(19) United States
(12) Patent Application Publication
(10) Pub. No.: US 2022/0175960 A1
(43) Pub. Date: Jun. 9, 2022

(54) FASL IMMUNOMODULATORY GENE THERAPY COMPOSITIONS AND METHODS FOR USE

(71) Applicant: Locanabio, Inc., San Diego, CA (US)

(72) Inventor: David A. NELLES, San Diego, CA (US)

(21) Appl. No.: 17/271,123

(22) PCT Filed: Aug. 26, 2019
(86) PCT No.: PCT/US2019/048148

§ 371 Date: Feb. 24, 2021

Related U.S. Application Data
(60) Provisional application No. 62/722,550, filed on Aug. 24, 2018.

(51) Int. Cl. A61K 48/00; C07K 14/705; C12N 9/22; C12N 7/00

(52) U.S. Cl. CPC A61K 48/005; C07K 14/70575; C12N 2750/14143; C12N 7/00; C12N 2750/14122; C12N 9/22

(57) ABSTRACT

Disclosed are compositions comprising a sequence encoding a non-self polypeptide of interest (POI), and a sequence encoding a non-cleavable FASL, wherein expression of the non-cleavable FASL in the presence of IL-6 or TNF-alpha eliminates WIC-mediated immunogenic peptides and helper T cells specific to the expression of the POI. Methods of making and methods of using compositions of the disclosure are also provided. For example, compositions of the disclosure may be used in the combined treatment of a disease or disorder in a subject and immune masking activity specific to the treatment. Exemplary disease or disorders of the disclosure include genetic and epigenetic diseases or disorders.

### RELATED APPLICATIONS

[0001] This application claims priority to U.S. Patent Application No. 62/722,550, filed Aug. 24, 2018, the contents of which are herein incorporated by reference in their entirety.

### FIELD OF THE DISCLOSURE

[0002] The disclosure is directed to molecular biology, gene therapy, and/or modifying expression and activity of RNA molecules, and more, specifically, to compositions and methods for attenuating the immune response to cells subjected to RNA modification and/or gene therapies via elimination of immune effector cells.

### INCORPORATION OF SEQUENCE LISTING

[0003] The contents of the text file named “LOCN_004_001WO_SeqList_ST25”, which was created on Aug. 24, 2019 and is 20.7 MB in size, are hereby incorporated by reference in their entirety.

### BACKGROUND

[0004] There has been a long-felt but unmet need in the art for attenuating the detrimental immune response to non-self gene therapies. The disclosure provides compositions and methods for promoting the elimination of immune effector cells specific to cells treated or modified by gene therapy techniques.

[0005] The importance of the role of FasL (Fas Ligand) in the pathway for immune regulation is well established. Activated T-cells upregulate Fas and become sensitive to FasL-mediated apoptosis in the process of activation-induced cell death and tolerance to self-antigens. Deficiencies in Fas or FasL often cause autoimmune pathologies or aberrant lymphoproliferation demonstrating the apparent lack of compensatory mechanisms in the pathway. While local presentation of mutated FasL has been shown to prevent rejection of transplanted cells in mice, ectopic expression of FASL in certain transplantation settings has had mixed results in achieving graft survival. In many instances, gene therapies delivering a non-self therapeutic transgene, such as a CRISPR/Cas complex, to a patient in need of such treatment can trigger an undesirable immune response to the therapeutic transgene and/or to the vector delivering the transgene. As such, there is a need to provide compositions and methods for masking immune activity and thereby promoting elimination of immune effector cells specific to cells treated and/or modified by gene therapy techniques.

### SUMMARY

[0006] The disclosure provides a composition comprising: a sequence encoding a non-self polypeptide of interest (POI), and a sequence encoding a non-cleavable FasL, wherein expression of the non-cleavable FasL eliminates MHC-mediated immunogenic peptides and helper T cells specific to the expression of the POI. In some embodiments, the POI is a CRISPR-Cas protein. In some embodiments, the POI is a viral capsid polypeptide such as an AAV viral capsid. In other embodiments, the POI is a heterologous non-self (foreign) protein antigen, fragment or variant thereof. In another embodiment, non-self proteins or POIs are selected from the group consisting of bacterial proteins, archaeal proteins, viral proteins, parasitic proteins, tumor proteins, mycoplasma proteins, yeast proteins or allergen proteins. In one embodiment, a non-self POI is a bacterially-derived CRISPR/Cas protein or an archaeal-derived CRISPR/Cas protein.

[0007] The disclosure also provides a composition comprising a sequence comprising: a guide RNA (gRNA) that specifically binds a target sequence within an RNA molecule, a sequence encoding an RNA-binding polypeptide, and a sequence encoding a non-cleavable FASL, wherein expression of the non-cleavable FASL eliminates MHC-mediated immunogenic peptides and helper T cells specific to the expression of the RNA-binding polypeptide.

[0008] In some embodiments of the compositions of the disclosure, the target sequence comprises at least one repeated sequence.

[0009] In some embodiments of the compositions of the disclosure, the sequences are within the same vector.

[0010] In some embodiments of the compositions of the disclosure, the vector is a viral vector. In some embodiments, the viral vector is an AAV vector, an adenoviral vector, or a retroviral vector such as a lentiviral vector.

[0011] In some embodiments of the compositions of the disclosure, the vector is an AAV vector and the vector comprises sequences encoding the AAV capsid.

[0012] In some embodiments of the compositions of the disclosure, the sequences comprise an IRES (Internal Ribosomal Entry Site) or a 2A ribosomal site.

[0013] In some embodiments of the compositions of the disclosure, the mutated non-cleavable FasL comprises at least one mutation or deletion in its metalloproteinase cleavage site. In some embodiments, the mutated non-cleavable FasL comprises at least one mutation or deletion in its protease recognition region. In another embodiment, the protease recognition region is at least amino acid residues 119 to 154 of wild-type human FasL.

[0014] In some embodiments, the metalloproteinase cleavage site comprises the amino acid sequence ELAELR. In another embodiment, the mutation comprises one or more of a substitution, an insertion, a deletion, a frameshift, an inversion, or a transposition of the amino acid sequence ELAELR.

[0015] In some embodiments, the non-cleavable FASL comprises the amino acid sequence of:

(SEQ ID NO: 210)
MQQPFNYPYPQIYWVDSSASSPWAPPGTVLPCPTSVPRRPGQRRPPPP
PPPPPLPPPPPPPPLPPLPLPPLKKRGNHSTGLCLLVMFFMVLVALVG
LGLGMFQLFHLQKX₁X₂X₃X₄X₅X₆ESTSQMHTASSLEKQIGHPSPPPEK
KELRKVAHLTGKSNSRSMPLEWEDTYGIVLLSGVKYKKGGLVINETGL
YFVYSKVYFRGQSCNNLPLSHKVYMRNSKYPQDLVMMEGKMMSYCTTG
QMWARSSYLGAVFNLTSADHLYVNVSELSLVNFEESQTFFGLYKL,

wherein X₁ is not a glutamic acid (E), X₂ is not an leucine (L), X₃ is not an alanine (A), X₄ is not an glutamic acid (E), X₅ is not an leucine (L) or X₆ is not an arginine (R).

[0016] In some embodiments, the non-cleavable FASL comprises the amino acid sequence of:

(SEQ ID NO: 210)
MQQPFNYPYPQIYWVDSSASSPWAPPGTVLPCPTSVPRRPGQRRPPPP
PPPPPLPPPPPPPPLPPLPLPPLKKRGNHSTGLCLLVMFFMVLVALVG
LGLGMFQLFHLQKX₁X₂X₃X₄X₅X₆ESTSQMHTASSLEKQIGHPSPPPEK
KELRKVAHLTGKSNSRSMPLEWEDTYGIVLLSGVKYKKGGLVINETGL
YFVYSKVYFRGQSCNNLPLSHKVYMRNSKYPQDLVMMEGKMMSYCTTG
QMWARSSYLGAVFNLTSADHLYVNVSELSLVNFEESQTFFGLYKL,

wherein X₁ is not a glutamic acid (E), X₂ is not an leucine (L), X₃ is not an alanine (A), X₄ is not an glutamic acid (E), X₅ is not an leucine (L) and X₆ is not an arginine (R).

[0017] In some embodiments, expression of the non-cleavable FASL selectively eliminates a T-cell that recognizes a MHC-peptide complex, wherein the peptide is derived from the non-self polypeptide, and wherein expression of FASL is in the presence of IL-6 or TNF-alpha.

[0018] In some embodiments, the non-cleavable FASL comprises an intron, wherein the intron blocks FASL splicing in the absence of IL-6 or TNF-alpha.

In some embodiments, the non-cleavable FASL comprises an intron, wherein the intron blocks FASL splicing in the absence of IL-6 or TNF-alpha. In a further embodiment, the composition comprises synthetic mRNA target sites which are expressed in the presence of IL-6 or TNF-alpha.

[0019] In some embodiments, the compositions comprise 1) a synthetic notch system, 2) microRNA target sites, or a 3) split intein and engineered IL-6 or TNF-alpha receptors for regulating expression of FASL in the presence of IL-6 or TNF-alpha.

[0020] In some embodiments of the compositions of the disclosure, the RNA-binding polypeptide or RNA-binding portion thereof is selected from the group consisting of Cas9, Cas13d, PUF, PUMBY, and PPR.

[0021] In some embodiments of the compositions of the disclosure, the sequences comprise a promoter or promoters.

[0022] In some embodiments, the promoter driving expression of FASL is regulated by the presence of IL-6 receptor or TNF-alpha receptor. In some embodiments, a promoter capable of driving FASL expression in the presence of IL-6 receptor or TNF-alpha receptor is a promoter listed in Table 1 or Table 2.

[0023] In some embodiments, the non-self POI is a nucleoprotein complex encoded by (i) a sequence comprising a guide RNA (gRNA) that specifically binds a target sequence within an RNA molecule, and (ii) a sequence encoding an RNA-binding polypeptide.

[0024] In some embodiments of the compositions of the disclosure, the sequence comprising the gRNA further comprises a sequence encoding a promoter capable of expressing the gRNA in a eukaryotic cell.

[0025] In some embodiments of the compositions of the disclosure, the eukaryotic cell is an animal cell. In some embodiments, the animal cell is a mammalian cell. In some embodiments, the animal cell is a human cell.

[0026] In some embodiments of the compositions of the disclosure, the promoter is a constitutively active promoter. In some embodiments, the promoter comprises a sequence isolated or derived from a promoter capable of diving expression of an RNA polymerase. In some embodiments, the promoter sequence comprises a sequence isolated or derived from a U6 promoter. In some embodiments, the promoter sequence comprises a sequence isolated or derived from a promoter capable of driving expression of a transfer RNA (tRNA). In some embodiments, the promoter sequence comprises a sequence isolated or derived from an alanine tRNA promoter, an arginine tRNA promoter, an asparagine tRNA promoter, an aspartic acid tRNA promoter, a cysteine tRNA promoter, a glutamine tRNA promoter, a glutamic acid tRNA promoter, a glycine tRNA promoter, a histidine tRNA promoter, an isoleucine tRNA promoter, a leucine tRNA promoter, a lysine tRNA promoter, a methionine tRNA promoter, a phenylalanine tRNA promoter, a proline tRNA promoter, a serine tRNA promoter, a threonine tRNA promoter, a tryptophan tRNA promoter, a tyrosine tRNA promoter, or a valine tRNA promoter. In some embodiments, the promoter comprises a sequence isolated or derived from a valine tRNA promoter.

### BRIEF DESCRIPTION OF THE DRAWINGS

[0027] The patent or application file contains at least one drawing executed in color. Copies of this patent or patent application publication with color drawing(s) will be provided by the Office upon request and payment of the necessary fee.

[0028] FIG. 1A-B are schematic diagrams relevant to the compositions of the disclosure. (A) Depicts typical therapeutic non-self transgene delivery via AAV which result in presentation of non-self polypeptides that can activate T helper cells and potentiate a cytotoxic effect against treated tissue or cells. (B) Depicts various embodiments of the compositions of the disclosure by including sequences encoding mutated (metalloproteinase non-cleavable) versions of FasL in vector constructs comprising therapeutic transgenes (Tx genes), such as transgene components encoding a CRISPR/Cas9 complex, thereby resulting in the promotion of programmed death of T-cells that interrogate treated tissue or cells and preventing cytotoxic activity against the treated tissue or cells.

[0029] FIG. 2A-B are schematic diagrams relevant to the compositions of the disclosure. (A) Depicts repeated AAV administration in humans which results in formation of adaptive immunity against the AAV capsid in the form of both humoral and cellular responses. (B) Depicts compositions of the disclosure by including sequences encoding both mutated non-cleavable FasL and polypeptides from the AAV vector capsid in the vector constructs additionally comprising a therapeutic transgene (self or non-self). This results in elimination of T-cells specific to the viral capsid and prevention of the formation of adaptive immunity against the viral capsid which allows for efficient and safe redosing with the AAV vector.

[0030] FIG. 3A-F are schematic diagrams relevant to embodiments of the compositions disclosed herein that are capable of detecting the activity of T cells. (A) Depicts a construct configuration embodiment comprising FASL driven by a promoter that is regulated by IL-6 receptor or TNF-alpha receptor. (B) Depicts a construct configuration embodiment comprising a Cas13d RNA-targeting system and FASL. The FASL comprises an intron whose splicing is negatively regulated by Cas13d. Upon gene expression changes mediated by IL-6 or TNF-alpha, Cas13d is titrated away from the FASL construct so that splicing of FASL is allowed and FASL protein is produced. (C) Depicts a construct configuration embodiment similar to the construct configuration in (B) but with the addition of another component: engineered mRNA that is regulated by TNF-alpha receptor or IL-6 receptor that contains concatenated sites which titrate Cas13d away from the FASL pre-mRNA. (D) Depicts a construct configuration embodiment comprising an engineered receptor such as Syn-notch that detects IL-6 or TNF-alpha and subsequently releases a transcription factor such as GAL4 thereby promoting expression of a GAL4-regulated FASL gene. (E) Depicts a construct configuration embodiment comprising an engineered mRNA that codes for FASL and also contains concatenated target sites in the 3′UTR for a microRNA (miRNA) that is downregulated upon stimulation by TNF-alpha or IL-6. (F) Depicts a construct configuration embodiment comprising an engineered version of IL-6 receptor or TNF-alpha receptor that carries an intein on the intracellular domain along with a Cas13d-intein fusion present in the nucleus. This construct embodiment is similar to the embodiment of (B) in that the Cas13d regulates splicing of FASL but the release of the intein from the cell membrane and translocation to the nucleus upon IL-6 or TNF-alpha detection results in intein activity on Cas13d thereby releasing the splicing block on FASL.

### DETAILED DESCRIPTION

[0031] The disclosure provides compositions and methods for combined therapeutic and immune masking activity. The immune masking activity eliminates MHC-mediated immunogenic peptides and helper T-cells specific to the expression of a non-self therapeutic activity, i.e., a non-self therapeutic protein such as a CRISPR/Cas ribonucleoprotein complex. The compositions comprise nucleic acid sequences which encode at least two functional components—a non-self protein of interest (POI) and a non-cleavable mutated FasL. In one embodiment of the compositions of the disclosure, the compositions comprise nucleic acid sequences comprising a gRNA that specifically binds a target sequence within an RNA molecule, a sequence encoding an RNA-binding polypeptide or RNA-binding portion thereof, and a sequence encoding a non-cleavable FasL. In another embodiment, the compositions comprise vector constructs. In other embodiments, the sequences comprise a promoter driving the functional components or separate promoters driving expression of each or certain of the functional components. Additional elements often used in the expression of multiple coding sequences such as 2A ribosomal skipping sites, or IRESs can be incorporated in the compositions comprising the vector constructs.

[0032] An important feature of the compositions and methods of the disclosure is controlling the timing and levels associated with FASL expression. Constitutive expression of FASL is associated with toxicity but by expressing FASL when cells are challenged by activated T cells, selective T cell elimination is achieved while avoiding these toxicity issues.

[0033] In one embodiment, temporal control of FASL expression is achieved by utilizing delivery modes that promote short-term expression of the FASL system. Specifically, nonviral delivery modes such as lipid nanoparticles carrying DNA or RNA encoding the FASL system promotes transient expression of the system in the target tissue.

[0034] In another embodiment, AAV vectors or other viral delivery or nonviral delivery modes comprise built-in temporal controls. One such approach involves promoters that cycle with circadian rhythms such as the clock gene. Another could involve the use of drug-inducible promoters such as, without limitation, tetracycline, cumate, galactose (GAL), alcohol oxidase (AOX), cellobiohydrolase, or glucoamylase.

[0035] In another embodiment, integrated sensors promote FASL expression only under controlled conditions. Specifically, a genetic circuit that recognizes expression of specific genes is used to identify the activity of cytotoxic T cells and subsequently promote FASL expression only in the presence of these activated T cells.

[0036] Accordingly, the disclosure provides compositions and methods for regulating and/or controlling expression of mutant (mFASL). In one embodiment, the composition produces mFASL only in the presence of activated T cells via detection of the cytokines, IL-6 or TNFalpha. This mFASL protein protects the therapeutic-treated cells via specific killing of the activated T cell. In the absence of the cytokines, the cells downregulate FASL which avoids safety issues associated with broad, constitutive expression of FASL.

[0037] In one embodiment, the production of mFASL is only in the presence of activated T cells via use of a construct configuration, such as FIG. 3A, comprising a promoter which is specifically activated by one or both of IL-6 and/or TNF-alpha. Exemplary promoters which are specifically activated by one or both IL-6 and/or TNF-alpha include, without limitation, promoters listed in Table 1 and/or Table 2.

TABLE 1

```
Genes with promoters
regulated by TNF-alpha
  1. BLIMP1/PRDM1
  2. CCL5
  3. CCL15
  4. CCL17
  5. CCL19
  6. CCL20
  7. CCL22
  8. CCL23
  9. CCL28
  10. CXCL1
  11. CXCL11
  12. CXCL10
  13. CXCL3
  14. CXCL1
  15. GRO-beta
  16. GRO-gamma
  17. CXCL1
  18. ICOS
  19. IFNG
  20. IL1A
  21. IL1B
  22. IL1RN
  23. IL2
  24. IL6
  25. IL8
  26. IL9
  27. IL10
  28. IL11
  29. IL12B
  30. IL12A
  31. IL13
  32. IL15
  33. IL17
  34. IL23A
  35. IL27
  36. EBI3
  37. IFNB1
  38. CXCL5
  39. KC
  40. ligp1
  41. CXCL5
  42. CXCL6
  43. LTA
  44. LTB
  45. CCL2
  46. CXCL9
  47. CCL3
  48. CCL4
  49. CCL4
  50. CXCL3
  51. CCL20
  52. CXCL10
  53. CXCL5
  54. CCL5
  55. CCL1
  56. TNF
  57. LTA
  58. TNFSF10
  59. TFF3
  60. TNFSF15
  61. CD80
  62. BLR1
  63. CCR5
  64. CCR7
  65. IL8RA
  66. IL8RB
  67. TNFRSF9
  68. CD40LG
  69. CD3G
  70. CR2
  71. CD38
  72. CD40
  73. CD48
  74. CD83
  75. CD86
  76. SLC3A2
  77. TNFRSF4
  78. F11R
  79. FCGRT
  80. FCER2
  81. HLA-G
  82. ICOS
  83. IL2RA
  84. IGHG2
  85. IGHG1
  86. IGHG4
  87. IGHE
  88. IGKC
  89. BDKRB1
  90. HLA-B
  91. B2M
  92. NOD2
  93. pIgR
  94. PGLYRP1
  95. TCRB
  96. CD3G
  97. TLR2
  98. TLR9
  99. TNFRSF1B
100. TREM1
101. CFB
102. C3
103. CR2
104. PSMB9
105. TAP1
106. TAPBP
107. CD44
108. CD209
109. SELE
110. ENG
111. FN1
112. CD54
113. MADCAM1
114. NCAM
115. SELP
116. TNC
117. VCAM1
118. AGT
119. DEFB2
120. C4BPA
121. CFB
122. C4A
123. HAMP
124. LBP
125. PTX3
126. SAA1
127. SAA2
128. SAA3
129. F3
130. PLAU
131. CYP2E1
132. CYP2C11
133. CYP7B1
134. PTGS2
135. FTH1
136. GCLC
137. GCLM
138. HSP90AA1
139. ALOX5
140. ALOX12
141. NOS2A
142. MAP4K1
143. SENP2
144. SOD1
145. SOD1
146. SOD2
147. MX1
148. NQO1
149. PLA2
150. SELS
151. ABCA1
152. ABCC6
153. ADORA1
154. ADORA2A
155. ADAM19
156. SCNN1A
157. ADRA2B
158. BDKRB1
159. FCER2/CD23
160. C69
161. OPRD1
162. EGFR
163. ERBB2
164. KISS1
165. OLR1
166. KLRA1
167. ABCB4
168. OPRM1
169. GRM2
170. NPY1R
171. GRIN2A
172. GRIN1
173. OXTR
174. PTAFR
175. ABCB1
176. AGER
177. PYCARD
178. BAX
179. BCL2A1
180. BCL2L1
181. BCL2
182. BCL2L11
183. CD274
184. BNIP3
185. CASP4
186. CFLAR
187. FAS
188. CIDEA
189. PTPN13
190. FASLG
191. IER3
192. TRAF1
193. TRAF2
194. TIFA
195. XIAP
196. INHBA
197. ANGPT1
198. PI3KAP1
199. BDNF
200. TNFSF13B
201. BLNK
202. BMP2
203. BMP4
204. CALCB
205. FGF8
206. FSTL3
207. CSF3
208. CSF2
209. HGF
210. EPO
211. IGFBP1
212. IGFBP2
213. CSF1
214. MDK
215. NGFB
216. TACR1
217. NK4
218. NRG1
219. SPP1
220. PDGFB
221. PIGF
222. PENK
223. PRL
224. KITLG
225. THBS1
226. THBS2
227. VEGFC
228. WNT10B
229. TNFAIP2
230. EGR1
231. IER3
232. DCTN4
233. KLF10
234. TNFAIP3
235. TNIP3
236. AR
237. BCL3
238. BMI1
239. CDX1
240. FOS
241. MYB
242. MYC
243. REL
244. CEBPD
245. ZNF366
246. DMP1
247. E2F3
248. ELF3
249. AHCTF1
250. IER2
251. GATA3
252. NR3C1
253. HIF1A
254. HOXA9
255. IRF1
256. IRF2
257. IRF4
258. IRF7
259. NFKBIA
260. NFKBIE
261. JUNB
262. JMJD3
263. LEF1
264. CREB3
265. NFKBIZ
266. NFKB2
267. NFKB1
268. NLRP2
269. NR4A2
270. Osterix
271. TP53
272. PGR
273. SPI1
274. RELB
275. SNAI1
276. SOX9
277. STAT5A
278. TFEC
279. TWIST1
280. WT1
281. YY1
282. ABCB9
283. GCNT1
284. ADH1A
285. AICDA
286. AMACR
287. ARFRP1
288. ASS1
289. CYP19A1
290. ART1
291. SERPINA3
292. BACE1
293. BTK
294. CTSB
295. CTSL1
296. CDK6
297. UGCGL1
298. CHI3L1
299. Rdh1
300. Rdh7
301. MMP1
302. AKR1C1
303. DPYD
304. DNASE1L2
305. LIPG
306. ENO2
307. GAD1
308. ST8SIA1
309. NOX1
310. MMP9
311. GSTP1
312. GCLC
313. GCLC
314. GCLM
315. GCLC
316. G6PD
317. G6PC
318. GNRH2
319. GZMB
320. GUCY1A2
321. HPSE
322. HMOX1
323. HAS1
324. HSD11B2
325. HSD17B8
326. ATP1A2
327. DIO2
328. IDO1
329. PTGDS
330. LYZ
331. MTHFR
332. DUSP1
333. MMP3
334. MMP9
335. MYLK
336. NOS2A
337. NOS1
338. PDE7A
339. PIM1
340. PLK3
341. PIK3CA
342. PPP5C
343. PRKACA
344. PRKCD
345. PLCD1
346. PTGIS
347. PTGES
348. PTPN1
349. PTHLH
350. GNB2L1
351. REV3L
352. Slfn2
353. SERPINA2
354. ST6GAL1
355. NUAK2
356. SAT1
357. SUPV3L1
358. TERT
359. TGM1
360. TGM2
361. PAFAH2
362. UPP1
363. XDH
364. ABCG5
365. ABCG8
366. ASPH
367. ORM1
368. AFP
369. AMH
370. A4
371. APOBEC2
372. APOC3
373. APOD
374. APOE
375. AQP4
376. BGN
377. BRCA2
378. MYOZ1
379. CAV1
380. CDKN1A
381. CLDN2
382. COL1A2
383. GJB1
384. CCND1
385. CCND2
386. CCND3
387. IER3
388. SLC11A2
389. SKALP, PI3
390. EDN1
391. EPHA1
392. F8
393. FTH1
394. GADD45B
395. GNAI2
396. MT3
397. LGALS3
398. GBP1
399. HBE1
400. HBZ
401. IFI44L
402. KRT5
403. VPS53
404. HMGN1
405. FABP6
406. IGFBP2
407. KRT3
408. KRT6B
409. KRT15
410. LTF
411. LAMB2
412. LCN2
413. S100A4
414. SERPINB1
415. MUC2
416. MBP
417. SLC16A1
418. TNIP1
419. LCN2
420. FAM148A
421. S100A10
422. PSME1
423. PSME2
424. SERPINE1, PAI-1
425. PAX8
426. PTS
427. PRF1
428. PGK1
429. POMC
430. CGM3
431. PDYN
432. KLK3
433. PTEN
434. RAG1
435. RAG2
436. RBBP4
437. RIPK2
438. SERPINE2
439. S100A6
440. SH3BGRL
441. KCNN2
442. SKP2
443. SPATA19
444. OPN1SW
445. ERVWE1
446. SDC4
447. SLC6A6
448. KCNK5
449. TFPI2
450. TF
451. TICAM1
452. TRPC1
453. UBE2M
454. UCP2
455. UPK1B
456. CYP27B1
457. VIM
458. SERPINA1
459. CXCL1
```

TABLE 2

```
Promoters regulated
by IL6 (STAT3)
  1. BCAR3
  2. CALCB
  3. CCR6
  4. COL6A3
  5. CXCR5
  6. DHRS9
  7. FLT1
  8. FNBP1L
  9. FNDC9
10. GBP4
11. GPR87
12. GZMB
13. HOPX
14. HSD11B1
15. IFIT2
16. IFNL1
17. IGFBP6
18. IL12RB2
19. IL1R1
20. IL1R2
21. IL23R
22. IL24
23. KCNK18
24. MAF
25. NAPSA
26. PALLD
27. PRG4
28. PSD3
29. RORA
30. TNFSF1
31. TNFSF13B
32. TSHZ2
```

[0038] In another embodiment, mFASL expression is regulated by a construct configuration, such as FIG. 3B, comprising an RNA-targeting system (e.g., Cas13d) that prevents splicing of mFASL. Specifically, the FASL comprises an intron whose splicing is negatively regulated by the RNA-binding protein (e.g., Cas13d). Upon TNFalpha or IL-6 signaling, the RNA-targeting system is drawn to a stronger binding site in an RNA that is expressed upon TNFalpha or IL-6 signaling, that is, Cas13d is titrated away from the FASL construct. This releases the splicing block on mFASL (and splicing of FASL is permitted) and promotes production of the protein. In one embodiment, the Cas13d guide RNA (gRNA) is antisense to the mRNA of the regulated FASL construct configuration (such as in FIG. 3A). Spacer sequences for gRNAs targeting the IL6 or TNF-alpha-regulated mRNAs are listed in Table 3.

TABLE 3
Spacer sequences for
gRNAs targeting the
IL6 or TNF-alpha-
regulated mRNAs

| mRNA | SEQ ID NO: |
|---|---|
| FNDC9 | 250-2307 |
| PSD3 | 2308-13986 |
| FLT1 | 13987-21641 |
| TSHZ2 | 21642-33851 |
| RORA | 33852-44653 |
| KCNK18 | 44654-45783 |
| NAPSA | 45784-47664 |
| FNBP1L | 47665-53010 |
| CALCB | 53011-54027 |
| IL1R1 | 54028-59015 |
| COL6A3 | 59016-69589 |
| CCR6 | 69590-72780 |
| IL24 | 72781-74731 |
| HSD11B1 | 74732-76094 |
| IFNL1 | 76095-76844 |
| IL23R | 76945-79675 |
| MAF | 79676-82318 |
| PALLD | 82319-89021 |
| HOPX | 89022-90118 |
| IFIT2 | 90119-93485 |
| GPR87 | 93486-94953 |
| BCAR3 | 94954-98267 |
| IL1R2 | 98268-99704 |
| DHRS9 | 99705-101754 |
| IGFBP6 | 101755-102675 |
| PRG4 | 102676-107705 |
| CXCR5 | 107706-111973 |
| GZMB | 111974-112838 |
| IL12RB2 | 112839-116853 |
| GBP4 | 116854-122969 |
| TNFSF13B | 122970-125618 |
| TNFSF1 | 125619-127937 |

[0039] In a similar embodiment, a construct configuration, such as FIG. 3C, comprises an engineered RNA comprising concatenated sites that titrate Cas13d away from the FASL pre-mRNA and which is regulated by TNFalpha or IL-6 via use of an appropriate promoter (such as, without limitation, a promoter in Table 1 or Table 2). In this case, the engineered RNA contains multiple target sites for the RNA-targeting system. As such, expression of the engineered RNA releases the splicing block on the mFASL mRNA.

[0040] In another embodiment, a construct configuration, such as FIG. 3D, comprises an engineered receptor such as synthetic notch detects IL-6 or TNFalpha and regulates expression of a promoter that drives mFASL. In this manner, mFASL is only produced in the presence of TNFalpha or IL-6 signaling.

[0041] For example, such an engineered Syn-notch receptor would detect IL-6 or TNF-alpha and subsequently release a transcription factor such as GAL4 which promotes expression of a GAL4-regulated FASL gene. In one embodiment, the engineered receptor comprises three modules (from N- to C-terminus):

[0042] 1) an IL-6 or TNF-alpha binding section such as, without limitation, an IL-6 scFV having an amino acid sequence as follows:

(SEQ ID NO: 227)
MSTVILSAAAPLSGVYAAMERGSHHHHHHGSGSGSGIEGRPYNGTGSA
CELGTQVQLKESGPGLVPSQSLSITCTVSDFSLTNYGVHWVRQSPGKG
LEWLGVIWSGGSTDYNAAFISRLSISKDNSKSQVFFEMNSLQADDTAI
YYCARNGNRYYGYALDYWGQGTSVTVSSGGGGSGGGGSGGGGSDVVMT
QTPLSLPVSLGDQASISCRSSQSIVHSNGNTYLEWYLQKPGQSPKLLI
YTVSNRLSGVPDRFSGSGSGTDFTLKISRVEAEDLGVYYCFQGSHGPY
TFGGGTKLEIKLQTCGRKLSLNQN

[0043] 2) A synthetic notch such as, without limitation, having an amino acid sequence as follows:

(SEQ ID NO: 228)
ILDYSFTGGAGRDIPPPQIEEACELPECQVDAGNKVCNLQCNNHACGWDGG
DCSLNFNDPWKNCTQSLQCWKYFSDGHCDSQCNSAGCLFDGFDCQLTEGQC
NPLYDQYCKDHFSDGHCDQGCNSAECEWDGLDCAEHVPERLAAGTLVLVVL
LPPDQLRNNSFHFLRELSHVLHTNVVFKRDAQGQQMIFPYYGHEEELRKHP
IKRSTVGWATSSLLPGTSGGRQRRELDPMDIRGSIVYLEIDNRQCVQSSSQ
CFQSATDVAAFLGALASLGSLNIPYKIEAVKSEPVEPPLPSQLHLMYVAAA
AFVLLFFVGCGVLLSRKRRR

[0044] and 3) a transcription factor such as, without limitation, GAL4 having the amino acid sequence as follows:

(SEQ ID NO: 229)
MKLLSSIEQACDICRLKKLKCSKEKPKCAKCLKNNWECRYSPKTKRSPLTR
AHLTEVESRLERLEQLFLLIFPREDLDMILKMDSLQDIKALLTGLFVQDNV
NKDAVTDRLASVETDMPLTLRQHRISATSSSEESSNKGQRQLTVSAAAGGS
GGSGGSDALDDFDLDMLGSDALDDFDLDMLGSDALDDFDLDMLGSDALDDF
DLDMLGS

[0045] In another embodiment, in a construct configuration, such as FIG. 3E, mFASL is regulated via placement of microRNA (miRNA) binding sites of interest in the mRNA 3′UTR. The engineered mRNA comprises concatenated target sites (for an miRNA or miRNAs of interest) and are selected so that these microRNAs are expressed in cells that are not subjected to TNFalpha or IL-6. Cells that experience TNF-alpha or IL-6 reduce expression of the microRNA (i.e., the miRNA is downregulated upon stimulation by TNF-alpha or IL-6), resulting in mFASL expression only in the presence of cytokine signaling. In one embodiment, the engineered mRNA comprises target sites for miRNA, without limitation, selected from the group consisting of hsa-miR-934, hsa-miR-1269a, hsa-miR-671-5p, hsa-miR-663a, hsa-miR-1292, hsa-miR-615-5p, hsa-miR-2276, hsa-miR-1307-3p, hsa-miR-3654, hsa-miR-4741, hsa-miR-100-5p, hsa-miR-3189-3p, hsa-miR-548t-5p, hsa-miR-769-3p, hsa-miR-1307-5p, hsa-miR-3687, hsa-miR-324-5p, hsa-miR-449c-5p, hsa-miR-532-5p, hsa-miR-122-5p, hsa-miR-301b, hsa-miR-652-3p, hsa-miR-181a-5p, hsa-miR-140-3p, hsa-miR-331-3p, hsa-miR-10a-5p, hsa-miR-3656, hsa-miR-146a-5p, hsa-miR-1246, hsa-miR-143-3p, hsa-miR-23a-5p, hsa-miR-4508, hsa-miR-4488, hsa-miR-548o-3p, hsa-miR-29c-5p, hsa-miR-21-3p, hsa-miR-215, hsa-miR-139-3p, hsa-miR-720, hsa-miR-3141, hsa-miR-29b-1-5p, hsa-miR-141-5p, hsa-miR-25-5p, hsa-miR-197-5p, hsa-miR-1260b, hsa-miR-22-5p, and hsa-miR-628-5p.

[0046] In another embodiment, a construct configuration, such as FIG. 3F, comprises an engineered receptor that detects IL-6 or TNFalpha and comprises a split intein (e.g., an intein on the intracellular domain along with a Cas13d-intein fusion that is present in the nucleus). The RNA-targeting system (such as Cas13d) regulates the splicing of an mRNA encoding mFASL and releases the intein from the cell membrane. Accordingly, upon activation of the synthetic receptor, the fused split intein translocates to the nucleus where it interacts with the split intein fused to the RNA-targeting system. The result is the destruction of a functional RNA-targeting system, correct mFASL mRNA splicing, and the production of mFASL protein.

[0047] The disclosure provides vectors, compositions and cells comprising the therapeutic and FasL immune masking nucleic acid sequences. The disclosure provides methods of using the vectors, compositions and cells of the disclosure to treat a disease or disorder and at the same time eliminate the WIC-mediated immunogenic response specific to the vectors and/or compositions and treated cells.

### Preventing Adaptive Immune Response to a Non-Self Therapeutic Transgene

[0048] An AAV vector carrying a therapeutic, non-self transgene is packaged with mutant FALS (mFASL) so that both genes are expressed. After administration of the AAV vector, treated cells begin to express both the transgene and mFASL. Peptides derived from the transgene are displayed by WIC as part of the typical and typical process of antigen presentation conducted by many cell types. The formation of regulatory and effector T cells that target the non-self peptides occurs. These transgene-specific T cells interrogate infected (treated) cells that display the non-self peptides and simultaneously encounter mFASL. The presence of this non-self peptide display and mFASL results in apoptosis of the transgene-specific T cells. This eliminates this facet of adaptive immune response against the therapeutic transgene and the cells that harbor it.

### Treatment of Myotonic Dystrophy Type I (DM1)

[0049] Compositions of the disclosure are used for the treatment of myotonic dystrophy type I (DM1) wherein an RNA-targeting CRISPR system composed of a therapeutic transgene (Cas9) and single guide RNA targeting the CUG repeats that cause DM1 are delivered to patient muscle or the central nervous system. The presence of mFASL causes the elimination of T cells that are specific to Cas9 and potentially cytotoxic against treated cells.

### Treatment of Hemophilia

[0050] Compositions of the disclosure are used for the treatment of hemophilia. A secreted transgene such as Factor IX is used for the treatment of hemophilia. A vector carrying an expression cassette for factor IX along with mFASL reduces, eliminates, or prevents an adaptive immune response to Factor IX-expressing cells.

Preventing Adaptive Immune Response to a Non-Self Therapeutic Transgene while Simultaneously Preventing Immune Response to Repeated AAV Administrations

[0051] Compositions of the disclosure may comprise an AAV vector containing an expressed polypeptide composed of all or part of AAV viral capsid protein. The AAV capsid polypeptide is identical to the serotype used to deliver the system. Co-expression of this AAV capsid polypeptide causes the elimination of T cells that are specific to the AAV capsid in a manner described above. This causes depletion of T cells that can regulate both cellular and humoral immunity to the AAV capsid. This allows repeated dosing of the same AAV serotype. In the absence of the compositions of the disclosure, and using the standard of care prior to development of the compositions of the disclosure, an individual AAV serotype could not be used in more than once in a patient due to the formation of adaptive immune response against the viral capsid.

[0052] The compositions of the disclosure may be useful in situations wherein incomplete therapeutic transfer occurs during the first administration of a gene therapy or wherein a second dose is desired. In this case, the second dose of the gene therapy does not require the presence of the mFASL and AAV capsid polypeptide unless subsequent doses beyond the second dose are desired. One situation could be during the treatment of large organs such as skeletal muscle where the volume of virus required to transduce muscle in a single dose is prohibitively high. Another situation could be during treatment involving complicated administration methods in the brain or spine where initial treatments do not provide satisfactory infection of targeted cells.

### Non-Cleavable FasL

[0053] The Fas/FasL interaction is well established with regards to the immune system. The activation of T cells through the T cell receptor (TCR) upregulates both Fas and FasL. In circumstances of low to moderate TCR stimulation, T cells proliferate. Under conditions of repetitive or high levels of TCR stimulation, T cells are driven toward apoptosis. This phenomenon has been termed Antigen Induced Cell Death (AICD). The importance of AICD in regulating the immune system has been demonstrated in the LPR mouse. Nagata et al., Immunol. Today 16:39-43 (1995).

[0054] That the Fas/FasL interaction contributes to immune privilege is also well established. In particular, a number of studies demonstrate engineered immune privilege via the induction of FasL expression in transplantation settings. Bellgrau et al., Nature 377:630-632 (1995); Griffith et al., Science 270:1189-1192 (1995), Lau et al., Science 273:109-112 (1996).

[0055] FasL is proteolytically cleaved by matrix metalloproteases and bound to the cell membrane. Because soluble FasL is released into and circulated widely throughout the circulatory system, it is known to cause non-specific and widespread cell death. Ogasawara et al., Nature 364:806-809 (1993), published erratum, Nature 365:568 (1993), Tanaka et al., Nature Med. 2:317-322 (1996), Rodriguez et al., J. Exp. Med. 183:1031-1036 (1996). As such, selective modulation of Fas/FasL and the subsequent selective induction of apoptosis to specific target tissues and cells has been achieved by the mutation of the FasL protease recognition region. This is because it has been found that making at least one mutation or deletion in the wild-type FasL protease recognition region inhibits proteolytic cleavage of the FasL polypeptide from the cell membrane and minimizes the production of and the deleterious non-selective effects of soluble FasL. The sequence of the wild-type, full-length human FasL is known in the art. The extracellular domain of the wild-type, full-length human FasL is defined by amino acid residues 103 to 281, and the protease recognition region of wild-type human FasL comprises at least amino acid residues 119 to 154. Residues are numbered by reference to the known amino acid sequence of wild-type human FasL. See Takahashi et al., Int'l Immunol. 6:1567-1574 (1994). Moreover, non-cleavable mutated FasL polypeptides and methods of generating the same can be found, e.g., in WO 1999/036079, which is incorporated herein by reference in its entirety.

[0056] The terminology “FASL” and “mFasL” are used interchangeably herein to refer to non-cleavable mutated FasL.

[0057] In one embodiment, an exemplary mutated non-cleavable FasL (Mus musculus) (MMP cleavage site in bold) can be generated by making one or more mutations or deletions in the following amino acid sequence:

(SEQ ID NO: 209)
PGSVFPCPSCGPRGPDQRRPPPPPPPVSPLPPPSQPLPLPPLTPLKKKDHN
TNLWLPVVFFMVLVALVGMGLGMYQLFHLQKELAELREFTNQSLKVSSFEK
QIANPSTPSEKKEPRSVAHLTGNPHSRSIPLEWEDTYGTALISGVKYKKGG
LVINETGLYFVYSKVYFRGQSCNNQPLNHKVYMRNSKYPEDLVLMEEKRLN
YCTTGQIWAHSSYLGAVFNLTSADHLYVNISQLSLINFEESKTFFGLYKL.

[0058] In another embodiment, an exemplary mutated non-cleavable FasL (Homo sapiens) (MMP cleavage site in bold) can be generated by making one or more mutations or deletions in the following amino acid sequence:

(SEQ ID NO: 210)
MQQPFNYPYPQIYWVDSSASSPWAPPGTVLPCPTSVPRRPGQRRPPPPPPP
PPLPPPPPPPPLPPLPLPPLKKRGNHSTGLCLLVMFFMVLVALVGLGLGMF
QLFHLQKELAELRESTSQMHTASSLEKQIGHPSPPPEKKELRKVAHLTGKS
NSRSMPLEWEDTYGIVLLSGVKYKKGGLVINETGLYFVYSKVYFRGQSCNN
LPLSHKVYMRNSKYPQDLVMMEGKMMSYCTTGQMWARSSYLGAVFNLTSAD
HLYVNVSELSLVNFEESQTFFGLYKL.

### Non-Self POIs

[0059] With regard to an embodiment relating to one component of the compositions of the disclosure, a nucleic acid sequence of the composition encodes a non-self protein of interest (POI). In one embodiment, a non-self POI is a heterologous non-self (or foreign) protein antigen, fragment or variant thereof. Exemplary non-self proteins or POIs include, without limitation, bacterial proteins, archaeal proteins, viral proteins (e.g., viral capsids), parasitic proteins, tumor proteins, mycoplasma proteins, yeast proteins or allergen proteins. In one embodiment, a non-self POI is a bacterially-derived CRISPR/Cas protein or an archaeal-derived CRISPR/Cas protein. In another embodiment, a non-self POI is a viral capsid specific to the viral vector carrying a therapeutic transgene (self or non-self transgene).

### AAV Capsids—Repeated Administration of Self or Non-Self Gene Therapy

[0060] Repeated AAV administration in humans and animal models typically results in formation of adaptive immunity against the AAV capsid in the form of both humoral and cellular responses (FIG. 2A). As a result, repeated doses of AAV result in attenuated gene transduction after the initial dose with the potential for toxic effects. By include both FASL and polypeptides from the AAV capsid in the transgene payload (self or non-self transgenes) carried within the AAV vector used in the initial treatment, T-cells specific to the viral capsid can be eliminated (FIG. 2B). Elimination of these capsid-specific T-cells prevents the formation of adaptive immunity against the viral capsid and allows efficient and safe redosing. Specifically, the expression of the viral capsid polypeptide causes infected cells to display peptides specific to the viral capsid via WIC which will promote interaction among capsid-specific T cells (with TCRs for the viral capsid peptides) and infected cells. The co-expression of FASL on the infected cells will promote killing of these capsid-specific T-cells. As the T-cells are required for mounting of both cellular and humoral immunity against the capsid, subsequent treatments with the same AAV serotype will not be attenuated by the adaptive immune system.

[0061] AAV biology has been extensively studied and is well known in the art. AAV capsids for use in the compositions disclosed herein are derived from AAV serotypes which include, without limitation, AAV1, AAV2, AAV4, AAV5, AAV6 (a hybrid of AAV1 and AAV2), AAV7, AAV8, AAV9, AAV10, AAV11, AAV12, and synthetic AAV serotypes, such as, without limitation, Anc80 AAV (an ancestor of AAV 1, 2, 6, 8 and 9).

[0062] In one embodiment, the AAV capsid is derived from the AAV9 VP1 amino acid sequence which is:

(SEQ ID NO: 211)
MAADGYLPDWLEDNLSEGIREWWALKPGAPQPKANQQHQDNARGLVLPGYK
YLGPGNGLDKGEPVNAADAAALEHDKAYDQQLKAGDNPYLKYNHADAEFQE
RLKEDTSFGGNLGRAVFQAKKRLLEPLGLVEEAAKTAPGKKRPVEQSPQEP
DSSAGIGKSGAQPAKKRLNFGQTGDTESVPDPQPIGEPPAAPSGVGSLTMA
SGGGAPVADNNEGADGVGSSSGNWHCDSQWLGDRVITTSTRTWALPTYNNH
LYKQISNSTSGGSSNDNAYFGYSTPWGYFDFNRFHCHFSPRDWQRLINNNW
GFRPKRLNFKLFNIQVKEVTDNNGVKTIANNLTSTVQVFTDSDYQLPYVLG
SAHEGCLPPFPADVFMIPQYGYLTLNDGSQAVGRSSFYCLEYFPSQMLRTG
NNFQFSYEFENVPFHSSYAHSQSLDRLMNPLIDQYLYYLSKTINGSGQNQQ
TLKFSVAGPSNMAVQGRNYIPGPSYRQQRVSTTVTQNNNSEFAWPGASSWA
LNGRNSLMNPGPAMASHKEGEDRFFPLSGSLIFGKQGTGRDNVDADKVMIT
NEEEIKTTNPVATESYGQVATNHQSAQAQAQTGWVQNQGILPGMVWQDRDV
YLQGPIWAKIPHTDGNFHPSPLMGGFGMKHPPPQILIKNTPVPADPPTAFN
KDKLNSFITQYSTGQVSVEIEWELQKENSKRWNPEIQYTSNYYKSNNVEFA
VNTEGVYSEPRPIGTRYLTRNL.

[0063] In another embodiment, the predicted surface residues of AAV9 capsid (subset of VP1) is:

(SEQ ID NO: 212)
AKTAPGKKRPVEQSPQEPDSSAGIGKSGAQPAKKRLNFGQTGDTESVPDPQ
PIGEPPAAPSGVGSLTMASWHCDSQWLGDRVITTSTRTWALPTYNNHLYKQ
ISNSTSGGSSNDNAYFGYSTPWGYFDFNRFWHCDSQWLGDRVITTSTRTWA
LPTYNNHLYKQISNSTSGGSSNDNAYFGYSTPWGYFDFNRFDVFMIPQYGY
LTLNDGSQAVGRSSFYCLEYFPSQMLRTGNNFQFSYEFENVPFHSSYAHSQ
SLDRLMNPLIDQYLYYLSKTINGSGQNQQTLKFSVAGPSNMAVQGRNYIPG
PSYRQQRVSTTVTQNNNSEFAWPGASSWALNGRNSLMNPGPAMASHKEGED
RFFPLSGSLIFGKQGTGRDNVDADKVMITNEEEIKTTNPVATESYGQVATN
HQSAQAQAQTGWVQNQGILPGMVWIKNTPVPADPPTAFNKDKLNSFITQYS
TGQVSVEIEWELQKENSKRWNPEIQYTSNYYKSNNVEFAVNTEGVYSEPRP
IGTRYLTRNL.

[0064] In one embodiment, the AAV capsid is derived from the Anc80 AAV VP1 amino acid sequence which is:

(SEQ ID NO: 213)
AADGYLPDWLEDNLSEGIREWDLKPGAPKPKANQQKQDDGRGLVLPGYYL
GPFNGLDKGEPVNAADAAALEHDKAYDQQLKAGDNPYLRYNHADAEFQER
LQEDTSFGGNLGRAVFQAKKRVLEPLGLVEEGAKTAPGKKRPVEQSPQEP
DSSSGIGKKGQQPAXKRLNFGQTGDSESVPDPQPLGEPPAAPSGVGSNTM
XAGGGAPADNNEGADGVGNASGNWHCDSTWLGDRVITTSTRTALPTYNNH
LYKQISSQSGXSTNDNTYFGYSTPWGYFDFNRFHCHFSPRDWQRLINNNW
GFRPKXLNFKLFNIQVKEVTTNDGTTTIANNLTSTVQVFTDSEYQLPYVL
GSAHQGCLPPFPADVFMIPQYGYLTLNNGSQAVGRSSFYCLEYFPSQMLR
TGNNFXFSYTFEDVPFHSSYAHSQSLDRLNPLIDQYLYYLSRTQTTSGTA
GNRXLQFSQAGPSSANQAKNWLPGPCYRQQRVSKTXNQNNNSNFAWTGAT
KYHLNGRDSLVNPGPAMATHKDDEDKFFPMSGVLIFGKQGAGNSNVDLDN
VITXEEEIKTTNPVATEXYGTVATNLQSXNTAPATGTVNSQGALPGVWQX
RDVYLQGPIWAKIPHTDGHFHPSPLMGGFGLKHPPPQILIKNTPVPANPP
TTFSPAKFASFITQYSTGQVSVEIEELQKENSKRWNPEIQYTSNYNKSTN
VDFAVDTNGVYSEPRPIGTRYLTRNL

[0065] In one embodiment, the AAV capsid is derived from the AAV12 VP1 amino acid sequence which is:

(SEQ ID NO: 214)
MAADGYLPDWLEDNLSEGIREWWALKPGAPQPKANQQHQDNGRGLVLPGYK
YLGPFNGLDKGEPVNEADAAALEHDKAYDKQLEQGDNPYLKYNHADAEFQQ
RLATDTSFGGNLGRAVFQAKKRILEPLGLVEEGVKTAPGKKRPLEKTPNRP
TNPDSGKAPAKKKQKDGEPADSARRTLDFEDSGAGDGPPEGSSSGEMSHDA
EMRAAPGGNAVEAGQGADGVGNASGDWHCDSTWSEGRVTTTSTRTWVLPTY
NNHLYLRIGTTANSNTYNGFSTPWGYFDFNRFHCHFSPRDWQRLINNNWGL
RPKSMRVKIFNIQVKEVTTSNGETTVANNLTSTVQIFADSTYELPYVMDAG
QEGSFPPFPNDVFMVPQYGYCGVVTGKNQNQTDRNAFYCLEYFPSQMLRTG
NNFEVSYQFEKVPFHSMYAHSQSLDRMMNPLLDQYLWHLQSTTTGNSLNQG
TATTTYGKITTGDFAYYRKNWLPGACIKQQKFSKNANQNYKIPASGGDALL
KYDTHTTLNGRWSNMAPGPPMATAGAGDSDFSNSQLIFAGPNPSGNTTTSS
NNLLFTSEEEIATTNPRDTDMFGQIADNNQNATTAPHIANLDAMGIVPGMV
WQNRDIYYQGPIWAKVPHTDGHFHPSPLMGGFGLKHPPPQIFIKNTPVPAN
PNTTFSAARINSFLTQYSTGQVAVQIDWEIQKEHSKRWNPEVQFTSNYGTQ
NSMLWAPDNAGNYHELRAIGSRFLTHHL

[0066] In one embodiment, the AAV capsid is derived from the AAV1 VP1 amino acid sequence which is:

(SEQ ID NO: 215)
MAADGYLPDWLEDNLSEGIREWWDLKPGAPKPKANQQKQDDGRGLVLPGYK
YLGPFNGLDKGEPVNAADAAALEHDKAYDQQLKAGDNPYLRYNHADAEFQE
RLQEDTSFGGNLGRAVFQAKKRVLEPLGLVEEGAKTAPGKKRPVEQSPQEP
DSSSGIGKTGQQPAKKRLNFGQTGDSESVPDPQPLGEPPATPAAVGPTTMA
SGGGAPMADNNEGADGVGNASGNWHCDSTWLGDRVITTSTRTWALPTYNNH
LYKQISSASTGASNDNHYFGYSTPWGYFDFNRFHCHFSPRDWQRLINNNWG
FRPKRLNFKLFNIQVKEVTTNDGVTTIANNLTSTVQVFSDSEYQLPYVLGS
AHQGCLPPFPADVFMIPQYGYLTLNNGSQAVGRSSFYCLEYFPSQMLRTGN
NFTFSYTFEEVPFHSSYAHSQSLDRLMNPLIDQYLYYLNRTQNQSGSAQNK
DLLFSRGSPAGMSVQPKNWLPGPCYRQQRVSKTKTDNNNSNFTWTGASKYN
LNGRESIINPGTAMASHKDDEDKFFPMSGVMIFGKESAGASNTALDNVMIT
DEEEIKATNPVATERFGTVAVNFQSSSTDPATGDVHAMGALPGMVWQDRDV
YLQGPIWAKIPHTDGHFHPSPLMGGFGLKNPPPQILIKNTPVPANPPAEFS
ATKFASFITQYSTGQVSVEIEWELQKENSKRWNPEVQYTSNYAKSANVDFT
VDNNGLYTEPRPIGTRYLTRPL

[0067] In one embodiment, the AAV capsid is derived from the AAV2 VP1 amino acid sequence which is:

(SEQ ID NO: 216)
[sequence omitted]

[0068] In one embodiment, the AAV capsid is derived from the AAV6 VP1 amino acid sequence which is:

(SEQ ID NO: 217)
MAADGYLPDWLEDNLSEGIREWWDLKPGAPKPKANQQKQDDGRGLVLPGYK
YLGPFNGLDKGEPVNAADAAALEHDKAYDQQLKAGDNPYLRYNHADAEFQE
RLQEDTSFGGNLGRAVFQAKKRVLEPFGLVEEGAKTAPGKKRPVEQSPQEP
DSSSGIGKTGQQPAKKRLNFGQTGDSESVPDPQPLGEPPATPAAVGPTTMA
SGGGAPMADNNEGADGVGNASGNWHCDSTWLGDRVITTSTRTWALPTYNNH
LYKQISSASTGASNDNHYFGYSTPWGYFDFNRFHCHFSPRDWQRLINNNWG
FRPKRLNFKLFNIQVKEVTTNDGVTTIANNLTSTVQVFSDSEYQLPYVLGS
AHQGCLPPFPADVFMIPQYGYLTLNNGSQAVGRSSFYCLEYFPSQMLRTGN
NFTFSYTFEDVPFHSSYAHSQSLDRLMNPLIDQYLYYLNRTQNQSGSAQNK
DLLFSRGSPAGMSVQPKNWLPGPCYRQQRVSKTKTDNNNSNFTWTGASKYN
LNGRESIINPGTAMASHKDDKDKFFPMSGVMIFGKESAGASNTALDNVMIT
DEEEIKATNPVATERFGTVAVNLQSSSTDPATGDVHVMGALPGMVWQDRDV
YLQGPIWAKIPHTDGHFHPSPLMGGFGLKHPPPQILIKNTPVPANPPAEFS
ATKFASFITQYSTGQVSVEIEWELQKENSKRWNPEVQYTSNYAKSANVDFT
VDNNGLYTEPRPIGTRYLTRPL

[0069] In one embodiment, the AAV capsid is derived from the AAV8 VP1 amino acid sequence which is:

(SEQ ID NO: 218)
MAADGYLPDWLEDNLSEGIREWWDLKPGAPKPKANQQKQDDGRGLVLPGYK
YLGPFNGLDKGEPVNAADAAALEHDKAYDQQLKAGDNPYLRYNHADAEFQE
RLQEDTSFGGNLGRAVFQAKKRVLEPLGLVEEGAKTAPGKKRPVEQSPQEP
DSSSGIGKTGQQPAKKRLNFGQTGDSESVPDPQPLGEPPAAPSGLGPNTMA
SGGGAPMADNNEGADGVGNSSGNWHCDSTWLGDRVITTSTRTWALPTYNNH
LYKQISNGTSGGSTNDNTYFGYSTPWGYFDFNRFHCHFSPRDWQRLINNNW
GFRPKRLNFKLFNIQVKEVTTNEGTKTIANNLTSTVQVFTDSEYQLPYVLG
SAHQGCLPPFPADVFMVPQYGYLTLNNGSQALGRSSFYCLEYFPSQMLRTG
NNFQFSYTFEDVPFHSSYAHSQSLDRLMNPLIDQYLYYLVRTQTTGTGGTQ
TLAFSQAGPSSMANQARNWVPGPCYRQQRVSTTTNQNNNSNFAWTGAAKFK
LNGRDSLMNPGVAMASHKDDDDRFFPSSGVLIFGKQGAGNDGVDYSQVLIT
DEEEIKATNPVATEEYGAVAINNQAANTQAQTGLVHNQGVIPGMVWQNRDV
YLQGPIWAKIPHTDGNFHPSPLMGGFGLKHPPPQILIKNTPVPADPPLTFN
QAKLNSFITQYSTGQVSVEIEWELQKENSKRWNPEIQYTSNYYKSTNVDFA
VNTEGVYSEPRPIGTRYLTRNL

### RNA-Binding Proteins

[0070] An RNA-binding protein, polypeptide, or domain of the disclosure includes, without limitation, an RNA-binding portion or portions of the RNA-binding protein or polypeptide or domain.

[0071] In some embodiments of the compositions of the disclosure, the sequence encoding an RNA-binding protein or RNA-binding portion thereof comprises a sequence isolated or derived from a CRISPR Cas protein. In some embodiments, the CRISPR Cas protein comprises a Type II CRISPR Cas protein. In some embodiments, the Type II CRISPR Cas protein comprises a Cas9 protein. Exemplary Cas9 proteins of the disclosure may be isolated or derived from any species, including, but not limited to, a bacteria or an archaea. Exemplary Cas9 proteins of the disclosure may be isolated or derived from any species, including, but not limited to, Streptococcus pyogenes, Haloferax mediteranii, Mycobacterium tuberculosis, Francisella tularensis subsp. novicida, Pasteurella multocida, Neisseria meningitidis, Campylobacter jejune, Streptococcus thermophilus, Campylobacter lari CF89-12, Mycoplasma gallisepticum str. F, Nitratifractor salsuginis str. DSM 16511, Parvibaculum lavamentivorans, Roseburia intestinalis, Neisseria cinerea, a Gluconacetobacter diazotrophicus, an Azospirillum B510, a Sphaerochaeta globus str. Buddy, Flavobacterium columnare, Fluviicola taffensis, Bacteroides coprophilus, Mycoplasma mobile, Lactobacillus farciminis, Streptococcus pasteurianus, Lactobacillus johnsonii, Staphylococcus pseudintermedius, Filifactor alocis, Treponema denticola, Legionella pneumophila str. Paris, Sutterella wadsworthensis, Corynebacter diphtherias, Streptococcus aureus, and Francisella novicida.

[0072] Exemplary wild type S. pyogenes Cas9 proteins of the disclosure may comprise or consist of the amino acid sequence:

(SEQ ID NO: 147)

| | |
|---|---|
| 1 | MDKKYSIGLD IGTNSVGWAV ITDEYKVPSK KFKVLGNTDR |
| | HSIKKNLIGA LLFDSGETAE |
| 61 | ATRLKRTARR RYTRRKNRIC YLQEIFSNEM AKVDDSFFHR |
| | LEESFLVEED KKHERHPIFG |
| 121 | NIVDEVAYHE KYPTIYHLRK KLVDSTDKAD LRLIYLALAH |
| | MIKFRGHFLI EGDLNPDNSD |
| 181 | VDKLFIQLVQ TYNQLFEENP INASGVDAKA ILSARLSKSR |
| | RLENLIAQLP GEKKNGLFGN |
| 241 | LIALSLGLTP NFKSNFDLAE DAKLQLSKDT YDDDLDNLLA |
| | QIGDQYADLF LAAKNLSDAI |
| 301 | LLSDILRVNT EITKAPLSAS MIKRYDEHHQ DLTLLKALVR |
| | QQLPEKYKEI FFDQSKNGYA |
| 361 | GYIDGGASQE EFYKFIKPIL EKMDGTEELL VKLNREDLLR |
| | KQRTFDNGSI PHQIHLGELH |
| 421 | AILRRQEDFY PFLKDNREKI EKILTFRIPY YVGPLARGNS |
| | RFAWMTRKSE ETITPWNFEE |
| 481 | VVDKGASAQS FIERMTNFDK NLPNEKVLPK HSLLYEYFTV |
| | YNELTKVKYV TEGMRKPAFL |
| 541 | SGEQKKAIVD LLFKTNRKVT VKQLKEDYFK KIECFDSVEI |
| | SGVEDRFNAS LGTYHDLLKI |
| 601 | IKDKDFLDNE ENEDILEDIV LTLTLFEDRE MIEERLKTYA |
| | HLFDDKVMKQ LKRRRYTGWG |
| 661 | RLSRKLINGI RDKQSGKTIL DFLKSDGFAN RNFMQLIHDD |
| | SLTFKEDIQK AQVSGQGDSL |
| 721 | HEHIANLAGS PAIKKGILQT VKVVDELVKV MGRHKPENIV |
| | IEMARENQTT QKGQKNSRER |
| 781 | MKRIEEGIKE LGSQILKEHP VENTQLQNEK LYLYYLQNGR |
| | DMYVDQELDI NRLSDYDVDH |
| 841 | IVPQSFLKDD SIDNKVLTRS DKNRGKSDNV PSEEVVKKMK |
| | NYWRQLLNAK LITQRKFDNL |
| 901 | TKAERGGLSE LDKAGFIKRQ LVETRQITKH VAQILDSRMN |
| | TKYDENDKLI REVKVITLKS |
| 961 | KLVSDFRKDF QFYKVREINN YHHAHDAYLN AVVGTALIKK |
| | YPKLESEFVY GDYKVYDVRK |
| 1021 | MIAKSEQEIG KATAKYFFYS NIMNFFKTEI TLANGEIRKR |
| | PLIETNGETG EIVWDKGRDF |
| 1081 | ATVRKVLSMP QVNIVKKTEV QTGGFSKESI LPKRNSDKLI |
| | ARKKDWDPKK YGGFDSPTVA |
| 1141 | YSVLVVAKVE KGKSKKLKSV KELLGITIME RSSFEKNPID |
| | FLEAKGYKEV KKDLIIKLPK |
| 1201 | YSLFELENGR KRMLASAGEL QKGNELALPS KYVNFLYLAS |
| | HYEKLKGSPE DNEQKQLFVE |
| 1261 | QHKHYLDEII EQISEFSKRV ILADANLDKV LSAYNKHRDK |
| | PIREQAENII HLFTLTNLGA |
| 1321 | PAAFKYFDTT IDRKRYTSTK EVLDATLIHQ SITGLYETRI |
| | DLSQLGGD. |

[0073] Nuclease inactivated S. pyogenes Cas9 proteins may comprise a substitution of an Alanine (A) for an Aspartic Acid (D) at position 10 and an alanine (A) for a Histidine (H) at position 840. Exemplary nuclease inactivated S. pyogenes Cas9 proteins of the disclosure may comprise or consist of the amino acid sequence (D10A and H840A bolded and underlined):

(SEQ ID NO: 148)

| | |
|---|---|
| 1 | MDKKYSIGLA IGTNSVGWAV ITDEYKVPSK KFKVLGNTDR |
| | HSIKKNLIGALLFDSGETAE |
| 61 | ATRLKRTARR RYTRRKNRIC YLQEIFSNEM AKVDDSFFHR |
| | LEESFLVEED KKHERHPIFG |
| 121 | NIVDEVAYHE KYPTIYHLRK KLVDSTDKAD LRLIYLALAH |
| | MIKFRGHFLI EGDLNPDNSD |
| 181 | VDKLFIQLVQ TYNQLFEENP INASGVDAKA ILSARLSKSR |
| | RLENLIAQLP GEKKNGLFGN |
| 241 | LIALSLGLTP NFKSNFDLAE DAKLQLSKDT YDDDLDNLLA |
| | QIGDQYADLF LAAKNLSDAI |
| 301 | LLSDILRVNT EITKAPLSAS MIKRYDEHHQ DLTLLKALVR |
| | QQLPEKYKEI FFDQSKNGYA |
| 361 | GYIDGGASQE EFYKFIKPIL EKMDGTEELL VKLNREDLLR |
| | KQRTFDNGSI PHQIHLGELH |
| 421 | AILRRQEDFY PFLKDNREKI EKILTFRIPY YVGPLARGNS |
| | RFAWMTRKSE ETITPWNFEE |
| 481 | VVDKGASAQS FIERMTNFDK NLPNEKVLPK HSLLYEYFTV |
| | YNELTKVKYV TEGMRKPAFL |
| 541 | SGEQKKAIVD LLFKTNRKVT VKQLKEDYFK KIECFDSVEI |
| | SGVEDRFNAS LGTYHDLLKI |
| 601 | IKDKDFLDNE ENEDILEDIV LTLTLFEDRE MIEERLKTYA |
| | HLFDDKVMKQ LKRRRYTGWG |
| 661 | RLSRKLINGI RDKQSGKTIL DFLKSDGFAN RNFMQLIHDD |
| | SLTFKEDIQK AQVSGQGDSL |
| 721 | HEHIANLAGS PAIKKGILQT VKVVDELVKV MGRHKPENIV |
| | IEMARENQTT QKGQKNSRER |
| 781 | MKRIEEGIKE LGSQILKEHP VENTQLQNEK LYLYYLQNGR |
| | DMYVDQELDI NRLSDYDVDA |
| 841 | IVPQSFLKDD SIDNKVLTRS DKNRGKSDNV PSEEVVKKMK |
| | NYWRQLLNAK LITQRKFDNL |
| 901 | TKAERGGLSE LDKAGFIKRQ LVETRQITKH VAQILDSRMN |
| | TKYDENDKLI REVKVITLKS |
| 961 | KLVSDFRKDF QFYKVREINN YHHAHDAYLN AVVGTALIKK |
| | YPKLESEFVY GDYKVYDVRK |
| 1021 | MIAKSEQEIG KATAKYFFYS NIMNFFKTEI TLANGEIRKR |
| | PLIETNGETG EIVWDKGRDF |
| 1081 | ATVRKVLSMP QVNIVKKTEV QTGGFSKESI LPKRNSDKLI |
| | ARKKDWDPKK YGGFDSPTVA |
| 1141 | YSVLVVAKVE KGKSKKLKSV KELLGITIME RSSFEKNPID |
| | FLEAKGYKEV KKDLIIKLPK |
| 1201 | YSLFELENGR KRMLASAGEL QKGNELALPS KYVNFLYLAS |
| | HYEKLKGSPE DNEQKQLFVE |
| 1261 | QHKHYLDEII EQISEFSKRV ILADANLDKV LSAYNKHRDK |
| | PIREQAENII HLFTLTNLGA |
| 1321 | PAAFKYFDTT IDRKRYTSTK EVLDATLIHQ SITGLYETRI |
| | DLSQLGGD. |

[0074] Nuclease inactivated S. pyogenes Cas9 proteins may comprise deletion of a RuvC nuclease domain or a portion thereof, an HNH domain, a DNAse active site, a ββα-metal fold or a portion thereof comprising a DNAse active site or any combination thereof.

[0075] Other exemplary Cas9 proteins or portions thereof may comprise or consist of the following amino acid sequences.

[0076] In some embodiments the Cas9 protein can be S. pyogenes Cas9 and may comprise or consist of the amino acid sequence:

(SEQ ID NO: 149)
[sequence omitted]

[0077] In some embodiments the Cas9 protein can be S. aureus Cas9 and may comprise or consist of the amino acid sequence:

(SEQ ID NO: 150)
MKRNYILGLDIGITSVGYGIIDYETRDVIDAGVRLFKEANVENNEGRRSKR
GARRLKRRRRHRIQRVKKLLFDYNLLTDHSELSGINPYEARVKGLSQKLSE
EEFSAALLHLAKRRGVHNVNEVEEDTGNELSTKEQISRNSKALEEKYVAEL
QLERLKKDGEVRGSINRFKTSDYVKEAKQLLKVQKAYHQLDQSFIDTYIDL
LETRRTYYEGPGEGSPFGWKDIKEWYEMLMGHCTYFPEELRSVKYAYNADL
YNALNDLNNLVITRDENEKLEYYEKFQIIENVFKQKKKPTLKQIAKEILVN
EEDIKGYRVTSTGKPEFTNLKVYHDIKDITARKEIIENAELLDQIAKILTI
YQSSEDIQEELTNLNSELTQEEIEQISNLKGYTGTHNLSLKAINLILDELW
HTNDNQIAIFNRLKLVPKKVDLSQQKEIPTTLVDDFILSPVVKRSFIQSIK
VINAIIKKYGLPNDIIIELAREKNSKDAQKMINEMQKRNRQTNERIEEIIR
TTGKENAKYLIEKIKLHDMQEGKCLYSLEAIPLEDLLNNPFNYEVDHIIPR
SVSFDNSFNNKVLVKQEENSKKGNRTPFQYLSSSDSKISYETFKKHILNLA
KGKGRISKTKKEYLLEERDINRFSVQKDFINRNLVDTRYATRGLMNLLRSY
FRVNNLDVKVKSINGGFTSFLRRKWKFKKERNKGYKHHAEDALIIANADFI
FKEWKKLDKAKKVMENQMFEEKQAESMPEIETEQEYKEIFITPHQIKHIKD
FKDYKYSHRVDKKPNRELINDTLYSTRKDDKGNTLIVNNLNGLYDKDNDKL
KKLINKSPEKLLMYHHDPQTYQKLKLIMEQYGDEKNPLYKYYEETGNYLTK
YSKKDNGPVIKKIKYYGNKLNAHLDITDDYPNSRNKVVKLSLKPYRFDVYL
DNGVYKFVTVKNLDVIKKENYYEVNSKCYEEAKKLKKISNQAEFIASFYNN
DLIKINGELYRVIGVNNDLLNRIEVNMIDITYREYLENMNDKRPPRIIKTI
ASKTQSIKKYSTDILGNLYEVKSKKHPQIIKKG

[0078] In some embodiments the Cas9 protein can be S. thermophiles CRISPR1 Cas9 and may comprise or consist of the amino acid sequence:

(SEQ ID NO: 151)
MSDLVLGLDIGIGSVGVGILNKVTGEIIHKNSRIFPAAQAENNLVRRTNR
QGRRLARRKKHRRVRLNRLFEESGLITDFTKISINLNPYQLRVKGLTDEL
SNEELFIALKNMVKHRGISYLDDASDDGNSSVGDYAQIVKENSKQLETKT
PGQIQLERYQTYGQLRGDFTVEKDGKKHRLINVFPTSAYRSEALRILQTQ
QEFNPQITDEFINRYLEILTGKRKYYHGPGNEKSRTDYGRYRTSGETLDN
IFGILIGKCTFYPDEFRAAKASYTAQEFNLLNDLNNLTVP1ETKKLSKEQ
KNQIINYVKNEKAMGPAKLFKYIAKLLSCDVADIKGYRIDKSGKAEIHTF
EAYRKMKTLETLDIEQMDRETLDKLAYVLTLNTEREGIQEALEHEFADGS
FSQKQVDELVQFRKANSSIFGKGWHNFSVKLMMELIPELYETSEEQMTIL
TRLGKQKTTSSSNKTKYIDEKLLTEEIYNPVVAKSVRQAIKIVNAAIKEY
GDFDNIVIEMARETNEDDEKKAIQKIQKANKDEKDAAMLKAANQYNGKAE
LPHSVFHGHKQLATKIRLWHQQGERCLYTGKTISIHDLINNSNQFEVDHI
LPLSITFDDSLANKVLVYATANQEKGQRTPYQALDSMDDAWSFRELKAFV
RESKTLSNKKKEYLLTEEDISKFDVRKKFIERNLVDTRYASRVVLNALQE
HFRAHKIDTKVSVVRGQFTSQLRRHWGIEKTRDTYHHHAVDALIIAASSQ
LNLWKKQKNTLVSYSEDQLLDIETGELISDDEYKESVFKAPYQHFVDTLK
SKEFEDSILFSYQVDSKFNRKISDATIYATRQAKVGKDKADETYVLGKIK
DIYTQDGYDAFMKIYKKDKSKFLMYRHDPQTFEKVIEPILENYPNKQIND
KGKEVPCNPFLKYKEEHGYIRKYSKKGNGPEIKSLKYYDSKLGNHIDITP
KDSNNKVVLQSVSPWRADVYFNKTTGKYEILGLKYADLQFDKGTGTYKIS
QEKYNDIKKKEGVDSDSEFKFTLYKNDLLLVKDIETKEQQLFRFLSRTMP
KQKHYVELKPYDKQKFEGGEALIKVLGNVANSGQCKKGLGKSNISIYKVR
TDVLGNQHIIKNEGDKPKLDF

[0079] In some embodiments the Cas9 protein can be N. meningitidis Cas9 and may comprise or consist of the amino acid sequence:

(SEQ ID NO: 152)
MAAFKPNPINYILGLDIGIASVGWAMVEIDEDENPICLIDLGVRVFERAE
VPKTGDSLAMARRLARSVRRLTRRRAHRLLRARRLLKREGVLQAADFDEN
GLIKSLPNTPWQLRAAALDRKLTPLEWSAVLLHLIKHRGYLSQRKNEGET
ADKELGALLKGVADNAHALQTGDFRTPAELALNKFEKESGHIRNQRGDYS
HTFSRKDLQAELILLFEKQKEFGNPHVSGGLKEGIETLLMTQRPALSGDA
VQKMLGHCTFEPAEPKAAKNTYTAERFIWLTKLNNLRILEQGSERPLTDT
ERATLMDEPYRKSKLTYAQARKLLGLEDTAFFKGLRYGKDNAEASTLMEM
KAYHAISRALEKEGLKDKKSPLNLSPELQDEIGTAFSLFKTDEDITGRLK
DRIQPEILEALLKHISFDKFVQISLKALRRIVPLMEQGKRYDEACAEIYG
DHYGKKNIEEKIYLPPIPADEIRNPVVLRALSQARKVINGVVRRYGSPAR
IHIETAREVGKSFKDRKEIEKRQEENRKDREKAAAKFREYFPNFVGEPKS
KDILKLRLYEQQHGKCLYSGKEINLGRLNEKGYVEIDHALPFSRTWDDSF
NNKVLVLGSENQNKGNQTPYEYFNGKDNSREWQEFKARVETSRFPRSKKQ
RILLQKFDEDGFKERNLNDTRYVNRFLCQFVADRMRLTGKGKKRVFASNG
QITNLLRGFWGLRKVRAENDRHHALDAVVVACSTVAMQQKITRFVRYKEM
NAFDGKTIDKETGEVLHQKTHFPQPWEFFAQEVMIRVFGKPDGKPEFEEA
DTPEKLRTLLAEKLSSRPEAVHEYVTPLFVSRAPNRKMSGQGHMETVKSA
KRLDEGVSVLRVPLTQLKLKDLEKMVNREREPKLYEALKARLEAHKDDPA
KAFAEPFYKYDKAGNRTQQVKAVRVEQVQKTGVVVVRNHNGIADNATMVR
VDVFEKGDKYYLVPIYSWQVAKGILPDRAVVQGKDEEDWQLIDDSFNFKF
SLHPNDLVEVITKKARMFGYFASCHRGTGNINIRIHDLDHKIGKNGILEG
IGVKTALSFQKYQIDELGKEIRPCRLKKRPPVR

[0080] In some embodiments the Cas9 protein can be Parvibaculum. lavamentivorans Cas9 and may comprise or consist of the amino acid sequence:

(SEQ ID NO: 153)
MERIFGFDIGTTSIGFSVIDYSSTQSAGNIQRLGVRIFPEARDPDGTPLN
QQRRQKRMMRRQLRRRRIRRKALNETLHEAGFLPAYGSADWPVVMADEPY
ELRRRGLEEGLSAYEFGRAIYHLAQHRHFKGRELEESDTPDPDVDDEKEA
ANERAATLKALKNEQTTLGAWLARRPPSDRKRGIHAHRNVVAEEFERLWE
VQSKFHPALKSEEMRARISDTIFAQRPVFWRKNTLGECRFMPGEPLCPKG
SWLSQQRRMLEKLNNLAIAGGNARPLDAEERDAILSKLQQQASMSWPGVR
SALKALYKQRGEPGAEKSLKFNLELGGESKLLGNALEAKLADMFGPDWPA
HPRKQEIRHAVHERLWAADYGETPDKKRVIILSEKDRKAHREAAANSFVA
DFGITGEQAAQLQALKLPTGWEPYSIPALNLFLAELEKGERFGALVNGPD
WEGWRRTNFPHRNQPTGEILDKLPSPASKEERERISQLRNPTVVRTQNEL
RKVVNNLIGLYGKPDRIRIEVGRDVGKSKREREEIQSGIRRNEKQRKKAI
EDLIKNGIANPSRDDVEKWILWKEGQERCPYTGDQIGFNALFREGRYEVE
HIWPRSRSFDNSPRNKTLCRKDVNIEKGNRMPFEAFGHDEDRWSAIQIRL
QGMVSAKGGTGMSPGKVKRFLAKTMPEDFAARQLNDTRYAAKQILAQLKR
LWPDMGPEAPVKVEAVTGQVTAQLRKLWTLNNILADDGEKTRADHRHHAI
DALTVACTHPGMTNKLSRYWQLRDDPRAEKPALTPPWDTIRADAEKAVSE
IVVSHRVRKKVSGPLHKETTYGDTGTDIKTKSGTYRQFVTRKKIESLSKG
ELDEIRDPRIKEIVAAHVAGRGGDPKKAFPPYPCVSPGGPEIRKVRLTSK
QQLNLMAQTGNGYADLGSNHHIAIYRLPDGKADFEIVSLFDASRRLAQRN
PIVQRTRADGASFVMSLAAGEAIMIPEGSKKGIWIVQGVVVASGQVVLER
DTDADHSTTTRPMPNPILKDDAKKVSIDPIGRVRPSND

[0081] In some embodiments the Cas9 protein can be Corynebacter diphtheria Cas9 and may comprise or consist of the amino acid sequence:

(SEQ ID NO: 154)
MKYHVGIDVGTFSVGLAAIEVDDAGMPIKTLSLVSHIHDSGLDPDEIKSA
VTRLASSGIARRTRRLYRRKRRRLQQLDKFIQRQGWPVIELEDYSDPLYP
WKVRAELAASYIADEKERGEKLSVALRHIARHRGWRNPYAKVSSLYLPDG
PSDAFKAIREEIKRASGQPVPETATVGQMVTLCELGTLKLRGEGGVLSAR
LQQSDYAREIQEICRMQEIGQELYRKIIDVVFAAESPKGSASSRVGKDPL
QPGKNRALKASDAFQRYRIAALIGNLRVRVDGEKRILSVEEKNLVFDHLV
NLTPKKEPEWVTIAEILGIDRGQLIGTATMTDDGERAGARPPTHDTNRSI
VNSRIAPLVDWWKTASALEQHAMVKALSNAEVDDFDSPEGAKVQAFFADL
DDDVHAKLDSLHLPVGRAAYSEDTLVRLTRRMLSDGVDLYTARLQEFGIE
PSWTPPTPRIGEPVGNPAVDRVLKTVSRWLESATKTWGAPERVIIEHVRE
GFVTEKRAREMDGDMRRRAARNAKLFQEMQEKLNVQGKPSRADLWRYQSV
QRQNCQCAYCGSPITFSNSEMDHIVPRAGQGSTNTRENLVAVCHRCNQSK
GNTPFAIWAKNTSIEGVSVKEAVERTRHWVTDTGMRSTDFKKFTKAVVER
FQRATMDEEIDARSMESVAWMANELRSRVAQHFASHGTTVRVYRGSLTAE
ARRASGISGKLKFFDGVGKSRLDRRHHAIDAAVIAFTSDYVAETLAVRSN
LKQSQAHRQEAPQWREFTGKDAEHRAAWRVVVCQKMEKLSALLTEDLRDD
RVVVMSNVRLRLGNGSAHKETIGKLSKVKLSSQLSVSDIDKASSEALWCA
LTREPGFDPKEGLPANPERHIRVNGTHVYAGDNIGLFPVSAGSIALRGGY
AELGSSFHHARVYKITSGKKPAFAMLRVYTIDLLPYRNQDLFSVELKPQT
MSMRQAEKKLRDALATGNAEYLGWLVVDDELVVDTSKIATDQVKAVEAEL
GTIRRWRVDGFFSPSKLRLRPLQMSKEGIKKESAPELSKIIDRPGWLPAV
NKLFSDGNVTVVRRDSLGRVRLESTAHLPVTWKVQ

[0082] In some embodiments the Cas9 protein can be Streptococcus pasteurianus Cas9 and may comprise or consist of the amino acid sequence:

(SEQ ID NO: 155)
MTNGKILGLDIGIASVGVGIIEAKTGKVVHANSRLFSAANAENNAERRGF
RGSRRLNRRKKHRVKRVRDLFEKYGIVTDFRNLNLNPYELRVKGLTEQLK
NEELFAALRTISKRRGISYLDDAEDDSTGSTDYAKSIDENRRLLKNKTPG
QIQLERLEKYGQLRGNFTVYDENGEAHRLINVFSTSDYEKEARKILETQA
DYNKKITAEFIDDYVEILTQKRKYYHGPGNEKSRTDYGRFRTDGTTLENI
FGILIGKCNFYPDEYRASKASYTAQEYNFLNDLNNLKVSIETGKLSTEQK
ESLVEFAKNTATLGPAKLLKEIAKILDCKVDEIKGYREDDKGKPDLHTFE
PYRKLKFNLESINIDDLSREVIDKLADILTLNTEREGIEDAIKRNLPNQF
IEEQISEIIKVRKSQSTAFNKGWHSFSAKLMNELIPELYATSDEQMTILT
RLEKFKVNKKSSKNTKTIDEKEVTDEIYNPVVAKSVRQTIKIINAAVKKY
GDFDKIVIEMPRDKNADDEKKFIDKRNKENKKEKDDALKRAAYLYNSSDK
LPDEVFHGNKQLETKIRLWYQQGERCLYSGKPISIQELVHNSNNFEIDHI
LPLSLSFDDSLANKVLVYAWTNQEKGQKTPYQVIDSMDAAWSFREMKDYV
LKQKGLGKKKRDYLLTIENIDKIEVKKKFIERNLVDTRYASRVVLNSLQS
ALRELGKDTKVSVVRGQFTSQLRRKWKIDKSRETYHHHAVDALIIAASSQ
LKLWEKQDNPMFVDYGKNQVVDKQTGEILSVSDDEYKELVFQPPYQGFVN
TISSKGFEDEILFSYQVDSKYNRKVSDATIYSTRKAKIGKDKKEETYVLG
KIKDIYSQNGFDTFIKKYNKDKTQFLMYQKDSLTWENVIEVILRDYPTTK
KSEDGKNDVKCNPFEEYRRENGLICKYSKKGKGTPIKSLKYYDKKLGNCI
DITPEESRNKVILQSINPWRADVYFNPETLKYELMGLKYSDLSFEKGTGN
YHISQEKYDAIKEKEGIGKKSEFKFTLYRNDLILIKDIASGEQEIYRFLS
RTMPNVNHYVELKPYDKEKFDNVQELVEALGEADKVGRCIKGLNKPNISI
YKVRTDVLGNKYFVKKKGDKPKLDFKNNKK

[0083] In some embodiments the Cas9 protein can be Neisseria cinerea Cas9 and may comprise or consist of the amino acid sequence:

(SEQ ID NO: 156)
MAAFKPNPMNYILGLDIGIASVGWAIVEIDEEENPIRLIDLGVRVFERAE
VPKTGDSLAAARRLARSVRRLTRRRAHRLLRARRLLKREGVLQAADFDEN
GLIKSLPNTPWQLRAAALDRKLTPLEWSAVLLHLIKHRGYLSQRKNEGET
ADKELGALLKGVADNTHALQTGDFRTPAELALNKFEKESGHIRNQRGDYS
HTFNRKDLQAELNLLFEKQKEFGNPHVSDGLKEGIETLLMTQRPALSGDA
VQKMLGHCTFEPIEPKAAKNTYTAERFVWLTKLNNLRILEQGSERPLTDI
ERATLMDEPYRKSKLTYAQARKLLDLDDTAFFKGLRYGKDNAEASTLMEM
KAYHAISRALEKEGLKDKKSPLNLSPELQDEIGTAFSLFKTDEDITGRLK
DRVQPEILEALLKHISFDKFVQISLKALRRIVPLMEQGNRYDEACTEIYG
DHYGKKNIEEKIYLPPIPADEIRNPVVLRALSQARKVINGVVRRYGSPAR
IHIETAREVGKSFKDRKEIEKRQEENRKDREKSAAKFREYFPNFVGEPKS
KDILKLRLYEQQHGKCLYSGKEINLGRLNEKGYVEIDHALPFSRTWDDSF
NNKVLALGSENQNKGNQTPYEYFNGKDNSREWQEFKARVETSRFPRSKKQ
RILLQKFDEDGFKERNLNDTRYINRFLCQFVADHMLLTGKGKRRVFASNG
QITNLLRGFWGLRKVRAENDRHHALDAVVVACSTIAMQQKITRFVRYKEM
NAFDGKTIDKETGEVLHQKAHFPQPWEFFAQEVIVIIRVFGKPDGKPEFE
EADTPEKLRTLLAEKLSSRPEAVHKYVTPLFISRAPNRKMSGQGHMETVK
SAKRLDEGISVLRVPLTQLKLKDLEKMVNREREPKLYEALKARLEAHKDD
PAKAFAEPFYKYDKAGNRTQQVKAVRVEQVQKTGVVVVHNHNGIADNATI
VRVDVFEKGGKYYLVPIYSWQVAKGILPDRAVVQGKDEEDWTVMDDSFEF
KFVLYANDLIKLTAKKNEFLGYFVSLNRATGAIDIRTHDTDSTKGKNGIF
QSVGVKTALSFQKYQIDELGKEIRPCRLKKRPPVR

[0084] In some embodiments the Cas9 protein can be Campylobacter lari Cas9 and may comprise or consist of the amino acid sequence:

(SEQ ID NO: 157)
MRILGFDIGINSIGWAFVENDELKDCGVRIFTKAENPKNKESLALPRRNA
RSSRRRLKRRKARLIAIKRILAKELKLNYKDYVAADGELPKAYEGSLASV
YELRYKALTQNLETKDLARVILHIAKHRGYMNKNEKKSNDAKKGKILSAL
KNNALKLENYQSVGEYFYKEFFQKYKKNTKNFIKIRNTKDNYNNCVLSSD
LEKELKLILEKQKEFGYNYSEDFINEILKVAFFQRPLKDFSHLVGACTFF
EEEKRACKNSYSAWEFVALTKIINEIKSLEKISGEIVPTQTINEVLNLIL
DKGSITYKKFRSCINLHESISFKSLKYDKENAENAKLIDFRKLVEFKKAL
GVHSLSRQELDQISTHITLIKDNVKLKTVLEKYNLSNEQINNLLEIEFND
YINLSFKALGMILPLMREGKRYDEACEIANLKPKTVDEKKDFLPAFCDST
AHELSNPVVNRAISEYRKVLNALLKKYGKVHKIHLELARDVGLSKKAREK
IEKEQKENQAVNAWALKECENIGLKASAKNILKLKLWKEQKEICIYSGNK
ISIEHLKDEKALEVDHIYPYSRSFDDSFINKVLVFTKENQEKLNKTPFEA
FGKNIEKWSKIQTLAQNLPYKKKNKILDENFKDKQQEDFISRNLNDTRYI
ATLIAKYTKEYLNFLLLSENENANLKSGEKGSKIHVQTISGMLTSVLRHT
WGFDKKDRNNHLHHALDAIIVAYSTNSIIKAFSDFRKNQELLKARFYAKE
LTSDNYKHQVKFFEPFKSFREKILSKIDEIFVSKPPRKRARRALHKDTFH
SENKIIDKCSYNSKEGLQIALSCGRVRKIGTKYVENDTIVRVDIFKKQNK
FYAIPIYAMDFALGILPNKIVITGKDKNNNPKQWQTIDESYEFCFSLYKN
DLILLQKKNMQEPEFAYYNDFSISTSSICVEKHDNKFENLTSNQKLLFSN
AKEGSVKVESLGIQNLKVFEKYIITPLGDKIKADFQPRENISLKTSKKYG
LR

[0085] In some embodiments the Cas9 protein can be T. denticola Cas9 and may comprise or consist of the amino acid sequence:

(SEQ ID NO: 158)
MKKEIKDYFLGLDVGTGSVGWAVTDTDYKLLKANRKDLWGMRCFETAETA
EVRRLHRGARRRIERRKKRIKLLQELFSQEIAKTDEGFFQRMKESPFYAE
DKTILQENTLFNDKDFADKTYHKAYPTINHLIKAWIENKVKPDPRLLYLA
CHNIIKKRGHFLFEGDFDSENQFDTSIQALFEYLREDMEVDIDADSQKVK
EILKDSSLKNSEKQSRLNKILGLKPSDKQKKAITNLISGNKINFADLYDN
PDLKDAEKNSISFSKDDFDALSDDLASILGDSFELLLKAKAVYNCSVLSK
VIGDEQYLSFAKVKIYEKHKTDLTKLKNVIKKHFPKDYKKVFGYNKNEKN
NNNYSGYVGVCKTKSKKLIINNSVNQEDFYKFLKTILSAKSEIKEVNDIL
TEIETGTFLPKQISKSNAEIPYQLRKMELEKILSNAEKHFSFLKQKDEKG
LSHSEKIIMLLTFKIPYYIGPINDNHKKFFPDRCWVVKKEKSPSGKTTPW
NFFDHIDKEKTAEAFITSRTNFCTYLVGESVLPKSSLLYSEYTVLNEINN
LQIIIDGKNICDIKLKQKIYEDLFKKYKKITQKQISTFIKHEGICNKTDE
VIILGIDKECTSSLKSYIELKNIFGKQVDEISTKNMLEEIIRWATIYDEG
EGKTILKTKIKAEYGKYCSDEQIKKILNLKFSGWGRLSRKFLETVTSEMP
GFSEPVNIITAMRETQNNLMELLSSEFTFTENIKKINSGFEDAEKQFSYD
GLVKPLFLSPSVKKMLWQTLKLVKEISHITQAPPKKIFIEMAKGAELEPA
RTKTRLKILQDLYNNCKNDADAFSSEIKDLSGKIENEDNLRLRSDKLYLY
YTQLGKCMYCGKPMIGHVFDTSNYDIDHIYPQSKIKDDSISNRVLVCSSC
NKNKEDKYPLKSEIQSKQRGFWNFLQRNNFISLEKLNRLTRATPISDDET
AKFIARQLVETRQATKVAAKVLEKMFPETKIVYSKAETVSMFRNKFDIVK
CREINDFHHAHDAYLNIVVGNVYNTKFTNNPWNFIKEKRDNPKIADTYNY
YKVFDYDVKRNNITAWEKGKTIITVKDMLKRNTPIYTRQAACKKGELFNQ
TIMKKGLGQHPLKKEGPFSNISKYGGYNKVSAAYYTLIEYEEKGNKIRSL
ETIPLYLVKDIQKDQDVLKSYLTDLLGKKEFKILVPKIKINSLLKINGFP
CHITGKTNDSFLLRPAVQFCCSNNEVLYFKKIIRFSEIRSQREKIGKTIS
PYEDLSFRSYIKENLWKKTKNDEIGEKEFYDLLQKKNLEIYDMLLTKHKD
TIYKKRPNSATIDILVKGKEKFKSLIIENQFEVILEILKLFSATRNVSDL
QHIGGSKYSGVAKIGNKISSLDNCILIYQSITGIFEKRIDLLKV

[0086] In some embodiments the Cas9 protein can be S. mutans Cas9 and may comprise or consist of the amino acid sequence:

(SEQ ID NO: 159)
MKKPYSIGLDIGTNSVGWAVVTDDYKVPAKKMKVLGNTDKSHIEKNLLGA
LLFDSGNTAEDRRLKRTARRRYTRRRNRILYLQEIFSEEMGKVDDSFFHR
LEDSFLVTEDKRGERHPIFGNLEEEVKYHENFPTIYHLRQYLADNPEKVD
LRLVYLALAHIIKFRGHFLIEGKFDTRNNDVQRLFQEFLAVYDNTFENSS
LQEQNVQVEEILTDKISKSAKKDRVLKLFPNEKSNGRFAEFLKLIVGNQA
DFKKHFELEEKAPLQFSKDTYEEELEVLLAQIGDNYAELFLSAKKLYDSI
LLSGILTVTDVGTKAPLSASMIQRYNEHQMDLAQLKQFIRQKLSDKYNEV
FSDVSKDGYAGYIDGKTNQEAFYKYLKGLLNKIEGSGYFLDKIEREDFLR
KQRTFDNGSIPHQIHLQEMRAIIRRQAEFYPFLADNQDRIEKLLTFRIPY
YVGPLARGKSDFAWLSRKSADKITPWNFDEIVDKESSAEAFINRMTNYDL
YLPNQKVLPKHSLLYEKFTVYNELTKVKYK1EQGKTAFFDANMKQEIFDG
VFKVYRKVTKDKLMDFLEKEFDEFRIVDLTGLDKENKVFNASYGTYHDLC
KILDKDFLDNSKNEKILEDIVLTLTLFEDREMIRKRLENYSDLLTKEQVK
KLERRHYTGWGRLSAELIHGIRNKESRKTILDYLIDDGNSNRNFMQLIND
DALSFKEEIAKAQVIGETDNLNQVVSDIAGSPAIKKGILQSLKIVDELVK
IMGHQPENIVVEMARENQFTNQGRRNSQQRLKGLTDSIKEFGSQILKEHP
VENSQLQNDRLFLYYLQNGRDMYTGEELDIDYLSQYDIDHIIPQAFIKDN
SIDNRVLTSSKENRGKSDDVPSKDVVRKMKSYWSKLLSAKLITQRKFDNL
TKAERGGLTDDDKAGFIKRQLVETRQITKHVARILDERFNTETDENNKKI
RQVKIVTLKSNLVSNFRKEFELYKVREINDYHHAHDAYLNAVIGKALLGV
YPQLEPEFVYGDYPHFHGHKENKATAKKFFYSNIMNFFKKDDVRTDKNGE
IIWKKDEHISNIKKVLSYPQVNIVKKVEEQTGGFSKESILPKGNSDKLIP
RKTKKFYWDTKKYGGFDSPIVAYSILVIADIEKGKSKKLKTVKALVGVTI
MEKMTFERDPVAFLERKGYRNVQEENIIKLPKYSLFKLENGRKRLLASAR
ELQKGNEIVLPNHLGTLLYHAKNIHKVDEPKHLDYVDKHKDEFKELLDVV
SNFSKKYTLAEGNLEKIKELYAQNNGEDLKELASSFINLLTFTAIGAPAT
FKFFDKNIDRKRYTSTlEILNATLIHQSITGLYETRIDLNKLGGD

[0087] In some embodiments the Cas9 protein can be S. thermophilus CRISPR 3 Cas9 and may comprise or consist of the amino acid sequence:

(SEQ ID NO: 160)
MTKPYSIGLDIGTNSVGWAVTTDNYKVPSKKMKVLGNTSKKYIKKNLLGV
LLFDSGITAEGRRLKRTARRRYTRRRNRILYLQEIFSTEMATLDDAFFQR
LDDSFLVPDDKRDSKYPIFGNLVEEKAYHDEFPTIYHLRKYLADSTKKAD
LRLVYLALAHMIKYRGHFLIEGEFNSKNNDIQKNFQDFLDTYNAIFESDL
SLENSKQLEEIVKDKISKLEKKDRILKLFPGEKNSGIFSEFLKLIVGNQA
DFRKCFNLDEKASLHFSKESYDEDLETLLGYIGDDYSDVFLKAKKLYDAI
LLSGFLTVTDNElEAPLSSAMIKRYNEHKEDLALLKEYIRNISLKTYNEV
FKDDTKNGYAGYIDGKTNQEDFYVYLKKLLAEFEGADYFLEKIDREDFLR
KQRTFDNGSIPYQIHLQEMRAILDKQAKFYPFLAKNKERIEKILTFRIPY
YVGPLARGNSDFAWSIRKRNEKITPWNFEDVIDKESSAEAFINRMTSFDL
YLPEEKVLPKHSLLYETFNVYNELTKVRFIAESMRDYQFLDSKQKKDIVR
LYFKDKRKVTDKDIIEYLHAIYGYDGIELKGIEKQFNSSLSTYHDLLNII
NDKEFLDDSSNEAIIEEIIHTLTIFEDREMIKQRLSKFENIFDKSVLKKL
SRRHYTGWGKLSAKLINGIRDEKSGNTILDYLIDDGISNRNFMQLIHDDA
LSFKKKIQKAQIIGDEDKGNIKEVVKSLPGSPAIKKGILQSIKIVDELVK
VMGGRKPESIVVEMARENQYTNQGKSNSQQRLKRLEKSLKELGSKILKEN
IPAKLSKIDNNALQNDRLYLYYLQNGKDMYTGDDLDIDRLSNYDIDHIIP
QAFLKDNSIDNKVLVSSASNRGKSDDVPSLEVVKKRKTFWYQLLKSKLIS
QRKFDNLTKAERGGLSPEDKAGFIQRQLVETRQITKHVARLLDEKFNNKK
DENNRAVRTVKIITLKSTLVSQFRKDFELYKVREINDFHHAHDAYLNAVV
ASALLKKYPKLEPEFVYGDYPKYNSFRERKSA1EKVYFYSNIMNIFKKSI
SLADGRVIERPLIEVNEETGESVWNKESDLATVRRVLSYPQVNVVKKVEE
QNHGLDRGKPKGLFNANLSSKPKPNSNENLVGAKEYLDPKKYGGYAGISN
SFTVLVKGTIEKGAKKKITNVLEFQGISILDRINYRKDKLNFLLEKGYKD
IELIIELPKYSLFELSDGSRRMLASILSTNNKRGEIHKGNQIFLSQKFVK
LLYHAKRISNTINENHRKYVENHKKEFEELFYYILEFNENYVGAKKNGKL
LNSAFQSWQNHSIDELCSSFIGPTGSERKGLFELTSRGSAADFEFLGVKI
PRYRDYTPSSLLKDATLIHQSVTGLYETRIDLAKLGEG

[0088] In some embodiments the Cas9 protein can be C. jejuni Cas9 and may comprise or consist of the amino acid sequence:

(SEQ ID NO: 161)
MARILAFDIGISSIGWAFSENDELKDCGVRIFTKVENPKTGESLALPRRL
ARSARKRLARRKARLNHLKHLIANEFKLNYEDYQSFDESLAKAYKGSLIS
PYELRFRALNELLSKQDFARVILHIAKRRGYDDIKNSDDKEKGAILKAIK
QNEEKLANYQSVGEYLYKEYFQKFKENSKEFTNVRNKKESYERCIAQSFL
KDELKLIFKKQREFGFSFSKKFEEEVLSVAFYKRALKDFSHLVGNCSFFT
DEKRAPKNSPLAFWVALTRIINLLNNLKNIEGILYTKDDLNALLNEVLKN
GTLTYKQTKKLLGLSDDYEFKGEKGTYFIEFKKYKEFIKALGEHNLSQDD
LNEIAKDITLIKDEIKLKKALAKYDLNQNQIDSLSKLEFKDHLNISFKAL
KLVTPLMLEGKKYDEACNELNLKVAINEDKKDFLPAFNETYYKDEVTNPV
VLRAIKEYRKVLNALLKKYGKVHKINIELAREVGKNHSQRAKIEKEQNEN
YKAKKDAELECEKLGLKINSKNILKLRLFKEQKEFCAYSGEKIKISDLQD
EKMLEIDHIYPYSRSFDDSYMNKVLVFTKQNQEKLNQTPFEAFGNDSAKW
QKIEVLAKNLPTKKQKRILDKNYKDKEQKNFKDRNLNDTRYIARLVLNYT
KDYLDFLPLSDDENTKLNDTQKGSKVHVEAKSGMLTSALRHTWGFSAKDR
NNHLHHAIDAVIIAYANNSIVKAFSDFKKEQESNSAELYAKKISELDYKN
KRKFFEPFSGFRQKVLDKIDEIFVSKPERKKPSGALHEETFRKEEEFYQS
YGGKEGVLKALELGKIRKVNGKIVKNGDMFRVDIFKHKKTNKFYAVPIYT
MDFALKVLPNKAVARSKKGEIKDWILMDENYEFCFSLYKDSLILIQTKDM
QEPEFVYYNAFTSSTVSLIVSKHDNKFETLSKNQKILFKNANEKEVIAKS
IGIQNLKVFEKYIVSALGEVTKAEFRQREDFKK

[0089] In some embodiments the Cas9 protein can be P. multocida Cas9 and may comprise or consist of the amino acid sequence:

(SEQ ID NO: 162)
MQTTNLSYILGLDLGIASVGWAVVEINENEDPIGLIDVGVRIFERAEVPK
TGESLALSRRLARSTRRLIRRRAHRLLLAKRFLKREGILSTIDLEKGLPN
QAWELRVAGLERRLSAIEWGAVLLHLIKHRGYLSKRKNESQTNNKELGAL
LSGVAQNHQLLQSDDYRTPAELALKKFAKEEGHIRNQRGAYTHTFNRLDL
LAELNLLFAQQHQFGNPHCKEHIQQYMTELLMWQKPALSGEAILKMLGKC
THEKNEFKAAKHTYSAERFVVVLTKLNNLRILEDGAERALNEEERQLLIN
HPYEKSKLTYAQVRKLLGLSEQAIFKHLRYSKENAESATFMELKAWHAIR
KALENQGLKDTWQDLAKKPDLLDEIGTAFSLYKTDEDIQQYLTNKVPNSV
INALLVSLNFDKFIELSLKSLRKILPLMEQGKRYDQACREIYGHHYGEAN
QKTSQLLPAIPAQEIRNPVVLRTLSQARKVINAIIRQYGSPARVHIETGR
ELGKSFKERREIQKQQEDNRTKRESAVQKFKELFSDFSSEPKSKDILKFR
LYEQQHGKCLYSGKEINIHRLNEKGYVEIDHALPFSRTWDDSFNNKVLVL
ASENQNKGNQTPYEWLQGKINSERWKNFVALVLGSQCSAAKKQRLLTQVI
DDNKFIDRNLNDTRYIARFLSNYIQENLLLVGKNKKNVFTPNGQITALLR
SRWGLIKARENNNRHHALDAIVVACATPSMQQKITRFIRFKEVHPYKIEN
RYEMVDQESGEIISPHFPEPWAYFRQEVNIRVFDNHPDTVLKEMLPDRPQ
ANHQFVQPLFVSRAPTRKMSGQGHMETIKSAKRLAEGISVLRIPLTQLKP
NLLENMVNKEREPALYAGLKARLAEFNQDPAKAFATPFYKQGGQQVKAIR
VEQVQKSGVLVRENNGVADNASIVRTDVFIKNNKFFLVPIYTWQVAKGIL
PNKAIVAHKNEDEWEEMDEGAKFKFSLFPNDLVELKTKKEYFFGYYIGLD
RATGNISLKEHDGEISKGKDGVYRVGVKLALSFEKYQVDELGKNRQICRP
QQRQPVR

[0090] In some embodiments the Cas9 protein can be F. novicida Cas9 and may comprise or consist of the amino acid sequence:

(SEQ ID NO: 163)
MNFKILPIAIDLGVKNTGVFSAFYQKGTSLERLDNKNGKVYELSKDSYTL
LMNNRTARRHQRRGIDRKQLVKRLFKLIW1EQLNLEWDKDTQQAISFLFN
RRGFSFITDGYSPEYLNIVPEQVKAILMDIFDDYNGEDDLDSYLKLATEQ
ESKISEIYNKLMQKILEFKLMKLCTDIKDDKVSTKTLKEITSYEFELLAD
YLANYSESLKTQKFSYTDKQGNLKELSYYHHDKYNIQEFLKRHATINDRI
LDTLLTDDLDIWNFNFEKFDFDKNEEKLQNQEDKDHIQAHLHHFVFAVNK
IKSEMASGGRHRSQYFQEITNVLDENNHQEGYLKNFCENLHNKKYSNLSV
KNLVNLIGNLSNLELKPLRKYFNDKIHAKADHWDEQKFTETYCHWILGEW
RVGVKDQDKKDGAKYSYKDLCNELKQKVTKAGLVDFLLELDPCRTIPPYL
DNNNRKPPKCQSLILNPKFLDNQYPNWQQYLQELKKLQSIQNYLDSFETD
LKVLKSSKDQPYFVEYKSSNQQIASGQRDYKDLDARILQFIFDRVKASDE
LLLNEIYFQAKKLKQKASSELEKLESSKKLDEVIANSQLSQILKSQHTNG
IFEQGTFLHLVCKYYKQRQRARDSRLYIMPEYRYDKKLHKYNNTGRFDDD
NQLLTYCNHKPRQKRYQLLNDLAGVLQVSPNFLKDKIGSDDDLFISKWLV
EHIRGFKKACEDSLKIQKDNRGLLNHKINIARNTKGKCEKEIFNLICKIE
GSEDKKGNYKHGLAYELGVLLFGEPNEASKPEFDRKIKKFNSIYSFAQIQ
QIAFAERKGNANTCAVCSADNAHRMQQIKIIEPVEDNKDKIILSAKAQRL
PAIPTRIVDGAVKKMATILAKNIVDDNWQNIKQVLSAKHQLHIPIIlESN
AFEFEPALADVKGKSLKDRRKKALERISPENIFKDKNNRIKEFAKGISAY
SGANLTDGDFDGAKEELDHIIPRSHKKYGTLNDEANLICVTRGDNKNKGN
RIFCLRDLADNYKLKQFETTDDLEIEKKIADTIWDANKKDFKFGNYRSFI
NLTPQEQKAFRHALFLADENPIKQAVIRAINNRNRTFVNGTQRYFAEVLA
NNIYLRAKKENLNTDKISFDYFGIPTIGNGRGIAEIRQLYEKVDSDIQAY
AKGDKPQASYSHLIDAMLAFCIAADEHRNDGSIGLEIDKNYSLYPLDKNT
GEVFTKDIFSQIKITDNEFSDKKLVRKKAIEGFNTHRQMTRDGIYAENYL
PILIHKELNEVRKGYTWKNSEEIKIFKGKKYDIQQLNNLVYCLKFVDKPI
SIDIQISTLEELRNILTTNNIAATAEYYYINLKTQKLHEYYIENYNTALG
YKKYSKEMEFLRSLAYRSERVKIKSIDDVKQVLDKDSNFIIGKITLPFKK
EWQRLYREWQNTTIKDDYEFLKSFFNVKSITKLHKKVRKDFSLPISTNEG
KFLVKRKTWDNNFIYQILNDSDSRADGTKPFIPAFDISKNEIVEAIIDSF
TSKNIFWLPKNIELQKVDNKNIFAIDTSKWFEVETPSDLRDIGIATIQYK
IDNNSRPKVRVKLDYVIDDDSKINYFMNHSLLKSRYPDKVLEILKQSTII
EFESSGFNKTIKEMLGMKLAGIYNETSNN

[0091] In some embodiments the Cas9 protein can be Lactobacillus buchneri Cas9 and may comprise or consist of the amino acid sequence:

(SEQ ID NO: 164)
MKVNNYHIGLDIGTSSIGWVAIGKDGKPLRVKGKTAIGARLFQEGNPAAD
RRMFRTTRRRLSRRKWRLKLLEEIFDPYITPVDSTFFARLKQSNLSPKDS
RKEFKGSMLFPDLTDMQYHKNYPTIYHLRHALMTQDKKFDIRMVYLAIHH
IVKYRGNFLNSTPVDSFKASKVDFVDQFKKLNELYAAINPEESFKINLAN
SEDIGHQFLDPSIRKFDKKKQIPKIVPVMMNDKVTDRLNGKIASEIIHAI
LGYKAKLDVVLQCTPVDSKPWALKFDDEDIDAKLEKILPEMDENQQSIVA
ILQNLYSQVTLNQIVPNGMSLSESMIEKYNDHHDHLKLYKKLIDQLADPK
KKAVLKKAYSQYVGDDGKVIEQAEFWSSVKKNLDDSELSKQIMDLIDAEK
FMPKQRTSQNGVIPHQLHQRELDEIIEHQSKYYPWLVEINPNKHDLHLAK
YKIEQLVAFRVPYYVGPMITPKDQAESAETVFSWMERKGIETGQITPWNF
DEKVDRKASANRFIKRMTTKDTYLIGEDVLPDESLLYEKFKVLNELNMVR
VNGKLLKVADKQAIFQDLFENYKHVSVKKLQNYIKAKTGLPSDPEISGLS
DPEHFNNSLGTYNDFKKLFGSKVDEPDLQDDFEKIVEWSTVFEDKKILRE
KLNEITWLSDQQKDVLESSRYQGWGRLSKKLLTGIVNDQGERIIDKLWNT
NKNFMQIQSDDDFAKRIHEANADQMQAVDVEDVLADAYTSPQNKKAIRQV
VKVVDDIQKAMGGVAPKYISIEFTRSEDRNPRRTISRQRQLENTLKDTAK
SLAKSINPELLSELDNAAKSKKGLTDRLYLYFTQLGKDIYTGEPINIDEL
NKYDIDHILPQAFIKDNSLDNRVLVLTAVNNGKSDNVPLRMFGAKMGHFW
KQLAEAGLISKRKLKNLQTDPDTISKYAMHGFIRRQLVETSQVIKLVANI
LGDKYRNDDTKIIEITARMNHQMRDEFGFIKNREINDYHHAFDAYLTAFL
GRYLYHRYIKLRPYFVYGDFKKFREDKVTMRNFNFLHDLTDDTQEKIADA
ETGEVIWDRENSIQQLKDVYHYKFMLISHEVYTLRGAMFNQTVYPASDAG
KRKLIPVKADRPVNVYGGYSGSADAYMAIVRIHNKKGDKYRVVGVPMRAL
DRLDAAKNVSDADFDRALKDVLAPQLTKTKKSRKTGEITQVIEDFEIVLG
KVMYRQLMIDGDKKFMLGSSTYQYNAKQLVLSDQSVKTLASKGRLDPLQE
SMDYNNVYIEILDKVNQYFSLYDMNKFRHKLNLGFSKFISFPNHNVLDGN
TKVSSGKREILQEILNGLHANPTFGNLKDVGITTPFGQLQQPNGILLSDE
TKIRYQSPTGLFERTVSLKDL

[0092] In some embodiments the Cas9 protein can be Listeria innocua Cas9 and may comprise or consist of the amino acid sequence:

(SEQ ID NO: 165)
MKKPYTIGLDIGTNSVGWAVLTDQYDLVKRKMKIAGDSEKKQIKKNFWGV
RLFDEGQTAADRRMARTARRRIERRRNRISYLQGIFAEEMSKTDANFFCR
LSDSFYVDNEKRNSRHPFFATIEEEVEYHKNYPTIYHLREELVNSSEKAD
LRLVYLALAHIIKYRGNFLIEGALDTQNTSVDGIYKQFIQTYNQVFASGI
EDGSLKKLEDNKDVAKILVEKVTRKEKLERILKLYPGEKSAGMFAQFISL
IVGSKGNFQKPFDLIEKSDIECAKDSYEEDLESLLALIGDEYAELFVAAK
NAYSAVVLSSIITVAElETNAKLSASMIERFDTHEEDLGELKAFIKLHLP
KHYEEIFSNlEKHGYAGYIDGKTKQADFYKYMKMTLENIEGADYFIAKIE
KENFLRKQRTFDNGAIPHQLHLEELEAILHQQAKYYPFLKENYDKIKSLV
TFRIPYFVGPLANGQSEFAWLTRKADGEIRPWNIEEKVDFGKSAVDFIEK
MTNKDTYLPKENVLPKHSLCYQKYLVYNELTKVRYINDQGKTSYFSGQEK
EQIFNDLFKQKRKVKKKDLELFLRNMSHVESPTIEGLEDSFNSSYSTYHD
LLKVGIKQEILDNPVNIEMLENIVKILTVFEDKRMIKEQLQQFSDVLDGV
VLKKLERRHYTGWGRLSAKLLMGIRDKQSHLTILDYLMNDDGLNRNLMQL
INDSNLSFKSIIEKEQVTTADKDIQSIVADLAGSPAIKKGILQSLKIVDE
LVSVMGYPPQTIVVEMARENQTTGKGKNNSRPRYKSLEKAIKEFGSQILK
EHPTDNQELRNNRLYLYYLQNGKDMYTGQDLDIHNLSNYDIDHIVPQSFI
TDNSIDNLVLTSSAGNREKGDDVPPLEIVRKRKVFWEKLYQGNLMSKRKF
DYLTKAERGGLTEADKARFIHRQLVETRQITKNVANILHQRFNYEKDDHG
NTMKQVRIVTLKSALVSQFRKQFQLYKVRDVNDYHHAHDAYLNGVVANTL
LKVYPQLEPEFVYGDYHQFDWFKANKATAKKQFYTNIMLFFAQKDRIIDE
NGEILWDKKYLDTVKKVMSYRQMNIVKKTEIQKGEFSKATIKPKGNSSKL
IPRKTNWDPMKYGGLDSPNMAYAVVIEYAKGKNKLVFEKKIIRVTIMERK
AFEKDEKAFLEEQGYRQPKVLAKLPKYTLYECEEGRRRMLASANEAQKGN
QQVLPNHLVTLLHHAANCEVSDGKSLDYIESNREMFAELLAHVSEFAKRY
TLAEANLNKINQLFEQNKEGDIKAIAQSFVDLMAFNAMGAPASFKFFETT
IERKRYNNLKELLNSTIIYQSITGLYESRKRLDD

[0093] In some embodiments the Cas9 protein can be L. pneumophilia Cas9 and may comprise or consist of the amino acid sequence:

(SEQ ID NO: 166)
MESSQILSPIGIDLGGKFTGVCLSHLEAFAELPNHANTKYSVILIDHNNF
QLSQAQRRATRHRVRNKKRNQFVKRVALQLFQHILSRDLNAKEETALCHY
LNNRGYTYVDTDLDEYIKDETTINLLKELLPSESEHNFIDWFLQKMQSSE
FRKILVSKVEEKKDDKELKNAVKNIKNFITGFEKNSVEGHRHRKVYFENI
KSDITKDNQLDSIKKKIPSVCLSNLLGHLSNLQWKNLHRYLAKNPKQFDE
QTFGNEFLRMLKNFRHLKGSQESLAVRNLIQQLEQSQDYISILEKTPPEI
TIPPYEARTNTGMEKDQSLLLNPEKLNNLYPNWRNLIPGIIDAHPFLEKD
LEHTKLRDRKRIISPSKQDEKRDSYILQRYLDLNKKIDKFKIKKQLSFLG
QGKQLPANLIETQKEMETHFNSSLVSVLIQIASAYNKEREDAAQGIWFDN
AFSLCELSNINPPRKQKILPLLVGAILSEDFINNKDKWAKFKIFWNTHKI
GRTSLKSKCKEIEEARKNSGNAFKIDYEEALNHPEHSNNKALIKIIQTIP
DIIQAIQSHLGHNDSQALIYHNPFSLSQLYTILETKRDGFHKNCVAVTCE
NYWRSQKTEIDPEISYASRLPADSVRPFDGVLARMMQRLAYEIAMAKWEQ
IKHIPDNSSLLIPIYLEQNRFEFEESFKKIKGSSSDKTLEQAIEKQNIQW
EEKFQRIINASMNICPYKGASIGGQGEIDHIYPRSLSKKHFGVIFNSEVN
LIYCSSQGNREKKEEHYLLEHLSPLYLKHQFGTDNVSDIKNFISQNVANI
KKYISFHLLTPEQQKAARHALFLDYDDEAFKTITKFLMSQQKARVNGTQK
FLGKQIMEFLSTLADSKQLQLEFSIKQITAEEVHDHRELLSKQEPKLVKS
RQQSFPSHAIDATLTMSIGLKEFPQFSQELDNSWFINHLMPDEVHLNPVR
SKEKYNKPNISSTPLFKDSLYAERFIPVWVKGETFAIGFSEKDLFEIKPS
NKEKLFTLLKTYSTKNPGESLQELQAKSKAKWLYFPINKTLALEFLHHYF
HKEIVTPDDTTVCHFINSLRYYTKKESITVKILKEPMPVLSVKFESSKKN
VLGSFKHTIALPATKDWERLFNHPNFLALKANPAPNPKEFNEFIRKYFLS
DNNPNSDIPNNGHNIKPQKHKAVRKVFSLPVIPGNAGTMMRIRRKDNKGQ
PLYQLQTIDDTPSMGIQINEDRLVKQEVLMDAYKTRNLSTIDGINNSEGQ
AYATFDNWLTLPVSTFKPEIIKLEMKPHSKTRRYIRITQSLADFIKTIDE
ALMIKPSDSIDDPLNMPNEIVCKNKLFGNELKPRDGKMKIVSTGKIVTYE
FESDSTPQWIQTLYVTQLKKQP

[0094] In some embodiments the Cas9 protein can be N. lactamica Cas9 and may comprise or consist of the amino acid sequence:

(SEQ ID NO: 167)
MAAFKPNPMNYILGLDIGIASVGWAMVEVDEEENPIRLIDLGVRVFERAE
VPKTGDSLAMARRLARSVRRLTRRRAHRLLRARRLLKREGVLQDADFDEN
GLVKSLPNTPWQLRAAALDRKLTCLEWSAVLLHLVKHRGYLSQRKNEGET
ADKELGALLKGVADNAHALQTGDFRTPAELALNKFEKESGHIRNQRGDYS
HTFSRKDLQAELNLLFEKQKEFGNPHVSDGLKEDIETLLMAQRPALSGDA
VQKMLGHCTFEPAEPKAAKNTYTAERFIWLTKLNNLRILEQGSERPLTDT
ERATLMDEPYRKSKLTYAQARKLLGLEDTAFFKGLRYGKDNAEASTLMEM
KAYHAISRALEKEGLKDKKSPLNLSTELQDEIGTAFSLFKTDKDITGRLK
DRVQPEILEALLKHISFDKFVQISLKALRRIVPLMEQGKRYDEACAEIYG
DHYCKKNAEEKIYLPPIPADEIRNPVVLRALSQARKVINCVVRRYGSPAR
IHIETAREVGKSFKDRKEIEKRQEENRKDREKAAAKFREYFPNFVGEPKS
KDILKLRLYEQQHGKCLYSGKEINLVRLNEKGYVEIDHALPFSRTWDDSF
NNKVLVLGSENQNKGNQTPYEYFNGKDNSREWQEFKARVETSRFPRSKKQ
RILLQKFDEEGFKERNLNDTRYVNRFLCQFVADHILLTGKGKRRVFASNG
QITNLLRGFWGLRKVRTENDRHHALDAVVVACSTVAMQQKITRFVRYKEM
NAFDGKTIDKETGEVLHQKAHFPQPWEFFAQEVMIRVFGKPDGKPEFEEA
DTPEKLRTLLAEKLSSRPEAVHEYVTPLFVSRAPNRKMSGQGHMETVKSA
KRLDEGISVLRVPLTQLKLKGLEKMVNREREPKLYDALKAQLETHKDDPA
KAFAEPFYKYDKAGSRTQQVKAVRIEQVQKTGVVVVRNHNGIADNATMVR
VDVFEKGGKYYLVPIYSWQVAKGILPDRAVVAFKDEEDWTVMDDSFEFRF
VLYANDLIKLTAKKNEFLGYFVSLNRATGAIDIRTHDTDSTKGKNGIFQS
VGVKTALSFQKNQIDELGKEIRPCRLKKRPPVR

[0095] In some embodiments the Cas9 protein can be N. meningitides Cas9 and may comprise or consist of the amino acid sequence:

(SEQ ID NO: 168)
MAAFKPNPINYILGLDIGIASVGWAMVEIDEDENPICLIDLGVRVFERAE
VPKTGDSLAMARRLARSVRRLTRRRAHRLLRARRLLKREGVLQAADFDEN
GLIKSLPNTPWQLRAAALDRKLTPLEWSAVLLHLIKHRGYLSQRKNEGET
ADKELGALLKGVADNAHALQTGDFRTPAELALNKFEKESGHIRNQRGDYS
HTFSRKDLQAELILLFEKQKEFGNPHVSGGLKEGIETLLMTQRPALSGDA
VQKMLGHCTFEPAEPKAAKNTYTAERFIWLTKLNNLRILEQGSERPLTDT
ERATLMDEPYRKSKLTYAQARKLLGLEDTAFFKGLRYGKDNAEASTLMEM
KAYHAISRALEKEGLKDKKSPLNLSPELQDEIGTAFSLFKTDEDITGRLK
DRIQPEILEALLKHISFDKFVQISLKALRRIVPLMEQGKRYDEACAEIYG
DHYGKKNTEEKIYLPPIPADEIRNPVVLRALSQARKVINGVVRRYGSPAR
IHIETAREVGKSFKDRKEIEKRQEENRKDREKAAAKFREYFPNFVGEPKS
KDILKLRLYEQQHGKCLYSGKEINLGRLNEKGYVEIDHALPFSRTWDDSF
NNKVLVLGSENQNKGNQTPYEYFNGKDNSREWQEFKARVETSRFPRSKKQ
RILLQKFDEDGFKERNLNDTRYVNRFLCQFVADRMRLTGKGKKRVFASNG
QITNLLRGFWGLRKVRAENDRHHALDAVVVACSTVAMQQKITRFVRYKEM
NAFDGKTIDKETGEVLHQKTHFPQPWEFFAQEVMIRVFGKPDGKPEFEEA
DTPEKLRTLLAEKLSSRPEAVHEYVTPLFVSRAPNRKMSGQGHMETVKSA
KRLDEGVSVLRVPLTQLKLKDLEKMVNREREPKLYEALKARLEAHKDDPA
KAFAEPFYKYDKAGNRTQQVKAVRVEQVQKTGVVVVRNHNGIADNATMVR
VDVFEKGDKYYLVPIYSWQVAKGILPDRAVVQGKDEEDWQLIDDSFNFKF
SLHPNDLVEVITKKARMFGYFASCHRGTGNINIRIHDLDHKIGKNGILEG
IGVKTALSFQKYQIDELGKEIRPCRLKKRPPVR

[0096] In some embodiments the Cas9 protein can be B. longum Cas9 and may comprise or consist of the amino acid sequence:

(SEQ ID NO: 169)
MLSRQLLGASHLARPVSYSYNVQDNDVHCSYGERCFMRGKRYRIGIDVGL
NSVGLAAVEVSDENSPVRLLNAQSVIHDGGVDPQKNKEAITRKNMSGVAR
RTRRMRRRKRERLHKLDMLLGKFGYPVIEPESLDKPFEEWHVRAELATRY
IEDDELRRESISIALRHMARHRGWRNPYRQVDSLISDNPYSKQYGELKEK
AKAYNDDATAAEEESTPAQLVVAMLDAGYAEAPRLRWRTGSKKPDAEGYL
PVRLMQEDNANELKQIFRVQRVPADEWKPLFRSVFYAVSPKGSAEQRVGQ
DPLAPEQARALKASLAFQEYRIANVITNLRIKDASAELRKLTVDEKQSIY
DQLVSPSSEDITWSDLCDFLGFKRSQLKGVGSLTEDGEERISSRPPRLTS
VQRIYESDNKIRKPLVAWWKSASDNEHEAMIRLLSNTVDIDKVREDVAYA
SAIEFIDGLDDDALTKLDSVDLPSGRAAYSVETLQKLTRQMLTTDDDLHE
ARKTLFNVTDSWRPPADPIGEPLGNPSVDRVLKNVNRYLMNCQQRWGNPV
SVNIEHVRSSFSSVAFARKDKREYEKNNEKRSIFRSSLSEQLRADEQMEK
VRESDLRRLEAIQRQNGQCLYCGRTITFRTCEMDHIVPRKGVGSTNTRTN
FAAVCAECNRMKSNTPFAIWARSEDAQTRGVSLAEAKKRVTMFTFNPKSY
APREVKAFKQAVIARLQQTEDDAAIDNRSIESVAWMADELHRRIDWYFNA
KQYVNSASIDDAEAETMKTTVSVFQGRVTASARRAAGIEGKIHFIGQQSK
TRLDRRHHAVDASVIAMMNTAAAQTLMERESLRESQRLIGLMPGERSWKE
YPYEGTSRYESFHLWLDNMDVLLELLNDALDNDRIAVMQSQRYVLGNSIA
HDATIHPLEKVPLGSAMSADLIRRASTPALWCALTRLPDYDEKEGLPEDS
HREIRVHDTRYSADDEMGFFASQAAQIAVQEGSADIGSAIHHARVYRCWK
TNAKGVRKYFYGMIRVFQTDLLRACHDDLFTVPLPPQSISMRYGEPRVVQ
ALQSGNAQYLGSLVVGDEIEMDFSSLDVDGQIGEYLQFFSQFSGGNLAWK
HWVVDGFFNQTQLRIRPRYLAAEGLAKAFSDDVVPDGVQKIVTKQGWLPP
VNTASKTAVRIVRRNAFGEPRLSSAHHMPCSWQWRHE

[0097] In some embodiments the Cas9 protein can be A. muciniphila Cas9 and may comprise or consist of the amino acid sequence:

(SEQ ID NO: 170)
MSRSLTFSFDIGYASIGWAVIASASHDDADPSVCGCGTVLFPKDDCQAFK
RREYRRLRRNIRSRRVRIERIGRLLVQAQIITPEMKETSGHPAPFYLASE
ALKGHRTLAPIELWHVLRWYAHNRGYDNNASWSNSLSEDGGNGEDTERVK
HAQDLMDKHGTATMAETICRELKLEEGKADAPMEVSTPAYKNLNTAFPRL
IVEKEVRRILELSAPLIPGLTAEIIELIAQHHPLTTEQRGVLLQHGIKLA
RRYRGSLLFGQLIPRFDNRIISRCPVTWAQVYEAELKKGNSEQSARERAE
KLSKVPTANCPEFYEYRMARILCNIRADGEPLSAEIRRELMNQARQEGKL
TKASLEKAISSRLGKETETNVSNYFTLHPDSEEALYLNPAVEVLQRSGIG
QILSPSVYRIAANRLRRGKSVTPNYLLNLLKSRGESGEALEKKIEKESKK
KEADYADTPLKPKYATGRAPYARTVLKKVVEEILDGEDPTRPARGEAHPD
GELKAHDGCLYCLLDTDSSVNQHQKERRLDTMTNNHLVRHRMLILDRLLK
DLIQDFADGQKDRISRVCVEVGKELTTFSAMDSKKIQRELTLRQKSHTDA
VNRLKRKLPGKALSANLIRKCRIAMDMNWTCPFTGATYGDHELENLELEH
IVPHSFRQSNALSSLVLTWPGVNRMKGQRTGYDFVEQEQENPVPDKPNLH
ICSLNNYRELVEKLDDKKGHEDDRRRKKKRKALLMVRGLSHKHQSQNHEA
MKEIGMTEGMMTQSSHLMKLACKSIKTSLPDAHIDMIPGAVTAEVRKAWD
VFGVFKELCPEAADPDSGKILKENLRSLTHLHHALDACVLGLIPYIIPAH
HNGLLRRVLAMRRIPEKLIPQVRPVANQRHYVLNDDGRMMLRDLSASLKE
NIREQLMEQRVIQHVPADMGGALLKETMQRVLSVDGSGEDAMVSLSKKKD
GKKEKNQVKASKLVGVFPEGPSKLKALKAAIEIDGNYGVALDPKPVVIRH
IKVFKRIMALKEQNGGKPVRILKKGMLIHLTSSKDPKHAGVVVRIESIQD
SKGGVKLDLQRAHCAVPKNKTHECNWREVDLISLLKKYQMKRYPTSYTGT
PR

[0098] In some embodiments the Cas9 protein can be O. laneus Cas9 and may comprise or consist of the amino acid sequence:

(SEQ ID NO: 171)
METTLGIDLGTNSIGLALVDQEEHQILYSGVRIFPEGINKDTIGLGEKEE
SRNATRRAKRQMRRQYFRKKLRKAKLLELLIAYDMCPLKPEDVRRWKNWD
KQQKSTVRQFPDTPAFREWLKQNPYELRKQAVTEDVTRPELGRILYQMIQ
RRGFLSSRKGKEEGKIFTGKDRMVGIDETRKNLQKQTLGAYLYDIAPKNG
EKYRFRTERVRARYTLRDMYIREFEIIWQRQAGHLGLAHEQATRKKNIFL
EGSATNVRNSKLITHLQAKYGRGHVLIEDTRITVTFQLPLKEVLGGKIEI
EEEQLKFKSNESVLFWQRPLRSQKSLLSKCVFEGRNFYDPVHQKWIIAGP
TPAPLSHPEFEEFRAYQFINNITYGKNEHLTAIQREAVFELMCTESKDFN
FEKIPKHLKLFEKFNFDDTTKVPACTTISQLRKLFPHPVVVEEKREEIWH
CFYFYDDNTLLFEKLQKDYALQTNDLEKIKKIRLSESYGNVSLKAIRRIN
PYLKKGYAYSTAVLLGGIRNSFGKRFEYFKEYEPEIEKAVCRILKEKNAE
GEVIRKIKDYLVHNRFGFAKNDRAFQKLYHHSQAITTQAQKERLPETGNL
RNPIVQQGLNELRRTVNKLLATCREKYGPSFKFDHIHVEMGRELRSSKIE
REKQSRQIRENEKKNEAAKVKLAEYGLKAYRDNIQKYLLYKEIEEKGGTV
CCPYTGKTLNISHTLGSDNSVQIEHIIPYSISLDDSLANKTLCDATFNRE
KGELTPYDFYQKDPSPEKWGASSWEEIEDRAFRLLPYAKAQRFIRRKPQE
SNEFISRQLNDTRYISKKAVEYLSAICSDVKAFPGQLTAELRHLWGLNNI
LQSAPDITFPLPVSATENHREYYVITNEQNEVIRLFPKQGETPRIEKGEL
LLTGEVERKVFRCKGMQEFQTDVSDGKYWRRIKLSSSVTWSPLFAPKPIS
ADGQIVLKGRIEKGVFVCNQLKQKLKTGLPDGSYWISLPVISQTFKEGES
VNNSKLTSQQVQLFGRVREGIFRCHNYQCPASGADGNFWCTLDTDTAQPA
FTPIKNAPPGVGGGQIILTGDVDDKGIFHADDDLHYELPASLPKGKYYGI
FTVESCDPTLIPIELSAPKTSKGENLIEGNIWVDEHTGEVRFDPKKNRED
QRHHAIDAIVIALSSQSLFQRLSTYNARRENKKRGLDSTEHFPSPWPGFA
QDVRQSVVPLLVSYKQNPKTLCKISKTLYKDGKKIHSCGNAVRGQLHKET
VYGQRTAPGATEKSYHIRKDIRELKTSKHIGKVVDITIRQMLLKHLQENY
HIDITQEFNIPSNAFFKEGVYRIFLPNKHGEPVPIKKIRMKEELGNAERL
KDNINQYVNPRNNHHVMIYQDADGNLKEEIVSFWSVIERQNQGQPIYQLP
REGRNIVSILQINDTFLIGLKEEEPEVYRNDLSTLSKHLYRVQKLSGMYY
TFRHHLASTLNNEREEFRIQSLEAWKRANPVKVQIDEIGRITFLNGPLC.

[0099] In some embodiments of the compositions of the disclosure, the sequence encoding the fRNA binding protein comprises a sequence isolated or derived from a CRISPR Cas protein. In some embodiments, the CRISPR Cas protein comprises a Type V CRISPR Cas protein. In some embodiments, the Type V CRISPR Cas protein comprises a Cpf1 protein. Exemplary Cpf1 proteins of the disclosure may be isolated or derived from any species, including, but not limited to, a bacteria or an archaea. Exemplary Cpf1 proteins of the disclosure may be isolated or derived from any species, including, but not limited to, Francisella tularensis subsp. novicida, Acidaminococcus sp. BV3L6 and Lachnospiraceae bacterium sp. ND2006. Exemplary Cpf1 proteins of the disclosure may be nuclease inactivated.

[0100] Exemplary wild type Francisella tularensis subsp. Novicida Cpf1 (FnCpf1) proteins of the disclosure may comprise or consist of the amino acid sequence:

| (SEQ ID NO: 172) | |
|---|---|
| 1 | MSIYQEFVNK YSLSKTLRFE LIPQGKTLEN IKARGLILDD EKRAKDYKKA KQIIDKYHQF |
| 61 | FIEEILSSVC ISEDLLQNYS DVYFKLKKSD DDNLQKDFKS AKDTIKKQIS EYIKDSEKFK |
| 121 | NLFNQNLIDA KKGQESDLIL WLKQSKDNGI ELFKANSDIT DIDEALEIIK SFKGWTTYFK |
| 181 | GFHENRKNVY SSNDIPTSII YRIVDDNLPK FLENKAKYES LKDKAPEAIN YEQIKKDLAE |
| 241 | ELTFDIDYKT SEVNQRVFSL DEVFEIANFN NYLNQSGITK FNTIIGGKFV NGENTKRKGI |
| 301 | NEYINLYSQQ INDKTLKKYK MSVLFKQILS DTESKSFVID KLEDDSDVVT TMQSFYEQIA |
| 361 | AFKTVEEKSI KETLSLLFDD LKAQKLDLSK IYFKNDKSLT DLSQQVFDDY SVIGTAVLEY |
| 421 | ITQQIAPKNL DNPSKKEQEL IAKKTEKAKY LSLETIKLAL EEFNKHRDID KQCRFEEILA |
| 481 | NFAAIPMIFD EIAQNKDNLA QISIKYQNQG KKDLLQASAE DDVKAIKDLL DQTNNLLHKL |
| 541 | KIFHISQSED KANILDKDEH FYLVFEECYF ELANIVPLYN KIRNYITQKP YSDEKFKLNF |
| 601 | ENSTLANGWD KNKEPDNTAI LFIKDDKYYL GVMNKKNNKI FDDKAIKENK GEGYKKIVYK |
| 661 | LLPGANKMLP KVFFSAKSIK FYNPSEDILR IRNHSTHTKN GSPQKGYEKF EFNIEDCRKF |
| 721 | IDFYKQSISK HPEWKDFGFR FSDTQRYNSI DEFYREVENQ GYKLTFENIS ESYIDSVVNQ |
| 781 | GKLYLFQIYN KDFSAYSKGR PNLHTLYWKA LFDERNLQDV VYKLNGEAEL FYRKQSIPKK |
| 841 | ITHPAKEAIA NKNKDNPKKE SVFEYDLIKD KRFTEDKFFF HCPITINFKS SGANKFNDEI |
| 901 | NLLLKEKAND VHILSIDRGE RHLAYYTLVD GKGNIIKQDT FNIIGNDRMK TNYHDKLAAI |
| 961 | EKDRDSARKD WKKINNIKEM KEGYLSQVVH EIAKLVIEYN AIVVFEDLNF GFKRGRFKVE |
| 1021 | KQVYQKLEKM LIEKLNYLVF KDNEFDKTGG VLRAYQLTAP FETFKKMGKQ TGIIYYVPAG |
| 1081 | FTSKICPVTG FVNQLYPKYE SVSKSQEFFS KFDKICYNLD KGYFEFSFDY KNFGDKAAKG |
| 1141 | KWTIASFGSR LINFRNSDKN HNWDTREVYP TKELEKLLKD YSIEYGHGEC IKAAICGESD |
| 1201 | KKFFAKLTSV LNTILQMRNS KTGTELDYLI SPVADVNGNF FDSRQAPKNM PQDADANGAY |
| 1261 | HIGLKGLMLL GRIKNNQEGK KLNLVIKNEE YFEFVQNRNN |

[0101] Exemplary wild type Lachnospiraceae bacterium sp. ND2006 Cpf1 (LbCpf1) proteins of the disclosure may comprise or consist of the amino acid sequence:

| (SEQ ID NO: 173) | |
|---|---|
| 1 | AASKLEKFTN CYSLSKTLRF KAIPVGKTQE NIDNKRLLVE DEKRAEDYKG VKKLLDRYYL |
| 61 | SFINDVLHSI KLKNLNNYIS LFRKKTRTEK ENKELENLEI NLRKEIAKAF KGAAGYKSLF |
| 121 | KKDIIETILP EAADDKDEIA LVNSENGETT AFTGFFDNRE NMFSEEAKST SIAFRCINEN |
| 181 | LTRYISNMDI FEKVDAIFDK HEVQEIKEKI LNSDYDVEDF FEGEFFNFVL TQEGIDVYNA |
| 241 | IIGGFVTESG EKIKGLNEYI NLYNAKTKQA LPKFKPLYKQ VLSDRESLSF YGEGYTSDEE |
| 301 | VLEVFRNTLN KNSEIFSSIK KLEKLFKNFD EYSSAGIFVK NGPAISTISK DIFGEWNLIR |
| 361 | DKWNAEYDDI HLKKKAVVTE KYEDDRRKSF KKIGSFSLEQ LQEYADADLS VVEKLKEIII |
| 421 | QKVDEIYKVY GSSEKLFDAD FVLEKSLKKN DAVVAIMKDL LDSVKSFENY IKAFFGEGKE |
| 481 | TNRDESFYGD FVLAYDILLK VDHIYDAIRN YVTQKPYSKD KFKLYFQNPQ FMGGWDKDKE |
| 541 | TDYRATILRY GSKYYLAIMD KKYAKCLQKI DKDDVNGNYE KINYKLLPGP NKMLPKVFFS |
| 601 | KKWMAYYNPS EDIQKIYKNG TFKKGDMFNL NDCHKLIDFF KDSISRYPKW SNAYDFNFSE |
| 661 | TEKYKDIAGF YREVEEQGYK VSFESASKKE VDKLVEEGKL YMFQIYNKDF SDKSHGTPNL |
| 721 | HTMYFKLLFD ENNHGQIRLS GGAELFMRRA SLKKEELVVH PANSPIANKN PDNPKKTTTL |
| 781 | SYDVYKDKRF SEDQYELHIP IAINKCPKNI FKINTEVRVL LKHDDNPYVI GIDRGERNLL |
| 841 | YIVVVDGKGN IVEQYSLNEI INNFNGIRIK TDYHSLLDKK EKERFEARQN WTSIENIKEL |
| 901 | KAGYISQVVH KICELVEKYD AVIALEDLNS GFKNSRVKVE KQVYQKFEKM LIDKLNYMVD |
| 961 | KKSNPCATGG ALKGYQITNK FESFKSMSTQ NGFIFYIPAW LTSKIDPSTG FVNLLKTKYT |
| 1021 | SIADSKKFIS SFDRIMYVPE EDLFEFALDY KNFSRTDADY IKKWKLYSYG NRIRIFAAAK |
| 1081 | KNNVFAWEEV CLTSAYKELF NKYGINYQQG DIRALLCEQS DKAFYSSFMA LMSLMLQMRN |
| 1141 | SITGRTDVDF LISPVKNSDG IFYDSRNYEA QENAILPKNA DANGAYNIAR KVLWAIGQFK |
| 1201 | KAEDEKLDKV KIAISNKEWL EYAQTSVK |

[0102] Exemplary wild type Acidaminococcus sp. BV3L6 Cpf1 (AsCpf1) proteins of the disclosure may comprise or consist of the amino acid sequence:

| (SEQ ID NO: 174) | |
|---|---|
| 1 | MTQFEGFTNL YQVSKTLRFE LIPQGKTLKH IQEQGFIEED KARNDHYKEL KPIIDRIYKT |
| 61 | YADQCLQLVQ LDWENLSAAI DSYRKEKTEE TRNALIEEQA TYRNAIHDYF IGRIDNLIDA |
| 121 | INKRHAEIYK GLFKAELENG KVLKQLGTVT TTEHENALLR SFDKFTTYFS GFYENRKNVF |
| 181 | SAEDISTAIP HRIVQDNFPK FKENCHIFTR LITAVPSLRE HFENVKKAIG IFVSTSIEEV |
| 241 | FSFPFYNQLL TQTQIDLYNQ LLGGISREAG TEKIKGLNEV LNLAIQKNDE TAHIIASLPH |
| 301 | RFIPLFKQIL SDRNTLSFIL EEFKSDEEVI QSFCKYKTLL RNENVLETAE ALFNELNSID |
| 361 | LTHIFISHKK LETISSALCD HWDTLRNALY ERRISELTGK ITKSAKEKVQ RSLKHEDINL |
| 421 | QEIISAAGKE LSEAFKQKTS EILSHAHAAL DQPLPTTLKK QEEKEILKSQ LDSLLGLYHL |
| 481 | LDWFAVDESN EVDPEFSARL TGIKLEMEPS LSFYNKARNY ATKKPYSVEK FKLNFQMPTL |
| 541 | ASGWDVNKEK NNGAILFVKN GLYYLGIMPK QKGRYKALSF EPTEKTSEGF DKMYYDYFPD |
| 601 | AAKMIPKCST QLKAVTAHFQ THTTPILLSN NFIEPLEITK EIYDLNNPEK EPKKFQTAYA |
| 661 | KKTGDQKGYR EALCKWIDFT RDFLSKYTKT TSIDLSSLRP SSQYKDLGEY YAELNPLLYH |
| 721 | ISFQRIAEKE IMDAVETGKL YLFQIYNKDF AKGHHGKPNL HTLYWTGLFS PENLAKTSIK |
| 781 | LNGQAELFYR PKSRMKRMAH RLGEKMLNKK LKDQKTPIPD TLYQELYDYV NHRLSHDLSD |
| 841 | EARALLPNVI TKEVSHEIIK DRRFTSDKFF FHVPITLNYQ AANSPSKFNQ RVNAYLKEHP |
| 901 | ETPIIGIDRG ERNLIYITVI DSTGKILEQR SLNTIQQFDY QKKLDNREKE RVAARQAWSV |
| 961 | VGTIKDLKQG YLSQVIHEIV DLMIHYQAVV VLENLNFGFK SKRTGIAEKA VYQQFEKMLI |
| 1021 | DKLNCLVLKD YPAEKVGGVL NPYQLTDQFT SFAKMGTQSG FLFYVPAPYT SKIDPLTGFV |
| 1081 | DPFVWKTIKN HESRKHFLEG FDFLHYDVKT GDFILHFKMN RNLSFQRGLP GFMPAWDIVF |
| 1141 | EKNETQFDAK GTPFIAGKRI VPVIENHRFT GRYRDLYPAN ELIALLEEKG IVFRDGSNIL |
| 1201 | PKLLENDDSH AIDTMVALIR SVLQMRNSNA ATGEDYINSP VRDLNGVCFD SRFQNPEWPM |
| 1261 | DADANGAYHI ALKGQLLLNH LKESKDLKLQ NGISNQDWLA YIQELRN |

[0103] In some embodiments of the compositions of the disclosure, the sequence encoding the RNA binding protein comprises a sequence isolated or derived from a CRISPR Cas protein or RNA-binding portion thereof. In some embodiments, the CRISPR Cas protein comprises a Type VI CRISPR Cas protein. In some embodiments, the Type VI CRISPR Cas protein comprises a Cas13 protein. Exemplary Cas13 proteins of the disclosure may be isolated or derived from any species, including, but not limited to, a bacteria or an archaea. Exemplary Cas13 proteins of the disclosure may be isolated or derived from any species, including, but not limited to, Leptotrichia wadei, Listeria seeligeri serovar 1/2b (strain ATCC 35967/DSM 20751/CIP 100100/SLCC 3954), Lachnospiraceae bacterium, Clostridium aminophilum DSM 10710, Carnobacterium gallinarum DSM 4847, Paludibacter propionicigenes WB4, Listeria weihenstephanensis FSL R9-0317, Listeria weihenstephanensis FSL R9-0317, bacterium FSL M6-0635 (Listeria newyorkensis), Leptotrichia wadei F0279, Rhodobacter capsulatus SB 1003, Rhodobacter capsulatus R121, Rhodobacter capsulatus DE442 and Corynebacterium ulcerans. Exemplary Cas13 proteins of the disclosure may be DNA nuclease inactivated. Exemplary Cas13 proteins of the disclosure include, but are not limited to, Cas13a, Cas13b, Cas13c, Cas13d and orthologs thereof. Exemplary Cas13b proteins of the disclosure include, but are not limited to, subtypes 1 and 2 referred to herein as Csx27 and Csx28, respectively.

[0104] Exemplary Cas13a proteins include, but are not limited to:

| Cas13a | Cas13a | | Accession | |
|---|---|---|---|---|
| number | abbreviation | Organism name | number | Direct Repeat sequence |
| Cas13a1 | LshCas13a | Leptotrichia | WP_018451595.1 | CCACCCCAATATCGAAGGGGACTAA |
| | | shahii | | AAC (SEQ ID NO: 175) |
| Cas13a2 | LwaCas13a | Leptotrichia | WP_021746774.1 | GATTTAGACTACCCCAAAAACGAAG |
| | | wadei | | GGGACTAAAAC (SEQ ID NO: |
| | | | | 176) |
| Cas13a3 | LseCas13a | Listeria seeligeri | WP_012985477.1 | GTAAGAGACTACCTCTATATGAAAG |
| | | | | AGGACTAAAAC (SEQ ID NO: |
| | | | | 177) |
| Cas13a4 | LbmCas13a | Lachnospiraceae | WP_044921188.1 | GTATTGAGAAAAGCCAGATATAGTT |
| | | bacterium | | GGCAATAGAC (SEQ ID NO: 178) |
| | | MA2020 | | |
| Cas13a5 | LbnCas13a | Lachnospiraceae | WP_022785443.1 | GTTGATGAGAAGAGCCCAAGATAG |
| | | bacterium | | AGGGCAATAAC (SEQ ID NO: |
| | | NK4A179 | | 179) |
| Cas13a6 | CamCas13a | [Clostridium] | WP_031473346.1 | GTCTATTGCCCTCTATATCGGGCTGT |
| | | aminophilum | | TCTCCAAAC (SEQ ID NO: 180) |
| | | DSM 10710 | | |
| Cas13a7 | CgaCas13a | Carnobacterium | WP_034560163.1 | ATTAAAGACTACCTCTAAATGTAAG |
| | | gallinarum DSM | | AGGACTATAAC (SEQ ID NO: |
| | | 4847 | | 181) |
| Cas13a8 | Cga2Cas13a | Carnobacterium | WP_034563842.1 | AATATAAACTACCTCTAAATGTAAG |
| | | gallinarum DSM | | AGGACTATAAC (SEQ ID NO: |
| | | 4847 | | 182) |
| Cas13a9 | Pprcas13a | Paludibacter | WP_013443710.1 | CTTGTGGATTATCCCAAAATTGAAG |
| | | propionicigenes | | GGAACTACAAC (SEQ ID NO: |
| | | WB4 | | 183) |
| Cas13a10 | LweCas13a | Listeria | WP_036059185.1 | GATTTAGAGTACCTCAAAATAGAAG |
| | | weihenstephanensis | | AGGTCTAAAAC (SEQ ID NO: |
| | | FSL R9-0317 | | 184) |
| Cas13a11 | LbfCas13a | Listeriaceae | WP_036091002.1 | GATTTAGAGTACCTCAAAACAAAAG |
| | | bacterium FSL | | AGGACTAAAAC (SEQ ID NO: |
| | | M6-0635 | | 185) |
| | | (Listeria | | |
| | | newyorkensis) | | |
| Cas13a12 | Lwa2cas13a | Leptotrichia | WP_021746774.1 | GATATAGATAACCCCAAAAACGAA |
| | | wadei F0279 | | GGGATCTAAAAC (SEQ ID NO: |
| | | | | 186) |
| Cas13a13 | RcsCas13a | Rhodobacter | WP_013067728.1 | GCCTCACATCACCGCCAAGACGACG |
| | | capsulatus SB | | GCGGACTGAAC (SEQ ID NO: |
| | | 1003 | | 187) |
| Cas13a14 | RcrCas13a | Rhodobacter | WP_023911507.1 | GCCTCACATCACCGCCAAGACGACG |
| | | capsulatus R121 | | GCGGACTGAAC (SEQ ID NO: |
| | | | | 188) |
| Cas13a15 | RcdCas13a | Rhodobacter | WP_023911507.1 | GCCTCACATCACCGCCAAGACGACG |
| | | capsulatus | | GCGGACTGAAC (SEQ ID NO: |
| | | DE442 | | 189) |

[0105] Exemplary wild type Cas13a proteins of the disclosure may comprise or consist of the amino acid sequence:

| (SEQ ID NO: 190) | |
|---|---|
| 1 | MGNLFGHKRW YEVRDKKDFK IKRKVKVKRN YDGNKYILNI NENNNKEKID NNKFIRKYIN |
| 61 | YKKNDNILKE FTRKFHAGNI LFKLKGKEGI IRIENNDDFL ETEEVVLYIE AYGKSEKLKA |
| 121 | LGITKKKIID EAIRQGITKD DKKIEIKRQE NEEEIEIDIR DEYTNKTLND CSIILRIIEN |
| 181 | DELETKKSIY EIFKNINMSL YKIIEKIIEN ETEKVFENRY YEEHLREKLL KDDKIDVILT |
| 241 | NFMEIREKIK SNLEILGFVK FYLNVGGDKK KSKNKKMLVE KILNINVDLT VEDIADFVIK |
| 301 | ELEFWNITKR IEKVKKVNNE FLEKRRNRTY IKSYVLLDKH EKFKIERENK KDKIVKFFVE |
| 361 | NIKNNSIKEK IEKILAEFKI DELIKKLEKE LKKGNCDTEI FGIFKKHYKV NFDSKKFSKK |
| 421 | SDEEKELYKI IYRYLKGRIE KILVNEQKVR LKKMEKIEIE KILNESILSE KILKRVKQYT |
| 481 | LEHIMYLGKL RHNDIDMITV NTDDFSRLHA KEELDLELIT FFASTNMELN KIFSRENINN |
| 541 | DENIDFFGGD REKNYVLDKK ILNSKIKIIR DLDFIDNKNN ITNNFIRKFT KIGTNERNRI |
| 601 | LHAISKERDL QGTQDDYNKV INIIQNLKIS DEEVSKALNL DVVFKDKKNI ITKINDIKIS |
| 661 | EENNNDIKYL PSFSKVLPEI LNLYRNNPKN EPFDTIETEK IVLNALIYVN KELYKKLILE |
| 721 | DDLEENESKN IFLQELKKTL GNIDEIDENI IENYYKNAQI SASKGNNKAI KKYQKKVIEC |
| 781 | YIGYLRKNYE ELFDFSDFKM NIQEIKKQIK DINDNKTYER ITVKISDKTI VINDDFEYII |
| 841 | SIFALLNSNA VINKIRNRFF ATSVWLNTSE YQNIIDILDE IMQLNTLRNE CITENWNLNL |
| 901 | EEFIQKMKEI EKDFDDFKIQ TKKEIFNNYY EDIKNNILTE FKDDINGCDV LEKKLEKIVI |
| 961 | FDDETKFEID KKSNILQDEQ RKLSNINKKD LKKKVDQYIK DKDQEIKSKI LCRIIFNSDF |
| 1021 | LKKYKKEIDN LIEDMESENE NKFQEIYYPK ERKNELYIYK KNLFLNIGNP NFDKIYGLIS |
| 1081 | NDIKMADAKF LFNIDGKNIR KNKISEIDAI LKNLNDKLNG YSKEYKEKYI KKLKENDDFF |
| 1141 | AKNIQNKNYK SFEKDYNRVS EYKKIRDLVE FNYLNKIESY LIDINWKLAI QMARFERDMH |
| 1201 | YIVNGLRELG IIKLSGYNTG ISRAYPKRNG SDGFYTTTAY YKFFDEESYK KFEKICYGFG |
| 1261 | IDLSENSEIN KPENESIRNY ISHFYIVRNP FADYSIAEQI DRVSNLLSYS TRYNNSTYAS |
| 1321 | VFEVFKKDVN LDYDELKKKF KLIGNNDILE RLMKPKKVSV LELESYNSDY IKNLIIELLT |
| 1381 | KIENTNDTL |

[0106] Exemplary Cas13b proteins include, but are not limited to:

| | Cas13b | Cas13b |
|---|---|---|
| Species | Accession | Size (aa) |
| Paludibacter propionicigenes | WP_013446107.1 | 1155 |
| WB4 | | |
| Prevotella sp. P5-60 | WP_044074780.1 | 1091 |
| Prevotella sp. P4-76 | WP_044072147.1 | 1091 |
| Prevotella sp. P5-125 | WP_044065294.1 | 1091 |
| Prevotella sp. P5-119 | WP_042518169.1 | 1091 |
| Capnocytophaga canimorsus Cc5 | WP_013997271.1 | 1200 |
| Phaeodactylibacter xiamenensis | WP_044218239.1 | 1132 |
| Porphyromonas gingivalis W83 | WP_005873511.1 | 1136 |
| Porphyromonas gingivalis F0570 | WP_021665475.1 | 1136 |
| Porphyromonas gingivalis | WP_012458151.1 | 1136 |
| ATCC 33277 | | |
| Porphyromonas gingivalis F0185 | ERJ81987.1 | 1136 |
| Porphyromonas gingivalis F0185 | WP_021677657.1 | 1136 |
| Porphyromonas gingivalis SJD2 | WP_023846767.1 | 1136 |
| Porphyromonas gingivalis F0568 | ERJ65637.1 | 1136 |
| Porphyromonas gingivalis W4087 | ERJ87335.1 | 1136 |
| Porphyromonas gingivalis W4087 | WP_021680012.1 | 1136 |
| Porphyromonas gingivalis F0568 | WP_021663197.1 | 1136 |
| Porphyromonas gingivalis | WP_061156637.1 | 1136 |
| Porphyromonas gulae | WP_039445055.1 | 1136 |
| Bacteroides pyogenes F0041 | ERI81700.1 | 1116 |
| Bacteroides pyogenes JCM 10003 | WP_034542281.1 | 1116 |
| Alistipes sp. ZOR0009 | WP_047447901.1 | 954 |
| Flavobacterium branchiophilum | WP_014084666.1 | 1151 |
| FL-15 | | |
| Prevotella sp. MA2016 | WP_036929175.1 | 1323 |
| Myroides odoratimimus | EHO06562.1 | 1160 |
| CCUG 10230 | | |
| Myroides odoratimimus | EKB06014.1 | 1158 |
| CCUG 3837 | | |
| Myroides odoratimimus | WP_006265509.1 | 1158 |
| CCUG 3837 | | |
| Myroides odoratimimus | WP_006261414.1 | 1158 |
| CCUG 12901 | | |
| Myroides odoratimimus | EHO08761.1 | 1158 |
| CCUG 12901 | | |
| Myroides odoratimimus | WP_058700060.1 | 1160 |
| (NZ_CP013690.1) | | |
| Bergeyella zoohelcum | EKB54193.1 | 1225 |
| ATCC 43767 | | |
| Capnocytophaga cynodegmi | WP_041989581.1 | 1219 |
| Bergeyella zoohelcum | WP_002664492.1 | 1225 |
| ATCC 43767 | | |
| Flavobacterium sp. 316 | WP_045968377.1 | 1156 |
| Psychroflexus torquis | WP_015024765.1 | 1146 |
| ATCC 700755 | | |
| Flavobacterium columnare | WP_014165541.1 | 1180 |
| ATCC 49512 | | |
| Flavobacterium columnare | WP_060381855.1 | 1214 |
| Flavobacterium columnare | WP_063744070.1 | 1214 |
| Flavobacterium columnare | WP_065213424.1 | 1215 |
| Chryseobacterium sp. YR477 | WP_047431796.1 | 1146 |
| Riemerella anatipestifer | WP_004919755.1 | 1096 |
| ATCC 11845 = DSM 15868 | | |
| Riemerella anatipestifer RA-CH-2 | WP_015345620.1 | 949 |
| Riemerella anatipestifer | WP_049354263.1 | 949 |
| Riemerella anatipestifer | WP_061710138.1 | 951 |
| Riemerella anatipestifer | WP_064970887.1 | 1096 |
| Prevotella saccharolytica F0055 | EKY00089.1 | 1151 |
| Prevotella saccharolytica | WP_051522484.1 | 1152 |
| JCM 17484 | | |
| Prevotella buccae ATCC 33574 | EFU31981.1 | 1128 |
| Prevotella buccae ATCC 33574 | WP_004343973.1 | 1128 |
| Prevotella buccae D17 | WP_004343581.1 | 1128 |
| Prevotella sp. MSX73 | WP_007412163.1 | 1128 |
| Prevotella pallens ATCC 700821 | EGQ18444.1 | 1126 |
| Prevotella pallens ATCC 700821 | WP_006044833.1 | 1126 |
| Prevotella intermedia | WP_036860899.1 | 1127 |
| ATCC 25611 = DSM 20706 | | |
| Prevotella intermedia | WP_061868553.1 | 1121 |
| Prevotella intermedia 17 | AFJ07523.1 | 1135 |
| Prevotella intermedia | WP_050955369.1 | 1133 |
| Prevotella intermedia | BAU18623.1 | 1134 |
| Prevotella intermedia ZT | KJJ86756.1 | 1126 |
| Prevotella aurantiaca JCM 15754 | WP_025000926.1 | 1125 |
| Prevotella pleuritidis F0068 | WP_021584635.1 | 1140 |
| Prevotella pleuritidis JCM 14110 | WP_036931485.1 | 1117 |
| Prevotella falsenii | WP_036884929.1 | 1134 |
| DSM 22864 = JCM 15124 | | |
| Porphyromonas gulae | WP_039418912.1 | 1176 |
| Porphyromonas sp. | WP_039428968.1 | 1176 |
| COT-052 OH4946 | | |
| Porphyromonas gulae | WP_039442171.1 | 1175 |
| Porphyromonas gulae | WP_039431778.1 | 1176 |
| Porphyromonas gulae | WP_046201018.1 | 1176 |
| Porphyromonas gulae | WP_039434803.1 | 1176 |
| Porphyromonas gulae | WP_039419792.1 | 1120 |
| Porphyromonas gulae | WP_039426176.1 | 1120 |
| Porphyromonas gulae | WP_039437199.1 | 1120 |
| Porphyromonas gingivalis TDC60 | WP_013816155.1 | 1120 |
| Porphyromonas gingivalis | WP_012458414.1 | 1120 |
| ATCC 33277 | | |
| Porphyromonas gingivalis | WP_058019250.1 | 1176 |
| A7A1-28 | | |
| Porphyromonas gingivalis | EOA10535.1 | 1176 |
| JCVI SC001 | | |
| Porphyromonas gingivalis W50 | WP_005874195.1 | 1176 |
| Porphyromonas gingivalis | WP_052912312.1 | 1176 |
| Porphyromonas gingivalis AJW4 | WP_053444417.1 | 1120 |
| Porphyromonas gingivalis | WP_039417390.1 | 1120 |
| Porphyromonas gingivalis | WP_061156470.1 | 1120 |

[0107] Exemplary wild type Bergeyella zoohelcum ATCC 43767 Cas13b (BzCas13b) proteins of the disclosure may comprise or consist of the amino acid sequence:

| (SEQ ID NO: 191) | |
|---|---|
| 1 | menktslgnn iyynpfkpqd ksyfagyfna amentdsvfr elgkrlkgke ytsenffdai |
| 61 | fkenislvey eryvkllsdy fpmarlldkk evpikerken fkknfkgiik avrdlrnfyt |
| 121 | hkehgeveit deifgvldem lkstvltvkk kkvktdktke ilkksiekql dilcqkkley |
| 181 | lrdtarkiee krrnqrerge kelvapfkys dkrddliaai yndafdvyid kkkdslkess |
| 241 | kakyntksdp qqeegdlkip iskngvvfll slfltkqeih afkskiagfk atvideatvs |
| 301 | eatvshgkns icfmatheif shlaykklkr kvrtaeinyg eaenaeqlsv yaketlmmqm |
| 361 | ldelskvpdv vyqnlsedvg ktfiedwney lkenngdvgt meeeqvihpv irkryedkfn |
| 421 | yfairfldef aqfptlrfqv hlgnylhdsr pkenlisdrr ikekitvfgr lselehkkal |
| 481 | fikntetned rehyweifpn pnydfpkeni svndkdfpia gsildrekqp vagkigikvk |
| 541 | llnqqyvsev dkavkahqlk qrkaskpsig niieeivpin esnpkeaivf ggqptaylsm |
| 601 | ndihsilyef fdkwekkkek lekkgekelr keigkelekk ivgkiqaqiq qiidkdtnak |
| 661 | ilkpyqdgns taidkeklik dlkqeqnilq klkdeqtvre keyndfiayq dknreinkvr |
| 721 | drnhkqylkd nlkrkypeap arkevlyyre kgkvavwlan dikrfmptdf knewkgeqhs |
| 781 | llqkslayye qckeelknll pekvfqhlpf klggyfqqky lyqfytcyld krleyisglv |
| 841 | qqaenfksen kvfkkvenec fkflkkqnyt hkeldarvqs ilgypifler gfmdekptii |
| 901 | kgktfkgnea lfadwfryyk eyqnfqtfyd tenyplvele kkqadrkrkt kiyqqkkndv |
| 961 | ftllmakhif ksvfkqdsid qfsledlyqs reerlgnqer arqtgerntn yiwnktvdlk |
| 1021 | lcdgkitven vklknvgdfi kyeydqrvqa flkyeeniew qaflikeske eenypyvver |
| 1081 | eieqyekvrr eellkevhli eeyilekvkd keilkkgdnq nfkyyilngl lkqlknedve |
| 1141 | sykvfnlnte pedvninqlk qeatdleqka fvltyirnkf ahnqlpkkef wdycqekygk |
| 1201 | iekektyaey faevfkkeke alik. |

[0108] In some embodiments of the compositions of the disclosure, the sequence encoding the first RNA binding protein comprises a sequence isolated or derived from a CasRX/Cas13d protein. CasRX/Cas13d is an effector of the type VI-D CRISPR-Cas systems. In some embodiments, the CasRX/Cas13d protein is an RNA-guided RNA endonuclease enzyme that can cut or bind RNA. In some embodiments, the CasRX/Cas13d protein can include one or more higher eukaryotes and prokaryotes nucleotide-binding (HEPN) domains. In some embodiments, the CasRX/Cas13d protein can include either a wild-type or mutated HEPN domain. In some embodiments, the CasRX/Cas13d protein includes a mutated HEPN domain that cannot cut RNA but can process guide RNA. In some embodiments, the CasRX/Cas13d protein does not require a protospacer flanking sequence. Also see WO Publication No. WO2019/040664 & US2019/0062724, which is incorporated herein by reference in its entirety, for further examples and sequences of CasRX/Cas13d protein, without limitation, specific reference is made to

[0109] Exemplary CasRX/Cas13d proteins may comprise or consist of the sequence: CasRX/Cas13d Gut_metagenome_contig6049000251:

| (SEQ ID NO: 54) | |
|---|---|
| LYLTSFGKGN AAVIEQKIEP ENGYRVTGMQ ITPSITVNKA TDESVRFRVK RKIAQKDEFI | 60 |
| ADNPMHEGRH RIEPSAGSDM LGLKTKLEKY YFGKEFDDNL HIQIIYNILD IEKILAVYST | 120 |
| NITA | 124. |

[0110] Exemplary CasRX/Cas13d proteins may comprise or consist of the sequence: CasRX/Cas13d Gut_metagenome_contig546000275:

| (SEQ ID NO: 57) | |
|---|---|
| MDSYRPKLYK LIDFCIFKHY HEYTEISEKN VDTLRAAVSE EQKESFYADE AKRLWGIFDK | 60 |
| QFLGFCKKIN VWVNGSHEKE ILGYIDKDAY RKKSDVSYFS KFLYAMSFFL DGKEINDLLT | 120 |
| TLINKFDNIA SFISTAKELD AEIDRILEKK LDPVTGKPLK GKNSFRNFIA NNVIENKRFI | 180 |
| YVIKFCNPKN VLKLVKNTKV TEFVLKRMPE SQIDRYYSSC IDTEKNPSVD KKISDLAEMI | 240 |
| KKIAFDDFRN VRQKTRTREE SLEKERFKAV IGLYLTVVYL LIKNLVNVNS RYVMAFHCLE | 300 |
| RDAKLYGINI GKNYIELTED LCRENENSRS AYLARNKRLR DCVKQNIDNA KNMKSKEK | 358. |

[0111] Exemplary CasRX/Cas13d proteins may comprise or consist of the sequence: CasRX/Cas13d Gut_metagenome_contig4114000374:

| (SEQ ID NO: 61) | |
|---|---|
| DTKINPQTWL YQLENTPDLD NEYRDTLDHF FDERFNEINE HFVTQNATNL CIMKEVFPDE | 60 |
| DFKSIADLYY DFIVVKSYKN IGFSIKKLRE KMLELPEAKR VTSTEMDSVR SKLYKLIDFC | 120 |
| IFKHYHEKPE TVEMIVSMLR AYTSEDMKE | 149. |

[0112] Exemplary CasRX/Cas13d proteins may comprise or consist of the sequence: CasRX/Cas13d Gut_metagenome_contig721000619:

| (SEQ ID NO: 67) | |
|---|---|
| KEGSTMAKNE KKKSTAKALG LKSSFVVNND IYMTSFGKGN KAVLEKKITE NTIENKSDTT | 60 |
| YFDVINRDPK GFTLEGRRIA DMTAFSNDPK YHVNVVNGKF LEDQLGARSE LEKKVFGRTF | 120 |
| DDNVHIQLIH NILDIEKIMA QYVSDIVYLL HNTIKRDMND DIMGYISIRN SFDDFCHPER | 180 |
| IPDRKAKDNL QKQHDIFFDE ILKCGRLAYF GNAFFEDGSD NKEIAKLKRY KEIYHIIALM | 240 |
| GSLRQSYFHG ENSDKNFQGP TWAYTLESNL TGKYKEFKDT LDKTFDERYE MISKDFGSTN | 300 |
| MVNLQILEEL LKMLYGNVSP | 320. |

[0113] Exemplary CasRX/Cas13d proteins may comprise or consist of the sequence: CasRX/Cas13d Gut_metagenome_contig2002000411:

| (SEQ ID NO: 69) | |
|---|---|
| EKQNKAKYQA IISLYLMVMY QIVKNMIYVN SRYVIAFHCL ERDSNQLLGR FNSRDASMYN | 60 |
| KLTQKFITDK YLNDGAQGCS KKVGNYLSHN ITCCSDELRK EYRNQVDHFA VVRMIGKYAA | 120 |
| DIGKFSTWFE LYHYVMQRII FDKRNPLSET ERTYKQLIAK HHTYCKDLVK ALNTPFGYNL | 180 |
| ARYKNLSIGE LFDRNNYNAK TKET | 204. |

[0114] Exemplary CasRX/Cas13d proteins may comprise or consist of the sequence: CasRX/Cas13d Gut_metagenome_contig13552000311:

| (SEQ ID NO: 71) | |
|---|---|
| LIDFLIYDLY YNRKPARIEE IVDKLRESVN DEEKESIYSA ETKYVYEALG KVLVRSLKKY | 60 |
| LNGATIRDLK NRYDAKTANR IWDISEHSKS GHVNCFCKLI YMMTLMLDGK EINDLLTTLV | 120 |
| NKFDNIASFI DVMDELGLEH SFTDNYKMFA DSKAICLDLQ FINSFARMSK IDDEKSKRQL | 180 |
| FRDALVVLDI GDKNEDWIEK YLTSDIFKRD ENGNKIDGEK RDFRNFIANN VIKSARFKYL | 240 |
| VKYSSADGMI KLKKNEKLIS FVLEQLPETQ IDRYYESCGL DCAVADRKVR IEKLTGLIRD | 300 |
| MRFDNFRGVN YSNDACKKDK QAKAKYQAII SLYLMVLYQI VKNMIYVNSR YVIAFHCLER | 360 |
| DLLFFNIELD NSYQYSNCNE LTEKFIKDKY MKEGALGFNM KAGRYLTKNI GNCSNELRKI | 420 |
| YRNQVDHFAV VRKIGNYAAD IASVGSWFE | 449. |

[0115] Exemplary CasRX/Cas13d proteins may comprise or consist of the sequence: CasRX/Cas13d Gut_metagenome_contig10037000527:

| (SEQ ID NO: 72) | |
|---|---|
| YMDQNFANSD AWAIHVYRNK IQHLDAVRHA DMYIGDIREF HSWFELYHYI IQRRIIDQYA | 60 |
| YESTPGSSRD GSAIIDEERL NPATRRYFRL ITTYKT | 96. |

[0116] Exemplary CasRX/Cas13d proteins may comprise or consist of the sequence: CasRX/Cas13d Gut_metagenome_contig238000329:

| (SEQ ID NO: 73) | |
|---|---|
| RYDKDRSKIY TMMDFVIYRY YIDNNNDSID FINKLRSSID EKSKEKLYNE EANRLWNKLK | 60 |
| EYMLYIKEFN GKLASRTPDR DGNISEFVES LPKIHRLLPR GQKISNFSKL MYLLTMFLDG | 120 |
| KEINDLLTTL INKFENIQGF LDIMPEINVN AKFEPEYVFF NKSHEIAGEL KLIKGFAQMG | 180 |
| EPAATLKLEM TADAIKILGT EKEDAELIKL AESLFKDENG KLLGNKQHGM RNFIGNNVIK | 240 |
| SKRFHYLIRY GDPAHLHKIA TNKNVVRFVL GRIADMQKKQ GQKGKNQIDR YYEVCVGNKD | 300 |
| IKKTIEEKID ALTDIIVNMN YDQFEKKKAV IENQNRGKTF EEKNKYKRDN AEREKFKKII | 360 |
| SLYLTVIYHI LKNIVNVNSR YILGFHCLER DKQLYIEKYN KDKLDGFVAL TKFCLGDEER | 420 |
| YEDLKAKAQA SIQALETANP KLYAKYMNYS DEEKKEEFKK QLNRERVKNA RNAYLKNIKN | 480 |
| YIMIRLQLRD QTDSSGYLCG EFRDKVAHLE VARHAHEYI | 519. |

[0117] Exemplary CasRX/Cas13d proteins may comprise or consist of the sequence: CasRX/Cas13d Gut_metagenome_contig2643000492:

| (SEQ ID NO: 84) | |
|---|---|
| NGEIVSLAEK EAFSAKIADK NIGCKIENKQ FRHPKGYDVI ADNPIYKGSP RQDMLGLKET | 60 |
| LEKRYFSPSD SIDNVRVQVA HNILDIEKIL AEYITNAVYS FDNIAGFGKD IIGDDFSPVY | 120 |
| TYDKFEKSDR YEYFKNLLNN SRLGYYGQAF FECDDSKENK KKKDAIKCYN IIALLSGLRH | 180 |
| W | 181. |

[0118] Exemplary CasRX/Cas13d proteins may comprise or consist of the sequence: CasRX/Cas13d Gut_metagenome_contig874000057:

| (SEQ ID NO: 85) | |
|---|---|
| MSKNKESYAK GMGLKSALVS GSKVYMTSFE GGNDAKLEKV VENSEIVSLA EKESFSAEIF | 60 |
| KKNIGCKIEN KKFKHPKRYD VIADNPLYKG SVRQDMLGLK ETLEKRYFNS ADGTDNVCIQ | 120 |
| VIHNILDIEK ILAEYITNAV YSFDNIAGFG EDIIGMGGFK PIYTYKQFKE PDKYNKKFDD | 180 |
| ILNNSRLGYY GKAFFEKNDL KHNPNKKKRD KNPYILKYDN ECYYIIALLS GLRHWNIHSH | 240 |
| AKDDLVSYRW LYNLDSILNR EYISTLNYLY DDIADELTES FSKNSSANVN YIAETLNIDP | 300 |
| SEFAQQYFRF SIMKEQKNMG FNVSKLREIM LDRKELSDIR DNHRVFDSIR SKLYTMMDFV | 360 |
| IYRYYIEEAA KTEAENRNLP ENEKKISEKD FFVINLRGSF DENQKEKLYI EEAKRLWEKL | 420 |
| KDIMLKIKEF RGEKVKEYKK | 440. |

[0119] Exemplary CasRX/Cas13d proteins may comprise or consist of the sequence: CasRX/Cas13d Gut_metagenome_contig4781000489:

| (SEQ ID NO: 86) | |
|---|---|
| LDKQLDYEYI RTLNYMFNDI ADELTRTFSK NSAANVNYIA ETLNIDPNKF AEQYFRFSIM | 60 |
| KEQKNLGFNL TKLRESMLDR RELSDIRDNH NVFDSIRPKL YTMMDFVIYK HYIDEAKKTE | 120 |
| AENKSLPDDR KNLSEKD | 137. |

[0120] Exemplary CasRX/Cas13d proteins may comprise or consist of the sequence: CasRX/Cas13d Gut_metagenome_contig12144000352:

| (SEQ ID NO: 87) | |
|---|---|
| RMGEPVANTK RVMMIDAVKI LGTDLSDDEL KEMADSFFKD SDGNLLKKGK HGMRNFITNN | 60 |
| VIKNKRFHYL IRYGDPAHLH EIAKNEA | 87. |

[0121] Exemplary CasRX/Cas13d proteins may comprise or consist of the sequence: CasRX/Cas13d Gut_metagenome_contig5590000448:

| (SEQ ID NO: 88) | |
|---|---|
| VHNNEEKDLI KYTWLYNLDK YLDAEYITTL NYMYNDIGDE LTDSFSKNSA ANINYIAETL | 60 |
| GIDPKTFAEQ YFRFSIMKEQ KNLGFNLTKL REVMLDRKDM SEIRENHNDF DSIRAKVYTM | 120 |
| MDFVIYRYYI EEAAKVNAAN KSLPDNEKSL SEKDIFVISL RGSFNEDQKD RLYYDEAQRL | 180 |
| WSKVGKLMLK IKKFRGKDTR KYKNMGTPRI RRLIPEGRDI STFSKLMYAL TMFLDGKEIN | 240 |
| DLLTTLINKF DNIQSFLKVM PLIGVNAKFA EEYSFFNNSE KIADELRLIK SFARMGEPVA | 300 |
| DARRAMYIDA IRILGTDLSD DELKALADSF SLDENGNKLG KGKHGMRNFI INNVITNKRF | 360 |
| HYLIRYGNPV HLHEIAKNEA VVKFVLGRIA DIQKKQGQNG KNQIDRYYET CIGK | 414. |

[0122] Exemplary CasRX/Cas13d proteins may comprise or consist of the sequence: CasRX/Cas13d Gut_metagenome_contig525000349:

| (SEQ ID NO: 89) | |
|---|---|
| MSKKENRKSY VKGLGLKSTL VSDSKVYLTT FADGSNAKLE KCVENNKIIC ISNDKEAFAA | 60 |
| SIANKNVGYK IKNDEKFRHP KGYDIISNNP LLHNNSVQQD MLGLKNVLEK RYFGKSSGGD | 120 |
| NNLCIQIIHN IIDIEKILSE YIPNVVYAFN NIAGFKDEHN NIIDIIGTQT YNSSYTYADF | 180 |
| SKDKSDKKYI EFQKLLKNKR LGYWGKAFFT GQGNNAKVRQ ENQCFHIIAL LISLRNWATH | 240 |
| SNELDKHTKR TWLYKLDDTN ILNAEYVKTL NYLYDTIADE LTKSFSKNGA VNVNYLAKKY | 300 |
| NIKDDLPGFS EQYFRFSIMK EQKNLGFNIS KLRENMLDFK DMSVI | 345. |

[0123] Exemplary CasRX/Cas13d proteins may comprise or consist of the sequence: CasRX/Cas13d Gut_metagenome_contig7229000302:

| (SEQ ID NO: 90) | |
|---|---|
| KKISSLTKFC LGESDEKKLK ALAKKSLEEL KTTNSKLYEN YIKYSDERKA EEAKRQINRE | 60 |
| RAKTAMNAHL RNTKWNDIMY GQLKDLADSK SRICSEFRNK AAHLEVARYA HMYINDISEV | 120 |
| KSYFRLYHYI MQRRIIDVIE NNPKAKYEGK VKVYFEDVKK NKKYNKNLLK LMCVPFGYCI | 180 |
| PRFKNLSIEQ MFDMNETDNS DKKKEK | 206. |

[0124] Exemplary CasRX/Cas13d proteins may comprise or consist of the sequence: CasRX/Cas13d Gut_metagenome_contig3227000343:

| (SEQ ID NO: 91) | |
|---|---|
| IGDISEVNSY FQLYHYIMQR ILIDKIGSKT TGKAKEYFDS VIVNKKYDDR LLKLLCSPLG | 60 |
| YCLTRYKDLS IEALFDMNEA AKYDKLNKER KNKKK | 95. |

[0125] Exemplary CasRX/Cas13d proteins may comprise or consist of the sequence: CasRX/Cas13d Gut_metagenome_contig7030000469:

| (SEQ ID NO: 92) | |
|---|---|
| SIRSKLYTMM DFVIYRYYIE ESAKAAAENK PSESDSFVIR LRGSFNENQK EELYIEEAER | 60 |
| LWKKFGEIML KIKEFRGEKV KEYKKEVPRI ERILPHGKDI SAFSKLMYML SMFLD | 115. |

[0126] Exemplary CasRX/Cas13d proteins may comprise or consist of the sequence: CasRX/Cas13d gut_metagenome_P17E0k2120140920, c87000043:

| (SEQ ID NO: 93) | |
|---|---|
| MYFSKMIYML TYFLDGKEIN DLLTTLISKF DNIKEFLKIM KSSAVDVECE LTAGYKLFND | 60 |
| SQRITNELFI VKNIASMRKP AASAKLTMFR DALTILGIDD KITDDRISEI LKLKEKGKGI | 120 |
| HGLRNFITNN VIESSRFVYL IKYANAQKIR EVAKNEKVVM FVLGGIPDTQ IERYYKSCVE | 180 |
| FPDMNSSLEA KRSELARMIK NISFDDFKNV KQQAKGRENV AKERAKAVIG LYLT | 234. |

[0127] Exemplary CasRX/Cas13d proteins may comprise or consist of the sequence: CasRX/Cas13d Metagenomic hit (no protein accession): contig emb|OBVH01003037.1, human gut metagenome sequence (also found in WGS contigs emb|OBXZ01000094.1| and emb|OBJF01000033.1|):

| (SEQ ID NO: 94) | |
|---|---|
| MAKKKRITAK ERKQNHRELL MKKADSNAEK EKAKKPVVEN KPDTAISKDN TPKPNKEIKK | 60 |
| SKAKLAGVKW VIKANDDVAY ISSFGKGNNS VLEKRIMGDV SSNVNKDSHM YVNPKYTKKN | 120 |
| YEIKNGFSSG SSLVTYPNKP DKNSGMDALC LKPYFEKDFF GHIFTDNMHI QAIYNIFDIE | 180 |
| KILAKHITNI IYTVNSFDRN YNQSGNDTIG FGLNYRVPYS EYGGGKDSNG EPKNQSKWEK | 240 |
| RDNFIKFYNE SKPHLGYYEN IFYDHGEPIS EEKFYNYLNI LNFIRNNTFH YKDDDIELYS | 300 |
| ENYSEEFVFI NCLNKFVKNK FKNVNKNFIS NEKNNLYIIL NAYGKDTENV EVVKKYSKEL | 360 |
| YKLSVLKTNK NLGVNVKKLR ESAIEYGYCP LPYDKEKEVA KLSSVKHKLY KTYDFVITHY | 420 |
| LNSNDKLLLE IVETLRLSKN DDEKENVYKK YAEKLFKADD VINPIKAISK LFARKGNKLF | 480 |
| KEKIIIKKEY IEDVSIDKNI YDFTKVIFFM TCFLDGKEIN DLLTNIISKL QVIEDHNNVI | 540 |
| KFISNNKDAV YKDYSDKYAI FRNAGKIATE LEAIKSIARM ENKIENAPQE PLLKDALLSL | 600 |
| GVSDDTKVLE NTYNKYFDSK EKTDKQSQKV STFLMNNVIN NNRFKYVIKY INPADINGLA | 660 |
| KNRYLVKFVL SKIPEEQIDS YYKLFSNEEE PGCEEKIKLL TKKISKLNFQ TLFENNKIPN | 720 |
| VEKEKKKAII TLYFTIVYIL VKNLVNINGL YTLALYFVER DGYFYKDICG KKDKKKSYND | 780 |
| VDYLLLPEIF SGSKYREETK NLKLPKEKDR DIMKKYLPND KDREKYNKFF TAYRNNIVHL | 840 |
| NIIAKLSELT KNIDKDINSY FDIYHYCTQR VMFNYCKEKN DVVLAKMKDL AHIKSDCNEF | 900 |
| SSKHTYPFSS AVLRFMNLPF AYNVPRFKNL SYKKFFDKQ. | 939 |

[0128] Exemplary CasRX/Cas13d proteins may comprise or consist of the sequence: CasRX/Cas13d Metagenomic hit (no protein accession): contig tpg|DJXD01000002.1| (uncultivated Ruminococcus assembly, UBA7013, from sheep gut metagenome):

| (SEQ ID NO: 95) | |
|---|---|
| MKKQKSKKTV SKTSGLKEAL SVQGTVIMTS FGKGNMANLS YKIPSSQKPQ NLNSSAGLKN | 60 |
| VEVSGKKIKF QGRHPKIATT DNPLFKPQPG MDLLCLKDKL EMHYFGKTFD DNIHIQLIYQ | 120 |
| ILDIEKILAV HVNNIVFTLD NVLHPQKEEL TEDFIGAGGW RINLDYQTLR GQTNKYDRFK | 180 |
| NYIKRKELLY FGEAFYHENE RRYEEDIFAI LTLLSALRQF CFHSDLSSDE SDHVNSFWLY | 240 |
| QLEDQLSDEF KETLSILWEE VTERIDSEFL KTNTVNLHIL CHVFPKESKE TIVRAYYEFL | 300 |
| IKKSFKNMGF SIKKLREIML EQSDLKSFKE DKYNSVRAKL YKLFDFIITY YYDHHAFEKE | 360 |
| ALVSSLRSSL TEENKEEIYI KTARTLASAL GADFKKAAAD VNAKNIRDYQ KKANDYRISF | 420 |
| EDIKIGNTGI GYFSELIYML TLLLDGKEIN DLLTTLINKF DNIISFIDIL KKLNLEFKFK | 480 |
| PEYADFFNMT NCRYTLEELR VINSIARMQK PSADARKIMY RDALRILGMD NRPDEEIDRE | 540 |
| LERTMPVGAD GKFIKGKQGF RNFIASNVIE SSRFHYLVRY NNPHKTRTLV KNPNVVKFVL | 600 |
| EGIPETQIKR YFDVCKGQEI PPTSDKSAQI DVLARIISSV DYKIFEDVPQ SAKINKDDPS | 660 |
| RNFSDALKKQ RYQAIVSLYL TVMYLITKNL VYVNSRYVIA FHCLERDAFL HGVTLPKMNK | 720 |
| KIVYSQLTTH LLTDKNYTTY GHLKNQKGHR KWYVLVKNNL QNSDITAVSS FRNIVAHISV | 780 |
| VRNSNEYISG IGELHSYFEL YHYLVQSMIA KNNWYDTSHQ PKTAEYLNNL KKHHTYCKDF | 840 |
| VKAYCIPFGY VVPRYKNLTI NELFDRNNPN PEPKEEV. | 877 |

[0129] An exemplary direct repeat sequence of CasRX/Cas13d Metagenomic hit (no protein accession): contig tpg|DJXD01000002.1| (uncultivated Ruminococcus assembly, UBA7013, from sheep gut metagenome) (SEQ ID NO: 95) comprises or consists of the nucleic acid sequence:

### CasRX/Cas13d DR:

(SEQ ID NO: 96)

| | |
|---|---|
| caactacaac cccgtaaaaa tacggggttc tgaaac. | 36 |

[0131] Exemplary CasRX/Cas13d proteins may comprise or consist of the sequence: CasRX/Cas13d Metagenomic hit (no protein accession): contig OGZC01000639.1 (human gut metagenome assembly):

| (SEQ ID NO: 97) | |
|---|---|
| MKKKNIRATR EALKAQKIKK SQENEALKKQ KLAEEAAQKR REELEKKNLA QWEETSAEGR | 60 |
| RSRVKAVGVK SVFVVGDDLY LATFGNGNET VLEKKITPDG KITTFPEEET FTAKLKFAQT | 120 |
| EPTVATSIGI SNGRIVLPEI SVDNPLHTTM QKNTIKRSAG EDILQLKDVL ENRYFDRSFN | 180 |
| DDLHIRLIYN ILDIEKILAE YTTNAVFAID NVSGCSDDFL SNFSTRNQWD EFQNPEQHRE | 240 |
| HFGNKDNVIC SVKKQQDLFF NFFKNNRIGY FGKAFFHAES ERKIVKKTEK EVYHILTLIG | 300 |
| SLRQWITHST EGGISRLWLY QLEDALSREY QETMNNCYNS TIYGLQKDFE KTNAPNLNFL | 360 |
| AEILGKNASE LAEPYFRFII TKEYKNLGFS IKTLREMLLD QPDLQEIREN HNVYDSIRSK | 420 |
| LYKMIDFVLV YAYSNERKSK ADALASNLRS AITEDAKKRI YQNEADQLWT SYQELFKRIR | 480 |
| GFKGAQVKEY SSKNMPIPIQ KQIQNILKPA EQVTYFTKLM YLLTMFLDGK EINDLLTTLI | 540 |
| NKFDNISSLL KTMEQLELQT TFKEDYTFFQ QSSRLCKEIT QLKSFARMGN PISNLKEVMM | 600 |
| VDAIQILGTE KSEQELQSMA CFFFRDKNGK KLNTGEHGMR NFIGNNVISN TRFQYLIRYG | 660 |
| NPQKLHTLSQ NETVVRFVLS RIAKNQRVQG MNGKNQIDRY YETCGGTNSW SVSEEEKINF | 720 |
| LCKILTNMSY DQFQDVKQSG AEITAEEKRK KERYKAIISL YLTVLYQLIK NLVNINARYI | 780 |
| IAFHCLERDA ILYSSKFNTS INLKKRYTAL TEMILGYETD EKARRKDTRT VYEKAEAAKN | 840 |
| RHLKNVKWNC KTRENLENAD KNAIVAFRNI VAHLWIIRDA DRFITGMGAM KRYFDCYHYL | 900 |
| LQRELGYILE KSNQGSEYTK KSLEKVQQYH SYCKDFLHML CLPFAYCIPR YKNLSIAELF | 960 |
| DRHEPEAEPK EEASSVNNSQ FITT. | 984 |

[0132] Exemplary CasRX/Cas13d proteins may comprise or consist of the sequence: CasRX/Cas13d Metagenomic hit (no protein accession): contig emb|OHBM01000764.1 (human gut metagenome assembly):

| (SEQ ID NO: 98) | |
|---|---|
| XXXXXXXXXX XXXXXXXXXX XXXXXXXXXX XXXXXXXXXX XXXXXXXXXX XXXXXXXXXX | 60 |
| XXXXXXXXXX XXXXXXXXXX XXXXXXXXXX XXXXXXXXXX XXXXXXXXXX XXXXXXXXXX | 120 |
| XXXXXXXXXX XXXXXXXXXX XXXXXXXXXX XXXXXXXXXX XXXXXXXXXX XXXXXXXXXX | 180 |
| XXXXXXXXXX XXXXXXXXXX XXXXXXXXXX XXXXXXXXXX XXHPLQKRYR YLTSTNLKSF | 240 |
| ETYKNNLVNK KKFDLDRVKK IPQLAYFGSA FYNTPEDTSA KITKTKIKSN EEIYYTFMLL | 300 |
| STARNFSAHY LDRNRAKSSD AEDFDGTSVI MYNLDNEELY KKLYNKKVHM ALTGMKKVLD | 360 |
| ANFNKKVEHL NNSFIKNSAK DFVILCEVLG IKSRDEKTKF VKDYYDFVVR KNYKHLGFSV | 420 |
| KELRELLFAN HDSNKYIKEF DKISNKKFDS VRSRLNRLAD YIIYDYYNKN NAKVSDLVKY | 480 |
| LRAAADDEQK KKIYLNESIN LVKSGILERI KKILPKLNGK IIGNMQPDST ITASMLHNTG | 540 |
| KDWHPISENA HYFTKWIYTL TLFMDGKEIN DLVTTLINKF DNIASFIEVL KSQSVCTHFS | 600 |
| EERKMFIDSA EICSELSAMN SFARMEAPGA SSKRAMFVEA ARILGDNRSK EELEEYFDTL | 660 |
| FDKSASKKEK GFRNFIRNNV VDSNRFKYLT RYTDTSSVKA FSNNKALVKF AIKDIPQEQI | 720 |
| LRYYNSCFGA SERYYNDGMS DKLVEAIGKI NLMQFNGVIQ QADRNMLPEE KKKANAQKEK | 780 |
| YKSIIRLYLT VCYLFFKNLV YVNSRYYSAF YNLEKDRSLF EINGELKPTG KFDEGHYTGL | 840 |
| VKLFIDNGWI NPRASAYLTV NLANSDETAI RTFRNTAEHL EALRNADKYL NDLKQFDSYF | 900 |
| EIYHYITQRN IKEKCEMLKE QTVKYNNDLL KYHGYSKDFV KALCVPFGYN LPRFKNLSID | 960 |
| ALFDKNDKRE KLKKGFED. | 978 |

[0133] Exemplary CasRX/Cas13d proteins may comprise or consist of the sequence: CasRX/Cas13d Metagenomic hit (no protein accession): contig emb|OHCP01000044.1 (human gut metagenome assembly):

| (SEQ ID NO: 99) | |
|---|---|
| MAKKITAKQK REEKERLNKQ KWAKNDSVII VPETKEEIKT GEIQDNNRKR SRQKSQAKAM | 60 |
| GLKAVLSFDN KIAIASFVSS KNAKSSHIER ITDKEGTTIS VNSKMFESSV NKRDINIEKR | 120 |
| ITIEEPQQDG TIKKEEKGVK STTCNPYFKV GGKDYIGIKE IAEEHFFGRA FPNENLRVQI | 180 |
| AYNIFDVQKI LGTFVNNIIY SFYNLSRDEV QSDNDVIGML YSISDYDRQK ETETFLQAKS | 240 |
| LLKQTEAYYA YFDDVFKKNK KPDKNKEGDN SKQYQENLRH NFNILRVLSF LRQICMHAEV | 300 |
| HVSDDEGCTR TQNYTDSLEA LFNISKAFGK KMPELKTLID NIYSKGINAI NDEFVKNGKN | 360 |
| NLYILSKVYP NEKREVLLRE YYNFVVCKEG SNIGISTRKL KETMIAQNMP SLKEENTYRN | 420 |
| KLYTVMNFIL VRELKNCATI REQMIKELRA NMDEEEGRDR IYSKYAKEIY LYVKDKLKLM | 480 |
| LNVFKEEAEG IIIPGKEDPV KFSHGKLDKK EIESFCLTTK NTEDITKVIY FLCKFLDGKE | 540 |
| INELCCAMMN KLDGISDLIE TAKQCGEDVE FVDQFKCLSK CATMSNQIRI VKNISRMKKE | 600 |
| MTIDNDTIFL DALELLGRKI EKYQKDKNGD YVKDEKGKKV YTKDYNNFQD MFFEGKNHRV | 660 |
| RNFVSNNVIK SKWFSYVVRY NKPAECQALM RNSKLVKFAL DELPDSQIEK YYISVFGEKS | 720 |
| SSSNEEMRRE LLKKLCDFSV RGFLDEIVLL SEDEMKQKDK FSEKEKKKSL IRLYLTIVYL | 780 |
| ITKSMVKINT RFSIACATYE RDYILLCQSE KAERAWEKGA TAFALTRKFL NHDKPTFEQY | 840 |
| YTREREISAM PQEKRKELRK ENDQLLKKTH YSKHAYCYIV DNVNNLTGAV ANDNGRGLPC | 900 |
| LSEKNDNANL FLEMRNKIVH LNVVHDMVKY INEIKNITSY YAFFCYVLQR MIIGNNSNEQ | 960 |
| NKFKAKYSKT LQEFGTYSKD LMWVLNLPFA YNLPRYKNLS NEQLFYDEEE RMEKIVGRKN | 1020 |
| DSR. | 1023 |

[0134] Exemplary CasRX/Cas13d proteins may comprise or consist of the sequence: CasRX/Cas13d Metagenomic hit (no protein accession): contig emb|OGDF01008514.1| (human gut metagenome assembly):

| (SEQ ID NO: 100) | |
|---|---|
| MTETKPKRED IAKTPAAKSR SKAAGLKSTF AVNGSVLLTS FGRGNDAVPE KLITEKAVSE | 60 |
| INTVKPRFSV EKPATSYSSS FGIKSHISAT ADNPLAGRAP VGEDAIHAKE VLEQRVFGKT | 120 |
| FSDDNIHIQL IYNILDIRKI LSTYANNVVF TINSMRRLDE YDREQDYLGY LYTGNSYERL | 180 |
| LDIADKYAVD GEDWRNTAAG ISNDFEKKQF QTINGFWDLL DMIEPYMCYF SEAFFCETTV | 240 |
| KDPDSGRIVP CLEQRSDGDI YNILRILSIV RQTCMHDNAS MRTVMFTLGQ NSVRDRKNGF | 300 |
| DELAELLDYL YDEKIDIVNR DFLRNQKNNI ELLSRIYGSS ADSPERDRLV QNFYDFRVLS | 360 |
| QDKNLGFSIK KLREKLLDSP ALSVVRSKKY DTMRSKIYSL IDFMIYRKFS ENHVAVDDFV | 420 |
| EELRSLLTED EKESAYSRWA ETLINDGFAQ EILVKLLPQT DPAVIGKIKG KKLLNDSIAG | 480 |
| IKLKKDASFF TKIINVLCMF QDGKEINELV SSLVNKFANI QSFVDVMRSQ GIDSGFTADY | 540 |
| AMFAESGRIS RELHILKGIA RMQHSIAGLG DVKIYGSDDK FHGVSRRVYT DAAYILGFGE | 600 |
| RSEDNDGYVD DYVSSKLLGG ADKNLRNFIT NNVIKNRRFL YTVRYMNPKR AKKLVQNDAL | 660 |
| VVLALSGIPE TQIDRYYKSC IEKRSFNPDL NEKIAALSEM ITTLKIDDFE DVKQNPEKNA | 720 |
| NYEAKKNQRI SKERYKACIG LYLTVLYLIC KNLVKINARY SIAIGCLERD TQLHGVDFKG | 780 |
| AAYMTRDVFI AKGWINPKKP TVKSIKEQYA FLTPYIFTTY RNMIAHLAAV TNAYKYIPQM | 840 |
| DRFKSWFHLY HTVIQHSLIQ QYEYDRDYGR KGAPVVSERV LQLLEQCREH SNYSRDLLHI | 900 |
| LNLPFGYNLP RYLNLSSEKY FDANAI. | 926 |

[0135] Exemplary CasRX/Cas13d proteins may comprise or consist of the sequence: CasRX/Cas13d Metagenomic hit (no protein accession): contig emb|OGPN01002610.1 (human gut metagenome assembly):

| (SEQ ID NO: 101) | |
|---|---|
| MAKKITAKQK REEKERLNKQ KWAKQDTPVV PKSKTEEKPV AASDDKLLKT TQVKKVQTKS | 60 |
| KAKAMGLKTV LSFDDKIAIA SFVNDKKTKL PHIERITDKS GTTIHENARM FDSSVDEQNV | 120 |
| NIEKRMTIEE KQNDGTFKKD EKDVKATICN PYFKTCGKDY IGIKDVAEKY FFGKTFPNEN | 180 |
| LRVQIAYNVF DIQKILGTYV NNIIYSFYNL RRDGKSDVDI IGSLYAFADF DNQLKDKPAF | 240 |
| REAKDLLKNT EAYFSYFGDV FKKSKKGKKD ENNEDYEKNL RHNFNVLRVL SFLRQICTHA | 300 |
| YVKCTGGAKN NGDSTKVEAE SLDALFNITE YFAKTAPELS KTINEIYKEG IDRINNDFVT | 360 |
| NGKNNLYILS KVYPDMQRNE LVKKYYQFVV CKEGNNVGIN TRKLKESIIS QHPWITTPQD | 420 |
| NNKANDYESC RHKLYTIMCF ILVAELDAHE SIRDNMVAEL RANMDGDDGR DAIYEKYAKD | 480 |
| IYHIVKDKLL AMQKVFDEEL VPVKVEGKND PQQFTHGKLG KKEIESFCLS DKNTSDIAKV | 540 |
| VYFLCNFLDG KEINELCCAM MNKFDGIGDL IDTAKQCGEE VKFIEEFACL SNCRKITNDI | 600 |
| RVAKSISKMK NKVNIDNDII YLDAIELLGR KIEKYQKDEN GKILLGTDGK RLYTQEYKYF | 660 |
| NDMFFNAGNH KVRNFIANNV MQSKWFFYVV RYNKPAECQI IMRNKTLVKF TLDDLPDMQI | 720 |
| QRYYSSVFGD NNMPAVDEMR KRLLDKINQF SVRGFLDELD EIVLMSDEES KRNKSSEKEQ | 780 |
| KKSLIRLYLT IAYLITKSMV KINTRFSIAC AMYERDYALL CQSEMKGGPW DGGAQALAVT | 840 |
| RKFLNHDREV FDRYCAREAE IARLPSEERK PLRKANDKLL KQTHYTNHSY TYIVNNLNSF | 900 |
| TDIDYCAKDV GLPAPNDKND NASILGEMRN DIAHLNIVHD MVKYIEELKD ISSYYAFYCY | 960 |
| VLQRRLVGKD PNCQNKFKAK YAKELNDYGT YNKNLMWMLN LPFAYNLPRY KNLSSEFLFY | 1020 |
| DMEYNKKDDE. | 1030 |

[0136] Exemplary CasRX/Cas13d proteins may comprise or consist of the sequence: CasRX/Cas13d Metagenomic hit (no protein accession): from contig emb|OBLI01020244 and emb|OBLI01038679 (from pig gut metagenome):

| (SEQ ID NO: 102) | |
|---|---|
| MAKKITAKQR REERERQNKQ KWAKKQADAT AVFECEADIK PADSKDEDCT NIYIKREKKK | 60 |
| TQAKAMGLKT VLGFDNKIAI ASFMSSKDSK SSHIERITDP NGKTIREDVR MFDSNVDECS | 120 |
| INLEKRMTVE ERQKDGTIKK DEKDVKSTIC NPYSNECGKD YIGIKSVAEE LFFGRTFPND | 180 |
| NLRVQIAYNI FDIQKILGTY INNIIYSFYN LSRDESQSDN DVIGTLYMLK DFDGQKETDT | 240 |
| FRQARALLER TEAYYSYFDN VFKKIDKNKK KSDDCKRERN EILRYNFNVL RVLSFLRQIC | 300 |
| AHAQVKISNE HDREKGGGLV DSLDALFNIS RFFDAVAPEL NEVINSVYSK GIDDINDNFV | 360 |
| KNGKNNFYIL SKIYPEVARE DLLREYYYFV VSKEGNNIGI STKKLKEAII VQDMSYIKSE | 420 |
| DYDTYRNKLY TVLCFILVKE LNERTTIREQ MVADLRANMN GDIGREDIYS KYAKIIYAQV | 480 |
| KPRFDTMKSA FEEEAKDVIV PDKKKPVKFS HGKLDKNEIE RFCITSANTD SVAKIIYFLC | 540 |
| KFLDGKEINE LCCAMMNKLD GINDLIETAE QCGAKVEFVD KFSVLSNCET ISDQIRIVKS | 600 |
| ISKMKKEIAI DNDTIFLDAL ELLGRKIDKY KKDATGKYLK DENGKYLYSK EYDDFQYMFF | 660 |
| KDSHRVRNFI SNSVIKSKWF SYIVRYNQPS ECRAIMKNKT LVKFALDELP DLQIQRYFVA | 720 |
| LYGDEDLPSY GEMRKILLKK LHDFSIKGFL DEIVLLSDLD MESQDKYCEK EQKKSLFRLY | 780 |
| LTIAYLITKS MVKINTRFSI ACATYERDYA LLCASNKQER AWSSGATALA LTRRFLNQDK | 840 |
| LIFEKHYARE GEISKLPKEE RKAMRKVNDQ LLKRTHFSKH SYCYIVDNVN RLTGGECRTD | 900 |
| KRVLPVLNEK NDNAGILLDF RKTIAHLNVV HKMVDYVDEI KGITSYYAFF CYVLQRMLVG | 960 |
| NNLNEKNAIK EKYSATVKSF GTYSKDFMWL INLPFAYNLP RYKNLSNEQL FYDEEERNET | 1020 |
| EEQIDRL. | 1027 |

[0137] Exemplary CasRX/Cas13d proteins may comprise or consist of the sequence: CasRX/Cas13d Metagenomic hit (no protein accession): contig OIZX01000427.1:

| (SEQ ID NO: 103) | |
|---|---|
| MAKKKKTARQ LREEMQQQRK QAIQKQQEQR QEKAAAARET AAPEQPAAAP VPKRQRKSLA | 60 |
| KAAGLKSNFI LDPQRRTTVM TAFGQGSTAI LEKQIVDRAI SDLQPVQQFQ VEPASAAKYR | 120 |
| LKNSRVRFPN VTADDPLYRR KDGGFVPGMD ALRRKNVLEQ RFFGKSFADN IHIQMIYSIL | 180 |
| DIHKILAAAS GHIVHLLNIV NGSKDRDFIG MLAAHVLYNE LNEEAKRSIA DFCKSPRLIY | 240 |
| YSAAFYETLD NGKSERRSNE DIFNILALMT CLRNFSSHHS IAIKVKDYSA AGLYNLRRLG | 300 |
| PDMKKMLDTF YTEAFIQLNQ SFQDHNTTNL TCLFDILNIS DSARQKQLAE EFYRYVVFKE | 360 |
| QKNLGFSVRK LREEMLLLPD AAVIADKRYD TCRSKLYNLM DFLILRVYRT GRADRCDKLP | 420 |
| EALRAALTDE EKAVVYHKEA LSLWNEMRTL ILDGLLPQMT PENLSRLSGQ KRKGELSLDD | 480 |
| AMLKECLYEP GPVPEDAAPE EANAEYFCRM IYLATLFMDG KEINTLLTTL ISKFENIAAF | 540 |
| LQTMEQLNIE AELGPEYAMF TRSRAVAEQL RVINSFALMK KPQVNAKQQL YRAAVTLLGT | 600 |
| EDPDGVTDEM LCIDPVTGKM LPPNQRHHGD TGLRNFIANN VVESRRFQYL IRYSDPAQLH | 660 |
| QLASNKKLVR FVLSSIPDTQ INRYYETCGQ TRLAGRAAKV EFLTDMIAAI RFDQFRDVNQ | 720 |
| KERGANTQKE RYKAMLGLYQ TVLYLAVKNL VNINARYVMA FHCVERDMFL YDGELTDPKG | 780 |
| ESVSAFLAVN GKKGVQPQYL LLTQLFIRRD YLKRSACEQI QHNMENISDR LLREYRNAVA | 840 |
| HLNVIAHLAD YSADMREITS YYGLYHYLMQ RHLFKRHAWQ IRQPERPTEE EQKLIEQEQK | 900 |
| QLAWEKALFD KTLQYHSYNK DLVKALNAPF GYNLARYKNL SIEPLFSKEA APAAEIKATH | 960 |
| A. | 961 |

[0138] Exemplary CasRX/Cas13d proteins may comprise or consist of the sequence: CasRX/Cas13d Metagenomic hit (no protein accession): contig OCTW011587266.1:

| (SEQ ID NO: 104) | |
|---|---|
| MKQNDRENNN KIKKSAAKAV GVKSLARLSD GSTVVSSFGK GAAAELESLI TGGEIRKLSD | 60 |
| KAILEITDDT QNKNAYNVKS SRIPNLTART DKLSDKSGMD DLGFKRELEL EVFGQCFDDS | 120 |
| IHIQIAHAVF DIQKSLAAVI PNVLYTLNNL DRSYSTDNTS DKKDIIGNTL NYQHSYESFN | 180 |
| VEKRGEFTEY YNAAKDRFSY FPDILCVLEK VNGKDRYQPK SEKDAFNVLS SVNMLRNSLF | 240 |
| HFAPKSNDGK ARIAVFKNQF DSDFSHITST VNKIYSAKIA GVNENFLNNE GNNLYIILKA | 300 |
| TNWDIKKIVP QLYRFSVLKS DKNMGFNMRK LREFAVESKN IDLSRLNDKF LTNNRKKLYK | 360 |
| VIDFIIYYHL NKVLKDSFVD DFVAALRASQ SEEEKEKLYA QYSERLFADE GLKSAIKKAV | 420 |
| DMISDTKSNI FKMKTPLDKA LIENIKVNSD ASDFCKLIYV FTRFLDGKEI NILLNSLIKK | 480 |
| FQDIHSFNTT VKKLSENNLI INADYVDDYS LFEQSGTVAR ELMLIKSISK MDFGLDNINL | 540 |
| SFMYDDALRT LGVSDENLPE VKREYFGKTK NLSAYIRNNV LENRRFKYVI KYIHPSDVQK | 600 |
| IACNKAIAGF VLNRMPDTQI KRYYDSLINK GATDIQAQAK ALLDCITGIS FDAIKDDKHL | 660 |
| HKSKEKSPQR SADRERKKAM LTLYYTIVYI FVKQMLHINS LYTIGFFYLE RDQRFIYSRA | 720 |
| KKENKNPSKN SYLNDFRSVT AYFIPSEIMK RIEKNENKGF LEDFEALWNS CGKTSRLRKE | 780 |
| DVLLYARYIS PDHALKNYKM ILNSYRNKIA HINVIMSAGK YTGGIKRMDS YFSVFQHLVQ | 840 |
| CDILSNPNNK GKCFESESLK PLLLDMKFDG TDEKLYSKRL TRALNIPFGY NVPRYKNLTF | 900 |
| EKIYLKSSIN E. | 911 |

[0139] Exemplary CasRX/Cas13d proteins may comprise or consist of the sequence: CasRX/Cas13d Metagenomic hit (no protein accession): contig emb|OGNF01009141.1:

| (SEQ ID NO: 105) | |
|---|---|
| MADIDKKKSS AKAAGLKSTF VLENNKLLMT SFGNGNKAVI EKIIDEKVDS INEPEVFSVT | 60 |
| PCDKKFELQP AKRGLAADSL VDNPLKSKKT AGDDAIHSRK FLERQFFDGN TFNDNIHIQL | 120 |
| IYNILDIEKI LSVHVNDIVY SVNNILSRGE GMEYNDYIGT LNLKSFETYK NNLVNKKKFD | 180 |
| LDRVKKIPQL AYFGSAFYNT PEDTSAKITK TKIKSNEEIY YTFMLLSTAR NFSAHYLDRN | 240 |
| RAKSSDAEDF DGTSVIMYNL DNEELYKKLY NKKVHMALTG MKKVLDANFN KKVEHLNNSF | 300 |
| IKNSAKDFVI LCEVLGIKSR DEKTKFVKDY YDFVVRKNYK HLGFSVKELR ELLFANHDSN | 360 |
| KYIKEFDKIS NKKFDSVRSR LNRLADYIIY DYYNKNNAKV SDLVKYLRAA ADDEQKKKIY | 420 |
| LNESINLVKS GILERIKKIL PKLNGKIIGN MQPDSTITAS MLHNTGKDWH PISENAHYFT | 480 |
| KWIYTLTLFM DGKEINDLVT TLINKFDNIA SFIEVLKSQS VCTHFSEERK MFIDSAEICS | 540 |
| ELSAMNSFAR MEAPGASSKR AMFVEAARIL GDNRSKEELE EYFDTLFDKS ASKKEKGFRN | 600 |
| FIRNNVVDSN RFKYLTRYTD TSSVKAFSNN KALVKFAIKD IPQEQILRYY NSCFGASERY | 660 |
| YNDGMSDKLV EAIGKINLMQ FNGVIQQADR NMLPEEKKKA NAQKEKYKSI IRLYLTVCYL | 720 |
| FFKNLVYVNS RYYSAFYNLE KDRSLFEING ELKPTGKFDE GHYTGLVKLF IDNGWINPRA | 780 |
| SAYLTVNLAN SDETAIRTFR NTAEHLEALR NADKYLNDLK QFDSYFEIYH YITQRNIKEK | 840 |
| CEMLKEQTVK YNNDLLKYHG YSKDFVKALC VPFGYNLPRF KNLSIDALFD KNDKREKLKK | 900 |
| GFED. | 904 |

[0140] Exemplary CasRX/Cas13d proteins may comprise or consist of the sequence: CasRX/Cas13d Metagenomic hit (no protein accession): contig emb|OIEN01002196.1:

| (SEQ ID NO: 106) | |
|---|---|
| MERQKRKMKS KSKMAGVKSV FVIGDELLMT SFGDGDDAVL EKDIDENGVV NDCRNPAAYD | 60 |
| AVYGTDSIRV KKTNNNIRAK VNNPLAKSNI RSEESALFRT RVNEYKREQK DKYETLFFGK | 120 |
| TFDDNIHIQL ISKILDIEKT FSVVIGNIVY AINNLSLEQS IDRPIDIFGD KNTQGISLRE | 180 |
| DNDYLKTMLP RCEYLFHNIL NSDSDNNSKM NYNKVNKGKE EKDNRNNENI EKLKKALEVI | 240 |
| KIIRVDSFHG VDGIKGDQKF PRSKYNLAMN YNEEIQKTIS EPFNRKVEEV QQDFYRNSCV | 300 |
| NIDFLKEIMY GSNYTDRGSD SLECSYFNFA ILKQNKNMGF SITSIRECLL DLYELNFESM | 360 |
| QNLRPRANSF CDFLIYDYYC KNESERANLV DCLRSAASEE EKKNIYFQTA ERVKEKFRNA | 420 |
| FNRISRFDAS YIKNSREKNL SGGSSLPKYS FIEGFTKRSK KINDNDEKNA DLFCNMLYYL | 480 |
| AQFLDGKEIN IFLTSIHNIF QNIDSFLKVM KEKGMECKFQ KDFKMFSHAG HVAKKIEIVI | 540 |
| SLAKMKKTLD FYNAQALKDA VTILGVSKKH QYLDMNSYLD FYMFDNRSGA TGKNAGKDHN | 600 |
| LRNFLVSNVI RSRKFNYLSR YSNLAEVKKL AQNPSLVQFV LSRIEPSLIC RYYESSQGIS | 660 |
| SEGITIDEQI KKLTGIIVDM NIDSFENINN GEIGMRYSKA TPQSIERRNQ MRVCVGLYLN | 720 |
| VLYQIEKNLM NVNARYVLAF AFAERDALML NFTLEECKKN KKRSSGGFSF IEMTQFFIDK | 780 |
| KLFKVATEAI KKNVLKYNGN PESLNHIPGE YICKNMEGYH ENTVRNFRNM VAHLTAVARV | 840 |
| PLYISEVTQI DSYYALYHYC MQMNILQGIE QSGKILDNIK LKNALENARV HRTYSKDAVK | 900 |
| YLCLPFAYNI SRYKALTIKD LFDWTEYSCK KDE. | 933 |

[0141] Exemplary CasRX/Cas13d proteins may comprise or consist of the sequence: CasRX/Cas13d Metagenomic hit (no protein accession): contig e-k87_11092736:

| (SEQ ID NO: 107) | |
|---|---|
| MKRQKTFAKR IGIKSTVAYG QGKYAITTFG KGSKAEIAVR SADPPEETLP TESDATLSIH | 60 |
| AKFAKAGRDG REFKCGDVDE TRIHTSRSEY ESLISNPAES PREDYLGLKG TLERKFFGDE | 120 |
| YPKDNLRIQI IYSILDIQKI LGLYVEDILH FVDGLQDEPE DLVGLGLGDE KMQKLLSKAL | 180 |
| PYMGFFGSTD VFKVTKKREE RAAADEHNAK VFRALGAIRQ KLAHFKWKES LAIFGANANM | 240 |
| PIRFFQGATG GRQLWNDVIA PLWKKRIERV RKSFLSNSAK NLWVLYQVFK DDTDEKKKAR | 300 |
| ARQYYHFSVL KEGKNLGFNL TKTREYFLDK FFPIFHSSAP DVKRKVDTFR SKFYAILDFI | 360 |
| IYEASVSVAN SGQMGKVAPW KGAIDNALVK LREAPDEEAK EKIYNVLAAS IRNDSLFLRL | 420 |
| KSACDKFGAE QNRPVFPNEL RNNRDIRNVR SEWLEATQDV DAAAFVQLIA FLCNFLEGKE | 480 |
| INELVTALIK KFEGIQALID LLRNLEGVDS IRFENEFALF NDDKGNMAGR IARQLRLLAS | 540 |
| VGKMKPDMTD AKRVLYKSAL EILGAPPDEV SDEWLAENIL LDKSNNDYQK AKKTVNPFRN | 600 |
| YIAKNVITSR SFYYLVRYAK PTAVRKLMSN PKIVRYVLKR LPEKQVASYY SAIWTQSESN | 660 |
| SNEMVKLIEM IDRLTTEIAG FSFAVLKDKK DSIVSASRES RAVNLEVERL KKLTTLYMSI | 720 |
| AYIAVKSLVK VNARYFIAYS ALERDLYFFN EKYGEEFRLH FIPYELNGKT CQFEYLAILK | 780 |
| YYLARDEETL KRKCEICEEI KVGCEKHKKN ANPPYEYDQE WIDKKKALNS ERKACERRLH | 840 |
| FSTHWAQYAT KRDENMAKHP QKWYDILASH YDELLALQAT GWLATQARND AEHLNPVNEF | 900 |
| DVYIEDLRRY PEGTPKNKDY HIGSYFEIYH YIRQRAYLEE VLAKRKEYRD SGSFTDEQLD | 960 |
| KLQKILDDIR ARGSYDKNLL KLEYLPFAYN LPRYKNLTTE ALFDDDSVSG KKRVAEWRER | 1020 |
| EKTREAEREQ RRQR. | 1034 |

[0142] An exemplary direct repeat sequence of CasRX/Cas13d Metagenomic hit (no protein accession): contig e-k87_11092736 (SEQ ID NO: 107) comprises or consists of the nucleic acid sequence: CasRX/Cas13d Direct repeat 1: gtgagaagtc tccttatggg gagatgctac (SEQ ID NO: 108).

[0143] Exemplary CasRX/Cas13d proteins may comprise or consist of the sequence: CasRX/Cas13d Ga0129306_1000735:

| (SEQ ID NO: 109) | |
|---|---|
| MQKQREQQTV TDESERKKKP LKSGAKAAGL KSVFVLSEGK ELLTSFGRGN EAVPEKRVTG | 60 |
| GTIANARTDN KEAFSAALQN KRFEVFGRTA GSSDDPLAVS RAPGQDLIGA KTALEERYFG | 120 |
| RAFADNIHMQ VIYAIQDINK ILAVHANNIV YTLNNLDREA DPETDDFIGS GYLTLKNTFE | 180 |
| TYCDPAALNE REREKVTVSK QHFDAFMQNP RLAYYGNAFF RKLSKAERLA RGREIFDKES | 240 |
| PERRQEILGS RGKNKSVDDE IRALAPEWVK REERDVYSEL VLMSELRQSC FHGQQKNSAR | 300 |
| IFRLDNDLGP GVDGARELLD RLYAEKINDL RSFDKTSASS NFRLLFNAYH ADNEKKKELA | 360 |
| QEFYRFSVLK VSKNTGFSIR TLREKIIEDH AAQYRDKIYD SMRKKLFSTF DFFLWRFYEE | 420 |
| REDEAEELRA CLRAARSDEE KEQIYAEAAA SCWPSVKPFV ESVAATLCDV VKGRTKLNKL | 480 |
| KLSADESTLV RNAIDGVRIS PRASYFTKLI YLMTLFLDGK EINDLLTTLI HAFENIDSFL | 540 |
| SVLGSERLER TFDANYRIFA DSGVIAQELR AVNSFARMTT EPFNSKLVMF EDAAQLFGMS | 600 |
| GGLVEHAEEL REYLDNKMLD KTKLRLLPDG KVDTGFRNFI ISNVTESRRF RYLVRYCEPR | 660 |
| AVRDYMSCRP LIRLTLRDMP DTILRRYYEQ SVGAATVDRE RILDTLADKL LSLRFTDFEN | 720 |
| VNQRANAERN REKQKMMGII SLYLNVAYQI VKNLVYVNAR YTMAYHCAER DTELLLNAAG | 780 |
| EGNLLRRDRS WPARLHLPRR ALARRRDRVE VMERDVARGP EAYNRDEWLG LVRTLRREKR | 840 |
| VCDNLHNNYA YLCGADAEPG DASLSLLFVY RNKAAHLSVL NKGGRLSGDL KEAKSWFYVY | 900 |
| HFLMQRVLEE EFRNTQALPE RLRELLMMAE RYRGCSKDLI KVLNLTFAYN LPRYKNLSID | 960 |
| GRFDKNHPDP SDE. | 973 |

[0144] Exemplary CasRX/Cas13d proteins may comprise or consist of the sequence: CasRX/Cas13d Ga0129317_1008067:

| (SEQ ID NO: 110) | |
|---|---|
| MKKQKKSLVK AAGLKSAFVV GDSVYLTSFG KGNAARLDTK INPDNSTERY VSDSEKHTLK | 60 |
| INSITDTELR LSGPFPKQAE AKNPTHKKDN EQKNTRQDML GLKSTLEKFY FGSTFDDNIH | 120 |
| IQIIHNIQDI AKILAAHSNN AGYALDNMLA YQGVEFSDMI GYMGTSRTFD NYDPNHKNNK | 180 |
| DFFRFLKLPR LGYFGSAFYS QKGKDFEKRS DEEVYNICAL MGQIRQCCFH GKQEKYQLKW | 240 |
| LYNFHNFKSN KPFLDTLDKH FDEMIDRINK NFIKNNTPDL IILSGLYPDM AKKELVRLFY | 300 |
| DFTTVKEYKN MGFSVKKLRE KMLESEEASD FRDKDYDSVR RKLYKLMDFC IYYLYYSDSE | 360 |
| RNENLVSRLR ESLTDENKDI IYSKEAKIVW NELRKKFSTI LDNVKGSNIK KLENVKEKFI | 420 |
| SEDEFDDIKL DIDISYFSKL MYVMCYFLDG KEINDLLTTL VSKFDNIGSI IEAATQIGIN | 480 |
| IEFIDDFKFF DRSKDISVEL NIIRNFARMQ APVPNAKRAM QEDAIRILGG SEEDIFSILD | 540 |
| DMTGYDKSGK KLAQSKKGFR NFIINNVVES SRFKYIVRYS NPQKIRKLAN NSVVVGFVLG | 600 |
| KLPDAQIESY FNSCLPNRVY STPDKARESL RDMLHNISFN DFADVKQDDR RATPEEKVEK | 660 |
| ERYKAIIGLY LTVMYHLVKN LVYVNSRYVM AFHCLERDAM HYDVSLDNYR DLIRHLISEG | 720 |
| DSSCNHFISH NRRMRDCIEE NVKNSEQLIF GKEDAVIRFR NNVAHLSAIR NANEYIGDIR | 780 |
| EITSYFALYH YLMQRKLIDD CKVNDTAHKY FEQLTKYKTY VMDMVKALCS PFGYNLPRFK | 840 |
| NLSIEGKFDM HESK. | 854 |

[0145] Exemplary CasRX/Cas13d proteins may comprise or consist of the sequence: CasRX/Cas13d Ga0224415_10048792:

| (SEQ ID NO: 111) | |
|---|---|
| MSKKENRKSY VKGLGLKSTL VSDSKVYLTT FADGSNAKLE KCVENNKIIC ISNDKEAFAA | 60 |
| SIANKNVGYK IKNDEKFRHP KGYDIISNNP LLHNNSVQQD MLGLKNVLEK RYFGKSSGGD | 120 |
| NNLCIQIIHN IIDIEKILSE YIPNVVYAFN NIAGFKDEHN NIIDIIGTQT YNSSYTYADF | 180 |
| SKDKSDKKYI EFQKLLKNKR LGYWGKAFFT GQGNNAKVRQ ENQCFHIIAL LISLRNWATH | 240 |
| SNELDKHTKR TWLYKLDDTN ILNAEYVKTL NYLYDTIADE LTKSFSKNGA VNVNYLAKKY | 300 |
| NIKDDLPGFS EQYFRFSIMK EQKNLGFNIS KLRENMLDFK DMSVIRDDHN RYDKDRSKIY | 360 |
| TMMDFVIYRY YIDNNNDSID FINKLRSSID EKSKEKLYNE EANRLWNKLK EYMLYIKEFN | 420 |
| GKLASRTPDR DGNISEFVES LPKIHRLLPR GQKISNFSKL MYLLTMFLDG KEINDLLTTL | 480 |
| INKFENIQGF LDIMPEINVN AKFEPEYVFF NKSHEIAGEL KLIKGFAQMG EPAATLKLEM | 540 |
| TADAIKILGT EKEDAELIKL AESLFKDENG KLLGNKQHGM RNFIGNNVIK SKRFHYLIRY | 600 |
| GDPAHLHKIA TNKNVVRFVL GRIADMQKKQ GQKGKNQIDR YYEVCVGNKD IKKTIEEKID | 660 |
| ALTDIIVNMN YDQFEKKKAV IENQNRGKTF EEKNKYKRDN AEREKFKKII SLYLTVIYHI | 720 |
| LKNIVNVNSR YILGFHCLER DKQLYIEKYN KDKLDGFVAL TKFCLGDEER FEDLKAKAQA | 780 |
| SIQALETANP KLYAKYMNYS DEEKKEEFKK QLNRERVKNA RNAYLKNIKN YIMIRLQLRD | 840 |
| QTDSSGYLCG EFRDKVAHLE VARHAHEYIG NIKEVNSYFQ LYHYIMQCRL YDVLKNNTKA | 900 |
| EAMVKGKAKE YFEALEKEGT YNDKLLKIAC VPFGYCIPRY KNLSMEELFD MNEEKKFKKK | 960 |
| APENT. | 965 |

[0146] Exemplary CasRX/Cas13d proteins may comprise or consist of the sequence CasRX/Cas13d 160582958_gene49834:

| (SEQ ID NO: 112) | |
|---|---|
| MKNSVTFKLI QAQENKEAAR KKAKDIAEQA RIAKRNGVVK KEENRINRIQ IEIQTQKKSN | 60 |
| TQNAYHLKSL AKAAGVKSVF AIGNDLLMTG FGPGNDATIE KRVFQNRAIE TLSSPEQYSA | 120 |
| EFQNKQFKIK GNIKVLNHST QKMEEIQTEL QDNYNRPHFD LLGCKNVLEQ KYFGRTFSDN | 180 |
| IHVQIAYNIM DIEKLLTPYI NNIIYTLNEL MRDNSKDDFF GCDSHFSVAY LYDELKAGYS | 240 |
| DRLKTKPNLS KNIDRIWNNF CNYMNSDSGN TEARLAYFGE LFYKPKETGD AKSDYKTHLS | 300 |
| NNQKEEWELK SDKEVYNIFA ILCDLRHFCT HGESITPSGK PFPYNLEKNL FPEAKQVLNS | 360 |
| LFEEKAESLG AEAFGKTAGK TDVSILLKVF EKEQASQKEQ QALLKEYYDF KVQKTYKNMG | 420 |
| FSIKKLREAI MEIPDAAKFK DDLYSSLRHK LYGLFDFILV KHFLDTSDSE NLQNNDIFRQ | 480 |
| LRACRCEEEK DQVYRSIAVK VWEKVKKKEL NMFKQVVVIP SLSKDELKQM EMTKNTELLS | 540 |
| SIETISTQAS LFSEMIFMMT YLLDGKEINL LCTSLIEKFE NIASFNEVLK SPQIGYETKY | 600 |
| TEGYAFFKNA DKTAKELRQV NNMARMTKPL GGVNTKCVMY NEAAKILGAK PMSKAELESV | 660 |
| FNLDNHDYTY SPSGKKIPNK NFRNFIINNV ITSRRFLYLI RYGNPEKIRK IAINPSIISF | 720 |
| VLKQIPDEQI KRYYPPCIGK RTDDVTLMRD ELGKMLQSVN FEQFSRVNNK QNAKQNPNGE | 780 |
| KARLQACVRL YLTVPYLFIK NMVNINARYV LAFHCLERDH ALCFNSRKLN DDSYNEMANK | 840 |
| FQMVRKAKKE QYEKEYKCKK QETGTAHTKK IEKLNQQIAY IDKDIKNMHS YTCRNYRNLV | 900 |
| AHLNVVSKLQ NYVSELPNDY QITSYFSFYH YCMQLGLMEK VSSKNIPLVE SLKNEANDAQ | 960 |
| SYSAKKTLEY FDLIEKNRTY CKDFLKALNA PFSYNLPRFK NLSIEALFDK NIVYEQADLK | 1020 |
| KE. | 1022 |

[0147] An exemplary direct repeat sequence of CasRX/Cas13d proteins may comprise or consist of the sequence CasRX/Cas13d 160582958_gene49834 (SEQ ID NO: 112) comprises or consists of the

| nucleic acid sequence: CasRX/Cas13d DR: | |
|---|---|
| (SEQ ID NO: 113) | |
| gaactacacc cctctgttct tgtaggggtc taacac. | 36 |

[0148] Exemplary CasRX/Cas13d proteins may comprise or consist of the sequence: CasRX/Cas13d 250twins_35838_GL0110300:

| (SEQ ID NO: 114) | |
|---|---|
| MGNKQRVSAQ KRRENAKLCN QQKARQAESQ RDKIKNMNVE KMKNINTNDI KHTKTTAKKL | 60 |
| GLKSTIIADK KIILTSFINE QSSKTANIEK VAGFKGDTID TISYTPRMFR SEINPGEIVI | 120 |
| SKGDDLSEFA NPANFPIGRD YVKIRSALEK QYFGKEFPED NLHVQIAYNV ADIKKILSVY | 180 |
| INNIIYMFYN LARSEEYDIF YNSQSENSGR DCDVIGSLYY QASYRNQDAN RFEKDGKKKA | 240 |
| IDSLLDDTRA YYTYFDGLFS VPKREDDGKI KESEKEKAKD QNFDVLRLLS VGRQLTFHSD | 300 |
| KSNNEAYLFD LSKLTRAAQD ENRRQDIQSL LNILNSTCRS NLEGVNGDFV KHAKNNLYVL | 360 |
| NQLYPSLKAN DLIGEYYNFI VKKENRNIGI RLITVRELII EHNYTNLKDS KYDTYRNKIY | 420 |
| TVLNFILFRE IQENSIAIKN FREKLRSTEK AEQPALYQAF ANKIYPMVQA KFAKAIDLFE | 480 |
| EQYKTKFKSE FKGGISIENM QQQNILLQTE NIDYFSKYVL FLTKFLDGKE INELLCALIN | 540 |
| KFDNIADLLD ISKQIGTPVV FCADYESLND AAKIAENIRL IKNIAHLRPA IQEAQSSKDN | 600 |
| ADAAGTPATL LIDAYNMLNT DIQLVYGEAA YEELRKDLFE RKNGTKYNKK GKKVDVYDHK | 660 |
| FRNFLINNVI KSKWFFYIAK YVKPADCAKM MSNKKMIEFA LRDLPETQIK RYYYTITGNE | 720 |
| ALGDAESLKG VIIEQLHAFS IKNTLLSIKN MGEGEYKIQQ IGSSKEKLKA IVNLYLTVAY | 780 |
| LLTKSLVKVN IRFSIAFGCL ERDLVLQKKS EKKFDAIINE ILLEDDKIRK ECDKERAQAK | 840 |
| TLPRELAQER FAQIKRRESG CYFKSYHVYD YLSKNSNEFK QNHIDFAVTS YRNNVEHLNV | 900 |
| VHCMTKYFSE VKDVKSYYGV YCYIMQRMLC DELIIKNQDK PDVRQTFEEY NRLLKDHGTY | 960 |
| SKNLMWLLNF PFAYNLARYK NLSNEDLFNA KNNDQKSK. | 998 |

[0149] Exemplary CasRX/Cas13d proteins may comprise or consist of the sequence: CasRX/Cas13d 250twins_36050_GL0158985:

| (SEQ ID NO: 115) | |
|---|---|
| MKKKHQSAAE KRQVKKLKNQ EKAQKYASEP SPLQSDTAGV ECSQKKTVVS HIASSKTLAK | 60 |
| AMGLKSTLVM GDKLVITSFA ASKAVGGAGY KSANIEKITD LQGRVIEEHE RMFSADVGEK | 120 |
| NIELSKNDCH TNVNNPVVTN IGKDYIGLKS RLEQEFFGKT FENDNLHVQL AYNILDIKKI | 180 |
| LGTYVNNIIY IFYNLNRAGT GRDERMYDDL IGTLYAYKPM EAQQTYLLKG DKDMRRFEEV | 240 |
| KQLLQNTSAY YVYYGTLFEK VKAKSKKEQR AKEAEIDACT AHNYDVLRLL SLMRQLCMHS | 300 |
| VAGTAFKLAE SALFNIEDVL SADLKEILDE AFSGAVNKLN DGFVQHSGNN LYVLQQLYPN | 360 |
| ETIERIAEKY YRLTVRKEDL NMGVNIKKLR ELIVGQYFPE VLDKEYDLSK NGDSVVTYRS | 420 |
| KIYTVMNYIL LYYLEDHDSS RESMVEALRQ NREGDEGKEE IYRQFAKKVW NGVSGLFGVC | 480 |
| LNLFKTEKRN KFRSKVALPD VSGAAYMLSS ENIDYFVKML FFVCKFLDGK EINELLCALI | 540 |
| NKFDNIADIL DAAAQCGSSV WFVDSYRFFE RSRRISAQIR IVKNIASKDF KKSKKDSDES | 600 |
| YPEQLYLDAL ALLGDVISKY KQNRDGSVVI DDQGNAVLTE QYKRFRYEFF EEIKRDESGG | 660 |
| IKYKKSGKPE YNHQRRNFIL NNVLKSKWFF YVVKYNRPSS CRELMKNKEI LRFVLRDIPD | 720 |
| SQVRRYFKAV QGEEAYASAE AMRTRLVDAL SQFSVTACLD EVGGMTDKEF ASQRAVDSKE | 780 |
| KLRAIIRLYL TVAYLITKSM VKVNTRFSIA FSVLERDYYL LIDGKKKSSD YTGEDMLALT | 840 |
| RKFVGEDAGL YREWKEKNAE AKDKYFDKAE RKKVLRQNDK MIRKMHFTPH SLNYVQKNLE | 900 |
| SVQSNGLAAV IKEYRNAVAH LNIINRLDEY IGSARADSYY SLYCYCLQMY LSKNFSVGYL | 960 |
| INVQKQLEEH HTYMKDLMWL LNIPFAYNLA RYKNLSNEKL FYDEEAAAEK ADKAENERGE. | 1020 |

[0150] Yan et al. (2018) Mol Cell. 70(2):327-339 (doi: 10.1016/j.molcel.2018.02.2018) and Konermann et al. (2018) Cell 173(3):665-676 (doi: 10.1016/j.cell/2018.02.033) have described CasRX/Cas13d proteins and both of which are incorporated by reference herein in their entireties. Also see WO Publication Nos. WO2018/183703 (CasM) and WO2019/006471 (Cas13d), which are incorporated herein by reference in their entirety.

[0151] Exemplary wild type Cas13d proteins of the disclosure may comprise or consist of the amino acid sequence:

[0152] Cas13d (Ruminococcus flavefaciens XPD3002) sequence:

(SEQ ID NO: 45)

| | |
|---|---|
| 1 | IEKKKSFAKG MGVKSTLVSG SKVYMTTFAE GSDARLEKIV |
| | EGDSIRSVNE GEAFSAEMAD |
| 61 | KNAGYKIGNA KFSHPKGYAV VANNPLYTGP VQQDMLGLKE |
| | TLEKRYFGES ADGNDNICIQ |
| 121 | VIHNILDIEK ILAEYITNAA YAVNNISGLD KDIIGFGKFS |
| | TVYTYDEFKD PEHHRAAFNN |
| 181 | NDKLINAIKA QYDEFDNFLD NPRLGYFGQA FFSKEGRNYI |
| | INYGNECYDI LALLSGLAHW |
| 241 | VVANNEEESR ISRTWLYNLD KNLDNEYIST LNYLYDRITN |
| | ELTNSFSKNS AANVNYIAET |
| 301 | LGINPAEFAE QYFRFSIMKE QKNLGFNITK LREVMLDRKD |
| | MSEIRKNHKV FDSIRTKVYT |
| 361 | MMDFVIYRYY IEEDAKVAAA NKSLPDNEKS LSEKDIFVIN |
| | LRGSFNDDQK DALYYDEANR |
| 421 | IWRKLENIMH NIKEFRGNKT REYKKKDAPR LPRILPAGRD |
| | VSAFSKLMYA LTMFLDGKEI |
| 481 | NDLLTTLINK FDNIQSFLKV MPLIGVNAKF VEEYAFFKDS |
| | AKIADELRLI KSFARMGEPI |
| 541 | ADARRAMYID AIRILGTNLS YDELKALADT FSLDENGNKL |
| | KKGKHGMRNF IINNVISNKR |
| 601 | FHYLIRYGDP AHLHEIAKNE AVVKFVLGRI ADIQKKQGQN |
| | GKNQIDRYYE TCIGKDKGKS |
| 661 | VSEKVDALTK IITGMNYDQF DKKRSVIEDT GRENAEREKF |
| | KKIISLYLTV IYHILKNIVN |
| 721 | INARYVIGFH CVERDAQLYK EKGYDINLKK LEEKGFSSVT |
| | KLCAGIDETA PDKRKDVEKE |
| 781 | MAERAKESID SLESANPKLY ANYIKYSDEK KAEEFTRQIN |
| | REKAKTALNA YLRNTKWNVI |
| 841 | IREDLLRIDN KTCTLFANKA VALEVARYVH AYINDIAEVN |
| | SYFQLYHYIM QRIIMNERYE |
| 901 | KSSGKVSEYF DAVNDEKKYN DRLLKLLCVP FGYCIPRFKN |
| | LSIEALFDRN EAAKFDKEKK |
| 961 | SGNS. |

[0153] Exemplary wild type Cas13d proteins of the disclosure may comprise or consist of the amino acid sequence:

[0154] Cas13d (contig e-k87_11092736):

(SEQ ID NO: 46)
MKRQKTFAKRIGIKSTVAYGQGKYAITTFGKGSKAEIAVRSADPPEETLP
TESDATLSIHAKFAKAGRDGREFKCGDVDETRIHTSRSEYESLISNPAES
PREDYLGLKGTLERKFFGDEYPKDNLRIQIIYSILDIQKILGLYVEDILH
FVDGLQDEPEDLVGLGLGDEKMQKLLSKALPYMGFFGSTDVFKVTKKREE
RAAADEHNAKVFRALGAIRQKLAHFKWKESLAIFGANANMPIRFFQGATG
GRQLWNDVIAPLWKKRIERVRKSFLSNSAKNLWVLYQVFKDDTDEKKKAR
ARQYYHFSVLKEGKNLGFNLTKTREYFLDKFFPIFHSSAPDVKRKVDTFR
SKFYAILDFIIYEASVSVANSGQMGKVAPWKGAIDNALVKLREAPDEEAK
EKIYNVLAASIRNDSLFLRLKSACDKFGAEQNRPVFPNELRNNRDIRNVR
SEWLEATQDVDAAAFVQLIAFLCNFLEGKEINELVTALIKKFEGIQALID
LLRNLEGVDSIRFENEFALFNDDKGNMAGRIARQLRLLASVGKMKPDMTD
AKRVLYKSALEILGAPPDEVSDEWLAENILLDKSNNDYQKAKKTVNPFRN
YIAKNVITSRSFYYLVRYAKPTAVRKLMSNPKIVRYVLKRLPEKQVASYY
SAIWTQSESNSNEMVKLIEMIDRLTTEIAGFSFAVLKDKKDSIVSASRES
RAVNLEVERLKKLTTLYMSIAYIAVKSLVKVNARYFIAYSALERDLYFFN
EKYGEEFRLHFIPYELNGKTCQFEYLAILKYYLARDEETLKRKCEICEEI
KVGCEKHKKNANPPYEYDQEWIDKKKALNSERKACERRLHFSTHWAQYAT
KRDENMAKHPQKWYDILASHYDELLALQATGWLATQARNDAEHLNPVNEF
DVYIEDLRRYPEGTPKNKDYHIGSYFEIYHYIRQRAYLEEVLAKRKEYRD
SGSFTDEQLDKLQKILDDIRARGSYDKNLLKLEYLPFAYNLPRYKNLTTE
ALFDDDSVSGKKRVAEWREREKTREAEREQRRQR.

[0155] An exemplary direct repeat sequence of Cas13d (contig e-k87_11092736) (SEQ ID NO: 46) comprises or consists of the nucleic acid sequence: Cas13d (contig e-k87_11092736)

Direct Repeat Sequence):
(SEQ ID NO: 47)
GTGAGAAGTCTCCTTATGGGGAGATGCTAC.

[0156] Exemplary wild type Cas13d proteins of the disclosure may comprise or consist of the amino acid sequence:

[0157] Cas13d (160582958_gene49834):

(SEQ ID NO: 48)
MKNSVTFKLIQAQENKEAARKKAKDIAEQARIAKRNGVVKKEENRINRIQ
IEIQTQKKSNTQNAYHLKSLAKAAGVKSVFAIGNDLLMTGFGPGNDATIE
KRVFQNRAIETLSSPEQYSAEFQNKQFKIKGNIKVLNHSTQKMEEIQTEL
QDNYNRPHFDLLGCKNVLEQKYFGRTFSDNIHVQIAYNIMDIEKLLTPYI
NNIIYTLNELMRDNSKDDFFGCDSHFSVAYLYDELKAGYSDRLKTKPNLS
KNIDRIWNNFCNYMNSDSGNTEARLAYFGELFYKPKETGDAKSDYKTHLS
NNQKEEWELKSDKEVYNIFAILCDLRHFCTHGESITPSGKPFPYNLEKNL
FPEAKQVLNSLFEEKAESLGAEAFGKTAGKTDVSILLKVFEKEQASQKEQ
QALLKEYYDFKVQKTYKNMGFSIKKLREAIMEIPDAAKFKDDLYSSLRHK
LYGLFDFILVKHFLDTSDSENLQNNDIFRQLRACRCEEEKDQVYRSIAVK
VWEKVKKKELNMFKQVVVIPSLSKDELKQMEMTKNTELLSSIETISTQAS
LFSEMIFMMTYLLDGKEINLLCTSLIEKFENIASFNEVLKSPQIGYETKY
TEGYAFFKNADKTAKELRQVNNMARMTKPLGGVNTKCVMYNEAAKILGAK
PMSKAELESVFNLDNHDYTYSPSGKKIPNKNFRNFIINNVITSRRFLYLI
RYGNPEKIRKIAINPSIISFVLKQIPDEQIKRYYPPCIGKRTDDVTLMRD
ELGKMLQSVNFEQFSRVNNKQNAKQNPNGEKARLQACVRLYLTVPYLFIK
NMVNINARYVLAFHCLERDHALCFNSRKLNDDSYNEMANKFQMVRKAKKE
QYEKEYKCKKQETGTAHTKKIEKLNQQIAYIDKDIKNMHSYTCRNYRNLV
AHLNVVSKLQNYVSELPNDYQITSYFSFYHYCMQLGLMEKVSSKNIPLVE
SLKNEANDAQSYSAKKTLEYFDLIEKNRTYCKDFLKALNAPFSYNLPRFK
NLSIEALFDKNIVYEQADLKKE.

[0158] An exemplary direct repeat sequence of Cas13d (160582958_gene49834) (SEQ ID NO: 48) comprises or consists of the nucleic acid sequence:

[0159] Cas13d (160582958_gene49834) Direct Repeat Sequence:

(SEQ ID NO: 49)
GAACTACACCCCTCTGTTCTTGTAGGGGTCTAACAC.

[0160] Exemplary wild type Cas13d proteins of the disclosure may comprise or consist of the amino acid sequence:

[0161] Cas13d (contig tpg|DJXD01000002.1|; uncultivated Ruminococcus assembly, UBA7013, from sheep gut metagenome):

(SEQ ID NO: 50)
MKKQKSKKTVSKTSGLKEALSVQGTVIMTSFGKGNMANLSYKIPSSQKPQ
NLNSSAGLKNVEVSGKKIKFQGRHPKIATTDNPLFKPQPGMDLLCLKDKL
EMHYFGKTFDDNIHIQLIYQILDIEKILAVHVNNIVFTLDNVLHPQKEEL
TEDFIGAGGWRINLDYQTLRGQTNKYDRFKNYIKRKELLYFGEAFYHENE
RRYEEDIFAILTLLSALRQFCFHSDLSSDESDHVNSFWLYQLEDQLSDEF
KETLSILWEEVTERIDSEFLKTNTVNLHILCHVFPKESKETIVRAYYEFL
IKKSFKNMGFSIKKLREIMLEQSDLKSFKEDKYNSVRAKLYKLFDFIITY
YYDHHAFEKEALVSSLRSSLTEENKEEIYIKTARTLASALGADFKKAAAD
VNAKNIRDYQKKANDYRISFEDIKIGNTGIGYFSELIYMLTLLLDGKEIN
DLLTTLINKFDNIISFIDILKKLNLEFKFKPEYADFFNMTNCRYTLEELR
VINSIARMQKPSADARKIMYRDALRILGMDNRPDEEIDRELERTMPVGAD
GKFIKGKQGFRNFIASNVIESSRFHYLVRYNNPHKTRTLVKNPNVVKFVL
EGIPETQIKRYFDVCKGQEIPPTSDKSAQIDVLARIISSVDYKIFEDVPQ
SAKINKDDPSRNFSDALKKQRYQAIVSLYLTVMYLITKNLVYVNSRYVIA
FHCLERDAFLHGVTLPKMNKKIVYSQLTTHLLTDKNYTTYGHLKNQKGHR
KWYVLVKNNLQNSDITAVSSFRNIVAHISVVRNSNEYISGIGELHSYFEL
YHYLVQSMIAKNNWYDTSHQPKTAEYLNNLKKHHTYCKDFVKAYCIPFGY
VVPRYKNLTINELFDRNNPNPEPKEEV.

[0162] An exemplary direct repeat sequence of Cas13d (contig tpg|DJXD01000002.1|; uncultivated Ruminococcus assembly, UBA7013, from sheep gut metagenome) (SEQ ID NO: 50) comprises or consists of the nucleic acid sequence: Cas13d (contig tpg|DJXD01000002.1|; uncultivated Ruminococcus assembly, UBA7013, from sheep gut metagenome) Direct Repeat Sequence:

(SEQ ID NO: 51)
CAACTACAACCCCGTAAAAATACGGGGTTCTGAAAC.

[0163] In some embodiments of the compositions of the disclosure, the sequence comprising the gRNA further comprises a spacer sequence that specifically binds to the target RNA sequence. In some embodiments, the spacer sequence has at least 50%, 55%, 60%, 65%, 70%, 75%, 80%, 87%, 90%, 95%, 97%, 99% or any percentage in between of complementarity to the target RNA sequence. In some embodiments, the spacer sequence has 100% complementarity to the target RNA sequence. In some embodiments, the spacer sequence comprises or consists of 20 nucleotides. In some embodiments, the spacer sequence comprises or consists of 21 nucleotides. In some embodiments, the spacer sequence comprises or consists of the sequence UGGAGCGAGCAUCCCCCAAA (SEQ ID NO: 1), GUUUGGGGGAUGCUCGCUCCA (SEQ ID NO: 2), CCCUCACUGCUGGGGAGUCC (SEQ ID NO: 3), GGACUCCCCAGCAGUGAGGG (SEQ ID NO: 4), GCAACUGGAUCAAUUUGCUG (SEQ ID NO: 5), GCAGCAAAUUGAUCCAGUUGC (SEQ ID NO: 6), GCAUUCUUAUCUGGUCAGUGC (SEQ ID NO: 7), GCACUGACCAGAUAAGAAUG (SEQ ID NO: 8), GAGCAGCAGCAGCAGCAGCAG (SEQ ID NO: 9), GCAGGCAGGCAGGCAGGCAGG (SEQ ID NO: 10), GCCCCGGCCCCGGCCCCGGC (SEQ ID NO: 11), or GCTGCTGCTGCTGCTGCTGC (SEQ ID NO: 12), GGGGCCGGGGCCGGGGCCGG (SEQ ID NO: 74), GGGCCGGGGCCGGGGCCGGG (SEQ ID NO: 75), GGCCGGGGCCGGGGCCGGGG (SEQ ID NO: 76), GCCGGGGCCGGGGCCGGGGC (SEQ ID NO: 77), CCGGGGCCGGGGCCGGGGCC (SEQ ID NO: 78), or CGGGGCCGGGGCCGGGGCCG (SEQ ID NO: 79).

[0164] In some embodiments of the compositions of the disclosure, the sequence comprising the gRNA further comprises a spacer sequence that specifically binds to the target RNA sequence. In some embodiments, the spacer sequence has at least 50%, 55%, 60%, 65%, 70%, 75%, 80%, 87%, 90%, 95%, 97%, 99% or any percentage in between of complementarity to the target RNA sequence.

[0165] In some embodiments, the spacer sequence has 100% complementarity to the target RNA sequence. In some embodiments, the spacer sequence comprises or consists of 20 nucleotides. In some embodiments, the spacer sequence comprises or consists of 21 nucleotides. In some embodiments, the spacer sequence comprises or consists of the sequence GUGAUAAGUGGAAUGCCAUG (SEQ ID NO: 14), CUGGUGAACUUCCGAUAGUG (SEQ ID NO: 15), or GAGATATAGCCTGGTGGTTC (SEQ ID NO: 16).

[0166] In some embodiments of the compositions of the disclosure, the sequence comprising the gRNA further comprises a spacer sequence that specifically binds to the target RNA sequence. In some embodiments, the spacer sequence has at least 50%, 55%, 60%, 65%, 70%, 75%, 80%, 87%, 90%, 95%, 97%, 99% or any percentage in between of complementarity to the target RNA sequence. In some embodiments, the spacer sequence has 100% complementarity to the target RNA sequence. In some embodiments, the spacer sequence comprises or consists of 20 nucleotides. In some embodiments, the spacer sequence comprises or consists of 21 nucleotides. In some embodiments, the spacer sequence comprises or consists of a sequence comprising at least 1, 2, 3, 4, 5, 6, or 7 repeats of the sequence CUG (SEQ ID NO: 18), CCUG (SEQ ID NO: 19), CAG (SEQ ID NO: 80), GGGGCC (SEQ ID NO: 81) or any combination thereof.

[0167] In some embodiments of the compositions of the disclosure, the sequence comprising the gRNA further comprises a scaffold sequence that specifically binds to the first RNA binding protein. In some embodiments, the scaffold sequence comprises a stem-loop structure. In some embodiments, the scaffold sequence comprises or consists of 90 nucleotides. In some embodiments, the scaffold sequence comprises or consists of 93 nucleotides. In some embodiments, the scaffold sequence comprises or consists of the sequence

(SEQ ID NO: 13)
GUUUAAGAGCUAUGCUGGAAACAGCAUAGCAAGUUUAAAUAAGGCUAGUC
CGUUAUCAACUUGAAAAAGUGGCACCGAGUCGGUGCUUUUUUU.

In some embodiments, the scaffold sequence comprises or consists of the sequence

(SEQ ID NO: 17)
GGACAGCAUAGCAAGUUAAAAUAAGGCUAGUCCGUUAUCAACUUGAAAAA
GUGGCACCGAGUCGGUGCUUUUU.

In some embodiments, the scaffold sequence comprises or consists of the sequence

(SEQ ID NO: 82)
GUUUAAGAGCUAUGCUGGAAACAGCAUAGCAAGUUUAAAUAAGGCUAGUC
CGUUAUCAACUUGAAAAAGUGGCACCGAGUCGGUGCUUUUUUU
or
(SEQ ID NO: 83)
GUUUUAGAGCUAGAAAUAGCAAGUUAAAAUAAGGCUAGUCCGUUAUCAAC
UUGAAAAAGUGGCACCGAGUCGGUGCUUUUUUU.

[0168] In some embodiments of the compositions of the disclosure, the gRNA does not bind or does not selectively bind to a second sequence within the RNA molecule.

[0169] In some embodiments of the compositions of the disclosure, an RNA genome or an RNA transcriptome comprises the RNA molecule.

[0170] In some embodiments of the compositions of the disclosure, the sequence encoding the RNA-binding protein encodes a CRISPR-Cas protein or RNA-binding portion thereof. In some embodiments, the RNA-binding protein is a fusion protein. In some embodiments, the CRISPR-Cas protein is a Type II CRISPR-Cas protein. In some embodiments, the RNA-binding protein comprises a Cas9 polypeptide or an RNA-binding portion thereof. In some embodiments, the CRISPR-Cas protein comprises a native RNA nuclease activity. In some embodiments, the native RNA nuclease activity is reduced or inhibited. In some embodiments, the native RNA nuclease activity is increased or induced. In some embodiments, the CRISPR-Cas protein comprises a native DNA nuclease activity and the native DNA nuclease activity is inhibited. In some embodiments, the CRISPR-Cas protein comprises a mutation. In some embodiments, a nuclease domain of the CRISPR-Cas protein comprises the mutation. In some embodiments, the mutation occurs in a nucleic acid encoding the CRISPR-Cas protein. In some embodiments, the mutation occurs in an amino acid encoding the CRISPR-Cas protein. In some embodiments, the mutation comprises a substitution, an insertion, a deletion, a frameshift, an inversion, or a transposition. In some embodiments, the mutation comprises a deletion of a nuclease domain, a binding site within the nuclease domain, an active site within the nuclease domain, or at least one essential amino acid residue within the nuclease domain.

[0171] In some embodiments of the compositions of the disclosure, the RNA binding protein comprises a CRISPR-Cas protein or RNA-binding portion thereof. In some embodiments, the CRISPR-Cas protein is a Type V CRISPR-Cas protein. In some embodiments, the first RNA binding protein comprises a Cpf1 polypeptide or an RNA-binding portion thereof. In some embodiments, the CRISPR-Cas protein comprises a native RNA nuclease activity. In some embodiments, the native RNA nuclease activity is reduced or inhibited. In some embodiments, the native RNA nuclease activity is increased or induced. In some embodiments, the CRISPR-Cas protein comprises a native DNA nuclease activity and the native DNA nuclease activity is inhibited. In some embodiments, the CRISPR-Cas protein comprises a mutation. In some embodiments, a nuclease domain of the CRISPR-Cas protein comprises the mutation. In some embodiments, the mutation occurs in a nucleic acid encoding the CRISPR-Cas protein. In some embodiments, the mutation occurs in an amino acid encoding the CRISPR-Cas protein. In some embodiments, the mutation comprises a substitution, an insertion, a deletion, a frameshift, an inversion, or a transposition. In some embodiments, the mutation comprises a deletion of a nuclease domain, a binding site within the nuclease domain, an active site within the nuclease domain, or at least one essential amino acid residue within the nuclease domain.

[0172] In some embodiments of the compositions of the disclosure, the RNA binding protein comprises a CRISPR-Cas protein or RNA-binding portion thereof. In some embodiments, the CRISPR-Cas protein is a Type VI CRISPR-Cas protein. In some embodiments, the RNA binding protein comprises a Cas13 polypeptide or an RNA-binding portion thereof. In some embodiments, the RNA binding protein comprises a Cas13d polypeptide or an RNA-binding portion thereof. In some embodiments, the CRISPR-Cas protein comprises a native RNA nuclease activity. In some embodiments, the native RNA nuclease activity is reduced or inhibited. In some embodiments, the native RNA nuclease activity is increased or induced. In some embodiments, the CRISPR-Cas protein comprises a native DNA nuclease activity and the native DNA nuclease activity is inhibited. In some embodiments, the CRISPR-Cas protein comprises a mutation. In some embodiments, a nuclease domain of the CRISPR-Cas protein comprises the mutation. In some embodiments, the mutation occurs in a nucleic acid encoding the CRISPR-Cas protein. In some embodiments, the mutation occurs in an amino acid encoding the CRISPR-Cas protein. In some embodiments, the mutation comprises a substitution, an insertion, a deletion, a frameshift, an inversion, or a transposition. In some embodiments, the mutation comprises a deletion of a nuclease domain, a binding site within the nuclease domain, an active site within the nuclease domain, or at least one essential amino acid residue within the nuclease domain.

[0173] In some embodiments, a target RNA-binding fusion protein is not an RNA-guided target RNA-binding fusion protein and as such comprises at least one RNA-binding polypeptide which is capable of binding a target RNA without a corresponding gRNA sequence. Such non-guided RNA-binding polypeptides include, without limitation, at least one RNA-binding protein or RNA-binding portion thereof which is a PUF (Pumilio and FBF homology family). This type RNA-binding polypeptide can be used in place of a gRNA-guided RNA binding protein such as CRISPR/Cas. In some embodiments of the compositions of the disclosure, the RNA-binding protein or RNA-binding portion thereof is a PUF (Pumilio and FBF homology family). The unique RNA recognition mode of PUF proteins (named for Drosophila Pumilio and C. elegans fem-3 binding factor) that are involved in mediating mRNA stability and translation are well known in the art. The PUF domain of human Pumiliol, also known in the art, binds tightly to cognate RNA sequences and its specificity can be modified. It contains eight PUF repeats that recognize eight consecutive RNA bases with each repeat recognizing a single base. Since two amino acid side chains in each repeat recognize the Watson-Crick edge of the corresponding base and determine the specificity of that repeat, a PUF domain can be designed to specifically bind most 8-nt RNA. Wang et al., Nat Methods. 2009; 6(11): 825-830. See also WO2012/068627 which is incorporated by reference herein in its entirety.

[0174] In some embodiments of the compositions of the disclosure, the RNA-binding protein or RNA-binding portion thereof is a PUMBY (Pumilio-based assembly) protein. RNA-binding protein PumHD (Pumilio homology domain, a member of the PUF family), which has been widely used in native and modified form for targeting RNA, has been engineered to yield a set of four canonical protein modules, each of which targets one RNA base. These modules (i.e., Pumby, for Pumilio-based assembly) can be concatenated in chains of varying composition and length, to bind desired target RNAs. The specificity of such Pumby-RNA interactions is high, with undetectable binding of a Pumby chain to RNA sequences that bear three or more mismatches from the target sequence. Katarzyna et al., PNAS, 2016; 113(19): E2579-E2588.

[0175] In some embodiments of the compositions of the disclosure, the first RNA binding protein comprises a Pumilio and FBF (PUF) protein. In some embodiments, the first RNA binding protein comprises a Pumilio-based assembly (PUMBY) protein. In some embodiments, a PUF1 protein of the disclosure comprises or consists of the amino acid sequence of

| SEQ ID NO: 219) | |
|---|---|
| MDKSKQMNIN NLSNIPEVID PGITIPIYEE EYENNGESNS QLQQQPQKLG SYRSRAGKFS | 60 |
| NTLSNLLPSI SAKLHHSKKN SHGKNGAEFS SSNNSSQSTV ASKTPRASPS RSKMMESSID | 120 |
| GVTMDRPGSL TPPQDMEKLV HFPDSSNNFL IPAPRGSSDS FNLPHQISRT RNNTMSSQIT | 180 |
| SISSIAPKPR TSSGIWSSNA SANDPMQQHL LQQLQPTTSN NTTNSNTLND YSTKTAYFDN | 240 |
| MVSTSGSQMA DNKMNTNNLA IPNSVWSNTR QRSQSNASSI YTDAPLYEQP ARASISSHYT | 300 |
| IPTQESPLIA DEIDPQSINW VTMDPTVPSI NQISNLLPTN TISISNVFPL QHQQPQLNNA | 360 |
| INLTSTSLAT LCSKYGEVIS ARTLRNLNMA LVEFSSVESA VKALDSLQGK EVSMIGAPSK | 420 |
| ISFAKILPMH QQPPQFLLNS QGLPLGLENN NLQPQPLLQE QLFNGAVTFQ QQGNVSIPVF | 480 |
| NQQSQQSQHQ NHSSGSAGFS NVLHGYNNNN SMHGNNNNSA NEKEQCPFPL PPPNVNEKED | 540 |
| LLREIIELFF ANSDEYQINS LIKKSLNHKG TSDTQNFGPL PEPLSGREFD PPKLRELRKS | 600 |
| IDSNAESDLE IEQLATAMLD ELPELSSDYL GNTIVQKLFE HSSDIIKDIM LRKTSKYLTS | 660 |
| MGVHKNGTWA CQKMITMAHT PRQIMQVTQG VKDYCTPLIN DQFGNYVIQC VLKFGFPWNQ | 720 |
| FIFESIIANF WVIVQNRYGA RAVRACLEAH DIVTPEQSIV LSAMIVTYAE YLDTNSNGAL | 780 |
| LVTWFLDTSV LPNRHSILAP RLTKRIVELC GHRLASLTIL KVLNYRGDDN ARKIILDSLF | 840 |
| GNVNAHDSSP PKELTKLLCE TNYGPTFVHK VLAMPLLEDD LRAHIIKQVR KVLTDSTQIQ | 900 |
| PSRRLLEEVG LASPSSTHNK TKQQQQQHHN SSISHMFATP DTSGQHMRGL SVSSVKSGGS | 960 |
| KHTTMNTTTT NGSSASTLSP GQPLNANSNS SMGYFSYPGV FPVSGFSGNA SNGYAMNNDD | 1020 |
| LSSQFDMLNF NNGTRLSLPQ LSLTNHNNTT MELVNNVGSS QPHTNNNNNN NNTNYNDDNT | 1080 |
| VFETLTLHSA N | 1091. |

In some embodiments, a PUF3 protein of the disclosure comprises or consists of the amino acid sequence of

| (SEQ ID NO: 220) | |
|---|---|
| 1 | MEMNMDMDMD MELASIVSSL SALSHSNNNG GQAAAAGIVN GGAAGSQQIG GFRRSSFTTA |
| 61 | NEVDSEILLL HGSSESSPIF KKTALSVGTA PPFSTNSKEF FGNGGNYYQY RSTDTASLSS |
| 121 | ASYNNYHTHH TAANLGKNNK VNHLLGQYSA SIAGPVYYNG NDNNNSGGEG FFEKFGKSLI |
| 181 | DGTRELESQD RPDAVNTQSQ FISKSVSNAS LDTQNTFEQN VESDKNFNKL NRNTTNSGSL |
| 241 | YHSSSNSGSS ASLESERAHY PKRNIWNVAN TPVFRPSNNP AAVGATNVAL PNQQDGPANN |
| 301 | NFPPYMNGFP PNQFHQGPHY QNFPNYLIGS PSNFISQMIS VQIPANEDTE DSNGKKKKKA |
| 361 | NRPSSVSSPS SPPNNSPFPF AYPNPMMFMP PPPLSAPQQQ QQQQQQQQQE DQQQQQQQEN |
| 421 | PYIYYPTPNP IPVKMPKDEK TFKKRNNKNH PANNSNNANK QANPYLENSI PTKNTSKKNA |
| 481 | SSKSNESTAN NHKSHSHSHP HSQSLQQQQQ TYHRSPLLEQ LRNSSSDKNS NSNMSLKDIF |
| 541 | GHSLEFCKDQ HGSRFIQREL ATSPASEKEV IFNEIRDDAI ELSNDVFGNY VIQKFFEFGS |
| 601 | KIQKNTLVDQ FKGNMKQLSL QMYACRVIQK ALEYIDSNQR IELVLELSDS VLQMIKDQNG |
| 661 | NHVIQKAIET IPIEKLPFIL SSLTGHIYHL STHSYGCRVI QRLLEFGSSE DQESILNELK |
| 721 | DFIPYLIQDQ YGNYVIQYVL QQDQFTNKEM VDIKQETIET VANNVVEYSK HKFASNVVEK |
| 781 | SILYGSKNQK DLIISKILPR DKNHALNLED DSPMILMIKD QFANYVIQKL VNVSEGEGKK |
| 841 | LIVIAIRAYL DKLNKSNSLG NRHLASVEKL AALVENAEV. |

In some embodiments, a PUF4 protein of the disclosure comprises or consists of the amino acid sequence of

(SEQ ID NO: 221)

| | |
|---|---|
| 1 | MSTKGLKEEI DDVPSVDPVV SETVNSALEQ LQLDDPEENA |
| | TSNAFANKVS QDSQFANGPP |
| 61 | SQMFPHTQMM GGMGFMPYSQ MMQVPHNPCP FFPPPDFNDP |
| | TAPLSSSPLN AGGPPMLFKN |
| 121 | DSLPFQMLSS GSSVATQGGQ NLNPLINDNS MKVIPIASAD |
| | PLWTHSNVTG SASVAIEETT |
| 181 | ATLQESLPSK GRESNNKASS FPRQTFHALS PTDLINAANN |
| | VTLSKDFQSD MQNFSKAKKP |
| 241 | SVGANNTAKT RTQSISFDNT PSSTSFIPPT NSVSEKLSDF |
| | KIETSKEDLI NKTAPAKKES |
| 301 | PTTYGAAYPY GGPLLQPNPI MPGHPHNISS PIYGIRSPFP |
| | NSYEMGAQFQ PFSPILNPTS |
| 361 | HSLNANSPIP LTQSPIHLAP VLNPSSNSVA FSDMKNDGGK |
| | PTTDNDKAGP NVRMDLINPN |
| 421 | LGPSMQPFHI LPPQQNTPPP PWLYSTPPPF NAMVPPHLLA |
| | QNHMTLMNSA NNKHHGRNNN |
| 481 | SMSSHNDNDN IGNSNYNNKD TGRSNVGKMK NMKNSYHGYY |
| | NNNNNNNNNN NYNNNSNATN |
| 541 | SNSAEKQRKI EESSRFADAV LDQYIGSIHS LCKDQHGCRF |
| | LQKQLDILGS FAADAIFEET |
| 601 | KDYTVELMTD SFGNYLIQKL LEEVTTEQRI VLTKISSPHF |
| | VEISLNPHGT RALQKLIECI |
| 661 | KTDEEAQIVV DSIRTYTVQL SKDLNGNHVI QKCLQRLKPE |
| | NFQFIFDAIS DSCIDIATHR |
| 721 | HGCCVLQRCL DHGTTEQCDN LCDKLLALVD KLTLDPFGNY |
| | VVQYIITKEA EKNKYDYTHK |
| 781 | IVHLLKPRAI ELSIHKFGSN VIEKILKTAI VSEPMILEIL |
| | NNGGETGIQS LLNDSYGNYV |
| 841 | LQTALDISHK QNDYLYKRLS EIVAPLLVGP IRNTPHGKRI |
| | IGMLHLDS. |

In some embodiments, a PUF5 protein of the disclosure comprises or consists of the amino acid sequence of

| (SEQ ID NO: 222) | |
|---|---|
| 1 | MSDSTGRINS KASDSSSISD HQTADLSIFN GSFDGGAFSS SNIPLFNFMG TGNQRFQYSP |
| 61 | HPFAKESDPC RLAALTPSTP KGPLNLTPAD FGLADFSVGN ESFADFTANN TSFVGNVQSN |
| 121 | VRSTRLLPAW AVDNSGNIRD DLTLQDVVSN GSLIDFAMDR TGVKFLERHF PEDHDNEMHF |
| 181 | VLFDKLTEQG AVFTSLCRSA AGNFIIQKFV EHATLDEQER LVRKMCDNGL IEMCLDKFAC |
| 241 | PVVQMSIQKF DVSIAMKLVE KISSLDFLPL CTDQCAIHVL QKVVKLLPIS AWSFFVKFLC |
| 301 | RDDNLMTVCQ DKYGCRLVQQ TIDKLSDNPK LHCFNTRLQL LHGLMTSVAR NCFRLSSNEF |
| 361 | ANYVVQYVIK SSGVMEMYRD TIIEKCLLRN ILSMSQDKYA SHVVEGAFLF APPLLLSEMM |
| 421 | DEIFDGYVKD QETNRDALDI LLFHQYGNYV VQQMISICIS ALLGKEERKM VASEMRLYAK |
| 481 | WFDRIKNRVN RHSGRLERFS SGKKIIESLQ KLNVPMTMTN EPMPYWAMPT PLMDISAHFM |
| 541 | NKLNFQKNSV FDE. |

In some embodiments, a PUF6 protein of the disclosure comprises or consists of the amino acid sequence of

| (SEQ ID NO: 223) | |
|---|---|
| 1 | MTPNRRSTDS YNMLGASEDF DPDFSLLSNK THKNKNTKPP VKLLPYRHGS NTTSSDLDNY |
| 61 | IFNSGSGSSD DETPPPAAPI FISLEEVLLN GLLIDFAIDP SGVKFLEANY PLDSEDQIRK |
| 121 | AVFEKLTEST TLFVGICHSR NGNFIVQKLV ELATPAEQRE LLRQMIDGGL LVMCKDKFAC |
| 181 | RVVQLALQKF DHSNVFQLIQ ELSTFDLAAM CTDQISIHVI QRVVKQLPVD MWTFFVHFLS |
| 241 | SGDSLMAVCQ DKYGCRLVQQ VIDRLAENPK LPCFKFRIQL LHSLMTCIVR NCYRLSSNEF |
| 301 | ANYVIQYVIK SSGIMEMYRD TIIDKCLLRN LLSMSQDKYA SHVIEGAFLF APPALLHEMM |
| 361 | EEIFSGYVKD VELNRDALDI LLFHQYGNYV VQQMISICTA ALIGKEERQL PPAILLLYSG |
| 421 | WYEKMKQRVL QHASRLERFS SGKKIIDSVM RHGVPTAAAI NAQAAPSLME LTAQFDAMFP |
| 481 | SFLAR. |

In some embodiments, a PUF7 protein of the disclosure comprises or consists of the amino acid sequence of

| (SEQ ID NO: 224) | |
|---|---|
| 1 | MTPNRRSTDS YNMLGASFDF DPDFSLLSNK THKNKNPKPP VKLLPYRHGS NTTSSDSDSY |
| 61 | IFNSGSGSSD AETPAPVAPI FISLEDVILN GQLIDFAIDP SGVKFLEANY PLDSEDQIRK |
| 121 | AVFEKFTEST TLFVGLCHSR NGNFIVQKLV ELATPAEQRE LLRQMIDGGL LAMCKDKFAC |
| 181 | RVVQLALQKF DHSNVFQLIQ ELSTFDLAAM CTDQISIHVI QRVVKQLPVD MWTFFVHFLS |
| 241 | SGDSLMAVCQ DKYGCRLVQQ VIDRLAENPK LPCFKFRIQL LHSLMTCIVR NCYRLSSNEF |
| 301 | ANYVIQYVIK SSGIMEMYRD TIIDKCLLRN LLSMSQDKYA SHVIEGAFLF APPALLHEMM |
| 361 | EEIFSGYVKD VESNPDALDI LLFHQYGNYV VQQMISICTA ALIGKEEREL PPAILLLYSG |
| 421 | WYEKMKQRVL QHASRLERFS SGKKIIDSVM RHGVPTAAAV NAQAAPSLME LTAQFDAMFP |
| 481 | SFLAR. |

In some embodiments, a PUF8 protein of the disclosure comprises or consists of the amino acid sequence of

| (SEQ ID NO: 225) | |
|---|---|
| 1 | MSRPISIGNT CTFDPSASPI ESLGRSIGAQ KIVDSVCGSP IRSYGRHIST NPKNERLPDT |
| 61 | PEFQFATYMH QGGKVIGQNT LHMFGTPPSC YCAQENIPIS SNVGHVLSTI NNNYMNHQYN |
| 121 | GSNMFSNQMT QMLQAQAYND LQMHQAHSQS IRVPVQPSAT GIFSNTYREP TTTDDLLTRY |
| 181 | RANPAMMKNL KLSDIRGALL KFAKDQVGSR FIQQELkSSK DRFEKDSIFD EVVSNADELV |
| 241 | DDIFGNYVVQ KFFEYGEERH WARLVDAIID RVPEYAFQMY ACRVLQKALE KINEPLQIKI |
| 301 | LSQIRHVIHR CMKDQNGNHV VQKAIEKVSP QYVQFIVDTL LESSNTIYEM SVDPYGCRVV |
| 361 | QRCLEHCSPS QTKPVIGQIH KRFDEIANNQ YGNYVVQHVI EHGSEEDRMV IVTRVSNNLF |
| 421 | EFATHKYSSN VIEKCLEQGA VYHKSMIVGA ACHHQEGSVP IVVQMMKDQY ANYVVQKMFD |
| 481 | QVTSEQRREL ILTVRPHIPV LRQFPHGKHI LAKLEKYFQK PAVMSYPYQD MQGSH. |

In some embodiments, a PUF9 protein of the disclosure comprises or consists of the amino acid sequence of

| (SEQ ID NO: 226) | |
|---|---|
| 1 | MADPNWAYAP PTNYYADHSI AKPIMISGGH PSQDQGHSPK SESFGQSVTT AFNGMVDNLV |
| 61 | GSPSSSVQQR NYFTTTPFPI SRSPNDRNDD KIMGNGSYGV PIPIPQDGVP QGTPDFQMTP |
| 121 | FLQQGGHLIG GSPNGPVQVS GNWYSGGAGI FSTMQQADPS NGMPGMAAEF VNNENGMPGP |
| 181 | NGMHQQAMIS GSPPFPYQNM MNLTTSFGAM GLGPQQIQQR DPQMFQQPIL HEPIQGMAQN |
| 241 | GFGQQVFFTQ MQNQQHPQGQ AQQQLQQLAQ QHQQQQNSQQ FFGQGPNGMG NGGVMNDWSQ |
| 301 | RSFGMPQQQA QQNGLPPNFS QNPPRRRGPE DPNGQTPKTL QDIKNNVIEF AKDQHGSRFI |
| 361 | QQKLERASLR DKAAIFTPVL ENAEELMTDV FGNYVIQKFF EFGNNEQRNQ LVGTIRGNVM |
| 421 | KLALQMYGCR VIQKALEYVE EKYQHEILGE MEGQVLKCVK DQNGNHVIQK VIERVEPERL |
| 481 | QFIIDAFTKN NSDNVYTLSV HPYGCRVIQR VLEYCNEEQK QPVLDAIQIH LKQLVLDQYG |
| 541 | NYVIQHVIEH GSPSDKEQIV QDVISDDLLK FAQHKFASNV IEKCLTFGGH AERNLIIDKV |
| 601 | CGDPNDPSPP LLQMMKDPFA NYVVQKMLDV ADPQHRKKIT LTIKPHIATL RKYNFGKHIL |
| 661 | LKLEKYFAKQ APANSSNSSS NDQIYEHSPF DIPLGADFSN HPF. |

[0176] In some embodiments of the compositions of the disclosure, the RNA-binding protein or RNA-binding portion thereof is a PPR protein. PPR proteins (proteins with pentatricopeptide repeat (PPR) motifs derived from plants) are nuclear-encoded and exclusively controlled at the RNA level organelles (chloroplasts and mitochondria), cutting, translation, splicing, RNA editing, genes specifically acting on RNA stability. PPR proteins are typically a motif of 35 amino acids and have a structure in which a PPR motif is about 10 contiguous amino acids. The combination of PPR motifs can be used for sequence-selective binding to RNA. PPR proteins are often comprised of PPR motifs of about 10 repeat domains. PPR domains or RNA-binding domains may be configured to be catalytically inactive. WO 2013/058404 incorporated herein by reference in its entirety.

[0177] In some embodiments of the compositions of the disclosure, a fusion protein comprises the RNA-binding polypeptide. In some embodiments, the fusion protein comprises a sequence encoding a first RNA-binding polypeptide and a sequence encoding a second RNA-binding polypeptide, wherein neither the first RNA-binding polypeptide nor the second RNA-binding polypeptide comprises a significant DNA-nuclease activity, wherein the first RNA-binding polypeptide and the second RNA-binding polypeptide are not identical, and wherein the second RNA-binding polypeptide comprises an RNA-nuclease activity.

[0178] In some embodiments of the compositions of the disclosure, including those wherein a fusion protein comprises a sequence encoding a first RNA-binding polypeptide and a sequence encoding a second RNA-binding polypeptide, the first RNA binding protein comprises a CRISPR-Cas protein. In some embodiments, the CRISPR-Cas protein is a Type II CRISPR-Cas protein. In some embodiments, the first RNA binding protein comprises a Cas9 polypeptide or an RNA-binding portion thereof. In some embodiments, the CRISPR-Cas protein is a Type V CRISPR-Cas protein. In some embodiments, the first RNA binding protein comprises a Cpf1 polypeptide or an RNA-binding portion thereof. In some embodiments, the CRISPR-Cas protein is a Type VI CRISPR-Cas protein. In some embodiments, the first RNA binding protein comprises a Cas13 polypeptide or an RNA-binding portion thereof. In some embodiments, the CRISPR-Cas protein comprises a native RNA nuclease activity.

[0179] In some embodiments of the compositions of the disclosure, including those wherein a fusion protein comprises a sequence encoding a first RNA-binding polypeptide and a sequence encoding a second RNA-binding polypeptide, the native RNA nuclease activity is reduced or inhibited. In some embodiments, the native RNA nuclease activity is increased or induced. In some embodiments, the CRISPR-Cas protein comprises a native DNA nuclease activity and wherein the native DNA nuclease activity is inhibited. In some embodiments, the CRISPR-Cas protein comprises a mutation. In some embodiments, a nuclease domain of the CRISPR-Cas protein comprises the mutation. In some embodiments, the mutation occurs in a nucleic acid encoding the CRISPR-Cas protein. In some embodiments, the mutation comprises a substitution, an insertion, a deletion, a frameshift, an inversion, or a transposition. In some embodiments, the mutation comprises a deletion of a nuclease domain, a binding site within the nuclease domain, an active site within the nuclease domain, or at least one essential amino acid residue within the nuclease domain.

[0180] In some embodiments of the compositions of the disclosure, including those wherein a fusion protein comprises a sequence encoding a first RNA-binding polypeptide or RNA-binding portion thereof and a sequence encoding a second RNA-binding polypeptide or RNA-binding portion thereof, the first RNA binding protein comprises a Pumilio and FBF (PUF) protein. In some embodiments, the first RNA binding protein comprises a Pumilio-based assembly (PUMBY) protein. In some embodiments, the first RNA binding protein comprises a PPR (pentatricopeptide repeat) protein.

[0181] In some embodiments of the compositions of the disclosure, including those wherein a fusion protein comprises a sequence encoding a first RNA-binding polypeptide and a sequence encoding a second RNA-binding polypeptide, the first RNA binding protein does not require multimerization for RNA-binding activity. In some embodiments, the first RNA binding protein is not a monomer of a multimer complex. In some embodiments, a multimer protein complex does not comprise the first RNA binding protein.

[0182] In some embodiments of the compositions of the disclosure, including those wherein a fusion protein comprises a sequence encoding a first RNA-binding polypeptide and a sequence encoding a second RNA-binding polypeptide, the first RNA binding protein selectively binds to a target sequence within the RNA molecule. In some embodiments, the first RNA binding protein does not comprise an affinity for a second sequence within the RNA molecule. In some embodiments, the first RNA binding protein does not comprise a high affinity for or selectively bind a second sequence within the RNA molecule.

[0183] In some embodiments of the compositions of the disclosure, including those wherein a fusion protein comprises a sequence encoding a first RNA-binding polypeptide and a sequence encoding a second RNA-binding polypeptide, an RNA genome or an RNA transcriptome comprises the RNA molecule.

[0184] In some embodiments of the compositions of the disclosure, including those wherein a fusion protein comprises a sequence encoding a first RNA-binding polypeptide and a sequence encoding a second RNA-binding polypeptide, the first RNA binding protein comprises between 2 and 1300 amino acids, inclusive of the endpoints.

[0185] In some embodiments of the compositions of the disclosure, including those wherein a fusion protein comprises a sequence encoding a first RNA-binding polypeptide and a sequence encoding a second RNA-binding polypeptide, the sequence encoding the first RNA binding protein further comprises a sequence encoding a nuclear localization signal (NLS). In some embodiments, the sequence encoding a nuclear localization signal (NLS) is positioned 3′ to the sequence encoding the first RNA binding protein. In some embodiments, the first RNA binding protein comprises an NLS at a C-terminus of the protein. In some embodiments, the sequence encoding the first RNA binding protein further comprises a first sequence encoding a first NLS and a second sequence encoding a second NLS. In some embodiments, the sequence encoding the first NLS or the second NLS is positioned 3′ to the sequence encoding the first RNA binding protein. In some embodiments, the first RNA binding protein comprises the first NLS or the second NLS at a C-terminus of the protein.

### RNA-Binding Endonucleases

[0186] In some embodiments of the compositions of the disclosure, the second RNA binding protein comprises or consists of a nuclease domain. In some embodiments, the second RNA binding protein binds RNA in a manner in which it associates with RNA. In some embodiments, the second RNA binding protein associates with RNA in a manner in which it cleaves RNA.

[0187] In some embodiments of the compositions of the disclosure, the second RNA binding protein comprises or consists of an RNAse.

[0188] In some embodiments of the compositions of the disclosure, including those wherein a fusion protein comprises a sequence encoding a first RNA-binding polypeptide and a sequence encoding a second RNA-binding polypeptide, the second RNA binding protein comprises or consists of a nuclease domain. In some embodiments, the sequence encoding the second RNA binding protein comprises or consists of an RNAse. In some embodiments, the second RNA binding protein comprises or consists of an RNAse1. In some embodiments, the sequence encoding the RNAse1 comprises or consists of:

(SEQ ID NO: 20)
KESRAKKFQRQHMDSDSSPSSSSTYCNQMMRRRNMTQGLCKPVNTFVHE
PLVDVQNVCFQEKVTCKNGQGNCYKSNSSMHITDCRLTNGSRYPNCAYR
TSPKERHIIVACEGSPYVPVHFDASVEDST.

In some embodiments, the second RNA binding protein comprises or consists of an RNAse4. In some embodiments, the sequence encoding the RNAse4 comprises or consists of:

(SEQ ID NO: 21)
QDGMYQRFLRQHVHPEETGGSDRYCDLMMQRRKMTLYHCKRENTFIHED
IWNIRSICSTTNIQCKNGKMNCHEGVVKVTDCRDTGSSRAPNCRYRAIA
STRRVVIACEGNPQVPVHFDG.

In some embodiments, the second RNA binding protein comprises or consists of an RNAse6. In some embodiments, the sequence encoding the RNAse6 comprises or consists of:

(SEQ ID NO: 22)
WPKRLTKAHWFEIQHIQPSPLQCNRAMSGINNYTQHCKHQNTFLHDSFQ
NVAAVCDLLSIVCKNRRHNCHQSSKPVNMTDCRLTSGKYPQCRYSAAAQ
YKFFIVACDPPQKSDPPYKLVPVHLDSIL.

In some embodiments, the second RNA binding protein comprises or consists of an RNAse7. In some embodiments, the sequence encoding the RNAse7 comprises or consists of:

(SEQ ID NO: 23)
APARAGFCPLLLLLLLGLWVAEIPVSAKPKGMTSSQWFKIQHMQPSPQA
CNSAMKNINKHTKRCKDLNTFLHEPFSSVAATCQTPKIACKNGDKNCHQ
SHGPVSLTMCKLTSGKYPNCRYKEKRQNKSYVVACKPPQKKDSQQFHLV
PVHLDRVL.

In some embodiments, the second RNA binding protein comprises or consists of an RNAse8. In some embodiments, the sequence encoding the RNAse8 comprises or consists of:

(SEQ ID NO: 24)
TSSQWFKTQHVQPSPQACNSAMSIINKYTERCKDLNTFLHEPFSSVAIT
CQTPNIACKNSCKNCHQSHGPMSLTMGELTSGKYPNCRYKEKHLNTPYI
VACDPPQQGDPGYPLVPVHLDKVV.

In some embodiments, the second RNA binding protein comprises or consists of an RNAse2. In some embodiments, the sequence encoding the RNAse2 comprises or consists of:

(SEQ ID NO: 25)
KPPQFTWAQWFETQHINMTSQQCTNAMQVINNYQRRCKNQNTFLLTTFA
NVVNVCGNPNMTCPSNKTRKNCHHSGSQVPLIHCNLTTPSPQNISNCRY
AQTPANMFYIVACDNRDQRRDPPQYPVVPVHLDRII.

In some embodiments, the second RNA binding protein comprises or consists of an RNAse6PL. In some embodiments, the sequence encoding the RNAse6PL comprises or consists of:

(SEQ ID NO: 26)
DKRLRDNHEWKKLIMVQHWPETVCEKIQNDCRDPPDYWTIHGLWPDKSE
GCNRSWPFNLEEIKKNWMEITDSSLPSPSMGPAPPRWMRSTPRRSTLAE
AWNSTGSWTSTGGCALPPAALPSGDLCCRPSLTAGSRGVGVDLTALHQL
LHVHYSATGIIPEECSEPTKPFQIILHHDHTEWVQSIGMPIWGTISSSE
SAIGKNEESQPACAVLSHDS.

In some embodiments, the second RNA binding protein comprises or consists of an RNAseL. In some embodiments, the sequence encoding the RNAseL comprises or consists of:

(SEQ ID NO: 27)
AAVEDNHLLIKAVQNEDVDLVQQLLEGGANVNFQEEEGGWTPLHNAVQMS
REDIVELLLRHGADPVLRKKNGATPFILAAIAGSVKdLLKLFLSKGADVN
ECDFYGFTAFMEAAVYGKVKALKFLYKRGANVNLRRKTKEDQERLRKGGA
TALMDAAEKGHVEVLKILLDEMGADVNACDNMGRNALIHALLSSDDSDVE
AITHLLLDHGADVNVRGERGKTPLILAVEKKHLGLVQRLLEQEHIEINDT
DSDGKTALLLAVELKLKKIAELLCKRGASTDCGDLVMTARRNYDHSLVKV
LLSHGAKEDFHPPAEDWKPQSSHWGAALKDLHRIYRPMIGKLKFFIDEKY
KIADTSEGGIYLGFYEKQEVAVKTFCEGSPRAQREVSCLQSSRENSHLVT
FYGSESHRGHLFVCVTLCEQTLEACLDVHRGEDVENEEDEFARNVLSSIF
KAVQELHLSCGYTHQDLQPQNILIDSKKAAHLADFDKSIKWAGDPQEVKR
DLEDLGRLVLYVVKKGSISFEDLKAQSNEEVVQLSPDEETKDLIHRLFHP
GEHVRDCLSDLLGHPFFWTWESRYRTLRNVGNESDIKTRKSESEILRLLQ
PGPSEHSKSFDKWTTKINECVMKKMNKFYEKRGNFYQNTVGDLLKFIRNL
GEHIDEEKHKKMKLKIGDPSLYFQKTFPDLVIYVYTKLQNTEYRKHFPQT
HSPNKPQCDGAGGASGLASPGC.

In some embodiments, the second RNA binding protein comprises or consists of an RNAseT2. In some embodiments, the sequence encoding the RNAseT2 comprises or consists of:

(SEQ ID NO: 28)
VQHWPETVCEKIQNDCRDPPDYWTIHGLWPDKSEGCNRSWPFNLEEIKD
LLPEIVIRAYWFIDVIHSFPNRSRFWKHEWEKHGTCAAQVDALNSQKKY
FGRSLELYRELDLNSVLLKLGIKPSINYYQVADFKDALARVYGVIPKIQ
CLPPSQDEEVQTIGQIELCLTKQDQQLQNCTEPGEQPSPKQEVWLANGA
AESRGLRVCEDGPVFYPPPKKTKH.

In some embodiments, the second RNA binding protein comprises or consists of an RNAse11. In some embodiments, the sequence encoding the RNAse11 comprises or consists of:

(SEQ ID NO: 29)
EASESTMKIIKEEFTDEEMQYDMAKSGQEKQTIEILMNPILLVKNTSLS
MSKDDMSSTLLTFRSLHYNDPKGNSSGNDKECCNDMTVWRKVSEANGSC
KWSNNFIRSSTEVMRRVHRAPSCKFVQNPGISCCESLELENTVCQFTTG
KQFPRCQYHSVTSLEKILTVLTGHSLMSWLVCGSKL.

In some embodiments, the second RNA binding protein comprises or consists of an RNAseT2-like. In some embodiments, the sequence encoding the RNAseT2-like comprises or consists of:

(SEQ ID NO: 30)
XLGGADKRLRDNHEWKKLIMVQHWPETVCEKIQNDCRDPPDYWTIHGLW
PDKSEGCNRSWPFNLEEIKDLLPEMRAYWPDVIHSFPNRSRFWKHEWEK
HGTCAAQVDALNSQKKYFGRSLELYRELDLNSVLLKLGIKPSINYYQTT
EEDLNLDVEPTTEDTAEEVTIHVLLHSALFGEIGPRRW.

[0189] In some embodiments of the compositions of the disclosure, the second RNA binding protein comprises or consists of a mutated RNAse.

[0190] In some embodiments, the second RNA binding protein comprises or consists of a mutated Rnase1 (Rnase1(K41R)) polypeptide. In some embodiments, the Rnase1(K41R) polypeptide comprises or consists of:

(SEQ ID NO: 116)
KESRAKKFQRQHMDSDSSPSSSSTYCNQMMRRRNIVITQGRCRPVNTFV
HEPLVDVQNVCFQEKVTCKNGQGNCYKSNSSMHITDCRLTNGSRYPNCA
YRTSPKERHIIVACEGSPYVPVHFDASVEDS.

[0191] In some embodiments, the second RNA binding protein comprises or consists of a mutated Rnase1 (Rnase1(K41R, D121E)) polypeptide. In some embodiments, the Rnase1 (Rnase1(K41R, D121E)) polypeptide comprises or consists of:

(SEQ ID NO: 117)
KESRAKKFQRQHMDSDSSPSSSSTYCNQMMRRRNIVITQGRCRPVNTFV
HEPLVDVQNVCFQEKVTCKNGQGNCYKSNSSMHITDCRLTNGSRYPNCA
YRTSPKERHIIVACEGSPYVPVHFEASVEDST.

[0192] In some embodiments, the second RNA binding protein comprises or consists of a mutated Rnase1 (Rnase1(K41R, D121E, H119N)) polypeptide. In some embodiments, the Rnase1 (Rnase1(K41R, D121E, H119N)) polypeptide comprises or consists of:

(SEQ ID NO: 118)
KESRAKKFQRQHMDSDSSPSSSSTYCNQMMRRRNIVITQGRCRPVNTFV
HEPLVDVQNVCFQEKVTCKNGQGNCYKSNSSMHITDCRLTNGSRYPNCA
YRTSPKERHIIVACEGSPYVPVNFEASVEDST.

[0193] In some embodiments, the second RNA binding protein comprises or consists of a mutated Rnase1. In some embodiments, the second RNA binding protein comprises or consists of a mutated Rnase1 (Rnase1(H119N)) polypeptide. In some embodiments, the Rnase1 (Rnase1(H119N)) polypeptide comprises or consists of:

(SEQ ID NO: 119)
KESRAKKFQRQHMDSDSSPSSSSTYCNQMMRRRNMTQGRCKPVNTFVHEP
LVDVQNVCFQEKVTCKNGQGNCYKSNSSMHITDCRLTNGSRYPNCAYRTS
PKERHIIVACEGSPYVPVNFDASVEDST.

[0194] In some embodiments, the second RNA binding protein comprises or consists of a mutated Rnase1 (Rnase1(R39D, N67D, N88A, G89D, R91D, H119N)) polypeptide. In some embodiments, the Rnase1 (Rnase1(R39D, N67D, N88A, G89D, R91D, H119N)) polypeptide comprises or consists of:

(SEQ ID NO: 120)
KESRAKKFQRQHMDSDSSPSSSSTYCNQMMRRRNMTQGDCKPVNTFVHE
PLVDVQNVCFQEKVTCKDGQGNCYKSNSSMHITDCRLTADSDYPNCAYR
TSPKERHIIVACEGSPYVPVNFDASVEDST.

In some embodiments, the second RNA binding protein comprises or consists of a mutated Rnase1 (Rnase1(R39D, N67D, N88A, G89D, R91D, H119N)) polypeptide.

[0195] In some embodiments, the Rnase1 (Rnase1(R39D, N67D, N88A, G89D, R91D, H119N, K41R, D121E)) polypeptide comprises or consists of:

(SEQ ID NO: 121)
KESRAKKFQRQHMDSDSSPSSSSTYCNQMMRRRNMTQGDCRPVNTFVHEP
LVDVQNVCFQEKVTCKDGQGNCYKSNSSMHITDCRLTADSDYPNCAYRTS
PKERHIIVACEGSPYVPVNFEASVEDST.

[0196] In some embodiments, the second RNA binding protein comprises or consists of a mutated Rnase1 (Rnase1(R39D, N67D, N88A, G89D, R91D, H119N)) polypeptide. In some embodiments, the Rnase1 (Rnase1(R39D, N67D, N88A, G89D, R91D)) polypeptide comprises or consists of:

(SEQ ID NO: 122)
KESRAKKFQRQHMDSDSSPSSSSTYCNQMMRRRNMTQGDCKPVNTFVHEP
LVDVQNVCFQEKVTCKDGQGNCYKSNSSMHITDCRLTADSDYPNCAYRTS
PKERHIIVACEGSPYVPVHFDASVEDST.

[0197] In some embodiments, the second RNA binding protein comprises or consists of a mutated Rnase1 (Rnase1 (R39D, N67D, N88A, G89D, R91D, H119N, K41R, D121E)) polypeptide that comprises or consists of:

(SEQ ID NO: 208)
KESRAKKFQRQHMDSDSSPSSSSTYCNQMMRRRNMTQGDCRPVNTFVHEP
LVDVQNVCFQEKVTCKDGQGNCYKSNSSMHITDCRLTADSDYPNCAYRTS
PKERHIIVACEGSPYVPVNFEASVEDST.

[0198] In some embodiments, the sequence encoding the second RNA binding protein comprises or consists of a NOB1 polypeptide. The composition of claim 101, wherein the sequence encoding the NOB1 polypeptide comprises or consists of:

(SEQ ID NO: 31)
APVEHVVADAGAFLRHAALQDIGKNIYTIREVVTEIRDKATRRRLAVLP
YELRFKEPLPEYVRLVTEFSKKTGDYPSLSATDIQVLALTYQLEAEFVG
VSHLKQEPQKVKVSSSIQHPETPLHISGFHLPYKPKPPQETEKGHSACE
PENLEFSSFNIFWRNPLPNIDHELQELLIDRGEDVPSEEEEEEENGFED
RKDDSDDDGGGWITPSNIKQIQQELEQCDVPEDVRVGCLTTDFAMQNVL
LQMGLHVLAVNGMLIREARSYILRCHGCFKTTSDMSRVFCSHCGNKTLK
KVSVTV.

[0199] In some embodiments, the sequence encoding the second RNA binding protein comprises or consists of an endonuclease. In some embodiments, the sequence encoding the second RNA binding protein comprises or consists of an endonuclease V (ENDOV). In some embodiments, the sequence encoding the ENDOV comprises or consists of:

(SEQ ID NO: 32)
AFSGLQRVGGVDVSFVKGDSVRACASLVVLSFPELEVVYEESRMVSLTAP
YVSGFLAFREVPFLLELVQQLREKEPGLMPQVLLVDGNGVLHHRGFGVAC
HLGVLTDLPCVGVAKKLLQVDGLENNALHKEKIRLLQTRGDSFPLLGDSG
TVLGMALRSHDRSTRPLYISVGHRMSLEAAVRLTCCCCRFRIPEPVRQAD
ICSREHIRKS.

[0200] In some embodiments, the sequence encoding the second RNA binding protein comprises or consists of an endonuclease G (ENDOG). In some embodiments, the sequence encoding the ENDOG comprises or consists of:

(SEQ ID NO: 33)
AELPPVPGGPRGPGELAKYGLPGLAQLKSRESYVLCYDPRTRGALWVVEQ
LRPERLRGDGDRRECDFREDDSVHAYHRATNADYRGSGFDRGHLAAAANH
RWSQKAMDDTFYLSNVAPQVPHLNQNAWNNLEKYSRSLTRSYQNVYVCTG
PLFLPRTEADGKSYVKYQVIGKNHVAVPTHFEKVLILEAAGGQIELRTYV
MPNAPVDEAIPLERFLVPIESIERASGLLFVPNILARAGSLKAITAGSK.

[0201] In some embodiments, the sequence encoding the second RNA binding protein comprises or consists of an endonuclease D1 (ENDOD1). In some embodiments, sequence encoding the ENDOD1 comprises or consists of:

(SEQ ID NO: 34)
RLVGEEEAGFGECDKFFYAGTPPAGLAADSHVKICQRAEGAERFATLYST
RDRIPVYSAFRAPRPAPGGAEQRWLVEPQIDDPNSNLEEAINEAEAITSV
NSLGSKQALNTDYLDSDYQRGQLYPFSLSSDVQVATFTLTNSAPMTQSFQ
ERWYVNLHSLMDRALTPQCGSGEDLYILTGTVPSDYRVKDKVAVPEFVWL
AACCAVPGGGWAMGFVKHTRDSDIIEDVMVKDLQKLLPFNPQLFQNNCGE
TEQDTEKMKKILEVVNQIQDEERMVQSQKSSSPLSSTRSKRSTLLPPEAS
EGSSSFLGKLMGFIATPFIKLFQLIYYLVVAILKNIVYFLWCVTKQVING
IESCLYRLGSATISYFMAIGEELVSIPWKVLKVVAKVIRALLRILCCLLK
AICRVLSIPVRVLVDVATFPVYTMGAIPIVCKDIALGLGGTVSLLFDTAF
GTLGGLFQVVFSVCKRIGYKVTFDNSGEL.

[0202] In some embodiments, the sequence encoding the second RNA binding protein comprises or consists of a Human flap endonuclease-1 (hFEN1). In some embodiments, the sequence encoding the hFEN1 comprises or consists of:

(SEQ ID NO: 35)
MGIQGLAKLIADVAPSAIRENDIKSYFGRKVAIDASMSIYQFLIAVRQGG
DVLQNEEGETTSHLMGMFYRTIRMMENGIKPVYVFDGKPPQLKSGELAKR
SERRAEAEKQLQQAQAAGAEQEVEKFTKRLVKVTKQHNDECKHLLSLMGI
PYLDAPSEAEASCAALVKAGKVYAAATEDMDCLTFGSPVLMRHLTASEAK
KLPIQEFHLSRILQELGLNQEQFVDLCILLGSDYCESIRGIGPKRAVDLI
QKHKSIEEIVRRLDPNKYPVPENWLHKEAHQLFLEPEVLDPESVELKWSE
PNEEELIKFMCGEKQFSEERIRSGVKRLSKSRQGSTQGRLDDFFKVTGSL
SSAKRKEPEPKGSTKKKAKTGAAGKFKRGK.

[0203] In some embodiments, the sequence encoding the second RNA binding protein comprises or consists of a human Schlafen 14 (hSLFN14) polypeptide. In some embodiments, the sequence encoding the hSLFN14 comprises or consists of:

(SEQ ID NO: 36)
ESTHVEFKRFTTKKVIPRIKEMLPHYVSAFANTQGGYVLIGVDDKSKEVV
GCKWEKVNPDLLKKEIENCIEKLPTFHFCCEKPKVNFTTKILNVYQKDVL
DGYVCVIQVEPFCCVVFAEAPDSWIMKDNSVTRLTAEQWVVMMLDTQSAP
PSLVTDYNSCLISSASSARKSPGYPIKVHKFKEALQ.

[0204] In some embodiments, the sequence encoding the second RNA binding protein comprises or consists of a human beta-lactamase-like protein 2 (hLACTB2) polypeptide. In some embodiments, the sequence encoding the hLACTB2 comprises or consists of:

(SEQ ID NO: 37)
TLQGTNTYLVGTGPRRILIDTGEPAIPEYISCLKQALTEFNTAIQEIVVT
HWHRDHSGGIGDICKSINNDTTYCIKKLPRNPQREDIGNGEQQYVYLKDG
DVIKTEGATLRVLYTPGHTDDHMALLLEEENAIFSGDCILGEGTTVFEDL
YDYMNSLKELLKIKADIIYPGHGPVIHNAEAKIQQYISHRNIREQQILTL
FRENFEKSFTVMELVKIIYKNTPENLHEMAKHNLLLHLKKLEKEGKIFSN
TDPDKKWKAHL.

[0205] In some embodiments, the sequence encoding the second RNA binding protein comprises or consists of an apurinic/apyrimidinic (AP) endodeoxyribonuclease (APEX2) polypeptide. In some embodiments, the sequence encoding the APEX2 comprises or consists of:

(SEQ ID NO: 38)
MLRVVSWNINGIRRPLQGVANQEPSNCAAVAVGRILDELDADIVCLQETK
VTRDALTEPLAIVEGYNSYFSFSRNRSGYSGVATFCKDNATPVAAEEGLS
GLFATQNGDVGCYGNMDEFTQEELRALDSEGRALLTQHKIRTWEGKEKTL
TLINVYCPHADPGRPERLVFKMRFYRLLQIRAEALLAAGSHVIILGDLNT
AHRPIDHWDAVNLECFEEDPGRKWMDSLLSNLGCQSASHVGPFIDSYRCF
QPKQEGAFTCWSAVTGARHLNYGSRLDYVLGDRTLVIDTFQASFLLPEVI
VIGSDHCPVGAVLSVSSVPAKQCPPLCTRFLPEFAGTQLKILRFLVPLEQ
SPVLEQSTLQHNNQTRVQTCQNKAQVRSTRPQPSQVGSSRGQKNLKSYFQ
PSPSCPQASPDIELPSLPLMSALMTPKTPEEKAVAKVVKGQAKTSEAKDE
KELRTSFWKSVLAGPLRTPLCGGHREPCVMRTVKKPGPNLGRRFYMCARP
RGPPTDPSSRCNFFLWSRPS.

[0206] In some embodiments, the sequence encoding the APEX2 comprises or consists of:

(SEQ ID NO: 39)
MLRVVSWNINGIRRPLQGVANQEPSNCAAVAVGRILDELDADIVCLQETK
VTRDALTEPLAIVEGYNSYFSFSRNRSGYSGVATFCKDNATPVAAEEGLS
GLFATQNGDVGCYGNMDEFTQEELRALDSEGRALLTQHKIRTWEGKEKTL
TLINVYCPHADPGRPERLVFKMRFYRLLQIRAEALLAAGSHVIILGDLNT
AHRPIDHWDAVNLECFEEDPGRKWMDSLLSNLGCQSASHVGPFIDSYRCF
QPKQEGAFTCWSAVTGARHLNYGSRLDYVLGDRTLVIDTFQASFLLPEVG
SDHCPVGAVLSVSSVPAKQCPPLCTRFLPEFAGTQLKILRFLVPLEQSP.

[0207] In some embodiments, the sequence encoding the second RNA binding protein comprises or consists of an angiogenin (ANG) polypeptide. In some embodiments, the sequence encoding the ANG comprises or consists of:

(SEQ ID NO: 40)
[sequence omitted]

[0208] In some embodiments, the sequence encoding the second RNA binding protein comprises or consists of a heat responsive protein 12 (HRSP12) polypeptide. In some embodiments, the sequence encoding the HRSP12 comprises or consists of:

(SEQ ID NO: 41)
SSLIRRVISTAKAPGAIGPYSQAVLVDRTIYISGQIGMDPSSGQLVSGGV
AEEAKQALKNMGEILKAAGCDFTNVVKTTVLLADINDFNTVNEIYKQYFK
SNFPARAAYQVAALPKGSRIEIEAVAIQGPLTTASL.

[0209] In some embodiments, the sequence encoding the second RNA binding protein comprises or consists of a Zinc Finger CCCH-Type Containing 12A (ZC3H12A) polypeptide. In some embodiments, the sequence encoding the ZC3H12A comprises or consists of:

(SEQ ID NO: 42)
GGGTPKAPNLEPPLPEEEKEGSDLRPVVIDGSNVAMSHGNKEVFSCRGIL
LAVNWFLERGHTDITVFVPSWRKEQPRPDVPITDQHILRELEKKKILVFT
PSRRVGGKRVVCYDDRFIVKLAYESDGIVVSNDTYRDLQGERQEWKRFIE
ERLLMYSFVNDKFMPPDDPLGRHGPSLDNFLRKKPLTLE.

In some embodiments, the sequence encoding the ZC3H12A comprises or consists of:

(SEQ ID NO: 43)
SGPCGEKPVLEASPTMSLWEFEDSHSRQGTPRPGQELAAEEASALELQM
KVDFFRKLGYSSTEIHSVLQKLGVQADTNTVLGELVKHGTATERERQTS
PDPCPQLPLVPRGGGTPKAPNLEPPLPEEEKEGSDLRPVVIDGSNVAMS
HGNKEVFSCRGILLAVNWFLERGHTDITVFVPSWRKEQPRPDVPITDQH
ILRELEKKKILVFTPSRRVGGKRVVCYDDRFIVKLAYESDGIVVSNDTY
RDLQGERQEWKRFIEERLLMYSFVNDKFMPPDDPLGRHGPSLDNFLRKK
PLTLEHRKQPCPYGRKCTYGIKCRFFHPERPSCPQRSVADELRANALLS
PPRAPSKDKNGRRPSPSSQSSSLLTESEQCSLDGKKLGAQASPGSRQEG
LTQTYAPSGRSLAPSGGSGSSFGPTDWLPQTLDSLPYVSQDCLDSGIGS
LESQMSELWGVRGGGPGEPGPPRAPYTGYSPYGSELPATAAFSAFGRAM
GAGHFSVPADYPPAPPAFPPREYWSEPYPLPPPTSVLQEPPVQSPGAGR
SPWGRAGSLAKEQASVYTKLCGVFPPHLVEAVMGRFPQLLDPQQLAAEI
LSYKSQHPSE.

[0210] In some embodiments, wherein the sequence encoding the second RNA binding protein comprises or consists of a Reactive Intermediate Imine Deaminase A (RIDA) polypeptide. In some embodiments, the sequence encoding the RIDA comprises or consists of:

(SEQ ID NO: 44)
SSLIRRVISTAKAPGAIGPYSQAVLVDRTIYISGQIGMDPSSGQLVSGGV
AEEAKQALKNMGEILKAAGCDFTNVVKTTVLLADINDFNTVNEIYKQYFK
SNFPARAAYQVAALPKGSRIEIEAVAIQGPLTTASL.

[0211] In some embodiments, the sequence encoding the second RNA binding protein comprises or consists of a Phospholipase D Family Member 6 (PDL6) polypeptide. In some embodiments, the sequence encoding the PDL6 comprises or consists of:

(SEQ ID NO: 126)
EALFFPSQVTCTEALLRAPGAELAELPEGCPCGLPHGESALSRLLRALLA
ARASLDLCLFAFSSPQLGRAVQLLHQRGVRVRVVTDCDYMALNGSQIGLL
RKAGIQVRHDQDPGYMHHKFAIVDKRVLITGSLNWTTQAIQNNRENVLIT
EDDEYVRLFLEEFERIWEQFNPTKYTFFPPKKSHGSCAPPVSRAGGRLLS
WHRTCGTSSESQT.

[0212] In some embodiments, the sequence encoding the second RNA binding protein comprises or consists of a Endonuclease III-like protein 1 (NTHL) polypeptide. In some embodiments, the sequence encoding the NTHL comprises or consists of:

(SEQ ID NO: 123)
CSPQESGMTALSARMLTRSRSLGPGAGPRGCREEPGPLRRREAAAEARKS
HSPVKRPRKAQRLRVAYEGSDSEKGEGAEPLKVPVWEPQDWQQQLVNIRA
MRNKKDAPVDHLGTEHCYDSSAPPKVRRYQVLLSLMLSSQTKDQVTAGAM
QRLRARGLTVDSILQTDDATLGKLIYPVGFWRSKVKYIKQTSAILQQHYG
GDIPASVAELVALPGVGPKMAHLAMAVAWGTVSGIAVDTHVHRIANRLRW
TKKATKSPEETRAALEEWLPRELWHEINGLLVGFGQQTCLPVHPRCHACL
NQALCPAAQGL.

[0213] In some embodiments, the sequence encoding the second RNA binding protein comprises or consists of a Mitochondrial ribonuclease P catalytic subunit (KIAA0391) polypeptide. In some embodiments, the sequence encoding the KIAA0391 comprises or consists of:

(SEQ ID NO: 127)
KARYKTLEPRGYSLLIRGLIHSDRWREALLLLEDIKKVITPSKKNYNDCI
QGALLHQDVNTAWNLYQELLGHDIVPMLETLKAFFDFGKDIKDDNYSNKL
LDILSYLRNNQLYPGESFAHSIKTWFESVPGKQWKGQFTTVRKSGQCSGC
GKTIESIQLSPEEYECLKGKIMRDVIDGGDQYRKTTPQELKRFENFIKSR
PPFDVVIDGLNVAKMFPKVRESQLLLNVVSQLAKRNLRLLVLGRKHMLRR
SSQWSRDEMEEVQKQASCFFADDISEDDPFLLYATLHSGNHCRFITRDLM
RDHKACLPDAKTQRLFFKWQQGHQLAIVNRFPGSKLTFQRILSYDTVVQT
TGDSWHIPYDEDLVERCSCEVPTKWLCLHQKT.

[0214] In some embodiments, the sequence encoding the second RNA binding protein comprises or consists of an apurinic or apyrimidinic site lyase (APEX1) polypeptide. In some embodiments, the sequence encoding the APEX1 comprises or consists of:

(SEQ ID NO: 125)
PKRGKKGAVAEDGDELRTEPEAKKSKTAAKKNDKEAAGEGPALYEDPPDQ
KTSPSGKPATLKICSWNVDGLRAWIKKKGLDWVKEEAPDILCLQETKCSE
NKLPAELQELPGLSHQYWSAPSDKEGYSGVGLLSRQCPLKVSYGIGDEEH
DQEGRVIVAEFDSFVLVTAYVPNAGRGLVRLEYRQRWDEAFRKFLKGLAS
RKPLVLCGDLNVAHEEIDLRNPKGNKKNAGFTPQERQGFGELLQAVPLAD
SFRHLYPNTPYAYTFWTYMMNARSKNVGWRLDYFLLS.

[0215] In some embodiments, the sequence encoding the second RNA binding protein comprises or consists of an argonaute 2 (AGO2) polypeptide. In some embodiments, the sequence encoding the AGO2 comprises or consists of:

(SEQ ID NO: 128)
SVEPMFRHLKNTYAGLQLVVVILPGKTPVYAEVKRVGDTVLGMATQCVQM
KNVQRTTPQTLSNLCLKINVKLGGVNNILLPQGRPPVFQQPVIFLGADVT
HPPAGDGKKPSIAAVVGSMDAHPNRYCATVRVQQHRQEIIQDLAAMVREL
LIQFYKSTRFKPTRIIFYRDGVSEGQFQQVLHHELLAIREACIKLEKDYQ
PGITFIVVQKRHHTRLFCTDKNERVGKSGNIPAGTTVDTKITHPTEFDFY
LCSHAGIQGTSRPSHYHVLWDDNRFSSDELQILTYQLCHTYVRCTRSVSI
PAPAYYAHLVAFRARYHLVDKEHDSAEGSHTSGQSNGRDHQALAKAVQVH
QDTLRTMYFA.

[0216] In some embodiments, the sequence encoding the second RNA binding protein comprises or consists of a mitochondrial nuclease EXOG (EXOG) polypeptide. In some embodiments, the sequence encoding the EXOG comprises or consists of:

(SEQ ID NO: 129)
QGAEGALTGKQPDGSAEKAVLEQFGFPLTGTEARCYTNHALSYDQAKRVP
RWVLEHISKSKIMGDADRKHCKFKPDPNIPPTFSAFNEDYVGSGWSRGHM
APAGNNKFSSKAMAETFYLSNIVPQDFDNNSGYWNRIEMYCRELTERFED
VWVVSGPLTLPQTRGDGKKIVSYQVIGEDNVAVPSHLYKVILARRSSVST
EPLALGAFVVPNEAIGFQPQLTEFQVSLQDLEKLSGLVFFPHLDRTSDIR
NICSVDTCKLLDFQEFTLYLSTRKIEGARSVLRLEKIMENLKNAEIEPDD
YFMSRYEKKLEELKAKEQSGTQIRKPS.

[0217] In some embodiments, the sequence encoding the second RNA binding protein comprises or consists of a Zinc Finger CCCH-Type Containing 12D (ZC3H12D) polypeptide. In some embodiments, the sequence encoding the ZC3H12D comprises or consists of:

(SEQ ID NO: 130)
EHPSKMEFFQKLGYDREDVLRVLGKLGEGALVNDVLQELIRTGSRPGALE
HPAAPRLVPRGSCGVPDSAQRGPGTALEEDFRTLASSLRPIVIDGSNVAM
SHGNKETFSCRGIKLAVDWFRDRGHTYIKVFVPSWRKDPPRADTPIREQH
VLAELERQAVLVYTPSRKVHGKRLVCYDDRYIVKVAYEQDGVIVSNDNYR
DLQSENPEWKWFIEQRLLMFSFVNDRFMPPDDPLGRHGPSLSNFLSRKPK
PPEPSWQHCPYGKKCTYGIKCKFYHPERPHHAQLAVADELRAKTGARPGA
GAEEQRPPRAPGGSAGARAAPREPFAHSLPPARGSPDLAALRGSFSRLAF
SDDLGPLGPPLPVPACSLTPRLGGPDWVSAGGRVPGPLSLPSPESQFSPG
DLPPPPGLQLQPRGEHRPRDLHGDLLSPRRPPDDPWARPPRSDRFPGRSV
WAEPAWGDGATGGLSVYATEDDEGDARARARIALYSVFPRDQVDRVMAAF
PELSDLARLILLVQRCQSAGAPLGKP.

[0218] In some embodiments, the sequence encoding the second RNA binding protein comprises or consists of an endoplasmic reticulum to nucleus signaling 2 (ERN2) polypeptide. In some embodiments, the sequence encoding the ERN2 comprises or consists of:

(SEQ ID NO: 131)
RQQQPQVVEKQQETPLAPADFAHISQDAQSLHSGASRRSQKRLQSPSKQA
QPLDDPEAEQLTVVGKISFNPKDVLGRGAGGTFVFRGQFEGRAVAVKRLL
RECFGLVRREVQLLQESDRHPNVLRYFCTERGPQFHYIALELCRASLQEY
VENPDLDRGGLEPEVVLQQLMSGLAHLHSLHIVHRDLKPGNILITGPDSQ
GLGRVVLSDFGLCKKLPAGRCSFSLHSGIPGTEGWMAPELLQLLPPDSPT
SAVDIFSAGCVFYYVLSGGSHPFGDSLYRQANILTGAPCLAHLEEEVHDK
VVARDLVGAMLSPLPQPRPSAPQVLAHPFFWSRAKQLQFFQDVSDWLEKE
SEQEPLVRALEAGGCAVVRDNWHEHISMPLQTDLRKFRSYKGTSVRDLLR
AVRNKKHHYRELPVEVRQALGQVPDGFVQYFTNRFPRLLLHTHRAMRSCA
SESLFLPYYPPDSEARRPCPGATGR.

[0219] In some embodiments, the sequence encoding the second RNA binding protein comprises or consists of a pelota mRNA surveillance and ribosome rescue factor (PELO) polypeptide. In some embodiments, the sequence encoding the PELO comprises or consists of:

(SEQ ID NO: 132)
KLVRKNIEKDNAGQVTLVPEEPEDMWHTYNLVQVGDSLRASTIRKVQTES
STGSVGSNRVRTTLTLCVEAIDFDSQACQLRVKGTNIQENEYVKMGAYHT
IELEPNRQFTLAKKQWDSVVLERIEQACDPAWSADVAAVVMQEGLAHICL
VTPSMTLTRAKVEVNIPRKRKGNCSQHDRALERFYEQVVQAIQRHIHFDV
VKCILVASPGFVREQFCDYLFQQAVKTDNKLLLENRSKFLQVHASSGHKY
SLKEALCDPTVASRLSDTKAAGEVKALDDFYKMLQHEPDRAFYGLKQVEK
ANEAMAIDTLLISDELFRHQDVATRSRYVRLVDSVKENAGTVRIFSSLHV
SGEQLSQLTGVAAILRFPVPELSDQEGDSSSEED.

[0220] In some embodiments, wherein the sequence encoding the second RNA binding protein comprises or consists of a YBEY metallopeptidase (YBEY) polypeptide. In some embodiments, the sequence encoding the YBEY comprises or consists of:

(SEQ ID NO: 133)
SLVIRNLQRVIPIRRAPLRSKIEIVRRILGVQKFDLGIICVDNKNIQHIN
RIYRDRNVPTDVLSFPFHEHLKAGEFPQPDFPDDYNLGDIFLGVEYIFHQ
CKENEDYNDVLTVTATHGLCHLLGFTHGTEAEWQQMFQKEKAVLDELGRR
TGTRLQPLTRGLFGGS.

[0221] In some embodiments, the sequence encoding the second RNA binding protein comprises or consists of a cleavage and polyadenylation specific factor 4 like (CPSF4L) polypeptide. In some embodiments, the sequence encoding the CPSF4L comprises or consists of:

(SEQ ID NO: 134)
QEVIAGLERFTFAFEKDVEMQKGTGLLPFQGMDKSASAVCNFFTKGLCEK
GKLCPFRHDRGEKMVVCKHWLRGLCKKGDHCKFLHQYDLTRMPECYFYSK
FGDCSNKECSFLHVKPAFKSQDCPWYDQGFCKDGPLCKYRHVPRIMCLNY
LVGFCPEGPKCQFAQKIREFKLLPGSKI.

[0222] In some embodiments, the sequence encoding the second RNA binding protein comprises or consists of an hCG_2002731polypeptide. In some embodiments, the sequence encoding the hCG_2002731 comprises or consists of:

(SEQ ID NO: 135)
KLVRKNIEKDNAGQVTLVPEEPEDMWHTYNLVQVGDSLRASTIRKVQTES
STGSVGSNRVRTTLTLCVEAIDFDSQACQLRVKGTNIQENEYVKMGAYHT
IELEPNRQFTLAKKQWDSVVLERIEQACDPAWSADVAAVVMQEGLAHICL
VTPSMTLTRAKVEVNIPRKRKGNCSQHDRALERFYEQVVQAIQRHIHFDV
VKCILVASPGFVREQFCDYMFQQAVKTDNKLLLENRSKFLQVHASSGHKY
SLKEALCDPTVASRLSDTKAAGEVKALDDFYKMLQHEPDRAFYGLKQVEK
ANEAMAIDTLLISDELFRHQDVATRSRYVRLVDSVKENAGTVRIFSSLHV
SGEQLSQLTGVAAILRFPVPELSDQEGDSSSEED.

[0223] In some embodiments, the sequence encoding the hCG 2002731 comprises or consists of:

(SEQ ID NO: 136)
DPAWSADVAAVVMQEGLAHICLVTPSMTLTRAKVEVNIPRKRKGNCSQHD
RALERFYEQVVQAIQRHIHFDVVKCILVASPGFVREQFCDYMFQQAVKTD
NKLLLENRSKFLQVHASSGHKYSLKEALCDPTVASRLSDTKAAGEVKALD
DFYKMLQHEPDRAFYGLKQVEKANEAMAIDTLLISDELFRHQDVATRSRY
VRLVDSVKENAGTVRIFSSLHVSGEQLSQLTGVAAILRFPVPELSDQEGD
SSSEED.

[0224] In some embodiments, the sequence encoding the second RNA binding protein comprises or consists of an Excision Repair Cross-Complementation Group 1 (ERCC1) polypeptide. In some embodiments, the sequence encoding the ERCC1 comprises or consists of:

(SEQ ID NO: 137)
MDPGKDKEGVPQPSGPPARKKFVIPLDEDEVPPGVRGNPVLKFVRNVPWE
FGDVIPDYVLGQSTCALFLSLRYHNLHPDYIHGRLQSLGKNFALRVLLVQ
VDVKDPQQALKELAKMCILADCTLILAWSPEEAGRYLETYKAYEQKPADL
LMEKLEQDFVSRVTECLTTVKSVNKTDSQTLLTTFGSLEQLIAASREDLA
LCPGLGPQK.

[0225] In some embodiments, the sequence encoding the second RNA binding protein comprises or consists of a ras-related C3 botulinum toxin substrate 1 isoform (RAC1) polypeptide. In some embodiments, the sequence encoding the RAC1 comprises or consists of:

(SEQ ID NO: 138)
KESRAKKFQRQHMDSDSSPSSSSTYCNQMMRRRNMTQGRCKPVNTFVHEP
LVDVQNVCFQEKVTCKNGQGNCYKSNSSMHITDCRLTNGSRYPNCAYRTS
PKERHIIVACEGSPYVPVHFDASVEDST.

[0226] In some embodiments, the sequence encoding the second RNA binding protein comprises or consists of a Ribonuclease A A1 (RAA1) polypeptide. In some embodiments, the sequence encoding the RAA1 comprises or consists of:

(SEQ ID NO: 139)
[sequence omitted]

[0227] In some embodiments, the sequence encoding the second RNA binding protein comprises or consists of a Ras Related Protein (RAB1) polypeptide. In some embodiments, the sequence encoding the RAB1 comprises or consists of:

(SEQ ID NO: 140)
GLGLVQPSYGQDGMYQRFLRQHVHPEETGGSDRYCNLMMQRRKMTLYHC
KRFNTFIHEDIWNIRSICSTTNIQCKNGKMNCHEGVVKVTDCRDTGSSR
APNCRYRAIASTRRVVIACEGNPQVPVHFDG.

[0228] In some embodiments, the sequence encoding the second RNA binding protein comprises or consists of a DNA Replication Helicase/Nuclease 2 (DNA2) polypeptide. In some embodiments, the sequence encoding the DNA2 comprises or consists of:

(SEQ ID NO: 141)
XSAVDNILLKLAKFKIGFLRLGQIQKVHPAIQQFTEQEICRSKSIKSLA
LLEELYNSQLIVATTCMGINHPIFSRKIFDFCIVDEASQISQPICLGPL
FFSRRFVLVGDHQQLPPLVLNREARALGMSESLFKRLEQNKSAVVQLTV
QYRIVINSKIMSLSNKLTYEGKLECGSDKVANAVINLRHFKDVKLELEF
YADYSDNPWLMGVFEPNNPVCFLNTDKVPAPEQVEKGGVSNVTEAKLIV
FLTSIFVKAGCSPSDIGIIAPYRQQLKIINDLLARSIGMVEVNTVDKYQ
GRDKSIVLVSFVRSNKDGTVGELLKDWRRLNVAITRAKHKLILLGCVPS
LNCYPPLEKLLNHLNSEKLISFFFCIWSHLIALL.

[0229] In some embodiments, the sequence encoding the second RNA binding protein comprises or consists of a FLJ35220 polypeptide. In some embodiments, the sequence encoding the FLJ35220 comprises or consists of:

(SEQ ID NO: 142)
MALRSHDRSTRPLYISVGHRIVISLEAAVRLTCCCCRFRIPEPVRQADI
CSREHIRKSLGLPGPPTPRSPKAQRPVACPKGDSGESSALC.

[0230] In some embodiments, wherein the sequence encoding the second RNA binding protein comprises or consists of a FLJ13173 polypeptide. In some embodiments, the sequence encoding the FLJ13173 comprises or consists of:

(SEQ ID NO: 143)
CYTNHALSYDQAKRVPRWVLEHISKSKIMGDADRKHCKFKPDPNIPPTF
SAFNEDYVGSGWSRGHMAPAGNNKFSSKAMAETFYLSNIVPQDFDNNSG
YWNRIEMYCRELTERFEDVWVVSGPLTLPQTRGDGKKIVSYQVIGEDNV
AVPSHLYKVILARRSSVSTEPLALGAFVVPNEAIGFQPQLTEFQVSLQD
LEKLSGLVFFPHLDRT.

[0231] In some embodiments, the sequence encoding the second RNA binding protein comprises or consists of a DNA repair endonuclease XPF (ERCC4) polypeptide. In some embodiments, the sequence encoding the ERCC4 comprises or consists of:

(SEQ ID NO: 64)
MESGQPARRIAMAPLLEYERQLVLELLDTDGLVVCARGLGADRLLYHFL
QLHCHPACLVLVLNTQPAEEEYFINQLKIEGVEHLPRRVTNEITSNSRY
EVYTQGGVIFATSRILVVDFLTDRIPSDLITGILVYRAHRIIESCQEAF
ILRLFRQKNKRGFIKAFTDNAVAFDTGFCHVERVMRNLFVRKLYLWPRF
HVAVNSFLEQHKPEVVEIHVSMTPTMLAIQTAILDILNACLKELKCHNP
SLEVEDLSLENAIGKPFDKTIRHYLDPLWHQLGAKTKSLVQDLKILRTL
LQYLSQYDCVTFLNLLESLRATEKAFGQNSGWLFLDSSTSMFINARARV
YHLPDAKMSKKEKISEKMEIKEGEGILWG.

In some embodiments, the sequence encoding the second RNA binding protein comprises or consists of Teneurin Transmembrane Protein 1 (TENM1) polypeptide. In some embodiments, the sequence encoding the TENM1 comprises or consists of:

(SEQ ID NO: 144)
VTVSQMTSVLNGKTRRFADIQLQHGALCFNIRYGTTVEEEKNHVLEIAR
QRAVAQAWTKEQRRLQEGEEGIRAWTEGEKQQLLSTGRVQGYDGYFVLS
VEQYLELSDSANNIHFMRQSEIGRR.

[0232] In some embodiments, the sequence encoding the second RNA binding protein comprises or consists of Teneurin Transmembrane Protein 2 (TENM2) polypeptide. In some embodiments, the sequence encoding the TENM2 comprises or consists of:

(SEQ ID NO: 145)
TVSQPTLLVNGKTRRFTNIEFQYSTLLLSIRYGLTPDTLDEEKARVLDQ
ARQRALGTAWAKEQQKARDGREGSRLWTEGEKQQLLSTGRVQGYEGYYV
LPVEQYPELADSSSNIQFLRQNEMGKR.

[0233] In some embodiments, the second RNA binding protein comprises or consists of a transcription activator-like effector nuclease (TALEN) polypeptide or a nuclease domain thereof. In some embodiments, the sequence encoding the TALEN polypeptide comprises or consists of:

| (SEQ ID NO: 205) | |
|---|---|
| 1 | MRIGKSSGWL NESVSLEYEH VSPPTRPRDT RRRPRAAGDG GLAHLHRRLA VGYAEDTPRT |
| 61 | EARSPAPRRP LPVAPASAPP APSLVPEPPM PVSLPAVSSP RFSAGSSAAI TDPFPSLPPT |
| 121 | PVLYAMAREL EALSDATWQP AVPLPAEPPT DARRGNTVFD EASASSPVIA SACPQAFASP |
| 181 | PRAPRSARAR RARTGGDAWP APTFLSRPSS SRIGRDVFGK LVALGYSREQ IRKLKQESLS |
| 241 | EIAKYHTTLT GQGFTHADIC RISRRRQSLR VVARNYPELA AALPELTRAH IVDIARQRSG |
| 301 | DLALQALLPV ATALTAAPLR LSASQIATVA QYGERPAIQA LYRLRRKLTR APLHLTPQQV |
| 361 | VAIASNTGGK RALEAVCVQL PVLRAAPYRL STEQVVAIAS NKGGKQALEA VKAHLLDLLG |
| 421 | APYVLDTEQV VAIASHNGGK QALEAVKADL LDLRGAPYAL STEQVVAIAS HNGGKQALEA |
| 481 | VKADLLELRG APYALSTEQV VAIASHNGGK QALEAVKAHL LDLRGVPYAL STEQVVAIAS |
| 541 | HNGGKQALEA VKAQLLDLRG APYALSTAQV VAIASNGGGK QALEGIGEQL LKLRTAPYGL |
| 601 | STEQVVAIAS HDGGKQALEA VGAQLVALRA APYALSTEQV VAIASNKGGK QALEAVKAQL |
| 661 | LELRGAPYAL STAQVVAIAS HDGGNQALEA VGTQLVALRA APYALSTEQV VAIASHDGGK |
| 721 | QALEAVGAQL VALRAAPYAL NTEQVVAIAS SHGGKQALEA VRALFPDLRA APYALSTAQL |
| 781 | VAIASNPGGK QALEAVRALF RELRAAPYAL STEQVVAIAS NHGGKQALEA VRALFRGLRA |
| 841 | APYGLSTAQV VAIASSNGGK QALEAVWALL PVLRATPYDL NTAQIVAIAS HDGGKPALEA |
| 901 | VWAKLPVLRG APYALSTAQV VAIACISGQQ ALEAIEAHMP TLRQASHSLS PERVAAIACI |
| 961 | GGRSAVEAVR QGLPVKAIRR IRREKAPVAG PPPASLGPTP QELVAVLHFF RAHQQPRQAF |
| 1021 | VDALAAFQAT RPALLRLLSS VGVTEIEALG GTIPDATERW QRLLGRLGFR PATGAAAPSP |
| 1081 | DSLQGFAQSL ERTLGSPGMA GQSACSPHRK RPAETAIAPR SIRRSPNNAG QPSEPWPDQL |
| 1141 | AWLQRRKRTA RSHIRADSAA SVPANLHLGT RAQFTPDRLR AEPGPIMQAH TSPASVSFGS |
| 1201 | HVAFEPGLPD PGTPTSADLA SFEAEPFGVG PLDFHLDWLL QILET. |

In some embodiments, the sequence encoding the TALEN polypeptide comprises or consists of:

| (SEQ ID NO: 206) | |
|---|---|
| 1 | mdpirsrtps parellpgpq pdrvqptadr ggappaggpl dglparrtms rtrlpsppap |
| 61 | spafsagsfs dllrqfdpsl ldtslldsmp avgtphtaaa paecdevqsg lraaddpppt |
| 121 | vrvavtaarp prakpaprrr aausdaspa aqvdlrtlgy sqqqqekikp kvgstvaqhh |
| 181 | ealvghgfth ahivalsrhp aalgtvavky qdmiaalpea thedivgvgk qwsgaralea |
| 241 | lltvagelrg pplqldtgql vkiakrggvt aveavhasrn altgapinit paqvvaiasn |
| 301 | nggkgaletv grllpvlcqa hgltpaqvva iashdggkqa letmqrllpv logahglppd |
| 361 | qvvaiasnig gkgaletvqr llpvlogahg ltpdqvvaia shgggkgale tvqrllpvlc |
| 421 | qahgltpdqv vaiashdggk galetvqrll pvlogahglt pdqvvaiasn gggkgaletv |
| 481 | grllpvlcqa hgltpdqvva iasnggkgal etvqrllpvl cgahgltpdg vvaiashdgg |
| 541 | kgaletvqrl lpvlcgthgl tpaqvvaias hdggkgalet vqqllpvlcq ahgltpdqvv |
| 601 | aiasniggkq alatvqrllp vlogahgltp dqvvaiasng ggkgaletvg rllpvlogah |
| 661 | gltpdqvvai asngggkgal etvqrllpvl cgahgltqvg vvaiasnigg kgaletvqrl |
| 721 | lpvlogahgl tpaqvvaias hdggkgalet vqrllpvlcq ahgltpdqvv aiasngggkq |
| 781 | aletvqrllp vlogahgltq eqvvaiasnn ggkgaletvg rllpvlogah gltpdqvvai |
| 841 | asngggkgal etvqrllpvl cqahgltpaq vvaiasnigg kgaletvqrl lpvlcqdhgl |
| 901 | tlaqvvaias niggkgalet vqrllpvlcq ahgltqdqvv aiasniggkq aletvqrllp |
| 961 | vlcqdhgltp dqvvaiasni ggkgaletvg rllpvlcqdh gltldqvvai asnggkgale |
| 1021 | tvqrllpvlc qdhgltpdqv vaiasnsggk galetvqrll pvlcqdhglt pnqvvaiasn |
| 1081 | ggkgalesiv aqlsrpdpal aaltndhlva laclggrpam davkkglpha pelirrvnrr |
| 1141 | igertshrva dyaqvvrvle ffqchshpay afdeamtqfg msrnglvqlf rrvgvtelea |
| 1201 | rggtlppasq rwdrilqasg mkrakpspts aqtpdgaslh afadslerdl dapspmhegd |
| 1261 | qtgassrkrs rsdravtgps aqhsfevrvp eqrdalhlpl swrvkrprtr iggglpdpgt |
| 1321 | piaadlaass tvmwegdaap fagaaddfpa fneeelawlm ellpqsgsvg gti. |

In some embodiments, the second RNA binding protein comprises or consists of a zinc finger nuclease polypeptide or a nuclease domain thereof. In some embodiments, the sequence encoding the zinc finger nuclease polypeptide comprises or consists of:

| (SEQ ID NO: 52) | |
|---|---|
| 1 | MSRPRFNPRG DFPLQRPRAP NPSGMRPPGP FMRPGSMGLP RFYPAGRARG IPHRFAGHES |
| 61 | YQNMGPQRMN VQVTQHRTDP RLTKEKLDFH EAQQKKGKPH GSRWDDEPHI SASVAVKQSS |
| 121 | VTQVTEQSPK VQSRYTKESA SSILASFGLS NEDLEELSRY PDEQLTPENM PLILRDIRMR |
| 181 | KMGRRLPNLP SQSRNKETLG SEAVSSNVID YGHASKYGYT EDPLEVRIYD PEIPTDEVEN |
| 241 | EFQSQQNISA SVPNPNVICN SMFPVEDVFR QMDFPGESSN NRSFFSVESG TKMSGLHISG |
| 301 | GQSVLEPIKS VNQSINQTVS QTMSQSLIPP SMNQQPFSSE LISSVSQQER IPHEPVINSS |
| 361 | NVHVGSRGSK KNYQSQADIP IRSPFGIVKA SWLPKFSHAD AQKMKRLPTP SMMNDYYAAS |
| 421 | PRIFPHLCSL CNVECSHLKD WIQHQNTSTH IESCRQLRQQ YPDWNPEILP SRRNEGNRKE |
| 481 | NETPRRRSHS PSPRRSRRSS SSHRFRRSRS PMHYMYRPRS RSPRICHRFI SRYRSRSRSR |
| 541 | SPYRIRNPFR GSPKCFRSVS PERMSRRSVR SSDRKKALED VVQRSGHGTE FNKQKHLEAA |
| 601 | DKGHSPAQKP KTSSGTKPSV KPTSATKSDS NLGGHSIRCK SKNLEDDTLS ECKQVSDKAV |
| 661 | SLQRKLRKEQ SLHYGSVLLI TELPEDGCTE EDVRKLFQPF GKVNDVLIVP YRKEAYLEME |
| 721 | FKEAITAIMK YIETTPLTIK GKSVKICVPG KKKAQNKEVK KKTLESKKVS ASTLKRDADA |
| 781 | SKAVEIVTST SAAKTGQAKA SVAKVNKSTG KSASSVKSVV TVAVKGNKAS IKTAKSGGKK |
| 841 | SLEAKKTGNV KNKDSNKPVT IPENSEIKTS IEVKATENCA KEAISDAALE ATENEPLNKE |
| 901 | TEEMCVMLVS NLPNKGYSVE EVYDLAKPFG GLKDILILSS HKKAYIEINR KAAESMVKFY |
| 961 | TCFPVLMDGN QLSISMAPEN MNIKDEEAIF ITLVKENDPE ANIDTIYDRF VHLDNLPEDG |
| 1021 | LQCVLCVGLQ FGKVDHHVFI SNRNKAILQL DSPESAQSMY SFLKQNPQNI GDHMLTCSLS |
| 1081 | PKIDLPEVQI EHDPELEKES PGLKNSPIDE SEVQTATDSP SVKPNELEEE STPSIQTETL |
| 1141 | VQQEEPCEEE AEKATCDSDF AVETLELETQ GEEVKEEIPL VASASVSIEQ FTENAEECAL |
| 1201 | NQQMFNSDLE KKGAEIINPK TALLPSDSVF AEERNLKGIL EESPSEAEDF ISGITQTMVE |
| 1261 | AVAEVEKNET VSEILPSTCI VTLVPGIPTG DEKTVDKKNI SEKKGNMDEK EEKEFNTKET |
| 1321 | RMDLQIGTEK AEKNEGRMDA EKVEKMAAMK EKPAENTLFK AYPNKGVGQA NKPDETSKTS |
| 1381 | ILAVSDVSSS KPSIKAVIVS SPKAKATVSK TENQKSFPKS VPRDQINAEK KLSAKEFGLL |
| 1441 | KPTSARSGLA ESSSKFKPTQ SSLTRGGSGR ISALQGKLSK LDYRDITKQS QETEARPSIM |
| 1501 | KRDDSNNKTL AEQNTKNPKS TTGRSSKSKE EPLFPFNLDE FVTVDEVIEE VNPSQAKQNP |
| 1561 | LKGKRKETLK NVPFSELNLK KKKGKTSTPR GVEGELSFVT LDEIGEEEDA AAHLAQALVT |
| 1621 | VDEVIDEEEL NMEEMVKNSN SLFTLDELID QDDCISHSEP KDVTVLSVAE EQDLLKQERL |
| 1681 | VTVDEIGEVE ELPLNESADI TFATLNTKGN EGDTVRDSIG FISSQVPEDP STLVTVDEIQ |
| 1741 | DDSSDLHLVT LDEVTEEDED SLADFNNLKE ELNFVTVDEV GEEEDGDNDL KVELAQSKND |
| 1801 | HPTDKKGNRK KRAVDTKKTK LESLSQVGPV NENVMEEDLK TMIERHLTAK TPTKRVRIGK |
| 1861 | TLPSEKAVVT EPAKGEEAFQ MSEVDEESGL KDSEPERKRK KTEDSSSGKS VASDVPEELD |
| 1921 | FLVPKAGFFC PICSLFYSGE KAMTNHCKST RHKQNTEKFM AKQRKEKEQN EAEERSSR. |

### Guide RNA

[0234] The terms guide RNA (gRNA) and single guide RNA (sgRNA) are used interchangeably throughout the disclosure.

[0235] Guide RNAs (gRNAs) of the disclosure may comprise of a spacer sequence and a scaffolding sequence. In some embodiments, a guide RNA is a single guide RNA (sgRNA) comprising a contiguous spacer sequence and scaffolding sequence. In some embodiments, the spacer sequence and the scaffolding sequence are not contiguous. In some embodiments, a sequence encoding a guide RNA or single guide RNA of the disclosure comprises or consists of a spacer sequence and a scaffolding sequence, that are separated by a linker sequence. In some embodiments, the linker sequence may comprise or consist of 1, 2, 3, 4, 5, 6, 7, 8, 9, 10, 15, 20, 25, 30, 35, 40, 45, 50 or any number of nucleotides in between. In some embodiments, the linker sequence may comprise at least 1, 2, 3, 4, 5, 6, 7, 8, 9, 10, 15, 20, 25, 30, 35, 40, 45, 50 or any number of nucleotides in between.

[0236] Guide RNAs (gRNAs) of the disclosure may comprise non-naturally occurring nucleotides. In some embodiments, a guide RNA of the disclosure or a sequence encoding the guide RNA comprises or consists of modified or synthetic RNA nucleotides. Exemplary modified RNA nucleotides include, but are not limited to, pseudouridine (4), dihydrouridine (D), inosine (I), and 7-methylguanosine (m7G), hypoxanthine, xanthine, xanthosine, 7-methylguanine, 5, 6-Dihydrouracil, 5-methylcytosine, 5-methylcytidine, 5-hydropxymethylcytosine, isoguanine, and isocytosine.

[0237] Guide RNAs (gRNAs) of the disclosure may bind modified RNA within a target sequence. Within a target sequence, guide RNAs (gRNAs) of the disclosure may bind modified RNA. Exemplary epigenetically or post-transcriptionally modified RNA include, but are not limited to, 2′-O-Methylation (2′-OMe) (2′-O-methylation occurs on the oxygen of the free 2′-OH of the ribose moiety), N6-methyladenosine (m6A), and 5-methylcytosine (m5C).

[0238] In some embodiments of the compositions of the disclosure, a guide RNA of the disclosure comprises at least one sequence encoding a non-coding C/D box small nucleolar RNA (snoRNA) sequence. In some embodiments, the snoRNA sequence comprises at least one sequence that is complementary to the target RNA, wherein the target sequence of the RNA molecule comprises at least one 2′-OMe. In some embodiments, the snoRNA sequence comprises at least one sequence that is complementary to the target RNA, wherein the at least one sequence that is complementary to the target RNA comprises a box C motif (RUGAUGA) and a box D motif (CUGA).

[0239] Spacer sequences of the disclosure bind to the target sequence of an RNA molecule. Spacer sequences of the disclosure may comprise a CRISPR RNA (crRNA). Spacer sequences of the disclosure comprise or consist of a sequence having sufficient complementarity to a target sequence of an RNA molecule to bind selectively to the target sequence. Upon binding to a target sequence of an RNA molecule, the spacer sequence may guide one or more of a scaffolding sequence and a fusion protein to the RNA molecule. In some embodiments, a sequence having sufficient complementarity to a target sequence of an RNA molecule to bind selectively to the target sequence has at least 50%, 55%, 60%, 65%, 70%, 75%, 80%, 85%, 90%, 95%, 96, 97%, 98%, 99%, or any percentage identity in between to the target sequence. In some embodiments, a sequence having sufficient complementarity to a target sequence of an RNA molecule to bind selectively to the target sequence has 100% identity the target sequence.

[0240] Scaffolding sequences of the disclosure bind the first RNA-binding polypeptide of the disclosure. Scaffolding sequences of the disclosure may comprise a trans acting RNA (tracrRNA). Scaffolding sequences of the disclosure comprise or consist of a sequence having sufficient complementarity to a target sequence of an RNA molecule to bind selectively to the target sequence. Upon binding to a target sequence of an RNA molecule, the scaffolding sequence may guide a fusion protein to the RNA molecule. In some embodiments, a sequence having sufficient complementarity to a target sequence of an RNA molecule to bind selectively to the target sequence has at least 50%, 55%, 60%, 65%, 70%, 75%, 80%, 85%, 90%, 95%, 96, 97%, 98%, 99%, or any percentage identity in between to the target sequence. In some embodiments, a sequence having sufficient complementarity to a target sequence of an RNA molecule to bind selectively to the target sequence has 100% identity the target sequence. Alternatively or in addition, in some embodiments, scaffolding sequences of the disclosure comprise or consist of a sequence that binds to a first RNA binding protein or a second RNA binding protein of a fusion protein of the disclosure. In some embodiments, scaffolding sequences of the disclosure comprise a secondary structure or a tertiary structure. Exemplary secondary structures include, but are not limited to, a helix, a stem loop, a bulge, a tetraloop and a pseudoknot. Exemplary tertiary structures include, but are not limited to, an A-form of a helix, a B-form of a helix, and a Z-form of a helix. Exemplary tertiary structures include, but are not limited to, a twisted or helicized stem loop. Exemplary tertiary structures include, but are not limited to, a twisted or helicized pseudoknot. In some embodiments, scaffolding sequences of the disclosure comprise at least one secondary structure or at least one tertiary structure. In some embodiments, scaffolding sequences of the disclosure comprise one or more secondary structure(s) or one or more tertiary structure(s).

[0241] In some embodiments of the compositions of the disclosure, a guide RNA or a portion thereof selectively binds to a tetraloop motif in an RNA molecule of the disclosure. In some embodiments, a target sequence of an RNA molecule comprises a tetraloop motif. In some embodiments, the tetraloop motif is a “GRNA” motif comprising or consisting of one or more of the sequences of GAAA, GUGA, GCAA or GAGA.

[0242] In some embodiments of the compositions of the disclosure, a guide RNA or a portion thereof that binds to a target sequence of an RNA molecule hybridizes to the target sequence of the RNA molecule. In some embodiments, a guide RNA or a portion thereof that binds to a first RNA binding protein or to a second RNA binding protein covalently binds to the first RNA binding protein or to the second RNA binding protein. In some embodiments, a guide RNA or a portion thereof that binds to a first RNA binding protein or to a second RNA binding protein non-covalently binds to the first RNA binding protein or to the second RNA binding protein.

[0243] In some embodiments of the compositions of the disclosure, a guide RNA or a portion thereof comprises or consists of between 10 and 100 nucleotides, inclusive of the endpoints. In some embodiments, a spacer sequence of the disclosure comprises or consists of between 10 and 30 nucleotides, inclusive of the endpoints. In some embodiments, a spacer sequence of the disclosure comprises or consists of 15, 16, 17, 18, 19, 20, 21, 22, 23, 24, 25, 26, 27, 28, 29 or 30 nucleotides. In some embodiments, the spacer sequence of the disclosure comprises or consists of 20 nucleotides. In some embodiments, the spacer sequence of the disclosure comprises or consists of 21 nucleotides. In some embodiments, a scaffold sequence of the disclosure comprises or consists of between 10 and 100 nucleotides, inclusive of the endpoints. In some embodiments, a spacer sequence of the disclosure comprises or consists of 30, 35, 40, 45, 50, 55, 60, 65, 70, 76, 80, 87, 90, 95, 100 or any number of nucleotides in between. In some embodiments, the scaffold sequence of the disclosure comprises or consists of between 85 and 95 nucleotides, inclusive of the endpoints. In some embodiments, the scaffold sequence of the disclosure comprises or consists of 85 nucleotides. In some embodiments, the scaffold sequence of the disclosure comprises or consists of 90 nucleotides. In some embodiments, the scaffold sequence of the disclosure comprises or consists of 93 nucleotides.

[0244] In some embodiments of the compositions of the disclosure, a guide RNA or a portion thereof does not comprise a nuclear localization sequence (NLS).

[0245] In some embodiments of the compositions of the disclosure, a guide RNA or a portion thereof does not comprise a sequence complementary to a protospacer adjacent motif (PAM).

[0246] Therapeutic or pharmaceutical compositions of the disclosure do not comprise a PAMmer oligonucleotide. In other embodiments, optionally, non-therapeutic or non-pharmaceutical compositions may comprise a PAMmer oligonucleotide.

[0247] In some embodiments of the compositions of the disclosure, a guide RNA or a portion thereof comprises a sequence complementary to a protospacer flanking sequence (PFS). In some embodiments, including those wherein a guide RNA or a portion thereof comprises a sequence complementary to a PFS, the first RNA binding protein may comprise a sequence isolated or derived from a Cas13 protein. In some embodiments, including those wherein a guide RNA or a portion thereof comprises a sequence complementary to a PFS, the first RNA binding protein may comprise a sequence encoding a Cas13 protein or an RNA-binding portion thereof. In some embodiments, the guide RNA or a portion thereof does not comprise a sequence complementary to a PFS.

[0248] In some embodiments of the compositions of the disclosure, a sequence encoding a guide RNA of the disclosure further comprises a sequence encoding a promoter to drive expression of the guide RNA. In some embodiments, a vector comprising a sequence encoding a guide RNA of the disclosure further comprises a sequence encoding a promoter to drive expression of the guide RNA. In some embodiments, a sequence encoding a promoter to drive expression of the guide RNA comprises a sequence encoding a constitutive promoter. In some embodiments, a sequence encoding a promoter to drive expression of the guide RNA comprises a sequence encoding an inducible promoter. In some embodiments, a sequence encoding a promoter to drive expression of the guide RNA comprises a sequence encoding a hybrid or a recombinant promoter. In some embodiments, a sequence encoding a promoter to drive expression of the guide RNA comprises a sequence encoding a promoter capable of expressing the guide RNA in a mammalian cell. In some embodiments, a sequence encoding a promoter to drive expression of the guide RNA comprises a sequence encoding a promoter capable of expressing the guide RNA in a human cell. In some embodiments, a sequence encoding a promoter to drive expression of the guide RNA comprises a sequence encoding a promoter capable of expressing the guide RNA and restricting the guide RNA to the nucleus of the cell. In some embodiments, a sequence encoding a promoter to drive expression of the guide RNA comprises a sequence encoding a human RNA polymerase promoter or a sequence isolated or derived from a sequence encoding a human RNA polymerase promoter. In some embodiments, a sequence encoding a promoter to drive expression of the guide RNA comprises a sequence encoding a U6 promoter or a sequence isolated or derived from a sequence encoding a U6 promoter. In some embodiments, a sequence encoding a promoter to drive expression of the guide RNA comprises a sequence encoding a human tRNA promoter or a sequence isolated or derived from a sequence encoding a human tRNA promoter. In some embodiments, a sequence encoding a promoter to drive expression of the guide RNA comprises a sequence encoding a human valine tRNA promoter or a sequence isolated or derived from a sequence encoding a human valine tRNA promoter.

[0249] In some embodiments of the compositions of the disclosure, a sequence encoding a promoter to drive expression of the guide RNA further comprises a regulatory element. In some embodiments, a vector comprising a sequence encoding a promoter to drive expression of the guide RNA further comprises a regulatory element. In some embodiments, a regulatory element enhances expression of the guide RNA. Exemplary regulatory elements include, but are not limited to, an enhancer element, an intron, an exon, or a combination thereof.

[0250] In some embodiments of the compositions of the disclosure, a vector of the disclosure comprises one or more of a sequence encoding a guide RNA, a sequence encoding a promoter to drive expression of the guide RNA and a sequence encoding a regulatory element. In some embodiments of the compositions of the disclosure, the vector further comprises a sequence encoding a fusion protein of the disclosure.

### Fusion Proteins

[0251] Fusion proteins in the context of the compositions of the disclosure may comprise a first RNA binding protein and a second RNA binding protein. In some embodiments, along a sequence encoding the fusion protein, the sequence encoding the first RNA binding protein is positioned 5′ of the sequence encoding the second RNA binding protein. In some embodiments, along a sequence encoding the fusion protein, the sequence encoding the first RNA binding protein is positioned 3′ of the sequence encoding the second RNA binding protein.

[0252] In some embodiments of the compositions of the disclosure, the sequence encoding the first RNA binding protein comprises a sequence isolated or derived from a protein capable of binding an RNA molecule. In some embodiments, the sequence encoding the first RNA binding protein comprises a sequence isolated or derived from a protein capable of selectively binding an RNA molecule and not binding a DNA molecule, a mammalian DNA molecule or any DNA molecule. In some embodiments, the sequence encoding the first RNA binding protein comprises a sequence isolated or derived from a protein capable of binding an RNA molecule and inducing a break in the RNA molecule. In some embodiments, the sequence encoding the first RNA binding protein comprises a sequence isolated or derived from a protein capable of binding an RNA molecule, inducing a break in the RNA molecule, and not binding a DNA molecule, a mammalian DNA molecule or any DNA molecule. In some embodiments, the sequence encoding the first RNA binding protein comprises a sequence isolated or derived from a protein capable of binding an RNA molecule, inducing a break in the RNA molecule, and neither binding nor inducing a break in a DNA molecule, a mammalian DNA molecule or any DNA molecule.

[0253] In some embodiments of the compositions of the disclosure, the sequence encoding the first RNA binding protein comprises a sequence isolated or derived from a protein with no DNA nuclease activity.

[0254] In some embodiments of the compositions of the disclosure, the sequence encoding the first RNA binding protein comprises a sequence isolated or derived from a protein having DNA nuclease activity, wherein the DNA nuclease activity does not induce a break in a DNA molecule, a mammalian DNA molecule or any DNA molecule when a composition of the disclosure is contacted to an RNA molecule or introduced into a cell or into a subject of the disclosure.

[0255] In some embodiments of the compositions of the disclosure, the sequence encoding the first RNA binding protein comprises a sequence isolated or derived from a protein having DNA nuclease activity, wherein the DNA nuclease activity is inactivated and wherein the DNA nuclease activity does not induce a break in a DNA molecule, a mammalian DNA molecule or any DNA molecule when a composition of the disclosure is contacted to an RNA molecule or introduced into a cell or into a subject of the disclosure. In some embodiments, the sequence encoding the first RNA binding protein comprises a mutation that inactivates or decreases the DNA nuclease activity to a level at which the DNA nuclease activity does not induce a break in a DNA molecule, a mammalian DNA molecule or any DNA molecule when a composition of the disclosure is contacted to an RNA molecule or introduced into a cell or into a subject of the disclosure. In some embodiments, the sequence encoding the first RNA binding protein comprises a mutation that inactivates or decreases the DNA nuclease activity and the mutation comprises one or more of a substitution, inversion, transposition, insertion, deletion, or any combination thereof to a nucleic acid sequence or amino acid sequence encoding the first RNA binding protein or a nuclease domain thereof.

[0256] In some embodiments, the fusion protein disclosed herein comprises a linker between the at least two RNA-binding polypeptides. In some embodiments, the linker is a peptide linker. In some embodiments, the peptide linker comprises one or more repeats of the tri-peptide GGS. In other embodiments, the linker is a non-peptide linker. In some embodiments, the non-peptide linker comprises polyethylene glycol (PEG), polypropylene glycol (PPG), co-poly(ethylene/propylene) glycol, polyoxyethylene (POE), polyurethane, polyphosphazene, polysaccharides, dextran, polyvinyl alcohol, polyvinylpyrrolidones, polyvinyl ethyl ether, polyacryl amide, polyacrylate, polycyanoacrylates, lipid polymers, chitins, hyaluronic acid, heparin, or an alkyl linker.

[0257] In some embodiments, the at least one RNA-binding protein does not require multimerization for RNA-binding activity. In some embodiments, the at least one RNA-binding protein is not a monomer of a multimer complex. In some embodiments, a multimer protein complex does not comprise the RNA binding protein. In some embodiments, the at least one of RNA-binding protein selectively binds to a target sequence within the RNA molecule. In some embodiments, the at least one RNA-binding protein does not comprise an affinity for a second sequence within the RNA molecule. In some embodiments, the at least one RNA-binding protein does not comprise a high affinity for or selectively bind a second sequence within the RNA molecule. In some embodiments, the at least one RNA-binding protein comprises between 2 and 1300 amino acids, inclusive of the endpoints.

[0258] In some embodiments, the at least one RNA-binding protein of the fusion proteins disclosed herein further comprises a sequence encoding a nuclear localization signal (NLS). In some embodiments, a nuclear localization signal (NLS) is positioned 3′ to the RNA binding protein. In some embodiments, the at least one RNA-binding protein comprises an NLS at a C-terminus of the protein. In some embodiments, the at least one RNA-binding protein further comprises a first sequence encoding a first NLS and a second sequence encoding a second NLS. In some embodiments, the first NLS or the second NLS is positioned 3′ to the RNA-binding protein. In some embodiments, the at least one RNA-binding protein comprises the first NLS or the second NLS at a C-terminus of the protein. In some embodiments, the at least one RNA-binding protein further comprises an NES (nuclear export signal) or other peptide tag or secretory signal.

[0259] In some embodiments, a fusion protein disclosed herein comprises the at least one RNA-binding protein as a first RNA-binding protein together with a second RNA-binding protein comprising or consisting of a nuclease domain.

[0260] In some embodiments, the second RNA-binding polypeptide is operably configured to the first RNA-binding polypeptide at the C-terminus of the first RNA-binding polypeptide. In some embodiments, the second RNA-binding polypeptide is operably configured to the first RNA-binding polypeptide at the N-terminus of the first RNA-binding polypeptide. For example, one such exemplary fusion protein is E99 which is configured so that RNAse1(R39D, N67D, N88A, G89D, R19D, H119N, K41R) is located at the N-terminus of SpyCas9 whereas another exemplary fusion protein, E100, is configured so that RNAse1(R39D, N67D, N88A, G89D, R19D, H119N, K41R) is located at the C-terminus of SpyCas9.

gRNA Target Sequences

[0261] In some embodiments of the compositions of the disclosure, a target sequence of an RNA molecule comprises a sequence motif corresponding to the RNA binding protein and/or the RNA binding proteins and/or fusion protein thereof.

[0262] In some embodiments of the compositions and methods of the disclosure, the sequence motif is a signature of a disease or disorder.

[0263] A sequence motif of the disclosure may be isolated or derived from a sequence of foreign or exogenous sequence found in a genomic sequence, and therefore translated into an mRNA molecule of the disclosure or a sequence of foreign or exogenous sequence found in an RNA sequence of the disclosure.

[0264] A sequence motif of the disclosure may comprise or consist of a mutation in an endogenous sequence that causes a disease or disorder. The mutation may comprise or consist of a sequence substitution, inversion, deletion, insertion, transposition, or any combination thereof.

[0265] A sequence motif of the disclosure may comprise or consist of a repeated sequence. In some embodiments, the repeated sequence may be associated with a microsatellite instability (MSI). MSI at one or more loci results from impaired DNA mismatch repair mechanisms of a cell of the disclosure. A hypervariable sequence of DNA may be transcribed into an mRNA of the disclosure comprising a target sequence comprising or consisting of the hypervariable sequence.

[0266] A sequence motif of the disclosure may comprise or consist of a biomarker. The biomarker may indicate a risk of developing a disease or disorder. The biomarker may indicate a healthy gene (low or no determinable risk of developing a disease or disorder. The biomarker may indicate an edited gene. Exemplary biomarkers include, but are not limited to, single nucleotide polymorphisms (SNPs), sequence variations or mutations, epigenetic marks, splice acceptor sites, exogenous sequences, heterologous sequences, and any combination thereof.

[0267] A sequence motif of the disclosure may comprise or consist of a secondary, tertiary or quaternary structure. The secondary, tertiary or quaternary structure may be endogenous or naturally occurring. The secondary, tertiary or quaternary structure may be induced or non-naturally occurring. The secondary, tertiary or quaternary structure may be encoded by an endogenous, exogenous, or heterologous sequence.

[0268] In some embodiments of the compositions and methods of the disclosure, a target sequence of an RNA molecule comprises or consists of between 2 and 100 nucleotides or nucleic acid bases, inclusive of the endpoints. In some embodiments, the target sequence of an RNA molecule comprises or consists of between 2 and 50 nucleotides or nucleic acid bases, inclusive of the endpoints. In some embodiments, the target sequence of an RNA molecule comprises or consists of between 2 and 20 nucleotides or nucleic acid bases, inclusive of the endpoints.

[0269] In some embodiments of the compositions and methods of the disclosure, a target sequence of an RNA molecule is continuous. In some embodiments, the target sequence of an RNA molecule is discontinuous. For example, the target sequence of an RNA molecule may comprise or consist of one or more nucleotides or nucleic acid bases that are not contiguous because one or more intermittent nucleotides are positioned in between the nucleotides of the target sequence.

[0270] In some embodiments of the compositions and methods of the disclosure, a target sequence of an RNA molecule is naturally occurring. In some embodiments, the target sequence of an RNA molecule is non-naturally occurring. Exemplary non-naturally occurring target sequences may comprise or consist of sequence variations or mutations, chimeric sequences, exogenous sequences, heterologous sequences, chimeric sequences, recombinant sequences, sequences comprising a modified or synthetic nucleotide or any combination thereof.

[0271] In some embodiments of the compositions and methods of the disclosure, a target sequence of an RNA molecule binds to a guide RNA of the disclosure.

[0272] In some embodiments of the compositions and methods of the disclosure, a target sequence of an RNA molecule binds to a first RNA binding protein of the disclosure.

[0273] In some embodiments of the compositions and methods of the disclosure, a target sequence of an RNA molecule binds to a second RNA binding protein of the disclosure.

### RNA Molecules

[0274] In some embodiments of the compositions and methods of the disclosure, an RNA molecule of the disclosure comprises a target sequence. In some embodiments, the RNA molecule of the disclosure comprises at least one target sequence. In some embodiments, the RNA molecule of the disclosure comprises one or more target sequence(s). In some embodiments, the RNA molecule of the disclosure comprises two or more target sequences.

[0275] In some embodiments of the compositions and methods of the disclosure, an RNA molecule of the disclosure is a naturally occurring RNA molecule. In some embodiments, the RNA molecule of the disclosure is a non-naturally occurring molecule. Exemplary non-naturally occurring RNA molecules may comprise or consist of sequence variations or mutations, chimeric sequences, exogenous sequences, heterologous sequences, chimeric sequences, recombinant sequences, sequences comprising a modified or synthetic nucleotide or any combination thereof.

[0276] In some embodiments of the compositions and methods of the disclosure, an RNA molecule of the disclosure comprises or consists of a sequence isolated or derived from a virus.

[0277] In some embodiments of the compositions and methods of the disclosure, an RNA molecule of the disclosure comprises or consists of a sequence isolated or derived from a prokaryotic organism. In some embodiments, an RNA molecule of the disclosure comprises or consists of a sequence isolated or derived from a species or strain of archaea or a species or strain of bacteria.

[0278] In some embodiments of the compositions and methods of the disclosure, the RNA molecule of the disclosure comprises or consists of a sequence isolated or derived from a eukaryotic organism. In some embodiments, an RNA molecule of the disclosure comprises or consists of a sequence isolated or derived from a species of protozoa, parasite, protist, algae, fungi, yeast, amoeba, worm, microorganism, invertebrate, vertebrate, insect, rodent, mouse, rat, mammal, or a primate. In some embodiments, an RNA molecule of the disclosure comprises or consists of a sequence isolated or derived from a human.

[0279] In some embodiments of the compositions and methods of the disclosure, the RNA molecule of the disclosure comprises or consists of a sequence derived from a coding sequence from a genome of an organism or a virus. In some embodiments, the RNA molecule of the disclosure comprises or consists of a primary RNA transcript, a precursor messenger RNA (pre-mRNA) or messenger RNA (mRNA). In some embodiments, the RNA molecule of the disclosure comprises or consists of a gene product that has not been processed (e.g. a transcript). In some embodiments, the RNA molecule of the disclosure comprises or consists of a gene product that has been subject to post-transcriptional processing (e.g. a transcript comprising a 5′ cap and a 3′ polyadenylation signal). In some embodiments, the RNA molecule of the disclosure comprises or consists of a gene product that has been subject to alternative splicing (e.g. a splice variant). In some embodiments, the RNA molecule of the disclosure comprises or consists of a gene product that has been subject to removal of non-coding and/or intronic sequences (e.g. a messenger RNA (mRNA)).

[0280] In some embodiments of the compositions and methods of the disclosure, the RNA molecule of the disclosure comprises or consists of a sequence derived from a non-coding sequence (e.g. a non-coding RNA (ncRNA)). In some embodiments, the RNA molecule of the disclosure comprises or consists of a ribosomal RNA. In some embodiments, the RNA molecule of the disclosure comprises or consists of a small ncRNA molecule. Exemplary small RNA molecules of the disclosure include, but are not limited to, microRNAs (miRNAs), small interfering (siRNAs), piwi-interacting RNAs (piRNAs), small nucleolar RNAs (snoRNAs), small nuclear RNAs (snRNAs), extracellular or exosomal RNAs (exRNAs), and small Cajal body-specific RNAs (scaRNAs). In some embodiments, the RNA molecule of the disclosure comprises or consists of a long ncRNA molecule. Exemplary long RNA molecules of the disclosure include, but are not limited to, X-inactive specific transcript (Xist) and HOX transcript antisense RNA (HOTAIR).

[0281] In some embodiments of the compositions and methods of the disclosure, the RNA molecule of the disclosure contacted by a composition of the disclosure in an intracellular space. In some embodiments, the RNA molecule of the disclosure contacted by a composition of the disclosure in a cytosolic space. In some embodiments, the RNA molecule of the disclosure contacted by a composition of the disclosure in a nucleus. In some embodiments, the RNA molecule of the disclosure contacted by a composition of the disclosure in a vesicle, membrane-bound compartment of a cell, or an organelle.

[0282] In some embodiments of the compositions and methods of the disclosure, the RNA molecule of the disclosure contacted by a composition of the disclosure in an extracellular space. In some embodiments, the RNA molecule of the disclosure contacted by a composition of the disclosure in an exosome. In some embodiments, the RNA molecule of the disclosure contacted by a composition of the disclosure in a liposome, a polymersome, a micelle or a nanoparticle. In some embodiments, the RNA molecule of the disclosure contacted by a composition of the disclosure in an extracellular matrix. In some embodiments, the RNA molecule of the disclosure contacted by a composition of the disclosure in a droplet. In some embodiments, the RNA molecule of the disclosure contacted by a composition of the disclosure in a microfluidic droplet.

[0283] In some embodiments of the compositions and methods of the disclosure, a RNA molecule of the disclosure comprises or consists of a single-stranded sequence. In some embodiments, the RNA molecule of the disclosure comprises or consists of a double-stranded sequence. In some embodiments, the double-stranded sequence comprises two RNA molecules. In some embodiments, the double-stranded sequence comprises one RNA molecule and one DNA molecule. In some embodiments, including those wherein the double-stranded sequence comprises one RNA molecule and one DNA molecule, compositions of the disclosure selectively bind and, optionally, selectively cut the RNA molecule.

### Vectors

[0284] In some embodiments of the compositions and methods of the disclosure, a vector comprises a guide RNA of the disclosure. In some embodiments, the vector comprises at least one guide RNA of the disclosure. In some embodiments, the vector comprises one or more guide RNA(s) of the disclosure. In some embodiments, the vector comprises two or more guide RNAs of the disclosure. In some embodiments, the vector further comprises a fusion protein of the disclosure. In some embodiments, the fusion protein comprises a first RNA binding protein and a second RNA binding protein.

[0285] In some embodiments of the compositions and methods of the disclosure, a first vector comprises a guide RNA of the disclosure and a second vector comprises a fusion protein of the disclosure. In some embodiments, the first vector comprises at least one guide RNA of the disclosure. In some embodiments, the first vector comprises one or more guide RNA(s) of the disclosure. In some embodiments, the first vector comprises two or more guide RNA(s) of the disclosure. In some embodiments, the fusion protein comprises a first RNA binding protein and a second RNA binding protein. In some embodiments, the first vector and the second vector are identical. In some embodiments, the first vector and the second vector are not identical.

[0286] In some embodiments of the compositions and methods of the disclosure, the vector is or comprises a component of a “2-component RNA targeting system” comprising (a) nucleic acid sequence encoding a RNA-targeted fusion protein of the disclosure; and (b) a single guide RNA (sgRNA) sequence comprising: on its 5′ end, an RNA sequence (or spacer sequence) that hybridizes to or binds to a target RNA sequence; and on its 3′ end, an RNA sequence (or scaffold sequence) capable of binding to or associating with the CRISPR/Cas protein of the fusion protein; and wherein the 2-component RNA targeting system recognizes and alters the target RNA in a cell in the absence of a PAMmer. In some embodiments, the sequences of the 2-component system are in a single vector. In some embodiments, the spacer sequence of the 2-component system targets a repeat sequence selected from the group consisting of CUG, CCUG, CAG, and GGGGCC.

[0287] In some embodiments of the compositions and methods of the disclosure, a vector of the disclosure is a viral vector. In some embodiments, the viral vector comprises a sequence isolated or derived from a retrovirus. In some embodiments, the viral vector comprises a sequence isolated or derived from a lentivirus. In some embodiments, the viral vector comprises a sequence isolated or derived from an adenovirus. In some embodiments, the viral vector comprises a sequence isolated or derived from an adeno-associated virus (AAV). In some embodiments, the viral vector is replication incompetent. In some embodiments, the viral vector is isolated or recombinant. In some embodiments, the viral vector is self-complementary.

[0288] In some embodiments of the compositions and methods of the disclosure, the viral vector comprises a sequence isolated or derived from an adeno-associated virus (AAV). In some embodiments, the viral vector comprises an inverted terminal repeat sequence or a capsid sequence that is isolated or derived from an AAV of serotype AAV1, AAV2, AAV3, AAV4, AAV5, AAV6, AAV7, AAV8, AAV9, AAV10, AAV11, or AAV12, or the vector and/or components are derived from a synthetic AAV serotype, such as, without limitation, Anc80 AAV (an ancestor of AAV 1, 2, 6, 8 and 9). In some embodiments, the viral vector is replication incompetent. In some embodiments, the viral vector is isolated or recombinant (rAAV). In some embodiments, the viral vector is self-complementary (scAAV).

[0289] In some embodiments of the compositions and methods of the disclosure, a vector of the disclosure is a non-viral vector. In some embodiments, the vector comprises or consists of a nanoparticle, a micelle, a liposome or lipoplex, a polymersome, a polyplex or a dendrimer. In some embodiments, the vector is an expression vector or recombinant expression system. As used herein, the term “recombinant expression system” refers to a genetic construct for the expression of certain genetic material formed by recombination.

[0290] In some embodiments of the compositions and methods of the disclosure, an expression vector, viral vector or non-viral vector provided herein, includes without limitation, an expression control element. An “expression control element” as used herein refers to any sequence that regulates the expression of a coding sequence, such as a gene. Exemplary expression control elements include but are not limited to promoters, enhancers, microRNAs, post-transcriptional regulatory elements, polyadenylation signal sequences, and introns. Expression control elements may be constitutive, inducible, repressible, or tissue-specific, for example. A “promoter” is a control sequence that is a region of a polynucleotide sequence at which initiation and rate of transcription are controlled. It may contain genetic elements at which regulatory proteins and molecules may bind such as RNA polymerase and other transcription factors. In some embodiments, expression control by a promoter is tissue-specific. Non-limiting exemplary promoters include CMV, CBA, CAG, Cbh, EF-1a, PGK, UBC, GUSB, UCOE, hAAT, TBG, Desmin, MCK, C5-12, NSE, Synapsin, PDGF, MecP2, CaMKII, mGluR2, NFL, NFH, nβ2, PPE, ENK, EAAT2, GFAP, MBP, and U6 promoters. An “enhancer” is a region of DNA that can be bound by activating proteins to increase the likelihood or frequency of transcription. Non-limiting exemplary enhancers and posttranscriptional regulatory elements include the CMV enhancer and WPRE.

[0291] In some embodiments of the compositions and methods of the disclosure, an expression vector, viral vector or non-viral vector provided herein, includes without limitation, vector elements such as an IRES or 2A peptide sites for configuration of “multicistronic” or “polycistronic” or “bicistronic” or tricistronic” constructs, i.e., having double or triple or multiple coding areas or exons, and as such will have the capability to express from mRNA two or more proteins from a single construct. Multicistronic vectors simultaneously express two or more separate proteins from the same mRNA. The two strategies most widely used for constructing multicistronic configurations are through the use of an IRES or a 2A self-cleaving site. An “IRES” refers to an internal ribosome entry site or portion thereof of viral, prokaryotic, or eukaryotic origin which are used within polycistronic vector constructs. In some embodiments, an IRES is an RNA element that allows for translation initiation in a cap-independent manner. The term “self-cleaving peptides” or “sequences encoding self-cleaving peptides” or “2A self-cleaving site” refer to linking sequences which are used within vector constructs to incorporate sites to promote ribosomal skipping and thus to generate two polypeptides from a single promoter, such self-cleaving peptides include without limitation, T2A, and P2A peptides or sequences encoding the self-cleaving peptides.

[0292] In some embodiments, the vector is a viral vector. In some embodiments, the vector is an adenoviral vector, an adeno-associated viral (AAV) vector, or a lentiviral vector. In some embodiments, the vector is a retroviral vector, an adenoviral/retroviral chimera vector, a herpes simplex viral I or II vector, a parvoviral vector, a reticuloendotheliosis viral vector, a polioviral vector, a papillomaviral vector, a vaccinia viral vector, or any hybrid or chimeric vector incorporating favorable aspects of two or more viral vectors. In some embodiments, the vector further comprises one or more expression control elements operably linked to the polynucleotide. In some embodiments, the vector further comprises one or more selectable markers. In some embodiments, the AAV vector has low toxicity. In some embodiments, the AAV vector does not incorporate into the host genome, thereby having a low probability of causing insertional mutagenesis. In some embodiments, the AAV vector can encode a range of total polynucleotides from 4.5 kb to 4.75 kb. In some embodiments, exemplary AAV vectors that may be used in any of the herein described compositions, systems, methods, and kits can include an AAV1 vector, a modified AAV1 vector, an AAV2 vector, a modified AAV2 vector, an AAV3 vector, a modified AAV3 vector, an AAV4 vector, a modified AAV4 vector, an AAV5 vector, a modified AAV5 vector, an AAV6 vector, a modified AAV6 vector, an AAV7 vector, a modified AAV7 vector, an AAV8 vector, an AAV9 vector, an AAV.rh10 vector, a modified AAV.rh10 vector, an AAV.rh32/33 vector, a modified AAV.rh32/33 vector, an AAV.rh43 vector, a modified AAV.rh43 vector, an AAV.rh64R1 vector, and a modified AAV.rh64R1 vector and any combinations or equivalents thereof. In some embodiments, the lentiviral vector is an integrase-competent lentiviral vector (ICLV). In some embodiments, the lentiviral vector can refer to the transgene plasmid vector as well as the transgene plasmid vector in conjunction with related plasmids (e.g., a packaging plasmid, a rev expressing plasmid, an envelope plasmid) as well as a lentiviral-based particle capable of introducing exogenous nucleic acid into a cell through a viral or viral-like entry mechanism. Lentiviral vectors are well-known in the art (see, e.g., Trono D. (2002) Lentiviral vectors, New York: Spring-Verlag Berlin Heidelberg and Durand et al. (2011) Viruses 3(2):132-159 doi: 10.3390/v3020132). In some embodiments, exemplary lentiviral vectors that may be used in any of the herein described compositions, systems, methods, and kits can include a human immunodeficiency virus (HIV) 1 vector, a modified human immunodeficiency virus (HIV) 1 vector, a human immunodeficiency virus (HIV) 2 vector, a modified human immunodeficiency virus (HIV) 2 vector, a sooty mangabey simian immunodeficiency virus (SIV_{SM}) vector, a modified sooty mangabey simian immunodeficiency virus (SIV_{SM}) vector, a African green monkey simian immunodeficiency virus (SIV_{AGM}) vector, a modified African green monkey simian immunodeficiency virus (SIV_{AGM}) vector, an equine infectious anemia virus (EIAV) vector, a modified equine infectious anemia virus (EIAV) vector, a feline immunodeficiency virus (FIV) vector, a modified feline immunodeficiency virus (FIV) vector, a Visna/maedi virus (VNV/VMV) vector, a modified Visna/maedi virus (VNV/VMV) vector, a caprine arthritis-encephalitis virus (CAEV) vector, a modified caprine arthritis-encephalitis virus (CAEV) vector, a bovine immunodeficiency virus (BIV), or a modified bovine immunodeficiency virus (BIV).

[0293] In some embodiments of the compositions and methods of the disclosure, a vector of the disclosure is a non-viral vector. In some embodiments, the vector comprises or consists of a nanoparticle, a micelle, a liposome or lipoplex, a polymersome, a polyplex or a dendrimer.

### Nucleic Acids

[0294] Provided herein are the nucleic acid sequences encoding the fusion proteins disclosed herein for use in gene transfer and expression techniques described herein. It should be understood, although not always explicitly stated that the sequences provided herein can be used to provide the expression product as well as substantially identical sequences that produce a protein that has the same biological properties. These “biologically equivalent” or “biologically active” or “equivalent” polypeptides are encoded by equivalent polynucleotides as described herein. They may possess at least 60%, or alternatively, at least 65%, or alternatively, at least 70%, or alternatively, at least 75%, or alternatively, at least 80%, or alternatively at least 85%, or alternatively at least 90%, or alternatively at least 95% or alternatively at least 98%, identical primary amino acid sequence to the reference polypeptide when compared using sequence identity methods run under default conditions. Specific polypeptide sequences are provided as examples of particular embodiments. Modifications to the sequences to amino acids with alternate amino acids that have similar charge. Additionally, an equivalent polynucleotide is one that hybridizes under stringent conditions to the reference polynucleotide or its complement or in reference to a polypeptide, a polypeptide encoded by a polynucleotide that hybridizes to the reference encoding polynucleotide under stringent conditions or its complementary strand. Alternatively, an equivalent polypeptide or protein is one that is expressed from an equivalent polynucleotide.

[0295] The nucleic acid sequences (e.g., polynucleotide sequences) disclosed herein may be codon-optimized which is a technique well known in the art. In some embodiments disclosed herein, exemplary Cas sequences, such as e.g., SEQ ID NO: 46 (Cas13d), are codon optimized for expression in human cells. Codon optimization refers to the fact that different cells differ in their usage of particular codons. This codon bias corresponds to a bias in the relative abundance of particular tRNAs in the cell type. By altering the codons in the sequence to match with the relative abundance of corresponding tRNAs, it is possible to increase expression. It is also possible to decrease expression by deliberately choosing codons for which the corresponding tRNAs are known to be rare in a particular cell type. Codon usage tables are known in the art for mammalian cells, as well as for a variety of other organisms. Based on the genetic code, nucleic acid sequences coding for, e.g., a Cas protein, can be generated. In some embodiments, such a sequence is optimized for expression in a host or target cell, such as a host cell used to express the Cas protein or a cell in which the disclosed methods are practiced (such as in a mammalian cell, e.g., a human cell). Codon preferences and codon usage tables for a particular species can be used to engineer isolated nucleic acid molecules encoding a Cas protein (such as one encoding a protein having at least 80%, at least 85%, at least 90%, at least 92%, at least 95%, at least 96%, at least 97%, at least 98%, at least 99%, or 100% sequence identity to its corresponding wild-type protein) that takes advantage of the codon usage preferences of that particular species. For example, the Cas proteins disclosed herein can be designed to have codons that are preferentially used by a particular organism of interest. In one example, an Cas nucleic acid sequence is optimized for expression in human cells, such as one having at least 70%, at least 80%, at least 85%, at least 90%, at least 92%, at least 95%, at least 98%, or at least 99% sequence identity to its corresponding wild-type or originating nucleic acid sequence. In some embodiments, an isolated nucleic acid molecule encoding at least one Cas protein (which can be part of a vector) includes at least one Cas protein coding sequence that is codon optimized for expression in a eukaryotic cell, or at least one Cas protein coding sequence codon optimized for expression in a human cell. In one embodiment, such a codon optimized Cas coding sequence has at least 80%, at least 85%, at least 90%, at least 92%, at least 95%, at least 96%, at least 97%, at least 98%, at least 99%, or 100% sequence identity to its corresponding wild-type or originating sequence. In another embodiment, a eukaryotic cell codon optimized nucleic acid sequence encodes a Cas protein having at least 85%, at least 90%, at least 92%, at least 95%, at least 96%, at least 97%, at least 98%, at least 99%, or 100% sequence identity to its corresponding wild-type or originating protein. In another embodiment, a variety of clones containing functionally equivalent nucleic acids may be routinely generated, such as nucleic acids which differ in sequence but which encode the same Cas protein sequence. Silent mutations in the coding sequence result from the degeneracy (i.e., redundancy) of the genetic code, whereby more than one codon can encode the same amino acid residue. Thus, for example, leucine can be encoded by CTT, CTC, CTA, CTG, TTA, or TTG; serine can be encoded by TCT, TCC, TCA, TCG, AGT, or AGC; asparagine can be encoded by AAT or AAC; aspartic acid can be encoded by GAT or GAC; cysteine can be encoded by TGT or TGC; alanine can be encoded by GCT, GCC, GCA, or GCG; glutamine can be encoded by CAA or CAG; tyrosine can be encoded by TAT or TAC; and isoleucine can be encoded by ATT, ATC, or ATA. Tables showing the standard genetic code can be found in various sources (see, for example, Stryer, 1988, Biochemistry, 3.sup.rd Edition, W.H. 5 Freeman and Co., NY).

[0296] “Hybridization” refers to a reaction in which one or more polynucleotides react to form a complex that is stabilized via hydrogen bonding between the bases of the nucleotide residues. The hydrogen bonding may occur by Watson-Crick base pairing, Hoogstein binding, or in any other sequence-specific manner. The complex may comprise two strands forming a duplex structure, three or more strands forming a multi-stranded complex, a single self-hybridizing strand, or any combination of these. A hybridization reaction may constitute a step in a more extensive process, such as the initiation of a PC reaction, or the enzymatic cleavage of a polynucleotide by a ribozyme.

[0297] Examples of stringent hybridization conditions include: incubation temperatures of about 25° C. to about 37° C.; hybridization buffer concentrations of about 6×SSC to about 10×SSC; formamide concentrations of about 0% to about 25%; and wash solutions from about 4×SSC to about 8×SSC. Examples of moderate hybridization conditions include: incubation temperatures of about 40° C. to about 50° C.; buffer concentrations of about 9×SSC to about 2×SSC; formamide concentrations of about 30% to about 50%; and wash solutions of about 5×SSC to about 2×SSC. Examples of high stringency conditions include: incubation temperatures of about 55° C. to about 68° C.; buffer concentrations of about 1×SSC to about 0.1×SSC; formamide concentrations of about 55% to about 75%; and wash solutions of about 1×SSC, 0.1×SSC, or deionized water. In general, hybridization incubation times are from 5 minutes to 24 hours, with 1, 2, or more washing steps, and wash incubation times are about 1, 2, or 15 minutes. SSC is 0.15 M NaCl and 15 mM citrate buffer. It is understood that equivalents of SSC using other buffer systems can be employed.

[0298] “Homology” or “identity” or “similarity” refers to sequence similarity between two peptides or between two nucleic acid molecules. Homology can be determined by comparing a position in each sequence which may be aligned for purposes of comparison. When a position in the compared sequence is occupied by the same base or amino acid, then the molecules are homologous at that position. A degree of homology between sequences is a function of the number of matching or homologous positions shared by the sequences. An “unrelated” or “non-homologous” sequence shares less than 40% identity, or alternatively less than 25% identity, with one of the sequences of the present invention.

### Cells

[0299] In some embodiments of the compositions and methods of the disclosure, a cell of the disclosure is a prokaryotic cell.

[0300] In some embodiments of the compositions and methods of the disclosure, a cell of the disclosure is a eukaryotic cell. In some embodiments, a cell of the disclosure is a somatic cell. In some embodiments, a cell of the disclosure is a germline cell. In some embodiments, a germline cell of the disclosure is not a human cell.

[0301] In some embodiments of the compositions and methods of the disclosure, a cell of the disclosure is a stem cell. In some embodiments, a cell of the disclosure is an embryonic stem cell. In some embodiments, an embryonic stem cell of the disclosure is not a human cell. In some embodiments, a cell of the disclosure is a multipotent stem cell or a pluripotent stem cell. In some embodiments, a cell of the disclosure is an adult stem cell. In some embodiments, a cell of the disclosure is an induced pluripotent stem cell (iPSC). In some embodiments, a cell of the disclosure is a hematopoietic stem cell (HSC).

[0302] In some embodiments of the compositions and methods of the disclosure, a somatic cell of the disclosure is an immune cell. In some embodiments, an immune cell of the disclosure is a lymphocyte. In some embodiments, an immune cell of the disclosure is a T lymphocyte (also referred to herein as a T-cell). Exemplary T-cells of the disclosure include, but are not limited to, naïve T cells, effector T cells, helper T cells, memory T cells, regulatory T cells (Tregs) and Gamma delta T cells. In some embodiments, an immune cell of the disclosure is a B lymphocyte. In some embodiments, an immune cell of the disclosure is a natural killer cell. In some embodiments, an immune cell of the disclosure is an antigen-presenting cell.

[0303] In some embodiments of the compositions and methods of the disclosure, a somatic cell of the disclosure is a muscle cell. In some embodiments, a muscle cell of the disclosure is a myoblast or a myocyte. In some embodiments, a muscle cell of the disclosure is a cardiac muscle cell, skeletal muscle cell or smooth muscle cell. In some embodiments, a muscle cell of the disclosure is a striated cell.

[0304] In some embodiments of the compositions and methods of the disclosure, a somatic cell of the disclosure is an epithelial cell. In some embodiments, an epithelial cell of the disclosure forms a squamous cell epithelium, a cuboidal cell epithelium, a columnar cell epithelium, a stratified cell epithelium, a pseudostratified columnar cell epithelium or a transitional cell epithelium. In some embodiments, an epithelial cell of the disclosure forms a gland including, but not limited to, a pineal gland, a thymus gland, a pituitary gland, a thyroid gland, an adrenal gland, an apocrine gland, a holocrine gland, a merocrine gland, a serous gland, a mucous gland and a sebaceous gland. In some embodiments, an epithelial cell of the disclosure contacts an outer surface of an organ including, but not limited to, a lung, a spleen, a stomach, a pancreas, a bladder, an intestine, a kidney, a gallbladder, a liver, a larynx or a pharynx. In some embodiments, an epithelial cell of the disclosure contacts an outer surface of a blood vessel or a vein.

[0305] In some embodiments of the compositions and methods of the disclosure, a somatic cell of the disclosure is a neuronal cell. In some embodiments, a neuron cell of the disclosure is a neuron of the central nervous system. In some embodiments, a neuron cell of the disclosure is a neuron of the brain or the spinal cord. In some embodiments, a neuron cell of the disclosure is a neuron of the retina. In some embodiments, a neuron cell of the disclosure is a neuron of a cranial nerve or an optic nerve. In some embodiments, a neuron cell of the disclosure is a neuron of the peripheral nervous system. In some embodiments, a neuron cell of the disclosure is a neuroglial or a glial cell. In some embodiments, a glial of the disclosure is a glial cell of the central nervous system including, but not limited to, oligodendrocytes, astrocytes, ependymal cells, and microglia. In some embodiments, a glial of the disclosure is a glial cell of the peripheral nervous system including, but not limited to, Schwann cells and satellite cells.

[0306] In some embodiments of the compositions and methods of the disclosure, a somatic cell of the disclosure is a primary cell.

[0307] In some embodiments of the compositions and methods of the disclosure, a somatic cell of the disclosure is a cultured cell.

[0308] In some embodiments of the compositions and methods of the disclosure, a somatic cell of the disclosure is in vivo, in vitro, ex vivo or in situ.

[0309] In some embodiments of the compositions and methods of the disclosure, a somatic cell of the disclosure is autologous or allogeneic.

### Methods of Use

[0310] The disclosure provides a method of modifying level of expression of an RNA molecule of the disclosure or a protein encoded by the RNA molecule comprising contacting the composition and the RNA molecule under conditions suitable for binding of one or more of the guide RNA or the RNA-binding protein or fusion protein thereof (or a portion thereof) to the RNA molecule and providing immune masking activity specific to the RNA-binding protein.

[0311] The disclosure provides a method of modifying an activity of a protein encoded by an RNA molecule comprising contacting the composition and the RNA molecule under conditions suitable for binding of one or more of the guide RNA or the fusion protein (or a RNA-binding portion thereof) to the RNA molecule and providing immune masking activity specific to the RNA-binding protein.

[0312] The disclosure provides a method of modifying level of expression of an RNA molecule of the disclosure or a protein encoded by the RNA molecule comprising contacting the composition and a cell comprising the RNA molecule under conditions suitable for binding of one or more of the guide RNA or the RNA-binding protein or fusion protein thereof (or a portion thereof) to the RNA molecule and providing immune masking activity specific to the RNA-binding protein. In some embodiments, the cell is in vivo, in vitro, ex vivo or in situ. In some embodiments, the composition comprises a vector comprising composition comprising a guide RNA of the disclosure and a fusion protein of the disclosure. In some embodiments, the vector is an AAV.

[0313] The disclosure provides a method of modifying an activity of a protein encoded by an RNA molecule comprising contacting the composition and a cell comprising the RNA molecule under conditions suitable for binding of one or more of the guide RNA or the RNA-binding protein or fusion protein thereof (or a portion thereof) to the RNA molecule and providing immune masking activity specific to the RNA-binding protein. In some embodiments, the cell is in vivo, in vitro, ex vivo or in situ. In some embodiments, the composition comprises a vector comprising composition comprising a guide RNA or a single guide RNA of the disclosure and a fusion protein of the disclosure. In some embodiments, the vector is an AAV.

[0314] The disclosure provides a method of modifying level of expression of an RNA molecule of the disclosure or a protein encoded by the RNA molecule comprising contacting the composition and the RNA molecule under conditions suitable for RNA nuclease activity wherein the RNA-binding protein or fusion protein thereof or portion thereof induces a break in the RNA molecule and provides immune masking activity specific to the RNA-binding protein.

[0315] The disclosure provides a method of modifying an activity of a protein encoded by an RNA molecule comprising contacting the composition and the RNA molecule under conditions suitable for RNA nuclease activity wherein the RNA-binding protein or fusion protein thereof (or a portion thereof) induces a break to the RNA molecule and provides immune masking activity specific to the RNA-binding protein.

[0316] The disclosure provides a method of modifying a level of expression of an RNA molecule of the disclosure or a protein encoded by the RNA molecule and provides immune masking activity specific to the RNA-binding protein comprising contacting the composition and a cell comprising the RNA molecule under conditions suitable for RNA nuclease activity wherein the RNA-binding protein or fusion protein thereof induces a break in the RNA molecule. In some embodiments, the cell is in vivo, in vitro, ex vivo or in situ. In some embodiments, the composition comprises a vector comprising composition comprising a guide RNA of the disclosure and an RNA-binding protein of the disclosure and a mutated non-cleavable FasL of the disclosure. In some embodiments, the vector is an AAV.

[0317] The disclosure provides a method of modifying an activity of a protein encoded by an RNA molecule comprising contacting the composition and a cell comprising the RNA molecule under conditions suitable for RNA nuclease activity wherein the RNA-binding protein or fusion protein thereof or portion thereof induces a break in the RNA molecule. In some embodiments, the cell is in vivo, in vitro, ex vivo or in situ. In some embodiments, the composition comprises a vector comprising composition comprising a guide RNA sequence or a single guide RNA of the disclosure and a sequence encoding an RNA-binding protein of the disclosure and sequence encoding a mutated non-cleavable FasL of the disclosure. In some embodiments, the vector is an AAV.

[0318] The disclosure provides a method of treating a disease or disorder comprising administering to a subject a therapeutically effective amount of a composition of the disclosure.

[0319] The disclosure provides a method of treating a disease or disorder comprising administering to a subject a therapeutically effective amount of a composition of the disclosure, wherein the composition comprises a vector comprising a guide RNA sequence of the disclosure, a sequence encoding an RNA-binding protein of the disclosure, and a sequence encoding a mutated non-cleavable FasL of the disclosure, and wherein the composition modifies a level of expression of an RNA molecule of the disclosure or a protein encoded by the RNA molecule and provides immune masking activity specific to the RNA-binding protein.

[0320] The disclosure provides a method of treating a disease or disorder comprising administering to a subject a therapeutically effective amount of a composition of the disclosure, wherein the composition comprises a vector comprising composition comprising a compositions of the disclosure.

[0321] In some embodiments of the compositions and methods of the disclosure, a disease or disorder of the disclosure includes, but is not limited to, a genetic disease or disorder. In some embodiments, the genetic disease or disorder is a single-gene disease or disorder. In some embodiments, the single-gene disease or disorder is an autosomal dominant disease or disorder, an autosomal recessive disease or disorder, an X-chromosome linked (X-linked) disease or disorder, an X-linked dominant disease or disorder, an X-linked recessive disease or disorder, a Y-linked disease or disorder or a mitochondrial disease or disorder. In some embodiments, the genetic disease or disorder is a multiple-gene disease or disorder. In some embodiments, the genetic disease or disorder is a multiple-gene disease or disorder. In some embodiments, the single-gene disease or disorder is an autosomal dominant disease or disorder including, but not limited to, Huntington's disease, neurofibromatosis type 1, neurofibromatosis type 2, Marfan syndrome, hereditary nonpolyposis colorectal cancer, hereditary multiple exostoses, Von Willebrand disease, and acute intermittent porphyria. In some embodiments, the single-gene disease or disorder is an autosomal recessive disease or disorder including, but not limited to, Albinism, Medium-chain acyl-CoA dehydrogenase deficiency, cystic fibrosis, sickle-cell disease, Tay-Sachs disease, Niemann-Pick disease, spinal muscular atrophy, and Roberts syndrome. In some embodiments, the single-gene disease or disorder is X-linked disease or disorder including, but not limited to, muscular dystrophy, Duchenne muscular dystrophy, Hemophilia, Adrenoleukodystrophy (ALD), Rett syndrome, and Hemophilia A. In some embodiments, the single-gene disease or disorder is a mitochondrial disorder including, but not limited to, Leber's hereditary optic neuropathy.

[0322] In some embodiments of the compositions and methods of the disclosure, a disease or disorder of the disclosure includes, but is not limited to, an immune disease or disorder. In some embodiments, the immune disease or disorder is an immunodeficiency disease or disorder including, but not limited to, B-cell deficiency, T-cell deficiency, neutropenia, asplenia, complement deficiency, acquired immunodeficiency syndrome (AIDS) and immunodeficiency due to medical intervention (immunosuppression as an intended or adverse effect of a medical therapy). In some embodiments, the immune disease or disorder is an autoimmune disease or disorder including, but not limited to, Achalasia, Addison's disease, Adult Still's disease, Agammaglobulinemia, Alopecia areata, Amyloidosis, Anti-GBM/Anti-TBM nephritis, Antiphospholipid syndrome, Autoimmune angioedema, Autoimmune dysautonomia, Autoimmune encephalomyelitis, Autoimmune hepatitis, Autoimmune inner ear disease (AIED), Autoimmune myocarditis, Autoimmune oophoritis, Autoimmune orchitis, Autoimmune pancreatitis, Autoimmune retinopathy, Autoimmune urticaria, Axonal & neuronal neuropathy (AMAN), Baló disease, Behcet's disease, Benign mucosal pemphigoid, Bullous pemphigoid, Castleman disease (CD), Celiac disease, Chagas disease, Chronic inflammatory demyelinating polyneuropathy (CIDP), Chronic recurrent multifocal osteomyelitis (CRMO), Churg-Strauss Syndrome (CSS) or Eosinophilic Granulomatosis (EGPA), Cicatricial pemphigoid, Cogan's syndrome, Cold agglutinin disease, Congenital heart block, Coxsackie myocarditis, CREST syndrome, Crohn's disease, Dermatitis herpetiformis, Dermatomyositis, Devic's disease (neuromyelitis optica), Discoid lupus, Dressler's syndrome, Endometriosis, Eosinophilic esophagitis (EoE), Eosinophilic fasciitis, Erythema nodosum, Essential mixed cryoglobulinemia, Evans syndrome, Fibromyalgia, Fibrosing alveolitis, Giant cell arteritis (temporal arteritis), Giant cell myocarditis, Glomerulonephritis, Goodpasture's syndrome, Granulomatosis with Polyangiitis, Graves' disease, Guillain-Barre syndrome, Hashimoto's thyroiditis, Hemolytic anemia, Henoch-Schonlein purpura (HSP), Herpes gestationis or pemphigoid gestationis (PG), Hidradenitis Suppurativa (HS) (Acne Inversa), Hypogammalglobulinemia, IgA Nephropathy, IgG4-related sclerosing disease, Immune thrombocytopenic purpura (ITP), Inclusion body myositis (IBM), Interstitial cystitis (IC), Juvenile arthritis, Juvenile diabetes (Type 1 diabetes), Juvenile myositis (JM), Kawasaki disease, Lambert-Eaton syndrome, Leukocytoclastic vasculitis, Lichen planus, Lichen sclerosus, Ligneous conjunctivitis, Linear IgA disease (LAD), Lupus, Lyme disease chronic, Meniere's disease, Microscopic polyangiitis (MPA), Mixed connective tissue disease (MCTD), Mooren's ulcer, Mucha-Habermann disease, Multifocal Motor Neuropathy (MMN) or MMNCB, Multiple sclerosis, Myasthenia gravis, Myositis, Narcolepsy, Neonatal Lupus, Neuromyelitis optica, Neutropenia, Ocular cicatricial pemphigoid, Optic neuritis, Palindromic rheumatism (PR), PANDAS, Paraneoplastic cerebellar degeneration (PCD), Paroxysmal nocturnal hemoglobinuria (PNH), Parry Romberg syndrome, Pars planitis (peripheral uveitis), Parsonnage-Turner syndrome, Pemphigus, Peripheral neuropathy, Perivenous encephalomyelitis, Pernicious anemia (PA), POEMS syndrome, Polyarteritis nodosa, Polyglandular syndromes type I, II, III, Polymyalgia rheumatica, Polymyositis, Postmyocardial infarction syndrome, Postpericardiotomy syndrome, Primary biliary cirrhosis, Primary sclerosing cholangitis, Progesterone dermatitis, Psoriasis, Psoriatic arthritis, Pure red cell aplasia (PRCA), Pyoderma gangrenosum, Raynaud's phenomenon, Reactive Arthritis, Reflex sympathetic dystrophy, Relapsing polychondritis, Restless legs syndrome (RLS), Retroperitoneal fibrosis, Rheumatic fever, Rheumatoid arthritis, Sarcoidosis, Schmidt syndrome, Scleritis, Scleroderma, Sjögren's syndrome, Sperm & testicular autoimmunity, Stiff person syndrome (SPS), Subacute bacterial endocarditis (SBE), Susac's syndrome, Sympathetic ophthalmia (SO), Takayasu's arteritis, Temporal arteritis/Giant cell arteritis, Thrombocytopenic purpura (TTP), Tolosa-Hunt syndrome (THS), Transverse myelitis, Type 1 diabetes, Ulcerative colitis (UC), Undifferentiated connective tissue disease (UCTD), Uveitis, Vasculitis, Vitiligo, Vogt-Koyanagi-Harada Disease, or Wegener's granulomatosis.

[0323] In some embodiments of the compositions and methods of the disclosure, a disease or disorder of the disclosure includes, but is not limited to, an inflammatory disease or disorder.

[0324] In some embodiments of the compositions and methods of the disclosure, a disease or disorder of the disclosure includes, but is not limited to, a metabolic disease or disorder.

[0325] In some embodiments of the compositions and methods of the disclosure, a disease or disorder of the disclosure includes, but is not limited to, a degenerative or a progressive disease or disorder. In some embodiments, the degenerative or a progressive disease or disorder includes, but is not limited to, amyotrophic lateral sclerosis (ALS), Huntington's disease, Alzheimer's disease, and aging.

[0326] In some embodiments of the compositions and methods of the disclosure, a disease or disorder of the disclosure includes, but is not limited to, an infectious disease or disorder.

[0327] In some embodiments of the compositions and methods of the disclosure, a disease or disorder of the disclosure includes, but is not limited to, a pediatric or a developmental disease or disorder.

[0328] In some embodiments of the compositions and methods of the disclosure, a disease or disorder of the disclosure includes, but is not limited to, a cardiovascular disease or disorder.

[0329] In some embodiments of the compositions and methods of the disclosure, a disease or disorder of the disclosure includes, but is not limited to, a proliferative disease or disorder. In some embodiments, the proliferative disease or disorder is a cancer. In some embodiments, the cancer includes, but is not limited to, Acute Lymphoblastic Leukemia (ALL), Acute Myeloid Leukemia (AML), Adrenocortical Carcinoma, AIDS-Related Cancers, Kaposi Sarcoma (Soft Tissue Sarcoma), AIDS-Related Lymphoma (Lymphoma), Primary CNS Lymphoma (Lymphoma), Anal Cancer, Appendix Cancer, Gastrointestinal Carcinoid Tumors, Astrocytomas, Atypical Teratoid/Rhabdoid Tumor, Central Nervous System (Brain Cancer), Basal Cell Carcinoma, Bile Duct Cancer, Bladder Cancer, Bone Cancer, Ewing Sarcoma, Osteosarcoma, Malignant Fibrous Histiocytoma, Brain Tumors, Breast Cancer, Burkitt Lymphoma, Carcinoid Tumor, Carcinoma, Cardiac (Heart) Tumors, Embryonal Tumors, Germ Cell Tumor, Primary CNS Lymphoma, Cervical Cancer, Cholangiocarcinoma, Chordoma, Chronic Lymphocytic Leukemia (CLL), Chronic Myelogenous Leukemia (CIVIL), Chronic Myeloproliferative Neoplasms, Colorectal Cancer, Craniopharyngioma, Cutaneous T-Cell Lymphoma, Ductal Carcinoma In Situ, Embryonal Tumors, Endometrial Cancer (Uterine Cancer), Ependymoma, Esophageal Cancer, Esthesioneuroblastoma (Head and Neck Cancer), Ewing Sarcoma (Bone Cancer), Extracranial Germ Cell Tumor, Extragonadal Germ Cell Tumor, Eye Cancer, Childhood Intraocular Melanoma, Intraocular Melanoma, Retinoblastoma, Fallopian Tube Cancer, Fibrous Histiocytoma of Bone, Malignant, and Osteosarcoma, Gallbladder Cancer, Gastric (Stomach) Cancer, Gastrointestinal Carcinoid Tumor, Gastrointestinal Stromal Tumors (GIST) (Soft Tissue Sarcoma), Childhood Gastrointestinal Stromal Tumors, Germ Cell Tumors, Childhood Extracranial Germ Cell Tumors, Extragonadal Germ Cell Tumors, Ovarian Germ Cell Tumors, Testicular Cancer, Gestational Trophoblastic Disease, Hairy Cell Leukemia, Head and Neck Cancer, Heart Tumors, Hepatocellular (Liver) Cancer, Histiocytosis, Hodgkin Lymphoma, Hypopharyngeal Cancer (Head and Neck Cancer), Intraocular Melanoma, Islet Cell Tumors, Pancreatic Neuroendocrine Tumors, Kaposi Sarcoma (Soft Tissue Sarcoma), Kidney (Renal Cell) Cancer, Langerhans Cell Histiocytosis, Laryngeal Cancer (Head and Neck Cancer), Leukemia, Lip and Oral Cavity Cancer (Head and Neck Cancer), Liver Cancer, Lung Cancer (Non-Small Cell and Small Cell), Childhood Lung Cancer, Lymphoma, Male Breast Cancer, Malignant Fibrous Histiocytoma of Bone and Osteosarcoma, Melanoma, Merkel Cell Carcinoma (Skin Cancer), Mesothelioma, Metastatic Squamous Neck Cancer with Occult Primary (Head and Neck Cancer), Midline Tract Carcinoma With NUT Gene Changes, Mouth Cancer (Head and Neck Cancer), Multiple Endocrine Neoplasia Syndromes, Multiple Myeloma/Plasma Cell Neoplasms, Mycosis Fungoides (Lymphoma), Myelodysplastic Syndromes, Myelodysplastic/Myeloproliferative Neoplasms, Nasal Cavity and Paranasal Sinus Cancer (Head and Neck Cancer), Nasopharyngeal Cancer (Head and Neck Cancer), Neuroblastoma, Non-Hodgkin Lymphoma, Non-Small Cell Lung Cancer, Oral Cancer, Lip and Oral Cavity Cancer and Oropharyngeal Cancer, Osteosarcoma and Malignant Fibrous Histiocytoma of Bone, Ovarian Cancer, Pancreatic Cancer, Pancreatic Neuroendocrine Tumors (Islet Cell Tumors), Papillomatosis, Paraganglioma, Parathyroid Cancer, Penile Cancer, Pharyngeal Cancer (Head and Neck Cancer), Pheochromocytoma, Plasma Cell Neoplasm/Multiple Myeloma, Pleuropulmonary Blastoma, Pregnancy and Breast Cancer, Primary Central Nervous System (CNS) Lymphoma, Primary Peritoneal Cancer, Prostate Cancer, Rectal Cancer, Recurrent Cancer, Renal Cell (Kidney) Cancer, Retinoblastoma, Rhabdomyosarcoma, Childhood (Soft Tissue Sarcoma), Salivary Gland Cancer (Head and Neck Cancer), Sarcoma, Childhood Rhabdomyosarcoma (Soft Tissue Sarcoma), Childhood Vascular Tumors (Soft Tissue Sarcoma), Ewing Sarcoma (Bone Cancer), Kaposi Sarcoma (Soft Tissue Sarcoma), Osteosarcoma (Bone Cancer), Uterine Sarcoma, Sézary Syndrome, Lymphoma, Skin Cancer, Small Cell Lung Cancer, Small Intestine Cancer, Soft Tissue Sarcoma, Squamous Cell Carcinoma of the Skin, Squamous Neck Cancer, Stomach (Gastric) Cancer, T-Cell Lymphoma, Testicular Cancer, Throat Cancer (Head and Neck Cancer), Nasopharyngeal Cancer, Oropharyngeal Cancer, Hypopharyngeal Cancer, Thymoma and Thymic Carcinoma, Thyroid Cancer, Transitional Cell Cancer of the Renal Pelvis and Ureter, Renal Cell Cancer, Urethral Cancer, Uterine Sarcoma, Vaginal Cancer, Vascular Tumors (Soft Tissue Sarcoma), Vulvar Cancer, Wilms Tumor and Other Childhood Kidney Tumors.

[0330] In some embodiments of the methods of the disclosure, a subject of the disclosure has been diagnosed with the disease or disorder. In some embodiments, the subject of the disclosure presents at least one sign or symptom of the disease or disorder. In some embodiments, the subject has a biomarker predictive of a risk of developing the disease or disorder. In some embodiments, the biomarker is a genetic mutation.

[0331] In some embodiments of the methods of the disclosure, a subject of the disclosure is female. In some embodiments of the methods of the disclosure, a subject of the disclosure is male. In some embodiments, a subject of the disclosure has two XX or XY chromosomes. In some embodiments, a subject of the disclosure has two XX or XY chromosomes and a third chromosome, either an X or a Y.

[0332] In some embodiments of the methods of the disclosure, a subject of the disclosure is a neonate, an infant, a child, an adult, a senior adult, or an elderly adult. In some embodiments of the methods of the disclosure, a subject of the disclosure is at least 1, 2, 3, 4, 5, 6, 7, 8, 9, 10, 11, 12, 13, 14, 15, 16, 17, 18, 19, 20, 21, 22, 23, 24, 25, 26, 27, 28, 29, 30 or 31 days old. In some embodiments of the methods of the disclosure, a subject of the disclosure is at least 1, 2, 3, 4, 5, 6, 7, 8, 9, 10, 11 or 12 months old. In some embodiments of the methods of the disclosure, a subject of the disclosure is at least 1, 2, 3, 4, 5, 6, 7, 8, 9, 10, 15, 20, 25, 30, 35, 40, 45, 50, 55, 60, 65, 70, 75, 80, 85, 90, 95, 100 or any number of years or partial years in between of age.

[0333] In some embodiments of the methods of the disclosure, a subject of the disclosure is a mammal. In some embodiments, a subject of the disclosure is a non-human mammal.

[0334] In some embodiments of the methods of the disclosure, a subject of the disclosure is a human.

[0335] In some embodiments of the methods of the disclosure, a therapeutically effective amount comprises a single dose of a composition of the disclosure. In some embodiments, a therapeutically effective amount comprises a therapeutically effective amount comprises at least one dose of a composition of the disclosure. In some embodiments, a therapeutically effective amount comprises a therapeutically effective amount comprises one or more dose(s) of a composition of the disclosure.

[0336] In some embodiments of the methods of the disclosure, a therapeutically effective amount eliminates a sign or symptom of the disease or disorder. In some embodiments, a therapeutically effective amount reduces a severity of a sign or symptom of the disease or disorder.

[0337] In some embodiments of the methods of the disclosure, a therapeutically effective amount eliminates the disease or disorder.

[0338] In some embodiments of the methods of the disclosure, a therapeutically effective amount prevents an onset of a disease or disorder. In some embodiments, a therapeutically effective amount delays the onset of a disease or disorder. In some embodiments, a therapeutically effective amount reduces the severity of a sign or symptom of the disease or disorder. In some embodiments, a therapeutically effective amount improves a prognosis for the subject.

[0339] In some embodiments of the methods of the disclosure, a composition of the disclosure is administered to the subject systemically. In some embodiments, the composition of the disclosure is administered to the subject by an intravenous route. In some embodiments, the composition of the disclosure is administered to the subject by an injection or an infusion.

[0340] In some embodiments of the methods of the disclosure, a composition of the disclosure is administered to the subject locally. In some embodiments, the composition of the disclosure is administered to the subject by an intraosseous, intraocular, intracerebrospinal or intraspinal route. In some embodiments, the composition of the disclosure is administered directly to the cerebral spinal fluid of the central nervous system. In some embodiments, the composition of the disclosure is administered directly to a tissue or fluid of the eye and does not have bioavailability outside of ocular structures. In some embodiments, the composition of the disclosure is administered to the subject by an injection or an infusion.

### Numbered Embodiments

[0341] 1. A composition comprising:

[0342] (a) a sequence encoding a non-self polypeptide of interest (POI), and

[0343] (b) a sequence encoding a non-cleavable Fas Ligand (FASL),

wherein expression of the non-cleavable FASL eliminates MHC-mediated immunogenic peptides and helper T cells specific to the expression of the POI.

[0344] 2. A composition comprising:

(a) a sequence encoding a non-self polypeptide, and
(b) a sequence encoding a non-cleavable FASL,
wherein expression of the non-cleavable FASL selectively eliminates a T-cell that recognizes a MHC-peptide complex, wherein the peptide is derived from the non-self polypeptide.

[0345] 3. A composition comprising:

(a) a sequence encoding a therapeutic polypeptide, and
(b) a sequence encoding a non-cleavable FASL,
wherein expression of the non-cleavable FASL selectively eliminates a T-cell that recognizes a MHC-peptide complex, wherein the peptide is derived from the therapeutic polypeptide.

[0346] 4. A composition comprising an adeno-associated virus (AAV) vector comprising:

a sequence encoding an AAV capsid polypeptide, and
a composition comprising
(a) a sequence encoding a human polypeptide, and
(b) a sequence encoding a non-cleavable FASL,
wherein expression of the non-cleavable FASL selectively eliminates a T-cell that recognizes a MHC-peptide complex, wherein the peptide is derived from the human polypeptide and/or the AAV capsid polypeptide.

[0347] 5. The composition of embodiment 4, wherein the human polypeptide is a self polypeptide and wherein the peptide is derived from the AAV capsid polypeptide.

[0348] 6. A composition comprising:

(a) a sequence comprising a guide RNA (gRNA) that specifically binds a target sequence within an RNA molecule,
(b) a sequence encoding an RNA-binding polypeptide, and
(c) a sequence encoding a non-cleavable FASL,

[0349] wherein expression of the non-cleavable FASL selectively eliminates a T-cell that recognizes a MHC-peptide complex, wherein the peptide is derived from the RNA-binding polypeptide.

[0350] 7. The composition of any one of embodiments 1-5, wherein a vector comprises the sequence of (a) and the sequence of (b).

[0351] 8. The composition of embodiment 6, wherein a vector comprises the sequence of (a), the sequence of (b) and the sequence of (c).

[0352] 9. The composition of embodiment 7 or 8, wherein the vector is an expression vector.

[0353] 10. The composition of embodiment 9, wherein the expression vector is a plasmid.

[0354] 11. The composition of any one of embodiments 1-10, wherein a promoter drives expression of the sequence of (a).

[0355] 12. The composition of any one of embodiments 1-5 and 7-11, wherein the promoter drives expression of the sequence of (b).

[0356] 13. The composition of embodiment 6, wherein a first promoter drives expression of the sequence of (a) and a second promoter drives expression of the sequence of (b).

[0357] 14. The composition of embodiment 13, wherein the second promoter drives expression of the sequence of (b) and the sequence of (c).

[0358] 15. The composition of embodiment 11, wherein a first promoter drives expression of the sequence of (a) and a second promoter drives expression of the sequence of (b).

[0359] 16. The composition of any one of embodiments 1-15, wherein one or more sequence(s) encoding the promoter comprises a sequence isolated or derived from a U6 promoter.

[0360] 17. The composition of any one of embodiments 1-15, wherein one or more sequence(s) encoding the promoter comprises a sequence isolated or derived from a promoter capable of diving expression of a transfer RNA (tRNA).

[0361] 18. The composition of embodiment 17, wherein the sequence encoding the promoter comprises a sequence isolated or derived from an alanine tRNA promoter, an arginine tRNA promoter, an asparagine tRNA promoter, an aspartic acid tRNA promoter, a cysteine tRNA promoter, a glutamine tRNA promoter, a glutamic acid tRNA promoter, a glycine tRNA promoter, a histidine tRNA promoter, an isoleucine tRNA promoter, a leucine tRNA promoter, a lysine tRNA promoter, a methionine tRNA promoter, a phenylalanine tRNA promoter, a proline tRNA promoter, a serine tRNA promoter, a threonine tRNA promoter, a tryptophan tRNA promoter, a tyrosine tRNA promoter, or a valine tRNA promoter.

[0362] 19. The composition of embodiment 17, wherein the sequence encoding the promoter comprises a sequence isolated or derived from a valine tRNA promoter.

[0363] 20. The composition of any one of embodiment 1-3 or 6-19, wherein a delivery vector comprises the composition.

[0364] 21. The composition of embodiment 20, wherein the delivery vector is an adeno-associated viral (AAV) vector.

[0365] 22. The composition of embodiment 20, wherein the AAV comprises a sequence isolated or derived from an AAV of serotype AAV1, AAV2, AAV3, AAV4, AAV5, AAV6, AAV7, AAV8, AAV9, AAV10, AAV11, or AAV12.

[0366] 23. The composition of embodiment 4 or 5, wherein the AAV comprises a sequence isolated or derived from an AAV of serotype AAV1, AAV2, AAV3, AAV4, AAV5, AAV6, AAV7, AAV8, AAV9, AAV10, AAV11, or AAV12.

[0367] 24. The composition of any one of embodiments 1-5, 7-14 or 16-23, wherein the sequence of (a) or the sequence of (b) further comprises a sequence encoding an Internal Ribosomal Entry Site (IRES) or a sequence encoding a self-cleaving peptide.

[0368] 25. The composition of embodiment 6, wherein the sequence of (b) or the sequence of (c) further comprises a sequence encoding IRES or a sequence encoding a self-cleaving peptide.

[0369] 26. The composition of any one of embodiments 8-23, wherein the vector comprises a sequence encoding IRES or a sequence encoding a self-cleaving peptide.

[0370] 27. The composition of embodiment 24 or 26, wherein the sequence encoding IRES or the sequence encoding a self-cleaving peptide is positioned between the sequence of (a) and the sequence of (b).

[0371] 28. The composition of embodiment 25 or 26, wherein the sequence encoding IRES or the sequence encoding a self-cleaving peptide is positioned between the sequence of (b) and the sequence of (c).

[0372] 29. The composition of any one of embodiments 24-28, wherein the self-cleaving peptide comprises a 2A self-cleaving peptide.

[0373] 30. The composition of any one of embodiments 1-29, wherein the non-cleavable FASL comprises a mutation in a metalloproteinase cleavage site.

[0374] 31. The composition of embodiment 30, wherein the metalloproteinase cleavage site comprises the amino acid sequence ELAELR.

[0375] 32. The composition of embodiment 31, wherein the mutation comprises one or more of a substitution, an insertion, a deletion, a frameshift, an inversion, or a transposition of the amino acid sequence ELAELR.

[0376] 33. The composition of any one of embodiments 30-32, wherein the non-cleavable FASL comprises the amino acid sequence of:

(SEQ ID NO: 210)
MQQPFNYPYPQIYWVDSSASSPWAPPGTVLPCPTSVPRRPGQRRPPPPP
PPPPLPPPPPPPPLPPLPLPPLKKRGNHSTGLCLLVMFFMVLVALVGLG
LGMFQLFHLQKX1X2X3X4X5X6ESTSQMHTASSLEKQIGHPSPPPEKK
ELRKVAHLTGKSNSRSMPLEWEDTYGIVLLSGVKYKKGGLVINETGLYF
VYSKVYFRGQSCNNLPLSHKVYMRNSKYPQDLVMMEGKMMSYCTTGQMW
ARSSYLGAVFNLTSADHLYVNVSELSLVNFEESQTFFGLYKL,

wherein X1 is not a glutamic acid (E), X2 is not an leucine (L), X3 is not an alanine (A), X4 is not an glutamic acid (E), X5 is not an leucine (L) or X6 is not an arginine (R).

[0377] 34. The composition of any one of embodiments 30-32, wherein the non-cleavable FASL comprises the amino acid sequence of:

(SEQ ID NO: 210)
MQQPFNYPYPQIYWVDSSASSPWAPPGTVLPCPTSVPRRPGQRRPPPPP
PPPPLPPPPPPPPLPPLPLPPLKKRGNHSTGLCLLVMFFMVLVALVGLG
LGMFQLFHLQKX1X2X3X4X5X6ESTSQMHTASSLEKQIGHPSPPPEKK
ELRKVAHLTGKSNSRSMPLEWEDTYGIVLLSGVKYKKGGLVINETGLYF
VYSKVYFRGQSCNNLPLSHKVYMRNSKYPQDLVMMEGKMMSYCTTGQMW
ARSSYLGAVFNLTSADHLYVNVSELSLVNFEESQTFFGLYKL,

wherein X1 is not a glutamic acid (E), X2 is not an leucine (L), X3 is not an alanine (A), X4 is not an glutamic acid (E), X5 is not an leucine (L) and X6 is not an arginine (R).

[0378] 35. The composition of embodiment 6, wherein the sequence comprising the gRNA further comprises a spacer sequence that specifically binds to the target RNA sequence.

[0379] 36. The composition of embodiment 35, wherein the spacer sequence has at least 50%, 55%, 60%, 65%, 70%, 75%, 80%, 87%, 90%, 95%, 97%, 99% or any percentage in between of complementarity to the target RNA sequence.

[0380] 37. The composition of embodiment 35, wherein the spacer sequence has 100% complementarity to the target RNA sequence.

[0381] 38. The composition of any one of embodiments 35-37, wherein the spacer sequence comprises or consists of 20 nucleotides.

[0382] 39. The composition of any one of embodiments 35-37, wherein the spacer sequence comprises or consists of 21 nucleotides.

[0383] 40. The composition of embodiment 39, wherein the spacer sequence comprises the sequence UGGAGCGAGCAUCCCCCAAA (SEQ ID NO: 1), GUUUGGGGGAUGCUCGCUCCA (SEQ ID NO: 2), CCCUCACUGCUGGGGAGUCC (SEQ ID NO: 3), GGACUCCCCAGCAGUGAGGG (SEQ ID NO: 4), GCAACUGGAUCAAUUUGCUG (SEQ ID NO: 5), GCAGCAAAUUGAUCCAGUUGC (SEQ ID NO: 6), GCAUUCUUAUCUGGUCAGUGC (SEQ ID NO: 7), GCACUGACCAGAUAAGAAUG (SEQ ID NO: 8), GAGCAGCAGCAGCAGCAGCAG (SEQ ID NO: 9), GCAGGCAGGCAGGCAGGCAGG (SEQ ID NO: 10), GCCCCGGCCCCGGCCCCGGC (SEQ ID NO: 11), or GCTGCTGCTGCTGCTGCTGC (SEQ ID NO: 12), GGGGCCGGGGCCGGGGCCGG (SEQ ID NO: 74), GGGCCGGGGCCGGGGCCGGG (SEQ ID NO: 75), GGCCGGGGCCGGGGCCGGGG (SEQ ID NO: 76), GCCGGGGCCGGGGCCGGGGC (SEQ ID NO: 77), CCGGGGCCGGGGCCGGGGCC (SEQ ID NO: 78), CGGGGCCGGGGCCGGGGCCG (SEQ ID NO: 79).

[0384] 41. The composition of any one of embodiments 6, 11, 13-14, 17-23, 25, and 28-40, wherein the sequence comprising the gRNA further comprises a scaffold sequence that specifically binds to the RNA binding protein.

[0385] 42. The composition of embodiment 41, wherein the scaffold sequence comprises a stem-loop structure.

[0386] 43. The composition of embodiment 41 or 42, wherein the scaffold sequence comprises or consists of 90 nucleotides.

[0387] 44. The composition of embodiment 41 or 42, wherein the scaffold sequence comprises or consists of 93 nucleotides.

[0388] 45. The composition of embodiment 44, wherein the scaffold sequence comprises the sequence

(SEQ ID NO: 13)
GUUUAAGAGCUAUGCUGGAAACAGCAUAGCAAGUUUAAAUAAGGCUAGUC
CGUUAUCAACUUGAAAAAGUGGCACCGAGUCGGUGCUUUUUUU.

[0389] 46. The composition of embodiment 45, wherein the spacer sequence comprises the sequence GUGAUAAGUGGAAUGCCAUG (SEQ ID NO: 14), CUGGUGAACUUCCGAUAGUG (SEQ ID NO: 15), or GAGATATAGCCTGGTGGTTC (SEQ ID NO: 16).

[0390] 47. The composition of embodiment 41 or 42, wherein the scaffold sequence comprises or consists of 85 nucleotides.

[0391] 48. The composition of embodiment 47, wherein the scaffold sequence comprises the sequence

(SEQ ID NO: 17)
GGACAGCAUAGCAAGUUAAAAUAAGGCUAGUCCGUUAUCAACUUGAAAAA
GUGGCACCGAGUCGGUGCUUUUU.

[0392] 49. The composition of embodiment 48, wherein the spacer sequence comprises the sequence at least 1, 2, 3, 4, 5, 6, or 7 repeats of the sequence CUG (SEQ ID NO: 18), CCUG (SEQ ID NO: 19), CAG (SEQ ID NO: 80), GGGGCC (SEQ ID NO: 81) or any combination thereof.

[0393] 50. The composition of embodiment 41 or 42, wherein the scaffold sequence comprises the sequence

(SEQ ID NO: 82)
GUUUAAGAGCUAUGCUGGAAACAGCAUAGCAAGUUUAAAUAAGGCUAGUC
CGUUAUCAACUUGAAAAAGUGGCACCGAGUCGGUGCUUUUUUU
or
(SEQ ID NO: 83)
GUUUUAGAGCUAGAAAUAGCAAGUUAAAAUAAGGCUAGUCCGUUAUCAAC
UUGAAAAAGUGGCACCGAGUCGGUGCUUUUUUU.

[0394] 51. The composition of any one of embodiments 6, 11, 13-14, 17-23, 25, and 28-50, wherein the gRNA does not bind or does not selectively bind to a second sequence within the RNA molecule.

[0395] 52. The composition of any one of embodiments 6, 11, 13-14, 17-23, 25, and 28-51, wherein an RNA genome or an RNA transcriptome comprises the RNA molecule.

[0396] 53. The composition of any one of embodiments 6, 11, 13-14, 17-23, 25, and 28-52, wherein the RNA-binding polypeptide is selected from the group consisting of CRISPR-Cas, PUF, Pumilio, and PPR.

[0397] 54. The composition of embodiment 53, wherein a fusion protein comprises the RNA-binding polypeptide.

[0398] 55. The composition of embodiment 54, wherein the fusion protein comprises a sequence encoding a first RNA-binding polypeptide and a sequence encoding a second RNA-binding polypeptide,

wherein neither the first RNA-binding polypeptide nor the second RNA-binding polypeptide comprises a significant DNA-nuclease activity,
wherein the first RNA-binding polypeptide and the second RNA-binding polypeptide are not identical, and
wherein the second RNA-binding polypeptide comprises an RNA-nuclease activity.

[0399] 56. The composition embodiment 55, wherein the first RNA binding protein comprises a CRISPR-Cas protein.

[0400] 57. The composition of embodiment 56, wherein the CRISPR-Cas protein is a Type II CRISPR-Cas protein.

[0401] 58. The composition of embodiment 57, wherein the first RNA binding protein comprises a Cas9 polypeptide or an RNA-binding portion thereof.

[0402] 59. The composition of embodiment 56, wherein the CRISPR-Cas protein is a Type V CRISPR-Cas protein.

[0403] 60. The composition of embodiment 59, wherein the first RNA binding protein comprises a Cpf1 polypeptide or an RNA-binding portion thereof.

[0404] 61. The composition of embodiment 56, wherein the CRISPR-Cas protein is a Type VI CRISPR-Cas protein.

[0405] 62. The composition of embodiment 61, wherein the first RNA binding protein comprises a Cas13 polypeptide or an RNA-binding portion thereof.

[0406] 63. The composition of any one of embodiments 56-62, wherein the CRISPR-Cas protein comprises a native RNA nuclease activity.

[0407] 64. The composition of embodiment 63, wherein the native RNA nuclease activity is reduced or inhibited.

[0408] 65. The composition of embodiment 63, wherein the native RNA nuclease activity is increased or induced.

[0409] 66. The composition of any one of embodiments 56-63, wherein the CRISPR-Cas protein comprises a native DNA nuclease activity and wherein the native DNA nuclease activity is inhibited.

[0410] 67. The composition of any one of embodiments 56-66, wherein the CRISPR-Cas protein comprises a mutation.

[0411] 68. The composition of embodiment 67, wherein a nuclease domain of the CRISPR-Cas protein comprises the mutation.

[0412] 69. The composition of embodiment 67 or 68, wherein the mutation occurs in a nucleic acid encoding the CRISPR-Cas protein.

[0413] 70. The composition of any one of embodiments 67-69, wherein the mutation comprises a substitution, an insertion, a deletion, a frameshift, an inversion, or a transposition.

[0414] 71. The composition of any one of embodiments 67-69, wherein the mutation comprises a deletion of a nuclease domain, a binding site within the nuclease domain, an active site within the nuclease domain, or at least one essential amino acid residue within the nuclease domain.

[0415] 72. The composition of embodiment 55, wherein the first RNA binding protein comprises a Pumilio and FBF (PUF) protein.

[0416] 73. The composition of embodiment 72, wherein the first RNA binding protein comprises a Pumilio-based assembly (PUMBY) protein.

[0417] 74. The composition of any one of embodiments 55-73, wherein the first RNA binding protein does not require multimerization for RNA-binding activity.

[0418] 75. The composition of any one of embodiments 55-74, wherein the first RNA binding protein is not a monomer of a multimer complex

[0419] 76. The composition of any one of embodiments 55-75, wherein a multimer protein complex does not comprise the first RNA binding protein.

[0420] 77. The composition of any one of embodiments 55-76, wherein the first RNA binding protein selectively binds to a target sequence within the RNA molecule.

[0421] 78. The composition of any one of embodiments 55-77, wherein the first RNA binding protein does not comprise an affinity for a second sequence within the RNA molecule.

[0422] 79. The composition of any one of embodiments 55-78, wherein the first RNA binding protein does not comprise a high affinity for or selectively bind a second sequence within the RNA molecule.

[0423] 80. The composition of any one of embodiments 55-79, wherein an RNA genome or an RNA transcriptome comprises the RNA molecule.

[0424] 81. The composition of any one of embodiments 55-80, wherein the first RNA binding protein comprises between 2 and 1300 amino acids, inclusive of the endpoints.

[0425] 82. The composition of any one of embodiments 55-81, wherein the sequence encoding the first RNA binding protein further comprises a sequence encoding a nuclear localization signal (NLS).

[0426] 83. The composition of embodiment 82, wherein the sequence encoding a nuclear localization signal (NLS) is positioned 3′ to the sequence encoding the first RNA binding protein.

[0427] 84. The composition of embodiment 82, wherein the first RNA binding protein comprises an NLS at a C-terminus of the protein.

[0428] 85. The composition of any one of embodiments 55-81, wherein the sequence encoding the first RNA binding protein further comprises a first sequence encoding a first NLS and a second sequence encoding a second NLS.

[0429] 86. The composition of embodiment 85, wherein the sequence encoding the first NLS or the second NLS is positioned 3′ to the sequence encoding the first RNA binding protein.

[0430] 87. The composition of embodiment 85, wherein the first RNA binding protein comprises the first NLS or the second NLS at a C-terminus of the protein.

[0431] 88. The composition of any one of embodiments 55-87, wherein the second RNA binding protein comprises or consists of a nuclease domain.

[0432] 89. The composition of embodiment 88, wherein the sequence encoding the second RNA binding protein comprises or consists of an RNAse.

### EXAMPLES

### Example 1: Preventing Adaptive Immune Response to a Non-Self Therapeutic Transgene

[0433] A non-self therapeutic transgene is delivered to a target issue via viral or nonviral means. In order to prevent adaptive immune response to this therapeutic, vector with DNA encoding mutant FASL (mFASL) is co-delivered by AAV. mFASL expression is driven by a promoter that is activated by TNFα or IL-6 signaling (FIG. 3A). This regulated expression of mFASL induces expression of mFASL only in the presence of activated T cells. In turn, T cells become sensitive to mFASL-mediated death only when activated. Two AAV-9 transfer vectors were produced that 1) encode Cas13d and guide RNA, and 2) encode mFASL driven by an IL-6-regulated promoter. The following IL-6-regulated promoters were compared:

i. CALCB promoter:
(SEQ ID NO: 192)
tcctggtgtggtactacaaaggtcctggaagtcctcctgccttacttcgagtccgccacaggccgga
gctacttctagaacagttctgactgccttcccaggggagggggcgactgcaggtcaccctgcctcag
tgcacgctgcgcatctgagttgcaggccgggcggcagtcacccgagtcagcggtcccgattcttcg
tgggtgttacctggagtttccattgcacgggtgctggaggccaacccgccctagtcccaccagctgg
gtcctgccacaagaaaaggacccagagggcctagacagatatcccctgaacttttttctgacccgca
gaaacagtgagcatcacctgcaggggttccgccagcctctggctttgcttcctgcccggcagcctcc
agcaagttttcccgaatgctctccaggagtgcagtgggcgccggcggacttatttagggtcgctgct
gccaagcgtcagagagcgaaccggaggcccggggctgggggctgtggtgagaggcgccccttt
ctttcttgccatcgcccctacccccagctccttcctagcctattctgccaaagctgggatcttctcctgg
aacccgggagcaagaagagctggcagtgccgactcccagaacccggctttccttcagaaaagatg
gataggccgagtttgtgtgcgtggacgtgcatgtgtcggtgtgcatgtttaggggacagtatgtaccc
ccaattgcataaaacacgcctgtttttggaaacagaaacacacggggttgctttcgggtatgggtgtg
gttagtttgggttcctgcgcacgctcccttttcggagcagctggtgagggcgcatctgttccagtgagt
gctggctgtctgatggactgtctgtgaatgcagaaggcagagcgtgtggtgggggtcctgccatgtg
agtgatgatgcgcgcactggctggtctgtagtcgcgagtggaacttgtgtgaaaattctcaggctgac
tctcgcgctgcagcacctgctcccctccgtgggtggcagctggaccccagcgcgctcagctctcag
gcgcttcagcgaagtggggtaggggtgtggaacgagagagatagagacccgggcatagaccatc
tccgccaggcagcttggcaaacaggtggcagagttgcagggcagctgtgtaagccaacttcggcg
cagcagtggagggtcctggcttggcgtgggggatgctggacccgcggtcgaggatttggggatat
aggggaagagggaggaggtggatgctgagccttgtatgcaggctatgtcagtttagccctctcccc
aacctctcttcggctcctgcccgtcccagaggagtgaggtggagaagggctggctgccagactgg
caccaaaacagccttctttgggtgcccaggttgccagggctcgaggggtcggaggatatccaggg
aagcaccccaggtggtccaaaaagatcaaattttgaggacccctccctccccttttccctcccccccc
ctccttccctgccgtgggctctttcagctgtggtccctttagaacccaggactactactgctcaacctcg
ctgggggttcgggtggctggattcgggtccctcactggcgtgacaggagggagtgcgaggcagg
aatttaggagccaaggaggtgagagcagctctggcccctcactgtaggtgacgccaaactctcctc
gacttgccccgactcttagttgaaaaatctctgtcctctcccaggctctccagcttcccaagcaatgac
ctcaatgaaaaaaatgacagcggggcggactgcccccgctccagagtaccagtgccggcagtgc
gagctatgacgcaatcggagctcggtcggtcctttgattggctagtcctggccactttggattggccg
cgcgggctggtggggaccccccccctccagctatctctgtaataagagcggggtctccgcgggga
aggcGCCCACAGCAGGTGTGGTGTTCATCCCGGGTCGACCGGC
CGCTCGCGCTGCCCTGAAACTCTAGTCGCCAGGTGAGGAAC
TTCCCATTCCCCATTCCGCTC
ii. BCAR3 promoter:
(SEQ ID NO: 193)
taaatagaatattatcagcatgcagaagtcacctctgggatccctttctgtcataatccacagctcaata
taaccactgtcttcacttttaacatcacagatatgctttgactatttttgaagtttatgtaaatggaatcatat
agtatgtacccatttgcggccagcttctttcactcaatatcctatttgtaagattcactcatcttgttgagtg
taaatgagttcatgcattcttattactatgttgtatgttacacagtttatctctcttctgctgatggacatttgg
gttgttttctttttggccgtcataaagagatacattataaacatttttcaacatcttttggtgaatatgtgtata
catctctgttgggtgcacacttaggggtggaattgctgggtcataggatacatgttaatttagcttttcta
gataatgccaagcaggtttttaaagtggttgtaaaaagttcattttgacgagcagtatggtcaggccctt
taattttagtcattctgggtggtatgaagttagatcacattgaaatatcaatttgcatttttgggatggttaa
taaattgagatattttccatatgtttattggcttttttgagaaatgcctgtttgtcctctatgaggacagttg
aaatattctgcctgtttttaattggattttctgccttattctggctgatccgtaggtgttctttatatatctgtaa
acaaaccttttttggatgtatgtgttgcaattatgttttctcactctgcggtttgccttttcactcgtggtgtct
tttcatgaacagaagctataattttaatcttgtccaatgatgagttttttttctttatattagtactacatgtgt
ttaagacatcgtctttgtctaccccaaggtaatgaagatttttttggacattttctttggatcgtgttattggt
ttactttttacctttaaaatccatctggaggccgggcgcggtggctcacacctgtaatcccagcactttg
ggaggccgaggtgggtggatcacctgaggtcaggagttcgagaccagcctgaccaaaatggtga
acccgtctctactaaaaatacaaaaattagccgggcatagtggcgtgcgcctgtaatcccagctactt
gggaagctgaggcaagataattgcttgaacccgggaggcggaggttgcagtgagccaagatcatg
ccgttgcacaacagcttgggcaacaagaccgaaactctgtctcgaaaagaaaaattccatctggaat
tgactggggatggggggattcagttgatccagcatcatttactggaaagagagagctaatctgaccc
ccaatacagcacagcagcacctgacataaatcaagtgaccacatattgtaaatctgtttttggactttat
tccattggtcagtttgtctatccttctactatttctatgactttataatggatcttgatataagatagtgttaag
tcttttccagtgggctccaatttttcaccccaccaaatcatctagtgctgaagtgccaccgccaactcgc
actttgctttcaatacgtccatacgagtgcaattgatttgcctgttcccgtggatggttcatttgtggttac
ctggggctttgtctcatcaaagcccttcacattgaaagccagccaggtgtctgcagacgagcaaagc
agatctgttgggtaattaaataacgcggggaaggggaaggagtggattcgacgaggctgtctctgg
agagagcttcagaaaggaagtgatcgagctatacttgaggactggctccttggggagatacgaaga
gagccaaactctaaaatccgggcagaggagggcctggctaggtcaccgaatgtaaatgtctcggg
gggttccgcaaggcagcgcgaatcggctcgccggggtggggccgcggagccgcaaatcaccag
ttgagggccggagtgcgcgccgccggctcAGAGCTGCGCCTGCTGCTGGCC
GGGCGGGGGACGGGGCCGGGACCGGAGCCGGAGCTGCGGG
GCGCACCGGCTAGACGCGCGCGGGATTCTCGGCGGGCAC
iii. CCAR6 promoter:
(SEQ ID NO: 194)
ccacattcctcgccttttatgcacctcacagtgtctatgcaaatgaacagtgtgattttaaatttgaggaa
gtttcaataagagtgagatctaagaggatctttaatataggggcatttttagagagctaaaaaccaaat
aggtctcagctttctcagggtgacatataatttagatttgacttggaactacagaaggaatatggggca
aaggacatgagaaacattgcagaggtcagtgccatatggagcttccacctcagctctcgaagtaaag
gcaaccagcccaggctgggagccagtcagcagcagggtctcaatctccatccactaccttcccctct
ggggcagggagggtgttgcagggaggaggccactcttggagacctccagatccctgcctctgtgc
agtctaacagaaggggcccccacagtggccatgaatctctttgttctgcaaggaagggggtgtcatt
gggcctcctgggtccctcagcatctgcgtggccacacaacgcggttttgttcaacacgttacatttctg
cttaattaatgttcatttttggtccccagcaaagtccaatctgtttttcgttttctttcttttctttccaggcagg
cattgccagggctaatcatctataaaagggcttactttcttaccttcacgctaagcaagaccatccaag
ggcagtgttagagggcacctgagaacgcaggaggggtgtgttacctggtggcctgtttcttcctccta
tgggcagcccttctacaggaagcagaagcctcaggggcgatggtagaaatgaggaggaggggat
ggagctgaggtagcaggggaggggtcgtaagagcagaggggagggtcttgctttgttcgccatcc
aataatcagcaggtttcgggttggggtgaactactggggaggagcgccccagggcttctctcagat
ggaggagggacaggtcacccagagtgaaggaagttgtgagctctgttagaggaaaacagccagg
acttagtcaggagaggctttgtttggaaggattgttgtaaggcagggagaggaatgatggcagcaag
aggaccccgtgaccataggtctgcaagcacttcaaacagaaaaggcccttcttttatccagtaaggg
ggagccactggggccagcagagtctttggaggggaccctggacaaacccgggaaaatggccagt
ggggttgagcaggacacaggtcctgctgtgtctagctggttccccagagagatgataaggggtgcg
ctccagcttctcaggctcactcaggcgtgaggacgtggagctcagggctctgcaggaaggagcga
cccaggtgaggtgtggtcaagatagagcagagctgggcagcgggcagtggagcctcgtgggcag
cctgggggtggggaggcacagtgcactgggaagtggagaaagtgtgagtccatcaggctggctg
agaattgatcacgaacctattgtctgtaaaacttttgttatttcctgagacgtggttcacagcaacccag
gtgcgaacagccttgtgattctagggttcttttctattttttaagcacttgcatctacaaataaatttctgag
tgacttgtcgtcagctgctttccttgatatgtctaaagacagggcagtgacccgcatcgtcacccaga
gattctgtctctgtgccacatgaagattaggtgcccgcttttgattgaggagctcctctgttgctctcaaa
gtatcttgtaataatagctgagatgcatggagaaccacctctccttcaggcgctgctcctcggcttccg
tggacgggcatggctatttctcggaaccctctgaggttagagctgtcatggtctttcttctgaaagagg
aaaccgaggcttgctggggctcagtggcccttctgtggctgcacagctttcggggtggggccagga
ctgactgactccacacaaaagtgctcccggcccatgtctttAACTCACACGGCCTCTT
GCAAACGTTCCCAAATCTTCCCAGTCGGCTTGCAGAGACTCC
TTGCTCCCAGGAGATAACCAGGTAAAGGAGTATGAAAGTTT
G
iv. COL6A3 promoter:
(SEQ ID NO: 195)
agtgtatttgtatttgaaagaaaccgtggagtggaaacacctaaaacgtgcttgttcagttaacctcagt
ttgctgagctgatggagcatggggttgtaatcaaagattgtcttcttcgcagcagacaatgttctggg
agaaatagtcctccttagtgctgaagttgcagactctaaccaagggggtggcagcaagtatccccgg
tctctgtaggggcttgagtcaacgcctgcactgtgcagagaggatgagggcagagaattggatgcc
gctggaggggcgtgttgtccttctacatgtcatgcaggcagcgcggttctatactcggagcctctgct
cagcgtgtcttcacctaagaaccccataattcaggttccatccttgttccctactccagtgctctgcaag
tgagccctttggtttagagatgggttgggcttctttatgggagaggaagggagccctggagctgcag
aggggagcaggcattctctctggggtgctgtctcctttcttccctaaattggagggagataatccatgg
aaaggagttaatgatttctttgctcttcaaacttggtttggaaggatctctcagtcaaaaagaacctttcg
gatgtctcttgatatttcacattaatggacttttcataaggaccacatgatgggagagcagtgagaagtt
tggggatggccaaagctgggttgtcatttgagctctgttactaacccagactggacaatgacgatgtc
acttactctctcggaacttcttttcttttcttcttttcttttctttttttcttttttctcttctcttctcttctc
ttctcttctcttctcttcttttcttttcatttcttttctttctttcctttttctcttttttggagtctcactctg
ttgcccaggctagagtgcagtggcgccatctcggctcactgcaacctctgcctcctgggttcaagcaattgtcct
gcctcagcctcccaaatagctgggactacaagcgcctgccaccatgcctggctaatttttatatttttagtagag
atttagtaggggtttcaccatgttggccaggctggtctccaactcctgaccttgtgatctgcctgccttagc
ctcccgaagtgctgagattacaggcataagccaccgtgcccagcctgtttctttcatctgtaaaatggg
accacaatttcacctaataaaagaagacatctttctatttaaaagggcttagggtgttgatgtttgtgata
aaggagagaatgtatattgaagtgttttgaaatgtgcaaagctttctagaaacagaagttcttactcaag
tattttcccgaagctttggcaagataaccatttttattaccccgtctgtgcctagaatgggcctataagcg
ccacaatcagaatcattagatatagaaattaagagaaatgtagcctccttttttttgccggtgaacagag
ctttggttaacagaaaaccaaggcgattttaattgctggtttttctatttgaagggggaagttattagtag
aagtctcaattcagaaacttcaagaagaaatgggagggtgtggtgagggtaagcgggggactgcat
ttcctgttttcctttcagatggtgttggaaaacattgcaggaaaaccatggatacccacgaagaaattcc
aaaatttattctttttgacgccaagggcccagcccaaaaggtgacgagtaggagtggtcaatttttttttt
taagagttggggcttgcaggagtccagctaaacgcttgtagggtgaagacagaattcagagggtga
catcagcctgagcgggggccagaagaaacagagtggaggagtctggtttcatttacagttttgggtc
agttctgcagtgaggagggggagaggaggggtccgggagggaggaggaggaggaggaggag
ctggaggaagccctgactggtatccctggccccagtccagtttggagctcAGTCTTCCACC
AAAGGCCGTTCAGTTCTCCTGGGCTCCAGCCTCCTGCAAGGA
CTGCAAGAGTTTTCCTCCGCAGCTCTGAGTCTCCACTTTTTTG
GTGGA
v. CXCR5 promoter:
(SEQ ID NO: 196)
atggaatcttttttttttttttttttgagtgtcaccaaggctagagggcagtggtgtgatcatggctcattgc
agcctcaacctcctgggctcaagcgatccgcctatctcagcctcctgagtagctgggactacaggtg
tgtgccaccatgcccagctaatttttgaattttttgtagagacgaggtttcaccatgttgcccaggctagt
ctcaaattcctgggctcaaaggattctcccatcttgacctcccaaagtgctgggattacaggcatgag
caaccacgccctgccaagtatagagtcttgaacaaggaaatgcatatcgtcctatattttttcctagtca
gataatatctagaccattaaccagaaatcacccagaggtcaaaaaacagggcgtcaaaggacccag
aaaccaagtctgcaaataacgactgaagacactgtggaagtgtgtttgggagacaacaagactctca
ggatgtgctggctgtatcagaggatgcttattggaagaggagtcagacagtccagacagaaggca
cagccaggacctctggagaggagttacaggaagacatattttgactcatcataaggaataagtttcta
atcatgaaaccatcctccactgaaacatgatctattgaaaggagcaaatgtctcaccttcattgatgttc
gtattcattgattctgggtgatcatctgataaggatgcagtgacgagaatcttgcatttgctgggggtgg
gggtgtggttgaggatagtctggtttatattccaaagttcctttcaattcctctatgattctatacgctgtac
tccttcctgatcaatgtccctagccagggtggccaaggctaagtcaagtatgctaagggattggagg
ggcagggatattgagaatagggtgaatggaaggatgaggagttcccagcaagcttgggacacagg
aaaccttggggcagcttcctcctggaggtttcaggactgtacgtgctggagaagaagtgtgatgcctt
gtcctgaaagccgtcttctttgaaagcagcttctaaaggcagtgaatggagaagagcgaggaaacg
accccaataccaccaacagaggctggaaactcctcaggctgtttaatcctaagaatgatgcatctgtt
ggccgggcacggtggttcacatctgtaatcctagcactttgggaggctgaggcaggcggatcacctt
aggtcaggaattcaagaccagactgaccaacatggagaaaccccatttctactaaaaatacaaaatt
agccgggcgtggtagcgcatgcctgtaatcccagctactcgggaggctgaagcaggagaattgctt
gaatccgggaggtggagtttgtggtgagctgagatctcgccattgcactccagcctgggcaacgag
agcaaaattctgtctcaaaataaataaataaaaatacaaaattagccgggcgtggtggtgcatgcctg
taatcccagatgctcgggaggctgaggcaggagaatcgcttgaacctgggaggtggaggttgtggt
gagccaagatcatgccattgcactccagcctgggcaagaagtgcaaaactctgtctcaaaaaaaaa
aaaaaaaaaaaaaaaaaagaatgatgcatctgttggggatgcagtggggtaagcatcttcagtaagc
aaggtgtgaagaggggaaagagggaaggtgaatatggaggagagggtgaaggagggcactgg
aaagggtagtaggatcccagcaaagggcgatttggctgaaagggagcgtgataacaagggtggg
ggtggggccaagaagcagccaccatgtgtgggtgcctctgtgcgtgcagtcatctttctcacatcatt
gtggatcaagagaggaaatgcccacttctggaagaaaaagccacaaaatgagacttggaagggaa
attgatcaacatctacaaaacggcttcttaaaggaagcggccctcAGACAGGACAGAG
TTGAGGGAAAGGACAGAGGTTATGAGTGCCTGCAAGAGTGG
CAGCCTGGAGTAGAGAAAACACTAAAGGTGGAGTCAAAAG
ACCTGAG

[0434] AAV-9 preparations were generated according to standard techniques (triple-transfection method) and purified by IDX gradient ultracentrifugation. AAV was titered by qPCR after dialysis against PBS. One of the three AAV versions described above is next injected into the tibialis anterior muscles of wildtype FVB strain mice (304, total volume, 2*10\hat{ }10 vg, 1*10\hat{ }11 vg or 4*10\hat{ }12 vg) and subjected to daily clinical observation subsequently. (Contralateral injection of vector 1 and either vector 2, 3, or PBS. 4 mice for each combination, 1/2, 1/3, 1/PBS). Mice are sacrificed at 1 w, 4 w, and 6 w after injection. For each animal, the proximal half of the tibialis anterior muscle (injection site), heart, spleen, liver (representative portion, i.e. piece of a lobe) and kidneys are collected, placed individually (except pair organs) into cryovials and flash frozen in liquid nitrogen for RNA/protein assessment and changes in gene expressions. The other half of the tibialis anterior muscle is embedded in OCT and frozen. The tibialis anterior muscle is cut in a transverse fashion.

[0435] RNA isolations from frozen tissue is carried out with RNAeasy columns (Qiagen) according to the manufacturer's protocol. RNA quality and concentrations are estimated using the Nanodrop spectrophotometer. cDNA preparation is done using Superscript III (Thermo) with random primers according to the manufacturer's protocol. qPCR is carried out to assess the levels of Cas9 in tissue among the three mouse groups (vector 1/2, 1/3, 1/PBS).

[0436] Immunofluorescence with sectioned tibialis anterior muscle is conducted to measure infiltration of immune cells (CD3 and CD45 staining).

### Example 2: Preventing Adaptive Immune Response to a Non-Self Therapeutic Transgene

[0437] A non-self therapeutic transgene is delivered to a target issue via viral or nonviral means. In order to prevent adaptive immune response to this therapeutic, vector with DNA encoding mutant FASL (mFASL) is co-delivered by viral or nonviral means. The mFASL mRNA contains an intron that splits the coding sequence of FASL (FIG. 3B). This intron is bound by an RNA-binding protein Cas13d with a single guide RNA that is partially complementary to the intron which prevents splicing of the adjacent exons. The Cas13d guide RNA is perfectly complementary to genes whose expression is regulated by TNFα or IL-6 signaling so that mFASL splicing is released from blockage upon TNFα or IL-6 signaling. Systems where the guide RNA is perfectly complementary to mRNAs encoded by the following genes were constructed: BCAR3, CALCB, CCR6, COL6A3, CXCR5, DHRS9, FLT1, FNBP1L, FNDC9, GBP4, GPR87, GZMB, HOPX, HSD11B1, IFIT2, IFNL1, IGFBP6, IL12RB2, IL1R1, IL1R2, IL23R, IL24, KCNK18, MAF, NAPSA, PALLD, PRG4, PSD3, RORA, TNFSF1, TNFSF13B, TSHZ2. Two AAV-9 transfer vectors were produced that 1) encode Cas13d and guide RNA, and 2) encode the mFASL construct with the intervening intron.

[0438] AAV-9 preparations were generated according to standard techniques (triple-transfection method) and purified by IDX gradient ultracentrifugation. AAV was titered by qPCR after dialysis against PBS. The AAV encoding the non-self transgene along with a vector containing the engineered mFASL construct and Cas13d were next injected into the tibialis anterior muscles of wildtype FVB strain mice (304, total volume, 2*10\hat{ }10 vg, 1*10\hat{ }11 vg or 4*10\hat{ }12 vg) and subjected to daily clinical observation subsequently. (Contralateral injection of vector 1 and either vector 2, 3, or PBS. 4 mice for each combination, 1/2, 1/3, 1/PBS). Mice are sacrificed at 1 w, 4 w, and 6 w after injection. For each animal, the proximal half of the tibialis anterior muscle (injection site), heart, spleen, liver (representative portion, i.e. piece of a lobe) and kidneys are collected, placed individually (except pair organs) into cryovials and flash frozen in liquid nitrogen for RNA/protein assessment and changes in gene expressions. The other half of the tibialis anterior muscle is embedded in OCT and frozen. The tibialis anterior muscle is cut in a transverse fashion.

[0439] RNA isolations from frozen tissue is carried out with RNAeasy columns (Qiagen) according to the manufacturer's protocol. RNA quality and concentrations are estimated using the Nanodrop spectrophotometer. cDNA preparation is done using Superscript III (Thermo) with random primers according to the manufacturer's protocol. qPCR is carried out to assess the levels of Cas9 in tissue among the three mouse groups (vector 1/2, 1/3, 1/PBS).

[0440] Immunofluorescence with sectioned tibialis anterior muscle is conducted to measure infiltration of immune cells (CD3 and CD45 staining).

### Example 3: Treatment of Myotonic Dystrophy Type I (DM1)

[0441] Compositions of the disclosure are used for the treatment of myotonic dystrophy type I (DM1) wherein an RNA-targeting CRISPR system composed of a therapeutic transgene (Cas9 or Cas13d and corresponding single guide RNA targeting the CUG repeats that cause DM1) is delivered to patient muscle or the central nervous system. The presence of mFASL causes the elimination of T cells that are specific to Cas9 or Cas13d and potentially cytotoxic against treated cells.

### Example 4: Treatment of Hemophilia

[0442] Compositions of the disclosure are used for the treatment of hemophilia. A secreted transgene such as Factor IX is used for the treatment of hemophilia. A vector carrying an expression cassette for factor IX along with mFASL reduces, eliminates, or prevents an adaptive immune response to Factor IX-expressing cells.

### Example 5: Preventing Adaptive Immune Response to a Non-Self Therapeutic Transgene while Simultaneously Preventing Immune Response to Repeated AAV Administrations

[0443] Compositions of the disclosure may comprise an AAV vector containing an expressed polypeptide composed of all or part of AAV viral capsid protein. The AAV capsid polypeptide is identical to the serotype used to deliver the system. Co-expression of this AAV capsid polypeptide causes the elimination of T cells that are specific to the AAV capsid in a manner described above. This causes depletion of T cells that can regulate both cellular and humoral immunity to the AAV capsid. This allows repeated dosing of the same AAV serotype. In the absence of the compositions of the disclosure, and using the standard of care prior to development of the compositions of the disclosure, an individual AAV serotype could not be used in more than once in a patient due to the formation of adaptive immune response against the viral capsid.

[0444] The compositions of the disclosure may be useful in situations wherein incomplete therapeutic transfer occurs during the first administration of a gene therapy or wherein a second dose is desired. In this case, the second dose of the gene therapy does not require the presence of the mFASL and AAV capsid polypeptide unless subsequent doses beyond the second dose are desired. One situation could be during the treatment of large organs such as skeletal muscle where the volume of virus required to transduce muscle in a single dose is prohibitively high. Another situation could be during treatment involving complicated administration methods in the brain or spine where initial treatments do not provide satisfactory infection of targeted cells.

### INCORPORATION BY REFERENCE

[0445] Every document cited herein, including any cross referenced or related patent or application is hereby incorporated herein by reference in its entirety unless expressly excluded or otherwise limited. The citation of any document is not an admission that it is prior art with respect to any invention disclosed or claimed herein or that it alone, or in any combination with any other reference or references, teaches, suggests or discloses any such invention. Further, to the extent that any meaning or definition of a term in this document conflicts with any meaning or definition of the same term in a document incorporated by reference, the meaning or definition assigned to that term in this document shall govern.

### OTHER EMBODIMENTS

[0446] While particular embodiments of the disclosure have been illustrated and described, various other changes and modifications can be made without departing from the spirit and scope of the disclosure. The scope of the appended claims includes all such changes and modifications that are within the scope of this disclosure.

The application's sequence listing, which the Patent Office published only in electronic form, follows.

SEQUENCE LISTING (127937 sequences)

SEQ ID NO: 1 - RNA, 20 nt, Artificial Sequence
  Space Sequence
uggagcgagcaucccccaaa

SEQ ID NO: 2 - RNA, 21 nt, Artificial Sequence
  Space Sequence
guuugggggaugcucgcucca

SEQ ID NO: 3 - RNA, 20 nt, Artificial Sequence
  Space Sequence
cccucacugcuggggagucc

SEQ ID NO: 4 - RNA, 20 nt, Artificial Sequence
  Space Sequence
ggacuccccagcagugaggg

SEQ ID NO: 5 - RNA, 20 nt, Artificial Sequence
  Space Sequence
gcaacuggaucaauuugcug

SEQ ID NO: 6 - RNA, 21 nt, Artificial Sequence
  Space Sequence
gcagcaaauugauccaguugc

SEQ ID NO: 7 - RNA, 21 nt, Artificial Sequence
  Space Sequence
gcauucuuaucuggucagugc

SEQ ID NO: 8 - RNA, 20 nt, Artificial Sequence
  Space Sequence
gcacugaccagauaagaaug

SEQ ID NO: 9 - RNA, 21 nt, Artificial Sequence
  Space Sequence
gagcagcagcagcagcagcag

SEQ ID NO: 10 - RNA, 21 nt, Artificial Sequence
  Space Sequence
gcaggcaggcaggcaggcagg

SEQ ID NO: 11 - RNA, 20 nt, Artificial Sequence
  Space Sequence
gccccggccccggccccggc

SEQ ID NO: 12 - DNA, 20 bp, Artificial Sequence
  Space Sequence
gctgctgctgctgctgctgc

SEQ ID NO: 13 - RNA, 93 nt, Artificial Sequence
  Scaffold Sequence
guuuaagagcuaugcuggaaacagcauagcaaguuuaaauaaggcuaguccguuaucaacuugaaaaaguggcaccgagucggugcuuuuuuu

SEQ ID NO: 14 - RNA, 20 nt, Artificial Sequence
  Space Sequence
gugauaaguggaaugccaug

SEQ ID NO: 15 - RNA, 20 nt, Artificial Sequence
  Space Sequence
cuggugaacuuccgauagug

SEQ ID NO: 16 - DNA, 20 bp, Artificial Sequence
  Space Sequence
gagatatagcctggtggttc

SEQ ID NO: 17 - RNA, 73 nt, Artificial Sequence
  Scaffold Sequence
ggacagcauagcaaguuaaaauaaggcuaguccguuaucaacuugaaaaaguggcaccgagucggugcuuuuu

SEQ ID NO: 18 - RNA, 3 nt, Artificial Sequence
  Space Sequence
cug

SEQ ID NO: 19 - RNA, 4 nt, Artificial Sequence
  Space Sequence
ccug

SEQ ID NO: 20 - protein, 128 aa, Artificial Sequence
  RNAse1
KESRAKKFQRQHMDSDSSPSSSSTYCNQMMRRRNMTQGLCKPVNTFVHEPLVDVQNVCFQEKVTCKNGQGNCYKSNSSMHITDCRLTNGSRYPNCAYRTSPKERHIIVACEGSPYVPVHFDASVEDST

SEQ ID NO: 21 - protein, 119 aa, Artificial Sequence
  RNAse4
QDGMYQRFLRQHVHPEETGGSDRYCDLMMQRRKMTLYHCKRFNTFIHEDIWNIRSICSTTNIQCKNGKMNCHEGVVKVTDCRDTGSSRAPNCRYRAIASTRRVVIACEGNPQVPVHFDG

SEQ ID NO: 22 - protein, 127 aa, Artificial Sequence
  RNAse6
WPKRLTKAHWFEIQHIQPSPLQCNRAMSGINNYTQHCKHQNTFLHDSFQNVAAVCDLLSIVCKNRRHNCHQSSKPVNMTDCRLTSGKYPQCRYSAAAQYKFFIVACDPPQKSDPPYKLVPVHLDSIL

SEQ ID NO: 23 - protein, 155 aa, Artificial Sequence
  RNAse7
APARAGFCPLLLLLLLGLWVAEIPVSAKPKGMTSSQWFKIQHMQPSPQACNSAMKNINKHTKRCKDLNTFLHEPFSSVAATCQTPKIACKNGDKNCHQSHGPVSLTMCKLTSGKYPNCRYKEKRQNKSYVVACKPPQKKDSQQFHLVPVHLDRVL

SEQ ID NO: 24 - protein, 122 aa, Artificial Sequence
  RNAse8
TSSQWFKTQHVQPSPQACNSAMSIINKYTERCKDLNTFLHEPFSSVAITCQTPNIACKNSCKNCHQSHGPMSLTMGELTSGKYPNCRYKEKHLNTPYIVACDPPQQGDPGYPLVPVHLDKVV

SEQ ID NO: 25 - protein, 134 aa, Artificial Sequence
  RNAse2
KPPQFTWAQWFETQHINMTSQQCTNAMQVINNYQRRCKNQNTFLLTTFANVVNVCGNPNMTCPSNKTRKNCHHSGSQVPLIHCNLTTPSPQNISNCRYAQTPANMFYIVACDNRDQRRDPPQYPVVPVHLDRII

SEQ ID NO: 26 - protein, 216 aa, Artificial Sequence
  RNAse6PL
DKRLRDNHEWKKLIMVQHWPETVCEKIQNDCRDPPDYWTIHGLWPDKSEGCNRSWPFNLEEIKKNWMEITDSSLPSPSMGPAPPRWMRSTPRRSTLAEAWNSTGSWTSTGGCALPPAALPSGDLCCRPSLTAGSRGVGVDLTALHQLLHVHYSATGIIPEECSEPTKPFQIILHHDHTEWVQSIGMPIWGTISSSESAIGKNEESQPACAVLSHDS

SEQ ID NO: 27 - protein, 722 aa, Artificial Sequence
  RNAseL
AAVEDNHLLIKAVQNEDVDLVQQLLEGGANVNFQEEEGGWTPLHNAVQMSREDIVELLLRHGADPVLRKKNGATPFILAAIAGSVKDLLKLFLSKGADVNECDFYGFTAFMEAAVYGKVKALKFLYKRGANVNLRRKTKEDQERLRKGGATALMDAAEKGHVEVLKILLDEMGADVNACDNMGRNALIHALLSSDDSDVEAITHLLLDHGADVNVRGERGKTPLILAVEKKHLGLVQRLLEQEHIEINDTDSDGKTALLLAVELKLKKIAELLCKRGASTDCGDLVMTARRNYDHSLVKVLLSHGAKEDFHPPAEDWKPQSSHWGAALKDLHRIYRPMIGKLKFFIDEKYKIADTSEGGIYLGFYEKQEVAVKTFCEGSPRAQREVSCLQSSRENSHLVTFYGSESHRGHLFVCVTLCEQTLEACLDVHRGEDVENEEDEFARNVLSSIFKAVQELHLSCGYTHQDLQPQNILIDSKKAAHLADFDKSIKWAGDPQEVKRDLEDLGRLVLYVVKKGSISFEDLKAQSNEEVVQLSPDEETKDLIHRLFHPGEHVRDCLSDLLGHPFFWTWESRYRTLRNVGNESDIKTRKSESEILRLLQPGPSEHSKSFDKWTTKINECVMKKMNKFYEKRGNFYQNTVGDLLKFIRNLGEHIDEEKHKKMKLKIGDPSLYFQKTFPDLVIYVYTKLQNTEYRKHFPQTHSPNKPQCDGAGGASGLASPGC

SEQ ID NO: 28 - protein, 217 aa, Artificial Sequence
  RNAseT2
VQHWPETVCEKIQNDCRDPPDYWTIHGLWPDKSEGCNRSWPFNLEEIKDLLPEMRAYWPDVIHSFPNRSRFWKHEWEKHGTCAAQVDALNSQKKYFGRSLELYRELDLNSVLLKLGIKPSINYYQVADFKDALARVYGVIPKIQCLPPSQDEEVQTIGQIELCLTKQDQQLQNCTEPGEQPSPKQEVWLANGAAESRGLRVCEDGPVFYPPPKKTKH

SEQ ID NO: 29 - protein, 183 aa, Artificial Sequence
  RNAse11
EASESTMKIIKEEFTDEEMQYDMAKSGQEKQTIEILMNPILLVKNTSLSMSKDDMSSTLLTFRSLHYNDPKGNSSGNDKECCNDMTVWRKVSEANGSCKWSNNFIRSSTEVMRRVHRAPSCKFVQNPGISCCESLELENTVCQFTTGKQFPRCQYHSVTSLEKILTVLTGHSLMSWLVCGSKL

SEQ ID NO: 30 - protein, 185 aa, Artificial Sequence
  RNAseT2-like
  misc_feature (1)..(1): Xaa can be any naturally occurring amino acid
XLGGADKRLRDNHEWKKLIMVQHWPETVCEKIQNDCRDPPDYWTIHGLWPDKSEGCNRSWPFNLEEIKDLLPEMRAYWPDVIHSFPNRSRFWKHEWEKHGTCAAQVDALNSQKKYFGRSLELYRELDLNSVLLKLGIKPSINYYQTTEEDLNLDVEPTTEDTAEEVTIHVLLHSALFGEIGPRRW

SEQ ID NO: 31 - protein, 299 aa, Artificial Sequence
  NOB1
APVEHVVADAGAFLRHAALQDIGKNIYTIREVVTEIRDKATRRRLAVLPYELRFKEPLPEYVRLVTEFSKKTGDYPSLSATDIQVLALTYQLEAEFVGVSHLKQEPQKVKVSSSIQHPETPLHISGFHLPYKPKPPQETEKGHSACEPENLEFSSFMFWRNPLPNIDHELQELLIDRGEDVPSEEEEEEENGFEDRKDDSDDDGGGWITPSNIKQIQQELEQCDVPEDVRVGCLTTDFAMQNVLLQMGLHVLAVNGMLIREARSYILRCHGCFKTTSDMSRVFCSHCGNKTLKKVSVTV

SEQ ID NO: 32 - protein, 210 aa, Artificial Sequence
  ENDOV
AFSGLQRVGGVDVSFVKGDSVRACASLVVLSFPELEVVYEESRMVSLTAPYVSGFLAFREVPFLLELVQQLREKEPGLMPQVLLVDGNGVLHHRGFGVACHLGVLTDLPCVGVAKKLLQVDGLENNALHKEKIRLLQTRGDSFPLLGDSGTVLGMALRSHDRSTRPLYISVGHRMSLEAAVRLTCCCCRFRIPEPVRQADICSREHIRKS

SEQ ID NO: 33 - protein, 249 aa, Artificial Sequence
  ENDOG
AELPPVPGGPRGPGELAKYGLPGLAQLKSRESYVLCYDPRTRGALWVVEQLRPERLRGDGDRRECDFREDDSVHAYHRATNADYRGSGFDRGHLAAAANHRWSQKAMDDTFYLSNVAPQVPHLNQNAWNNLEKYSRSLTRSYQNVYVCTGPLFLPRTEADGKSYVKYQVIGKNHVAVPTHFFKVLILEAAGGQIELRTYVMPNAPVDEAIPLERFLVPIESIERASGLLFVPNILARAGSLKAITAGSK

SEQ ID NO: 34 - protein, 479 aa, Artificial Sequence
  ENDOD1
RLVGEEEAGFGECDKFFYAGTPPAGLAADSHVKICQRAEGAERFATLYSTRDRIPVYSAFRAPRPAPGGAEQRWLVEPQIDDPNSNLEEAINEAEAITSVNSLGSKQALNTDYLDSDYQRGQLYPFSLSSDVQVATFTLTNSAPMTQSFQERWYVNLHSLMDRALTPQCGSGEDLYILTGTVPSDYRVKDKVAVPEFVWLAACCAVPGGGWAMGFVKHTRDSDIIEDVMVKDLQKLLPFNPQLFQNNCGETEQDTEKMKKILEVVNQIQDEERMVQSQKSSSPLSSTRSKRSTLLPPEASEGSSSFLGKLMGFIATPFIKLFQLIYYLVVAILKNIVYFLWCVTKQVINGIESCLYRLGSATISYFMAIGEELVSIPWKVLKVVAKVIRALLRILCCLLKAICRVLSIPVRVLVDVATFPVYTMGAIPIVCKDIALGLGGTVSLLFDTAFGTLGGLFQVVFSVCKRIGYKVTFDNSGEL

SEQ ID NO: 35 - protein, 380 aa, Artificial Sequence
  hFEN1
MGIQGLAKLIADVAPSAIRENDIKSYFGRKVAIDASMSIYQFLIAVRQGGDVLQNEEGETTSHLMGMFYRTIRMMENGIKPVYVFDGKPPQLKSGELAKRSERRAEAEKQLQQAQAAGAEQEVEKFTKRLVKVTKQHNDECKHLLSLMGIPYLDAPSEAEASCAALVKAGKVYAAATEDMDCLTFGSPVLMRHLTASEAKKLPIQEFHLSRILQELGLNQEQFVDLCILLGSDYCESIRGIGPKRAVDLIQKHKSIEEIVRRLDPNKYPVPENWLHKEAHQLFLEPEVLDPESVELKWSEPNEEELIKFMCGEKQFSEERIRSGVKRLSKSRQGSTQGRLDDFFKVTGSLSSAKRKEPEPKGSTKKKAKTGAAGKFKRGK

SEQ ID NO: 36 - protein, 186 aa, Homo sapiens
ESTHVEFKRFTTKKVIPRIKEMLPHYVSAFANTQGGYVLIGVDDKSKEVVGCKWEKVNPDLLKKEIENCIEKLPTFHFCCEKPKVNFTTKILNVYQKDVLDGYVCVIQVEPFCCVVFAEAPDSWIMKDNSVTRLTAEQWVVMMLDTQSAPPSLVTDYNSCLISSASSARKSPGYPIKVHKFKEALQ

SEQ ID NO: 37 - protein, 262 aa, Homo sapiens
TLQGTNTYLVGTGPRRILIDTGEPAIPEYISCLKQALTEFNTAIQEIVVTHWHRDHSGGIGDICKSINNDTTYCIKKLPRNPQREEIIGNGEQQYVYLKDGDVIKTEGATLRVLYTPGHTDDHMALLLEEENAIFSGDCILGEGTTVFEDLYDYMNSLKELLKIKADIIYPGHGPVIHNAEAKIQQYISHRNIREQQILTLFRENFEKSFTVMELVKIIYKNTPENLHEMAKHNLLLHLKKLEKEGKIFSNTDPDKKWKAHL

SEQ ID NO: 38 - protein, 518 aa, Homo sapiens
MLRVVSWNINGIRRPLQGVANQEPSNCAAVAVGRILDELDADIVCLQETKVTRDALTEPLAIVEGYNSYFSFSRNRSGYSGVATFCKDNATPVAAEEGLSGLFATQNGDVGCYGNMDEFTQEELRALDSEGRALLTQHKIRTWEGKEKTLTLINVYCPHADPGRPERLVFKMRFYRLLQIRAEALLAAGSHVIILGDLNTAHRPIDHWDAVNLECFEEDPGRKWMDSLLSNLGCQSASHVGPFIDSYRCFQPKQEGAFTCWSAVTGARHLNYGSRLDYVLGDRTLVIDTFQASFLLPEVMGSDHCPVGAVLSVSSVPAKQCPPLCTRFLPEFAGTQLKILRFLVPLEQSPVLEQSTLQHNNQTRVQTCQNKAQVRSTRPQPSQVGSSRGQKNLKSYFQPSPSCPQASPDIELPSLPLMSALMTPKTPEEKAVAKVVKGQAKTSEAKDEKELRTSFWKSVLAGPLRTPLCGGHREPCVMRTVKKPGPNLGRRFYMCARPRGPPTDPSSRCNFFLWSRPS

SEQ ID NO: 39 - protein, 350 aa, Homo sapiens
MLRVVSWNINGIRRPLQGVANQEPSNCAAVAVGRILDELDADIVCLQETKVTRDALTEPLAIVEGYNSYFSFSRNRSGYSGVATFCKDNATPVAAEEGLSGLFATQNGDVGCYGNMDEFTQEELRALDSEGRALLTQHKIRTWEGKEKTLTLINVYCPHADPGRPERLVFKMRFYRLLQIRAEALLAAGSHVIILGDLNTAHRPIDHWDAVNLECFEEDPGRKWMDSLLSNLGCQSASHVGPFIDSYRCFQPKQEGAFTCWSAVTGARHLNYGSRLDYVLGDRTLVIDTFQASFLLPEVMGSDHCPVGAVLSVSSVPAKQCPPLCTRFLPEFAGTQLKILRFLVPLEQSP

SEQ ID NO: 40 - protein, 123 aa, Homo sapiens [sequence omitted]

SEQ ID NO: 41 - protein, 136 aa, Homo sapiens
SSLIRRVISTAKAPGAIGPYSQAVLVDRTIYISGQIGMDPSSGQLVSGGVAEEAKQALKNMGEILKAAGCDFTNVVKTTVLLADINDFNTVNEIYKQYFKSNFPARAAYQVAALPKGSRIEIEAVAIQGPLTTASL

SEQ ID NO: 42 - protein, 189 aa, Homo sapiens
GGGTPKAPNLEPPLPEEEKEGSDLRPVVIDGSNVAMSHGNKEVFSCRGILLAVNWFLERGHTDITVFVPSWRKEQPRPDVPITDQHILRELEKKKILVFTPSRRVGGKRVVCYDDRFIVKLAYESDGIVVSNDTYRDLQGERQEWKRFIEERLLMYSFVNDKFMPPDDPLGRHGPSLDNFLRKKPLTLE

SEQ ID NO: 43 - protein, 598 aa, Homo sapiens
SGPCGEKPVLEASPTMSLWEFEDSHSRQGTPRPGQELAAEEASALELQMKVDFFRKLGYSSTEIHSVLQKLGVQADTNTVLGELVKHGTATERERQTSPDPCPQLPLVPRGGGTPKAPNLEPPLPEEEKEGSDLRPVVIDGSNVAMSHGNKEVFSCRGILLAVNWFLERGHTDITVFVPSWRKEQPRPDVPITDQHILRELEKKKILVFTPSRRVGGKRVVCYDDRFIVKLAYESDGIVVSNDTYRDLQGERQEWKRFIEERLLMYSFVNDKFMPPDDPLGRHGPSLDNFLRKKPLTLEHRKQPCPYGRKCTYGIKCRFFHPERPSCPQRSVADELRANALLSPPRAPSKDKNGRRPSPSSQSSSLLTESEQCSLDGKKLGAQASPGSRQEGLTQTYAPSGRSLAPSGGSGSSFGPTDWLPQTLDSLPYVSQDCLDSGIGSLESQMSELWGVRGGGPGEPGPPRAPYTGYSPYGSELPATAAFSAFGRAMGAGHFSVPADYPPAPPAFPPREYWSEPYPLPPPTSVLQEPPVQSPGAGRSPWGRAGSLAKEQASVYTKLCGVFPPHLVEAVMGRFPQLLDPQQLAAEILSYKSQHPSE

SEQ ID NO: 44 - protein, 136 aa, Homo sapiens; identical to SEQ ID NO: 41

SEQ ID NO: 45 - protein, 966 aa, Ruminococcus flavefaciens
IEKKKSFAKGMGVKSTLVSGSKVYMTTFAEGSDARLEKIVEGDSIRSVNEGEAFSAEMADKNAGYKIGNAKFSHPKGYAVVANNPLYTGPVQQDMLGLKETLEKRYFGESADGNDNICIQVIHNILDIEKILAEYITNAAYAVNNISGLDKDIIGFGKFSTVYTYDEFKDPEHHRAAFNNNDKLINAIKAQYDEFDNFLDNPRLGYFGQAFFSKEGRNYIINYGNECYDILALLSGLAHWVVANNEEESRISRTWLYNLDKNLDNEYISTLNYLYDRITNELTNSFSKNSAANVNYIAETLGINPAEFAEQYFRFSIMKEQKNLGFNITKLREVMLDRKDMSEIRKNHKVFDSIRTKVYTMMDFVIYRYYIEEDAKVAAANKSLPDNEKSLSEKDIFVINLRGSFNDDQKDALYYDEANRIWRKLENIMHNIKEFRGNKTREYKKKDAPRLPRILPAGRDVSAFSKLMYALTMFLDGKEINDLLTTLINKFDNIQSFLKVMPLIGVNAKFVEEYAFFKDSAKIADELRLIKSFARMGEPIADARRAMYIDAIRILGTNLSYDELKALADTFSLDENGNKLKKGKHGMRNFIINNVISNKRFHYLIRYGDPAHLHEIAKNEAVVKFVLGRIADIQKKQGQNGKNQIDRYYETCIGKDKGKSVSEKVDALTKIITGMNYDQFDKKRSVIEDTGRENAEREKFKKIISLYLTVIYHILKNIVNINARYVIGFHCVERDAQLYKEKGYDINLKKLEEKGFSSVTKLCAGIDETAPDKRKDVEKEMAERAKESIDSLESANPKLYANYIKYSDEKKAEEFTRQINREKAKTALNAYLRNTKWNVIIREDLLRIDNKTCTLFANKAVALEVARYVHAYINDIAEVNSYFQLYHYIMQRIIMNERYEKSSGKVSEYFDAVNDEKKYNDRLLKLLCVPFGYCIPRFKNLSIEALFDRNEAAKFDKEKKKVSGNS

SEQ ID NO: 46 - protein, 1034 aa, Artificial Sequence
  Cas13d (contig e-k87 11092736)
MKRQKTFAKRIGIKSTVAYGQGKYAITTFGKGSKAEIAVRSADPPEETLPTESDATLSIHAKFAKAGRDGREFKCGDVDETRIHTSRSEYESLISNPAESPREDYLGLKGTLERKFFGDEYPKDNLRIQIIYSILDIQKILGLYVEDILHFVDGLQDEPEDLVGLGLGDEKMQKLLSKALPYMGFFGSTDVFKVTKKREERAAADEHNAKVFRALGAIRQKLAHFKWKESLAIFGANANMPIRFFQGATGGRQLWNDVIAPLWKKRIERVRKSFLSNSAKNLWVLYQVFKDDTDEKKKARARQYYHFSVLKEGKNLGFNLTKTREYFLDKFFPIFHSSAPDVKRKVDTFRSKFYAILDFIIYEASVSVANSGQMGKVAPWKGAIDNALVKLREAPDEEAKEKIYNVLAASIRNDSLFLRLKSACDKFGAEQNRPVFPNELRNNRDIRNVRSEWLEATQDVDAAAFVQLIAFLCNFLEGKEINELVTALIKKFEGIQALIDLLRNLEGVDSIRFENEFALFNDDKGNMAGRIARQLRLLASVGKMKPDMTDAKRVLYKSALEILGAPPDEVSDEWLAENILLDKSNNDYQKAKKTVNPFRNYIAKNVITSRSFYYLVRYAKPTAVRKLMSNPKIVRYVLKRLPEKQVASYYSAIWTQSESNSNEMVKLIEMIDRLTTEIAGFSFAVLKDKKDSIVSASRESRAVNLEVERLKKLTTLYMSIAYIAVKSLVKVNARYFIAYSALERDLYFFNEKYGEEFRLHFIPYELNGKTCQFEYLAILKYYLARDEETLKRKCEICEEIKVGCEKHKKNANPPYEYDQEWIDKKKALNSERKACERRLHFSTHWAQYATKRDENMAKHPQKWYDILASHYDELLALQATGWLATQARNDAEHLNPVNEFDVYIEDLRRYPEGTPKNKDYHIGSYFEIYHYIRQRAYLEEVLAKRKEYRDSGSFTDEQLDKLQKILDDIRARGSYDKNLLKLEYLPFAYNLPRYKNLTTEALFDDDSVSGKKRVAEWREREKTREAEREQRRQR

SEQ ID NO: 47 - DNA, 30 bp, Artificial Sequence
  contig e-k87 11092736
gtgagaagtctccttatggggagatgctac

SEQ ID NO: 48 - protein, 1022 aa, Artificial Sequence
  Cas13d (160582958 gene49834)
MKNSVTFKLIQAQENKEAARKKAKDIAEQARIAKRNGVVKKEENRINRIQIEIQTQKKSNTQNAYHLKSLAKAAGVKSVFAIGNDLLMTGFGPGNDATIEKRVFQNRAIETLSSPEQYSAEFQNKQFKIKGNIKVLNHSTQKMEEIQTELQDNYNRPHFDLLGCKNVLEQKYFGRTFSDNIHVQIAYNIMDIEKLLTPYINNIIYTLNELMRDNSKDDFFGCDSHFSVAYLYDELKAGYSDRLKTKPNLSKNIDRIWNNFCNYMNSDSGNTEARLAYFGELFYKPKETGDAKSDYKTHLSNNQKEEWELKSDKEVYNIFAILCDLRHFCTHGESITPSGKPFPYNLEKNLFPEAKQVLNSLFEEKAESLGAEAFGKTAGKTDVSILLKVFEKEQASQKEQQALLKEYYDFKVQKTYKNMGFSIKKLREAIMEIPDAAKFKDDLYSSLRHKLYGLFDFILVKHFLDTSDSENLQNNDIFRQLRACRCEEEKDQVYRSIAVKVWEKVKKKELNMFKQVVVIPSLSKDELKQMEMTKNTELLSSIETISTQASLFSEMIFMMTYLLDGKEINLLCTSLIEKFENIASFNEVLKSPQIGYETKYTEGYAFFKNADKTAKELRQVNNMARMTKPLGGVNTKCVMYNEAAKILGAKPMSKAELESVFNLDNHDYTYSPSGKKIPNKNFRNFIINNVITSRRFLYLIRYGNPEKIRKIAINPSIISFVLKQIPDEQIKRYYPPCIGKRTDDVTLMRDELGKMLQSVNFEQFSRVNNKQNAKQNPNGEKARLQACVRLYLTVPYLFIKNMVNINARYVLAFHCLERDHALCFNSRKLNDDSYNEMANKFQMVRKAKKEQYEKEYKCKKQETGTAHTKKIEKLNQQIAYIDKDIKNMHSYTCRNYRNLVAHLNVVSKLQNYVSELPNDYQITSYFSFYHYCMQLGLMEKVSSKNIPLVESLKNEANDAQSYSAKKTLEYFDLIEKNRTYCKDFLKALNAPFSYNLPRFKNLSIEALFDKNIVYEQADLKKE

SEQ ID NO: 49 - DNA, 36 bp, Artificial Sequence
  Cas13d (160582958 gene49834)
gaactacacccctctgttcttgtaggggtctaacac

SEQ ID NO: 50 - protein, 877 aa, Artificial Sequence
  Cas13d (contig tpg DJXD01000002.1)
MKKQKSKKTVSKTSGLKEALSVQGTVIMTSFGKGNMANLSYKIPSSQKPQNLNSSAGLKNVEVSGKKIKFQGRHPKIATTDNPLFKPQPGMDLLCLKDKLEMHYFGKTFDDNIHIQLIYQILDIEKILAVHVNNIVFTLDNVLHPQKEELTEDFIGAGGWRINLDYQTLRGQTNKYDRFKNYIKRKELLYFGEAFYHENERRYEEDIFAILTLLSALRQFCFHSDLSSDESDHVNSFWLYQLEDQLSDEFKETLSILWEEVTERIDSEFLKTNTVNLHILCHVFPKESKETIVRAYYEFLIKKSFKNMGFSIKKLREIMLEQSDLKSFKEDKYNSVRAKLYKLFDFIITYYYDHHAFEKEALVSSLRSSLTEENKEEIYIKTARTLASALGADFKKAAADVNAKNIRDYQKKANDYRISFEDIKIGNTGIGYFSELIYMLTLLLDGKEINDLLTTLINKFDNIISFIDILKKLNLEFKFKPEYADFFNMTNCRYTLEELRVINSIARMQKPSADARKIMYRDALRILGMDNRPDEEIDRELERTMPVGADGKFIKGKQGFRNFIASNVIESSRFHYLVRYNNPHKTRTLVKNPNVVKFVLEGIPETQIKRYFDVCKGQEIPPTSDKSAQIDVLARIISSVDYKIFEDVPQSAKINKDDPSRNFSDALKKQRYQAIVSLYLTVMYLITKNLVYVNSRYVIAFHCLERDAFLHGVTLPKMNKKIVYSQLTTHLLTDKNYTTYGHLKNQKGHRKWYVLVKNNLQNSDITAVSSFRNIVAHISVVRNSNEYISGIGELHSYFELYHYLVQSMIAKNNWYDTSHQPKTAEYLNNLKKHHTYCKDFVKAYCIPFGYVVPRYKNLTINELFDRNNPNPEPKEEV

SEQ ID NO: 51 - DNA, 36 bp, Homo sapiens
caactacaaccccgtaaaaatacggggttctgaaac

SEQ ID NO: 52 - protein, 1978 aa, Artificial Sequence
  zinc finger nuclease polypeptide
MSRPRFNPRGDFPLQRPRAPNPSGMRPPGPFMRPGSMGLPRFYPAGRARGIPHRFAGHESYQNMGPQRMNVQVTQHRTDPRLTKEKLDFHEAQQKKGKPHGSRWDDEPHISASVAVKQSSVTQVTEQSPKVQSRYTKESASSILASFGLSNEDLEELSRYPDEQLTPENMPLILRDIRMRKMGRRLPNLPSQSRNKETLGSEAVSSNVIDYGHASKYGYTEDPLEVRIYDPEIPTDEVENEFQSQQNISASVPNPNVICNSMFPVEDVFRQMDFPGESSNNRSFFSVESGTKMSGLHISGGQSVLEPIKSVNQSINQTVSQTMSQSLIPPSMNQQPFSSELISSVSQQERIPHEPVINSSNVHVGSRGSKKNYQSQADIPIRSPFGIVKASWLPKFSHADAQKMKRLPTPSMMNDYYAASPRIFPHLCSLCNVECSHLKDWIQHQNTSTHIESCRQLRQQYPDWNPEILPSRRNEGNRKENETPRRRSHSPSPRRSRRSSSSHRFRRSRSPMHYMYRPRSRSPRICHRFISRYRSRSRSRSPYRIRNPFRGSPKCFRSVSPERMSRRSVRSSDRKKALEDVVQRSGHGTEFNKQKHLEAADKGHSPAQKPKTSSGTKPSVKPTSATKSDSNLGGHSIRCKSKNLEDDTLSECKQVSDKAVSLQRKLRKEQSLHYGSVLLITELPEDGCTEEDVRKLFQPFGKVNDVLIVPYRKEAYLEMEFKEAITAIMKYIETTPLTIKGKSVKICVPGKKKAQNKEVKKKTLESKKVSASTLKRDADASKAVEIVTSTSAAKTGQAKASVAKVNKSTGKSASSVKSVVTVAVKGNKASIKTAKSGGKKSLEAKKTGNVKNKDSNKPVTIPENSEIKTSIEVKATENCAKEAISDAALEATENEPLNKETEEMCVMLVSNLPNKGYSVEEVYDLAKPFGGLKDILILSSHKKAYIEINRKAAESMVKFYTCFPVLMDGNQLSISMAPENMNIKDEEAIFITLVKENDPEANIDTIYDRFVHLDNLPEDGLQCVLCVGLQFGKVDHHVFISNRNKAILQLDSPESAQSMYSFLKQNPQNIGDHMLTCSLSPKIDLPEVQIEHDPELEKESPGLKNSPIDESEVQTATDSPSVKPNELEEESTPSIQTETLVQQEEPCEEEAEKATCDSDFAVETLELETQGEEVKEEIPLVASASVSIEQFTENAEECALNQQMFNSDLEKKGAEIINPKTALLPSDSVFAEERNLKGILEESPSEAEDFISGITQTMVEAVAEVEKNETVSEILPSTCIVTLVPGIPTGDEKTVDKKNISEKKGNMDEKEEKEFNTKETRMDLQIGTEKAEKNEGRMDAEKVEKMAAMKEKPAENTLFKAYPNKGVGQANKPDETSKTSILAVSDVSSSKPSIKAVIVSSPKAKATVSKTENQKSFPKSVPRDQINAEKKLSAKEFGLLKPTSARSGLAESSSKFKPTQSSLTRGGSGRISALQGKLSKLDYRDITKQSQETEARPSIMKRDDSNNKTLAEQNTKNPKSTTGRSSKSKEEPLFPFNLDEFVTVDEVIEEVNPSQAKQNPLKGKRKETLKNVPFSELNLKKKKGKTSTPRGVEGELSFVTLDEIGEEEDAAAHLAQALVTVDEVIDEEELNMEEMVKNSNSLFTLDELIDQDDCISHSEPKDVTVLSVAEEQDLLKQERLVTVDEIGEVEELPLNESADITFATLNTKGNEGDTVRDSIGFISSQVPEDPSTLVTVDEIQDDSSDLHLVTLDEVTEEDEDSLADFNNLKEELNFVTVDEVGEEEDGDNDLKVELAQSKNDHPTDKKGNRKKRAVDTKKTKLESLSQVGPVNENVMEEDLKTMIERHLTAKTPTKRVRIGKTLPSEKAVVTEPAKGEEAFQMSEVDEESGLKDSEPERKRKKTEDSSSGKSVASDVPEELDFLVPKAGFFCPICSLFYSGEKAMTNHCKSTRHKQNTEKFMAKQRKEKEQNEAEERSSR

SEQ ID NO: 53 - skipped

SEQ ID NO: 54 - protein, 124 aa, Artificial Sequence
  CasRX/Cas13d Gut metagenome contig6049000251
LYLTSFGKGNAAVIEQKIEPENGYRVTGMQITPSITVNKATDESVRFRVKRKIAQKDEFIADNPMHEGRHRIEPSAGSDMLGLKTKLEKYYFGKEFDDNLHIQIIYNILDIEKILAVYSTNITA

SEQ ID NO: 55-56 - skipped (2 entries)

SEQ ID NO: 57 - protein, 358 aa, Artificial Sequence
  CasRX/Cas13d Gut metagenome contig546000275
MDSYRPKLYKLIDFCIFKHYHEYTEISEKNVDTLRAAVSEEQKESFYADEAKRLWGIFDKQFLGFCKKINVWVNGSHEKEILGYIDKDAYRKKSDVSYFSKFLYAMSFFLDGKEINDLLTTLINKFDNIASFISTAKELDAEIDRILEKKLDPVTGKPLKGKNSFRNFIANNVIENKRFIYVIKFCNPKNVLKLVKNTKVTEFVLKRMPESQIDRYYSSCIDTEKNPSVDKKISDLAEMIKKIAFDDFRNVRQKTRTREESLEKERFKAVIGLYLTVVYLLIKNLVNVNSRYVMAFHCLERDAKLYGINIGKNYIELTEDLCRENENSRSAYLARNKRLRDCVKQNIDNAKNMKSKEK

SEQ ID NO: 58-60 - skipped (3 entries)

SEQ ID NO: 61 - protein, 149 aa, Artificial Sequence
  CasRX/Cas13d Gut metagenome contig4114000374
DTKINPQTWLYQLENTPDLDNEYRDTLDHFFDERFNEINEHFVTQNATNLCIMKEVFPDEDFKSIADLYYDFIVVKSYKNIGFSIKKLREKMLELPEAKRVTSTEMDSVRSKLYKLIDFCIFKHYHEKPETVEMIVSMLRAYTSEDMKE

SEQ ID NO: 62-63 - skipped (2 entries)

SEQ ID NO: 64 - protein, 372 aa, Homo sapiens
MESGQPARRIAMAPLLEYERQLVLELLDTDGLVVCARGLGADRLLYHFLQLHCHPACLVLVLNTQPAEEEYFINQLKIEGVEHLPRRVTNEITSNSRYEVYTQGGVIFATSRILVVDFLTDRIPSDLITGILVYRAHRIIESCQEAFILRLFRQKNKRGFIKAFTDNAVAFDTGFCHVERVMRNLFVRKLYLWPRFHVAVNSFLEQHKPEVVEIHVSMTPTMLAIQTAILDILNACLKELKCHNPSLEVEDLSLENAIGKPFDKTIRHYLDPLWHQLGAKTKSLVQDLKILRTLLQYLSQYDCVTFLNLLESLRATEKAFGQNSGWLFLDSSTSMFINARARVYHLPDAKMSKKEKISEKMEIKEGEGILWG

SEQ ID NO: 65-66 - skipped (2 entries)

SEQ ID NO: 67 - protein, 320 aa, Artificial Sequence
  CasRX/Cas13d Gut metagenome contig721000619
KEGSTMAKNEKKKSTAKALGLKSSFVVNNDIYMTSFGKGNKAVLEKKITENTIENKSDTTYFDVINRDPKGFTLEGRRIADMTAFSNDPKYHVNVVNGKFLEDQLGARSELEKKVFGRTFDDNVHIQLIHNILDIEKIMAQYVSDIVYLLHNTIKRDMNDDIMGYISIRNSFDDFCHPERIPDRKAKDNLQKQHDIFFDEILKCGRLAYFGNAFFEDGSDNKEIAKLKRYKEIYHIIALMGSLRQSYFHGENSDKNFQGPTWAYTLESNLTGKYKEFKDTLDKTFDERYEMISKDFGSTNMVNLQILEELLKMLYGNVSP

SEQ ID NO: 68 - skipped

SEQ ID NO: 69 - protein, 204 aa, Artificial Sequence
  CasRX/Cas13d Gut metagenome contig2002000411
EKQNKAKYQAIISLYLMVMYQIVKNMIYVNSRYVIAFHCLERDSNQLLGRFNSRDASMYNKLTQKFITDKYLNDGAQGCSKKVGNYLSHNITCCSDELRKEYRNQVDHFAVVRMIGKYAADIGKFSTWFELYHYVMQRIIFDKRNPLSETERTYKQLIAKHHTYCKDLVKALNTPFGYNLARYKNLSIGELFDRNNYNAKTKET

SEQ ID NO: 70 - skipped

SEQ ID NO: 71 - protein, 449 aa, Artificial Sequence
  CasRX/Cas13d Gut metagenome contig13552000311
LIDFLIYDLYYNRKPARIEEIVDKLRESVNDEEKESIYSAETKYVYEALGKVLVRSLKKYLNGATIRDLKNRYDAKTANRIWDISEHSKSGHVNCFCKLIYMMTLMLDGKEINDLLTTLVNKFDNIASFIDVMDELGLEHSFTDNYKMFADSKAICLDLQFINSFARMSKIDDEKSKRQLFRDALVVLDIGDKNEDWIEKYLTSDIFKRDENGNKIDGEKRDFRNFIANNVIKSARFKYLVKYSSADGMIKLKKNEKLISFVLEQLPETQIDRYYESCGLDCAVADRKVRIEKLTGLIRDMRFDNFRGVNYSNDACKKDKQAKAKYQAIISLYLMVLYQIVKNMIYVNSRYVIAFHCLERDLLFFNIELDNSYQYSNCNELTEKFIKDKYMKEGALGFNMKAGRYLTKNIGNCSNELRKIYRNQVDHFAVVRKIGNYAADIASVGSWFE

SEQ ID NO: 72 - protein, 96 aa, Artificial Sequence
  CasRX/Cas13d Gut metagenome contig10037000527
YMDQNFANSDAWAIHVYRNKIQHLDAVRHADMYIGDIREFHSWFELYHYIIQRRIIDQYAYESTPGSSRDGSAIIDEERLNPATRRYFRLITTYKT

SEQ ID NO: 73 - protein, 519 aa, Artificial Sequence
  CasRX/Cas13d Gut metagenome contig238000329
RYDKDRSKIYTMMDFVIYRYYIDNNNDSIDFINKLRSSIDEKSKEKLYNEEANRLWNKLKEYMLYIKEFNGKLASRTPDRDGNISEFVESLPKIHRLLPRGQKISNFSKLMYLLTMFLDGKEINDLLTTLINKFENIQGFLDIMPEINVNAKFEPEYVFFNKSHEIAGELKLIKGFAQMGEPAATLKLEMTADAIKILGTEKEDAELIKLAESLFKDENGKLLGNKQHGMRNFIGNNVIKSKRFHYLIRYGDPAHLHKIATNKNVVRFVLGRIADMQKKQGQKGKNQIDRYYEVCVGNKDIKKTIEEKIDALTDIIVNMNYDQFEKKKAVIENQNRGKTFEEKNKYKRDNAEREKFKKIISLYLTVIYHILKNIVNVNSRYILGFHCLERDKQLYIEKYNKDKLDGFVALTKFCLGDEERYEDLKAKAQASIQALETANPKLYAKYMNYSDEEKKEEFKKQLNRERVKNARNAYLKNIKNYIMIRLQLRDQTDSSGYLCGEFRDKVAHLEVARHAHEYI

SEQ ID NO: 74 - RNA, 20 nt, Artificial Sequence
  Space Sequence
ggggccggggccggggccgg

SEQ ID NO: 75 - RNA, 20 nt, Artificial Sequence
  Space Sequence
gggccggggccggggccggg

SEQ ID NO: 76 - RNA, 20 nt, Artificial Sequence
  Space Sequence
ggccggggccggggccgggg

SEQ ID NO: 77 - RNA, 20 nt, Artificial Sequence
  Space Sequence
gccggggccggggccggggc

SEQ ID NO: 78 - RNA, 20 nt, Artificial Sequence
  Space Sequence
ccggggccggggccggggcc

SEQ ID NO: 79 - RNA, 20 nt, Artificial Sequence
  Space Sequence
cggggccggggccggggccg

SEQ ID NO: 80 - RNA, 3 nt, Artificial Sequence
  Space Sequence
cag

SEQ ID NO: 81 - RNA, 6 nt, Artificial Sequence
  Space Sequence
ggggcc

SEQ ID NO: 82 - RNA, 93 nt, Artificial Sequence; identical to SEQ ID NO: 13
  Scaffold Sequence

SEQ ID NO: 83 - RNA, 83 nt, Artificial Sequence
  Scaffold Sequence
guuuuagagcuagaaauagcaaguuaaaauaaggcuaguccguuaucaacuugaaaaaguggcaccgagucggugcuuuuuuu

SEQ ID NO: 84 - protein, 181 aa, Artificial Sequence
  CasRX/Cas13d Gut metagenome contig2643000492
NGEIVSLAEKEAFSAKIADKNIGCKIENKQFRHPKGYDVIADNPIYKGSPRQDMLGLKETLEKRYFSPSDSIDNVRVQVAHNILDIEKILAEYITNAVYSFDNIAGFGKDIIGDDFSPVYTYDKFEKSDRYEYFKNLLNNSRLGYYGQAFFECDDSKENKKKKDAIKCYNIIALLSGLRHW

SEQ ID NO: 85 - protein, 440 aa, Artificial Sequence
  CasRX/Cas13d Gut metagenome contig874000057
MSKNKESYAKGMGLKSALVSGSKVYMTSFEGGNDAKLEKVVENSEIVSLAEKESFSAEIFKKNIGCKIENKKFKHPKRYDVIADNPLYKGSVRQDMLGLKETLEKRYFNSADGTDNVCIQVIHNILDIEKILAEYITNAVYSFDNIAGFGEDIIGMGGFKPIYTYKQFKEPDKYNKKFDDILNNSRLGYYGKAFFEKNDLKHNPNKKKRDKNPYILKYDNECYYIIALLSGLRHWNIHSHAKDDLVSYRWLYNLDSILNREYISTLNYLYDDIADELTESFSKNSSANVNYIAETLNIDPSEFAQQYFRFSIMKEQKNMGFNVSKLREIMLDRKELSDIRDNHRVFDSIRSKLYTMMDFVIYRYYIEEAAKTEAENRNLPENEKKISEKDFFVINLRGSFDENQKEKLYIEEAKRLWEKLKDIMLKIKEFRGEKVKEYKK

SEQ ID NO: 86 - protein, 137 aa, Artificial Sequence
  CasRX/Cas13d Gut metagenome contig4781000489
LDKQLDYEYIRTLNYMFNDIADELTRTFSKNSAANVNYIAETLNIDPNKFAEQYFRFSIMKEQKNLGFNLTKLRESMLDRRELSDIRDNHNVFDSIRPKLYTMMDFVIYKHYIDEAKKTEAENKSLPDDRKNLSEKD

SEQ ID NO: 87 - protein, 87 aa, Artificial Sequence
  CasRX/Cas13d Gut metagenome contig12144000352
RMGEPVANTKRVMMIDAVKILGTDLSDDELKEMADSFFKDSDGNLLKKGKHGMRNFITNNVIKNKRFHYLIRYGDPAHLHEIAKNEA

SEQ ID NO: 88 - protein, 414 aa, Artificial Sequence
  CasRX/Cas13d Gut metagenome contig5590000448
VHNNEEKDLIKYTWLYNLDKYLDAEYITTLNYMYNDIGDELTDSFSKNSAANINYIAETLGIDPKTFAEQYFRFSIMKEQKNLGFNLTKLREVMLDRKDMSEIRENHNDFDSIRAKVYTMMDFVIYRYYIEEAAKVNAANKSLPDNEKSLSEKDIFVISLRGSFNEDQKDRLYYDEAQRLWSKVGKLMLKIKKFRGKDTRKYKNMGTPRIRRLIPEGRDISTFSKLMYALTMFLDGKEINDLLTTLINKFDNIQSFLKVMPLIGVNAKFAEEYSFFNNSEKIADELRLIKSFARMGEPVADARRAMYIDAIRILGTDLSDDELKALADSFSLDENGNKLGKGKHGMRNFIINNVITNKRFHYLIRYGNPVHLHEIAKNEAVVKFVLGRIADIQKKQGQNGKNQIDRYYETCIGK

SEQ ID NO: 89 - protein, 345 aa, Artificial Sequence
  CasRX/Cas13d Gut metagenome contig525000349
MSKKENRKSYVKGLGLKSTLVSDSKVYLTTFADGSNAKLEKCVENNKIICISNDKEAFAASIANKNVGYKIKNDEKFRHPKGYDIISNNPLLHNNSVQQDMLGLKNVLEKRYFGKSSGGDNNLCIQIIHNIIDIEKILSEYIPNVVYAFNNIAGFKDEHNNIIDIIGTQTYNSSYTYADFSKDKSDKKYIEFQKLLKNKRLGYWGKAFFTGQGNNAKVRQENQCFHIIALLISLRNWATHSNELDKHTKRTWLYKLDDTNILNAEYVKTLNYLYDTIADELTKSFSKNGAVNVNYLAKKYNIKDDLPGFSEQYFRFSIMKEQKNLGFNISKLRENMLDFKDMSVI

SEQ ID NO: 90 - protein, 206 aa, Artificial Sequence
  CasRX/Cas13d Gut metagenome contig7229000302
KKISSLTKFCLGESDEKKLKALAKKSLEELKTTNSKLYENYIKYSDERKAEEAKRQINRERAKTAMNAHLRNTKWNDIMYGQLKDLADSKSRICSEFRNKAAHLEVARYAHMYINDISEVKSYFRLYHYIMQRRIIDVIENNPKAKYEGKVKVYFEDVKKNKKYNKNLLKLMCVPFGYCIPRFKNLSIEQMFDMNETDNSDKKKEK

SEQ ID NO: 91 - protein, 95 aa, Artificial Sequence
  CasRX/Cas13d Gut metagenome contig3227000343
IGDISEVNSYFQLYHYIMQRILIDKIGSKTTGKAKEYFDSVIVNKKYDDRLLKLLCSPLGYCLTRYKDLSIEALFDMNEAAKYDKLNKERKNKKK

SEQ ID NO: 92 - protein, 115 aa, Artificial Sequence
  CasRX/Cas13d Gut metagenome contig7030000469
SIRSKLYTMMDFVIYRYYIEESAKAAAENKPSESDSFVIRLRGSFNENQKEELYIEEAERLWKKFGEIMLKIKEFRGEKVKEYKKEVPRIERILPHGKDISAFSKLMYMLSMFLD

SEQ ID NO: 93 - protein, 234 aa, Artificial Sequence
  CasRX/Cas13d gut metagenome P17E0k2120140920, c87000043
MYFSKMIYMLTYFLDGKEINDLLTTLISKFDNIKEFLKIMKSSAVDVECELTAGYKLFNDSQRITNELFIVKNIASMRKPAASAKLTMFRDALTILGIDDKITDDRISEILKLKEKGKGIHGLRNFITNNVIESSRFVYLIKYANAQKIREVAKNEKVVMFVLGGIPDTQIERYYKSCVEFPDMNSSLEAKRSELARMIKNISFDDFKNVKQQAKGRENVAKERAKAVIGLYLT

SEQ ID NO: 94 - protein, 939 aa, Artificial Sequence
  contig emb OBVH01003037.1, human gut metagenome sequence
MAKKKRITAKERKQNHRELLMKKADSNAEKEKAKKPVVENKPDTAISKDNTPKPNKEIKKSKAKLAGVKWVIKANDDVAYISSFGKGNNSVLEKRIMGDVSSNVNKDSHMYVNPKYTKKNYEIKNGFSSGSSLVTYPNKPDKNSGMDALCLKPYFEKDFFGHIFTDNMHIQAIYNIFDIEKILAKHITNIIYTVNSFDRNYNQSGNDTIGFGLNYRVPYSEYGGGKDSNGEPKNQSKWEKRDNFIKFYNESKPHLGYYENIFYDHGEPISEEKFYNYLNILNFIRNNTFHYKDDDIELYSENYSEEFVFINCLNKFVKNKFKNVNKNFISNEKNNLYIILNAYGKDTENVEVVKKYSKELYKLSVLKTNKNLGVNVKKLRESAIEYGYCPLPYDKEKEVAKLSSVKHKLYKTYDFVITHYLNSNDKLLLEIVETLRLSKNDDEKENVYKKYAEKLFKADDVINPIKAISKLFARKGNKLFKEKIIIKKEYIEDVSIDKNIYDFTKVIFFMTCFLDGKEINDLLTNIISKLQVIEDHNNVIKFISNNKDAVYKDYSDKYAIFRNAGKIATELEAIKSIARMENKIENAPQEPLLKDALLSLGVSDDTKVLENTYNKYFDSKEKTDKQSQKVSTFLMNNVINNNRFKYVIKYINPADINGLAKNRYLVKFVLSKIPEEQIDSYYKLFSNEEEPGCEEKIKLLTKKISKLNFQTLFENNKIPNVEKEKKKAIITLYFTIVYILVKNLVNINGLYTLALYFVERDGYFYKDICGKKDKKKSYNDVDYLLLPEIFSGSKYREETKNLKLPKEKDRDIMKKYLPNDKDREKYNKFFTAYRNNIVHLNIIAKLSELTKNIDKDINSYFDIYHYCTQRVMFNYCKEKNDVVLAKMKDLAHIKSDCNEFSSKHTYPFSSAVLRFMNLPFAYNVPRFKNLSYKKFFDKQ

SEQ ID NO: 95 - protein, 877 aa, Artificial Sequence; identical to SEQ ID NO: 50
  contig  tpg DJXD01000002.1

SEQ ID NO: 96 - DNA, 36 bp, Artificial Sequence; identical to SEQ ID NO: 51
  CasRX/Cas13d DR

SEQ ID NO: 97 - protein, 984 aa, Artificial Sequence
  contig OGZC01000639.1
MKKKNIRATREALKAQKIKKSQENEALKKQKLAEEAAQKRREELEKKNLAQWEETSAEGRRSRVKAVGVKSVFVVGDDLYLATFGNGNETVLEKKITPDGKITTFPEEETFTAKLKFAQTEPTVATSIGISNGRIVLPEISVDNPLHTTMQKNTIKRSAGEDILQLKDVLENRYFDRSFNDDLHIRLIYNILDIEKILAEYTTNAVFAIDNVSGCSDDFLSNFSTRNQWDEFQNPEQHREHFGNKDNVICSVKKQQDLFFNFFKNNRIGYFGKAFFHAESERKIVKKTEKEVYHILTLIGSLRQWITHSTEGGISRLWLYQLEDALSREYQETMNNCYNSTIYGLQKDFEKTNAPNLNFLAEILGKNASELAEPYFRFIITKEYKNLGFSIKTLREMLLDQPDLQEIRENHNVYDSIRSKLYKMIDFVLVYAYSNERKSKADALASNLRSAITEDAKKRIYQNEADQLWTSYQELFKRIRGFKGAQVKEYSSKNMPIPIQKQIQNILKPAEQVTYFTKLMYLLTMFLDGKEINDLLTTLINKFDNISSLLKTMEQLELQTTFKEDYTFFQQSSRLCKEITQLKSFARMGNPISNLKEVMMVDAIQILGTEKSEQELQSMACFFFRDKNGKKLNTGEHGMRNFIGNNVISNTRFQYLIRYGNPQKLHTLSQNETVVRFVLSRIAKNQRVQGMNGKNQIDRYYETCGGTNSWSVSEEEKINFLCKILTNMSYDQFQDVKQSGAEITAEEKRKKERYKAIISLYLTVLYQLIKNLVNINARYIIAFHCLERDAILYSSKFNTSINLKKRYTALTEMILGYETDEKARRKDTRTVYEKAEAAKNRHLKNVKWNCKTRENLENADKNAIVAFRNIVAHLWIIRDADRFITGMGAMKRYFDCYHYLLQRELGYILEKSNQGSEYTKKSLEKVQQYHSYCKDFLHMLCLPFAYCIPRYKNLSIAELFDRHEPEAEPKEEASSVNNSQFITT

SEQ ID NO: 98 - protein, 978 aa, Artificial Sequence
  contig emb OHBM01000764.1
  misc_feature (1)..(222): Xaa can be any naturally occurring amino acid
XXXXXXXXXXXXXXXXXXXXXXXXXXXXXXXXXXXXXXXXXXXXXXXXXXXXXXXXXXXXXXXXXXXXXXXXXXXXXXXXXXXXXXXXXXXXXXXXXXXXXXXXXXXXXXXXXXXXXXXXXXXXXXXXXXXXXXXXXXXXXXXXXXXXXXXXXXXXXXXXXXXXXXXXXXXXXXXXXXXXXXXXXXXXXXXXXXXXXXXXXXXXXXXXXXXXXXXXXXXXXXHPLQKRYRYLTSTNLKSFETYKNNLVNKKKFDLDRVKKIPQLAYFGSAFYNTPEDTSAKITKTKIKSNEEIYYTFMLLSTARNFSAHYLDRNRAKSSDAEDFDGTSVIMYNLDNEELYKKLYNKKVHMALTGMKKVLDANFNKKVEHLNNSFIKNSAKDFVILCEVLGIKSRDEKTKFVKDYYDFVVRKNYKHLGFSVKELRELLFANHDSNKYIKEFDKISNKKFDSVRSRLNRLADYIIYDYYNKNNAKVSDLVKYLRAAADDEQKKKIYLNESINLVKSGILERIKKILPKLNGKIIGNMQPDSTITASMLHNTGKDWHPISENAHYFTKWIYTLTLFMDGKEINDLVTTLINKFDNIASFIEVLKSQSVCTHFSEERKMFIDSAEICSELSAMNSFARMEAPGASSKRAMFVEAARILGDNRSKEELEEYFDTLFDKSASKKEKGFRNFIRNNVVDSNRFKYLTRYTDTSSVKAFSNNKALVKFAIKDIPQEQILRYYNSCFGASERYYNDGMSDKLVEAIGKINLMQFNGVIQQADRNMLPEEKKKANAQKEKYKSIIRLYLTVCYLFFKNLVYVNSRYYSAFYNLEKDRSLFEINGELKPTGKFDEGHYTGLVKLFIDNGWINPRASAYLTVNLANSDETAIRTFRNTAEHLEALRNADKYLNDLKQFDSYFEIYHYITQRNIKEKCEMLKEQTVKYNNDLLKYHGYSKDFVKALCVPFGYNLPRFKNLSIDALFDKNDKREKLKKGFED

SEQ ID NO: 99 - protein, 1023 aa, Artificial Sequence
  contig emb OHCP01000044.1
MAKKITAKQKREEKERLNKQKWAKNDSVIIVPETKEEIKTGEIQDNNRKRSRQKSQAKAMGLKAVLSFDNKIAIASFVSSKNAKSSHIERITDKEGTTISVNSKMFESSVNKRDINIEKRITIEEPQQDGTIKKEEKGVKSTTCNPYFKVGGKDYIGIKEIAEEHFFGRAFPNENLRVQIAYNIFDVQKILGTFVNNIIYSFYNLSRDEVQSDNDVIGMLYSISDYDRQKETETFLQAKSLLKQTEAYYAYFDDVFKKNKKPDKNKEGDNSKQYQENLRHNFNILRVLSFLRQICMHAEVHVSDDEGCTRTQNYTDSLEALFNISKAFGKKMPELKTLIDNIYSKGINAINDEFVKNGKNNLYILSKVYPNEKREVLLREYYNFVVCKEGSNIGISTRKLKETMIAQNMPSLKEENTYRNKLYTVMNFILVRELKNCATIREQMIKELRANMDEEEGRDRIYSKYAKEIYLYVKDKLKLMLNVFKEEAEGIIIPGKEDPVKFSHGKLDKKEIESFCLTTKNTEDITKVIYFLCKFLDGKEINELCCAMMNKLDGISDLIETAKQCGEDVEFVDQFKCLSKCATMSNQIRIVKNISRMKKEMTIDNDTIFLDALELLGRKIEKYQKDKNGDYVKDEKGKKVYTKDYNNFQDMFFEGKNHRVRNFVSNNVIKSKWFSYVVRYNKPAECQALMRNSKLVKFALDELPDSQIEKYYISVFGEKSSSSNEEMRRELLKKLCDFSVRGFLDEIVLLSEDEMKQKDKFSEKEKKKSLIRLYLTIVYLITKSMVKINTRFSIACATYERDYILLCQSEKAERAWEKGATAFALTRKFLNHDKPTFEQYYTREREISAMPQEKRKELRKENDQLLKKTHYSKHAYCYIVDNVNNLTGAVANDNGRGLPCLSEKNDNANLFLEMRNKIVHLNVVHDMVKYINEIKNITSYYAFFCYVLQRMIIGNNSNEQNKFKAKYSKTLQEFGTYSKDLMWVLNLPFAYNLPRYKNLSNEQLFYDEEERMEKIVGRKNDSR

SEQ ID NO: 100 - protein, 926 aa, Artificial Sequence
  contig emb OGDF01008514.1
MTETKPKREDIAKTPAAKSRSKAAGLKSTFAVNGSVLLTSFGRGNDAVPEKLITEKAVSEINTVKPRFSVEKPATSYSSSFGIKSHISATADNPLAGRAPVGEDAIHAKEVLEQRVFGKTFSDDNIHIQLIYNILDIRKILSTYANNVVFTINSMRRLDEYDREQDYLGYLYTGNSYERLLDIADKYAVDGEDWRNTAAGISNDFEKKQFQTINGFWDLLDMIEPYMCYFSEAFFCETTVKDPDSGRIVPCLEQRSDGDIYNILRILSIVRQTCMHDNASMRTVMFTLGQNSVRDRKNGFDELAELLDYLYDEKIDIVNRDFLRNQKNNIELLSRIYGSSADSPERDRLVQNFYDFRVLSQDKNLGFSIKKLREKLLDSPALSVVRSKKYDTMRSKIYSLIDFMIYRKFSENHVAVDDFVEELRSLLTEDEKESAYSRWAETLINDGFAQEILVKLLPQTDPAVIGKIKGKKLLNDSIAGIKLKKDASFFTKIINVLCMFQDGKEINELVSSLVNKFANIQSFVDVMRSQGIDSGFTADYAMFAESGRISRELHILKGIARMQHSIAGLGDVKIYGSDDKFHGVSRRVYTDAAYILGFGERSEDNDGYVDDYVSSKLLGGADKNLRNFITNNVIKNRRFLYTVRYMNPKRAKKLVQNDALVVLALSGIPETQIDRYYKSCIEKRSFNPDLNEKIAALSEMITTLKIDDFEDVKQNPEKNANYEAKKNQRISKERYKACIGLYLTVLYLICKNLVKINARYSIAIGCLERDTQLHGVDFKGAAYMTRDVFIAKGWINPKKPTVKSIKEQYAFLTPYIFTTYRNMIAHLAAVTNAYKYIPQMDRFKSWFHLYHTVIQHSLIQQYEYDRDYGRKGAPVVSERVLQLLEQCREHSNYSRDLLHILNLPFGYNLPRYLNLSSEKYFDANAI

SEQ ID NO: 101 - protein, 1030 aa, Artificial Sequence
  contig emb OGPN01002610.1
MAKKITAKQKREEKERLNKQKWAKQDTPVVPKSKTEEKPVAASDDKLLKTTQVKKVQTKSKAKAMGLKTVLSFDDKIAIASFVNDKKTKLPHIERITDKSGTTIHENARMFDSSVDEQNVNIEKRMTIEEKQNDGTFKKDEKDVKATICNPYFKTCGKDYIGIKDVAEKYFFGKTFPNENLRVQIAYNVFDIQKILGTYVNNIIYSFYNLRRDGKSDVDIIGSLYAFADFDNQLKDKPAFREAKDLLKNTEAYFSYFGDVFKKSKKGKKDENNEDYEKNLRHNFNVLRVLSFLRQICTHAYVKCTGGAKNNGDSTKVEAESLDALFNITEYFAKTAPELSKTINEIYKEGIDRINNDFVTNGKNNLYILSKVYPDMQRNELVKKYYQFVVCKEGNNVGINTRKLKESIISQHPWITTPQDNNKANDYESCRHKLYTIMCFILVAELDAHESIRDNMVAELRANMDGDDGRDAIYEKYAKDIYHIVKDKLLAMQKVFDEELVPVKVEGKNDPQQFTHGKLGKKEIESFCLSDKNTSDIAKVVYFLCNFLDGKEINELCCAMMNKFDGIGDLIDTAKQCGEEVKFIEEFACLSNCRKITNDIRVAKSISKMKNKVNIDNDIIYLDAIELLGRKIEKYQKDENGKILLGTDGKRLYTQEYKYFNDMFFNAGNHKVRNFIANNVMQSKWFFYVVRYNKPAECQIIMRNKTLVKFTLDDLPDMQIQRYYSSVFGDNNMPAVDEMRKRLLDKINQFSVRGFLDELDEIVLMSDEESKRNKSSEKEQKKSLIRLYLTIAYLITKSMVKINTRFSIACAMYERDYALLCQSEMKGGPWDGGAQALAVTRKFLNHDREVFDRYCAREAEIARLPSEERKPLRKANDKLLKQTHYTNHSYTYIVNNLNSFTDIDYCAKDVGLPAPNDKNDNASILGEMRNDIAHLNIVHDMVKYIEELKDISSYYAFYCYVLQRRLVGKDPNCQNKFKAKYAKELNDYGTYNKNLMWMLNLPFAYNLPRYKNLSSEFLFYDMEYNKKDDE

SEQ ID NO: 102 - protein, 1027 aa, Artificial Sequence
  contig emb OBLI01020244
MAKKITAKQRREERERQNKQKWAKKQADATAVFECEADIKPADSKDEDCTNIYIKREKKKTQAKAMGLKTVLGFDNKIAIASFMSSKDSKSSHIERITDPNGKTIREDVRMFDSNVDECSINLEKRMTVEERQKDGTIKKDEKDVKSTICNPYSNECGKDYIGIKSVAEELFFGRTFPNDNLRVQIAYNIFDIQKILGTYINNIIYSFYNLSRDESQSDNDVIGTLYMLKDFDGQKETDTFRQARALLERTEAYYSYFDNVFKKIDKNKKKSDDCKRERNEILRYNFNVLRVLSFLRQICAHAQVKISNEHDREKGGGLVDSLDALFNISRFFDAVAPELNEVINSVYSKGIDDINDNFVKNGKNNFYILSKIYPEVAREDLLREYYYFVVSKEGNNIGISTKKLKEAIIVQDMSYIKSEDYDTYRNKLYTVLCFILVKELNERTTIREQMVADLRANMNGDIGREDIYSKYAKIIYAQVKPRFDTMKSAFEEEAKDVIVPDKKKPVKFSHGKLDKNEIERFCITSANTDSVAKIIYFLCKFLDGKEINELCCAMMNKLDGINDLIETAEQCGAKVEFVDKFSVLSNCETISDQIRIVKSISKMKKEIAIDNDTIFLDALELLGRKIDKYKKDATGKYLKDENGKYLYSKEYDDFQYMFFKDSHRVRNFISNSVIKSKWFSYIVRYNQPSECRAIMKNKTLVKFALDELPDLQIQRYFVALYGDEDLPSYGEMRKILLKKLHDFSIKGFLDEIVLLSDLDMESQDKYCEKEQKKSLFRLYLTIAYLITKSMVKINTRFSIACATYERDYALLCASNKQERAWSSGATALALTRRFLNQDKLIFEKHYAREGEISKLPKEERKAMRKVNDQLLKRTHFSKHSYCYIVDNVNRLTGGECRTDKRVLPVLNEKNDNAGILLDFRKTIAHLNVVHKMVDYVDEIKGITSYYAFFCYVLQRMLVGNNLNEKNAIKEKYSATVKSFGTYSKDFMWLINLPFAYNLPRYKNLSNEQLFYDEEERNETEEQIDRL

SEQ ID NO: 103 - protein, 961 aa, Artificial Sequence
  contig OIZX01000427.1
MAKKKKTARQLREEMQQQRKQAIQKQQEQRQEKAAAARETAAPEQPAAAPVPKRQRKSLAKAAGLKSNFILDPQRRTTVMTAFGQGSTAILEKQIVDRAISDLQPVQQFQVEPASAAKYRLKNSRVRFPNVTADDPLYRRKDGGFVPGMDALRRKNVLEQRFFGKSFADNIHIQMIYSILDIHKILAAASGHIVHLLNIVNGSKDRDFIGMLAAHVLYNELNEEAKRSIADFCKSPRLIYYSAAFYETLDNGKSERRSNEDIFNILALMTCLRNFSSHHSIAIKVKDYSAAGLYNLRRLGPDMKKMLDTFYTEAFIQLNQSFQDHNTTNLTCLFDILNISDSARQKQLAEEFYRYVVFKEQKNLGFSVRKLREEMLLLPDAAVIADKRYDTCRSKLYNLMDFLILRVYRTGRADRCDKLPEALRAALTDEEKAVVYHKEALSLWNEMRTLILDGLLPQMTPENLSRLSGQKRKGELSLDDAMLKECLYEPGPVPEDAAPEEANAEYFCRMIYLATLFMDGKEINTLLTTLISKFENIAAFLQTMEQLNIEAELGPEYAMFTRSRAVAEQLRVINSFALMKKPQVNAKQQLYRAAVTLLGTEDPDGVTDEMLCIDPVTGKMLPPNQRHHGDTGLRNFIANNVVESRRFQYLIRYSDPAQLHQLASNKKLVRFVLSSIPDTQINRYYETCGQTRLAGRAAKVEFLTDMIAAIRFDQFRDVNQKERGANTQKERYKAMLGLYQTVLYLAVKNLVNINARYVMAFHCVERDMFLYDGELTDPKGESVSAFLAVNGKKGVQPQYLLLTQLFIRRDYLKRSACEQIQHNMENISDRLLREYRNAVAHLNVIAHLADYSADMREITSYYGLYHYLMQRHLFKRHAWQIRQPERPTEEEQKLIEQEQKQLAWEKALFDKTLQYHSYNKDLVKALNAPFGYNLARYKNLSIEPLFSKEAAPAAEIKATHA

SEQ ID NO: 104 - protein, 911 aa, Artificial Sequence
  contig OCTW011587266.1
MKQNDRENNNKIKKSAAKAVGVKSLARLSDGSTVVSSFGKGAAAELESLITGGEIRKLSDKAILEITDDTQNKNAYNVKSSRIPNLTARTDKLSDKSGMDDLGFKRELELEVFGQCFDDSIHIQIAHAVFDIQKSLAAVIPNVLYTLNNLDRSYSTDNTSDKKDIIGNTLNYQHSYESFNVEKRGEFTEYYNAAKDRFSYFPDILCVLEKVNGKDRYQPKSEKDAFNVLSSVNMLRNSLFHFAPKSNDGKARIAVFKNQFDSDFSHITSTVNKIYSAKIAGVNENFLNNEGNNLYIILKATNWDIKKIVPQLYRFSVLKSDKNMGFNMRKLREFAVESKNIDLSRLNDKFLTNNRKKLYKVIDFIIYYHLNKVLKDSFVDDFVAALRASQSEEEKEKLYAQYSERLFADEGLKSAIKKAVDMISDTKSNIFKMKTPLDKALIENIKVNSDASDFCKLIYVFTRFLDGKEINILLNSLIKKFQDIHSFNTTVKKLSENNLIINADYVDDYSLFEQSGTVARELMLIKSISKMDFGLDNINLSFMYDDALRTLGVSDENLPEVKREYFGKTKNLSAYIRNNVLENRRFKYVIKYIHPSDVQKIACNKAIAGFVLNRMPDTQIKRYYDSLINKGATDIQAQAKALLDCITGISFDAIKDDKHLHKSKEKSPQRSADRERKKAMLTLYYTIVYIFVKQMLHINSLYTIGFFYLERDQRFIYSRAKKENKNPSKNSYLNDFRSVTAYFIPSEIMKRIEKNENKGFLEDFEALWNSCGKTSRLRKEDVLLYARYISPDHALKNYKMILNSYRNKIAHINVIMSAGKYTGGIKRMDSYFSVFQHLVQCDILSNPNNKGKCFESESLKPLLLDMKFDGTDEKLYSKRLTRALNIPFGYNVPRYKNLTFEKIYLKSSINE

SEQ ID NO: 105 - protein, 904 aa, Artificial Sequence
  contig emb OGNF01009141.1
MADIDKKKSSAKAAGLKSTFVLENNKLLMTSFGNGNKAVIEKIIDEKVDSINEPEVFSVTPCDKKFELQPAKRGLAADSLVDNPLKSKKTAGDDAIHSRKFLERQFFDGNTFNDNIHIQLIYNILDIEKILSVHVNDIVYSVNNILSRGEGMEYNDYIGTLNLKSFETYKNNLVNKKKFDLDRVKKIPQLAYFGSAFYNTPEDTSAKITKTKIKSNEEIYYTFMLLSTARNFSAHYLDRNRAKSSDAEDFDGTSVIMYNLDNEELYKKLYNKKVHMALTGMKKVLDANFNKKVEHLNNSFIKNSAKDFVILCEVLGIKSRDEKTKFVKDYYDFVVRKNYKHLGFSVKELRELLFANHDSNKYIKEFDKISNKKFDSVRSRLNRLADYIIYDYYNKNNAKVSDLVKYLRAAADDEQKKKIYLNESINLVKSGILERIKKILPKLNGKIIGNMQPDSTITASMLHNTGKDWHPISENAHYFTKWIYTLTLFMDGKEINDLVTTLINKFDNIASFIEVLKSQSVCTHFSEERKMFIDSAEICSELSAMNSFARMEAPGASSKRAMFVEAARILGDNRSKEELEEYFDTLFDKSASKKEKGFRNFIRNNVVDSNRFKYLTRYTDTSSVKAFSNNKALVKFAIKDIPQEQILRYYNSCFGASERYYNDGMSDKLVEAIGKINLMQFNGVIQQADRNMLPEEKKKANAQKEKYKSIIRLYLTVCYLFFKNLVYVNSRYYSAFYNLEKDRSLFEINGELKPTGKFDEGHYTGLVKLFIDNGWINPRASAYLTVNLANSDETAIRTFRNTAEHLEALRNADKYLNDLKQFDSYFEIYHYITQRNIKEKCEMLKEQTVKYNNDLLKYHGYSKDFVKALCVPFGYNLPRFKNLSIDALFDKNDKREKLKKGFED

SEQ ID NO: 106 - protein, 933 aa, Artificial Sequence
  contig emb OIEN01002196.1
MERQKRKMKSKSKMAGVKSVFVIGDELLMTSFGDGDDAVLEKDIDENGVVNDCRNPAAYDAVYGTDSIRVKKTNNNIRAKVNNPLAKSNIRSEESALFRTRVNEYKREQKDKYETLFFGKTFDDNIHIQLISKILDIEKTFSVVIGNIVYAINNLSLEQSIDRPIDIFGDKNTQGISLREDNDYLKTMLPRCEYLFHNILNSDSDNNSKMNYNKVNKGKEEKDNRNNENIEKLKKALEVIKIIRVDSFHGVDGIKGDQKFPRSKYNLAVNYNEEIQKTISEPFNRKVEEVQQDFYRNSCVNIDFLKEIMYGSNYTDRGSDSLECSYFNFAILKQNKNMGFSITSIRECLLDLYELNFESMQNLRPRANSFCDFLIYDYYCKNESERANLVDCLRSAASEEEKKNIYFQTAERVKEKFRNAFNRISRFDASYIKNSREKNLSGGSSLPKYSFIEGFTKRSKKINDNDEKNADLFCNMLYYLAQFLDGKEINIFLTSIHNIFQNIDSFLKVMKEKGMECKFQKDFKMFSHAGHVAKKIEIVISLAKMKKTLDFYNAQALKDAVTILGVSKKHQYLDMNSYLDFYMFDNRSGATGKNAGKDHNLRNFLVSNVIRSRKFNYLSRYSNLAEVKKLAQNPSLVQFVLSRIEPSLICRYYESSQGISSEGITIDEQIKKLTGIIVDMNIDSFENINNGEIGMRYSKATPQSIERRNQMRVCVGLYLNVLYQIEKNLMNVNARYVLAFAFAERDALMLNFTLEECKKNKKRSSGGFSFIEMTQFFIDKKLFKVATEAIKKNVLKYNGNPESLNHIPGEYICKNMEGYHENTVRNFRNMVAHLTAVARVPLYISEVTQIDSYYALYHYCMQMNILQGIEQSGKILDNIKLKNALENARVHRTYSKDAVKYLCLPFAYNISRYKALTIKDLFDWTEYSCKKDE

SEQ ID NO: 107 - protein, 1034 aa, Artificial Sequence; identical to SEQ ID NO: 46
  contig e-k87 11092736

SEQ ID NO: 108 - DNA, 30 bp, Artificial Sequence; identical to SEQ ID NO: 47
  CasRX/Cas13d Direct repeat 1

SEQ ID NO: 109 - protein, 973 aa, Artificial Sequence
  CasRX/Cas13d Ga0129306 1000735
MQKQREQQTVTDESERKKKPLKSGAKAAGLKSVFVLSEGKELLTSFGRGNEAVPEKRVTGGTIANARTDNKEAFSAALQNKRFEVFGRTAGSSDDPLAVSRAPGQDLIGAKTALEERYFGRAFADNIHMQVIYAIQDINKILAVHANNIVYTLNNLDREADPETDDFIGSGYLTLKNTFETYCDPAALNEREREKVTVSKQHFDAFMQNPRLAYYGNAFFRKLSKAERLARGREIFDKESPERRQEILGSRGKNKSVDDEIRALAPEWVKREERDVYSELVLMSELRQSCFHGQQKNSARIFRLDNDLGPGVDGARELLDRLYAEKINDLRSFDKTSASSNFRLLFNAYHADNEKKKELAQEFYRFSVLKVSKNTGFSIRTLREKIIEDHAAQYRDKIYDSMRKKLFSTFDFFLWRFYEEREDEAEELRACLRAARSDEEKEQIYAEAAASCWPSVKPFVESVAATLCDVVKGRTKLNKLKLSADESTLVRNAIDGVRISPRASYFTKLIYLMTLFLDGKEINDLLTTLIHAFENIDSFLSVLGSERLERTFDANYRIFADSGVIAQELRAVNSFARMTTEPFNSKLVMFEDAAQLFGMSGGLVEHAEELREYLDNKMLDKTKLRLLPDGKVDTGFRNFIISNVTESRRFRYLVRYCEPRAVRDYMSCRPLIRLTLRDMPDTILRRYYEQSVGAATVDRERILDTLADKLLSLRFTDFENVNQRANAERNREKQKMMGIISLYLNVAYQIVKNLVYVNARYTMAYHCAERDTELLLNAAGEGNLLRRDRSWPARLHLPRRALARRRDRVEVMERDVARGPEAYNRDEWLGLVRTLRREKRVCDNLHNNYAYLCGADAEPGDASLSLLFVYRNKAAHLSVLNKGGRLSGDLKEAKSWFYVYHFLMQRVLEEEFRNTQALPERLRELLMMAERYRGCSKDLIKVLNLTFAYNLPRYKNLSIDGRFDKNHPDPSDE

SEQ ID NO: 110 - protein, 854 aa, Artificial Sequence
  CasRX/Cas13d  Ga0129317 1008067
MKKQKKSLVKAAGLKSAFVVGDSVYLTSFGKGNAARLDTKINPDNSTERYVSDSEKHTLKINSITDTELRLSGPFPKQAEAKNPTHKKDNEQKNTRQDMLGLKSTLEKFYFGSTFDDNIHIQIIHNIQDIAKILAAHSNNAGYALDNMLAYQGVEFSDMIGYMGTSRTFDNYDPNHKNNKDFFRFLKLPRLGYFGSAFYSQKGKDFEKRSDEEVYNICALMGQIRQCCFHGKQEKYQLKWLYNFHNFKSNKPFLDTLDKHFDEMIDRINKNFIKNNTPDLIILSGLYPDMAKKELVRLFYDFTTVKEYKNMGFSVKKLREKMLESEEASDFRDKDYDSVRRKLYKLMDFCIYYLYYSDSERNENLVSRLRESLTDENKDIIYSKEAKIVWNELRKKFSTILDNVKGSNIKKLENVKEKFISEDEFDDIKLDIDISYFSKLMYVMCYFLDGKEINDLLTTLVSKFDNIGSIIEAATQIGINIEFIDDFKFFDRSKDISVELNIIRNFARMQAPVPNAKRAMQEDAIRILGGSEEDIFSILDDMTGYDKSGKKLAQSKKGFRNFIINNVVESSRFKYIVRYSNPQKIRKLANNSVVVGFVLGKLPDAQIESYFNSCLPNRVYSTPDKARESLRDMLHNISFNDFADVKQDDRRATPEEKVEKERYKAIIGLYLTVMYHLVKNLVYVNSRYVMAFHCLERDAMHYDVSLDNYRDLIRHLISEGDSSCNHFISHNRRMRDCIEENVKNSEQLIFGKEDAVIRFRNNVAHLSAIRNANEYIGDIREITSYFALYHYLMQRKLIDDCKVNDTAHKYFEQLTKYKTYVMDMVKALCSPFGYNLPRFKNLSIEGKFDMHESK

SEQ ID NO: 111 - protein, 965 aa, Artificial Sequence
  CasRX/Cas13d Ga0224415 10048792
MSKKENRKSYVKGLGLKSTLVSDSKVYLTTFADGSNAKLEKCVENNKIICISNDKEAFAASIANKNVGYKIKNDEKFRHPKGYDIISNNPLLHNNSVQQDMLGLKNVLEKRYFGKSSGGDNNLCIQIIHNIIDIEKILSEYIPNVVYAFNNIAGFKDEHNNIIDIIGTQTYNSSYTYADFSKDKSDKKYIEFQKLLKNKRLGYWGKAFFTGQGNNAKVRQENQCFHIIALLISLRNWATHSNELDKHTKRTWLYKLDDTNILNAEYVKTLNYLYDTIADELTKSFSKNGAVNVNYLAKKYNIKDDLPGFSEQYFRFSIMKEQKNLGFNISKLRENMLDFKDMSVIRDDHNRYDKDRSKIYTMMDFVIYRYYIDNNNDSIDFINKLRSSIDEKSKEKLYNEEANRLWNKLKEYMLYIKEFNGKLASRTPDRDGNISEFVESLPKIHRLLPRGQKISNFSKLMYLLTMFLDGKEINDLLTTLINKFENIQGFLDIMPEINVNAKFEPEYVFFNKSHEIAGELKLIKGFAQMGEPAATLKLEMTADAIKILGTEKEDAELIKLAESLFKDENGKLLGNKQHGMRNFIGNNVIKSKRFHYLIRYGDPAHLHKIATNKNVVRFVLGRIADMQKKQGQKGKNQIDRYYEVCVGNKDIKKTIEEKIDALTDIIVNMNYDQFEKKKAVIENQNRGKTFEEKNKYKRDNAEREKFKKIISLYLTVIYHILKNIVNVNSRYILGFHCLERDKQLYIEKYNKDKLDGFVALTKFCLGDEERFEDLKAKAQASIQALETANPKLYAKYMNYSDEEKKEEFKKQLNRERVKNARNAYLKNIKNYIMIRLQLRDQTDSSGYLCGEFRDKVAHLEVARHAHEYIGNIKEVNSYFQLYHYIMQCRLYDVLKNNTKAEAMVKGKAKEYFEALEKEGTYNDKLLKIACVPFGYCIPRYKNLSMEELFDMNEEKKFKKKAPENT

SEQ ID NO: 112 - protein, 1022 aa, Artificial Sequence; identical to SEQ ID NO: 48
  CasRX/Cas13d 160582958 gene49834

SEQ ID NO: 113 - DNA, 36 bp, Artificial Sequence; identical to SEQ ID NO: 49
  CasRX/Cas13d DR

SEQ ID NO: 114 - protein, 998 aa, Artificial Sequence
  CasRX/Cas13d 250twins 35838 GL0110300
MGNKQRVSAQKRRENAKLCNQQKARQAESQRDKIKNMNVEKMKNINTNDIKHTKTTAKKLGLKSTIIADKKIILTSFINEQSSKTANIEKVAGFKGDTIDTISYTPRMFRSEINPGEIVISKGDDLSEFANPANFPIGRDYVKIRSALEKQYFGKEFPEDNLHVQIAYNVADIKKILSVYINNIIYMFYNLARSEEYDIFYNSQSENSGRDCDVIGSLYYQASYRNQDANRFEKDGKKKAIDSLLDDTRAYYTYFDGLFSVPKREDDGKIKESEKEKAKDQNFDVLRLLSVGRQLTFHSDKSNNEAYLFDLSKLTRAAQDENRRQDIQSLLNILNSTCRSNLEGVNGDFVKHAKNNLYVLNQLYPSLKANDLIGEYYNFIVKKENRNIGIRLITVRELIIEHNYTNLKDSKYDTYRNKIYTVLNFILFREIQENSIAIKNFREKLRSTEKAEQPALYQAFANKIYPMVQAKFAKAIDLFEEQYKTKFKSEFKGGISIENMQQQNILLQTENIDYFSKYVLFLTKFLDGKEINELLCALINKFDNIADLLDISKQIGTPVVFCADYESLNDAAKIAENIRLIKNIAHLRPAIQEAQSSKDNADAAGTPATLLIDAYNMLNTDIQLVYGEAAYEELRKDLFERKNGTKYNKKGKKVDVYDHKFRNFLINNVIKSKWFFYIAKYVKPADCAKMMSNKKMIEFALRDLPETQIKRYYYTITGNEALGDAESLKGVIIEQLHAFSIKNTLLSIKNMGEGEYKIQQIGSSKEKLKAIVNLYLTVAYLLTKSLVKVNIRFSIAFGCLERDLVLQKKSEKKFDAIINEILLEDDKIRKECDKERAQAKTLPRELAQERFAQIKRRESGCYFKSYHVYDYLSKNSNEFKQNHIDFAVTSYRNNVEHLNVVHCMTKYFSEVKDVKSYYGVYCYIMQRMLCDELIIKNQDKPDVRQTFEEYNRLLKDHGTYSKNLMWLLNFPFAYNLARYKNLSNEDLFNAKNNDQKSK

SEQ ID NO: 115 - protein, 1020 aa, Artificial Sequence
  CasRX/Cas13d 250twins 36050 GL0158985
MKKKHQSAAEKRQVKKLKNQEKAQKYASEPSPLQSDTAGVECSQKKTVVSHIASSKTLAKAMGLKSTLVMGDKLVITSFAASKAVGGAGYKSANIEKITDLQGRVIEEHERMFSADVGEKNIELSKNDCHTNVNNPVVTNIGKDYIGLKSRLEQEFFGKTFENDNLHVQLAYNILDIKKILGTYVNNIIYIFYNLNRAGTGRDERMYDDLIGTLYAYKPMEAQQTYLLKGDKDMRRFEEVKQLLQNTSAYYVYYGTLFEKVKAKSKKEQRAKEAEIDACTAHNYDVLRLLSLMRQLCMHSVAGTAFKLAESALFNIEDVLSADLKEILDEAFSGAVNKLNDGFVQHSGNNLYVLQQLYPNETIERIAEKYYRLTVRKEDLNMGVNIKKLRELIVGQYFPEVLDKEYDLSKNGDSVVTYRSKIYTVMNYILLYYLEDHDSSRESMVEALRQNREGDEGKEEIYRQFAKKVWNGVSGLFGVCLNLFKTEKRNKFRSKVALPDVSGAAYMLSSENIDYFVKMLFFVCKFLDGKEINELLCALINKFDNIADILDAAAQCGSSVWFVDSYRFFERSRRISAQIRIVKNIASKDFKKSKKDSDESYPEQLYLDALALLGDVISKYKQNRDGSVVIDDQGNAVLTEQYKRFRYEFFEEIKRDESGGIKYKKSGKPEYNHQRRNFILNNVLKSKWFFYVVKYNRPSSCRELMKNKEILRFVLRDIPDSQVRRYFKAVQGEEAYASAEAMRTRLVDALSQFSVTACLDEVGGMTDKEFASQRAVDSKEKLRAIIRLYLTVAYLITKSMVKVNTRFSIAFSVLERDYYLLIDGKKKSSDYTGEDMLALTRKFVGEDAGLYREWKEKNAEAKDKYFDKAERKKVLRQNDKMIRKMHFTPHSLNYVQKNLESVQSNGLAAVIKEYRNAVAHLNIINRLDEYIGSARADSYYSLYCYCLQMYLSKNFSVGYLINVQKQLEEHHTYMKDLMWLLNIPFAYNLARYKNLSNEKLFYDEEAAAEKADKAENERGE

SEQ ID NO: 116 - protein, 128 aa, Artificial Sequence
  RNase1(K41R)
KESRAKKFQRQHMDSDSSPSSSSTYCNQMMRRRNMTQGRCRPVNTFVHEPLVDVQNVCFQEKVTCKNGQGNCYKSNSSMHITDCRLTNGSRYPNCAYRTSPKERHIIVACEGSPYVPVHFDASVEDST

SEQ ID NO: 117 - protein, 128 aa, Artificial Sequence
  RNase1 (RNase1(K41R, D121E))
KESRAKKFQRQHMDSDSSPSSSSTYCNQMMRRRNMTQGRCRPVNTFVHEPLVDVQNVCFQEKVTCKNGQGNCYKSNSSMHITDCRLTNGSRYPNCAYRTSPKERHIIVACEGSPYVPVHFEASVEDST

SEQ ID NO: 118 - protein, 128 aa, Artificial Sequence
  RNase1 (RNase1(K41R, D121E, H119N))
KESRAKKFQRQHMDSDSSPSSSSTYCNQMMRRRNMTQGRCRPVNTFVHEPLVDVQNVCFQEKVTCKNGQGNCYKSNSSMHITDCRLTNGSRYPNCAYRTSPKERHIIVACEGSPYVPVNFEASVEDST

SEQ ID NO: 119 - protein, 128 aa, Artificial Sequence
  (RNase1(H119N))
KESRAKKFQRQHMDSDSSPSSSSTYCNQMMRRRNMTQGRCKPVNTFVHEPLVDVQNVCFQEKVTCKNGQGNCYKSNSSMHITDCRLTNGSRYPNCAYRTSPKERHIIVACEGSPYVPVNFDASVEDST

SEQ ID NO: 120 - protein, 128 aa, Artificial Sequence
  (RNase1(R39D, N67D, N88A, G89D, R91D, H119N))
KESRAKKFQRQHMDSDSSPSSSSTYCNQMMRRRNMTQGDCKPVNTFVHEPLVDVQNVCFQEKVTCKDGQGNCYKSNSSMHITDCRLTADSDYPNCAYRTSPKERHIIVACEGSPYVPVNFDASVEDST

SEQ ID NO: 121 - protein, 128 aa, Artificial Sequence
  RNase1 (RNase1(R39D, N67D, N88A, G89D, R91D, H119N, K41R, D121E))
KESRAKKFQRQHMDSDSSPSSSSTYCNQMMRRRNMTQGDCRPVNTFVHEPLVDVQNVCFQEKVTCKDGQGNCYKSNSSMHITDCRLTADSDYPNCAYRTSPKERHIIVACEGSPYVPVNFEASVEDST

SEQ ID NO: 122 - protein, 128 aa, Artificial Sequence
  RNase1 (RNase1(R39D, N67D, N88A, G89D, R91D))
KESRAKKFQRQHMDSDSSPSSSSTYCNQMMRRRNMTQGDCKPVNTFVHEPLVDVQNVCFQEKVTCKDGQGNCYKSNSSMHITDCRLTADSDYPNCAYRTSPKERHIIVACEGSPYVPVHFDASVEDST

SEQ ID NO: 123 - protein, 311 aa, Homo sapiens
CSPQESGMTALSARMLTRSRSLGPGAGPRGCREEPGPLRRREAAAEARKSHSPVKRPRKAQRLRVAYEGSDSEKGEGAEPLKVPVWEPQDWQQQLVNIRAMRNKKDAPVDHLGTEHCYDSSAPPKVRRYQVLLSLMLSSQTKDQVTAGAMQRLRARGLTVDSILQTDDATLGKLIYPVGFWRSKVKYIKQTSAILQQHYGGDIPASVAELVALPGVGPKMAHLAMAVAWGTVSGIAVDTHVHRIANRLRWTKKATKSPEETRAALEEWLPRELWHEINGLLVGFGQQTCLPVHPRCHACLNQALCPAAQGL

SEQ ID NO: 124 - protein, 372 aa, Homo sapiens; identical to SEQ ID NO: 64

SEQ ID NO: 125 - protein, 287 aa, Homo sapiens
PKRGKKGAVAEDGDELRTEPEAKKSKTAAKKNDKEAAGEGPALYEDPPDQKTSPSGKPATLKICSWNVDGLRAWIKKKGLDWVKEEAPDILCLQETKCSENKLPAELQELPGLSHQYWSAPSDKEGYSGVGLLSRQCPLKVSYGIGDEEHDQEGRVIVAEFDSFVLVTAYVPNAGRGLVRLEYRQRWDEAFRKFLKGLASRKPLVLCGDLNVAHEEIDLRNPKGNKKNAGFTPQERQGFGELLQAVPLADSFRHLYPNTPYAYTFWTYMMNARSKNVGWRLDYFLLS

SEQ ID NO: 126 - protein, 213 aa, Homo sapiens
EALFFPSQVTCTEALLRAPGAELAELPEGCPCGLPHGESALSRLLRALLAARASLDLCLFAFSSPQLGRAVQLLHQRGVRVRVVTDCDYMALNGSQIGLLRKAGIQVRHDQDPGYMHHKFAIVDKRVLITGSLNWTTQAIQNNRENVLITEDDEYVRLFLEEFERIWEQFNPTKYTFFPPKKSHGSCAPPVSRAGGRLLSWHRTCGTSSESQT

SEQ ID NO: 127 - protein, 382 aa, Homo sapiens
KARYKTLEPRGYSLLIRGLIHSDRWREALLLLEDIKKVITPSKKNYNDCIQGALLHQDVNTAWNLYQELLGHDIVPMLETLKAFFDFGKDIKDDNYSNKLLDILSYLRNNQLYPGESFAHSIKTWFESVPGKQWKGQFTTVRKSGQCSGCGKTIESIQLSPEEYECLKGKIMRDVIDGGDQYRKTTPQELKRFENFIKSRPPFDVVIDGLNVAKMFPKVRESQLLLNVVSQLAKRNLRLLVLGRKHMLRRSSQWSRDEMEEVQKQASCFFADDISEDDPFLLYATLHSGNHCRFITRDLMRDHKACLPDAKTQRLFFKWQQGHQLAIVNRFPGSKLTFQRILSYDTVVQTTGDSWHIPYDEDLVERCSCEVPTKWLCLHQKT

SEQ ID NO: 128 - protein, 360 aa, Homo sapiens
SVEPMFRHLKNTYAGLQLVVVILPGKTPVYAEVKRVGDTVLGMATQCVQMKNVQRTTPQTLSNLCLKINVKLGGVNNILLPQGRPPVFQQPVIFLGADVTHPPAGDGKKPSIAAVVGSMDAHPNRYCATVRVQQHRQEIIQDLAAMVRELLIQFYKSTRFKPTRIIFYRDGVSEGQFQQVLHHELLAIREACIKLEKDYQPGITFIVVQKRHHTRLFCTDKNERVGKSGNIPAGTTVDTKITHPTEFDFYLCSHAGIQGTSRPSHYHVLWDDNRFSSDELQILTYQLCHTYVRCTRSVSIPAPAYYAHLVAFRARYHLVDKEHDSAEGSHTSGQSNGRDHQALAKAVQVHQDTLRTMYFA

SEQ ID NO: 129 - protein, 327 aa, Homo sapiens
QGAEGALTGKQPDGSAEKAVLEQFGFPLTGTEARCYTNHALSYDQAKRVPRWVLEHISKSKIMGDADRKHCKFKPDPNIPPTFSAFNEDYVGSGWSRGHMAPAGNNKFSSKAMAETFYLSNIVPQDFDNNSGYWNRIEMYCRELTERFEDVWVVSGPLTLPQTRGDGKKIVSYQVIGEDNVAVPSHLYKVILARRSSVSTEPLALGAFVVPNEAIGFQPQLTEFQVSLQDLEKLSGLVFFPHLDRTSDIRNICSVDTCKLLDFQEFTLYLSTRKIEGARSVLRLEKIMENLKNAEIEPDDYFMSRYEKKLEELKAKEQSGTQIRKPS

SEQ ID NO: 130 - protein, 526 aa, Homo sapiens
EHPSKMEFFQKLGYDREDVLRVLGKLGEGALVNDVLQELIRTGSRPGALEHPAAPRLVPRGSCGVPDSAQRGPGTALEEDFRTLASSLRPIVIDGSNVAMSHGNKETFSCRGIKLAVDWFRDRGHTYIKVFVPSWRKDPPRADTPIREQHVLAELERQAVLVYTPSRKVHGKRLVCYDDRYIVKVAYEQDGVIVSNDNYRDLQSENPEWKWFIEQRLLMFSFVNDRFMPPDDPLGRHGPSLSNFLSRKPKPPEPSWQHCPYGKKCTYGIKCKFYHPERPHHAQLAVADELRAKTGARPGAGAEEQRPPRAPGGSAGARAAPREPFAHSLPPARGSPDLAALRGSFSRLAFSDDLGPLGPPLPVPACSLTPRLGGPDWVSAGGRVPGPLSLPSPESQFSPGDLPPPPGLQLQPRGEHRPRDLHGDLLSPRRPPDDPWARPPRSDRFPGRSVWAEPAWGDGATGGLSVYATEDDEGDARARARIALYSVFPRDQVDRVMAAFPELSDLARLILLVQRCQSAGAPLGKP

SEQ ID NO: 131 - protein, 475 aa, Homo sapiens
RQQQPQVVEKQQETPLAPADFAHISQDAQSLHSGASRRSQKRLQSPSKQAQPLDDPEAEQLTVVGKISFNPKDVLGRGAGGTFVFRGQFEGRAVAVKRLLRECFGLVRREVQLLQESDRHPNVLRYFCTERGPQFHYIALELCRASLQEYVENPDLDRGGLEPEVVLQQLMSGLAHLHSLHIVHRDLKPGNILITGPDSQGLGRVVLSDFGLCKKLPAGRCSFSLHSGIPGTEGWMAPELLQLLPPDSPTSAVDIFSAGCVFYYVLSGGSHPFGDSLYRQANILTGAPCLAHLEEEVHDKVVARDLVGAMLSPLPQPRPSAPQVLAHPFFWSRAKQLQFFQDVSDWLEKESEQEPLVRALEAGGCAVVRDNWHEHISMPLQTDLRKFRSYKGTSVRDLLRAVRNKKHHYRELPVEVRQALGQVPDGFVQYFTNRFPRLLLHTHRAMRSCASESLFLPYYPPDSEARRPCPGATGR

SEQ ID NO: 132 - protein, 384 aa, Homo sapiens
KLVRKNIEKDNAGQVTLVPEEPEDMWHTYNLVQVGDSLRASTIRKVQTESSTGSVGSNRVRTTLTLCVEAIDFDSQACQLRVKGTNIQENEYVKMGAYHTIELEPNRQFTLAKKQWDSVVLERIEQACDPAWSADVAAVVMQEGLAHICLVTPSMTLTRAKVEVNIPRKRKGNCSQHDRALERFYEQVVQAIQRHIHFDVVKCILVASPGFVREQFCDYLFQQAVKTDNKLLLENRSKFLQVHASSGHKYSLKEALCDPTVASRLSDTKAAGEVKALDDFYKMLQHEPDRAFYGLKQVEKANEAMAIDTLLISDELFRHQDVATRSRYVRLVDSVKENAGTVRIFSSLHVSGEQLSQLTGVAAILRFPVPELSDQEGDSSSEED

SEQ ID NO: 133 - protein, 166 aa, Homo sapiens
SLVIRNLQRVIPIRRAPLRSKIEIVRRILGVQKFDLGIICVDNKNIQHINRIYRDRNVPTDVLSFPFHEHLKAGEFPQPDFPDDYNLGDIFLGVEYIFHQCKENEDYNDVLTVTATHGLCHLLGFTHGTEAEWQQMFQKEKAVLDELGRRTGTRLQPLTRGLFGGS

SEQ ID NO: 134 - protein, 178 aa, Homo sapiens
QEVIAGLERFTFAFEKDVEMQKGTGLLPFQGMDKSASAVCNFFTKGLCEKGKLCPFRHDRGEKMVVCKHWLRGLCKKGDHCKFLHQYDLTRMPECYFYSKFGDCSNKECSFLHVKPAFKSQDCPWYDQGFCKDGPLCKYRHVPRIMCLNYLVGFCPEGPKCQFAQKIREFKLLPGSKI

SEQ ID NO: 135 - protein, 384 aa, Homo sapiens
KLVRKNIEKDNAGQVTLVPEEPEDMWHTYNLVQVGDSLRASTIRKVQTESSTGSVGSNRVRTTLTLCVEAIDFDSQACQLRVKGTNIQENEYVKMGAYHTIELEPNRQFTLAKKQWDSVVLERIEQACDPAWSADVAAVVMQEGLAHICLVTPSMTLTRAKVEVNIPRKRKGNCSQHDRALERFYEQVVQAIQRHIHFDVVKCILVASPGFVREQFCDYMFQQAVKTDNKLLLENRSKFLQVHASSGHKYSLKEALCDPTVASRLSDTKAAGEVKALDDFYKMLQHEPDRAFYGLKQVEKANEAMAIDTLLISDELFRHQDVATRSRYVRLVDSVKENAGTVRIFSSLHVSGEQLSQLTGVAAILRFPVPELSDQEGDSSSEED

SEQ ID NO: 136 - protein, 256 aa, Homo sapiens
DPAWSADVAAVVMQEGLAHICLVTPSMTLTRAKVEVNIPRKRKGNCSQHDRALERFYEQVVQAIQRHIHFDVVKCILVASPGFVREQFCDYMFQQAVKTDNKLLLENRSKFLQVHASSGHKYSLKEALCDPTVASRLSDTKAAGEVKALDDFYKMLQHEPDRAFYGLKQVEKANEAMAIDTLLISDELFRHQDVATRSRYVRLVDSVKENAGTVRIFSSLHVSGEQLSQLTGVAAILRFPVPELSDQEGDSSSEED

SEQ ID NO: 137 - protein, 209 aa, Homo sapiens
MDPGKDKEGVPQPSGPPARKKFVIPLDEDEVPPGVRGNPVLKFVRNVPWEFGDVIPDYVLGQSTCALFLSLRYHNLHPDYIHGRLQSLGKNFALRVLLVQVDVKDPQQALKELAKMCILADCTLILAWSPEEAGRYLETYKAYEQKPADLLMEKLEQDFVSRVTECLTTVKSVNKTDSQTLLTTFGSLEQLIAASREDLALCPGLGPQK

SEQ ID NO: 138 - protein, 128 aa, Homo sapiens
KESRAKKFQRQHMDSDSSPSSSSTYCNQMMRRRNMTQGRCKPVNTFVHEPLVDVQNVCFQEKVTCKNGQGNCYKSNSSMHITDCRLTNGSRYPNCAYRTSPKERHIIVACEGSPYVPVHFDASVEDST

SEQ ID NO: 139 - protein, 123 aa, Homo sapiens [sequence omitted]

SEQ ID NO: 140 - protein, 129 aa, Homo sapiens
GLGLVQPSYGQDGMYQRFLRQHVHPEETGGSDRYCNLMMQRRKMTLYHCKRFNTFIHEDIWNIRSICSTTNIQCKNGKMNCHEGVVKVTDCRDTGSSRAPNCRYRAIASTRRVVIACEGNPQVPVHFDG

SEQ ID NO: 141 - protein, 375 aa, Homo sapiens
  misc_feature (1)..(1): Xaa can be any naturally occurring amino acid
XSAVDNILLKLAKFKIGFLRLGQIQKVHPAIQQFTEQEICRSKSIKSLALLEELYNSQLIVATTCMGINHPIFSRKIFDFCIVDEASQISQPICLGPLFFSRRFVLVGDHQQLPPLVLNREARALGMSESLFKRLEQNKSAVVQLTVQYRMNSKIMSLSNKLTYEGKLECGSDKVANAVINLRHFKDVKLELEFYADYSDNPWLMGVFEPNNPVCFLNTDKVPAPEQVEKGGVSNVTEAKLIVFLTSIFVKAGCSPSDIGIIAPYRQQLKIINDLLARSIGMVEVNTVDKYQGRDKSIVLVSFVRSNKDGTVGELLKDWRRLNVAITRAKHKLILLGCVPSLNCYPPLEKLLNHLNSEKLISFFFCIWSHLIALL

SEQ ID NO: 142 - protein, 88 aa, Homo sapiens
MALRSHDRSTRPLYISVGHRMSLEAAVRLTCCCCRFRIPEPVRQADICSREHIRKSLGLPGPPTPRSPKAQRPVACPKGDSGESSALC

SEQ ID NO: 143 - protein, 212 aa, Homo sapiens
CYTNHALSYDQAKRVPRWVLEHISKSKIMGDADRKHCKFKPDPNIPPTFSAFNEDYVGSGWSRGHMAPAGNNKFSSKAMAETFYLSNIVPQDFDNNSGYWNRIEMYCRELTERFEDVWVVSGPLTLPQTRGDGKKIVSYQVIGEDNVAVPSHLYKVILARRSSVSTEPLALGAFVVPNEAIGFQPQLTEFQVSLQDLEKLSGLVFFPHLDRT

SEQ ID NO: 144 - protein, 123 aa, Homo sapiens
VTVSQMTSVLNGKTRRFADIQLQHGALCFNIRYGTTVEEEKNHVLEIARQRAVAQAWTKEQRRLQEGEEGIRAWTEGEKQQLLSTGRVQGYDGYFVLSVEQYLELSDSANNIHFMRQSEIGRR

SEQ ID NO: 145 - protein, 125 aa, Homo sapiens
TVSQPTLLVNGKTRRFTNIEFQYSTLLLSIRYGLTPDTLDEEKARVLDQARQRALGTAWAKEQQKARDGREGSRLWTEGEKQQLLSTGRVQGYEGYYVLPVEQYPELADSSSNIQFLRQNEMGKR

SEQ ID NO: 146 - skipped

SEQ ID NO: 147 - protein, 1368 aa, Streptococcus pyogenes [sequence omitted]

SEQ ID NO: 148 - protein, 1368 aa, Streptococcus pyogenes
MDKKYSIGLAIGTNSVGWAVITDEYKVPSKKFKVLGNTDRHSIKKNLIGALLFDSGETAEATRLKRTARRRYTRRKNRICYLQEIFSNEMAKVDDSFFHRLEESFLVEEDKKHERHPIFGNIVDEVAYHEKYPTIYHLRKKLVDSTDKADLRLIYLALAHMIKFRGHFLIEGDLNPDNSDVDKLFIQLVQTYNQLFEENPINASGVDAKAILSARLSKSRRLENLIAQLPGEKKNGLFGNLIALSLGLTPNFKSNFDLAEDAKLQLSKDTYDDDLDNLLAQIGDQYADLFLAAKNLSDAILLSDILRVNTEITKAPLSASMIKRYDEHHQDLTLLKALVRQQLPEKYKEIFFDQSKNGYAGYIDGGASQEEFYKFIKPILEKMDGTEELLVKLNREDLLRKQRTFDNGSIPHQIHLGELHAILRRQEDFYPFLKDNREKIEKILTFRIPYYVGPLARGNSRFAWMTRKSEETITPWNFEEVVDKGASAQSFIERMTNFDKNLPNEKVLPKHSLLYEYFTVYNELTKVKYVTEGMRKPAFLSGEQKKAIVDLLFKTNRKVTVKQLKEDYFKKIECFDSVEISGVEDRFNASLGTYHDLLKIIKDKDFLDNEENEDILEDIVLTLTLFEDREMIEERLKTYAHLFDDKVMKQLKRRRYTGWGRLSRKLINGIRDKQSGKTILDFLKSDGFANRNFMQLIHDDSLTFKEDIQKAQVSGQGDSLHEHIANLAGSPAIKKGILQTVKVVDELVKVMGRHKPENIVIEMARENQTTQKGQKNSRERMKRIEEGIKELGSQILKEHPVENTQLQNEKLYLYYLQNGRDMYVDQELDINRLSDYDVDAIVPQSFLKDDSIDNKVLTRSDKNRGKSDNVPSEEVVKKMKNYWRQLLNAKLITQRKFDNLTKAERGGLSELDKAGFIKRQLVETRQITKHVAQILDSRMNTKYDENDKLIREVKVITLKSKLVSDFRKDFQFYKVREINNYHHAHDAYLNAVVGTALIKKYPKLESEFVYGDYKVYDVRKMIAKSEQEIGKATAKYFFYSNIMNFFKTEITLANGEIRKRPLIETNGETGEIVWDKGRDFATVRKVLSMPQVNIVKKTEVQTGGFSKESILPKRNSDKLIARKKDWDPKKYGGFDSPTVAYSVLVVAKVEKGKSKKLKSVKELLGITIMERSSFEKNPIDFLEAKGYKEVKKDLIIKLPKYSLFELENGRKRMLASAGELQKGNELALPSKYVNFLYLASHYEKLKGSPEDNEQKQLFVEQHKHYLDEIIEQISEFSKRVILADANLDKVLSAYNKHRDKPIREQAENIIHLFTLTNLGAPAAFKYFDTTIDRKRYTSTKEVLDATLIHQSITGLYETRIDLSQLGGD

SEQ ID NO: 149 - protein, 1368 aa, Streptococcus pyogenes [sequence omitted]

SEQ ID NO: 150 - protein, 1053 aa, Staphylococcus aureus
MKRNYILGLDIGITSVGYGIIDYETRDVIDAGVRLFKEANVENNEGRRSKRGARRLKRRRRHRIQRVKKLLFDYNLLTDHSELSGINPYEARVKGLSQKLSEEEFSAALLHLAKRRGVHNVNEVEEDTGNELSTKEQISRNSKALEEKYVAELQLERLKKDGEVRGSINRFKTSDYVKEAKQLLKVQKAYHQLDQSFIDTYIDLLETRRTYYEGPGEGSPFGWKDIKEWYEMLMGHCTYFPEELRSVKYAYNADLYNALNDLNNLVITRDENEKLEYYEKFQIIENVFKQKKKPTLKQIAKEILVNEEDIKGYRVTSTGKPEFTNLKVYHDIKDITARKEIIENAELLDQIAKILTIYQSSEDIQEELTNLNSELTQEEIEQISNLKGYTGTHNLSLKAINLILDELWHTNDNQIAIFNRLKLVPKKVDLSQQKEIPTTLVDDFILSPVVKRSFIQSIKVINAIIKKYGLPNDIIIELAREKNSKDAQKMINEMQKRNRQTNERIEEIIRTTGKENAKYLIEKIKLHDMQEGKCLYSLEAIPLEDLLNNPFNYEVDHIIPRSVSFDNSFNNKVLVKQEENSKKGNRTPFQYLSSSDSKISYETFKKHILNLAKGKGRISKTKKEYLLEERDINRFSVQKDFINRNLVDTRYATRGLMNLLRSYFRVNNLDVKVKSINGGFTSFLRRKWKFKKERNKGYKHHAEDALIIANADFIFKEWKKLDKAKKVMENQMFEEKQAESMPEIETEQEYKEIFITPHQIKHIKDFKDYKYSHRVDKKPNRELINDTLYSTRKDDKGNTLIVNNLNGLYDKDNDKLKKLINKSPEKLLMYHHDPQTYQKLKLIMEQYGDEKNPLYKYYEETGNYLTKYSKKDNGPVIKKIKYYGNKLNAHLDITDDYPNSRNKVVKLSLKPYRFDVYLDNGVYKFVTVKNLDVIKKENYYEVNSKCYEEAKKLKKISNQAEFIASFYNNDLIKINGELYRVIGVNNDLLNRIEVNMIDITYREYLENMNDKRPPRIIKTIASKTQSIKKYSTDILGNLYEVKSKKHPQIIKKG

SEQ ID NO: 151 - protein, 1121 aa, Streptococcus thermophilus
MSDLVLGLDIGIGSVGVGILNKVTGEIIHKNSRIFPAAQAENNLVRRTNRQGRRLARRKKHRRVRLNRLFEESGLITDFTKISINLNPYQLRVKGLTDELSNEELFIALKNMVKHRGISYLDDASDDGNSSVGDYAQIVKENSKQLETKTPGQIQLERYQTYGQLRGDFTVEKDGKKHRLINVFPTSAYRSEALRILQTQQEFNPQITDEFINRYLEILTGKRKYYHGPGNEKSRTDYGRYRTSGETLDNIFGILIGKCTFYPDEFRAAKASYTAQEFNLLNDLNNLTVPTETKKLSKEQKNQIINYVKNEKAMGPAKLFKYIAKLLSCDVADIKGYRIDKSGKAEIHTFEAYRKMKTLETLDIEQMDRETLDKLAYVLTLNTEREGIQEALEHEFADGSFSQKQVDELVQFRKANSSIFGKGWHNFSVKLMMELIPELYETSEEQMTILTRLGKQKTTSSSNKTKYIDEKLLTEEIYNPVVAKSVRQAIKIVNAAIKEYGDFDNIVIEMARETNEDDEKKAIQKIQKANKDEKDAAMLKAANQYNGKAELPHSVFHGHKQLATKIRLWHQQGERCLYTGKTISIHDLINNSNQFEVDHILPLSITFDDSLANKVLVYATANQEKGQRTPYQALDSMDDAWSFRELKAFVRESKTLSNKKKEYLLTEEDISKFDVRKKFIERNLVDTRYASRVVLNALQEHFRAHKIDTKVSVVRGQFTSQLRRHWGIEKTRDTYHHHAVDALIIAASSQLNLWKKQKNTLVSYSEDQLLDIETGELISDDEYKESVFKAPYQHFVDTLKSKEFEDSILFSYQVDSKFNRKISDATIYATRQAKVGKDKADETYVLGKIKDIYTQDGYDAFMKIYKKDKSKFLMYRHDPQTFEKVIEPILENYPNKQINDKGKEVPCNPFLKYKEEHGYIRKYSKKGNGPEIKSLKYYDSKLGNHIDITPKDSNNKVVLQSVSPWRADVYFNKTTGKYEILGLKYADLQFDKGTGTYKISQEKYNDIKKKEGVDSDSEFKFTLYKNDLLLVKDTETKEQQLFRFLSRTMPKQKHYVELKPYDKQKFEGGEALIKVLGNVANSGQCKKGLGKSNISIYKVRTDVLGNQHIIKNEGDKPKLDF

SEQ ID NO: 152 - protein, 1082 aa, Neisseria meningitidis
MAAFKPNPINYILGLDIGIASVGWAMVEIDEDENPICLIDLGVRVFERAEVPKTGDSLAMARRLARSVRRLTRRRAHRLLRARRLLKREGVLQAADFDENGLIKSLPNTPWQLRAAALDRKLTPLEWSAVLLHLIKHRGYLSQRKNEGETADKELGALLKGVADNAHALQTGDFRTPAELALNKFEKESGHIRNQRGDYSHTFSRKDLQAELILLFEKQKEFGNPHVSGGLKEGIETLLMTQRPALSGDAVQKMLGHCTFEPAEPKAAKNTYTAERFIWLTKLNNLRILEQGSERPLTDTERATLMDEPYRKSKLTYAQARKLLGLEDTAFFKGLRYGKDNAEASTLMEMKAYHAISRALEKEGLKDKKSPLNLSPELQDEIGTAFSLFKTDEDITGRLKDRIQPEILEALLKHISFDKFVQISLKALRRIVPLMEQGKRYDEACAEIYGDHYGKKNTEEKIYLPPIPADEIRNPVVLRALSQARKVINGVVRRYGSPARIHIETAREVGKSFKDRKEIEKRQEENRKDREKAAAKFREYFPNFVGEPKSKDILKLRLYEQQHGKCLYSGKEINLGRLNEKGYVEIDHALPFSRTWDDSFNNKVLVLGSENQNKGNQTPYEYFNGKDNSREWQEFKARVETSRFPRSKKQRILLQKFDEDGFKERNLNDTRYVNRFLCQFVADRMRLTGKGKKRVFASNGQITNLLRGFWGLRKVRAENDRHHALDAVVVACSTVAMQQKITRFVRYKEMNAFDGKTIDKETGEVLHQKTHFPQPWEFFAQEVMIRVFGKPDGKPEFEEADTPEKLRTLLAEKLSSRPEAVHEYVTPLFVSRAPNRKMSGQGHMETVKSAKRLDEGVSVLRVPLTQLKLKDLEKMVNREREPKLYEALKARLEAHKDDPAKAFAEPFYKYDKAGNRTQQVKAVRVEQVQKTGVWVRNHNGIADNATMVRVDVFEKGDKYYLVPIYSWQVAKGILPDRAVVQGKDEEDWQLIDDSFNFKFSLHPNDLVEVITKKARMFGYFASCHRGTGNINIRIHDLDHKIGKNGILEGIGVKTALSFQKYQIDELGKEIRPCRLKKRPPVR

SEQ ID NO: 153 - protein, 1037 aa, Parvibaculum lavamentivorans
MERIFGFDIGTTSIGFSVIDYSSTQSAGNIQRLGVRIFPEARDPDGTPLNQQRRQKRMMRRQLRRRRIRRKALNETLHEAGFLPAYGSADWPVVMADEPYELRRRGLEEGLSAYEFGRAIYHLAQHRHFKGRELEESDTPDPDVDDEKEAANERAATLKALKNEQTTLGAWLARRPPSDRKRGIHAHRNVVAEEFERLWEVQSKFHPALKSEEMRARISDTIFAQRPVFWRKNTLGECRFMPGEPLCPKGSWLSQQRRMLEKLNNLAIAGGNARPLDAEERDAILSKLQQQASMSWPGVRSALKALYKQRGEPGAEKSLKFNLELGGESKLLGNALEAKLADMFGPDWPAHPRKQEIRHAVHERLWAADYGETPDKKRVIILSEKDRKAHREAAANSFVADFGITGEQAAQLQALKLPTGWEPYSIPALNLFLAELEKGERFGALVNGPDWEGWRRTNFPHRNQPTGEILDKLPSPASKEERERISQLRNPTVVRTQNELRKVVNNLIGLYGKPDRIRIEVGRDVGKSKREREEIQSGIRRNEKQRKKATEDLIKNGIANPSRDDVEKWILWKEGQERCPYTGDQIGFNALFREGRYEVEHIWPRSRSFDNSPRNKTLCRKDVNIEKGNRMPFEAFGHDEDRWSAIQIRLQGMVSAKGGTGMSPGKVKRFLAKTMPEDFAARQLNDTRYAAKQILAQLKRLWPDMGPEAPVKVEAVTGQVTAQLRKLWTLNNILADDGEKTRADHRHHAIDALTVACTHPGMTNKLSRYWQLRDDPRAEKPALTPPWDTIRADAEKAVSEIVVSHRVRKKVSGPLHKETTYGDTGTDIKTKSGTYRQFVTRKKIESLSKGELDEIRDPRIKEIVAAHVAGRGGDPKKAFPPYPCVSPGGPEIRKVRLTSKQQLNLMAQTGNGYADLGSNHHIAIYRLPDGKADFEIVSLFDASRRLAQRNPIVQRTRADGASFVMSLAAGEAIMIPEGSKKGIWIVQGVWASGQVVLERDTDADHSTTTRPMPNPILKDDAKKVSIDPIGRVRPSND

SEQ ID NO: 154 - protein, 1084 aa, Corynebacter diphtheria
MKYHVGIDVGTFSVGLAAIEVDDAGMPIKTLSLVSHIHDSGLDPDEIKSAVTRLASSGIARRTRRLYRRKRRRLQQLDKFIQRQGWPVIELEDYSDPLYPWKVRAELAASYIADEKERGEKLSVALRHIARHRGWRNPYAKVSSLYLPDGPSDAFKAIREEIKRASGQPVPETATVGQMVTLCELGTLKLRGEGGVLSARLQQSDYAREIQEICRMQEIGQELYRKIIDVVFAAESPKGSASSRVGKDPLQPGKNRALKASDAFQRYRIAALIGNLRVRVDGEKRILSVEEKNLVFDHLVNLTPKKEPEWVTIAEILGIDRGQLIGTATMTDDGERAGARPPTHDTNRSIVNSRIAPLVDWWKTASALEQHAMVKALSNAEVDDFDSPEGAKVQAFFADLDDDVHAKLDSLHLPVGRAAYSEDTLVRLTRRMLSDGVDLYTARLQEFGIEPSWTPPTPRIGEPVGNPAVDRVLKTVSRWLESATKTWGAPERVIIEHVREGFVTEKRAREMDGDMRRRAARNAKLFQEMQEKLNVQGKPSRADLWRYQSVQRQNCQCAYCGSPITFSNSEMDHIVPRAGQGSTNTRENLVAVCHRCNQSKGNTPFAIWAKNTSIEGVSVKEAVERTRHWVTDTGMRSTDFKKFTKAVVERFQRATMDEEIDARSMESVAWMANELRSRVAQHFASHGTTVRVYRGSLTAEARRASGISGKLKFFDGVGKSRLDRRHHAIDAAVIAFTSDYVAETLAVRSNLKQSQAHRQEAPQWREFTGKDAEHRAAWRVWCQKMEKLSALLTEDLRDDRVVVMSNVRLRLGNGSAHKETIGKLSKVKLSSQLSVSDIDKASSEALWCALTREPGFDPKEGLPANPERHIRVNGTHVYAGDNIGLFPVSAGSIALRGGYAELGSSFHHARVYKITSGKKPAFAMLRVYTIDLLPYRNQDLFSVELKPQTMSMRQAEKKLRDALATGNAEYLGWLVVDDELVVDTSKIATDQVKAVEAELGTIRRWRVDGFFSPSKLRLRPLQMSKEGIKKESAPELSKIIDRPGWLPAVNKLFSDGNVTVVRRDSLGRVRLESTAHLPVTWKVQ

SEQ ID NO: 155 - protein, 1130 aa, Streptococcus pasteurianus
MTNGKILGLDIGIASVGVGIIEAKTGKVVHANSRLFSAANAENNAERRGFRGSRRLNRRKKHRVKRVRDLFEKYGIVTDFRNLNLNPYELRVKGLTEQLKNEELFAALRTISKRRGISYLDDAEDDSTGSTDYAKSIDENRRLLKNKTPGQIQLERLEKYGQLRGNFTVYDENGEAHRLINVFSTSDYEKEARKILETQADYNKKITAEFIDDYVEILTQKRKYYHGPGNEKSRTDYGRFRTDGTTLENIFGILIGKCNFYPDEYRASKASYTAQEYNFLNDLNNLKVSTETGKLSTEQKESLVEFAKNTATLGPAKLLKEIAKILDCKVDEIKGYREDDKGKPDLHTFEPYRKLKFNLESINIDDLSREVIDKLADILTLNTEREGIEDAIKRNLPNQFTEEQISEIIKVRKSQSTAFNKGWHSFSAKLMNELIPELYATSDEQMTILTRLEKFKVNKKSSKNTKTIDEKEVTDEIYNPVVAKSVRQTIKIINAAVKKYGDFDKIVIEMPRDKNADDEKKFIDKRNKENKKEKDDALKRAAYLYNSSDKLPDEVFHGNKQLETKIRLWYQQGERCLYSGKPISIQELVHNSNNFEIDHILPLSLSFDDSLANKVLVYAWTNQEKGQKTPYQVIDSMDAAWSFREMKDYVLKQKGLGKKKRDYLLTTENIDKIEVKKKFIERNLVDTRYASRVVLNSLQSALRELGKDTKVSVVRGQFTSQLRRKWKIDKSRETYHHHAVDALIIAASSQLKLWEKQDNPMFVDYGKNQVVDKQTGEILSVSDDEYKELVFQPPYQGFVNTISSKGFEDEILFSYQVDSKYNRKVSDATIYSTRKAKIGKDKKEETYVLGKIKDIYSQNGFDTFIKKYNKDKTQFLMYQKDSLTWENVIEVILRDYPTTKKSEDGKNDVKCNPFEEYRRENGLICKYSKKGKGTPIKSLKYYDKKLGNCIDITPEESRNKVILQSINPWRADVYFNPETLKYELMGLKYSDLSFEKGTGNYHISQEKYDAIKEKEGIGKKSEFKFTLYRNDLILIKDIASGEQEIYRFLSRTMPNVNHYVELKPYDKEKFDNVQELVEALGEADKVGRCIKGLNKPNISIYKVRTDVLGNKYFVKKKGDKPKLDFKNNKK

SEQ ID NO: 156 - protein, 1082 aa, Neisseria cinerea
MAAFKPNPMNYILGLDIGIASVGWAIVEIDEEENPIRLIDLGVRVFERAEVPKTGDSLAAARRLARSVRRLTRRRAHRLLRARRLLKREGVLQAADFDENGLIKSLPNTPWQLRAAALDRKLTPLEWSAVLLHLIKHRGYLSQRKNEGETADKELGALLKGVADNTHALQTGDFRTPAELALNKFEKESGHIRNQRGDYSHTFNRKDLQAELNLLFEKQKEFGNPHVSDGLKEGIETLLMTQRPALSGDAVQKMLGHCTFEPTEPKAAKNTYTAERFVWLTKLNNLRILEQGSERPLTDTERATLMDEPYRKSKLTYAQARKLLDLDDTAFFKGLRYGKDNAEASTLMEMKAYHAISRALEKEGLKDKKSPLNLSPELQDEIGTAFSLFKTDEDITGRLKDRVQPEILEALLKHISFDKFVQISLKALRRIVPLMEQGNRYDEACTEIYGDHYGKKNTEEKIYLPPIPADEIRNPVVLRALSQARKVINGVVRRYGSPARIHIETAREVGKSFKDRKEIEKRQEENRKDREKSAAKFREYFPNFVGEPKSKDILKLRLYEQQHGKCLYSGKEINLGRLNEKGYVEIDHALPFSRTWDDSFNNKVLALGSENQNKGNQTPYEYFNGKDNSREWQEFKARVETSRFPRSKKQRILLQKFDEDGFKERNLNDTRYINRFLCQFVADHMLLTGKGKRRVFASNGQITNLLRGFWGLRKVRAENDRHHALDAVVVACSTIAMQQKITRFVRYKEMNAFDGKTIDKETGEVLHQKAHFPQPWEFFAQEVMIRVFGKPDGKPEFEEADTPEKLRTLLAEKLSSRPEAVHKYVTPLFISRAPNRKMSGQGHMETVKSAKRLDEGISVLRVPLTQLKLKDLEKMVNREREPKLYEALKARLEAHKDDPAKAFAEPFYKYDKAGNRTQQVKAVRVEQVQKTGVWVHNHNGIADNATIVRVDVFEKGGKYYLVPIYSWQVAKGILPDRAVVQGKDEEDWTVMDDSFEFKFVLYANDLIKLTAKKNEFLGYFVSLNRATGAIDIRTHDTDSTKGKNGIFQSVGVKTALSFQKYQIDELGKEIRPCRLKKRPPVR

SEQ ID NO: 157 - protein, 1003 aa, Campylobacter lari
MRILGFDIGINSIGWAFVENDELKDCGVRIFTKAENPKNKESLALPRRNARSSRRRLKRRKARLIAIKRILAKELKLNYKDYVAADGELPKAYEGSLASVYELRYKALTQNLETKDLARVILHIAKHRGYMNKNEKKSNDAKKGKILSALKNNALKLENYQSVGEYFYKEFFQKYKKNTKNFIKIRNTKDNYNNCVLSSDLEKELKLILEKQKEFGYNYSEDFINEILKVAFFQRPLKDFSHLVGACTFFEEEKRACKNSYSAWEFVALTKIINEIKSLEKISGEIVPTQTINEVLNLILDKGSITYKKFRSCINLHESISFKSLKYDKENAENAKLIDFRKLVEFKKALGVHSLSRQELDQISTHITLIKDNVKLKTVLEKYNLSNEQINNLLEIEFNDYINLSFKALGMILPLMREGKRYDEACEIANLKPKTVDEKKDFLPAFCDSIFAHELSNPVVNRAISEYRKVLNALLKKYGKVHKIHLELARDVGLSKKAREKIEKEQKENQAVNAWALKECENIGLKASAKNILKLKLWKEQKEICIYSGNKISIEHLKDEKALEVDHIYPYSRSFDDSFINKVLVFTKENQEKLNKTPFEAFGKNIEKWSKIQTLAQNLPYKKKNKILDENFKDKQQEDFISRNLNDTRYIATLIAKYTKEYLNFLLLSENENANLKSGEKGSKIHVQTISGMLTSVLRHTWGFDKKDRNNHLHHALDAIIVAYSTNSIIKAFSDFRKNQELLKARFYAKELTSDNYKHQVKFFEPFKSFREKILSKIDEIFVSKPPRKRARRALHKDTFHSENKIIDKCSYNSKEGLQIALSCGRVRKIGTKYVENDTIVRVDIFKKQNKFYAIPIYAMDFALGILPNKIVITGKDKNNNPKQWQTIDESYEFCFSLYKNDLILLQKKNMQEPEFAYYNDFSISTSSICVEKHDNKFENLTSNQKLLFSNAKEGSVKVESLGIQNLKVFEKYIITPLGDKIKADFQPRENISLKTSKKYGLR

SEQ ID NO: 158 - protein, 1395 aa, Treponema denticola
MKKEIKDYFLGLDVGTGSVGWAVTDTDYKLLKANRKDLWGMRCFETAETAEVRRLHRGARRRIERRKKRIKLLQELFSQEIAKTDEGFFQRMKESPFYAEDKTILQENTLFNDKDFADKTYHKAYPTINHLIKAWIENKVKPDPRLLYLACHNIIKKRGHFLFEGDFDSENQFDTSIQALFEYLREDMEVDIDADSQKVKEILKDSSLKNSEKQSRLNKILGLKPSDKQKKAITNLISGNKINFADLYDNPDLKDAEKNSISFSKDDFDALSDDLASILGDSFELLLKAKAVYNCSVLSKVIGDEQYLSFAKVKIYEKHKTDLTKLKNVIKKHFPKDYKKVFGYNKNEKNNNNYSGYVGVCKTKSKKLIINNSVNQEDFYKFLKTILSAKSEIKEVNDILTEIETGTFLPKQISKSNAEIPYQLRKMELEKILSNAEKHFSFLKQKDEKGLSHSEKIIMLLTFKIPYYIGPINDNHKKFFPDRCWVVKKEKSPSGKTTPWNFFDHIDKEKTAEAFITSRTNFCTYLVGESVLPKSSLLYSEYTVLNEINNLQIIIDGKNICDIKLKQKIYEDLFKKYKKITQKQISTFIKHEGICNKTDEVIILGIDKECTSSLKSYIELKNIFGKQVDEISTKNMLEEIIRWATIYDEGEGKTILKTKIKAEYGKYCSDEQIKKILNLKFSGWGRLSRKFLETVTSEMPGFSEPVNIITAMRETQNNLMELLSSEFTFTENIKKINSGFEDAEKQFSYDGLVKPLFLSPSVKKMLWQTLKLVKEISHITQAPPKKIFIEMAKGAELEPARTKTRLKILQDLYNNCKNDADAFSSEIKDLSGKIENEDNLRLRSDKLYLYYTQLGKCMYCGKPIEIGHVFDTSNYDIDHIYPQSKIKDDSISNRVLVCSSCNKNKEDKYPLKSEIQSKQRGFWNFLQRNNFISLEKLNRLTRATPISDDETAKFIARQLVETRQATKVAAKVLEKMFPETKIVYSKAETVSMFRNKFDIVKCREINDFHHAHDAYLNIVVGNVYNTKFTNNPWNFIKEKRDNPKIADTYNYYKVFDYDVKRNNITAWEKGKTIITVKDMLKRNTPIYTRQAACKKGELFNQTIMKKGLGQHPLKKEGPFSNISKYGGYNKVSAAYYTLIEYEEKGNKIRSLETIPLYLVKDIQKDQDVLKSYLTDLLGKKEFKILVPKIKINSLLKINGFPCHITGKTNDSFLLRPAVQFCCSNNEVLYFKKIIRFSEIRSQREKIGKTISPYEDLSFRSYIKENLWKKTKNDEIGEKEFYDLLQKKNLEIYDMLLTKHKDTIYKKRPNSATIDILVKGKEKFKSLIIENQFEVILEILKLFSATRNVSDLQHIGGSKYSGVAKIGNKISSLDNCILIYQSITGIFEKRIDLLKV

SEQ ID NO: 159 - protein, 1345 aa, Streptococcus mutans
MKKPYSIGLDIGTNSVGWAVVTDDYKVPAKKMKVLGNTDKSHIEKNLLGALLFDSGNTAEDRRLKRTARRRYTRRRNRILYLQEIFSEEMGKVDDSFFHRLEDSFLVTEDKRGERHPIFGNLEEEVKYHENFPTIYHLRQYLADNPEKVDLRLVYLALAHIIKFRGHFLIEGKFDTRNNDVQRLFQEFLAVYDNTFENSSLQEQNVQVEEILTDKISKSAKKDRVLKLFPNEKSNGRFAEFLKLIVGNQADFKKHFELEEKAPLQFSKDTYEEELEVLLAQIGDNYAELFLSAKKLYDSILLSGILTVTDVGTKAPLSASMIQRYNEHQMDLAQLKQFIRQKLSDKYNEVFSDVSKDGYAGYIDGKTNQEAFYKYLKGLLNKIEGSGYFLDKIEREDFLRKQRTFDNGSIPHQIHLQEMRAIIRRQAEFYPFLADNQDRIEKLLTFRIPYYVGPLARGKSDFAWLSRKSADKITPWNFDEIVDKESSAEAFINRMTNYDLYLPNQKVLPKHSLLYEKFTVYNELTKVKYKTEQGKTAFFDANMKQEIFDGVFKVYRKVTKDKLMDFLEKEFDEFRIVDLTGLDKENKVFNASYGTYHDLCKILDKDFLDNSKNEKILEDIVLTLTLFEDREMIRKRLENYSDLLTKEQVKKLERRHYTGWGRLSAELIHGIRNKESRKTILDYLIDDGNSNRNFMQLINDDALSFKEEIAKAQVIGETDNLNQVVSDIAGSPAIKKGILQSLKIVDELVKIMGHQPENIVVEMARENQFTNQGRRNSQQRLKGLTDSIKEFGSQILKEHPVENSQLQNDRLFLYYLQNGRDMYTGEELDIDYLSQYDIDHIIPQAFIKDNSIDNRVLTSSKENRGKSDDVPSKDVVRKMKSYWSKLLSAKLITQRKFDNLTKAERGGLTDDDKAGFIKRQLVETRQITKHVARILDERFNTETDENNKKIRQVKIVTLKSNLVSNFRKEFELYKVREINDYHHAHDAYLNAVIGKALLGVYPQLEPEFVYGDYPHFHGHKENKATAKKFFYSNIMNFFKKDDVRTDKNGEIIWKKDEHISNIKKVLSYPQVNIVKKVEEQTGGFSKESILPKGNSDKLIPRKTKKFYWDTKKYGGFDSPIVAYSILVIADIEKGKSKKLKTVKALVGVTIMEKMTFERDPVAFLERKGYRNVQEENIIKLPKYSLFKLENGRKRLLASARELQKGNEIVLPNHLGTLLYHAKNIHKVDEPKHLDYVDKHKDEFKELLDVVSNFSKKYTLAEGNLEKIKELYAQNNGEDLKELASSFINLLTFTAIGAPATFKFFDKNIDRKRYTSTTEILNATLIHQSITGLYETRIDLNKLGGD

SEQ ID NO: 160 - protein, 1388 aa, Streptococcus thermophilus
MTKPYSIGLDIGTNSVGWAVTTDNYKVPSKKMKVLGNTSKKYIKKNLLGVLLFDSGITAEGRRLKRTARRRYTRRRNRILYLQEIFSTEMATLDDAFFQRLDDSFLVPDDKRDSKYPIFGNLVEEKAYHDEFPTIYHLRKYLADSTKKADLRLVYLALAHMIKYRGHFLIEGEFNSKNNDIQKNFQDFLDTYNAIFESDLSLENSKQLEEIVKDKISKLEKKDRILKLFPGEKNSGIFSEFLKLIVGNQADFRKCFNLDEKASLHFSKESYDEDLETLLGYIGDDYSDVFLKAKKLYDAILLSGFLTVTDNETEAPLSSAMIKRYNEHKEDLALLKEYIRNISLKTYNEVFKDDTKNGYAGYIDGKTNQEDFYVYLKKLLAEFEGADYFLEKIDREDFLRKQRTFDNGSIPYQIHLQEMRAILDKQAKFYPFLAKNKERIEKILTFRIPYYVGPLARGNSDFAWSIRKRNEKITPWNFEDVIDKESSAEAFINRMTSFDLYLPEEKVLPKHSLLYETFNVYNELTKVRFIAESMRDYQFLDSKQKKDIVRLYFKDKRKVTDKDIIEYLHAIYGYDGIELKGIEKQFNSSLSTYHDLLNIINDKEFLDDSSNEAIIEEIIHTLTIFEDREMIKQRLSKFENIFDKSVLKKLSRRHYTGWGKLSAKLINGIRDEKSGNTILDYLIDDGISNRNFMQLIHDDALSFKKKIQKAQIIGDEDKGNIKEVVKSLPGSPAIKKGILQSIKIVDELVKVMGGRKPESIVVEMARENQYTNQGKSNSQQRLKRLEKSLKELGSKILKENIPAKLSKIDNNALQNDRLYLYYLQNGKDMYTGDDLDIDRLSNYDIDHIIPQAFLKDNSIDNKVLVSSASNRGKSDDVPSLEVVKKRKTFWYQLLKSKLISQRKFDNLTKAERGGLSPEDKAGFIQRQLVETRQITKHVARLLDEKFNNKKDENNRAVRTVKIITLKSTLVSQFRKDFELYKVREINDFHHAHDAYLNAVVASALLKKYPKLEPEFVYGDYPKYNSFRERKSATEKVYFYSNIMNIFKKSISLADGRVIERPLIEVNEETGESVWNKESDLATVRRVLSYPQVNVVKKVEEQNHGLDRGKPKGLFNANLSSKPKPNSNENLVGAKEYLDPKKYGGYAGISNSFTVLVKGTIEKGAKKKITNVLEFQGISILDRINYRKDKLNFLLEKGYKDIELIIELPKYSLFELSDGSRRMLASILSTNNKRGEIHKGNQIFLSQKFVKLLYHAKRISNTINENHRKYVENHKKEFEELFYYILEFNENYVGAKKNGKLLNSAFQSWQNHSIDELCSSFIGPTGSERKGLFELTSRGSAADFEFLGVKIPRYRDYTPSSLLKDATLIHQSVTGLYETRIDLAKLGEG

SEQ ID NO: 161 - protein, 984 aa, Campylobacter jejuni
MARILAFDIGISSIGWAFSENDELKDCGVRIFTKVENPKTGESLALPRRLARSARKRLARRKARLNHLKHLIANEFKLNYEDYQSFDESLAKAYKGSLISPYELRFRALNELLSKQDFARVILHIAKRRGYDDIKNSDDKEKGAILKAIKQNEEKLANYQSVGEYLYKEYFQKFKENSKEFTNVRNKKESYERCIAQSFLKDELKLIFKKQREFGFSFSKKFEEEVLSVAFYKRALKDFSHLVGNCSFFTDEKRAPKNSPLAFMFVALTRIINLLNNLKNTEGILYTKDDLNALLNEVLKNGTLTYKQTKKLLGLSDDYEFKGEKGTYFIEFKKYKEFIKALGEHNLSQDDLNEIAKDITLIKDEIKLKKALAKYDLNQNQIDSLSKLEFKDHLNISFKALKLVTPLMLEGKKYDEACNELNLKVAINEDKKDFLPAFNETYYKDEVTNPVVLRAIKEYRKVLNALLKKYGKVHKINIELAREVGKNHSQRAKIEKEQNENYKAKKDAELECEKLGLKINSKNILKLRLFKEQKEFCAYSGEKIKISDLQDEKMLEIDHIYPYSRSFDDSYMNKVLVFTKQNQEKLNQTPFEAFGNDSAKWQKIEVLAKNLPTKKQKRILDKNYKDKEQKNFKDRNLNDTRYIARLVLNYTKDYLDFLPLSDDENTKLNDTQKGSKVHVEAKSGMLTSALRHTWGFSAKDRNNHLHHAIDAVIIAYANNSIVKAFSDFKKEQESNSAELYAKKISELDYKNKRKFFEPFSGFRQKVLDKIDEIFVSKPERKKPSGALHEETFRKEEEFYQSYGGKEGVLKALELGKIRKVNGKIVKNGDMFRVDIFKHKKTNKFYAVPIYTMDFALKVLPNKAVARSKKGEIKDWILMDENYEFCFSLYKDSLILIQTKDMQEPEFVYYNAFTSSTVSLIVSKHDNKFETLSKNQKILFKNANEKEVIAKSIGIQNLKVFEKYIVSALGEVTKAEFRQREDFKK

SEQ ID NO: 162 - protein, 1056 aa, Pasteurella multocida
MQTTNLSYILGLDLGIASVGWAVVEINENEDPIGLIDVGVRIFERAEVPKTGESLALSRRLARSTRRLIRRRAHRLLLAKRFLKREGILSTIDLEKGLPNQAWELRVAGLERRLSAIEWGAVLLHLIKHRGYLSKRKNESQTNNKELGALLSGVAQNHQLLQSDDYRTPAELALKKFAKEEGHIRNQRGAYTHTFNRLDLLAELNLLFAQQHQFGNPHCKEHIQQYMTELLMWQKPALSGEAILKMLGKCTHEKNEFKAAKHTYSAERFVWLTKLNNLRILEDGAERALNEEERQLLINHPYEKSKLTYAQVRKLLGLSEQAIFKHLRYSKENAESATFMELKAWHAIRKALENQGLKDTWQDLAKKPDLLDEIGTAFSLYKTDEDIQQYLTNKVPNSVINALLVSLNFDKFIELSLKSLRKILPLMEQGKRYDQACREIYGHHYGEANQKTSQLLPAIPAQEIRNPVVLRTLSQARKVINAIIRQYGSPARVHIETGRELGKSFKERREIQKQQEDNRTKRESAVQKFKELFSDFSSEPKSKDILKFRLYEQQHGKCLYSGKEINIHRLNEKGYVEIDHALPFSRTWDDSFNNKVLVLASENQNKGNQTPYEWLQGKINSERWKNFVALVLGSQCSAAKKQRLLTQVIDDNKFIDRNLNDTRYIARFLSNYIQENLLLVGKNKKNVFTPNGQITALLRSRWGLIKARENNNRHHALDAIVVACATPSMQQKITRFIRFKEVHPYKIENRYEMVDQESGEIISPHFPEPWAYFRQEVNIRVFDNHPDTVLKEMLPDRPQANHQFVQPLFVSRAPTRKMSGQGHMETIKSAKRLAEGISVLRIPLTQLKPNLLENMVNKEREPALYAGLKARLAEFNQDPAKAFATPFYKQGGQQVKAIRVEQVQKSGVLVRENNGVADNASIVRTDVFIKNNKFFLVPIYTWQVAKGILPNKAIVAHKNEDEWEEMDEGAKFKFSLFPNDLVELKTKKEYFFGYYIGLDRATGNISLKEHDGEISKGKDGVYRVGVKLALSFEKYQVDELGKNRQICRPQQRQPVR

SEQ ID NO: 163 - protein, 1629 aa, Francisella novicida
MNFKILPIAIDLGVKNTGVFSAFYQKGTSLERLDNKNGKVYELSKDSYTLLMNNRTARRHQRRGIDRKQLVKRLFKLIWTEQLNLEWDKDTQQAISFLFNRRGFSFITDGYSPEYLNIVPEQVKAILMDIFDDYNGEDDLDSYLKLATEQESKISEIYNKLMQKILEFKLMKLCTDIKDDKVSTKTLKEITSYEFELLADYLANYSESLKTQKFSYTDKQGNLKELSYYHHDKYNIQEFLKRHATINDRILDTLLTDDLDIWNFNFEKFDFDKNEEKLQNQEDKDHIQAHLHHFVFAVNKIKSEMASGGRHRSQYFQEITNVLDENNHQEGYLKNFCENLHNKKYSNLSVKNLVNLIGNLSNLELKPLRKYFNDKIHAKADHWDEQKFTETYCHWILGEWRVGVKDQDKKDGAKYSYKDLCNELKQKVTKAGLVDFLLELDPCRTIPPYLDNNNRKPPKCQSLILNPKFLDNQYPNWQQYLQELKKLQSIQNYLDSFETDLKVLKSSKDQPYFVEYKSSNQQIASGQRDYKDLDARILQFIFDRVKASDELLLNEIYFQAKKLKQKASSELEKLESSKKLDEVIANSQLSQILKSQHTNGIFEQGTFLHLVCKYYKQRQRARDSRLYIMPEYRYDKKLHKYNNTGRFDDDNQLLTYCNHKPRQKRYQLLNDLAGVLQVSPNFLKDKIGSDDDLFISKWLVEHIRGFKKACEDSLKIQKDNRGLLNHKINIARNTKGKCEKEIFNLICKIEGSEDKKGNYKHGLAYELGVLLFGEPNEASKPEFDRKIKKFNSIYSFAQIQQIAFAERKGNANTCAVCSADNAHRMQQIKITEPVEDNKDKIILSAKAQRLPAIPTRIVDGAVKKMATILAKNIVDDNWQNIKQVLSAKHQLHIPIITESNAFEFEPALADVKGKSLKDRRKKALERISPENIFKDKNNRIKEFAKGISAYSGANLTDGDFDGAKEELDHIIPRSHKKYGTLNDEANLICVTRGDNKNKGNRIFCLRDLADNYKLKQFETTDDLEIEKKIADTIWDANKKDFKFGNYRSFINLTPQEQKAFRHALFLADENPIKQAVIRAINNRNRTFVNGTQRYFAEVLANNIYLRAKKENLNTDKISFDYFGIPTIGNGRGIAEIRQLYEKVDSDIQAYAKGDKPQASYSHLIDAMLAFCIAADEHRNDGSIGLEIDKNYSLYPLDKNTGEVFTKDIFSQIKITDNEFSDKKLVRKKAIEGFNTHRQMTRDGIYAENYLPILIHKELNEVRKGYTWKNSEEIKIFKGKKYDIQQLNNLVYCLKFVDKPISIDIQISTLEELRNILTTNNIAATAEYYYINLKTQKLHEYYIENYNTALGYKKYSKEMEFLRSLAYRSERVKIKSIDDVKQVLDKDSNFIIGKITLPFKKEWQRLYREWQNTTIKDDYEFLKSFFNVKSITKLHKKVRKDFSLPISTNEGKFLVKRKTWDNNFIYQILNDSDSRADGTKPFIPAFDISKNEIVEAIIDSFTSKNIFWLPKNIELQKVDNKNIFAIDTSKWFEVETPSDLRDIGIATIQYKIDNNSRPKVRVKLDYVIDDDSKINYFMNHSLLKSRYPDKVLEILKQSTIIEFESSGFNKTIKEMLGMKLAGIYNETSNN

SEQ ID NO: 164 - protein, 1371 aa, Lactobacillus buchneri
MKVNNYHIGLDIGTSSIGWVAIGKDGKPLRVKGKTAIGARLFQEGNPAADRRMFRTTRRRLSRRKWRLKLLEEIFDPYITPVDSTFFARLKQSNLSPKDSRKEFKGSMLFPDLTDMQYHKNYPTIYHLRHALMTQDKKFDIRMVYLAIHHIVKYRGNFLNSTPVDSFKASKVDFVDQFKKLNELYAAINPEESFKINLANSEDIGHQFLDPSIRKFDKKKQIPKIVPVMMNDKVTDRLNGKIASEIIHAILGYKAKLDVVLQCTPVDSKPWALKFDDEDIDAKLEKILPEMDENQQSIVAILQNLYSQVTLNQIVPNGMSLSESMIEKYNDHHDHLKLYKKLIDQLADPKKKAVLKKAYSQYVGDDGKVIEQAEFWSSVKKNLDDSELSKQIMDLIDAEKFMPKQRTSQNGVIPHQLHQRELDEIIEHQSKYYPWLVEINPNKHDLHLAKYKIEQLVAFRVPYYVGPMITPKDQAESAETVFSWMERKGTETGQITPWNFDEKVDRKASANRFIKRMTTKDTYLIGEDVLPDESLLYEKFKVLNELNMVRVNGKLLKVADKQAIFQDLFENYKHVSVKKLQNYIKAKTGLPSDPEISGLSDPEHFNNSLGTYNDFKKLFGSKVDEPDLQDDFEKIVEWSTVFEDKKILREKLNEITWLSDQQKDVLESSRYQGWGRLSKKLLTGIVNDQGERIIDKLWNTNKNFMQIQSDDDFAKRIHEANADQMQAVDVEDVLADAYTSPQNKKAIRQVVKVVDDIQKAMGGVAPKYISIEFTRSEDRNPRRTISRQRQLENTLKDTAKSLAKSINPELLSELDNAAKSKKGLTDRLYLYFTQLGKDIYTGEPINIDELNKYDIDHILPQAFIKDNSLDNRVLVLTAVNNGKSDNVPLRMFGAKMGHFWKQLAEAGLISKRKLKNLQTDPDTISKYAMHGFIRRQLVETSQVIKLVANILGDKYRNDDTKIIEITARMNHQMRDEFGFIKNREINDYHHAFDAYLTAFLGRYLYHRYIKLRPYFVYGDFKKFREDKVTMRNFNFLHDLTDDTQEKIADAETGEVIWDRENSIQQLKDVYHYKFMLISHEVYTLRGAMFNQTVYPASDAGKRKLIPVKADRPVNVYGGYSGSADAYMAIVRIHNKKGDKYRVVGVPMRALDRLDAAKNVSDADFDRALKDVLAPQLTKTKKSRKTGEITQVIEDFEIVLGKVMYRQLMIDGDKKFMLGSSTYQYNAKQLVLSDQSVKTLASKGRLDPLQESMDYNNVYTEILDKVNQYFSLYDMNKFRHKLNLGFSKFISFPNHNVLDGNTKVSSGKREILQEILNGLHANPTFGNLKDVGITTPFGQLQQPNGILLSDETKIRYQSPTGLFERTVSLKDL

SEQ ID NO: 165 - protein, 1334 aa, Listeria innocua
MKKPYTIGLDIGTNSVGWAVLTDQYDLVKRKMKIAGDSEKKQIKKNFWGVRLFDEGQTAADRRMARTARRRIERRRNRISYLQGIFAEEMSKTDANFFCRLSDSFYVDNEKRNSRHPFFATIEEEVEYHKNYPTIYHLREELVNSSEKADLRLVYLALAHIIKYRGNFLIEGALDTQNTSVDGIYKQFIQTYNQVFASGIEDGSLKKLEDNKDVAKILVEKVTRKEKLERILKLYPGEKSAGMFAQFISLIVGSKGNFQKPFDLIEKSDIECAKDSYEEDLESLLALIGDEYAELFVAAKNAYSAVVLSSIITVAETETNAKLSASMIERFDTHEEDLGELKAFIKLHLPKHYEEIFSNTEKHGYAGYIDGKTKQADFYKYMKMTLENIEGADYFIAKIEKENFLRKQRTFDNGAIPHQLHLEELEAILHQQAKYYPFLKENYDKIKSLVTFRIPYFVGPLANGQSEFAWLTRKADGEIRPWNIEEKVDFGKSAVDFIEKMTNKDTYLPKENVLPKHSLCYQKYLVYNELTKVRYINDQGKTSYFSGQEKEQIFNDLFKQKRKVKKKDLELFLRNMSHVESPTIEGLEDSFNSSYSTYHDLLKVGIKQEILDNPVNTEMLENIVKILTVFEDKRMIKEQLQQFSDVLDGVVLKKLERRHYTGWGRLSAKLLMGIRDKQSHLTILDYLMNDDGLNRNLMQLINDSNLSFKSIIEKEQVTTADKDIQSIVADLAGSPAIKKGILQSLKIVDELVSVMGYPPQTIVVEMARENQTTGKGKNNSRPRYKSLEKAIKEFGSQILKEHPTDNQELRNNRLYLYYLQNGKDMYTGQDLDIHNLSNYDIDHIVPQSFITDNSIDNLVLTSSAGNREKGDDVPPLEIVRKRKVFWEKLYQGNLMSKRKFDYLTKAERGGLTEADKARFIHRQLVETRQITKNVANILHQRFNYEKDDHGNTMKQVRIVTLKSALVSQFRKQFQLYKVRDVNDYHHAHDAYLNGVVANTLLKVYPQLEPEFVYGDYHQFDWFKANKATAKKQFYTNIMLFFAQKDRIIDENGEILWDKKYLDTVKKVMSYRQMNIVKKTEIQKGEFSKATIKPKGNSSKLIPRKTNWDPMKYGGLDSPNMAYAVVIEYAKGKNKLVFEKKIIRVTIMERKAFEKDEKAFLEEQGYRQPKVLAKLPKYTLYECEEGRRRMLASANEAQKGNQQVLPNHLVTLLHHAANCEVSDGKSLDYIESNREMFAELLAHVSEFAKRYTLAEANLNKINQLFEQNKEGDIKAIAQSFVDLMAFNAMGAPASFKFFETTIERKRYNNLKELLNSTIIYQSITGLYESRKRLDD

SEQ ID NO: 166 - protein, 1372 aa, Legionella pneumophila
MESSQILSPIGIDLGGKFTGVCLSHLEAFAELPNHANTKYSVILIDHNNFQLSQAQRRATRHRVRNKKRNQFVKRVALQLFQHILSRDLNAKEETALCHYLNNRGYTYVDTDLDEYIKDETTINLLKELLPSESEHNFIDWFLQKMQSSEFRKILVSKVEEKKDDKELKNAVKNIKNFITGFEKNSVEGHRHRKVYFENIKSDITKDNQLDSIKKKIPSVCLSNLLGHLSNLQWKNLHRYLAKNPKQFDEQTFGNEFLRMLKNFRHLKGSQESLAVRNLIQQLEQSQDYISILEKTPPEITIPPYEARTNTGMEKDQSLLLNPEKLNNLYPNWRNLIPGIIDAHPFLEKDLEHTKLRDRKRIISPSKQDEKRDSYILQRYLDLNKKIDKFKIKKQLSFLGQGKQLPANLIETQKEMETHFNSSLVSVLIQIASAYNKEREDAAQGIWFDNAFSLCELSNINPPRKQKILPLLVGAILSEDFINNKDKWAKFKIFWNTHKIGRTSLKSKCKEIEEARKNSGNAFKIDYEEALNHPEHSNNKALIKIIQTIPDIIQAIQSHLGHNDSQALIYHNPFSLSQLYTILETKRDGFHKNCVAVTCENYWRSQKTEIDPEISYASRLPADSVRPFDGVLARMMQRLAYEIAMAKWEQIKHIPDNSSLLIPIYLEQNRFEFEESFKKIKGSSSDKTLEQAIEKQNIQWEEKFQRIINASMNICPYKGASIGGQGEIDHIYPRSLSKKHFGVIFNSEVNLIYCSSQGNREKKEEHYLLEHLSPLYLKHQFGTDNVSDIKNFISQNVANIKKYISFHLLTPEQQKAARHALFLDYDDEAFKTITKFLMSQQKARVNGTQKFLGKQIMEFLSTLADSKQLQLEFSIKQITAEEVHDHRELLSKQEPKLVKSRQQSFPSHAIDATLTMSIGLKEFPQFSQELDNSWFINHLMPDEVHLNPVRSKEKYNKPNISSTPLFKDSLYAERFIPVWVKGETFAIGFSEKDLFEIKPSNKEKLFTLLKTYSTKNPGESLQELQAKSKAKWLYFPINKTLALEFLHHYFHKEIVTPDDTTVCHFINSLRYYTKKESITVKILKEPMPVLSVKFESSKKNVLGSFKHTIALPATKDWERLFNHPNFLALKANPAPNPKEFNEFIRKYFLSDNNPNSDIPNNGHNIKPQKHKAVRKVFSLPVIPGNAGTMMRIRRKDNKGQPLYQLQTIDDTPSMGIQINEDRLVKQEVLMDAYKTRNLSTIDGINNSEGQAYATFDNWLTLPVSTFKPEIIKLEMKPHSKTRRYIRITQSLADFIKTIDEALMIKPSDSIDDPLNMPNEIVCKNKLFGNELKPRDGKMKIVSTGKIVTYEFESDSTPQWIQTLYVTQLKKQP

SEQ ID NO: 167 - protein, 1082 aa, Neisseria lactamica
MAAFKPNPMNYILGLDIGIASVGWAMVEVDEEENPIRLIDLGVRVFERAEVPKTGDSLAMARRLARSVRRLTRRRAHRLLRARRLLKREGVLQDADFDENGLVKSLPNTPWQLRAAALDRKLTCLEWSAVLLHLVKHRGYLSQRKNEGETADKELGALLKGVADNAHALQTGDFRTPAELALNKFEKESGHIRNQRGDYSHTFSRKDLQAELNLLFEKQKEFGNPHVSDGLKEDIETLLMAQRPALSGDAVQKMLGHCTFEPAEPKAAKNTYTAERFIWLTKLNNLRILEQGSERPLTDTERATLMDEPYRKSKLTYAQARKLLGLEDTAFFKGLRYGKDNAEASTLMEMKAYHAISRALEKEGLKDKKSPLNLSTELQDEIGTAFSLFKTDKDITGRLKDRVQPEILEALLKHISFDKFVQISLKALRRIVPLMEQGKRYDEACAEIYGDHYCKKNAEEKIYLPPIPADEIRNPVVLRALSQARKVINCVVRRYGSPARIHIETAREVGKSFKDRKEIEKRQEENRKDREKAAAKFREYFPNFVGEPKSKDILKLRLYEQQHGKCLYSGKEINLVRLNEKGYVEIDHALPFSRTWDDSFNNKVLVLGSENQNKGNQTPYEYFNGKDNSREWQEFKARVETSRFPRSKKQRILLQKFDEEGFKERNLNDTRYVNRFLCQFVADHILLTGKGKRRVFASNGQITNLLRGFWGLRKVRTENDRHHALDAVVVACSTVAMQQKITRFVRYKEMNAFDGKTIDKETGEVLHQKAHFPQPWEFFAQEVMIRVFGKPDGKPEFEEADTPEKLRTLLAEKLSSRPEAVHEYVTPLFVSRAPNRKMSGQGHMETVKSAKRLDEGISVLRVPLTQLKLKGLEKMVNREREPKLYDALKAQLETHKDDPAKAFAEPFYKYDKAGSRTQQVKAVRIEQVQKTGVWVRNHNGIADNATMVRVDVFEKGGKYYLVPIYSWQVAKGILPDRAVVAFKDEEDWTVMDDSFEFRFVLYANDLIKLTAKKNEFLGYFVSLNRATGAIDIRTHDTDSTKGKNGIFQSVGVKTALSFQKNQIDELGKEIRPCRLKKRPPVR

SEQ ID NO: 168 - protein, 1082 aa, Neisseria meningitidis; identical to SEQ ID NO: 152

SEQ ID NO: 169 - protein, 1187 aa, Bifidobacterium longum
MLSRQLLGASHLARPVSYSYNVQDNDVHCSYGERCFMRGKRYRIGIDVGLNSVGLAAVEVSDENSPVRLLNAQSVIHDGGVDPQKNKEAITRKNMSGVARRTRRMRRRKRERLHKLDMLLGKFGYPVIEPESLDKPFEEWHVRAELATRYIEDDELRRESISIALRHMARHRGWRNPYRQVDSLISDNPYSKQYGELKEKAKAYNDDATAAEEESTPAQLVVAMLDAGYAEAPRLRWRTGSKKPDAEGYLPVRLMQEDNANELKQIFRVQRVPADEWKPLFRSVFYAVSPKGSAEQRVGQDPLAPEQARALKASLAFQEYRIANVITNLRIKDASAELRKLTVDEKQSIYDQLVSPSSEDITWSDLCDFLGFKRSQLKGVGSLTEDGEERISSRPPRLTSVQRIYESDNKIRKPLVAWWKSASDNEHEAMIRLLSNTVDIDKVREDVAYASAIEFIDGLDDDALTKLDSVDLPSGRAAYSVETLQKLTRQMLTTDDDLHEARKTLFNVTDSWRPPADPIGEPLGNPSVDRVLKNVNRYLMNCQQRWGNPVSVNIEHVRSSFSSVAFARKDKREYEKNNEKRSIFRSSLSEQLRADEQMEKVRESDLRRLEAIQRQNGQCLYCGRTITFRTCEMDHIVPRKGVGSTNTRTNFAAVCAECNRMKSNTPFAIWARSEDAQTRGVSLAEAKKRVTMFTFNPKSYAPREVKAFKQAVIARLQQTEDDAAIDNRSIESVAWMADELHRRIDWYFNAKQYVNSASIDDAEAETMKTTVSVFQGRVTASARRAAGIEGKIHFIGQQSKTRLDRRHHAVDASVIAMMNTAAAQTLMERESLRESQRLIGLMPGERSWKEYPYEGTSRYESFHLWLDNMDVLLELLNDALDNDRIAVMQSQRYVLGNSIAHDATIHPLEKVPLGSAMSADLIRRASTPALWCALTRLPDYDEKEGLPEDSHREIRVHDTRYSADDEMGFFASQAAQIAVQEGSADIGSAIHHARVYRCWKTNAKGVRKYFYGMIRVFQTDLLRACHDDLFTVPLPPQSISMRYGEPRVVQALQSGNAQYLGSLVVGDEIEMDFSSLDVDGQIGEYLQFFSQFSGGNLAWKHWVVDGFFNQTQLRIRPRYLAAEGLAKAFSDDVVPDGVQKIVTKQGWLPPVNTASKTAVRIVRRNAFGEPRLSSAHHMPCSWQWRHE

SEQ ID NO: 170 - protein, 1101 aa, Akkermansia muciniphila
MSRSLTFSFDIGYASIGWAVIASASHDDADPSVCGCGTVLFPKDDCQAFKRREYRRLRRNIRSRRVRIERIGRLLVQAQIITPEMKETSGHPAPFYLASEALKGHRTLAPIELWHVLRWYAHNRGYDNNASWSNSLSEDGGNGEDTERVKHAQDLMDKHGTATMAETICRELKLEEGKADAPMEVSTPAYKNLNTAFPRLIVEKEVRRILELSAPLIPGLTAEIIELIAQHHPLTTEQRGVLLQHGIKLARRYRGSLLFGQLIPRFDNRIISRCPVTWAQVYEAELKKGNSEQSARERAEKLSKVPTANCPEFYEYRMARILCNIRADGEPLSAEIRRELMNQARQEGKLTKASLEKAISSRLGKETETNVSNYFTLHPDSEEALYLNPAVEVLQRSGIGQILSPSVYRIAANRLRRGKSVTPNYLLNLLKSRGESGEALEKKIEKESKKKEADYADTPLKPKYATGRAPYARTVLKKVVEEILDGEDPTRPARGEAHPDGELKAHDGCLYCLLDTDSSVNQHQKERRLDTMTNNHLVRHRMLILDRLLKDLIQDFADGQKDRISRVCVEVGKELTTFSAMDSKKIQRELTLRQKSHTDAVNRLKRKLPGKALSANLIRKCRIAMDMNWTCPFTGATYGDHELENLELEHIVPHSFRQSNALSSLVLTWPGVNRMKGQRTGYDFVEQEQENPVPDKPNLHICSLNNYRELVEKLDDKKGHEDDRRRKKKRKALLMVRGLSHKHQSQNHEAMKEIGMTEGMMTQSSHLMKLACKSIKTSLPDAHIDMIPGAVTAEVRKAWDVFGVFKELCPEAADPDSGKILKENLRSLTHLHHALDACVLGLIPYIIPAHHNGLLRRVLAMRRIPEKLIPQVRPVANQRHYVLNDDGRMMLRDLSASLKENIREQLMEQRVIQHVPADMGGALLKETMQRVLSVDGSGEDAMVSLSKKKDGKKEKNQVKASKLVGVFPEGPSKLKALKAAIEIDGNYGVALDPKPVVIRHIKVFKRIMALKEQNGGKPVRILKKGMLIHLTSSKDPKHAGVWRIESIQDSKGGVKLDLQRAHCAVPKNKTHECNWREVDLISLLKKYQMKRYPTSYTGTPR

SEQ ID NO: 171 - protein, 1498 aa, Odoribacter laneus
METTLGIDLGTNSIGLALVDQEEHQILYSGVRIFPEGINKDTIGLGEKEESRNATRRAKRQMRRQYFRKKLRKAKLLELLIAYDMCPLKPEDVRRWKNWDKQQKSTVRQFPDTPAFREWLKQNPYELRKQAVTEDVTRPELGRILYQMIQRRGFLSSRKGKEEGKIFTGKDRMVGIDETRKNLQKQTLGAYLYDIAPKNGEKYRFRTERVRARYTLRDMYIREFEIIWQRQAGHLGLAHEQATRKKNIFLEGSATNVRNSKLITHLQAKYGRGHVLIEDTRITVTFQLPLKEVLGGKIEIEEEQLKFKSNESVLFWQRPLRSQKSLLSKCVFEGRNFYDPVHQKWIIAGPTPAPLSHPEFEEFRAYQFINNIIYGKNEHLTAIQREAVFELMCTESKDFNFEKIPKHLKLFEKFNFDDTTKVPACTTISQLRKLFPHPVWEEKREEIWHCFYFYDDNTLLFEKLQKDYALQTNDLEKIKKIRLSESYGNVSLKAIRRINPYLKKGYAYSTAVLLGGIRNSFGKRFEYFKEYEPEIEKAVCRILKEKNAEGEVIRKIKDYLVHNRFGFAKNDRAFQKLYHHSQAITTQAQKERLPETGNLRNPIVQQGLNELRRTVNKLLATCREKYGPSFKFDHIHVEMGRELRSSKTEREKQSRQIRENEKKNEAAKVKLAEYGLKAYRDNIQKYLLYKEIEEKGGTVCCPYTGKTLNISHTLGSDNSVQIEHIIPYSISLDDSLANKTLCDATFNREKGELTPYDFYQKDPSPEKWGASSWEEIEDRAFRLLPYAKAQRFIRRKPQESNEFISRQLNDTRYISKKAVEYLSAICSDVKAFPGQLTAELRHLWGLNNILQSAPDITFPLPVSATENHREYYVITNEQNEVIRLFPKQGETPRTEKGELLLTGEVERKVFRCKGMQEFQTDVSDGKYWRRIKLSSSVTWSPLFAPKPISADGQIVLKGRIEKGVFVCNQLKQKLKTGLPDGSYWISLPVISQTFKEGESVNNSKLTSQQVQLFGRVREGIFRCHNYQCPASGADGNFWCTLDTDTAQPAFTPIKNAPPGVGGGQIILTGDVDDKGIFHADDDLHYELPASLPKGKYYGIFTVESCDPTLIPIELSAPKTSKGENLIEGNIWVDEHTGEVRFDPKKNREDQRHHAIDAIVIALSSQSLFQRLSTYNARRENKKRGLDSTEHFPSPWPGFAQDVRQSVVPLLVSYKQNPKTLCKISKTLYKDGKKIHSCGNAVRGQLHKETVYGQRTAPGATEKSYHIRKDIRELKTSKHIGKVVDITIRQMLLKHLQENYHIDITQEFNIPSNAFFKEGVYRIFLPNKHGEPVPIKKIRMKEELGNAERLKDNINQYVNPRNNHHVMIYQDADGNLKEEIVSFWSVIERQNQGQPIYQLPREGRNIVSILQINDTFLIGLKEEEPEVYRNDLSTLSKHLYRVQKLSGMYYTFRHHLASTLNNEREEFRIQSLEAWKRANPVKVQIDEIGRITFLNGPLC

SEQ ID NO: 172 - protein, 1300 aa, Francisella tularensis
MSIYQEFVNKYSLSKTLRFELIPQGKTLENIKARGLILDDEKRAKDYKKAKQIIDKYHQFFIEEILSSVCISEDLLQNYSDVYFKLKKSDDDNLQKDFKSAKDTIKKQISEYIKDSEKFKNLFNQNLIDAKKGQESDLILWLKQSKDNGIELFKANSDITDIDEALEIIKSFKGWTTYFKGFHENRKNVYSSNDIPTSIIYRIVDDNLPKFLENKAKYESLKDKAPEAINYEQIKKDLAEELTFDIDYKTSEVNQRVFSLDEVFEIANFNNYLNQSGITKFNTIIGGKFVNGENTKRKGINEYINLYSQQINDKTLKKYKMSVLFKQILSDTESKSFVIDKLEDDSDVVTTMQSFYEQIAAFKTVEEKSIKETLSLLFDDLKAQKLDLSKIYFKNDKSLTDLSQQVFDDYSVIGTAVLEYITQQIAPKNLDNPSKKEQELIAKKTEKAKYLSLETIKLALEEFNKHRDIDKQCRFEEILANFAAIPMIFDEIAQNKDNLAQISIKYQNQGKKDLLQASAEDDVKAIKDLLDQTNNLLHKLKIFHISQSEDKANILDKDEHFYLVFEECYFELANIVPLYNKIRNYITQKPYSDEKFKLNFENSTLANGWDKNKEPDNTAILFIKDDKYYLGVMNKKNNKIFDDKAIKENKGEGYKKIVYKLLPGANKMLPKVFFSAKSIKFYNPSEDILRIRNHSTHTKNGSPQKGYEKFEFNIEDCRKFIDFYKQSISKHPEWKDFGFRFSDTQRYNSIDEFYREVENQGYKLTFENISESYIDSVVNQGKLYLFQIYNKDFSAYSKGRPNLHTLYWKALFDERNLQDVVYKLNGEAELFYRKQSIPKKITHPAKEAIANKNKDNPKKESVFEYDLIKDKRFTEDKFFFHCPITINFKSSGANKFNDEINLLLKEKANDVHILSIDRGERHLAYYTLVDGKGNIIKQDTFNIIGNDRMKTNYHDKLAAIEKDRDSARKDWKKINNIKEMKEGYLSQVVHEIAKLVIEYNAIVVFEDLNFGFKRGRFKVEKQVYQKLEKMLIEKLNYLVFKDNEFDKTGGVLRAYQLTAPFETFKKMGKQTGIIYYVPAGFTSKICPVTGFVNQLYPKYESVSKSQEFFSKFDKICYNLDKGYFEFSFDYKNFGDKAAKGKWTIASFGSRLINFRNSDKNHNWDTREVYPTKELEKLLKDYSIEYGHGECIKAAICGESDKKFFAKLTSVLNTILQMRNSKTGTELDYLISPVADVNGNFFDSRQAPKNMPQDADANGAYHIGLKGLMLLGRIKNNQEGKKLNLVIKNEEYFEFVQNRNN

SEQ ID NO: 173 - protein, 1228 aa, Lachnospiraceae bacterium sp. ND2006
AASKLEKFTNCYSLSKTLRFKAIPVGKTQENIDNKRLLVEDEKRAEDYKGVKKLLDRYYLSFINDVLHSIKLKNLNNYISLFRKKTRTEKENKELENLEINLRKEIAKAFKGAAGYKSLFKKDIIETILPEAADDKDEIALVNSFNGFTTAFTGFFDNRENMFSEEAKSTSIAFRCINENLTRYISNMDIFEKVDAIFDKHEVQEIKEKILNSDYDVEDFFEGEFFNFVLTQEGIDVYNAIIGGFVTESGEKIKGLNEYINLYNAKTKQALPKFKPLYKQVLSDRESLSFYGEGYTSDEEVLEVFRNTLNKNSEIFSSIKKLEKLFKNFDEYSSAGIFVKNGPAISTISKDIFGEWNLIRDKWNAEYDDIHLKKKAVVTEKYEDDRRKSFKKIGSFSLEQLQEYADADLSVVEKLKEIIIQKVDEIYKVYGSSEKLFDADFVLEKSLKKNDAVVAIMKDLLDSVKSFENYIKAFFGEGKETNRDESFYGDFVLAYDILLKVDHIYDAIRNYVTQKPYSKDKFKLYFQNPQFMGGWDKDKETDYRATILRYGSKYYLAIMDKKYAKCLQKIDKDDVNGNYEKINYKLLPGPNKMLPKVFFSKKWMAYYNPSEDIQKIYKNGTFKKGDMFNLNDCHKLIDFFKDSISRYPKWSNAYDFNFSETEKYKDIAGFYREVEEQGYKVSFESASKKEVDKLVEEGKLYMFQIYNKDFSDKSHGTPNLHTMYFKLLFDENNHGQIRLSGGAELFMRRASLKKEELVVHPANSPIANKNPDNPKKTTTLSYDVYKDKRFSEDQYELHIPIAINKCPKNIFKINTEVRVLLKHDDNPYVIGIDRGERNLLYIVVVDGKGNIVEQYSLNEIINNFNGIRIKTDYHSLLDKKEKERFEARQNWTSIENIKELKAGYISQVVHKICELVEKYDAVIALEDLNSGFKNSRVKVEKQVYQKFEKMLIDKLNYMVDKKSNPCATGGALKGYQITNKFESFKSMSTQNGFIFYIPAWLTSKIDPSTGFVNLLKTKYTSIADSKKFISSFDRIMYVPEEDLFEFALDYKNFSRTDADYIKKWKLYSYGNRIRIFAAAKKNNVFAWEEVCLTSAYKELFNKYGINYQQGDIRALLCEQSDKAFYSSFMALMSLMLQMRNSITGRTDVDFLISPVKNSDGIFYDSRNYEAQENAILPKNADANGAYNIARKVLWAIGQFKKAEDEKLDKVKIAISNKEWLEYAQTSVK

SEQ ID NO: 174 - protein, 1307 aa, Acidaminococcus sp. BV3L6
MTQFEGFTNLYQVSKTLRFELIPQGKTLKHIQEQGFIEEDKARNDHYKELKPIIDRIYKTYADQCLQLVQLDWENLSAAIDSYRKEKTEETRNALIEEQATYRNAIHDYFIGRTDNLTDAINKRHAEIYKGLFKAELFNGKVLKQLGTVTTTEHENALLRSFDKFTTYFSGFYENRKNVFSAEDISTAIPHRIVQDNFPKFKENCHIFTRLITAVPSLREHFENVKKAIGIFVSTSIEEVFSFPFYNQLLTQTQIDLYNQLLGGISREAGTEKIKGLNEVLNLAIQKNDETAHIIASLPHRFIPLFKQILSDRNTLSFILEEFKSDEEVIQSFCKYKTLLRNENVLETAEALFNELNSIDLTHIFISHKKLETISSALCDHWDTLRNALYERRISELTGKITKSAKEKVQRSLKHEDINLQEIISAAGKELSEAFKQKTSEILSHAHAALDQPLPTTLKKQEEKEILKSQLDSLLGLYHLLDWFAVDESNEVDPEFSARLTGIKLEMEPSLSFYNKARNYATKKPYSVEKFKLNFQMPTLASGWDVNKEKNNGAILFVKNGLYYLGIMPKQKGRYKALSFEPTEKTSEGFDKMYYDYFPDAAKMIPKCSTQLKAVTAHFQTHTTPILLSNNFIEPLEITKEIYDLNNPEKEPKKFQTAYAKKTGDQKGYREALCKWIDFTRDFLSKYTKTTSIDLSSLRPSSQYKDLGEYYAELNPLLYHISFQRIAEKEIMDAVETGKLYLFQIYNKDFAKGHHGKPNLHTLYWTGLFSPENLAKTSIKLNGQAELFYRPKSRMKRMAHRLGEKMLNKKLKDQKTPIPDTLYQELYDYVNHRLSHDLSDEARALLPNVITKEVSHEIIKDRRFTSDKFFFHVPITLNYQAANSPSKFNQRVNAYLKEHPETPIIGIDRGERNLIYITVIDSTGKILEQRSLNTIQQFDYQKKLDNREKERVAARQAWSVVGTIKDLKQGYLSQVIHEIVDLMIHYQAVVVLENLNFGFKSKRTGIAEKAVYQQFEKMLIDKLNCLVLKDYPAEKVGGVLNPYQLTDQFTSFAKMGTQSGFLFYVPAPYTSKIDPLTGFVDPFVWKTIKNHESRKHFLEGFDFLHYDVKTGDFILHFKMNRNLSFQRGLPGFMPAWDIVFEKNETQFDAKGTPFIAGKRIVPVIENHRFTGRYRDLYPANELIALLEEKGIVFRDGSNILPKLLENDDSHAIDTMVALIRSVLQMRNSNAATGEDYINSPVRDLNGVCFDSRFQNPEWPMDADANGAYHIALKGQLLLNHLKESKDLKLQNGISNQDWLAYIQELRN

SEQ ID NO: 175 - DNA, 28 bp, Leptotrichia shahii
ccaccccaatatcgaaggggactaaaac

SEQ ID NO: 176 - DNA, 36 bp, Leptotrichia wadei
gatttagactaccccaaaaacgaaggggactaaaac

SEQ ID NO: 177 - DNA, 36 bp, Listeria seeligeri
gtaagagactacctctatatgaaagaggactaaaac

SEQ ID NO: 178 - DNA, 35 bp, Lachnospiraceae bacterium MA2020
gtattgagaaaagccagatatagttggcaatagac

SEQ ID NO: 179 - DNA, 35 bp, Lachnospiraceae bacterium NK4A179
gttgatgagaagagcccaagatagagggcaataac

SEQ ID NO: 180 - DNA, 35 bp, Clostridium aminophilum DSM 10710
gtctattgccctctatatcgggctgttctccaaac

SEQ ID NO: 181 - DNA, 36 bp, Carnobacterium gallinarum DSM 4847
attaaagactacctctaaatgtaagaggactataac

SEQ ID NO: 182 - DNA, 36 bp, Carnobacterium gallinarum DSM 4847
aatataaactacctctaaatgtaagaggactataac

SEQ ID NO: 183 - DNA, 36 bp, Paludibacter propionicigenes WB4
cttgtggattatcccaaaattgaagggaactacaac

SEQ ID NO: 184 - DNA, 36 bp, Listeria weihenstephanensis FSL R9-0317
gatttagagtacctcaaaatagaagaggtctaaaac

SEQ ID NO: 185 - DNA, 36 bp, Listeriaceae bacterium FSL M6-0635
gatttagagtacctcaaaacaaaagaggactaaaac

SEQ ID NO: 186 - DNA, 36 bp, Leptotrichia wadei F0279
gatatagataaccccaaaaacgaagggatctaaaac

SEQ ID NO: 187 - DNA, 36 bp, Rhodobacter capsulatus SB 1003
gcctcacatcaccgccaagacgacggcggactgaac

SEQ ID NO: 188 - DNA, 36 bp, Rhodobacter capsulatus R121; identical to SEQ ID NO: 187

SEQ ID NO: 189 - DNA, 36 bp, Rhodobacter capsulatus DE442; identical to SEQ ID NO: 187

SEQ ID NO: 190 - protein, 1389 aa, Artificial Sequence
  Cas13a
MGNLFGHKRWYEVRDKKDFKIKRKVKVKRNYDGNKYILNINENNNKEKIDNNKFIRKYINYKKNDNILKEFTRKFHAGNILFKLKGKEGIIRIENNDDFLETEEVVLYIEAYGKSEKLKALGITKKKIIDEAIRQGITKDDKKIEIKRQENEEEIEIDIRDEYTNKTLNDCSIILRIIENDELETKKSIYEIFKNINMSLYKIIEKIIENETEKVFENRYYEEHLREKLLKDDKIDVILTNFMEIREKIKSNLEILGFVKFYLNVGGDKKKSKNKKMLVEKILNINVDLTVEDIADFVIKELEFWNITKRIEKVKKVNNEFLEKRRNRTYIKSYVLLDKHEKFKIERENKKDKIVKFFVENIKNNSIKEKIEKILAEFKIDELIKKLEKELKKGNCDTEIFGIFKKHYKVNFDSKKFSKKSDEEKELYKIIYRYLKGRIEKILVNEQKVRLKKMEKIEIEKILNESILSEKILKRVKQYTLEHIMYLGKLRHNDIDMTTVNTDDFSRLHAKEELDLELITFFASTNMELNKIFSRENINNDENIDFFGGDREKNYVLDKKILNSKIKIIRDLDFIDNKNNITNNFIRKFTKIGTNERNRILHAISKERDLQGTQDDYNKVINIIQNLKISDEEVSKALNLDVVFKDKKNIITKINDIKISEENNNDIKYLPSFSKVLPEILNLYRNNPKNEPFDTIETEKIVLNALIYVNKELYKKLILEDDLEENESKNIFLQELKKTLGNIDEIDENIIENYYKNAQISASKGNNKAIKKYQKKVIECYIGYLRKNYEELFDFSDFKMNIQEIKKQIKDINDNKTYERITVKTSDKTIVINDDFEYIISIFALLNSNAVINKIRNRFFATSVWLNTSEYQNIIDILDEIMQLNTLRNECITENWNLNLEEFIQKMKEIEKDFDDFKIQTKKEIFNNYYEDIKNNILTEFKDDINGCDVLEKKLEKIVIFDDETKFEIDKKSNILQDEQRKLSNINKKDLKKKVDQYIKDKDQEIKSKILCRIIFNSDFLKKYKKEIDNLIEDMESENENKFQEIYYPKERKNELYIYKKNLFLNIGNPNFDKIYGLISNDIKMADAKFLFNIDGKNIRKNKISEIDAILKNLNDKLNGYSKEYKEKYIKKLKENDDFFAKNIQNKNYKSFEKDYNRVSEYKKIRDLVEFNYLNKIESYLIDINWKLAIQMARFERDMHYIVNGLRELGIIKLSGYNTGISRAYPKRNGSDGFYTTTAYYKFFDEESYKKFEKICYGFGIDLSENSEINKPENESIRNYISHFYIVRNPFADYSIAEQIDRVSNLLSYSTRYNNSTYASVFEVFKKDVNLDYDELKKKFKLIGNNDILERLMKPKKVSVLELESYNSDYIKNLIIELLTKIENTNDTL

SEQ ID NO: 191 - protein, 1221 aa, Bergeyella zoohelcum ATCC 43767
MENKTSLGNNIYYNPFKPQDKSYFAGYFNAAMENTDSVFRELGKRLKGKEYTSENFFDAIFKENISLVEYERYVKLLSDYFPMARLLDKKEVPIKERKENFKKNFKGIIKAVRDLRNFYTHKEHGEVEITDEIFGVLDEMLKSTVLTVKKKKVKTDKTKEILKKSIEKQLDILCQKKLEYLRDTARKIEEKRRNQRERGEKELVAPFKYSDKRDDLIAAIYNDAFDVYIDKKKDSLKESSKAKYNTKSDPQQEEGDLKIPISKNGVVFLLSLFLTKQEIHAFKSKIAGFKATVIDEATVSEATVSHGKNSICFMATHEIFSHLAYKKLKRKVRTAEINYGEAENAEQLSVYAKETLMMQMLDELSKVPDVVYQNLSEDVQKTFIEDWNEYLKENNGDVGTMEEEQVIHPVIRKRYEDKFNYFAIRFLDEFAQFPTLRFQVHLGNYLHDSRPKENLISDRRIKEKITVFGRLSELEHKKALFIKNTETNEDREHYWEIFPNPNYDFPKENISVNDKDFPIAGSILDREKQPVAGKIGIKVKLLNQQYVSEVDKAVKAHQLKQRKASKPSIQNIIEEIVPINESNPKEAIVFGGQPTAYLSMNDIHSILYEFFDKWEKKKEKLEKKGEKELRKEIGKELEKKIVGKIQAQIQQIIDKDTNAKILKPYQDGNSTAIDKEKLIKDLKQEQNILQKLKDEQTVREKEYNDFIAYQDKNREINKVRDRNHKQYLKDNLKRKYPEAPARKEVLYYREKGKVAVWLANDIKRFMPTDFKNEWKGEQHSLLQKSLAYYEQCKEELKNLLPEKVFQHLPFKLGGYFQQKYLYQFYTCYLDKRLEYISGLVQQAENFKSENKVFKKVENECFKFLKKQNYTHKELDARVQSILGYPIFLERGFMDEKPTIIKGKTFKGNEALFADWFRYYKEYQNFQTFYDTENYPLVELEKKQADRKRKTKIYQQKKNDVFTLLMAKHIFKSVFKQDSIDQFSLEDLYQSREERLGNQERARQTGERNTNYIWNKTVDLKLCDGKITVENVKLKNVGDFIKYEYDQRVQAFLKYEENIEWQAFLIKESKEEENYPYVVEREIEQYEKVRREELLKEVHLIEEYILEKVKDKEILKKGDNQNFKYYILNGLLKQLKNEDVESYKVFNLNTEPEDVNINQLKQEATDLEQKAFVLTYIRNKFAHNQLPKKEFWDYCQEKYGKEKTYAEYFAEVFKKEKEALIK

SEQ ID NO: 192 - DNA, 2101 bp, Homo sapiens
tcctggtgtggtactacaaaggtcctggaagtcctcctgccttacttcgagtccgccacaggccggagctacttctagaacagttctgactgccttcccaggggagggggcgactgcaggtcaccctgcctcagtgcacgctgcgcatctgagttgcaggccgggcggcagtcacccgagtcagcggtcccgattcttcgtgggtgttacctggagtttccattgcacgggtgctggaggccaacccgccctagtcccaccagctgggtcctgccacaagaaaaggacccagagggcctagacagatatcccctgaacttttttctgacccgcagaaacagtgagcatcacctgcaggggttccgccagcctctggctttgcttcctgcccggcagcctccagcaagttttcccgaatgctctccaggagtgcagtgggcgccggcggacttatttagggtcgctgctgccaagcgtcagagagcgaaccggaggcccggggctgggggctgtggtgagaggcgcccctttctttcttgccatcgcccctacccccagctccttcctagcctattctgccaaagctgggatcttctcctggaacccgggagcaagaagagctggcagtgccgactcccagaacccggctttccttcagaaaagatggataggccgagtttgtgtgcgtggacgtgcatgtgtcggtgtgcatgtttaggggacagtatgtacccccaattgcataaaacacgcctgtttttggaaacagaaacacacggggttgctttcgggtatgggtgtggttagtttgggttcctgcgcacgctcccttttcggagcagctggtgagggcgcatctgttccagtgagtgctggctgtctgatggactgtctgtgaatgcagaaggcagagcgtgtggtgggggtcctgccatgtgagtgatgatgcgcgcactggctggtctgtagtcgcgagtggaacttgtgtgaaaattctcaggctgactctcgcgctgcagcacctgctcccctccgtgggtggcagctggaccccagcgcgctcagctctcaggcgcttcagcgaagtggggtaggggtgtggaacgagagagatagagacccgggcatagaccatctccgccaggcagcttggcaaacaggtggcagagttgcagggcagctgtgtaagccaacttcggcgcagcagtggagggtcctggcttggcgtgggggatgctggacccgcggtcgaggatttggggatataggggaagagggaggaggtggatgctgagccttgtatgcaggctatgtcagtttagccctctccccaacctctcttcggctcctgcccgtcccagaggagtgaggtggagaagggctggctgccagactggcaccaaaacagccttctttgggtgcccaggttgccagggctcgaggggtcggaggatatccagggaagcaccccaggtggtccaaaaagatcaaattttgaggacccctccctccccttttccctccccccccctccttccctgccgtgggctctttcagctgtggtccctttagaacccaggactactactgctcaacctcgctgggggttcgggtggctggattcgggtccctcactggcgtgacaggagggagtgcgaggcaggaatttaggagccaaggaggtgagagcagctctggcccctcactgtaggtgacgccaaactctcctcgacttgccccgactcttagttgaaaaatctctgtcctctcccaggctctccagcttcccaagcaatgacctcaatgaaaaaaatgacagcggggcggactgcccccgctccagagtaccagtgccggcagtgcgagctatgacgcaatcggagctcggtcggtcctttgattggctagtcctggccactttggattggccgcgcgggctggtggggaccccccccctccagctatctctgtaataagagcggggtctccgcggggaaggcgcccacagcaggtgtggtgttcatcccgggtcgaccggccgctcgcgctgccctgaaactctagtcgccaggtgaggaacttcccattccccattccgctc

SEQ ID NO: 193 - DNA, 2101 bp, Homo sapiens
taaatagaatattatcagcatgcagaagtcacctctgggatccctttctgtcataatccacagctcaatataaccactgtcttcacttttaacatcacagatatgctttgactatttttgaagtttatgtaaatggaatcatatagtatgtacccatttgcggccagcttctttcactcaatatcctatttgtaagattcactcatcttgttgagtgtaaatgagttcatgcattcttattactatgttgtatgttacacagtttatctctcttctgctgatggacatttgggttgttttctttttggccgtcataaagagatacattataaacatttttcaacatcttttggtgaatatgtgtatacatctctgttgggtgcacacttaggggtggaattgctgggtcataggatacatgttaatttagcttttctagataatgccaagcaggtttttaaagtggttgtaaaaagttcattttgacgagcagtatggtcaggccctttaattttagtcattctgggtggtatgaagttagatcacattgaaatatcaatttgcatttttgggatggttaataaattgagatattttccatatgtttattggcttttttgagaaatgcctgtttgtcctctcttgaggacagttgaaatattctgcctgtttttaattggattttctgccttattctggctgatccgtaggtgttctttatatatctgtaaacaaaccttttttggatgtatgtgttgcaattatgttttctcactctgcggtttgccttttcactcgtggtgtcttttcatgaacagaagctcttaattttaatcttgtccaatgatgagttttttttctttatattagtactacatgtgtttaagacatcgtctttgtctaccccaaggtaatgaagatttttttggacattttctttggatcgtgttattggtttactttttacctttaaaatccatctggaggccgggcgcggtggctcacacctgtaatcccagcactttgggaggccgaggtgggtggatcacctgaggtcaggagttcgagaccagcctgaccaaaatggtgaacccgtctctactaaaaatacaaaaattagccgggcatagtggcgtgcgcctgtaatcccagctacttgggaagctgaggcaagataattgcttgaacccgggaggcggaggttgcagtgagccaagatcatgccgttgcacaacagcttgggcaacaagaccgaaactctgtctcgaaaagaaaaattccatctggaattgactggggatggggggattcagttgatccagcatcatttactggaaagagagagctaatctgacccccaatacagcacagcagcacctgacataaatcaagtgaccacatattgtaaatctgtttttggactttattccattggtcagtttgtctatccttctactatttctatgactttataatggatcttgatataagatagtgttaagtcttttccagtgggctccaatttttcaccccaccaaatcatctagtgctgaagtgccaccgccaactcgcactttgctttcaatacgtccatacgagtgcaattgatttgcctgttcccgtggatggttcatttgtggttacctggggctttgtctcatcaaagcccttcacattgaaagccagccaggtgtctgcagacgagcaaagcagatctgttgggtaattaaataacgcggggaaggggaaggagtggattcgacgaggctgtctctggagagagcttcagaaaggaagtgatcgagctatacttgaggactggctccttggggagatacgaagagagccaaactctaaaatccgggcagaggagggcctggctaggtcaccgaatgtaaatgtctcggggggttccgcaaggcagcgcgaatcggctcgccggggtggggccgcggagccgcaaatcaccagttgagggccggagtgcgcgccgccggctcagagctgcgcctgctgctggccgggcgggggacggggccgggaccggagccggagctgcggggcgcaccggctagacgcgcgcgggattctcggcgggcac

SEQ ID NO: 194 - DNA, 2101 bp, Homo sapiens
ccacattcctcgccttttatgcacctcacagtgtctatgcaaatgaacagtgtgattttaaatttgaggaagtttcaataagagtgagatctaagaggatctttaatataggggcatttttagagagctaaaaaccaaataggtctcagctttctcagggtgacatataatttagatttgacttggaactacagaaggaatatggggcaaaggacatgagaaacattgcagaggtcagtgccatatggagcttccacctcagctctcgaagtaaaggcaaccagcccaggctgggagccagtcagcagcagggtctcaatctccatccactaccttcccctctggggcagggagggtgttgcagggaggaggccactcttggagacctccagatccctgcctctgtgcagtctaacagaaggggcccccacagtggccatgaatctctttgttctgcaaggaagggggtgtcattgggcctcctgggtccctcagcatctgcgtggccacacaacgcggttttgttcaacacgttacatttctgcttaattaatgttcatttttggtccccagcaaagtccaatctgtttttcgttttctttcttttctttccaggcaggcattgccagggctaatcatctataaaagggcttactttcttaccttcacgctaagcaagaccatccaagggcagtgttagagggcacctgagaacgcaggaggggtgtgttacctggtggcctgtttcttcctcctatgggcagcccttctacaggaagcagaagcctcaggggcgatggtagaaatgaggaggaggggatggagctgaggtagcaggggaggggtcgtaagagcagaggggagggtcttgctttgttcgccatccaataatcagcaggtttcgggttggggtgaactactggggaggagcgccccagggcttctctcagatggaggagggacaggtcacccagagtgaaggaagttgtgagctctgttagaggaaaacagccaggacttagtcaggagaggctttgtttggaaggattgttgtaaggcagggagaggaatgatggcagcaagaggaccccgtgaccataggtctgcaagcacttcaaacagaaaaggcccttcttttatccagtaagggggagccactggggccagcagagtctttggaggggaccctggacaaacccgggaaaatggccagtggggttgagcaggacacaggtcctgctgtgtctagctggttccccagagagatgataaggggtgcgctccagcttctcaggctcactcaggcgtgaggacgtggagctcagggctctgcaggaaggagcgacccaggtgaggtgtggtcaagatagagcagagctgggcagcgggcagtggagcctcgtgggcagcctgggggtggggaggcacagtgcactgggaagtggagaaagtgtgagtccatcaggctggctgagaattgatcacgaacctattgtctgtaaaacttttgttatttcctgagacgtggttcacagcaacccaggtgcgaacagccttgtgattctagggttcttttctattttttaagcacttgcatctacaaataaatttctgagtgacttgtcgtcagctgctttccttgatatgtctaaagacagggcagtgacccgcatcgtcacccagagattctgtctctgtgccacatgaagattaggtgcccgcttttgattgaggagctcctctgttgctctcaaagtatcttgtaataatagctgagatgcatggagaaccacctctccttcaggcgctgctcctcggcttccgtggacgggcatggctatttctcggaaccctctgaggttagagctgtcatggtctttcttctgaaagaggaaaccgaggcttgctggggctcagtggcccttctgtggctgcacagctttcggggtggggccaggactgactgactccacacaaaagtgctcccggcccatgtctttaactcacacggcctcttgcaaacgttcccaaatcttcccagtcggcttgcagagactccttgctcccaggagataaccaggtaaaggagtatgaaagtttg

SEQ ID NO: 195 - DNA, 2101 bp, Homo sapiens
agtgtatttgtatttgaaagaaaccgtggagtggaaacacctaaaacgtgcttgttcagttaacctcagtttgctgagctgcttggagcatggggttgtaatcaaagattgtcttcttcgcagcagacaatgttctgggagaaatagtcctccttagtgctgaagttgcagactctaaccaagggggtggcagcaagtatccccggtctctgtaggggcttgagtcaacgcctgcactgtgcagagaggatgagggcagagaattggatgccgctggaggggcgtgttgtccttctacatgtcatgcaggcagcgcggttctatactcggagcctctgctcagcgtgtcttcacctaagaaccccataattcaggttccatccttgttccctactccagtgctctgcaagtgagccctttggtttagagatgggttgggcttctttatgggagaggaagggagccctggagctgcagaggggagcaggcattctctctggggtgctgtctcctttcttccctaaattggagggagataatccatggaaaggagttaatgatttctttgctcttcaaacttggtttggaaggatctctcagtcaaaaagaacctttcggatgtctcttgatatttcacattaatggacttttcataaggaccacatgatgggagagcagtgagaagtttggggatggccaaagctgggttgtcatttgagctctgttactaacccagactggacaatgacgatgtcacttactctctcggaacttcttttcttttcttcttttcttttctttttttcttttttctcttctcttctcttctcttctcttctcttctcttcttttcttttcatttcttttctttctttcctttttctcttttttggagtctcactctgttgcccaggctagagtgcagtggcgccatctcggctcactgcaacctctgcctcctgggttcaagcaattgtcctgcctcagcctcccaaatagctgggactacaagcgcctgccaccatgcctggctaatttttatatttttagtagagatttagtaggggtttcaccatgttggccaggctggtctccaactcctgaccttgtgatctgcctgccttagcctcccgaagtgctgagattacaggcataagccaccgtgcccagcctgtttctttcatctgtaaaatgggaccacaatttcacctaataaaagaagacatctttctatttaaaagggcttagggtgttgatgtttgtgataaaggagagaatgtatattgaagtgttttgaaatgtgcaaagctttctagaaacagaagttcttactcaagtattttcccgaagctttggcaagataaccatttttattaccccgtctgtgcctagaatgggcctataagcgccacaatcagaatcattagatatagaaattaagagaaatgtagcctccttttttttgccggtgaacagagctttggttaacagaaaaccaaggcgattttaattgctggtttttctatttgaagggggaagttattagtagaagtctcaattcagaaacttcaagaagaaatgggagggtgtggtgagggtaagcgggggactgcatttcctgttttcctttcagatggtgttggaaaacattgcaggaaaaccatggatacccacgaagaaattccaaaatttattctttttgacgccaagggcccagcccaaaaggtgacgagtaggagtggtcaatttttttttttaagagttggggcttgcaggagtccagctaaacgcttgtagggtgaagacagaattcagagggtgacatcagcctgagcgggggccagaagaaacagagtggaggagtctggtttcatttacagttttgggtcagttctgcagtgaggagggggagaggaggggtccgggagggaggaggaggaggaggaggagctggaggaagccctgactggtatccctggccccagtccagtttggagctcagtcttccaccaaaggccgttcagttctcctgggctccagcctcctgcaaggactgcaagagttttcctccgcagctctgagtctccacttttttggtgga

SEQ ID NO: 196 - DNA, 2101 bp, Homo sapiens
atggaatcttttttttttttttttttgagtgtcaccaaggctagagggcagtggtgtgatcatggctcattgcagcctcaacctcctgggctcaagcgatccgcctatctcagcctcctgagtagctgggactacaggtgtgtgccaccatgcccagctaatttttgaattttttgtagagacgaggtttcaccatgttgcccaggctagtctcaaattcctgggctcaaaggattctcccatcttgacctcccaaagtgctgggattacaggcatgagcaaccacgccctgccaagtatagagtcttgaacaaggaaatgcatatcgtcctatattttttcctagtcagataatatctagaccattaaccagaaatcacccagaggtcaaaaaacagggcgtcaaaggacccagaaaccaagtctgcaaataacgactgaagacactgtggaagtgtgtttgggagacaacaagactctcaggatgtgctggctgtcttcagaggatgcttattggaagaggagtcagacagtccagacagaaggcacagccaggacctctggagaggagttacaggaagacatattttgactcatcataaggaataagtttctaatcatgaaaccatcctccactgaaacatgatctattgaaaggagcaaatgtctcaccttcattgatgttcgtattcattgattctgggtgatcatctgataaggatgcagtgacgagaatcttgcatttgctgggggtgggggtgtggttgaggatagtctggtttatattccaaagttcctttcaattcctctatgattctatacgctgtactccttcctgatcaatgtccctagccagggtggccaaggctaagtcaagtatgctaagggattggaggggcagggatattgagaatagggtgaatggaaggatgaggagttcccagcaagcttgggacacaggaaaccttggggcagcttcctcctggaggtttcaggactgtacgtgctggagaagaagtgtgatgccttgtcctgaaagccgtcttctttgaaagcagcttctaaaggcagtgaatggagaagagcgaggaaacgaccccaataccaccaacagaggctggaaactcctcaggctgtttaatcctaagaatgatgcatctgttggccgggcacggtggttcacatctgtaatcctagcactttgggaggctgaggcaggcggatcaccttaggtcaggaattcaagaccagactgaccaacatggagaaaccccatttctactaaaaatacaaaattagccgggcgtggtagcgcatgcctgtaatcccagctactcgggaggctgaagcaggagaattgcttgaatccgggaggtggagtttgtggtgagctgagatctcgccattgcactccagcctgggcaacgagagcaaaattctgtctcaaaataaataaataaaaatacaaaattagccgggcgtggtggtgcatgcctgtaatcccagatgctcgggaggctgaggcaggagaatcgcttgaacctgggaggtggaggttgtggtgagccaagatcatgccattgcactccagcctgggcaagaagtgcaaaactctgtctcaaaaaaaaaaaaaaaaaaaaaaaaaaagaatgatgcatctgttggggatgcagtggggtaagcatcttcagtaagcaaggtgtgaagaggggaaagagggaaggtgaatatggaggagagggtgaaggagggcactggaaagggtagtaggatcccagcaaagggcgatttggctgaaagggagcgtgataacaagggtgggggtggggccaagaagcagccaccatgtgtgggtgcctctgtgcgtgcagtcatctttctcacatcattgtggatcaagagaggaaatgcccacttctggaagaaaaagccacaaaatgagacttggaagggaaattgatcaacatctacaaaacggcttcttaaaggaagcggccctcagacaggacagagttgagggaaaggacagaggttatgagtgcctgcaagagtggcagcctggagtagagaaaacactaaaggtggagtcaaaagacctgag

SEQ ID NO: 197-203 - skipped (7 entries)

SEQ ID NO: 204 - protein, 137 aa, Artificial Sequence
  RNAseK
MGWLRPGPRPLCPPARASWAFSHRFPSPLAPRRSPTPFFMASLLCCGPKLAACGIVLSAWGVIMLIMLGIFFNVHSAVLIEDVPFTEKDFENGPQNIYNLYEQVSYNCFIAAGLYLLLGGFSFCQVRLNKRKEYMVR

SEQ ID NO: 205 - protein, 1245 aa, Artificial Sequence
  TALEN
MRIGKSSGWLNESVSLEYEHVSPPTRPRDTRRRPRAAGDGGLAHLHRRLAVGYAEDTPRTEARSPAPRRPLPVAPASAPPAPSLVPEPPMPVSLPAVSSPRFSAGSSAAITDPFPSLPPTPVLYAMARELEALSDATWQPAVPLPAEPPTDARRGNTVFDEASASSPVIASACPQAFASPPRAPRSARARRARTGGDAWPAPTFLSRPSSSRIGRDVFGKLVALGYSREQIRKLKQESLSEIAKYHTTLTGQGFTHADICRISRRRQSLRVVARNYPELAAALPELTRAHIVDIARQRSGDLALQALLPVATALTAAPLRLSASQIATVAQYGERPAIQALYRLRRKLTRAPLHLTPQQVVAIASNTGGKRALEAVCVQLPVLRAAPYRLSTEQVVAIASNKGGKQALEAVKAHLLDLLGAPYVLDTEQVVAIASHNGGKQALEAVKADLLDLRGAPYALSTEQVVAIASHNGGKQALEAVKADLLELRGAPYALSTEQVVAIASHNGGKQALEAVKAHLLDLRGVPYALSTEQVVAIASHNGGKQALEAVKAQLLDLRGAPYALSTAQVVAIASNGGGKQALEGIGEQLLKLRTAPYGLSTEQVVAIASHDGGKQALEAVGAQLVALRAAPYALSTEQVVAIASNKGGKQALEAVKAQLLELRGAPYALSTAQVVAIASHDGGNQALEAVGTQLVALRAAPYALSTEQVVAIASHDGGKQALEAVGAQLVALRAAPYALNTEQVVAIASSHGGKQALEAVRALFPDLRAAPYALSTAQLVAIASNPGGKQALEAVRALFRELRAAPYALSTEQVVAIASNHGGKQALEAVRALFRGLRAAPYGLSTAQVVAIASSNGGKQALEAVWALLPVLRATPYDLNTAQIVAIASHDGGKPALEAVWAKLPVLRGAPYALSTAQVVAIACISGQQALEAIEAHMPTLRQASHSLSPERVAAIACIGGRSAVEAVRQGLPVKAIRRIRREKAPVAGPPPASLGPTPQELVAVLHFFRAHQQPRQAFVDALAAFQATRPALLRLLSSVGVTEIEALGGTIPDATERWQRLLGRLGFRPATGAAAPSPDSLQGFAQSLERTLGSPGMAGQSACSPHRKRPAETAIAPRSIRRSPNNAGQPSEPWPDQLAWLQRRKRTARSHIRADSAASVPANLHLGTRAQFTPDRLRAEPGPIMQAHTSPASVSFGSHVAFEPGLPDPGTPTSADLASFEAEPFGVGPLDFHLDWLLQILET

SEQ ID NO: 206 - protein, 1373 aa, Artificial Sequence
  TALEN
MDPIRSRTPSPARELLPGPQPDRVQPTADRGGAPPAGGPLDGLPARRTMSRTRLPSPPAPSPAFSAGSFSDLLRQFDPSLLDTSLLDSMPAVGTPHTAAAPAECDEVQSGLRAADDPPPTVRVAVTAARPPRAKPAPRRRAAQPSDASPAAQVDLRTLGYSQQQQEKIKPKVGSTVAQHHEALVGHGFTHAHIVALSRHPAALGTVAVKYQDMIAALPEATHEDIVGVGKQWSGARALEALLTVAGELRGPPLQLDTGQLVKIAKRGGVTAVEAVHASRNALTGAPLNLTPAQVVAIASNNGGKQALETVQRLLPVLCQAHGLTPAQVVAIASHDGGKQALETMQRLLPVLCQAHGLPPDQVVAIASNIGGKQALETVQRLLPVLCQAHGLTPDQVVAIASHGGGKQALETVQRLLPVLCQAHGLTPDQVVAIASHDGGKQALETVQRLLPVLCQAHGLTPDQVVAIASNGGGKQALETVQRLLPVLCQAHGLTPDQVVAIASNGGKQALETVQRLLPVLCQAHGLTPDQVVAIASHDGGKQALETVQRLLPVLCQTHGLTPAQVVAIASHDGGKQALETVQQLLPVLCQAHGLTPDQVVAIASNIGGKQALATVQRLLPVLCQAHGLTPDQVVAIASNGGGKQALETVQRLLPVLCQAHGLTPDQVVAIASNGGGKQALETVQRLLPVLCQAHGLTQVQVVAIASNIGGKQALETVQRLLPVLCQAHGLTPAQVVAIASHDGGKQALETVQRLLPVLCQAHGLTPDQVVAIASNGGGKQALETVQRLLPVLCQAHGLTQEQVVAIASNNGGKQALETVQRLLPVLCQAHGLTPDQVVAIASNGGGKQALETVQRLLPVLCQAHGLTPAQVVAIASNIGGKQALETVQRLLPVLCQDHGLTLAQVVAIASNIGGKQALETVQRLLPVLCQAHGLTQDQVVAIASNIGGKQALETVQRLLPVLCQDHGLTPDQVVAIASNIGGKQALETVQRLLPVLCQDHGLTLDQVVAIASNGGKQALETVQRLLPVLCQDHGLTPDQVVAIASNSGGKQALETVQRLLPVLCQDHGLTPNQVVAIASNGGKQALESIVAQLSRPDPALAALTNDHLVALACLGGRPAMDAVKKGLPHAPELIRRVNRRIGERTSHRVADYAQVVRVLEFFQCHSHPAYAFDEAMTQFGMSRNGLVQLFRRVGVTELEARGGTLPPASQRWDRILQASGMKRAKPSPTSAQTPDQASLHAFADSLERDLDAPSPMHEGDQTGASSRKRSRSDRAVTGPSAQHSFEVRVPEQRDALHLPLSWRVKRPRTRIGGGLPDPGTPIAADLAASSTVMWEQDAAPFAGAADDFPAFNEEELAWLMELLPQSGSVGGTI

SEQ ID NO: 207 - protein, 1978 aa, Artificial Sequence; identical to SEQ ID NO: 52
  ZNF638

SEQ ID NO: 208 - protein, 128 aa, Artificial Sequence; identical to SEQ ID NO: 121
  Rnase1 (R39D, N67D, N88A, G89D, R91D, H119N, K41R, D121E)

SEQ ID NO: 209 - protein, 254 aa, Mus musculus
PGSVFPCPSCGPRGPDQRRPPPPPPPVSPLPPPSQPLPLPPLTPLKKKDHNTNLWLPVVFFMVLVALVGMGLGMYQLFHLQKELAELREFTNQSLKVSSFEKQIANPSTPSEKKEPRSVAHLTGNPHSRSIPLEWEDTYGTALISGVKYKKGGLVINETGLYFVYSKVYFRGQSCNNQPLNHKVYMRNSKYPEDLVLMEEKRLNYCTTGQIWAHSSYLGAVFNLTSADHLYVNISQLSLINFEESKTFFGLYKL

SEQ ID NO: 210 - protein, 281 aa, Homo sapiens
MQQPFNYPYPQIYWVDSSASSPWAPPGTVLPCPTSVPRRPGQRRPPPPPPPPPLPPPPPPPPLPPLPLPPLKKRGNHSTGLCLLVMFFMVLVALVGLGLGMFQLFHLQKELAELRESTSQMHTASSLEKQIGHPSPPPEKKELRKVAHLTGKSNSRSMPLEWEDTYGIVLLSGVKYKKGGLVINETGLYFVYSKVYFRGQSCNNLPLSHKVYMRNSKYPQDLVMMEGKMMSYCTTGQMWARSSYLGAVFNLTSADHLYVNVSELSLVNFEESQTFFGLYKL

SEQ ID NO: 211 - protein, 736 aa, Adeno-associated virus
MAADGYLPDWLEDNLSEGIREWWALKPGAPQPKANQQHQDNARGLVLPGYKYLGPGNGLDKGEPVNAADAAALEHDKAYDQQLKAGDNPYLKYNHADAEFQERLKEDTSFGGNLGRAVFQAKKRLLEPLGLVEEAAKTAPGKKRPVEQSPQEPDSSAGIGKSGAQPAKKRLNFGQTGDTESVPDPQPIGEPPAAPSGVGSLTMASGGGAPVADNNEGADGVGSSSGNWHCDSQWLGDRVITTSTRTWALPTYNNHLYKQISNSTSGGSSNDNAYFGYSTPWGYFDFNRFHCHFSPRDWQRLINNNWGFRPKRLNFKLFNIQVKEVTDNNGVKTIANNLTSTVQVFTDSDYQLPYVLGSAHEGCLPPFPADVFMIPQYGYLTLNDGSQAVGRSSFYCLEYFPSQMLRTGNNFQFSYEFENVPFHSSYAHSQSLDRLMNPLIDQYLYYLSKTINGSGQNQQTLKFSVAGPSNMAVQGRNYIPGPSYRQQRVSTTVTQNNNSEFAWPGASSWALNGRNSLMNPGPAMASHKEGEDRFFPLSGSLIFGKQGTGRDNVDADKVMITNEEEIKTTNPVATESYGQVATNHQSAQAQAQTGWVQNQGILPGMVWQDRDVYLQGPIWAKIPHTDGNFHPSPLMGGFGMKHPPPQILIKNTPVPADPPTAFNKDKLNSFITQYSTGQVSVEIEWELQKENSKRWNPEIQYTSNYYKSNNVEFAVNTEGVYSEPRPIGTRYLTRNL

SEQ ID NO: 212 - protein, 520 aa, Adeno-associated virus
AKTAPGKKRPVEQSPQEPDSSAGIGKSGAQPAKKRLNFGQTGDTESVPDPQPIGEPPAAPSGVGSLTMASWHCDSQWLGDRVITTSTRTWALPTYNNHLYKQISNSTSGGSSNDNAYFGYSTPWGYFDFNRFWHCDSQWLGDRVITTSTRTWALPTYNNHLYKQISNSTSGGSSNDNAYFGYSTPWGYFDFNRFDVFMIPQYGYLTLNDGSQAVGRSSFYCLEYFPSQMLRTGNNFQFSYEFENVPFHSSYAHSQSLDRLMNPLIDQYLYYLSKTINGSGQNQQTLKFSVAGPSNMAVQGRNYIPGPSYRQQRVSTTVTQNNNSEFAWPGASSWALNGRNSLMNPGPAMASHKEGEDRFFPLSGSLIFGKQGTGRDNVDADKVMITNEEEIKTTNPVATESYGQVATNHQSAQAQAQTGWVQNQGILPGMVWIKNTPVPADPPTAFNKDKLNSFITQYSTGQVSVEIEWELQKENSKRWNPEIQYTSNYYKSNNVEFAVNTEGVYSEPRPIGTRYLTRNL

SEQ ID NO: 213 - protein, 726 aa, Adeno-associated virus
  misc_feature (165)..(165): Xaa can be any naturally occurring amino acid
  misc_feature (201)..(201): Xaa can be any naturally occurring amino acid
  misc_feature (261)..(261): Xaa can be any naturally occurring amino acid
  misc_feature (306)..(306): Xaa can be any naturally occurring amino acid
  misc_feature (406)..(406): Xaa can be any naturally occurring amino acid
  misc_feature (454)..(454): Xaa can be any naturally occurring amino acid
  misc_feature (486)..(486): Xaa can be any naturally occurring amino acid
  misc_feature (554)..(554): Xaa can be any naturally occurring amino acid
  misc_feature (568)..(568): Xaa can be any naturally occurring amino acid
  misc_feature (579)..(579): Xaa can be any naturally occurring amino acid
  misc_feature (600)..(600): Xaa can be any naturally occurring amino acid
AADGYLPDWLEDNLSEGIREWDLKPGAPKPKANQQKQDDGRGLVLPGYYLGPFNGLDKGEPVNAADAAALEHDKAYDQQLKAGDNPYLRYNHADAEFQERLQEDTSFGGNLGRAVFQAKKRVLEPLGLVEEGAKTAPGKKRPVEQSPQEPDSSSGIGKKGQQPAXKRLNFGQTGDSESVPDPQPLGEPPAAPSGVGSNTMXAGGGAPADNNEGADGVGNASGNWHCDSTWLGDRVITTSTRTALPTYNNHLYKQISSQSGXSTNDNTYFGYSTPWGYFDFNRFHCHFSPRDWQRLINNNWGFRPKXLNFKLFNIQVKEVTTNDGTTTIANNLTSTVQVFTDSEYQLPYVLGSAHQGCLPPFPADVFMIPQYGYLTLNNGSQAVGRSSFYCLEYFPSQMLRTGNNFXFSYTFEDVPFHSSYAHSQSLDRLNPLIDQYLYYLSRTQTTSGTAGNRXLQFSQAGPSSANQAKNWLPGPCYRQQRVSKTXNQNNNSNFAWTGATKYHLNGRDSLVNPGPAMATHKDDEDKFFPMSGVLIFGKQGAGNSNVDLDNVITXEEEIKTTNPVATEXYGTVATNLQSXNTAPATGTVNSQGALPGVWQXRDVYLQGPIWAKIPHTDGHFHPSPLMGGFGLKHPPPQILIKNTPVPANPPTTFSPAKFASFITQYSTGQVSVEIEELQKENSKRWNPEIQYTSNYNKSTNVDFAVDTNGVYSEPRPIGTRYLTRNL

SEQ ID NO: 214 - protein, 742 aa, Adeno-associated virus
MAADGYLPDWLEDNLSEGIREWWALKPGAPQPKANQQHQDNGRGLVLPGYKYLGPFNGLDKGEPVNEADAAALEHDKAYDKQLEQGDNPYLKYNHADAEFQQRLATDTSFGGNLGRAVFQAKKRILEPLGLVEEGVKTAPGKKRPLEKTPNRPTNPDSGKAPAKKKQKDGEPADSARRTLDFEDSGAGDGPPEGSSSGEMSHDAEMRAAPGGNAVEAGQGADGVGNASGDWHCDSTWSEGRVTTTSTRTWVLPTYNNHLYLRIGTTANSNTYNGFSTPWGYFDFNRFHCHFSPRDWQRLINNNWGLRPKSMRVKIFNIQVKEVTTSNGETTVANNLTSTVQIFADSTYELPYVMDAGQEGSFPPFPNDVFMVPQYGYCGVVTGKNQNQTDRNAFYCLEYFPSQMLRTGNNFEVSYQFEKVPFHSMYAHSQSLDRMMNPLLDQYLWHLQSTTTGNSLNQGTATTTYGKITTGDFAYYRKNWLPGACIKQQKFSKNANQNYKIPASGGDALLKYDTHTTLNGRWSNMAPGPPMATAGAGDSDFSNSQLIFAGPNPSGNTTTSSNNLLFTSEEEIATTNPRDTDMFGQIADNNQNATTAPHIANLDAMGIVPGMVWQNRDIYYQGPIWAKVPHTDGHFHPSPLMGGFGLKHPPPQIFIKNTPVPANPNTTFSAARINSFLTQYSTGQVAVQIDWEIQKEHSKRWNPEVQFTSNYGTQNSMLWAPDNAGNYHELRAIGSRFLTHHL

SEQ ID NO: 215 - protein, 736 aa, Adeno-associated virus
MAADGYLPDWLEDNLSEGIREWWDLKPGAPKPKANQQKQDDGRGLVLPGYKYLGPFNGLDKGEPVNAADAAALEHDKAYDQQLKAGDNPYLRYNHADAEFQERLQEDTSFGGNLGRAVFQAKKRVLEPLGLVEEGAKTAPGKKRPVEQSPQEPDSSSGIGKTGQQPAKKRLNFGQTGDSESVPDPQPLGEPPATPAAVGPTTMASGGGAPMADNNEGADGVGNASGNWHCDSTWLGDRVITTSTRTWALPTYNNHLYKQISSASTGASNDNHYFGYSTPWGYFDFNRFHCHFSPRDWQRLINNNWGFRPKRLNFKLFNIQVKEVTTNDGVTTIANNLTSTVQVFSDSEYQLPYVLGSAHQGCLPPFPADVFMIPQYGYLTLNNGSQAVGRSSFYCLEYFPSQMLRTGNNFTFSYTFEEVPFHSSYAHSQSLDRLMNPLIDQYLYYLNRTQNQSGSAQNKDLLFSRGSPAGMSVQPKNWLPGPCYRQQRVSKTKTDNNNSNFTWTGASKYNLNGRESIINPGTAMASHKDDEDKFFPMSGVMIFGKESAGASNTALDNVMITDEEEIKATNPVATERFGTVAVNFQSSSTDPATGDVHAMGALPGMVWQDRDVYLQGPIWAKIPHTDGHFHPSPLMGGFGLKNPPPQILIKNTPVPANPPAEFSATKFASFITQYSTGQVSVEIEWELQKENSKRWNPEVQYTSNYAKSANVDFTVDNNGLYTEPRPIGTRYLTRPL

SEQ ID NO: 216 - protein, 735 aa, Adeno-associated virus [sequence omitted]

SEQ ID NO: 217 - protein, 736 aa, Adeno-associated virus
MAADGYLPDWLEDNLSEGIREWWDLKPGAPKPKANQQKQDDGRGLVLPGYKYLGPFNGLDKGEPVNAADAAALEHDKAYDQQLKAGDNPYLRYNHADAEFQERLQEDTSFGGNLGRAVFQAKKRVLEPFGLVEEGAKTAPGKKRPVEQSPQEPDSSSGIGKTGQQPAKKRLNFGQTGDSESVPDPQPLGEPPATPAAVGPTTMASGGGAPMADNNEGADGVGNASGNWHCDSTWLGDRVITTSTRTWALPTYNNHLYKQISSASTGASNDNHYFGYSTPWGYFDFNRFHCHFSPRDWQRLINNNWGFRPKRLNFKLFNIQVKEVTTNDGVTTIANNLTSTVQVFSDSEYQLPYVLGSAHQGCLPPFPADVFMIPQYGYLTLNNGSQAVGRSSFYCLEYFPSQMLRTGNNFTFSYTFEDVPFHSSYAHSQSLDRLMNPLIDQYLYYLNRTQNQSGSAQNKDLLFSRGSPAGMSVQPKNWLPGPCYRQQRVSKTKTDNNNSNFTWTGASKYNLNGRESIINPGTAMASHKDDKDKFFPMSGVMIFGKESAGASNTALDNVMITDEEEIKATNPVATERFGTVAVNLQSSSTDPATGDVHVMGALPGMVWQDRDVYLQGPIWAKIPHTDGHFHPSPLMGGFGLKHPPPQILIKNTPVPANPPAEFSATKFASFITQYSTGQVSVEIEWELQKENSKRWNPEVQYTSNYAKSANVDFTVDNNGLYTEPRPIGTRYLTRPL

SEQ ID NO: 218 - protein, 736 aa, Adeno-associated virus
MAADGYLPDWLEDNLSEGIREWWDLKPGAPKPKANQQKQDDGRGLVLPGYKYLGPFNGLDKGEPVNAADAAALEHDKAYDQQLKAGDNPYLRYNHADAEFQERLQEDTSFGGNLGRAVFQAKKRVLEPLGLVEEGAKTAPGKKRPVEQSPQEPDSSSGIGKTGQQPAKKRLNFGQTGDSESVPDPQPLGEPPAAPSGLGPNTMASGGGAPMADNNEGADGVGNSSGNWHCDSTWLGDRVITTSTRTWALPTYNNHLYKQISNGTSGGSTNDNTYFGYSTPWGYFDFNRFHCHFSPRDWQRLINNNWGFRPKRLNFKLFNIQVKEVTTNEGTKTIANNLTSTVQVFTDSEYQLPYVLGSAHQGCLPPFPADVFMVPQYGYLTLNNGSQALGRSSFYCLEYFPSQMLRTGNNFQFSYTFEDVPFHSSYAHSQSLDRLMNPLIDQYLYYLVRTQTTGTGGTQTLAFSQAGPSSMANQARNWVPGPCYRQQRVSTTTNQNNNSNFAWTGAAKFKLNGRDSLMNPGVAMASHKDDDDRFFPSSGVLIFGKQGAGNDGVDYSQVLITDEEEIKATNPVATEEYGAVAINNQAANTQAQTGLVHNQGVIPGMVWQNRDVYLQGPIWAKIPHTDGNFHPSPLMGGFGLKHPPPQILIKNTPVPADPPLTFNQAKLNSFITQYSTGQVSVEIEWELQKENSKRWNPEIQYTSNYYKSTNVDFAVNTEGVYSEPRPIGTRYLTRNL

SEQ ID NO: 219 - protein, 1091 aa, Artificial Sequence
  PUF1
MDKSKQMNINNLSNIPEVIDPGITIPIYEEEYENNGESNSQLQQQPQKLGSYRSRAGKFSNTLSNLLPSISAKLHHSKKNSHGKNGAEFSSSNNSSQSTVASKTPRASPSRSKMMESSIDGVTMDRPGSLTPPQDMEKLVHFPDSSNNFLIPAPRGSSDSFNLPHQISRTRNNTMSSQITSISSIAPKPRTSSGIWSSNASANDPMQQHLLQQLQPTTSNNTTNSNTLNDYSTKTAYFDNMVSTSGSQMADNKMNTNNLAIPNSVWSNTRQRSQSNASSIYTDAPLYEQPARASISSHYTIPTQESPLIADEIDPQSINWVTMDPTVPSINQISNLLPTNTISISNVFPLQHQQPQLNNAINLTSTSLATLCSKYGEVISARTLRNLNMALVEFSSVESAVKALDSLQGKEVSMIGAPSKISFAKILPMHQQPPQFLLNSQGLPLGLENNNLQPQPLLQEQLFNGAVTFQQQGNVSIPVFNQQSQQSQHQNHSSGSAGFSNVLHGYNNNNSMHGNNNNSANEKEQCPFPLPPPNVNEKEDLLREIIELFEANSDEYQINSLIKKSLNHKGTSDTQNFGPLPEPLSGREFDPPKLRELRKSIDSNAFSDLEIEQLAIAMLDELPELSSDYLGNTIVQKLFEHSSDIIKDIMLRKTSKYLTSMGVHKNGTWACQKMITMAHTPRQIMQVTQGVKDYCTPLINDQFGNYVIQCVLKFGFPWNQFIFESIIANFWVIVQNRYGARAVRACLEAHDIVTPEQSIVLSAMIVTYAEYLSTNSNGALLVTWFLDTSVLPNRHSILAPRLTKRIVELCGHRLASLTILKVLNYRGDDNARKIILDSLFGNVNAHDSSPPKELTKLLCETNYGPTFVHKVLAMPLLEDDLRAHIIKQVRKVLTDSTQIQPSRRLLEEVGLASPSSTHNKTKQQQQQHHNSSISHMFATPDTSGQHMRGLSVSSVKSGGSKHTTMNTTTTNGSSASTLSPGQPLNANSNSSMGYFSYPGVFPVSGFSGNASNGYAMNNDDLSSQFDMLNFNNGTRLSLPQLSLTNHNNTTMELVNNVGSSQPHTNNNNNNNNTNYNDDNTVFETLTLHSAN

SEQ ID NO: 220 - protein, 879 aa, Artificial Sequence
  PUF3
MEMNMDMDMDMELASIVSSLSALSHSNNNGGQAAAAGIVNGGAAGSQQIGGFRRSSFTTANEVDSEILLLHGSSESSPIFKKTALSVGTAPPFSTNSKKFFGNGGNYYQYRSTDTASLSSASYNNYHTHHTAANLGKNNKVNHLLGQYSASIAGPVYYNGNDNNNSGGEGFFEKFGKSLIDGTRELESQDRPDAVNTQSQFISKSVSNASLDTQNTFEQNVESDKNFNKLNRNTTNSGSLYHSSSNSGSSASLESENAHYPKRNIWNVANTPVFRPSNNPAAVGATNVALPNQQDGPANNNFPPYMNGFPPNQFHQGPHYQNFPNYLIGSPSNFISQMISVQIPANEDTEDSNGKKKKKANRPSSVSSPSSPPNNSPFPFAYPNPMMFMPPPPLSAPQQQQQQQQQQQQEDQQQQQQQENPYIYYPTPNPIPVKMPKDEKTFKKRNNKNHPANNSNNANKQANPYLENSIPTKNTSKKNASSKSNESTANNHKSHSHSHPHSQSLQQQQQTYHRSPLLEQLRNSSSDKNSNSNMSLKDIFGHSLEFCKDQHGSRFIQRELATSPASEKEVIFNEIRDDAIELSNDVFGNYVIQKFFEFGSKIQKNTLVDQFKGNMKQLSLQMYACRVIQKALEYIDSNQRIELVLELSDSVLQMIKDQNGNHVIQKAIETIPIEKLPFILSSLTGHIYHLSTHSYGCRVIQRLLEFGSSEDQESILNELKDFIPYLIQDQYGNYVIQYVLQQDQFTNKEMVDIKQEIIETVANNVVEYSKHKFASNVVEKSILYGSKNQKDLIISKILPRDKNHALNLEDDSPMILMIKDQFANYVIQKLVNVSEGEGKKLIVIAIRAYLDKLNKSNSLGNRHLASVEKLAALVENAEV

SEQ ID NO: 221 - protein, 888 aa, Artificial Sequence
  PUF4
MSTKGLKEEIDDVPSVDPVVSETVNSALEQLQLDDPEENATSNAFANKVSQDSQFANGPPSQMFPHPQMMGGMGFMPYSQMMQVPHNPCPFFPPPDFNDPTAPLSSSPLNAGGPPMLFKNDSLPFQMLSSGAAVATQGGQNLNPLINDNSMKVLPIASADPLWTHSNVPGSASVAIEETTATLQESLPSKGRESNNKASSFRRQTFHALSPTDLINAANNVTLSKDFQSDMQNFSKAKKPSVGANNTAKTRTQSISFDNTPSSTSFIPPTNSVSEKLSDFKIETSKEDLINKTAPAKKESPTTYGAAYPYGGPLLQPNPIMPGHPHNISSPIYGIRSPFPNSYEMGAQFQPFSPILNPTSHSLNANSPIPLTQSPIHLAPVLNPSSNSVAFSDMKNDGGKPTTDNDKAGPNVRMDLINPNLGPSMQPFHILPPQQNTPPPPWLYSTPPPFNAMVPPHLLAQNHMPLMNSANNKHHGRNNNSMSSHNDNDNIGNSNYNNKDTGRSNVGKMKNMKNSYHGYYNNNNNNNNNNNNNNNSNATNSNSAEKQRKIEESSRFADAVLDQYIGSIHSLCKDQHGCRFLQKQLDILGSKAADAIFEETKDYTVELMTDSFGNYLIQKLLEEVTTEQRIVLTKISSPHFVEISLNPHGTRALQKLIECIKTDEEAQIVVDSLRPYTVQLSKDLNGNHVIQKCLQRLKPENFQFIFDAISDSCIDIATHRHGCCVLQRCLDHGTTEQCDNLCDKLLALVDKLTLDPFGNYVVQYIITKEAEKNKYDYTHKIVHLLKPRAIELSIHKFGSNVIEKILKTAIVSEPMILEILNNGGETGIQSLLNDSYGNYVLQTALDISHKQNDYLYKRLSEIVAPLLVGPIRNTPHGKRIIGMLHLDS

SEQ ID NO: 222 - protein, 553 aa, Artificial Sequence
  PUF5
MSDSTGRINSKASDSSSISDHQTADLSIFNGSFDGGAFSSSNIPLFNFMGTGNQRFQYSPHPFAKSSDPCRLAALTPSTPKGPLNLTPADFGLADFSVGNESFADFTANNTSFVGNVQSNVRSTRLLPAWAVDNSGNIRDDLTLQDVVSNGSLIDFAMDRTGVKFLERHFPEDHDNEMHFVLFDKLTEQGAVFTSLCRSAAGNFIIQKFVEHATLDEQERLVRKMCDNGLIEMCLDKFACRVVQMSIQKFDVSIAMKLVEKISSLDFLPLCTDQCAIHVLQKVVKLLPISAWSFFVKFLCRDDNLMTVCQDKYGCRLVQQTIDKLSDNPKLHCFNTRLQLLHGLMTSVARNCFRLSSNEFANYVVQYVIKSSGVMEMYRDTIIEKCLLRNILSMSQDKYASHVVEGAFLFAPPLLLSEMMDEIFDGYVKDQETNRDALDILLFHQYGNYVVQQMISICISALLGKEERKMVASEMRLYAKWFDRIKNRVNRHSGRLERFSSGKKIIESLQKLNVPMTMTNEPMPYWAMPTPLMDISAHFMNKLNFQKNSVFDE

SEQ ID NO: 223 - protein, 485 aa, Artificial Sequence
  PUF6
MTPNRRSTDSYNMLGASFDFDPDFSLLSNKTHKNKNPKPPVKLLPYRHGSNTTSSDLDNYIFNSGSGSSDDETPPPAAPIFISLEEVLLNGLLIDFAIDPSGVKFLEANYPLDSEDQIRKAVFEKLTESTTLFVGLCHSRNGNFIVQKLVELATPAEQRELLRQMIDGGLLVMCKDKFACRVVQLALQKFDHSNVFQLIQELSTFDLAAMCTDQISIHVIQRVVKQLPVDMWTFFVHFLSSGDSLMAVCQDKYGCRLVQQVIDRLAENPKLPCFKFRIQLLHSLMTCIVRNCYRLSSNEFANYVIQYVIKSSGIMEMYRDTIIDKCLLRNLLSMSQDKYASHVIEGAFLFAPPALLHEMMEEIFSGYVKDVELNRDALDILLFHQYGNYVVQQMISICTAALIGKEERQLPPAILLLYSGWYEKMKQRVLQHASRLERFSSGKKIIDSVMRHGVPTAAAINAQAAPSLMELTAQFDAMFPSFLAR

SEQ ID NO: 224 - protein, 485 aa, Artificial Sequence
  PUF7
MTPNRRSTDSYNMLGASFDFDPDFSLLSNKTHKNKNPKPPVKLLPYRHGSNTTSSDSDSYIFNSGSGSSDAETPAPVAPIFISLEDVLLNGQLIDFAIDPSGVKFLEANYPLDSEDQIRKAVFEKFTESTTLFVGLCHSRNGNFIVQKLVELATPAEQRELLRQMIDGGLLAMCKDKFACRVVQLALQKFDHSNVFQLIQELSTFDLAAMCTDQISIHVIQRVVKQLPVDMWTFFVHFLSSGDSLMAVCQDKYGCRLVQQVIDRLAENPKLPCFKFRIQLLHSLMTCIVRNCYRLSSNEFANYVIQYVIKSSGIMEMYRDTIIDKCLLRNLLSMSQDKYASHVIEGAFLFAPPALLHEMMEEIFSGYVKDVESNRDALDILLFHQYGNYVVQQMISICTAALIGKEERELPPAILLLYSGWYEKMKQRVLQHASRLERFSSGKKIIDSVMRHGVPTAAAVNAQAAPSLMELTAQFDAMFPSFLAR

SEQ ID NO: 225 - protein, 535 aa, Artificial Sequence
  PUF8
MSRPISIGNTCTFDPSASPIESLGRSIGAQKIVDSVCGSPIRSYGRHISTNPKNERLPDTPEFQFATYMHQGGKVIGQNTLHMFGTPPSCYCAQENIPISSNVGHVLSTINNNYMNHQYNGSNMFSNQMTQMLQAQAYNDLQMHQAHSQSIRVPVQPSATGIFSNPYREPTTTDDLLTRYRANPAMMKNLKLSDIRGALLKFAKDQVGSRFIQQELASSKDRFEKDSIFDEVVSNADELVDDIFGNYVVQKFFEYGEERHWARLVDAIIDRVPEYAFQMYACRVLQKALEKINEPLQIKILSQIRHVIHRCMKDQNGNHVVQKAIEKVSPQYVQFIVDTLLESSNTIYEMSVDPYGCRVVQRCLEHCSPSQTKPVIGQIHKRFDEIANNQYGNYVVQHVIEHGSEEDRMVIVTRVSNNLFEFATHKYSSNVIEKCLEQGAVYHKSMIVGAACHHQEGSVPIVVQMMKDQYANYVVQKMFDQVTSEQRRELILTVRPHIPVLRQFPHGKHILAKLEKYFQKPAVMSYPYQDMQGSH

SEQ ID NO: 226 - protein, 703 aa, Artificial Sequence
  PUF9
MADPNWAYAPPTNYYADHSIAKPIMISGGHPSQDQGHSPKSESFGQSVTTAFNGMVDNLVGSPSSSVQQRNYFTTTPFPISRSPNDRNDDKIMGNGSYGVPIPIPQDGVPQGTPDFQMTPFLQQGGHLIGGSPNGPVQVSGNWYSGGAGIFSTMQQADPSNGMPGMAAEFVNNENGMPGPNGMHQQAMISGSPPFPYQNMMNLTTSFGAMGLGPQQIQQRDPQMFQQPILHEPIQGMAQNGFGQQVFFTQMQNQQHPQGQAQQQLQQLAQQHQQQQNSQQFFGQGPNGMGNGGVMNDWSQRSFGMPQQQAQQNGLPPNFSQNPPRRRGPEDPNGQTPKTLQDIKNNVIEFAKDQHGSRFIQQKLERASLRDKAAIFTPVLENAEELMTDVFGNYVIQKFFEFGNNEQRNQLVGTIRGNVMKLALQMYGCRVIQKALEYVEEKYQHEILGEMEGQVLKCVKDQNGNHVIQKVIERVEPERLQFIIDAFTKNNSDNVYTLSVHPYGCRVIQRVLEYCNEEQKQPVLDALQIHLKQLVLDQYGNYVIQHVIEHGSPSDKEQIVQDVISDDLLKFAQHKFASNVIEKCLTFGGHAERNLIIDKVCGDPNDPSPPLLQMMKDPFANYVVQKMLDVADPQHRKKITLTIKPHIATLRKYNFGKHILLKLEKYFAKQAPANSSNSSSNDQIYEHSPFDIPLGADFSNHPF

SEQ ID NO: 227 - protein, 312 aa, Artificial Sequence
  IL6 scFV
MSTVILSAAAPLSGVYAAMERGSHHHHHHGSGSGSGIEGRPYNGTGSACELGTQVQLKESGPGLVPSQSLSITCTVSDFSLTNYGVHWVRQSPGKGLEWLGVIWSGGSTDYNAAFISRLSISKDNSKSQVFFEMNSLQADDTAIYYCARNGNRYYGYALDYWGQGTSVTVSSGGGGSGGGGSGGGGSDVVMTQTPLSLPVSLGDQASISCRSSQSIVHSNGNTYLEWYLQKPGQSPKLLIYTVSNRLSGVPDRFSGSGSGTDFTLKISRVEAEDLGVYYCFQGSHGPYTFGGGTKLEIKLQTCGRKLSLNQN

SEQ ID NO: 228 - protein, 326 aa, Artificial Sequence
  synthetic notch
ILDYSFTGGAGRDIPPPQIEEACELPECQVDAGNKVCNLQCNNHACGWDGGDCSLNFNDPWKNCTQSLQCWKYFSDGHCDSQCNSAGCLFDGFDCQLTEGQCNPLYDQYCKDHFSDGHCDQGCNSAECEWDGLDCAEHVPERLAAGTLVLVVLLPPDQLRNNSFHFLRELSHVLHTNVVFKRDAQGQQMIFPYYGHEEELRKHPIKRSTVGWATSSLLPGTSGGRQRRELDPMDIRGSIVYLEIDNRQCVQSSSQCFQSATDVAAFLGALASLGSLNIPYKIEAVKSEPVEPPLPSQLHLMYVAAAAFVLLFFVGCGVLLSRKRRR

SEQ ID NO: 229 - protein, 211 aa, Artificial Sequence
  Gal4
MKLLSSIEQACDICRLKKLKCSKEKPKCAKCLKNNWECRYSPKTKRSPLTRAHLTEVESRLERLEQLFLLIFPREDLDMILKMDSLQDIKALLTGLFVQDNVNKDAVTDRLASVETDMPLTLRQHRISATSSSEESSNKGQRQLTVSAAAGGSGGSGGSDALDDFDLDMLGSDALDDFDLDMLGSDALDDFDLDMLGSDALDDFDLDMLGS

SEQ ID NO: 230 - protein, 7 aa, Homo sapiens
SKIPPED

SEQ ID NO: 231 - protein, 7 aa, Homo sapiens
SKIPPED

SEQ ID NO: 232 - protein, 7 aa, Homo sapiens
SKIPPED

SEQ ID NO: 233 - protein, 7 aa, Homo sapiens
SKIPPED

SEQ ID NO: 234 - protein, 7 aa, Homo sapiens
SKIPPED

SEQ ID NO: 235 - protein, 7 aa, Homo sapiens
SKIPPED

SEQ ID NO: 236 - protein, 7 aa, Homo sapiens
SKIPPED

SEQ ID NO: 237 - protein, 7 aa, Homo sapiens
SKIPPED

SEQ ID NO: 238 - protein, 7 aa, Homo sapiens
SKIPPED

SEQ ID NO: 239 - protein, 7 aa, Homo sapiens
SKIPPED

SEQ ID NO: 240 - protein, 7 aa, Homo sapiens
SKIPPED

SEQ ID NO: 241 - protein, 7 aa, Homo sapiens
SKIPPED

SEQ ID NO: 242 - protein, 7 aa, Homo sapiens
SKIPPED

SEQ ID NO: 243 - protein, 7 aa, Homo sapiens
SKIPPED

SEQ ID NO: 244 - protein, 7 aa, Homo sapiens
SKIPPED

SEQ ID NO: 245 - protein, 7 aa, Homo sapiens
SKIPPED

SEQ ID NO: 246 - protein, 7 aa, Homo sapiens
SKIPPED

SEQ ID NO: 247 - protein, 7 aa, Homo sapiens
SKIPPED

SEQ ID NO: 248 - protein, 7 aa, Homo sapiens
SKIPPED

SEQ ID NO: 249 - protein, 7 aa, Homo sapiens
SKIPPED

SEQ ID NO: 250 - DNA, 26 bp, Homo sapiens
tgtgagtatatgaatctttatttgtt

SEQ ID NO: 251 - DNA, 26 bp, Homo sapiens
gtgagtatatgaatctttatttgttc

SEQ ID NO: 252 - DNA, 26 bp, Homo sapiens
tgagtatatgaatctttatttgttca

SEQ ID NO: 253 - DNA, 26 bp, Homo sapiens
gagtatatgaatctttatttgttcac

SEQ ID NO: 254 - DNA, 26 bp, Homo sapiens
agtatatgaatctttatttgttcaca

SEQ ID NO: 255 - DNA, 26 bp, Homo sapiens
gtatatgaatctttatttgttcacaa

SEQ ID NO: 256 - DNA, 26 bp, Homo sapiens
tatatgaatctttatttgttcacaag

SEQ ID NO: 257 - DNA, 26 bp, Homo sapiens
atatgaatctttatttgttcacaagt

SEQ ID NO: 258 - DNA, 26 bp, Homo sapiens
tatgaatctttatttgttcacaagta

SEQ ID NO: 259 - DNA, 26 bp, Homo sapiens
atgaatctttatttgttcacaagtag

SEQ ID NO: 260 - DNA, 26 bp, Homo sapiens
tgaatctttatttgttcacaagtagc

SEQ ID NO: 261 - DNA, 26 bp, Homo sapiens
gaatctttatttgttcacaagtagca

SEQ ID NO: 262 - DNA, 26 bp, Homo sapiens
aatctttatttgttcacaagtagcag

SEQ ID NO: 263 - DNA, 26 bp, Homo sapiens
atctttatttgttcacaagtagcagg

SEQ ID NO: 264 - DNA, 26 bp, Homo sapiens
tctttatttgttcacaagtagcagga

SEQ ID NO: 265 - DNA, 26 bp, Homo sapiens
ctttatttgttcacaagtagcaggaa

SEQ ID NO: 266 - DNA, 26 bp, Homo sapiens
tttatttgttcacaagtagcaggaat

SEQ ID NO: 267 - DNA, 26 bp, Homo sapiens
ttatttgttcacaagtagcaggaatg

SEQ ID NO: 268 - DNA, 26 bp, Homo sapiens
tatttgttcacaagtagcaggaatgg

SEQ ID NO: 269 - DNA, 26 bp, Homo sapiens
atttgttcacaagtagcaggaatggg

SEQ ID NO: 270 - DNA, 26 bp, Homo sapiens
tttgttcacaagtagcaggaatgggg

SEQ ID NO: 271 - DNA, 26 bp, Homo sapiens
ttgttcacaagtagcaggaatggggg

SEQ ID NO: 272 - DNA, 26 bp, Homo sapiens
tgttcacaagtagcaggaatgggggc

SEQ ID NO: 273 - DNA, 26 bp, Homo sapiens
gttcacaagtagcaggaatgggggca

SEQ ID NO: 274 - DNA, 26 bp, Homo sapiens
ttcacaagtagcaggaatgggggcaa

SEQ ID NO: 275 - DNA, 26 bp, Homo sapiens
tcacaagtagcaggaatgggggcaaa

SEQ ID NO: 276 - DNA, 26 bp, Homo sapiens
cacaagtagcaggaatgggggcaaaa

SEQ ID NO: 277 - DNA, 26 bp, Homo sapiens
acaagtagcaggaatgggggcaaaag

SEQ ID NO: 278 - DNA, 26 bp, Homo sapiens
caagtagcaggaatgggggcaaaagt

SEQ ID NO: 279 - DNA, 26 bp, Homo sapiens
aagtagcaggaatgggggcaaaagtc

SEQ ID NO: 280 - DNA, 26 bp, Homo sapiens
agtagcaggaatgggggcaaaagtct

SEQ ID NO: 281 - DNA, 26 bp, Homo sapiens
gtagcaggaatgggggcaaaagtctg

SEQ ID NO: 282 - DNA, 26 bp, Homo sapiens
tagcaggaatgggggcaaaagtctgg

SEQ ID NO: 283 - DNA, 26 bp, Homo sapiens
agcaggaatgggggcaaaagtctggg

SEQ ID NO: 284 - DNA, 26 bp, Homo sapiens
gcaggaatgggggcaaaagtctgggt

SEQ ID NO: 285 - DNA, 26 bp, Homo sapiens
caggaatgggggcaaaagtctgggtg

SEQ ID NO: 286 - DNA, 26 bp, Homo sapiens
aggaatgggggcaaaagtctgggtgc

SEQ ID NO: 287 - DNA, 26 bp, Homo sapiens
ggaatgggggcaaaagtctgggtgcc

SEQ ID NO: 288 - DNA, 26 bp, Homo sapiens
gaatgggggcaaaagtctgggtgccg

SEQ ID NO: 289 - DNA, 26 bp, Homo sapiens
aatgggggcaaaagtctgggtgccga

SEQ ID NO: 290 - DNA, 26 bp, Homo sapiens
atgggggcaaaagtctgggtgccgag

SEQ ID NO: 291 - DNA, 26 bp, Homo sapiens
tgggggcaaaagtctgggtgccgagc

SEQ ID NO: 292 - DNA, 26 bp, Homo sapiens
gggggcaaaagtctgggtgccgagca

SEQ ID NO: 293 - DNA, 26 bp, Homo sapiens
ggggcaaaagtctgggtgccgagcag

SEQ ID NO: 294 - DNA, 26 bp, Homo sapiens
gggcaaaagtctgggtgccgagcagg

SEQ ID NO: 295 - DNA, 26 bp, Homo sapiens
ggcaaaagtctgggtgccgagcaggg

SEQ ID NO: 296 - DNA, 26 bp, Homo sapiens
gcaaaagtctgggtgccgagcaggga

SEQ ID NO: 297 - DNA, 26 bp, Homo sapiens
caaaagtctgggtgccgagcagggaa

SEQ ID NO: 298 - DNA, 26 bp, Homo sapiens
aaaagtctgggtgccgagcagggaat

SEQ ID NO: 299 - DNA, 26 bp, Homo sapiens
aaagtctgggtgccgagcagggaatg

SEQ ID NO: 300 - DNA, 26 bp, Homo sapiens
aagtctgggtgccgagcagggaatgc

SEQ ID NO: 301 - DNA, 26 bp, Homo sapiens
agtctgggtgccgagcagggaatgca

SEQ ID NO: 302 - DNA, 26 bp, Homo sapiens
gtctgggtgccgagcagggaatgcat

SEQ ID NO: 303 - DNA, 26 bp, Homo sapiens
tctgggtgccgagcagggaatgcatg

SEQ ID NO: 304 - DNA, 26 bp, Homo sapiens
ctgggtgccgagcagggaatgcatga

SEQ ID NO: 305 - DNA, 26 bp, Homo sapiens
tgggtgccgagcagggaatgcatgag

SEQ ID NO: 306 - DNA, 26 bp, Homo sapiens
gggtgccgagcagggaatgcatgagg

SEQ ID NO: 307 - DNA, 26 bp, Homo sapiens
ggtgccgagcagggaatgcatgaggt

SEQ ID NO: 308 - DNA, 26 bp, Homo sapiens
gtgccgagcagggaatgcatgaggta

SEQ ID NO: 309 - DNA, 26 bp, Homo sapiens
tgccgagcagggaatgcatgaggtag

SEQ ID NO: 310 - DNA, 26 bp, Homo sapiens
gccgagcagggaatgcatgaggtagg

SEQ ID NO: 311 - DNA, 26 bp, Homo sapiens
ccgagcagggaatgcatgaggtaggc

SEQ ID NO: 312 - DNA, 26 bp, Homo sapiens
cgagcagggaatgcatgaggtaggca

SEQ ID NO: 313 - DNA, 26 bp, Homo sapiens
gagcagggaatgcatgaggtaggcaa

SEQ ID NO: 314 - DNA, 26 bp, Homo sapiens
agcagggaatgcatgaggtaggcaag

SEQ ID NO: 315 - DNA, 26 bp, Homo sapiens
gcagggaatgcatgaggtaggcaagg

SEQ ID NO: 316 - DNA, 26 bp, Homo sapiens
cagggaatgcatgaggtaggcaaggg

SEQ ID NO: 317 - DNA, 26 bp, Homo sapiens
agggaatgcatgaggtaggcaaggga

SEQ ID NO: 318 - DNA, 26 bp, Homo sapiens
gggaatgcatgaggtaggcaagggaa

SEQ ID NO: 319 - DNA, 26 bp, Homo sapiens
ggaatgcatgaggtaggcaagggaat

SEQ ID NO: 320 - DNA, 26 bp, Homo sapiens
gaatgcatgaggtaggcaagggaata

SEQ ID NO: 321 - DNA, 26 bp, Homo sapiens
aatgcatgaggtaggcaagggaatag

SEQ ID NO: 322 - DNA, 26 bp, Homo sapiens
atgcatgaggtaggcaagggaatagg

SEQ ID NO: 323 - DNA, 26 bp, Homo sapiens
tgcatgaggtaggcaagggaataggg

SEQ ID NO: 324 - DNA, 26 bp, Homo sapiens
gcatgaggtaggcaagggaataggga

SEQ ID NO: 325 - DNA, 26 bp, Homo sapiens
catgaggtaggcaagggaatagggat

SEQ ID NO: 326 - DNA, 26 bp, Homo sapiens
atgaggtaggcaagggaatagggatg

SEQ ID NO: 327 - DNA, 26 bp, Homo sapiens
tgaggtaggcaagggaatagggatgt

SEQ ID NO: 328 - DNA, 26 bp, Homo sapiens
gaggtaggcaagggaatagggatgtg

SEQ ID NO: 329 - DNA, 26 bp, Homo sapiens
aggtaggcaagggaatagggatgtgg

SEQ ID NO: 330 - DNA, 26 bp, Homo sapiens
ggtaggcaagggaatagggatgtggg

SEQ ID NO: 331 - DNA, 26 bp, Homo sapiens
gtaggcaagggaatagggatgtgggg

SEQ ID NO: 332 - DNA, 26 bp, Homo sapiens
taggcaagggaatagggatgtggggc

SEQ ID NO: 333 - DNA, 26 bp, Homo sapiens
aggcaagggaatagggatgtggggct

SEQ ID NO: 334 - DNA, 26 bp, Homo sapiens
ggcaagggaatagggatgtggggctt

SEQ ID NO: 335 - DNA, 26 bp, Homo sapiens
gcaagggaatagggatgtggggcttc

SEQ ID NO: 336 - DNA, 26 bp, Homo sapiens
caagggaatagggatgtggggcttct

SEQ ID NO: 337 - DNA, 26 bp, Homo sapiens
aagggaatagggatgtggggcttctc

SEQ ID NO: 338 - DNA, 26 bp, Homo sapiens
agggaatagggatgtggggcttctcg

SEQ ID NO: 339 - DNA, 26 bp, Homo sapiens
gggaatagggatgtggggcttctcgt

SEQ ID NO: 340 - DNA, 26 bp, Homo sapiens
ggaatagggatgtggggcttctcgtc

SEQ ID NO: 341 - DNA, 26 bp, Homo sapiens
gaatagggatgtggggcttctcgtct

SEQ ID NO: 342 - DNA, 26 bp, Homo sapiens
aatagggatgtggggcttctcgtctt

SEQ ID NO: 343 - DNA, 26 bp, Homo sapiens
atagggatgtggggcttctcgtcttg

SEQ ID NO: 344 - DNA, 26 bp, Homo sapiens
tagggatgtggggcttctcgtcttgg

SEQ ID NO: 345 - DNA, 26 bp, Homo sapiens
agggatgtggggcttctcgtcttggc

SEQ ID NO: 346 - DNA, 26 bp, Homo sapiens
gggatgtggggcttctcgtcttggct

SEQ ID NO: 347 - DNA, 26 bp, Homo sapiens
ggatgtggggcttctcgtcttggctt

SEQ ID NO: 348 - DNA, 26 bp, Homo sapiens
gatgtggggcttctcgtcttggcttc

SEQ ID NO: 349 - DNA, 26 bp, Homo sapiens
atgtggggcttctcgtcttggcttct

SEQ ID NO: 350 - DNA, 26 bp, Homo sapiens
tgtggggcttctcgtcttggcttctc

SEQ ID NO: 351 - DNA, 26 bp, Homo sapiens
gtggggcttctcgtcttggcttctca

SEQ ID NO: 352 - DNA, 26 bp, Homo sapiens
tggggcttctcgtcttggcttctcag

SEQ ID NO: 353 - DNA, 26 bp, Homo sapiens
ggggcttctcgtcttggcttctcagc

SEQ ID NO: 354 - DNA, 26 bp, Homo sapiens
gggcttctcgtcttggcttctcagct

SEQ ID NO: 355 - DNA, 26 bp, Homo sapiens
ggcttctcgtcttggcttctcagctc

SEQ ID NO: 356 - DNA, 26 bp, Homo sapiens
gcttctcgtcttggcttctcagctcc

SEQ ID NO: 357 - DNA, 26 bp, Homo sapiens
cttctcgtcttggcttctcagctcct

SEQ ID NO: 358 - DNA, 26 bp, Homo sapiens
ttctcgtcttggcttctcagctcctg

SEQ ID NO: 359 - DNA, 26 bp, Homo sapiens
tctcgtcttggcttctcagctcctgc

SEQ ID NO: 360 - DNA, 26 bp, Homo sapiens
ctcgtcttggcttctcagctcctgct

SEQ ID NO: 361 - DNA, 26 bp, Homo sapiens
tcgtcttggcttctcagctcctgctg

SEQ ID NO: 362 - DNA, 26 bp, Homo sapiens
cgtcttggcttctcagctcctgctgt

SEQ ID NO: 363 - DNA, 26 bp, Homo sapiens
gtcttggcttctcagctcctgctgtt

SEQ ID NO: 364 - DNA, 26 bp, Homo sapiens
tcttggcttctcagctcctgctgttt

SEQ ID NO: 365 - DNA, 26 bp, Homo sapiens
cttggcttctcagctcctgctgtttc

SEQ ID NO: 366 - DNA, 26 bp, Homo sapiens
ttggcttctcagctcctgctgtttct

SEQ ID NO: 367 - DNA, 26 bp, Homo sapiens
tggcttctcagctcctgctgtttctt

SEQ ID NO: 368 - DNA, 26 bp, Homo sapiens
ggcttctcagctcctgctgtttctta

SEQ ID NO: 369 - DNA, 26 bp, Homo sapiens
gcttctcagctcctgctgtttcttag

SEQ ID NO: 370 - DNA, 26 bp, Homo sapiens
cttctcagctcctgctgtttcttagt

SEQ ID NO: 371 - DNA, 26 bp, Homo sapiens
ttctcagctcctgctgtttcttagtt

SEQ ID NO: 372 - DNA, 26 bp, Homo sapiens
tctcagctcctgctgtttcttagttg

SEQ ID NO: 373 - DNA, 26 bp, Homo sapiens
ctcagctcctgctgtttcttagttga

SEQ ID NO: 374 - DNA, 26 bp, Homo sapiens
tcagctcctgctgtttcttagttgat

SEQ ID NO: 375 - DNA, 26 bp, Homo sapiens
cagctcctgctgtttcttagttgatt

SEQ ID NO: 376 - DNA, 26 bp, Homo sapiens
agctcctgctgtttcttagttgattc

SEQ ID NO: 377 - DNA, 26 bp, Homo sapiens
gctcctgctgtttcttagttgattca

SEQ ID NO: 378 - DNA, 26 bp, Homo sapiens
ctcctgctgtttcttagttgattcac

SEQ ID NO: 379 - DNA, 26 bp, Homo sapiens
tcctgctgtttcttagttgattcact

SEQ ID NO: 380 - DNA, 26 bp, Homo sapiens
cctgctgtttcttagttgattcactg

SEQ ID NO: 381 - DNA, 26 bp, Homo sapiens
ctgctgtttcttagttgattcactgc

SEQ ID NO: 382 - DNA, 26 bp, Homo sapiens
tgctgtttcttagttgattcactgca

SEQ ID NO: 383 - DNA, 26 bp, Homo sapiens
gctgtttcttagttgattcactgcag

SEQ ID NO: 384 - DNA, 26 bp, Homo sapiens
ctgtttcttagttgattcactgcagt

SEQ ID NO: 385 - DNA, 26 bp, Homo sapiens
tgtttcttagttgattcactgcagtg

SEQ ID NO: 386 - DNA, 26 bp, Homo sapiens
gtttcttagttgattcactgcagtgt

SEQ ID NO: 387 - DNA, 26 bp, Homo sapiens
tttcttagttgattcactgcagtgtc

SEQ ID NO: 388 - DNA, 26 bp, Homo sapiens
ttcttagttgattcactgcagtgtcg

SEQ ID NO: 389 - DNA, 26 bp, Homo sapiens
tcttagttgattcactgcagtgtcgt

SEQ ID NO: 390 - DNA, 26 bp, Homo sapiens
cttagttgattcactgcagtgtcgtc

SEQ ID NO: 391 - DNA, 26 bp, Homo sapiens
ttagttgattcactgcagtgtcgtcc

SEQ ID NO: 392 - DNA, 26 bp, Homo sapiens
tagttgattcactgcagtgtcgtcct

SEQ ID NO: 393 - DNA, 26 bp, Homo sapiens
agttgattcactgcagtgtcgtcctg

SEQ ID NO: 394 - DNA, 26 bp, Homo sapiens
gttgattcactgcagtgtcgtcctgt

SEQ ID NO: 395 - DNA, 26 bp, Homo sapiens
ttgattcactgcagtgtcgtcctgtg

SEQ ID NO: 396 - DNA, 26 bp, Homo sapiens
tgattcactgcagtgtcgtcctgtga

SEQ ID NO: 397 - DNA, 26 bp, Homo sapiens
gattcactgcagtgtcgtcctgtgat

SEQ ID NO: 398 - DNA, 26 bp, Homo sapiens
attcactgcagtgtcgtcctgtgatt

SEQ ID NO: 399 - DNA, 26 bp, Homo sapiens
ttcactgcagtgtcgtcctgtgattc

SEQ ID NO: 400 - DNA, 26 bp, Homo sapiens
tcactgcagtgtcgtcctgtgattct

SEQ ID NO: 401 - DNA, 26 bp, Homo sapiens
cactgcagtgtcgtcctgtgattctg

SEQ ID NO: 402 - DNA, 26 bp, Homo sapiens
actgcagtgtcgtcctgtgattctgg

SEQ ID NO: 403 - DNA, 26 bp, Homo sapiens
ctgcagtgtcgtcctgtgattctggg

SEQ ID NO: 404 - DNA, 26 bp, Homo sapiens
tgcagtgtcgtcctgtgattctggga

SEQ ID NO: 405 - DNA, 26 bp, Homo sapiens
gcagtgtcgtcctgtgattctgggat

SEQ ID NO: 406 - DNA, 26 bp, Homo sapiens
cagtgtcgtcctgtgattctgggatt

SEQ ID NO: 407 - DNA, 26 bp, Homo sapiens
agtgtcgtcctgtgattctgggattt

SEQ ID NO: 408 - DNA, 26 bp, Homo sapiens
gtgtcgtcctgtgattctgggatttt

SEQ ID NO: 409 - DNA, 26 bp, Homo sapiens
tgtcgtcctgtgattctgggattttg

SEQ ID NO: 410 - DNA, 26 bp, Homo sapiens
gtcgtcctgtgattctgggattttgt

SEQ ID NO: 411 - DNA, 26 bp, Homo sapiens
tcgtcctgtgattctgggattttgtg

SEQ ID NO: 412 - DNA, 26 bp, Homo sapiens
cgtcctgtgattctgggattttgtgc

SEQ ID NO: 413 - DNA, 26 bp, Homo sapiens
gtcctgtgattctgggattttgtgct

SEQ ID NO: 414 - DNA, 26 bp, Homo sapiens
tcctgtgattctgggattttgtgctc

SEQ ID NO: 415 - DNA, 26 bp, Homo sapiens
cctgtgattctgggattttgtgctct

SEQ ID NO: 416 - DNA, 26 bp, Homo sapiens
ctgtgattctgggattttgtgctcta

SEQ ID NO: 417 - DNA, 26 bp, Homo sapiens
tgtgattctgggattttgtgctctat

SEQ ID NO: 418 - DNA, 26 bp, Homo sapiens
gtgattctgggattttgtgctctata

SEQ ID NO: 419 - DNA, 26 bp, Homo sapiens
tgattctgggattttgtgctctatag

SEQ ID NO: 420 - DNA, 26 bp, Homo sapiens
gattctgggattttgtgctctataga

SEQ ID NO: 421 - DNA, 26 bp, Homo sapiens
attctgggattttgtgctctatagat

SEQ ID NO: 422 - DNA, 26 bp, Homo sapiens
ttctgggattttgtgctctatagata

SEQ ID NO: 423 - DNA, 26 bp, Homo sapiens
tctgggattttgtgctctatagatat

SEQ ID NO: 424 - DNA, 26 bp, Homo sapiens
ctgggattttgtgctctatagatata

SEQ ID NO: 425 - DNA, 26 bp, Homo sapiens
tgggattttgtgctctatagatataa

SEQ ID NO: 426 - DNA, 26 bp, Homo sapiens
gggattttgtgctctatagatataag

SEQ ID NO: 427 - DNA, 26 bp, Homo sapiens
ggattttgtgctctatagatataaga

SEQ ID NO: 428 - DNA, 26 bp, Homo sapiens
gattttgtgctctatagatataagag

SEQ ID NO: 429 - DNA, 26 bp, Homo sapiens
attttgtgctctatagatataagagg

SEQ ID NO: 430 - DNA, 26 bp, Homo sapiens
ttttgtgctctatagatataagaggg

SEQ ID NO: 431 - DNA, 26 bp, Homo sapiens
tttgtgctctatagatataagagggt

SEQ ID NO: 432 - DNA, 26 bp, Homo sapiens
ttgtgctctatagatataagagggta

SEQ ID NO: 433 - DNA, 26 bp, Homo sapiens
tgtgctctatagatataagagggtac

SEQ ID NO: 434 - DNA, 26 bp, Homo sapiens
gtgctctatagatataagagggtact

SEQ ID NO: 435 - DNA, 26 bp, Homo sapiens
tgctctatagatataagagggtactg

SEQ ID NO: 436 - DNA, 26 bp, Homo sapiens
gctctatagatataagagggtactgg

SEQ ID NO: 437 - DNA, 26 bp, Homo sapiens
ctctatagatataagagggtactggg

SEQ ID NO: 438 - DNA, 26 bp, Homo sapiens
tctatagatataagagggtactggga

SEQ ID NO: 439 - DNA, 26 bp, Homo sapiens
ctatagatataagagggtactgggaa

SEQ ID NO: 440 - DNA, 26 bp, Homo sapiens
tatagatataagagggtactgggaag

SEQ ID NO: 441 - DNA, 26 bp, Homo sapiens
atagatataagagggtactgggaagg

SEQ ID NO: 442 - DNA, 26 bp, Homo sapiens
tagatataagagggtactgggaaggt

SEQ ID NO: 443 - DNA, 26 bp, Homo sapiens
agatataagagggtactgggaaggtc

SEQ ID NO: 444 - DNA, 26 bp, Homo sapiens
gatataagagggtactgggaaggtct

SEQ ID NO: 445 - DNA, 26 bp, Homo sapiens
atataagagggtactgggaaggtctt

SEQ ID NO: 446 - DNA, 26 bp, Homo sapiens
tataagagggtactgggaaggtcttg

SEQ ID NO: 447 - DNA, 26 bp, Homo sapiens
ataagagggtactgggaaggtcttgg

SEQ ID NO: 448 - DNA, 26 bp, Homo sapiens
taagagggtactgggaaggtcttgga

SEQ ID NO: 449 - DNA, 26 bp, Homo sapiens
aagagggtactgggaaggtcttggat

SEQ ID NO: 450 - DNA, 26 bp, Homo sapiens
agagggtactgggaaggtcttggatg

SEQ ID NO: 451 - DNA, 26 bp, Homo sapiens
gagggtactgggaaggtcttggatga

SEQ ID NO: 452 - DNA, 26 bp, Homo sapiens
agggtactgggaaggtcttggatgat

SEQ ID NO: 453 - DNA, 26 bp, Homo sapiens
gggtactgggaaggtcttggatgatg

SEQ ID NO: 454 - DNA, 26 bp, Homo sapiens
ggtactgggaaggtcttggatgatgc

SEQ ID NO: 455 - DNA, 26 bp, Homo sapiens
gtactgggaaggtcttggatgatgct

SEQ ID NO: 456 - DNA, 26 bp, Homo sapiens
tactgggaaggtcttggatgatgctt

SEQ ID NO: 457 - DNA, 26 bp, Homo sapiens
actgggaaggtcttggatgatgcttg

SEQ ID NO: 458 - DNA, 26 bp, Homo sapiens
ctgggaaggtcttggatgatgcttgg

SEQ ID NO: 459 - DNA, 26 bp, Homo sapiens
tgggaaggtcttggatgatgcttgga

SEQ ID NO: 460 - DNA, 26 bp, Homo sapiens
gggaaggtcttggatgatgcttggag

SEQ ID NO: 461 - DNA, 26 bp, Homo sapiens
ggaaggtcttggatgatgcttggaga

SEQ ID NO: 462 - DNA, 26 bp, Homo sapiens
gaaggtcttggatgatgcttggagag

SEQ ID NO: 463 - DNA, 26 bp, Homo sapiens
aaggtcttggatgatgcttggagagt

SEQ ID NO: 464 - DNA, 26 bp, Homo sapiens
aggtcttggatgatgcttggagagta

SEQ ID NO: 465 - DNA, 26 bp, Homo sapiens
ggtcttggatgatgcttggagagtac

SEQ ID NO: 466 - DNA, 26 bp, Homo sapiens
gtcttggatgatgcttggagagtaca

SEQ ID NO: 467 - DNA, 26 bp, Homo sapiens
tcttggatgatgcttggagagtacag

SEQ ID NO: 468 - DNA, 26 bp, Homo sapiens
cttggatgatgcttggagagtacagg

SEQ ID NO: 469 - DNA, 26 bp, Homo sapiens
ttggatgatgcttggagagtacaggc

SEQ ID NO: 470 - DNA, 26 bp, Homo sapiens
tggatgatgcttggagagtacaggcg

SEQ ID NO: 471 - DNA, 26 bp, Homo sapiens
ggatgatgcttggagagtacaggcgt

SEQ ID NO: 472 - DNA, 26 bp, Homo sapiens
gatgatgcttggagagtacaggcgtc

SEQ ID NO: 473 - DNA, 26 bp, Homo sapiens
atgatgcttggagagtacaggcgtct

SEQ ID NO: 474 - DNA, 26 bp, Homo sapiens
tgatgcttggagagtacaggcgtctt

SEQ ID NO: 475 - DNA, 26 bp, Homo sapiens
gatgcttggagagtacaggcgtcttc

SEQ ID NO: 476 - DNA, 26 bp, Homo sapiens
atgcttggagagtacaggcgtcttct

SEQ ID NO: 477 - DNA, 26 bp, Homo sapiens
tgcttggagagtacaggcgtcttctc

SEQ ID NO: 478 - DNA, 26 bp, Homo sapiens
gcttggagagtacaggcgtcttctcc

SEQ ID NO: 479 - DNA, 26 bp, Homo sapiens
cttggagagtacaggcgtcttctcca

SEQ ID NO: 480 - DNA, 26 bp, Homo sapiens
ttggagagtacaggcgtcttctccag

SEQ ID NO: 481 - DNA, 26 bp, Homo sapiens
tggagagtacaggcgtcttctccaga

SEQ ID NO: 482 - DNA, 26 bp, Homo sapiens
ggagagtacaggcgtcttctccagaa

SEQ ID NO: 483 - DNA, 26 bp, Homo sapiens
gagagtacaggcgtcttctccagaac

SEQ ID NO: 484 - DNA, 26 bp, Homo sapiens
agagtacaggcgtcttctccagaaca

SEQ ID NO: 485 - DNA, 26 bp, Homo sapiens
gagtacaggcgtcttctccagaacag

SEQ ID NO: 486 - DNA, 26 bp, Homo sapiens
agtacaggcgtcttctccagaacagc

SEQ ID NO: 487 - DNA, 26 bp, Homo sapiens
gtacaggcgtcttctccagaacagcc

SEQ ID NO: 488 - DNA, 26 bp, Homo sapiens
tacaggcgtcttctccagaacagcct

SEQ ID NO: 489 - DNA, 26 bp, Homo sapiens
acaggcgtcttctccagaacagcctg

SEQ ID NO: 490 - DNA, 26 bp, Homo sapiens
caggcgtcttctccagaacagcctgc

SEQ ID NO: 491 - DNA, 26 bp, Homo sapiens
aggcgtcttctccagaacagcctgcc

SEQ ID NO: 492 - DNA, 26 bp, Homo sapiens
ggcgtcttctccagaacagcctgcct

SEQ ID NO: 493 - DNA, 26 bp, Homo sapiens
gcgtcttctccagaacagcctgccta

SEQ ID NO: 494 - DNA, 26 bp, Homo sapiens
cgtcttctccagaacagcctgcctag

SEQ ID NO: 495 - DNA, 26 bp, Homo sapiens
gtcttctccagaacagcctgcctagt

SEQ ID NO: 496 - DNA, 26 bp, Homo sapiens
tcttctccagaacagcctgcctagtc

SEQ ID NO: 497 - DNA, 26 bp, Homo sapiens
cttctccagaacagcctgcctagtct

SEQ ID NO: 498 - DNA, 26 bp, Homo sapiens
ttctccagaacagcctgcctagtctg

SEQ ID NO: 499 - DNA, 26 bp, Homo sapiens
tctccagaacagcctgcctagtctgg

SEQ ID NO: 500 - DNA, 26 bp, Homo sapiens
ctccagaacagcctgcctagtctggt

SEQ ID NO: 501 - DNA, 26 bp, Homo sapiens
tccagaacagcctgcctagtctggtc

SEQ ID NO: 502 - DNA, 26 bp, Homo sapiens
ccagaacagcctgcctagtctggtca

SEQ ID NO: 503 - DNA, 26 bp, Homo sapiens
cagaacagcctgcctagtctggtcaa

SEQ ID NO: 504 - DNA, 26 bp, Homo sapiens
agaacagcctgcctagtctggtcaag

SEQ ID NO: 505 - DNA, 26 bp, Homo sapiens
gaacagcctgcctagtctggtcaaga

SEQ ID NO: 506 - DNA, 26 bp, Homo sapiens
aacagcctgcctagtctggtcaagac

SEQ ID NO: 507 - DNA, 26 bp, Homo sapiens
acagcctgcctagtctggtcaagaca

SEQ ID NO: 508 - DNA, 26 bp, Homo sapiens
cagcctgcctagtctggtcaagacaa

SEQ ID NO: 509 - DNA, 26 bp, Homo sapiens
agcctgcctagtctggtcaagacaat

SEQ ID NO: 510 - DNA, 26 bp, Homo sapiens
gcctgcctagtctggtcaagacaatt

SEQ ID NO: 511 - DNA, 26 bp, Homo sapiens
cctgcctagtctggtcaagacaattt

SEQ ID NO: 512 - DNA, 26 bp, Homo sapiens
ctgcctagtctggtcaagacaatttt

SEQ ID NO: 513 - DNA, 26 bp, Homo sapiens
tgcctagtctggtcaagacaattttc

SEQ ID NO: 514 - DNA, 26 bp, Homo sapiens
gcctagtctggtcaagacaattttct

SEQ ID NO: 515 - DNA, 26 bp, Homo sapiens
cctagtctggtcaagacaattttctc

SEQ ID NO: 516 - DNA, 26 bp, Homo sapiens
ctagtctggtcaagacaattttctca

SEQ ID NO: 517 - DNA, 26 bp, Homo sapiens
tagtctggtcaagacaattttctcaa

SEQ ID NO: 518 - DNA, 26 bp, Homo sapiens
agtctggtcaagacaattttctcaaa

SEQ ID NO: 519 - DNA, 26 bp, Homo sapiens
gtctggtcaagacaattttctcaaat

SEQ ID NO: 520 - DNA, 26 bp, Homo sapiens
tctggtcaagacaattttctcaaatc

SEQ ID NO: 521 - DNA, 26 bp, Homo sapiens
ctggtcaagacaattttctcaaatca

SEQ ID NO: 522 - DNA, 26 bp, Homo sapiens
tggtcaagacaattttctcaaatcaa

SEQ ID NO: 523 - DNA, 26 bp, Homo sapiens
ggtcaagacaattttctcaaatcaag

SEQ ID NO: 524 - DNA, 26 bp, Homo sapiens
gtcaagacaattttctcaaatcaagg

SEQ ID NO: 525 - DNA, 26 bp, Homo sapiens
tcaagacaattttctcaaatcaaggg

SEQ ID NO: 526 - DNA, 26 bp, Homo sapiens
caagacaattttctcaaatcaaggga

SEQ ID NO: 527 - DNA, 26 bp, Homo sapiens
aagacaattttctcaaatcaagggaa

SEQ ID NO: 528 - DNA, 26 bp, Homo sapiens
agacaattttctcaaatcaagggaag

SEQ ID NO: 529 - DNA, 26 bp, Homo sapiens
gacaattttctcaaatcaagggaagc

SEQ ID NO: 530 - DNA, 26 bp, Homo sapiens
acaattttctcaaatcaagggaagct

SEQ ID NO: 531 - DNA, 26 bp, Homo sapiens
caattttctcaaatcaagggaagctg

SEQ ID NO: 532 - DNA, 26 bp, Homo sapiens
aattttctcaaatcaagggaagctga

SEQ ID NO: 533 - DNA, 26 bp, Homo sapiens
attttctcaaatcaagggaagctgac

SEQ ID NO: 534 - DNA, 26 bp, Homo sapiens
ttttctcaaatcaagggaagctgact

SEQ ID NO: 535 - DNA, 26 bp, Homo sapiens
tttctcaaatcaagggaagctgactg

SEQ ID NO: 536 - DNA, 26 bp, Homo sapiens
ttctcaaatcaagggaagctgactga

SEQ ID NO: 537 - DNA, 26 bp, Homo sapiens
tctcaaatcaagggaagctgactgac

SEQ ID NO: 538 - DNA, 26 bp, Homo sapiens
ctcaaatcaagggaagctgactgaca

SEQ ID NO: 539 - DNA, 26 bp, Homo sapiens
tcaaatcaagggaagctgactgacag

SEQ ID NO: 540 - DNA, 26 bp, Homo sapiens
caaatcaagggaagctgactgacagc

SEQ ID NO: 541 - DNA, 26 bp, Homo sapiens
aaatcaagggaagctgactgacagca

SEQ ID NO: 542 - DNA, 26 bp, Homo sapiens
aatcaagggaagctgactgacagcat

SEQ ID NO: 543 - DNA, 26 bp, Homo sapiens
atcaagggaagctgactgacagcatt

SEQ ID NO: 544 - DNA, 26 bp, Homo sapiens
tcaagggaagctgactgacagcattt

SEQ ID NO: 545 - DNA, 26 bp, Homo sapiens
caagggaagctgactgacagcatttg

SEQ ID NO: 546 - DNA, 26 bp, Homo sapiens
aagggaagctgactgacagcatttga

SEQ ID NO: 547 - DNA, 26 bp, Homo sapiens
agggaagctgactgacagcatttgag

SEQ ID NO: 548 - DNA, 26 bp, Homo sapiens
gggaagctgactgacagcatttgagg

SEQ ID NO: 549 - DNA, 26 bp, Homo sapiens
ggaagctgactgacagcatttgaggt

SEQ ID NO: 550 - DNA, 26 bp, Homo sapiens
gaagctgactgacagcatttgaggtg

SEQ ID NO: 551 - DNA, 26 bp, Homo sapiens
aagctgactgacagcatttgaggtgg

SEQ ID NO: 552 - DNA, 26 bp, Homo sapiens
agctgactgacagcatttgaggtggt

SEQ ID NO: 553 - DNA, 26 bp, Homo sapiens
gctgactgacagcatttgaggtggtt

SEQ ID NO: 554 - DNA, 26 bp, Homo sapiens
ctgactgacagcatttgaggtggttc

SEQ ID NO: 555 - DNA, 26 bp, Homo sapiens
tgactgacagcatttgaggtggttca

SEQ ID NO: 556 - DNA, 26 bp, Homo sapiens
gactgacagcatttgaggtggttcac

SEQ ID NO: 557 - DNA, 26 bp, Homo sapiens
actgacagcatttgaggtggttcaca

SEQ ID NO: 558 - DNA, 26 bp, Homo sapiens
ctgacagcatttgaggtggttcacag

SEQ ID NO: 559 - DNA, 26 bp, Homo sapiens
tgacagcatttgaggtggttcacaga

SEQ ID NO: 560 - DNA, 26 bp, Homo sapiens
gacagcatttgaggtggttcacagac

SEQ ID NO: 561 - DNA, 26 bp, Homo sapiens
acagcatttgaggtggttcacagaca

SEQ ID NO: 562 - DNA, 26 bp, Homo sapiens
cagcatttgaggtggttcacagacat

SEQ ID NO: 563 - DNA, 26 bp, Homo sapiens
agcatttgaggtggttcacagacatg

SEQ ID NO: 564 - DNA, 26 bp, Homo sapiens
gcatttgaggtggttcacagacatgg

SEQ ID NO: 565 - DNA, 26 bp, Homo sapiens
catttgaggtggttcacagacatggc

SEQ ID NO: 566 - DNA, 26 bp, Homo sapiens
atttgaggtggttcacagacatggca

SEQ ID NO: 567 - DNA, 26 bp, Homo sapiens
tttgaggtggttcacagacatggcat

SEQ ID NO: 568 - DNA, 26 bp, Homo sapiens
ttgaggtggttcacagacatggcatt

SEQ ID NO: 569 - DNA, 26 bp, Homo sapiens
tgaggtggttcacagacatggcattt

SEQ ID NO: 570 - DNA, 26 bp, Homo sapiens
gaggtggttcacagacatggcattta

SEQ ID NO: 571 - DNA, 26 bp, Homo sapiens
aggtggttcacagacatggcatttaa

SEQ ID NO: 572 - DNA, 26 bp, Homo sapiens
ggtggttcacagacatggcatttaac

SEQ ID NO: 573 - DNA, 26 bp, Homo sapiens
gtggttcacagacatggcatttaact

SEQ ID NO: 574 - DNA, 26 bp, Homo sapiens
tggttcacagacatggcatttaacta

SEQ ID NO: 575 - DNA, 26 bp, Homo sapiens
ggttcacagacatggcatttaactaa

SEQ ID NO: 576 - DNA, 26 bp, Homo sapiens
gttcacagacatggcatttaactaac

SEQ ID NO: 577 - DNA, 26 bp, Homo sapiens
ttcacagacatggcatttaactaaca

SEQ ID NO: 578 - DNA, 26 bp, Homo sapiens
tcacagacatggcatttaactaacac

SEQ ID NO: 579 - DNA, 26 bp, Homo sapiens
cacagacatggcatttaactaacact

SEQ ID NO: 580 - DNA, 26 bp, Homo sapiens
acagacatggcatttaactaacactg

SEQ ID NO: 581 - DNA, 26 bp, Homo sapiens
cagacatggcatttaactaacactga

SEQ ID NO: 582 - DNA, 26 bp, Homo sapiens
agacatggcatttaactaacactgac

SEQ ID NO: 583 - DNA, 26 bp, Homo sapiens
gacatggcatttaactaacactgact

SEQ ID NO: 584 - DNA, 26 bp, Homo sapiens
acatggcatttaactaacactgactc

SEQ ID NO: 585 - DNA, 26 bp, Homo sapiens
catggcatttaactaacactgactcg

SEQ ID NO: 586 - DNA, 26 bp, Homo sapiens
atggcatttaactaacactgactcgc

SEQ ID NO: 587 - DNA, 26 bp, Homo sapiens
tggcatttaactaacactgactcgca

SEQ ID NO: 588 - DNA, 26 bp, Homo sapiens
ggcatttaactaacactgactcgcaa

SEQ ID NO: 589 - DNA, 26 bp, Homo sapiens
gcatttaactaacactgactcgcaaa

SEQ ID NO: 590 - DNA, 26 bp, Homo sapiens
catttaactaacactgactcgcaaag

SEQ ID NO: 591 - DNA, 26 bp, Homo sapiens
atttaactaacactgactcgcaaagt

SEQ ID NO: 592 - DNA, 26 bp, Homo sapiens
tttaactaacactgactcgcaaagta

SEQ ID NO: 593 - DNA, 26 bp, Homo sapiens
ttaactaacactgactcgcaaagtaa

SEQ ID NO: 594 - DNA, 26 bp, Homo sapiens
taactaacactgactcgcaaagtaaa

SEQ ID NO: 595 - DNA, 26 bp, Homo sapiens
aactaacactgactcgcaaagtaaaa

SEQ ID NO: 596 - DNA, 26 bp, Homo sapiens
actaacactgactcgcaaagtaaaaa

SEQ ID NO: 597 - DNA, 26 bp, Homo sapiens
ctaacactgactcgcaaagtaaaaac

SEQ ID NO: 598 - DNA, 26 bp, Homo sapiens
taacactgactcgcaaagtaaaaaca

SEQ ID NO: 599 - DNA, 26 bp, Homo sapiens
aacactgactcgcaaagtaaaaacag

SEQ ID NO: 600 - DNA, 26 bp, Homo sapiens
acactgactcgcaaagtaaaaacagc

SEQ ID NO: 601 - DNA, 26 bp, Homo sapiens
cactgactcgcaaagtaaaaacagca

SEQ ID NO: 602 - DNA, 26 bp, Homo sapiens
actgactcgcaaagtaaaaacagcac

SEQ ID NO: 603 - DNA, 26 bp, Homo sapiens
ctgactcgcaaagtaaaaacagcact

SEQ ID NO: 604 - DNA, 26 bp, Homo sapiens
tgactcgcaaagtaaaaacagcactt

SEQ ID NO: 605 - DNA, 26 bp, Homo sapiens
gactcgcaaagtaaaaacagcacttc

SEQ ID NO: 606 - DNA, 26 bp, Homo sapiens
actcgcaaagtaaaaacagcacttcc

SEQ ID NO: 607 - DNA, 26 bp, Homo sapiens
ctcgcaaagtaaaaacagcacttccc

SEQ ID NO: 608 - DNA, 26 bp, Homo sapiens
tcgcaaagtaaaaacagcacttccct

SEQ ID NO: 609 - DNA, 26 bp, Homo sapiens
cgcaaagtaaaaacagcacttccctt

SEQ ID NO: 610 - DNA, 26 bp, Homo sapiens
gcaaagtaaaaacagcacttcccttt

SEQ ID NO: 611 - DNA, 26 bp, Homo sapiens
caaagtaaaaacagcacttccctttt

SEQ ID NO: 612 - DNA, 26 bp, Homo sapiens
aaagtaaaaacagcacttcccttttc

SEQ ID NO: 613 - DNA, 26 bp, Homo sapiens
aagtaaaaacagcacttcccttttcg

SEQ ID NO: 614 - DNA, 26 bp, Homo sapiens
agtaaaaacagcacttcccttttcga

SEQ ID NO: 615 - DNA, 26 bp, Homo sapiens
gtaaaaacagcacttcccttttcgat

SEQ ID NO: 616 - DNA, 26 bp, Homo sapiens
taaaaacagcacttcccttttcgatt

SEQ ID NO: 617 - DNA, 26 bp, Homo sapiens
aaaaacagcacttcccttttcgattc

SEQ ID NO: 618 - DNA, 26 bp, Homo sapiens
aaaacagcacttcccttttcgattct

SEQ ID NO: 619 - DNA, 26 bp, Homo sapiens
aaacagcacttcccttttcgattctc

SEQ ID NO: 620 - DNA, 26 bp, Homo sapiens
aacagcacttcccttttcgattctct

SEQ ID NO: 621 - DNA, 26 bp, Homo sapiens
acagcacttcccttttcgattctctt

SEQ ID NO: 622 - DNA, 26 bp, Homo sapiens
cagcacttcccttttcgattctcttt

SEQ ID NO: 623 - DNA, 26 bp, Homo sapiens
agcacttcccttttcgattctctttc

SEQ ID NO: 624 - DNA, 26 bp, Homo sapiens
gcacttcccttttcgattctctttca

SEQ ID NO: 625 - DNA, 26 bp, Homo sapiens
cacttcccttttcgattctctttcaa

SEQ ID NO: 626 - DNA, 26 bp, Homo sapiens
acttcccttttcgattctctttcaaa

SEQ ID NO: 627 - DNA, 26 bp, Homo sapiens
cttcccttttcgattctctttcaaac

SEQ ID NO: 628 - DNA, 26 bp, Homo sapiens
ttcccttttcgattctctttcaaacc

SEQ ID NO: 629 - DNA, 26 bp, Homo sapiens
tcccttttcgattctctttcaaacct

SEQ ID NO: 630 - DNA, 26 bp, Homo sapiens
cccttttcgattctctttcaaacctt

SEQ ID NO: 631 - DNA, 26 bp, Homo sapiens
ccttttcgattctctttcaaacctta

SEQ ID NO: 632 - DNA, 26 bp, Homo sapiens
cttttcgattctctttcaaaccttat

SEQ ID NO: 633 - DNA, 26 bp, Homo sapiens
ttttcgattctctttcaaaccttatg

SEQ ID NO: 634 - DNA, 26 bp, Homo sapiens
tttcgattctctttcaaaccttatgc

SEQ ID NO: 635 - DNA, 26 bp, Homo sapiens
ttcgattctctttcaaaccttatgct

SEQ ID NO: 636 - DNA, 26 bp, Homo sapiens
tcgattctctttcaaaccttatgcta

SEQ ID NO: 637 - DNA, 26 bp, Homo sapiens
cgattctctttcaaaccttatgctat

SEQ ID NO: 638 - DNA, 26 bp, Homo sapiens
gattctctttcaaaccttatgctata

SEQ ID NO: 639 - DNA, 26 bp, Homo sapiens
attctctttcaaaccttatgctatat

SEQ ID NO: 640 - DNA, 26 bp, Homo sapiens
ttctctttcaaaccttatgctatatc

SEQ ID NO: 641 - DNA, 26 bp, Homo sapiens
tctctttcaaaccttatgctatatca

SEQ ID NO: 642 - DNA, 26 bp, Homo sapiens
ctctttcaaaccttatgctatatcaa

SEQ ID NO: 643 - DNA, 26 bp, Homo sapiens
tctttcaaaccttatgctatatcaag

SEQ ID NO: 644 - DNA, 26 bp, Homo sapiens
ctttcaaaccttatgctatatcaagg

SEQ ID NO: 645 - DNA, 26 bp, Homo sapiens
tttcaaaccttatgctatatcaagga

SEQ ID NO: 646 - DNA, 26 bp, Homo sapiens
ttcaaaccttatgctatatcaaggag

SEQ ID NO: 647 - DNA, 26 bp, Homo sapiens
tcaaaccttatgctatatcaaggaga

SEQ ID NO: 648 - DNA, 26 bp, Homo sapiens
caaaccttatgctatatcaaggagaa

SEQ ID NO: 649 - DNA, 26 bp, Homo sapiens
aaaccttatgctatatcaaggagaaa

SEQ ID NO: 650 - DNA, 26 bp, Homo sapiens
aaccttatgctatatcaaggagaaag

SEQ ID NO: 651 - DNA, 26 bp, Homo sapiens
accttatgctatatcaaggagaaaga

SEQ ID NO: 652 - DNA, 26 bp, Homo sapiens
ccttatgctatatcaaggagaaagac

SEQ ID NO: 653 - DNA, 26 bp, Homo sapiens
cttatgctatatcaaggagaaagaca

SEQ ID NO: 654 - DNA, 26 bp, Homo sapiens
ttatgctatatcaaggagaaagacaa

SEQ ID NO: 655 - DNA, 26 bp, Homo sapiens
tatgctatatcaaggagaaagacaaa

SEQ ID NO: 656 - DNA, 26 bp, Homo sapiens
atgctatatcaaggagaaagacaaat

SEQ ID NO: 657 - DNA, 26 bp, Homo sapiens
tgctatatcaaggagaaagacaaata

SEQ ID NO: 658 - DNA, 26 bp, Homo sapiens
gctatatcaaggagaaagacaaatat

SEQ ID NO: 659 - DNA, 26 bp, Homo sapiens
ctatatcaaggagaaagacaaatatt

SEQ ID NO: 660 - DNA, 26 bp, Homo sapiens
tatatcaaggagaaagacaaatattg

SEQ ID NO: 661 - DNA, 26 bp, Homo sapiens
atatcaaggagaaagacaaatattgg

SEQ ID NO: 662 - DNA, 26 bp, Homo sapiens
tatcaaggagaaagacaaatattggt

SEQ ID NO: 663 - DNA, 26 bp, Homo sapiens
atcaaggagaaagacaaatattggtg

SEQ ID NO: 664 - DNA, 26 bp, Homo sapiens
tcaaggagaaagacaaatattggtgc

SEQ ID NO: 665 - DNA, 26 bp, Homo sapiens
caaggagaaagacaaatattggtgct

SEQ ID NO: 666 - DNA, 26 bp, Homo sapiens
aaggagaaagacaaatattggtgcta

SEQ ID NO: 667 - DNA, 26 bp, Homo sapiens
aggagaaagacaaatattggtgctaa

SEQ ID NO: 668 - DNA, 26 bp, Homo sapiens
ggagaaagacaaatattggtgctaat

SEQ ID NO: 669 - DNA, 26 bp, Homo sapiens
gagaaagacaaatattggtgctaata

SEQ ID NO: 670 - DNA, 26 bp, Homo sapiens
agaaagacaaatattggtgctaatat

SEQ ID NO: 671 - DNA, 26 bp, Homo sapiens
gaaagacaaatattggtgctaatatg

SEQ ID NO: 672 - DNA, 26 bp, Homo sapiens
aaagacaaatattggtgctaatatgt

SEQ ID NO: 673 - DNA, 26 bp, Homo sapiens
aagacaaatattggtgctaatatgtc

SEQ ID NO: 674 - DNA, 26 bp, Homo sapiens
agacaaatattggtgctaatatgtct

SEQ ID NO: 675 - DNA, 26 bp, Homo sapiens
gacaaatattggtgctaatatgtctt

SEQ ID NO: 676 - DNA, 26 bp, Homo sapiens
acaaatattggtgctaatatgtcttt

SEQ ID NO: 677 - DNA, 26 bp, Homo sapiens
caaatattggtgctaatatgtcttta

SEQ ID NO: 678 - DNA, 26 bp, Homo sapiens
aaatattggtgctaatatgtctttat

SEQ ID NO: 679 - DNA, 26 bp, Homo sapiens
aatattggtgctaatatgtctttatt

SEQ ID NO: 680 - DNA, 26 bp, Homo sapiens
atattggtgctaatatgtctttatta

SEQ ID NO: 681 - DNA, 26 bp, Homo sapiens
tattggtgctaatatgtctttattac

SEQ ID NO: 682 - DNA, 26 bp, Homo sapiens
attggtgctaatatgtctttattacc

SEQ ID NO: 683 - DNA, 26 bp, Homo sapiens
ttggtgctaatatgtctttattacct

SEQ ID NO: 684 - DNA, 26 bp, Homo sapiens
tggtgctaatatgtctttattacctc

SEQ ID NO: 685 - DNA, 26 bp, Homo sapiens
ggtgctaatatgtctttattacctct

SEQ ID NO: 686 - DNA, 26 bp, Homo sapiens
gtgctaatatgtctttattacctctc

SEQ ID NO: 687 - DNA, 26 bp, Homo sapiens
tgctaatatgtctttattacctctcc

SEQ ID NO: 688 - DNA, 26 bp, Homo sapiens
gctaatatgtctttattacctctcca

SEQ ID NO: 689 - DNA, 26 bp, Homo sapiens
ctaatatgtctttattacctctccaa

SEQ ID NO: 690 - DNA, 26 bp, Homo sapiens
taatatgtctttattacctctccaac

SEQ ID NO: 691 - DNA, 26 bp, Homo sapiens
aatatgtctttattacctctccaaca

SEQ ID NO: 692 - DNA, 26 bp, Homo sapiens
atatgtctttattacctctccaacac

SEQ ID NO: 693 - DNA, 26 bp, Homo sapiens
tatgtctttattacctctccaacact

SEQ ID NO: 694 - DNA, 26 bp, Homo sapiens
atgtctttattacctctccaacactg

SEQ ID NO: 695 - DNA, 26 bp, Homo sapiens
tgtctttattacctctccaacactgg

SEQ ID NO: 696 - DNA, 26 bp, Homo sapiens
gtctttattacctctccaacactgga

SEQ ID NO: 697 - DNA, 26 bp, Homo sapiens
tctttattacctctccaacactggat

SEQ ID NO: 698 - DNA, 26 bp, Homo sapiens
ctttattacctctccaacactggatc

SEQ ID NO: 699 - DNA, 26 bp, Homo sapiens
tttattacctctccaacactggatct

SEQ ID NO: 700 - DNA, 26 bp, Homo sapiens
ttattacctctccaacactggatctc

SEQ ID NO: 701 - DNA, 26 bp, Homo sapiens
tattacctctccaacactggatctcc

SEQ ID NO: 702 - DNA, 26 bp, Homo sapiens
attacctctccaacactggatctccc

SEQ ID NO: 703 - DNA, 26 bp, Homo sapiens
ttacctctccaacactggatctccct

SEQ ID NO: 704 - DNA, 26 bp, Homo sapiens
tacctctccaacactggatctccctt

SEQ ID NO: 705 - DNA, 26 bp, Homo sapiens
acctctccaacactggatctcccttt

SEQ ID NO: 706 - DNA, 26 bp, Homo sapiens
cctctccaacactggatctccctttt

SEQ ID NO: 707 - DNA, 26 bp, Homo sapiens
ctctccaacactggatctcccttttt

SEQ ID NO: 708 - DNA, 26 bp, Homo sapiens
tctccaacactggatctcccttttta

SEQ ID NO: 709 - DNA, 26 bp, Homo sapiens
ctccaacactggatctccctttttat

SEQ ID NO: 710 - DNA, 26 bp, Homo sapiens
tccaacactggatctccctttttatc

SEQ ID NO: 711 - DNA, 26 bp, Homo sapiens
ccaacactggatctccctttttatca

SEQ ID NO: 712 - DNA, 26 bp, Homo sapiens
caacactggatctccctttttatcaa

SEQ ID NO: 713 - DNA, 26 bp, Homo sapiens
aacactggatctccctttttatcaaa

SEQ ID NO: 714 - DNA, 26 bp, Homo sapiens
acactggatctccctttttatcaaag

SEQ ID NO: 715 - DNA, 26 bp, Homo sapiens
cactggatctccctttttatcaaaga

SEQ ID NO: 716 - DNA, 26 bp, Homo sapiens
actggatctccctttttatcaaagac

SEQ ID NO: 717 - DNA, 26 bp, Homo sapiens
ctggatctccctttttatcaaagaca

SEQ ID NO: 718 - DNA, 26 bp, Homo sapiens
tggatctccctttttatcaaagacaa

SEQ ID NO: 719 - DNA, 26 bp, Homo sapiens
ggatctccctttttatcaaagacaag

SEQ ID NO: 720 - DNA, 26 bp, Homo sapiens
gatctccctttttatcaaagacaagc

SEQ ID NO: 721 - DNA, 26 bp, Homo sapiens
atctccctttttatcaaagacaagca

SEQ ID NO: 722 - DNA, 26 bp, Homo sapiens
tctccctttttatcaaagacaagcaa

SEQ ID NO: 723 - DNA, 26 bp, Homo sapiens
ctccctttttatcaaagacaagcaag

SEQ ID NO: 724 - DNA, 26 bp, Homo sapiens
tccctttttatcaaagacaagcaagc

SEQ ID NO: 725 - DNA, 26 bp, Homo sapiens
ccctttttatcaaagacaagcaagca

SEQ ID NO: 726 - DNA, 26 bp, Homo sapiens
cctttttatcaaagacaagcaagcag

SEQ ID NO: 727 - DNA, 26 bp, Homo sapiens
ctttttatcaaagacaagcaagcagg

SEQ ID NO: 728 - DNA, 26 bp, Homo sapiens
tttttatcaaagacaagcaagcaggc

SEQ ID NO: 729 - DNA, 26 bp, Homo sapiens
ttttatcaaagacaagcaagcaggca

SEQ ID NO: 730 - DNA, 26 bp, Homo sapiens
tttatcaaagacaagcaagcaggcat

SEQ ID NO: 731 - DNA, 26 bp, Homo sapiens
ttatcaaagacaagcaagcaggcatt

SEQ ID NO: 732 - DNA, 26 bp, Homo sapiens
tatcaaagacaagcaagcaggcatta

SEQ ID NO: 733 - DNA, 26 bp, Homo sapiens
atcaaagacaagcaagcaggcattaa

SEQ ID NO: 734 - DNA, 26 bp, Homo sapiens
tcaaagacaagcaagcaggcattaag

SEQ ID NO: 735 - DNA, 26 bp, Homo sapiens
caaagacaagcaagcaggcattaagc

SEQ ID NO: 736 - DNA, 26 bp, Homo sapiens
aaagacaagcaagcaggcattaagct

SEQ ID NO: 737 - DNA, 26 bp, Homo sapiens
aagacaagcaagcaggcattaagctc

SEQ ID NO: 738 - DNA, 26 bp, Homo sapiens
agacaagcaagcaggcattaagctca

SEQ ID NO: 739 - DNA, 26 bp, Homo sapiens
gacaagcaagcaggcattaagctcag

SEQ ID NO: 740 - DNA, 26 bp, Homo sapiens
acaagcaagcaggcattaagctcaga

SEQ ID NO: 741 - DNA, 26 bp, Homo sapiens
caagcaagcaggcattaagctcagaa

SEQ ID NO: 742 - DNA, 26 bp, Homo sapiens
aagcaagcaggcattaagctcagaat

SEQ ID NO: 743 - DNA, 26 bp, Homo sapiens
agcaagcaggcattaagctcagaatc

SEQ ID NO: 744 - DNA, 26 bp, Homo sapiens
gcaagcaggcattaagctcagaatca

SEQ ID NO: 745 - DNA, 26 bp, Homo sapiens
caagcaggcattaagctcagaatcac

SEQ ID NO: 746 - DNA, 26 bp, Homo sapiens
aagcaggcattaagctcagaatcact

SEQ ID NO: 747 - DNA, 26 bp, Homo sapiens
agcaggcattaagctcagaatcactg

SEQ ID NO: 748 - DNA, 26 bp, Homo sapiens
gcaggcattaagctcagaatcactgg

SEQ ID NO: 749 - DNA, 26 bp, Homo sapiens
caggcattaagctcagaatcactggc

SEQ ID NO: 750 - DNA, 26 bp, Homo sapiens
aggcattaagctcagaatcactggca

SEQ ID NO: 751 - DNA, 26 bp, Homo sapiens
ggcattaagctcagaatcactggcag

SEQ ID NO: 752 - DNA, 26 bp, Homo sapiens
gcattaagctcagaatcactggcagg

SEQ ID NO: 753 - DNA, 26 bp, Homo sapiens
cattaagctcagaatcactggcaggc

SEQ ID NO: 754 - DNA, 26 bp, Homo sapiens
attaagctcagaatcactggcaggca

SEQ ID NO: 755 - DNA, 26 bp, Homo sapiens
ttaagctcagaatcactggcaggcaa

SEQ ID NO: 756 - DNA, 26 bp, Homo sapiens
taagctcagaatcactggcaggcaat

SEQ ID NO: 757 - DNA, 26 bp, Homo sapiens
aagctcagaatcactggcaggcaata

SEQ ID NO: 758 - DNA, 26 bp, Homo sapiens
agctcagaatcactggcaggcaatag

SEQ ID NO: 759 - DNA, 26 bp, Homo sapiens
gctcagaatcactggcaggcaataga

SEQ ID NO: 760 - DNA, 26 bp, Homo sapiens
ctcagaatcactggcaggcaatagaa

SEQ ID NO: 761 - DNA, 26 bp, Homo sapiens
tcagaatcactggcaggcaatagaag

SEQ ID NO: 762 - DNA, 26 bp, Homo sapiens
cagaatcactggcaggcaatagaagc

SEQ ID NO: 763 - DNA, 26 bp, Homo sapiens
agaatcactggcaggcaatagaagct

SEQ ID NO: 764 - DNA, 26 bp, Homo sapiens
gaatcactggcaggcaatagaagcta

SEQ ID NO: 765 - DNA, 26 bp, Homo sapiens
aatcactggcaggcaatagaagctaa

SEQ ID NO: 766 - DNA, 26 bp, Homo sapiens
atcactggcaggcaatagaagctaag

SEQ ID NO: 767 - DNA, 26 bp, Homo sapiens
tcactggcaggcaatagaagctaagt

SEQ ID NO: 768 - DNA, 26 bp, Homo sapiens
cactggcaggcaatagaagctaagtc

SEQ ID NO: 769 - DNA, 26 bp, Homo sapiens
actggcaggcaatagaagctaagtca

SEQ ID NO: 770 - DNA, 26 bp, Homo sapiens
ctggcaggcaatagaagctaagtcag

SEQ ID NO: 771 - DNA, 26 bp, Homo sapiens
tggcaggcaatagaagctaagtcaga

SEQ ID NO: 772 - DNA, 26 bp, Homo sapiens
ggcaggcaatagaagctaagtcagat

SEQ ID NO: 773 - DNA, 26 bp, Homo sapiens
gcaggcaatagaagctaagtcagatt

SEQ ID NO: 774 - DNA, 26 bp, Homo sapiens
caggcaatagaagctaagtcagatta

SEQ ID NO: 775 - DNA, 26 bp, Homo sapiens
aggcaatagaagctaagtcagattat

SEQ ID NO: 776 - DNA, 26 bp, Homo sapiens
ggcaatagaagctaagtcagattatt

SEQ ID NO: 777 - DNA, 26 bp, Homo sapiens
gcaatagaagctaagtcagattattt

SEQ ID NO: 778 - DNA, 26 bp, Homo sapiens
caatagaagctaagtcagattattta

SEQ ID NO: 779 - DNA, 26 bp, Homo sapiens
aatagaagctaagtcagattatttaa

SEQ ID NO: 780 - DNA, 26 bp, Homo sapiens
atagaagctaagtcagattatttaat

SEQ ID NO: 781 - DNA, 26 bp, Homo sapiens
tagaagctaagtcagattatttaata

SEQ ID NO: 782 - DNA, 26 bp, Homo sapiens
agaagctaagtcagattatttaatat

SEQ ID NO: 783 - DNA, 26 bp, Homo sapiens
gaagctaagtcagattatttaatatt

SEQ ID NO: 784 - DNA, 26 bp, Homo sapiens
aagctaagtcagattatttaatatta

SEQ ID NO: 785 - DNA, 26 bp, Homo sapiens
agctaagtcagattatttaatattat

SEQ ID NO: 786 - DNA, 26 bp, Homo sapiens
gctaagtcagattatttaatattatc

SEQ ID NO: 787 - DNA, 26 bp, Homo sapiens
ctaagtcagattatttaatattatct

SEQ ID NO: 788 - DNA, 26 bp, Homo sapiens
taagtcagattatttaatattatctt

SEQ ID NO: 789 - DNA, 26 bp, Homo sapiens
aagtcagattatttaatattatcttg

SEQ ID NO: 790 - DNA, 26 bp, Homo sapiens
agtcagattatttaatattatcttgt

SEQ ID NO: 791 - DNA, 26 bp, Homo sapiens
gtcagattatttaatattatcttgtt

SEQ ID NO: 792 - DNA, 26 bp, Homo sapiens
tcagattatttaatattatcttgttt

SEQ ID NO: 793 - DNA, 26 bp, Homo sapiens
cagattatttaatattatcttgtttt

SEQ ID NO: 794 - DNA, 26 bp, Homo sapiens
agattatttaatattatcttgttttc

SEQ ID NO: 795 - DNA, 26 bp, Homo sapiens
gattatttaatattatcttgttttca

SEQ ID NO: 796 - DNA, 26 bp, Homo sapiens
attatttaatattatcttgttttcat

SEQ ID NO: 797 - DNA, 26 bp, Homo sapiens
ttatttaatattatcttgttttcatg

SEQ ID NO: 798 - DNA, 26 bp, Homo sapiens
tatttaatattatcttgttttcatga

SEQ ID NO: 799 - DNA, 26 bp, Homo sapiens
atttaatattatcttgttttcatgat

SEQ ID NO: 800 - DNA, 26 bp, Homo sapiens
tttaatattatcttgttttcatgatg

SEQ ID NO: 801 - DNA, 26 bp, Homo sapiens
ttaatattatcttgttttcatgatgt

SEQ ID NO: 802 - DNA, 26 bp, Homo sapiens
taatattatcttgttttcatgatgtt

SEQ ID NO: 803 - DNA, 26 bp, Homo sapiens
aatattatcttgttttcatgatgttt

SEQ ID NO: 804 - DNA, 26 bp, Homo sapiens
atattatcttgttttcatgatgttta

SEQ ID NO: 805 - DNA, 26 bp, Homo sapiens
tattatcttgttttcatgatgtttat

SEQ ID NO: 806 - DNA, 26 bp, Homo sapiens
attatcttgttttcatgatgtttatt

SEQ ID NO: 807 - DNA, 26 bp, Homo sapiens
ttatcttgttttcatgatgtttattc

SEQ ID NO: 808 - DNA, 26 bp, Homo sapiens
tatcttgttttcatgatgtttattct

SEQ ID NO: 809 - DNA, 26 bp, Homo sapiens
atcttgttttcatgatgtttattctt

SEQ ID NO: 810 - DNA, 26 bp, Homo sapiens
tcttgttttcatgatgtttattctta

SEQ ID NO: 811 - DNA, 26 bp, Homo sapiens
cttgttttcatgatgtttattcttat

SEQ ID NO: 812 - DNA, 26 bp, Homo sapiens
ttgttttcatgatgtttattcttatg

SEQ ID NO: 813 - DNA, 26 bp, Homo sapiens
tgttttcatgatgtttattcttatgt

SEQ ID NO: 814 - DNA, 26 bp, Homo sapiens
gttttcatgatgtttattcttatgtc

SEQ ID NO: 815 - DNA, 26 bp, Homo sapiens
ttttcatgatgtttattcttatgtct

SEQ ID NO: 816 - DNA, 26 bp, Homo sapiens
tttcatgatgtttattcttatgtctc

SEQ ID NO: 817 - DNA, 26 bp, Homo sapiens
ttcatgatgtttattcttatgtctct

SEQ ID NO: 818 - DNA, 26 bp, Homo sapiens
tcatgatgtttattcttatgtctctt

SEQ ID NO: 819 - DNA, 26 bp, Homo sapiens
catgatgtttattcttatgtctcttc

SEQ ID NO: 820 - DNA, 26 bp, Homo sapiens
atgatgtttattcttatgtctcttcc

SEQ ID NO: 821 - DNA, 26 bp, Homo sapiens
tgatgtttattcttatgtctcttccc

SEQ ID NO: 822 - DNA, 26 bp, Homo sapiens
gatgtttattcttatgtctcttccct

SEQ ID NO: 823 - DNA, 26 bp, Homo sapiens
atgtttattcttatgtctcttccctt

SEQ ID NO: 824 - DNA, 26 bp, Homo sapiens
tgtttattcttatgtctcttcccttc

SEQ ID NO: 825 - DNA, 26 bp, Homo sapiens
gtttattcttatgtctcttcccttct

SEQ ID NO: 826 - DNA, 26 bp, Homo sapiens
tttattcttatgtctcttcccttctg

SEQ ID NO: 827 - DNA, 26 bp, Homo sapiens
ttattcttatgtctcttcccttctgt

SEQ ID NO: 828 - DNA, 26 bp, Homo sapiens
tattcttatgtctcttcccttctgtt

SEQ ID NO: 829 - DNA, 26 bp, Homo sapiens
attcttatgtctcttcccttctgttt

SEQ ID NO: 830 - DNA, 26 bp, Homo sapiens
ttcttatgtctcttcccttctgtttg

SEQ ID NO: 831 - DNA, 26 bp, Homo sapiens
tcttatgtctcttcccttctgtttgc

SEQ ID NO: 832 - DNA, 26 bp, Homo sapiens
cttatgtctcttcccttctgtttgca

SEQ ID NO: 833 - DNA, 26 bp, Homo sapiens
ttatgtctcttcccttctgtttgcag

SEQ ID NO: 834 - DNA, 26 bp, Homo sapiens
tatgtctcttcccttctgtttgcagc

SEQ ID NO: 835 - DNA, 26 bp, Homo sapiens
atgtctcttcccttctgtttgcagca

SEQ ID NO: 836 - DNA, 26 bp, Homo sapiens
tgtctcttcccttctgtttgcagcag

SEQ ID NO: 837 - DNA, 26 bp, Homo sapiens
gtctcttcccttctgtttgcagcagg

SEQ ID NO: 838 - DNA, 26 bp, Homo sapiens
tctcttcccttctgtttgcagcagga

SEQ ID NO: 839 - DNA, 26 bp, Homo sapiens
ctcttcccttctgtttgcagcaggag

SEQ ID NO: 840 - DNA, 26 bp, Homo sapiens
tcttcccttctgtttgcagcaggagg

SEQ ID NO: 841 - DNA, 26 bp, Homo sapiens
cttcccttctgtttgcagcaggaggg

SEQ ID NO: 842 - DNA, 26 bp, Homo sapiens
ttcccttctgtttgcagcaggagggt

SEQ ID NO: 843 - DNA, 26 bp, Homo sapiens
tcccttctgtttgcagcaggagggtg

SEQ ID NO: 844 - DNA, 26 bp, Homo sapiens
cccttctgtttgcagcaggagggtgc

SEQ ID NO: 845 - DNA, 26 bp, Homo sapiens
ccttctgtttgcagcaggagggtgct

SEQ ID NO: 846 - DNA, 26 bp, Homo sapiens
cttctgtttgcagcaggagggtgctg

SEQ ID NO: 847 - DNA, 26 bp, Homo sapiens
ttctgtttgcagcaggagggtgctgg

SEQ ID NO: 848 - DNA, 26 bp, Homo sapiens
tctgtttgcagcaggagggtgctggt

SEQ ID NO: 849 - DNA, 26 bp, Homo sapiens
ctgtttgcagcaggagggtgctggtt

SEQ ID NO: 850 - DNA, 26 bp, Homo sapiens
tgtttgcagcaggagggtgctggttt

SEQ ID NO: 851 - DNA, 26 bp, Homo sapiens
gtttgcagcaggagggtgctggtttt

SEQ ID NO: 852 - DNA, 26 bp, Homo sapiens
tttgcagcaggagggtgctggttttt

SEQ ID NO: 853 - DNA, 26 bp, Homo sapiens
ttgcagcaggagggtgctggtttttc

SEQ ID NO: 854 - DNA, 26 bp, Homo sapiens
tgcagcaggagggtgctggtttttca

SEQ ID NO: 855 - DNA, 26 bp, Homo sapiens
gcagcaggagggtgctggtttttcac

SEQ ID NO: 856 - DNA, 26 bp, Homo sapiens
cagcaggagggtgctggtttttcact

SEQ ID NO: 857 - DNA, 26 bp, Homo sapiens
agcaggagggtgctggtttttcactt

SEQ ID NO: 858 - DNA, 26 bp, Homo sapiens
gcaggagggtgctggtttttcactta

SEQ ID NO: 859 - DNA, 26 bp, Homo sapiens
caggagggtgctggtttttcacttat

SEQ ID NO: 860 - DNA, 26 bp, Homo sapiens
aggagggtgctggtttttcacttatg

SEQ ID NO: 861 - DNA, 26 bp, Homo sapiens
ggagggtgctggtttttcacttatgg

SEQ ID NO: 862 - DNA, 26 bp, Homo sapiens
gagggtgctggtttttcacttatgga

SEQ ID NO: 863 - DNA, 26 bp, Homo sapiens
agggtgctggtttttcacttatggag

SEQ ID NO: 864 - DNA, 26 bp, Homo sapiens
gggtgctggtttttcacttatggagt

SEQ ID NO: 865 - DNA, 26 bp, Homo sapiens
ggtgctggtttttcacttatggagta

SEQ ID NO: 866 - DNA, 26 bp, Homo sapiens
gtgctggtttttcacttatggagtaa

SEQ ID NO: 867 - DNA, 26 bp, Homo sapiens
tgctggtttttcacttatggagtaat

SEQ ID NO: 868 - DNA, 26 bp, Homo sapiens
gctggtttttcacttatggagtaata

SEQ ID NO: 869 - DNA, 26 bp, Homo sapiens
ctggtttttcacttatggagtaatat

SEQ ID NO: 870 - DNA, 26 bp, Homo sapiens
tggtttttcacttatggagtaatata

SEQ ID NO: 871 - DNA, 26 bp, Homo sapiens
ggtttttcacttatggagtaatataa

SEQ ID NO: 872 - DNA, 26 bp, Homo sapiens
gtttttcacttatggagtaatataag

SEQ ID NO: 873 - DNA, 26 bp, Homo sapiens
tttttcacttatggagtaatataagg

SEQ ID NO: 874 - DNA, 26 bp, Homo sapiens
ttttcacttatggagtaatataaggc

SEQ ID NO: 875 - DNA, 26 bp, Homo sapiens
tttcacttatggagtaatataaggct

SEQ ID NO: 876 - DNA, 26 bp, Homo sapiens
ttcacttatggagtaatataaggctg

SEQ ID NO: 877 - DNA, 26 bp, Homo sapiens
tcacttatggagtaatataaggctgt

SEQ ID NO: 878 - DNA, 26 bp, Homo sapiens
cacttatggagtaatataaggctgtc

SEQ ID NO: 879 - DNA, 26 bp, Homo sapiens
acttatggagtaatataaggctgtct

SEQ ID NO: 880 - DNA, 26 bp, Homo sapiens
cttatggagtaatataaggctgtctt

SEQ ID NO: 881 - DNA, 26 bp, Homo sapiens
ttatggagtaatataaggctgtcttt

SEQ ID NO: 882 - DNA, 26 bp, Homo sapiens
tatggagtaatataaggctgtctttg

SEQ ID NO: 883 - DNA, 26 bp, Homo sapiens
atggagtaatataaggctgtctttga

SEQ ID NO: 884 - DNA, 26 bp, Homo sapiens
tggagtaatataaggctgtctttgaa

SEQ ID NO: 885 - DNA, 26 bp, Homo sapiens
ggagtaatataaggctgtctttgaaa

SEQ ID NO: 886 - DNA, 26 bp, Homo sapiens
gagtaatataaggctgtctttgaaaa

SEQ ID NO: 887 - DNA, 26 bp, Homo sapiens
agtaatataaggctgtctttgaaaat

SEQ ID NO: 888 - DNA, 26 bp, Homo sapiens
gtaatataaggctgtctttgaaaata

SEQ ID NO: 889 - DNA, 26 bp, Homo sapiens
taatataaggctgtctttgaaaataa

SEQ ID NO: 890 - DNA, 26 bp, Homo sapiens
aatataaggctgtctttgaaaataag

SEQ ID NO: 891 - DNA, 26 bp, Homo sapiens
atataaggctgtctttgaaaataagt

SEQ ID NO: 892 - DNA, 26 bp, Homo sapiens
tataaggctgtctttgaaaataagtt

SEQ ID NO: 893 - DNA, 26 bp, Homo sapiens
ataaggctgtctttgaaaataagttt

SEQ ID NO: 894 - DNA, 26 bp, Homo sapiens
taaggctgtctttgaaaataagttta

SEQ ID NO: 895 - DNA, 26 bp, Homo sapiens
aaggctgtctttgaaaataagtttac

SEQ ID NO: 896 - DNA, 26 bp, Homo sapiens
aggctgtctttgaaaataagtttacg

SEQ ID NO: 897 - DNA, 26 bp, Homo sapiens
ggctgtctttgaaaataagtttacgc

SEQ ID NO: 898 - DNA, 26 bp, Homo sapiens
gctgtctttgaaaataagtttacgct

SEQ ID NO: 899 - DNA, 26 bp, Homo sapiens
ctgtctttgaaaataagtttacgctt

SEQ ID NO: 900 - DNA, 26 bp, Homo sapiens
tgtctttgaaaataagtttacgctta

SEQ ID NO: 901 - DNA, 26 bp, Homo sapiens
gtctttgaaaataagtttacgcttaa

SEQ ID NO: 902 - DNA, 26 bp, Homo sapiens
tctttgaaaataagtttacgcttaaa

SEQ ID NO: 903 - DNA, 26 bp, Homo sapiens
ctttgaaaataagtttacgcttaaaa

SEQ ID NO: 904 - DNA, 26 bp, Homo sapiens
tttgaaaataagtttacgcttaaaaa

SEQ ID NO: 905 - DNA, 26 bp, Homo sapiens
ttgaaaataagtttacgcttaaaaaa

SEQ ID NO: 906 - DNA, 26 bp, Homo sapiens
tgaaaataagtttacgcttaaaaaat

SEQ ID NO: 907 - DNA, 26 bp, Homo sapiens
gaaaataagtttacgcttaaaaaatg

SEQ ID NO: 908 - DNA, 26 bp, Homo sapiens
aaaataagtttacgcttaaaaaatga

SEQ ID NO: 909 - DNA, 26 bp, Homo sapiens
aaataagtttacgcttaaaaaatgag

SEQ ID NO: 910 - DNA, 26 bp, Homo sapiens
aataagtttacgcttaaaaaatgagt

SEQ ID NO: 911 - DNA, 26 bp, Homo sapiens
ataagtttacgcttaaaaaatgagtc

SEQ ID NO: 912 - DNA, 26 bp, Homo sapiens
taagtttacgcttaaaaaatgagtca

SEQ ID NO: 913 - DNA, 26 bp, Homo sapiens
aagtttacgcttaaaaaatgagtcaa

SEQ ID NO: 914 - DNA, 26 bp, Homo sapiens
agtttacgcttaaaaaatgagtcaat

SEQ ID NO: 915 - DNA, 26 bp, Homo sapiens
gtttacgcttaaaaaatgagtcaatt

SEQ ID NO: 916 - DNA, 26 bp, Homo sapiens
tttacgcttaaaaaatgagtcaattt

SEQ ID NO: 917 - DNA, 26 bp, Homo sapiens
ttacgcttaaaaaatgagtcaattta

SEQ ID NO: 918 - DNA, 26 bp, Homo sapiens
tacgcttaaaaaatgagtcaatttaa

SEQ ID NO: 919 - DNA, 26 bp, Homo sapiens
acgcttaaaaaatgagtcaatttaaa

SEQ ID NO: 920 - DNA, 26 bp, Homo sapiens
cgcttaaaaaatgagtcaatttaaag

SEQ ID NO: 921 - DNA, 26 bp, Homo sapiens
gcttaaaaaatgagtcaatttaaagg

SEQ ID NO: 922 - DNA, 26 bp, Homo sapiens
cttaaaaaatgagtcaatttaaagga

SEQ ID NO: 923 - DNA, 26 bp, Homo sapiens
ttaaaaaatgagtcaatttaaaggaa

SEQ ID NO: 924 - DNA, 26 bp, Homo sapiens
taaaaaatgagtcaatttaaaggaaa

SEQ ID NO: 925 - DNA, 26 bp, Homo sapiens
aaaaaatgagtcaatttaaaggaaag

SEQ ID NO: 926 - DNA, 26 bp, Homo sapiens
aaaaatgagtcaatttaaaggaaagt

SEQ ID NO: 927 - DNA, 26 bp, Homo sapiens
aaaatgagtcaatttaaaggaaagta

SEQ ID NO: 928 - DNA, 26 bp, Homo sapiens
aaatgagtcaatttaaaggaaagtat

SEQ ID NO: 929 - DNA, 26 bp, Homo sapiens
aatgagtcaatttaaaggaaagtatt

SEQ ID NO: 930 - DNA, 26 bp, Homo sapiens
atgagtcaatttaaaggaaagtatta

SEQ ID NO: 931 - DNA, 26 bp, Homo sapiens
tgagtcaatttaaaggaaagtattat

SEQ ID NO: 932 - DNA, 26 bp, Homo sapiens
gagtcaatttaaaggaaagtattatt

SEQ ID NO: 933 - DNA, 26 bp, Homo sapiens
agtcaatttaaaggaaagtattatta

SEQ ID NO: 934 - DNA, 26 bp, Homo sapiens
gtcaatttaaaggaaagtattattaa

SEQ ID NO: 935 - DNA, 26 bp, Homo sapiens
tcaatttaaaggaaagtattattaat

SEQ ID NO: 936 - DNA, 26 bp, Homo sapiens
caatttaaaggaaagtattattaata

SEQ ID NO: 937 - DNA, 26 bp, Homo sapiens
aatttaaaggaaagtattattaataa

SEQ ID NO: 938 - DNA, 26 bp, Homo sapiens
atttaaaggaaagtattattaataat

SEQ ID NO: 939 - DNA, 26 bp, Homo sapiens
tttaaaggaaagtattattaataata

SEQ ID NO: 940 - DNA, 26 bp, Homo sapiens
ttaaaggaaagtattattaataatag

SEQ ID NO: 941 - DNA, 26 bp, Homo sapiens
taaaggaaagtattattaataatagt

SEQ ID NO: 942 - DNA, 26 bp, Homo sapiens
aaaggaaagtattattaataatagtg

SEQ ID NO: 943 - DNA, 26 bp, Homo sapiens
aaggaaagtattattaataatagtga

SEQ ID NO: 944 - DNA, 26 bp, Homo sapiens
aggaaagtattattaataatagtgaa

SEQ ID NO: 945 - DNA, 26 bp, Homo sapiens
ggaaagtattattaataatagtgaag

SEQ ID NO: 946 - DNA, 26 bp, Homo sapiens
gaaagtattattaataatagtgaaga

SEQ ID NO: 947 - DNA, 26 bp, Homo sapiens
aaagtattattaataatagtgaagat

SEQ ID NO: 948 - DNA, 26 bp, Homo sapiens
aagtattattaataatagtgaagata

SEQ ID NO: 949 - DNA, 26 bp, Homo sapiens
agtattattaataatagtgaagataa

SEQ ID NO: 950 - DNA, 26 bp, Homo sapiens
gtattattaataatagtgaagataat

SEQ ID NO: 951 - DNA, 26 bp, Homo sapiens
tattattaataatagtgaagataatc

SEQ ID NO: 952 - DNA, 26 bp, Homo sapiens
attattaataatagtgaagataatcc

SEQ ID NO: 953 - DNA, 26 bp, Homo sapiens
ttattaataatagtgaagataatcca

SEQ ID NO: 954 - DNA, 26 bp, Homo sapiens
tattaataatagtgaagataatccat

SEQ ID NO: 955 - DNA, 26 bp, Homo sapiens
attaataatagtgaagataatccatg

SEQ ID NO: 956 - DNA, 26 bp, Homo sapiens
ttaataatagtgaagataatccatgg

SEQ ID NO: 957 - DNA, 26 bp, Homo sapiens
taataatagtgaagataatccatggt

SEQ ID NO: 958 - DNA, 26 bp, Homo sapiens
aataatagtgaagataatccatggtt

SEQ ID NO: 959 - DNA, 26 bp, Homo sapiens
ataatagtgaagataatccatggttt

SEQ ID NO: 960 - DNA, 26 bp, Homo sapiens
taatagtgaagataatccatggtttt

SEQ ID NO: 961 - DNA, 26 bp, Homo sapiens
aatagtgaagataatccatggtttta

SEQ ID NO: 962 - DNA, 26 bp, Homo sapiens
atagtgaagataatccatggttttaa

SEQ ID NO: 963 - DNA, 26 bp, Homo sapiens
tagtgaagataatccatggttttaaa

SEQ ID NO: 964 - DNA, 26 bp, Homo sapiens
agtgaagataatccatggttttaaaa

SEQ ID NO: 965 - DNA, 26 bp, Homo sapiens
gtgaagataatccatggttttaaaaa

SEQ ID NO: 966 - DNA, 26 bp, Homo sapiens
tgaagataatccatggttttaaaaaa

SEQ ID NO: 967 - DNA, 26 bp, Homo sapiens
gaagataatccatggttttaaaaaat

SEQ ID NO: 968 - DNA, 26 bp, Homo sapiens
aagataatccatggttttaaaaaata

SEQ ID NO: 969 - DNA, 26 bp, Homo sapiens
agataatccatggttttaaaaaatag

SEQ ID NO: 970 - DNA, 26 bp, Homo sapiens
gataatccatggttttaaaaaataga

SEQ ID NO: 971 - DNA, 26 bp, Homo sapiens
ataatccatggttttaaaaaatagag

SEQ ID NO: 972 - DNA, 26 bp, Homo sapiens
taatccatggttttaaaaaatagaga

SEQ ID NO: 973 - DNA, 26 bp, Homo sapiens
aatccatggttttaaaaaatagagag

SEQ ID NO: 974 - DNA, 26 bp, Homo sapiens
atccatggttttaaaaaatagagagc

SEQ ID NO: 975 - DNA, 26 bp, Homo sapiens
tccatggttttaaaaaatagagagcg

SEQ ID NO: 976 - DNA, 26 bp, Homo sapiens
ccatggttttaaaaaatagagagcgg

SEQ ID NO: 977 - DNA, 26 bp, Homo sapiens
catggttttaaaaaatagagagcggt

SEQ ID NO: 978 - DNA, 26 bp, Homo sapiens
atggttttaaaaaatagagagcggtg

SEQ ID NO: 979 - DNA, 26 bp, Homo sapiens
tggttttaaaaaatagagagcggtgg

SEQ ID NO: 980 - DNA, 26 bp, Homo sapiens
ggttttaaaaaatagagagcggtggt

SEQ ID NO: 981 - DNA, 26 bp, Homo sapiens
gttttaaaaaatagagagcggtggta

SEQ ID NO: 982 - DNA, 26 bp, Homo sapiens
ttttaaaaaatagagagcggtggtat

SEQ ID NO: 983 - DNA, 26 bp, Homo sapiens
tttaaaaaatagagagcggtggtatg

SEQ ID NO: 984 - DNA, 26 bp, Homo sapiens
ttaaaaaatagagagcggtggtatgt

SEQ ID NO: 985 - DNA, 26 bp, Homo sapiens
taaaaaatagagagcggtggtatgtg

SEQ ID NO: 986 - DNA, 26 bp, Homo sapiens
aaaaaatagagagcggtggtatgtga

SEQ ID NO: 987 - DNA, 26 bp, Homo sapiens
aaaaatagagagcggtggtatgtgat

SEQ ID NO: 988 - DNA, 26 bp, Homo sapiens
aaaatagagagcggtggtatgtgatt

SEQ ID NO: 989 - DNA, 26 bp, Homo sapiens
aaatagagagcggtggtatgtgattg

SEQ ID NO: 990 - DNA, 26 bp, Homo sapiens
aatagagagcggtggtatgtgattgc

SEQ ID NO: 991 - DNA, 26 bp, Homo sapiens
atagagagcggtggtatgtgattgcc

SEQ ID NO: 992 - DNA, 26 bp, Homo sapiens
tagagagcggtggtatgtgattgcct

SEQ ID NO: 993 - DNA, 26 bp, Homo sapiens
agagagcggtggtatgtgattgccta

SEQ ID NO: 994 - DNA, 26 bp, Homo sapiens
gagagcggtggtatgtgattgcctaa

SEQ ID NO: 995 - DNA, 26 bp, Homo sapiens
agagcggtggtatgtgattgcctaaa

SEQ ID NO: 996 - DNA, 26 bp, Homo sapiens
gagcggtggtatgtgattgcctaaaa

SEQ ID NO: 997 - DNA, 26 bp, Homo sapiens
agcggtggtatgtgattgcctaaaag

SEQ ID NO: 998 - DNA, 26 bp, Homo sapiens
gcggtggtatgtgattgcctaaaagt

SEQ ID NO: 999 - DNA, 26 bp, Homo sapiens
cggtggtatgtgattgcctaaaagtt

SEQ ID NO: 1000 - DNA, 26 bp, Homo sapiens
ggtggtatgtgattgcctaaaagttg

SEQ ID NO: 1001 - DNA, 26 bp, Homo sapiens
gtggtatgtgattgcctaaaagttgg

SEQ ID NO: 1002 - DNA, 26 bp, Homo sapiens
tggtatgtgattgcctaaaagttgga

SEQ ID NO: 1003 - DNA, 26 bp, Homo sapiens
ggtatgtgattgcctaaaagttggaa

SEQ ID NO: 1004 - DNA, 26 bp, Homo sapiens
gtatgtgattgcctaaaagttggaaa

SEQ ID NO: 1005 - DNA, 26 bp, Homo sapiens
tatgtgattgcctaaaagttggaaaa

SEQ ID NO: 1006 - DNA, 26 bp, Homo sapiens
atgtgattgcctaaaagttggaaaac

SEQ ID NO: 1007 - DNA, 26 bp, Homo sapiens
tgtgattgcctaaaagttggaaaaca

SEQ ID NO: 1008 - DNA, 26 bp, Homo sapiens
gtgattgcctaaaagttggaaaacac

SEQ ID NO: 1009 - DNA, 26 bp, Homo sapiens
tgattgcctaaaagttggaaaacact

SEQ ID NO: 1010 - DNA, 26 bp, Homo sapiens
gattgcctaaaagttggaaaacactc

SEQ ID NO: 1011 - DNA, 26 bp, Homo sapiens
attgcctaaaagttggaaaacactcc

SEQ ID NO: 1012 - DNA, 26 bp, Homo sapiens
ttgcctaaaagttggaaaacactcca

SEQ ID NO: 1013 - DNA, 26 bp, Homo sapiens
tgcctaaaagttggaaaacactccag

SEQ ID NO: 1014 - DNA, 26 bp, Homo sapiens
gcctaaaagttggaaaacactccaga

SEQ ID NO: 1015 - DNA, 26 bp, Homo sapiens
cctaaaagttggaaaacactccagag

SEQ ID NO: 1016 - DNA, 26 bp, Homo sapiens
ctaaaagttggaaaacactccagagc

SEQ ID NO: 1017 - DNA, 26 bp, Homo sapiens
taaaagttggaaaacactccagagca

SEQ ID NO: 1018 - DNA, 26 bp, Homo sapiens
aaaagttggaaaacactccagagcaa

SEQ ID NO: 1019 - DNA, 26 bp, Homo sapiens
aaagttggaaaacactccagagcaag

SEQ ID NO: 1020 - DNA, 26 bp, Homo sapiens
aagttggaaaacactccagagcaagg

SEQ ID NO: 1021 - DNA, 26 bp, Homo sapiens
agttggaaaacactccagagcaaggg

SEQ ID NO: 1022 - DNA, 26 bp, Homo sapiens
gttggaaaacactccagagcaagggt

SEQ ID NO: 1023 - DNA, 26 bp, Homo sapiens
ttggaaaacactccagagcaagggtt

SEQ ID NO: 1024 - DNA, 26 bp, Homo sapiens
tggaaaacactccagagcaagggttc

SEQ ID NO: 1025 - DNA, 26 bp, Homo sapiens
ggaaaacactccagagcaagggttct

SEQ ID NO: 1026 - DNA, 26 bp, Homo sapiens
gaaaacactccagagcaagggttctc

SEQ ID NO: 1027 - DNA, 26 bp, Homo sapiens
aaaacactccagagcaagggttctca

SEQ ID NO: 1028 - DNA, 26 bp, Homo sapiens
aaacactccagagcaagggttctcac

SEQ ID NO: 1029 - DNA, 26 bp, Homo sapiens
aacactccagagcaagggttctcaca

SEQ ID NO: 1030 - DNA, 26 bp, Homo sapiens
acactccagagcaagggttctcacaa

SEQ ID NO: 1031 - DNA, 26 bp, Homo sapiens
cactccagagcaagggttctcacaaa

SEQ ID NO: 1032 - DNA, 26 bp, Homo sapiens
actccagagcaagggttctcacaaat

SEQ ID NO: 1033 - DNA, 26 bp, Homo sapiens
ctccagagcaagggttctcacaaatt

SEQ ID NO: 1034 - DNA, 26 bp, Homo sapiens
tccagagcaagggttctcacaaatta

SEQ ID NO: 1035 - DNA, 26 bp, Homo sapiens
ccagagcaagggttctcacaaattat

SEQ ID NO: 1036 - DNA, 26 bp, Homo sapiens
cagagcaagggttctcacaaattatt

SEQ ID NO: 1037 - DNA, 26 bp, Homo sapiens
agagcaagggttctcacaaattattt

SEQ ID NO: 1038 - DNA, 26 bp, Homo sapiens
gagcaagggttctcacaaattatttc

SEQ ID NO: 1039 - DNA, 26 bp, Homo sapiens
agcaagggttctcacaaattatttcc

SEQ ID NO: 1040 - DNA, 26 bp, Homo sapiens
gcaagggttctcacaaattatttcca

SEQ ID NO: 1041 - DNA, 26 bp, Homo sapiens
caagggttctcacaaattatttccaa

SEQ ID NO: 1042 - DNA, 26 bp, Homo sapiens
aagggttctcacaaattatttccaaa

SEQ ID NO: 1043 - DNA, 26 bp, Homo sapiens
agggttctcacaaattatttccaaat

SEQ ID NO: 1044 - DNA, 26 bp, Homo sapiens
gggttctcacaaattatttccaaata

SEQ ID NO: 1045 - DNA, 26 bp, Homo sapiens
ggttctcacaaattatttccaaataa

SEQ ID NO: 1046 - DNA, 26 bp, Homo sapiens
gttctcacaaattatttccaaataat

SEQ ID NO: 1047 - DNA, 26 bp, Homo sapiens
ttctcacaaattatttccaaataatc

SEQ ID NO: 1048 - DNA, 26 bp, Homo sapiens
tctcacaaattatttccaaataatcc

SEQ ID NO: 1049 - DNA, 26 bp, Homo sapiens
ctcacaaattatttccaaataatccc

SEQ ID NO: 1050 - DNA, 26 bp, Homo sapiens
tcacaaattatttccaaataatccca

SEQ ID NO: 1051 - DNA, 26 bp, Homo sapiens
cacaaattatttccaaataatcccaa

SEQ ID NO: 1052 - DNA, 26 bp, Homo sapiens
acaaattatttccaaataatcccaaa

SEQ ID NO: 1053 - DNA, 26 bp, Homo sapiens
caaattatttccaaataatcccaaat

SEQ ID NO: 1054 - DNA, 26 bp, Homo sapiens
aaattatttccaaataatcccaaatt

SEQ ID NO: 1055 - DNA, 26 bp, Homo sapiens
aattatttccaaataatcccaaatta

SEQ ID NO: 1056 - DNA, 26 bp, Homo sapiens
attatttccaaataatcccaaattat

SEQ ID NO: 1057 - DNA, 26 bp, Homo sapiens
ttatttccaaataatcccaaattatt

SEQ ID NO: 1058 - DNA, 26 bp, Homo sapiens
tatttccaaataatcccaaattattt

SEQ ID NO: 1059 - DNA, 26 bp, Homo sapiens
atttccaaataatcccaaattatttc

SEQ ID NO: 1060 - DNA, 26 bp, Homo sapiens
tttccaaataatcccaaattatttcc

SEQ ID NO: 1061 - DNA, 26 bp, Homo sapiens
ttccaaataatcccaaattatttcca

SEQ ID NO: 1062 - DNA, 26 bp, Homo sapiens
tccaaataatcccaaattatttccaa

SEQ ID NO: 1063 - DNA, 26 bp, Homo sapiens
ccaaataatcccaaattatttccaaa

SEQ ID NO: 1064 - DNA, 26 bp, Homo sapiens
caaataatcccaaattatttccaaat

SEQ ID NO: 1065 - DNA, 26 bp, Homo sapiens
aaataatcccaaattatttccaaata

SEQ ID NO: 1066 - DNA, 26 bp, Homo sapiens
aataatcccaaattatttccaaataa

SEQ ID NO: 1067 - DNA, 26 bp, Homo sapiens
ataatcccaaattatttccaaataat

SEQ ID NO: 1068 - DNA, 26 bp, Homo sapiens
taatcccaaattatttccaaataatc

SEQ ID NO: 1069 - DNA, 26 bp, Homo sapiens
aatcccaaattatttccaaataatcc

SEQ ID NO: 1070 - DNA, 26 bp, Homo sapiens
atcccaaattatttccaaataatccc

SEQ ID NO: 1071 - DNA, 26 bp, Homo sapiens
tcccaaattatttccaaataatcccc

SEQ ID NO: 1072 - DNA, 26 bp, Homo sapiens
cccaaattatttccaaataatcccct

SEQ ID NO: 1073 - DNA, 26 bp, Homo sapiens
ccaaattatttccaaataatcccctc

SEQ ID NO: 1074 - DNA, 26 bp, Homo sapiens
caaattatttccaaataatcccctca

SEQ ID NO: 1075 - DNA, 26 bp, Homo sapiens
aaattatttccaaataatcccctcaa

SEQ ID NO: 1076 - DNA, 26 bp, Homo sapiens
aattatttccaaataatcccctcaag

SEQ ID NO: 1077 - DNA, 26 bp, Homo sapiens
attatttccaaataatcccctcaagg

SEQ ID NO: 1078 - DNA, 26 bp, Homo sapiens
ttatttccaaataatcccctcaaggg

SEQ ID NO: 1079 - DNA, 26 bp, Homo sapiens
tatttccaaataatcccctcaagggc

SEQ ID NO: 1080 - DNA, 26 bp, Homo sapiens
atttccaaataatcccctcaagggca

SEQ ID NO: 1081 - DNA, 26 bp, Homo sapiens
tttccaaataatcccctcaagggcag

SEQ ID NO: 1082 - DNA, 26 bp, Homo sapiens
ttccaaataatcccctcaagggcaga

SEQ ID NO: 1083 - DNA, 26 bp, Homo sapiens
tccaaataatcccctcaagggcagag

SEQ ID NO: 1084 - DNA, 26 bp, Homo sapiens
ccaaataatcccctcaagggcagagg

SEQ ID NO: 1085 - DNA, 26 bp, Homo sapiens
caaataatcccctcaagggcagagga

SEQ ID NO: 1086 - DNA, 26 bp, Homo sapiens
aaataatcccctcaagggcagaggaa

SEQ ID NO: 1087 - DNA, 26 bp, Homo sapiens
aataatcccctcaagggcagaggaaa

SEQ ID NO: 1088 - DNA, 26 bp, Homo sapiens
ataatcccctcaagggcagaggaaac

SEQ ID NO: 1089 - DNA, 26 bp, Homo sapiens
taatcccctcaagggcagaggaaact

SEQ ID NO: 1090 - DNA, 26 bp, Homo sapiens
aatcccctcaagggcagaggaaactg

SEQ ID NO: 1091 - DNA, 26 bp, Homo sapiens
atcccctcaagggcagaggaaactgg

SEQ ID NO: 1092 - DNA, 26 bp, Homo sapiens
tcccctcaagggcagaggaaactgga

SEQ ID NO: 1093 - DNA, 26 bp, Homo sapiens
cccctcaagggcagaggaaactggac

SEQ ID NO: 1094 - DNA, 26 bp, Homo sapiens
ccctcaagggcagaggaaactggaca

SEQ ID NO: 1095 - DNA, 26 bp, Homo sapiens
cctcaagggcagaggaaactggacat

SEQ ID NO: 1096 - DNA, 26 bp, Homo sapiens
ctcaagggcagaggaaactggacatc

SEQ ID NO: 1097 - DNA, 26 bp, Homo sapiens
tcaagggcagaggaaactggacatct

SEQ ID NO: 1098 - DNA, 26 bp, Homo sapiens
caagggcagaggaaactggacatcta

SEQ ID NO: 1099 - DNA, 26 bp, Homo sapiens
aagggcagaggaaactggacatctac

SEQ ID NO: 1100 - DNA, 26 bp, Homo sapiens
agggcagaggaaactggacatctacc

SEQ ID NO: 1101 - DNA, 26 bp, Homo sapiens
gggcagaggaaactggacatctacct

SEQ ID NO: 1102 - DNA, 26 bp, Homo sapiens
ggcagaggaaactggacatctacctt

SEQ ID NO: 1103 - DNA, 26 bp, Homo sapiens
gcagaggaaactggacatctaccttt

SEQ ID NO: 1104 - DNA, 26 bp, Homo sapiens
cagaggaaactggacatctacctttg

SEQ ID NO: 1105 - DNA, 26 bp, Homo sapiens
agaggaaactggacatctacctttgc

SEQ ID NO: 1106 - DNA, 26 bp, Homo sapiens
gaggaaactggacatctacctttgcc

SEQ ID NO: 1107 - DNA, 26 bp, Homo sapiens
aggaaactggacatctacctttgccc

SEQ ID NO: 1108 - DNA, 26 bp, Homo sapiens
ggaaactggacatctacctttgccca

SEQ ID NO: 1109 - DNA, 26 bp, Homo sapiens
gaaactggacatctacctttgcccaa

SEQ ID NO: 1110 - DNA, 26 bp, Homo sapiens
aaactggacatctacctttgcccaaa

SEQ ID NO: 1111 - DNA, 26 bp, Homo sapiens
aactggacatctacctttgcccaaaa

SEQ ID NO: 1112 - DNA, 26 bp, Homo sapiens
actggacatctacctttgcccaaaag

SEQ ID NO: 1113 - DNA, 26 bp, Homo sapiens
ctggacatctacctttgcccaaaagt

SEQ ID NO: 1114 - DNA, 26 bp, Homo sapiens
tggacatctacctttgcccaaaagtg

SEQ ID NO: 1115 - DNA, 26 bp, Homo sapiens
ggacatctacctttgcccaaaagtgt

SEQ ID NO: 1116 - DNA, 26 bp, Homo sapiens
gacatctacctttgcccaaaagtgta

SEQ ID NO: 1117 - DNA, 26 bp, Homo sapiens
acatctacctttgcccaaaagtgtac

SEQ ID NO: 1118 - DNA, 26 bp, Homo sapiens
catctacctttgcccaaaagtgtacc

SEQ ID NO: 1119 - DNA, 26 bp, Homo sapiens
atctacctttgcccaaaagtgtacct

SEQ ID NO: 1120 - DNA, 26 bp, Homo sapiens
tctacctttgcccaaaagtgtacctc

SEQ ID NO: 1121 - DNA, 26 bp, Homo sapiens
ctacctttgcccaaaagtgtacctct

SEQ ID NO: 1122 - DNA, 26 bp, Homo sapiens
tacctttgcccaaaagtgtacctctg

SEQ ID NO: 1123 - DNA, 26 bp, Homo sapiens
acctttgcccaaaagtgtacctctga

SEQ ID NO: 1124 - DNA, 26 bp, Homo sapiens
cctttgcccaaaagtgtacctctgag

SEQ ID NO: 1125 - DNA, 26 bp, Homo sapiens
ctttgcccaaaagtgtacctctgaga

SEQ ID NO: 1126 - DNA, 26 bp, Homo sapiens
tttgcccaaaagtgtacctctgagag

SEQ ID NO: 1127 - DNA, 26 bp, Homo sapiens
ttgcccaaaagtgtacctctgagagc

SEQ ID NO: 1128 - DNA, 26 bp, Homo sapiens
tgcccaaaagtgtacctctgagagcc

SEQ ID NO: 1129 - DNA, 26 bp, Homo sapiens
gcccaaaagtgtacctctgagagcct

SEQ ID NO: 1130 - DNA, 26 bp, Homo sapiens
cccaaaagtgtacctctgagagccta

SEQ ID NO: 1131 - DNA, 26 bp, Homo sapiens
ccaaaagtgtacctctgagagcctac

SEQ ID NO: 1132 - DNA, 26 bp, Homo sapiens
caaaagtgtacctctgagagcctact

SEQ ID NO: 1133 - DNA, 26 bp, Homo sapiens
aaaagtgtacctctgagagcctactt

SEQ ID NO: 1134 - DNA, 26 bp, Homo sapiens
aaagtgtacctctgagagcctacttg

SEQ ID NO: 1135 - DNA, 26 bp, Homo sapiens
aagtgtacctctgagagcctacttgt

SEQ ID NO: 1136 - DNA, 26 bp, Homo sapiens
agtgtacctctgagagcctacttgta

SEQ ID NO: 1137 - DNA, 26 bp, Homo sapiens
gtgtacctctgagagcctacttgtaa

SEQ ID NO: 1138 - DNA, 26 bp, Homo sapiens
tgtacctctgagagcctacttgtaac

SEQ ID NO: 1139 - DNA, 26 bp, Homo sapiens
gtacctctgagagcctacttgtaact

SEQ ID NO: 1140 - DNA, 26 bp, Homo sapiens
tacctctgagagcctacttgtaactc

SEQ ID NO: 1141 - DNA, 26 bp, Homo sapiens
acctctgagagcctacttgtaactca

SEQ ID NO: 1142 - DNA, 26 bp, Homo sapiens
cctctgagagcctacttgtaactcaa

SEQ ID NO: 1143 - DNA, 26 bp, Homo sapiens
ctctgagagcctacttgtaactcaag

SEQ ID NO: 1144 - DNA, 26 bp, Homo sapiens
tctgagagcctacttgtaactcaagt

SEQ ID NO: 1145 - DNA, 26 bp, Homo sapiens
ctgagagcctacttgtaactcaagtg

SEQ ID NO: 1146 - DNA, 26 bp, Homo sapiens
tgagagcctacttgtaactcaagtgt

SEQ ID NO: 1147 - DNA, 26 bp, Homo sapiens
gagagcctacttgtaactcaagtgtt

SEQ ID NO: 1148 - DNA, 26 bp, Homo sapiens
agagcctacttgtaactcaagtgttt

SEQ ID NO: 1149 - DNA, 26 bp, Homo sapiens
gagcctacttgtaactcaagtgtttc

SEQ ID NO: 1150 - DNA, 26 bp, Homo sapiens
agcctacttgtaactcaagtgtttcc

SEQ ID NO: 1151 - DNA, 26 bp, Homo sapiens
gcctacttgtaactcaagtgtttcct

SEQ ID NO: 1152 - DNA, 26 bp, Homo sapiens
cctacttgtaactcaagtgtttcctt

SEQ ID NO: 1153 - DNA, 26 bp, Homo sapiens
ctacttgtaactcaagtgtttccttc

SEQ ID NO: 1154 - DNA, 26 bp, Homo sapiens
tacttgtaactcaagtgtttccttca

SEQ ID NO: 1155 - DNA, 26 bp, Homo sapiens
acttgtaactcaagtgtttccttcaa

SEQ ID NO: 1156 - DNA, 26 bp, Homo sapiens
cttgtaactcaagtgtttccttcaag

SEQ ID NO: 1157 - DNA, 26 bp, Homo sapiens
ttgtaactcaagtgtttccttcaagt

SEQ ID NO: 1158 - DNA, 26 bp, Homo sapiens
tgtaactcaagtgtttccttcaagtg

SEQ ID NO: 1159 - DNA, 26 bp, Homo sapiens
gtaactcaagtgtttccttcaagtgc

SEQ ID NO: 1160 - DNA, 26 bp, Homo sapiens
taactcaagtgtttccttcaagtgct

SEQ ID NO: 1161 - DNA, 26 bp, Homo sapiens
aactcaagtgtttccttcaagtgctg

SEQ ID NO: 1162 - DNA, 26 bp, Homo sapiens
actcaagtgtttccttcaagtgctgt

SEQ ID NO: 1163 - DNA, 26 bp, Homo sapiens
ctcaagtgtttccttcaagtgctgtg

SEQ ID NO: 1164 - DNA, 26 bp, Homo sapiens
tcaagtgtttccttcaagtgctgtgt

SEQ ID NO: 1165 - DNA, 26 bp, Homo sapiens
caagtgtttccttcaagtgctgtgtt

SEQ ID NO: 1166 - DNA, 26 bp, Homo sapiens
aagtgtttccttcaagtgctgtgttt

SEQ ID NO: 1167 - DNA, 26 bp, Homo sapiens
agtgtttccttcaagtgctgtgtttt

SEQ ID NO: 1168 - DNA, 26 bp, Homo sapiens
gtgtttccttcaagtgctgtgtttta

SEQ ID NO: 1169 - DNA, 26 bp, Homo sapiens
tgtttccttcaagtgctgtgttttat

SEQ ID NO: 1170 - DNA, 26 bp, Homo sapiens
gtttccttcaagtgctgtgttttatt

SEQ ID NO: 1171 - DNA, 26 bp, Homo sapiens
tttccttcaagtgctgtgttttattt

SEQ ID NO: 1172 - DNA, 26 bp, Homo sapiens
ttccttcaagtgctgtgttttatttg

SEQ ID NO: 1173 - DNA, 26 bp, Homo sapiens
tccttcaagtgctgtgttttatttgt

SEQ ID NO: 1174 - DNA, 26 bp, Homo sapiens
ccttcaagtgctgtgttttatttgtc

SEQ ID NO: 1175 - DNA, 26 bp, Homo sapiens
cttcaagtgctgtgttttatttgtca

SEQ ID NO: 1176 - DNA, 26 bp, Homo sapiens
ttcaagtgctgtgttttatttgtcat

SEQ ID NO: 1177 - DNA, 26 bp, Homo sapiens
tcaagtgctgtgttttatttgtcatg

SEQ ID NO: 1178 - DNA, 26 bp, Homo sapiens
caagtgctgtgttttatttgtcatgc

SEQ ID NO: 1179 - DNA, 26 bp, Homo sapiens
aagtgctgtgttttatttgtcatgca

SEQ ID NO: 1180 - DNA, 26 bp, Homo sapiens
agtgctgtgttttatttgtcatgcaa

SEQ ID NO: 1181 - DNA, 26 bp, Homo sapiens
gtgctgtgttttatttgtcatgcaaa

SEQ ID NO: 1182 - DNA, 26 bp, Homo sapiens
tgctgtgttttatttgtcatgcaaat

SEQ ID NO: 1183 - DNA, 26 bp, Homo sapiens
gctgtgttttatttgtcatgcaaatt

SEQ ID NO: 1184 - DNA, 26 bp, Homo sapiens
ctgtgttttatttgtcatgcaaattt

SEQ ID NO: 1185 - DNA, 26 bp, Homo sapiens
tgtgttttatttgtcatgcaaatttt

SEQ ID NO: 1186 - DNA, 26 bp, Homo sapiens
gtgttttatttgtcatgcaaattttt

SEQ ID NO: 1187 - DNA, 26 bp, Homo sapiens
tgttttatttgtcatgcaaatttttg

SEQ ID NO: 1188 - DNA, 26 bp, Homo sapiens
gttttatttgtcatgcaaatttttgc

SEQ ID NO: 1189 - DNA, 26 bp, Homo sapiens
ttttatttgtcatgcaaatttttgct

SEQ ID NO: 1190 - DNA, 26 bp, Homo sapiens
tttatttgtcatgcaaatttttgctt

SEQ ID NO: 1191 - DNA, 26 bp, Homo sapiens
ttatttgtcatgcaaatttttgcttt

SEQ ID NO: 1192 - DNA, 26 bp, Homo sapiens
tatttgtcatgcaaatttttgctttc

SEQ ID NO: 1193 - DNA, 26 bp, Homo sapiens
atttgtcatgcaaatttttgctttct

SEQ ID NO: 1194 - DNA, 26 bp, Homo sapiens
tttgtcatgcaaatttttgctttcta

SEQ ID NO: 1195 - DNA, 26 bp, Homo sapiens
ttgtcatgcaaatttttgctttctac

SEQ ID NO: 1196 - DNA, 26 bp, Homo sapiens
tgtcatgcaaatttttgctttctact

SEQ ID NO: 1197 - DNA, 26 bp, Homo sapiens
gtcatgcaaatttttgctttctactt

SEQ ID NO: 1198 - DNA, 26 bp, Homo sapiens
tcatgcaaatttttgctttctacttt

SEQ ID NO: 1199 - DNA, 26 bp, Homo sapiens
catgcaaatttttgctttctacttta

SEQ ID NO: 1200 - DNA, 26 bp, Homo sapiens
atgcaaatttttgctttctactttat

SEQ ID NO: 1201 - DNA, 26 bp, Homo sapiens
tgcaaatttttgctttctactttata

SEQ ID NO: 1202 - DNA, 26 bp, Homo sapiens
gcaaatttttgctttctactttataa

SEQ ID NO: 1203 - DNA, 26 bp, Homo sapiens
caaatttttgctttctactttataac

SEQ ID NO: 1204 - DNA, 26 bp, Homo sapiens
aaatttttgctttctactttataaca

SEQ ID NO: 1205 - DNA, 26 bp, Homo sapiens
aatttttgctttctactttataacat

SEQ ID NO: 1206 - DNA, 26 bp, Homo sapiens
atttttgctttctactttataacata

SEQ ID NO: 1207 - DNA, 26 bp, Homo sapiens
tttttgctttctactttataacatat

SEQ ID NO: 1208 - DNA, 26 bp, Homo sapiens
ttttgctttctactttataacatatc

SEQ ID NO: 1209 - DNA, 26 bp, Homo sapiens
tttgctttctactttataacatatcc

SEQ ID NO: 1210 - DNA, 26 bp, Homo sapiens
ttgctttctactttataacatatcca

SEQ ID NO: 1211 - DNA, 26 bp, Homo sapiens
tgctttctactttataacatatccat

SEQ ID NO: 1212 - DNA, 26 bp, Homo sapiens
gctttctactttataacatatccatg

SEQ ID NO: 1213 - DNA, 26 bp, Homo sapiens
ctttctactttataacatatccatgt

SEQ ID NO: 1214 - DNA, 26 bp, Homo sapiens
tttctactttataacatatccatgtt

SEQ ID NO: 1215 - DNA, 26 bp, Homo sapiens
ttctactttataacatatccatgttt

SEQ ID NO: 1216 - DNA, 26 bp, Homo sapiens
tctactttataacatatccatgtttg

SEQ ID NO: 1217 - DNA, 26 bp, Homo sapiens
ctactttataacatatccatgtttgt

SEQ ID NO: 1218 - DNA, 26 bp, Homo sapiens
tactttataacatatccatgtttgtt

SEQ ID NO: 1219 - DNA, 26 bp, Homo sapiens
actttataacatatccatgtttgttt

SEQ ID NO: 1220 - DNA, 26 bp, Homo sapiens
ctttataacatatccatgtttgtttt

SEQ ID NO: 1221 - DNA, 26 bp, Homo sapiens
tttataacatatccatgtttgtttta

SEQ ID NO: 1222 - DNA, 26 bp, Homo sapiens
ttataacatatccatgtttgttttaa

SEQ ID NO: 1223 - DNA, 26 bp, Homo sapiens
tataacatatccatgtttgttttaat

SEQ ID NO: 1224 - DNA, 26 bp, Homo sapiens
ataacatatccatgtttgttttaatg

SEQ ID NO: 1225 - DNA, 26 bp, Homo sapiens
taacatatccatgtttgttttaatgt

SEQ ID NO: 1226 - DNA, 26 bp, Homo sapiens
aacatatccatgtttgttttaatgtt

SEQ ID NO: 1227 - DNA, 26 bp, Homo sapiens
acatatccatgtttgttttaatgtta

SEQ ID NO: 1228 - DNA, 26 bp, Homo sapiens
catatccatgtttgttttaatgttaa

SEQ ID NO: 1229 - DNA, 26 bp, Homo sapiens
atatccatgtttgttttaatgttaaa

SEQ ID NO: 1230 - DNA, 26 bp, Homo sapiens
tatccatgtttgttttaatgttaaaa

SEQ ID NO: 1231 - DNA, 26 bp, Homo sapiens
atccatgtttgttttaatgttaaaac

SEQ ID NO: 1232 - DNA, 26 bp, Homo sapiens
tccatgtttgttttaatgttaaaaca

SEQ ID NO: 1233 - DNA, 26 bp, Homo sapiens
ccatgtttgttttaatgttaaaacaa

SEQ ID NO: 1234 - DNA, 26 bp, Homo sapiens
catgtttgttttaatgttaaaacaat

SEQ ID NO: 1235 - DNA, 26 bp, Homo sapiens
atgtttgttttaatgttaaaacaatg

SEQ ID NO: 1236 - DNA, 26 bp, Homo sapiens
tgtttgttttaatgttaaaacaatgc

SEQ ID NO: 1237 - DNA, 26 bp, Homo sapiens
gtttgttttaatgttaaaacaatgct

SEQ ID NO: 1238 - DNA, 26 bp, Homo sapiens
tttgttttaatgttaaaacaatgctt

SEQ ID NO: 1239 - DNA, 26 bp, Homo sapiens
ttgttttaatgttaaaacaatgcttt

SEQ ID NO: 1240 - DNA, 26 bp, Homo sapiens
tgttttaatgttaaaacaatgctttc

SEQ ID NO: 1241 - DNA, 26 bp, Homo sapiens
gttttaatgttaaaacaatgctttca

SEQ ID NO: 1242 - DNA, 26 bp, Homo sapiens
ttttaatgttaaaacaatgctttcaa

SEQ ID NO: 1243 - DNA, 26 bp, Homo sapiens
tttaatgttaaaacaatgctttcaat

SEQ ID NO: 1244 - DNA, 26 bp, Homo sapiens
ttaatgttaaaacaatgctttcaatt

SEQ ID NO: 1245 - DNA, 26 bp, Homo sapiens
taatgttaaaacaatgctttcaattc

SEQ ID NO: 1246 - DNA, 26 bp, Homo sapiens
aatgttaaaacaatgctttcaattct

SEQ ID NO: 1247 - DNA, 26 bp, Homo sapiens
atgttaaaacaatgctttcaattctt

SEQ ID NO: 1248 - DNA, 26 bp, Homo sapiens
tgttaaaacaatgctttcaattctta

SEQ ID NO: 1249 - DNA, 26 bp, Homo sapiens
gttaaaacaatgctttcaattcttaa

SEQ ID NO: 1250 - DNA, 26 bp, Homo sapiens
ttaaaacaatgctttcaattcttaac

SEQ ID NO: 1251 - DNA, 26 bp, Homo sapiens
taaaacaatgctttcaattcttaact

SEQ ID NO: 1252 - DNA, 26 bp, Homo sapiens
aaaacaatgctttcaattcttaactg

SEQ ID NO: 1253 - DNA, 26 bp, Homo sapiens
aaacaatgctttcaattcttaactgt

SEQ ID NO: 1254 - DNA, 26 bp, Homo sapiens
aacaatgctttcaattcttaactgtg

SEQ ID NO: 1255 - DNA, 26 bp, Homo sapiens
acaatgctttcaattcttaactgtgt

SEQ ID NO: 1256 - DNA, 26 bp, Homo sapiens
caatgctttcaattcttaactgtgtc

SEQ ID NO: 1257 - DNA, 26 bp, Homo sapiens
aatgctttcaattcttaactgtgtcc

SEQ ID NO: 1258 - DNA, 26 bp, Homo sapiens
atgctttcaattcttaactgtgtcct

SEQ ID NO: 1259 - DNA, 26 bp, Homo sapiens
tgctttcaattcttaactgtgtcctc

SEQ ID NO: 1260 - DNA, 26 bp, Homo sapiens
gctttcaattcttaactgtgtcctcc

SEQ ID NO: 1261 - DNA, 26 bp, Homo sapiens
ctttcaattcttaactgtgtcctccg

SEQ ID NO: 1262 - DNA, 26 bp, Homo sapiens
tttcaattcttaactgtgtcctccga

SEQ ID NO: 1263 - DNA, 26 bp, Homo sapiens
ttcaattcttaactgtgtcctccgag

SEQ ID NO: 1264 - DNA, 26 bp, Homo sapiens
tcaattcttaactgtgtcctccgagt

SEQ ID NO: 1265 - DNA, 26 bp, Homo sapiens
caattcttaactgtgtcctccgagtg

SEQ ID NO: 1266 - DNA, 26 bp, Homo sapiens
aattcttaactgtgtcctccgagtgg

SEQ ID NO: 1267 - DNA, 26 bp, Homo sapiens
attcttaactgtgtcctccgagtgga

SEQ ID NO: 1268 - DNA, 26 bp, Homo sapiens
ttcttaactgtgtcctccgagtggac

SEQ ID NO: 1269 - DNA, 26 bp, Homo sapiens
tcttaactgtgtcctccgagtggacg

SEQ ID NO: 1270 - DNA, 26 bp, Homo sapiens
cttaactgtgtcctccgagtggacgc

SEQ ID NO: 1271 - DNA, 26 bp, Homo sapiens
ttaactgtgtcctccgagtggacgct

SEQ ID NO: 1272 - DNA, 26 bp, Homo sapiens
taactgtgtcctccgagtggacgctg

SEQ ID NO: 1273 - DNA, 26 bp, Homo sapiens
aactgtgtcctccgagtggacgctgc

SEQ ID NO: 1274 - DNA, 26 bp, Homo sapiens
actgtgtcctccgagtggacgctgct

SEQ ID NO: 1275 - DNA, 26 bp, Homo sapiens
ctgtgtcctccgagtggacgctgctg

SEQ ID NO: 1276 - DNA, 26 bp, Homo sapiens
tgtgtcctccgagtggacgctgctgc

SEQ ID NO: 1277 - DNA, 26 bp, Homo sapiens
gtgtcctccgagtggacgctgctgct

SEQ ID NO: 1278 - DNA, 26 bp, Homo sapiens
tgtcctccgagtggacgctgctgctg

SEQ ID NO: 1279 - DNA, 26 bp, Homo sapiens
gtcctccgagtggacgctgctgctga

SEQ ID NO: 1280 - DNA, 26 bp, Homo sapiens
tcctccgagtggacgctgctgctgag

SEQ ID NO: 1281 - DNA, 26 bp, Homo sapiens
cctccgagtggacgctgctgctgaga

SEQ ID NO: 1282 - DNA, 26 bp, Homo sapiens
ctccgagtggacgctgctgctgagat

SEQ ID NO: 1283 - DNA, 26 bp, Homo sapiens
tccgagtggacgctgctgctgagatg

SEQ ID NO: 1284 - DNA, 26 bp, Homo sapiens
ccgagtggacgctgctgctgagatgc

SEQ ID NO: 1285 - DNA, 26 bp, Homo sapiens
cgagtggacgctgctgctgagatgcc

SEQ ID NO: 1286 - DNA, 26 bp, Homo sapiens
gagtggacgctgctgctgagatgcct

SEQ ID NO: 1287 - DNA, 26 bp, Homo sapiens
agtggacgctgctgctgagatgcctc

SEQ ID NO: 1288 - DNA, 26 bp, Homo sapiens
gtggacgctgctgctgagatgcctcg

SEQ ID NO: 1289 - DNA, 26 bp, Homo sapiens
tggacgctgctgctgagatgcctcgt

SEQ ID NO: 1290 - DNA, 26 bp, Homo sapiens
ggacgctgctgctgagatgcctcgtt

SEQ ID NO: 1291 - DNA, 26 bp, Homo sapiens
gacgctgctgctgagatgcctcgttt

SEQ ID NO: 1292 - DNA, 26 bp, Homo sapiens
acgctgctgctgagatgcctcgtttg

SEQ ID NO: 1293 - DNA, 26 bp, Homo sapiens
cgctgctgctgagatgcctcgtttgt

SEQ ID NO: 1294 - DNA, 26 bp, Homo sapiens
gctgctgctgagatgcctcgtttgtg

SEQ ID NO: 1295 - DNA, 26 bp, Homo sapiens
ctgctgctgagatgcctcgtttgtgc

SEQ ID NO: 1296 - DNA, 26 bp, Homo sapiens
tgctgctgagatgcctcgtttgtgcc

SEQ ID NO: 1297 - DNA, 26 bp, Homo sapiens
gctgctgagatgcctcgtttgtgcct

SEQ ID NO: 1298 - DNA, 26 bp, Homo sapiens
ctgctgagatgcctcgtttgtgcctt

SEQ ID NO: 1299 - DNA, 26 bp, Homo sapiens
tgctgagatgcctcgtttgtgccttg

SEQ ID NO: 1300 - DNA, 26 bp, Homo sapiens
gctgagatgcctcgtttgtgccttgg

SEQ ID NO: 1301 - DNA, 26 bp, Homo sapiens
ctgagatgcctcgtttgtgccttggc

SEQ ID NO: 1302 - DNA, 26 bp, Homo sapiens
tgagatgcctcgtttgtgccttggca

SEQ ID NO: 1303 - DNA, 26 bp, Homo sapiens
gagatgcctcgtttgtgccttggcat

SEQ ID NO: 1304 - DNA, 26 bp, Homo sapiens
agatgcctcgtttgtgccttggcata

SEQ ID NO: 1305 - DNA, 26 bp, Homo sapiens
gatgcctcgtttgtgccttggcatac

SEQ ID NO: 1306 - DNA, 26 bp, Homo sapiens
atgcctcgtttgtgccttggcatacc

SEQ ID NO: 1307 - DNA, 26 bp, Homo sapiens
tgcctcgtttgtgccttggcataccc

SEQ ID NO: 1308 - DNA, 26 bp, Homo sapiens
gcctcgtttgtgccttggcataccct

SEQ ID NO: 1309 - DNA, 26 bp, Homo sapiens
cctcgtttgtgccttggcataccctg

SEQ ID NO: 1310 - DNA, 26 bp, Homo sapiens
ctcgtttgtgccttggcataccctgg

SEQ ID NO: 1311 - DNA, 26 bp, Homo sapiens
tcgtttgtgccttggcataccctggg

SEQ ID NO: 1312 - DNA, 26 bp, Homo sapiens
cgtttgtgccttggcataccctgggg

SEQ ID NO: 1313 - DNA, 26 bp, Homo sapiens
gtttgtgccttggcataccctggggg

SEQ ID NO: 1314 - DNA, 26 bp, Homo sapiens
tttgtgccttggcataccctggggga

SEQ ID NO: 1315 - DNA, 26 bp, Homo sapiens
ttgtgccttggcataccctgggggat

SEQ ID NO: 1316 - DNA, 26 bp, Homo sapiens
tgtgccttggcataccctgggggata

SEQ ID NO: 1317 - DNA, 26 bp, Homo sapiens
gtgccttggcataccctgggggatac

SEQ ID NO: 1318 - DNA, 26 bp, Homo sapiens
tgccttggcataccctgggggataca

SEQ ID NO: 1319 - DNA, 26 bp, Homo sapiens
gccttggcataccctgggggatacat

SEQ ID NO: 1320 - DNA, 26 bp, Homo sapiens
ccttggcataccctgggggatacatt

SEQ ID NO: 1321 - DNA, 26 bp, Homo sapiens
cttggcataccctgggggatacattt

SEQ ID NO: 1322 - DNA, 26 bp, Homo sapiens
ttggcataccctgggggatacatttt

SEQ ID NO: 1323 - DNA, 26 bp, Homo sapiens
tggcataccctgggggatacattttc

SEQ ID NO: 1324 - DNA, 26 bp, Homo sapiens
ggcataccctgggggatacattttcc

SEQ ID NO: 1325 - DNA, 26 bp, Homo sapiens
gcataccctgggggatacattttcca

SEQ ID NO: 1326 - DNA, 26 bp, Homo sapiens
cataccctgggggatacattttccag

SEQ ID NO: 1327 - DNA, 26 bp, Homo sapiens
ataccctgggggatacattttccagc

SEQ ID NO: 1328 - DNA, 26 bp, Homo sapiens
taccctgggggatacattttccagct

SEQ ID NO: 1329 - DNA, 26 bp, Homo sapiens
accctgggggatacattttccagctt

SEQ ID NO: 1330 - DNA, 26 bp, Homo sapiens
ccctgggggatacattttccagcttg

SEQ ID NO: 1331 - DNA, 26 bp, Homo sapiens
cctgggggatacattttccagcttga

SEQ ID NO: 1332 - DNA, 26 bp, Homo sapiens
ctgggggatacattttccagcttgag

SEQ ID NO: 1333 - DNA, 26 bp, Homo sapiens
tgggggatacattttccagcttgaga

SEQ ID NO: 1334 - DNA, 26 bp, Homo sapiens
gggggatacattttccagcttgagaa

SEQ ID NO: 1335 - DNA, 26 bp, Homo sapiens
ggggatacattttccagcttgagaag

SEQ ID NO: 1336 - DNA, 26 bp, Homo sapiens
gggatacattttccagcttgagaagc

SEQ ID NO: 1337 - DNA, 26 bp, Homo sapiens
ggatacattttccagcttgagaagct

SEQ ID NO: 1338 - DNA, 26 bp, Homo sapiens
gatacattttccagcttgagaagctt

SEQ ID NO: 1339 - DNA, 26 bp, Homo sapiens
atacattttccagcttgagaagcttt

SEQ ID NO: 1340 - DNA, 26 bp, Homo sapiens
tacattttccagcttgagaagctttg

SEQ ID NO: 1341 - DNA, 26 bp, Homo sapiens
acattttccagcttgagaagctttgt

SEQ ID NO: 1342 - DNA, 26 bp, Homo sapiens
cattttccagcttgagaagctttgtc

SEQ ID NO: 1343 - DNA, 26 bp, Homo sapiens
attttccagcttgagaagctttgtca

SEQ ID NO: 1344 - DNA, 26 bp, Homo sapiens
ttttccagcttgagaagctttgtcat

SEQ ID NO: 1345 - DNA, 26 bp, Homo sapiens
tttccagcttgagaagctttgtcatg

SEQ ID NO: 1346 - DNA, 26 bp, Homo sapiens
ttccagcttgagaagctttgtcatgg

SEQ ID NO: 1347 - DNA, 26 bp, Homo sapiens
tccagcttgagaagctttgtcatggg

SEQ ID NO: 1348 - DNA, 26 bp, Homo sapiens
ccagcttgagaagctttgtcatgggg

SEQ ID NO: 1349 - DNA, 26 bp, Homo sapiens
cagcttgagaagctttgtcatggggc

SEQ ID NO: 1350 - DNA, 26 bp, Homo sapiens
agcttgagaagctttgtcatggggca

SEQ ID NO: 1351 - DNA, 26 bp, Homo sapiens
gcttgagaagctttgtcatggggcat

SEQ ID NO: 1352 - DNA, 26 bp, Homo sapiens
cttgagaagctttgtcatggggcatt

SEQ ID NO: 1353 - DNA, 26 bp, Homo sapiens
ttgagaagctttgtcatggggcattc

SEQ ID NO: 1354 - DNA, 26 bp, Homo sapiens
tgagaagctttgtcatggggcattca

SEQ ID NO: 1355 - DNA, 26 bp, Homo sapiens
gagaagctttgtcatggggcattcat

SEQ ID NO: 1356 - DNA, 26 bp, Homo sapiens
agaagctttgtcatggggcattcatc

SEQ ID NO: 1357 - DNA, 26 bp, Homo sapiens
gaagctttgtcatggggcattcatcc

SEQ ID NO: 1358 - DNA, 26 bp, Homo sapiens
aagctttgtcatggggcattcatcca

SEQ ID NO: 1359 - DNA, 26 bp, Homo sapiens
agctttgtcatggggcattcatccaa

SEQ ID NO: 1360 - DNA, 26 bp, Homo sapiens
gctttgtcatggggcattcatccaac

SEQ ID NO: 1361 - DNA, 26 bp, Homo sapiens
ctttgtcatggggcattcatccaacc

SEQ ID NO: 1362 - DNA, 26 bp, Homo sapiens
tttgtcatggggcattcatccaaccc

SEQ ID NO: 1363 - DNA, 26 bp, Homo sapiens
ttgtcatggggcattcatccaaccca

SEQ ID NO: 1364 - DNA, 26 bp, Homo sapiens
tgtcatggggcattcatccaacccag

SEQ ID NO: 1365 - DNA, 26 bp, Homo sapiens
gtcatggggcattcatccaacccagg

SEQ ID NO: 1366 - DNA, 26 bp, Homo sapiens
tcatggggcattcatccaacccaggt

SEQ ID NO: 1367 - DNA, 26 bp, Homo sapiens
catggggcattcatccaacccaggtg

SEQ ID NO: 1368 - DNA, 26 bp, Homo sapiens
atggggcattcatccaacccaggtga

SEQ ID NO: 1369 - DNA, 26 bp, Homo sapiens
tggggcattcatccaacccaggtgac

SEQ ID NO: 1370 - DNA, 26 bp, Homo sapiens
ggggcattcatccaacccaggtgacc

SEQ ID NO: 1371 - DNA, 26 bp, Homo sapiens
gggcattcatccaacccaggtgacct

SEQ ID NO: 1372 - DNA, 26 bp, Homo sapiens
ggcattcatccaacccaggtgaccta

SEQ ID NO: 1373 - DNA, 26 bp, Homo sapiens
gcattcatccaacccaggtgacctac

SEQ ID NO: 1374 - DNA, 26 bp, Homo sapiens
cattcatccaacccaggtgacctaca

SEQ ID NO: 1375 - DNA, 26 bp, Homo sapiens
attcatccaacccaggtgacctacaa

SEQ ID NO: 1376 - DNA, 26 bp, Homo sapiens
ttcatccaacccaggtgacctacaat

SEQ ID NO: 1377 - DNA, 26 bp, Homo sapiens
tcatccaacccaggtgacctacaata

SEQ ID NO: 1378 - DNA, 26 bp, Homo sapiens
catccaacccaggtgacctacaatag

SEQ ID NO: 1379 - DNA, 26 bp, Homo sapiens
atccaacccaggtgacctacaatagc

SEQ ID NO: 1380 - DNA, 26 bp, Homo sapiens
tccaacccaggtgacctacaatagca

SEQ ID NO: 1381 - DNA, 26 bp, Homo sapiens
ccaacccaggtgacctacaatagcag

SEQ ID NO: 1382 - DNA, 26 bp, Homo sapiens
caacccaggtgacctacaatagcagt

SEQ ID NO: 1383 - DNA, 26 bp, Homo sapiens
aacccaggtgacctacaatagcagtg

SEQ ID NO: 1384 - DNA, 26 bp, Homo sapiens
acccaggtgacctacaatagcagtga

SEQ ID NO: 1385 - DNA, 26 bp, Homo sapiens
cccaggtgacctacaatagcagtgac

SEQ ID NO: 1386 - DNA, 26 bp, Homo sapiens
ccaggtgacctacaatagcagtgacg

SEQ ID NO: 1387 - DNA, 26 bp, Homo sapiens
caggtgacctacaatagcagtgacgt

SEQ ID NO: 1388 - DNA, 26 bp, Homo sapiens
aggtgacctacaatagcagtgacgtt

SEQ ID NO: 1389 - DNA, 26 bp, Homo sapiens
ggtgacctacaatagcagtgacgttt

SEQ ID NO: 1390 - DNA, 26 bp, Homo sapiens
gtgacctacaatagcagtgacgtttg

SEQ ID NO: 1391 - DNA, 26 bp, Homo sapiens
tgacctacaatagcagtgacgtttga

SEQ ID NO: 1392 - DNA, 26 bp, Homo sapiens
gacctacaatagcagtgacgtttgat

SEQ ID NO: 1393 - DNA, 26 bp, Homo sapiens
acctacaatagcagtgacgtttgatg

SEQ ID NO: 1394 - DNA, 26 bp, Homo sapiens
cctacaatagcagtgacgtttgatgg

SEQ ID NO: 1395 - DNA, 26 bp, Homo sapiens
ctacaatagcagtgacgtttgatggg

SEQ ID NO: 1396 - DNA, 26 bp, Homo sapiens
tacaatagcagtgacgtttgatggga

SEQ ID NO: 1397 - DNA, 26 bp, Homo sapiens
acaatagcagtgacgtttgatgggag

SEQ ID NO: 1398 - DNA, 26 bp, Homo sapiens
caatagcagtgacgtttgatgggaga

SEQ ID NO: 1399 - DNA, 26 bp, Homo sapiens
aatagcagtgacgtttgatgggagag

SEQ ID NO: 1400 - DNA, 26 bp, Homo sapiens
atagcagtgacgtttgatgggagaga

SEQ ID NO: 1401 - DNA, 26 bp, Homo sapiens
tagcagtgacgtttgatgggagagaa

SEQ ID NO: 1402 - DNA, 26 bp, Homo sapiens
agcagtgacgtttgatgggagagaaa

SEQ ID NO: 1403 - DNA, 26 bp, Homo sapiens
gcagtgacgtttgatgggagagaaat

SEQ ID NO: 1404 - DNA, 26 bp, Homo sapiens
cagtgacgtttgatgggagagaaatg

SEQ ID NO: 1405 - DNA, 26 bp, Homo sapiens
agtgacgtttgatgggagagaaatgg

SEQ ID NO: 1406 - DNA, 26 bp, Homo sapiens
gtgacgtttgatgggagagaaatggg

SEQ ID NO: 1407 - DNA, 26 bp, Homo sapiens
tgacgtttgatgggagagaaatgggt

SEQ ID NO: 1408 - DNA, 26 bp, Homo sapiens
gacgtttgatgggagagaaatgggta

SEQ ID NO: 1409 - DNA, 26 bp, Homo sapiens
acgtttgatgggagagaaatgggtag

SEQ ID NO: 1410 - DNA, 26 bp, Homo sapiens
cgtttgatgggagagaaatgggtagt

SEQ ID NO: 1411 - DNA, 26 bp, Homo sapiens
gtttgatgggagagaaatgggtagtc

SEQ ID NO: 1412 - DNA, 26 bp, Homo sapiens
tttgatgggagagaaatgggtagtct

SEQ ID NO: 1413 - DNA, 26 bp, Homo sapiens
ttgatgggagagaaatgggtagtcta

SEQ ID NO: 1414 - DNA, 26 bp, Homo sapiens
tgatgggagagaaatgggtagtctat

SEQ ID NO: 1415 - DNA, 26 bp, Homo sapiens
gatgggagagaaatgggtagtctata

SEQ ID NO: 1416 - DNA, 26 bp, Homo sapiens
atgggagagaaatgggtagtctatag

SEQ ID NO: 1417 - DNA, 26 bp, Homo sapiens
tgggagagaaatgggtagtctataga

SEQ ID NO: 1418 - DNA, 26 bp, Homo sapiens
gggagagaaatgggtagtctatagac

SEQ ID NO: 1419 - DNA, 26 bp, Homo sapiens
ggagagaaatgggtagtctatagaca

SEQ ID NO: 1420 - DNA, 26 bp, Homo sapiens
gagagaaatgggtagtctatagacac

SEQ ID NO: 1421 - DNA, 26 bp, Homo sapiens
agagaaatgggtagtctatagacaca

SEQ ID NO: 1422 - DNA, 26 bp, Homo sapiens
gagaaatgggtagtctatagacacat

SEQ ID NO: 1423 - DNA, 26 bp, Homo sapiens
agaaatgggtagtctatagacacatt

SEQ ID NO: 1424 - DNA, 26 bp, Homo sapiens
gaaatgggtagtctatagacacattt

SEQ ID NO: 1425 - DNA, 26 bp, Homo sapiens
aaatgggtagtctatagacacatttg

SEQ ID NO: 1426 - DNA, 26 bp, Homo sapiens
aatgggtagtctatagacacatttgt

SEQ ID NO: 1427 - DNA, 26 bp, Homo sapiens
atgggtagtctatagacacatttgta

SEQ ID NO: 1428 - DNA, 26 bp, Homo sapiens
tgggtagtctatagacacatttgtac

SEQ ID NO: 1429 - DNA, 26 bp, Homo sapiens
gggtagtctatagacacatttgtaca

SEQ ID NO: 1430 - DNA, 26 bp, Homo sapiens
ggtagtctatagacacatttgtacaa

SEQ ID NO: 1431 - DNA, 26 bp, Homo sapiens
gtagtctatagacacatttgtacaaa

SEQ ID NO: 1432 - DNA, 26 bp, Homo sapiens
tagtctatagacacatttgtacaaac

SEQ ID NO: 1433 - DNA, 26 bp, Homo sapiens
agtctatagacacatttgtacaaacg

SEQ ID NO: 1434 - DNA, 26 bp, Homo sapiens
gtctatagacacatttgtacaaacga

SEQ ID NO: 1435 - DNA, 26 bp, Homo sapiens
tctatagacacatttgtacaaacgac

SEQ ID NO: 1436 - DNA, 26 bp, Homo sapiens
ctatagacacatttgtacaaacgacc

SEQ ID NO: 1437 - DNA, 26 bp, Homo sapiens
tatagacacatttgtacaaacgacct

SEQ ID NO: 1438 - DNA, 26 bp, Homo sapiens
atagacacatttgtacaaacgaccta

SEQ ID NO: 1439 - DNA, 26 bp, Homo sapiens
tagacacatttgtacaaacgacctac

SEQ ID NO: 1440 - DNA, 26 bp, Homo sapiens
agacacatttgtacaaacgacctact

SEQ ID NO: 1441 - DNA, 26 bp, Homo sapiens
gacacatttgtacaaacgacctactg

SEQ ID NO: 1442 - DNA, 26 bp, Homo sapiens
acacatttgtacaaacgacctactgt

SEQ ID NO: 1443 - DNA, 26 bp, Homo sapiens
cacatttgtacaaacgacctactgtg

SEQ ID NO: 1444 - DNA, 26 bp, Homo sapiens
acatttgtacaaacgacctactgtgt

SEQ ID NO: 1445 - DNA, 26 bp, Homo sapiens
catttgtacaaacgacctactgtgtg

SEQ ID NO: 1446 - DNA, 26 bp, Homo sapiens
atttgtacaaacgacctactgtgtgg

SEQ ID NO: 1447 - DNA, 26 bp, Homo sapiens
tttgtacaaacgacctactgtgtgga

SEQ ID NO: 1448 - DNA, 26 bp, Homo sapiens
ttgtacaaacgacctactgtgtggaa

SEQ ID NO: 1449 - DNA, 26 bp, Homo sapiens
tgtacaaacgacctactgtgtggaaa

SEQ ID NO: 1450 - DNA, 26 bp, Homo sapiens
gtacaaacgacctactgtgtggaaag

SEQ ID NO: 1451 - DNA, 26 bp, Homo sapiens
tacaaacgacctactgtgtggaaagc

SEQ ID NO: 1452 - DNA, 26 bp, Homo sapiens
acaaacgacctactgtgtggaaagct

SEQ ID NO: 1453 - DNA, 26 bp, Homo sapiens
caaacgacctactgtgtggaaagctt

SEQ ID NO: 1454 - DNA, 26 bp, Homo sapiens
aaacgacctactgtgtggaaagcttt

SEQ ID NO: 1455 - DNA, 26 bp, Homo sapiens
aacgacctactgtgtggaaagcttta

SEQ ID NO: 1456 - DNA, 26 bp, Homo sapiens
acgacctactgtgtggaaagctttag

SEQ ID NO: 1457 - DNA, 26 bp, Homo sapiens
cgacctactgtgtggaaagctttagg

SEQ ID NO: 1458 - DNA, 26 bp, Homo sapiens
gacctactgtgtggaaagctttaggc

SEQ ID NO: 1459 - DNA, 26 bp, Homo sapiens
acctactgtgtggaaagctttaggct

SEQ ID NO: 1460 - DNA, 26 bp, Homo sapiens
cctactgtgtggaaagctttaggcta

SEQ ID NO: 1461 - DNA, 26 bp, Homo sapiens
ctactgtgtggaaagctttaggctac

SEQ ID NO: 1462 - DNA, 26 bp, Homo sapiens
tactgtgtggaaagctttaggctaca

SEQ ID NO: 1463 - DNA, 26 bp, Homo sapiens
actgtgtggaaagctttaggctacat

SEQ ID NO: 1464 - DNA, 26 bp, Homo sapiens
ctgtgtggaaagctttaggctacatg

SEQ ID NO: 1465 - DNA, 26 bp, Homo sapiens
tgtgtggaaagctttaggctacatga

SEQ ID NO: 1466 - DNA, 26 bp, Homo sapiens
gtgtggaaagctttaggctacatgat

SEQ ID NO: 1467 - DNA, 26 bp, Homo sapiens
tgtggaaagctttaggctacatgatg

SEQ ID NO: 1468 - DNA, 26 bp, Homo sapiens
gtggaaagctttaggctacatgatgc

SEQ ID NO: 1469 - DNA, 26 bp, Homo sapiens
tggaaagctttaggctacatgatgcg

SEQ ID NO: 1470 - DNA, 26 bp, Homo sapiens
ggaaagctttaggctacatgatgcgg

SEQ ID NO: 1471 - DNA, 26 bp, Homo sapiens
gaaagctttaggctacatgatgcggg

SEQ ID NO: 1472 - DNA, 26 bp, Homo sapiens
aaagctttaggctacatgatgcgggc

SEQ ID NO: 1473 - DNA, 26 bp, Homo sapiens
aagctttaggctacatgatgcgggcg

SEQ ID NO: 1474 - DNA, 26 bp, Homo sapiens
agctttaggctacatgatgcgggcgc

SEQ ID NO: 1475 - DNA, 26 bp, Homo sapiens
gctttaggctacatgatgcgggcgct

SEQ ID NO: 1476 - DNA, 26 bp, Homo sapiens
ctttaggctacatgatgcgggcgctc

SEQ ID NO: 1477 - DNA, 26 bp, Homo sapiens
tttaggctacatgatgcgggcgctct

SEQ ID NO: 1478 - DNA, 26 bp, Homo sapiens
ttaggctacatgatgcgggcgctctc

SEQ ID NO: 1479 - DNA, 26 bp, Homo sapiens
taggctacatgatgcgggcgctctcc

SEQ ID NO: 1480 - DNA, 26 bp, Homo sapiens
aggctacatgatgcgggcgctctcct

SEQ ID NO: 1481 - DNA, 26 bp, Homo sapiens
ggctacatgatgcgggcgctctcctc

SEQ ID NO: 1482 - DNA, 26 bp, Homo sapiens
gctacatgatgcgggcgctctcctcc

SEQ ID NO: 1483 - DNA, 26 bp, Homo sapiens
ctacatgatgcgggcgctctcctccc

SEQ ID NO: 1484 - DNA, 26 bp, Homo sapiens
tacatgatgcgggcgctctcctcccc

SEQ ID NO: 1485 - DNA, 26 bp, Homo sapiens
acatgatgcgggcgctctcctcccca

SEQ ID NO: 1486 - DNA, 26 bp, Homo sapiens
catgatgcgggcgctctcctccccac

SEQ ID NO: 1487 - DNA, 26 bp, Homo sapiens
atgatgcgggcgctctcctccccact

SEQ ID NO: 1488 - DNA, 26 bp, Homo sapiens
tgatgcgggcgctctcctccccactc

SEQ ID NO: 1489 - DNA, 26 bp, Homo sapiens
gatgcgggcgctctcctccccactct

SEQ ID NO: 1490 - DNA, 26 bp, Homo sapiens
atgcgggcgctctcctccccactctc

SEQ ID NO: 1491 - DNA, 26 bp, Homo sapiens
tgcgggcgctctcctccccactctca

SEQ ID NO: 1492 - DNA, 26 bp, Homo sapiens
gcgggcgctctcctccccactctcat

SEQ ID NO: 1493 - DNA, 26 bp, Homo sapiens
cgggcgctctcctccccactctcatt

SEQ ID NO: 1494 - DNA, 26 bp, Homo sapiens
gggcgctctcctccccactctcattc

SEQ ID NO: 1495 - DNA, 26 bp, Homo sapiens
ggcgctctcctccccactctcattcc

SEQ ID NO: 1496 - DNA, 26 bp, Homo sapiens
gcgctctcctccccactctcattccc

SEQ ID NO: 1497 - DNA, 26 bp, Homo sapiens
cgctctcctccccactctcattcccc

SEQ ID NO: 1498 - DNA, 26 bp, Homo sapiens
gctctcctccccactctcattcccca

SEQ ID NO: 1499 - DNA, 26 bp, Homo sapiens
ctctcctccccactctcattccccac

SEQ ID NO: 1500 - DNA, 26 bp, Homo sapiens
tctcctccccactctcattccccaca

SEQ ID NO: 1501 - DNA, 26 bp, Homo sapiens
ctcctccccactctcattccccacaa

SEQ ID NO: 1502 - DNA, 26 bp, Homo sapiens
tcctccccactctcattccccacaat

SEQ ID NO: 1503 - DNA, 26 bp, Homo sapiens
cctccccactctcattccccacaatg

SEQ ID NO: 1504 - DNA, 26 bp, Homo sapiens
ctccccactctcattccccacaatga

SEQ ID NO: 1505 - DNA, 26 bp, Homo sapiens
tccccactctcattccccacaatgag

SEQ ID NO: 1506 - DNA, 26 bp, Homo sapiens
ccccactctcattccccacaatgagg

SEQ ID NO: 1507 - DNA, 26 bp, Homo sapiens
cccactctcattccccacaatgaggc

SEQ ID NO: 1508 - DNA, 26 bp, Homo sapiens
ccactctcattccccacaatgaggca

SEQ ID NO: 1509 - DNA, 26 bp, Homo sapiens
cactctcattccccacaatgaggcag

SEQ ID NO: 1510 - DNA, 26 bp, Homo sapiens
actctcattccccacaatgaggcagt

SEQ ID NO: 1511 - DNA, 26 bp, Homo sapiens
ctctcattccccacaatgaggcagta

SEQ ID NO: 1512 - DNA, 26 bp, Homo sapiens
tctcattccccacaatgaggcagtat

SEQ ID NO: 1513 - DNA, 26 bp, Homo sapiens
ctcattccccacaatgaggcagtata

SEQ ID NO: 1514 - DNA, 26 bp, Homo sapiens
tcattccccacaatgaggcagtatag

SEQ ID NO: 1515 - DNA, 26 bp, Homo sapiens
cattccccacaatgaggcagtatagc

SEQ ID NO: 1516 - DNA, 26 bp, Homo sapiens
attccccacaatgaggcagtatagcg

SEQ ID NO: 1517 - DNA, 26 bp, Homo sapiens
ttccccacaatgaggcagtatagcgg

SEQ ID NO: 1518 - DNA, 26 bp, Homo sapiens
tccccacaatgaggcagtatagcggg

SEQ ID NO: 1519 - DNA, 26 bp, Homo sapiens
ccccacaatgaggcagtatagcgggt

SEQ ID NO: 1520 - DNA, 26 bp, Homo sapiens
cccacaatgaggcagtatagcgggtg

SEQ ID NO: 1521 - DNA, 26 bp, Homo sapiens
ccacaatgaggcagtatagcgggtgg

SEQ ID NO: 1522 - DNA, 26 bp, Homo sapiens
cacaatgaggcagtatagcgggtggg

SEQ ID NO: 1523 - DNA, 26 bp, Homo sapiens
acaatgaggcagtatagcgggtgggt

SEQ ID NO: 1524 - DNA, 26 bp, Homo sapiens
caatgaggcagtatagcgggtgggtc

SEQ ID NO: 1525 - DNA, 26 bp, Homo sapiens
aatgaggcagtatagcgggtgggtca

SEQ ID NO: 1526 - DNA, 26 bp, Homo sapiens
atgaggcagtatagcgggtgggtcac

SEQ ID NO: 1527 - DNA, 26 bp, Homo sapiens
tgaggcagtatagcgggtgggtcacc

SEQ ID NO: 1528 - DNA, 26 bp, Homo sapiens
gaggcagtatagcgggtgggtcacca

SEQ ID NO: 1529 - DNA, 26 bp, Homo sapiens
aggcagtatagcgggtgggtcaccac

SEQ ID NO: 1530 - DNA, 26 bp, Homo sapiens
ggcagtatagcgggtgggtcaccacc

SEQ ID NO: 1531 - DNA, 26 bp, Homo sapiens
gcagtatagcgggtgggtcaccaccc

SEQ ID NO: 1532 - DNA, 26 bp, Homo sapiens
cagtatagcgggtgggtcaccacccc

SEQ ID NO: 1533 - DNA, 26 bp, Homo sapiens
agtatagcgggtgggtcaccaccccc

SEQ ID NO: 1534 - DNA, 26 bp, Homo sapiens
gtatagcgggtgggtcaccacccccc

SEQ ID NO: 1535 - DNA, 26 bp, Homo sapiens
tatagcgggtgggtcaccaccccccc

SEQ ID NO: 1536 - DNA, 26 bp, Homo sapiens
atagcgggtgggtcaccaccccccct

SEQ ID NO: 1537 - DNA, 26 bp, Homo sapiens
tagcgggtgggtcaccaccccccctc

SEQ ID NO: 1538 - DNA, 26 bp, Homo sapiens
agcgggtgggtcaccaccccccctct

SEQ ID NO: 1539 - DNA, 26 bp, Homo sapiens
gcgggtgggtcaccaccccccctctg

SEQ ID NO: 1540 - DNA, 26 bp, Homo sapiens
cgggtgggtcaccaccccccctctgt

SEQ ID NO: 1541 - DNA, 26 bp, Homo sapiens
gggtgggtcaccaccccccctctgta

SEQ ID NO: 1542 - DNA, 26 bp, Homo sapiens
ggtgggtcaccaccccccctctgtaa

SEQ ID NO: 1543 - DNA, 26 bp, Homo sapiens
gtgggtcaccaccccccctctgtaag

SEQ ID NO: 1544 - DNA, 26 bp, Homo sapiens
tgggtcaccaccccccctctgtaagg

SEQ ID NO: 1545 - DNA, 26 bp, Homo sapiens
gggtcaccaccccccctctgtaaggc

SEQ ID NO: 1546 - DNA, 26 bp, Homo sapiens
ggtcaccaccccccctctgtaaggca

SEQ ID NO: 1547 - DNA, 26 bp, Homo sapiens
gtcaccaccccccctctgtaaggcac

SEQ ID NO: 1548 - DNA, 26 bp, Homo sapiens
tcaccaccccccctctgtaaggcacc

SEQ ID NO: 1549 - DNA, 26 bp, Homo sapiens
caccaccccccctctgtaaggcaccc

SEQ ID NO: 1550 - DNA, 26 bp, Homo sapiens
accaccccccctctgtaaggcacccg

SEQ ID NO: 1551 - DNA, 26 bp, Homo sapiens
ccaccccccctctgtaaggcacccgc

SEQ ID NO: 1552 - DNA, 26 bp, Homo sapiens
caccccccctctgtaaggcacccgca

SEQ ID NO: 1553 - DNA, 26 bp, Homo sapiens
accccccctctgtaaggcacccgcat

SEQ ID NO: 1554 - DNA, 26 bp, Homo sapiens
ccccccctctgtaaggcacccgcatc

SEQ ID NO: 1555 - DNA, 26 bp, Homo sapiens
cccccctctgtaaggcacccgcatca

SEQ ID NO: 1556 - DNA, 26 bp, Homo sapiens
ccccctctgtaaggcacccgcatcag

SEQ ID NO: 1557 - DNA, 26 bp, Homo sapiens
cccctctgtaaggcacccgcatcagg

SEQ ID NO: 1558 - DNA, 26 bp, Homo sapiens
ccctctgtaaggcacccgcatcaggg

SEQ ID NO: 1559 - DNA, 26 bp, Homo sapiens
cctctgtaaggcacccgcatcagggg

SEQ ID NO: 1560 - DNA, 26 bp, Homo sapiens
ctctgtaaggcacccgcatcaggggc

SEQ ID NO: 1561 - DNA, 26 bp, Homo sapiens
tctgtaaggcacccgcatcaggggca

SEQ ID NO: 1562 - DNA, 26 bp, Homo sapiens
ctgtaaggcacccgcatcaggggcat

SEQ ID NO: 1563 - DNA, 26 bp, Homo sapiens
tgtaaggcacccgcatcaggggcatc

SEQ ID NO: 1564 - DNA, 26 bp, Homo sapiens
gtaaggcacccgcatcaggggcatcc

SEQ ID NO: 1565 - DNA, 26 bp, Homo sapiens
taaggcacccgcatcaggggcatcct

SEQ ID NO: 1566 - DNA, 26 bp, Homo sapiens
aaggcacccgcatcaggggcatcctg

SEQ ID NO: 1567 - DNA, 26 bp, Homo sapiens
aggcacccgcatcaggggcatcctgg

SEQ ID NO: 1568 - DNA, 26 bp, Homo sapiens
ggcacccgcatcaggggcatcctggt

SEQ ID NO: 1569 - DNA, 26 bp, Homo sapiens
gcacccgcatcaggggcatcctggtt

SEQ ID NO: 1570 - DNA, 26 bp, Homo sapiens
cacccgcatcaggggcatcctggttg

SEQ ID NO: 1571 - DNA, 26 bp, Homo sapiens
acccgcatcaggggcatcctggttgg

SEQ ID NO: 1572 - DNA, 26 bp, Homo sapiens
cccgcatcaggggcatcctggttggc

SEQ ID NO: 1573 - DNA, 26 bp, Homo sapiens
ccgcatcaggggcatcctggttggct

SEQ ID NO: 1574 - DNA, 26 bp, Homo sapiens
cgcatcaggggcatcctggttggctt

SEQ ID NO: 1575 - DNA, 26 bp, Homo sapiens
gcatcaggggcatcctggttggcttc

SEQ ID NO: 1576 - DNA, 26 bp, Homo sapiens
catcaggggcatcctggttggcttcg

SEQ ID NO: 1577 - DNA, 26 bp, Homo sapiens
atcaggggcatcctggttggcttcgg

SEQ ID NO: 1578 - DNA, 26 bp, Homo sapiens
tcaggggcatcctggttggcttcggg

SEQ ID NO: 1579 - DNA, 26 bp, Homo sapiens
caggggcatcctggttggcttcggga

SEQ ID NO: 1580 - DNA, 26 bp, Homo sapiens
aggggcatcctggttggcttcgggat

SEQ ID NO: 1581 - DNA, 26 bp, Homo sapiens
ggggcatcctggttggcttcgggatc

SEQ ID NO: 1582 - DNA, 26 bp, Homo sapiens
gggcatcctggttggcttcgggatcc

SEQ ID NO: 1583 - DNA, 26 bp, Homo sapiens
ggcatcctggttggcttcgggatcca

SEQ ID NO: 1584 - DNA, 26 bp, Homo sapiens
gcatcctggttggcttcgggatccag

SEQ ID NO: 1585 - DNA, 26 bp, Homo sapiens
catcctggttggcttcgggatccagt

SEQ ID NO: 1586 - DNA, 26 bp, Homo sapiens
atcctggttggcttcgggatccagtt

SEQ ID NO: 1587 - DNA, 26 bp, Homo sapiens
tcctggttggcttcgggatccagttc

SEQ ID NO: 1588 - DNA, 26 bp, Homo sapiens
cctggttggcttcgggatccagttca

SEQ ID NO: 1589 - DNA, 26 bp, Homo sapiens
ctggttggcttcgggatccagttcag

SEQ ID NO: 1590 - DNA, 26 bp, Homo sapiens
tggttggcttcgggatccagttcagc

SEQ ID NO: 1591 - DNA, 26 bp, Homo sapiens
ggttggcttcgggatccagttcagct

SEQ ID NO: 1592 - DNA, 26 bp, Homo sapiens
gttggcttcgggatccagttcagctc

SEQ ID NO: 1593 - DNA, 26 bp, Homo sapiens
ttggcttcgggatccagttcagctcc

SEQ ID NO: 1594 - DNA, 26 bp, Homo sapiens
tggcttcgggatccagttcagctcca

SEQ ID NO: 1595 - DNA, 26 bp, Homo sapiens
ggcttcgggatccagttcagctccat

SEQ ID NO: 1596 - DNA, 26 bp, Homo sapiens
gcttcgggatccagttcagctccatc

SEQ ID NO: 1597 - DNA, 26 bp, Homo sapiens
cttcgggatccagttcagctccatct

SEQ ID NO: 1598 - DNA, 26 bp, Homo sapiens
ttcgggatccagttcagctccatctc

SEQ ID NO: 1599 - DNA, 26 bp, Homo sapiens
tcgggatccagttcagctccatctct

SEQ ID NO: 1600 - DNA, 26 bp, Homo sapiens
cgggatccagttcagctccatctctg

SEQ ID NO: 1601 - DNA, 26 bp, Homo sapiens
gggatccagttcagctccatctctgg

SEQ ID NO: 1602 - DNA, 26 bp, Homo sapiens
ggatccagttcagctccatctctgga

SEQ ID NO: 1603 - DNA, 26 bp, Homo sapiens
gatccagttcagctccatctctggag

SEQ ID NO: 1604 - DNA, 26 bp, Homo sapiens
atccagttcagctccatctctggagt

SEQ ID NO: 1605 - DNA, 26 bp, Homo sapiens
tccagttcagctccatctctggagtt

SEQ ID NO: 1606 - DNA, 26 bp, Homo sapiens
ccagttcagctccatctctggagttc

SEQ ID NO: 1607 - DNA, 26 bp, Homo sapiens
cagttcagctccatctctggagttct

SEQ ID NO: 1608 - DNA, 26 bp, Homo sapiens
agttcagctccatctctggagttctt

SEQ ID NO: 1609 - DNA, 26 bp, Homo sapiens
gttcagctccatctctggagttcttg

SEQ ID NO: 1610 - DNA, 26 bp, Homo sapiens
ttcagctccatctctggagttcttgc

SEQ ID NO: 1611 - DNA, 26 bp, Homo sapiens
tcagctccatctctggagttcttgcg

SEQ ID NO: 1612 - DNA, 26 bp, Homo sapiens
cagctccatctctggagttcttgcgt

SEQ ID NO: 1613 - DNA, 26 bp, Homo sapiens
agctccatctctggagttcttgcgtg

SEQ ID NO: 1614 - DNA, 26 bp, Homo sapiens
gctccatctctggagttcttgcgtgg

SEQ ID NO: 1615 - DNA, 26 bp, Homo sapiens
ctccatctctggagttcttgcgtggc

SEQ ID NO: 1616 - DNA, 26 bp, Homo sapiens
tccatctctggagttcttgcgtggca

SEQ ID NO: 1617 - DNA, 26 bp, Homo sapiens
ccatctctggagttcttgcgtggcat

SEQ ID NO: 1618 - DNA, 26 bp, Homo sapiens
catctctggagttcttgcgtggcatt

SEQ ID NO: 1619 - DNA, 26 bp, Homo sapiens
atctctggagttcttgcgtggcattt

SEQ ID NO: 1620 - DNA, 26 bp, Homo sapiens
tctctggagttcttgcgtggcatttc

SEQ ID NO: 1621 - DNA, 26 bp, Homo sapiens
ctctggagttcttgcgtggcatttcc

SEQ ID NO: 1622 - DNA, 26 bp, Homo sapiens
tctggagttcttgcgtggcatttcca

SEQ ID NO: 1623 - DNA, 26 bp, Homo sapiens
ctggagttcttgcgtggcatttccac

SEQ ID NO: 1624 - DNA, 26 bp, Homo sapiens
tggagttcttgcgtggcatttccacc

SEQ ID NO: 1625 - DNA, 26 bp, Homo sapiens
ggagttcttgcgtggcatttccacca

SEQ ID NO: 1626 - DNA, 26 bp, Homo sapiens
gagttcttgcgtggcatttccaccag

SEQ ID NO: 1627 - DNA, 26 bp, Homo sapiens
agttcttgcgtggcatttccaccagg

SEQ ID NO: 1628 - DNA, 26 bp, Homo sapiens
gttcttgcgtggcatttccaccaggg

SEQ ID NO: 1629 - DNA, 26 bp, Homo sapiens
ttcttgcgtggcatttccaccagggg

SEQ ID NO: 1630 - DNA, 26 bp, Homo sapiens
tcttgcgtggcatttccaccaggggg

SEQ ID NO: 1631 - DNA, 26 bp, Homo sapiens
cttgcgtggcatttccaccaggggga

SEQ ID NO: 1632 - DNA, 26 bp, Homo sapiens
ttgcgtggcatttccaccagggggag

SEQ ID NO: 1633 - DNA, 26 bp, Homo sapiens
tgcgtggcatttccaccagggggagc

SEQ ID NO: 1634 - DNA, 26 bp, Homo sapiens
gcgtggcatttccaccagggggagcc

SEQ ID NO: 1635 - DNA, 26 bp, Homo sapiens
cgtggcatttccaccagggggagccc

SEQ ID NO: 1636 - DNA, 26 bp, Homo sapiens
gtggcatttccaccagggggagcccc

SEQ ID NO: 1637 - DNA, 26 bp, Homo sapiens
tggcatttccaccagggggagcccct

SEQ ID NO: 1638 - DNA, 26 bp, Homo sapiens
ggcatttccaccagggggagcccctg

SEQ ID NO: 1639 - DNA, 26 bp, Homo sapiens
gcatttccaccagggggagcccctgc

SEQ ID NO: 1640 - DNA, 26 bp, Homo sapiens
catttccaccagggggagcccctgca

SEQ ID NO: 1641 - DNA, 26 bp, Homo sapiens
atttccaccagggggagcccctgcag

SEQ ID NO: 1642 - DNA, 26 bp, Homo sapiens
tttccaccagggggagcccctgcagg

SEQ ID NO: 1643 - DNA, 26 bp, Homo sapiens
ttccaccagggggagcccctgcaggt

SEQ ID NO: 1644 - DNA, 26 bp, Homo sapiens
tccaccagggggagcccctgcaggtc

SEQ ID NO: 1645 - DNA, 26 bp, Homo sapiens
ccaccagggggagcccctgcaggtct

SEQ ID NO: 1646 - DNA, 26 bp, Homo sapiens
caccagggggagcccctgcaggtctt

SEQ ID NO: 1647 - DNA, 26 bp, Homo sapiens
accagggggagcccctgcaggtcttc

SEQ ID NO: 1648 - DNA, 26 bp, Homo sapiens
ccagggggagcccctgcaggtcttcc

SEQ ID NO: 1649 - DNA, 26 bp, Homo sapiens
cagggggagcccctgcaggtcttcct

SEQ ID NO: 1650 - DNA, 26 bp, Homo sapiens
agggggagcccctgcaggtcttcctc

SEQ ID NO: 1651 - DNA, 26 bp, Homo sapiens
gggggagcccctgcaggtcttcctcc

SEQ ID NO: 1652 - DNA, 26 bp, Homo sapiens
ggggagcccctgcaggtcttcctccc

SEQ ID NO: 1653 - DNA, 26 bp, Homo sapiens
gggagcccctgcaggtcttcctccct

SEQ ID NO: 1654 - DNA, 26 bp, Homo sapiens
ggagcccctgcaggtcttcctccctc

SEQ ID NO: 1655 - DNA, 26 bp, Homo sapiens
gagcccctgcaggtcttcctccctct

SEQ ID NO: 1656 - DNA, 26 bp, Homo sapiens
agcccctgcaggtcttcctccctctg

SEQ ID NO: 1657 - DNA, 26 bp, Homo sapiens
gcccctgcaggtcttcctccctctga

SEQ ID NO: 1658 - DNA, 26 bp, Homo sapiens
cccctgcaggtcttcctccctctgac

SEQ ID NO: 1659 - DNA, 26 bp, Homo sapiens
ccctgcaggtcttcctccctctgacc

SEQ ID NO: 1660 - DNA, 26 bp, Homo sapiens
cctgcaggtcttcctccctctgacca

SEQ ID NO: 1661 - DNA, 26 bp, Homo sapiens
ctgcaggtcttcctccctctgaccaa

SEQ ID NO: 1662 - DNA, 26 bp, Homo sapiens
tgcaggtcttcctccctctgaccaag

SEQ ID NO: 1663 - DNA, 26 bp, Homo sapiens
gcaggtcttcctccctctgaccaaga

SEQ ID NO: 1664 - DNA, 26 bp, Homo sapiens
caggtcttcctccctctgaccaagat

SEQ ID NO: 1665 - DNA, 26 bp, Homo sapiens
aggtcttcctccctctgaccaagatc

SEQ ID NO: 1666 - DNA, 26 bp, Homo sapiens
ggtcttcctccctctgaccaagatcc

SEQ ID NO: 1667 - DNA, 26 bp, Homo sapiens
gtcttcctccctctgaccaagatccg

SEQ ID NO: 1668 - DNA, 26 bp, Homo sapiens
tcttcctccctctgaccaagatccgg

SEQ ID NO: 1669 - DNA, 26 bp, Homo sapiens
cttcctccctctgaccaagatccggg

SEQ ID NO: 1670 - DNA, 26 bp, Homo sapiens
ttcctccctctgaccaagatccgggg

SEQ ID NO: 1671 - DNA, 26 bp, Homo sapiens
tcctccctctgaccaagatccggggc

SEQ ID NO: 1672 - DNA, 26 bp, Homo sapiens
cctccctctgaccaagatccggggcc

SEQ ID NO: 1673 - DNA, 26 bp, Homo sapiens
ctccctctgaccaagatccggggcct

SEQ ID NO: 1674 - DNA, 26 bp, Homo sapiens
tccctctgaccaagatccggggcctc

SEQ ID NO: 1675 - DNA, 26 bp, Homo sapiens
ccctctgaccaagatccggggcctcc

SEQ ID NO: 1676 - DNA, 26 bp, Homo sapiens
cctctgaccaagatccggggcctcct

SEQ ID NO: 1677 - DNA, 26 bp, Homo sapiens
ctctgaccaagatccggggcctcctc

SEQ ID NO: 1678 - DNA, 26 bp, Homo sapiens
tctgaccaagatccggggcctcctct

SEQ ID NO: 1679 - DNA, 26 bp, Homo sapiens
ctgaccaagatccggggcctcctctg

SEQ ID NO: 1680 - DNA, 26 bp, Homo sapiens
tgaccaagatccggggcctcctctgg

SEQ ID NO: 1681 - DNA, 26 bp, Homo sapiens
gaccaagatccggggcctcctctggc

SEQ ID NO: 1682 - DNA, 26 bp, Homo sapiens
accaagatccggggcctcctctggcc

SEQ ID NO: 1683 - DNA, 26 bp, Homo sapiens
ccaagatccggggcctcctctggcca

SEQ ID NO: 1684 - DNA, 26 bp, Homo sapiens
caagatccggggcctcctctggccat

SEQ ID NO: 1685 - DNA, 26 bp, Homo sapiens
aagatccggggcctcctctggccatc

SEQ ID NO: 1686 - DNA, 26 bp, Homo sapiens
agatccggggcctcctctggccatct

SEQ ID NO: 1687 - DNA, 26 bp, Homo sapiens
gatccggggcctcctctggccatctc

SEQ ID NO: 1688 - DNA, 26 bp, Homo sapiens
atccggggcctcctctggccatctca

SEQ ID NO: 1689 - DNA, 26 bp, Homo sapiens
tccggggcctcctctggccatctcac

SEQ ID NO: 1690 - DNA, 26 bp, Homo sapiens
ccggggcctcctctggccatctcacc

SEQ ID NO: 1691 - DNA, 26 bp, Homo sapiens
cggggcctcctctggccatctcacca

SEQ ID NO: 1692 - DNA, 26 bp, Homo sapiens
ggggcctcctctggccatctcaccaa

SEQ ID NO: 1693 - DNA, 26 bp, Homo sapiens
gggcctcctctggccatctcaccaac

SEQ ID NO: 1694 - DNA, 26 bp, Homo sapiens
ggcctcctctggccatctcaccaacc

SEQ ID NO: 1695 - DNA, 26 bp, Homo sapiens
gcctcctctggccatctcaccaaccc

SEQ ID NO: 1696 - DNA, 26 bp, Homo sapiens
cctcctctggccatctcaccaaccca

SEQ ID NO: 1697 - DNA, 26 bp, Homo sapiens
ctcctctggccatctcaccaacccat

SEQ ID NO: 1698 - DNA, 26 bp, Homo sapiens
tcctctggccatctcaccaacccatt

SEQ ID NO: 1699 - DNA, 26 bp, Homo sapiens
cctctggccatctcaccaacccattg

SEQ ID NO: 1700 - DNA, 26 bp, Homo sapiens
ctctggccatctcaccaacccattgg

SEQ ID NO: 1701 - DNA, 26 bp, Homo sapiens
tctggccatctcaccaacccattggc

SEQ ID NO: 1702 - DNA, 26 bp, Homo sapiens
ctggccatctcaccaacccattggcc

SEQ ID NO: 1703 - DNA, 26 bp, Homo sapiens
tggccatctcaccaacccattggcct

SEQ ID NO: 1704 - DNA, 26 bp, Homo sapiens
ggccatctcaccaacccattggcctc

SEQ ID NO: 1705 - DNA, 26 bp, Homo sapiens
gccatctcaccaacccattggcctcc

SEQ ID NO: 1706 - DNA, 26 bp, Homo sapiens
ccatctcaccaacccattggcctcct

SEQ ID NO: 1707 - DNA, 26 bp, Homo sapiens
catctcaccaacccattggcctcctc

SEQ ID NO: 1708 - DNA, 26 bp, Homo sapiens
atctcaccaacccattggcctcctcc

SEQ ID NO: 1709 - DNA, 26 bp, Homo sapiens
tctcaccaacccattggcctcctcca

SEQ ID NO: 1710 - DNA, 26 bp, Homo sapiens
ctcaccaacccattggcctcctccat

SEQ ID NO: 1711 - DNA, 26 bp, Homo sapiens
tcaccaacccattggcctcctccatg

SEQ ID NO: 1712 - DNA, 26 bp, Homo sapiens
caccaacccattggcctcctccatgt

SEQ ID NO: 1713 - DNA, 26 bp, Homo sapiens
accaacccattggcctcctccatgtg

SEQ ID NO: 1714 - DNA, 26 bp, Homo sapiens
ccaacccattggcctcctccatgtgg

SEQ ID NO: 1715 - DNA, 26 bp, Homo sapiens
caacccattggcctcctccatgtggc

SEQ ID NO: 1716 - DNA, 26 bp, Homo sapiens
aacccattggcctcctccatgtggcc

SEQ ID NO: 1717 - DNA, 26 bp, Homo sapiens
acccattggcctcctccatgtggcca

SEQ ID NO: 1718 - DNA, 26 bp, Homo sapiens
cccattggcctcctccatgtggccag

SEQ ID NO: 1719 - DNA, 26 bp, Homo sapiens
ccattggcctcctccatgtggccagc

SEQ ID NO: 1720 - DNA, 26 bp, Homo sapiens
cattggcctcctccatgtggccagcc

SEQ ID NO: 1721 - DNA, 26 bp, Homo sapiens
attggcctcctccatgtggccagccc

SEQ ID NO: 1722 - DNA, 26 bp, Homo sapiens
ttggcctcctccatgtggccagccct

SEQ ID NO: 1723 - DNA, 26 bp, Homo sapiens
tggcctcctccatgtggccagccctg

SEQ ID NO: 1724 - DNA, 26 bp, Homo sapiens
ggcctcctccatgtggccagccctgt

SEQ ID NO: 1725 - DNA, 26 bp, Homo sapiens
gcctcctccatgtggccagccctgta

SEQ ID NO: 1726 - DNA, 26 bp, Homo sapiens
cctcctccatgtggccagccctgtaa

SEQ ID NO: 1727 - DNA, 26 bp, Homo sapiens
ctcctccatgtggccagccctgtaag

SEQ ID NO: 1728 - DNA, 26 bp, Homo sapiens
tcctccatgtggccagccctgtaaga

SEQ ID NO: 1729 - DNA, 26 bp, Homo sapiens
cctccatgtggccagccctgtaagac

SEQ ID NO: 1730 - DNA, 26 bp, Homo sapiens
ctccatgtggccagccctgtaagacc

SEQ ID NO: 1731 - DNA, 26 bp, Homo sapiens
tccatgtggccagccctgtaagacca

SEQ ID NO: 1732 - DNA, 26 bp, Homo sapiens
ccatgtggccagccctgtaagaccat

SEQ ID NO: 1733 - DNA, 26 bp, Homo sapiens
catgtggccagccctgtaagaccatc

SEQ ID NO: 1734 - DNA, 26 bp, Homo sapiens
atgtggccagccctgtaagaccatcg

SEQ ID NO: 1735 - DNA, 26 bp, Homo sapiens
tgtggccagccctgtaagaccatcgc

SEQ ID NO: 1736 - DNA, 26 bp, Homo sapiens
gtggccagccctgtaagaccatcgcg

SEQ ID NO: 1737 - DNA, 26 bp, Homo sapiens
tggccagccctgtaagaccatcgcgg

SEQ ID NO: 1738 - DNA, 26 bp, Homo sapiens
ggccagccctgtaagaccatcgcggc

SEQ ID NO: 1739 - DNA, 26 bp, Homo sapiens
gccagccctgtaagaccatcgcggct

SEQ ID NO: 1740 - DNA, 26 bp, Homo sapiens
ccagccctgtaagaccatcgcggctc

SEQ ID NO: 1741 - DNA, 26 bp, Homo sapiens
cagccctgtaagaccatcgcggctca

SEQ ID NO: 1742 - DNA, 26 bp, Homo sapiens
agccctgtaagaccatcgcggctcat

SEQ ID NO: 1743 - DNA, 26 bp, Homo sapiens
gccctgtaagaccatcgcggctcatg

SEQ ID NO: 1744 - DNA, 26 bp, Homo sapiens
ccctgtaagaccatcgcggctcatgg

SEQ ID NO: 1745 - DNA, 26 bp, Homo sapiens
cctgtaagaccatcgcggctcatggc

SEQ ID NO: 1746 - DNA, 26 bp, Homo sapiens
ctgtaagaccatcgcggctcatggca

SEQ ID NO: 1747 - DNA, 26 bp, Homo sapiens
tgtaagaccatcgcggctcatggcaa

SEQ ID NO: 1748 - DNA, 26 bp, Homo sapiens
gtaagaccatcgcggctcatggcaac

SEQ ID NO: 1749 - DNA, 26 bp, Homo sapiens
taagaccatcgcggctcatggcaacg

SEQ ID NO: 1750 - DNA, 26 bp, Homo sapiens
aagaccatcgcggctcatggcaacgg

SEQ ID NO: 1751 - DNA, 26 bp, Homo sapiens
agaccatcgcggctcatggcaacgga

SEQ ID NO: 1752 - DNA, 26 bp, Homo sapiens
gaccatcgcggctcatggcaacggac

SEQ ID NO: 1753 - DNA, 26 bp, Homo sapiens
accatcgcggctcatggcaacggaca

SEQ ID NO: 1754 - DNA, 26 bp, Homo sapiens
ccatcgcggctcatggcaacggacac

SEQ ID NO: 1755 - DNA, 26 bp, Homo sapiens
catcgcggctcatggcaacggacaca

SEQ ID NO: 1756 - DNA, 26 bp, Homo sapiens
atcgcggctcatggcaacggacacac

SEQ ID NO: 1757 - DNA, 26 bp, Homo sapiens
tcgcggctcatggcaacggacacacc

SEQ ID NO: 1758 - DNA, 26 bp, Homo sapiens
cgcggctcatggcaacggacacacca

SEQ ID NO: 1759 - DNA, 26 bp, Homo sapiens
gcggctcatggcaacggacacaccag

SEQ ID NO: 1760 - DNA, 26 bp, Homo sapiens
cggctcatggcaacggacacaccaga

SEQ ID NO: 1761 - DNA, 26 bp, Homo sapiens
ggctcatggcaacggacacaccagaa

SEQ ID NO: 1762 - DNA, 26 bp, Homo sapiens
gctcatggcaacggacacaccagaac

SEQ ID NO: 1763 - DNA, 26 bp, Homo sapiens
ctcatggcaacggacacaccagaact

SEQ ID NO: 1764 - DNA, 26 bp, Homo sapiens
tcatggcaacggacacaccagaactg

SEQ ID NO: 1765 - DNA, 26 bp, Homo sapiens
catggcaacggacacaccagaactgg

SEQ ID NO: 1766 - DNA, 26 bp, Homo sapiens
atggcaacggacacaccagaactgga

SEQ ID NO: 1767 - DNA, 26 bp, Homo sapiens
tggcaacggacacaccagaactggag

SEQ ID NO: 1768 - DNA, 26 bp, Homo sapiens
ggcaacggacacaccagaactggagg

SEQ ID NO: 1769 - DNA, 26 bp, Homo sapiens
gcaacggacacaccagaactggaggc

SEQ ID NO: 1770 - DNA, 26 bp, Homo sapiens
caacggacacaccagaactggaggca

SEQ ID NO: 1771 - DNA, 26 bp, Homo sapiens
aacggacacaccagaactggaggcag

SEQ ID NO: 1772 - DNA, 26 bp, Homo sapiens
acggacacaccagaactggaggcaga

SEQ ID NO: 1773 - DNA, 26 bp, Homo sapiens
cggacacaccagaactggaggcagat

SEQ ID NO: 1774 - DNA, 26 bp, Homo sapiens
ggacacaccagaactggaggcagatg

SEQ ID NO: 1775 - DNA, 26 bp, Homo sapiens
gacacaccagaactggaggcagatga

SEQ ID NO: 1776 - DNA, 26 bp, Homo sapiens
acacaccagaactggaggcagatgaa

SEQ ID NO: 1777 - DNA, 26 bp, Homo sapiens
cacaccagaactggaggcagatgaag

SEQ ID NO: 1778 - DNA, 26 bp, Homo sapiens
acaccagaactggaggcagatgaagg

SEQ ID NO: 1779 - DNA, 26 bp, Homo sapiens
caccagaactggaggcagatgaaggc

SEQ ID NO: 1780 - DNA, 26 bp, Homo sapiens
accagaactggaggcagatgaaggcc

SEQ ID NO: 1781 - DNA, 26 bp, Homo sapiens
ccagaactggaggcagatgaaggcca

SEQ ID NO: 1782 - DNA, 26 bp, Homo sapiens
cagaactggaggcagatgaaggccaa

SEQ ID NO: 1783 - DNA, 26 bp, Homo sapiens
agaactggaggcagatgaaggccaag

SEQ ID NO: 1784 - DNA, 26 bp, Homo sapiens
gaactggaggcagatgaaggccaaga

SEQ ID NO: 1785 - DNA, 26 bp, Homo sapiens
aactggaggcagatgaaggccaagac

SEQ ID NO: 1786 - DNA, 26 bp, Homo sapiens
actggaggcagatgaaggccaagacg

SEQ ID NO: 1787 - DNA, 26 bp, Homo sapiens
ctggaggcagatgaaggccaagacgg

SEQ ID NO: 1788 - DNA, 26 bp, Homo sapiens
tggaggcagatgaaggccaagacggc

SEQ ID NO: 1789 - DNA, 26 bp, Homo sapiens
ggaggcagatgaaggccaagacggct

SEQ ID NO: 1790 - DNA, 26 bp, Homo sapiens
gaggcagatgaaggccaagacggctg

SEQ ID NO: 1791 - DNA, 26 bp, Homo sapiens
aggcagatgaaggccaagacggctgt

SEQ ID NO: 1792 - DNA, 26 bp, Homo sapiens
ggcagatgaaggccaagacggctgtg

SEQ ID NO: 1793 - DNA, 26 bp, Homo sapiens
gcagatgaaggccaagacggctgtga

SEQ ID NO: 1794 - DNA, 26 bp, Homo sapiens
cagatgaaggccaagacggctgtgaa

SEQ ID NO: 1795 - DNA, 26 bp, Homo sapiens
agatgaaggccaagacggctgtgaag

SEQ ID NO: 1796 - DNA, 26 bp, Homo sapiens
gatgaaggccaagacggctgtgaagc

SEQ ID NO: 1797 - DNA, 26 bp, Homo sapiens
atgaaggccaagacggctgtgaagca

SEQ ID NO: 1798 - DNA, 26 bp, Homo sapiens
tgaaggccaagacggctgtgaagcag

SEQ ID NO: 1799 - DNA, 26 bp, Homo sapiens
gaaggccaagacggctgtgaagcagg

SEQ ID NO: 1800 - DNA, 26 bp, Homo sapiens
aaggccaagacggctgtgaagcaggc

SEQ ID NO: 1801 - DNA, 26 bp, Homo sapiens
aggccaagacggctgtgaagcaggcc

SEQ ID NO: 1802 - DNA, 26 bp, Homo sapiens
ggccaagacggctgtgaagcaggcca

SEQ ID NO: 1803 - DNA, 26 bp, Homo sapiens
gccaagacggctgtgaagcaggccag

SEQ ID NO: 1804 - DNA, 26 bp, Homo sapiens
ccaagacggctgtgaagcaggccagc

SEQ ID NO: 1805 - DNA, 26 bp, Homo sapiens
caagacggctgtgaagcaggccagca

SEQ ID NO: 1806 - DNA, 26 bp, Homo sapiens
aagacggctgtgaagcaggccagcag

SEQ ID NO: 1807 - DNA, 26 bp, Homo sapiens
agacggctgtgaagcaggccagcaga

SEQ ID NO: 1808 - DNA, 26 bp, Homo sapiens
gacggctgtgaagcaggccagcagaa

SEQ ID NO: 1809 - DNA, 26 bp, Homo sapiens
acggctgtgaagcaggccagcagaat

SEQ ID NO: 1810 - DNA, 26 bp, Homo sapiens
cggctgtgaagcaggccagcagaatg

SEQ ID NO: 1811 - DNA, 26 bp, Homo sapiens
ggctgtgaagcaggccagcagaatgg

SEQ ID NO: 1812 - DNA, 26 bp, Homo sapiens
gctgtgaagcaggccagcagaatggc

SEQ ID NO: 1813 - DNA, 26 bp, Homo sapiens
ctgtgaagcaggccagcagaatggcc

SEQ ID NO: 1814 - DNA, 26 bp, Homo sapiens
tgtgaagcaggccagcagaatggcca

SEQ ID NO: 1815 - DNA, 26 bp, Homo sapiens
gtgaagcaggccagcagaatggccat

SEQ ID NO: 1816 - DNA, 26 bp, Homo sapiens
tgaagcaggccagcagaatggccatc

SEQ ID NO: 1817 - DNA, 26 bp, Homo sapiens
gaagcaggccagcagaatggccatca

SEQ ID NO: 1818 - DNA, 26 bp, Homo sapiens
aagcaggccagcagaatggccatcag

SEQ ID NO: 1819 - DNA, 26 bp, Homo sapiens
agcaggccagcagaatggccatcagc

SEQ ID NO: 1820 - DNA, 26 bp, Homo sapiens
gcaggccagcagaatggccatcagca

SEQ ID NO: 1821 - DNA, 26 bp, Homo sapiens
caggccagcagaatggccatcagcac

SEQ ID NO: 1822 - DNA, 26 bp, Homo sapiens
aggccagcagaatggccatcagcacc

SEQ ID NO: 1823 - DNA, 26 bp, Homo sapiens
ggccagcagaatggccatcagcaccc

SEQ ID NO: 1824 - DNA, 26 bp, Homo sapiens
gccagcagaatggccatcagcaccca

SEQ ID NO: 1825 - DNA, 26 bp, Homo sapiens
ccagcagaatggccatcagcacccaa

SEQ ID NO: 1826 - DNA, 26 bp, Homo sapiens
cagcagaatggccatcagcacccaaa

SEQ ID NO: 1827 - DNA, 26 bp, Homo sapiens
agcagaatggccatcagcacccaaag

SEQ ID NO: 1828 - DNA, 26 bp, Homo sapiens
gcagaatggccatcagcacccaaagg

SEQ ID NO: 1829 - DNA, 26 bp, Homo sapiens
cagaatggccatcagcacccaaaggg

SEQ ID NO: 1830 - DNA, 26 bp, Homo sapiens
agaatggccatcagcacccaaaggga

SEQ ID NO: 1831 - DNA, 26 bp, Homo sapiens
gaatggccatcagcacccaaagggag

SEQ ID NO: 1832 - DNA, 26 bp, Homo sapiens
aatggccatcagcacccaaagggaga

SEQ ID NO: 1833 - DNA, 26 bp, Homo sapiens
atggccatcagcacccaaagggagat

SEQ ID NO: 1834 - DNA, 26 bp, Homo sapiens
tggccatcagcacccaaagggagatc

SEQ ID NO: 1835 - DNA, 26 bp, Homo sapiens
ggccatcagcacccaaagggagatct

SEQ ID NO: 1836 - DNA, 26 bp, Homo sapiens
gccatcagcacccaaagggagatctg

SEQ ID NO: 1837 - DNA, 26 bp, Homo sapiens
ccatcagcacccaaagggagatctgg

SEQ ID NO: 1838 - DNA, 26 bp, Homo sapiens
catcagcacccaaagggagatctggg

SEQ ID NO: 1839 - DNA, 26 bp, Homo sapiens
atcagcacccaaagggagatctgggg

SEQ ID NO: 1840 - DNA, 26 bp, Homo sapiens
tcagcacccaaagggagatctggggg

SEQ ID NO: 1841 - DNA, 26 bp, Homo sapiens
cagcacccaaagggagatctgggggt

SEQ ID NO: 1842 - DNA, 26 bp, Homo sapiens
agcacccaaagggagatctgggggtc

SEQ ID NO: 1843 - DNA, 26 bp, Homo sapiens
gcacccaaagggagatctgggggtct

SEQ ID NO: 1844 - DNA, 26 bp, Homo sapiens
cacccaaagggagatctgggggtcta

SEQ ID NO: 1845 - DNA, 26 bp, Homo sapiens
acccaaagggagatctgggggtctac

SEQ ID NO: 1846 - DNA, 26 bp, Homo sapiens
cccaaagggagatctgggggtctacc

SEQ ID NO: 1847 - DNA, 26 bp, Homo sapiens
ccaaagggagatctgggggtctacca

SEQ ID NO: 1848 - DNA, 26 bp, Homo sapiens
caaagggagatctgggggtctaccag

SEQ ID NO: 1849 - DNA, 26 bp, Homo sapiens
aaagggagatctgggggtctaccagg

SEQ ID NO: 1850 - DNA, 26 bp, Homo sapiens
aagggagatctgggggtctaccaggg

SEQ ID NO: 1851 - DNA, 26 bp, Homo sapiens
agggagatctgggggtctaccaggga

SEQ ID NO: 1852 - DNA, 26 bp, Homo sapiens
gggagatctgggggtctaccagggag

SEQ ID NO: 1853 - DNA, 26 bp, Homo sapiens
ggagatctgggggtctaccagggagc

SEQ ID NO: 1854 - DNA, 26 bp, Homo sapiens
gagatctgggggtctaccagggagct

SEQ ID NO: 1855 - DNA, 26 bp, Homo sapiens
agatctgggggtctaccagggagctt

SEQ ID NO: 1856 - DNA, 26 bp, Homo sapiens
gatctgggggtctaccagggagcttc

SEQ ID NO: 1857 - DNA, 26 bp, Homo sapiens
atctgggggtctaccagggagcttcc

SEQ ID NO: 1858 - DNA, 26 bp, Homo sapiens
tctgggggtctaccagggagcttcca

SEQ ID NO: 1859 - DNA, 26 bp, Homo sapiens
ctgggggtctaccagggagcttccag

SEQ ID NO: 1860 - DNA, 26 bp, Homo sapiens
tgggggtctaccagggagcttccagg

SEQ ID NO: 1861 - DNA, 26 bp, Homo sapiens
gggggtctaccagggagcttccagga

SEQ ID NO: 1862 - DNA, 26 bp, Homo sapiens
ggggtctaccagggagcttccaggag

SEQ ID NO: 1863 - DNA, 26 bp, Homo sapiens
gggtctaccagggagcttccaggagc

SEQ ID NO: 1864 - DNA, 26 bp, Homo sapiens
ggtctaccagggagcttccaggagcc

SEQ ID NO: 1865 - DNA, 26 bp, Homo sapiens
gtctaccagggagcttccaggagcca

SEQ ID NO: 1866 - DNA, 26 bp, Homo sapiens
tctaccagggagcttccaggagccag

SEQ ID NO: 1867 - DNA, 26 bp, Homo sapiens
ctaccagggagcttccaggagccagc

SEQ ID NO: 1868 - DNA, 26 bp, Homo sapiens
taccagggagcttccaggagccagcg

SEQ ID NO: 1869 - DNA, 26 bp, Homo sapiens
accagggagcttccaggagccagcgg

SEQ ID NO: 1870 - DNA, 26 bp, Homo sapiens
ccagggagcttccaggagccagcgga

SEQ ID NO: 1871 - DNA, 26 bp, Homo sapiens
cagggagcttccaggagccagcggac

SEQ ID NO: 1872 - DNA, 26 bp, Homo sapiens
agggagcttccaggagccagcggact

SEQ ID NO: 1873 - DNA, 26 bp, Homo sapiens
gggagcttccaggagccagcggactc

SEQ ID NO: 1874 - DNA, 26 bp, Homo sapiens
ggagcttccaggagccagcggactct

SEQ ID NO: 1875 - DNA, 26 bp, Homo sapiens
gagcttccaggagccagcggactctt

SEQ ID NO: 1876 - DNA, 26 bp, Homo sapiens
agcttccaggagccagcggactctta

SEQ ID NO: 1877 - DNA, 26 bp, Homo sapiens
gcttccaggagccagcggactcttat

SEQ ID NO: 1878 - DNA, 26 bp, Homo sapiens
cttccaggagccagcggactcttatc

SEQ ID NO: 1879 - DNA, 26 bp, Homo sapiens
ttccaggagccagcggactcttatcc

SEQ ID NO: 1880 - DNA, 26 bp, Homo sapiens
tccaggagccagcggactcttatcca

SEQ ID NO: 1881 - DNA, 26 bp, Homo sapiens
ccaggagccagcggactcttatccag

SEQ ID NO: 1882 - DNA, 26 bp, Homo sapiens
caggagccagcggactcttatccagg

SEQ ID NO: 1883 - DNA, 26 bp, Homo sapiens
aggagccagcggactcttatccaggg

SEQ ID NO: 1884 - DNA, 26 bp, Homo sapiens
ggagccagcggactcttatccagggt

SEQ ID NO: 1885 - DNA, 26 bp, Homo sapiens
gagccagcggactcttatccagggtg

SEQ ID NO: 1886 - DNA, 26 bp, Homo sapiens
agccagcggactcttatccagggtgt

SEQ ID NO: 1887 - DNA, 26 bp, Homo sapiens
gccagcggactcttatccagggtgtg

SEQ ID NO: 1888 - DNA, 26 bp, Homo sapiens
ccagcggactcttatccagggtgtgg

SEQ ID NO: 1889 - DNA, 26 bp, Homo sapiens
cagcggactcttatccagggtgtgga

SEQ ID NO: 1890 - DNA, 26 bp, Homo sapiens
agcggactcttatccagggtgtggaa

SEQ ID NO: 1891 - DNA, 26 bp, Homo sapiens
gcggactcttatccagggtgtggaac

SEQ ID NO: 1892 - DNA, 26 bp, Homo sapiens
cggactcttatccagggtgtggaaca

SEQ ID NO: 1893 - DNA, 26 bp, Homo sapiens
ggactcttatccagggtgtggaacat

SEQ ID NO: 1894 - DNA, 26 bp, Homo sapiens
gactcttatccagggtgtggaacatg

SEQ ID NO: 1895 - DNA, 26 bp, Homo sapiens
actcttatccagggtgtggaacatgg

SEQ ID NO: 1896 - DNA, 26 bp, Homo sapiens
ctcttatccagggtgtggaacatggt

SEQ ID NO: 1897 - DNA, 26 bp, Homo sapiens
tcttatccagggtgtggaacatggtg

SEQ ID NO: 1898 - DNA, 26 bp, Homo sapiens
cttatccagggtgtggaacatggtgc

SEQ ID NO: 1899 - DNA, 26 bp, Homo sapiens
ttatccagggtgtggaacatggtgca

SEQ ID NO: 1900 - DNA, 26 bp, Homo sapiens
tatccagggtgtggaacatggtgcag

SEQ ID NO: 1901 - DNA, 26 bp, Homo sapiens
atccagggtgtggaacatggtgcagt

SEQ ID NO: 1902 - DNA, 26 bp, Homo sapiens
tccagggtgtggaacatggtgcagta

SEQ ID NO: 1903 - DNA, 26 bp, Homo sapiens
ccagggtgtggaacatggtgcagtag

SEQ ID NO: 1904 - DNA, 26 bp, Homo sapiens
cagggtgtggaacatggtgcagtagt

SEQ ID NO: 1905 - DNA, 26 bp, Homo sapiens
agggtgtggaacatggtgcagtagtg

SEQ ID NO: 1906 - DNA, 26 bp, Homo sapiens
gggtgtggaacatggtgcagtagtgc

SEQ ID NO: 1907 - DNA, 26 bp, Homo sapiens
ggtgtggaacatggtgcagtagtgcc

SEQ ID NO: 1908 - DNA, 26 bp, Homo sapiens
gtgtggaacatggtgcagtagtgcct

SEQ ID NO: 1909 - DNA, 26 bp, Homo sapiens
tgtggaacatggtgcagtagtgcctg

SEQ ID NO: 1910 - DNA, 26 bp, Homo sapiens
gtggaacatggtgcagtagtgcctgt

SEQ ID NO: 1911 - DNA, 26 bp, Homo sapiens
tggaacatggtgcagtagtgcctgta

SEQ ID NO: 1912 - DNA, 26 bp, Homo sapiens
ggaacatggtgcagtagtgcctgtaa

SEQ ID NO: 1913 - DNA, 26 bp, Homo sapiens
gaacatggtgcagtagtgcctgtaag

SEQ ID NO: 1914 - DNA, 26 bp, Homo sapiens
aacatggtgcagtagtgcctgtaagg

SEQ ID NO: 1915 - DNA, 26 bp, Homo sapiens
acatggtgcagtagtgcctgtaaggg

SEQ ID NO: 1916 - DNA, 26 bp, Homo sapiens
catggtgcagtagtgcctgtaaggga

SEQ ID NO: 1917 - DNA, 26 bp, Homo sapiens
atggtgcagtagtgcctgtaagggaa

SEQ ID NO: 1918 - DNA, 26 bp, Homo sapiens
tggtgcagtagtgcctgtaagggaag

SEQ ID NO: 1919 - DNA, 26 bp, Homo sapiens
ggtgcagtagtgcctgtaagggaagg

SEQ ID NO: 1920 - DNA, 26 bp, Homo sapiens
gtgcagtagtgcctgtaagggaaggc

SEQ ID NO: 1921 - DNA, 26 bp, Homo sapiens
tgcagtagtgcctgtaagggaaggca

SEQ ID NO: 1922 - DNA, 26 bp, Homo sapiens
gcagtagtgcctgtaagggaaggcag

SEQ ID NO: 1923 - DNA, 26 bp, Homo sapiens
cagtagtgcctgtaagggaaggcagc

SEQ ID NO: 1924 - DNA, 26 bp, Homo sapiens
agtagtgcctgtaagggaaggcagcc

SEQ ID NO: 1925 - DNA, 26 bp, Homo sapiens
gtagtgcctgtaagggaaggcagcct

SEQ ID NO: 1926 - DNA, 26 bp, Homo sapiens
tagtgcctgtaagggaaggcagcctt

SEQ ID NO: 1927 - DNA, 26 bp, Homo sapiens
agtgcctgtaagggaaggcagccttc

SEQ ID NO: 1928 - DNA, 26 bp, Homo sapiens
gtgcctgtaagggaaggcagccttct

SEQ ID NO: 1929 - DNA, 26 bp, Homo sapiens
tgcctgtaagggaaggcagccttctt

SEQ ID NO: 1930 - DNA, 26 bp, Homo sapiens
gcctgtaagggaaggcagccttctta

SEQ ID NO: 1931 - DNA, 26 bp, Homo sapiens
cctgtaagggaaggcagccttcttac

SEQ ID NO: 1932 - DNA, 26 bp, Homo sapiens
ctgtaagggaaggcagccttcttaca

SEQ ID NO: 1933 - DNA, 26 bp, Homo sapiens
tgtaagggaaggcagccttcttacag

SEQ ID NO: 1934 - DNA, 26 bp, Homo sapiens
gtaagggaaggcagccttcttacagc

SEQ ID NO: 1935 - DNA, 26 bp, Homo sapiens
taagggaaggcagccttcttacagct

SEQ ID NO: 1936 - DNA, 26 bp, Homo sapiens
aagggaaggcagccttcttacagctg

SEQ ID NO: 1937 - DNA, 26 bp, Homo sapiens
agggaaggcagccttcttacagctga

SEQ ID NO: 1938 - DNA, 26 bp, Homo sapiens
gggaaggcagccttcttacagctgat

SEQ ID NO: 1939 - DNA, 26 bp, Homo sapiens
ggaaggcagccttcttacagctgatg

SEQ ID NO: 1940 - DNA, 26 bp, Homo sapiens
gaaggcagccttcttacagctgatgc

SEQ ID NO: 1941 - DNA, 26 bp, Homo sapiens
aaggcagccttcttacagctgatgca

SEQ ID NO: 1942 - DNA, 26 bp, Homo sapiens
aggcagccttcttacagctgatgcac

SEQ ID NO: 1943 - DNA, 26 bp, Homo sapiens
ggcagccttcttacagctgatgcaca

SEQ ID NO: 1944 - DNA, 26 bp, Homo sapiens
gcagccttcttacagctgatgcacag

SEQ ID NO: 1945 - DNA, 26 bp, Homo sapiens
cagccttcttacagctgatgcacagg

SEQ ID NO: 1946 - DNA, 26 bp, Homo sapiens
agccttcttacagctgatgcacagga

SEQ ID NO: 1947 - DNA, 26 bp, Homo sapiens
gccttcttacagctgatgcacaggaa

SEQ ID NO: 1948 - DNA, 26 bp, Homo sapiens
ccttcttacagctgatgcacaggaag

SEQ ID NO: 1949 - DNA, 26 bp, Homo sapiens
cttcttacagctgatgcacaggaagt

SEQ ID NO: 1950 - DNA, 26 bp, Homo sapiens
ttcttacagctgatgcacaggaagta

SEQ ID NO: 1951 - DNA, 26 bp, Homo sapiens
tcttacagctgatgcacaggaagtag

SEQ ID NO: 1952 - DNA, 26 bp, Homo sapiens
cttacagctgatgcacaggaagtaga

SEQ ID NO: 1953 - DNA, 26 bp, Homo sapiens
ttacagctgatgcacaggaagtagag

SEQ ID NO: 1954 - DNA, 26 bp, Homo sapiens
tacagctgatgcacaggaagtagaga

SEQ ID NO: 1955 - DNA, 26 bp, Homo sapiens
acagctgatgcacaggaagtagagag

SEQ ID NO: 1956 - DNA, 26 bp, Homo sapiens
cagctgatgcacaggaagtagagagt

SEQ ID NO: 1957 - DNA, 26 bp, Homo sapiens
agctgatgcacaggaagtagagagtg

SEQ ID NO: 1958 - DNA, 26 bp, Homo sapiens
gctgatgcacaggaagtagagagtgg

SEQ ID NO: 1959 - DNA, 26 bp, Homo sapiens
ctgatgcacaggaagtagagagtgga

SEQ ID NO: 1960 - DNA, 26 bp, Homo sapiens
tgatgcacaggaagtagagagtggaa

SEQ ID NO: 1961 - DNA, 26 bp, Homo sapiens
gatgcacaggaagtagagagtggaag

SEQ ID NO: 1962 - DNA, 26 bp, Homo sapiens
atgcacaggaagtagagagtggaagg

SEQ ID NO: 1963 - DNA, 26 bp, Homo sapiens
tgcacaggaagtagagagtggaaggg

SEQ ID NO: 1964 - DNA, 26 bp, Homo sapiens
gcacaggaagtagagagtggaagggg

SEQ ID NO: 1965 - DNA, 26 bp, Homo sapiens
cacaggaagtagagagtggaaggggc

SEQ ID NO: 1966 - DNA, 26 bp, Homo sapiens
acaggaagtagagagtggaaggggca

SEQ ID NO: 1967 - DNA, 26 bp, Homo sapiens
caggaagtagagagtggaaggggcaa

SEQ ID NO: 1968 - DNA, 26 bp, Homo sapiens
aggaagtagagagtggaaggggcaag

SEQ ID NO: 1969 - DNA, 26 bp, Homo sapiens
ggaagtagagagtggaaggggcaaga

SEQ ID NO: 1970 - DNA, 26 bp, Homo sapiens
gaagtagagagtggaaggggcaagat

SEQ ID NO: 1971 - DNA, 26 bp, Homo sapiens
aagtagagagtggaaggggcaagatg

SEQ ID NO: 1972 - DNA, 26 bp, Homo sapiens
agtagagagtggaaggggcaagatgt

SEQ ID NO: 1973 - DNA, 26 bp, Homo sapiens
gtagagagtggaaggggcaagatgtt

SEQ ID NO: 1974 - DNA, 26 bp, Homo sapiens
tagagagtggaaggggcaagatgttc

SEQ ID NO: 1975 - DNA, 26 bp, Homo sapiens
agagagtggaaggggcaagatgttcc

SEQ ID NO: 1976 - DNA, 26 bp, Homo sapiens
gagagtggaaggggcaagatgttcca

SEQ ID NO: 1977 - DNA, 26 bp, Homo sapiens
agagtggaaggggcaagatgttccag

SEQ ID NO: 1978 - DNA, 26 bp, Homo sapiens
gagtggaaggggcaagatgttccagc

SEQ ID NO: 1979 - DNA, 26 bp, Homo sapiens
agtggaaggggcaagatgttccagca

SEQ ID NO: 1980 - DNA, 26 bp, Homo sapiens
gtggaaggggcaagatgttccagcac

SEQ ID NO: 1981 - DNA, 26 bp, Homo sapiens
tggaaggggcaagatgttccagcacc

SEQ ID NO: 1982 - DNA, 26 bp, Homo sapiens
ggaaggggcaagatgttccagcacca

SEQ ID NO: 1983 - DNA, 26 bp, Homo sapiens
gaaggggcaagatgttccagcaccac

SEQ ID NO: 1984 - DNA, 26 bp, Homo sapiens
aaggggcaagatgttccagcaccacg

SEQ ID NO: 1985 - DNA, 26 bp, Homo sapiens
aggggcaagatgttccagcaccacgg

SEQ ID NO: 1986 - DNA, 26 bp, Homo sapiens
ggggcaagatgttccagcaccacgga

SEQ ID NO: 1987 - DNA, 26 bp, Homo sapiens
gggcaagatgttccagcaccacggag

SEQ ID NO: 1988 - DNA, 26 bp, Homo sapiens
ggcaagatgttccagcaccacggagc

SEQ ID NO: 1989 - DNA, 26 bp, Homo sapiens
gcaagatgttccagcaccacggagct

SEQ ID NO: 1990 - DNA, 26 bp, Homo sapiens
caagatgttccagcaccacggagctg

SEQ ID NO: 1991 - DNA, 26 bp, Homo sapiens
aagatgttccagcaccacggagctga

SEQ ID NO: 1992 - DNA, 26 bp, Homo sapiens
agatgttccagcaccacggagctgat

SEQ ID NO: 1993 - DNA, 26 bp, Homo sapiens
gatgttccagcaccacggagctgatc

SEQ ID NO: 1994 - DNA, 26 bp, Homo sapiens
atgttccagcaccacggagctgatcg

SEQ ID NO: 1995 - DNA, 26 bp, Homo sapiens
tgttccagcaccacggagctgatcgt

SEQ ID NO: 1996 - DNA, 26 bp, Homo sapiens
gttccagcaccacggagctgatcgtt

SEQ ID NO: 1997 - DNA, 26 bp, Homo sapiens
ttccagcaccacggagctgatcgttc

SEQ ID NO: 1998 - DNA, 26 bp, Homo sapiens
tccagcaccacggagctgatcgttcg

SEQ ID NO: 1999 - DNA, 26 bp, Homo sapiens
ccagcaccacggagctgatcgttcga

SEQ ID NO: 2000 - DNA, 26 bp, Homo sapiens
cagcaccacggagctgatcgttcgag

SEQ ID NO: 2001 - DNA, 26 bp, Homo sapiens
agcaccacggagctgatcgttcgagg

SEQ ID NO: 2002 - DNA, 26 bp, Homo sapiens
gcaccacggagctgatcgttcgaggc

SEQ ID NO: 2003 - DNA, 26 bp, Homo sapiens
caccacggagctgatcgttcgaggca

SEQ ID NO: 2004 - DNA, 26 bp, Homo sapiens
accacggagctgatcgttcgaggcac

SEQ ID NO: 2005 - DNA, 26 bp, Homo sapiens
ccacggagctgatcgttcgaggcacc

SEQ ID NO: 2006 - DNA, 26 bp, Homo sapiens
cacggagctgatcgttcgaggcacct

SEQ ID NO: 2007 - DNA, 26 bp, Homo sapiens
acggagctgatcgttcgaggcacctt

SEQ ID NO: 2008 - DNA, 26 bp, Homo sapiens
cggagctgatcgttcgaggcaccttc

SEQ ID NO: 2009 - DNA, 26 bp, Homo sapiens
ggagctgatcgttcgaggcaccttct

SEQ ID NO: 2010 - DNA, 26 bp, Homo sapiens
gagctgatcgttcgaggcaccttctc

SEQ ID NO: 2011 - DNA, 26 bp, Homo sapiens
agctgatcgttcgaggcaccttctcc

SEQ ID NO: 2012 - DNA, 26 bp, Homo sapiens
gctgatcgttcgaggcaccttctcct

SEQ ID NO: 2013 - DNA, 26 bp, Homo sapiens
ctgatcgttcgaggcaccttctcctc

SEQ ID NO: 2014 - DNA, 26 bp, Homo sapiens
tgatcgttcgaggcaccttctcctcg

SEQ ID NO: 2015 - DNA, 26 bp, Homo sapiens
gatcgttcgaggcaccttctcctcgt

SEQ ID NO: 2016 - DNA, 26 bp, Homo sapiens
atcgttcgaggcaccttctcctcgtg

SEQ ID NO: 2017 - DNA, 26 bp, Homo sapiens
tcgttcgaggcaccttctcctcgtgg

SEQ ID NO: 2018 - DNA, 26 bp, Homo sapiens
cgttcgaggcaccttctcctcgtggt

SEQ ID NO: 2019 - DNA, 26 bp, Homo sapiens
gttcgaggcaccttctcctcgtggtg

SEQ ID NO: 2020 - DNA, 26 bp, Homo sapiens
ttcgaggcaccttctcctcgtggtgg

SEQ ID NO: 2021 - DNA, 26 bp, Homo sapiens
tcgaggcaccttctcctcgtggtgga

SEQ ID NO: 2022 - DNA, 26 bp, Homo sapiens
cgaggcaccttctcctcgtggtggaa

SEQ ID NO: 2023 - DNA, 26 bp, Homo sapiens
gaggcaccttctcctcgtggtggaag

SEQ ID NO: 2024 - DNA, 26 bp, Homo sapiens
aggcaccttctcctcgtggtggaagc

SEQ ID NO: 2025 - DNA, 26 bp, Homo sapiens
ggcaccttctcctcgtggtggaagct

SEQ ID NO: 2026 - DNA, 26 bp, Homo sapiens
gcaccttctcctcgtggtggaagctg

SEQ ID NO: 2027 - DNA, 26 bp, Homo sapiens
caccttctcctcgtggtggaagctgt

SEQ ID NO: 2028 - DNA, 26 bp, Homo sapiens
accttctcctcgtggtggaagctgta

SEQ ID NO: 2029 - DNA, 26 bp, Homo sapiens
ccttctcctcgtggtggaagctgtag

SEQ ID NO: 2030 - DNA, 26 bp, Homo sapiens
cttctcctcgtggtggaagctgtagc

SEQ ID NO: 2031 - DNA, 26 bp, Homo sapiens
ttctcctcgtggtggaagctgtagcg

SEQ ID NO: 2032 - DNA, 26 bp, Homo sapiens
tctcctcgtggtggaagctgtagcga

SEQ ID NO: 2033 - DNA, 26 bp, Homo sapiens
ctcctcgtggtggaagctgtagcgaa

SEQ ID NO: 2034 - DNA, 26 bp, Homo sapiens
tcctcgtggtggaagctgtagcgaag

SEQ ID NO: 2035 - DNA, 26 bp, Homo sapiens
cctcgtggtggaagctgtagcgaaga

SEQ ID NO: 2036 - DNA, 26 bp, Homo sapiens
ctcgtggtggaagctgtagcgaagat

SEQ ID NO: 2037 - DNA, 26 bp, Homo sapiens
tcgtggtggaagctgtagcgaagata

SEQ ID NO: 2038 - DNA, 26 bp, Homo sapiens
cgtggtggaagctgtagcgaagatag

SEQ ID NO: 2039 - DNA, 26 bp, Homo sapiens
gtggtggaagctgtagcgaagatagc

SEQ ID NO: 2040 - DNA, 26 bp, Homo sapiens
tggtggaagctgtagcgaagatagcc

SEQ ID NO: 2041 - DNA, 26 bp, Homo sapiens
ggtggaagctgtagcgaagatagcca

SEQ ID NO: 2042 - DNA, 26 bp, Homo sapiens
gtggaagctgtagcgaagatagccag

SEQ ID NO: 2043 - DNA, 26 bp, Homo sapiens
tggaagctgtagcgaagatagccaga

SEQ ID NO: 2044 - DNA, 26 bp, Homo sapiens
ggaagctgtagcgaagatagccagag

SEQ ID NO: 2045 - DNA, 26 bp, Homo sapiens
gaagctgtagcgaagatagccagaga

SEQ ID NO: 2046 - DNA, 26 bp, Homo sapiens
aagctgtagcgaagatagccagagaa

SEQ ID NO: 2047 - DNA, 26 bp, Homo sapiens
agctgtagcgaagatagccagagaag

SEQ ID NO: 2048 - DNA, 26 bp, Homo sapiens
gctgtagcgaagatagccagagaaga

SEQ ID NO: 2049 - DNA, 26 bp, Homo sapiens
ctgtagcgaagatagccagagaagat

SEQ ID NO: 2050 - DNA, 26 bp, Homo sapiens
tgtagcgaagatagccagagaagatg

SEQ ID NO: 2051 - DNA, 26 bp, Homo sapiens
gtagcgaagatagccagagaagatgc

SEQ ID NO: 2052 - DNA, 26 bp, Homo sapiens
tagcgaagatagccagagaagatgct

SEQ ID NO: 2053 - DNA, 26 bp, Homo sapiens
agcgaagatagccagagaagatgctg

SEQ ID NO: 2054 - DNA, 26 bp, Homo sapiens
gcgaagatagccagagaagatgctgt

SEQ ID NO: 2055 - DNA, 26 bp, Homo sapiens
cgaagatagccagagaagatgctgtt

SEQ ID NO: 2056 - DNA, 26 bp, Homo sapiens
gaagatagccagagaagatgctgttc

SEQ ID NO: 2057 - DNA, 26 bp, Homo sapiens
aagatagccagagaagatgctgttcc

SEQ ID NO: 2058 - DNA, 26 bp, Homo sapiens
agatagccagagaagatgctgttcca

SEQ ID NO: 2059 - DNA, 26 bp, Homo sapiens
gatagccagagaagatgctgttccag

SEQ ID NO: 2060 - DNA, 26 bp, Homo sapiens
atagccagagaagatgctgttccagt

SEQ ID NO: 2061 - DNA, 26 bp, Homo sapiens
tagccagagaagatgctgttccagtt

SEQ ID NO: 2062 - DNA, 26 bp, Homo sapiens
agccagagaagatgctgttccagttg

SEQ ID NO: 2063 - DNA, 26 bp, Homo sapiens
gccagagaagatgctgttccagttgg

SEQ ID NO: 2064 - DNA, 26 bp, Homo sapiens
ccagagaagatgctgttccagttggg

SEQ ID NO: 2065 - DNA, 26 bp, Homo sapiens
cagagaagatgctgttccagttgggc

SEQ ID NO: 2066 - DNA, 26 bp, Homo sapiens
agagaagatgctgttccagttgggcc

SEQ ID NO: 2067 - DNA, 26 bp, Homo sapiens
gagaagatgctgttccagttgggcct

SEQ ID NO: 2068 - DNA, 26 bp, Homo sapiens
agaagatgctgttccagttgggcctg

SEQ ID NO: 2069 - DNA, 26 bp, Homo sapiens
gaagatgctgttccagttgggcctgt

SEQ ID NO: 2070 - DNA, 26 bp, Homo sapiens
aagatgctgttccagttgggcctgta

SEQ ID NO: 2071 - DNA, 26 bp, Homo sapiens
agatgctgttccagttgggcctgtac

SEQ ID NO: 2072 - DNA, 26 bp, Homo sapiens
gatgctgttccagttgggcctgtaca

SEQ ID NO: 2073 - DNA, 26 bp, Homo sapiens
atgctgttccagttgggcctgtacat

SEQ ID NO: 2074 - DNA, 26 bp, Homo sapiens
tgctgttccagttgggcctgtacata

SEQ ID NO: 2075 - DNA, 26 bp, Homo sapiens
gctgttccagttgggcctgtacataa

SEQ ID NO: 2076 - DNA, 26 bp, Homo sapiens
ctgttccagttgggcctgtacataat

SEQ ID NO: 2077 - DNA, 26 bp, Homo sapiens
tgttccagttgggcctgtacataata

SEQ ID NO: 2078 - DNA, 26 bp, Homo sapiens
gttccagttgggcctgtacataatat

SEQ ID NO: 2079 - DNA, 26 bp, Homo sapiens
ttccagttgggcctgtacataatatg

SEQ ID NO: 2080 - DNA, 26 bp, Homo sapiens
tccagttgggcctgtacataatatgg

SEQ ID NO: 2081 - DNA, 26 bp, Homo sapiens
ccagttgggcctgtacataatatggt

SEQ ID NO: 2082 - DNA, 26 bp, Homo sapiens
cagttgggcctgtacataatatggta

SEQ ID NO: 2083 - DNA, 26 bp, Homo sapiens
agttgggcctgtacataatatggtaa

SEQ ID NO: 2084 - DNA, 26 bp, Homo sapiens
gttgggcctgtacataatatggtaat

SEQ ID NO: 2085 - DNA, 26 bp, Homo sapiens
ttgggcctgtacataatatggtaata

SEQ ID NO: 2086 - DNA, 26 bp, Homo sapiens
tgggcctgtacataatatggtaatag

SEQ ID NO: 2087 - DNA, 26 bp, Homo sapiens
gggcctgtacataatatggtaatagt

SEQ ID NO: 2088 - DNA, 26 bp, Homo sapiens
ggcctgtacataatatggtaatagtc

SEQ ID NO: 2089 - DNA, 26 bp, Homo sapiens
gcctgtacataatatggtaatagtcc

SEQ ID NO: 2090 - DNA, 26 bp, Homo sapiens
cctgtacataatatggtaatagtcct

SEQ ID NO: 2091 - DNA, 26 bp, Homo sapiens
ctgtacataatatggtaatagtcctc

SEQ ID NO: 2092 - DNA, 26 bp, Homo sapiens
tgtacataatatggtaatagtcctcc

SEQ ID NO: 2093 - DNA, 26 bp, Homo sapiens
gtacataatatggtaatagtcctcca

SEQ ID NO: 2094 - DNA, 26 bp, Homo sapiens
tacataatatggtaatagtcctccag

SEQ ID NO: 2095 - DNA, 26 bp, Homo sapiens
acataatatggtaatagtcctccagg

SEQ ID NO: 2096 - DNA, 26 bp, Homo sapiens
cataatatggtaatagtcctccaggc

SEQ ID NO: 2097 - DNA, 26 bp, Homo sapiens
ataatatggtaatagtcctccaggca

SEQ ID NO: 2098 - DNA, 26 bp, Homo sapiens
taatatggtaatagtcctccaggcag

SEQ ID NO: 2099 - DNA, 26 bp, Homo sapiens
aatatggtaatagtcctccaggcagg

SEQ ID NO: 2100 - DNA, 26 bp, Homo sapiens
atatggtaatagtcctccaggcaggg

SEQ ID NO: 2101 - DNA, 26 bp, Homo sapiens
tatggtaatagtcctccaggcagggc

SEQ ID NO: 2102 - DNA, 26 bp, Homo sapiens
atggtaatagtcctccaggcagggct

SEQ ID NO: 2103 - DNA, 26 bp, Homo sapiens
tggtaatagtcctccaggcagggctc

SEQ ID NO: 2104 - DNA, 26 bp, Homo sapiens
ggtaatagtcctccaggcagggctcc

SEQ ID NO: 2105 - DNA, 26 bp, Homo sapiens
gtaatagtcctccaggcagggctccg

SEQ ID NO: 2106 - DNA, 26 bp, Homo sapiens
taatagtcctccaggcagggctccga

SEQ ID NO: 2107 - DNA, 26 bp, Homo sapiens
aatagtcctccaggcagggctccgag

SEQ ID NO: 2108 - DNA, 26 bp, Homo sapiens
atagtcctccaggcagggctccgagg

SEQ ID NO: 2109 - DNA, 26 bp, Homo sapiens
tagtcctccaggcagggctccgagga

SEQ ID NO: 2110 - DNA, 26 bp, Homo sapiens
agtcctccaggcagggctccgaggac

SEQ ID NO: 2111 - DNA, 26 bp, Homo sapiens
gtcctccaggcagggctccgaggacg

SEQ ID NO: 2112 - DNA, 26 bp, Homo sapiens
tcctccaggcagggctccgaggacga

SEQ ID NO: 2113 - DNA, 26 bp, Homo sapiens
cctccaggcagggctccgaggacgac

SEQ ID NO: 2114 - DNA, 26 bp, Homo sapiens
ctccaggcagggctccgaggacgacc

SEQ ID NO: 2115 - DNA, 26 bp, Homo sapiens
tccaggcagggctccgaggacgacca

SEQ ID NO: 2116 - DNA, 26 bp, Homo sapiens
ccaggcagggctccgaggacgaccag

SEQ ID NO: 2117 - DNA, 26 bp, Homo sapiens
caggcagggctccgaggacgaccagg

SEQ ID NO: 2118 - DNA, 26 bp, Homo sapiens
aggcagggctccgaggacgaccagga

SEQ ID NO: 2119 - DNA, 26 bp, Homo sapiens
ggcagggctccgaggacgaccaggag

SEQ ID NO: 2120 - DNA, 26 bp, Homo sapiens
gcagggctccgaggacgaccaggaga

SEQ ID NO: 2121 - DNA, 26 bp, Homo sapiens
cagggctccgaggacgaccaggagat

SEQ ID NO: 2122 - DNA, 26 bp, Homo sapiens
agggctccgaggacgaccaggagatg

SEQ ID NO: 2123 - DNA, 26 bp, Homo sapiens
gggctccgaggacgaccaggagatga

SEQ ID NO: 2124 - DNA, 26 bp, Homo sapiens
ggctccgaggacgaccaggagatgat

SEQ ID NO: 2125 - DNA, 26 bp, Homo sapiens
gctccgaggacgaccaggagatgatg

SEQ ID NO: 2126 - DNA, 26 bp, Homo sapiens
ctccgaggacgaccaggagatgatgg

SEQ ID NO: 2127 - DNA, 26 bp, Homo sapiens
tccgaggacgaccaggagatgatggc

SEQ ID NO: 2128 - DNA, 26 bp, Homo sapiens
ccgaggacgaccaggagatgatggct

SEQ ID NO: 2129 - DNA, 26 bp, Homo sapiens
cgaggacgaccaggagatgatggctc

SEQ ID NO: 2130 - DNA, 26 bp, Homo sapiens
gaggacgaccaggagatgatggctcc

SEQ ID NO: 2131 - DNA, 26 bp, Homo sapiens
aggacgaccaggagatgatggctcct

SEQ ID NO: 2132 - DNA, 26 bp, Homo sapiens
ggacgaccaggagatgatggctcctg

SEQ ID NO: 2133 - DNA, 26 bp, Homo sapiens
gacgaccaggagatgatggctcctgt

SEQ ID NO: 2134 - DNA, 26 bp, Homo sapiens
acgaccaggagatgatggctcctgta

SEQ ID NO: 2135 - DNA, 26 bp, Homo sapiens
cgaccaggagatgatggctcctgtat

SEQ ID NO: 2136 - DNA, 26 bp, Homo sapiens
gaccaggagatgatggctcctgtata

SEQ ID NO: 2137 - DNA, 26 bp, Homo sapiens
accaggagatgatggctcctgtataa

SEQ ID NO: 2138 - DNA, 26 bp, Homo sapiens
ccaggagatgatggctcctgtataag

SEQ ID NO: 2139 - DNA, 26 bp, Homo sapiens
caggagatgatggctcctgtataaga

SEQ ID NO: 2140 - DNA, 26 bp, Homo sapiens
aggagatgatggctcctgtataagaa

SEQ ID NO: 2141 - DNA, 26 bp, Homo sapiens
ggagatgatggctcctgtataagaaa

SEQ ID NO: 2142 - DNA, 26 bp, Homo sapiens
gagatgatggctcctgtataagaaat

SEQ ID NO: 2143 - DNA, 26 bp, Homo sapiens
agatgatggctcctgtataagaaatg

SEQ ID NO: 2144 - DNA, 26 bp, Homo sapiens
gatgatggctcctgtataagaaatgt

SEQ ID NO: 2145 - DNA, 26 bp, Homo sapiens
atgatggctcctgtataagaaatgtt

SEQ ID NO: 2146 - DNA, 26 bp, Homo sapiens
tgatggctcctgtataagaaatgttc

SEQ ID NO: 2147 - DNA, 26 bp, Homo sapiens
gatggctcctgtataagaaatgttcc

SEQ ID NO: 2148 - DNA, 26 bp, Homo sapiens
atggctcctgtataagaaatgttccc

SEQ ID NO: 2149 - DNA, 26 bp, Homo sapiens
tggctcctgtataagaaatgttcccc

SEQ ID NO: 2150 - DNA, 26 bp, Homo sapiens
ggctcctgtataagaaatgttcccca

SEQ ID NO: 2151 - DNA, 26 bp, Homo sapiens
gctcctgtataagaaatgttccccac

SEQ ID NO: 2152 - DNA, 26 bp, Homo sapiens
ctcctgtataagaaatgttccccacc

SEQ ID NO: 2153 - DNA, 26 bp, Homo sapiens
tcctgtataagaaatgttccccacct

SEQ ID NO: 2154 - DNA, 26 bp, Homo sapiens
cctgtataagaaatgttccccacctc

SEQ ID NO: 2155 - DNA, 26 bp, Homo sapiens
ctgtataagaaatgttccccacctcg

SEQ ID NO: 2156 - DNA, 26 bp, Homo sapiens
tgtataagaaatgttccccacctcga

SEQ ID NO: 2157 - DNA, 26 bp, Homo sapiens
gtataagaaatgttccccacctcgat

SEQ ID NO: 2158 - DNA, 26 bp, Homo sapiens
tataagaaatgttccccacctcgatg

SEQ ID NO: 2159 - DNA, 26 bp, Homo sapiens
ataagaaatgttccccacctcgatgt

SEQ ID NO: 2160 - DNA, 26 bp, Homo sapiens
taagaaatgttccccacctcgatgtt

SEQ ID NO: 2161 - DNA, 26 bp, Homo sapiens
aagaaatgttccccacctcgatgttc

SEQ ID NO: 2162 - DNA, 26 bp, Homo sapiens
agaaatgttccccacctcgatgttca

SEQ ID NO: 2163 - DNA, 26 bp, Homo sapiens
gaaatgttccccacctcgatgttcat

SEQ ID NO: 2164 - DNA, 26 bp, Homo sapiens
aaatgttccccacctcgatgttcatc

SEQ ID NO: 2165 - DNA, 26 bp, Homo sapiens
aatgttccccacctcgatgttcatcc

SEQ ID NO: 2166 - DNA, 26 bp, Homo sapiens
atgttccccacctcgatgttcatccc

SEQ ID NO: 2167 - DNA, 26 bp, Homo sapiens
tgttccccacctcgatgttcatcccg

SEQ ID NO: 2168 - DNA, 26 bp, Homo sapiens
gttccccacctcgatgttcatcccga

SEQ ID NO: 2169 - DNA, 26 bp, Homo sapiens
ttccccacctcgatgttcatcccgat

SEQ ID NO: 2170 - DNA, 26 bp, Homo sapiens
tccccacctcgatgttcatcccgatt

SEQ ID NO: 2171 - DNA, 26 bp, Homo sapiens
ccccacctcgatgttcatcccgattc

SEQ ID NO: 2172 - DNA, 26 bp, Homo sapiens
cccacctcgatgttcatcccgattct

SEQ ID NO: 2173 - DNA, 26 bp, Homo sapiens
ccacctcgatgttcatcccgattctg

SEQ ID NO: 2174 - DNA, 26 bp, Homo sapiens
cacctcgatgttcatcccgattctga

SEQ ID NO: 2175 - DNA, 26 bp, Homo sapiens
acctcgatgttcatcccgattctgat

SEQ ID NO: 2176 - DNA, 26 bp, Homo sapiens
cctcgatgttcatcccgattctgatg

SEQ ID NO: 2177 - DNA, 26 bp, Homo sapiens
ctcgatgttcatcccgattctgatgc

SEQ ID NO: 2178 - DNA, 26 bp, Homo sapiens
tcgatgttcatcccgattctgatgct

SEQ ID NO: 2179 - DNA, 26 bp, Homo sapiens
cgatgttcatcccgattctgatgctt

SEQ ID NO: 2180 - DNA, 26 bp, Homo sapiens
gatgttcatcccgattctgatgcttg

SEQ ID NO: 2181 - DNA, 26 bp, Homo sapiens
atgttcatcccgattctgatgcttgc

SEQ ID NO: 2182 - DNA, 26 bp, Homo sapiens
tgttcatcccgattctgatgcttgca

SEQ ID NO: 2183 - DNA, 26 bp, Homo sapiens
gttcatcccgattctgatgcttgcag

SEQ ID NO: 2184 - DNA, 26 bp, Homo sapiens
ttcatcccgattctgatgcttgcagc

SEQ ID NO: 2185 - DNA, 26 bp, Homo sapiens
tcatcccgattctgatgcttgcagcg

SEQ ID NO: 2186 - DNA, 26 bp, Homo sapiens
catcccgattctgatgcttgcagcgt

SEQ ID NO: 2187 - DNA, 26 bp, Homo sapiens
atcccgattctgatgcttgcagcgtg

SEQ ID NO: 2188 - DNA, 26 bp, Homo sapiens
tcccgattctgatgcttgcagcgtgt

SEQ ID NO: 2189 - DNA, 26 bp, Homo sapiens
cccgattctgatgcttgcagcgtgtc

SEQ ID NO: 2190 - DNA, 26 bp, Homo sapiens
ccgattctgatgcttgcagcgtgtct

SEQ ID NO: 2191 - DNA, 26 bp, Homo sapiens
cgattctgatgcttgcagcgtgtctg

SEQ ID NO: 2192 - DNA, 26 bp, Homo sapiens
gattctgatgcttgcagcgtgtctgg

SEQ ID NO: 2193 - DNA, 26 bp, Homo sapiens
attctgatgcttgcagcgtgtctggt

SEQ ID NO: 2194 - DNA, 26 bp, Homo sapiens
ttctgatgcttgcagcgtgtctggtt

SEQ ID NO: 2195 - DNA, 26 bp, Homo sapiens
tctgatgcttgcagcgtgtctggtta

SEQ ID NO: 2196 - DNA, 26 bp, Homo sapiens
ctgatgcttgcagcgtgtctggttag

SEQ ID NO: 2197 - DNA, 26 bp, Homo sapiens
tgatgcttgcagcgtgtctggttaga

SEQ ID NO: 2198 - DNA, 26 bp, Homo sapiens
gatgcttgcagcgtgtctggttagag

SEQ ID NO: 2199 - DNA, 26 bp, Homo sapiens
atgcttgcagcgtgtctggttagagc

SEQ ID NO: 2200 - DNA, 26 bp, Homo sapiens
tgcttgcagcgtgtctggttagagct

SEQ ID NO: 2201 - DNA, 26 bp, Homo sapiens
gcttgcagcgtgtctggttagagctc

SEQ ID NO: 2202 - DNA, 26 bp, Homo sapiens
cttgcagcgtgtctggttagagctct

SEQ ID NO: 2203 - DNA, 26 bp, Homo sapiens
ttgcagcgtgtctggttagagctctg

SEQ ID NO: 2204 - DNA, 26 bp, Homo sapiens
tgcagcgtgtctggttagagctctgc

SEQ ID NO: 2205 - DNA, 26 bp, Homo sapiens
gcagcgtgtctggttagagctctgcc

SEQ ID NO: 2206 - DNA, 26 bp, Homo sapiens
cagcgtgtctggttagagctctgccc

SEQ ID NO: 2207 - DNA, 26 bp, Homo sapiens
agcgtgtctggttagagctctgccct

SEQ ID NO: 2208 - DNA, 26 bp, Homo sapiens
gcgtgtctggttagagctctgccctc

SEQ ID NO: 2209 - DNA, 26 bp, Homo sapiens
cgtgtctggttagagctctgccctcc

SEQ ID NO: 2210 - DNA, 26 bp, Homo sapiens
gtgtctggttagagctctgccctccg

SEQ ID NO: 2211 - DNA, 26 bp, Homo sapiens
tgtctggttagagctctgccctccga

SEQ ID NO: 2212 - DNA, 26 bp, Homo sapiens
gtctggttagagctctgccctccgag

SEQ ID NO: 2213 - DNA, 26 bp, Homo sapiens
tctggttagagctctgccctccgagg

SEQ ID NO: 2214 - DNA, 26 bp, Homo sapiens
ctggttagagctctgccctccgaggt

SEQ ID NO: 2215 - DNA, 26 bp, Homo sapiens
tggttagagctctgccctccgaggtg

SEQ ID NO: 2216 - DNA, 26 bp, Homo sapiens
ggttagagctctgccctccgaggtgc

SEQ ID NO: 2217 - DNA, 26 bp, Homo sapiens
gttagagctctgccctccgaggtgca

SEQ ID NO: 2218 - DNA, 26 bp, Homo sapiens
ttagagctctgccctccgaggtgcag

SEQ ID NO: 2219 - DNA, 26 bp, Homo sapiens
tagagctctgccctccgaggtgcagt

SEQ ID NO: 2220 - DNA, 26 bp, Homo sapiens
agagctctgccctccgaggtgcagta

SEQ ID NO: 2221 - DNA, 26 bp, Homo sapiens
gagctctgccctccgaggtgcagtag

SEQ ID NO: 2222 - DNA, 26 bp, Homo sapiens
agctctgccctccgaggtgcagtaga

SEQ ID NO: 2223 - DNA, 26 bp, Homo sapiens
gctctgccctccgaggtgcagtagat

SEQ ID NO: 2224 - DNA, 26 bp, Homo sapiens
ctctgccctccgaggtgcagtagatt

SEQ ID NO: 2225 - DNA, 26 bp, Homo sapiens
tctgccctccgaggtgcagtagatta

SEQ ID NO: 2226 - DNA, 26 bp, Homo sapiens
ctgccctccgaggtgcagtagattaa

SEQ ID NO: 2227 - DNA, 26 bp, Homo sapiens
tgccctccgaggtgcagtagattaaa

SEQ ID NO: 2228 - DNA, 26 bp, Homo sapiens
gccctccgaggtgcagtagattaaag

SEQ ID NO: 2229 - DNA, 26 bp, Homo sapiens
ccctccgaggtgcagtagattaaagc

SEQ ID NO: 2230 - DNA, 26 bp, Homo sapiens
cctccgaggtgcagtagattaaagct

SEQ ID NO: 2231 - DNA, 26 bp, Homo sapiens
ctccgaggtgcagtagattaaagctg

SEQ ID NO: 2232 - DNA, 26 bp, Homo sapiens
tccgaggtgcagtagattaaagctga

SEQ ID NO: 2233 - DNA, 26 bp, Homo sapiens
ccgaggtgcagtagattaaagctgag

SEQ ID NO: 2234 - DNA, 26 bp, Homo sapiens
cgaggtgcagtagattaaagctgaga

SEQ ID NO: 2235 - DNA, 26 bp, Homo sapiens
gaggtgcagtagattaaagctgagag

SEQ ID NO: 2236 - DNA, 26 bp, Homo sapiens
aggtgcagtagattaaagctgagaga

SEQ ID NO: 2237 - DNA, 26 bp, Homo sapiens
ggtgcagtagattaaagctgagagaa

SEQ ID NO: 2238 - DNA, 26 bp, Homo sapiens
gtgcagtagattaaagctgagagaat

SEQ ID NO: 2239 - DNA, 26 bp, Homo sapiens
tgcagtagattaaagctgagagaatg

SEQ ID NO: 2240 - DNA, 26 bp, Homo sapiens
gcagtagattaaagctgagagaatgg

SEQ ID NO: 2241 - DNA, 26 bp, Homo sapiens
cagtagattaaagctgagagaatggg

SEQ ID NO: 2242 - DNA, 26 bp, Homo sapiens
agtagattaaagctgagagaatgggg

SEQ ID NO: 2243 - DNA, 26 bp, Homo sapiens
gtagattaaagctgagagaatggggc

SEQ ID NO: 2244 - DNA, 26 bp, Homo sapiens
tagattaaagctgagagaatggggcc

SEQ ID NO: 2245 - DNA, 26 bp, Homo sapiens
agattaaagctgagagaatggggcct

SEQ ID NO: 2246 - DNA, 26 bp, Homo sapiens
gattaaagctgagagaatggggcctt

SEQ ID NO: 2247 - DNA, 26 bp, Homo sapiens
attaaagctgagagaatggggccttc

SEQ ID NO: 2248 - DNA, 26 bp, Homo sapiens
ttaaagctgagagaatggggccttct

SEQ ID NO: 2249 - DNA, 26 bp, Homo sapiens
taaagctgagagaatggggccttctc

SEQ ID NO: 2250 - DNA, 26 bp, Homo sapiens
aaagctgagagaatggggccttctcc

SEQ ID NO: 2251 - DNA, 26 bp, Homo sapiens
aagctgagagaatggggccttctccc

SEQ ID NO: 2252 - DNA, 26 bp, Homo sapiens
agctgagagaatggggccttctccct

SEQ ID NO: 2253 - DNA, 26 bp, Homo sapiens
gctgagagaatggggccttctccctc

SEQ ID NO: 2254 - DNA, 26 bp, Homo sapiens
ctgagagaatggggccttctccctcc

SEQ ID NO: 2255 - DNA, 26 bp, Homo sapiens
tgagagaatggggccttctccctcct

SEQ ID NO: 2256 - DNA, 26 bp, Homo sapiens
gagagaatggggccttctccctcctc

SEQ ID NO: 2257 - DNA, 26 bp, Homo sapiens
agagaatggggccttctccctcctct

SEQ ID NO: 2258 - DNA, 26 bp, Homo sapiens
gagaatggggccttctccctcctctg

SEQ ID NO: 2259 - DNA, 26 bp, Homo sapiens
agaatggggccttctccctcctctgc

SEQ ID NO: 2260 - DNA, 26 bp, Homo sapiens
gaatggggccttctccctcctctgct

SEQ ID NO: 2261 - DNA, 26 bp, Homo sapiens
aatggggccttctccctcctctgctc

SEQ ID NO: 2262 - DNA, 26 bp, Homo sapiens
atggggccttctccctcctctgctct

SEQ ID NO: 2263 - DNA, 26 bp, Homo sapiens
tggggccttctccctcctctgctctg

SEQ ID NO: 2264 - DNA, 26 bp, Homo sapiens
ggggccttctccctcctctgctctgg

SEQ ID NO: 2265 - DNA, 26 bp, Homo sapiens
gggccttctccctcctctgctctggg

SEQ ID NO: 2266 - DNA, 26 bp, Homo sapiens
ggccttctccctcctctgctctgggc

SEQ ID NO: 2267 - DNA, 26 bp, Homo sapiens
gccttctccctcctctgctctgggct

SEQ ID NO: 2268 - DNA, 26 bp, Homo sapiens
ccttctccctcctctgctctgggctt

SEQ ID NO: 2269 - DNA, 26 bp, Homo sapiens
cttctccctcctctgctctgggcttt

SEQ ID NO: 2270 - DNA, 26 bp, Homo sapiens
ttctccctcctctgctctgggctttc

SEQ ID NO: 2271 - DNA, 26 bp, Homo sapiens
tctccctcctctgctctgggctttcc

SEQ ID NO: 2272 - DNA, 26 bp, Homo sapiens
ctccctcctctgctctgggctttccg

SEQ ID NO: 2273 - DNA, 26 bp, Homo sapiens
tccctcctctgctctgggctttccgt

SEQ ID NO: 2274 - DNA, 26 bp, Homo sapiens
ccctcctctgctctgggctttccgtg

SEQ ID NO: 2275 - DNA, 26 bp, Homo sapiens
cctcctctgctctgggctttccgtgt

SEQ ID NO: 2276 - DNA, 26 bp, Homo sapiens
ctcctctgctctgggctttccgtgtt

SEQ ID NO: 2277 - DNA, 26 bp, Homo sapiens
tcctctgctctgggctttccgtgttg

SEQ ID NO: 2278 - DNA, 26 bp, Homo sapiens
cctctgctctgggctttccgtgttgt

SEQ ID NO: 2279 - DNA, 26 bp, Homo sapiens
ctctgctctgggctttccgtgttgtt

SEQ ID NO: 2280 - DNA, 26 bp, Homo sapiens
tctgctctgggctttccgtgttgttt

SEQ ID NO: 2281 - DNA, 26 bp, Homo sapiens
ctgctctgggctttccgtgttgtttc

SEQ ID NO: 2282 - DNA, 26 bp, Homo sapiens
tgctctgggctttccgtgttgtttct

SEQ ID NO: 2283 - DNA, 26 bp, Homo sapiens
gctctgggctttccgtgttgtttctc

SEQ ID NO: 2284 - DNA, 26 bp, Homo sapiens
ctctgggctttccgtgttgtttctct

SEQ ID NO: 2285 - DNA, 26 bp, Homo sapiens
tctgggctttccgtgttgtttctctc

SEQ ID NO: 2286 - DNA, 26 bp, Homo sapiens
ctgggctttccgtgttgtttctctca

SEQ ID NO: 2287 - DNA, 26 bp, Homo sapiens
tgggctttccgtgttgtttctctcaa

SEQ ID NO: 2288 - DNA, 26 bp, Homo sapiens
gggctttccgtgttgtttctctcaac

SEQ ID NO: 2289 - DNA, 26 bp, Homo sapiens
ggctttccgtgttgtttctctcaaca

SEQ ID NO: 2290 - DNA, 26 bp, Homo sapiens
gctttccgtgttgtttctctcaacac

SEQ ID NO: 2291 - DNA, 26 bp, Homo sapiens
ctttccgtgttgtttctctcaacact

SEQ ID NO: 2292 - DNA, 26 bp, Homo sapiens
tttccgtgttgtttctctcaacactg

SEQ ID NO: 2293 - DNA, 26 bp, Homo sapiens
ttccgtgttgtttctctcaacactga

SEQ ID NO: 2294 - DNA, 26 bp, Homo sapiens
tccgtgttgtttctctcaacactgag

SEQ ID NO: 2295 - DNA, 26 bp, Homo sapiens
ccgtgttgtttctctcaacactgagt

SEQ ID NO: 2296 - DNA, 26 bp, Homo sapiens
cgtgttgtttctctcaacactgagta

SEQ ID NO: 2297 - DNA, 26 bp, Homo sapiens
gtgttgtttctctcaacactgagtaa

SEQ ID NO: 2298 - DNA, 26 bp, Homo sapiens
tgttgtttctctcaacactgagtaat

SEQ ID NO: 2299 - DNA, 26 bp, Homo sapiens
gttgtttctctcaacactgagtaatc

SEQ ID NO: 2300 - DNA, 26 bp, Homo sapiens
ttgtttctctcaacactgagtaatcc

SEQ ID NO: 2301 - DNA, 26 bp, Homo sapiens
tgtttctctcaacactgagtaatccc

SEQ ID NO: 2302 - DNA, 26 bp, Homo sapiens
gtttctctcaacactgagtaatccca

SEQ ID NO: 2303 - DNA, 26 bp, Homo sapiens
tttctctcaacactgagtaatcccac

SEQ ID NO: 2304 - DNA, 26 bp, Homo sapiens
ttctctcaacactgagtaatcccact

SEQ ID NO: 2305 - DNA, 26 bp, Homo sapiens
tctctcaacactgagtaatcccactg

SEQ ID NO: 2306 - DNA, 26 bp, Homo sapiens
ctctcaacactgagtaatcccactgc

SEQ ID NO: 2307 - DNA, 26 bp, Homo sapiens
tctcaacactgagtaatcccactgcc

SEQ ID NO: 2308 - DNA, 26 bp, Homo sapiens
tgattgaaatttgttggatttatttc

SEQ ID NO: 2309 - DNA, 26 bp, Homo sapiens
gattgaaatttgttggatttatttct

SEQ ID NO: 2310 - DNA, 26 bp, Homo sapiens
attgaaatttgttggatttatttctt

SEQ ID NO: 2311 - DNA, 26 bp, Homo sapiens
ttgaaatttgttggatttatttcttt

SEQ ID NO: 2312 - DNA, 26 bp, Homo sapiens
tgaaatttgttggatttatttctttc

SEQ ID NO: 2313 - DNA, 26 bp, Homo sapiens
gaaatttgttggatttatttctttct

SEQ ID NO: 2314 - DNA, 26 bp, Homo sapiens
aaatttgttggatttatttctttcta

SEQ ID NO: 2315 - DNA, 26 bp, Homo sapiens
aatttgttggatttatttctttctaa

SEQ ID NO: 2316 - DNA, 26 bp, Homo sapiens
atttgttggatttatttctttctaaa

SEQ ID NO: 2317 - DNA, 26 bp, Homo sapiens
tttgttggatttatttctttctaaag

SEQ ID NO: 2318 - DNA, 26 bp, Homo sapiens
ttgttggatttatttctttctaaagt

SEQ ID NO: 2319 - DNA, 26 bp, Homo sapiens
tgttggatttatttctttctaaagtt

SEQ ID NO: 2320 - DNA, 26 bp, Homo sapiens
gttggatttatttctttctaaagttt

SEQ ID NO: 2321 - DNA, 26 bp, Homo sapiens
ttggatttatttctttctaaagtttg

SEQ ID NO: 2322 - DNA, 26 bp, Homo sapiens
tggatttatttctttctaaagtttgt

SEQ ID NO: 2323 - DNA, 26 bp, Homo sapiens
ggatttatttctttctaaagtttgta

SEQ ID NO: 2324 - DNA, 26 bp, Homo sapiens
gatttatttctttctaaagtttgtac

SEQ ID NO: 2325 - DNA, 26 bp, Homo sapiens
atttatttctttctaaagtttgtaca

SEQ ID NO: 2326 - DNA, 26 bp, Homo sapiens
tttatttctttctaaagtttgtacat

SEQ ID NO: 2327 - DNA, 26 bp, Homo sapiens
ttatttctttctaaagtttgtacatt

SEQ ID NO: 2328 - DNA, 26 bp, Homo sapiens
tatttctttctaaagtttgtacattt

SEQ ID NO: 2329 - DNA, 26 bp, Homo sapiens
atttctttctaaagtttgtacattta

SEQ ID NO: 2330 - DNA, 26 bp, Homo sapiens
tttctttctaaagtttgtacatttac

SEQ ID NO: 2331 - DNA, 26 bp, Homo sapiens
ttctttctaaagtttgtacatttaca

SEQ ID NO: 2332 - DNA, 26 bp, Homo sapiens
tctttctaaagtttgtacatttacat

SEQ ID NO: 2333 - DNA, 26 bp, Homo sapiens
ctttctaaagtttgtacatttacatg

SEQ ID NO: 2334 - DNA, 26 bp, Homo sapiens
tttctaaagtttgtacatttacatgt

SEQ ID NO: 2335 - DNA, 26 bp, Homo sapiens
ttctaaagtttgtacatttacatgta

SEQ ID NO: 2336 - DNA, 26 bp, Homo sapiens
tctaaagtttgtacatttacatgtat

SEQ ID NO: 2337 - DNA, 26 bp, Homo sapiens
ctaaagtttgtacatttacatgtatc

SEQ ID NO: 2338 - DNA, 26 bp, Homo sapiens
taaagtttgtacatttacatgtatca

SEQ ID NO: 2339 - DNA, 26 bp, Homo sapiens
aaagtttgtacatttacatgtatcat

SEQ ID NO: 2340 - DNA, 26 bp, Homo sapiens
aagtttgtacatttacatgtatcata

SEQ ID NO: 2341 - DNA, 26 bp, Homo sapiens
agtttgtacatttacatgtatcatat

SEQ ID NO: 2342 - DNA, 26 bp, Homo sapiens
gtttgtacatttacatgtatcatata

SEQ ID NO: 2343 - DNA, 26 bp, Homo sapiens
tttgtacatttacatgtatcatatac

SEQ ID NO: 2344 - DNA, 26 bp, Homo sapiens
ttgtacatttacatgtatcatataca

SEQ ID NO: 2345 - DNA, 26 bp, Homo sapiens
tgtacatttacatgtatcatatacat

SEQ ID NO: 2346 - DNA, 26 bp, Homo sapiens
gtacatttacatgtatcatatacata

SEQ ID NO: 2347 - DNA, 26 bp, Homo sapiens
tacatttacatgtatcatatacatat

SEQ ID NO: 2348 - DNA, 26 bp, Homo sapiens
acatttacatgtatcatatacatatt

SEQ ID NO: 2349 - DNA, 26 bp, Homo sapiens
catttacatgtatcatatacatattt

SEQ ID NO: 2350 - DNA, 26 bp, Homo sapiens
atttacatgtatcatatacatatttt

SEQ ID NO: 2351 - DNA, 26 bp, Homo sapiens
tttacatgtatcatatacatatttta

SEQ ID NO: 2352 - DNA, 26 bp, Homo sapiens
ttacatgtatcatatacatattttaa

SEQ ID NO: 2353 - DNA, 26 bp, Homo sapiens
tacatgtatcatatacatattttaaa

SEQ ID NO: 2354 - DNA, 26 bp, Homo sapiens
acatgtatcatatacatattttaaat

SEQ ID NO: 2355 - DNA, 26 bp, Homo sapiens
catgtatcatatacatattttaaatc

SEQ ID NO: 2356 - DNA, 26 bp, Homo sapiens
atgtatcatatacatattttaaatcc

SEQ ID NO: 2357 - DNA, 26 bp, Homo sapiens
tgtatcatatacatattttaaatcct

SEQ ID NO: 2358 - DNA, 26 bp, Homo sapiens
gtatcatatacatattttaaatcctt

SEQ ID NO: 2359 - DNA, 26 bp, Homo sapiens
tatcatatacatattttaaatccttc

SEQ ID NO: 2360 - DNA, 26 bp, Homo sapiens
atcatatacatattttaaatccttca

SEQ ID NO: 2361 - DNA, 26 bp, Homo sapiens
tcatatacatattttaaatccttcac

SEQ ID NO: 2362 - DNA, 26 bp, Homo sapiens
catatacatattttaaatccttcact

SEQ ID NO: 2363 - DNA, 26 bp, Homo sapiens
atatacatattttaaatccttcacta

SEQ ID NO: 2364 - DNA, 26 bp, Homo sapiens
tatacatattttaaatccttcactat

SEQ ID NO: 2365 - DNA, 26 bp, Homo sapiens
atacatattttaaatccttcactatt

SEQ ID NO: 2366 - DNA, 26 bp, Homo sapiens
tacatattttaaatccttcactattt

SEQ ID NO: 2367 - DNA, 26 bp, Homo sapiens
acatattttaaatccttcactatttt

SEQ ID NO: 2368 - DNA, 26 bp, Homo sapiens
catattttaaatccttcactattttg

SEQ ID NO: 2369 - DNA, 26 bp, Homo sapiens
atattttaaatccttcactattttgc

SEQ ID NO: 2370 - DNA, 26 bp, Homo sapiens
tattttaaatccttcactattttgcg

SEQ ID NO: 2371 - DNA, 26 bp, Homo sapiens
attttaaatccttcactattttgcgt

SEQ ID NO: 2372 - DNA, 26 bp, Homo sapiens
ttttaaatccttcactattttgcgtg

SEQ ID NO: 2373 - DNA, 26 bp, Homo sapiens
tttaaatccttcactattttgcgtga

SEQ ID NO: 2374 - DNA, 26 bp, Homo sapiens
ttaaatccttcactattttgcgtgat

SEQ ID NO: 2375 - DNA, 26 bp, Homo sapiens
taaatccttcactattttgcgtgatt

SEQ ID NO: 2376 - DNA, 26 bp, Homo sapiens
aaatccttcactattttgcgtgattt

SEQ ID NO: 2377 - DNA, 26 bp, Homo sapiens
aatccttcactattttgcgtgatttc

SEQ ID NO: 2378 - DNA, 26 bp, Homo sapiens
atccttcactattttgcgtgatttct

SEQ ID NO: 2379 - DNA, 26 bp, Homo sapiens
tccttcactattttgcgtgatttcta

SEQ ID NO: 2380 - DNA, 26 bp, Homo sapiens
ccttcactattttgcgtgatttctat

SEQ ID NO: 2381 - DNA, 26 bp, Homo sapiens
cttcactattttgcgtgatttctatt

SEQ ID NO: 2382 - DNA, 26 bp, Homo sapiens
ttcactattttgcgtgatttctatta

SEQ ID NO: 2383 - DNA, 26 bp, Homo sapiens
tcactattttgcgtgatttctattac

SEQ ID NO: 2384 - DNA, 26 bp, Homo sapiens
cactattttgcgtgatttctattaca

SEQ ID NO: 2385 - DNA, 26 bp, Homo sapiens
actattttgcgtgatttctattacat

SEQ ID NO: 2386 - DNA, 26 bp, Homo sapiens
ctattttgcgtgatttctattacata

SEQ ID NO: 2387 - DNA, 26 bp, Homo sapiens
tattttgcgtgatttctattacataa

SEQ ID NO: 2388 - DNA, 26 bp, Homo sapiens
attttgcgtgatttctattacataaa

SEQ ID NO: 2389 - DNA, 26 bp, Homo sapiens
ttttgcgtgatttctattacataaaa

SEQ ID NO: 2390 - DNA, 26 bp, Homo sapiens
tttgcgtgatttctattacataaaaa

SEQ ID NO: 2391 - DNA, 26 bp, Homo sapiens
ttgcgtgatttctattacataaaaac

SEQ ID NO: 2392 - DNA, 26 bp, Homo sapiens
tgcgtgatttctattacataaaaacc

SEQ ID NO: 2393 - DNA, 26 bp, Homo sapiens
gcgtgatttctattacataaaaacca

SEQ ID NO: 2394 - DNA, 26 bp, Homo sapiens
cgtgatttctattacataaaaaccat

SEQ ID NO: 2395 - DNA, 26 bp, Homo sapiens
gtgatttctattacataaaaaccatt

SEQ ID NO: 2396 - DNA, 26 bp, Homo sapiens
tgatttctattacataaaaaccattt

SEQ ID NO: 2397 - DNA, 26 bp, Homo sapiens
gatttctattacataaaaaccattta

SEQ ID NO: 2398 - DNA, 26 bp, Homo sapiens
atttctattacataaaaaccatttaa

SEQ ID NO: 2399 - DNA, 26 bp, Homo sapiens
tttctattacataaaaaccatttaaa

SEQ ID NO: 2400 - DNA, 26 bp, Homo sapiens
ttctattacataaaaaccatttaaat

SEQ ID NO: 2401 - DNA, 26 bp, Homo sapiens
tctattacataaaaaccatttaaatg

SEQ ID NO: 2402 - DNA, 26 bp, Homo sapiens
ctattacataaaaaccatttaaatgc

SEQ ID NO: 2403 - DNA, 26 bp, Homo sapiens
tattacataaaaaccatttaaatgca

SEQ ID NO: 2404 - DNA, 26 bp, Homo sapiens
attacataaaaaccatttaaatgcaa

SEQ ID NO: 2405 - DNA, 26 bp, Homo sapiens
ttacataaaaaccatttaaatgcaat

SEQ ID NO: 2406 - DNA, 26 bp, Homo sapiens
tacataaaaaccatttaaatgcaata

SEQ ID NO: 2407 - DNA, 26 bp, Homo sapiens
acataaaaaccatttaaatgcaataa

SEQ ID NO: 2408 - DNA, 26 bp, Homo sapiens
cataaaaaccatttaaatgcaataaa

SEQ ID NO: 2409 - DNA, 26 bp, Homo sapiens
ataaaaaccatttaaatgcaataaat

SEQ ID NO: 2410 - DNA, 26 bp, Homo sapiens
taaaaaccatttaaatgcaataaatt

SEQ ID NO: 2411 - DNA, 26 bp, Homo sapiens
aaaaaccatttaaatgcaataaattt

SEQ ID NO: 2412 - DNA, 26 bp, Homo sapiens
aaaaccatttaaatgcaataaatttt

SEQ ID NO: 2413 - DNA, 26 bp, Homo sapiens
aaaccatttaaatgcaataaattttg

SEQ ID NO: 2414 - DNA, 26 bp, Homo sapiens
aaccatttaaatgcaataaattttgt

SEQ ID NO: 2415 - DNA, 26 bp, Homo sapiens
accatttaaatgcaataaattttgtt

SEQ ID NO: 2416 - DNA, 26 bp, Homo sapiens
ccatttaaatgcaataaattttgttg

SEQ ID NO: 2417 - DNA, 26 bp, Homo sapiens
catttaaatgcaataaattttgttgc

SEQ ID NO: 2418 - DNA, 26 bp, Homo sapiens
atttaaatgcaataaattttgttgcc

SEQ ID NO: 2419 - DNA, 26 bp, Homo sapiens
tttaaatgcaataaattttgttgccg

SEQ ID NO: 2420 - DNA, 26 bp, Homo sapiens
ttaaatgcaataaattttgttgccgt

SEQ ID NO: 2421 - DNA, 26 bp, Homo sapiens
taaatgcaataaattttgttgccgta

SEQ ID NO: 2422 - DNA, 26 bp, Homo sapiens
aaatgcaataaattttgttgccgtaa

SEQ ID NO: 2423 - DNA, 26 bp, Homo sapiens
aatgcaataaattttgttgccgtaaa

SEQ ID NO: 2424 - DNA, 26 bp, Homo sapiens
atgcaataaattttgttgccgtaaaa

SEQ ID NO: 2425 - DNA, 26 bp, Homo sapiens
tgcaataaattttgttgccgtaaaac

SEQ ID NO: 2426 - DNA, 26 bp, Homo sapiens
gcaataaattttgttgccgtaaaaca

SEQ ID NO: 2427 - DNA, 26 bp, Homo sapiens
caataaattttgttgccgtaaaacaa

SEQ ID NO: 2428 - DNA, 26 bp, Homo sapiens
aataaattttgttgccgtaaaacaac

SEQ ID NO: 2429 - DNA, 26 bp, Homo sapiens
ataaattttgttgccgtaaaacaaca

SEQ ID NO: 2430 - DNA, 26 bp, Homo sapiens
taaattttgttgccgtaaaacaacaa

SEQ ID NO: 2431 - DNA, 26 bp, Homo sapiens
aaattttgttgccgtaaaacaacaaa

SEQ ID NO: 2432 - DNA, 26 bp, Homo sapiens
aattttgttgccgtaaaacaacaaaa

SEQ ID NO: 2433 - DNA, 26 bp, Homo sapiens
attttgttgccgtaaaacaacaaaat

SEQ ID NO: 2434 - DNA, 26 bp, Homo sapiens
ttttgttgccgtaaaacaacaaaata

SEQ ID NO: 2435 - DNA, 26 bp, Homo sapiens
tttgttgccgtaaaacaacaaaatat

SEQ ID NO: 2436 - DNA, 26 bp, Homo sapiens
ttgttgccgtaaaacaacaaaatatc

SEQ ID NO: 2437 - DNA, 26 bp, Homo sapiens
tgttgccgtaaaacaacaaaatatcc

SEQ ID NO: 2438 - DNA, 26 bp, Homo sapiens
gttgccgtaaaacaacaaaatatccc

SEQ ID NO: 2439 - DNA, 26 bp, Homo sapiens
ttgccgtaaaacaacaaaatatcccc

SEQ ID NO: 2440 - DNA, 26 bp, Homo sapiens
tgccgtaaaacaacaaaatatcccca

SEQ ID NO: 2441 - DNA, 26 bp, Homo sapiens
gccgtaaaacaacaaaatatccccaa

SEQ ID NO: 2442 - DNA, 26 bp, Homo sapiens
ccgtaaaacaacaaaatatccccaac

SEQ ID NO: 2443 - DNA, 26 bp, Homo sapiens
cgtaaaacaacaaaatatccccaact

SEQ ID NO: 2444 - DNA, 26 bp, Homo sapiens
gtaaaacaacaaaatatccccaactt

SEQ ID NO: 2445 - DNA, 26 bp, Homo sapiens
taaaacaacaaaatatccccaactta

SEQ ID NO: 2446 - DNA, 26 bp, Homo sapiens
aaaacaacaaaatatccccaacttat

SEQ ID NO: 2447 - DNA, 26 bp, Homo sapiens
aaacaacaaaatatccccaacttata

SEQ ID NO: 2448 - DNA, 26 bp, Homo sapiens
aacaacaaaatatccccaacttataa

SEQ ID NO: 2449 - DNA, 26 bp, Homo sapiens
acaacaaaatatccccaacttataaa

SEQ ID NO: 2450 - DNA, 26 bp, Homo sapiens
caacaaaatatccccaacttataaaa

SEQ ID NO: 2451 - DNA, 26 bp, Homo sapiens
aacaaaatatccccaacttataaaaa

SEQ ID NO: 2452 - DNA, 26 bp, Homo sapiens
acaaaatatccccaacttataaaaac

SEQ ID NO: 2453 - DNA, 26 bp, Homo sapiens
caaaatatccccaacttataaaaaca

SEQ ID NO: 2454 - DNA, 26 bp, Homo sapiens
aaaatatccccaacttataaaaacac

SEQ ID NO: 2455 - DNA, 26 bp, Homo sapiens
aaatatccccaacttataaaaacaca

SEQ ID NO: 2456 - DNA, 26 bp, Homo sapiens
aatatccccaacttataaaaacacag

SEQ ID NO: 2457 - DNA, 26 bp, Homo sapiens
atatccccaacttataaaaacacagg

SEQ ID NO: 2458 - DNA, 26 bp, Homo sapiens
tatccccaacttataaaaacacagga

SEQ ID NO: 2459 - DNA, 26 bp, Homo sapiens
atccccaacttataaaaacacaggaa

SEQ ID NO: 2460 - DNA, 26 bp, Homo sapiens
tccccaacttataaaaacacaggaac

SEQ ID NO: 2461 - DNA, 26 bp, Homo sapiens
ccccaacttataaaaacacaggaaca

SEQ ID NO: 2462 - DNA, 26 bp, Homo sapiens
cccaacttataaaaacacaggaacaa

SEQ ID NO: 2463 - DNA, 26 bp, Homo sapiens
ccaacttataaaaacacaggaacaat

SEQ ID NO: 2464 - DNA, 26 bp, Homo sapiens
caacttataaaaacacaggaacaatt

SEQ ID NO: 2465 - DNA, 26 bp, Homo sapiens
aacttataaaaacacaggaacaatta

SEQ ID NO: 2466 - DNA, 26 bp, Homo sapiens
acttataaaaacacaggaacaattat

SEQ ID NO: 2467 - DNA, 26 bp, Homo sapiens
cttataaaaacacaggaacaattata

SEQ ID NO: 2468 - DNA, 26 bp, Homo sapiens
ttataaaaacacaggaacaattatat

SEQ ID NO: 2469 - DNA, 26 bp, Homo sapiens
tataaaaacacaggaacaattatatt

SEQ ID NO: 2470 - DNA, 26 bp, Homo sapiens
ataaaaacacaggaacaattatattc

SEQ ID NO: 2471 - DNA, 26 bp, Homo sapiens
taaaaacacaggaacaattatattca

SEQ ID NO: 2472 - DNA, 26 bp, Homo sapiens
aaaaacacaggaacaattatattcat

SEQ ID NO: 2473 - DNA, 26 bp, Homo sapiens
aaaacacaggaacaattatattcata

SEQ ID NO: 2474 - DNA, 26 bp, Homo sapiens
aaacacaggaacaattatattcataa

SEQ ID NO: 2475 - DNA, 26 bp, Homo sapiens
aacacaggaacaattatattcataaa

SEQ ID NO: 2476 - DNA, 26 bp, Homo sapiens
acacaggaacaattatattcataaac

SEQ ID NO: 2477 - DNA, 26 bp, Homo sapiens
cacaggaacaattatattcataaaca

SEQ ID NO: 2478 - DNA, 26 bp, Homo sapiens
acaggaacaattatattcataaacat

SEQ ID NO: 2479 - DNA, 26 bp, Homo sapiens
caggaacaattatattcataaacatt

SEQ ID NO: 2480 - DNA, 26 bp, Homo sapiens
aggaacaattatattcataaacattt

SEQ ID NO: 2481 - DNA, 26 bp, Homo sapiens
ggaacaattatattcataaacattta

SEQ ID NO: 2482 - DNA, 26 bp, Homo sapiens
gaacaattatattcataaacatttac

SEQ ID NO: 2483 - DNA, 26 bp, Homo sapiens
aacaattatattcataaacatttaca

SEQ ID NO: 2484 - DNA, 26 bp, Homo sapiens
acaattatattcataaacatttacac

SEQ ID NO: 2485 - DNA, 26 bp, Homo sapiens
caattatattcataaacatttacaca

SEQ ID NO: 2486 - DNA, 26 bp, Homo sapiens
aattatattcataaacatttacacaa

SEQ ID NO: 2487 - DNA, 26 bp, Homo sapiens
attatattcataaacatttacacaat

SEQ ID NO: 2488 - DNA, 26 bp, Homo sapiens
ttatattcataaacatttacacaata

SEQ ID NO: 2489 - DNA, 26 bp, Homo sapiens
tatattcataaacatttacacaataa

SEQ ID NO: 2490 - DNA, 26 bp, Homo sapiens
atattcataaacatttacacaataaa

SEQ ID NO: 2491 - DNA, 26 bp, Homo sapiens
tattcataaacatttacacaataaat

SEQ ID NO: 2492 - DNA, 26 bp, Homo sapiens
attcataaacatttacacaataaatg

SEQ ID NO: 2493 - DNA, 26 bp, Homo sapiens
ttcataaacatttacacaataaatgt

SEQ ID NO: 2494 - DNA, 26 bp, Homo sapiens
tcataaacatttacacaataaatgta

SEQ ID NO: 2495 - DNA, 26 bp, Homo sapiens
cataaacatttacacaataaatgtac

SEQ ID NO: 2496 - DNA, 26 bp, Homo sapiens
ataaacatttacacaataaatgtact

SEQ ID NO: 2497 - DNA, 26 bp, Homo sapiens
taaacatttacacaataaatgtactc

SEQ ID NO: 2498 - DNA, 26 bp, Homo sapiens
aaacatttacacaataaatgtactct

SEQ ID NO: 2499 - DNA, 26 bp, Homo sapiens
aacatttacacaataaatgtactcta

SEQ ID NO: 2500 - DNA, 26 bp, Homo sapiens
acatttacacaataaatgtactctat

SEQ ID NO: 2501 - DNA, 26 bp, Homo sapiens
catttacacaataaatgtactctata

SEQ ID NO: 2502 - DNA, 26 bp, Homo sapiens
atttacacaataaatgtactctatat

SEQ ID NO: 2503 - DNA, 26 bp, Homo sapiens
tttacacaataaatgtactctatata

SEQ ID NO: 2504 - DNA, 26 bp, Homo sapiens
ttacacaataaatgtactctatatat

SEQ ID NO: 2505 - DNA, 26 bp, Homo sapiens
tacacaataaatgtactctatatatc

SEQ ID NO: 2506 - DNA, 26 bp, Homo sapiens
acacaataaatgtactctatatatca

SEQ ID NO: 2507 - DNA, 26 bp, Homo sapiens
cacaataaatgtactctatatatcac

SEQ ID NO: 2508 - DNA, 26 bp, Homo sapiens
acaataaatgtactctatatatcaca

SEQ ID NO: 2509 - DNA, 26 bp, Homo sapiens
caataaatgtactctatatatcacag

SEQ ID NO: 2510 - DNA, 26 bp, Homo sapiens
aataaatgtactctatatatcacagc

SEQ ID NO: 2511 - DNA, 26 bp, Homo sapiens
ataaatgtactctatatatcacagct

SEQ ID NO: 2512 - DNA, 26 bp, Homo sapiens
taaatgtactctatatatcacagctt

SEQ ID NO: 2513 - DNA, 26 bp, Homo sapiens
aaatgtactctatatatcacagcttc

SEQ ID NO: 2514 - DNA, 26 bp, Homo sapiens
aatgtactctatatatcacagcttct

SEQ ID NO: 2515 - DNA, 26 bp, Homo sapiens
atgtactctatatatcacagcttcta

SEQ ID NO: 2516 - DNA, 26 bp, Homo sapiens
tgtactctatatatcacagcttctat

SEQ ID NO: 2517 - DNA, 26 bp, Homo sapiens
gtactctatatatcacagcttctata

SEQ ID NO: 2518 - DNA, 26 bp, Homo sapiens
tactctatatatcacagcttctatac

SEQ ID NO: 2519 - DNA, 26 bp, Homo sapiens
actctatatatcacagcttctataca

SEQ ID NO: 2520 - DNA, 26 bp, Homo sapiens
ctctatatatcacagcttctatacat

SEQ ID NO: 2521 - DNA, 26 bp, Homo sapiens
tctatatatcacagcttctatacata

SEQ ID NO: 2522 - DNA, 26 bp, Homo sapiens
ctatatatcacagcttctatacatat

SEQ ID NO: 2523 - DNA, 26 bp, Homo sapiens
tatatatcacagcttctatacatatc

SEQ ID NO: 2524 - DNA, 26 bp, Homo sapiens
atatatcacagcttctatacatatca

SEQ ID NO: 2525 - DNA, 26 bp, Homo sapiens
tatatcacagcttctatacatatcag

SEQ ID NO: 2526 - DNA, 26 bp, Homo sapiens
atatcacagcttctatacatatcaga

SEQ ID NO: 2527 - DNA, 26 bp, Homo sapiens
tatcacagcttctatacatatcagat

SEQ ID NO: 2528 - DNA, 26 bp, Homo sapiens
atcacagcttctatacatatcagatg

SEQ ID NO: 2529 - DNA, 26 bp, Homo sapiens
tcacagcttctatacatatcagatga

SEQ ID NO: 2530 - DNA, 26 bp, Homo sapiens
cacagcttctatacatatcagatgac

SEQ ID NO: 2531 - DNA, 26 bp, Homo sapiens
acagcttctatacatatcagatgact

SEQ ID NO: 2532 - DNA, 26 bp, Homo sapiens
cagcttctatacatatcagatgactc

SEQ ID NO: 2533 - DNA, 26 bp, Homo sapiens
agcttctatacatatcagatgactca

SEQ ID NO: 2534 - DNA, 26 bp, Homo sapiens
gcttctatacatatcagatgactcac

SEQ ID NO: 2535 - DNA, 26 bp, Homo sapiens
cttctatacatatcagatgactcact

SEQ ID NO: 2536 - DNA, 26 bp, Homo sapiens
ttctatacatatcagatgactcactt

SEQ ID NO: 2537 - DNA, 26 bp, Homo sapiens
tctatacatatcagatgactcacttg

SEQ ID NO: 2538 - DNA, 26 bp, Homo sapiens
ctatacatatcagatgactcacttgt

SEQ ID NO: 2539 - DNA, 26 bp, Homo sapiens
tatacatatcagatgactcacttgtc

SEQ ID NO: 2540 - DNA, 26 bp, Homo sapiens
atacatatcagatgactcacttgtct

SEQ ID NO: 2541 - DNA, 26 bp, Homo sapiens
tacatatcagatgactcacttgtcta

SEQ ID NO: 2542 - DNA, 26 bp, Homo sapiens
acatatcagatgactcacttgtctac

SEQ ID NO: 2543 - DNA, 26 bp, Homo sapiens
catatcagatgactcacttgtctaca

SEQ ID NO: 2544 - DNA, 26 bp, Homo sapiens
atatcagatgactcacttgtctacaa

SEQ ID NO: 2545 - DNA, 26 bp, Homo sapiens
tatcagatgactcacttgtctacaag

SEQ ID NO: 2546 - DNA, 26 bp, Homo sapiens
atcagatgactcacttgtctacaagg

SEQ ID NO: 2547 - DNA, 26 bp, Homo sapiens
tcagatgactcacttgtctacaaggt

SEQ ID NO: 2548 - DNA, 26 bp, Homo sapiens
cagatgactcacttgtctacaaggtt

SEQ ID NO: 2549 - DNA, 26 bp, Homo sapiens
agatgactcacttgtctacaaggttt

SEQ ID NO: 2550 - DNA, 26 bp, Homo sapiens
gatgactcacttgtctacaaggttta

SEQ ID NO: 2551 - DNA, 26 bp, Homo sapiens
atgactcacttgtctacaaggtttag

SEQ ID NO: 2552 - DNA, 26 bp, Homo sapiens
tgactcacttgtctacaaggtttaga

SEQ ID NO: 2553 - DNA, 26 bp, Homo sapiens
gactcacttgtctacaaggtttagat

SEQ ID NO: 2554 - DNA, 26 bp, Homo sapiens
actcacttgtctacaaggtttagatt

SEQ ID NO: 2555 - DNA, 26 bp, Homo sapiens
ctcacttgtctacaaggtttagattt

SEQ ID NO: 2556 - DNA, 26 bp, Homo sapiens
tcacttgtctacaaggtttagattta

SEQ ID NO: 2557 - DNA, 26 bp, Homo sapiens
cacttgtctacaaggtttagatttac

SEQ ID NO: 2558 - DNA, 26 bp, Homo sapiens
acttgtctacaaggtttagatttact

SEQ ID NO: 2559 - DNA, 26 bp, Homo sapiens
cttgtctacaaggtttagatttactt

SEQ ID NO: 2560 - DNA, 26 bp, Homo sapiens
ttgtctacaaggtttagatttacttg

SEQ ID NO: 2561 - DNA, 26 bp, Homo sapiens
tgtctacaaggtttagatttacttga

SEQ ID NO: 2562 - DNA, 26 bp, Homo sapiens
gtctacaaggtttagatttacttgaa

SEQ ID NO: 2563 - DNA, 26 bp, Homo sapiens
tctacaaggtttagatttacttgaac

SEQ ID NO: 2564 - DNA, 26 bp, Homo sapiens
ctacaaggtttagatttacttgaaca

SEQ ID NO: 2565 - DNA, 26 bp, Homo sapiens
tacaaggtttagatttacttgaacaa

SEQ ID NO: 2566 - DNA, 26 bp, Homo sapiens
acaaggtttagatttacttgaacaac

SEQ ID NO: 2567 - DNA, 26 bp, Homo sapiens
caaggtttagatttacttgaacaaca

SEQ ID NO: 2568 - DNA, 26 bp, Homo sapiens
aaggtttagatttacttgaacaacag

SEQ ID NO: 2569 - DNA, 26 bp, Homo sapiens
aggtttagatttacttgaacaacagt

SEQ ID NO: 2570 - DNA, 26 bp, Homo sapiens
ggtttagatttacttgaacaacagtg

SEQ ID NO: 2571 - DNA, 26 bp, Homo sapiens
gtttagatttacttgaacaacagtga

SEQ ID NO: 2572 - DNA, 26 bp, Homo sapiens
tttagatttacttgaacaacagtgaa

SEQ ID NO: 2573 - DNA, 26 bp, Homo sapiens
ttagatttacttgaacaacagtgaaa

SEQ ID NO: 2574 - DNA, 26 bp, Homo sapiens
tagatttacttgaacaacagtgaaat

SEQ ID NO: 2575 - DNA, 26 bp, Homo sapiens
agatttacttgaacaacagtgaaata

SEQ ID NO: 2576 - DNA, 26 bp, Homo sapiens
gatttacttgaacaacagtgaaatag

SEQ ID NO: 2577 - DNA, 26 bp, Homo sapiens
atttacttgaacaacagtgaaatagg

SEQ ID NO: 2578 - DNA, 26 bp, Homo sapiens
tttacttgaacaacagtgaaataggg

SEQ ID NO: 2579 - DNA, 26 bp, Homo sapiens
ttacttgaacaacagtgaaatagggt

SEQ ID NO: 2580 - DNA, 26 bp, Homo sapiens
tacttgaacaacagtgaaatagggta

SEQ ID NO: 2581 - DNA, 26 bp, Homo sapiens
acttgaacaacagtgaaatagggtaa

SEQ ID NO: 2582 - DNA, 26 bp, Homo sapiens
cttgaacaacagtgaaatagggtaat

SEQ ID NO: 2583 - DNA, 26 bp, Homo sapiens
ttgaacaacagtgaaatagggtaata

SEQ ID NO: 2584 - DNA, 26 bp, Homo sapiens
tgaacaacagtgaaatagggtaatat

SEQ ID NO: 2585 - DNA, 26 bp, Homo sapiens
gaacaacagtgaaatagggtaatatt

SEQ ID NO: 2586 - DNA, 26 bp, Homo sapiens
aacaacagtgaaatagggtaatattt

SEQ ID NO: 2587 - DNA, 26 bp, Homo sapiens
acaacagtgaaatagggtaatattta

SEQ ID NO: 2588 - DNA, 26 bp, Homo sapiens
caacagtgaaatagggtaatatttat

SEQ ID NO: 2589 - DNA, 26 bp, Homo sapiens
aacagtgaaatagggtaatatttata

SEQ ID NO: 2590 - DNA, 26 bp, Homo sapiens
acagtgaaatagggtaatatttatat

SEQ ID NO: 2591 - DNA, 26 bp, Homo sapiens
cagtgaaatagggtaatatttatata

SEQ ID NO: 2592 - DNA, 26 bp, Homo sapiens
agtgaaatagggtaatatttatatac

SEQ ID NO: 2593 - DNA, 26 bp, Homo sapiens
gtgaaatagggtaatatttatataca

SEQ ID NO: 2594 - DNA, 26 bp, Homo sapiens
tgaaatagggtaatatttatatacaa

SEQ ID NO: 2595 - DNA, 26 bp, Homo sapiens
gaaatagggtaatatttatatacaac

SEQ ID NO: 2596 - DNA, 26 bp, Homo sapiens
aaatagggtaatatttatatacaact

SEQ ID NO: 2597 - DNA, 26 bp, Homo sapiens
aatagggtaatatttatatacaacta

SEQ ID NO: 2598 - DNA, 26 bp, Homo sapiens
atagggtaatatttatatacaactat

SEQ ID NO: 2599 - DNA, 26 bp, Homo sapiens
tagggtaatatttatatacaactatt

SEQ ID NO: 2600 - DNA, 26 bp, Homo sapiens
agggtaatatttatatacaactattt

SEQ ID NO: 2601 - DNA, 26 bp, Homo sapiens
gggtaatatttatatacaactatttt

SEQ ID NO: 2602 - DNA, 26 bp, Homo sapiens
ggtaatatttatatacaactatttta

SEQ ID NO: 2603 - DNA, 26 bp, Homo sapiens
gtaatatttatatacaactattttaa

SEQ ID NO: 2604 - DNA, 26 bp, Homo sapiens
taatatttatatacaactattttaat

SEQ ID NO: 2605 - DNA, 26 bp, Homo sapiens
aatatttatatacaactattttaata

SEQ ID NO: 2606 - DNA, 26 bp, Homo sapiens
atatttatatacaactattttaataa

SEQ ID NO: 2607 - DNA, 26 bp, Homo sapiens
tatttatatacaactattttaataaa

SEQ ID NO: 2608 - DNA, 26 bp, Homo sapiens
atttatatacaactattttaataaaa

SEQ ID NO: 2609 - DNA, 26 bp, Homo sapiens
tttatatacaactattttaataaaaa

SEQ ID NO: 2610 - DNA, 26 bp, Homo sapiens
ttatatacaactattttaataaaaaa

SEQ ID NO: 2611 - DNA, 26 bp, Homo sapiens
tatatacaactattttaataaaaaat

SEQ ID NO: 2612 - DNA, 26 bp, Homo sapiens
atatacaactattttaataaaaaata

SEQ ID NO: 2613 - DNA, 26 bp, Homo sapiens
tatacaactattttaataaaaaataa

SEQ ID NO: 2614 - DNA, 26 bp, Homo sapiens
atacaactattttaataaaaaataaa

SEQ ID NO: 2615 - DNA, 26 bp, Homo sapiens
tacaactattttaataaaaaataaag

SEQ ID NO: 2616 - DNA, 26 bp, Homo sapiens
acaactattttaataaaaaataaagc

SEQ ID NO: 2617 - DNA, 26 bp, Homo sapiens
caactattttaataaaaaataaagca

SEQ ID NO: 2618 - DNA, 26 bp, Homo sapiens
aactattttaataaaaaataaagcaa

SEQ ID NO: 2619 - DNA, 26 bp, Homo sapiens
actattttaataaaaaataaagcaat

SEQ ID NO: 2620 - DNA, 26 bp, Homo sapiens
ctattttaataaaaaataaagcaatt

SEQ ID NO: 2621 - DNA, 26 bp, Homo sapiens
tattttaataaaaaataaagcaattg

SEQ ID NO: 2622 - DNA, 26 bp, Homo sapiens
attttaataaaaaataaagcaattgt

SEQ ID NO: 2623 - DNA, 26 bp, Homo sapiens
ttttaataaaaaataaagcaattgta

SEQ ID NO: 2624 - DNA, 26 bp, Homo sapiens
tttaataaaaaataaagcaattgtaa

SEQ ID NO: 2625 - DNA, 26 bp, Homo sapiens
ttaataaaaaataaagcaattgtaaa

SEQ ID NO: 2626 - DNA, 26 bp, Homo sapiens
taataaaaaataaagcaattgtaaaa

SEQ ID NO: 2627 - DNA, 26 bp, Homo sapiens
aataaaaaataaagcaattgtaaaat

SEQ ID NO: 2628 - DNA, 26 bp, Homo sapiens
ataaaaaataaagcaattgtaaaatg

SEQ ID NO: 2629 - DNA, 26 bp, Homo sapiens
taaaaaataaagcaattgtaaaatgt

SEQ ID NO: 2630 - DNA, 26 bp, Homo sapiens
aaaaaataaagcaattgtaaaatgta

SEQ ID NO: 2631 - DNA, 26 bp, Homo sapiens
aaaaataaagcaattgtaaaatgtaa

SEQ ID NO: 2632 - DNA, 26 bp, Homo sapiens
aaaataaagcaattgtaaaatgtaaa

SEQ ID NO: 2633 - DNA, 26 bp, Homo sapiens
aaataaagcaattgtaaaatgtaaac

SEQ ID NO: 2634 - DNA, 26 bp, Homo sapiens
aataaagcaattgtaaaatgtaaact

SEQ ID NO: 2635 - DNA, 26 bp, Homo sapiens
ataaagcaattgtaaaatgtaaactt

SEQ ID NO: 2636 - DNA, 26 bp, Homo sapiens
taaagcaattgtaaaatgtaaactta

SEQ ID NO: 2637 - DNA, 26 bp, Homo sapiens
aaagcaattgtaaaatgtaaacttaa

SEQ ID NO: 2638 - DNA, 26 bp, Homo sapiens
aagcaattgtaaaatgtaaacttaat

SEQ ID NO: 2639 - DNA, 26 bp, Homo sapiens
agcaattgtaaaatgtaaacttaatt

SEQ ID NO: 2640 - DNA, 26 bp, Homo sapiens
gcaattgtaaaatgtaaacttaattg

SEQ ID NO: 2641 - DNA, 26 bp, Homo sapiens
caattgtaaaatgtaaacttaattgt

SEQ ID NO: 2642 - DNA, 26 bp, Homo sapiens
aattgtaaaatgtaaacttaattgtc

SEQ ID NO: 2643 - DNA, 26 bp, Homo sapiens
attgtaaaatgtaaacttaattgtca

SEQ ID NO: 2644 - DNA, 26 bp, Homo sapiens
ttgtaaaatgtaaacttaattgtcaa

SEQ ID NO: 2645 - DNA, 26 bp, Homo sapiens
tgtaaaatgtaaacttaattgtcaaa

SEQ ID NO: 2646 - DNA, 26 bp, Homo sapiens
gtaaaatgtaaacttaattgtcaaaa

SEQ ID NO: 2647 - DNA, 26 bp, Homo sapiens
taaaatgtaaacttaattgtcaaaat

SEQ ID NO: 2648 - DNA, 26 bp, Homo sapiens
aaaatgtaaacttaattgtcaaaata

SEQ ID NO: 2649 - DNA, 26 bp, Homo sapiens
aaatgtaaacttaattgtcaaaatat

SEQ ID NO: 2650 - DNA, 26 bp, Homo sapiens
aatgtaaacttaattgtcaaaatatt

SEQ ID NO: 2651 - DNA, 26 bp, Homo sapiens
atgtaaacttaattgtcaaaatattc

SEQ ID NO: 2652 - DNA, 26 bp, Homo sapiens
tgtaaacttaattgtcaaaatattct

SEQ ID NO: 2653 - DNA, 26 bp, Homo sapiens
gtaaacttaattgtcaaaatattctt

SEQ ID NO: 2654 - DNA, 26 bp, Homo sapiens
taaacttaattgtcaaaatattcttt

SEQ ID NO: 2655 - DNA, 26 bp, Homo sapiens
aaacttaattgtcaaaatattcttta

SEQ ID NO: 2656 - DNA, 26 bp, Homo sapiens
aacttaattgtcaaaatattctttaa

SEQ ID NO: 2657 - DNA, 26 bp, Homo sapiens
acttaattgtcaaaatattctttaaa

SEQ ID NO: 2658 - DNA, 26 bp, Homo sapiens
cttaattgtcaaaatattctttaaac

SEQ ID NO: 2659 - DNA, 26 bp, Homo sapiens
ttaattgtcaaaatattctttaaaca

SEQ ID NO: 2660 - DNA, 26 bp, Homo sapiens
taattgtcaaaatattctttaaacac

SEQ ID NO: 2661 - DNA, 26 bp, Homo sapiens
aattgtcaaaatattctttaaacact

SEQ ID NO: 2662 - DNA, 26 bp, Homo sapiens
attgtcaaaatattctttaaacactt

SEQ ID NO: 2663 - DNA, 26 bp, Homo sapiens
ttgtcaaaatattctttaaacacttt

SEQ ID NO: 2664 - DNA, 26 bp, Homo sapiens
tgtcaaaatattctttaaacacttta

SEQ ID NO: 2665 - DNA, 26 bp, Homo sapiens
gtcaaaatattctttaaacactttaa

SEQ ID NO: 2666 - DNA, 26 bp, Homo sapiens
tcaaaatattctttaaacactttaac

SEQ ID NO: 2667 - DNA, 26 bp, Homo sapiens
caaaatattctttaaacactttaaca

SEQ ID NO: 2668 - DNA, 26 bp, Homo sapiens
aaaatattctttaaacactttaacaa

SEQ ID NO: 2669 - DNA, 26 bp, Homo sapiens
aaatattctttaaacactttaacaat

SEQ ID NO: 2670 - DNA, 26 bp, Homo sapiens
aatattctttaaacactttaacaata

SEQ ID NO: 2671 - DNA, 26 bp, Homo sapiens
atattctttaaacactttaacaatat

SEQ ID NO: 2672 - DNA, 26 bp, Homo sapiens
tattctttaaacactttaacaatatc

SEQ ID NO: 2673 - DNA, 26 bp, Homo sapiens
attctttaaacactttaacaatatcc

SEQ ID NO: 2674 - DNA, 26 bp, Homo sapiens
ttctttaaacactttaacaatatcca

SEQ ID NO: 2675 - DNA, 26 bp, Homo sapiens
tctttaaacactttaacaatatccac

SEQ ID NO: 2676 - DNA, 26 bp, Homo sapiens
ctttaaacactttaacaatatccaca

SEQ ID NO: 2677 - DNA, 26 bp, Homo sapiens
tttaaacactttaacaatatccacac

SEQ ID NO: 2678 - DNA, 26 bp, Homo sapiens
ttaaacactttaacaatatccacaca

SEQ ID NO: 2679 - DNA, 26 bp, Homo sapiens
taaacactttaacaatatccacacaa

SEQ ID NO: 2680 - DNA, 26 bp, Homo sapiens
aaacactttaacaatatccacacaaa

SEQ ID NO: 2681 - DNA, 26 bp, Homo sapiens
aacactttaacaatatccacacaaat

SEQ ID NO: 2682 - DNA, 26 bp, Homo sapiens
acactttaacaatatccacacaaatt

SEQ ID NO: 2683 - DNA, 26 bp, Homo sapiens
cactttaacaatatccacacaaatta

SEQ ID NO: 2684 - DNA, 26 bp, Homo sapiens
actttaacaatatccacacaaattac

SEQ ID NO: 2685 - DNA, 26 bp, Homo sapiens
ctttaacaatatccacacaaattact

SEQ ID NO: 2686 - DNA, 26 bp, Homo sapiens
tttaacaatatccacacaaattactg

SEQ ID NO: 2687 - DNA, 26 bp, Homo sapiens
ttaacaatatccacacaaattactgt

SEQ ID NO: 2688 - DNA, 26 bp, Homo sapiens
taacaatatccacacaaattactgtt

SEQ ID NO: 2689 - DNA, 26 bp, Homo sapiens
aacaatatccacacaaattactgttc

SEQ ID NO: 2690 - DNA, 26 bp, Homo sapiens
acaatatccacacaaattactgttcc

SEQ ID NO: 2691 - DNA, 26 bp, Homo sapiens
caatatccacacaaattactgttcct

SEQ ID NO: 2692 - DNA, 26 bp, Homo sapiens
aatatccacacaaattactgttcctt

SEQ ID NO: 2693 - DNA, 26 bp, Homo sapiens
atatccacacaaattactgttccttt

SEQ ID NO: 2694 - DNA, 26 bp, Homo sapiens
tatccacacaaattactgttcctttc

SEQ ID NO: 2695 - DNA, 26 bp, Homo sapiens
atccacacaaattactgttcctttca

SEQ ID NO: 2696 - DNA, 26 bp, Homo sapiens
tccacacaaattactgttcctttcaa

SEQ ID NO: 2697 - DNA, 26 bp, Homo sapiens
ccacacaaattactgttcctttcaaa

SEQ ID NO: 2698 - DNA, 26 bp, Homo sapiens
cacacaaattactgttcctttcaaaa

SEQ ID NO: 2699 - DNA, 26 bp, Homo sapiens
acacaaattactgttcctttcaaaag

SEQ ID NO: 2700 - DNA, 26 bp, Homo sapiens
cacaaattactgttcctttcaaaaga

SEQ ID NO: 2701 - DNA, 26 bp, Homo sapiens
acaaattactgttcctttcaaaagaa

SEQ ID NO: 2702 - DNA, 26 bp, Homo sapiens
caaattactgttcctttcaaaagaag

SEQ ID NO: 2703 - DNA, 26 bp, Homo sapiens
aaattactgttcctttcaaaagaaga

SEQ ID NO: 2704 - DNA, 26 bp, Homo sapiens
aattactgttcctttcaaaagaagac

SEQ ID NO: 2705 - DNA, 26 bp, Homo sapiens
attactgttcctttcaaaagaagacc

SEQ ID NO: 2706 - DNA, 26 bp, Homo sapiens
ttactgttcctttcaaaagaagacca

SEQ ID NO: 2707 - DNA, 26 bp, Homo sapiens
tactgttcctttcaaaagaagaccac

SEQ ID NO: 2708 - DNA, 26 bp, Homo sapiens
actgttcctttcaaaagaagaccacc

SEQ ID NO: 2709 - DNA, 26 bp, Homo sapiens
ctgttcctttcaaaagaagaccacca

SEQ ID NO: 2710 - DNA, 26 bp, Homo sapiens
tgttcctttcaaaagaagaccaccac

SEQ ID NO: 2711 - DNA, 26 bp, Homo sapiens
gttcctttcaaaagaagaccaccaca

SEQ ID NO: 2712 - DNA, 26 bp, Homo sapiens
ttcctttcaaaagaagaccaccacaa

SEQ ID NO: 2713 - DNA, 26 bp, Homo sapiens
tcctttcaaaagaagaccaccacaaa

SEQ ID NO: 2714 - DNA, 26 bp, Homo sapiens
cctttcaaaagaagaccaccacaaac

SEQ ID NO: 2715 - DNA, 26 bp, Homo sapiens
ctttcaaaagaagaccaccacaaacg

SEQ ID NO: 2716 - DNA, 26 bp, Homo sapiens
tttcaaaagaagaccaccacaaacgc

SEQ ID NO: 2717 - DNA, 26 bp, Homo sapiens
ttcaaaagaagaccaccacaaacgcc

SEQ ID NO: 2718 - DNA, 26 bp, Homo sapiens
tcaaaagaagaccaccacaaacgcca

SEQ ID NO: 2719 - DNA, 26 bp, Homo sapiens
caaaagaagaccaccacaaacgccat

SEQ ID NO: 2720 - DNA, 26 bp, Homo sapiens
aaaagaagaccaccacaaacgccatc

SEQ ID NO: 2721 - DNA, 26 bp, Homo sapiens
aaagaagaccaccacaaacgccatcg

SEQ ID NO: 2722 - DNA, 26 bp, Homo sapiens
aagaagaccaccacaaacgccatcgt

SEQ ID NO: 2723 - DNA, 26 bp, Homo sapiens
agaagaccaccacaaacgccatcgtt

SEQ ID NO: 2724 - DNA, 26 bp, Homo sapiens
gaagaccaccacaaacgccatcgttt

SEQ ID NO: 2725 - DNA, 26 bp, Homo sapiens
aagaccaccacaaacgccatcgtttt

SEQ ID NO: 2726 - DNA, 26 bp, Homo sapiens
agaccaccacaaacgccatcgttttc

SEQ ID NO: 2727 - DNA, 26 bp, Homo sapiens
gaccaccacaaacgccatcgttttct

SEQ ID NO: 2728 - DNA, 26 bp, Homo sapiens
accaccacaaacgccatcgttttcta

SEQ ID NO: 2729 - DNA, 26 bp, Homo sapiens
ccaccacaaacgccatcgttttctag

SEQ ID NO: 2730 - DNA, 26 bp, Homo sapiens
caccacaaacgccatcgttttctaga

SEQ ID NO: 2731 - DNA, 26 bp, Homo sapiens
accacaaacgccatcgttttctagaa

SEQ ID NO: 2732 - DNA, 26 bp, Homo sapiens
ccacaaacgccatcgttttctagaag

SEQ ID NO: 2733 - DNA, 26 bp, Homo sapiens
cacaaacgccatcgttttctagaaga

SEQ ID NO: 2734 - DNA, 26 bp, Homo sapiens
acaaacgccatcgttttctagaagac

SEQ ID NO: 2735 - DNA, 26 bp, Homo sapiens
caaacgccatcgttttctagaagacg

SEQ ID NO: 2736 - DNA, 26 bp, Homo sapiens
aaacgccatcgttttctagaagacgg

SEQ ID NO: 2737 - DNA, 26 bp, Homo sapiens
aacgccatcgttttctagaagacggc

SEQ ID NO: 2738 - DNA, 26 bp, Homo sapiens
acgccatcgttttctagaagacggca

SEQ ID NO: 2739 - DNA, 26 bp, Homo sapiens
cgccatcgttttctagaagacggcat

SEQ ID NO: 2740 - DNA, 26 bp, Homo sapiens
gccatcgttttctagaagacggcatt

SEQ ID NO: 2741 - DNA, 26 bp, Homo sapiens
ccatcgttttctagaagacggcattt

SEQ ID NO: 2742 - DNA, 26 bp, Homo sapiens
catcgttttctagaagacggcatttc

SEQ ID NO: 2743 - DNA, 26 bp, Homo sapiens
atcgttttctagaagacggcatttcc

SEQ ID NO: 2744 - DNA, 26 bp, Homo sapiens
tcgttttctagaagacggcatttcca

SEQ ID NO: 2745 - DNA, 26 bp, Homo sapiens
cgttttctagaagacggcatttccag

SEQ ID NO: 2746 - DNA, 26 bp, Homo sapiens
gttttctagaagacggcatttccaga

SEQ ID NO: 2747 - DNA, 26 bp, Homo sapiens
ttttctagaagacggcatttccagaa

SEQ ID NO: 2748 - DNA, 26 bp, Homo sapiens
tttctagaagacggcatttccagaat

SEQ ID NO: 2749 - DNA, 26 bp, Homo sapiens
ttctagaagacggcatttccagaatc

SEQ ID NO: 2750 - DNA, 26 bp, Homo sapiens
tctagaagacggcatttccagaatct

SEQ ID NO: 2751 - DNA, 26 bp, Homo sapiens
ctagaagacggcatttccagaatctg

SEQ ID NO: 2752 - DNA, 26 bp, Homo sapiens
tagaagacggcatttccagaatctgg

SEQ ID NO: 2753 - DNA, 26 bp, Homo sapiens
agaagacggcatttccagaatctggt

SEQ ID NO: 2754 - DNA, 26 bp, Homo sapiens
gaagacggcatttccagaatctggta

SEQ ID NO: 2755 - DNA, 26 bp, Homo sapiens
aagacggcatttccagaatctggtag

SEQ ID NO: 2756 - DNA, 26 bp, Homo sapiens
agacggcatttccagaatctggtagg

SEQ ID NO: 2757 - DNA, 26 bp, Homo sapiens
gacggcatttccagaatctggtaggt

SEQ ID NO: 2758 - DNA, 26 bp, Homo sapiens
acggcatttccagaatctggtaggtg

SEQ ID NO: 2759 - DNA, 26 bp, Homo sapiens
cggcatttccagaatctggtaggtgg

SEQ ID NO: 2760 - DNA, 26 bp, Homo sapiens
ggcatttccagaatctggtaggtggt

SEQ ID NO: 2761 - DNA, 26 bp, Homo sapiens
gcatttccagaatctggtaggtggtg

SEQ ID NO: 2762 - DNA, 26 bp, Homo sapiens
catttccagaatctggtaggtggtga

SEQ ID NO: 2763 - DNA, 26 bp, Homo sapiens
atttccagaatctggtaggtggtgat

SEQ ID NO: 2764 - DNA, 26 bp, Homo sapiens
tttccagaatctggtaggtggtgatg

SEQ ID NO: 2765 - DNA, 26 bp, Homo sapiens
ttccagaatctggtaggtggtgatga

SEQ ID NO: 2766 - DNA, 26 bp, Homo sapiens
tccagaatctggtaggtggtgatgag

SEQ ID NO: 2767 - DNA, 26 bp, Homo sapiens
ccagaatctggtaggtggtgatgagg

SEQ ID NO: 2768 - DNA, 26 bp, Homo sapiens
cagaatctggtaggtggtgatgagga

SEQ ID NO: 2769 - DNA, 26 bp, Homo sapiens
agaatctggtaggtggtgatgaggaa

SEQ ID NO: 2770 - DNA, 26 bp, Homo sapiens
gaatctggtaggtggtgatgaggaac

SEQ ID NO: 2771 - DNA, 26 bp, Homo sapiens
aatctggtaggtggtgatgaggaaca

SEQ ID NO: 2772 - DNA, 26 bp, Homo sapiens
atctggtaggtggtgatgaggaacag

SEQ ID NO: 2773 - DNA, 26 bp, Homo sapiens
tctggtaggtggtgatgaggaacagg

SEQ ID NO: 2774 - DNA, 26 bp, Homo sapiens
ctggtaggtggtgatgaggaacaggt

SEQ ID NO: 2775 - DNA, 26 bp, Homo sapiens
tggtaggtggtgatgaggaacaggtt

SEQ ID NO: 2776 - DNA, 26 bp, Homo sapiens
ggtaggtggtgatgaggaacaggttt

SEQ ID NO: 2777 - DNA, 26 bp, Homo sapiens
gtaggtggtgatgaggaacaggtttc

SEQ ID NO: 2778 - DNA, 26 bp, Homo sapiens
taggtggtgatgaggaacaggtttcc

SEQ ID NO: 2779 - DNA, 26 bp, Homo sapiens
aggtggtgatgaggaacaggtttcca

SEQ ID NO: 2780 - DNA, 26 bp, Homo sapiens
ggtggtgatgaggaacaggtttccag

SEQ ID NO: 2781 - DNA, 26 bp, Homo sapiens
gtggtgatgaggaacaggtttccagt

SEQ ID NO: 2782 - DNA, 26 bp, Homo sapiens
tggtgatgaggaacaggtttccagta

SEQ ID NO: 2783 - DNA, 26 bp, Homo sapiens
ggtgatgaggaacaggtttccagtac

SEQ ID NO: 2784 - DNA, 26 bp, Homo sapiens
gtgatgaggaacaggtttccagtacg

SEQ ID NO: 2785 - DNA, 26 bp, Homo sapiens
tgatgaggaacaggtttccagtacgt

SEQ ID NO: 2786 - DNA, 26 bp, Homo sapiens
gatgaggaacaggtttccagtacgtg

SEQ ID NO: 2787 - DNA, 26 bp, Homo sapiens
atgaggaacaggtttccagtacgtgt

SEQ ID NO: 2788 - DNA, 26 bp, Homo sapiens
tgaggaacaggtttccagtacgtgtt

SEQ ID NO: 2789 - DNA, 26 bp, Homo sapiens
gaggaacaggtttccagtacgtgtta

SEQ ID NO: 2790 - DNA, 26 bp, Homo sapiens
aggaacaggtttccagtacgtgttat

SEQ ID NO: 2791 - DNA, 26 bp, Homo sapiens
ggaacaggtttccagtacgtgttata

SEQ ID NO: 2792 - DNA, 26 bp, Homo sapiens
gaacaggtttccagtacgtgttatag

SEQ ID NO: 2793 - DNA, 26 bp, Homo sapiens
aacaggtttccagtacgtgttatagt

SEQ ID NO: 2794 - DNA, 26 bp, Homo sapiens
acaggtttccagtacgtgttatagta

SEQ ID NO: 2795 - DNA, 26 bp, Homo sapiens
caggtttccagtacgtgttatagtac

SEQ ID NO: 2796 - DNA, 26 bp, Homo sapiens
aggtttccagtacgtgttatagtacc

SEQ ID NO: 2797 - DNA, 26 bp, Homo sapiens
ggtttccagtacgtgttatagtaccg

SEQ ID NO: 2798 - DNA, 26 bp, Homo sapiens
gtttccagtacgtgttatagtaccgc

SEQ ID NO: 2799 - DNA, 26 bp, Homo sapiens
tttccagtacgtgttatagtaccgcc

SEQ ID NO: 2800 - DNA, 26 bp, Homo sapiens
ttccagtacgtgttatagtaccgcca

SEQ ID NO: 2801 - DNA, 26 bp, Homo sapiens
tccagtacgtgttatagtaccgccag

SEQ ID NO: 2802 - DNA, 26 bp, Homo sapiens
ccagtacgtgttatagtaccgccagc

SEQ ID NO: 2803 - DNA, 26 bp, Homo sapiens
cagtacgtgttatagtaccgccagct

SEQ ID NO: 2804 - DNA, 26 bp, Homo sapiens
agtacgtgttatagtaccgccagctt

SEQ ID NO: 2805 - DNA, 26 bp, Homo sapiens
gtacgtgttatagtaccgccagctta

SEQ ID NO: 2806 - DNA, 26 bp, Homo sapiens
tacgtgttatagtaccgccagcttac

SEQ ID NO: 2807 - DNA, 26 bp, Homo sapiens
acgtgttatagtaccgccagcttacc

SEQ ID NO: 2808 - DNA, 26 bp, Homo sapiens
cgtgttatagtaccgccagcttaccc

SEQ ID NO: 2809 - DNA, 26 bp, Homo sapiens
gtgttatagtaccgccagcttaccca

SEQ ID NO: 2810 - DNA, 26 bp, Homo sapiens
tgttatagtaccgccagcttacccaa

SEQ ID NO: 2811 - DNA, 26 bp, Homo sapiens
gttatagtaccgccagcttacccaaa

SEQ ID NO: 2812 - DNA, 26 bp, Homo sapiens
ttatagtaccgccagcttacccaaaa

SEQ ID NO: 2813 - DNA, 26 bp, Homo sapiens
tatagtaccgccagcttacccaaaac

SEQ ID NO: 2814 - DNA, 26 bp, Homo sapiens
atagtaccgccagcttacccaaaact

SEQ ID NO: 2815 - DNA, 26 bp, Homo sapiens
tagtaccgccagcttacccaaaactg

SEQ ID NO: 2816 - DNA, 26 bp, Homo sapiens
agtaccgccagcttacccaaaactgc

SEQ ID NO: 2817 - DNA, 26 bp, Homo sapiens
gtaccgccagcttacccaaaactgct

SEQ ID NO: 2818 - DNA, 26 bp, Homo sapiens
taccgccagcttacccaaaactgcta

SEQ ID NO: 2819 - DNA, 26 bp, Homo sapiens
accgccagcttacccaaaactgctaa

SEQ ID NO: 2820 - DNA, 26 bp, Homo sapiens
ccgccagcttacccaaaactgctaat

SEQ ID NO: 2821 - DNA, 26 bp, Homo sapiens
cgccagcttacccaaaactgctaatg

SEQ ID NO: 2822 - DNA, 26 bp, Homo sapiens
gccagcttacccaaaactgctaatgc

SEQ ID NO: 2823 - DNA, 26 bp, Homo sapiens
ccagcttacccaaaactgctaatgcc

SEQ ID NO: 2824 - DNA, 26 bp, Homo sapiens
cagcttacccaaaactgctaatgccg

SEQ ID NO: 2825 - DNA, 26 bp, Homo sapiens
agcttacccaaaactgctaatgccga

SEQ ID NO: 2826 - DNA, 26 bp, Homo sapiens
gcttacccaaaactgctaatgccgac

SEQ ID NO: 2827 - DNA, 26 bp, Homo sapiens
cttacccaaaactgctaatgccgaca

SEQ ID NO: 2828 - DNA, 26 bp, Homo sapiens
ttacccaaaactgctaatgccgacag

SEQ ID NO: 2829 - DNA, 26 bp, Homo sapiens
tacccaaaactgctaatgccgacagt

SEQ ID NO: 2830 - DNA, 26 bp, Homo sapiens
acccaaaactgctaatgccgacagtt

SEQ ID NO: 2831 - DNA, 26 bp, Homo sapiens
cccaaaactgctaatgccgacagttt

SEQ ID NO: 2832 - DNA, 26 bp, Homo sapiens
ccaaaactgctaatgccgacagtttc

SEQ ID NO: 2833 - DNA, 26 bp, Homo sapiens
caaaactgctaatgccgacagtttcg

SEQ ID NO: 2834 - DNA, 26 bp, Homo sapiens
aaaactgctaatgccgacagtttcgc

SEQ ID NO: 2835 - DNA, 26 bp, Homo sapiens
aaactgctaatgccgacagtttcgcc

SEQ ID NO: 2836 - DNA, 26 bp, Homo sapiens
aactgctaatgccgacagtttcgcca

SEQ ID NO: 2837 - DNA, 26 bp, Homo sapiens
actgctaatgccgacagtttcgccat

SEQ ID NO: 2838 - DNA, 26 bp, Homo sapiens
ctgctaatgccgacagtttcgccatt

SEQ ID NO: 2839 - DNA, 26 bp, Homo sapiens
tgctaatgccgacagtttcgccattg

SEQ ID NO: 2840 - DNA, 26 bp, Homo sapiens
gctaatgccgacagtttcgccattga

SEQ ID NO: 2841 - DNA, 26 bp, Homo sapiens
ctaatgccgacagtttcgccattgaa

SEQ ID NO: 2842 - DNA, 26 bp, Homo sapiens
taatgccgacagtttcgccattgaaa

SEQ ID NO: 2843 - DNA, 26 bp, Homo sapiens
aatgccgacagtttcgccattgaaaa

SEQ ID NO: 2844 - DNA, 26 bp, Homo sapiens
atgccgacagtttcgccattgaaaag

SEQ ID NO: 2845 - DNA, 26 bp, Homo sapiens
tgccgacagtttcgccattgaaaagg

SEQ ID NO: 2846 - DNA, 26 bp, Homo sapiens
gccgacagtttcgccattgaaaagga

SEQ ID NO: 2847 - DNA, 26 bp, Homo sapiens
ccgacagtttcgccattgaaaaggag

SEQ ID NO: 2848 - DNA, 26 bp, Homo sapiens
cgacagtttcgccattgaaaaggagc

SEQ ID NO: 2849 - DNA, 26 bp, Homo sapiens
gacagtttcgccattgaaaaggagca

SEQ ID NO: 2850 - DNA, 26 bp, Homo sapiens
acagtttcgccattgaaaaggagcag

SEQ ID NO: 2851 - DNA, 26 bp, Homo sapiens
cagtttcgccattgaaaaggagcagg

SEQ ID NO: 2852 - DNA, 26 bp, Homo sapiens
agtttcgccattgaaaaggagcaggc

SEQ ID NO: 2853 - DNA, 26 bp, Homo sapiens
gtttcgccattgaaaaggagcaggct

SEQ ID NO: 2854 - DNA, 26 bp, Homo sapiens
tttcgccattgaaaaggagcaggctg

SEQ ID NO: 2855 - DNA, 26 bp, Homo sapiens
ttcgccattgaaaaggagcaggctgc

SEQ ID NO: 2856 - DNA, 26 bp, Homo sapiens
tcgccattgaaaaggagcaggctgct

SEQ ID NO: 2857 - DNA, 26 bp, Homo sapiens
cgccattgaaaaggagcaggctgcta

SEQ ID NO: 2858 - DNA, 26 bp, Homo sapiens
gccattgaaaaggagcaggctgctat

SEQ ID NO: 2859 - DNA, 26 bp, Homo sapiens
ccattgaaaaggagcaggctgctatt

SEQ ID NO: 2860 - DNA, 26 bp, Homo sapiens
cattgaaaaggagcaggctgctattt

SEQ ID NO: 2861 - DNA, 26 bp, Homo sapiens
attgaaaaggagcaggctgctatttt

SEQ ID NO: 2862 - DNA, 26 bp, Homo sapiens
ttgaaaaggagcaggctgctattttg

SEQ ID NO: 2863 - DNA, 26 bp, Homo sapiens
tgaaaaggagcaggctgctattttgt

SEQ ID NO: 2864 - DNA, 26 bp, Homo sapiens
gaaaaggagcaggctgctattttgtc

SEQ ID NO: 2865 - DNA, 26 bp, Homo sapiens
aaaaggagcaggctgctattttgtca

SEQ ID NO: 2866 - DNA, 26 bp, Homo sapiens
aaaggagcaggctgctattttgtcac

SEQ ID NO: 2867 - DNA, 26 bp, Homo sapiens
aaggagcaggctgctattttgtcact

SEQ ID NO: 2868 - DNA, 26 bp, Homo sapiens
aggagcaggctgctattttgtcacta

SEQ ID NO: 2869 - DNA, 26 bp, Homo sapiens
ggagcaggctgctattttgtcactaa

SEQ ID NO: 2870 - DNA, 26 bp, Homo sapiens
gagcaggctgctattttgtcactaat

SEQ ID NO: 2871 - DNA, 26 bp, Homo sapiens
agcaggctgctattttgtcactaatt

SEQ ID NO: 2872 - DNA, 26 bp, Homo sapiens
gcaggctgctattttgtcactaatta

SEQ ID NO: 2873 - DNA, 26 bp, Homo sapiens
caggctgctattttgtcactaattac

SEQ ID NO: 2874 - DNA, 26 bp, Homo sapiens
aggctgctattttgtcactaattact

SEQ ID NO: 2875 - DNA, 26 bp, Homo sapiens
ggctgctattttgtcactaattactt

SEQ ID NO: 2876 - DNA, 26 bp, Homo sapiens
gctgctattttgtcactaattacttt

SEQ ID NO: 2877 - DNA, 26 bp, Homo sapiens
ctgctattttgtcactaattactttc

SEQ ID NO: 2878 - DNA, 26 bp, Homo sapiens
tgctattttgtcactaattactttca

SEQ ID NO: 2879 - DNA, 26 bp, Homo sapiens
gctattttgtcactaattactttcac

SEQ ID NO: 2880 - DNA, 26 bp, Homo sapiens
ctattttgtcactaattactttcaca

SEQ ID NO: 2881 - DNA, 26 bp, Homo sapiens
tattttgtcactaattactttcacaa

SEQ ID NO: 2882 - DNA, 26 bp, Homo sapiens
attttgtcactaattactttcacaat

SEQ ID NO: 2883 - DNA, 26 bp, Homo sapiens
ttttgtcactaattactttcacaatt

SEQ ID NO: 2884 - DNA, 26 bp, Homo sapiens
tttgtcactaattactttcacaattt

SEQ ID NO: 2885 - DNA, 26 bp, Homo sapiens
ttgtcactaattactttcacaatttg

SEQ ID NO: 2886 - DNA, 26 bp, Homo sapiens
tgtcactaattactttcacaatttgc

SEQ ID NO: 2887 - DNA, 26 bp, Homo sapiens
gtcactaattactttcacaatttgca

SEQ ID NO: 2888 - DNA, 26 bp, Homo sapiens
tcactaattactttcacaatttgcag

SEQ ID NO: 2889 - DNA, 26 bp, Homo sapiens
cactaattactttcacaatttgcagg

SEQ ID NO: 2890 - DNA, 26 bp, Homo sapiens
actaattactttcacaatttgcaggg

SEQ ID NO: 2891 - DNA, 26 bp, Homo sapiens
ctaattactttcacaatttgcagggg

SEQ ID NO: 2892 - DNA, 26 bp, Homo sapiens
taattactttcacaatttgcagggga

SEQ ID NO: 2893 - DNA, 26 bp, Homo sapiens
aattactttcacaatttgcaggggac

SEQ ID NO: 2894 - DNA, 26 bp, Homo sapiens
attactttcacaatttgcaggggaca

SEQ ID NO: 2895 - DNA, 26 bp, Homo sapiens
ttactttcacaatttgcaggggacat

SEQ ID NO: 2896 - DNA, 26 bp, Homo sapiens
tactttcacaatttgcaggggacata

SEQ ID NO: 2897 - DNA, 26 bp, Homo sapiens
actttcacaatttgcaggggacatat

SEQ ID NO: 2898 - DNA, 26 bp, Homo sapiens
ctttcacaatttgcaggggacatatg

SEQ ID NO: 2899 - DNA, 26 bp, Homo sapiens
tttcacaatttgcaggggacatatgg

SEQ ID NO: 2900 - DNA, 26 bp, Homo sapiens
ttcacaatttgcaggggacatatggc

SEQ ID NO: 2901 - DNA, 26 bp, Homo sapiens
tcacaatttgcaggggacatatggca

SEQ ID NO: 2902 - DNA, 26 bp, Homo sapiens
cacaatttgcaggggacatatggcac

SEQ ID NO: 2903 - DNA, 26 bp, Homo sapiens
acaatttgcaggggacatatggcacc

SEQ ID NO: 2904 - DNA, 26 bp, Homo sapiens
caatttgcaggggacatatggcacca

SEQ ID NO: 2905 - DNA, 26 bp, Homo sapiens
aatttgcaggggacatatggcaccag

SEQ ID NO: 2906 - DNA, 26 bp, Homo sapiens
atttgcaggggacatatggcaccagg

SEQ ID NO: 2907 - DNA, 26 bp, Homo sapiens
tttgcaggggacatatggcaccagga

SEQ ID NO: 2908 - DNA, 26 bp, Homo sapiens
ttgcaggggacatatggcaccaggac

SEQ ID NO: 2909 - DNA, 26 bp, Homo sapiens
tgcaggggacatatggcaccaggact

SEQ ID NO: 2910 - DNA, 26 bp, Homo sapiens
gcaggggacatatggcaccaggactg

SEQ ID NO: 2911 - DNA, 26 bp, Homo sapiens
caggggacatatggcaccaggactgc

SEQ ID NO: 2912 - DNA, 26 bp, Homo sapiens
aggggacatatggcaccaggactgca

SEQ ID NO: 2913 - DNA, 26 bp, Homo sapiens
ggggacatatggcaccaggactgcaa

SEQ ID NO: 2914 - DNA, 26 bp, Homo sapiens
gggacatatggcaccaggactgcaat

SEQ ID NO: 2915 - DNA, 26 bp, Homo sapiens
ggacatatggcaccaggactgcaata

SEQ ID NO: 2916 - DNA, 26 bp, Homo sapiens
gacatatggcaccaggactgcaatag

SEQ ID NO: 2917 - DNA, 26 bp, Homo sapiens
acatatggcaccaggactgcaataga

SEQ ID NO: 2918 - DNA, 26 bp, Homo sapiens
catatggcaccaggactgcaatagaa

SEQ ID NO: 2919 - DNA, 26 bp, Homo sapiens
atatggcaccaggactgcaatagaac

SEQ ID NO: 2920 - DNA, 26 bp, Homo sapiens
tatggcaccaggactgcaatagaact

SEQ ID NO: 2921 - DNA, 26 bp, Homo sapiens
atggcaccaggactgcaatagaactg

SEQ ID NO: 2922 - DNA, 26 bp, Homo sapiens
tggcaccaggactgcaatagaactga

SEQ ID NO: 2923 - DNA, 26 bp, Homo sapiens
ggcaccaggactgcaatagaactgaa

SEQ ID NO: 2924 - DNA, 26 bp, Homo sapiens
gcaccaggactgcaatagaactgaaa

SEQ ID NO: 2925 - DNA, 26 bp, Homo sapiens
caccaggactgcaatagaactgaaat

SEQ ID NO: 2926 - DNA, 26 bp, Homo sapiens
accaggactgcaatagaactgaaatg

SEQ ID NO: 2927 - DNA, 26 bp, Homo sapiens
ccaggactgcaatagaactgaaatga

SEQ ID NO: 2928 - DNA, 26 bp, Homo sapiens
caggactgcaatagaactgaaatgat

SEQ ID NO: 2929 - DNA, 26 bp, Homo sapiens
aggactgcaatagaactgaaatgatt

SEQ ID NO: 2930 - DNA, 26 bp, Homo sapiens
ggactgcaatagaactgaaatgattg

SEQ ID NO: 2931 - DNA, 26 bp, Homo sapiens
gactgcaatagaactgaaatgattgg

SEQ ID NO: 2932 - DNA, 26 bp, Homo sapiens
actgcaatagaactgaaatgattggt

SEQ ID NO: 2933 - DNA, 26 bp, Homo sapiens
ctgcaatagaactgaaatgattggtg

SEQ ID NO: 2934 - DNA, 26 bp, Homo sapiens
tgcaatagaactgaaatgattggtgg

SEQ ID NO: 2935 - DNA, 26 bp, Homo sapiens
gcaatagaactgaaatgattggtgga

SEQ ID NO: 2936 - DNA, 26 bp, Homo sapiens
caatagaactgaaatgattggtggag

SEQ ID NO: 2937 - DNA, 26 bp, Homo sapiens
aatagaactgaaatgattggtggaga

SEQ ID NO: 2938 - DNA, 26 bp, Homo sapiens
atagaactgaaatgattggtggagaa

SEQ ID NO: 2939 - DNA, 26 bp, Homo sapiens
tagaactgaaatgattggtggagaaa

SEQ ID NO: 2940 - DNA, 26 bp, Homo sapiens
agaactgaaatgattggtggagaaaa

SEQ ID NO: 2941 - DNA, 26 bp, Homo sapiens
gaactgaaatgattggtggagaaaac

SEQ ID NO: 2942 - DNA, 26 bp, Homo sapiens
aactgaaatgattggtggagaaaact

SEQ ID NO: 2943 - DNA, 26 bp, Homo sapiens
actgaaatgattggtggagaaaactt

SEQ ID NO: 2944 - DNA, 26 bp, Homo sapiens
ctgaaatgattggtggagaaaacttt

SEQ ID NO: 2945 - DNA, 26 bp, Homo sapiens
tgaaatgattggtggagaaaactttg

SEQ ID NO: 2946 - DNA, 26 bp, Homo sapiens
gaaatgattggtggagaaaactttga

SEQ ID NO: 2947 - DNA, 26 bp, Homo sapiens
aaatgattggtggagaaaactttgaa

SEQ ID NO: 2948 - DNA, 26 bp, Homo sapiens
aatgattggtggagaaaactttgaag

SEQ ID NO: 2949 - DNA, 26 bp, Homo sapiens
atgattggtggagaaaactttgaagg

SEQ ID NO: 2950 - DNA, 26 bp, Homo sapiens
tgattggtggagaaaactttgaaggt

SEQ ID NO: 2951 - DNA, 26 bp, Homo sapiens
gattggtggagaaaactttgaaggta

SEQ ID NO: 2952 - DNA, 26 bp, Homo sapiens
attggtggagaaaactttgaaggtaa

SEQ ID NO: 2953 - DNA, 26 bp, Homo sapiens
ttggtggagaaaactttgaaggtaaa

SEQ ID NO: 2954 - DNA, 26 bp, Homo sapiens
tggtggagaaaactttgaaggtaaag

SEQ ID NO: 2955 - DNA, 26 bp, Homo sapiens
ggtggagaaaactttgaaggtaaaga

SEQ ID NO: 2956 - DNA, 26 bp, Homo sapiens
gtggagaaaactttgaaggtaaagaa

SEQ ID NO: 2957 - DNA, 26 bp, Homo sapiens
tggagaaaactttgaaggtaaagaaa

SEQ ID NO: 2958 - DNA, 26 bp, Homo sapiens
ggagaaaactttgaaggtaaagaaat

SEQ ID NO: 2959 - DNA, 26 bp, Homo sapiens
gagaaaactttgaaggtaaagaaatg

SEQ ID NO: 2960 - DNA, 26 bp, Homo sapiens
agaaaactttgaaggtaaagaaatgt

SEQ ID NO: 2961 - DNA, 26 bp, Homo sapiens
gaaaactttgaaggtaaagaaatgtt

SEQ ID NO: 2962 - DNA, 26 bp, Homo sapiens
aaaactttgaaggtaaagaaatgttc

SEQ ID NO: 2963 - DNA, 26 bp, Homo sapiens
aaactttgaaggtaaagaaatgttcc

SEQ ID NO: 2964 - DNA, 26 bp, Homo sapiens
aactttgaaggtaaagaaatgttcca

SEQ ID NO: 2965 - DNA, 26 bp, Homo sapiens
actttgaaggtaaagaaatgttccac

SEQ ID NO: 2966 - DNA, 26 bp, Homo sapiens
ctttgaaggtaaagaaatgttccaca

SEQ ID NO: 2967 - DNA, 26 bp, Homo sapiens
tttgaaggtaaagaaatgttccacaa

SEQ ID NO: 2968 - DNA, 26 bp, Homo sapiens
ttgaaggtaaagaaatgttccacaat

SEQ ID NO: 2969 - DNA, 26 bp, Homo sapiens
tgaaggtaaagaaatgttccacaatg

SEQ ID NO: 2970 - DNA, 26 bp, Homo sapiens
gaaggtaaagaaatgttccacaatgc

SEQ ID NO: 2971 - DNA, 26 bp, Homo sapiens
aaggtaaagaaatgttccacaatgcc

SEQ ID NO: 2972 - DNA, 26 bp, Homo sapiens
aggtaaagaaatgttccacaatgcca

SEQ ID NO: 2973 - DNA, 26 bp, Homo sapiens
ggtaaagaaatgttccacaatgccaa

SEQ ID NO: 2974 - DNA, 26 bp, Homo sapiens
gtaaagaaatgttccacaatgccaat

SEQ ID NO: 2975 - DNA, 26 bp, Homo sapiens
taaagaaatgttccacaatgccaatt

SEQ ID NO: 2976 - DNA, 26 bp, Homo sapiens
aaagaaatgttccacaatgccaatta

SEQ ID NO: 2977 - DNA, 26 bp, Homo sapiens
aagaaatgttccacaatgccaattag

SEQ ID NO: 2978 - DNA, 26 bp, Homo sapiens
agaaatgttccacaatgccaattagt

SEQ ID NO: 2979 - DNA, 26 bp, Homo sapiens
gaaatgttccacaatgccaattagtt

SEQ ID NO: 2980 - DNA, 26 bp, Homo sapiens
aaatgttccacaatgccaattagttt

SEQ ID NO: 2981 - DNA, 26 bp, Homo sapiens
aatgttccacaatgccaattagtttg

SEQ ID NO: 2982 - DNA, 26 bp, Homo sapiens
atgttccacaatgccaattagtttga

SEQ ID NO: 2983 - DNA, 26 bp, Homo sapiens
tgttccacaatgccaattagtttgag

SEQ ID NO: 2984 - DNA, 26 bp, Homo sapiens
gttccacaatgccaattagtttgagc

SEQ ID NO: 2985 - DNA, 26 bp, Homo sapiens
ttccacaatgccaattagtttgagcc

SEQ ID NO: 2986 - DNA, 26 bp, Homo sapiens
tccacaatgccaattagtttgagcca

SEQ ID NO: 2987 - DNA, 26 bp, Homo sapiens
ccacaatgccaattagtttgagccac

SEQ ID NO: 2988 - DNA, 26 bp, Homo sapiens
cacaatgccaattagtttgagccaca

SEQ ID NO: 2989 - DNA, 26 bp, Homo sapiens
acaatgccaattagtttgagccacag

SEQ ID NO: 2990 - DNA, 26 bp, Homo sapiens
caatgccaattagtttgagccacagt

SEQ ID NO: 2991 - DNA, 26 bp, Homo sapiens
aatgccaattagtttgagccacagtg

SEQ ID NO: 2992 - DNA, 26 bp, Homo sapiens
atgccaattagtttgagccacagtga

SEQ ID NO: 2993 - DNA, 26 bp, Homo sapiens
tgccaattagtttgagccacagtgaa

SEQ ID NO: 2994 - DNA, 26 bp, Homo sapiens
gccaattagtttgagccacagtgaat

SEQ ID NO: 2995 - DNA, 26 bp, Homo sapiens
ccaattagtttgagccacagtgaata

SEQ ID NO: 2996 - DNA, 26 bp, Homo sapiens
caattagtttgagccacagtgaatat

SEQ ID NO: 2997 - DNA, 26 bp, Homo sapiens
aattagtttgagccacagtgaatata

SEQ ID NO: 2998 - DNA, 26 bp, Homo sapiens
attagtttgagccacagtgaatataa

SEQ ID NO: 2999 - DNA, 26 bp, Homo sapiens
ttagtttgagccacagtgaatataac

SEQ ID NO: 3000 - DNA, 26 bp, Homo sapiens
tagtttgagccacagtgaatataact

SEQ ID NO: 3001 - DNA, 26 bp, Homo sapiens
agtttgagccacagtgaatataactc

SEQ ID NO: 3002 - DNA, 26 bp, Homo sapiens
gtttgagccacagtgaatataactca

SEQ ID NO: 3003 - DNA, 26 bp, Homo sapiens
tttgagccacagtgaatataactcag

SEQ ID NO: 3004 - DNA, 26 bp, Homo sapiens
ttgagccacagtgaatataactcagt

SEQ ID NO: 3005 - DNA, 26 bp, Homo sapiens
tgagccacagtgaatataactcagtt

SEQ ID NO: 3006 - DNA, 26 bp, Homo sapiens
gagccacagtgaatataactcagtta

SEQ ID NO: 3007 - DNA, 26 bp, Homo sapiens
agccacagtgaatataactcagttat

SEQ ID NO: 3008 - DNA, 26 bp, Homo sapiens
gccacagtgaatataactcagttatt

SEQ ID NO: 3009 - DNA, 26 bp, Homo sapiens
ccacagtgaatataactcagttatta

SEQ ID NO: 3010 - DNA, 26 bp, Homo sapiens
cacagtgaatataactcagttattat

SEQ ID NO: 3011 - DNA, 26 bp, Homo sapiens
acagtgaatataactcagttattata

SEQ ID NO: 3012 - DNA, 26 bp, Homo sapiens
cagtgaatataactcagttattataa

SEQ ID NO: 3013 - DNA, 26 bp, Homo sapiens
agtgaatataactcagttattataat

SEQ ID NO: 3014 - DNA, 26 bp, Homo sapiens
gtgaatataactcagttattataata

SEQ ID NO: 3015 - DNA, 26 bp, Homo sapiens
tgaatataactcagttattataatag

SEQ ID NO: 3016 - DNA, 26 bp, Homo sapiens
gaatataactcagttattataatagg

SEQ ID NO: 3017 - DNA, 26 bp, Homo sapiens
aatataactcagttattataataggc

SEQ ID NO: 3018 - DNA, 26 bp, Homo sapiens
atataactcagttattataataggct

SEQ ID NO: 3019 - DNA, 26 bp, Homo sapiens
tataactcagttattataataggctg

SEQ ID NO: 3020 - DNA, 26 bp, Homo sapiens
ataactcagttattataataggctgg

SEQ ID NO: 3021 - DNA, 26 bp, Homo sapiens
taactcagttattataataggctgga

SEQ ID NO: 3022 - DNA, 26 bp, Homo sapiens
aactcagttattataataggctggaa

SEQ ID NO: 3023 - DNA, 26 bp, Homo sapiens
actcagttattataataggctggaaa

SEQ ID NO: 3024 - DNA, 26 bp, Homo sapiens
ctcagttattataataggctggaaaa

SEQ ID NO: 3025 - DNA, 26 bp, Homo sapiens
tcagttattataataggctggaaaag

SEQ ID NO: 3026 - DNA, 26 bp, Homo sapiens
cagttattataataggctggaaaagt

SEQ ID NO: 3027 - DNA, 26 bp, Homo sapiens
agttattataataggctggaaaagtt

SEQ ID NO: 3028 - DNA, 26 bp, Homo sapiens
gttattataataggctggaaaagtta

SEQ ID NO: 3029 - DNA, 26 bp, Homo sapiens
ttattataataggctggaaaagttaa

SEQ ID NO: 3030 - DNA, 26 bp, Homo sapiens
tattataataggctggaaaagttaaa

SEQ ID NO: 3031 - DNA, 26 bp, Homo sapiens
attataataggctggaaaagttaaaa

SEQ ID NO: 3032 - DNA, 26 bp, Homo sapiens
ttataataggctggaaaagttaaaag

SEQ ID NO: 3033 - DNA, 26 bp, Homo sapiens
tataataggctggaaaagttaaaagc

SEQ ID NO: 3034 - DNA, 26 bp, Homo sapiens
ataataggctggaaaagttaaaagct

SEQ ID NO: 3035 - DNA, 26 bp, Homo sapiens
taataggctggaaaagttaaaagctt

SEQ ID NO: 3036 - DNA, 26 bp, Homo sapiens
aataggctggaaaagttaaaagcttc

SEQ ID NO: 3037 - DNA, 26 bp, Homo sapiens
ataggctggaaaagttaaaagcttct

SEQ ID NO: 3038 - DNA, 26 bp, Homo sapiens
taggctggaaaagttaaaagcttctt

SEQ ID NO: 3039 - DNA, 26 bp, Homo sapiens
aggctggaaaagttaaaagcttcttt

SEQ ID NO: 3040 - DNA, 26 bp, Homo sapiens
ggctggaaaagttaaaagcttctttt

SEQ ID NO: 3041 - DNA, 26 bp, Homo sapiens
gctggaaaagttaaaagcttctttta

SEQ ID NO: 3042 - DNA, 26 bp, Homo sapiens
ctggaaaagttaaaagcttcttttat

SEQ ID NO: 3043 - DNA, 26 bp, Homo sapiens
tggaaaagttaaaagcttcttttata

SEQ ID NO: 3044 - DNA, 26 bp, Homo sapiens
ggaaaagttaaaagcttcttttatat

SEQ ID NO: 3045 - DNA, 26 bp, Homo sapiens
gaaaagttaaaagcttcttttatatt

SEQ ID NO: 3046 - DNA, 26 bp, Homo sapiens
aaaagttaaaagcttcttttatatta

SEQ ID NO: 3047 - DNA, 26 bp, Homo sapiens
aaagttaaaagcttcttttatattaa

SEQ ID NO: 3048 - DNA, 26 bp, Homo sapiens
aagttaaaagcttcttttatattaaa

SEQ ID NO: 3049 - DNA, 26 bp, Homo sapiens
agttaaaagcttcttttatattaaaa

SEQ ID NO: 3050 - DNA, 26 bp, Homo sapiens
gttaaaagcttcttttatattaaaag

SEQ ID NO: 3051 - DNA, 26 bp, Homo sapiens
ttaaaagcttcttttatattaaaaga

SEQ ID NO: 3052 - DNA, 26 bp, Homo sapiens
taaaagcttcttttatattaaaagat

SEQ ID NO: 3053 - DNA, 26 bp, Homo sapiens
aaaagcttcttttatattaaaagata

SEQ ID NO: 3054 - DNA, 26 bp, Homo sapiens
aaagcttcttttatattaaaagatac

SEQ ID NO: 3055 - DNA, 26 bp, Homo sapiens
aagcttcttttatattaaaagataca

SEQ ID NO: 3056 - DNA, 26 bp, Homo sapiens
agcttcttttatattaaaagatacaa

SEQ ID NO: 3057 - DNA, 26 bp, Homo sapiens
gcttcttttatattaaaagatacaaa

SEQ ID NO: 3058 - DNA, 26 bp, Homo sapiens
cttcttttatattaaaagatacaaat

SEQ ID NO: 3059 - DNA, 26 bp, Homo sapiens
ttcttttatattaaaagatacaaatt

SEQ ID NO: 3060 - DNA, 26 bp, Homo sapiens
tcttttatattaaaagatacaaatta

SEQ ID NO: 3061 - DNA, 26 bp, Homo sapiens
cttttatattaaaagatacaaattat

SEQ ID NO: 3062 - DNA, 26 bp, Homo sapiens
ttttatattaaaagatacaaattatc

SEQ ID NO: 3063 - DNA, 26 bp, Homo sapiens
tttatattaaaagatacaaattatcg

SEQ ID NO: 3064 - DNA, 26 bp, Homo sapiens
ttatattaaaagatacaaattatcgc

SEQ ID NO: 3065 - DNA, 26 bp, Homo sapiens
tatattaaaagatacaaattatcgcc

SEQ ID NO: 3066 - DNA, 26 bp, Homo sapiens
atattaaaagatacaaattatcgcct

SEQ ID NO: 3067 - DNA, 26 bp, Homo sapiens
tattaaaagatacaaattatcgcctt

SEQ ID NO: 3068 - DNA, 26 bp, Homo sapiens
attaaaagatacaaattatcgccttt

SEQ ID NO: 3069 - DNA, 26 bp, Homo sapiens
ttaaaagatacaaattatcgcctttc

SEQ ID NO: 3070 - DNA, 26 bp, Homo sapiens
taaaagatacaaattatcgcctttct

SEQ ID NO: 3071 - DNA, 26 bp, Homo sapiens
aaaagatacaaattatcgcctttctg

SEQ ID NO: 3072 - DNA, 26 bp, Homo sapiens
aaagatacaaattatcgcctttctgc

SEQ ID NO: 3073 - DNA, 26 bp, Homo sapiens
aagatacaaattatcgcctttctgcc

SEQ ID NO: 3074 - DNA, 26 bp, Homo sapiens
agatacaaattatcgcctttctgcct

SEQ ID NO: 3075 - DNA, 26 bp, Homo sapiens
gatacaaattatcgcctttctgcctg

SEQ ID NO: 3076 - DNA, 26 bp, Homo sapiens
atacaaattatcgcctttctgcctgt

SEQ ID NO: 3077 - DNA, 26 bp, Homo sapiens
tacaaattatcgcctttctgcctgtc

SEQ ID NO: 3078 - DNA, 26 bp, Homo sapiens
acaaattatcgcctttctgcctgtcc

SEQ ID NO: 3079 - DNA, 26 bp, Homo sapiens
caaattatcgcctttctgcctgtcct

SEQ ID NO: 3080 - DNA, 26 bp, Homo sapiens
aaattatcgcctttctgcctgtccta

SEQ ID NO: 3081 - DNA, 26 bp, Homo sapiens
aattatcgcctttctgcctgtcctat

SEQ ID NO: 3082 - DNA, 26 bp, Homo sapiens
attatcgcctttctgcctgtcctatg

SEQ ID NO: 3083 - DNA, 26 bp, Homo sapiens
ttatcgcctttctgcctgtcctatgg

SEQ ID NO: 3084 - DNA, 26 bp, Homo sapiens
tatcgcctttctgcctgtcctatggt

SEQ ID NO: 3085 - DNA, 26 bp, Homo sapiens
atcgcctttctgcctgtcctatggta

SEQ ID NO: 3086 - DNA, 26 bp, Homo sapiens
tcgcctttctgcctgtcctatggtaa

SEQ ID NO: 3087 - DNA, 26 bp, Homo sapiens
cgcctttctgcctgtcctatggtaat

SEQ ID NO: 3088 - DNA, 26 bp, Homo sapiens
gcctttctgcctgtcctatggtaatc

SEQ ID NO: 3089 - DNA, 26 bp, Homo sapiens
cctttctgcctgtcctatggtaatca

SEQ ID NO: 3090 - DNA, 26 bp, Homo sapiens
ctttctgcctgtcctatggtaatcaa

SEQ ID NO: 3091 - DNA, 26 bp, Homo sapiens
tttctgcctgtcctatggtaatcaag

SEQ ID NO: 3092 - DNA, 26 bp, Homo sapiens
ttctgcctgtcctatggtaatcaagg

SEQ ID NO: 3093 - DNA, 26 bp, Homo sapiens
tctgcctgtcctatggtaatcaaggc

SEQ ID NO: 3094 - DNA, 26 bp, Homo sapiens
ctgcctgtcctatggtaatcaaggct

SEQ ID NO: 3095 - DNA, 26 bp, Homo sapiens
tgcctgtcctatggtaatcaaggctg

SEQ ID NO: 3096 - DNA, 26 bp, Homo sapiens
gcctgtcctatggtaatcaaggctga

SEQ ID NO: 3097 - DNA, 26 bp, Homo sapiens
cctgtcctatggtaatcaaggctgac

SEQ ID NO: 3098 - DNA, 26 bp, Homo sapiens
ctgtcctatggtaatcaaggctgaca

SEQ ID NO: 3099 - DNA, 26 bp, Homo sapiens
tgtcctatggtaatcaaggctgacaa

SEQ ID NO: 3100 - DNA, 26 bp, Homo sapiens
gtcctatggtaatcaaggctgacaat

SEQ ID NO: 3101 - DNA, 26 bp, Homo sapiens
tcctatggtaatcaaggctgacaata

SEQ ID NO: 3102 - DNA, 26 bp, Homo sapiens
cctatggtaatcaaggctgacaatat

SEQ ID NO: 3103 - DNA, 26 bp, Homo sapiens
ctatggtaatcaaggctgacaatata

SEQ ID NO: 3104 - DNA, 26 bp, Homo sapiens
tatggtaatcaaggctgacaatataa

SEQ ID NO: 3105 - DNA, 26 bp, Homo sapiens
atggtaatcaaggctgacaatataaa

SEQ ID NO: 3106 - DNA, 26 bp, Homo sapiens
tggtaatcaaggctgacaatataaat

SEQ ID NO: 3107 - DNA, 26 bp, Homo sapiens
ggtaatcaaggctgacaatataaatt

SEQ ID NO: 3108 - DNA, 26 bp, Homo sapiens
gtaatcaaggctgacaatataaattc

SEQ ID NO: 3109 - DNA, 26 bp, Homo sapiens
taatcaaggctgacaatataaattct

SEQ ID NO: 3110 - DNA, 26 bp, Homo sapiens
aatcaaggctgacaatataaattctc

SEQ ID NO: 3111 - DNA, 26 bp, Homo sapiens
atcaaggctgacaatataaattctcc

SEQ ID NO: 3112 - DNA, 26 bp, Homo sapiens
tcaaggctgacaatataaattctccg

SEQ ID NO: 3113 - DNA, 26 bp, Homo sapiens
caaggctgacaatataaattctccgc

SEQ ID NO: 3114 - DNA, 26 bp, Homo sapiens
aaggctgacaatataaattctccgct

SEQ ID NO: 3115 - DNA, 26 bp, Homo sapiens
aggctgacaatataaattctccgcta

SEQ ID NO: 3116 - DNA, 26 bp, Homo sapiens
ggctgacaatataaattctccgctag

SEQ ID NO: 3117 - DNA, 26 bp, Homo sapiens
gctgacaatataaattctccgctagt

SEQ ID NO: 3118 - DNA, 26 bp, Homo sapiens
ctgacaatataaattctccgctagtg

SEQ ID NO: 3119 - DNA, 26 bp, Homo sapiens
tgacaatataaattctccgctagtgt

SEQ ID NO: 3120 - DNA, 26 bp, Homo sapiens
gacaatataaattctccgctagtgta

SEQ ID NO: 3121 - DNA, 26 bp, Homo sapiens
acaatataaattctccgctagtgtac

SEQ ID NO: 3122 - DNA, 26 bp, Homo sapiens
caatataaattctccgctagtgtaca

SEQ ID NO: 3123 - DNA, 26 bp, Homo sapiens
aatataaattctccgctagtgtacat

SEQ ID NO: 3124 - DNA, 26 bp, Homo sapiens
atataaattctccgctagtgtacatt

SEQ ID NO: 3125 - DNA, 26 bp, Homo sapiens
tataaattctccgctagtgtacattt

SEQ ID NO: 3126 - DNA, 26 bp, Homo sapiens
ataaattctccgctagtgtacattta

SEQ ID NO: 3127 - DNA, 26 bp, Homo sapiens
taaattctccgctagtgtacatttag

SEQ ID NO: 3128 - DNA, 26 bp, Homo sapiens
aaattctccgctagtgtacatttaga

SEQ ID NO: 3129 - DNA, 26 bp, Homo sapiens
aattctccgctagtgtacatttagaa

SEQ ID NO: 3130 - DNA, 26 bp, Homo sapiens
attctccgctagtgtacatttagaaa

SEQ ID NO: 3131 - DNA, 26 bp, Homo sapiens
ttctccgctagtgtacatttagaaat

SEQ ID NO: 3132 - DNA, 26 bp, Homo sapiens
tctccgctagtgtacatttagaaatg

SEQ ID NO: 3133 - DNA, 26 bp, Homo sapiens
ctccgctagtgtacatttagaaatgg

SEQ ID NO: 3134 - DNA, 26 bp, Homo sapiens
tccgctagtgtacatttagaaatggg

SEQ ID NO: 3135 - DNA, 26 bp, Homo sapiens
ccgctagtgtacatttagaaatgggt

SEQ ID NO: 3136 - DNA, 26 bp, Homo sapiens
cgctagtgtacatttagaaatgggtt

SEQ ID NO: 3137 - DNA, 26 bp, Homo sapiens
gctagtgtacatttagaaatgggttc

SEQ ID NO: 3138 - DNA, 26 bp, Homo sapiens
ctagtgtacatttagaaatgggttcc

SEQ ID NO: 3139 - DNA, 26 bp, Homo sapiens
tagtgtacatttagaaatgggttcct

SEQ ID NO: 3140 - DNA, 26 bp, Homo sapiens
agtgtacatttagaaatgggttccta

SEQ ID NO: 3141 - DNA, 26 bp, Homo sapiens
gtgtacatttagaaatgggttcctaa

SEQ ID NO: 3142 - DNA, 26 bp, Homo sapiens
tgtacatttagaaatgggttcctaaa

SEQ ID NO: 3143 - DNA, 26 bp, Homo sapiens
gtacatttagaaatgggttcctaaag

SEQ ID NO: 3144 - DNA, 26 bp, Homo sapiens
tacatttagaaatgggttcctaaagc

SEQ ID NO: 3145 - DNA, 26 bp, Homo sapiens
acatttagaaatgggttcctaaagct

SEQ ID NO: 3146 - DNA, 26 bp, Homo sapiens
catttagaaatgggttcctaaagctt

SEQ ID NO: 3147 - DNA, 26 bp, Homo sapiens
atttagaaatgggttcctaaagcttg

SEQ ID NO: 3148 - DNA, 26 bp, Homo sapiens
tttagaaatgggttcctaaagcttga

SEQ ID NO: 3149 - DNA, 26 bp, Homo sapiens
ttagaaatgggttcctaaagcttgag

SEQ ID NO: 3150 - DNA, 26 bp, Homo sapiens
tagaaatgggttcctaaagcttgaga

SEQ ID NO: 3151 - DNA, 26 bp, Homo sapiens
agaaatgggttcctaaagcttgagat

SEQ ID NO: 3152 - DNA, 26 bp, Homo sapiens
gaaatgggttcctaaagcttgagata

SEQ ID NO: 3153 - DNA, 26 bp, Homo sapiens
aaatgggttcctaaagcttgagatat

SEQ ID NO: 3154 - DNA, 26 bp, Homo sapiens
aatgggttcctaaagcttgagatata

SEQ ID NO: 3155 - DNA, 26 bp, Homo sapiens
atgggttcctaaagcttgagatataa

SEQ ID NO: 3156 - DNA, 26 bp, Homo sapiens
tgggttcctaaagcttgagatataag

SEQ ID NO: 3157 - DNA, 26 bp, Homo sapiens
gggttcctaaagcttgagatataaga

SEQ ID NO: 3158 - DNA, 26 bp, Homo sapiens
ggttcctaaagcttgagatataagag

SEQ ID NO: 3159 - DNA, 26 bp, Homo sapiens
gttcctaaagcttgagatataagaga

SEQ ID NO: 3160 - DNA, 26 bp, Homo sapiens
ttcctaaagcttgagatataagagac

SEQ ID NO: 3161 - DNA, 26 bp, Homo sapiens
tcctaaagcttgagatataagagact

SEQ ID NO: 3162 - DNA, 26 bp, Homo sapiens
cctaaagcttgagatataagagactg

SEQ ID NO: 3163 - DNA, 26 bp, Homo sapiens
ctaaagcttgagatataagagactgc

SEQ ID NO: 3164 - DNA, 26 bp, Homo sapiens
taaagcttgagatataagagactgca

SEQ ID NO: 3165 - DNA, 26 bp, Homo sapiens
aaagcttgagatataagagactgcag

SEQ ID NO: 3166 - DNA, 26 bp, Homo sapiens
aagcttgagatataagagactgcagg

SEQ ID NO: 3167 - DNA, 26 bp, Homo sapiens
agcttgagatataagagactgcaggg

SEQ ID NO: 3168 - DNA, 26 bp, Homo sapiens
gcttgagatataagagactgcaggga

SEQ ID NO: 3169 - DNA, 26 bp, Homo sapiens
cttgagatataagagactgcagggag

SEQ ID NO: 3170 - DNA, 26 bp, Homo sapiens
ttgagatataagagactgcagggagg

SEQ ID NO: 3171 - DNA, 26 bp, Homo sapiens
tgagatataagagactgcagggaggt

SEQ ID NO: 3172 - DNA, 26 bp, Homo sapiens
gagatataagagactgcagggaggtg

SEQ ID NO: 3173 - DNA, 26 bp, Homo sapiens
agatataagagactgcagggaggtgg

SEQ ID NO: 3174 - DNA, 26 bp, Homo sapiens
gatataagagactgcagggaggtggt

SEQ ID NO: 3175 - DNA, 26 bp, Homo sapiens
atataagagactgcagggaggtggtt

SEQ ID NO: 3176 - DNA, 26 bp, Homo sapiens
tataagagactgcagggaggtggtta

SEQ ID NO: 3177 - DNA, 26 bp, Homo sapiens
ataagagactgcagggaggtggttag

SEQ ID NO: 3178 - DNA, 26 bp, Homo sapiens
taagagactgcagggaggtggttagg

SEQ ID NO: 3179 - DNA, 26 bp, Homo sapiens
aagagactgcagggaggtggttaggc

SEQ ID NO: 3180 - DNA, 26 bp, Homo sapiens
agagactgcagggaggtggttaggcc

SEQ ID NO: 3181 - DNA, 26 bp, Homo sapiens
gagactgcagggaggtggttaggcct

SEQ ID NO: 3182 - DNA, 26 bp, Homo sapiens
agactgcagggaggtggttaggcctt

SEQ ID NO: 3183 - DNA, 26 bp, Homo sapiens
gactgcagggaggtggttaggccttt

SEQ ID NO: 3184 - DNA, 26 bp, Homo sapiens
actgcagggaggtggttaggccttta

SEQ ID NO: 3185 - DNA, 26 bp, Homo sapiens
ctgcagggaggtggttaggcctttac

SEQ ID NO: 3186 - DNA, 26 bp, Homo sapiens
tgcagggaggtggttaggcctttacc

SEQ ID NO: 3187 - DNA, 26 bp, Homo sapiens
gcagggaggtggttaggcctttacct

SEQ ID NO: 3188 - DNA, 26 bp, Homo sapiens
cagggaggtggttaggcctttaccta

SEQ ID NO: 3189 - DNA, 26 bp, Homo sapiens
agggaggtggttaggcctttacctaa

SEQ ID NO: 3190 - DNA, 26 bp, Homo sapiens
gggaggtggttaggcctttacctaac

SEQ ID NO: 3191 - DNA, 26 bp, Homo sapiens
ggaggtggttaggcctttacctaaca

SEQ ID NO: 3192 - DNA, 26 bp, Homo sapiens
gaggtggttaggcctttacctaacag

SEQ ID NO: 3193 - DNA, 26 bp, Homo sapiens
aggtggttaggcctttacctaacagc

SEQ ID NO: 3194 - DNA, 26 bp, Homo sapiens
ggtggttaggcctttacctaacagct

SEQ ID NO: 3195 - DNA, 26 bp, Homo sapiens
gtggttaggcctttacctaacagctc

SEQ ID NO: 3196 - DNA, 26 bp, Homo sapiens
tggttaggcctttacctaacagctct

SEQ ID NO: 3197 - DNA, 26 bp, Homo sapiens
ggttaggcctttacctaacagctctg

SEQ ID NO: 3198 - DNA, 26 bp, Homo sapiens
gttaggcctttacctaacagctctga

SEQ ID NO: 3199 - DNA, 26 bp, Homo sapiens
ttaggcctttacctaacagctctgat

SEQ ID NO: 3200 - DNA, 26 bp, Homo sapiens
taggcctttacctaacagctctgatc

SEQ ID NO: 3201 - DNA, 26 bp, Homo sapiens
aggcctttacctaacagctctgatct

SEQ ID NO: 3202 - DNA, 26 bp, Homo sapiens
ggcctttacctaacagctctgatctg

SEQ ID NO: 3203 - DNA, 26 bp, Homo sapiens
gcctttacctaacagctctgatctgg

SEQ ID NO: 3204 - DNA, 26 bp, Homo sapiens
cctttacctaacagctctgatctgga

SEQ ID NO: 3205 - DNA, 26 bp, Homo sapiens
ctttacctaacagctctgatctggac

SEQ ID NO: 3206 - DNA, 26 bp, Homo sapiens
tttacctaacagctctgatctggact

SEQ ID NO: 3207 - DNA, 26 bp, Homo sapiens
ttacctaacagctctgatctggactg

SEQ ID NO: 3208 - DNA, 26 bp, Homo sapiens
tacctaacagctctgatctggactga

SEQ ID NO: 3209 - DNA, 26 bp, Homo sapiens
acctaacagctctgatctggactgaa

SEQ ID NO: 3210 - DNA, 26 bp, Homo sapiens
cctaacagctctgatctggactgaac

SEQ ID NO: 3211 - DNA, 26 bp, Homo sapiens
ctaacagctctgatctggactgaaca

SEQ ID NO: 3212 - DNA, 26 bp, Homo sapiens
taacagctctgatctggactgaacaa

SEQ ID NO: 3213 - DNA, 26 bp, Homo sapiens
aacagctctgatctggactgaacaaa

SEQ ID NO: 3214 - DNA, 26 bp, Homo sapiens
acagctctgatctggactgaacaaag

SEQ ID NO: 3215 - DNA, 26 bp, Homo sapiens
cagctctgatctggactgaacaaagc

SEQ ID NO: 3216 - DNA, 26 bp, Homo sapiens
agctctgatctggactgaacaaagct

SEQ ID NO: 3217 - DNA, 26 bp, Homo sapiens
gctctgatctggactgaacaaagctg

SEQ ID NO: 3218 - DNA, 26 bp, Homo sapiens
ctctgatctggactgaacaaagctgc

SEQ ID NO: 3219 - DNA, 26 bp, Homo sapiens
tctgatctggactgaacaaagctgct

SEQ ID NO: 3220 - DNA, 26 bp, Homo sapiens
ctgatctggactgaacaaagctgcta

SEQ ID NO: 3221 - DNA, 26 bp, Homo sapiens
tgatctggactgaacaaagctgctaa

SEQ ID NO: 3222 - DNA, 26 bp, Homo sapiens
gatctggactgaacaaagctgctaag

SEQ ID NO: 3223 - DNA, 26 bp, Homo sapiens
atctggactgaacaaagctgctaagc

SEQ ID NO: 3224 - DNA, 26 bp, Homo sapiens
tctggactgaacaaagctgctaagct

SEQ ID NO: 3225 - DNA, 26 bp, Homo sapiens
ctggactgaacaaagctgctaagcta

SEQ ID NO: 3226 - DNA, 26 bp, Homo sapiens
tggactgaacaaagctgctaagctag

SEQ ID NO: 3227 - DNA, 26 bp, Homo sapiens
ggactgaacaaagctgctaagctagc

SEQ ID NO: 3228 - DNA, 26 bp, Homo sapiens
gactgaacaaagctgctaagctagca

SEQ ID NO: 3229 - DNA, 26 bp, Homo sapiens
actgaacaaagctgctaagctagcac

SEQ ID NO: 3230 - DNA, 26 bp, Homo sapiens
ctgaacaaagctgctaagctagcact

SEQ ID NO: 3231 - DNA, 26 bp, Homo sapiens
tgaacaaagctgctaagctagcactt

SEQ ID NO: 3232 - DNA, 26 bp, Homo sapiens
gaacaaagctgctaagctagcacttg

SEQ ID NO: 3233 - DNA, 26 bp, Homo sapiens
aacaaagctgctaagctagcacttga

SEQ ID NO: 3234 - DNA, 26 bp, Homo sapiens
acaaagctgctaagctagcacttgag

SEQ ID NO: 3235 - DNA, 26 bp, Homo sapiens
caaagctgctaagctagcacttgagt

SEQ ID NO: 3236 - DNA, 26 bp, Homo sapiens
aaagctgctaagctagcacttgagta

SEQ ID NO: 3237 - DNA, 26 bp, Homo sapiens
aagctgctaagctagcacttgagtat

SEQ ID NO: 3238 - DNA, 26 bp, Homo sapiens
agctgctaagctagcacttgagtatt

SEQ ID NO: 3239 - DNA, 26 bp, Homo sapiens
gctgctaagctagcacttgagtattc

SEQ ID NO: 3240 - DNA, 26 bp, Homo sapiens
ctgctaagctagcacttgagtattcc

SEQ ID NO: 3241 - DNA, 26 bp, Homo sapiens
tgctaagctagcacttgagtattcct

SEQ ID NO: 3242 - DNA, 26 bp, Homo sapiens
gctaagctagcacttgagtattcctc

SEQ ID NO: 3243 - DNA, 26 bp, Homo sapiens
ctaagctagcacttgagtattcctcg

SEQ ID NO: 3244 - DNA, 26 bp, Homo sapiens
taagctagcacttgagtattcctcga

SEQ ID NO: 3245 - DNA, 26 bp, Homo sapiens
aagctagcacttgagtattcctcgac

SEQ ID NO: 3246 - DNA, 26 bp, Homo sapiens
agctagcacttgagtattcctcgacc

SEQ ID NO: 3247 - DNA, 26 bp, Homo sapiens
gctagcacttgagtattcctcgaccc

SEQ ID NO: 3248 - DNA, 26 bp, Homo sapiens
ctagcacttgagtattcctcgaccct

SEQ ID NO: 3249 - DNA, 26 bp, Homo sapiens
tagcacttgagtattcctcgaccctt

SEQ ID NO: 3250 - DNA, 26 bp, Homo sapiens
agcacttgagtattcctcgacccttc

SEQ ID NO: 3251 - DNA, 26 bp, Homo sapiens
gcacttgagtattcctcgacccttcc

SEQ ID NO: 3252 - DNA, 26 bp, Homo sapiens
cacttgagtattcctcgacccttccc

SEQ ID NO: 3253 - DNA, 26 bp, Homo sapiens
acttgagtattcctcgacccttcccc

SEQ ID NO: 3254 - DNA, 26 bp, Homo sapiens
cttgagtattcctcgacccttcccct

SEQ ID NO: 3255 - DNA, 26 bp, Homo sapiens
ttgagtattcctcgacccttccccta

SEQ ID NO: 3256 - DNA, 26 bp, Homo sapiens
tgagtattcctcgacccttcccctag

SEQ ID NO: 3257 - DNA, 26 bp, Homo sapiens
gagtattcctcgacccttcccctaga

SEQ ID NO: 3258 - DNA, 26 bp, Homo sapiens
agtattcctcgacccttcccctagaa

SEQ ID NO: 3259 - DNA, 26 bp, Homo sapiens
gtattcctcgacccttcccctagaaa

SEQ ID NO: 3260 - DNA, 26 bp, Homo sapiens
tattcctcgacccttcccctagaaag

SEQ ID NO: 3261 - DNA, 26 bp, Homo sapiens
attcctcgacccttcccctagaaagg

SEQ ID NO: 3262 - DNA, 26 bp, Homo sapiens
ttcctcgacccttcccctagaaagga

SEQ ID NO: 3263 - DNA, 26 bp, Homo sapiens
tcctcgacccttcccctagaaaggaa

SEQ ID NO: 3264 - DNA, 26 bp, Homo sapiens
cctcgacccttcccctagaaaggaaa

SEQ ID NO: 3265 - DNA, 26 bp, Homo sapiens
ctcgacccttcccctagaaaggaaac

SEQ ID NO: 3266 - DNA, 26 bp, Homo sapiens
tcgacccttcccctagaaaggaaacg

SEQ ID NO: 3267 - DNA, 26 bp, Homo sapiens
cgacccttcccctagaaaggaaacgt

SEQ ID NO: 3268 - DNA, 26 bp, Homo sapiens
gacccttcccctagaaaggaaacgtt

SEQ ID NO: 3269 - DNA, 26 bp, Homo sapiens
acccttcccctagaaaggaaacgtta

SEQ ID NO: 3270 - DNA, 26 bp, Homo sapiens
cccttcccctagaaaggaaacgttag

SEQ ID NO: 3271 - DNA, 26 bp, Homo sapiens
ccttcccctagaaaggaaacgttagc

SEQ ID NO: 3272 - DNA, 26 bp, Homo sapiens
cttcccctagaaaggaaacgttagcc

SEQ ID NO: 3273 - DNA, 26 bp, Homo sapiens
ttcccctagaaaggaaacgttagcca

SEQ ID NO: 3274 - DNA, 26 bp, Homo sapiens
tcccctagaaaggaaacgttagccat

SEQ ID NO: 3275 - DNA, 26 bp, Homo sapiens
cccctagaaaggaaacgttagccatt

SEQ ID NO: 3276 - DNA, 26 bp, Homo sapiens
ccctagaaaggaaacgttagccattt

SEQ ID NO: 3277 - DNA, 26 bp, Homo sapiens
cctagaaaggaaacgttagccatttc

SEQ ID NO: 3278 - DNA, 26 bp, Homo sapiens
ctagaaaggaaacgttagccatttcc

SEQ ID NO: 3279 - DNA, 26 bp, Homo sapiens
tagaaaggaaacgttagccatttcca

SEQ ID NO: 3280 - DNA, 26 bp, Homo sapiens
agaaaggaaacgttagccatttccag

SEQ ID NO: 3281 - DNA, 26 bp, Homo sapiens
gaaaggaaacgttagccatttccagg

SEQ ID NO: 3282 - DNA, 26 bp, Homo sapiens
aaaggaaacgttagccatttccagga

SEQ ID NO: 3283 - DNA, 26 bp, Homo sapiens
aaggaaacgttagccatttccaggaa

SEQ ID NO: 3284 - DNA, 26 bp, Homo sapiens
aggaaacgttagccatttccaggaat

SEQ ID NO: 3285 - DNA, 26 bp, Homo sapiens
ggaaacgttagccatttccaggaatc

SEQ ID NO: 3286 - DNA, 26 bp, Homo sapiens
gaaacgttagccatttccaggaatct

SEQ ID NO: 3287 - DNA, 26 bp, Homo sapiens
aaacgttagccatttccaggaatctg

SEQ ID NO: 3288 - DNA, 26 bp, Homo sapiens
aacgttagccatttccaggaatctgg

SEQ ID NO: 3289 - DNA, 26 bp, Homo sapiens
acgttagccatttccaggaatctggg

SEQ ID NO: 3290 - DNA, 26 bp, Homo sapiens
cgttagccatttccaggaatctgggt

SEQ ID NO: 3291 - DNA, 26 bp, Homo sapiens
gttagccatttccaggaatctgggtg

SEQ ID NO: 3292 - DNA, 26 bp, Homo sapiens
ttagccatttccaggaatctgggtgt

SEQ ID NO: 3293 - DNA, 26 bp, Homo sapiens
tagccatttccaggaatctgggtgtg

SEQ ID NO: 3294 - DNA, 26 bp, Homo sapiens
agccatttccaggaatctgggtgtgg

SEQ ID NO: 3295 - DNA, 26 bp, Homo sapiens
gccatttccaggaatctgggtgtgga

SEQ ID NO: 3296 - DNA, 26 bp, Homo sapiens
ccatttccaggaatctgggtgtggag

SEQ ID NO: 3297 - DNA, 26 bp, Homo sapiens
catttccaggaatctgggtgtggagg

SEQ ID NO: 3298 - DNA, 26 bp, Homo sapiens
atttccaggaatctgggtgtggaggc

SEQ ID NO: 3299 - DNA, 26 bp, Homo sapiens
tttccaggaatctgggtgtggaggca

SEQ ID NO: 3300 - DNA, 26 bp, Homo sapiens
ttccaggaatctgggtgtggaggcaa

SEQ ID NO: 3301 - DNA, 26 bp, Homo sapiens
tccaggaatctgggtgtggaggcaaa

SEQ ID NO: 3302 - DNA, 26 bp, Homo sapiens
ccaggaatctgggtgtggaggcaaag

SEQ ID NO: 3303 - DNA, 26 bp, Homo sapiens
caggaatctgggtgtggaggcaaaga

SEQ ID NO: 3304 - DNA, 26 bp, Homo sapiens
aggaatctgggtgtggaggcaaagat

SEQ ID NO: 3305 - DNA, 26 bp, Homo sapiens
ggaatctgggtgtggaggcaaagata

SEQ ID NO: 3306 - DNA, 26 bp, Homo sapiens
gaatctgggtgtggaggcaaagatat

SEQ ID NO: 3307 - DNA, 26 bp, Homo sapiens
aatctgggtgtggaggcaaagatatc

SEQ ID NO: 3308 - DNA, 26 bp, Homo sapiens
atctgggtgtggaggcaaagatatcg

SEQ ID NO: 3309 - DNA, 26 bp, Homo sapiens
tctgggtgtggaggcaaagatatcgt

SEQ ID NO: 3310 - DNA, 26 bp, Homo sapiens
ctgggtgtggaggcaaagatatcgtc

SEQ ID NO: 3311 - DNA, 26 bp, Homo sapiens
tgggtgtggaggcaaagatatcgtcc

SEQ ID NO: 3312 - DNA, 26 bp, Homo sapiens
gggtgtggaggcaaagatatcgtccg

SEQ ID NO: 3313 - DNA, 26 bp, Homo sapiens
ggtgtggaggcaaagatatcgtccgt

SEQ ID NO: 3314 - DNA, 26 bp, Homo sapiens
gtgtggaggcaaagatatcgtccgtc

SEQ ID NO: 3315 - DNA, 26 bp, Homo sapiens
tgtggaggcaaagatatcgtccgtcc

SEQ ID NO: 3316 - DNA, 26 bp, Homo sapiens
gtggaggcaaagatatcgtccgtccg

SEQ ID NO: 3317 - DNA, 26 bp, Homo sapiens
tggaggcaaagatatcgtccgtccgt

SEQ ID NO: 3318 - DNA, 26 bp, Homo sapiens
ggaggcaaagatatcgtccgtccgta

SEQ ID NO: 3319 - DNA, 26 bp, Homo sapiens
gaggcaaagatatcgtccgtccgtag

SEQ ID NO: 3320 - DNA, 26 bp, Homo sapiens
aggcaaagatatcgtccgtccgtagt

SEQ ID NO: 3321 - DNA, 26 bp, Homo sapiens
ggcaaagatatcgtccgtccgtagtt

SEQ ID NO: 3322 - DNA, 26 bp, Homo sapiens
gcaaagatatcgtccgtccgtagtta

SEQ ID NO: 3323 - DNA, 26 bp, Homo sapiens
caaagatatcgtccgtccgtagttag

SEQ ID NO: 3324 - DNA, 26 bp, Homo sapiens
aaagatatcgtccgtccgtagttaga

SEQ ID NO: 3325 - DNA, 26 bp, Homo sapiens
aagatatcgtccgtccgtagttagaa

SEQ ID NO: 3326 - DNA, 26 bp, Homo sapiens
agatatcgtccgtccgtagttagaac

SEQ ID NO: 3327 - DNA, 26 bp, Homo sapiens
gatatcgtccgtccgtagttagaact

SEQ ID NO: 3328 - DNA, 26 bp, Homo sapiens
atatcgtccgtccgtagttagaactc

SEQ ID NO: 3329 - DNA, 26 bp, Homo sapiens
tatcgtccgtccgtagttagaactca

SEQ ID NO: 3330 - DNA, 26 bp, Homo sapiens
atcgtccgtccgtagttagaactcag

SEQ ID NO: 3331 - DNA, 26 bp, Homo sapiens
tcgtccgtccgtagttagaactcagg

SEQ ID NO: 3332 - DNA, 26 bp, Homo sapiens
cgtccgtccgtagttagaactcaggg

SEQ ID NO: 3333 - DNA, 26 bp, Homo sapiens
gtccgtccgtagttagaactcagggt

SEQ ID NO: 3334 - DNA, 26 bp, Homo sapiens
tccgtccgtagttagaactcagggtg

SEQ ID NO: 3335 - DNA, 26 bp, Homo sapiens
ccgtccgtagttagaactcagggtgc

SEQ ID NO: 3336 - DNA, 26 bp, Homo sapiens
cgtccgtagttagaactcagggtgcc

SEQ ID NO: 3337 - DNA, 26 bp, Homo sapiens
gtccgtagttagaactcagggtgcca

SEQ ID NO: 3338 - DNA, 26 bp, Homo sapiens
tccgtagttagaactcagggtgccag

SEQ ID NO: 3339 - DNA, 26 bp, Homo sapiens
ccgtagttagaactcagggtgccagt

SEQ ID NO: 3340 - DNA, 26 bp, Homo sapiens
cgtagttagaactcagggtgccagtt

SEQ ID NO: 3341 - DNA, 26 bp, Homo sapiens
gtagttagaactcagggtgccagttt

SEQ ID NO: 3342 - DNA, 26 bp, Homo sapiens
tagttagaactcagggtgccagtttg

SEQ ID NO: 3343 - DNA, 26 bp, Homo sapiens
agttagaactcagggtgccagtttgt

SEQ ID NO: 3344 - DNA, 26 bp, Homo sapiens
gttagaactcagggtgccagtttgtt

SEQ ID NO: 3345 - DNA, 26 bp, Homo sapiens
ttagaactcagggtgccagtttgttt

SEQ ID NO: 3346 - DNA, 26 bp, Homo sapiens
tagaactcagggtgccagtttgtttt

SEQ ID NO: 3347 - DNA, 26 bp, Homo sapiens
agaactcagggtgccagtttgttttt

SEQ ID NO: 3348 - DNA, 26 bp, Homo sapiens
gaactcagggtgccagtttgtttttt

SEQ ID NO: 3349 - DNA, 26 bp, Homo sapiens
aactcagggtgccagtttgttttttg

SEQ ID NO: 3350 - DNA, 26 bp, Homo sapiens
actcagggtgccagtttgttttttgc

SEQ ID NO: 3351 - DNA, 26 bp, Homo sapiens
ctcagggtgccagtttgttttttgca

SEQ ID NO: 3352 - DNA, 26 bp, Homo sapiens
tcagggtgccagtttgttttttgcaa

SEQ ID NO: 3353 - DNA, 26 bp, Homo sapiens
cagggtgccagtttgttttttgcaaa

SEQ ID NO: 3354 - DNA, 26 bp, Homo sapiens
agggtgccagtttgttttttgcaaag

SEQ ID NO: 3355 - DNA, 26 bp, Homo sapiens
gggtgccagtttgttttttgcaaagg

SEQ ID NO: 3356 - DNA, 26 bp, Homo sapiens
ggtgccagtttgttttttgcaaaggt

SEQ ID NO: 3357 - DNA, 26 bp, Homo sapiens
gtgccagtttgttttttgcaaaggta

SEQ ID NO: 3358 - DNA, 26 bp, Homo sapiens
tgccagtttgttttttgcaaaggtaa

SEQ ID NO: 3359 - DNA, 26 bp, Homo sapiens
gccagtttgttttttgcaaaggtaaa

SEQ ID NO: 3360 - DNA, 26 bp, Homo sapiens
ccagtttgttttttgcaaaggtaaaa

SEQ ID NO: 3361 - DNA, 26 bp, Homo sapiens
cagtttgttttttgcaaaggtaaaat

SEQ ID NO: 3362 - DNA, 26 bp, Homo sapiens
agtttgttttttgcaaaggtaaaata

SEQ ID NO: 3363 - DNA, 26 bp, Homo sapiens
gtttgttttttgcaaaggtaaaatac

SEQ ID NO: 3364 - DNA, 26 bp, Homo sapiens
tttgttttttgcaaaggtaaaatacg

SEQ ID NO: 3365 - DNA, 26 bp, Homo sapiens
ttgttttttgcaaaggtaaaatacgt

SEQ ID NO: 3366 - DNA, 26 bp, Homo sapiens
tgttttttgcaaaggtaaaatacgtg

SEQ ID NO: 3367 - DNA, 26 bp, Homo sapiens
gttttttgcaaaggtaaaatacgtgg

SEQ ID NO: 3368 - DNA, 26 bp, Homo sapiens
ttttttgcaaaggtaaaatacgtggt

SEQ ID NO: 3369 - DNA, 26 bp, Homo sapiens
tttttgcaaaggtaaaatacgtggtg

SEQ ID NO: 3370 - DNA, 26 bp, Homo sapiens
ttttgcaaaggtaaaatacgtggtgt

SEQ ID NO: 3371 - DNA, 26 bp, Homo sapiens
tttgcaaaggtaaaatacgtggtgtt

SEQ ID NO: 3372 - DNA, 26 bp, Homo sapiens
ttgcaaaggtaaaatacgtggtgtta

SEQ ID NO: 3373 - DNA, 26 bp, Homo sapiens
tgcaaaggtaaaatacgtggtgttaa

SEQ ID NO: 3374 - DNA, 26 bp, Homo sapiens
gcaaaggtaaaatacgtggtgttaac

SEQ ID NO: 3375 - DNA, 26 bp, Homo sapiens
caaaggtaaaatacgtggtgttaact

SEQ ID NO: 3376 - DNA, 26 bp, Homo sapiens
aaaggtaaaatacgtggtgttaactt

SEQ ID NO: 3377 - DNA, 26 bp, Homo sapiens
aaggtaaaatacgtggtgttaacttc

SEQ ID NO: 3378 - DNA, 26 bp, Homo sapiens
aggtaaaatacgtggtgttaacttca

SEQ ID NO: 3379 - DNA, 26 bp, Homo sapiens
ggtaaaatacgtggtgttaacttcac

SEQ ID NO: 3380 - DNA, 26 bp, Homo sapiens
gtaaaatacgtggtgttaacttcact

SEQ ID NO: 3381 - DNA, 26 bp, Homo sapiens
taaaatacgtggtgttaacttcactc

SEQ ID NO: 3382 - DNA, 26 bp, Homo sapiens
aaaatacgtggtgttaacttcactca

SEQ ID NO: 3383 - DNA, 26 bp, Homo sapiens
aaatacgtggtgttaacttcactcag

SEQ ID NO: 3384 - DNA, 26 bp, Homo sapiens
aatacgtggtgttaacttcactcaga

SEQ ID NO: 3385 - DNA, 26 bp, Homo sapiens
atacgtggtgttaacttcactcagag

SEQ ID NO: 3386 - DNA, 26 bp, Homo sapiens
tacgtggtgttaacttcactcagaga

SEQ ID NO: 3387 - DNA, 26 bp, Homo sapiens
acgtggtgttaacttcactcagagaa

SEQ ID NO: 3388 - DNA, 26 bp, Homo sapiens
cgtggtgttaacttcactcagagaat

SEQ ID NO: 3389 - DNA, 26 bp, Homo sapiens
gtggtgttaacttcactcagagaatc

SEQ ID NO: 3390 - DNA, 26 bp, Homo sapiens
tggtgttaacttcactcagagaatct

SEQ ID NO: 3391 - DNA, 26 bp, Homo sapiens
ggtgttaacttcactcagagaatctt

SEQ ID NO: 3392 - DNA, 26 bp, Homo sapiens
gtgttaacttcactcagagaatcttt

SEQ ID NO: 3393 - DNA, 26 bp, Homo sapiens
tgttaacttcactcagagaatctttg

SEQ ID NO: 3394 - DNA, 26 bp, Homo sapiens
gttaacttcactcagagaatctttgt

SEQ ID NO: 3395 - DNA, 26 bp, Homo sapiens
ttaacttcactcagagaatctttgtc

SEQ ID NO: 3396 - DNA, 26 bp, Homo sapiens
taacttcactcagagaatctttgtca

SEQ ID NO: 3397 - DNA, 26 bp, Homo sapiens
aacttcactcagagaatctttgtcat

SEQ ID NO: 3398 - DNA, 26 bp, Homo sapiens
acttcactcagagaatctttgtcatg

SEQ ID NO: 3399 - DNA, 26 bp, Homo sapiens
cttcactcagagaatctttgtcatga

SEQ ID NO: 3400 - DNA, 26 bp, Homo sapiens
ttcactcagagaatctttgtcatgac

SEQ ID NO: 3401 - DNA, 26 bp, Homo sapiens
tcactcagagaatctttgtcatgacg

SEQ ID NO: 3402 - DNA, 26 bp, Homo sapiens
cactcagagaatctttgtcatgacgt

SEQ ID NO: 3403 - DNA, 26 bp, Homo sapiens
actcagagaatctttgtcatgacgtt

SEQ ID NO: 3404 - DNA, 26 bp, Homo sapiens
ctcagagaatctttgtcatgacgttt

SEQ ID NO: 3405 - DNA, 26 bp, Homo sapiens
tcagagaatctttgtcatgacgtttg

SEQ ID NO: 3406 - DNA, 26 bp, Homo sapiens
cagagaatctttgtcatgacgtttgt

SEQ ID NO: 3407 - DNA, 26 bp, Homo sapiens
agagaatctttgtcatgacgtttgtt

SEQ ID NO: 3408 - DNA, 26 bp, Homo sapiens
gagaatctttgtcatgacgtttgttc

SEQ ID NO: 3409 - DNA, 26 bp, Homo sapiens
agaatctttgtcatgacgtttgttca

SEQ ID NO: 3410 - DNA, 26 bp, Homo sapiens
gaatctttgtcatgacgtttgttcat

SEQ ID NO: 3411 - DNA, 26 bp, Homo sapiens
aatctttgtcatgacgtttgttcatg

SEQ ID NO: 3412 - DNA, 26 bp, Homo sapiens
atctttgtcatgacgtttgttcatgt

SEQ ID NO: 3413 - DNA, 26 bp, Homo sapiens
tctttgtcatgacgtttgttcatgtg

SEQ ID NO: 3414 - DNA, 26 bp, Homo sapiens
ctttgtcatgacgtttgttcatgtgc

SEQ ID NO: 3415 - DNA, 26 bp, Homo sapiens
tttgtcatgacgtttgttcatgtgcc

SEQ ID NO: 3416 - DNA, 26 bp, Homo sapiens
ttgtcatgacgtttgttcatgtgcca

SEQ ID NO: 3417 - DNA, 26 bp, Homo sapiens
tgtcatgacgtttgttcatgtgccac

SEQ ID NO: 3418 - DNA, 26 bp, Homo sapiens
gtcatgacgtttgttcatgtgccacg

SEQ ID NO: 3419 - DNA, 26 bp, Homo sapiens
tcatgacgtttgttcatgtgccacgc

SEQ ID NO: 3420 - DNA, 26 bp, Homo sapiens
catgacgtttgttcatgtgccacgct

SEQ ID NO: 3421 - DNA, 26 bp, Homo sapiens
atgacgtttgttcatgtgccacgctc

SEQ ID NO: 3422 - DNA, 26 bp, Homo sapiens
tgacgtttgttcatgtgccacgctca

SEQ ID NO: 3423 - DNA, 26 bp, Homo sapiens
gacgtttgttcatgtgccacgctcag

SEQ ID NO: 3424 - DNA, 26 bp, Homo sapiens
acgtttgttcatgtgccacgctcagt

SEQ ID NO: 3425 - DNA, 26 bp, Homo sapiens
cgtttgttcatgtgccacgctcagtg

SEQ ID NO: 3426 - DNA, 26 bp, Homo sapiens
gtttgttcatgtgccacgctcagtga

SEQ ID NO: 3427 - DNA, 26 bp, Homo sapiens
tttgttcatgtgccacgctcagtgac

SEQ ID NO: 3428 - DNA, 26 bp, Homo sapiens
ttgttcatgtgccacgctcagtgact

SEQ ID NO: 3429 - DNA, 26 bp, Homo sapiens
tgttcatgtgccacgctcagtgactc

SEQ ID NO: 3430 - DNA, 26 bp, Homo sapiens
gttcatgtgccacgctcagtgactca

SEQ ID NO: 3431 - DNA, 26 bp, Homo sapiens
ttcatgtgccacgctcagtgactcag

SEQ ID NO: 3432 - DNA, 26 bp, Homo sapiens
tcatgtgccacgctcagtgactcagt

SEQ ID NO: 3433 - DNA, 26 bp, Homo sapiens
catgtgccacgctcagtgactcagtc

SEQ ID NO: 3434 - DNA, 26 bp, Homo sapiens
atgtgccacgctcagtgactcagtca

SEQ ID NO: 3435 - DNA, 26 bp, Homo sapiens
tgtgccacgctcagtgactcagtcac

SEQ ID NO: 3436 - DNA, 26 bp, Homo sapiens
gtgccacgctcagtgactcagtcact

SEQ ID NO: 3437 - DNA, 26 bp, Homo sapiens
tgccacgctcagtgactcagtcactc

SEQ ID NO: 3438 - DNA, 26 bp, Homo sapiens
gccacgctcagtgactcagtcactct

SEQ ID NO: 3439 - DNA, 26 bp, Homo sapiens
ccacgctcagtgactcagtcactctc

SEQ ID NO: 3440 - DNA, 26 bp, Homo sapiens
cacgctcagtgactcagtcactctcg

SEQ ID NO: 3441 - DNA, 26 bp, Homo sapiens
acgctcagtgactcagtcactctcgg

SEQ ID NO: 3442 - DNA, 26 bp, Homo sapiens
cgctcagtgactcagtcactctcgga

SEQ ID NO: 3443 - DNA, 26 bp, Homo sapiens
gctcagtgactcagtcactctcggag

SEQ ID NO: 3444 - DNA, 26 bp, Homo sapiens
ctcagtgactcagtcactctcggagt

SEQ ID NO: 3445 - DNA, 26 bp, Homo sapiens
tcagtgactcagtcactctcggagtt

SEQ ID NO: 3446 - DNA, 26 bp, Homo sapiens
cagtgactcagtcactctcggagttg

SEQ ID NO: 3447 - DNA, 26 bp, Homo sapiens
agtgactcagtcactctcggagttga

SEQ ID NO: 3448 - DNA, 26 bp, Homo sapiens
gtgactcagtcactctcggagttgat

SEQ ID NO: 3449 - DNA, 26 bp, Homo sapiens
tgactcagtcactctcggagttgata

SEQ ID NO: 3450 - DNA, 26 bp, Homo sapiens
gactcagtcactctcggagttgatac

SEQ ID NO: 3451 - DNA, 26 bp, Homo sapiens
actcagtcactctcggagttgatacc

SEQ ID NO: 3452 - DNA, 26 bp, Homo sapiens
ctcagtcactctcggagttgatacct

SEQ ID NO: 3453 - DNA, 26 bp, Homo sapiens
tcagtcactctcggagttgatacctt

SEQ ID NO: 3454 - DNA, 26 bp, Homo sapiens
cagtcactctcggagttgataccttg

SEQ ID NO: 3455 - DNA, 26 bp, Homo sapiens
agtcactctcggagttgataccttgc

SEQ ID NO: 3456 - DNA, 26 bp, Homo sapiens
gtcactctcggagttgataccttgcc

SEQ ID NO: 3457 - DNA, 26 bp, Homo sapiens
tcactctcggagttgataccttgcct

SEQ ID NO: 3458 - DNA, 26 bp, Homo sapiens
cactctcggagttgataccttgcctc

SEQ ID NO: 3459 - DNA, 26 bp, Homo sapiens
actctcggagttgataccttgcctca

SEQ ID NO: 3460 - DNA, 26 bp, Homo sapiens
ctctcggagttgataccttgcctcag

SEQ ID NO: 3461 - DNA, 26 bp, Homo sapiens
tctcggagttgataccttgcctcagc

SEQ ID NO: 3462 - DNA, 26 bp, Homo sapiens
ctcggagttgataccttgcctcagca

SEQ ID NO: 3463 - DNA, 26 bp, Homo sapiens
tcggagttgataccttgcctcagcag

SEQ ID NO: 3464 - DNA, 26 bp, Homo sapiens
cggagttgataccttgcctcagcagg

SEQ ID NO: 3465 - DNA, 26 bp, Homo sapiens
ggagttgataccttgcctcagcaggg

SEQ ID NO: 3466 - DNA, 26 bp, Homo sapiens
gagttgataccttgcctcagcagggt

SEQ ID NO: 3467 - DNA, 26 bp, Homo sapiens
agttgataccttgcctcagcagggtc

SEQ ID NO: 3468 - DNA, 26 bp, Homo sapiens
gttgataccttgcctcagcagggtca

SEQ ID NO: 3469 - DNA, 26 bp, Homo sapiens
ttgataccttgcctcagcagggtcac

SEQ ID NO: 3470 - DNA, 26 bp, Homo sapiens
tgataccttgcctcagcagggtcacg

SEQ ID NO: 3471 - DNA, 26 bp, Homo sapiens
gataccttgcctcagcagggtcacgc

SEQ ID NO: 3472 - DNA, 26 bp, Homo sapiens
ataccttgcctcagcagggtcacgct

SEQ ID NO: 3473 - DNA, 26 bp, Homo sapiens
taccttgcctcagcagggtcacgcta

SEQ ID NO: 3474 - DNA, 26 bp, Homo sapiens
accttgcctcagcagggtcacgctat

SEQ ID NO: 3475 - DNA, 26 bp, Homo sapiens
ccttgcctcagcagggtcacgctatc

SEQ ID NO: 3476 - DNA, 26 bp, Homo sapiens
cttgcctcagcagggtcacgctatca

SEQ ID NO: 3477 - DNA, 26 bp, Homo sapiens
ttgcctcagcagggtcacgctatcag

SEQ ID NO: 3478 - DNA, 26 bp, Homo sapiens
tgcctcagcagggtcacgctatcagg

SEQ ID NO: 3479 - DNA, 26 bp, Homo sapiens
gcctcagcagggtcacgctatcagga

SEQ ID NO: 3480 - DNA, 26 bp, Homo sapiens
cctcagcagggtcacgctatcaggac

SEQ ID NO: 3481 - DNA, 26 bp, Homo sapiens
ctcagcagggtcacgctatcaggaca

SEQ ID NO: 3482 - DNA, 26 bp, Homo sapiens
tcagcagggtcacgctatcaggacac

SEQ ID NO: 3483 - DNA, 26 bp, Homo sapiens
cagcagggtcacgctatcaggacacc

SEQ ID NO: 3484 - DNA, 26 bp, Homo sapiens
agcagggtcacgctatcaggacacct

SEQ ID NO: 3485 - DNA, 26 bp, Homo sapiens
gcagggtcacgctatcaggacacctg

SEQ ID NO: 3486 - DNA, 26 bp, Homo sapiens
cagggtcacgctatcaggacacctgg

SEQ ID NO: 3487 - DNA, 26 bp, Homo sapiens
agggtcacgctatcaggacacctgga

SEQ ID NO: 3488 - DNA, 26 bp, Homo sapiens
gggtcacgctatcaggacacctggat

SEQ ID NO: 3489 - DNA, 26 bp, Homo sapiens
ggtcacgctatcaggacacctggatc

SEQ ID NO: 3490 - DNA, 26 bp, Homo sapiens
gtcacgctatcaggacacctggatcc

SEQ ID NO: 3491 - DNA, 26 bp, Homo sapiens
tcacgctatcaggacacctggatccc

SEQ ID NO: 3492 - DNA, 26 bp, Homo sapiens
cacgctatcaggacacctggatccct

SEQ ID NO: 3493 - DNA, 26 bp, Homo sapiens
acgctatcaggacacctggatcccta

SEQ ID NO: 3494 - DNA, 26 bp, Homo sapiens
cgctatcaggacacctggatccctaa

SEQ ID NO: 3495 - DNA, 26 bp, Homo sapiens
gctatcaggacacctggatccctaaa

SEQ ID NO: 3496 - DNA, 26 bp, Homo sapiens
ctatcaggacacctggatccctaaag

SEQ ID NO: 3497 - DNA, 26 bp, Homo sapiens
tatcaggacacctggatccctaaagc

SEQ ID NO: 3498 - DNA, 26 bp, Homo sapiens
atcaggacacctggatccctaaagca

SEQ ID NO: 3499 - DNA, 26 bp, Homo sapiens
tcaggacacctggatccctaaagcag

SEQ ID NO: 3500 - DNA, 26 bp, Homo sapiens
caggacacctggatccctaaagcagg

SEQ ID NO: 3501 - DNA, 26 bp, Homo sapiens
aggacacctggatccctaaagcaggg

SEQ ID NO: 3502 - DNA, 26 bp, Homo sapiens
ggacacctggatccctaaagcagggg

SEQ ID NO: 3503 - DNA, 26 bp, Homo sapiens
gacacctggatccctaaagcagggga

SEQ ID NO: 3504 - DNA, 26 bp, Homo sapiens
acacctggatccctaaagcaggggaa

SEQ ID NO: 3505 - DNA, 26 bp, Homo sapiens
cacctggatccctaaagcaggggaag

SEQ ID NO: 3506 - DNA, 26 bp, Homo sapiens
acctggatccctaaagcaggggaagt

SEQ ID NO: 3507 - DNA, 26 bp, Homo sapiens
cctggatccctaaagcaggggaagtg

SEQ ID NO: 3508 - DNA, 26 bp, Homo sapiens
ctggatccctaaagcaggggaagtgg

SEQ ID NO: 3509 - DNA, 26 bp, Homo sapiens
tggatccctaaagcaggggaagtggc

SEQ ID NO: 3510 - DNA, 26 bp, Homo sapiens
ggatccctaaagcaggggaagtggca

SEQ ID NO: 3511 - DNA, 26 bp, Homo sapiens
gatccctaaagcaggggaagtggcat

SEQ ID NO: 3512 - DNA, 26 bp, Homo sapiens
atccctaaagcaggggaagtggcatt

SEQ ID NO: 3513 - DNA, 26 bp, Homo sapiens
tccctaaagcaggggaagtggcattt

SEQ ID NO: 3514 - DNA, 26 bp, Homo sapiens
ccctaaagcaggggaagtggcatttg

SEQ ID NO: 3515 - DNA, 26 bp, Homo sapiens
cctaaagcaggggaagtggcatttga

SEQ ID NO: 3516 - DNA, 26 bp, Homo sapiens
ctaaagcaggggaagtggcatttgaa

SEQ ID NO: 3517 - DNA, 26 bp, Homo sapiens
taaagcaggggaagtggcatttgaaa

SEQ ID NO: 3518 - DNA, 26 bp, Homo sapiens
aaagcaggggaagtggcatttgaaac

SEQ ID NO: 3519 - DNA, 26 bp, Homo sapiens
aagcaggggaagtggcatttgaaacc

SEQ ID NO: 3520 - DNA, 26 bp, Homo sapiens
agcaggggaagtggcatttgaaaccc

SEQ ID NO: 3521 - DNA, 26 bp, Homo sapiens
gcaggggaagtggcatttgaaaccca

SEQ ID NO: 3522 - DNA, 26 bp, Homo sapiens
caggggaagtggcatttgaaacccag

SEQ ID NO: 3523 - DNA, 26 bp, Homo sapiens
aggggaagtggcatttgaaacccagg

SEQ ID NO: 3524 - DNA, 26 bp, Homo sapiens
ggggaagtggcatttgaaacccaggc

SEQ ID NO: 3525 - DNA, 26 bp, Homo sapiens
gggaagtggcatttgaaacccaggct

SEQ ID NO: 3526 - DNA, 26 bp, Homo sapiens
ggaagtggcatttgaaacccaggctg

SEQ ID NO: 3527 - DNA, 26 bp, Homo sapiens
gaagtggcatttgaaacccaggctgt

SEQ ID NO: 3528 - DNA, 26 bp, Homo sapiens
aagtggcatttgaaacccaggctgtc

SEQ ID NO: 3529 - DNA, 26 bp, Homo sapiens
agtggcatttgaaacccaggctgtcc

SEQ ID NO: 3530 - DNA, 26 bp, Homo sapiens
gtggcatttgaaacccaggctgtcct

SEQ ID NO: 3531 - DNA, 26 bp, Homo sapiens
tggcatttgaaacccaggctgtcctt

SEQ ID NO: 3532 - DNA, 26 bp, Homo sapiens
ggcatttgaaacccaggctgtccttg

SEQ ID NO: 3533 - DNA, 26 bp, Homo sapiens
gcatttgaaacccaggctgtccttgc

SEQ ID NO: 3534 - DNA, 26 bp, Homo sapiens
catttgaaacccaggctgtccttgct

SEQ ID NO: 3535 - DNA, 26 bp, Homo sapiens
atttgaaacccaggctgtccttgctg

SEQ ID NO: 3536 - DNA, 26 bp, Homo sapiens
tttgaaacccaggctgtccttgctgc

SEQ ID NO: 3537 - DNA, 26 bp, Homo sapiens
ttgaaacccaggctgtccttgctgct

SEQ ID NO: 3538 - DNA, 26 bp, Homo sapiens
tgaaacccaggctgtccttgctgctc

SEQ ID NO: 3539 - DNA, 26 bp, Homo sapiens
gaaacccaggctgtccttgctgctca

SEQ ID NO: 3540 - DNA, 26 bp, Homo sapiens
aaacccaggctgtccttgctgctcag

SEQ ID NO: 3541 - DNA, 26 bp, Homo sapiens
aacccaggctgtccttgctgctcagt

SEQ ID NO: 3542 - DNA, 26 bp, Homo sapiens
acccaggctgtccttgctgctcagta

SEQ ID NO: 3543 - DNA, 26 bp, Homo sapiens
cccaggctgtccttgctgctcagtag

SEQ ID NO: 3544 - DNA, 26 bp, Homo sapiens
ccaggctgtccttgctgctcagtaga

SEQ ID NO: 3545 - DNA, 26 bp, Homo sapiens
caggctgtccttgctgctcagtagaa

SEQ ID NO: 3546 - DNA, 26 bp, Homo sapiens
aggctgtccttgctgctcagtagaag

SEQ ID NO: 3547 - DNA, 26 bp, Homo sapiens
ggctgtccttgctgctcagtagaagc

SEQ ID NO: 3548 - DNA, 26 bp, Homo sapiens
gctgtccttgctgctcagtagaagcc

SEQ ID NO: 3549 - DNA, 26 bp, Homo sapiens
ctgtccttgctgctcagtagaagcct

SEQ ID NO: 3550 - DNA, 26 bp, Homo sapiens
tgtccttgctgctcagtagaagcctg

SEQ ID NO: 3551 - DNA, 26 bp, Homo sapiens
gtccttgctgctcagtagaagcctga

SEQ ID NO: 3552 - DNA, 26 bp, Homo sapiens
tccttgctgctcagtagaagcctgag

SEQ ID NO: 3553 - DNA, 26 bp, Homo sapiens
ccttgctgctcagtagaagcctgagt

SEQ ID NO: 3554 - DNA, 26 bp, Homo sapiens
cttgctgctcagtagaagcctgagtg

SEQ ID NO: 3555 - DNA, 26 bp, Homo sapiens
ttgctgctcagtagaagcctgagtga

SEQ ID NO: 3556 - DNA, 26 bp, Homo sapiens
tgctgctcagtagaagcctgagtgaa

SEQ ID NO: 3557 - DNA, 26 bp, Homo sapiens
gctgctcagtagaagcctgagtgaag

SEQ ID NO: 3558 - DNA, 26 bp, Homo sapiens
ctgctcagtagaagcctgagtgaagt

SEQ ID NO: 3559 - DNA, 26 bp, Homo sapiens
tgctcagtagaagcctgagtgaagtg

SEQ ID NO: 3560 - DNA, 26 bp, Homo sapiens
gctcagtagaagcctgagtgaagtgg

SEQ ID NO: 3561 - DNA, 26 bp, Homo sapiens
ctcagtagaagcctgagtgaagtggc

SEQ ID NO: 3562 - DNA, 26 bp, Homo sapiens
tcagtagaagcctgagtgaagtggcg

SEQ ID NO: 3563 - DNA, 26 bp, Homo sapiens
cagtagaagcctgagtgaagtggcgg

SEQ ID NO: 3564 - DNA, 26 bp, Homo sapiens
agtagaagcctgagtgaagtggcggc

SEQ ID NO: 3565 - DNA, 26 bp, Homo sapiens
gtagaagcctgagtgaagtggcggcc

SEQ ID NO: 3566 - DNA, 26 bp, Homo sapiens
tagaagcctgagtgaagtggcggccg

SEQ ID NO: 3567 - DNA, 26 bp, Homo sapiens
agaagcctgagtgaagtggcggccgg

SEQ ID NO: 3568 - DNA, 26 bp, Homo sapiens
gaagcctgagtgaagtggcggccggg

SEQ ID NO: 3569 - DNA, 26 bp, Homo sapiens
aagcctgagtgaagtggcggccgggg

SEQ ID NO: 3570 - DNA, 26 bp, Homo sapiens
agcctgagtgaagtggcggccggggg

SEQ ID NO: 3571 - DNA, 26 bp, Homo sapiens
gcctgagtgaagtggcggccggggga

SEQ ID NO: 3572 - DNA, 26 bp, Homo sapiens
cctgagtgaagtggcggccgggggag

SEQ ID NO: 3573 - DNA, 26 bp, Homo sapiens
ctgagtgaagtggcggccgggggaga

SEQ ID NO: 3574 - DNA, 26 bp, Homo sapiens
tgagtgaagtggcggccgggggagag

SEQ ID NO: 3575 - DNA, 26 bp, Homo sapiens
gagtgaagtggcggccgggggagagg

SEQ ID NO: 3576 - DNA, 26 bp, Homo sapiens
agtgaagtggcggccgggggagaggt

SEQ ID NO: 3577 - DNA, 26 bp, Homo sapiens
gtgaagtggcggccgggggagaggtt

SEQ ID NO: 3578 - DNA, 26 bp, Homo sapiens
tgaagtggcggccgggggagaggttc

SEQ ID NO: 3579 - DNA, 26 bp, Homo sapiens
gaagtggcggccgggggagaggttcc

SEQ ID NO: 3580 - DNA, 26 bp, Homo sapiens
aagtggcggccgggggagaggttcct

SEQ ID NO: 3581 - DNA, 26 bp, Homo sapiens
agtggcggccgggggagaggttcctc

SEQ ID NO: 3582 - DNA, 26 bp, Homo sapiens
gtggcggccgggggagaggttcctct

SEQ ID NO: 3583 - DNA, 26 bp, Homo sapiens
tggcggccgggggagaggttcctctt

SEQ ID NO: 3584 - DNA, 26 bp, Homo sapiens
ggcggccgggggagaggttcctcttt

SEQ ID NO: 3585 - DNA, 26 bp, Homo sapiens
gcggccgggggagaggttcctctttg

SEQ ID NO: 3586 - DNA, 26 bp, Homo sapiens
cggccgggggagaggttcctctttgc

SEQ ID NO: 3587 - DNA, 26 bp, Homo sapiens
ggccgggggagaggttcctctttgca

SEQ ID NO: 3588 - DNA, 26 bp, Homo sapiens
gccgggggagaggttcctctttgcag

SEQ ID NO: 3589 - DNA, 26 bp, Homo sapiens
ccgggggagaggttcctctttgcaga

SEQ ID NO: 3590 - DNA, 26 bp, Homo sapiens
cgggggagaggttcctctttgcagag

SEQ ID NO: 3591 - DNA, 26 bp, Homo sapiens
gggggagaggttcctctttgcagaga

SEQ ID NO: 3592 - DNA, 26 bp, Homo sapiens
ggggagaggttcctctttgcagagat

SEQ ID NO: 3593 - DNA, 26 bp, Homo sapiens
gggagaggttcctctttgcagagatg

SEQ ID NO: 3594 - DNA, 26 bp, Homo sapiens
ggagaggttcctctttgcagagatga

SEQ ID NO: 3595 - DNA, 26 bp, Homo sapiens
gagaggttcctctttgcagagatgat

SEQ ID NO: 3596 - DNA, 26 bp, Homo sapiens
agaggttcctctttgcagagatgatg

SEQ ID NO: 3597 - DNA, 26 bp, Homo sapiens
gaggttcctctttgcagagatgatgt

SEQ ID NO: 3598 - DNA, 26 bp, Homo sapiens
aggttcctctttgcagagatgatgtg

SEQ ID NO: 3599 - DNA, 26 bp, Homo sapiens
ggttcctctttgcagagatgatgtgt

SEQ ID NO: 3600 - DNA, 26 bp, Homo sapiens
gttcctctttgcagagatgatgtgtt

SEQ ID NO: 3601 - DNA, 26 bp, Homo sapiens
ttcctctttgcagagatgatgtgtta

SEQ ID NO: 3602 - DNA, 26 bp, Homo sapiens
tcctctttgcagagatgatgtgttat

SEQ ID NO: 3603 - DNA, 26 bp, Homo sapiens
cctctttgcagagatgatgtgttatc

SEQ ID NO: 3604 - DNA, 26 bp, Homo sapiens
ctctttgcagagatgatgtgttatca

SEQ ID NO: 3605 - DNA, 26 bp, Homo sapiens
tctttgcagagatgatgtgttatcac

SEQ ID NO: 3606 - DNA, 26 bp, Homo sapiens
ctttgcagagatgatgtgttatcacc

SEQ ID NO: 3607 - DNA, 26 bp, Homo sapiens
tttgcagagatgatgtgttatcacca

SEQ ID NO: 3608 - DNA, 26 bp, Homo sapiens
ttgcagagatgatgtgttatcaccac

SEQ ID NO: 3609 - DNA, 26 bp, Homo sapiens
tgcagagatgatgtgttatcaccact

SEQ ID NO: 3610 - DNA, 26 bp, Homo sapiens
gcagagatgatgtgttatcaccactc

SEQ ID NO: 3611 - DNA, 26 bp, Homo sapiens
cagagatgatgtgttatcaccactct

SEQ ID NO: 3612 - DNA, 26 bp, Homo sapiens
agagatgatgtgttatcaccactctc

SEQ ID NO: 3613 - DNA, 26 bp, Homo sapiens
gagatgatgtgttatcaccactctct

SEQ ID NO: 3614 - DNA, 26 bp, Homo sapiens
agatgatgtgttatcaccactctctg

SEQ ID NO: 3615 - DNA, 26 bp, Homo sapiens
gatgatgtgttatcaccactctctgc

SEQ ID NO: 3616 - DNA, 26 bp, Homo sapiens
atgatgtgttatcaccactctctgca

SEQ ID NO: 3617 - DNA, 26 bp, Homo sapiens
tgatgtgttatcaccactctctgcag

SEQ ID NO: 3618 - DNA, 26 bp, Homo sapiens
gatgtgttatcaccactctctgcagg

SEQ ID NO: 3619 - DNA, 26 bp, Homo sapiens
atgtgttatcaccactctctgcaggg

SEQ ID NO: 3620 - DNA, 26 bp, Homo sapiens
tgtgttatcaccactctctgcagggc

SEQ ID NO: 3621 - DNA, 26 bp, Homo sapiens
gtgttatcaccactctctgcagggct

SEQ ID NO: 3622 - DNA, 26 bp, Homo sapiens
tgttatcaccactctctgcagggctc

SEQ ID NO: 3623 - DNA, 26 bp, Homo sapiens
gttatcaccactctctgcagggctct

SEQ ID NO: 3624 - DNA, 26 bp, Homo sapiens
ttatcaccactctctgcagggctctg

SEQ ID NO: 3625 - DNA, 26 bp, Homo sapiens
tatcaccactctctgcagggctctgg

SEQ ID NO: 3626 - DNA, 26 bp, Homo sapiens
atcaccactctctgcagggctctggt

SEQ ID NO: 3627 - DNA, 26 bp, Homo sapiens
tcaccactctctgcagggctctggtg

SEQ ID NO: 3628 - DNA, 26 bp, Homo sapiens
caccactctctgcagggctctggtgt

SEQ ID NO: 3629 - DNA, 26 bp, Homo sapiens
accactctctgcagggctctggtgtt

SEQ ID NO: 3630 - DNA, 26 bp, Homo sapiens
ccactctctgcagggctctggtgttc

SEQ ID NO: 3631 - DNA, 26 bp, Homo sapiens
cactctctgcagggctctggtgttca

SEQ ID NO: 3632 - DNA, 26 bp, Homo sapiens
actctctgcagggctctggtgttcag

SEQ ID NO: 3633 - DNA, 26 bp, Homo sapiens
ctctctgcagggctctggtgttcagg

SEQ ID NO: 3634 - DNA, 26 bp, Homo sapiens
tctctgcagggctctggtgttcagga

SEQ ID NO: 3635 - DNA, 26 bp, Homo sapiens
ctctgcagggctctggtgttcaggac

SEQ ID NO: 3636 - DNA, 26 bp, Homo sapiens
tctgcagggctctggtgttcaggact

SEQ ID NO: 3637 - DNA, 26 bp, Homo sapiens
ctgcagggctctggtgttcaggactc

SEQ ID NO: 3638 - DNA, 26 bp, Homo sapiens
tgcagggctctggtgttcaggactca

SEQ ID NO: 3639 - DNA, 26 bp, Homo sapiens
gcagggctctggtgttcaggactcag

SEQ ID NO: 3640 - DNA, 26 bp, Homo sapiens
cagggctctggtgttcaggactcaga

SEQ ID NO: 3641 - DNA, 26 bp, Homo sapiens
agggctctggtgttcaggactcagag

SEQ ID NO: 3642 - DNA, 26 bp, Homo sapiens
gggctctggtgttcaggactcagagc

SEQ ID NO: 3643 - DNA, 26 bp, Homo sapiens
ggctctggtgttcaggactcagagca

SEQ ID NO: 3644 - DNA, 26 bp, Homo sapiens
gctctggtgttcaggactcagagcag

SEQ ID NO: 3645 - DNA, 26 bp, Homo sapiens
ctctggtgttcaggactcagagcagt

SEQ ID NO: 3646 - DNA, 26 bp, Homo sapiens
tctggtgttcaggactcagagcagtg

SEQ ID NO: 3647 - DNA, 26 bp, Homo sapiens
ctggtgttcaggactcagagcagtga

SEQ ID NO: 3648 - DNA, 26 bp, Homo sapiens
tggtgttcaggactcagagcagtgag

SEQ ID NO: 3649 - DNA, 26 bp, Homo sapiens
ggtgttcaggactcagagcagtgagc

SEQ ID NO: 3650 - DNA, 26 bp, Homo sapiens
gtgttcaggactcagagcagtgagcc

SEQ ID NO: 3651 - DNA, 26 bp, Homo sapiens
tgttcaggactcagagcagtgagcct

SEQ ID NO: 3652 - DNA, 26 bp, Homo sapiens
gttcaggactcagagcagtgagcctc

SEQ ID NO: 3653 - DNA, 26 bp, Homo sapiens
ttcaggactcagagcagtgagcctca

SEQ ID NO: 3654 - DNA, 26 bp, Homo sapiens
tcaggactcagagcagtgagcctcag

SEQ ID NO: 3655 - DNA, 26 bp, Homo sapiens
caggactcagagcagtgagcctcaga

SEQ ID NO: 3656 - DNA, 26 bp, Homo sapiens
aggactcagagcagtgagcctcagac

SEQ ID NO: 3657 - DNA, 26 bp, Homo sapiens
ggactcagagcagtgagcctcagacc

SEQ ID NO: 3658 - DNA, 26 bp, Homo sapiens
gactcagagcagtgagcctcagacct

SEQ ID NO: 3659 - DNA, 26 bp, Homo sapiens
actcagagcagtgagcctcagacctg

SEQ ID NO: 3660 - DNA, 26 bp, Homo sapiens
ctcagagcagtgagcctcagacctgc

SEQ ID NO: 3661 - DNA, 26 bp, Homo sapiens
tcagagcagtgagcctcagacctgca

SEQ ID NO: 3662 - DNA, 26 bp, Homo sapiens
cagagcagtgagcctcagacctgcag

SEQ ID NO: 3663 - DNA, 26 bp, Homo sapiens
agagcagtgagcctcagacctgcagt

SEQ ID NO: 3664 - DNA, 26 bp, Homo sapiens
gagcagtgagcctcagacctgcagtg

SEQ ID NO: 3665 - DNA, 26 bp, Homo sapiens
agcagtgagcctcagacctgcagtgt

SEQ ID NO: 3666 - DNA, 26 bp, Homo sapiens
gcagtgagcctcagacctgcagtgtg

SEQ ID NO: 3667 - DNA, 26 bp, Homo sapiens
cagtgagcctcagacctgcagtgtgg

SEQ ID NO: 3668 - DNA, 26 bp, Homo sapiens
agtgagcctcagacctgcagtgtggt

SEQ ID NO: 3669 - DNA, 26 bp, Homo sapiens
gtgagcctcagacctgcagtgtggtc

SEQ ID NO: 3670 - DNA, 26 bp, Homo sapiens
tgagcctcagacctgcagtgtggtcc

SEQ ID NO: 3671 - DNA, 26 bp, Homo sapiens
gagcctcagacctgcagtgtggtcct

SEQ ID NO: 3672 - DNA, 26 bp, Homo sapiens
agcctcagacctgcagtgtggtcctt

SEQ ID NO: 3673 - DNA, 26 bp, Homo sapiens
gcctcagacctgcagtgtggtcctta

SEQ ID NO: 3674 - DNA, 26 bp, Homo sapiens
cctcagacctgcagtgtggtccttaa

SEQ ID NO: 3675 - DNA, 26 bp, Homo sapiens
ctcagacctgcagtgtggtccttaat

SEQ ID NO: 3676 - DNA, 26 bp, Homo sapiens
tcagacctgcagtgtggtccttaatc

SEQ ID NO: 3677 - DNA, 26 bp, Homo sapiens
cagacctgcagtgtggtccttaatcg

SEQ ID NO: 3678 - DNA, 26 bp, Homo sapiens
agacctgcagtgtggtccttaatcga

SEQ ID NO: 3679 - DNA, 26 bp, Homo sapiens
gacctgcagtgtggtccttaatcgag

SEQ ID NO: 3680 - DNA, 26 bp, Homo sapiens
acctgcagtgtggtccttaatcgagc

SEQ ID NO: 3681 - DNA, 26 bp, Homo sapiens
cctgcagtgtggtccttaatcgagcc

SEQ ID NO: 3682 - DNA, 26 bp, Homo sapiens
ctgcagtgtggtccttaatcgagcct

SEQ ID NO: 3683 - DNA, 26 bp, Homo sapiens
tgcagtgtggtccttaatcgagcctt

SEQ ID NO: 3684 - DNA, 26 bp, Homo sapiens
gcagtgtggtccttaatcgagccttg

SEQ ID NO: 3685 - DNA, 26 bp, Homo sapiens
cagtgtggtccttaatcgagccttgg

SEQ ID NO: 3686 - DNA, 26 bp, Homo sapiens
agtgtggtccttaatcgagccttggg

SEQ ID NO: 3687 - DNA, 26 bp, Homo sapiens
gtgtggtccttaatcgagccttgggc

SEQ ID NO: 3688 - DNA, 26 bp, Homo sapiens
tgtggtccttaatcgagccttgggct

SEQ ID NO: 3689 - DNA, 26 bp, Homo sapiens
gtggtccttaatcgagccttgggctg

SEQ ID NO: 3690 - DNA, 26 bp, Homo sapiens
tggtccttaatcgagccttgggctgg

SEQ ID NO: 3691 - DNA, 26 bp, Homo sapiens
ggtccttaatcgagccttgggctggg

SEQ ID NO: 3692 - DNA, 26 bp, Homo sapiens
gtccttaatcgagccttgggctggga

SEQ ID NO: 3693 - DNA, 26 bp, Homo sapiens
tccttaatcgagccttgggctgggac

SEQ ID NO: 3694 - DNA, 26 bp, Homo sapiens
ccttaatcgagccttgggctgggact

SEQ ID NO: 3695 - DNA, 26 bp, Homo sapiens
cttaatcgagccttgggctgggactc

SEQ ID NO: 3696 - DNA, 26 bp, Homo sapiens
ttaatcgagccttgggctgggactct

SEQ ID NO: 3697 - DNA, 26 bp, Homo sapiens
taatcgagccttgggctgggactctt

SEQ ID NO: 3698 - DNA, 26 bp, Homo sapiens
aatcgagccttgggctgggactcttc

SEQ ID NO: 3699 - DNA, 26 bp, Homo sapiens
atcgagccttgggctgggactcttct

SEQ ID NO: 3700 - DNA, 26 bp, Homo sapiens
tcgagccttgggctgggactcttcta

SEQ ID NO: 3701 - DNA, 26 bp, Homo sapiens
cgagccttgggctgggactcttctag

SEQ ID NO: 3702 - DNA, 26 bp, Homo sapiens
gagccttgggctgggactcttctagg

SEQ ID NO: 3703 - DNA, 26 bp, Homo sapiens
agccttgggctgggactcttctagga

SEQ ID NO: 3704 - DNA, 26 bp, Homo sapiens
gccttgggctgggactcttctaggag

SEQ ID NO: 3705 - DNA, 26 bp, Homo sapiens
ccttgggctgggactcttctaggagc

SEQ ID NO: 3706 - DNA, 26 bp, Homo sapiens
cttgggctgggactcttctaggagcg

SEQ ID NO: 3707 - DNA, 26 bp, Homo sapiens
ttgggctgggactcttctaggagcgc

SEQ ID NO: 3708 - DNA, 26 bp, Homo sapiens
tgggctgggactcttctaggagcgcc

SEQ ID NO: 3709 - DNA, 26 bp, Homo sapiens
gggctgggactcttctaggagcgcct

SEQ ID NO: 3710 - DNA, 26 bp, Homo sapiens
ggctgggactcttctaggagcgcctg

SEQ ID NO: 3711 - DNA, 26 bp, Homo sapiens
gctgggactcttctaggagcgcctga

SEQ ID NO: 3712 - DNA, 26 bp, Homo sapiens
ctgggactcttctaggagcgcctgaa

SEQ ID NO: 3713 - DNA, 26 bp, Homo sapiens
tgggactcttctaggagcgcctgaag

SEQ ID NO: 3714 - DNA, 26 bp, Homo sapiens
gggactcttctaggagcgcctgaaga

SEQ ID NO: 3715 - DNA, 26 bp, Homo sapiens
ggactcttctaggagcgcctgaagac

SEQ ID NO: 3716 - DNA, 26 bp, Homo sapiens
gactcttctaggagcgcctgaagact

SEQ ID NO: 3717 - DNA, 26 bp, Homo sapiens
actcttctaggagcgcctgaagactt

SEQ ID NO: 3718 - DNA, 26 bp, Homo sapiens
ctcttctaggagcgcctgaagactta

SEQ ID NO: 3719 - DNA, 26 bp, Homo sapiens
tcttctaggagcgcctgaagacttat

SEQ ID NO: 3720 - DNA, 26 bp, Homo sapiens
cttctaggagcgcctgaagacttatt

SEQ ID NO: 3721 - DNA, 26 bp, Homo sapiens
ttctaggagcgcctgaagacttattt

SEQ ID NO: 3722 - DNA, 26 bp, Homo sapiens
tctaggagcgcctgaagacttattta

SEQ ID NO: 3723 - DNA, 26 bp, Homo sapiens
ctaggagcgcctgaagacttatttat

SEQ ID NO: 3724 - DNA, 26 bp, Homo sapiens
taggagcgcctgaagacttatttatg

SEQ ID NO: 3725 - DNA, 26 bp, Homo sapiens
aggagcgcctgaagacttatttatgg

SEQ ID NO: 3726 - DNA, 26 bp, Homo sapiens
ggagcgcctgaagacttatttatggc

SEQ ID NO: 3727 - DNA, 26 bp, Homo sapiens
gagcgcctgaagacttatttatggcg

SEQ ID NO: 3728 - DNA, 26 bp, Homo sapiens
agcgcctgaagacttatttatggcga

SEQ ID NO: 3729 - DNA, 26 bp, Homo sapiens
gcgcctgaagacttatttatggcgac

SEQ ID NO: 3730 - DNA, 26 bp, Homo sapiens
cgcctgaagacttatttatggcgacc

SEQ ID NO: 3731 - DNA, 26 bp, Homo sapiens
gcctgaagacttatttatggcgaccg

SEQ ID NO: 3732 - DNA, 26 bp, Homo sapiens
cctgaagacttatttatggcgaccga

SEQ ID NO: 3733 - DNA, 26 bp, Homo sapiens
ctgaagacttatttatggcgaccgat

SEQ ID NO: 3734 - DNA, 26 bp, Homo sapiens
tgaagacttatttatggcgaccgatg

SEQ ID NO: 3735 - DNA, 26 bp, Homo sapiens
gaagacttatttatggcgaccgatgg

SEQ ID NO: 3736 - DNA, 26 bp, Homo sapiens
aagacttatttatggcgaccgatggg

SEQ ID NO: 3737 - DNA, 26 bp, Homo sapiens
agacttatttatggcgaccgatggga

SEQ ID NO: 3738 - DNA, 26 bp, Homo sapiens
gacttatttatggcgaccgatgggaa

SEQ ID NO: 3739 - DNA, 26 bp, Homo sapiens
acttatttatggcgaccgatgggaaa

SEQ ID NO: 3740 - DNA, 26 bp, Homo sapiens
cttatttatggcgaccgatgggaaaa

SEQ ID NO: 3741 - DNA, 26 bp, Homo sapiens
ttatttatggcgaccgatgggaaaat

SEQ ID NO: 3742 - DNA, 26 bp, Homo sapiens
tatttatggcgaccgatgggaaaata

SEQ ID NO: 3743 - DNA, 26 bp, Homo sapiens
atttatggcgaccgatgggaaaatat

SEQ ID NO: 3744 - DNA, 26 bp, Homo sapiens
tttatggcgaccgatgggaaaatatt

SEQ ID NO: 3745 - DNA, 26 bp, Homo sapiens
ttatggcgaccgatgggaaaatatta

SEQ ID NO: 3746 - DNA, 26 bp, Homo sapiens
tatggcgaccgatgggaaaatattaa

SEQ ID NO: 3747 - DNA, 26 bp, Homo sapiens
atggcgaccgatgggaaaatattaag

SEQ ID NO: 3748 - DNA, 26 bp, Homo sapiens
tggcgaccgatgggaaaatattaagt

SEQ ID NO: 3749 - DNA, 26 bp, Homo sapiens
ggcgaccgatgggaaaatattaagtg

SEQ ID NO: 3750 - DNA, 26 bp, Homo sapiens
gcgaccgatgggaaaatattaagtga

SEQ ID NO: 3751 - DNA, 26 bp, Homo sapiens
cgaccgatgggaaaatattaagtgaa

SEQ ID NO: 3752 - DNA, 26 bp, Homo sapiens
gaccgatgggaaaatattaagtgaaa

SEQ ID NO: 3753 - DNA, 26 bp, Homo sapiens
accgatgggaaaatattaagtgaaac

SEQ ID NO: 3754 - DNA, 26 bp, Homo sapiens
ccgatgggaaaatattaagtgaaact

SEQ ID NO: 3755 - DNA, 26 bp, Homo sapiens
cgatgggaaaatattaagtgaaactc

SEQ ID NO: 3756 - DNA, 26 bp, Homo sapiens
gatgggaaaatattaagtgaaactcc

SEQ ID NO: 3757 - DNA, 26 bp, Homo sapiens
atgggaaaatattaagtgaaactcca

SEQ ID NO: 3758 - DNA, 26 bp, Homo sapiens
tgggaaaatattaagtgaaactccaa

SEQ ID NO: 3759 - DNA, 26 bp, Homo sapiens
gggaaaatattaagtgaaactccaaa

SEQ ID NO: 3760 - DNA, 26 bp, Homo sapiens
ggaaaatattaagtgaaactccaaaa

SEQ ID NO: 3761 - DNA, 26 bp, Homo sapiens
gaaaatattaagtgaaactccaaaat

SEQ ID NO: 3762 - DNA, 26 bp, Homo sapiens
aaaatattaagtgaaactccaaaatt

SEQ ID NO: 3763 - DNA, 26 bp, Homo sapiens
aaatattaagtgaaactccaaaattc

SEQ ID NO: 3764 - DNA, 26 bp, Homo sapiens
aatattaagtgaaactccaaaattct

SEQ ID NO: 3765 - DNA, 26 bp, Homo sapiens
atattaagtgaaactccaaaattctc

SEQ ID NO: 3766 - DNA, 26 bp, Homo sapiens
tattaagtgaaactccaaaattctct

SEQ ID NO: 3767 - DNA, 26 bp, Homo sapiens
attaagtgaaactccaaaattctctc

SEQ ID NO: 3768 - DNA, 26 bp, Homo sapiens
ttaagtgaaactccaaaattctctcc

SEQ ID NO: 3769 - DNA, 26 bp, Homo sapiens
taagtgaaactccaaaattctctcca

SEQ ID NO: 3770 - DNA, 26 bp, Homo sapiens
aagtgaaactccaaaattctctccat

SEQ ID NO: 3771 - DNA, 26 bp, Homo sapiens
agtgaaactccaaaattctctccatt

SEQ ID NO: 3772 - DNA, 26 bp, Homo sapiens
gtgaaactccaaaattctctccatta

SEQ ID NO: 3773 - DNA, 26 bp, Homo sapiens
tgaaactccaaaattctctccattaa

SEQ ID NO: 3774 - DNA, 26 bp, Homo sapiens
gaaactccaaaattctctccattaac

SEQ ID NO: 3775 - DNA, 26 bp, Homo sapiens
aaactccaaaattctctccattaacc

SEQ ID NO: 3776 - DNA, 26 bp, Homo sapiens
aactccaaaattctctccattaacca

SEQ ID NO: 3777 - DNA, 26 bp, Homo sapiens
actccaaaattctctccattaaccaa

SEQ ID NO: 3778 - DNA, 26 bp, Homo sapiens
ctccaaaattctctccattaaccaac

SEQ ID NO: 3779 - DNA, 26 bp, Homo sapiens
tccaaaattctctccattaaccaaca

SEQ ID NO: 3780 - DNA, 26 bp, Homo sapiens
ccaaaattctctccattaaccaacat

SEQ ID NO: 3781 - DNA, 26 bp, Homo sapiens
caaaattctctccattaaccaacatt

SEQ ID NO: 3782 - DNA, 26 bp, Homo sapiens
aaaattctctccattaaccaacattt

SEQ ID NO: 3783 - DNA, 26 bp, Homo sapiens
aaattctctccattaaccaacatttt

SEQ ID NO: 3784 - DNA, 26 bp, Homo sapiens
aattctctccattaaccaacattttc

SEQ ID NO: 3785 - DNA, 26 bp, Homo sapiens
attctctccattaaccaacattttca

SEQ ID NO: 3786 - DNA, 26 bp, Homo sapiens
ttctctccattaaccaacattttcag

SEQ ID NO: 3787 - DNA, 26 bp, Homo sapiens
tctctccattaaccaacattttcagg

SEQ ID NO: 3788 - DNA, 26 bp, Homo sapiens
ctctccattaaccaacattttcagga

SEQ ID NO: 3789 - DNA, 26 bp, Homo sapiens
tctccattaaccaacattttcaggaa

SEQ ID NO: 3790 - DNA, 26 bp, Homo sapiens
ctccattaaccaacattttcaggaat

SEQ ID NO: 3791 - DNA, 26 bp, Homo sapiens
tccattaaccaacattttcaggaatt

SEQ ID NO: 3792 - DNA, 26 bp, Homo sapiens
ccattaaccaacattttcaggaattg

SEQ ID NO: 3793 - DNA, 26 bp, Homo sapiens
cattaaccaacattttcaggaattga

SEQ ID NO: 3794 - DNA, 26 bp, Homo sapiens
attaaccaacattttcaggaattgaa

SEQ ID NO: 3795 - DNA, 26 bp, Homo sapiens
ttaaccaacattttcaggaattgaag

SEQ ID NO: 3796 - DNA, 26 bp, Homo sapiens
taaccaacattttcaggaattgaagt

SEQ ID NO: 3797 - DNA, 26 bp, Homo sapiens
aaccaacattttcaggaattgaagtt

SEQ ID NO: 3798 - DNA, 26 bp, Homo sapiens
accaacattttcaggaattgaagtta

SEQ ID NO: 3799 - DNA, 26 bp, Homo sapiens
ccaacattttcaggaattgaagttag

SEQ ID NO: 3800 - DNA, 26 bp, Homo sapiens
caacattttcaggaattgaagttagg

SEQ ID NO: 3801 - DNA, 26 bp, Homo sapiens
aacattttcaggaattgaagttaggg

SEQ ID NO: 3802 - DNA, 26 bp, Homo sapiens
acattttcaggaattgaagttagggt

SEQ ID NO: 3803 - DNA, 26 bp, Homo sapiens
cattttcaggaattgaagttagggtg

SEQ ID NO: 3804 - DNA, 26 bp, Homo sapiens
attttcaggaattgaagttagggtgc

SEQ ID NO: 3805 - DNA, 26 bp, Homo sapiens
ttttcaggaattgaagttagggtgct

SEQ ID NO: 3806 - DNA, 26 bp, Homo sapiens
tttcaggaattgaagttagggtgctt

SEQ ID NO: 3807 - DNA, 26 bp, Homo sapiens
ttcaggaattgaagttagggtgctta

SEQ ID NO: 3808 - DNA, 26 bp, Homo sapiens
tcaggaattgaagttagggtgcttat

SEQ ID NO: 3809 - DNA, 26 bp, Homo sapiens
caggaattgaagttagggtgcttatt

SEQ ID NO: 3810 - DNA, 26 bp, Homo sapiens
aggaattgaagttagggtgcttattt

SEQ ID NO: 3811 - DNA, 26 bp, Homo sapiens
ggaattgaagttagggtgcttatttc

SEQ ID NO: 3812 - DNA, 26 bp, Homo sapiens
gaattgaagttagggtgcttatttct

SEQ ID NO: 3813 - DNA, 26 bp, Homo sapiens
aattgaagttagggtgcttatttcta

SEQ ID NO: 3814 - DNA, 26 bp, Homo sapiens
attgaagttagggtgcttatttctat

SEQ ID NO: 3815 - DNA, 26 bp, Homo sapiens
ttgaagttagggtgcttatttctata

SEQ ID NO: 3816 - DNA, 26 bp, Homo sapiens
tgaagttagggtgcttatttctataa

SEQ ID NO: 3817 - DNA, 26 bp, Homo sapiens
gaagttagggtgcttatttctataac

SEQ ID NO: 3818 - DNA, 26 bp, Homo sapiens
aagttagggtgcttatttctataaca

SEQ ID NO: 3819 - DNA, 26 bp, Homo sapiens
agttagggtgcttatttctataacac

SEQ ID NO: 3820 - DNA, 26 bp, Homo sapiens
gttagggtgcttatttctataacact

SEQ ID NO: 3821 - DNA, 26 bp, Homo sapiens
ttagggtgcttatttctataacacta

SEQ ID NO: 3822 - DNA, 26 bp, Homo sapiens
tagggtgcttatttctataacactat

SEQ ID NO: 3823 - DNA, 26 bp, Homo sapiens
agggtgcttatttctataacactatt

SEQ ID NO: 3824 - DNA, 26 bp, Homo sapiens
gggtgcttatttctataacactattc

SEQ ID NO: 3825 - DNA, 26 bp, Homo sapiens
ggtgcttatttctataacactattcc

SEQ ID NO: 3826 - DNA, 26 bp, Homo sapiens
gtgcttatttctataacactattcct

SEQ ID NO: 3827 - DNA, 26 bp, Homo sapiens
tgcttatttctataacactattccta

SEQ ID NO: 3828 - DNA, 26 bp, Homo sapiens
gcttatttctataacactattcctaa

SEQ ID NO: 3829 - DNA, 26 bp, Homo sapiens
cttatttctataacactattcctaag

SEQ ID NO: 3830 - DNA, 26 bp, Homo sapiens
ttatttctataacactattcctaaga

SEQ ID NO: 3831 - DNA, 26 bp, Homo sapiens
tatttctataacactattcctaagag

SEQ ID NO: 3832 - DNA, 26 bp, Homo sapiens
atttctataacactattcctaagagc

SEQ ID NO: 3833 - DNA, 26 bp, Homo sapiens
tttctataacactattcctaagagct

SEQ ID NO: 3834 - DNA, 26 bp, Homo sapiens
ttctataacactattcctaagagctt

SEQ ID NO: 3835 - DNA, 26 bp, Homo sapiens
tctataacactattcctaagagctta

SEQ ID NO: 3836 - DNA, 26 bp, Homo sapiens
ctataacactattcctaagagcttag

SEQ ID NO: 3837 - DNA, 26 bp, Homo sapiens
tataacactattcctaagagcttagc

SEQ ID NO: 3838 - DNA, 26 bp, Homo sapiens
ataacactattcctaagagcttagct

SEQ ID NO: 3839 - DNA, 26 bp, Homo sapiens
taacactattcctaagagcttagctc

SEQ ID NO: 3840 - DNA, 26 bp, Homo sapiens
aacactattcctaagagcttagctct

SEQ ID NO: 3841 - DNA, 26 bp, Homo sapiens
acactattcctaagagcttagctctc

SEQ ID NO: 3842 - DNA, 26 bp, Homo sapiens
cactattcctaagagcttagctctct

SEQ ID NO: 3843 - DNA, 26 bp, Homo sapiens
actattcctaagagcttagctctctg

SEQ ID NO: 3844 - DNA, 26 bp, Homo sapiens
ctattcctaagagcttagctctctgc

SEQ ID NO: 3845 - DNA, 26 bp, Homo sapiens
tattcctaagagcttagctctctgcc

SEQ ID NO: 3846 - DNA, 26 bp, Homo sapiens
attcctaagagcttagctctctgccc

SEQ ID NO: 3847 - DNA, 26 bp, Homo sapiens
ttcctaagagcttagctctctgccct

SEQ ID NO: 3848 - DNA, 26 bp, Homo sapiens
tcctaagagcttagctctctgccctg

SEQ ID NO: 3849 - DNA, 26 bp, Homo sapiens
cctaagagcttagctctctgccctgc

SEQ ID NO: 3850 - DNA, 26 bp, Homo sapiens
ctaagagcttagctctctgccctgca

SEQ ID NO: 3851 - DNA, 26 bp, Homo sapiens
taagagcttagctctctgccctgcaa

SEQ ID NO: 3852 - DNA, 26 bp, Homo sapiens
aagagcttagctctctgccctgcaaa

SEQ ID NO: 3853 - DNA, 26 bp, Homo sapiens
agagcttagctctctgccctgcaaag

SEQ ID NO: 3854 - DNA, 26 bp, Homo sapiens
gagcttagctctctgccctgcaaagg

SEQ ID NO: 3855 - DNA, 26 bp, Homo sapiens
agcttagctctctgccctgcaaaggg

SEQ ID NO: 3856 - DNA, 26 bp, Homo sapiens
gcttagctctctgccctgcaaaggga

SEQ ID NO: 3857 - DNA, 26 bp, Homo sapiens
cttagctctctgccctgcaaagggaa

SEQ ID NO: 3858 - DNA, 26 bp, Homo sapiens
ttagctctctgccctgcaaagggaaa

SEQ ID NO: 3859 - DNA, 26 bp, Homo sapiens
tagctctctgccctgcaaagggaaat

SEQ ID NO: 3860 - DNA, 26 bp, Homo sapiens
agctctctgccctgcaaagggaaatg

SEQ ID NO: 3861 - DNA, 26 bp, Homo sapiens
gctctctgccctgcaaagggaaatgc

SEQ ID NO: 3862 - DNA, 26 bp, Homo sapiens
ctctctgccctgcaaagggaaatgca

SEQ ID NO: 3863 - DNA, 26 bp, Homo sapiens
tctctgccctgcaaagggaaatgcat

SEQ ID NO: 3864 - DNA, 26 bp, Homo sapiens
ctctgccctgcaaagggaaatgcatt

SEQ ID NO: 3865 - DNA, 26 bp, Homo sapiens
tctgccctgcaaagggaaatgcattt

SEQ ID NO: 3866 - DNA, 26 bp, Homo sapiens
ctgccctgcaaagggaaatgcatttt

SEQ ID NO: 3867 - DNA, 26 bp, Homo sapiens
tgccctgcaaagggaaatgcatttta

SEQ ID NO: 3868 - DNA, 26 bp, Homo sapiens
gccctgcaaagggaaatgcattttag

SEQ ID NO: 3869 - DNA, 26 bp, Homo sapiens
ccctgcaaagggaaatgcattttagt

SEQ ID NO: 3870 - DNA, 26 bp, Homo sapiens
cctgcaaagggaaatgcattttagtt

SEQ ID NO: 3871 - DNA, 26 bp, Homo sapiens
ctgcaaagggaaatgcattttagttc

SEQ ID NO: 3872 - DNA, 26 bp, Homo sapiens
tgcaaagggaaatgcattttagttcg

SEQ ID NO: 3873 - DNA, 26 bp, Homo sapiens
gcaaagggaaatgcattttagttcgg

SEQ ID NO: 3874 - DNA, 26 bp, Homo sapiens
caaagggaaatgcattttagttcggt

SEQ ID NO: 3875 - DNA, 26 bp, Homo sapiens
aaagggaaatgcattttagttcggtt

SEQ ID NO: 3876 - DNA, 26 bp, Homo sapiens
aagggaaatgcattttagttcggttc

SEQ ID NO: 3877 - DNA, 26 bp, Homo sapiens
agggaaatgcattttagttcggttcc

SEQ ID NO: 3878 - DNA, 26 bp, Homo sapiens
gggaaatgcattttagttcggttcct

SEQ ID NO: 3879 - DNA, 26 bp, Homo sapiens
ggaaatgcattttagttcggttcctt

SEQ ID NO: 3880 - DNA, 26 bp, Homo sapiens
gaaatgcattttagttcggttccttt

SEQ ID NO: 3881 - DNA, 26 bp, Homo sapiens
aaatgcattttagttcggttcctttc

SEQ ID NO: 3882 - DNA, 26 bp, Homo sapiens
aatgcattttagttcggttcctttcc

SEQ ID NO: 3883 - DNA, 26 bp, Homo sapiens
atgcattttagttcggttcctttcca

SEQ ID NO: 3884 - DNA, 26 bp, Homo sapiens
tgcattttagttcggttcctttccat

SEQ ID NO: 3885 - DNA, 26 bp, Homo sapiens
gcattttagttcggttcctttccatt

SEQ ID NO: 3886 - DNA, 26 bp, Homo sapiens
cattttagttcggttcctttccattt

SEQ ID NO: 3887 - DNA, 26 bp, Homo sapiens
attttagttcggttcctttccatttc

SEQ ID NO: 3888 - DNA, 26 bp, Homo sapiens
ttttagttcggttcctttccatttcc

SEQ ID NO: 3889 - DNA, 26 bp, Homo sapiens
tttagttcggttcctttccatttcca

SEQ ID NO: 3890 - DNA, 26 bp, Homo sapiens
ttagttcggttcctttccatttccat

SEQ ID NO: 3891 - DNA, 26 bp, Homo sapiens
tagttcggttcctttccatttccatc

SEQ ID NO: 3892 - DNA, 26 bp, Homo sapiens
agttcggttcctttccatttccatcc

SEQ ID NO: 3893 - DNA, 26 bp, Homo sapiens
gttcggttcctttccatttccatcct

SEQ ID NO: 3894 - DNA, 26 bp, Homo sapiens
ttcggttcctttccatttccatcctc

SEQ ID NO: 3895 - DNA, 26 bp, Homo sapiens
tcggttcctttccatttccatcctcg

SEQ ID NO: 3896 - DNA, 26 bp, Homo sapiens
cggttcctttccatttccatcctcgc

SEQ ID NO: 3897 - DNA, 26 bp, Homo sapiens
ggttcctttccatttccatcctcgct

SEQ ID NO: 3898 - DNA, 26 bp, Homo sapiens
gttcctttccatttccatcctcgctg

SEQ ID NO: 3899 - DNA, 26 bp, Homo sapiens
ttcctttccatttccatcctcgctgt

SEQ ID NO: 3900 - DNA, 26 bp, Homo sapiens
tcctttccatttccatcctcgctgtt

SEQ ID NO: 3901 - DNA, 26 bp, Homo sapiens
cctttccatttccatcctcgctgttg

SEQ ID NO: 3902 - DNA, 26 bp, Homo sapiens
ctttccatttccatcctcgctgttgt

SEQ ID NO: 3903 - DNA, 26 bp, Homo sapiens
tttccatttccatcctcgctgttgtt

SEQ ID NO: 3904 - DNA, 26 bp, Homo sapiens
ttccatttccatcctcgctgttgttg

SEQ ID NO: 3905 - DNA, 26 bp, Homo sapiens
tccatttccatcctcgctgttgttgc

SEQ ID NO: 3906 - DNA, 26 bp, Homo sapiens
ccatttccatcctcgctgttgttgct

SEQ ID NO: 3907 - DNA, 26 bp, Homo sapiens
catttccatcctcgctgttgttgctg

SEQ ID NO: 3908 - DNA, 26 bp, Homo sapiens
atttccatcctcgctgttgttgctga

SEQ ID NO: 3909 - DNA, 26 bp, Homo sapiens
tttccatcctcgctgttgttgctgat

SEQ ID NO: 3910 - DNA, 26 bp, Homo sapiens
ttccatcctcgctgttgttgctgatg

SEQ ID NO: 3911 - DNA, 26 bp, Homo sapiens
tccatcctcgctgttgttgctgatgg

SEQ ID NO: 3912 - DNA, 26 bp, Homo sapiens
ccatcctcgctgttgttgctgatgga

SEQ ID NO: 3913 - DNA, 26 bp, Homo sapiens
catcctcgctgttgttgctgatggaa

SEQ ID NO: 3914 - DNA, 26 bp, Homo sapiens
atcctcgctgttgttgctgatggaaa

SEQ ID NO: 3915 - DNA, 26 bp, Homo sapiens
tcctcgctgttgttgctgatggaaaa

SEQ ID NO: 3916 - DNA, 26 bp, Homo sapiens
cctcgctgttgttgctgatggaaaag

SEQ ID NO: 3917 - DNA, 26 bp, Homo sapiens
ctcgctgttgttgctgatggaaaagt

SEQ ID NO: 3918 - DNA, 26 bp, Homo sapiens
tcgctgttgttgctgatggaaaagtg

SEQ ID NO: 3919 - DNA, 26 bp, Homo sapiens
cgctgttgttgctgatggaaaagtgc

SEQ ID NO: 3920 - DNA, 26 bp, Homo sapiens
gctgttgttgctgatggaaaagtgct

SEQ ID NO: 3921 - DNA, 26 bp, Homo sapiens
ctgttgttgctgatggaaaagtgctc

SEQ ID NO: 3922 - DNA, 26 bp, Homo sapiens
tgttgttgctgatggaaaagtgctca

SEQ ID NO: 3923 - DNA, 26 bp, Homo sapiens
gttgttgctgatggaaaagtgctcaa

SEQ ID NO: 3924 - DNA, 26 bp, Homo sapiens
ttgttgctgatggaaaagtgctcaac

SEQ ID NO: 3925 - DNA, 26 bp, Homo sapiens
tgttgctgatggaaaagtgctcaact

SEQ ID NO: 3926 - DNA, 26 bp, Homo sapiens
gttgctgatggaaaagtgctcaactg

SEQ ID NO: 3927 - DNA, 26 bp, Homo sapiens
ttgctgatggaaaagtgctcaactgc

SEQ ID NO: 3928 - DNA, 26 bp, Homo sapiens
tgctgatggaaaagtgctcaactgct

SEQ ID NO: 3929 - DNA, 26 bp, Homo sapiens
gctgatggaaaagtgctcaactgctc

SEQ ID NO: 3930 - DNA, 26 bp, Homo sapiens
ctgatggaaaagtgctcaactgctca

SEQ ID NO: 3931 - DNA, 26 bp, Homo sapiens
tgatggaaaagtgctcaactgctcag

SEQ ID NO: 3932 - DNA, 26 bp, Homo sapiens
gatggaaaagtgctcaactgctcagc

SEQ ID NO: 3933 - DNA, 26 bp, Homo sapiens
atggaaaagtgctcaactgctcagca

SEQ ID NO: 3934 - DNA, 26 bp, Homo sapiens
tggaaaagtgctcaactgctcagcat

SEQ ID NO: 3935 - DNA, 26 bp, Homo sapiens
ggaaaagtgctcaactgctcagcatg

SEQ ID NO: 3936 - DNA, 26 bp, Homo sapiens
gaaaagtgctcaactgctcagcatgt

SEQ ID NO: 3937 - DNA, 26 bp, Homo sapiens
aaaagtgctcaactgctcagcatgtt

SEQ ID NO: 3938 - DNA, 26 bp, Homo sapiens
aaagtgctcaactgctcagcatgttc

SEQ ID NO: 3939 - DNA, 26 bp, Homo sapiens
aagtgctcaactgctcagcatgttca

SEQ ID NO: 3940 - DNA, 26 bp, Homo sapiens
agtgctcaactgctcagcatgttcag

SEQ ID NO: 3941 - DNA, 26 bp, Homo sapiens
gtgctcaactgctcagcatgttcagt

SEQ ID NO: 3942 - DNA, 26 bp, Homo sapiens
tgctcaactgctcagcatgttcagtc

SEQ ID NO: 3943 - DNA, 26 bp, Homo sapiens
gctcaactgctcagcatgttcagtcg

SEQ ID NO: 3944 - DNA, 26 bp, Homo sapiens
ctcaactgctcagcatgttcagtcgg

SEQ ID NO: 3945 - DNA, 26 bp, Homo sapiens
tcaactgctcagcatgttcagtcgga

SEQ ID NO: 3946 - DNA, 26 bp, Homo sapiens
caactgctcagcatgttcagtcggag

SEQ ID NO: 3947 - DNA, 26 bp, Homo sapiens
aactgctcagcatgttcagtcggagc

SEQ ID NO: 3948 - DNA, 26 bp, Homo sapiens
actgctcagcatgttcagtcggagct

SEQ ID NO: 3949 - DNA, 26 bp, Homo sapiens
ctgctcagcatgttcagtcggagctc

SEQ ID NO: 3950 - DNA, 26 bp, Homo sapiens
tgctcagcatgttcagtcggagctct

SEQ ID NO: 3951 - DNA, 26 bp, Homo sapiens
gctcagcatgttcagtcggagctctc

SEQ ID NO: 3952 - DNA, 26 bp, Homo sapiens
ctcagcatgttcagtcggagctctct

SEQ ID NO: 3953 - DNA, 26 bp, Homo sapiens
tcagcatgttcagtcggagctctctt

SEQ ID NO: 3954 - DNA, 26 bp, Homo sapiens
cagcatgttcagtcggagctctctta

SEQ ID NO: 3955 - DNA, 26 bp, Homo sapiens
agcatgttcagtcggagctctcttac

SEQ ID NO: 3956 - DNA, 26 bp, Homo sapiens
gcatgttcagtcggagctctcttacc

SEQ ID NO: 3957 - DNA, 26 bp, Homo sapiens
catgttcagtcggagctctcttacca

SEQ ID NO: 3958 - DNA, 26 bp, Homo sapiens
atgttcagtcggagctctcttaccag

SEQ ID NO: 3959 - DNA, 26 bp, Homo sapiens
tgttcagtcggagctctcttaccagt

SEQ ID NO: 3960 - DNA, 26 bp, Homo sapiens
gttcagtcggagctctcttaccagta

SEQ ID NO: 3961 - DNA, 26 bp, Homo sapiens
ttcagtcggagctctcttaccagtaa

SEQ ID NO: 3962 - DNA, 26 bp, Homo sapiens
tcagtcggagctctcttaccagtaaa

SEQ ID NO: 3963 - DNA, 26 bp, Homo sapiens
cagtcggagctctcttaccagtaaag

SEQ ID NO: 3964 - DNA, 26 bp, Homo sapiens
agtcggagctctcttaccagtaaagc

SEQ ID NO: 3965 - DNA, 26 bp, Homo sapiens
gtcggagctctcttaccagtaaagct

SEQ ID NO: 3966 - DNA, 26 bp, Homo sapiens
tcggagctctcttaccagtaaagctc

SEQ ID NO: 3967 - DNA, 26 bp, Homo sapiens
cggagctctcttaccagtaaagctca

SEQ ID NO: 3968 - DNA, 26 bp, Homo sapiens
ggagctctcttaccagtaaagctcag

SEQ ID NO: 3969 - DNA, 26 bp, Homo sapiens
gagctctcttaccagtaaagctcaga

SEQ ID NO: 3970 - DNA, 26 bp, Homo sapiens
agctctcttaccagtaaagctcagag

SEQ ID NO: 3971 - DNA, 26 bp, Homo sapiens
gctctcttaccagtaaagctcagagg

SEQ ID NO: 3972 - DNA, 26 bp, Homo sapiens
ctctcttaccagtaaagctcagaggg

SEQ ID NO: 3973 - DNA, 26 bp, Homo sapiens
tctcttaccagtaaagctcagagggg

SEQ ID NO: 3974 - DNA, 26 bp, Homo sapiens
ctcttaccagtaaagctcagagggga

SEQ ID NO: 3975 - DNA, 26 bp, Homo sapiens
tcttaccagtaaagctcagaggggag

SEQ ID NO: 3976 - DNA, 26 bp, Homo sapiens
cttaccagtaaagctcagaggggagt

SEQ ID NO: 3977 - DNA, 26 bp, Homo sapiens
ttaccagtaaagctcagaggggagtg

SEQ ID NO: 3978 - DNA, 26 bp, Homo sapiens
taccagtaaagctcagaggggagtgt

SEQ ID NO: 3979 - DNA, 26 bp, Homo sapiens
accagtaaagctcagaggggagtgtg

SEQ ID NO: 3980 - DNA, 26 bp, Homo sapiens
ccagtaaagctcagaggggagtgtgg

SEQ ID NO: 3981 - DNA, 26 bp, Homo sapiens
cagtaaagctcagaggggagtgtgga

SEQ ID NO: 3982 - DNA, 26 bp, Homo sapiens
agtaaagctcagaggggagtgtggac

SEQ ID NO: 3983 - DNA, 26 bp, Homo sapiens
gtaaagctcagaggggagtgtggaca

SEQ ID NO: 3984 - DNA, 26 bp, Homo sapiens
taaagctcagaggggagtgtggacaa

SEQ ID NO: 3985 - DNA, 26 bp, Homo sapiens
aaagctcagaggggagtgtggacaag

SEQ ID NO: 3986 - DNA, 26 bp, Homo sapiens
aagctcagaggggagtgtggacaagg

SEQ ID NO: 3987 - DNA, 26 bp, Homo sapiens
agctcagaggggagtgtggacaaggc

SEQ ID NO: 3988 - DNA, 26 bp, Homo sapiens
gctcagaggggagtgtggacaaggca

SEQ ID NO: 3989 - DNA, 26 bp, Homo sapiens
ctcagaggggagtgtggacaaggcac

SEQ ID NO: 3990 - DNA, 26 bp, Homo sapiens
tcagaggggagtgtggacaaggcaca

SEQ ID NO: 3991 - DNA, 26 bp, Homo sapiens
cagaggggagtgtggacaaggcacat

SEQ ID NO: 3992 - DNA, 26 bp, Homo sapiens
agaggggagtgtggacaaggcacatc

SEQ ID NO: 3993 - DNA, 26 bp, Homo sapiens
gaggggagtgtggacaaggcacatca

SEQ ID NO: 3994 - DNA, 26 bp, Homo sapiens
aggggagtgtggacaaggcacatcag

SEQ ID NO: 3995 - DNA, 26 bp, Homo sapiens
ggggagtgtggacaaggcacatcagt

SEQ ID NO: 3996 - DNA, 26 bp, Homo sapiens
gggagtgtggacaaggcacatcagtg

SEQ ID NO: 3997 - DNA, 26 bp, Homo sapiens
ggagtgtggacaaggcacatcagtgc

SEQ ID NO: 3998 - DNA, 26 bp, Homo sapiens
gagtgtggacaaggcacatcagtgct

SEQ ID NO: 3999 - DNA, 26 bp, Homo sapiens
agtgtggacaaggcacatcagtgctc

SEQ ID NO: 4000 - DNA, 26 bp, Homo sapiens
gtgtggacaaggcacatcagtgctcc

SEQ ID NO: 4001 - DNA, 26 bp, Homo sapiens
tgtggacaaggcacatcagtgctcct

SEQ ID NO: 4002 - DNA, 26 bp, Homo sapiens
gtggacaaggcacatcagtgctccta

SEQ ID NO: 4003 - DNA, 26 bp, Homo sapiens
tggacaaggcacatcagtgctcctac

SEQ ID NO: 4004 - DNA, 26 bp, Homo sapiens
ggacaaggcacatcagtgctcctaca

SEQ ID NO: 4005 - DNA, 26 bp, Homo sapiens
gacaaggcacatcagtgctcctacag

SEQ ID NO: 4006 - DNA, 26 bp, Homo sapiens
acaaggcacatcagtgctcctacagg

SEQ ID NO: 4007 - DNA, 26 bp, Homo sapiens
caaggcacatcagtgctcctacagga

SEQ ID NO: 4008 - DNA, 26 bp, Homo sapiens
aaggcacatcagtgctcctacaggaa

SEQ ID NO: 4009 - DNA, 26 bp, Homo sapiens
aggcacatcagtgctcctacaggaag

SEQ ID NO: 4010 - DNA, 26 bp, Homo sapiens
ggcacatcagtgctcctacaggaagt

SEQ ID NO: 4011 - DNA, 26 bp, Homo sapiens
gcacatcagtgctcctacaggaagtg

SEQ ID NO: 4012 - DNA, 26 bp, Homo sapiens
cacatcagtgctcctacaggaagtgc

SEQ ID NO: 4013 - DNA, 26 bp, Homo sapiens
acatcagtgctcctacaggaagtgcc

SEQ ID NO: 4014 - DNA, 26 bp, Homo sapiens
catcagtgctcctacaggaagtgcct

SEQ ID NO: 4015 - DNA, 26 bp, Homo sapiens
atcagtgctcctacaggaagtgcctc

SEQ ID NO: 4016 - DNA, 26 bp, Homo sapiens
tcagtgctcctacaggaagtgcctcc

SEQ ID NO: 4017 - DNA, 26 bp, Homo sapiens
cagtgctcctacaggaagtgcctcct

SEQ ID NO: 4018 - DNA, 26 bp, Homo sapiens
agtgctcctacaggaagtgcctcctt

SEQ ID NO: 4019 - DNA, 26 bp, Homo sapiens
gtgctcctacaggaagtgcctccttg

SEQ ID NO: 4020 - DNA, 26 bp, Homo sapiens
tgctcctacaggaagtgcctccttgt

SEQ ID NO: 4021 - DNA, 26 bp, Homo sapiens
gctcctacaggaagtgcctccttgtt

SEQ ID NO: 4022 - DNA, 26 bp, Homo sapiens
ctcctacaggaagtgcctccttgttt

SEQ ID NO: 4023 - DNA, 26 bp, Homo sapiens
tcctacaggaagtgcctccttgtttc

SEQ ID NO: 4024 - DNA, 26 bp, Homo sapiens
cctacaggaagtgcctccttgtttct

SEQ ID NO: 4025 - DNA, 26 bp, Homo sapiens
ctacaggaagtgcctccttgtttctt

SEQ ID NO: 4026 - DNA, 26 bp, Homo sapiens
tacaggaagtgcctccttgtttcttc

SEQ ID NO: 4027 - DNA, 26 bp, Homo sapiens
acaggaagtgcctccttgtttcttca

SEQ ID NO: 4028 - DNA, 26 bp, Homo sapiens
caggaagtgcctccttgtttcttcac

SEQ ID NO: 4029 - DNA, 26 bp, Homo sapiens
aggaagtgcctccttgtttcttcact

SEQ ID NO: 4030 - DNA, 26 bp, Homo sapiens
ggaagtgcctccttgtttcttcactt

SEQ ID NO: 4031 - DNA, 26 bp, Homo sapiens
gaagtgcctccttgtttcttcacttg

SEQ ID NO: 4032 - DNA, 26 bp, Homo sapiens
aagtgcctccttgtttcttcacttgt

SEQ ID NO: 4033 - DNA, 26 bp, Homo sapiens
agtgcctccttgtttcttcacttgta

SEQ ID NO: 4034 - DNA, 26 bp, Homo sapiens
gtgcctccttgtttcttcacttgtac

SEQ ID NO: 4035 - DNA, 26 bp, Homo sapiens
tgcctccttgtttcttcacttgtact

SEQ ID NO: 4036 - DNA, 26 bp, Homo sapiens
gcctccttgtttcttcacttgtactc

SEQ ID NO: 4037 - DNA, 26 bp, Homo sapiens
cctccttgtttcttcacttgtactcc

SEQ ID NO: 4038 - DNA, 26 bp, Homo sapiens
ctccttgtttcttcacttgtactcct

SEQ ID NO: 4039 - DNA, 26 bp, Homo sapiens
tccttgtttcttcacttgtactcctc

SEQ ID NO: 4040 - DNA, 26 bp, Homo sapiens
ccttgtttcttcacttgtactcctct

SEQ ID NO: 4041 - DNA, 26 bp, Homo sapiens
cttgtttcttcacttgtactcctctc

SEQ ID NO: 4042 - DNA, 26 bp, Homo sapiens
ttgtttcttcacttgtactcctctct

SEQ ID NO: 4043 - DNA, 26 bp, Homo sapiens
tgtttcttcacttgtactcctctctc

SEQ ID NO: 4044 - DNA, 26 bp, Homo sapiens
gtttcttcacttgtactcctctctca

SEQ ID NO: 4045 - DNA, 26 bp, Homo sapiens
tttcttcacttgtactcctctctcaa

SEQ ID NO: 4046 - DNA, 26 bp, Homo sapiens
ttcttcacttgtactcctctctcaaa

SEQ ID NO: 4047 - DNA, 26 bp, Homo sapiens
tcttcacttgtactcctctctcaaag

SEQ ID NO: 4048 - DNA, 26 bp, Homo sapiens
cttcacttgtactcctctctcaaagg

SEQ ID NO: 4049 - DNA, 26 bp, Homo sapiens
ttcacttgtactcctctctcaaagga

SEQ ID NO: 4050 - DNA, 26 bp, Homo sapiens
tcacttgtactcctctctcaaaggaa

SEQ ID NO: 4051 - DNA, 26 bp, Homo sapiens
cacttgtactcctctctcaaaggaat

SEQ ID NO: 4052 - DNA, 26 bp, Homo sapiens
acttgtactcctctctcaaaggaatg

SEQ ID NO: 4053 - DNA, 26 bp, Homo sapiens
cttgtactcctctctcaaaggaatga

SEQ ID NO: 4054 - DNA, 26 bp, Homo sapiens
ttgtactcctctctcaaaggaatgat

SEQ ID NO: 4055 - DNA, 26 bp, Homo sapiens
tgtactcctctctcaaaggaatgatc

SEQ ID NO: 4056 - DNA, 26 bp, Homo sapiens
gtactcctctctcaaaggaatgatct

SEQ ID NO: 4057 - DNA, 26 bp, Homo sapiens
tactcctctctcaaaggaatgatctg

SEQ ID NO: 4058 - DNA, 26 bp, Homo sapiens
actcctctctcaaaggaatgatctgc

SEQ ID NO: 4059 - DNA, 26 bp, Homo sapiens
ctcctctctcaaaggaatgatctgca

SEQ ID NO: 4060 - DNA, 26 bp, Homo sapiens
tcctctctcaaaggaatgatctgcag

SEQ ID NO: 4061 - DNA, 26 bp, Homo sapiens
cctctctcaaaggaatgatctgcaga

SEQ ID NO: 4062 - DNA, 26 bp, Homo sapiens
ctctctcaaaggaatgatctgcagag

SEQ ID NO: 4063 - DNA, 26 bp, Homo sapiens
tctctcaaaggaatgatctgcagagc

SEQ ID NO: 4064 - DNA, 26 bp, Homo sapiens
ctctcaaaggaatgatctgcagagca

SEQ ID NO: 4065 - DNA, 26 bp, Homo sapiens
tctcaaaggaatgatctgcagagcaa

SEQ ID NO: 4066 - DNA, 26 bp, Homo sapiens
ctcaaaggaatgatctgcagagcaag

SEQ ID NO: 4067 - DNA, 26 bp, Homo sapiens
tcaaaggaatgatctgcagagcaagc

SEQ ID NO: 4068 - DNA, 26 bp, Homo sapiens
caaaggaatgatctgcagagcaagca

SEQ ID NO: 4069 - DNA, 26 bp, Homo sapiens
aaaggaatgatctgcagagcaagcag

SEQ ID NO: 4070 - DNA, 26 bp, Homo sapiens
aaggaatgatctgcagagcaagcagc

SEQ ID NO: 4071 - DNA, 26 bp, Homo sapiens
aggaatgatctgcagagcaagcagct

SEQ ID NO: 4072 - DNA, 26 bp, Homo sapiens
ggaatgatctgcagagcaagcagctc

SEQ ID NO: 4073 - DNA, 26 bp, Homo sapiens
gaatgatctgcagagcaagcagctct

SEQ ID NO: 4074 - DNA, 26 bp, Homo sapiens
aatgatctgcagagcaagcagctctg

SEQ ID NO: 4075 - DNA, 26 bp, Homo sapiens
atgatctgcagagcaagcagctctgc

SEQ ID NO: 4076 - DNA, 26 bp, Homo sapiens
tgatctgcagagcaagcagctctgcc

SEQ ID NO: 4077 - DNA, 26 bp, Homo sapiens
gatctgcagagcaagcagctctgcca

SEQ ID NO: 4078 - DNA, 26 bp, Homo sapiens
atctgcagagcaagcagctctgccac

SEQ ID NO: 4079 - DNA, 26 bp, Homo sapiens
tctgcagagcaagcagctctgccacc

SEQ ID NO: 4080 - DNA, 26 bp, Homo sapiens
ctgcagagcaagcagctctgccacct

SEQ ID NO: 4081 - DNA, 26 bp, Homo sapiens
tgcagagcaagcagctctgccacctt

SEQ ID NO: 4082 - DNA, 26 bp, Homo sapiens
gcagagcaagcagctctgccaccttg

SEQ ID NO: 4083 - DNA, 26 bp, Homo sapiens
cagagcaagcagctctgccaccttgg

SEQ ID NO: 4084 - DNA, 26 bp, Homo sapiens
agagcaagcagctctgccaccttgga

SEQ ID NO: 4085 - DNA, 26 bp, Homo sapiens
gagcaagcagctctgccaccttggaa

SEQ ID NO: 4086 - DNA, 26 bp, Homo sapiens
agcaagcagctctgccaccttggaaa

SEQ ID NO: 4087 - DNA, 26 bp, Homo sapiens
gcaagcagctctgccaccttggaaaa

SEQ ID NO: 4088 - DNA, 26 bp, Homo sapiens
caagcagctctgccaccttggaaaat

SEQ ID NO: 4089 - DNA, 26 bp, Homo sapiens
aagcagctctgccaccttggaaaatg

SEQ ID NO: 4090 - DNA, 26 bp, Homo sapiens
agcagctctgccaccttggaaaatga

SEQ ID NO: 4091 - DNA, 26 bp, Homo sapiens
gcagctctgccaccttggaaaatgat

SEQ ID NO: 4092 - DNA, 26 bp, Homo sapiens
cagctctgccaccttggaaaatgatg

SEQ ID NO: 4093 - DNA, 26 bp, Homo sapiens
agctctgccaccttggaaaatgatgc

SEQ ID NO: 4094 - DNA, 26 bp, Homo sapiens
gctctgccaccttggaaaatgatgca

SEQ ID NO: 4095 - DNA, 26 bp, Homo sapiens
ctctgccaccttggaaaatgatgcac

SEQ ID NO: 4096 - DNA, 26 bp, Homo sapiens
tctgccaccttggaaaatgatgcaca

SEQ ID NO: 4097 - DNA, 26 bp, Homo sapiens
ctgccaccttggaaaatgatgcacac

SEQ ID NO: 4098 - DNA, 26 bp, Homo sapiens
tgccaccttggaaaatgatgcacacc

SEQ ID NO: 4099 - DNA, 26 bp, Homo sapiens
gccaccttggaaaatgatgcacacca

SEQ ID NO: 4100 - DNA, 26 bp, Homo sapiens
ccaccttggaaaatgatgcacaccag

SEQ ID NO: 4101 - DNA, 26 bp, Homo sapiens
caccttggaaaatgatgcacaccagc

SEQ ID NO: 4102 - DNA, 26 bp, Homo sapiens
accttggaaaatgatgcacaccagct

SEQ ID NO: 4103 - DNA, 26 bp, Homo sapiens
ccttggaaaatgatgcacaccagctt

SEQ ID NO: 4104 - DNA, 26 bp, Homo sapiens
cttggaaaatgatgcacaccagcttc

SEQ ID NO: 4105 - DNA, 26 bp, Homo sapiens
ttggaaaatgatgcacaccagcttct

SEQ ID NO: 4106 - DNA, 26 bp, Homo sapiens
tggaaaatgatgcacaccagcttctg

SEQ ID NO: 4107 - DNA, 26 bp, Homo sapiens
ggaaaatgatgcacaccagcttctgg

SEQ ID NO: 4108 - DNA, 26 bp, Homo sapiens
gaaaatgatgcacaccagcttctggg

SEQ ID NO: 4109 - DNA, 26 bp, Homo sapiens
aaaatgatgcacaccagcttctggga

SEQ ID NO: 4110 - DNA, 26 bp, Homo sapiens
aaatgatgcacaccagcttctgggac

SEQ ID NO: 4111 - DNA, 26 bp, Homo sapiens
aatgatgcacaccagcttctgggact

SEQ ID NO: 4112 - DNA, 26 bp, Homo sapiens
atgatgcacaccagcttctgggactt

SEQ ID NO: 4113 - DNA, 26 bp, Homo sapiens
tgatgcacaccagcttctgggacttc

SEQ ID NO: 4114 - DNA, 26 bp, Homo sapiens
gatgcacaccagcttctgggacttca

SEQ ID NO: 4115 - DNA, 26 bp, Homo sapiens
atgcacaccagcttctgggacttcac

SEQ ID NO: 4116 - DNA, 26 bp, Homo sapiens
tgcacaccagcttctgggacttcacc

SEQ ID NO: 4117 - DNA, 26 bp, Homo sapiens
gcacaccagcttctgggacttcaccc

SEQ ID NO: 4118 - DNA, 26 bp, Homo sapiens
cacaccagcttctgggacttcaccca

SEQ ID NO: 4119 - DNA, 26 bp, Homo sapiens
acaccagcttctgggacttcacccag

SEQ ID NO: 4120 - DNA, 26 bp, Homo sapiens
caccagcttctgggacttcacccagg

SEQ ID NO: 4121 - DNA, 26 bp, Homo sapiens
accagcttctgggacttcacccaggc

SEQ ID NO: 4122 - DNA, 26 bp, Homo sapiens
ccagcttctgggacttcacccaggct

SEQ ID NO: 4123 - DNA, 26 bp, Homo sapiens
cagcttctgggacttcacccaggcta

SEQ ID NO: 4124 - DNA, 26 bp, Homo sapiens
agcttctgggacttcacccaggctac

SEQ ID NO: 4125 - DNA, 26 bp, Homo sapiens
gcttctgggacttcacccaggctacg

SEQ ID NO: 4126 - DNA, 26 bp, Homo sapiens
cttctgggacttcacccaggctacgg

SEQ ID NO: 4127 - DNA, 26 bp, Homo sapiens
ttctgggacttcacccaggctacgga

SEQ ID NO: 4128 - DNA, 26 bp, Homo sapiens
tctgggacttcacccaggctacggag

SEQ ID NO: 4129 - DNA, 26 bp, Homo sapiens
ctgggacttcacccaggctacggaga

SEQ ID NO: 4130 - DNA, 26 bp, Homo sapiens
tgggacttcacccaggctacggagag

SEQ ID NO: 4131 - DNA, 26 bp, Homo sapiens
gggacttcacccaggctacggagaga

SEQ ID NO: 4132 - DNA, 26 bp, Homo sapiens
ggacttcacccaggctacggagagat

SEQ ID NO: 4133 - DNA, 26 bp, Homo sapiens
gacttcacccaggctacggagagatg

SEQ ID NO: 4134 - DNA, 26 bp, Homo sapiens
acttcacccaggctacggagagatgc

SEQ ID NO: 4135 - DNA, 26 bp, Homo sapiens
cttcacccaggctacggagagatgct

SEQ ID NO: 4136 - DNA, 26 bp, Homo sapiens
ttcacccaggctacggagagatgctg

SEQ ID NO: 4137 - DNA, 26 bp, Homo sapiens
tcacccaggctacggagagatgctgg

SEQ ID NO: 4138 - DNA, 26 bp, Homo sapiens
cacccaggctacggagagatgctgga

SEQ ID NO: 4139 - DNA, 26 bp, Homo sapiens
acccaggctacggagagatgctggag

SEQ ID NO: 4140 - DNA, 26 bp, Homo sapiens
cccaggctacggagagatgctggaga

SEQ ID NO: 4141 - DNA, 26 bp, Homo sapiens
ccaggctacggagagatgctggagag

SEQ ID NO: 4142 - DNA, 26 bp, Homo sapiens
caggctacggagagatgctggagagc

SEQ ID NO: 4143 - DNA, 26 bp, Homo sapiens
aggctacggagagatgctggagagct

SEQ ID NO: 4144 - DNA, 26 bp, Homo sapiens
ggctacggagagatgctggagagctg

SEQ ID NO: 4145 - DNA, 26 bp, Homo sapiens
gctacggagagatgctggagagctgc

SEQ ID NO: 4146 - DNA, 26 bp, Homo sapiens
ctacggagagatgctggagagctgct

SEQ ID NO: 4147 - DNA, 26 bp, Homo sapiens
tacggagagatgctggagagctgctg

SEQ ID NO: 4148 - DNA, 26 bp, Homo sapiens
acggagagatgctggagagctgctgc

SEQ ID NO: 4149 - DNA, 26 bp, Homo sapiens
cggagagatgctggagagctgctgct

SEQ ID NO: 4150 - DNA, 26 bp, Homo sapiens
ggagagatgctggagagctgctgctt

SEQ ID NO: 4151 - DNA, 26 bp, Homo sapiens
gagagatgctggagagctgctgcttg

SEQ ID NO: 4152 - DNA, 26 bp, Homo sapiens
agagatgctggagagctgctgcttgt

SEQ ID NO: 4153 - DNA, 26 bp, Homo sapiens
gagatgctggagagctgctgcttgtg

SEQ ID NO: 4154 - DNA, 26 bp, Homo sapiens
agatgctggagagctgctgcttgtga

SEQ ID NO: 4155 - DNA, 26 bp, Homo sapiens
gatgctggagagctgctgcttgtgaa

SEQ ID NO: 4156 - DNA, 26 bp, Homo sapiens
atgctggagagctgctgcttgtgaat

SEQ ID NO: 4157 - DNA, 26 bp, Homo sapiens
tgctggagagctgctgcttgtgaatt

SEQ ID NO: 4158 - DNA, 26 bp, Homo sapiens
gctggagagctgctgcttgtgaatta

SEQ ID NO: 4159 - DNA, 26 bp, Homo sapiens
ctggagagctgctgcttgtgaattac

SEQ ID NO: 4160 - DNA, 26 bp, Homo sapiens
tggagagctgctgcttgtgaattaca

SEQ ID NO: 4161 - DNA, 26 bp, Homo sapiens
ggagagctgctgcttgtgaattacaa

SEQ ID NO: 4162 - DNA, 26 bp, Homo sapiens
gagagctgctgcttgtgaattacaag

SEQ ID NO: 4163 - DNA, 26 bp, Homo sapiens
agagctgctgcttgtgaattacaaga

SEQ ID NO: 4164 - DNA, 26 bp, Homo sapiens
gagctgctgcttgtgaattacaagaa

SEQ ID NO: 4165 - DNA, 26 bp, Homo sapiens
agctgctgcttgtgaattacaagaaa

SEQ ID NO: 4166 - DNA, 26 bp, Homo sapiens
gctgctgcttgtgaattacaagaaag

SEQ ID NO: 4167 - DNA, 26 bp, Homo sapiens
ctgctgcttgtgaattacaagaaagc

SEQ ID NO: 4168 - DNA, 26 bp, Homo sapiens
tgctgcttgtgaattacaagaaagcc

SEQ ID NO: 4169 - DNA, 26 bp, Homo sapiens
gctgcttgtgaattacaagaaagcct

SEQ ID NO: 4170 - DNA, 26 bp, Homo sapiens
ctgcttgtgaattacaagaaagcctt

SEQ ID NO: 4171 - DNA, 26 bp, Homo sapiens
tgcttgtgaattacaagaaagccttc

SEQ ID NO: 4172 - DNA, 26 bp, Homo sapiens
gcttgtgaattacaagaaagccttca

SEQ ID NO: 4173 - DNA, 26 bp, Homo sapiens
cttgtgaattacaagaaagccttcaa

SEQ ID NO: 4174 - DNA, 26 bp, Homo sapiens
ttgtgaattacaagaaagccttcaat

SEQ ID NO: 4175 - DNA, 26 bp, Homo sapiens
tgtgaattacaagaaagccttcaatt

SEQ ID NO: 4176 - DNA, 26 bp, Homo sapiens
gtgaattacaagaaagccttcaattt

SEQ ID NO: 4177 - DNA, 26 bp, Homo sapiens
tgaattacaagaaagccttcaatttg

SEQ ID NO: 4178 - DNA, 26 bp, Homo sapiens
gaattacaagaaagccttcaatttgg

SEQ ID NO: 4179 - DNA, 26 bp, Homo sapiens
aattacaagaaagccttcaatttggt

SEQ ID NO: 4180 - DNA, 26 bp, Homo sapiens
attacaagaaagccttcaatttggtg

SEQ ID NO: 4181 - DNA, 26 bp, Homo sapiens
ttacaagaaagccttcaatttggtgg

SEQ ID NO: 4182 - DNA, 26 bp, Homo sapiens
tacaagaaagccttcaatttggtggt

SEQ ID NO: 4183 - DNA, 26 bp, Homo sapiens
acaagaaagccttcaatttggtggtc

SEQ ID NO: 4184 - DNA, 26 bp, Homo sapiens
caagaaagccttcaatttggtggtcc

SEQ ID NO: 4185 - DNA, 26 bp, Homo sapiens
aagaaagccttcaatttggtggtcca

SEQ ID NO: 4186 - DNA, 26 bp, Homo sapiens
agaaagccttcaatttggtggtccac

SEQ ID NO: 4187 - DNA, 26 bp, Homo sapiens
gaaagccttcaatttggtggtccaca

SEQ ID NO: 4188 - DNA, 26 bp, Homo sapiens
aaagccttcaatttggtggtccacaa

SEQ ID NO: 4189 - DNA, 26 bp, Homo sapiens
aagccttcaatttggtggtccacaag

SEQ ID NO: 4190 - DNA, 26 bp, Homo sapiens
agccttcaatttggtggtccacaaga

SEQ ID NO: 4191 - DNA, 26 bp, Homo sapiens
gccttcaatttggtggtccacaagaa

SEQ ID NO: 4192 - DNA, 26 bp, Homo sapiens
ccttcaatttggtggtccacaagaaa

SEQ ID NO: 4193 - DNA, 26 bp, Homo sapiens
cttcaatttggtggtccacaagaaag

SEQ ID NO: 4194 - DNA, 26 bp, Homo sapiens
ttcaatttggtggtccacaagaaaga

SEQ ID NO: 4195 - DNA, 26 bp, Homo sapiens
tcaatttggtggtccacaagaaagaa

SEQ ID NO: 4196 - DNA, 26 bp, Homo sapiens
caatttggtggtccacaagaaagaat

SEQ ID NO: 4197 - DNA, 26 bp, Homo sapiens
aatttggtggtccacaagaaagaatg

SEQ ID NO: 4198 - DNA, 26 bp, Homo sapiens
atttggtggtccacaagaaagaatgt

SEQ ID NO: 4199 - DNA, 26 bp, Homo sapiens
tttggtggtccacaagaaagaatgtg

SEQ ID NO: 4200 - DNA, 26 bp, Homo sapiens
ttggtggtccacaagaaagaatgtga

SEQ ID NO: 4201 - DNA, 26 bp, Homo sapiens
tggtggtccacaagaaagaatgtgat

SEQ ID NO: 4202 - DNA, 26 bp, Homo sapiens
ggtggtccacaagaaagaatgtgata

SEQ ID NO: 4203 - DNA, 26 bp, Homo sapiens
gtggtccacaagaaagaatgtgatat

SEQ ID NO: 4204 - DNA, 26 bp, Homo sapiens
tggtccacaagaaagaatgtgatatg

SEQ ID NO: 4205 - DNA, 26 bp, Homo sapiens
ggtccacaagaaagaatgtgatatgg

SEQ ID NO: 4206 - DNA, 26 bp, Homo sapiens
gtccacaagaaagaatgtgatatgga

SEQ ID NO: 4207 - DNA, 26 bp, Homo sapiens
tccacaagaaagaatgtgatatggat

SEQ ID NO: 4208 - DNA, 26 bp, Homo sapiens
ccacaagaaagaatgtgatatggatc

SEQ ID NO: 4209 - DNA, 26 bp, Homo sapiens
cacaagaaagaatgtgatatggatcc

SEQ ID NO: 4210 - DNA, 26 bp, Homo sapiens
acaagaaagaatgtgatatggatccc

SEQ ID NO: 4211 - DNA, 26 bp, Homo sapiens
caagaaagaatgtgatatggatcccc

SEQ ID NO: 4212 - DNA, 26 bp, Homo sapiens
aagaaagaatgtgatatggatcccct

SEQ ID NO: 4213 - DNA, 26 bp, Homo sapiens
agaaagaatgtgatatggatcccctc

SEQ ID NO: 4214 - DNA, 26 bp, Homo sapiens
gaaagaatgtgatatggatcccctca

SEQ ID NO: 4215 - DNA, 26 bp, Homo sapiens
aaagaatgtgatatggatcccctcat

SEQ ID NO: 4216 - DNA, 26 bp, Homo sapiens
aagaatgtgatatggatcccctcatt

SEQ ID NO: 4217 - DNA, 26 bp, Homo sapiens
agaatgtgatatggatcccctcattt

SEQ ID NO: 4218 - DNA, 26 bp, Homo sapiens
gaatgtgatatggatcccctcattta

SEQ ID NO: 4219 - DNA, 26 bp, Homo sapiens
aatgtgatatggatcccctcatttat

SEQ ID NO: 4220 - DNA, 26 bp, Homo sapiens
atgtgatatggatcccctcatttatg

SEQ ID NO: 4221 - DNA, 26 bp, Homo sapiens
tgtgatatggatcccctcatttatgt

SEQ ID NO: 4222 - DNA, 26 bp, Homo sapiens
gtgatatggatcccctcatttatgtg

SEQ ID NO: 4223 - DNA, 26 bp, Homo sapiens
tgatatggatcccctcatttatgtgt

SEQ ID NO: 4224 - DNA, 26 bp, Homo sapiens
gatatggatcccctcatttatgtgtt

SEQ ID NO: 4225 - DNA, 26 bp, Homo sapiens
atatggatcccctcatttatgtgtta

SEQ ID NO: 4226 - DNA, 26 bp, Homo sapiens
tatggatcccctcatttatgtgttaa

SEQ ID NO: 4227 - DNA, 26 bp, Homo sapiens
atggatcccctcatttatgtgttaaa

SEQ ID NO: 4228 - DNA, 26 bp, Homo sapiens
tggatcccctcatttatgtgttaaaa

SEQ ID NO: 4229 - DNA, 26 bp, Homo sapiens
ggatcccctcatttatgtgttaaaaa

SEQ ID NO: 4230 - DNA, 26 bp, Homo sapiens
gatcccctcatttatgtgttaaaaat

SEQ ID NO: 4231 - DNA, 26 bp, Homo sapiens
atcccctcatttatgtgttaaaaata

SEQ ID NO: 4232 - DNA, 26 bp, Homo sapiens
tcccctcatttatgtgttaaaaatat

SEQ ID NO: 4233 - DNA, 26 bp, Homo sapiens
cccctcatttatgtgttaaaaatata

SEQ ID NO: 4234 - DNA, 26 bp, Homo sapiens
ccctcatttatgtgttaaaaatataa

SEQ ID NO: 4235 - DNA, 26 bp, Homo sapiens
cctcatttatgtgttaaaaatataat

SEQ ID NO: 4236 - DNA, 26 bp, Homo sapiens
ctcatttatgtgttaaaaatataatg

SEQ ID NO: 4237 - DNA, 26 bp, Homo sapiens
tcatttatgtgttaaaaatataatgc

SEQ ID NO: 4238 - DNA, 26 bp, Homo sapiens
catttatgtgttaaaaatataatgca

SEQ ID NO: 4239 - DNA, 26 bp, Homo sapiens
atttatgtgttaaaaatataatgcat

SEQ ID NO: 4240 - DNA, 26 bp, Homo sapiens
tttatgtgttaaaaatataatgcatc

SEQ ID NO: 4241 - DNA, 26 bp, Homo sapiens
ttatgtgttaaaaatataatgcatct

SEQ ID NO: 4242 - DNA, 26 bp, Homo sapiens
tatgtgttaaaaatataatgcatctc

SEQ ID NO: 4243 - DNA, 26 bp, Homo sapiens
atgtgttaaaaatataatgcatctca

SEQ ID NO: 4244 - DNA, 26 bp, Homo sapiens
tgtgttaaaaatataatgcatctcaa

SEQ ID NO: 4245 - DNA, 26 bp, Homo sapiens
gtgttaaaaatataatgcatctcaaa

SEQ ID NO: 4246 - DNA, 26 bp, Homo sapiens
tgttaaaaatataatgcatctcaaag

SEQ ID NO: 4247 - DNA, 26 bp, Homo sapiens
gttaaaaatataatgcatctcaaagt

SEQ ID NO: 4248 - DNA, 26 bp, Homo sapiens
ttaaaaatataatgcatctcaaagtc

SEQ ID NO: 4249 - DNA, 26 bp, Homo sapiens
taaaaatataatgcatctcaaagtca

SEQ ID NO: 4250 - DNA, 26 bp, Homo sapiens
aaaaatataatgcatctcaaagtcag

SEQ ID NO: 4251 - DNA, 26 bp, Homo sapiens
aaaatataatgcatctcaaagtcaga

SEQ ID NO: 4252 - DNA, 26 bp, Homo sapiens
aaatataatgcatctcaaagtcagac

SEQ ID NO: 4253 - DNA, 26 bp, Homo sapiens
aatataatgcatctcaaagtcagaca

SEQ ID NO: 4254 - DNA, 26 bp, Homo sapiens
atataatgcatctcaaagtcagacac

SEQ ID NO: 4255 - DNA, 26 bp, Homo sapiens
tataatgcatctcaaagtcagacact

SEQ ID NO: 4256 - DNA, 26 bp, Homo sapiens
ataatgcatctcaaagtcagacacta

SEQ ID NO: 4257 - DNA, 26 bp, Homo sapiens
taatgcatctcaaagtcagacactag

SEQ ID NO: 4258 - DNA, 26 bp, Homo sapiens
aatgcatctcaaagtcagacactaga

SEQ ID NO: 4259 - DNA, 26 bp, Homo sapiens
atgcatctcaaagtcagacactagag

SEQ ID NO: 4260 - DNA, 26 bp, Homo sapiens
tgcatctcaaagtcagacactagagc

SEQ ID NO: 4261 - DNA, 26 bp, Homo sapiens
gcatctcaaagtcagacactagagct

SEQ ID NO: 4262 - DNA, 26 bp, Homo sapiens
catctcaaagtcagacactagagctc

SEQ ID NO: 4263 - DNA, 26 bp, Homo sapiens
atctcaaagtcagacactagagctca

SEQ ID NO: 4264 - DNA, 26 bp, Homo sapiens
tctcaaagtcagacactagagctcag

SEQ ID NO: 4265 - DNA, 26 bp, Homo sapiens
ctcaaagtcagacactagagctcaga

SEQ ID NO: 4266 - DNA, 26 bp, Homo sapiens
tcaaagtcagacactagagctcagat

SEQ ID NO: 4267 - DNA, 26 bp, Homo sapiens
caaagtcagacactagagctcagatt

SEQ ID NO: 4268 - DNA, 26 bp, Homo sapiens
aaagtcagacactagagctcagattc

SEQ ID NO: 4269 - DNA, 26 bp, Homo sapiens
aagtcagacactagagctcagattcc

SEQ ID NO: 4270 - DNA, 26 bp, Homo sapiens
agtcagacactagagctcagattcca

SEQ ID NO: 4271 - DNA, 26 bp, Homo sapiens
gtcagacactagagctcagattccac

SEQ ID NO: 4272 - DNA, 26 bp, Homo sapiens
tcagacactagagctcagattccacc

SEQ ID NO: 4273 - DNA, 26 bp, Homo sapiens
cagacactagagctcagattccaccc

SEQ ID NO: 4274 - DNA, 26 bp, Homo sapiens
agacactagagctcagattccaccct

SEQ ID NO: 4275 - DNA, 26 bp, Homo sapiens
gacactagagctcagattccaccctg

SEQ ID NO: 4276 - DNA, 26 bp, Homo sapiens
acactagagctcagattccaccctgg

SEQ ID NO: 4277 - DNA, 26 bp, Homo sapiens
cactagagctcagattccaccctggc

SEQ ID NO: 4278 - DNA, 26 bp, Homo sapiens
actagagctcagattccaccctggcc

SEQ ID NO: 4279 - DNA, 26 bp, Homo sapiens
ctagagctcagattccaccctggccc

SEQ ID NO: 4280 - DNA, 26 bp, Homo sapiens
tagagctcagattccaccctggccct

SEQ ID NO: 4281 - DNA, 26 bp, Homo sapiens
agagctcagattccaccctggccctt

SEQ ID NO: 4282 - DNA, 26 bp, Homo sapiens
gagctcagattccaccctggcccttg

SEQ ID NO: 4283 - DNA, 26 bp, Homo sapiens
agctcagattccaccctggcccttgg

SEQ ID NO: 4284 - DNA, 26 bp, Homo sapiens
gctcagattccaccctggcccttgga

SEQ ID NO: 4285 - DNA, 26 bp, Homo sapiens
ctcagattccaccctggcccttggaa

SEQ ID NO: 4286 - DNA, 26 bp, Homo sapiens
tcagattccaccctggcccttggaaa

SEQ ID NO: 4287 - DNA, 26 bp, Homo sapiens
cagattccaccctggcccttggaaaa

SEQ ID NO: 4288 - DNA, 26 bp, Homo sapiens
agattccaccctggcccttggaaaac

SEQ ID NO: 4289 - DNA, 26 bp, Homo sapiens
gattccaccctggcccttggaaaaca

SEQ ID NO: 4290 - DNA, 26 bp, Homo sapiens
attccaccctggcccttggaaaacat

SEQ ID NO: 4291 - DNA, 26 bp, Homo sapiens
ttccaccctggcccttggaaaacatc

SEQ ID NO: 4292 - DNA, 26 bp, Homo sapiens
tccaccctggcccttggaaaacatct

SEQ ID NO: 4293 - DNA, 26 bp, Homo sapiens
ccaccctggcccttggaaaacatctg

SEQ ID NO: 4294 - DNA, 26 bp, Homo sapiens
caccctggcccttggaaaacatctgt

SEQ ID NO: 4295 - DNA, 26 bp, Homo sapiens
accctggcccttggaaaacatctgtg

SEQ ID NO: 4296 - DNA, 26 bp, Homo sapiens
ccctggcccttggaaaacatctgtga

SEQ ID NO: 4297 - DNA, 26 bp, Homo sapiens
cctggcccttggaaaacatctgtgat

SEQ ID NO: 4298 - DNA, 26 bp, Homo sapiens
ctggcccttggaaaacatctgtgatg

SEQ ID NO: 4299 - DNA, 26 bp, Homo sapiens
tggcccttggaaaacatctgtgatgc

SEQ ID NO: 4300 - DNA, 26 bp, Homo sapiens
ggcccttggaaaacatctgtgatgca

SEQ ID NO: 4301 - DNA, 26 bp, Homo sapiens
gcccttggaaaacatctgtgatgcag

SEQ ID NO: 4302 - DNA, 26 bp, Homo sapiens
cccttggaaaacatctgtgatgcagt

SEQ ID NO: 4303 - DNA, 26 bp, Homo sapiens
ccttggaaaacatctgtgatgcagtt

SEQ ID NO: 4304 - DNA, 26 bp, Homo sapiens
cttggaaaacatctgtgatgcagttt

SEQ ID NO: 4305 - DNA, 26 bp, Homo sapiens
ttggaaaacatctgtgatgcagtttc

SEQ ID NO: 4306 - DNA, 26 bp, Homo sapiens
tggaaaacatctgtgatgcagtttcc

SEQ ID NO: 4307 - DNA, 26 bp, Homo sapiens
ggaaaacatctgtgatgcagtttcca

SEQ ID NO: 4308 - DNA, 26 bp, Homo sapiens
gaaaacatctgtgatgcagtttccac

SEQ ID NO: 4309 - DNA, 26 bp, Homo sapiens
aaaacatctgtgatgcagtttccacc

SEQ ID NO: 4310 - DNA, 26 bp, Homo sapiens
aaacatctgtgatgcagtttccaccc

SEQ ID NO: 4311 - DNA, 26 bp, Homo sapiens
aacatctgtgatgcagtttccacccc

SEQ ID NO: 4312 - DNA, 26 bp, Homo sapiens
acatctgtgatgcagtttccaccccc

SEQ ID NO: 4313 - DNA, 26 bp, Homo sapiens
catctgtgatgcagtttccaccccct

SEQ ID NO: 4314 - DNA, 26 bp, Homo sapiens
atctgtgatgcagtttccaccccctc

SEQ ID NO: 4315 - DNA, 26 bp, Homo sapiens
tctgtgatgcagtttccaccccctct

SEQ ID NO: 4316 - DNA, 26 bp, Homo sapiens
ctgtgatgcagtttccaccccctctg

SEQ ID NO: 4317 - DNA, 26 bp, Homo sapiens
tgtgatgcagtttccaccccctctgt

SEQ ID NO: 4318 - DNA, 26 bp, Homo sapiens
gtgatgcagtttccaccccctctgtt

SEQ ID NO: 4319 - DNA, 26 bp, Homo sapiens
tgatgcagtttccaccccctctgttc

SEQ ID NO: 4320 - DNA, 26 bp, Homo sapiens
gatgcagtttccaccccctctgttca

SEQ ID NO: 4321 - DNA, 26 bp, Homo sapiens
atgcagtttccaccccctctgttcat

SEQ ID NO: 4322 - DNA, 26 bp, Homo sapiens
tgcagtttccaccccctctgttcatc

SEQ ID NO: 4323 - DNA, 26 bp, Homo sapiens
gcagtttccaccccctctgttcatca

SEQ ID NO: 4324 - DNA, 26 bp, Homo sapiens
cagtttccaccccctctgttcatcac

SEQ ID NO: 4325 - DNA, 26 bp, Homo sapiens
agtttccaccccctctgttcatcacc

SEQ ID NO: 4326 - DNA, 26 bp, Homo sapiens
gtttccaccccctctgttcatcacct

SEQ ID NO: 4327 - DNA, 26 bp, Homo sapiens
tttccaccccctctgttcatcacctc

SEQ ID NO: 4328 - DNA, 26 bp, Homo sapiens
ttccaccccctctgttcatcacctct

SEQ ID NO: 4329 - DNA, 26 bp, Homo sapiens
tccaccccctctgttcatcacctctt

SEQ ID NO: 4330 - DNA, 26 bp, Homo sapiens
ccaccccctctgttcatcacctcttt

SEQ ID NO: 4331 - DNA, 26 bp, Homo sapiens
caccccctctgttcatcacctcttta

SEQ ID NO: 4332 - DNA, 26 bp, Homo sapiens
accccctctgttcatcacctctttag

SEQ ID NO: 4333 - DNA, 26 bp, Homo sapiens
ccccctctgttcatcacctctttaga

SEQ ID NO: 4334 - DNA, 26 bp, Homo sapiens
cccctctgttcatcacctctttagaa

SEQ ID NO: 4335 - DNA, 26 bp, Homo sapiens
ccctctgttcatcacctctttagaat

SEQ ID NO: 4336 - DNA, 26 bp, Homo sapiens
cctctgttcatcacctctttagaata

SEQ ID NO: 4337 - DNA, 26 bp, Homo sapiens
ctctgttcatcacctctttagaatat

SEQ ID NO: 4338 - DNA, 26 bp, Homo sapiens
tctgttcatcacctctttagaatatt

SEQ ID NO: 4339 - DNA, 26 bp, Homo sapiens
ctgttcatcacctctttagaatattc

SEQ ID NO: 4340 - DNA, 26 bp, Homo sapiens
tgttcatcacctctttagaatattct

SEQ ID NO: 4341 - DNA, 26 bp, Homo sapiens
gttcatcacctctttagaatattctg

SEQ ID NO: 4342 - DNA, 26 bp, Homo sapiens
ttcatcacctctttagaatattctgg

SEQ ID NO: 4343 - DNA, 26 bp, Homo sapiens
tcatcacctctttagaatattctggc

SEQ ID NO: 4344 - DNA, 26 bp, Homo sapiens
catcacctctttagaatattctggct

SEQ ID NO: 4345 - DNA, 26 bp, Homo sapiens
atcacctctttagaatattctggctc

SEQ ID NO: 4346 - DNA, 26 bp, Homo sapiens
tcacctctttagaatattctggctct

SEQ ID NO: 4347 - DNA, 26 bp, Homo sapiens
cacctctttagaatattctggctctt

SEQ ID NO: 4348 - DNA, 26 bp, Homo sapiens
acctctttagaatattctggctcttt

SEQ ID NO: 4349 - DNA, 26 bp, Homo sapiens
cctctttagaatattctggctctttg

SEQ ID NO: 4350 - DNA, 26 bp, Homo sapiens
ctctttagaatattctggctctttgc

SEQ ID NO: 4351 - DNA, 26 bp, Homo sapiens
tctttagaatattctggctctttgca

SEQ ID NO: 4352 - DNA, 26 bp, Homo sapiens
ctttagaatattctggctctttgcat

SEQ ID NO: 4353 - DNA, 26 bp, Homo sapiens
tttagaatattctggctctttgcatc

SEQ ID NO: 4354 - DNA, 26 bp, Homo sapiens
ttagaatattctggctctttgcatct

SEQ ID NO: 4355 - DNA, 26 bp, Homo sapiens
tagaatattctggctctttgcatctt

SEQ ID NO: 4356 - DNA, 26 bp, Homo sapiens
agaatattctggctctttgcatctta

SEQ ID NO: 4357 - DNA, 26 bp, Homo sapiens
gaatattctggctctttgcatcttaa

SEQ ID NO: 4358 - DNA, 26 bp, Homo sapiens
aatattctggctctttgcatcttaag

SEQ ID NO: 4359 - DNA, 26 bp, Homo sapiens
atattctggctctttgcatcttaagg

SEQ ID NO: 4360 - DNA, 26 bp, Homo sapiens
tattctggctctttgcatcttaaggt

SEQ ID NO: 4361 - DNA, 26 bp, Homo sapiens
attctggctctttgcatcttaaggtc

SEQ ID NO: 4362 - DNA, 26 bp, Homo sapiens
ttctggctctttgcatcttaaggtct

SEQ ID NO: 4363 - DNA, 26 bp, Homo sapiens
tctggctctttgcatcttaaggtctt

SEQ ID NO: 4364 - DNA, 26 bp, Homo sapiens
ctggctctttgcatcttaaggtctta

SEQ ID NO: 4365 - DNA, 26 bp, Homo sapiens
tggctctttgcatcttaaggtcttat

SEQ ID NO: 4366 - DNA, 26 bp, Homo sapiens
ggctctttgcatcttaaggtcttatg

SEQ ID NO: 4367 - DNA, 26 bp, Homo sapiens
gctctttgcatcttaaggtcttatgt

SEQ ID NO: 4368 - DNA, 26 bp, Homo sapiens
ctctttgcatcttaaggtcttatgtt

SEQ ID NO: 4369 - DNA, 26 bp, Homo sapiens
tctttgcatcttaaggtcttatgttt

SEQ ID NO: 4370 - DNA, 26 bp, Homo sapiens
ctttgcatcttaaggtcttatgtttg

SEQ ID NO: 4371 - DNA, 26 bp, Homo sapiens
tttgcatcttaaggtcttatgtttgt

SEQ ID NO: 4372 - DNA, 26 bp, Homo sapiens
ttgcatcttaaggtcttatgtttgta

SEQ ID NO: 4373 - DNA, 26 bp, Homo sapiens
tgcatcttaaggtcttatgtttgtat

SEQ ID NO: 4374 - DNA, 26 bp, Homo sapiens
gcatcttaaggtcttatgtttgtata

SEQ ID NO: 4375 - DNA, 26 bp, Homo sapiens
catcttaaggtcttatgtttgtataa

SEQ ID NO: 4376 - DNA, 26 bp, Homo sapiens
atcttaaggtcttatgtttgtataac

SEQ ID NO: 4377 - DNA, 26 bp, Homo sapiens
tcttaaggtcttatgtttgtataact

SEQ ID NO: 4378 - DNA, 26 bp, Homo sapiens
cttaaggtcttatgtttgtataactt

SEQ ID NO: 4379 - DNA, 26 bp, Homo sapiens
ttaaggtcttatgtttgtataactta

SEQ ID NO: 4380 - DNA, 26 bp, Homo sapiens
taaggtcttatgtttgtataacttaa

SEQ ID NO: 4381 - DNA, 26 bp, Homo sapiens
aaggtcttatgtttgtataacttaaa

SEQ ID NO: 4382 - DNA, 26 bp, Homo sapiens
aggtcttatgtttgtataacttaaaa

SEQ ID NO: 4383 - DNA, 26 bp, Homo sapiens
ggtcttatgtttgtataacttaaaac

SEQ ID NO: 4384 - DNA, 26 bp, Homo sapiens
gtcttatgtttgtataacttaaaaca

SEQ ID NO: 4385 - DNA, 26 bp, Homo sapiens
tcttatgtttgtataacttaaaacat

SEQ ID NO: 4386 - DNA, 26 bp, Homo sapiens
cttatgtttgtataacttaaaacatt

SEQ ID NO: 4387 - DNA, 26 bp, Homo sapiens
ttatgtttgtataacttaaaacattc

SEQ ID NO: 4388 - DNA, 26 bp, Homo sapiens
tatgtttgtataacttaaaacattca

SEQ ID NO: 4389 - DNA, 26 bp, Homo sapiens
atgtttgtataacttaaaacattcac

SEQ ID NO: 4390 - DNA, 26 bp, Homo sapiens
tgtttgtataacttaaaacattcact

SEQ ID NO: 4391 - DNA, 26 bp, Homo sapiens
gtttgtataacttaaaacattcactg

SEQ ID NO: 4392 - DNA, 26 bp, Homo sapiens
tttgtataacttaaaacattcactgt

SEQ ID NO: 4393 - DNA, 26 bp, Homo sapiens
ttgtataacttaaaacattcactgtg

SEQ ID NO: 4394 - DNA, 26 bp, Homo sapiens
tgtataacttaaaacattcactgtgt

SEQ ID NO: 4395 - DNA, 26 bp, Homo sapiens
gtataacttaaaacattcactgtgtg

SEQ ID NO: 4396 - DNA, 26 bp, Homo sapiens
tataacttaaaacattcactgtgtgt

SEQ ID NO: 4397 - DNA, 26 bp, Homo sapiens
ataacttaaaacattcactgtgtgtg

SEQ ID NO: 4398 - DNA, 26 bp, Homo sapiens
taacttaaaacattcactgtgtgtgc

SEQ ID NO: 4399 - DNA, 26 bp, Homo sapiens
aacttaaaacattcactgtgtgtgca

SEQ ID NO: 4400 - DNA, 26 bp, Homo sapiens
acttaaaacattcactgtgtgtgcat

SEQ ID NO: 4401 - DNA, 26 bp, Homo sapiens
cttaaaacattcactgtgtgtgcatg

SEQ ID NO: 4402 - DNA, 26 bp, Homo sapiens
ttaaaacattcactgtgtgtgcatgt

SEQ ID NO: 4403 - DNA, 26 bp, Homo sapiens
taaaacattcactgtgtgtgcatgtg

SEQ ID NO: 4404 - DNA, 26 bp, Homo sapiens
aaaacattcactgtgtgtgcatgtgt

SEQ ID NO: 4405 - DNA, 26 bp, Homo sapiens
aaacattcactgtgtgtgcatgtgtg

SEQ ID NO: 4406 - DNA, 26 bp, Homo sapiens
aacattcactgtgtgtgcatgtgtgc

SEQ ID NO: 4407 - DNA, 26 bp, Homo sapiens
acattcactgtgtgtgcatgtgtgca

SEQ ID NO: 4408 - DNA, 26 bp, Homo sapiens
cattcactgtgtgtgcatgtgtgcaa

SEQ ID NO: 4409 - DNA, 26 bp, Homo sapiens
attcactgtgtgtgcatgtgtgcaag

SEQ ID NO: 4410 - DNA, 26 bp, Homo sapiens
ttcactgtgtgtgcatgtgtgcaagc

SEQ ID NO: 4411 - DNA, 26 bp, Homo sapiens
tcactgtgtgtgcatgtgtgcaagca

SEQ ID NO: 4412 - DNA, 26 bp, Homo sapiens
cactgtgtgtgcatgtgtgcaagcat

SEQ ID NO: 4413 - DNA, 26 bp, Homo sapiens
actgtgtgtgcatgtgtgcaagcatg

SEQ ID NO: 4414 - DNA, 26 bp, Homo sapiens
ctgtgtgtgcatgtgtgcaagcatgt

SEQ ID NO: 4415 - DNA, 26 bp, Homo sapiens
tgtgtgtgcatgtgtgcaagcatgtg

SEQ ID NO: 4416 - DNA, 26 bp, Homo sapiens
gtgtgtgcatgtgtgcaagcatgtgt

SEQ ID NO: 4417 - DNA, 26 bp, Homo sapiens
tgtgtgcatgtgtgcaagcatgtgta

SEQ ID NO: 4418 - DNA, 26 bp, Homo sapiens
gtgtgcatgtgtgcaagcatgtgtac

SEQ ID NO: 4419 - DNA, 26 bp, Homo sapiens
tgtgcatgtgtgcaagcatgtgtaca

SEQ ID NO: 4420 - DNA, 26 bp, Homo sapiens
gtgcatgtgtgcaagcatgtgtacac

SEQ ID NO: 4421 - DNA, 26 bp, Homo sapiens
tgcatgtgtgcaagcatgtgtacaca

SEQ ID NO: 4422 - DNA, 26 bp, Homo sapiens
gcatgtgtgcaagcatgtgtacacat

SEQ ID NO: 4423 - DNA, 26 bp, Homo sapiens
catgtgtgcaagcatgtgtacacatg

SEQ ID NO: 4424 - DNA, 26 bp, Homo sapiens
atgtgtgcaagcatgtgtacacatgt

SEQ ID NO: 4425 - DNA, 26 bp, Homo sapiens
tgtgtgcaagcatgtgtacacatgtc

SEQ ID NO: 4426 - DNA, 26 bp, Homo sapiens
gtgtgcaagcatgtgtacacatgtca

SEQ ID NO: 4427 - DNA, 26 bp, Homo sapiens
tgtgcaagcatgtgtacacatgtcag

SEQ ID NO: 4428 - DNA, 26 bp, Homo sapiens
gtgcaagcatgtgtacacatgtcaga

SEQ ID NO: 4429 - DNA, 26 bp, Homo sapiens
tgcaagcatgtgtacacatgtcagag

SEQ ID NO: 4430 - DNA, 26 bp, Homo sapiens
gcaagcatgtgtacacatgtcagagg

SEQ ID NO: 4431 - DNA, 26 bp, Homo sapiens
caagcatgtgtacacatgtcagaggt

SEQ ID NO: 4432 - DNA, 26 bp, Homo sapiens
aagcatgtgtacacatgtcagaggtc

SEQ ID NO: 4433 - DNA, 26 bp, Homo sapiens
agcatgtgtacacatgtcagaggtcc

SEQ ID NO: 4434 - DNA, 26 bp, Homo sapiens
gcatgtgtacacatgtcagaggtccc

SEQ ID NO: 4435 - DNA, 26 bp, Homo sapiens
catgtgtacacatgtcagaggtccca

SEQ ID NO: 4436 - DNA, 26 bp, Homo sapiens
atgtgtacacatgtcagaggtcccag

SEQ ID NO: 4437 - DNA, 26 bp, Homo sapiens
tgtgtacacatgtcagaggtcccaga

SEQ ID NO: 4438 - DNA, 26 bp, Homo sapiens
gtgtacacatgtcagaggtcccagac

SEQ ID NO: 4439 - DNA, 26 bp, Homo sapiens
tgtacacatgtcagaggtcccagaca

SEQ ID NO: 4440 - DNA, 26 bp, Homo sapiens
gtacacatgtcagaggtcccagacat

SEQ ID NO: 4441 - DNA, 26 bp, Homo sapiens
tacacatgtcagaggtcccagacatg

SEQ ID NO: 4442 - DNA, 26 bp, Homo sapiens
acacatgtcagaggtcccagacatgt

SEQ ID NO: 4443 - DNA, 26 bp, Homo sapiens
cacatgtcagaggtcccagacatgtc

SEQ ID NO: 4444 - DNA, 26 bp, Homo sapiens
acatgtcagaggtcccagacatgtca

SEQ ID NO: 4445 - DNA, 26 bp, Homo sapiens
catgtcagaggtcccagacatgtcaa

SEQ ID NO: 4446 - DNA, 26 bp, Homo sapiens
atgtcagaggtcccagacatgtcaac

SEQ ID NO: 4447 - DNA, 26 bp, Homo sapiens
tgtcagaggtcccagacatgtcaact

SEQ ID NO: 4448 - DNA, 26 bp, Homo sapiens
gtcagaggtcccagacatgtcaactt

SEQ ID NO: 4449 - DNA, 26 bp, Homo sapiens
tcagaggtcccagacatgtcaacttt

SEQ ID NO: 4450 - DNA, 26 bp, Homo sapiens
cagaggtcccagacatgtcaactttt

SEQ ID NO: 4451 - DNA, 26 bp, Homo sapiens
agaggtcccagacatgtcaacttttc

SEQ ID NO: 4452 - DNA, 26 bp, Homo sapiens
gaggtcccagacatgtcaacttttct

SEQ ID NO: 4453 - DNA, 26 bp, Homo sapiens
aggtcccagacatgtcaacttttctc

SEQ ID NO: 4454 - DNA, 26 bp, Homo sapiens
ggtcccagacatgtcaacttttctcc

SEQ ID NO: 4455 - DNA, 26 bp, Homo sapiens
gtcccagacatgtcaacttttctcct

SEQ ID NO: 4456 - DNA, 26 bp, Homo sapiens
tcccagacatgtcaacttttctcctt

SEQ ID NO: 4457 - DNA, 26 bp, Homo sapiens
cccagacatgtcaacttttctcctta

SEQ ID NO: 4458 - DNA, 26 bp, Homo sapiens
ccagacatgtcaacttttctccttat

SEQ ID NO: 4459 - DNA, 26 bp, Homo sapiens
cagacatgtcaacttttctccttata

SEQ ID NO: 4460 - DNA, 26 bp, Homo sapiens
agacatgtcaacttttctccttatac

SEQ ID NO: 4461 - DNA, 26 bp, Homo sapiens
gacatgtcaacttttctccttataca

SEQ ID NO: 4462 - DNA, 26 bp, Homo sapiens
acatgtcaacttttctccttatacac

SEQ ID NO: 4463 - DNA, 26 bp, Homo sapiens
catgtcaacttttctccttatacacc

SEQ ID NO: 4464 - DNA, 26 bp, Homo sapiens
atgtcaacttttctccttatacacct

SEQ ID NO: 4465 - DNA, 26 bp, Homo sapiens
tgtcaacttttctccttatacaccta

SEQ ID NO: 4466 - DNA, 26 bp, Homo sapiens
gtcaacttttctccttatacacctaa

SEQ ID NO: 4467 - DNA, 26 bp, Homo sapiens
tcaacttttctccttatacacctaag

SEQ ID NO: 4468 - DNA, 26 bp, Homo sapiens
caacttttctccttatacacctaagg

SEQ ID NO: 4469 - DNA, 26 bp, Homo sapiens
aacttttctccttatacacctaaggg

SEQ ID NO: 4470 - DNA, 26 bp, Homo sapiens
acttttctccttatacacctaagggg

SEQ ID NO: 4471 - DNA, 26 bp, Homo sapiens
cttttctccttatacacctaagggga

SEQ ID NO: 4472 - DNA, 26 bp, Homo sapiens
ttttctccttatacacctaaggggac

SEQ ID NO: 4473 - DNA, 26 bp, Homo sapiens
tttctccttatacacctaaggggaca

SEQ ID NO: 4474 - DNA, 26 bp, Homo sapiens
ttctccttatacacctaaggggacag

SEQ ID NO: 4475 - DNA, 26 bp, Homo sapiens
tctccttatacacctaaggggacagt

SEQ ID NO: 4476 - DNA, 26 bp, Homo sapiens
ctccttatacacctaaggggacagtc

SEQ ID NO: 4477 - DNA, 26 bp, Homo sapiens
tccttatacacctaaggggacagtca

SEQ ID NO: 4478 - DNA, 26 bp, Homo sapiens
ccttatacacctaaggggacagtcaa

SEQ ID NO: 4479 - DNA, 26 bp, Homo sapiens
cttatacacctaaggggacagtcaac

SEQ ID NO: 4480 - DNA, 26 bp, Homo sapiens
ttatacacctaaggggacagtcaact

SEQ ID NO: 4481 - DNA, 26 bp, Homo sapiens
tatacacctaaggggacagtcaactg

SEQ ID NO: 4482 - DNA, 26 bp, Homo sapiens
atacacctaaggggacagtcaactgg

SEQ ID NO: 4483 - DNA, 26 bp, Homo sapiens
tacacctaaggggacagtcaactggt

SEQ ID NO: 4484 - DNA, 26 bp, Homo sapiens
acacctaaggggacagtcaactggtt

SEQ ID NO: 4485 - DNA, 26 bp, Homo sapiens
cacctaaggggacagtcaactggttc

SEQ ID NO: 4486 - DNA, 26 bp, Homo sapiens
acctaaggggacagtcaactggttct

SEQ ID NO: 4487 - DNA, 26 bp, Homo sapiens
cctaaggggacagtcaactggttctg

SEQ ID NO: 4488 - DNA, 26 bp, Homo sapiens
ctaaggggacagtcaactggttctga

SEQ ID NO: 4489 - DNA, 26 bp, Homo sapiens
taaggggacagtcaactggttctgaa

SEQ ID NO: 4490 - DNA, 26 bp, Homo sapiens
aaggggacagtcaactggttctgaat

SEQ ID NO: 4491 - DNA, 26 bp, Homo sapiens
aggggacagtcaactggttctgaatc

SEQ ID NO: 4492 - DNA, 26 bp, Homo sapiens
ggggacagtcaactggttctgaatct

SEQ ID NO: 4493 - DNA, 26 bp, Homo sapiens
gggacagtcaactggttctgaatctc

SEQ ID NO: 4494 - DNA, 26 bp, Homo sapiens
ggacagtcaactggttctgaatctca

SEQ ID NO: 4495 - DNA, 26 bp, Homo sapiens
gacagtcaactggttctgaatctcag

SEQ ID NO: 4496 - DNA, 26 bp, Homo sapiens
acagtcaactggttctgaatctcagg

SEQ ID NO: 4497 - DNA, 26 bp, Homo sapiens
cagtcaactggttctgaatctcagga

SEQ ID NO: 4498 - DNA, 26 bp, Homo sapiens
agtcaactggttctgaatctcaggag

SEQ ID NO: 4499 - DNA, 26 bp, Homo sapiens
gtcaactggttctgaatctcaggagg

SEQ ID NO: 4500 - DNA, 26 bp, Homo sapiens
tcaactggttctgaatctcaggagga

SEQ ID NO: 4501 - DNA, 26 bp, Homo sapiens
caactggttctgaatctcaggaggag

SEQ ID NO: 4502 - DNA, 26 bp, Homo sapiens
aactggttctgaatctcaggaggaga

SEQ ID NO: 4503 - DNA, 26 bp, Homo sapiens
actggttctgaatctcaggaggagag

SEQ ID NO: 4504 - DNA, 26 bp, Homo sapiens
ctggttctgaatctcaggaggagagg

SEQ ID NO: 4505 - DNA, 26 bp, Homo sapiens
tggttctgaatctcaggaggagagga

SEQ ID NO: 4506 - DNA, 26 bp, Homo sapiens
ggttctgaatctcaggaggagaggac

SEQ ID NO: 4507 - DNA, 26 bp, Homo sapiens
gttctgaatctcaggaggagaggact

SEQ ID NO: 4508 - DNA, 26 bp, Homo sapiens
ttctgaatctcaggaggagaggacta

SEQ ID NO: 4509 - DNA, 26 bp, Homo sapiens
tctgaatctcaggaggagaggactaa

SEQ ID NO: 4510 - DNA, 26 bp, Homo sapiens
ctgaatctcaggaggagaggactaac

SEQ ID NO: 4511 - DNA, 26 bp, Homo sapiens
tgaatctcaggaggagaggactaacc

SEQ ID NO: 4512 - DNA, 26 bp, Homo sapiens
gaatctcaggaggagaggactaacca

SEQ ID NO: 4513 - DNA, 26 bp, Homo sapiens
aatctcaggaggagaggactaaccac

SEQ ID NO: 4514 - DNA, 26 bp, Homo sapiens
atctcaggaggagaggactaaccaca

SEQ ID NO: 4515 - DNA, 26 bp, Homo sapiens
tctcaggaggagaggactaaccacat

SEQ ID NO: 4516 - DNA, 26 bp, Homo sapiens
ctcaggaggagaggactaaccacatg

SEQ ID NO: 4517 - DNA, 26 bp, Homo sapiens
tcaggaggagaggactaaccacatgc

SEQ ID NO: 4518 - DNA, 26 bp, Homo sapiens
caggaggagaggactaaccacatgca

SEQ ID NO: 4519 - DNA, 26 bp, Homo sapiens
aggaggagaggactaaccacatgcat

SEQ ID NO: 4520 - DNA, 26 bp, Homo sapiens
ggaggagaggactaaccacatgcatg

SEQ ID NO: 4521 - DNA, 26 bp, Homo sapiens
gaggagaggactaaccacatgcatgg

SEQ ID NO: 4522 - DNA, 26 bp, Homo sapiens
aggagaggactaaccacatgcatggt

SEQ ID NO: 4523 - DNA, 26 bp, Homo sapiens
ggagaggactaaccacatgcatggtt

SEQ ID NO: 4524 - DNA, 26 bp, Homo sapiens
gagaggactaaccacatgcatggtta

SEQ ID NO: 4525 - DNA, 26 bp, Homo sapiens
agaggactaaccacatgcatggttac

SEQ ID NO: 4526 - DNA, 26 bp, Homo sapiens
gaggactaaccacatgcatggttacc

SEQ ID NO: 4527 - DNA, 26 bp, Homo sapiens
aggactaaccacatgcatggttaccc

SEQ ID NO: 4528 - DNA, 26 bp, Homo sapiens
ggactaaccacatgcatggttaccct

SEQ ID NO: 4529 - DNA, 26 bp, Homo sapiens
gactaaccacatgcatggttacccta

SEQ ID NO: 4530 - DNA, 26 bp, Homo sapiens
actaaccacatgcatggttaccctaa

SEQ ID NO: 4531 - DNA, 26 bp, Homo sapiens
ctaaccacatgcatggttaccctaaa

SEQ ID NO: 4532 - DNA, 26 bp, Homo sapiens
taaccacatgcatggttaccctaaat

SEQ ID NO: 4533 - DNA, 26 bp, Homo sapiens
aaccacatgcatggttaccctaaatg

SEQ ID NO: 4534 - DNA, 26 bp, Homo sapiens
accacatgcatggttaccctaaatgg

SEQ ID NO: 4535 - DNA, 26 bp, Homo sapiens
ccacatgcatggttaccctaaatgga

SEQ ID NO: 4536 - DNA, 26 bp, Homo sapiens
cacatgcatggttaccctaaatggaa

SEQ ID NO: 4537 - DNA, 26 bp, Homo sapiens
acatgcatggttaccctaaatggaaa

SEQ ID NO: 4538 - DNA, 26 bp, Homo sapiens
catgcatggttaccctaaatggaaag

SEQ ID NO: 4539 - DNA, 26 bp, Homo sapiens
atgcatggttaccctaaatggaaagc

SEQ ID NO: 4540 - DNA, 26 bp, Homo sapiens
tgcatggttaccctaaatggaaagca

SEQ ID NO: 4541 - DNA, 26 bp, Homo sapiens
gcatggttaccctaaatggaaagcaa

SEQ ID NO: 4542 - DNA, 26 bp, Homo sapiens
catggttaccctaaatggaaagcaac

SEQ ID NO: 4543 - DNA, 26 bp, Homo sapiens
atggttaccctaaatggaaagcaacc

SEQ ID NO: 4544 - DNA, 26 bp, Homo sapiens
tggttaccctaaatggaaagcaacca

SEQ ID NO: 4545 - DNA, 26 bp, Homo sapiens
ggttaccctaaatggaaagcaaccac

SEQ ID NO: 4546 - DNA, 26 bp, Homo sapiens
gttaccctaaatggaaagcaaccact

SEQ ID NO: 4547 - DNA, 26 bp, Homo sapiens
ttaccctaaatggaaagcaaccactt

SEQ ID NO: 4548 - DNA, 26 bp, Homo sapiens
taccctaaatggaaagcaaccacttt

SEQ ID NO: 4549 - DNA, 26 bp, Homo sapiens
accctaaatggaaagcaaccacttta

SEQ ID NO: 4550 - DNA, 26 bp, Homo sapiens
ccctaaatggaaagcaaccactttac

SEQ ID NO: 4551 - DNA, 26 bp, Homo sapiens
cctaaatggaaagcaaccactttact

SEQ ID NO: 4552 - DNA, 26 bp, Homo sapiens
ctaaatggaaagcaaccactttactg

SEQ ID NO: 4553 - DNA, 26 bp, Homo sapiens
taaatggaaagcaaccactttactgt

SEQ ID NO: 4554 - DNA, 26 bp, Homo sapiens
aaatggaaagcaaccactttactgtc

SEQ ID NO: 4555 - DNA, 26 bp, Homo sapiens
aatggaaagcaaccactttactgtcc

SEQ ID NO: 4556 - DNA, 26 bp, Homo sapiens
atggaaagcaaccactttactgtccc

SEQ ID NO: 4557 - DNA, 26 bp, Homo sapiens
tggaaagcaaccactttactgtcccc

SEQ ID NO: 4558 - DNA, 26 bp, Homo sapiens
ggaaagcaaccactttactgtcccct

SEQ ID NO: 4559 - DNA, 26 bp, Homo sapiens
gaaagcaaccactttactgtccccta

SEQ ID NO: 4560 - DNA, 26 bp, Homo sapiens
aaagcaaccactttactgtcccctaa

SEQ ID NO: 4561 - DNA, 26 bp, Homo sapiens
aagcaaccactttactgtcccctaag

SEQ ID NO: 4562 - DNA, 26 bp, Homo sapiens
agcaaccactttactgtcccctaagc

SEQ ID NO: 4563 - DNA, 26 bp, Homo sapiens
gcaaccactttactgtcccctaagct

SEQ ID NO: 4564 - DNA, 26 bp, Homo sapiens
caaccactttactgtcccctaagctt

SEQ ID NO: 4565 - DNA, 26 bp, Homo sapiens
aaccactttactgtcccctaagcttc

SEQ ID NO: 4566 - DNA, 26 bp, Homo sapiens
accactttactgtcccctaagcttca

SEQ ID NO: 4567 - DNA, 26 bp, Homo sapiens
ccactttactgtcccctaagcttcaa

SEQ ID NO: 4568 - DNA, 26 bp, Homo sapiens
cactttactgtcccctaagcttcaat

SEQ ID NO: 4569 - DNA, 26 bp, Homo sapiens
actttactgtcccctaagcttcaatt

SEQ ID NO: 4570 - DNA, 26 bp, Homo sapiens
ctttactgtcccctaagcttcaattt

SEQ ID NO: 4571 - DNA, 26 bp, Homo sapiens
tttactgtcccctaagcttcaatttg

SEQ ID NO: 4572 - DNA, 26 bp, Homo sapiens
ttactgtcccctaagcttcaatttgg

SEQ ID NO: 4573 - DNA, 26 bp, Homo sapiens
tactgtcccctaagcttcaatttggt

SEQ ID NO: 4574 - DNA, 26 bp, Homo sapiens
actgtcccctaagcttcaatttggtc

SEQ ID NO: 4575 - DNA, 26 bp, Homo sapiens
ctgtcccctaagcttcaatttggtct

SEQ ID NO: 4576 - DNA, 26 bp, Homo sapiens
tgtcccctaagcttcaatttggtcta

SEQ ID NO: 4577 - DNA, 26 bp, Homo sapiens
gtcccctaagcttcaatttggtctaa

SEQ ID NO: 4578 - DNA, 26 bp, Homo sapiens
tcccctaagcttcaatttggtctaat

SEQ ID NO: 4579 - DNA, 26 bp, Homo sapiens
cccctaagcttcaatttggtctaatt

SEQ ID NO: 4580 - DNA, 26 bp, Homo sapiens
ccctaagcttcaatttggtctaatta

SEQ ID NO: 4581 - DNA, 26 bp, Homo sapiens
cctaagcttcaatttggtctaattac

SEQ ID NO: 4582 - DNA, 26 bp, Homo sapiens
ctaagcttcaatttggtctaattact

SEQ ID NO: 4583 - DNA, 26 bp, Homo sapiens
taagcttcaatttggtctaattactc

SEQ ID NO: 4584 - DNA, 26 bp, Homo sapiens
aagcttcaatttggtctaattactct

SEQ ID NO: 4585 - DNA, 26 bp, Homo sapiens
agcttcaatttggtctaattactctt

SEQ ID NO: 4586 - DNA, 26 bp, Homo sapiens
gcttcaatttggtctaattactcttg

SEQ ID NO: 4587 - DNA, 26 bp, Homo sapiens
cttcaatttggtctaattactcttgt

SEQ ID NO: 4588 - DNA, 26 bp, Homo sapiens
ttcaatttggtctaattactcttgtt

SEQ ID NO: 4589 - DNA, 26 bp, Homo sapiens
tcaatttggtctaattactcttgttc

SEQ ID NO: 4590 - DNA, 26 bp, Homo sapiens
caatttggtctaattactcttgttcc

SEQ ID NO: 4591 - DNA, 26 bp, Homo sapiens
aatttggtctaattactcttgttcct

SEQ ID NO: 4592 - DNA, 26 bp, Homo sapiens
atttggtctaattactcttgttccta

SEQ ID NO: 4593 - DNA, 26 bp, Homo sapiens
tttggtctaattactcttgttcctac

SEQ ID NO: 4594 - DNA, 26 bp, Homo sapiens
ttggtctaattactcttgttcctaca

SEQ ID NO: 4595 - DNA, 26 bp, Homo sapiens
tggtctaattactcttgttcctacag

SEQ ID NO: 4596 - DNA, 26 bp, Homo sapiens
ggtctaattactcttgttcctacagt

SEQ ID NO: 4597 - DNA, 26 bp, Homo sapiens
gtctaattactcttgttcctacagtt

SEQ ID NO: 4598 - DNA, 26 bp, Homo sapiens
tctaattactcttgttcctacagttt

SEQ ID NO: 4599 - DNA, 26 bp, Homo sapiens
ctaattactcttgttcctacagtttt

SEQ ID NO: 4600 - DNA, 26 bp, Homo sapiens
taattactcttgttcctacagtttta

SEQ ID NO: 4601 - DNA, 26 bp, Homo sapiens
aattactcttgttcctacagttttac

SEQ ID NO: 4602 - DNA, 26 bp, Homo sapiens
attactcttgttcctacagttttaca

SEQ ID NO: 4603 - DNA, 26 bp, Homo sapiens
ttactcttgttcctacagttttacaa

SEQ ID NO: 4604 - DNA, 26 bp, Homo sapiens
tactcttgttcctacagttttacaaa

SEQ ID NO: 4605 - DNA, 26 bp, Homo sapiens
actcttgttcctacagttttacaaaa

SEQ ID NO: 4606 - DNA, 26 bp, Homo sapiens
ctcttgttcctacagttttacaaaag

SEQ ID NO: 4607 - DNA, 26 bp, Homo sapiens
tcttgttcctacagttttacaaaagt

SEQ ID NO: 4608 - DNA, 26 bp, Homo sapiens
cttgttcctacagttttacaaaagta

SEQ ID NO: 4609 - DNA, 26 bp, Homo sapiens
ttgttcctacagttttacaaaagtat

SEQ ID NO: 4610 - DNA, 26 bp, Homo sapiens
tgttcctacagttttacaaaagtatc

SEQ ID NO: 4611 - DNA, 26 bp, Homo sapiens
gttcctacagttttacaaaagtatct

SEQ ID NO: 4612 - DNA, 26 bp, Homo sapiens
ttcctacagttttacaaaagtatctt

SEQ ID NO: 4613 - DNA, 26 bp, Homo sapiens
tcctacagttttacaaaagtatctta

SEQ ID NO: 4614 - DNA, 26 bp, Homo sapiens
cctacagttttacaaaagtatcttaa

SEQ ID NO: 4615 - DNA, 26 bp, Homo sapiens
ctacagttttacaaaagtatcttaac

SEQ ID NO: 4616 - DNA, 26 bp, Homo sapiens
tacagttttacaaaagtatcttaaca

SEQ ID NO: 4617 - DNA, 26 bp, Homo sapiens
acagttttacaaaagtatcttaacag

SEQ ID NO: 4618 - DNA, 26 bp, Homo sapiens
cagttttacaaaagtatcttaacagc

SEQ ID NO: 4619 - DNA, 26 bp, Homo sapiens
agttttacaaaagtatcttaacagca

SEQ ID NO: 4620 - DNA, 26 bp, Homo sapiens
gttttacaaaagtatcttaacagcat

SEQ ID NO: 4621 - DNA, 26 bp, Homo sapiens
ttttacaaaagtatcttaacagcatt

SEQ ID NO: 4622 - DNA, 26 bp, Homo sapiens
tttacaaaagtatcttaacagcatta

SEQ ID NO: 4623 - DNA, 26 bp, Homo sapiens
ttacaaaagtatcttaacagcattaa

SEQ ID NO: 4624 - DNA, 26 bp, Homo sapiens
tacaaaagtatcttaacagcattaaa

SEQ ID NO: 4625 - DNA, 26 bp, Homo sapiens
acaaaagtatcttaacagcattaaaa

SEQ ID NO: 4626 - DNA, 26 bp, Homo sapiens
caaaagtatcttaacagcattaaaaa

SEQ ID NO: 4627 - DNA, 26 bp, Homo sapiens
aaaagtatcttaacagcattaaaaat

SEQ ID NO: 4628 - DNA, 26 bp, Homo sapiens
aaagtatcttaacagcattaaaaatc

SEQ ID NO: 4629 - DNA, 26 bp, Homo sapiens
aagtatcttaacagcattaaaaatca

SEQ ID NO: 4630 - DNA, 26 bp, Homo sapiens
agtatcttaacagcattaaaaatcaa

SEQ ID NO: 4631 - DNA, 26 bp, Homo sapiens
gtatcttaacagcattaaaaatcaat

SEQ ID NO: 4632 - DNA, 26 bp, Homo sapiens
tatcttaacagcattaaaaatcaatg

SEQ ID NO: 4633 - DNA, 26 bp, Homo sapiens
atcttaacagcattaaaaatcaatgt

SEQ ID NO: 4634 - DNA, 26 bp, Homo sapiens
tcttaacagcattaaaaatcaatgtg

SEQ ID NO: 4635 - DNA, 26 bp, Homo sapiens
cttaacagcattaaaaatcaatgtgc

SEQ ID NO: 4636 - DNA, 26 bp, Homo sapiens
ttaacagcattaaaaatcaatgtgca

SEQ ID NO: 4637 - DNA, 26 bp, Homo sapiens
taacagcattaaaaatcaatgtgcat

SEQ ID NO: 4638 - DNA, 26 bp, Homo sapiens
aacagcattaaaaatcaatgtgcata

SEQ ID NO: 4639 - DNA, 26 bp, Homo sapiens
acagcattaaaaatcaatgtgcatat

SEQ ID NO: 4640 - DNA, 26 bp, Homo sapiens
cagcattaaaaatcaatgtgcatata

SEQ ID NO: 4641 - DNA, 26 bp, Homo sapiens
agcattaaaaatcaatgtgcatatat

SEQ ID NO: 4642 - DNA, 26 bp, Homo sapiens
gcattaaaaatcaatgtgcatatata

SEQ ID NO: 4643 - DNA, 26 bp, Homo sapiens
cattaaaaatcaatgtgcatatatat

SEQ ID NO: 4644 - DNA, 26 bp, Homo sapiens
attaaaaatcaatgtgcatatatata

SEQ ID NO: 4645 - DNA, 26 bp, Homo sapiens
ttaaaaatcaatgtgcatatatatac

SEQ ID NO: 4646 - DNA, 26 bp, Homo sapiens
taaaaatcaatgtgcatatatatact

SEQ ID NO: 4647 - DNA, 26 bp, Homo sapiens
aaaaatcaatgtgcatatatatactc

SEQ ID NO: 4648 - DNA, 26 bp, Homo sapiens
aaaatcaatgtgcatatatatactct

SEQ ID NO: 4649 - DNA, 26 bp, Homo sapiens
aaatcaatgtgcatatatatactctc

SEQ ID NO: 4650 - DNA, 26 bp, Homo sapiens
aatcaatgtgcatatatatactctct

SEQ ID NO: 4651 - DNA, 26 bp, Homo sapiens
atcaatgtgcatatatatactctctc

SEQ ID NO: 4652 - DNA, 26 bp, Homo sapiens
tcaatgtgcatatatatactctctct

SEQ ID NO: 4653 - DNA, 26 bp, Homo sapiens
caatgtgcatatatatactctctcta

SEQ ID NO: 4654 - DNA, 26 bp, Homo sapiens
aatgtgcatatatatactctctctag

SEQ ID NO: 4655 - DNA, 26 bp, Homo sapiens
atgtgcatatatatactctctctaga

SEQ ID NO: 4656 - DNA, 26 bp, Homo sapiens
tgtgcatatatatactctctctagag

SEQ ID NO: 4657 - DNA, 26 bp, Homo sapiens
gtgcatatatatactctctctagagt

SEQ ID NO: 4658 - DNA, 26 bp, Homo sapiens
tgcatatatatactctctctagagta

SEQ ID NO: 4659 - DNA, 26 bp, Homo sapiens
gcatatatatactctctctagagtag

SEQ ID NO: 4660 - DNA, 26 bp, Homo sapiens
catatatatactctctctagagtaga

SEQ ID NO: 4661 - DNA, 26 bp, Homo sapiens
atatatatactctctctagagtagat

SEQ ID NO: 4662 - DNA, 26 bp, Homo sapiens
tatatatactctctctagagtagata

SEQ ID NO: 4663 - DNA, 26 bp, Homo sapiens
atatatactctctctagagtagatat

SEQ ID NO: 4664 - DNA, 26 bp, Homo sapiens
tatatactctctctagagtagatatt

SEQ ID NO: 4665 - DNA, 26 bp, Homo sapiens
atatactctctctagagtagatatta

SEQ ID NO: 4666 - DNA, 26 bp, Homo sapiens
tatactctctctagagtagatattat

SEQ ID NO: 4667 - DNA, 26 bp, Homo sapiens
atactctctctagagtagatattatt

SEQ ID NO: 4668 - DNA, 26 bp, Homo sapiens
tactctctctagagtagatattatta

SEQ ID NO: 4669 - DNA, 26 bp, Homo sapiens
actctctctagagtagatattattat

SEQ ID NO: 4670 - DNA, 26 bp, Homo sapiens
ctctctctagagtagatattattatc

SEQ ID NO: 4671 - DNA, 26 bp, Homo sapiens
tctctctagagtagatattattatcc

SEQ ID NO: 4672 - DNA, 26 bp, Homo sapiens
ctctctagagtagatattattatcca

SEQ ID NO: 4673 - DNA, 26 bp, Homo sapiens
tctctagagtagatattattatccat

SEQ ID NO: 4674 - DNA, 26 bp, Homo sapiens
ctctagagtagatattattatccata

SEQ ID NO: 4675 - DNA, 26 bp, Homo sapiens
tctagagtagatattattatccatat

SEQ ID NO: 4676 - DNA, 26 bp, Homo sapiens
ctagagtagatattattatccatatc

SEQ ID NO: 4677 - DNA, 26 bp, Homo sapiens
tagagtagatattattatccatatca

SEQ ID NO: 4678 - DNA, 26 bp, Homo sapiens
agagtagatattattatccatatcaa

SEQ ID NO: 4679 - DNA, 26 bp, Homo sapiens
gagtagatattattatccatatcaaa

SEQ ID NO: 4680 - DNA, 26 bp, Homo sapiens
agtagatattattatccatatcaaat

SEQ ID NO: 4681 - DNA, 26 bp, Homo sapiens
gtagatattattatccatatcaaatg

SEQ ID NO: 4682 - DNA, 26 bp, Homo sapiens
tagatattattatccatatcaaatgg

SEQ ID NO: 4683 - DNA, 26 bp, Homo sapiens
agatattattatccatatcaaatggt

SEQ ID NO: 4684 - DNA, 26 bp, Homo sapiens
gatattattatccatatcaaatggtt

SEQ ID NO: 4685 - DNA, 26 bp, Homo sapiens
atattattatccatatcaaatggtta

SEQ ID NO: 4686 - DNA, 26 bp, Homo sapiens
tattattatccatatcaaatggttac

SEQ ID NO: 4687 - DNA, 26 bp, Homo sapiens
attattatccatatcaaatggttact

SEQ ID NO: 4688 - DNA, 26 bp, Homo sapiens
ttattatccatatcaaatggttactt

SEQ ID NO: 4689 - DNA, 26 bp, Homo sapiens
tattatccatatcaaatggttacttg

SEQ ID NO: 4690 - DNA, 26 bp, Homo sapiens
attatccatatcaaatggttacttgg

SEQ ID NO: 4691 - DNA, 26 bp, Homo sapiens
ttatccatatcaaatggttacttggc

SEQ ID NO: 4692 - DNA, 26 bp, Homo sapiens
tatccatatcaaatggttacttggct

SEQ ID NO: 4693 - DNA, 26 bp, Homo sapiens
atccatatcaaatggttacttggctt

SEQ ID NO: 4694 - DNA, 26 bp, Homo sapiens
tccatatcaaatggttacttggcttt

SEQ ID NO: 4695 - DNA, 26 bp, Homo sapiens
ccatatcaaatggttacttggcttta

SEQ ID NO: 4696 - DNA, 26 bp, Homo sapiens
catatcaaatggttacttggctttat

SEQ ID NO: 4697 - DNA, 26 bp, Homo sapiens
atatcaaatggttacttggctttata

SEQ ID NO: 4698 - DNA, 26 bp, Homo sapiens
tatcaaatggttacttggctttataa

SEQ ID NO: 4699 - DNA, 26 bp, Homo sapiens
atcaaatggttacttggctttataaa

SEQ ID NO: 4700 - DNA, 26 bp, Homo sapiens
tcaaatggttacttggctttataaac

SEQ ID NO: 4701 - DNA, 26 bp, Homo sapiens
caaatggttacttggctttataaact

SEQ ID NO: 4702 - DNA, 26 bp, Homo sapiens
aaatggttacttggctttataaactc

SEQ ID NO: 4703 - DNA, 26 bp, Homo sapiens
aatggttacttggctttataaactcc

SEQ ID NO: 4704 - DNA, 26 bp, Homo sapiens
atggttacttggctttataaactcca

SEQ ID NO: 4705 - DNA, 26 bp, Homo sapiens
tggttacttggctttataaactccat

SEQ ID NO: 4706 - DNA, 26 bp, Homo sapiens
ggttacttggctttataaactccatg

SEQ ID NO: 4707 - DNA, 26 bp, Homo sapiens
gttacttggctttataaactccatgg

SEQ ID NO: 4708 - DNA, 26 bp, Homo sapiens
ttacttggctttataaactccatggc

SEQ ID NO: 4709 - DNA, 26 bp, Homo sapiens
tacttggctttataaactccatggct

SEQ ID NO: 4710 - DNA, 26 bp, Homo sapiens
acttggctttataaactccatggctt

SEQ ID NO: 4711 - DNA, 26 bp, Homo sapiens
cttggctttataaactccatggcttt

SEQ ID NO: 4712 - DNA, 26 bp, Homo sapiens
ttggctttataaactccatggcttta

SEQ ID NO: 4713 - DNA, 26 bp, Homo sapiens
tggctttataaactccatggctttat

SEQ ID NO: 4714 - DNA, 26 bp, Homo sapiens
ggctttataaactccatggctttatg

SEQ ID NO: 4715 - DNA, 26 bp, Homo sapiens
gctttataaactccatggctttatgt

SEQ ID NO: 4716 - DNA, 26 bp, Homo sapiens
ctttataaactccatggctttatgtt

SEQ ID NO: 4717 - DNA, 26 bp, Homo sapiens
tttataaactccatggctttatgttt

SEQ ID NO: 4718 - DNA, 26 bp, Homo sapiens
ttataaactccatggctttatgttta

SEQ ID NO: 4719 - DNA, 26 bp, Homo sapiens
tataaactccatggctttatgtttaa

SEQ ID NO: 4720 - DNA, 26 bp, Homo sapiens
ataaactccatggctttatgtttaaa

SEQ ID NO: 4721 - DNA, 26 bp, Homo sapiens
taaactccatggctttatgtttaaag

SEQ ID NO: 4722 - DNA, 26 bp, Homo sapiens
aaactccatggctttatgtttaaagt

SEQ ID NO: 4723 - DNA, 26 bp, Homo sapiens
aactccatggctttatgtttaaagtc

SEQ ID NO: 4724 - DNA, 26 bp, Homo sapiens
actccatggctttatgtttaaagtcc

SEQ ID NO: 4725 - DNA, 26 bp, Homo sapiens
ctccatggctttatgtttaaagtcca

SEQ ID NO: 4726 - DNA, 26 bp, Homo sapiens
tccatggctttatgtttaaagtccaa

SEQ ID NO: 4727 - DNA, 26 bp, Homo sapiens
ccatggctttatgtttaaagtccaaa

SEQ ID NO: 4728 - DNA, 26 bp, Homo sapiens
catggctttatgtttaaagtccaaac

SEQ ID NO: 4729 - DNA, 26 bp, Homo sapiens
atggctttatgtttaaagtccaaaca

SEQ ID NO: 4730 - DNA, 26 bp, Homo sapiens
tggctttatgtttaaagtccaaacat

SEQ ID NO: 4731 - DNA, 26 bp, Homo sapiens
ggctttatgtttaaagtccaaacatt

SEQ ID NO: 4732 - DNA, 26 bp, Homo sapiens
gctttatgtttaaagtccaaacattt

SEQ ID NO: 4733 - DNA, 26 bp, Homo sapiens
ctttatgtttaaagtccaaacatttc

SEQ ID NO: 4734 - DNA, 26 bp, Homo sapiens
tttatgtttaaagtccaaacatttca

SEQ ID NO: 4735 - DNA, 26 bp, Homo sapiens
ttatgtttaaagtccaaacatttcaa

SEQ ID NO: 4736 - DNA, 26 bp, Homo sapiens
tatgtttaaagtccaaacatttcaaa

SEQ ID NO: 4737 - DNA, 26 bp, Homo sapiens
atgtttaaagtccaaacatttcaaat

SEQ ID NO: 4738 - DNA, 26 bp, Homo sapiens
tgtttaaagtccaaacatttcaaatg

SEQ ID NO: 4739 - DNA, 26 bp, Homo sapiens
gtttaaagtccaaacatttcaaatgg

SEQ ID NO: 4740 - DNA, 26 bp, Homo sapiens
tttaaagtccaaacatttcaaatggt

SEQ ID NO: 4741 - DNA, 26 bp, Homo sapiens
ttaaagtccaaacatttcaaatggtt

SEQ ID NO: 4742 - DNA, 26 bp, Homo sapiens
taaagtccaaacatttcaaatggtta

SEQ ID NO: 4743 - DNA, 26 bp, Homo sapiens
aaagtccaaacatttcaaatggttaa

SEQ ID NO: 4744 - DNA, 26 bp, Homo sapiens
aagtccaaacatttcaaatggttaag

SEQ ID NO: 4745 - DNA, 26 bp, Homo sapiens
agtccaaacatttcaaatggttaagg

SEQ ID NO: 4746 - DNA, 26 bp, Homo sapiens
gtccaaacatttcaaatggttaaggc

SEQ ID NO: 4747 - DNA, 26 bp, Homo sapiens
tccaaacatttcaaatggttaaggcc

SEQ ID NO: 4748 - DNA, 26 bp, Homo sapiens
ccaaacatttcaaatggttaaggccc

SEQ ID NO: 4749 - DNA, 26 bp, Homo sapiens
caaacatttcaaatggttaaggccca

SEQ ID NO: 4750 - DNA, 26 bp, Homo sapiens
aaacatttcaaatggttaaggcccaa

SEQ ID NO: 4751 - DNA, 26 bp, Homo sapiens
aacatttcaaatggttaaggcccaaa

SEQ ID NO: 4752 - DNA, 26 bp, Homo sapiens
acatttcaaatggttaaggcccaaaa

SEQ ID NO: 4753 - DNA, 26 bp, Homo sapiens
catttcaaatggttaaggcccaaaaa

SEQ ID NO: 4754 - DNA, 26 bp, Homo sapiens
atttcaaatggttaaggcccaaaaat

SEQ ID NO: 4755 - DNA, 26 bp, Homo sapiens
tttcaaatggttaaggcccaaaaatg

SEQ ID NO: 4756 - DNA, 26 bp, Homo sapiens
ttcaaatggttaaggcccaaaaatga

SEQ ID NO: 4757 - DNA, 26 bp, Homo sapiens
tcaaatggttaaggcccaaaaatgaa

SEQ ID NO: 4758 - DNA, 26 bp, Homo sapiens
caaatggttaaggcccaaaaatgaaa

SEQ ID NO: 4759 - DNA, 26 bp, Homo sapiens
aaatggttaaggcccaaaaatgaaac

SEQ ID NO: 4760 - DNA, 26 bp, Homo sapiens
aatggttaaggcccaaaaatgaaacg

SEQ ID NO: 4761 - DNA, 26 bp, Homo sapiens
atggttaaggcccaaaaatgaaacgt

SEQ ID NO: 4762 - DNA, 26 bp, Homo sapiens
tggttaaggcccaaaaatgaaacgtt

SEQ ID NO: 4763 - DNA, 26 bp, Homo sapiens
ggttaaggcccaaaaatgaaacgttt

SEQ ID NO: 4764 - DNA, 26 bp, Homo sapiens
gttaaggcccaaaaatgaaacgtttt

SEQ ID NO: 4765 - DNA, 26 bp, Homo sapiens
ttaaggcccaaaaatgaaacgttttg

SEQ ID NO: 4766 - DNA, 26 bp, Homo sapiens
taaggcccaaaaatgaaacgttttgc

SEQ ID NO: 4767 - DNA, 26 bp, Homo sapiens
aaggcccaaaaatgaaacgttttgct

SEQ ID NO: 4768 - DNA, 26 bp, Homo sapiens
aggcccaaaaatgaaacgttttgctt

SEQ ID NO: 4769 - DNA, 26 bp, Homo sapiens
ggcccaaaaatgaaacgttttgcttc

SEQ ID NO: 4770 - DNA, 26 bp, Homo sapiens
gcccaaaaatgaaacgttttgcttct

SEQ ID NO: 4771 - DNA, 26 bp, Homo sapiens
cccaaaaatgaaacgttttgcttctc

SEQ ID NO: 4772 - DNA, 26 bp, Homo sapiens
ccaaaaatgaaacgttttgcttctcc

SEQ ID NO: 4773 - DNA, 26 bp, Homo sapiens
caaaaatgaaacgttttgcttctcct

SEQ ID NO: 4774 - DNA, 26 bp, Homo sapiens
aaaaatgaaacgttttgcttctccta

SEQ ID NO: 4775 - DNA, 26 bp, Homo sapiens
aaaatgaaacgttttgcttctcctac

SEQ ID NO: 4776 - DNA, 26 bp, Homo sapiens
aaatgaaacgttttgcttctcctact

SEQ ID NO: 4777 - DNA, 26 bp, Homo sapiens
aatgaaacgttttgcttctcctactc

SEQ ID NO: 4778 - DNA, 26 bp, Homo sapiens
atgaaacgttttgcttctcctactcc

SEQ ID NO: 4779 - DNA, 26 bp, Homo sapiens
tgaaacgttttgcttctcctactcct

SEQ ID NO: 4780 - DNA, 26 bp, Homo sapiens
gaaacgttttgcttctcctactcctt

SEQ ID NO: 4781 - DNA, 26 bp, Homo sapiens
aaacgttttgcttctcctactccttt

SEQ ID NO: 4782 - DNA, 26 bp, Homo sapiens
aacgttttgcttctcctactcctttt

SEQ ID NO: 4783 - DNA, 26 bp, Homo sapiens
acgttttgcttctcctactccttttc

SEQ ID NO: 4784 - DNA, 26 bp, Homo sapiens
cgttttgcttctcctactccttttct

SEQ ID NO: 4785 - DNA, 26 bp, Homo sapiens
gttttgcttctcctactccttttcta

SEQ ID NO: 4786 - DNA, 26 bp, Homo sapiens
ttttgcttctcctactccttttctac

SEQ ID NO: 4787 - DNA, 26 bp, Homo sapiens
tttgcttctcctactccttttctaca

SEQ ID NO: 4788 - DNA, 26 bp, Homo sapiens
ttgcttctcctactccttttctacat

SEQ ID NO: 4789 - DNA, 26 bp, Homo sapiens
tgcttctcctactccttttctacatg

SEQ ID NO: 4790 - DNA, 26 bp, Homo sapiens
gcttctcctactccttttctacatga

SEQ ID NO: 4791 - DNA, 26 bp, Homo sapiens
cttctcctactccttttctacatgat

SEQ ID NO: 4792 - DNA, 26 bp, Homo sapiens
ttctcctactccttttctacatgatt

SEQ ID NO: 4793 - DNA, 26 bp, Homo sapiens
tctcctactccttttctacatgattt

SEQ ID NO: 4794 - DNA, 26 bp, Homo sapiens
ctcctactccttttctacatgatttt

SEQ ID NO: 4795 - DNA, 26 bp, Homo sapiens
tcctactccttttctacatgattttt

SEQ ID NO: 4796 - DNA, 26 bp, Homo sapiens
cctactccttttctacatgatttttg

SEQ ID NO: 4797 - DNA, 26 bp, Homo sapiens
ctactccttttctacatgatttttga

SEQ ID NO: 4798 - DNA, 26 bp, Homo sapiens
tactccttttctacatgatttttgaa

SEQ ID NO: 4799 - DNA, 26 bp, Homo sapiens
actccttttctacatgatttttgaat

SEQ ID NO: 4800 - DNA, 26 bp, Homo sapiens
ctccttttctacatgatttttgaatc

SEQ ID NO: 4801 - DNA, 26 bp, Homo sapiens
tccttttctacatgatttttgaatca

SEQ ID NO: 4802 - DNA, 26 bp, Homo sapiens
ccttttctacatgatttttgaatcaa

SEQ ID NO: 4803 - DNA, 26 bp, Homo sapiens
cttttctacatgatttttgaatcaaa

SEQ ID NO: 4804 - DNA, 26 bp, Homo sapiens
ttttctacatgatttttgaatcaaat

SEQ ID NO: 4805 - DNA, 26 bp, Homo sapiens
tttctacatgatttttgaatcaaatg

SEQ ID NO: 4806 - DNA, 26 bp, Homo sapiens
ttctacatgatttttgaatcaaatgg

SEQ ID NO: 4807 - DNA, 26 bp, Homo sapiens
tctacatgatttttgaatcaaatggc

SEQ ID NO: 4808 - DNA, 26 bp, Homo sapiens
ctacatgatttttgaatcaaatggct

SEQ ID NO: 4809 - DNA, 26 bp, Homo sapiens
tacatgatttttgaatcaaatggctg

SEQ ID NO: 4810 - DNA, 26 bp, Homo sapiens
acatgatttttgaatcaaatggctgt

SEQ ID NO: 4811 - DNA, 26 bp, Homo sapiens
catgatttttgaatcaaatggctgtt

SEQ ID NO: 4812 - DNA, 26 bp, Homo sapiens
atgatttttgaatcaaatggctgttt

SEQ ID NO: 4813 - DNA, 26 bp, Homo sapiens
tgatttttgaatcaaatggctgtttc

SEQ ID NO: 4814 - DNA, 26 bp, Homo sapiens
gatttttgaatcaaatggctgtttct

SEQ ID NO: 4815 - DNA, 26 bp, Homo sapiens
atttttgaatcaaatggctgtttctg

SEQ ID NO: 4816 - DNA, 26 bp, Homo sapiens
tttttgaatcaaatggctgtttctgc

SEQ ID NO: 4817 - DNA, 26 bp, Homo sapiens
ttttgaatcaaatggctgtttctgca

SEQ ID NO: 4818 - DNA, 26 bp, Homo sapiens
tttgaatcaaatggctgtttctgcag

SEQ ID NO: 4819 - DNA, 26 bp, Homo sapiens
ttgaatcaaatggctgtttctgcaga

SEQ ID NO: 4820 - DNA, 26 bp, Homo sapiens
tgaatcaaatggctgtttctgcagat

SEQ ID NO: 4821 - DNA, 26 bp, Homo sapiens
gaatcaaatggctgtttctgcagatc

SEQ ID NO: 4822 - DNA, 26 bp, Homo sapiens
aatcaaatggctgtttctgcagatca

SEQ ID NO: 4823 - DNA, 26 bp, Homo sapiens
atcaaatggctgtttctgcagatcac

SEQ ID NO: 4824 - DNA, 26 bp, Homo sapiens
tcaaatggctgtttctgcagatcaca

SEQ ID NO: 4825 - DNA, 26 bp, Homo sapiens
caaatggctgtttctgcagatcacaa

SEQ ID NO: 4826 - DNA, 26 bp, Homo sapiens
aaatggctgtttctgcagatcacaat

SEQ ID NO: 4827 - DNA, 26 bp, Homo sapiens
aatggctgtttctgcagatcacaata

SEQ ID NO: 4828 - DNA, 26 bp, Homo sapiens
atggctgtttctgcagatcacaataa

SEQ ID NO: 4829 - DNA, 26 bp, Homo sapiens
tggctgtttctgcagatcacaataat

SEQ ID NO: 4830 - DNA, 26 bp, Homo sapiens
ggctgtttctgcagatcacaataatt

SEQ ID NO: 4831 - DNA, 26 bp, Homo sapiens
gctgtttctgcagatcacaataattc

SEQ ID NO: 4832 - DNA, 26 bp, Homo sapiens
ctgtttctgcagatcacaataattct

SEQ ID NO: 4833 - DNA, 26 bp, Homo sapiens
tgtttctgcagatcacaataattctt

SEQ ID NO: 4834 - DNA, 26 bp, Homo sapiens
gtttctgcagatcacaataattctta

SEQ ID NO: 4835 - DNA, 26 bp, Homo sapiens
tttctgcagatcacaataattcttag

SEQ ID NO: 4836 - DNA, 26 bp, Homo sapiens
ttctgcagatcacaataattcttaga

SEQ ID NO: 4837 - DNA, 26 bp, Homo sapiens
tctgcagatcacaataattcttagaa

SEQ ID NO: 4838 - DNA, 26 bp, Homo sapiens
ctgcagatcacaataattcttagaag

SEQ ID NO: 4839 - DNA, 26 bp, Homo sapiens
tgcagatcacaataattcttagaagg

SEQ ID NO: 4840 - DNA, 26 bp, Homo sapiens
gcagatcacaataattcttagaagga

SEQ ID NO: 4841 - DNA, 26 bp, Homo sapiens
cagatcacaataattcttagaaggaa

SEQ ID NO: 4842 - DNA, 26 bp, Homo sapiens
agatcacaataattcttagaaggaaa

SEQ ID NO: 4843 - DNA, 26 bp, Homo sapiens
gatcacaataattcttagaaggaaat

SEQ ID NO: 4844 - DNA, 26 bp, Homo sapiens
atcacaataattcttagaaggaaata

SEQ ID NO: 4845 - DNA, 26 bp, Homo sapiens
tcacaataattcttagaaggaaatac

SEQ ID NO: 4846 - DNA, 26 bp, Homo sapiens
cacaataattcttagaaggaaatact

SEQ ID NO: 4847 - DNA, 26 bp, Homo sapiens
acaataattcttagaaggaaatactc

SEQ ID NO: 4848 - DNA, 26 bp, Homo sapiens
caataattcttagaaggaaatactct

SEQ ID NO: 4849 - DNA, 26 bp, Homo sapiens
aataattcttagaaggaaatactctc

SEQ ID NO: 4850 - DNA, 26 bp, Homo sapiens
ataattcttagaaggaaatactctcg

SEQ ID NO: 4851 - DNA, 26 bp, Homo sapiens
taattcttagaaggaaatactctcgc

SEQ ID NO: 4852 - DNA, 26 bp, Homo sapiens
aattcttagaaggaaatactctcgca

SEQ ID NO: 4853 - DNA, 26 bp, Homo sapiens
attcttagaaggaaatactctcgcaa

SEQ ID NO: 4854 - DNA, 26 bp, Homo sapiens
ttcttagaaggaaatactctcgcaaa

SEQ ID NO: 4855 - DNA, 26 bp, Homo sapiens
tcttagaaggaaatactctcgcaaaa

SEQ ID NO: 4856 - DNA, 26 bp, Homo sapiens
cttagaaggaaatactctcgcaaaac

SEQ ID NO: 4857 - DNA, 26 bp, Homo sapiens
ttagaaggaaatactctcgcaaaact

SEQ ID NO: 4858 - DNA, 26 bp, Homo sapiens
tagaaggaaatactctcgcaaaacta

SEQ ID NO: 4859 - DNA, 26 bp, Homo sapiens
agaaggaaatactctcgcaaaactaa

SEQ ID NO: 4860 - DNA, 26 bp, Homo sapiens
gaaggaaatactctcgcaaaactaag

SEQ ID NO: 4861 - DNA, 26 bp, Homo sapiens
aaggaaatactctcgcaaaactaaga

SEQ ID NO: 4862 - DNA, 26 bp, Homo sapiens
aggaaatactctcgcaaaactaagac

SEQ ID NO: 4863 - DNA, 26 bp, Homo sapiens
ggaaatactctcgcaaaactaagacc

SEQ ID NO: 4864 - DNA, 26 bp, Homo sapiens
gaaatactctcgcaaaactaagaccc

SEQ ID NO: 4865 - DNA, 26 bp, Homo sapiens
aaatactctcgcaaaactaagaccct

SEQ ID NO: 4866 - DNA, 26 bp, Homo sapiens
aatactctcgcaaaactaagaccctg

SEQ ID NO: 4867 - DNA, 26 bp, Homo sapiens
atactctcgcaaaactaagaccctgc

SEQ ID NO: 4868 - DNA, 26 bp, Homo sapiens
tactctcgcaaaactaagaccctgcc

SEQ ID NO: 4869 - DNA, 26 bp, Homo sapiens
actctcgcaaaactaagaccctgcca

SEQ ID NO: 4870 - DNA, 26 bp, Homo sapiens
ctctcgcaaaactaagaccctgccaa

SEQ ID NO: 4871 - DNA, 26 bp, Homo sapiens
tctcgcaaaactaagaccctgccaat

SEQ ID NO: 4872 - DNA, 26 bp, Homo sapiens
ctcgcaaaactaagaccctgccaatc

SEQ ID NO: 4873 - DNA, 26 bp, Homo sapiens
tcgcaaaactaagaccctgccaatca

SEQ ID NO: 4874 - DNA, 26 bp, Homo sapiens
cgcaaaactaagaccctgccaatcat

SEQ ID NO: 4875 - DNA, 26 bp, Homo sapiens
gcaaaactaagaccctgccaatcatt

SEQ ID NO: 4876 - DNA, 26 bp, Homo sapiens
caaaactaagaccctgccaatcattc

SEQ ID NO: 4877 - DNA, 26 bp, Homo sapiens
aaaactaagaccctgccaatcattca

SEQ ID NO: 4878 - DNA, 26 bp, Homo sapiens
aaactaagaccctgccaatcattcac

SEQ ID NO: 4879 - DNA, 26 bp, Homo sapiens
aactaagaccctgccaatcattcaca

SEQ ID NO: 4880 - DNA, 26 bp, Homo sapiens
actaagaccctgccaatcattcacag

SEQ ID NO: 4881 - DNA, 26 bp, Homo sapiens
ctaagaccctgccaatcattcacaga

SEQ ID NO: 4882 - DNA, 26 bp, Homo sapiens
taagaccctgccaatcattcacagag

SEQ ID NO: 4883 - DNA, 26 bp, Homo sapiens
aagaccctgccaatcattcacagagc

SEQ ID NO: 4884 - DNA, 26 bp, Homo sapiens
agaccctgccaatcattcacagagcc

SEQ ID NO: 4885 - DNA, 26 bp, Homo sapiens
gaccctgccaatcattcacagagcca

SEQ ID NO: 4886 - DNA, 26 bp, Homo sapiens
accctgccaatcattcacagagccag

SEQ ID NO: 4887 - DNA, 26 bp, Homo sapiens
ccctgccaatcattcacagagccagt

SEQ ID NO: 4888 - DNA, 26 bp, Homo sapiens
cctgccaatcattcacagagccagtc

SEQ ID NO: 4889 - DNA, 26 bp, Homo sapiens
ctgccaatcattcacagagccagtcc

SEQ ID NO: 4890 - DNA, 26 bp, Homo sapiens
tgccaatcattcacagagccagtcca

SEQ ID NO: 4891 - DNA, 26 bp, Homo sapiens
gccaatcattcacagagccagtccac

SEQ ID NO: 4892 - DNA, 26 bp, Homo sapiens
ccaatcattcacagagccagtccact

SEQ ID NO: 4893 - DNA, 26 bp, Homo sapiens
caatcattcacagagccagtccactg

SEQ ID NO: 4894 - DNA, 26 bp, Homo sapiens
aatcattcacagagccagtccactgc

SEQ ID NO: 4895 - DNA, 26 bp, Homo sapiens
atcattcacagagccagtccactgca

SEQ ID NO: 4896 - DNA, 26 bp, Homo sapiens
tcattcacagagccagtccactgcac

SEQ ID NO: 4897 - DNA, 26 bp, Homo sapiens
cattcacagagccagtccactgcacg

SEQ ID NO: 4898 - DNA, 26 bp, Homo sapiens
attcacagagccagtccactgcacgt

SEQ ID NO: 4899 - DNA, 26 bp, Homo sapiens
ttcacagagccagtccactgcacgtc

SEQ ID NO: 4900 - DNA, 26 bp, Homo sapiens
tcacagagccagtccactgcacgtca

SEQ ID NO: 4901 - DNA, 26 bp, Homo sapiens
cacagagccagtccactgcacgtcaa

SEQ ID NO: 4902 - DNA, 26 bp, Homo sapiens
acagagccagtccactgcacgtcaag

SEQ ID NO: 4903 - DNA, 26 bp, Homo sapiens
cagagccagtccactgcacgtcaaga

SEQ ID NO: 4904 - DNA, 26 bp, Homo sapiens
agagccagtccactgcacgtcaagaa

SEQ ID NO: 4905 - DNA, 26 bp, Homo sapiens
gagccagtccactgcacgtcaagaac

SEQ ID NO: 4906 - DNA, 26 bp, Homo sapiens
agccagtccactgcacgtcaagaacc

SEQ ID NO: 4907 - DNA, 26 bp, Homo sapiens
gccagtccactgcacgtcaagaacca

SEQ ID NO: 4908 - DNA, 26 bp, Homo sapiens
ccagtccactgcacgtcaagaaccaa

SEQ ID NO: 4909 - DNA, 26 bp, Homo sapiens
cagtccactgcacgtcaagaaccaat

SEQ ID NO: 4910 - DNA, 26 bp, Homo sapiens
agtccactgcacgtcaagaaccaatt

SEQ ID NO: 4911 - DNA, 26 bp, Homo sapiens
gtccactgcacgtcaagaaccaatta

SEQ ID NO: 4912 - DNA, 26 bp, Homo sapiens
tccactgcacgtcaagaaccaattag

SEQ ID NO: 4913 - DNA, 26 bp, Homo sapiens
ccactgcacgtcaagaaccaattagg

SEQ ID NO: 4914 - DNA, 26 bp, Homo sapiens
cactgcacgtcaagaaccaattagga

SEQ ID NO: 4915 - DNA, 26 bp, Homo sapiens
actgcacgtcaagaaccaattaggaa

SEQ ID NO: 4916 - DNA, 26 bp, Homo sapiens
ctgcacgtcaagaaccaattaggaaa

SEQ ID NO: 4917 - DNA, 26 bp, Homo sapiens
tgcacgtcaagaaccaattaggaaaa

SEQ ID NO: 4918 - DNA, 26 bp, Homo sapiens
gcacgtcaagaaccaattaggaaaaa

SEQ ID NO: 4919 - DNA, 26 bp, Homo sapiens
cacgtcaagaaccaattaggaaaaat

SEQ ID NO: 4920 - DNA, 26 bp, Homo sapiens
acgtcaagaaccaattaggaaaaatg

SEQ ID NO: 4921 - DNA, 26 bp, Homo sapiens
cgtcaagaaccaattaggaaaaatga

SEQ ID NO: 4922 - DNA, 26 bp, Homo sapiens
gtcaagaaccaattaggaaaaatgat

SEQ ID NO: 4923 - DNA, 26 bp, Homo sapiens
tcaagaaccaattaggaaaaatgata

SEQ ID NO: 4924 - DNA, 26 bp, Homo sapiens
caagaaccaattaggaaaaatgatat

SEQ ID NO: 4925 - DNA, 26 bp, Homo sapiens
aagaaccaattaggaaaaatgatata

SEQ ID NO: 4926 - DNA, 26 bp, Homo sapiens
agaaccaattaggaaaaatgatatat

SEQ ID NO: 4927 - DNA, 26 bp, Homo sapiens
gaaccaattaggaaaaatgatatatt

SEQ ID NO: 4928 - DNA, 26 bp, Homo sapiens
aaccaattaggaaaaatgatatattt

SEQ ID NO: 4929 - DNA, 26 bp, Homo sapiens
accaattaggaaaaatgatatatttg

SEQ ID NO: 4930 - DNA, 26 bp, Homo sapiens
ccaattaggaaaaatgatatatttgc

SEQ ID NO: 4931 - DNA, 26 bp, Homo sapiens
caattaggaaaaatgatatatttgca

SEQ ID NO: 4932 - DNA, 26 bp, Homo sapiens
aattaggaaaaatgatatatttgcaa

SEQ ID NO: 4933 - DNA, 26 bp, Homo sapiens
attaggaaaaatgatatatttgcaaa

SEQ ID NO: 4934 - DNA, 26 bp, Homo sapiens
ttaggaaaaatgatatatttgcaaaa

SEQ ID NO: 4935 - DNA, 26 bp, Homo sapiens
taggaaaaatgatatatttgcaaaaa

SEQ ID NO: 4936 - DNA, 26 bp, Homo sapiens
aggaaaaatgatatatttgcaaaaat

SEQ ID NO: 4937 - DNA, 26 bp, Homo sapiens
ggaaaaatgatatatttgcaaaaata

SEQ ID NO: 4938 - DNA, 26 bp, Homo sapiens
gaaaaatgatatatttgcaaaaatag

SEQ ID NO: 4939 - DNA, 26 bp, Homo sapiens
aaaaatgatatatttgcaaaaatagt

SEQ ID NO: 4940 - DNA, 26 bp, Homo sapiens
aaaatgatatatttgcaaaaatagtt

SEQ ID NO: 4941 - DNA, 26 bp, Homo sapiens
aaatgatatatttgcaaaaatagttt

SEQ ID NO: 4942 - DNA, 26 bp, Homo sapiens
aatgatatatttgcaaaaatagtttg

SEQ ID NO: 4943 - DNA, 26 bp, Homo sapiens
atgatatatttgcaaaaatagtttga

SEQ ID NO: 4944 - DNA, 26 bp, Homo sapiens
tgatatatttgcaaaaatagtttgag

SEQ ID NO: 4945 - DNA, 26 bp, Homo sapiens
gatatatttgcaaaaatagtttgaga

SEQ ID NO: 4946 - DNA, 26 bp, Homo sapiens
atatatttgcaaaaatagtttgagac

SEQ ID NO: 4947 - DNA, 26 bp, Homo sapiens
tatatttgcaaaaatagtttgagact

SEQ ID NO: 4948 - DNA, 26 bp, Homo sapiens
atatttgcaaaaatagtttgagacta

SEQ ID NO: 4949 - DNA, 26 bp, Homo sapiens
tatttgcaaaaatagtttgagactat

SEQ ID NO: 4950 - DNA, 26 bp, Homo sapiens
atttgcaaaaatagtttgagactata

SEQ ID NO: 4951 - DNA, 26 bp, Homo sapiens
tttgcaaaaatagtttgagactatag

SEQ ID NO: 4952 - DNA, 26 bp, Homo sapiens
ttgcaaaaatagtttgagactataga

SEQ ID NO: 4953 - DNA, 26 bp, Homo sapiens
tgcaaaaatagtttgagactatagag

SEQ ID NO: 4954 - DNA, 26 bp, Homo sapiens
gcaaaaatagtttgagactatagagt

SEQ ID NO: 4955 - DNA, 26 bp, Homo sapiens
caaaaatagtttgagactatagagtt

SEQ ID NO: 4956 - DNA, 26 bp, Homo sapiens
aaaaatagtttgagactatagagtta

SEQ ID NO: 4957 - DNA, 26 bp, Homo sapiens
aaaatagtttgagactatagagttaa

SEQ ID NO: 4958 - DNA, 26 bp, Homo sapiens
aaatagtttgagactatagagttaat

SEQ ID NO: 4959 - DNA, 26 bp, Homo sapiens
aatagtttgagactatagagttaatt

SEQ ID NO: 4960 - DNA, 26 bp, Homo sapiens
atagtttgagactatagagttaatta

SEQ ID NO: 4961 - DNA, 26 bp, Homo sapiens
tagtttgagactatagagttaattaa

SEQ ID NO: 4962 - DNA, 26 bp, Homo sapiens
agtttgagactatagagttaattaac

SEQ ID NO: 4963 - DNA, 26 bp, Homo sapiens
gtttgagactatagagttaattaaca

SEQ ID NO: 4964 - DNA, 26 bp, Homo sapiens
tttgagactatagagttaattaacaa

SEQ ID NO: 4965 - DNA, 26 bp, Homo sapiens
ttgagactatagagttaattaacaac

SEQ ID NO: 4966 - DNA, 26 bp, Homo sapiens
tgagactatagagttaattaacaaca

SEQ ID NO: 4967 - DNA, 26 bp, Homo sapiens
gagactatagagttaattaacaacaa

SEQ ID NO: 4968 - DNA, 26 bp, Homo sapiens
agactatagagttaattaacaacaac

SEQ ID NO: 4969 - DNA, 26 bp, Homo sapiens
gactatagagttaattaacaacaaca

SEQ ID NO: 4970 - DNA, 26 bp, Homo sapiens
actatagagttaattaacaacaacaa

SEQ ID NO: 4971 - DNA, 26 bp, Homo sapiens
ctatagagttaattaacaacaacaaa

SEQ ID NO: 4972 - DNA, 26 bp, Homo sapiens
tatagagttaattaacaacaacaaaa

SEQ ID NO: 4973 - DNA, 26 bp, Homo sapiens
atagagttaattaacaacaacaaaaa

SEQ ID NO: 4974 - DNA, 26 bp, Homo sapiens
tagagttaattaacaacaacaaaaaa

SEQ ID NO: 4975 - DNA, 26 bp, Homo sapiens
agagttaattaacaacaacaaaaaaa

SEQ ID NO: 4976 - DNA, 26 bp, Homo sapiens
gagttaattaacaacaacaaaaaaat

SEQ ID NO: 4977 - DNA, 26 bp, Homo sapiens
agttaattaacaacaacaaaaaaatg

SEQ ID NO: 4978 - DNA, 26 bp, Homo sapiens
gttaattaacaacaacaaaaaaatgc

SEQ ID NO: 4979 - DNA, 26 bp, Homo sapiens
ttaattaacaacaacaaaaaaatgcc

SEQ ID NO: 4980 - DNA, 26 bp, Homo sapiens
taattaacaacaacaaaaaaatgcct

SEQ ID NO: 4981 - DNA, 26 bp, Homo sapiens
aattaacaacaacaaaaaaatgcctc

SEQ ID NO: 4982 - DNA, 26 bp, Homo sapiens
attaacaacaacaaaaaaatgcctca

SEQ ID NO: 4983 - DNA, 26 bp, Homo sapiens
ttaacaacaacaaaaaaatgcctcaa

SEQ ID NO: 4984 - DNA, 26 bp, Homo sapiens
taacaacaacaaaaaaatgcctcaag

SEQ ID NO: 4985 - DNA, 26 bp, Homo sapiens
aacaacaacaaaaaaatgcctcaagt

SEQ ID NO: 4986 - DNA, 26 bp, Homo sapiens
acaacaacaaaaaaatgcctcaagtg

SEQ ID NO: 4987 - DNA, 26 bp, Homo sapiens
caacaacaaaaaaatgcctcaagtgt

SEQ ID NO: 4988 - DNA, 26 bp, Homo sapiens
aacaacaaaaaaatgcctcaagtgta

SEQ ID NO: 4989 - DNA, 26 bp, Homo sapiens
acaacaaaaaaatgcctcaagtgtaa

SEQ ID NO: 4990 - DNA, 26 bp, Homo sapiens
caacaaaaaaatgcctcaagtgtaac

SEQ ID NO: 4991 - DNA, 26 bp, Homo sapiens
aacaaaaaaatgcctcaagtgtaact

SEQ ID NO: 4992 - DNA, 26 bp, Homo sapiens
acaaaaaaatgcctcaagtgtaacta

SEQ ID NO: 4993 - DNA, 26 bp, Homo sapiens
caaaaaaatgcctcaagtgtaactac

SEQ ID NO: 4994 - DNA, 26 bp, Homo sapiens
aaaaaaatgcctcaagtgtaactacc

SEQ ID NO: 4995 - DNA, 26 bp, Homo sapiens
aaaaaatgcctcaagtgtaactacca

SEQ ID NO: 4996 - DNA, 26 bp, Homo sapiens
aaaaatgcctcaagtgtaactaccaa

SEQ ID NO: 4997 - DNA, 26 bp, Homo sapiens
aaaatgcctcaagtgtaactaccaac

SEQ ID NO: 4998 - DNA, 26 bp, Homo sapiens
aaatgcctcaagtgtaactaccaaca

SEQ ID NO: 4999 - DNA, 26 bp, Homo sapiens
aatgcctcaagtgtaactaccaacac

SEQ ID NO: 5000 - DNA, 26 bp, Homo sapiens
atgcctcaagtgtaactaccaacaca

SEQ ID NO: 5001 - DNA, 26 bp, Homo sapiens
tgcctcaagtgtaactaccaacacat

SEQ ID NO: 5002 - DNA, 26 bp, Homo sapiens
gcctcaagtgtaactaccaacacatt

SEQ ID NO: 5003 - DNA, 26 bp, Homo sapiens
cctcaagtgtaactaccaacacatta

SEQ ID NO: 5004 - DNA, 26 bp, Homo sapiens
ctcaagtgtaactaccaacacattac

SEQ ID NO: 5005 - DNA, 26 bp, Homo sapiens
tcaagtgtaactaccaacacattact

SEQ ID NO: 5006 - DNA, 26 bp, Homo sapiens
caagtgtaactaccaacacattactg

SEQ ID NO: 5007 - DNA, 26 bp, Homo sapiens
aagtgtaactaccaacacattactgc

SEQ ID NO: 5008 - DNA, 26 bp, Homo sapiens
agtgtaactaccaacacattactgca

SEQ ID NO: 5009 - DNA, 26 bp, Homo sapiens
gtgtaactaccaacacattactgcag

SEQ ID NO: 5010 - DNA, 26 bp, Homo sapiens
tgtaactaccaacacattactgcagc

SEQ ID NO: 5011 - DNA, 26 bp, Homo sapiens
gtaactaccaacacattactgcagcc

SEQ ID NO: 5012 - DNA, 26 bp, Homo sapiens
taactaccaacacattactgcagcct

SEQ ID NO: 5013 - DNA, 26 bp, Homo sapiens
aactaccaacacattactgcagcctg

SEQ ID NO: 5014 - DNA, 26 bp, Homo sapiens
actaccaacacattactgcagcctgg

SEQ ID NO: 5015 - DNA, 26 bp, Homo sapiens
ctaccaacacattactgcagcctgga

SEQ ID NO: 5016 - DNA, 26 bp, Homo sapiens
taccaacacattactgcagcctggag

SEQ ID NO: 5017 - DNA, 26 bp, Homo sapiens
accaacacattactgcagcctggagc

SEQ ID NO: 5018 - DNA, 26 bp, Homo sapiens
ccaacacattactgcagcctggagct

SEQ ID NO: 5019 - DNA, 26 bp, Homo sapiens
caacacattactgcagcctggagctg

SEQ ID NO: 5020 - DNA, 26 bp, Homo sapiens
aacacattactgcagcctggagctga

SEQ ID NO: 5021 - DNA, 26 bp, Homo sapiens
acacattactgcagcctggagctgaa

SEQ ID NO: 5022 - DNA, 26 bp, Homo sapiens
cacattactgcagcctggagctgaag

SEQ ID NO: 5023 - DNA, 26 bp, Homo sapiens
acattactgcagcctggagctgaagt

SEQ ID NO: 5024 - DNA, 26 bp, Homo sapiens
cattactgcagcctggagctgaagtt

SEQ ID NO: 5025 - DNA, 26 bp, Homo sapiens
attactgcagcctggagctgaagtta

SEQ ID NO: 5026 - DNA, 26 bp, Homo sapiens
ttactgcagcctggagctgaagttag

SEQ ID NO: 5027 - DNA, 26 bp, Homo sapiens
tactgcagcctggagctgaagttagt

SEQ ID NO: 5028 - DNA, 26 bp, Homo sapiens
actgcagcctggagctgaagttagtc

SEQ ID NO: 5029 - DNA, 26 bp, Homo sapiens
ctgcagcctggagctgaagttagtct

SEQ ID NO: 5030 - DNA, 26 bp, Homo sapiens
tgcagcctggagctgaagttagtctc

SEQ ID NO: 5031 - DNA, 26 bp, Homo sapiens
gcagcctggagctgaagttagtctcc

SEQ ID NO: 5032 - DNA, 26 bp, Homo sapiens
cagcctggagctgaagttagtctccc

SEQ ID NO: 5033 - DNA, 26 bp, Homo sapiens
agcctggagctgaagttagtctccca

SEQ ID NO: 5034 - DNA, 26 bp, Homo sapiens
gcctggagctgaagttagtctcccac

SEQ ID NO: 5035 - DNA, 26 bp, Homo sapiens
cctggagctgaagttagtctcccacc

SEQ ID NO: 5036 - DNA, 26 bp, Homo sapiens
ctggagctgaagttagtctcccaccc

SEQ ID NO: 5037 - DNA, 26 bp, Homo sapiens
tggagctgaagttagtctcccacccc

SEQ ID NO: 5038 - DNA, 26 bp, Homo sapiens
ggagctgaagttagtctcccacccca

SEQ ID NO: 5039 - DNA, 26 bp, Homo sapiens
gagctgaagttagtctcccaccccac

SEQ ID NO: 5040 - DNA, 26 bp, Homo sapiens
agctgaagttagtctcccaccccaca

SEQ ID NO: 5041 - DNA, 26 bp, Homo sapiens
gctgaagttagtctcccaccccacaa

SEQ ID NO: 5042 - DNA, 26 bp, Homo sapiens
ctgaagttagtctcccaccccacaat

SEQ ID NO: 5043 - DNA, 26 bp, Homo sapiens
tgaagttagtctcccaccccacaatt

SEQ ID NO: 5044 - DNA, 26 bp, Homo sapiens
gaagttagtctcccaccccacaattc

SEQ ID NO: 5045 - DNA, 26 bp, Homo sapiens
aagttagtctcccaccccacaattca

SEQ ID NO: 5046 - DNA, 26 bp, Homo sapiens
agttagtctcccaccccacaattcaa

SEQ ID NO: 5047 - DNA, 26 bp, Homo sapiens
gttagtctcccaccccacaattcaaa

SEQ ID NO: 5048 - DNA, 26 bp, Homo sapiens
ttagtctcccaccccacaattcaaac

SEQ ID NO: 5049 - DNA, 26 bp, Homo sapiens
tagtctcccaccccacaattcaaact

SEQ ID NO: 5050 - DNA, 26 bp, Homo sapiens
agtctcccaccccacaattcaaactc

SEQ ID NO: 5051 - DNA, 26 bp, Homo sapiens
gtctcccaccccacaattcaaactct

SEQ ID NO: 5052 - DNA, 26 bp, Homo sapiens
tctcccaccccacaattcaaactctc

SEQ ID NO: 5053 - DNA, 26 bp, Homo sapiens
ctcccaccccacaattcaaactctct

SEQ ID NO: 5054 - DNA, 26 bp, Homo sapiens
tcccaccccacaattcaaactctctg

SEQ ID NO: 5055 - DNA, 26 bp, Homo sapiens
cccaccccacaattcaaactctctga

SEQ ID NO: 5056 - DNA, 26 bp, Homo sapiens
ccaccccacaattcaaactctctgaa

SEQ ID NO: 5057 - DNA, 26 bp, Homo sapiens
caccccacaattcaaactctctgaat

SEQ ID NO: 5058 - DNA, 26 bp, Homo sapiens
accccacaattcaaactctctgaatc

SEQ ID NO: 5059 - DNA, 26 bp, Homo sapiens
ccccacaattcaaactctctgaatca

SEQ ID NO: 5060 - DNA, 26 bp, Homo sapiens
cccacaattcaaactctctgaatcag

SEQ ID NO: 5061 - DNA, 26 bp, Homo sapiens
ccacaattcaaactctctgaatcagc

SEQ ID NO: 5062 - DNA, 26 bp, Homo sapiens
cacaattcaaactctctgaatcagct

SEQ ID NO: 5063 - DNA, 26 bp, Homo sapiens
acaattcaaactctctgaatcagcta

SEQ ID NO: 5064 - DNA, 26 bp, Homo sapiens
caattcaaactctctgaatcagctac

SEQ ID NO: 5065 - DNA, 26 bp, Homo sapiens
aattcaaactctctgaatcagctaca

SEQ ID NO: 5066 - DNA, 26 bp, Homo sapiens
attcaaactctctgaatcagctacaa

SEQ ID NO: 5067 - DNA, 26 bp, Homo sapiens
ttcaaactctctgaatcagctacaaa

SEQ ID NO: 5068 - DNA, 26 bp, Homo sapiens
tcaaactctctgaatcagctacaaag

SEQ ID NO: 5069 - DNA, 26 bp, Homo sapiens
caaactctctgaatcagctacaaaga

SEQ ID NO: 5070 - DNA, 26 bp, Homo sapiens
aaactctctgaatcagctacaaagac

SEQ ID NO: 5071 - DNA, 26 bp, Homo sapiens
aactctctgaatcagctacaaagaca

SEQ ID NO: 5072 - DNA, 26 bp, Homo sapiens
actctctgaatcagctacaaagacac

SEQ ID NO: 5073 - DNA, 26 bp, Homo sapiens
ctctctgaatcagctacaaagacacg

SEQ ID NO: 5074 - DNA, 26 bp, Homo sapiens
tctctgaatcagctacaaagacacga

SEQ ID NO: 5075 - DNA, 26 bp, Homo sapiens
ctctgaatcagctacaaagacacgag

SEQ ID NO: 5076 - DNA, 26 bp, Homo sapiens
tctgaatcagctacaaagacacgagg

SEQ ID NO: 5077 - DNA, 26 bp, Homo sapiens
ctgaatcagctacaaagacacgaggc

SEQ ID NO: 5078 - DNA, 26 bp, Homo sapiens
tgaatcagctacaaagacacgaggca

SEQ ID NO: 5079 - DNA, 26 bp, Homo sapiens
gaatcagctacaaagacacgaggcag

SEQ ID NO: 5080 - DNA, 26 bp, Homo sapiens
aatcagctacaaagacacgaggcagt

SEQ ID NO: 5081 - DNA, 26 bp, Homo sapiens
atcagctacaaagacacgaggcagtg

SEQ ID NO: 5082 - DNA, 26 bp, Homo sapiens
tcagctacaaagacacgaggcagtgt

SEQ ID NO: 5083 - DNA, 26 bp, Homo sapiens
cagctacaaagacacgaggcagtgtg

SEQ ID NO: 5084 - DNA, 26 bp, Homo sapiens
agctacaaagacacgaggcagtgtgt

SEQ ID NO: 5085 - DNA, 26 bp, Homo sapiens
gctacaaagacacgaggcagtgtgtt

SEQ ID NO: 5086 - DNA, 26 bp, Homo sapiens
ctacaaagacacgaggcagtgtgttt

SEQ ID NO: 5087 - DNA, 26 bp, Homo sapiens
tacaaagacacgaggcagtgtgttta

SEQ ID NO: 5088 - DNA, 26 bp, Homo sapiens
acaaagacacgaggcagtgtgtttaa

SEQ ID NO: 5089 - DNA, 26 bp, Homo sapiens
caaagacacgaggcagtgtgtttaaa

SEQ ID NO: 5090 - DNA, 26 bp, Homo sapiens
aaagacacgaggcagtgtgtttaaac

SEQ ID NO: 5091 - DNA, 26 bp, Homo sapiens
aagacacgaggcagtgtgtttaaaca

SEQ ID NO: 5092 - DNA, 26 bp, Homo sapiens
agacacgaggcagtgtgtttaaacaa

SEQ ID NO: 5093 - DNA, 26 bp, Homo sapiens
gacacgaggcagtgtgtttaaacaaa

SEQ ID NO: 5094 - DNA, 26 bp, Homo sapiens
acacgaggcagtgtgtttaaacaaaa

SEQ ID NO: 5095 - DNA, 26 bp, Homo sapiens
cacgaggcagtgtgtttaaacaaaag

SEQ ID NO: 5096 - DNA, 26 bp, Homo sapiens
acgaggcagtgtgtttaaacaaaaga

SEQ ID NO: 5097 - DNA, 26 bp, Homo sapiens
cgaggcagtgtgtttaaacaaaagac

SEQ ID NO: 5098 - DNA, 26 bp, Homo sapiens
gaggcagtgtgtttaaacaaaagaca

SEQ ID NO: 5099 - DNA, 26 bp, Homo sapiens
aggcagtgtgtttaaacaaaagacac

SEQ ID NO: 5100 - DNA, 26 bp, Homo sapiens
ggcagtgtgtttaaacaaaagacact

SEQ ID NO: 5101 - DNA, 26 bp, Homo sapiens
gcagtgtgtttaaacaaaagacactg

SEQ ID NO: 5102 - DNA, 26 bp, Homo sapiens
cagtgtgtttaaacaaaagacactgc

SEQ ID NO: 5103 - DNA, 26 bp, Homo sapiens
agtgtgtttaaacaaaagacactgca

SEQ ID NO: 5104 - DNA, 26 bp, Homo sapiens
gtgtgtttaaacaaaagacactgcac

SEQ ID NO: 5105 - DNA, 26 bp, Homo sapiens
tgtgtttaaacaaaagacactgcact

SEQ ID NO: 5106 - DNA, 26 bp, Homo sapiens
gtgtttaaacaaaagacactgcactc

SEQ ID NO: 5107 - DNA, 26 bp, Homo sapiens
tgtttaaacaaaagacactgcactca

SEQ ID NO: 5108 - DNA, 26 bp, Homo sapiens
gtttaaacaaaagacactgcactcag

SEQ ID NO: 5109 - DNA, 26 bp, Homo sapiens
tttaaacaaaagacactgcactcagc

SEQ ID NO: 5110 - DNA, 26 bp, Homo sapiens
ttaaacaaaagacactgcactcagcc

SEQ ID NO: 5111 - DNA, 26 bp, Homo sapiens
taaacaaaagacactgcactcagcca

SEQ ID NO: 5112 - DNA, 26 bp, Homo sapiens
aaacaaaagacactgcactcagccac

SEQ ID NO: 5113 - DNA, 26 bp, Homo sapiens
aacaaaagacactgcactcagccact

SEQ ID NO: 5114 - DNA, 26 bp, Homo sapiens
acaaaagacactgcactcagccactc

SEQ ID NO: 5115 - DNA, 26 bp, Homo sapiens
caaaagacactgcactcagccactca

SEQ ID NO: 5116 - DNA, 26 bp, Homo sapiens
aaaagacactgcactcagccactcac

SEQ ID NO: 5117 - DNA, 26 bp, Homo sapiens
aaagacactgcactcagccactcact

SEQ ID NO: 5118 - DNA, 26 bp, Homo sapiens
aagacactgcactcagccactcactc

SEQ ID NO: 5119 - DNA, 26 bp, Homo sapiens
agacactgcactcagccactcactca

SEQ ID NO: 5120 - DNA, 26 bp, Homo sapiens
gacactgcactcagccactcactcaa

SEQ ID NO: 5121 - DNA, 26 bp, Homo sapiens
acactgcactcagccactcactcaaa

SEQ ID NO: 5122 - DNA, 26 bp, Homo sapiens
cactgcactcagccactcactcaaac

SEQ ID NO: 5123 - DNA, 26 bp, Homo sapiens
actgcactcagccactcactcaaaca

SEQ ID NO: 5124 - DNA, 26 bp, Homo sapiens
ctgcactcagccactcactcaaacac

SEQ ID NO: 5125 - DNA, 26 bp, Homo sapiens
tgcactcagccactcactcaaacaca

SEQ ID NO: 5126 - DNA, 26 bp, Homo sapiens
gcactcagccactcactcaaacacac

SEQ ID NO: 5127 - DNA, 26 bp, Homo sapiens
cactcagccactcactcaaacacact

SEQ ID NO: 5128 - DNA, 26 bp, Homo sapiens
actcagccactcactcaaacacactc

SEQ ID NO: 5129 - DNA, 26 bp, Homo sapiens
ctcagccactcactcaaacacactca

SEQ ID NO: 5130 - DNA, 26 bp, Homo sapiens
tcagccactcactcaaacacactcag

SEQ ID NO: 5131 - DNA, 26 bp, Homo sapiens
cagccactcactcaaacacactcagt

SEQ ID NO: 5132 - DNA, 26 bp, Homo sapiens
agccactcactcaaacacactcagtc

SEQ ID NO: 5133 - DNA, 26 bp, Homo sapiens
gccactcactcaaacacactcagtca

SEQ ID NO: 5134 - DNA, 26 bp, Homo sapiens
ccactcactcaaacacactcagtcac

SEQ ID NO: 5135 - DNA, 26 bp, Homo sapiens
cactcactcaaacacactcagtcact

SEQ ID NO: 5136 - DNA, 26 bp, Homo sapiens
actcactcaaacacactcagtcactg

SEQ ID NO: 5137 - DNA, 26 bp, Homo sapiens
ctcactcaaacacactcagtcactgc

SEQ ID NO: 5138 - DNA, 26 bp, Homo sapiens
tcactcaaacacactcagtcactgct

SEQ ID NO: 5139 - DNA, 26 bp, Homo sapiens
cactcaaacacactcagtcactgctt

SEQ ID NO: 5140 - DNA, 26 bp, Homo sapiens
actcaaacacactcagtcactgcttt

SEQ ID NO: 5141 - DNA, 26 bp, Homo sapiens
ctcaaacacactcagtcactgcttta

SEQ ID NO: 5142 - DNA, 26 bp, Homo sapiens
tcaaacacactcagtcactgctttaa

SEQ ID NO: 5143 - DNA, 26 bp, Homo sapiens
caaacacactcagtcactgctttaaa

SEQ ID NO: 5144 - DNA, 26 bp, Homo sapiens
aaacacactcagtcactgctttaaat

SEQ ID NO: 5145 - DNA, 26 bp, Homo sapiens
aacacactcagtcactgctttaaata

SEQ ID NO: 5146 - DNA, 26 bp, Homo sapiens
acacactcagtcactgctttaaatat

SEQ ID NO: 5147 - DNA, 26 bp, Homo sapiens
cacactcagtcactgctttaaatata

SEQ ID NO: 5148 - DNA, 26 bp, Homo sapiens
acactcagtcactgctttaaatatac

SEQ ID NO: 5149 - DNA, 26 bp, Homo sapiens
cactcagtcactgctttaaatatacc

SEQ ID NO: 5150 - DNA, 26 bp, Homo sapiens
actcagtcactgctttaaatatacca

SEQ ID NO: 5151 - DNA, 26 bp, Homo sapiens
ctcagtcactgctttaaatataccaa

SEQ ID NO: 5152 - DNA, 26 bp, Homo sapiens
tcagtcactgctttaaatataccaaa

SEQ ID NO: 5153 - DNA, 26 bp, Homo sapiens
cagtcactgctttaaatataccaaac

SEQ ID NO: 5154 - DNA, 26 bp, Homo sapiens
agtcactgctttaaatataccaaaca

SEQ ID NO: 5155 - DNA, 26 bp, Homo sapiens
gtcactgctttaaatataccaaacat

SEQ ID NO: 5156 - DNA, 26 bp, Homo sapiens
tcactgctttaaatataccaaacatg

SEQ ID NO: 5157 - DNA, 26 bp, Homo sapiens
cactgctttaaatataccaaacatgc

SEQ ID NO: 5158 - DNA, 26 bp, Homo sapiens
actgctttaaatataccaaacatgct

SEQ ID NO: 5159 - DNA, 26 bp, Homo sapiens
ctgctttaaatataccaaacatgctg

SEQ ID NO: 5160 - DNA, 26 bp, Homo sapiens
tgctttaaatataccaaacatgctgg

SEQ ID NO: 5161 - DNA, 26 bp, Homo sapiens
gctttaaatataccaaacatgctggt

SEQ ID NO: 5162 - DNA, 26 bp, Homo sapiens
ctttaaatataccaaacatgctggtt

SEQ ID NO: 5163 - DNA, 26 bp, Homo sapiens
tttaaatataccaaacatgctggtta

SEQ ID NO: 5164 - DNA, 26 bp, Homo sapiens
ttaaatataccaaacatgctggttaa

SEQ ID NO: 5165 - DNA, 26 bp, Homo sapiens
taaatataccaaacatgctggttaat

SEQ ID NO: 5166 - DNA, 26 bp, Homo sapiens
aaatataccaaacatgctggttaata

SEQ ID NO: 5167 - DNA, 26 bp, Homo sapiens
aatataccaaacatgctggttaataa

SEQ ID NO: 5168 - DNA, 26 bp, Homo sapiens
atataccaaacatgctggttaataaa

SEQ ID NO: 5169 - DNA, 26 bp, Homo sapiens
tataccaaacatgctggttaataaaa

SEQ ID NO: 5170 - DNA, 26 bp, Homo sapiens
ataccaaacatgctggttaataaaat

SEQ ID NO: 5171 - DNA, 26 bp, Homo sapiens
taccaaacatgctggttaataaaatt

SEQ ID NO: 5172 - DNA, 26 bp, Homo sapiens
accaaacatgctggttaataaaattt

SEQ ID NO: 5173 - DNA, 26 bp, Homo sapiens
ccaaacatgctggttaataaaatttt

SEQ ID NO: 5174 - DNA, 26 bp, Homo sapiens
caaacatgctggttaataaaatttta

SEQ ID NO: 5175 - DNA, 26 bp, Homo sapiens
aaacatgctggttaataaaattttag

SEQ ID NO: 5176 - DNA, 26 bp, Homo sapiens
aacatgctggttaataaaattttagt

SEQ ID NO: 5177 - DNA, 26 bp, Homo sapiens
acatgctggttaataaaattttagtc

SEQ ID NO: 5178 - DNA, 26 bp, Homo sapiens
catgctggttaataaaattttagtct

SEQ ID NO: 5179 - DNA, 26 bp, Homo sapiens
atgctggttaataaaattttagtctc

SEQ ID NO: 5180 - DNA, 26 bp, Homo sapiens
tgctggttaataaaattttagtctct

SEQ ID NO: 5181 - DNA, 26 bp, Homo sapiens
gctggttaataaaattttagtctcta

SEQ ID NO: 5182 - DNA, 26 bp, Homo sapiens
ctggttaataaaattttagtctctag

SEQ ID NO: 5183 - DNA, 26 bp, Homo sapiens
tggttaataaaattttagtctctagt

SEQ ID NO: 5184 - DNA, 26 bp, Homo sapiens
ggttaataaaattttagtctctagtt

SEQ ID NO: 5185 - DNA, 26 bp, Homo sapiens
gttaataaaattttagtctctagtta

SEQ ID NO: 5186 - DNA, 26 bp, Homo sapiens
ttaataaaattttagtctctagttac

SEQ ID NO: 5187 - DNA, 26 bp, Homo sapiens
taataaaattttagtctctagttacc

SEQ ID NO: 5188 - DNA, 26 bp, Homo sapiens
aataaaattttagtctctagttacct

SEQ ID NO: 5189 - DNA, 26 bp, Homo sapiens
ataaaattttagtctctagttaccta

SEQ ID NO: 5190 - DNA, 26 bp, Homo sapiens
taaaattttagtctctagttacctat

SEQ ID NO: 5191 - DNA, 26 bp, Homo sapiens
aaaattttagtctctagttacctatt

SEQ ID NO: 5192 - DNA, 26 bp, Homo sapiens
aaattttagtctctagttacctattt

SEQ ID NO: 5193 - DNA, 26 bp, Homo sapiens
aattttagtctctagttacctattta

SEQ ID NO: 5194 - DNA, 26 bp, Homo sapiens
attttagtctctagttacctatttac

SEQ ID NO: 5195 - DNA, 26 bp, Homo sapiens
ttttagtctctagttacctatttaca

SEQ ID NO: 5196 - DNA, 26 bp, Homo sapiens
tttagtctctagttacctatttacac

SEQ ID NO: 5197 - DNA, 26 bp, Homo sapiens
ttagtctctagttacctatttacact

SEQ ID NO: 5198 - DNA, 26 bp, Homo sapiens
tagtctctagttacctatttacactc

SEQ ID NO: 5199 - DNA, 26 bp, Homo sapiens
agtctctagttacctatttacactct

SEQ ID NO: 5200 - DNA, 26 bp, Homo sapiens
gtctctagttacctatttacactcta

SEQ ID NO: 5201 - DNA, 26 bp, Homo sapiens
tctctagttacctatttacactctat

SEQ ID NO: 5202 - DNA, 26 bp, Homo sapiens
ctctagttacctatttacactctata

SEQ ID NO: 5203 - DNA, 26 bp, Homo sapiens
tctagttacctatttacactctataa

SEQ ID NO: 5204 - DNA, 26 bp, Homo sapiens
ctagttacctatttacactctataat

SEQ ID NO: 5205 - DNA, 26 bp, Homo sapiens
tagttacctatttacactctataata

SEQ ID NO: 5206 - DNA, 26 bp, Homo sapiens
agttacctatttacactctataatat

SEQ ID NO: 5207 - DNA, 26 bp, Homo sapiens
gttacctatttacactctataatata

SEQ ID NO: 5208 - DNA, 26 bp, Homo sapiens
ttacctatttacactctataatataa

SEQ ID NO: 5209 - DNA, 26 bp, Homo sapiens
tacctatttacactctataatataag

SEQ ID NO: 5210 - DNA, 26 bp, Homo sapiens
acctatttacactctataatataagc

SEQ ID NO: 5211 - DNA, 26 bp, Homo sapiens
cctatttacactctataatataagca

SEQ ID NO: 5212 - DNA, 26 bp, Homo sapiens
ctatttacactctataatataagcag

SEQ ID NO: 5213 - DNA, 26 bp, Homo sapiens
tatttacactctataatataagcagt

SEQ ID NO: 5214 - DNA, 26 bp, Homo sapiens
atttacactctataatataagcagta

SEQ ID NO: 5215 - DNA, 26 bp, Homo sapiens
tttacactctataatataagcagtaa

SEQ ID NO: 5216 - DNA, 26 bp, Homo sapiens
ttacactctataatataagcagtaag

SEQ ID NO: 5217 - DNA, 26 bp, Homo sapiens
tacactctataatataagcagtaagc

SEQ ID NO: 5218 - DNA, 26 bp, Homo sapiens
acactctataatataagcagtaagct

SEQ ID NO: 5219 - DNA, 26 bp, Homo sapiens
cactctataatataagcagtaagctc

SEQ ID NO: 5220 - DNA, 26 bp, Homo sapiens
actctataatataagcagtaagctca

SEQ ID NO: 5221 - DNA, 26 bp, Homo sapiens
ctctataatataagcagtaagctcaa

SEQ ID NO: 5222 - DNA, 26 bp, Homo sapiens
tctataatataagcagtaagctcaaa

SEQ ID NO: 5223 - DNA, 26 bp, Homo sapiens
ctataatataagcagtaagctcaaac

SEQ ID NO: 5224 - DNA, 26 bp, Homo sapiens
tataatataagcagtaagctcaaaca

SEQ ID NO: 5225 - DNA, 26 bp, Homo sapiens
ataatataagcagtaagctcaaacaa

SEQ ID NO: 5226 - DNA, 26 bp, Homo sapiens
taatataagcagtaagctcaaacaac

SEQ ID NO: 5227 - DNA, 26 bp, Homo sapiens
aatataagcagtaagctcaaacaact

SEQ ID NO: 5228 - DNA, 26 bp, Homo sapiens
atataagcagtaagctcaaacaacta

SEQ ID NO: 5229 - DNA, 26 bp, Homo sapiens
tataagcagtaagctcaaacaactaa

SEQ ID NO: 5230 - DNA, 26 bp, Homo sapiens
ataagcagtaagctcaaacaactaag

SEQ ID NO: 5231 - DNA, 26 bp, Homo sapiens
taagcagtaagctcaaacaactaagg

SEQ ID NO: 5232 - DNA, 26 bp, Homo sapiens
aagcagtaagctcaaacaactaaggc

SEQ ID NO: 5233 - DNA, 26 bp, Homo sapiens
agcagtaagctcaaacaactaaggcc

SEQ ID NO: 5234 - DNA, 26 bp, Homo sapiens
gcagtaagctcaaacaactaaggcca

SEQ ID NO: 5235 - DNA, 26 bp, Homo sapiens
cagtaagctcaaacaactaaggccag

SEQ ID NO: 5236 - DNA, 26 bp, Homo sapiens
agtaagctcaaacaactaaggccagt

SEQ ID NO: 5237 - DNA, 26 bp, Homo sapiens
gtaagctcaaacaactaaggccagtg

SEQ ID NO: 5238 - DNA, 26 bp, Homo sapiens
taagctcaaacaactaaggccagtgg

SEQ ID NO: 5239 - DNA, 26 bp, Homo sapiens
aagctcaaacaactaaggccagtggc

SEQ ID NO: 5240 - DNA, 26 bp, Homo sapiens
agctcaaacaactaaggccagtggct

SEQ ID NO: 5241 - DNA, 26 bp, Homo sapiens
gctcaaacaactaaggccagtggctc

SEQ ID NO: 5242 - DNA, 26 bp, Homo sapiens
ctcaaacaactaaggccagtggctct

SEQ ID NO: 5243 - DNA, 26 bp, Homo sapiens
tcaaacaactaaggccagtggctctt

SEQ ID NO: 5244 - DNA, 26 bp, Homo sapiens
caaacaactaaggccagtggctcttc

SEQ ID NO: 5245 - DNA, 26 bp, Homo sapiens
aaacaactaaggccagtggctcttct

SEQ ID NO: 5246 - DNA, 26 bp, Homo sapiens
aacaactaaggccagtggctcttctt

SEQ ID NO: 5247 - DNA, 26 bp, Homo sapiens
acaactaaggccagtggctcttcttt

SEQ ID NO: 5248 - DNA, 26 bp, Homo sapiens
caactaaggccagtggctcttctttg

SEQ ID NO: 5249 - DNA, 26 bp, Homo sapiens
aactaaggccagtggctcttctttgg

SEQ ID NO: 5250 - DNA, 26 bp, Homo sapiens
actaaggccagtggctcttctttggg

SEQ ID NO: 5251 - DNA, 26 bp, Homo sapiens
ctaaggccagtggctcttctttgggg

SEQ ID NO: 5252 - DNA, 26 bp, Homo sapiens
taaggccagtggctcttctttgggga

SEQ ID NO: 5253 - DNA, 26 bp, Homo sapiens
aaggccagtggctcttctttggggag

SEQ ID NO: 5254 - DNA, 26 bp, Homo sapiens
aggccagtggctcttctttggggaga

SEQ ID NO: 5255 - DNA, 26 bp, Homo sapiens
ggccagtggctcttctttggggagag

SEQ ID NO: 5256 - DNA, 26 bp, Homo sapiens
gccagtggctcttctttggggagagg

SEQ ID NO: 5257 - DNA, 26 bp, Homo sapiens
ccagtggctcttctttggggagaggc

SEQ ID NO: 5258 - DNA, 26 bp, Homo sapiens
cagtggctcttctttggggagaggca

SEQ ID NO: 5259 - DNA, 26 bp, Homo sapiens
agtggctcttctttggggagaggcag

SEQ ID NO: 5260 - DNA, 26 bp, Homo sapiens
gtggctcttctttggggagaggcagg

SEQ ID NO: 5261 - DNA, 26 bp, Homo sapiens
tggctcttctttggggagaggcagga

SEQ ID NO: 5262 - DNA, 26 bp, Homo sapiens
ggctcttctttggggagaggcaggaa

SEQ ID NO: 5263 - DNA, 26 bp, Homo sapiens
gctcttctttggggagaggcaggaaa

SEQ ID NO: 5264 - DNA, 26 bp, Homo sapiens
ctcttctttggggagaggcaggaaaa

SEQ ID NO: 5265 - DNA, 26 bp, Homo sapiens
tcttctttggggagaggcaggaaaaa

SEQ ID NO: 5266 - DNA, 26 bp, Homo sapiens
cttctttggggagaggcaggaaaaag

SEQ ID NO: 5267 - DNA, 26 bp, Homo sapiens
ttctttggggagaggcaggaaaaaga

SEQ ID NO: 5268 - DNA, 26 bp, Homo sapiens
tctttggggagaggcaggaaaaagag

SEQ ID NO: 5269 - DNA, 26 bp, Homo sapiens
ctttggggagaggcaggaaaaagaga

SEQ ID NO: 5270 - DNA, 26 bp, Homo sapiens
tttggggagaggcaggaaaaagagac

SEQ ID NO: 5271 - DNA, 26 bp, Homo sapiens
ttggggagaggcaggaaaaagagacc

SEQ ID NO: 5272 - DNA, 26 bp, Homo sapiens
tggggagaggcaggaaaaagagacct

SEQ ID NO: 5273 - DNA, 26 bp, Homo sapiens
ggggagaggcaggaaaaagagaccta

SEQ ID NO: 5274 - DNA, 26 bp, Homo sapiens
gggagaggcaggaaaaagagacctaa

SEQ ID NO: 5275 - DNA, 26 bp, Homo sapiens
ggagaggcaggaaaaagagacctaag

SEQ ID NO: 5276 - DNA, 26 bp, Homo sapiens
gagaggcaggaaaaagagacctaagt

SEQ ID NO: 5277 - DNA, 26 bp, Homo sapiens
agaggcaggaaaaagagacctaagta

SEQ ID NO: 5278 - DNA, 26 bp, Homo sapiens
gaggcaggaaaaagagacctaagtat

SEQ ID NO: 5279 - DNA, 26 bp, Homo sapiens
aggcaggaaaaagagacctaagtata

SEQ ID NO: 5280 - DNA, 26 bp, Homo sapiens
ggcaggaaaaagagacctaagtataa

SEQ ID NO: 5281 - DNA, 26 bp, Homo sapiens
gcaggaaaaagagacctaagtataaa

SEQ ID NO: 5282 - DNA, 26 bp, Homo sapiens
caggaaaaagagacctaagtataaaa

SEQ ID NO: 5283 - DNA, 26 bp, Homo sapiens
aggaaaaagagacctaagtataaaaa

SEQ ID NO: 5284 - DNA, 26 bp, Homo sapiens
ggaaaaagagacctaagtataaaaat

SEQ ID NO: 5285 - DNA, 26 bp, Homo sapiens
gaaaaagagacctaagtataaaaata

SEQ ID NO: 5286 - DNA, 26 bp, Homo sapiens
aaaaagagacctaagtataaaaatat

SEQ ID NO: 5287 - DNA, 26 bp, Homo sapiens
aaaagagacctaagtataaaaatatt

SEQ ID NO: 5288 - DNA, 26 bp, Homo sapiens
aaagagacctaagtataaaaatattt

SEQ ID NO: 5289 - DNA, 26 bp, Homo sapiens
aagagacctaagtataaaaatattta

SEQ ID NO: 5290 - DNA, 26 bp, Homo sapiens
agagacctaagtataaaaatatttaa

SEQ ID NO: 5291 - DNA, 26 bp, Homo sapiens
gagacctaagtataaaaatatttaaa

SEQ ID NO: 5292 - DNA, 26 bp, Homo sapiens
agacctaagtataaaaatatttaaaa

SEQ ID NO: 5293 - DNA, 26 bp, Homo sapiens
gacctaagtataaaaatatttaaaat

SEQ ID NO: 5294 - DNA, 26 bp, Homo sapiens
acctaagtataaaaatatttaaaata

SEQ ID NO: 5295 - DNA, 26 bp, Homo sapiens
cctaagtataaaaatatttaaaataa

SEQ ID NO: 5296 - DNA, 26 bp, Homo sapiens
ctaagtataaaaatatttaaaataaa

SEQ ID NO: 5297 - DNA, 26 bp, Homo sapiens
taagtataaaaatatttaaaataaag

SEQ ID NO: 5298 - DNA, 26 bp, Homo sapiens
aagtataaaaatatttaaaataaagt

SEQ ID NO: 5299 - DNA, 26 bp, Homo sapiens
agtataaaaatatttaaaataaagtt

SEQ ID NO: 5300 - DNA, 26 bp, Homo sapiens
gtataaaaatatttaaaataaagttt

SEQ ID NO: 5301 - DNA, 26 bp, Homo sapiens
tataaaaatatttaaaataaagttta

SEQ ID NO: 5302 - DNA, 26 bp, Homo sapiens
ataaaaatatttaaaataaagtttaa

SEQ ID NO: 5303 - DNA, 26 bp, Homo sapiens
taaaaatatttaaaataaagtttaaa

SEQ ID NO: 5304 - DNA, 26 bp, Homo sapiens
aaaaatatttaaaataaagtttaaac

SEQ ID NO: 5305 - DNA, 26 bp, Homo sapiens
aaaatatttaaaataaagtttaaacc

SEQ ID NO: 5306 - DNA, 26 bp, Homo sapiens
aaatatttaaaataaagtttaaacct

SEQ ID NO: 5307 - DNA, 26 bp, Homo sapiens
aatatttaaaataaagtttaaacctg

SEQ ID NO: 5308 - DNA, 26 bp, Homo sapiens
atatttaaaataaagtttaaacctgg

SEQ ID NO: 5309 - DNA, 26 bp, Homo sapiens
tatttaaaataaagtttaaacctggt

SEQ ID NO: 5310 - DNA, 26 bp, Homo sapiens
atttaaaataaagtttaaacctggtc

SEQ ID NO: 5311 - DNA, 26 bp, Homo sapiens
tttaaaataaagtttaaacctggtcc

SEQ ID NO: 5312 - DNA, 26 bp, Homo sapiens
ttaaaataaagtttaaacctggtcct

SEQ ID NO: 5313 - DNA, 26 bp, Homo sapiens
taaaataaagtttaaacctggtcctg

SEQ ID NO: 5314 - DNA, 26 bp, Homo sapiens
aaaataaagtttaaacctggtcctga

SEQ ID NO: 5315 - DNA, 26 bp, Homo sapiens
aaataaagtttaaacctggtcctgaa

SEQ ID NO: 5316 - DNA, 26 bp, Homo sapiens
aataaagtttaaacctggtcctgaaa

SEQ ID NO: 5317 - DNA, 26 bp, Homo sapiens
ataaagtttaaacctggtcctgaaat

SEQ ID NO: 5318 - DNA, 26 bp, Homo sapiens
taaagtttaaacctggtcctgaaatt

SEQ ID NO: 5319 - DNA, 26 bp, Homo sapiens
aaagtttaaacctggtcctgaaattc

SEQ ID NO: 5320 - DNA, 26 bp, Homo sapiens
aagtttaaacctggtcctgaaattct

SEQ ID NO: 5321 - DNA, 26 bp, Homo sapiens
agtttaaacctggtcctgaaattctt

SEQ ID NO: 5322 - DNA, 26 bp, Homo sapiens
gtttaaacctggtcctgaaattcttt

SEQ ID NO: 5323 - DNA, 26 bp, Homo sapiens
tttaaacctggtcctgaaattctttt

SEQ ID NO: 5324 - DNA, 26 bp, Homo sapiens
ttaaacctggtcctgaaattctttta

SEQ ID NO: 5325 - DNA, 26 bp, Homo sapiens
taaacctggtcctgaaattcttttac

SEQ ID NO: 5326 - DNA, 26 bp, Homo sapiens
aaacctggtcctgaaattcttttacc

SEQ ID NO: 5327 - DNA, 26 bp, Homo sapiens
aacctggtcctgaaattcttttacct

SEQ ID NO: 5328 - DNA, 26 bp, Homo sapiens
acctggtcctgaaattcttttacctg

SEQ ID NO: 5329 - DNA, 26 bp, Homo sapiens
cctggtcctgaaattcttttacctgt

SEQ ID NO: 5330 - DNA, 26 bp, Homo sapiens
ctggtcctgaaattcttttacctgtg

SEQ ID NO: 5331 - DNA, 26 bp, Homo sapiens
tggtcctgaaattcttttacctgtga

SEQ ID NO: 5332 - DNA, 26 bp, Homo sapiens
ggtcctgaaattcttttacctgtgac

SEQ ID NO: 5333 - DNA, 26 bp, Homo sapiens
gtcctgaaattcttttacctgtgaca

SEQ ID NO: 5334 - DNA, 26 bp, Homo sapiens
tcctgaaattcttttacctgtgacac

SEQ ID NO: 5335 - DNA, 26 bp, Homo sapiens
cctgaaattcttttacctgtgacact

SEQ ID NO: 5336 - DNA, 26 bp, Homo sapiens
ctgaaattcttttacctgtgacacta

SEQ ID NO: 5337 - DNA, 26 bp, Homo sapiens
tgaaattcttttacctgtgacactag

SEQ ID NO: 5338 - DNA, 26 bp, Homo sapiens
gaaattcttttacctgtgacactaga

SEQ ID NO: 5339 - DNA, 26 bp, Homo sapiens
aaattcttttacctgtgacactagat

SEQ ID NO: 5340 - DNA, 26 bp, Homo sapiens
aattcttttacctgtgacactagatg

SEQ ID NO: 5341 - DNA, 26 bp, Homo sapiens
attcttttacctgtgacactagatgc

SEQ ID NO: 5342 - DNA, 26 bp, Homo sapiens
ttcttttacctgtgacactagatgct

SEQ ID NO: 5343 - DNA, 26 bp, Homo sapiens
tcttttacctgtgacactagatgcta

SEQ ID NO: 5344 - DNA, 26 bp, Homo sapiens
cttttacctgtgacactagatgctaa

SEQ ID NO: 5345 - DNA, 26 bp, Homo sapiens
ttttacctgtgacactagatgctaat

SEQ ID NO: 5346 - DNA, 26 bp, Homo sapiens
tttacctgtgacactagatgctaatt

SEQ ID NO: 5347 - DNA, 26 bp, Homo sapiens
ttacctgtgacactagatgctaattt

SEQ ID NO: 5348 - DNA, 26 bp, Homo sapiens
tacctgtgacactagatgctaatttc

SEQ ID NO: 5349 - DNA, 26 bp, Homo sapiens
acctgtgacactagatgctaatttct

SEQ ID NO: 5350 - DNA, 26 bp, Homo sapiens
cctgtgacactagatgctaatttctg

SEQ ID NO: 5351 - DNA, 26 bp, Homo sapiens
ctgtgacactagatgctaatttctgc

SEQ ID NO: 5352 - DNA, 26 bp, Homo sapiens
tgtgacactagatgctaatttctgca

SEQ ID NO: 5353 - DNA, 26 bp, Homo sapiens
gtgacactagatgctaatttctgcaa

SEQ ID NO: 5354 - DNA, 26 bp, Homo sapiens
tgacactagatgctaatttctgcaac

SEQ ID NO: 5355 - DNA, 26 bp, Homo sapiens
gacactagatgctaatttctgcaact

SEQ ID NO: 5356 - DNA, 26 bp, Homo sapiens
acactagatgctaatttctgcaactg

SEQ ID NO: 5357 - DNA, 26 bp, Homo sapiens
cactagatgctaatttctgcaactgc

SEQ ID NO: 5358 - DNA, 26 bp, Homo sapiens
actagatgctaatttctgcaactgca

SEQ ID NO: 5359 - DNA, 26 bp, Homo sapiens
ctagatgctaatttctgcaactgcaa

SEQ ID NO: 5360 - DNA, 26 bp, Homo sapiens
tagatgctaatttctgcaactgcaaa

SEQ ID NO: 5361 - DNA, 26 bp, Homo sapiens
agatgctaatttctgcaactgcaaac

SEQ ID NO: 5362 - DNA, 26 bp, Homo sapiens
gatgctaatttctgcaactgcaaacc

SEQ ID NO: 5363 - DNA, 26 bp, Homo sapiens
atgctaatttctgcaactgcaaacct

SEQ ID NO: 5364 - DNA, 26 bp, Homo sapiens
tgctaatttctgcaactgcaaaccta

SEQ ID NO: 5365 - DNA, 26 bp, Homo sapiens
gctaatttctgcaactgcaaacctag

SEQ ID NO: 5366 - DNA, 26 bp, Homo sapiens
ctaatttctgcaactgcaaacctagg

SEQ ID NO: 5367 - DNA, 26 bp, Homo sapiens
taatttctgcaactgcaaacctagga

SEQ ID NO: 5368 - DNA, 26 bp, Homo sapiens
aatttctgcaactgcaaacctaggat

SEQ ID NO: 5369 - DNA, 26 bp, Homo sapiens
atttctgcaactgcaaacctaggata

SEQ ID NO: 5370 - DNA, 26 bp, Homo sapiens
tttctgcaactgcaaacctaggatac

SEQ ID NO: 5371 - DNA, 26 bp, Homo sapiens
ttctgcaactgcaaacctaggataca

SEQ ID NO: 5372 - DNA, 26 bp, Homo sapiens
tctgcaactgcaaacctaggatacag

SEQ ID NO: 5373 - DNA, 26 bp, Homo sapiens
ctgcaactgcaaacctaggatacagt

SEQ ID NO: 5374 - DNA, 26 bp, Homo sapiens
tgcaactgcaaacctaggatacagta

SEQ ID NO: 5375 - DNA, 26 bp, Homo sapiens
gcaactgcaaacctaggatacagtac

SEQ ID NO: 5376 - DNA, 26 bp, Homo sapiens
caactgcaaacctaggatacagtacc

SEQ ID NO: 5377 - DNA, 26 bp, Homo sapiens
aactgcaaacctaggatacagtaccc

SEQ ID NO: 5378 - DNA, 26 bp, Homo sapiens
actgcaaacctaggatacagtaccca

SEQ ID NO: 5379 - DNA, 26 bp, Homo sapiens
ctgcaaacctaggatacagtacccaa

SEQ ID NO: 5380 - DNA, 26 bp, Homo sapiens
tgcaaacctaggatacagtacccaat

SEQ ID NO: 5381 - DNA, 26 bp, Homo sapiens
gcaaacctaggatacagtacccaatc

SEQ ID NO: 5382 - DNA, 26 bp, Homo sapiens
caaacctaggatacagtacccaatcc

SEQ ID NO: 5383 - DNA, 26 bp, Homo sapiens
aaacctaggatacagtacccaatcct

SEQ ID NO: 5384 - DNA, 26 bp, Homo sapiens
aacctaggatacagtacccaatcctg

SEQ ID NO: 5385 - DNA, 26 bp, Homo sapiens
acctaggatacagtacccaatcctgg

SEQ ID NO: 5386 - DNA, 26 bp, Homo sapiens
cctaggatacagtacccaatcctggg

SEQ ID NO: 5387 - DNA, 26 bp, Homo sapiens
ctaggatacagtacccaatcctggga

SEQ ID NO: 5388 - DNA, 26 bp, Homo sapiens
taggatacagtacccaatcctgggat

SEQ ID NO: 5389 - DNA, 26 bp, Homo sapiens
aggatacagtacccaatcctgggatg

SEQ ID NO: 5390 - DNA, 26 bp, Homo sapiens
ggatacagtacccaatcctgggatgc

SEQ ID NO: 5391 - DNA, 26 bp, Homo sapiens
gatacagtacccaatcctgggatgcc

SEQ ID NO: 5392 - DNA, 26 bp, Homo sapiens
atacagtacccaatcctgggatgccc

SEQ ID NO: 5393 - DNA, 26 bp, Homo sapiens
tacagtacccaatcctgggatgccct

SEQ ID NO: 5394 - DNA, 26 bp, Homo sapiens
acagtacccaatcctgggatgccctg

SEQ ID NO: 5395 - DNA, 26 bp, Homo sapiens
cagtacccaatcctgggatgccctga

SEQ ID NO: 5396 - DNA, 26 bp, Homo sapiens
agtacccaatcctgggatgccctgat

SEQ ID NO: 5397 - DNA, 26 bp, Homo sapiens
gtacccaatcctgggatgccctgata

SEQ ID NO: 5398 - DNA, 26 bp, Homo sapiens
tacccaatcctgggatgccctgatat

SEQ ID NO: 5399 - DNA, 26 bp, Homo sapiens
acccaatcctgggatgccctgatata

SEQ ID NO: 5400 - DNA, 26 bp, Homo sapiens
cccaatcctgggatgccctgatatac

SEQ ID NO: 5401 - DNA, 26 bp, Homo sapiens
ccaatcctgggatgccctgatatact

SEQ ID NO: 5402 - DNA, 26 bp, Homo sapiens
caatcctgggatgccctgatatactt

SEQ ID NO: 5403 - DNA, 26 bp, Homo sapiens
aatcctgggatgccctgatatacttt

SEQ ID NO: 5404 - DNA, 26 bp, Homo sapiens
atcctgggatgccctgatatacttta

SEQ ID NO: 5405 - DNA, 26 bp, Homo sapiens
tcctgggatgccctgatatactttag

SEQ ID NO: 5406 - DNA, 26 bp, Homo sapiens
cctgggatgccctgatatactttagt

SEQ ID NO: 5407 - DNA, 26 bp, Homo sapiens
ctgggatgccctgatatactttagtg

SEQ ID NO: 5408 - DNA, 26 bp, Homo sapiens
tgggatgccctgatatactttagtgc

SEQ ID NO: 5409 - DNA, 26 bp, Homo sapiens
gggatgccctgatatactttagtgct

SEQ ID NO: 5410 - DNA, 26 bp, Homo sapiens
ggatgccctgatatactttagtgctt

SEQ ID NO: 5411 - DNA, 26 bp, Homo sapiens
gatgccctgatatactttagtgcttg

SEQ ID NO: 5412 - DNA, 26 bp, Homo sapiens
atgccctgatatactttagtgcttgt

SEQ ID NO: 5413 - DNA, 26 bp, Homo sapiens
tgccctgatatactttagtgcttgtg

SEQ ID NO: 5414 - DNA, 26 bp, Homo sapiens
gccctgatatactttagtgcttgtga

SEQ ID NO: 5415 - DNA, 26 bp, Homo sapiens
ccctgatatactttagtgcttgtgat

SEQ ID NO: 5416 - DNA, 26 bp, Homo sapiens
cctgatatactttagtgcttgtgata

SEQ ID NO: 5417 - DNA, 26 bp, Homo sapiens
ctgatatactttagtgcttgtgatat

SEQ ID NO: 5418 - DNA, 26 bp, Homo sapiens
tgatatactttagtgcttgtgatatt

SEQ ID NO: 5419 - DNA, 26 bp, Homo sapiens
gatatactttagtgcttgtgatattt

SEQ ID NO: 5420 - DNA, 26 bp, Homo sapiens
atatactttagtgcttgtgatatttc

SEQ ID NO: 5421 - DNA, 26 bp, Homo sapiens
tatactttagtgcttgtgatatttct

SEQ ID NO: 5422 - DNA, 26 bp, Homo sapiens
atactttagtgcttgtgatatttctt

SEQ ID NO: 5423 - DNA, 26 bp, Homo sapiens
tactttagtgcttgtgatatttcttc

SEQ ID NO: 5424 - DNA, 26 bp, Homo sapiens
actttagtgcttgtgatatttcttcc

SEQ ID NO: 5425 - DNA, 26 bp, Homo sapiens
ctttagtgcttgtgatatttcttcca

SEQ ID NO: 5426 - DNA, 26 bp, Homo sapiens
tttagtgcttgtgatatttcttccaa

SEQ ID NO: 5427 - DNA, 26 bp, Homo sapiens
ttagtgcttgtgatatttcttccaag

SEQ ID NO: 5428 - DNA, 26 bp, Homo sapiens
tagtgcttgtgatatttcttccaagt

SEQ ID NO: 5429 - DNA, 26 bp, Homo sapiens
agtgcttgtgatatttcttccaagtc

SEQ ID NO: 5430 - DNA, 26 bp, Homo sapiens
gtgcttgtgatatttcttccaagtca

SEQ ID NO: 5431 - DNA, 26 bp, Homo sapiens
tgcttgtgatatttcttccaagtcaa

SEQ ID NO: 5432 - DNA, 26 bp, Homo sapiens
gcttgtgatatttcttccaagtcaag

SEQ ID NO: 5433 - DNA, 26 bp, Homo sapiens
cttgtgatatttcttccaagtcaagc

SEQ ID NO: 5434 - DNA, 26 bp, Homo sapiens
ttgtgatatttcttccaagtcaagcg

SEQ ID NO: 5435 - DNA, 26 bp, Homo sapiens
tgtgatatttcttccaagtcaagcga

SEQ ID NO: 5436 - DNA, 26 bp, Homo sapiens
gtgatatttcttccaagtcaagcgag

SEQ ID NO: 5437 - DNA, 26 bp, Homo sapiens
tgatatttcttccaagtcaagcgagt

SEQ ID NO: 5438 - DNA, 26 bp, Homo sapiens
gatatttcttccaagtcaagcgagta

SEQ ID NO: 5439 - DNA, 26 bp, Homo sapiens
atatttcttccaagtcaagcgagtac

SEQ ID NO: 5440 - DNA, 26 bp, Homo sapiens
tatttcttccaagtcaagcgagtacg

SEQ ID NO: 5441 - DNA, 26 bp, Homo sapiens
atttcttccaagtcaagcgagtacgg

SEQ ID NO: 5442 - DNA, 26 bp, Homo sapiens
tttcttccaagtcaagcgagtacgga

SEQ ID NO: 5443 - DNA, 26 bp, Homo sapiens
ttcttccaagtcaagcgagtacggat

SEQ ID NO: 5444 - DNA, 26 bp, Homo sapiens
tcttccaagtcaagcgagtacggatg

SEQ ID NO: 5445 - DNA, 26 bp, Homo sapiens
cttccaagtcaagcgagtacggatgc

SEQ ID NO: 5446 - DNA, 26 bp, Homo sapiens
ttccaagtcaagcgagtacggatgcg

SEQ ID NO: 5447 - DNA, 26 bp, Homo sapiens
tccaagtcaagcgagtacggatgcgg

SEQ ID NO: 5448 - DNA, 26 bp, Homo sapiens
ccaagtcaagcgagtacggatgcggc

SEQ ID NO: 5449 - DNA, 26 bp, Homo sapiens
caagtcaagcgagtacggatgcggca

SEQ ID NO: 5450 - DNA, 26 bp, Homo sapiens
aagtcaagcgagtacggatgcggcac

SEQ ID NO: 5451 - DNA, 26 bp, Homo sapiens
agtcaagcgagtacggatgcggcacc

SEQ ID NO: 5452 - DNA, 26 bp, Homo sapiens
gtcaagcgagtacggatgcggcacca

SEQ ID NO: 5453 - DNA, 26 bp, Homo sapiens
tcaagcgagtacggatgcggcaccac

SEQ ID NO: 5454 - DNA, 26 bp, Homo sapiens
caagcgagtacggatgcggcaccacg

SEQ ID NO: 5455 - DNA, 26 bp, Homo sapiens
aagcgagtacggatgcggcaccacga

SEQ ID NO: 5456 - DNA, 26 bp, Homo sapiens
agcgagtacggatgcggcaccacgag

SEQ ID NO: 5457 - DNA, 26 bp, Homo sapiens
gcgagtacggatgcggcaccacgaga

SEQ ID NO: 5458 - DNA, 26 bp, Homo sapiens
cgagtacggatgcggcaccacgagag

SEQ ID NO: 5459 - DNA, 26 bp, Homo sapiens
gagtacggatgcggcaccacgagagt

SEQ ID NO: 5460 - DNA, 26 bp, Homo sapiens
agtacggatgcggcaccacgagagtg

SEQ ID NO: 5461 - DNA, 26 bp, Homo sapiens
gtacggatgcggcaccacgagagtgg

SEQ ID NO: 5462 - DNA, 26 bp, Homo sapiens
tacggatgcggcaccacgagagtggt

SEQ ID NO: 5463 - DNA, 26 bp, Homo sapiens
acggatgcggcaccacgagagtggtt

SEQ ID NO: 5464 - DNA, 26 bp, Homo sapiens
cggatgcggcaccacgagagtggttt

SEQ ID NO: 5465 - DNA, 26 bp, Homo sapiens
ggatgcggcaccacgagagtggtttg

SEQ ID NO: 5466 - DNA, 26 bp, Homo sapiens
gatgcggcaccacgagagtggtttga

SEQ ID NO: 5467 - DNA, 26 bp, Homo sapiens
atgcggcaccacgagagtggtttgat

SEQ ID NO: 5468 - DNA, 26 bp, Homo sapiens
tgcggcaccacgagagtggtttgatc

SEQ ID NO: 5469 - DNA, 26 bp, Homo sapiens
gcggcaccacgagagtggtttgatct

SEQ ID NO: 5470 - DNA, 26 bp, Homo sapiens
cggcaccacgagagtggtttgatctc

SEQ ID NO: 5471 - DNA, 26 bp, Homo sapiens
ggcaccacgagagtggtttgatctcc

SEQ ID NO: 5472 - DNA, 26 bp, Homo sapiens
gcaccacgagagtggtttgatctccc

SEQ ID NO: 5473 - DNA, 26 bp, Homo sapiens
caccacgagagtggtttgatctcccg

SEQ ID NO: 5474 - DNA, 26 bp, Homo sapiens
accacgagagtggtttgatctcccgt

SEQ ID NO: 5475 - DNA, 26 bp, Homo sapiens
ccacgagagtggtttgatctcccgta

SEQ ID NO: 5476 - DNA, 26 bp, Homo sapiens
cacgagagtggtttgatctcccgtaa

SEQ ID NO: 5477 - DNA, 26 bp, Homo sapiens
acgagagtggtttgatctcccgtaaa

SEQ ID NO: 5478 - DNA, 26 bp, Homo sapiens
cgagagtggtttgatctcccgtaaaa

SEQ ID NO: 5479 - DNA, 26 bp, Homo sapiens
gagagtggtttgatctcccgtaaaac

SEQ ID NO: 5480 - DNA, 26 bp, Homo sapiens
agagtggtttgatctcccgtaaaaca

SEQ ID NO: 5481 - DNA, 26 bp, Homo sapiens
gagtggtttgatctcccgtaaaacat

SEQ ID NO: 5482 - DNA, 26 bp, Homo sapiens
agtggtttgatctcccgtaaaacata

SEQ ID NO: 5483 - DNA, 26 bp, Homo sapiens
gtggtttgatctcccgtaaaacatac

SEQ ID NO: 5484 - DNA, 26 bp, Homo sapiens
tggtttgatctcccgtaaaacataca

SEQ ID NO: 5485 - DNA, 26 bp, Homo sapiens
ggtttgatctcccgtaaaacatacac

SEQ ID NO: 5486 - DNA, 26 bp, Homo sapiens
gtttgatctcccgtaaaacatacaca

SEQ ID NO: 5487 - DNA, 26 bp, Homo sapiens
tttgatctcccgtaaaacatacacaa

SEQ ID NO: 5488 - DNA, 26 bp, Homo sapiens
ttgatctcccgtaaaacatacacaaa

SEQ ID NO: 5489 - DNA, 26 bp, Homo sapiens
tgatctcccgtaaaacatacacaaat

SEQ ID NO: 5490 - DNA, 26 bp, Homo sapiens
gatctcccgtaaaacatacacaaata

SEQ ID NO: 5491 - DNA, 26 bp, Homo sapiens
atctcccgtaaaacatacacaaatac

SEQ ID NO: 5492 - DNA, 26 bp, Homo sapiens
tctcccgtaaaacatacacaaataca

SEQ ID NO: 5493 - DNA, 26 bp, Homo sapiens
ctcccgtaaaacatacacaaatacat

SEQ ID NO: 5494 - DNA, 26 bp, Homo sapiens
tcccgtaaaacatacacaaatacata

SEQ ID NO: 5495 - DNA, 26 bp, Homo sapiens
cccgtaaaacatacacaaatacataa

SEQ ID NO: 5496 - DNA, 26 bp, Homo sapiens
ccgtaaaacatacacaaatacataaa

SEQ ID NO: 5497 - DNA, 26 bp, Homo sapiens
cgtaaaacatacacaaatacataaat

SEQ ID NO: 5498 - DNA, 26 bp, Homo sapiens
gtaaaacatacacaaatacataaatg

SEQ ID NO: 5499 - DNA, 26 bp, Homo sapiens
taaaacatacacaaatacataaatga

SEQ ID NO: 5500 - DNA, 26 bp, Homo sapiens
aaaacatacacaaatacataaatgat

SEQ ID NO: 5501 - DNA, 26 bp, Homo sapiens
aaacatacacaaatacataaatgata

SEQ ID NO: 5502 - DNA, 26 bp, Homo sapiens
aacatacacaaatacataaatgatat

SEQ ID NO: 5503 - DNA, 26 bp, Homo sapiens
acatacacaaatacataaatgatatg

SEQ ID NO: 5504 - DNA, 26 bp, Homo sapiens
catacacaaatacataaatgatatgg

SEQ ID NO: 5505 - DNA, 26 bp, Homo sapiens
atacacaaatacataaatgatatggt

SEQ ID NO: 5506 - DNA, 26 bp, Homo sapiens
tacacaaatacataaatgatatggtg

SEQ ID NO: 5507 - DNA, 26 bp, Homo sapiens
acacaaatacataaatgatatggtgg

SEQ ID NO: 5508 - DNA, 26 bp, Homo sapiens
cacaaatacataaatgatatggtggg

SEQ ID NO: 5509 - DNA, 26 bp, Homo sapiens
acaaatacataaatgatatggtgggt

SEQ ID NO: 5510 - DNA, 26 bp, Homo sapiens
caaatacataaatgatatggtgggta

SEQ ID NO: 5511 - DNA, 26 bp, Homo sapiens
aaatacataaatgatatggtgggtac

SEQ ID NO: 5512 - DNA, 26 bp, Homo sapiens
aatacataaatgatatggtgggtact

SEQ ID NO: 5513 - DNA, 26 bp, Homo sapiens
atacataaatgatatggtgggtactt

SEQ ID NO: 5514 - DNA, 26 bp, Homo sapiens
tacataaatgatatggtgggtactta

SEQ ID NO: 5515 - DNA, 26 bp, Homo sapiens
acataaatgatatggtgggtacttaa

SEQ ID NO: 5516 - DNA, 26 bp, Homo sapiens
cataaatgatatggtgggtacttaat

SEQ ID NO: 5517 - DNA, 26 bp, Homo sapiens
ataaatgatatggtgggtacttaatt

SEQ ID NO: 5518 - DNA, 26 bp, Homo sapiens
taaatgatatggtgggtacttaattc

SEQ ID NO: 5519 - DNA, 26 bp, Homo sapiens
aaatgatatggtgggtacttaattct

SEQ ID NO: 5520 - DNA, 26 bp, Homo sapiens
aatgatatggtgggtacttaattctt

SEQ ID NO: 5521 - DNA, 26 bp, Homo sapiens
atgatatggtgggtacttaattcttc

SEQ ID NO: 5522 - DNA, 26 bp, Homo sapiens
tgatatggtgggtacttaattcttcc

SEQ ID NO: 5523 - DNA, 26 bp, Homo sapiens
gatatggtgggtacttaattcttccg

SEQ ID NO: 5524 - DNA, 26 bp, Homo sapiens
atatggtgggtacttaattcttccga

SEQ ID NO: 5525 - DNA, 26 bp, Homo sapiens
tatggtgggtacttaattcttccgaa

SEQ ID NO: 5526 - DNA, 26 bp, Homo sapiens
atggtgggtacttaattcttccgaaa

SEQ ID NO: 5527 - DNA, 26 bp, Homo sapiens
tggtgggtacttaattcttccgaaag

SEQ ID NO: 5528 - DNA, 26 bp, Homo sapiens
ggtgggtacttaattcttccgaaagc

SEQ ID NO: 5529 - DNA, 26 bp, Homo sapiens
gtgggtacttaattcttccgaaagct

SEQ ID NO: 5530 - DNA, 26 bp, Homo sapiens
tgggtacttaattcttccgaaagcta

SEQ ID NO: 5531 - DNA, 26 bp, Homo sapiens
gggtacttaattcttccgaaagctat

SEQ ID NO: 5532 - DNA, 26 bp, Homo sapiens
ggtacttaattcttccgaaagctata

SEQ ID NO: 5533 - DNA, 26 bp, Homo sapiens
gtacttaattcttccgaaagctatat

SEQ ID NO: 5534 - DNA, 26 bp, Homo sapiens
tacttaattcttccgaaagctatatt

SEQ ID NO: 5535 - DNA, 26 bp, Homo sapiens
acttaattcttccgaaagctatattt

SEQ ID NO: 5536 - DNA, 26 bp, Homo sapiens
cttaattcttccgaaagctatatttt

SEQ ID NO: 5537 - DNA, 26 bp, Homo sapiens
ttaattcttccgaaagctatattttt

SEQ ID NO: 5538 - DNA, 26 bp, Homo sapiens
taattcttccgaaagctatatttttt

SEQ ID NO: 5539 - DNA, 26 bp, Homo sapiens
aattcttccgaaagctatatttttta

SEQ ID NO: 5540 - DNA, 26 bp, Homo sapiens
attcttccgaaagctatattttttat

SEQ ID NO: 5541 - DNA, 26 bp, Homo sapiens
ttcttccgaaagctatattttttatg

SEQ ID NO: 5542 - DNA, 26 bp, Homo sapiens
tcttccgaaagctatattttttatgg

SEQ ID NO: 5543 - DNA, 26 bp, Homo sapiens
cttccgaaagctatattttttatgga

SEQ ID NO: 5544 - DNA, 26 bp, Homo sapiens
ttccgaaagctatattttttatggac

SEQ ID NO: 5545 - DNA, 26 bp, Homo sapiens
tccgaaagctatattttttatggact

SEQ ID NO: 5546 - DNA, 26 bp, Homo sapiens
ccgaaagctatattttttatggacta

SEQ ID NO: 5547 - DNA, 26 bp, Homo sapiens
cgaaagctatattttttatggactaa

SEQ ID NO: 5548 - DNA, 26 bp, Homo sapiens
gaaagctatattttttatggactaat

SEQ ID NO: 5549 - DNA, 26 bp, Homo sapiens
aaagctatattttttatggactaatt

SEQ ID NO: 5550 - DNA, 26 bp, Homo sapiens
aagctatattttttatggactaatta

SEQ ID NO: 5551 - DNA, 26 bp, Homo sapiens
agctatattttttatggactaattac

SEQ ID NO: 5552 - DNA, 26 bp, Homo sapiens
gctatattttttatggactaattaca

SEQ ID NO: 5553 - DNA, 26 bp, Homo sapiens
ctatattttttatggactaattacaa

SEQ ID NO: 5554 - DNA, 26 bp, Homo sapiens
tatattttttatggactaattacaac

SEQ ID NO: 5555 - DNA, 26 bp, Homo sapiens
atattttttatggactaattacaaca

SEQ ID NO: 5556 - DNA, 26 bp, Homo sapiens
tattttttatggactaattacaacaa

SEQ ID NO: 5557 - DNA, 26 bp, Homo sapiens
attttttatggactaattacaacaac

SEQ ID NO: 5558 - DNA, 26 bp, Homo sapiens
ttttttatggactaattacaacaaca

SEQ ID NO: 5559 - DNA, 26 bp, Homo sapiens
tttttatggactaattacaacaacaa

SEQ ID NO: 5560 - DNA, 26 bp, Homo sapiens
ttttatggactaattacaacaacaat

SEQ ID NO: 5561 - DNA, 26 bp, Homo sapiens
tttatggactaattacaacaacaata

SEQ ID NO: 5562 - DNA, 26 bp, Homo sapiens
ttatggactaattacaacaacaataa

SEQ ID NO: 5563 - DNA, 26 bp, Homo sapiens
tatggactaattacaacaacaataaa

SEQ ID NO: 5564 - DNA, 26 bp, Homo sapiens
atggactaattacaacaacaataaag

SEQ ID NO: 5565 - DNA, 26 bp, Homo sapiens
tggactaattacaacaacaataaaga

SEQ ID NO: 5566 - DNA, 26 bp, Homo sapiens
ggactaattacaacaacaataaagaa

SEQ ID NO: 5567 - DNA, 26 bp, Homo sapiens
gactaattacaacaacaataaagaac

SEQ ID NO: 5568 - DNA, 26 bp, Homo sapiens
actaattacaacaacaataaagaacg

SEQ ID NO: 5569 - DNA, 26 bp, Homo sapiens
ctaattacaacaacaataaagaacgt

SEQ ID NO: 5570 - DNA, 26 bp, Homo sapiens
taattacaacaacaataaagaacgtg

SEQ ID NO: 5571 - DNA, 26 bp, Homo sapiens
aattacaacaacaataaagaacgtgt

SEQ ID NO: 5572 - DNA, 26 bp, Homo sapiens
attacaacaacaataaagaacgtgtg

SEQ ID NO: 5573 - DNA, 26 bp, Homo sapiens
ttacaacaacaataaagaacgtgtgc

SEQ ID NO: 5574 - DNA, 26 bp, Homo sapiens
tacaacaacaataaagaacgtgtgct

SEQ ID NO: 5575 - DNA, 26 bp, Homo sapiens
acaacaacaataaagaacgtgtgctt

SEQ ID NO: 5576 - DNA, 26 bp, Homo sapiens
caacaacaataaagaacgtgtgcttt

SEQ ID NO: 5577 - DNA, 26 bp, Homo sapiens
aacaacaataaagaacgtgtgcttta

SEQ ID NO: 5578 - DNA, 26 bp, Homo sapiens
acaacaataaagaacgtgtgctttaa

SEQ ID NO: 5579 - DNA, 26 bp, Homo sapiens
caacaataaagaacgtgtgctttaaa

SEQ ID NO: 5580 - DNA, 26 bp, Homo sapiens
aacaataaagaacgtgtgctttaaag

SEQ ID NO: 5581 - DNA, 26 bp, Homo sapiens
acaataaagaacgtgtgctttaaagc

SEQ ID NO: 5582 - DNA, 26 bp, Homo sapiens
caataaagaacgtgtgctttaaagca

SEQ ID NO: 5583 - DNA, 26 bp, Homo sapiens
aataaagaacgtgtgctttaaagcat

SEQ ID NO: 5584 - DNA, 26 bp, Homo sapiens
ataaagaacgtgtgctttaaagcatc

SEQ ID NO: 5585 - DNA, 26 bp, Homo sapiens
taaagaacgtgtgctttaaagcatca

SEQ ID NO: 5586 - DNA, 26 bp, Homo sapiens
aaagaacgtgtgctttaaagcatcac

SEQ ID NO: 5587 - DNA, 26 bp, Homo sapiens
aagaacgtgtgctttaaagcatcaca

SEQ ID NO: 5588 - DNA, 26 bp, Homo sapiens
agaacgtgtgctttaaagcatcacat

SEQ ID NO: 5589 - DNA, 26 bp, Homo sapiens
gaacgtgtgctttaaagcatcacatt

SEQ ID NO: 5590 - DNA, 26 bp, Homo sapiens
aacgtgtgctttaaagcatcacattt

SEQ ID NO: 5591 - DNA, 26 bp, Homo sapiens
acgtgtgctttaaagcatcacatttt

SEQ ID NO: 5592 - DNA, 26 bp, Homo sapiens
cgtgtgctttaaagcatcacattttg

SEQ ID NO: 5593 - DNA, 26 bp, Homo sapiens
gtgtgctttaaagcatcacattttgt

SEQ ID NO: 5594 - DNA, 26 bp, Homo sapiens
tgtgctttaaagcatcacattttgta

SEQ ID NO: 5595 - DNA, 26 bp, Homo sapiens
gtgctttaaagcatcacattttgtaa

SEQ ID NO: 5596 - DNA, 26 bp, Homo sapiens
tgctttaaagcatcacattttgtaat

SEQ ID NO: 5597 - DNA, 26 bp, Homo sapiens
gctttaaagcatcacattttgtaata

SEQ ID NO: 5598 - DNA, 26 bp, Homo sapiens
ctttaaagcatcacattttgtaataa

SEQ ID NO: 5599 - DNA, 26 bp, Homo sapiens
tttaaagcatcacattttgtaataag

SEQ ID NO: 5600 - DNA, 26 bp, Homo sapiens
ttaaagcatcacattttgtaataagc

SEQ ID NO: 5601 - DNA, 26 bp, Homo sapiens
taaagcatcacattttgtaataagcc

SEQ ID NO: 5602 - DNA, 26 bp, Homo sapiens
aaagcatcacattttgtaataagccc

SEQ ID NO: 5603 - DNA, 26 bp, Homo sapiens
aagcatcacattttgtaataagccca

SEQ ID NO: 5604 - DNA, 26 bp, Homo sapiens
agcatcacattttgtaataagcccaa

SEQ ID NO: 5605 - DNA, 26 bp, Homo sapiens
gcatcacattttgtaataagcccaaa

SEQ ID NO: 5606 - DNA, 26 bp, Homo sapiens
catcacattttgtaataagcccaaaa

SEQ ID NO: 5607 - DNA, 26 bp, Homo sapiens
atcacattttgtaataagcccaaaat

SEQ ID NO: 5608 - DNA, 26 bp, Homo sapiens
tcacattttgtaataagcccaaaatt

SEQ ID NO: 5609 - DNA, 26 bp, Homo sapiens
cacattttgtaataagcccaaaattg

SEQ ID NO: 5610 - DNA, 26 bp, Homo sapiens
acattttgtaataagcccaaaattgt

SEQ ID NO: 5611 - DNA, 26 bp, Homo sapiens
cattttgtaataagcccaaaattgtc

SEQ ID NO: 5612 - DNA, 26 bp, Homo sapiens
attttgtaataagcccaaaattgtca

SEQ ID NO: 5613 - DNA, 26 bp, Homo sapiens
ttttgtaataagcccaaaattgtcag

SEQ ID NO: 5614 - DNA, 26 bp, Homo sapiens
tttgtaataagcccaaaattgtcagt

SEQ ID NO: 5615 - DNA, 26 bp, Homo sapiens
ttgtaataagcccaaaattgtcagtt

SEQ ID NO: 5616 - DNA, 26 bp, Homo sapiens
tgtaataagcccaaaattgtcagttt

SEQ ID NO: 5617 - DNA, 26 bp, Homo sapiens
gtaataagcccaaaattgtcagtttg

SEQ ID NO: 5618 - DNA, 26 bp, Homo sapiens
taataagcccaaaattgtcagtttga

SEQ ID NO: 5619 - DNA, 26 bp, Homo sapiens
aataagcccaaaattgtcagtttgac

SEQ ID NO: 5620 - DNA, 26 bp, Homo sapiens
ataagcccaaaattgtcagtttgact

SEQ ID NO: 5621 - DNA, 26 bp, Homo sapiens
taagcccaaaattgtcagtttgactt

SEQ ID NO: 5622 - DNA, 26 bp, Homo sapiens
aagcccaaaattgtcagtttgacttt

SEQ ID NO: 5623 - DNA, 26 bp, Homo sapiens
agcccaaaattgtcagtttgacttta

SEQ ID NO: 5624 - DNA, 26 bp, Homo sapiens
gcccaaaattgtcagtttgactttaa

SEQ ID NO: 5625 - DNA, 26 bp, Homo sapiens
cccaaaattgtcagtttgactttaag

SEQ ID NO: 5626 - DNA, 26 bp, Homo sapiens
ccaaaattgtcagtttgactttaagt

SEQ ID NO: 5627 - DNA, 26 bp, Homo sapiens
caaaattgtcagtttgactttaagtg

SEQ ID NO: 5628 - DNA, 26 bp, Homo sapiens
aaaattgtcagtttgactttaagtgc

SEQ ID NO: 5629 - DNA, 26 bp, Homo sapiens
aaattgtcagtttgactttaagtgct

SEQ ID NO: 5630 - DNA, 26 bp, Homo sapiens
aattgtcagtttgactttaagtgctc

SEQ ID NO: 5631 - DNA, 26 bp, Homo sapiens
attgtcagtttgactttaagtgctct

SEQ ID NO: 5632 - DNA, 26 bp, Homo sapiens
ttgtcagtttgactttaagtgctctt

SEQ ID NO: 5633 - DNA, 26 bp, Homo sapiens
tgtcagtttgactttaagtgctctta

SEQ ID NO: 5634 - DNA, 26 bp, Homo sapiens
gtcagtttgactttaagtgctcttaa

SEQ ID NO: 5635 - DNA, 26 bp, Homo sapiens
tcagtttgactttaagtgctcttaat

SEQ ID NO: 5636 - DNA, 26 bp, Homo sapiens
cagtttgactttaagtgctcttaata

SEQ ID NO: 5637 - DNA, 26 bp, Homo sapiens
agtttgactttaagtgctcttaatac

SEQ ID NO: 5638 - DNA, 26 bp, Homo sapiens
gtttgactttaagtgctcttaatact

SEQ ID NO: 5639 - DNA, 26 bp, Homo sapiens
tttgactttaagtgctcttaatacta

SEQ ID NO: 5640 - DNA, 26 bp, Homo sapiens
ttgactttaagtgctcttaatactaa

SEQ ID NO: 5641 - DNA, 26 bp, Homo sapiens
tgactttaagtgctcttaatactaaa

SEQ ID NO: 5642 - DNA, 26 bp, Homo sapiens
gactttaagtgctcttaatactaaag

SEQ ID NO: 5643 - DNA, 26 bp, Homo sapiens
actttaagtgctcttaatactaaagt

SEQ ID NO: 5644 - DNA, 26 bp, Homo sapiens
ctttaagtgctcttaatactaaagtt

SEQ ID NO: 5645 - DNA, 26 bp, Homo sapiens
tttaagtgctcttaatactaaagtta

SEQ ID NO: 5646 - DNA, 26 bp, Homo sapiens
ttaagtgctcttaatactaaagttac

SEQ ID NO: 5647 - DNA, 26 bp, Homo sapiens
taagtgctcttaatactaaagttact

SEQ ID NO: 5648 - DNA, 26 bp, Homo sapiens
aagtgctcttaatactaaagttacta

SEQ ID NO: 5649 - DNA, 26 bp, Homo sapiens
agtgctcttaatactaaagttactaa

SEQ ID NO: 5650 - DNA, 26 bp, Homo sapiens
gtgctcttaatactaaagttactaag

SEQ ID NO: 5651 - DNA, 26 bp, Homo sapiens
tgctcttaatactaaagttactaaga

SEQ ID NO: 5652 - DNA, 26 bp, Homo sapiens
gctcttaatactaaagttactaagac

SEQ ID NO: 5653 - DNA, 26 bp, Homo sapiens
ctcttaatactaaagttactaagact

SEQ ID NO: 5654 - DNA, 26 bp, Homo sapiens
tcttaatactaaagttactaagactg

SEQ ID NO: 5655 - DNA, 26 bp, Homo sapiens
cttaatactaaagttactaagactgc

SEQ ID NO: 5656 - DNA, 26 bp, Homo sapiens
ttaatactaaagttactaagactgca

SEQ ID NO: 5657 - DNA, 26 bp, Homo sapiens
taatactaaagttactaagactgcac

SEQ ID NO: 5658 - DNA, 26 bp, Homo sapiens
aatactaaagttactaagactgcaca

SEQ ID NO: 5659 - DNA, 26 bp, Homo sapiens
atactaaagttactaagactgcacag

SEQ ID NO: 5660 - DNA, 26 bp, Homo sapiens
tactaaagttactaagactgcacagg

SEQ ID NO: 5661 - DNA, 26 bp, Homo sapiens
actaaagttactaagactgcacaggc

SEQ ID NO: 5662 - DNA, 26 bp, Homo sapiens
ctaaagttactaagactgcacaggct

SEQ ID NO: 5663 - DNA, 26 bp, Homo sapiens
taaagttactaagactgcacaggctg

SEQ ID NO: 5664 - DNA, 26 bp, Homo sapiens
aaagttactaagactgcacaggctgc

SEQ ID NO: 5665 - DNA, 26 bp, Homo sapiens
aagttactaagactgcacaggctgcc

SEQ ID NO: 5666 - DNA, 26 bp, Homo sapiens
agttactaagactgcacaggctgcct

SEQ ID NO: 5667 - DNA, 26 bp, Homo sapiens
gttactaagactgcacaggctgcctt

SEQ ID NO: 5668 - DNA, 26 bp, Homo sapiens
ttactaagactgcacaggctgccttt

SEQ ID NO: 5669 - DNA, 26 bp, Homo sapiens
tactaagactgcacaggctgcctttt

SEQ ID NO: 5670 - DNA, 26 bp, Homo sapiens
actaagactgcacaggctgccttttt

SEQ ID NO: 5671 - DNA, 26 bp, Homo sapiens
ctaagactgcacaggctgcctttttt

SEQ ID NO: 5672 - DNA, 26 bp, Homo sapiens
taagactgcacaggctgccttttttt

SEQ ID NO: 5673 - DNA, 26 bp, Homo sapiens
aagactgcacaggctgcctttttttt

SEQ ID NO: 5674 - DNA, 26 bp, Homo sapiens
agactgcacaggctgccttttttttt

SEQ ID NO: 5675 - DNA, 26 bp, Homo sapiens
gactgcacaggctgcctttttttttt

SEQ ID NO: 5676 - DNA, 26 bp, Homo sapiens
actgcacaggctgccttttttttttt

SEQ ID NO: 5677 - DNA, 26 bp, Homo sapiens
ctgcacaggctgcctttttttttttt

SEQ ID NO: 5678 - DNA, 26 bp, Homo sapiens
tgcacaggctgccttttttttttttt

SEQ ID NO: 5679 - DNA, 26 bp, Homo sapiens
gcacaggctgcctttttttttttttt

SEQ ID NO: 5680 - DNA, 26 bp, Homo sapiens
cacaggctgccttttttttttttttt

SEQ ID NO: 5681 - DNA, 26 bp, Homo sapiens
acaggctgcctttttttttttttttc

SEQ ID NO: 5682 - DNA, 26 bp, Homo sapiens
caggctgcctttttttttttttttct

SEQ ID NO: 5683 - DNA, 26 bp, Homo sapiens
aggctgcctttttttttttttttctt

SEQ ID NO: 5684 - DNA, 26 bp, Homo sapiens
ggctgcctttttttttttttttcttt

SEQ ID NO: 5685 - DNA, 26 bp, Homo sapiens
gctgcctttttttttttttttctttt

SEQ ID NO: 5686 - DNA, 26 bp, Homo sapiens
ctgcctttttttttttttttcttttc

SEQ ID NO: 5687 - DNA, 26 bp, Homo sapiens
tgcctttttttttttttttcttttct

SEQ ID NO: 5688 - DNA, 26 bp, Homo sapiens
gcctttttttttttttttcttttctt

SEQ ID NO: 5689 - DNA, 26 bp, Homo sapiens
cctttttttttttttttcttttcttt

SEQ ID NO: 5690 - DNA, 26 bp, Homo sapiens
ctttttttttttttttcttttctttc

SEQ ID NO: 5691 - DNA, 26 bp, Homo sapiens
tttttttttttttttcttttctttct

SEQ ID NO: 5692 - DNA, 26 bp, Homo sapiens
ttttttttttttttcttttctttctg

SEQ ID NO: 5693 - DNA, 26 bp, Homo sapiens
tttttttttttttcttttctttctgt

SEQ ID NO: 5694 - DNA, 26 bp, Homo sapiens
ttttttttttttcttttctttctgta

SEQ ID NO: 5695 - DNA, 26 bp, Homo sapiens
tttttttttttcttttctttctgtat

SEQ ID NO: 5696 - DNA, 26 bp, Homo sapiens
ttttttttttcttttctttctgtatt

SEQ ID NO: 5697 - DNA, 26 bp, Homo sapiens
tttttttttcttttctttctgtattt

SEQ ID NO: 5698 - DNA, 26 bp, Homo sapiens
ttttttttcttttctttctgtatttc

SEQ ID NO: 5699 - DNA, 26 bp, Homo sapiens
tttttttcttttctttctgtatttcc

SEQ ID NO: 5700 - DNA, 26 bp, Homo sapiens
ttttttcttttctttctgtatttccc

SEQ ID NO: 5701 - DNA, 26 bp, Homo sapiens
tttttcttttctttctgtatttccca

SEQ ID NO: 5702 - DNA, 26 bp, Homo sapiens
ttttcttttctttctgtatttcccaa

SEQ ID NO: 5703 - DNA, 26 bp, Homo sapiens
tttcttttctttctgtatttcccaaa

SEQ ID NO: 5704 - DNA, 26 bp, Homo sapiens
ttcttttctttctgtatttcccaaat

SEQ ID NO: 5705 - DNA, 26 bp, Homo sapiens
tcttttctttctgtatttcccaaatt

SEQ ID NO: 5706 - DNA, 26 bp, Homo sapiens
cttttctttctgtatttcccaaatta

SEQ ID NO: 5707 - DNA, 26 bp, Homo sapiens
ttttctttctgtatttcccaaattac

SEQ ID NO: 5708 - DNA, 26 bp, Homo sapiens
tttctttctgtatttcccaaattaca

SEQ ID NO: 5709 - DNA, 26 bp, Homo sapiens
ttctttctgtatttcccaaattacag

SEQ ID NO: 5710 - DNA, 26 bp, Homo sapiens
tctttctgtatttcccaaattacagg

SEQ ID NO: 5711 - DNA, 26 bp, Homo sapiens
ctttctgtatttcccaaattacaggg

SEQ ID NO: 5712 - DNA, 26 bp, Homo sapiens
tttctgtatttcccaaattacaggga

SEQ ID NO: 5713 - DNA, 26 bp, Homo sapiens
ttctgtatttcccaaattacagggag

SEQ ID NO: 5714 - DNA, 26 bp, Homo sapiens
tctgtatttcccaaattacagggagc

SEQ ID NO: 5715 - DNA, 26 bp, Homo sapiens
ctgtatttcccaaattacagggagct

SEQ ID NO: 5716 - DNA, 26 bp, Homo sapiens
tgtatttcccaaattacagggagcta

SEQ ID NO: 5717 - DNA, 26 bp, Homo sapiens
gtatttcccaaattacagggagctat

SEQ ID NO: 5718 - DNA, 26 bp, Homo sapiens
tatttcccaaattacagggagctatg

SEQ ID NO: 5719 - DNA, 26 bp, Homo sapiens
atttcccaaattacagggagctatgc

SEQ ID NO: 5720 - DNA, 26 bp, Homo sapiens
tttcccaaattacagggagctatgcc

SEQ ID NO: 5721 - DNA, 26 bp, Homo sapiens
ttcccaaattacagggagctatgccc

SEQ ID NO: 5722 - DNA, 26 bp, Homo sapiens
tcccaaattacagggagctatgccct

SEQ ID NO: 5723 - DNA, 26 bp, Homo sapiens
cccaaattacagggagctatgccctt

SEQ ID NO: 5724 - DNA, 26 bp, Homo sapiens
ccaaattacagggagctatgcccttg

SEQ ID NO: 5725 - DNA, 26 bp, Homo sapiens
caaattacagggagctatgcccttgg

SEQ ID NO: 5726 - DNA, 26 bp, Homo sapiens
aaattacagggagctatgcccttggt

SEQ ID NO: 5727 - DNA, 26 bp, Homo sapiens
aattacagggagctatgcccttggta

SEQ ID NO: 5728 - DNA, 26 bp, Homo sapiens
attacagggagctatgcccttggtat

SEQ ID NO: 5729 - DNA, 26 bp, Homo sapiens
ttacagggagctatgcccttggtatt

SEQ ID NO: 5730 - DNA, 26 bp, Homo sapiens
tacagggagctatgcccttggtattg

SEQ ID NO: 5731 - DNA, 26 bp, Homo sapiens
acagggagctatgcccttggtattgc

SEQ ID NO: 5732 - DNA, 26 bp, Homo sapiens
cagggagctatgcccttggtattgca

SEQ ID NO: 5733 - DNA, 26 bp, Homo sapiens
agggagctatgcccttggtattgcac

SEQ ID NO: 5734 - DNA, 26 bp, Homo sapiens
gggagctatgcccttggtattgcaca

SEQ ID NO: 5735 - DNA, 26 bp, Homo sapiens
ggagctatgcccttggtattgcacac

SEQ ID NO: 5736 - DNA, 26 bp, Homo sapiens
gagctatgcccttggtattgcacaca

SEQ ID NO: 5737 - DNA, 26 bp, Homo sapiens
agctatgcccttggtattgcacacag

SEQ ID NO: 5738 - DNA, 26 bp, Homo sapiens
gctatgcccttggtattgcacacagt

SEQ ID NO: 5739 - DNA, 26 bp, Homo sapiens
ctatgcccttggtattgcacacagta

SEQ ID NO: 5740 - DNA, 26 bp, Homo sapiens
tatgcccttggtattgcacacagtac

SEQ ID NO: 5741 - DNA, 26 bp, Homo sapiens
atgcccttggtattgcacacagtaca

SEQ ID NO: 5742 - DNA, 26 bp, Homo sapiens
tgcccttggtattgcacacagtacac

SEQ ID NO: 5743 - DNA, 26 bp, Homo sapiens
gcccttggtattgcacacagtacact

SEQ ID NO: 5744 - DNA, 26 bp, Homo sapiens
cccttggtattgcacacagtacactg

SEQ ID NO: 5745 - DNA, 26 bp, Homo sapiens
ccttggtattgcacacagtacactgc

SEQ ID NO: 5746 - DNA, 26 bp, Homo sapiens
cttggtattgcacacagtacactgca

SEQ ID NO: 5747 - DNA, 26 bp, Homo sapiens
ttggtattgcacacagtacactgcaa

SEQ ID NO: 5748 - DNA, 26 bp, Homo sapiens
tggtattgcacacagtacactgcaaa

SEQ ID NO: 5749 - DNA, 26 bp, Homo sapiens
ggtattgcacacagtacactgcaaaa

SEQ ID NO: 5750 - DNA, 26 bp, Homo sapiens
gtattgcacacagtacactgcaaaag

SEQ ID NO: 5751 - DNA, 26 bp, Homo sapiens
tattgcacacagtacactgcaaaaga

SEQ ID NO: 5752 - DNA, 26 bp, Homo sapiens
attgcacacagtacactgcaaaagat

SEQ ID NO: 5753 - DNA, 26 bp, Homo sapiens
ttgcacacagtacactgcaaaagatt

SEQ ID NO: 5754 - DNA, 26 bp, Homo sapiens
tgcacacagtacactgcaaaagattc

SEQ ID NO: 5755 - DNA, 26 bp, Homo sapiens
gcacacagtacactgcaaaagattca

SEQ ID NO: 5756 - DNA, 26 bp, Homo sapiens
cacacagtacactgcaaaagattcac

SEQ ID NO: 5757 - DNA, 26 bp, Homo sapiens
acacagtacactgcaaaagattcaca

SEQ ID NO: 5758 - DNA, 26 bp, Homo sapiens
cacagtacactgcaaaagattcacaa

SEQ ID NO: 5759 - DNA, 26 bp, Homo sapiens
acagtacactgcaaaagattcacaag

SEQ ID NO: 5760 - DNA, 26 bp, Homo sapiens
cagtacactgcaaaagattcacaagg

SEQ ID NO: 5761 - DNA, 26 bp, Homo sapiens
agtacactgcaaaagattcacaaggt

SEQ ID NO: 5762 - DNA, 26 bp, Homo sapiens
gtacactgcaaaagattcacaaggtt

SEQ ID NO: 5763 - DNA, 26 bp, Homo sapiens
tacactgcaaaagattcacaaggtta

SEQ ID NO: 5764 - DNA, 26 bp, Homo sapiens
acactgcaaaagattcacaaggttag

SEQ ID NO: 5765 - DNA, 26 bp, Homo sapiens
cactgcaaaagattcacaaggttagt

SEQ ID NO: 5766 - DNA, 26 bp, Homo sapiens
actgcaaaagattcacaaggttagtt

SEQ ID NO: 5767 - DNA, 26 bp, Homo sapiens
ctgcaaaagattcacaaggttagttg

SEQ ID NO: 5768 - DNA, 26 bp, Homo sapiens
tgcaaaagattcacaaggttagttga

SEQ ID NO: 5769 - DNA, 26 bp, Homo sapiens
gcaaaagattcacaaggttagttgaa

SEQ ID NO: 5770 - DNA, 26 bp, Homo sapiens
caaaagattcacaaggttagttgaaa

SEQ ID NO: 5771 - DNA, 26 bp, Homo sapiens
aaaagattcacaaggttagttgaaag

SEQ ID NO: 5772 - DNA, 26 bp, Homo sapiens
aaagattcacaaggttagttgaaagt

SEQ ID NO: 5773 - DNA, 26 bp, Homo sapiens
aagattcacaaggttagttgaaagtc

SEQ ID NO: 5774 - DNA, 26 bp, Homo sapiens
agattcacaaggttagttgaaagtca

SEQ ID NO: 5775 - DNA, 26 bp, Homo sapiens
gattcacaaggttagttgaaagtcat

SEQ ID NO: 5776 - DNA, 26 bp, Homo sapiens
attcacaaggttagttgaaagtcatt

SEQ ID NO: 5777 - DNA, 26 bp, Homo sapiens
ttcacaaggttagttgaaagtcattt

SEQ ID NO: 5778 - DNA, 26 bp, Homo sapiens
tcacaaggttagttgaaagtcatttt

SEQ ID NO: 5779 - DNA, 26 bp, Homo sapiens
cacaaggttagttgaaagtcattttt

SEQ ID NO: 5780 - DNA, 26 bp, Homo sapiens
acaaggttagttgaaagtcatttttg

SEQ ID NO: 5781 - DNA, 26 bp, Homo sapiens
caaggttagttgaaagtcatttttgc

SEQ ID NO: 5782 - DNA, 26 bp, Homo sapiens
aaggttagttgaaagtcatttttgcc

SEQ ID NO: 5783 - DNA, 26 bp, Homo sapiens
aggttagttgaaagtcatttttgccc

SEQ ID NO: 5784 - DNA, 26 bp, Homo sapiens
ggttagttgaaagtcatttttgccct

SEQ ID NO: 5785 - DNA, 26 bp, Homo sapiens
gttagttgaaagtcatttttgccctg

SEQ ID NO: 5786 - DNA, 26 bp, Homo sapiens
ttagttgaaagtcatttttgccctgg

SEQ ID NO: 5787 - DNA, 26 bp, Homo sapiens
tagttgaaagtcatttttgccctggt

SEQ ID NO: 5788 - DNA, 26 bp, Homo sapiens
agttgaaagtcatttttgccctggtg

SEQ ID NO: 5789 - DNA, 26 bp, Homo sapiens
gttgaaagtcatttttgccctggtga

SEQ ID NO: 5790 - DNA, 26 bp, Homo sapiens
ttgaaagtcatttttgccctggtgat

SEQ ID NO: 5791 - DNA, 26 bp, Homo sapiens
tgaaagtcatttttgccctggtgatt

SEQ ID NO: 5792 - DNA, 26 bp, Homo sapiens
gaaagtcatttttgccctggtgattc

SEQ ID NO: 5793 - DNA, 26 bp, Homo sapiens
aaagtcatttttgccctggtgattca

SEQ ID NO: 5794 - DNA, 26 bp, Homo sapiens
aagtcatttttgccctggtgattcaa

SEQ ID NO: 5795 - DNA, 26 bp, Homo sapiens
agtcatttttgccctggtgattcaaa

SEQ ID NO: 5796 - DNA, 26 bp, Homo sapiens
gtcatttttgccctggtgattcaaag

SEQ ID NO: 5797 - DNA, 26 bp, Homo sapiens
tcatttttgccctggtgattcaaagc

SEQ ID NO: 5798 - DNA, 26 bp, Homo sapiens
catttttgccctggtgattcaaagct

SEQ ID NO: 5799 - DNA, 26 bp, Homo sapiens
atttttgccctggtgattcaaagctc

SEQ ID NO: 5800 - DNA, 26 bp, Homo sapiens
tttttgccctggtgattcaaagctca

SEQ ID NO: 5801 - DNA, 26 bp, Homo sapiens
ttttgccctggtgattcaaagctcaa

SEQ ID NO: 5802 - DNA, 26 bp, Homo sapiens
tttgccctggtgattcaaagctcaaa

SEQ ID NO: 5803 - DNA, 26 bp, Homo sapiens
ttgccctggtgattcaaagctcaaag

SEQ ID NO: 5804 - DNA, 26 bp, Homo sapiens
tgccctggtgattcaaagctcaaaga

SEQ ID NO: 5805 - DNA, 26 bp, Homo sapiens
gccctggtgattcaaagctcaaagaa

SEQ ID NO: 5806 - DNA, 26 bp, Homo sapiens
ccctggtgattcaaagctcaaagaat

SEQ ID NO: 5807 - DNA, 26 bp, Homo sapiens
cctggtgattcaaagctcaaagaatt

SEQ ID NO: 5808 - DNA, 26 bp, Homo sapiens
ctggtgattcaaagctcaaagaattt

SEQ ID NO: 5809 - DNA, 26 bp, Homo sapiens
tggtgattcaaagctcaaagaatttt

SEQ ID NO: 5810 - DNA, 26 bp, Homo sapiens
ggtgattcaaagctcaaagaattttc

SEQ ID NO: 5811 - DNA, 26 bp, Homo sapiens
gtgattcaaagctcaaagaattttct

SEQ ID NO: 5812 - DNA, 26 bp, Homo sapiens
tgattcaaagctcaaagaattttcta

SEQ ID NO: 5813 - DNA, 26 bp, Homo sapiens
gattcaaagctcaaagaattttctag

SEQ ID NO: 5814 - DNA, 26 bp, Homo sapiens
attcaaagctcaaagaattttctagc

SEQ ID NO: 5815 - DNA, 26 bp, Homo sapiens
ttcaaagctcaaagaattttctagca

SEQ ID NO: 5816 - DNA, 26 bp, Homo sapiens
tcaaagctcaaagaattttctagcat

SEQ ID NO: 5817 - DNA, 26 bp, Homo sapiens
caaagctcaaagaattttctagcata

SEQ ID NO: 5818 - DNA, 26 bp, Homo sapiens
aaagctcaaagaattttctagcataa

SEQ ID NO: 5819 - DNA, 26 bp, Homo sapiens
aagctcaaagaattttctagcataaa

SEQ ID NO: 5820 - DNA, 26 bp, Homo sapiens
agctcaaagaattttctagcataaag

SEQ ID NO: 5821 - DNA, 26 bp, Homo sapiens
gctcaaagaattttctagcataaagt

SEQ ID NO: 5822 - DNA, 26 bp, Homo sapiens
ctcaaagaattttctagcataaagtc

SEQ ID NO: 5823 - DNA, 26 bp, Homo sapiens
tcaaagaattttctagcataaagtct

SEQ ID NO: 5824 - DNA, 26 bp, Homo sapiens
caaagaattttctagcataaagtctt

SEQ ID NO: 5825 - DNA, 26 bp, Homo sapiens
aaagaattttctagcataaagtctta

SEQ ID NO: 5826 - DNA, 26 bp, Homo sapiens
aagaattttctagcataaagtcttat

SEQ ID NO: 5827 - DNA, 26 bp, Homo sapiens
agaattttctagcataaagtcttatt

SEQ ID NO: 5828 - DNA, 26 bp, Homo sapiens
gaattttctagcataaagtcttatta

SEQ ID NO: 5829 - DNA, 26 bp, Homo sapiens
aattttctagcataaagtcttattaa

SEQ ID NO: 5830 - DNA, 26 bp, Homo sapiens
attttctagcataaagtcttattaaa

SEQ ID NO: 5831 - DNA, 26 bp, Homo sapiens
ttttctagcataaagtcttattaaaa

SEQ ID NO: 5832 - DNA, 26 bp, Homo sapiens
tttctagcataaagtcttattaaaaa

SEQ ID NO: 5833 - DNA, 26 bp, Homo sapiens
ttctagcataaagtcttattaaaaat

SEQ ID NO: 5834 - DNA, 26 bp, Homo sapiens
tctagcataaagtcttattaaaaatt

SEQ ID NO: 5835 - DNA, 26 bp, Homo sapiens
ctagcataaagtcttattaaaaattt

SEQ ID NO: 5836 - DNA, 26 bp, Homo sapiens
tagcataaagtcttattaaaaatttt

SEQ ID NO: 5837 - DNA, 26 bp, Homo sapiens
agcataaagtcttattaaaaatttta

SEQ ID NO: 5838 - DNA, 26 bp, Homo sapiens
gcataaagtcttattaaaaattttaa

SEQ ID NO: 5839 - DNA, 26 bp, Homo sapiens
cataaagtcttattaaaaattttaat

SEQ ID NO: 5840 - DNA, 26 bp, Homo sapiens
ataaagtcttattaaaaattttaatc

SEQ ID NO: 5841 - DNA, 26 bp, Homo sapiens
taaagtcttattaaaaattttaatca

SEQ ID NO: 5842 - DNA, 26 bp, Homo sapiens
aaagtcttattaaaaattttaatcaa

SEQ ID NO: 5843 - DNA, 26 bp, Homo sapiens
aagtcttattaaaaattttaatcaaa

SEQ ID NO: 5844 - DNA, 26 bp, Homo sapiens
agtcttattaaaaattttaatcaaaa

SEQ ID NO: 5845 - DNA, 26 bp, Homo sapiens
gtcttattaaaaattttaatcaaaat

SEQ ID NO: 5846 - DNA, 26 bp, Homo sapiens
tcttattaaaaattttaatcaaaata

SEQ ID NO: 5847 - DNA, 26 bp, Homo sapiens
cttattaaaaattttaatcaaaatat

SEQ ID NO: 5848 - DNA, 26 bp, Homo sapiens
ttattaaaaattttaatcaaaatatt

SEQ ID NO: 5849 - DNA, 26 bp, Homo sapiens
tattaaaaattttaatcaaaatatta

SEQ ID NO: 5850 - DNA, 26 bp, Homo sapiens
attaaaaattttaatcaaaatattat

SEQ ID NO: 5851 - DNA, 26 bp, Homo sapiens
ttaaaaattttaatcaaaatattatt

SEQ ID NO: 5852 - DNA, 26 bp, Homo sapiens
taaaaattttaatcaaaatattattt

SEQ ID NO: 5853 - DNA, 26 bp, Homo sapiens
aaaaattttaatcaaaatattatttg

SEQ ID NO: 5854 - DNA, 26 bp, Homo sapiens
aaaattttaatcaaaatattatttga

SEQ ID NO: 5855 - DNA, 26 bp, Homo sapiens
aaattttaatcaaaatattatttgag

SEQ ID NO: 5856 - DNA, 26 bp, Homo sapiens
aattttaatcaaaatattatttgagt

SEQ ID NO: 5857 - DNA, 26 bp, Homo sapiens
attttaatcaaaatattatttgagtt

SEQ ID NO: 5858 - DNA, 26 bp, Homo sapiens
ttttaatcaaaatattatttgagttt

SEQ ID NO: 5859 - DNA, 26 bp, Homo sapiens
tttaatcaaaatattatttgagttta

SEQ ID NO: 5860 - DNA, 26 bp, Homo sapiens
ttaatcaaaatattatttgagtttaa

SEQ ID NO: 5861 - DNA, 26 bp, Homo sapiens
taatcaaaatattatttgagtttaag

SEQ ID NO: 5862 - DNA, 26 bp, Homo sapiens
aatcaaaatattatttgagtttaagt

SEQ ID NO: 5863 - DNA, 26 bp, Homo sapiens
atcaaaatattatttgagtttaagtt

SEQ ID NO: 5864 - DNA, 26 bp, Homo sapiens
tcaaaatattatttgagtttaagttt

SEQ ID NO: 5865 - DNA, 26 bp, Homo sapiens
caaaatattatttgagtttaagttta

SEQ ID NO: 5866 - DNA, 26 bp, Homo sapiens
aaaatattatttgagtttaagtttaa

SEQ ID NO: 5867 - DNA, 26 bp, Homo sapiens
aaatattatttgagtttaagtttaat

SEQ ID NO: 5868 - DNA, 26 bp, Homo sapiens
aatattatttgagtttaagtttaata

SEQ ID NO: 5869 - DNA, 26 bp, Homo sapiens
atattatttgagtttaagtttaataa

SEQ ID NO: 5870 - DNA, 26 bp, Homo sapiens
tattatttgagtttaagtttaataaa

SEQ ID NO: 5871 - DNA, 26 bp, Homo sapiens
attatttgagtttaagtttaataaaa

SEQ ID NO: 5872 - DNA, 26 bp, Homo sapiens
ttatttgagtttaagtttaataaaac

SEQ ID NO: 5873 - DNA, 26 bp, Homo sapiens
tatttgagtttaagtttaataaaaca

SEQ ID NO: 5874 - DNA, 26 bp, Homo sapiens
atttgagtttaagtttaataaaacaa

SEQ ID NO: 5875 - DNA, 26 bp, Homo sapiens
tttgagtttaagtttaataaaacaat

SEQ ID NO: 5876 - DNA, 26 bp, Homo sapiens
ttgagtttaagtttaataaaacaata

SEQ ID NO: 5877 - DNA, 26 bp, Homo sapiens
tgagtttaagtttaataaaacaatac

SEQ ID NO: 5878 - DNA, 26 bp, Homo sapiens
gagtttaagtttaataaaacaatacc

SEQ ID NO: 5879 - DNA, 26 bp, Homo sapiens
agtttaagtttaataaaacaatacca

SEQ ID NO: 5880 - DNA, 26 bp, Homo sapiens
gtttaagtttaataaaacaataccac

SEQ ID NO: 5881 - DNA, 26 bp, Homo sapiens
tttaagtttaataaaacaataccact

SEQ ID NO: 5882 - DNA, 26 bp, Homo sapiens
ttaagtttaataaaacaataccacta

SEQ ID NO: 5883 - DNA, 26 bp, Homo sapiens
taagtttaataaaacaataccactat

SEQ ID NO: 5884 - DNA, 26 bp, Homo sapiens
aagtttaataaaacaataccactata

SEQ ID NO: 5885 - DNA, 26 bp, Homo sapiens
agtttaataaaacaataccactatat

SEQ ID NO: 5886 - DNA, 26 bp, Homo sapiens
gtttaataaaacaataccactatata

SEQ ID NO: 5887 - DNA, 26 bp, Homo sapiens
tttaataaaacaataccactatatat

SEQ ID NO: 5888 - DNA, 26 bp, Homo sapiens
ttaataaaacaataccactatatata

SEQ ID NO: 5889 - DNA, 26 bp, Homo sapiens
taataaaacaataccactatatatac

SEQ ID NO: 5890 - DNA, 26 bp, Homo sapiens
aataaaacaataccactatatatact

SEQ ID NO: 5891 - DNA, 26 bp, Homo sapiens
ataaaacaataccactatatatactc

SEQ ID NO: 5892 - DNA, 26 bp, Homo sapiens
taaaacaataccactatatatactct

SEQ ID NO: 5893 - DNA, 26 bp, Homo sapiens
aaaacaataccactatatatactctc

SEQ ID NO: 5894 - DNA, 26 bp, Homo sapiens
aaacaataccactatatatactctca

SEQ ID NO: 5895 - DNA, 26 bp, Homo sapiens
aacaataccactatatatactctcaa

SEQ ID NO: 5896 - DNA, 26 bp, Homo sapiens
acaataccactatatatactctcaac

SEQ ID NO: 5897 - DNA, 26 bp, Homo sapiens
caataccactatatatactctcaaca

SEQ ID NO: 5898 - DNA, 26 bp, Homo sapiens
aataccactatatatactctcaacaa

SEQ ID NO: 5899 - DNA, 26 bp, Homo sapiens
ataccactatatatactctcaacaac

SEQ ID NO: 5900 - DNA, 26 bp, Homo sapiens
taccactatatatactctcaacaact

SEQ ID NO: 5901 - DNA, 26 bp, Homo sapiens
accactatatatactctcaacaactt

SEQ ID NO: 5902 - DNA, 26 bp, Homo sapiens
ccactatatatactctcaacaacttc

SEQ ID NO: 5903 - DNA, 26 bp, Homo sapiens
cactatatatactctcaacaacttca

SEQ ID NO: 5904 - DNA, 26 bp, Homo sapiens
actatatatactctcaacaacttcat

SEQ ID NO: 5905 - DNA, 26 bp, Homo sapiens
ctatatatactctcaacaacttcatt

SEQ ID NO: 5906 - DNA, 26 bp, Homo sapiens
tatatatactctcaacaacttcatta

SEQ ID NO: 5907 - DNA, 26 bp, Homo sapiens
atatatactctcaacaacttcattat

SEQ ID NO: 5908 - DNA, 26 bp, Homo sapiens
tatatactctcaacaacttcattata

SEQ ID NO: 5909 - DNA, 26 bp, Homo sapiens
atatactctcaacaacttcattatat

SEQ ID NO: 5910 - DNA, 26 bp, Homo sapiens
tatactctcaacaacttcattatata

SEQ ID NO: 5911 - DNA, 26 bp, Homo sapiens
atactctcaacaacttcattatataa

SEQ ID NO: 5912 - DNA, 26 bp, Homo sapiens
tactctcaacaacttcattatataat

SEQ ID NO: 5913 - DNA, 26 bp, Homo sapiens
actctcaacaacttcattatataatc

SEQ ID NO: 5914 - DNA, 26 bp, Homo sapiens
ctctcaacaacttcattatataatca

SEQ ID NO: 5915 - DNA, 26 bp, Homo sapiens
tctcaacaacttcattatataatcag

SEQ ID NO: 5916 - DNA, 26 bp, Homo sapiens
ctcaacaacttcattatataatcagt

SEQ ID NO: 5917 - DNA, 26 bp, Homo sapiens
tcaacaacttcattatataatcagtc

SEQ ID NO: 5918 - DNA, 26 bp, Homo sapiens
caacaacttcattatataatcagtcc

SEQ ID NO: 5919 - DNA, 26 bp, Homo sapiens
aacaacttcattatataatcagtcct

SEQ ID NO: 5920 - DNA, 26 bp, Homo sapiens
acaacttcattatataatcagtccta

SEQ ID NO: 5921 - DNA, 26 bp, Homo sapiens
caacttcattatataatcagtcctat

SEQ ID NO: 5922 - DNA, 26 bp, Homo sapiens
aacttcattatataatcagtcctatg

SEQ ID NO: 5923 - DNA, 26 bp, Homo sapiens
acttcattatataatcagtcctatga

SEQ ID NO: 5924 - DNA, 26 bp, Homo sapiens
cttcattatataatcagtcctatgag

SEQ ID NO: 5925 - DNA, 26 bp, Homo sapiens
ttcattatataatcagtcctatgagg

SEQ ID NO: 5926 - DNA, 26 bp, Homo sapiens
tcattatataatcagtcctatgaggt

SEQ ID NO: 5927 - DNA, 26 bp, Homo sapiens
cattatataatcagtcctatgaggtt

SEQ ID NO: 5928 - DNA, 26 bp, Homo sapiens
attatataatcagtcctatgaggttg

SEQ ID NO: 5929 - DNA, 26 bp, Homo sapiens
ttatataatcagtcctatgaggttgt

SEQ ID NO: 5930 - DNA, 26 bp, Homo sapiens
tatataatcagtcctatgaggttgta

SEQ ID NO: 5931 - DNA, 26 bp, Homo sapiens
atataatcagtcctatgaggttgtac

SEQ ID NO: 5932 - DNA, 26 bp, Homo sapiens
tataatcagtcctatgaggttgtact

SEQ ID NO: 5933 - DNA, 26 bp, Homo sapiens
ataatcagtcctatgaggttgtactt

SEQ ID NO: 5934 - DNA, 26 bp, Homo sapiens
taatcagtcctatgaggttgtacttg

SEQ ID NO: 5935 - DNA, 26 bp, Homo sapiens
aatcagtcctatgaggttgtacttgc

SEQ ID NO: 5936 - DNA, 26 bp, Homo sapiens
atcagtcctatgaggttgtacttgct

SEQ ID NO: 5937 - DNA, 26 bp, Homo sapiens
tcagtcctatgaggttgtacttgctt

SEQ ID NO: 5938 - DNA, 26 bp, Homo sapiens
cagtcctatgaggttgtacttgcttt

SEQ ID NO: 5939 - DNA, 26 bp, Homo sapiens
agtcctatgaggttgtacttgctttt

SEQ ID NO: 5940 - DNA, 26 bp, Homo sapiens
gtcctatgaggttgtacttgcttttc

SEQ ID NO: 5941 - DNA, 26 bp, Homo sapiens
tcctatgaggttgtacttgcttttca

SEQ ID NO: 5942 - DNA, 26 bp, Homo sapiens
cctatgaggttgtacttgcttttcat

SEQ ID NO: 5943 - DNA, 26 bp, Homo sapiens
ctatgaggttgtacttgcttttcata

SEQ ID NO: 5944 - DNA, 26 bp, Homo sapiens
tatgaggttgtacttgcttttcatat

SEQ ID NO: 5945 - DNA, 26 bp, Homo sapiens
atgaggttgtacttgcttttcatatc

SEQ ID NO: 5946 - DNA, 26 bp, Homo sapiens
tgaggttgtacttgcttttcatatca

SEQ ID NO: 5947 - DNA, 26 bp, Homo sapiens
gaggttgtacttgcttttcatatcac

SEQ ID NO: 5948 - DNA, 26 bp, Homo sapiens
aggttgtacttgcttttcatatcaca

SEQ ID NO: 5949 - DNA, 26 bp, Homo sapiens
ggttgtacttgcttttcatatcacac

SEQ ID NO: 5950 - DNA, 26 bp, Homo sapiens
gttgtacttgcttttcatatcacact

SEQ ID NO: 5951 - DNA, 26 bp, Homo sapiens
ttgtacttgcttttcatatcacactg

SEQ ID NO: 5952 - DNA, 26 bp, Homo sapiens
tgtacttgcttttcatatcacactga

SEQ ID NO: 5953 - DNA, 26 bp, Homo sapiens
gtacttgcttttcatatcacactgat

SEQ ID NO: 5954 - DNA, 26 bp, Homo sapiens
tacttgcttttcatatcacactgatt

SEQ ID NO: 5955 - DNA, 26 bp, Homo sapiens
acttgcttttcatatcacactgatta

SEQ ID NO: 5956 - DNA, 26 bp, Homo sapiens
cttgcttttcatatcacactgattaa

SEQ ID NO: 5957 - DNA, 26 bp, Homo sapiens
ttgcttttcatatcacactgattaag

SEQ ID NO: 5958 - DNA, 26 bp, Homo sapiens
tgcttttcatatcacactgattaagg

SEQ ID NO: 5959 - DNA, 26 bp, Homo sapiens
gcttttcatatcacactgattaagga

SEQ ID NO: 5960 - DNA, 26 bp, Homo sapiens
cttttcatatcacactgattaaggac

SEQ ID NO: 5961 - DNA, 26 bp, Homo sapiens
ttttcatatcacactgattaaggaca

SEQ ID NO: 5962 - DNA, 26 bp, Homo sapiens
tttcatatcacactgattaaggacaa

SEQ ID NO: 5963 - DNA, 26 bp, Homo sapiens
ttcatatcacactgattaaggacaaa

SEQ ID NO: 5964 - DNA, 26 bp, Homo sapiens
tcatatcacactgattaaggacaaaa

SEQ ID NO: 5965 - DNA, 26 bp, Homo sapiens
catatcacactgattaaggacaaaaa

SEQ ID NO: 5966 - DNA, 26 bp, Homo sapiens
atatcacactgattaaggacaaaaat

SEQ ID NO: 5967 - DNA, 26 bp, Homo sapiens
tatcacactgattaaggacaaaaata

SEQ ID NO: 5968 - DNA, 26 bp, Homo sapiens
atcacactgattaaggacaaaaataa

SEQ ID NO: 5969 - DNA, 26 bp, Homo sapiens
tcacactgattaaggacaaaaataat

SEQ ID NO: 5970 - DNA, 26 bp, Homo sapiens
cacactgattaaggacaaaaataatt

SEQ ID NO: 5971 - DNA, 26 bp, Homo sapiens
acactgattaaggacaaaaataattt

SEQ ID NO: 5972 - DNA, 26 bp, Homo sapiens
cactgattaaggacaaaaataatttt

SEQ ID NO: 5973 - DNA, 26 bp, Homo sapiens
actgattaaggacaaaaataattttg

SEQ ID NO: 5974 - DNA, 26 bp, Homo sapiens
ctgattaaggacaaaaataattttga

SEQ ID NO: 5975 - DNA, 26 bp, Homo sapiens
tgattaaggacaaaaataattttgat

SEQ ID NO: 5976 - DNA, 26 bp, Homo sapiens
gattaaggacaaaaataattttgatg

SEQ ID NO: 5977 - DNA, 26 bp, Homo sapiens
attaaggacaaaaataattttgatgt

SEQ ID NO: 5978 - DNA, 26 bp, Homo sapiens
ttaaggacaaaaataattttgatgta

SEQ ID NO: 5979 - DNA, 26 bp, Homo sapiens
taaggacaaaaataattttgatgtac

SEQ ID NO: 5980 - DNA, 26 bp, Homo sapiens
aaggacaaaaataattttgatgtaca

SEQ ID NO: 5981 - DNA, 26 bp, Homo sapiens
aggacaaaaataattttgatgtacat

SEQ ID NO: 5982 - DNA, 26 bp, Homo sapiens
ggacaaaaataattttgatgtacatg

SEQ ID NO: 5983 - DNA, 26 bp, Homo sapiens
gacaaaaataattttgatgtacatgt

SEQ ID NO: 5984 - DNA, 26 bp, Homo sapiens
acaaaaataattttgatgtacatgta

SEQ ID NO: 5985 - DNA, 26 bp, Homo sapiens
caaaaataattttgatgtacatgtac

SEQ ID NO: 5986 - DNA, 26 bp, Homo sapiens
aaaaataattttgatgtacatgtacc

SEQ ID NO: 5987 - DNA, 26 bp, Homo sapiens
aaaataattttgatgtacatgtacca

SEQ ID NO: 5988 - DNA, 26 bp, Homo sapiens
aaataattttgatgtacatgtaccat

SEQ ID NO: 5989 - DNA, 26 bp, Homo sapiens
aataattttgatgtacatgtaccata

SEQ ID NO: 5990 - DNA, 26 bp, Homo sapiens
ataattttgatgtacatgtaccatac

SEQ ID NO: 5991 - DNA, 26 bp, Homo sapiens
taattttgatgtacatgtaccataca

SEQ ID NO: 5992 - DNA, 26 bp, Homo sapiens
aattttgatgtacatgtaccatacac

SEQ ID NO: 5993 - DNA, 26 bp, Homo sapiens
attttgatgtacatgtaccatacact

SEQ ID NO: 5994 - DNA, 26 bp, Homo sapiens
ttttgatgtacatgtaccatacactg

SEQ ID NO: 5995 - DNA, 26 bp, Homo sapiens
tttgatgtacatgtaccatacactga

SEQ ID NO: 5996 - DNA, 26 bp, Homo sapiens
ttgatgtacatgtaccatacactgat

SEQ ID NO: 5997 - DNA, 26 bp, Homo sapiens
tgatgtacatgtaccatacactgata

SEQ ID NO: 5998 - DNA, 26 bp, Homo sapiens
gatgtacatgtaccatacactgatat

SEQ ID NO: 5999 - DNA, 26 bp, Homo sapiens
atgtacatgtaccatacactgatatg

SEQ ID NO: 6000 - DNA, 26 bp, Homo sapiens
tgtacatgtaccatacactgatatgc

SEQ ID NO: 6001 - DNA, 26 bp, Homo sapiens
gtacatgtaccatacactgatatgca

SEQ ID NO: 6002 - DNA, 26 bp, Homo sapiens
tacatgtaccatacactgatatgcaa

SEQ ID NO: 6003 - DNA, 26 bp, Homo sapiens
acatgtaccatacactgatatgcaat

SEQ ID NO: 6004 - DNA, 26 bp, Homo sapiens
catgtaccatacactgatatgcaatc

SEQ ID NO: 6005 - DNA, 26 bp, Homo sapiens
atgtaccatacactgatatgcaatct

SEQ ID NO: 6006 - DNA, 26 bp, Homo sapiens
tgtaccatacactgatatgcaatcta

SEQ ID NO: 6007 - DNA, 26 bp, Homo sapiens
gtaccatacactgatatgcaatctac

SEQ ID NO: 6008 - DNA, 26 bp, Homo sapiens
taccatacactgatatgcaatctaca

SEQ ID NO: 6009 - DNA, 26 bp, Homo sapiens
accatacactgatatgcaatctacac

SEQ ID NO: 6010 - DNA, 26 bp, Homo sapiens
ccatacactgatatgcaatctacaca

SEQ ID NO: 6011 - DNA, 26 bp, Homo sapiens
catacactgatatgcaatctacacac

SEQ ID NO: 6012 - DNA, 26 bp, Homo sapiens
atacactgatatgcaatctacacact

SEQ ID NO: 6013 - DNA, 26 bp, Homo sapiens
tacactgatatgcaatctacacactg

SEQ ID NO: 6014 - DNA, 26 bp, Homo sapiens
acactgatatgcaatctacacactga

SEQ ID NO: 6015 - DNA, 26 bp, Homo sapiens
cactgatatgcaatctacacactgat

SEQ ID NO: 6016 - DNA, 26 bp, Homo sapiens
actgatatgcaatctacacactgatg

SEQ ID NO: 6017 - DNA, 26 bp, Homo sapiens
ctgatatgcaatctacacactgatgc

SEQ ID NO: 6018 - DNA, 26 bp, Homo sapiens
tgatatgcaatctacacactgatgca

SEQ ID NO: 6019 - DNA, 26 bp, Homo sapiens
gatatgcaatctacacactgatgcat

SEQ ID NO: 6020 - DNA, 26 bp, Homo sapiens
atatgcaatctacacactgatgcatt

SEQ ID NO: 6021 - DNA, 26 bp, Homo sapiens
tatgcaatctacacactgatgcattt

SEQ ID NO: 6022 - DNA, 26 bp, Homo sapiens
atgcaatctacacactgatgcattta

SEQ ID NO: 6023 - DNA, 26 bp, Homo sapiens
tgcaatctacacactgatgcatttac

SEQ ID NO: 6024 - DNA, 26 bp, Homo sapiens
gcaatctacacactgatgcatttaca

SEQ ID NO: 6025 - DNA, 26 bp, Homo sapiens
caatctacacactgatgcatttacat

SEQ ID NO: 6026 - DNA, 26 bp, Homo sapiens
aatctacacactgatgcatttacata

SEQ ID NO: 6027 - DNA, 26 bp, Homo sapiens
atctacacactgatgcatttacatac

SEQ ID NO: 6028 - DNA, 26 bp, Homo sapiens
tctacacactgatgcatttacataca

SEQ ID NO: 6029 - DNA, 26 bp, Homo sapiens
ctacacactgatgcatttacatacat

SEQ ID NO: 6030 - DNA, 26 bp, Homo sapiens
tacacactgatgcatttacatacata

SEQ ID NO: 6031 - DNA, 26 bp, Homo sapiens
acacactgatgcatttacatacatac

SEQ ID NO: 6032 - DNA, 26 bp, Homo sapiens
cacactgatgcatttacatacataca

SEQ ID NO: 6033 - DNA, 26 bp, Homo sapiens
acactgatgcatttacatacatacaa

SEQ ID NO: 6034 - DNA, 26 bp, Homo sapiens
cactgatgcatttacatacatacaac

SEQ ID NO: 6035 - DNA, 26 bp, Homo sapiens
actgatgcatttacatacatacaact

SEQ ID NO: 6036 - DNA, 26 bp, Homo sapiens
ctgatgcatttacatacatacaacta

SEQ ID NO: 6037 - DNA, 26 bp, Homo sapiens
tgatgcatttacatacatacaactat

SEQ ID NO: 6038 - DNA, 26 bp, Homo sapiens
gatgcatttacatacatacaactata

SEQ ID NO: 6039 - DNA, 26 bp, Homo sapiens
atgcatttacatacatacaactataa

SEQ ID NO: 6040 - DNA, 26 bp, Homo sapiens
tgcatttacatacatacaactataaa

SEQ ID NO: 6041 - DNA, 26 bp, Homo sapiens
gcatttacatacatacaactataaat

SEQ ID NO: 6042 - DNA, 26 bp, Homo sapiens
catttacatacatacaactataaata

SEQ ID NO: 6043 - DNA, 26 bp, Homo sapiens
atttacatacatacaactataaatac

SEQ ID NO: 6044 - DNA, 26 bp, Homo sapiens
tttacatacatacaactataaatacc

SEQ ID NO: 6045 - DNA, 26 bp, Homo sapiens
ttacatacatacaactataaataccc

SEQ ID NO: 6046 - DNA, 26 bp, Homo sapiens
tacatacatacaactataaataccca

SEQ ID NO: 6047 - DNA, 26 bp, Homo sapiens
acatacatacaactataaatacccac

SEQ ID NO: 6048 - DNA, 26 bp, Homo sapiens
catacatacaactataaatacccaca

SEQ ID NO: 6049 - DNA, 26 bp, Homo sapiens
atacatacaactataaatacccacaa

SEQ ID NO: 6050 - DNA, 26 bp, Homo sapiens
tacatacaactataaatacccacaaa

SEQ ID NO: 6051 - DNA, 26 bp, Homo sapiens
acatacaactataaatacccacaaat

SEQ ID NO: 6052 - DNA, 26 bp, Homo sapiens
catacaactataaatacccacaaata

SEQ ID NO: 6053 - DNA, 26 bp, Homo sapiens
atacaactataaatacccacaaatac

SEQ ID NO: 6054 - DNA, 26 bp, Homo sapiens
tacaactataaatacccacaaataca

SEQ ID NO: 6055 - DNA, 26 bp, Homo sapiens
acaactataaatacccacaaatacaa

SEQ ID NO: 6056 - DNA, 26 bp, Homo sapiens
caactataaatacccacaaatacaac

SEQ ID NO: 6057 - DNA, 26 bp, Homo sapiens
aactataaatacccacaaatacaaca

SEQ ID NO: 6058 - DNA, 26 bp, Homo sapiens
actataaatacccacaaatacaacaa

SEQ ID NO: 6059 - DNA, 26 bp, Homo sapiens
ctataaatacccacaaatacaacaat

SEQ ID NO: 6060 - DNA, 26 bp, Homo sapiens
tataaatacccacaaatacaacaatg

SEQ ID NO: 6061 - DNA, 26 bp, Homo sapiens
ataaatacccacaaatacaacaatgg

SEQ ID NO: 6062 - DNA, 26 bp, Homo sapiens
taaatacccacaaatacaacaatggc

SEQ ID NO: 6063 - DNA, 26 bp, Homo sapiens
aaatacccacaaatacaacaatggca

SEQ ID NO: 6064 - DNA, 26 bp, Homo sapiens
aatacccacaaatacaacaatggcag

SEQ ID NO: 6065 - DNA, 26 bp, Homo sapiens
atacccacaaatacaacaatggcagg

SEQ ID NO: 6066 - DNA, 26 bp, Homo sapiens
tacccacaaatacaacaatggcaggt

SEQ ID NO: 6067 - DNA, 26 bp, Homo sapiens
acccacaaatacaacaatggcaggtg

SEQ ID NO: 6068 - DNA, 26 bp, Homo sapiens
cccacaaatacaacaatggcaggtga

SEQ ID NO: 6069 - DNA, 26 bp, Homo sapiens
ccacaaatacaacaatggcaggtgac

SEQ ID NO: 6070 - DNA, 26 bp, Homo sapiens
cacaaatacaacaatggcaggtgaca

SEQ ID NO: 6071 - DNA, 26 bp, Homo sapiens
acaaatacaacaatggcaggtgacag

SEQ ID NO: 6072 - DNA, 26 bp, Homo sapiens
caaatacaacaatggcaggtgacagc

SEQ ID NO: 6073 - DNA, 26 bp, Homo sapiens
aaatacaacaatggcaggtgacagca

SEQ ID NO: 6074 - DNA, 26 bp, Homo sapiens
aatacaacaatggcaggtgacagcat

SEQ ID NO: 6075 - DNA, 26 bp, Homo sapiens
atacaacaatggcaggtgacagcatt

SEQ ID NO: 6076 - DNA, 26 bp, Homo sapiens
tacaacaatggcaggtgacagcattt

SEQ ID NO: 6077 - DNA, 26 bp, Homo sapiens
acaacaatggcaggtgacagcatttt

SEQ ID NO: 6078 - DNA, 26 bp, Homo sapiens
caacaatggcaggtgacagcattttc

SEQ ID NO: 6079 - DNA, 26 bp, Homo sapiens
aacaatggcaggtgacagcattttct

SEQ ID NO: 6080 - DNA, 26 bp, Homo sapiens
acaatggcaggtgacagcattttctt

SEQ ID NO: 6081 - DNA, 26 bp, Homo sapiens
caatggcaggtgacagcattttcttt

SEQ ID NO: 6082 - DNA, 26 bp, Homo sapiens
aatggcaggtgacagcattttctttg

SEQ ID NO: 6083 - DNA, 26 bp, Homo sapiens
atggcaggtgacagcattttctttga

SEQ ID NO: 6084 - DNA, 26 bp, Homo sapiens
tggcaggtgacagcattttctttgat

SEQ ID NO: 6085 - DNA, 26 bp, Homo sapiens
ggcaggtgacagcattttctttgatg

SEQ ID NO: 6086 - DNA, 26 bp, Homo sapiens
gcaggtgacagcattttctttgatga

SEQ ID NO: 6087 - DNA, 26 bp, Homo sapiens
caggtgacagcattttctttgatgac

SEQ ID NO: 6088 - DNA, 26 bp, Homo sapiens
aggtgacagcattttctttgatgact

SEQ ID NO: 6089 - DNA, 26 bp, Homo sapiens
ggtgacagcattttctttgatgactg

SEQ ID NO: 6090 - DNA, 26 bp, Homo sapiens
gtgacagcattttctttgatgactga

SEQ ID NO: 6091 - DNA, 26 bp, Homo sapiens
tgacagcattttctttgatgactgac

SEQ ID NO: 6092 - DNA, 26 bp, Homo sapiens
gacagcattttctttgatgactgaca

SEQ ID NO: 6093 - DNA, 26 bp, Homo sapiens
acagcattttctttgatgactgacat

SEQ ID NO: 6094 - DNA, 26 bp, Homo sapiens
cagcattttctttgatgactgacata

SEQ ID NO: 6095 - DNA, 26 bp, Homo sapiens
agcattttctttgatgactgacatac

SEQ ID NO: 6096 - DNA, 26 bp, Homo sapiens
gcattttctttgatgactgacatact

SEQ ID NO: 6097 - DNA, 26 bp, Homo sapiens
cattttctttgatgactgacatactg

SEQ ID NO: 6098 - DNA, 26 bp, Homo sapiens
attttctttgatgactgacatactgc

SEQ ID NO: 6099 - DNA, 26 bp, Homo sapiens
ttttctttgatgactgacatactgcc

SEQ ID NO: 6100 - DNA, 26 bp, Homo sapiens
tttctttgatgactgacatactgcct

SEQ ID NO: 6101 - DNA, 26 bp, Homo sapiens
ttctttgatgactgacatactgcctg

SEQ ID NO: 6102 - DNA, 26 bp, Homo sapiens
tctttgatgactgacatactgcctgt

SEQ ID NO: 6103 - DNA, 26 bp, Homo sapiens
ctttgatgactgacatactgcctgta

SEQ ID NO: 6104 - DNA, 26 bp, Homo sapiens
tttgatgactgacatactgcctgtaa

SEQ ID NO: 6105 - DNA, 26 bp, Homo sapiens
ttgatgactgacatactgcctgtaag

SEQ ID NO: 6106 - DNA, 26 bp, Homo sapiens
tgatgactgacatactgcctgtaaga

SEQ ID NO: 6107 - DNA, 26 bp, Homo sapiens
gatgactgacatactgcctgtaagaa

SEQ ID NO: 6108 - DNA, 26 bp, Homo sapiens
atgactgacatactgcctgtaagaat

SEQ ID NO: 6109 - DNA, 26 bp, Homo sapiens
tgactgacatactgcctgtaagaata

SEQ ID NO: 6110 - DNA, 26 bp, Homo sapiens
gactgacatactgcctgtaagaatag

SEQ ID NO: 6111 - DNA, 26 bp, Homo sapiens
actgacatactgcctgtaagaatagt

SEQ ID NO: 6112 - DNA, 26 bp, Homo sapiens
ctgacatactgcctgtaagaatagtc

SEQ ID NO: 6113 - DNA, 26 bp, Homo sapiens
tgacatactgcctgtaagaatagtct

SEQ ID NO: 6114 - DNA, 26 bp, Homo sapiens
gacatactgcctgtaagaatagtctc

SEQ ID NO: 6115 - DNA, 26 bp, Homo sapiens
acatactgcctgtaagaatagtctcc

SEQ ID NO: 6116 - DNA, 26 bp, Homo sapiens
catactgcctgtaagaatagtctcca

SEQ ID NO: 6117 - DNA, 26 bp, Homo sapiens
atactgcctgtaagaatagtctccaa

SEQ ID NO: 6118 - DNA, 26 bp, Homo sapiens
tactgcctgtaagaatagtctccaaa

SEQ ID NO: 6119 - DNA, 26 bp, Homo sapiens
actgcctgtaagaatagtctccaaaa

SEQ ID NO: 6120 - DNA, 26 bp, Homo sapiens
ctgcctgtaagaatagtctccaaaag

SEQ ID NO: 6121 - DNA, 26 bp, Homo sapiens
tgcctgtaagaatagtctccaaaagc

SEQ ID NO: 6122 - DNA, 26 bp, Homo sapiens
gcctgtaagaatagtctccaaaagcc

SEQ ID NO: 6123 - DNA, 26 bp, Homo sapiens
cctgtaagaatagtctccaaaagcct

SEQ ID NO: 6124 - DNA, 26 bp, Homo sapiens
ctgtaagaatagtctccaaaagcctg

SEQ ID NO: 6125 - DNA, 26 bp, Homo sapiens
tgtaagaatagtctccaaaagcctgc

SEQ ID NO: 6126 - DNA, 26 bp, Homo sapiens
gtaagaatagtctccaaaagcctgca

SEQ ID NO: 6127 - DNA, 26 bp, Homo sapiens
taagaatagtctccaaaagcctgcaa

SEQ ID NO: 6128 - DNA, 26 bp, Homo sapiens
aagaatagtctccaaaagcctgcaat

SEQ ID NO: 6129 - DNA, 26 bp, Homo sapiens
agaatagtctccaaaagcctgcaata

SEQ ID NO: 6130 - DNA, 26 bp, Homo sapiens
gaatagtctccaaaagcctgcaatac

SEQ ID NO: 6131 - DNA, 26 bp, Homo sapiens
aatagtctccaaaagcctgcaatact

SEQ ID NO: 6132 - DNA, 26 bp, Homo sapiens
atagtctccaaaagcctgcaatacta

SEQ ID NO: 6133 - DNA, 26 bp, Homo sapiens
tagtctccaaaagcctgcaatactac

SEQ ID NO: 6134 - DNA, 26 bp, Homo sapiens
agtctccaaaagcctgcaatactaca

SEQ ID NO: 6135 - DNA, 26 bp, Homo sapiens
gtctccaaaagcctgcaatactacag

SEQ ID NO: 6136 - DNA, 26 bp, Homo sapiens
tctccaaaagcctgcaatactacaga

SEQ ID NO: 6137 - DNA, 26 bp, Homo sapiens
ctccaaaagcctgcaatactacagat

SEQ ID NO: 6138 - DNA, 26 bp, Homo sapiens
tccaaaagcctgcaatactacagata

SEQ ID NO: 6139 - DNA, 26 bp, Homo sapiens
ccaaaagcctgcaatactacagatac

SEQ ID NO: 6140 - DNA, 26 bp, Homo sapiens
caaaagcctgcaatactacagataca

SEQ ID NO: 6141 - DNA, 26 bp, Homo sapiens
aaaagcctgcaatactacagatacac

SEQ ID NO: 6142 - DNA, 26 bp, Homo sapiens
aaagcctgcaatactacagatacaca

SEQ ID NO: 6143 - DNA, 26 bp, Homo sapiens
aagcctgcaatactacagatacacac

SEQ ID NO: 6144 - DNA, 26 bp, Homo sapiens
agcctgcaatactacagatacacaca

SEQ ID NO: 6145 - DNA, 26 bp, Homo sapiens
gcctgcaatactacagatacacacac

SEQ ID NO: 6146 - DNA, 26 bp, Homo sapiens
cctgcaatactacagatacacacaca

SEQ ID NO: 6147 - DNA, 26 bp, Homo sapiens
ctgcaatactacagatacacacacaa

SEQ ID NO: 6148 - DNA, 26 bp, Homo sapiens
tgcaatactacagatacacacacaaa

SEQ ID NO: 6149 - DNA, 26 bp, Homo sapiens
gcaatactacagatacacacacaaat

SEQ ID NO: 6150 - DNA, 26 bp, Homo sapiens
caatactacagatacacacacaaatt

SEQ ID NO: 6151 - DNA, 26 bp, Homo sapiens
aatactacagatacacacacaaatta

SEQ ID NO: 6152 - DNA, 26 bp, Homo sapiens
atactacagatacacacacaaattac

SEQ ID NO: 6153 - DNA, 26 bp, Homo sapiens
tactacagatacacacacaaattaca

SEQ ID NO: 6154 - DNA, 26 bp, Homo sapiens
actacagatacacacacaaattacaa

SEQ ID NO: 6155 - DNA, 26 bp, Homo sapiens
ctacagatacacacacaaattacaaa

SEQ ID NO: 6156 - DNA, 26 bp, Homo sapiens
tacagatacacacacaaattacaaag

SEQ ID NO: 6157 - DNA, 26 bp, Homo sapiens
acagatacacacacaaattacaaagg

SEQ ID NO: 6158 - DNA, 26 bp, Homo sapiens
cagatacacacacaaattacaaagga

SEQ ID NO: 6159 - DNA, 26 bp, Homo sapiens
agatacacacacaaattacaaaggat

SEQ ID NO: 6160 - DNA, 26 bp, Homo sapiens
gatacacacacaaattacaaaggatg

SEQ ID NO: 6161 - DNA, 26 bp, Homo sapiens
atacacacacaaattacaaaggatga

SEQ ID NO: 6162 - DNA, 26 bp, Homo sapiens
tacacacacaaattacaaaggatgaa

SEQ ID NO: 6163 - DNA, 26 bp, Homo sapiens
acacacacaaattacaaaggatgaac

SEQ ID NO: 6164 - DNA, 26 bp, Homo sapiens
cacacacaaattacaaaggatgaacc

SEQ ID NO: 6165 - DNA, 26 bp, Homo sapiens
acacacaaattacaaaggatgaaccg

SEQ ID NO: 6166 - DNA, 26 bp, Homo sapiens
cacacaaattacaaaggatgaaccga

SEQ ID NO: 6167 - DNA, 26 bp, Homo sapiens
acacaaattacaaaggatgaaccgaa

SEQ ID NO: 6168 - DNA, 26 bp, Homo sapiens
cacaaattacaaaggatgaaccgaag

SEQ ID NO: 6169 - DNA, 26 bp, Homo sapiens
acaaattacaaaggatgaaccgaaga

SEQ ID NO: 6170 - DNA, 26 bp, Homo sapiens
caaattacaaaggatgaaccgaagag

SEQ ID NO: 6171 - DNA, 26 bp, Homo sapiens
aaattacaaaggatgaaccgaagaga

SEQ ID NO: 6172 - DNA, 26 bp, Homo sapiens
aattacaaaggatgaaccgaagagac

SEQ ID NO: 6173 - DNA, 26 bp, Homo sapiens
attacaaaggatgaaccgaagagact

SEQ ID NO: 6174 - DNA, 26 bp, Homo sapiens
ttacaaaggatgaaccgaagagactt

SEQ ID NO: 6175 - DNA, 26 bp, Homo sapiens
tacaaaggatgaaccgaagagactta

SEQ ID NO: 6176 - DNA, 26 bp, Homo sapiens
acaaaggatgaaccgaagagacttaa

SEQ ID NO: 6177 - DNA, 26 bp, Homo sapiens
caaaggatgaaccgaagagacttaag

SEQ ID NO: 6178 - DNA, 26 bp, Homo sapiens
aaaggatgaaccgaagagacttaaga

SEQ ID NO: 6179 - DNA, 26 bp, Homo sapiens
aaggatgaaccgaagagacttaagaa

SEQ ID NO: 6180 - DNA, 26 bp, Homo sapiens
aggatgaaccgaagagacttaagaaa

SEQ ID NO: 6181 - DNA, 26 bp, Homo sapiens
ggatgaaccgaagagacttaagaaaa

SEQ ID NO: 6182 - DNA, 26 bp, Homo sapiens
gatgaaccgaagagacttaagaaaac

SEQ ID NO: 6183 - DNA, 26 bp, Homo sapiens
atgaaccgaagagacttaagaaaacc

SEQ ID NO: 6184 - DNA, 26 bp, Homo sapiens
tgaaccgaagagacttaagaaaacct

SEQ ID NO: 6185 - DNA, 26 bp, Homo sapiens
gaaccgaagagacttaagaaaaccta

SEQ ID NO: 6186 - DNA, 26 bp, Homo sapiens
aaccgaagagacttaagaaaacctac

SEQ ID NO: 6187 - DNA, 26 bp, Homo sapiens
accgaagagacttaagaaaacctact

SEQ ID NO: 6188 - DNA, 26 bp, Homo sapiens
ccgaagagacttaagaaaacctactg

SEQ ID NO: 6189 - DNA, 26 bp, Homo sapiens
cgaagagacttaagaaaacctactgt

SEQ ID NO: 6190 - DNA, 26 bp, Homo sapiens
gaagagacttaagaaaacctactgta

SEQ ID NO: 6191 - DNA, 26 bp, Homo sapiens
aagagacttaagaaaacctactgtat

SEQ ID NO: 6192 - DNA, 26 bp, Homo sapiens
agagacttaagaaaacctactgtata

SEQ ID NO: 6193 - DNA, 26 bp, Homo sapiens
gagacttaagaaaacctactgtatat

SEQ ID NO: 6194 - DNA, 26 bp, Homo sapiens
agacttaagaaaacctactgtatata

SEQ ID NO: 6195 - DNA, 26 bp, Homo sapiens
gacttaagaaaacctactgtatatac

SEQ ID NO: 6196 - DNA, 26 bp, Homo sapiens
acttaagaaaacctactgtatataca

SEQ ID NO: 6197 - DNA, 26 bp, Homo sapiens
cttaagaaaacctactgtatatacaa

SEQ ID NO: 6198 - DNA, 26 bp, Homo sapiens
ttaagaaaacctactgtatatacaat

SEQ ID NO: 6199 - DNA, 26 bp, Homo sapiens
taagaaaacctactgtatatacaatt

SEQ ID NO: 6200 - DNA, 26 bp, Homo sapiens
aagaaaacctactgtatatacaatta

SEQ ID NO: 6201 - DNA, 26 bp, Homo sapiens
agaaaacctactgtatatacaattat

SEQ ID NO: 6202 - DNA, 26 bp, Homo sapiens
gaaaacctactgtatatacaattatg

SEQ ID NO: 6203 - DNA, 26 bp, Homo sapiens
aaaacctactgtatatacaattatgt

SEQ ID NO: 6204 - DNA, 26 bp, Homo sapiens
aaacctactgtatatacaattatgta

SEQ ID NO: 6205 - DNA, 26 bp, Homo sapiens
aacctactgtatatacaattatgtaa

SEQ ID NO: 6206 - DNA, 26 bp, Homo sapiens
acctactgtatatacaattatgtaac

SEQ ID NO: 6207 - DNA, 26 bp, Homo sapiens
cctactgtatatacaattatgtaact

SEQ ID NO: 6208 - DNA, 26 bp, Homo sapiens
ctactgtatatacaattatgtaactt

SEQ ID NO: 6209 - DNA, 26 bp, Homo sapiens
tactgtatatacaattatgtaacttg

SEQ ID NO: 6210 - DNA, 26 bp, Homo sapiens
actgtatatacaattatgtaacttgc

SEQ ID NO: 6211 - DNA, 26 bp, Homo sapiens
ctgtatatacaattatgtaacttgca

SEQ ID NO: 6212 - DNA, 26 bp, Homo sapiens
tgtatatacaattatgtaacttgcaa

SEQ ID NO: 6213 - DNA, 26 bp, Homo sapiens
gtatatacaattatgtaacttgcaaa

SEQ ID NO: 6214 - DNA, 26 bp, Homo sapiens
tatatacaattatgtaacttgcaaaa

SEQ ID NO: 6215 - DNA, 26 bp, Homo sapiens
atatacaattatgtaacttgcaaaat

SEQ ID NO: 6216 - DNA, 26 bp, Homo sapiens
tatacaattatgtaacttgcaaaatt

SEQ ID NO: 6217 - DNA, 26 bp, Homo sapiens
atacaattatgtaacttgcaaaattt

SEQ ID NO: 6218 - DNA, 26 bp, Homo sapiens
tacaattatgtaacttgcaaaatttt

SEQ ID NO: 6219 - DNA, 26 bp, Homo sapiens
acaattatgtaacttgcaaaattttc

SEQ ID NO: 6220 - DNA, 26 bp, Homo sapiens
caattatgtaacttgcaaaattttcc

SEQ ID NO: 6221 - DNA, 26 bp, Homo sapiens
aattatgtaacttgcaaaattttcct

SEQ ID NO: 6222 - DNA, 26 bp, Homo sapiens
attatgtaacttgcaaaattttcctg

SEQ ID NO: 6223 - DNA, 26 bp, Homo sapiens
ttatgtaacttgcaaaattttcctgc

SEQ ID NO: 6224 - DNA, 26 bp, Homo sapiens
tatgtaacttgcaaaattttcctgct

SEQ ID NO: 6225 - DNA, 26 bp, Homo sapiens
atgtaacttgcaaaattttcctgctg

SEQ ID NO: 6226 - DNA, 26 bp, Homo sapiens
tgtaacttgcaaaattttcctgctgt

SEQ ID NO: 6227 - DNA, 26 bp, Homo sapiens
gtaacttgcaaaattttcctgctgtt

SEQ ID NO: 6228 - DNA, 26 bp, Homo sapiens
taacttgcaaaattttcctgctgttg

SEQ ID NO: 6229 - DNA, 26 bp, Homo sapiens
aacttgcaaaattttcctgctgttgc

SEQ ID NO: 6230 - DNA, 26 bp, Homo sapiens
acttgcaaaattttcctgctgttgca

SEQ ID NO: 6231 - DNA, 26 bp, Homo sapiens
cttgcaaaattttcctgctgttgcat

SEQ ID NO: 6232 - DNA, 26 bp, Homo sapiens
ttgcaaaattttcctgctgttgcatt

SEQ ID NO: 6233 - DNA, 26 bp, Homo sapiens
tgcaaaattttcctgctgttgcattc

SEQ ID NO: 6234 - DNA, 26 bp, Homo sapiens
gcaaaattttcctgctgttgcattca

SEQ ID NO: 6235 - DNA, 26 bp, Homo sapiens
caaaattttcctgctgttgcattcaa

SEQ ID NO: 6236 - DNA, 26 bp, Homo sapiens
aaaattttcctgctgttgcattcaag

SEQ ID NO: 6237 - DNA, 26 bp, Homo sapiens
aaattttcctgctgttgcattcaagt

SEQ ID NO: 6238 - DNA, 26 bp, Homo sapiens
aattttcctgctgttgcattcaagtc

SEQ ID NO: 6239 - DNA, 26 bp, Homo sapiens
attttcctgctgttgcattcaagtca

SEQ ID NO: 6240 - DNA, 26 bp, Homo sapiens
ttttcctgctgttgcattcaagtcaa

SEQ ID NO: 6241 - DNA, 26 bp, Homo sapiens
tttcctgctgttgcattcaagtcaaa

SEQ ID NO: 6242 - DNA, 26 bp, Homo sapiens
ttcctgctgttgcattcaagtcaaac

SEQ ID NO: 6243 - DNA, 26 bp, Homo sapiens
tcctgctgttgcattcaagtcaaact

SEQ ID NO: 6244 - DNA, 26 bp, Homo sapiens
cctgctgttgcattcaagtcaaactg

SEQ ID NO: 6245 - DNA, 26 bp, Homo sapiens
ctgctgttgcattcaagtcaaactgt

SEQ ID NO: 6246 - DNA, 26 bp, Homo sapiens
tgctgttgcattcaagtcaaactgtc

SEQ ID NO: 6247 - DNA, 26 bp, Homo sapiens
gctgttgcattcaagtcaaactgtca

SEQ ID NO: 6248 - DNA, 26 bp, Homo sapiens
ctgttgcattcaagtcaaactgtcat

SEQ ID NO: 6249 - DNA, 26 bp, Homo sapiens
tgttgcattcaagtcaaactgtcatg

SEQ ID NO: 6250 - DNA, 26 bp, Homo sapiens
gttgcattcaagtcaaactgtcatgc

SEQ ID NO: 6251 - DNA, 26 bp, Homo sapiens
ttgcattcaagtcaaactgtcatgca

SEQ ID NO: 6252 - DNA, 26 bp, Homo sapiens
tgcattcaagtcaaactgtcatgcag

SEQ ID NO: 6253 - DNA, 26 bp, Homo sapiens
gcattcaagtcaaactgtcatgcaga

SEQ ID NO: 6254 - DNA, 26 bp, Homo sapiens
cattcaagtcaaactgtcatgcagat

SEQ ID NO: 6255 - DNA, 26 bp, Homo sapiens
attcaagtcaaactgtcatgcagatt

SEQ ID NO: 6256 - DNA, 26 bp, Homo sapiens
ttcaagtcaaactgtcatgcagattc

SEQ ID NO: 6257 - DNA, 26 bp, Homo sapiens
tcaagtcaaactgtcatgcagattca

SEQ ID NO: 6258 - DNA, 26 bp, Homo sapiens
caagtcaaactgtcatgcagattcaa

SEQ ID NO: 6259 - DNA, 26 bp, Homo sapiens
aagtcaaactgtcatgcagattcaag

SEQ ID NO: 6260 - DNA, 26 bp, Homo sapiens
agtcaaactgtcatgcagattcaagt

SEQ ID NO: 6261 - DNA, 26 bp, Homo sapiens
gtcaaactgtcatgcagattcaagta

SEQ ID NO: 6262 - DNA, 26 bp, Homo sapiens
tcaaactgtcatgcagattcaagtat

SEQ ID NO: 6263 - DNA, 26 bp, Homo sapiens
caaactgtcatgcagattcaagtatt

SEQ ID NO: 6264 - DNA, 26 bp, Homo sapiens
aaactgtcatgcagattcaagtattt

SEQ ID NO: 6265 - DNA, 26 bp, Homo sapiens
aactgtcatgcagattcaagtattta

SEQ ID NO: 6266 - DNA, 26 bp, Homo sapiens
actgtcatgcagattcaagtatttaa

SEQ ID NO: 6267 - DNA, 26 bp, Homo sapiens
ctgtcatgcagattcaagtatttaat

SEQ ID NO: 6268 - DNA, 26 bp, Homo sapiens
tgtcatgcagattcaagtatttaatg

SEQ ID NO: 6269 - DNA, 26 bp, Homo sapiens
gtcatgcagattcaagtatttaatga

SEQ ID NO: 6270 - DNA, 26 bp, Homo sapiens
tcatgcagattcaagtatttaatgac

SEQ ID NO: 6271 - DNA, 26 bp, Homo sapiens
catgcagattcaagtatttaatgaca

SEQ ID NO: 6272 - DNA, 26 bp, Homo sapiens
atgcagattcaagtatttaatgacat

SEQ ID NO: 6273 - DNA, 26 bp, Homo sapiens
tgcagattcaagtatttaatgacatt

SEQ ID NO: 6274 - DNA, 26 bp, Homo sapiens
gcagattcaagtatttaatgacattc

SEQ ID NO: 6275 - DNA, 26 bp, Homo sapiens
cagattcaagtatttaatgacattct

SEQ ID NO: 6276 - DNA, 26 bp, Homo sapiens
agattcaagtatttaatgacattctc

SEQ ID NO: 6277 - DNA, 26 bp, Homo sapiens
gattcaagtatttaatgacattctct

SEQ ID NO: 6278 - DNA, 26 bp, Homo sapiens
attcaagtatttaatgacattctctc

SEQ ID NO: 6279 - DNA, 26 bp, Homo sapiens
ttcaagtatttaatgacattctctct

SEQ ID NO: 6280 - DNA, 26 bp, Homo sapiens
tcaagtatttaatgacattctctcta

SEQ ID NO: 6281 - DNA, 26 bp, Homo sapiens
caagtatttaatgacattctctctat

SEQ ID NO: 6282 - DNA, 26 bp, Homo sapiens
aagtatttaatgacattctctctatg

SEQ ID NO: 6283 - DNA, 26 bp, Homo sapiens
agtatttaatgacattctctctatga

SEQ ID NO: 6284 - DNA, 26 bp, Homo sapiens
gtatttaatgacattctctctatgaa

SEQ ID NO: 6285 - DNA, 26 bp, Homo sapiens
tatttaatgacattctctctatgaag

SEQ ID NO: 6286 - DNA, 26 bp, Homo sapiens
atttaatgacattctctctatgaaga

SEQ ID NO: 6287 - DNA, 26 bp, Homo sapiens
tttaatgacattctctctatgaagac

SEQ ID NO: 6288 - DNA, 26 bp, Homo sapiens
ttaatgacattctctctatgaagaca

SEQ ID NO: 6289 - DNA, 26 bp, Homo sapiens
taatgacattctctctatgaagacat

SEQ ID NO: 6290 - DNA, 26 bp, Homo sapiens
aatgacattctctctatgaagacatt

SEQ ID NO: 6291 - DNA, 26 bp, Homo sapiens
atgacattctctctatgaagacattc

SEQ ID NO: 6292 - DNA, 26 bp, Homo sapiens
tgacattctctctatgaagacattct

SEQ ID NO: 6293 - DNA, 26 bp, Homo sapiens
gacattctctctatgaagacattctc

SEQ ID NO: 6294 - DNA, 26 bp, Homo sapiens
acattctctctatgaagacattctct

SEQ ID NO: 6295 - DNA, 26 bp, Homo sapiens
cattctctctatgaagacattctctc

SEQ ID NO: 6296 - DNA, 26 bp, Homo sapiens
attctctctatgaagacattctctct

SEQ ID NO: 6297 - DNA, 26 bp, Homo sapiens
ttctctctatgaagacattctctctg

SEQ ID NO: 6298 - DNA, 26 bp, Homo sapiens
tctctctatgaagacattctctctgc

SEQ ID NO: 6299 - DNA, 26 bp, Homo sapiens
ctctctatgaagacattctctctgca

SEQ ID NO: 6300 - DNA, 26 bp, Homo sapiens
tctctatgaagacattctctctgcat

SEQ ID NO: 6301 - DNA, 26 bp, Homo sapiens
ctctatgaagacattctctctgcatg

SEQ ID NO: 6302 - DNA, 26 bp, Homo sapiens
tctatgaagacattctctctgcatgc

SEQ ID NO: 6303 - DNA, 26 bp, Homo sapiens
ctatgaagacattctctctgcatgca

SEQ ID NO: 6304 - DNA, 26 bp, Homo sapiens
tatgaagacattctctctgcatgcaa

SEQ ID NO: 6305 - DNA, 26 bp, Homo sapiens
atgaagacattctctctgcatgcaat

SEQ ID NO: 6306 - DNA, 26 bp, Homo sapiens
tgaagacattctctctgcatgcaatg

SEQ ID NO: 6307 - DNA, 26 bp, Homo sapiens
gaagacattctctctgcatgcaatgg

SEQ ID NO: 6308 - DNA, 26 bp, Homo sapiens
aagacattctctctgcatgcaatggg

SEQ ID NO: 6309 - DNA, 26 bp, Homo sapiens
agacattctctctgcatgcaatgggc

SEQ ID NO: 6310 - DNA, 26 bp, Homo sapiens
gacattctctctgcatgcaatgggcc

SEQ ID NO: 6311 - DNA, 26 bp, Homo sapiens
acattctctctgcatgcaatgggcca

SEQ ID NO: 6312 - DNA, 26 bp, Homo sapiens
cattctctctgcatgcaatgggccaa

SEQ ID NO: 6313 - DNA, 26 bp, Homo sapiens
attctctctgcatgcaatgggccaat

SEQ ID NO: 6314 - DNA, 26 bp, Homo sapiens
ttctctctgcatgcaatgggccaatt

SEQ ID NO: 6315 - DNA, 26 bp, Homo sapiens
tctctctgcatgcaatgggccaatta

SEQ ID NO: 6316 - DNA, 26 bp, Homo sapiens
ctctctgcatgcaatgggccaattat

SEQ ID NO: 6317 - DNA, 26 bp, Homo sapiens
tctctgcatgcaatgggccaattatt

SEQ ID NO: 6318 - DNA, 26 bp, Homo sapiens
ctctgcatgcaatgggccaattattg

SEQ ID NO: 6319 - DNA, 26 bp, Homo sapiens
tctgcatgcaatgggccaattattgt

SEQ ID NO: 6320 - DNA, 26 bp, Homo sapiens
ctgcatgcaatgggccaattattgtc

SEQ ID NO: 6321 - DNA, 26 bp, Homo sapiens
tgcatgcaatgggccaattattgtca

SEQ ID NO: 6322 - DNA, 26 bp, Homo sapiens
gcatgcaatgggccaattattgtcat

SEQ ID NO: 6323 - DNA, 26 bp, Homo sapiens
catgcaatgggccaattattgtcata

SEQ ID NO: 6324 - DNA, 26 bp, Homo sapiens
atgcaatgggccaattattgtcataa

SEQ ID NO: 6325 - DNA, 26 bp, Homo sapiens
tgcaatgggccaattattgtcataag

SEQ ID NO: 6326 - DNA, 26 bp, Homo sapiens
gcaatgggccaattattgtcataagc

SEQ ID NO: 6327 - DNA, 26 bp, Homo sapiens
caatgggccaattattgtcataagca

SEQ ID NO: 6328 - DNA, 26 bp, Homo sapiens
aatgggccaattattgtcataagcag

SEQ ID NO: 6329 - DNA, 26 bp, Homo sapiens
atgggccaattattgtcataagcaga

SEQ ID NO: 6330 - DNA, 26 bp, Homo sapiens
tgggccaattattgtcataagcagaa

SEQ ID NO: 6331 - DNA, 26 bp, Homo sapiens
gggccaattattgtcataagcagaag

SEQ ID NO: 6332 - DNA, 26 bp, Homo sapiens
ggccaattattgtcataagcagaagg

SEQ ID NO: 6333 - DNA, 26 bp, Homo sapiens
gccaattattgtcataagcagaaggc

SEQ ID NO: 6334 - DNA, 26 bp, Homo sapiens
ccaattattgtcataagcagaaggct

SEQ ID NO: 6335 - DNA, 26 bp, Homo sapiens
caattattgtcataagcagaaggctg

SEQ ID NO: 6336 - DNA, 26 bp, Homo sapiens
aattattgtcataagcagaaggctgc

SEQ ID NO: 6337 - DNA, 26 bp, Homo sapiens
attattgtcataagcagaaggctgcc

SEQ ID NO: 6338 - DNA, 26 bp, Homo sapiens
ttattgtcataagcagaaggctgccc

SEQ ID NO: 6339 - DNA, 26 bp, Homo sapiens
tattgtcataagcagaaggctgccca

SEQ ID NO: 6340 - DNA, 26 bp, Homo sapiens
attgtcataagcagaaggctgcccac

SEQ ID NO: 6341 - DNA, 26 bp, Homo sapiens
ttgtcataagcagaaggctgcccacg

SEQ ID NO: 6342 - DNA, 26 bp, Homo sapiens
tgtcataagcagaaggctgcccacgt

SEQ ID NO: 6343 - DNA, 26 bp, Homo sapiens
gtcataagcagaaggctgcccacgtg

SEQ ID NO: 6344 - DNA, 26 bp, Homo sapiens
tcataagcagaaggctgcccacgtgg

SEQ ID NO: 6345 - DNA, 26 bp, Homo sapiens
cataagcagaaggctgcccacgtggg

SEQ ID NO: 6346 - DNA, 26 bp, Homo sapiens
ataagcagaaggctgcccacgtgggt

SEQ ID NO: 6347 - DNA, 26 bp, Homo sapiens
taagcagaaggctgcccacgtgggtt

SEQ ID NO: 6348 - DNA, 26 bp, Homo sapiens
aagcagaaggctgcccacgtgggttc

SEQ ID NO: 6349 - DNA, 26 bp, Homo sapiens
agcagaaggctgcccacgtgggttct

SEQ ID NO: 6350 - DNA, 26 bp, Homo sapiens
gcagaaggctgcccacgtgggttctg

SEQ ID NO: 6351 - DNA, 26 bp, Homo sapiens
cagaaggctgcccacgtgggttctgg

SEQ ID NO: 6352 - DNA, 26 bp, Homo sapiens
agaaggctgcccacgtgggttctgga

SEQ ID NO: 6353 - DNA, 26 bp, Homo sapiens
gaaggctgcccacgtgggttctggat

SEQ ID NO: 6354 - DNA, 26 bp, Homo sapiens
aaggctgcccacgtgggttctggata

SEQ ID NO: 6355 - DNA, 26 bp, Homo sapiens
aggctgcccacgtgggttctggatac

SEQ ID NO: 6356 - DNA, 26 bp, Homo sapiens
ggctgcccacgtgggttctggatact

SEQ ID NO: 6357 - DNA, 26 bp, Homo sapiens
gctgcccacgtgggttctggatactg

SEQ ID NO: 6358 - DNA, 26 bp, Homo sapiens
ctgcccacgtgggttctggatactgt

SEQ ID NO: 6359 - DNA, 26 bp, Homo sapiens
tgcccacgtgggttctggatactgta

SEQ ID NO: 6360 - DNA, 26 bp, Homo sapiens
gcccacgtgggttctggatactgtag

SEQ ID NO: 6361 - DNA, 26 bp, Homo sapiens
cccacgtgggttctggatactgtagg

SEQ ID NO: 6362 - DNA, 26 bp, Homo sapiens
ccacgtgggttctggatactgtaggt

SEQ ID NO: 6363 - DNA, 26 bp, Homo sapiens
cacgtgggttctggatactgtaggta

SEQ ID NO: 6364 - DNA, 26 bp, Homo sapiens
acgtgggttctggatactgtaggtac

SEQ ID NO: 6365 - DNA, 26 bp, Homo sapiens
cgtgggttctggatactgtaggtaca

SEQ ID NO: 6366 - DNA, 26 bp, Homo sapiens
gtgggttctggatactgtaggtacaa

SEQ ID NO: 6367 - DNA, 26 bp, Homo sapiens
tgggttctggatactgtaggtacaaa

SEQ ID NO: 6368 - DNA, 26 bp, Homo sapiens
gggttctggatactgtaggtacaaaa

SEQ ID NO: 6369 - DNA, 26 bp, Homo sapiens
ggttctggatactgtaggtacaaaag

SEQ ID NO: 6370 - DNA, 26 bp, Homo sapiens
gttctggatactgtaggtacaaaagg

SEQ ID NO: 6371 - DNA, 26 bp, Homo sapiens
ttctggatactgtaggtacaaaagga

SEQ ID NO: 6372 - DNA, 26 bp, Homo sapiens
tctggatactgtaggtacaaaaggag

SEQ ID NO: 6373 - DNA, 26 bp, Homo sapiens
ctggatactgtaggtacaaaaggaga

SEQ ID NO: 6374 - DNA, 26 bp, Homo sapiens
tggatactgtaggtacaaaaggagaa

SEQ ID NO: 6375 - DNA, 26 bp, Homo sapiens
ggatactgtaggtacaaaaggagaat

SEQ ID NO: 6376 - DNA, 26 bp, Homo sapiens
gatactgtaggtacaaaaggagaatg

SEQ ID NO: 6377 - DNA, 26 bp, Homo sapiens
atactgtaggtacaaaaggagaatgc

SEQ ID NO: 6378 - DNA, 26 bp, Homo sapiens
tactgtaggtacaaaaggagaatgcc

SEQ ID NO: 6379 - DNA, 26 bp, Homo sapiens
actgtaggtacaaaaggagaatgcct

SEQ ID NO: 6380 - DNA, 26 bp, Homo sapiens
ctgtaggtacaaaaggagaatgcctt

SEQ ID NO: 6381 - DNA, 26 bp, Homo sapiens
tgtaggtacaaaaggagaatgccttt

SEQ ID NO: 6382 - DNA, 26 bp, Homo sapiens
gtaggtacaaaaggagaatgcctttg

SEQ ID NO: 6383 - DNA, 26 bp, Homo sapiens
taggtacaaaaggagaatgcctttgg

SEQ ID NO: 6384 - DNA, 26 bp, Homo sapiens
aggtacaaaaggagaatgcctttgga

SEQ ID NO: 6385 - DNA, 26 bp, Homo sapiens
ggtacaaaaggagaatgcctttggat

SEQ ID NO: 6386 - DNA, 26 bp, Homo sapiens
gtacaaaaggagaatgcctttggatt

SEQ ID NO: 6387 - DNA, 26 bp, Homo sapiens
tacaaaaggagaatgcctttggattt

SEQ ID NO: 6388 - DNA, 26 bp, Homo sapiens
acaaaaggagaatgcctttggatttc

SEQ ID NO: 6389 - DNA, 26 bp, Homo sapiens
caaaaggagaatgcctttggatttca

SEQ ID NO: 6390 - DNA, 26 bp, Homo sapiens
aaaaggagaatgcctttggatttcag

SEQ ID NO: 6391 - DNA, 26 bp, Homo sapiens
aaaggagaatgcctttggatttcagt

SEQ ID NO: 6392 - DNA, 26 bp, Homo sapiens
aaggagaatgcctttggatttcagtc

SEQ ID NO: 6393 - DNA, 26 bp, Homo sapiens
aggagaatgcctttggatttcagtcc

SEQ ID NO: 6394 - DNA, 26 bp, Homo sapiens
ggagaatgcctttggatttcagtcct

SEQ ID NO: 6395 - DNA, 26 bp, Homo sapiens
gagaatgcctttggatttcagtcctt

SEQ ID NO: 6396 - DNA, 26 bp, Homo sapiens
agaatgcctttggatttcagtccttc

SEQ ID NO: 6397 - DNA, 26 bp, Homo sapiens
gaatgcctttggatttcagtccttcc

SEQ ID NO: 6398 - DNA, 26 bp, Homo sapiens
aatgcctttggatttcagtccttcct

SEQ ID NO: 6399 - DNA, 26 bp, Homo sapiens
atgcctttggatttcagtccttcctt

SEQ ID NO: 6400 - DNA, 26 bp, Homo sapiens
tgcctttggatttcagtccttccttt

SEQ ID NO: 6401 - DNA, 26 bp, Homo sapiens
gcctttggatttcagtccttccttta

SEQ ID NO: 6402 - DNA, 26 bp, Homo sapiens
cctttggatttcagtccttcctttat

SEQ ID NO: 6403 - DNA, 26 bp, Homo sapiens
ctttggatttcagtccttcctttatg

SEQ ID NO: 6404 - DNA, 26 bp, Homo sapiens
tttggatttcagtccttcctttatgg

SEQ ID NO: 6405 - DNA, 26 bp, Homo sapiens
ttggatttcagtccttcctttatgga

SEQ ID NO: 6406 - DNA, 26 bp, Homo sapiens
tggatttcagtccttcctttatggat

SEQ ID NO: 6407 - DNA, 26 bp, Homo sapiens
ggatttcagtccttcctttatggatg

SEQ ID NO: 6408 - DNA, 26 bp, Homo sapiens
gatttcagtccttcctttatggatga

SEQ ID NO: 6409 - DNA, 26 bp, Homo sapiens
atttcagtccttcctttatggatgag

SEQ ID NO: 6410 - DNA, 26 bp, Homo sapiens
tttcagtccttcctttatggatgaga

SEQ ID NO: 6411 - DNA, 26 bp, Homo sapiens
ttcagtccttcctttatggatgagag

SEQ ID NO: 6412 - DNA, 26 bp, Homo sapiens
tcagtccttcctttatggatgagaga

SEQ ID NO: 6413 - DNA, 26 bp, Homo sapiens
cagtccttcctttatggatgagagat

SEQ ID NO: 6414 - DNA, 26 bp, Homo sapiens
agtccttcctttatggatgagagatg

SEQ ID NO: 6415 - DNA, 26 bp, Homo sapiens
gtccttcctttatggatgagagatgg

SEQ ID NO: 6416 - DNA, 26 bp, Homo sapiens
tccttcctttatggatgagagatgga

SEQ ID NO: 6417 - DNA, 26 bp, Homo sapiens
ccttcctttatggatgagagatggaa

SEQ ID NO: 6418 - DNA, 26 bp, Homo sapiens
cttcctttatggatgagagatggaaa

SEQ ID NO: 6419 - DNA, 26 bp, Homo sapiens
ttcctttatggatgagagatggaaaa

SEQ ID NO: 6420 - DNA, 26 bp, Homo sapiens
tcctttatggatgagagatggaaaag

SEQ ID NO: 6421 - DNA, 26 bp, Homo sapiens
cctttatggatgagagatggaaaagg

SEQ ID NO: 6422 - DNA, 26 bp, Homo sapiens
ctttatggatgagagatggaaaagga

SEQ ID NO: 6423 - DNA, 26 bp, Homo sapiens
tttatggatgagagatggaaaaggaa

SEQ ID NO: 6424 - DNA, 26 bp, Homo sapiens
ttatggatgagagatggaaaaggaat

SEQ ID NO: 6425 - DNA, 26 bp, Homo sapiens
tatggatgagagatggaaaaggaatc

SEQ ID NO: 6426 - DNA, 26 bp, Homo sapiens
atggatgagagatggaaaaggaatct

SEQ ID NO: 6427 - DNA, 26 bp, Homo sapiens
tggatgagagatggaaaaggaatctg

SEQ ID NO: 6428 - DNA, 26 bp, Homo sapiens
ggatgagagatggaaaaggaatctga

SEQ ID NO: 6429 - DNA, 26 bp, Homo sapiens
gatgagagatggaaaaggaatctgag

SEQ ID NO: 6430 - DNA, 26 bp, Homo sapiens
atgagagatggaaaaggaatctgaga

SEQ ID NO: 6431 - DNA, 26 bp, Homo sapiens
tgagagatggaaaaggaatctgagag

SEQ ID NO: 6432 - DNA, 26 bp, Homo sapiens
gagagatggaaaaggaatctgagaga

SEQ ID NO: 6433 - DNA, 26 bp, Homo sapiens
agagatggaaaaggaatctgagagaa

SEQ ID NO: 6434 - DNA, 26 bp, Homo sapiens
gagatggaaaaggaatctgagagaaa

SEQ ID NO: 6435 - DNA, 26 bp, Homo sapiens
agatggaaaaggaatctgagagaaaa

SEQ ID NO: 6436 - DNA, 26 bp, Homo sapiens
gatggaaaaggaatctgagagaaaaa

SEQ ID NO: 6437 - DNA, 26 bp, Homo sapiens
atggaaaaggaatctgagagaaaaat

SEQ ID NO: 6438 - DNA, 26 bp, Homo sapiens
tggaaaaggaatctgagagaaaaatc

SEQ ID NO: 6439 - DNA, 26 bp, Homo sapiens
ggaaaaggaatctgagagaaaaatca

SEQ ID NO: 6440 - DNA, 26 bp, Homo sapiens
gaaaaggaatctgagagaaaaatcag

SEQ ID NO: 6441 - DNA, 26 bp, Homo sapiens
aaaaggaatctgagagaaaaatcagt

SEQ ID NO: 6442 - DNA, 26 bp, Homo sapiens
aaaggaatctgagagaaaaatcagtg

SEQ ID NO: 6443 - DNA, 26 bp, Homo sapiens
aaggaatctgagagaaaaatcagtga

SEQ ID NO: 6444 - DNA, 26 bp, Homo sapiens
aggaatctgagagaaaaatcagtgac

SEQ ID NO: 6445 - DNA, 26 bp, Homo sapiens
ggaatctgagagaaaaatcagtgaca

SEQ ID NO: 6446 - DNA, 26 bp, Homo sapiens
gaatctgagagaaaaatcagtgacaa

SEQ ID NO: 6447 - DNA, 26 bp, Homo sapiens
aatctgagagaaaaatcagtgacaaa

SEQ ID NO: 6448 - DNA, 26 bp, Homo sapiens
atctgagagaaaaatcagtgacaaag

SEQ ID NO: 6449 - DNA, 26 bp, Homo sapiens
tctgagagaaaaatcagtgacaaagc

SEQ ID NO: 6450 - DNA, 26 bp, Homo sapiens
ctgagagaaaaatcagtgacaaagcc

SEQ ID NO: 6451 - DNA, 26 bp, Homo sapiens
tgagagaaaaatcagtgacaaagccc

SEQ ID NO: 6452 - DNA, 26 bp, Homo sapiens
gagagaaaaatcagtgacaaagcccc

SEQ ID NO: 6453 - DNA, 26 bp, Homo sapiens
agagaaaaatcagtgacaaagcccct

SEQ ID NO: 6454 - DNA, 26 bp, Homo sapiens
gagaaaaatcagtgacaaagcccctc

SEQ ID NO: 6455 - DNA, 26 bp, Homo sapiens
agaaaaatcagtgacaaagcccctct

SEQ ID NO: 6456 - DNA, 26 bp, Homo sapiens
gaaaaatcagtgacaaagcccctctc

SEQ ID NO: 6457 - DNA, 26 bp, Homo sapiens
aaaaatcagtgacaaagcccctctct

SEQ ID NO: 6458 - DNA, 26 bp, Homo sapiens
aaaatcagtgacaaagcccctctcta

SEQ ID NO: 6459 - DNA, 26 bp, Homo sapiens
aaatcagtgacaaagcccctctctat

SEQ ID NO: 6460 - DNA, 26 bp, Homo sapiens
aatcagtgacaaagcccctctctatt

SEQ ID NO: 6461 - DNA, 26 bp, Homo sapiens
atcagtgacaaagcccctctctattg

SEQ ID NO: 6462 - DNA, 26 bp, Homo sapiens
tcagtgacaaagcccctctctattgc

SEQ ID NO: 6463 - DNA, 26 bp, Homo sapiens
cagtgacaaagcccctctctattgct

SEQ ID NO: 6464 - DNA, 26 bp, Homo sapiens
agtgacaaagcccctctctattgcta

SEQ ID NO: 6465 - DNA, 26 bp, Homo sapiens
gtgacaaagcccctctctattgctat

SEQ ID NO: 6466 - DNA, 26 bp, Homo sapiens
tgacaaagcccctctctattgctatc

SEQ ID NO: 6467 - DNA, 26 bp, Homo sapiens
gacaaagcccctctctattgctatca

SEQ ID NO: 6468 - DNA, 26 bp, Homo sapiens
acaaagcccctctctattgctatcaa

SEQ ID NO: 6469 - DNA, 26 bp, Homo sapiens
caaagcccctctctattgctatcaat

SEQ ID NO: 6470 - DNA, 26 bp, Homo sapiens
aaagcccctctctattgctatcaata

SEQ ID NO: 6471 - DNA, 26 bp, Homo sapiens
aagcccctctctattgctatcaataa

SEQ ID NO: 6472 - DNA, 26 bp, Homo sapiens
agcccctctctattgctatcaataat

SEQ ID NO: 6473 - DNA, 26 bp, Homo sapiens
gcccctctctattgctatcaataatc

SEQ ID NO: 6474 - DNA, 26 bp, Homo sapiens
cccctctctattgctatcaataatct

SEQ ID NO: 6475 - DNA, 26 bp, Homo sapiens
ccctctctattgctatcaataatcta

SEQ ID NO: 6476 - DNA, 26 bp, Homo sapiens
cctctctattgctatcaataatctat

SEQ ID NO: 6477 - DNA, 26 bp, Homo sapiens
ctctctattgctatcaataatctatc

SEQ ID NO: 6478 - DNA, 26 bp, Homo sapiens
tctctattgctatcaataatctatca

SEQ ID NO: 6479 - DNA, 26 bp, Homo sapiens
ctctattgctatcaataatctatcac

SEQ ID NO: 6480 - DNA, 26 bp, Homo sapiens
tctattgctatcaataatctatcacg

SEQ ID NO: 6481 - DNA, 26 bp, Homo sapiens
ctattgctatcaataatctatcacgg

SEQ ID NO: 6482 - DNA, 26 bp, Homo sapiens
tattgctatcaataatctatcacggg

SEQ ID NO: 6483 - DNA, 26 bp, Homo sapiens
attgctatcaataatctatcacgggg

SEQ ID NO: 6484 - DNA, 26 bp, Homo sapiens
ttgctatcaataatctatcacggggt

SEQ ID NO: 6485 - DNA, 26 bp, Homo sapiens
tgctatcaataatctatcacggggtt

SEQ ID NO: 6486 - DNA, 26 bp, Homo sapiens
gctatcaataatctatcacggggtta

SEQ ID NO: 6487 - DNA, 26 bp, Homo sapiens
ctatcaataatctatcacggggttat

SEQ ID NO: 6488 - DNA, 26 bp, Homo sapiens
tatcaataatctatcacggggttatt

SEQ ID NO: 6489 - DNA, 26 bp, Homo sapiens
atcaataatctatcacggggttattc

SEQ ID NO: 6490 - DNA, 26 bp, Homo sapiens
tcaataatctatcacggggttattct

SEQ ID NO: 6491 - DNA, 26 bp, Homo sapiens
caataatctatcacggggttattctg

SEQ ID NO: 6492 - DNA, 26 bp, Homo sapiens
aataatctatcacggggttattctgt

SEQ ID NO: 6493 - DNA, 26 bp, Homo sapiens
ataatctatcacggggttattctgtg

SEQ ID NO: 6494 - DNA, 26 bp, Homo sapiens
taatctatcacggggttattctgtga

SEQ ID NO: 6495 - DNA, 26 bp, Homo sapiens
aatctatcacggggttattctgtgat

SEQ ID NO: 6496 - DNA, 26 bp, Homo sapiens
atctatcacggggttattctgtgatg

SEQ ID NO: 6497 - DNA, 26 bp, Homo sapiens
tctatcacggggttattctgtgatga

SEQ ID NO: 6498 - DNA, 26 bp, Homo sapiens
ctatcacggggttattctgtgatgat

SEQ ID NO: 6499 - DNA, 26 bp, Homo sapiens
tatcacggggttattctgtgatgatt

SEQ ID NO: 6500 - DNA, 26 bp, Homo sapiens
atcacggggttattctgtgatgattt

SEQ ID NO: 6501 - DNA, 26 bp, Homo sapiens
tcacggggttattctgtgatgatttg

SEQ ID NO: 6502 - DNA, 26 bp, Homo sapiens
cacggggttattctgtgatgatttga

SEQ ID NO: 6503 - DNA, 26 bp, Homo sapiens
acggggttattctgtgatgatttgat

SEQ ID NO: 6504 - DNA, 26 bp, Homo sapiens
cggggttattctgtgatgatttgatc

SEQ ID NO: 6505 - DNA, 26 bp, Homo sapiens
ggggttattctgtgatgatttgatca

SEQ ID NO: 6506 - DNA, 26 bp, Homo sapiens
gggttattctgtgatgatttgatcat

SEQ ID NO: 6507 - DNA, 26 bp, Homo sapiens
ggttattctgtgatgatttgatcatg

SEQ ID NO: 6508 - DNA, 26 bp, Homo sapiens
gttattctgtgatgatttgatcatgt

SEQ ID NO: 6509 - DNA, 26 bp, Homo sapiens
ttattctgtgatgatttgatcatgta

SEQ ID NO: 6510 - DNA, 26 bp, Homo sapiens
tattctgtgatgatttgatcatgtaa

SEQ ID NO: 6511 - DNA, 26 bp, Homo sapiens
attctgtgatgatttgatcatgtaag

SEQ ID NO: 6512 - DNA, 26 bp, Homo sapiens
ttctgtgatgatttgatcatgtaaga

SEQ ID NO: 6513 - DNA, 26 bp, Homo sapiens
tctgtgatgatttgatcatgtaagat

SEQ ID NO: 6514 - DNA, 26 bp, Homo sapiens
ctgtgatgatttgatcatgtaagatg

SEQ ID NO: 6515 - DNA, 26 bp, Homo sapiens
tgtgatgatttgatcatgtaagatgc

SEQ ID NO: 6516 - DNA, 26 bp, Homo sapiens
gtgatgatttgatcatgtaagatgct

SEQ ID NO: 6517 - DNA, 26 bp, Homo sapiens
tgatgatttgatcatgtaagatgcta

SEQ ID NO: 6518 - DNA, 26 bp, Homo sapiens
gatgatttgatcatgtaagatgctat

SEQ ID NO: 6519 - DNA, 26 bp, Homo sapiens
atgatttgatcatgtaagatgctata

SEQ ID NO: 6520 - DNA, 26 bp, Homo sapiens
tgatttgatcatgtaagatgctataa

SEQ ID NO: 6521 - DNA, 26 bp, Homo sapiens
gatttgatcatgtaagatgctataag

SEQ ID NO: 6522 - DNA, 26 bp, Homo sapiens
atttgatcatgtaagatgctataaga

SEQ ID NO: 6523 - DNA, 26 bp, Homo sapiens
tttgatcatgtaagatgctataagac

SEQ ID NO: 6524 - DNA, 26 bp, Homo sapiens
ttgatcatgtaagatgctataagact

SEQ ID NO: 6525 - DNA, 26 bp, Homo sapiens
tgatcatgtaagatgctataagactg

SEQ ID NO: 6526 - DNA, 26 bp, Homo sapiens
gatcatgtaagatgctataagactgg

SEQ ID NO: 6527 - DNA, 26 bp, Homo sapiens
atcatgtaagatgctataagactggt

SEQ ID NO: 6528 - DNA, 26 bp, Homo sapiens
tcatgtaagatgctataagactggtg

SEQ ID NO: 6529 - DNA, 26 bp, Homo sapiens
catgtaagatgctataagactggtgg

SEQ ID NO: 6530 - DNA, 26 bp, Homo sapiens
atgtaagatgctataagactggtgga

SEQ ID NO: 6531 - DNA, 26 bp, Homo sapiens
tgtaagatgctataagactggtggaa

SEQ ID NO: 6532 - DNA, 26 bp, Homo sapiens
gtaagatgctataagactggtggaaa

SEQ ID NO: 6533 - DNA, 26 bp, Homo sapiens
taagatgctataagactggtggaaag

SEQ ID NO: 6534 - DNA, 26 bp, Homo sapiens
aagatgctataagactggtggaaaga

SEQ ID NO: 6535 - DNA, 26 bp, Homo sapiens
agatgctataagactggtggaaagaa

SEQ ID NO: 6536 - DNA, 26 bp, Homo sapiens
gatgctataagactggtggaaagaaa

SEQ ID NO: 6537 - DNA, 26 bp, Homo sapiens
atgctataagactggtggaaagaaat

SEQ ID NO: 6538 - DNA, 26 bp, Homo sapiens
tgctataagactggtggaaagaaatt

SEQ ID NO: 6539 - DNA, 26 bp, Homo sapiens
gctataagactggtggaaagaaattt

SEQ ID NO: 6540 - DNA, 26 bp, Homo sapiens
ctataagactggtggaaagaaatttg

SEQ ID NO: 6541 - DNA, 26 bp, Homo sapiens
tataagactggtggaaagaaatttgc

SEQ ID NO: 6542 - DNA, 26 bp, Homo sapiens
ataagactggtggaaagaaatttgct

SEQ ID NO: 6543 - DNA, 26 bp, Homo sapiens
taagactggtggaaagaaatttgctg

SEQ ID NO: 6544 - DNA, 26 bp, Homo sapiens
aagactggtggaaagaaatttgctga

SEQ ID NO: 6545 - DNA, 26 bp, Homo sapiens
agactggtggaaagaaatttgctgac

SEQ ID NO: 6546 - DNA, 26 bp, Homo sapiens
gactggtggaaagaaatttgctgaca

SEQ ID NO: 6547 - DNA, 26 bp, Homo sapiens
actggtggaaagaaatttgctgacat

SEQ ID NO: 6548 - DNA, 26 bp, Homo sapiens
ctggtggaaagaaatttgctgacatg

SEQ ID NO: 6549 - DNA, 26 bp, Homo sapiens
tggtggaaagaaatttgctgacatgt

SEQ ID NO: 6550 - DNA, 26 bp, Homo sapiens
ggtggaaagaaatttgctgacatgtg

SEQ ID NO: 6551 - DNA, 26 bp, Homo sapiens
gtggaaagaaatttgctgacatgtgg

SEQ ID NO: 6552 - DNA, 26 bp, Homo sapiens
tggaaagaaatttgctgacatgtggc

SEQ ID NO: 6553 - DNA, 26 bp, Homo sapiens
ggaaagaaatttgctgacatgtggca

SEQ ID NO: 6554 - DNA, 26 bp, Homo sapiens
gaaagaaatttgctgacatgtggcag

SEQ ID NO: 6555 - DNA, 26 bp, Homo sapiens
aaagaaatttgctgacatgtggcaga

SEQ ID NO: 6556 - DNA, 26 bp, Homo sapiens
aagaaatttgctgacatgtggcagag

SEQ ID NO: 6557 - DNA, 26 bp, Homo sapiens
agaaatttgctgacatgtggcagagc

SEQ ID NO: 6558 - DNA, 26 bp, Homo sapiens
gaaatttgctgacatgtggcagagca

SEQ ID NO: 6559 - DNA, 26 bp, Homo sapiens
aaatttgctgacatgtggcagagcag

SEQ ID NO: 6560 - DNA, 26 bp, Homo sapiens
aatttgctgacatgtggcagagcagt

SEQ ID NO: 6561 - DNA, 26 bp, Homo sapiens
atttgctgacatgtggcagagcagtg

SEQ ID NO: 6562 - DNA, 26 bp, Homo sapiens
tttgctgacatgtggcagagcagtgg

SEQ ID NO: 6563 - DNA, 26 bp, Homo sapiens
ttgctgacatgtggcagagcagtggc

SEQ ID NO: 6564 - DNA, 26 bp, Homo sapiens
tgctgacatgtggcagagcagtggca

SEQ ID NO: 6565 - DNA, 26 bp, Homo sapiens
gctgacatgtggcagagcagtggcat

SEQ ID NO: 6566 - DNA, 26 bp, Homo sapiens
ctgacatgtggcagagcagtggcatg

SEQ ID NO: 6567 - DNA, 26 bp, Homo sapiens
tgacatgtggcagagcagtggcatgg

SEQ ID NO: 6568 - DNA, 26 bp, Homo sapiens
gacatgtggcagagcagtggcatggc

SEQ ID NO: 6569 - DNA, 26 bp, Homo sapiens
acatgtggcagagcagtggcatggcc

SEQ ID NO: 6570 - DNA, 26 bp, Homo sapiens
catgtggcagagcagtggcatggcct

SEQ ID NO: 6571 - DNA, 26 bp, Homo sapiens
atgtggcagagcagtggcatggcctg

SEQ ID NO: 6572 - DNA, 26 bp, Homo sapiens
tgtggcagagcagtggcatggcctgg

SEQ ID NO: 6573 - DNA, 26 bp, Homo sapiens
gtggcagagcagtggcatggcctggg

SEQ ID NO: 6574 - DNA, 26 bp, Homo sapiens
tggcagagcagtggcatggcctggga

SEQ ID NO: 6575 - DNA, 26 bp, Homo sapiens
ggcagagcagtggcatggcctgggag

SEQ ID NO: 6576 - DNA, 26 bp, Homo sapiens
gcagagcagtggcatggcctgggaga

SEQ ID NO: 6577 - DNA, 26 bp, Homo sapiens
cagagcagtggcatggcctgggagac

SEQ ID NO: 6578 - DNA, 26 bp, Homo sapiens
agagcagtggcatggcctgggagaca

SEQ ID NO: 6579 - DNA, 26 bp, Homo sapiens
gagcagtggcatggcctgggagacaa

SEQ ID NO: 6580 - DNA, 26 bp, Homo sapiens
agcagtggcatggcctgggagacaag

SEQ ID NO: 6581 - DNA, 26 bp, Homo sapiens
gcagtggcatggcctgggagacaaga

SEQ ID NO: 6582 - DNA, 26 bp, Homo sapiens
cagtggcatggcctgggagacaagat

SEQ ID NO: 6583 - DNA, 26 bp, Homo sapiens
agtggcatggcctgggagacaagatg

SEQ ID NO: 6584 - DNA, 26 bp, Homo sapiens
gtggcatggcctgggagacaagatgg

SEQ ID NO: 6585 - DNA, 26 bp, Homo sapiens
tggcatggcctgggagacaagatggc

SEQ ID NO: 6586 - DNA, 26 bp, Homo sapiens
ggcatggcctgggagacaagatggcc

SEQ ID NO: 6587 - DNA, 26 bp, Homo sapiens
gcatggcctgggagacaagatggcca

SEQ ID NO: 6588 - DNA, 26 bp, Homo sapiens
catggcctgggagacaagatggccag

SEQ ID NO: 6589 - DNA, 26 bp, Homo sapiens
atggcctgggagacaagatggccaga

SEQ ID NO: 6590 - DNA, 26 bp, Homo sapiens
tggcctgggagacaagatggccagaa

SEQ ID NO: 6591 - DNA, 26 bp, Homo sapiens
ggcctgggagacaagatggccagaaa

SEQ ID NO: 6592 - DNA, 26 bp, Homo sapiens
gcctgggagacaagatggccagaaag

SEQ ID NO: 6593 - DNA, 26 bp, Homo sapiens
cctgggagacaagatggccagaaagc

SEQ ID NO: 6594 - DNA, 26 bp, Homo sapiens
ctgggagacaagatggccagaaagct

SEQ ID NO: 6595 - DNA, 26 bp, Homo sapiens
tgggagacaagatggccagaaagctg

SEQ ID NO: 6596 - DNA, 26 bp, Homo sapiens
gggagacaagatggccagaaagctgt

SEQ ID NO: 6597 - DNA, 26 bp, Homo sapiens
ggagacaagatggccagaaagctgtg

SEQ ID NO: 6598 - DNA, 26 bp, Homo sapiens
gagacaagatggccagaaagctgtgg

SEQ ID NO: 6599 - DNA, 26 bp, Homo sapiens
agacaagatggccagaaagctgtgga

SEQ ID NO: 6600 - DNA, 26 bp, Homo sapiens
gacaagatggccagaaagctgtggag

SEQ ID NO: 6601 - DNA, 26 bp, Homo sapiens
acaagatggccagaaagctgtggagc

SEQ ID NO: 6602 - DNA, 26 bp, Homo sapiens
caagatggccagaaagctgtggagca

SEQ ID NO: 6603 - DNA, 26 bp, Homo sapiens
aagatggccagaaagctgtggagcaa

SEQ ID NO: 6604 - DNA, 26 bp, Homo sapiens
agatggccagaaagctgtggagcaag

SEQ ID NO: 6605 - DNA, 26 bp, Homo sapiens
gatggccagaaagctgtggagcaagg

SEQ ID NO: 6606 - DNA, 26 bp, Homo sapiens
atggccagaaagctgtggagcaaggt

SEQ ID NO: 6607 - DNA, 26 bp, Homo sapiens
tggccagaaagctgtggagcaaggta

SEQ ID NO: 6608 - DNA, 26 bp, Homo sapiens
ggccagaaagctgtggagcaaggtag

SEQ ID NO: 6609 - DNA, 26 bp, Homo sapiens
gccagaaagctgtggagcaaggtagg

SEQ ID NO: 6610 - DNA, 26 bp, Homo sapiens
ccagaaagctgtggagcaaggtagga

SEQ ID NO: 6611 - DNA, 26 bp, Homo sapiens
cagaaagctgtggagcaaggtaggag

SEQ ID NO: 6612 - DNA, 26 bp, Homo sapiens
agaaagctgtggagcaaggtaggagg

SEQ ID NO: 6613 - DNA, 26 bp, Homo sapiens
gaaagctgtggagcaaggtaggaggc

SEQ ID NO: 6614 - DNA, 26 bp, Homo sapiens
aaagctgtggagcaaggtaggaggcc

SEQ ID NO: 6615 - DNA, 26 bp, Homo sapiens
aagctgtggagcaaggtaggaggccc

SEQ ID NO: 6616 - DNA, 26 bp, Homo sapiens
agctgtggagcaaggtaggaggccca

SEQ ID NO: 6617 - DNA, 26 bp, Homo sapiens
gctgtggagcaaggtaggaggcccag

SEQ ID NO: 6618 - DNA, 26 bp, Homo sapiens
ctgtggagcaaggtaggaggcccaga

SEQ ID NO: 6619 - DNA, 26 bp, Homo sapiens
tgtggagcaaggtaggaggcccagag

SEQ ID NO: 6620 - DNA, 26 bp, Homo sapiens
gtggagcaaggtaggaggcccagagg

SEQ ID NO: 6621 - DNA, 26 bp, Homo sapiens
tggagcaaggtaggaggcccagaggc

SEQ ID NO: 6622 - DNA, 26 bp, Homo sapiens
ggagcaaggtaggaggcccagaggcg

SEQ ID NO: 6623 - DNA, 26 bp, Homo sapiens
gagcaaggtaggaggcccagaggcgc

SEQ ID NO: 6624 - DNA, 26 bp, Homo sapiens
agcaaggtaggaggcccagaggcgca

SEQ ID NO: 6625 - DNA, 26 bp, Homo sapiens
gcaaggtaggaggcccagaggcgcat

SEQ ID NO: 6626 - DNA, 26 bp, Homo sapiens
caaggtaggaggcccagaggcgcatc

SEQ ID NO: 6627 - DNA, 26 bp, Homo sapiens
aaggtaggaggcccagaggcgcatct

SEQ ID NO: 6628 - DNA, 26 bp, Homo sapiens
aggtaggaggcccagaggcgcatctg

SEQ ID NO: 6629 - DNA, 26 bp, Homo sapiens
ggtaggaggcccagaggcgcatctgc

SEQ ID NO: 6630 - DNA, 26 bp, Homo sapiens
gtaggaggcccagaggcgcatctgcc

SEQ ID NO: 6631 - DNA, 26 bp, Homo sapiens
taggaggcccagaggcgcatctgcct

SEQ ID NO: 6632 - DNA, 26 bp, Homo sapiens
aggaggcccagaggcgcatctgcctg

SEQ ID NO: 6633 - DNA, 26 bp, Homo sapiens
ggaggcccagaggcgcatctgcctgc

SEQ ID NO: 6634 - DNA, 26 bp, Homo sapiens
gaggcccagaggcgcatctgcctgca

SEQ ID NO: 6635 - DNA, 26 bp, Homo sapiens
aggcccagaggcgcatctgcctgcaa

SEQ ID NO: 6636 - DNA, 26 bp, Homo sapiens
ggcccagaggcgcatctgcctgcaaa

SEQ ID NO: 6637 - DNA, 26 bp, Homo sapiens
gcccagaggcgcatctgcctgcaaag

SEQ ID NO: 6638 - DNA, 26 bp, Homo sapiens
cccagaggcgcatctgcctgcaaagc

SEQ ID NO: 6639 - DNA, 26 bp, Homo sapiens
ccagaggcgcatctgcctgcaaagct

SEQ ID NO: 6640 - DNA, 26 bp, Homo sapiens
cagaggcgcatctgcctgcaaagctg

SEQ ID NO: 6641 - DNA, 26 bp, Homo sapiens
agaggcgcatctgcctgcaaagctga

SEQ ID NO: 6642 - DNA, 26 bp, Homo sapiens
gaggcgcatctgcctgcaaagctgac

SEQ ID NO: 6643 - DNA, 26 bp, Homo sapiens
aggcgcatctgcctgcaaagctgact

SEQ ID NO: 6644 - DNA, 26 bp, Homo sapiens
ggcgcatctgcctgcaaagctgactt

SEQ ID NO: 6645 - DNA, 26 bp, Homo sapiens
gcgcatctgcctgcaaagctgactta

SEQ ID NO: 6646 - DNA, 26 bp, Homo sapiens
cgcatctgcctgcaaagctgacttac

SEQ ID NO: 6647 - DNA, 26 bp, Homo sapiens
gcatctgcctgcaaagctgacttacc

SEQ ID NO: 6648 - DNA, 26 bp, Homo sapiens
catctgcctgcaaagctgacttacca

SEQ ID NO: 6649 - DNA, 26 bp, Homo sapiens
atctgcctgcaaagctgacttaccat

SEQ ID NO: 6650 - DNA, 26 bp, Homo sapiens
tctgcctgcaaagctgacttaccatt

SEQ ID NO: 6651 - DNA, 26 bp, Homo sapiens
ctgcctgcaaagctgacttaccattt

SEQ ID NO: 6652 - DNA, 26 bp, Homo sapiens
tgcctgcaaagctgacttaccatttt

SEQ ID NO: 6653 - DNA, 26 bp, Homo sapiens
gcctgcaaagctgacttaccattttc

SEQ ID NO: 6654 - DNA, 26 bp, Homo sapiens
cctgcaaagctgacttaccattttct

SEQ ID NO: 6655 - DNA, 26 bp, Homo sapiens
ctgcaaagctgacttaccattttctg

SEQ ID NO: 6656 - DNA, 26 bp, Homo sapiens
tgcaaagctgacttaccattttctgt

SEQ ID NO: 6657 - DNA, 26 bp, Homo sapiens
gcaaagctgacttaccattttctgtc

SEQ ID NO: 6658 - DNA, 26 bp, Homo sapiens
caaagctgacttaccattttctgtca

SEQ ID NO: 6659 - DNA, 26 bp, Homo sapiens
aaagctgacttaccattttctgtcag

SEQ ID NO: 6660 - DNA, 26 bp, Homo sapiens
aagctgacttaccattttctgtcaga

SEQ ID NO: 6661 - DNA, 26 bp, Homo sapiens
agctgacttaccattttctgtcagaa

SEQ ID NO: 6662 - DNA, 26 bp, Homo sapiens
gctgacttaccattttctgtcagaat

SEQ ID NO: 6663 - DNA, 26 bp, Homo sapiens
ctgacttaccattttctgtcagaata

SEQ ID NO: 6664 - DNA, 26 bp, Homo sapiens
tgacttaccattttctgtcagaataa

SEQ ID NO: 6665 - DNA, 26 bp, Homo sapiens
gacttaccattttctgtcagaataac

SEQ ID NO: 6666 - DNA, 26 bp, Homo sapiens
acttaccattttctgtcagaataact

SEQ ID NO: 6667 - DNA, 26 bp, Homo sapiens
cttaccattttctgtcagaataactt

SEQ ID NO: 6668 - DNA, 26 bp, Homo sapiens
ttaccattttctgtcagaataactta

SEQ ID NO: 6669 - DNA, 26 bp, Homo sapiens
taccattttctgtcagaataacttag

SEQ ID NO: 6670 - DNA, 26 bp, Homo sapiens
accattttctgtcagaataacttaga

SEQ ID NO: 6671 - DNA, 26 bp, Homo sapiens
ccattttctgtcagaataacttagat

SEQ ID NO: 6672 - DNA, 26 bp, Homo sapiens
cattttctgtcagaataacttagatg

SEQ ID NO: 6673 - DNA, 26 bp, Homo sapiens
attttctgtcagaataacttagatgc

SEQ ID NO: 6674 - DNA, 26 bp, Homo sapiens
ttttctgtcagaataacttagatgct

SEQ ID NO: 6675 - DNA, 26 bp, Homo sapiens
tttctgtcagaataacttagatgctt

SEQ ID NO: 6676 - DNA, 26 bp, Homo sapiens
ttctgtcagaataacttagatgcttt

SEQ ID NO: 6677 - DNA, 26 bp, Homo sapiens
tctgtcagaataacttagatgctttg

SEQ ID NO: 6678 - DNA, 26 bp, Homo sapiens
ctgtcagaataacttagatgctttga

SEQ ID NO: 6679 - DNA, 26 bp, Homo sapiens
tgtcagaataacttagatgctttgag

SEQ ID NO: 6680 - DNA, 26 bp, Homo sapiens
gtcagaataacttagatgctttgaga

SEQ ID NO: 6681 - DNA, 26 bp, Homo sapiens
tcagaataacttagatgctttgagac

SEQ ID NO: 6682 - DNA, 26 bp, Homo sapiens
cagaataacttagatgctttgagaca

SEQ ID NO: 6683 - DNA, 26 bp, Homo sapiens
agaataacttagatgctttgagacaa

SEQ ID NO: 6684 - DNA, 26 bp, Homo sapiens
gaataacttagatgctttgagacaaa

SEQ ID NO: 6685 - DNA, 26 bp, Homo sapiens
aataacttagatgctttgagacaaaa

SEQ ID NO: 6686 - DNA, 26 bp, Homo sapiens
ataacttagatgctttgagacaaaag

SEQ ID NO: 6687 - DNA, 26 bp, Homo sapiens
taacttagatgctttgagacaaaagc

SEQ ID NO: 6688 - DNA, 26 bp, Homo sapiens
aacttagatgctttgagacaaaagca

SEQ ID NO: 6689 - DNA, 26 bp, Homo sapiens
acttagatgctttgagacaaaagcag

SEQ ID NO: 6690 - DNA, 26 bp, Homo sapiens
cttagatgctttgagacaaaagcaga

SEQ ID NO: 6691 - DNA, 26 bp, Homo sapiens
ttagatgctttgagacaaaagcagat

SEQ ID NO: 6692 - DNA, 26 bp, Homo sapiens
tagatgctttgagacaaaagcagata

SEQ ID NO: 6693 - DNA, 26 bp, Homo sapiens
agatgctttgagacaaaagcagatac

SEQ ID NO: 6694 - DNA, 26 bp, Homo sapiens
gatgctttgagacaaaagcagatact

SEQ ID NO: 6695 - DNA, 26 bp, Homo sapiens
atgctttgagacaaaagcagatacta

SEQ ID NO: 6696 - DNA, 26 bp, Homo sapiens
tgctttgagacaaaagcagatactat

SEQ ID NO: 6697 - DNA, 26 bp, Homo sapiens
gctttgagacaaaagcagatactatt

SEQ ID NO: 6698 - DNA, 26 bp, Homo sapiens
ctttgagacaaaagcagatactattt

SEQ ID NO: 6699 - DNA, 26 bp, Homo sapiens
tttgagacaaaagcagatactattta

SEQ ID NO: 6700 - DNA, 26 bp, Homo sapiens
ttgagacaaaagcagatactatttaa

SEQ ID NO: 6701 - DNA, 26 bp, Homo sapiens
tgagacaaaagcagatactatttaaa

SEQ ID NO: 6702 - DNA, 26 bp, Homo sapiens
gagacaaaagcagatactatttaaac

SEQ ID NO: 6703 - DNA, 26 bp, Homo sapiens
agacaaaagcagatactatttaaact

SEQ ID NO: 6704 - DNA, 26 bp, Homo sapiens
gacaaaagcagatactatttaaactc

SEQ ID NO: 6705 - DNA, 26 bp, Homo sapiens
acaaaagcagatactatttaaactcc

SEQ ID NO: 6706 - DNA, 26 bp, Homo sapiens
caaaagcagatactatttaaactcca

SEQ ID NO: 6707 - DNA, 26 bp, Homo sapiens
aaaagcagatactatttaaactccaa

SEQ ID NO: 6708 - DNA, 26 bp, Homo sapiens
aaagcagatactatttaaactccaac

SEQ ID NO: 6709 - DNA, 26 bp, Homo sapiens
aagcagatactatttaaactccaact

SEQ ID NO: 6710 - DNA, 26 bp, Homo sapiens
agcagatactatttaaactccaactt

SEQ ID NO: 6711 - DNA, 26 bp, Homo sapiens
gcagatactatttaaactccaacttg

SEQ ID NO: 6712 - DNA, 26 bp, Homo sapiens
cagatactatttaaactccaacttgg

SEQ ID NO: 6713 - DNA, 26 bp, Homo sapiens
agatactatttaaactccaacttgga

SEQ ID NO: 6714 - DNA, 26 bp, Homo sapiens
gatactatttaaactccaacttggac

SEQ ID NO: 6715 - DNA, 26 bp, Homo sapiens
atactatttaaactccaacttggaca

SEQ ID NO: 6716 - DNA, 26 bp, Homo sapiens
tactatttaaactccaacttggacaa

SEQ ID NO: 6717 - DNA, 26 bp, Homo sapiens
actatttaaactccaacttggacaat

SEQ ID NO: 6718 - DNA, 26 bp, Homo sapiens
ctatttaaactccaacttggacaatt

SEQ ID NO: 6719 - DNA, 26 bp, Homo sapiens
tatttaaactccaacttggacaattc

SEQ ID NO: 6720 - DNA, 26 bp, Homo sapiens
atttaaactccaacttggacaattcc

SEQ ID NO: 6721 - DNA, 26 bp, Homo sapiens
tttaaactccaacttggacaattcct

SEQ ID NO: 6722 - DNA, 26 bp, Homo sapiens
ttaaactccaacttggacaattcctc

SEQ ID NO: 6723 - DNA, 26 bp, Homo sapiens
taaactccaacttggacaattcctca

SEQ ID NO: 6724 - DNA, 26 bp, Homo sapiens
aaactccaacttggacaattcctcat

SEQ ID NO: 6725 - DNA, 26 bp, Homo sapiens
aactccaacttggacaattcctcata

SEQ ID NO: 6726 - DNA, 26 bp, Homo sapiens
actccaacttggacaattcctcataa

SEQ ID NO: 6727 - DNA, 26 bp, Homo sapiens
ctccaacttggacaattcctcataaa

SEQ ID NO: 6728 - DNA, 26 bp, Homo sapiens
tccaacttggacaattcctcataaac

SEQ ID NO: 6729 - DNA, 26 bp, Homo sapiens
ccaacttggacaattcctcataaact

SEQ ID NO: 6730 - DNA, 26 bp, Homo sapiens
caacttggacaattcctcataaacta

SEQ ID NO: 6731 - DNA, 26 bp, Homo sapiens
aacttggacaattcctcataaactag

SEQ ID NO: 6732 - DNA, 26 bp, Homo sapiens
acttggacaattcctcataaactaga

SEQ ID NO: 6733 - DNA, 26 bp, Homo sapiens
cttggacaattcctcataaactagac

SEQ ID NO: 6734 - DNA, 26 bp, Homo sapiens
ttggacaattcctcataaactagact

SEQ ID NO: 6735 - DNA, 26 bp, Homo sapiens
tggacaattcctcataaactagactt

SEQ ID NO: 6736 - DNA, 26 bp, Homo sapiens
ggacaattcctcataaactagacttc

SEQ ID NO: 6737 - DNA, 26 bp, Homo sapiens
gacaattcctcataaactagacttca

SEQ ID NO: 6738 - DNA, 26 bp, Homo sapiens
acaattcctcataaactagacttcag

SEQ ID NO: 6739 - DNA, 26 bp, Homo sapiens
caattcctcataaactagacttcagg

SEQ ID NO: 6740 - DNA, 26 bp, Homo sapiens
aattcctcataaactagacttcaggt

SEQ ID NO: 6741 - DNA, 26 bp, Homo sapiens
attcctcataaactagacttcaggtt

SEQ ID NO: 6742 - DNA, 26 bp, Homo sapiens
ttcctcataaactagacttcaggttt

SEQ ID NO: 6743 - DNA, 26 bp, Homo sapiens
tcctcataaactagacttcaggttta

SEQ ID NO: 6744 - DNA, 26 bp, Homo sapiens
cctcataaactagacttcaggtttaa

SEQ ID NO: 6745 - DNA, 26 bp, Homo sapiens
ctcataaactagacttcaggtttaac

SEQ ID NO: 6746 - DNA, 26 bp, Homo sapiens
tcataaactagacttcaggtttaaca

SEQ ID NO: 6747 - DNA, 26 bp, Homo sapiens
cataaactagacttcaggtttaacaa

SEQ ID NO: 6748 - DNA, 26 bp, Homo sapiens
ataaactagacttcaggtttaacaac

SEQ ID NO: 6749 - DNA, 26 bp, Homo sapiens
taaactagacttcaggtttaacaact

SEQ ID NO: 6750 - DNA, 26 bp, Homo sapiens
aaactagacttcaggtttaacaactc

SEQ ID NO: 6751 - DNA, 26 bp, Homo sapiens
aactagacttcaggtttaacaactct

SEQ ID NO: 6752 - DNA, 26 bp, Homo sapiens
actagacttcaggtttaacaactctt

SEQ ID NO: 6753 - DNA, 26 bp, Homo sapiens
ctagacttcaggtttaacaactctta

SEQ ID NO: 6754 - DNA, 26 bp, Homo sapiens
tagacttcaggtttaacaactcttag

SEQ ID NO: 6755 - DNA, 26 bp, Homo sapiens
agacttcaggtttaacaactcttagg

SEQ ID NO: 6756 - DNA, 26 bp, Homo sapiens
gacttcaggtttaacaactcttagga

SEQ ID NO: 6757 - DNA, 26 bp, Homo sapiens
acttcaggtttaacaactcttaggat

SEQ ID NO: 6758 - DNA, 26 bp, Homo sapiens
cttcaggtttaacaactcttaggatg

SEQ ID NO: 6759 - DNA, 26 bp, Homo sapiens
ttcaggtttaacaactcttaggatgc

SEQ ID NO: 6760 - DNA, 26 bp, Homo sapiens
tcaggtttaacaactcttaggatgcc

SEQ ID NO: 6761 - DNA, 26 bp, Homo sapiens
caggtttaacaactcttaggatgcca

SEQ ID NO: 6762 - DNA, 26 bp, Homo sapiens
aggtttaacaactcttaggatgccac

SEQ ID NO: 6763 - DNA, 26 bp, Homo sapiens
ggtttaacaactcttaggatgccact

SEQ ID NO: 6764 - DNA, 26 bp, Homo sapiens
gtttaacaactcttaggatgccactt

SEQ ID NO: 6765 - DNA, 26 bp, Homo sapiens
tttaacaactcttaggatgccacttt

SEQ ID NO: 6766 - DNA, 26 bp, Homo sapiens
ttaacaactcttaggatgccactttg

SEQ ID NO: 6767 - DNA, 26 bp, Homo sapiens
taacaactcttaggatgccactttgg

SEQ ID NO: 6768 - DNA, 26 bp, Homo sapiens
aacaactcttaggatgccactttggt

SEQ ID NO: 6769 - DNA, 26 bp, Homo sapiens
acaactcttaggatgccactttggtt

SEQ ID NO: 6770 - DNA, 26 bp, Homo sapiens
caactcttaggatgccactttggttc

SEQ ID NO: 6771 - DNA, 26 bp, Homo sapiens
aactcttaggatgccactttggttct

SEQ ID NO: 6772 - DNA, 26 bp, Homo sapiens
actcttaggatgccactttggttctt

SEQ ID NO: 6773 - DNA, 26 bp, Homo sapiens
ctcttaggatgccactttggttcttt

SEQ ID NO: 6774 - DNA, 26 bp, Homo sapiens
tcttaggatgccactttggttctttg

SEQ ID NO: 6775 - DNA, 26 bp, Homo sapiens
cttaggatgccactttggttctttgt

SEQ ID NO: 6776 - DNA, 26 bp, Homo sapiens
ttaggatgccactttggttctttgtt

SEQ ID NO: 6777 - DNA, 26 bp, Homo sapiens
taggatgccactttggttctttgttt

SEQ ID NO: 6778 - DNA, 26 bp, Homo sapiens
aggatgccactttggttctttgtttt

SEQ ID NO: 6779 - DNA, 26 bp, Homo sapiens
ggatgccactttggttctttgtttta

SEQ ID NO: 6780 - DNA, 26 bp, Homo sapiens
gatgccactttggttctttgttttac

SEQ ID NO: 6781 - DNA, 26 bp, Homo sapiens
atgccactttggttctttgttttaca

SEQ ID NO: 6782 - DNA, 26 bp, Homo sapiens
tgccactttggttctttgttttacag

SEQ ID NO: 6783 - DNA, 26 bp, Homo sapiens
gccactttggttctttgttttacagt

SEQ ID NO: 6784 - DNA, 26 bp, Homo sapiens
ccactttggttctttgttttacagtg

SEQ ID NO: 6785 - DNA, 26 bp, Homo sapiens
cactttggttctttgttttacagtgc

SEQ ID NO: 6786 - DNA, 26 bp, Homo sapiens
actttggttctttgttttacagtgct

SEQ ID NO: 6787 - DNA, 26 bp, Homo sapiens
ctttggttctttgttttacagtgcta

SEQ ID NO: 6788 - DNA, 26 bp, Homo sapiens
tttggttctttgttttacagtgctaa

SEQ ID NO: 6789 - DNA, 26 bp, Homo sapiens
ttggttctttgttttacagtgctaat

SEQ ID NO: 6790 - DNA, 26 bp, Homo sapiens
tggttctttgttttacagtgctaatt

SEQ ID NO: 6791 - DNA, 26 bp, Homo sapiens
ggttctttgttttacagtgctaattt

SEQ ID NO: 6792 - DNA, 26 bp, Homo sapiens
gttctttgttttacagtgctaatttt

SEQ ID NO: 6793 - DNA, 26 bp, Homo sapiens
ttctttgttttacagtgctaatttta

SEQ ID NO: 6794 - DNA, 26 bp, Homo sapiens
tctttgttttacagtgctaattttac

SEQ ID NO: 6795 - DNA, 26 bp, Homo sapiens
ctttgttttacagtgctaattttaca

SEQ ID NO: 6796 - DNA, 26 bp, Homo sapiens
tttgttttacagtgctaattttacaa

SEQ ID NO: 6797 - DNA, 26 bp, Homo sapiens
ttgttttacagtgctaattttacaat

SEQ ID NO: 6798 - DNA, 26 bp, Homo sapiens
tgttttacagtgctaattttacaatt

SEQ ID NO: 6799 - DNA, 26 bp, Homo sapiens
gttttacagtgctaattttacaattg

SEQ ID NO: 6800 - DNA, 26 bp, Homo sapiens
ttttacagtgctaattttacaattgg

SEQ ID NO: 6801 - DNA, 26 bp, Homo sapiens
tttacagtgctaattttacaattgga

SEQ ID NO: 6802 - DNA, 26 bp, Homo sapiens
ttacagtgctaattttacaattggaa

SEQ ID NO: 6803 - DNA, 26 bp, Homo sapiens
tacagtgctaattttacaattggaaa

SEQ ID NO: 6804 - DNA, 26 bp, Homo sapiens
acagtgctaattttacaattggaaaa

SEQ ID NO: 6805 - DNA, 26 bp, Homo sapiens
cagtgctaattttacaattggaaaaa

SEQ ID NO: 6806 - DNA, 26 bp, Homo sapiens
agtgctaattttacaattggaaaaaa

SEQ ID NO: 6807 - DNA, 26 bp, Homo sapiens
gtgctaattttacaattggaaaaaat

SEQ ID NO: 6808 - DNA, 26 bp, Homo sapiens
tgctaattttacaattggaaaaaatt

SEQ ID NO: 6809 - DNA, 26 bp, Homo sapiens
gctaattttacaattggaaaaaattc

SEQ ID NO: 6810 - DNA, 26 bp, Homo sapiens
ctaattttacaattggaaaaaattct

SEQ ID NO: 6811 - DNA, 26 bp, Homo sapiens
taattttacaattggaaaaaattctg

SEQ ID NO: 6812 - DNA, 26 bp, Homo sapiens
aattttacaattggaaaaaattctgt

SEQ ID NO: 6813 - DNA, 26 bp, Homo sapiens
attttacaattggaaaaaattctgtc

SEQ ID NO: 6814 - DNA, 26 bp, Homo sapiens
ttttacaattggaaaaaattctgtca

SEQ ID NO: 6815 - DNA, 26 bp, Homo sapiens
tttacaattggaaaaaattctgtcat

SEQ ID NO: 6816 - DNA, 26 bp, Homo sapiens
ttacaattggaaaaaattctgtcatt

SEQ ID NO: 6817 - DNA, 26 bp, Homo sapiens
tacaattggaaaaaattctgtcattt

SEQ ID NO: 6818 - DNA, 26 bp, Homo sapiens
acaattggaaaaaattctgtcatttg

SEQ ID NO: 6819 - DNA, 26 bp, Homo sapiens
caattggaaaaaattctgtcatttga

SEQ ID NO: 6820 - DNA, 26 bp, Homo sapiens
aattggaaaaaattctgtcatttgaa

SEQ ID NO: 6821 - DNA, 26 bp, Homo sapiens
attggaaaaaattctgtcatttgaaa

SEQ ID NO: 6822 - DNA, 26 bp, Homo sapiens
ttggaaaaaattctgtcatttgaaaa

SEQ ID NO: 6823 - DNA, 26 bp, Homo sapiens
tggaaaaaattctgtcatttgaaaag

SEQ ID NO: 6824 - DNA, 26 bp, Homo sapiens
ggaaaaaattctgtcatttgaaaagt

SEQ ID NO: 6825 - DNA, 26 bp, Homo sapiens
gaaaaaattctgtcatttgaaaagtc

SEQ ID NO: 6826 - DNA, 26 bp, Homo sapiens
aaaaaattctgtcatttgaaaagtca

SEQ ID NO: 6827 - DNA, 26 bp, Homo sapiens
aaaaattctgtcatttgaaaagtcaa

SEQ ID NO: 6828 - DNA, 26 bp, Homo sapiens
aaaattctgtcatttgaaaagtcaag

SEQ ID NO: 6829 - DNA, 26 bp, Homo sapiens
aaattctgtcatttgaaaagtcaagg

SEQ ID NO: 6830 - DNA, 26 bp, Homo sapiens
aattctgtcatttgaaaagtcaaggg

SEQ ID NO: 6831 - DNA, 26 bp, Homo sapiens
attctgtcatttgaaaagtcaaggga

SEQ ID NO: 6832 - DNA, 26 bp, Homo sapiens
ttctgtcatttgaaaagtcaagggat

SEQ ID NO: 6833 - DNA, 26 bp, Homo sapiens
tctgtcatttgaaaagtcaagggatg

SEQ ID NO: 6834 - DNA, 26 bp, Homo sapiens
ctgtcatttgaaaagtcaagggatga

SEQ ID NO: 6835 - DNA, 26 bp, Homo sapiens
tgtcatttgaaaagtcaagggatgac

SEQ ID NO: 6836 - DNA, 26 bp, Homo sapiens
gtcatttgaaaagtcaagggatgact

SEQ ID NO: 6837 - DNA, 26 bp, Homo sapiens
tcatttgaaaagtcaagggatgactc

SEQ ID NO: 6838 - DNA, 26 bp, Homo sapiens
catttgaaaagtcaagggatgactca

SEQ ID NO: 6839 - DNA, 26 bp, Homo sapiens
atttgaaaagtcaagggatgactcac

SEQ ID NO: 6840 - DNA, 26 bp, Homo sapiens
tttgaaaagtcaagggatgactcact

SEQ ID NO: 6841 - DNA, 26 bp, Homo sapiens
ttgaaaagtcaagggatgactcactg

SEQ ID NO: 6842 - DNA, 26 bp, Homo sapiens
tgaaaagtcaagggatgactcactgc

SEQ ID NO: 6843 - DNA, 26 bp, Homo sapiens
gaaaagtcaagggatgactcactgct

SEQ ID NO: 6844 - DNA, 26 bp, Homo sapiens
aaaagtcaagggatgactcactgctg

SEQ ID NO: 6845 - DNA, 26 bp, Homo sapiens
aaagtcaagggatgactcactgctga

SEQ ID NO: 6846 - DNA, 26 bp, Homo sapiens
aagtcaagggatgactcactgctgaa

SEQ ID NO: 6847 - DNA, 26 bp, Homo sapiens
agtcaagggatgactcactgctgaaa

SEQ ID NO: 6848 - DNA, 26 bp, Homo sapiens
gtcaagggatgactcactgctgaaat

SEQ ID NO: 6849 - DNA, 26 bp, Homo sapiens
tcaagggatgactcactgctgaaatg

SEQ ID NO: 6850 - DNA, 26 bp, Homo sapiens
caagggatgactcactgctgaaatga

SEQ ID NO: 6851 - DNA, 26 bp, Homo sapiens
aagggatgactcactgctgaaatgaa

SEQ ID NO: 6852 - DNA, 26 bp, Homo sapiens
agggatgactcactgctgaaatgaag

SEQ ID NO: 6853 - DNA, 26 bp, Homo sapiens
gggatgactcactgctgaaatgaaga

SEQ ID NO: 6854 - DNA, 26 bp, Homo sapiens
ggatgactcactgctgaaatgaagag

SEQ ID NO: 6855 - DNA, 26 bp, Homo sapiens
gatgactcactgctgaaatgaagaga

SEQ ID NO: 6856 - DNA, 26 bp, Homo sapiens
atgactcactgctgaaatgaagagag

SEQ ID NO: 6857 - DNA, 26 bp, Homo sapiens
tgactcactgctgaaatgaagagagg

SEQ ID NO: 6858 - DNA, 26 bp, Homo sapiens
gactcactgctgaaatgaagagaggt

SEQ ID NO: 6859 - DNA, 26 bp, Homo sapiens
actcactgctgaaatgaagagaggtg

SEQ ID NO: 6860 - DNA, 26 bp, Homo sapiens
ctcactgctgaaatgaagagaggtgg

SEQ ID NO: 6861 - DNA, 26 bp, Homo sapiens
tcactgctgaaatgaagagaggtggc

SEQ ID NO: 6862 - DNA, 26 bp, Homo sapiens
cactgctgaaatgaagagaggtggct

SEQ ID NO: 6863 - DNA, 26 bp, Homo sapiens
actgctgaaatgaagagaggtggctc

SEQ ID NO: 6864 - DNA, 26 bp, Homo sapiens
ctgctgaaatgaagagaggtggctcc

SEQ ID NO: 6865 - DNA, 26 bp, Homo sapiens
tgctgaaatgaagagaggtggctccc

SEQ ID NO: 6866 - DNA, 26 bp, Homo sapiens
gctgaaatgaagagaggtggctccca

SEQ ID NO: 6867 - DNA, 26 bp, Homo sapiens
ctgaaatgaagagaggtggctcccaa

SEQ ID NO: 6868 - DNA, 26 bp, Homo sapiens
tgaaatgaagagaggtggctcccaac

SEQ ID NO: 6869 - DNA, 26 bp, Homo sapiens
gaaatgaagagaggtggctcccaacc

SEQ ID NO: 6870 - DNA, 26 bp, Homo sapiens
aaatgaagagaggtggctcccaacct

SEQ ID NO: 6871 - DNA, 26 bp, Homo sapiens
aatgaagagaggtggctcccaacctg

SEQ ID NO: 6872 - DNA, 26 bp, Homo sapiens
atgaagagaggtggctcccaacctgc

SEQ ID NO: 6873 - DNA, 26 bp, Homo sapiens
tgaagagaggtggctcccaacctgct

SEQ ID NO: 6874 - DNA, 26 bp, Homo sapiens
gaagagaggtggctcccaacctgctg

SEQ ID NO: 6875 - DNA, 26 bp, Homo sapiens
aagagaggtggctcccaacctgctga

SEQ ID NO: 6876 - DNA, 26 bp, Homo sapiens
agagaggtggctcccaacctgctgaa

SEQ ID NO: 6877 - DNA, 26 bp, Homo sapiens
gagaggtggctcccaacctgctgaaa

SEQ ID NO: 6878 - DNA, 26 bp, Homo sapiens
agaggtggctcccaacctgctgaaaa

SEQ ID NO: 6879 - DNA, 26 bp, Homo sapiens
gaggtggctcccaacctgctgaaaac

SEQ ID NO: 6880 - DNA, 26 bp, Homo sapiens
aggtggctcccaacctgctgaaaact

SEQ ID NO: 6881 - DNA, 26 bp, Homo sapiens
ggtggctcccaacctgctgaaaactc

SEQ ID NO: 6882 - DNA, 26 bp, Homo sapiens
gtggctcccaacctgctgaaaactcg

SEQ ID NO: 6883 - DNA, 26 bp, Homo sapiens
tggctcccaacctgctgaaaactcga

SEQ ID NO: 6884 - DNA, 26 bp, Homo sapiens
ggctcccaacctgctgaaaactcgac

SEQ ID NO: 6885 - DNA, 26 bp, Homo sapiens
gctcccaacctgctgaaaactcgacc

SEQ ID NO: 6886 - DNA, 26 bp, Homo sapiens
ctcccaacctgctgaaaactcgacca

SEQ ID NO: 6887 - DNA, 26 bp, Homo sapiens
tcccaacctgctgaaaactcgaccaa

SEQ ID NO: 6888 - DNA, 26 bp, Homo sapiens
cccaacctgctgaaaactcgaccaag

SEQ ID NO: 6889 - DNA, 26 bp, Homo sapiens
ccaacctgctgaaaactcgaccaagt

SEQ ID NO: 6890 - DNA, 26 bp, Homo sapiens
caacctgctgaaaactcgaccaagtc

SEQ ID NO: 6891 - DNA, 26 bp, Homo sapiens
aacctgctgaaaactcgaccaagtcc

SEQ ID NO: 6892 - DNA, 26 bp, Homo sapiens
acctgctgaaaactcgaccaagtcca

SEQ ID NO: 6893 - DNA, 26 bp, Homo sapiens
cctgctgaaaactcgaccaagtccac

SEQ ID NO: 6894 - DNA, 26 bp, Homo sapiens
ctgctgaaaactcgaccaagtccacg

SEQ ID NO: 6895 - DNA, 26 bp, Homo sapiens
tgctgaaaactcgaccaagtccacgg

SEQ ID NO: 6896 - DNA, 26 bp, Homo sapiens
gctgaaaactcgaccaagtccacggg

SEQ ID NO: 6897 - DNA, 26 bp, Homo sapiens
ctgaaaactcgaccaagtccacggga

SEQ ID NO: 6898 - DNA, 26 bp, Homo sapiens
tgaaaactcgaccaagtccacgggag

SEQ ID NO: 6899 - DNA, 26 bp, Homo sapiens
gaaaactcgaccaagtccacgggagt

SEQ ID NO: 6900 - DNA, 26 bp, Homo sapiens
aaaactcgaccaagtccacgggagtt

SEQ ID NO: 6901 - DNA, 26 bp, Homo sapiens
aaactcgaccaagtccacgggagtta

SEQ ID NO: 6902 - DNA, 26 bp, Homo sapiens
aactcgaccaagtccacgggagttaa

SEQ ID NO: 6903 - DNA, 26 bp, Homo sapiens
actcgaccaagtccacgggagttaaa

SEQ ID NO: 6904 - DNA, 26 bp, Homo sapiens
ctcgaccaagtccacgggagttaaat

SEQ ID NO: 6905 - DNA, 26 bp, Homo sapiens
tcgaccaagtccacgggagttaaatt

SEQ ID NO: 6906 - DNA, 26 bp, Homo sapiens
cgaccaagtccacgggagttaaatta

SEQ ID NO: 6907 - DNA, 26 bp, Homo sapiens
gaccaagtccacgggagttaaattac

SEQ ID NO: 6908 - DNA, 26 bp, Homo sapiens
accaagtccacgggagttaaattaca

SEQ ID NO: 6909 - DNA, 26 bp, Homo sapiens
ccaagtccacgggagttaaattacag

SEQ ID NO: 6910 - DNA, 26 bp, Homo sapiens
caagtccacgggagttaaattacaga

SEQ ID NO: 6911 - DNA, 26 bp, Homo sapiens
aagtccacgggagttaaattacagag

SEQ ID NO: 6912 - DNA, 26 bp, Homo sapiens
agtccacgggagttaaattacagaga

SEQ ID NO: 6913 - DNA, 26 bp, Homo sapiens
gtccacgggagttaaattacagagat

SEQ ID NO: 6914 - DNA, 26 bp, Homo sapiens
tccacgggagttaaattacagagatt

SEQ ID NO: 6915 - DNA, 26 bp, Homo sapiens
ccacgggagttaaattacagagattc

SEQ ID NO: 6916 - DNA, 26 bp, Homo sapiens
cacgggagttaaattacagagattca

SEQ ID NO: 6917 - DNA, 26 bp, Homo sapiens
acgggagttaaattacagagattcaa

SEQ ID NO: 6918 - DNA, 26 bp, Homo sapiens
cgggagttaaattacagagattcaaa

SEQ ID NO: 6919 - DNA, 26 bp, Homo sapiens
gggagttaaattacagagattcaaac

SEQ ID NO: 6920 - DNA, 26 bp, Homo sapiens
ggagttaaattacagagattcaaacc

SEQ ID NO: 6921 - DNA, 26 bp, Homo sapiens
gagttaaattacagagattcaaacct

SEQ ID NO: 6922 - DNA, 26 bp, Homo sapiens
agttaaattacagagattcaaacctg

SEQ ID NO: 6923 - DNA, 26 bp, Homo sapiens
gttaaattacagagattcaaacctgc

SEQ ID NO: 6924 - DNA, 26 bp, Homo sapiens
ttaaattacagagattcaaacctgca

SEQ ID NO: 6925 - DNA, 26 bp, Homo sapiens
taaattacagagattcaaacctgcaa

SEQ ID NO: 6926 - DNA, 26 bp, Homo sapiens
aaattacagagattcaaacctgcaaa

SEQ ID NO: 6927 - DNA, 26 bp, Homo sapiens
aattacagagattcaaacctgcaaag

SEQ ID NO: 6928 - DNA, 26 bp, Homo sapiens
attacagagattcaaacctgcaaagc

SEQ ID NO: 6929 - DNA, 26 bp, Homo sapiens
ttacagagattcaaacctgcaaagct

SEQ ID NO: 6930 - DNA, 26 bp, Homo sapiens
tacagagattcaaacctgcaaagcta

SEQ ID NO: 6931 - DNA, 26 bp, Homo sapiens
acagagattcaaacctgcaaagctaa

SEQ ID NO: 6932 - DNA, 26 bp, Homo sapiens
cagagattcaaacctgcaaagctaaa

SEQ ID NO: 6933 - DNA, 26 bp, Homo sapiens
agagattcaaacctgcaaagctaaac

SEQ ID NO: 6934 - DNA, 26 bp, Homo sapiens
gagattcaaacctgcaaagctaaact

SEQ ID NO: 6935 - DNA, 26 bp, Homo sapiens
agattcaaacctgcaaagctaaactt

SEQ ID NO: 6936 - DNA, 26 bp, Homo sapiens
gattcaaacctgcaaagctaaacttc

SEQ ID NO: 6937 - DNA, 26 bp, Homo sapiens
attcaaacctgcaaagctaaacttct

SEQ ID NO: 6938 - DNA, 26 bp, Homo sapiens
ttcaaacctgcaaagctaaacttctg

SEQ ID NO: 6939 - DNA, 26 bp, Homo sapiens
tcaaacctgcaaagctaaacttctgt

SEQ ID NO: 6940 - DNA, 26 bp, Homo sapiens
caaacctgcaaagctaaacttctgtg

SEQ ID NO: 6941 - DNA, 26 bp, Homo sapiens
aaacctgcaaagctaaacttctgtga

SEQ ID NO: 6942 - DNA, 26 bp, Homo sapiens
aacctgcaaagctaaacttctgtgaa

SEQ ID NO: 6943 - DNA, 26 bp, Homo sapiens
acctgcaaagctaaacttctgtgaat

SEQ ID NO: 6944 - DNA, 26 bp, Homo sapiens
cctgcaaagctaaacttctgtgaatt

SEQ ID NO: 6945 - DNA, 26 bp, Homo sapiens
ctgcaaagctaaacttctgtgaattc

SEQ ID NO: 6946 - DNA, 26 bp, Homo sapiens
tgcaaagctaaacttctgtgaattca

SEQ ID NO: 6947 - DNA, 26 bp, Homo sapiens
gcaaagctaaacttctgtgaattcag

SEQ ID NO: 6948 - DNA, 26 bp, Homo sapiens
caaagctaaacttctgtgaattcagg

SEQ ID NO: 6949 - DNA, 26 bp, Homo sapiens
aaagctaaacttctgtgaattcagga

SEQ ID NO: 6950 - DNA, 26 bp, Homo sapiens
aagctaaacttctgtgaattcaggat

SEQ ID NO: 6951 - DNA, 26 bp, Homo sapiens
agctaaacttctgtgaattcaggatg

SEQ ID NO: 6952 - DNA, 26 bp, Homo sapiens
gctaaacttctgtgaattcaggatgc

SEQ ID NO: 6953 - DNA, 26 bp, Homo sapiens
ctaaacttctgtgaattcaggatgca

SEQ ID NO: 6954 - DNA, 26 bp, Homo sapiens
taaacttctgtgaattcaggatgcaa

SEQ ID NO: 6955 - DNA, 26 bp, Homo sapiens
aaacttctgtgaattcaggatgcaac

SEQ ID NO: 6956 - DNA, 26 bp, Homo sapiens
aacttctgtgaattcaggatgcaaca

SEQ ID NO: 6957 - DNA, 26 bp, Homo sapiens
acttctgtgaattcaggatgcaacat

SEQ ID NO: 6958 - DNA, 26 bp, Homo sapiens
cttctgtgaattcaggatgcaacatg

SEQ ID NO: 6959 - DNA, 26 bp, Homo sapiens
ttctgtgaattcaggatgcaacatgc

SEQ ID NO: 6960 - DNA, 26 bp, Homo sapiens
tctgtgaattcaggatgcaacatgct

SEQ ID NO: 6961 - DNA, 26 bp, Homo sapiens
ctgtgaattcaggatgcaacatgctt

SEQ ID NO: 6962 - DNA, 26 bp, Homo sapiens
tgtgaattcaggatgcaacatgctta

SEQ ID NO: 6963 - DNA, 26 bp, Homo sapiens
gtgaattcaggatgcaacatgcttaa

SEQ ID NO: 6964 - DNA, 26 bp, Homo sapiens
tgaattcaggatgcaacatgcttaac

SEQ ID NO: 6965 - DNA, 26 bp, Homo sapiens
gaattcaggatgcaacatgcttaact

SEQ ID NO: 6966 - DNA, 26 bp, Homo sapiens
aattcaggatgcaacatgcttaactg

SEQ ID NO: 6967 - DNA, 26 bp, Homo sapiens
attcaggatgcaacatgcttaactga

SEQ ID NO: 6968 - DNA, 26 bp, Homo sapiens
ttcaggatgcaacatgcttaactgat

SEQ ID NO: 6969 - DNA, 26 bp, Homo sapiens
tcaggatgcaacatgcttaactgatg

SEQ ID NO: 6970 - DNA, 26 bp, Homo sapiens
caggatgcaacatgcttaactgatga

SEQ ID NO: 6971 - DNA, 26 bp, Homo sapiens
aggatgcaacatgcttaactgatgac

SEQ ID NO: 6972 - DNA, 26 bp, Homo sapiens
ggatgcaacatgcttaactgatgact

SEQ ID NO: 6973 - DNA, 26 bp, Homo sapiens
gatgcaacatgcttaactgatgactg

SEQ ID NO: 6974 - DNA, 26 bp, Homo sapiens
atgcaacatgcttaactgatgactgc

SEQ ID NO: 6975 - DNA, 26 bp, Homo sapiens
tgcaacatgcttaactgatgactgca

SEQ ID NO: 6976 - DNA, 26 bp, Homo sapiens
gcaacatgcttaactgatgactgcaa

SEQ ID NO: 6977 - DNA, 26 bp, Homo sapiens
caacatgcttaactgatgactgcaag

SEQ ID NO: 6978 - DNA, 26 bp, Homo sapiens
aacatgcttaactgatgactgcaagg

SEQ ID NO: 6979 - DNA, 26 bp, Homo sapiens
acatgcttaactgatgactgcaagga

SEQ ID NO: 6980 - DNA, 26 bp, Homo sapiens
catgcttaactgatgactgcaaggaa

SEQ ID NO: 6981 - DNA, 26 bp, Homo sapiens
atgcttaactgatgactgcaaggaaa

SEQ ID NO: 6982 - DNA, 26 bp, Homo sapiens
tgcttaactgatgactgcaaggaaaa

SEQ ID NO: 6983 - DNA, 26 bp, Homo sapiens
gcttaactgatgactgcaaggaaaaa

SEQ ID NO: 6984 - DNA, 26 bp, Homo sapiens
cttaactgatgactgcaaggaaaaat

SEQ ID NO: 6985 - DNA, 26 bp, Homo sapiens
ttaactgatgactgcaaggaaaaatg

SEQ ID NO: 6986 - DNA, 26 bp, Homo sapiens
taactgatgactgcaaggaaaaatgc

SEQ ID NO: 6987 - DNA, 26 bp, Homo sapiens
aactgatgactgcaaggaaaaatgcc

SEQ ID NO: 6988 - DNA, 26 bp, Homo sapiens
actgatgactgcaaggaaaaatgcca

SEQ ID NO: 6989 - DNA, 26 bp, Homo sapiens
ctgatgactgcaaggaaaaatgccaa

SEQ ID NO: 6990 - DNA, 26 bp, Homo sapiens
tgatgactgcaaggaaaaatgccaaa

SEQ ID NO: 6991 - DNA, 26 bp, Homo sapiens
gatgactgcaaggaaaaatgccaaag

SEQ ID NO: 6992 - DNA, 26 bp, Homo sapiens
atgactgcaaggaaaaatgccaaagg

SEQ ID NO: 6993 - DNA, 26 bp, Homo sapiens
tgactgcaaggaaaaatgccaaagga

SEQ ID NO: 6994 - DNA, 26 bp, Homo sapiens
gactgcaaggaaaaatgccaaaggaa

SEQ ID NO: 6995 - DNA, 26 bp, Homo sapiens
actgcaaggaaaaatgccaaaggaac

SEQ ID NO: 6996 - DNA, 26 bp, Homo sapiens
ctgcaaggaaaaatgccaaaggaact

SEQ ID NO: 6997 - DNA, 26 bp, Homo sapiens
tgcaaggaaaaatgccaaaggaactc

SEQ ID NO: 6998 - DNA, 26 bp, Homo sapiens
gcaaggaaaaatgccaaaggaactca

SEQ ID NO: 6999 - DNA, 26 bp, Homo sapiens
caaggaaaaatgccaaaggaactcaa

SEQ ID NO: 7000 - DNA, 26 bp, Homo sapiens
aaggaaaaatgccaaaggaactcaat

SEQ ID NO: 7001 - DNA, 26 bp, Homo sapiens
aggaaaaatgccaaaggaactcaatt

SEQ ID NO: 7002 - DNA, 26 bp, Homo sapiens
ggaaaaatgccaaaggaactcaattt

SEQ ID NO: 7003 - DNA, 26 bp, Homo sapiens
gaaaaatgccaaaggaactcaatttc

SEQ ID NO: 7004 - DNA, 26 bp, Homo sapiens
aaaaatgccaaaggaactcaatttca

SEQ ID NO: 7005 - DNA, 26 bp, Homo sapiens
aaaatgccaaaggaactcaatttcaa

SEQ ID NO: 7006 - DNA, 26 bp, Homo sapiens
aaatgccaaaggaactcaatttcaag

SEQ ID NO: 7007 - DNA, 26 bp, Homo sapiens
aatgccaaaggaactcaatttcaagg

SEQ ID NO: 7008 - DNA, 26 bp, Homo sapiens
atgccaaaggaactcaatttcaagga

SEQ ID NO: 7009 - DNA, 26 bp, Homo sapiens
tgccaaaggaactcaatttcaaggac

SEQ ID NO: 7010 - DNA, 26 bp, Homo sapiens
gccaaaggaactcaatttcaaggaca

SEQ ID NO: 7011 - DNA, 26 bp, Homo sapiens
ccaaaggaactcaatttcaaggacaa

SEQ ID NO: 7012 - DNA, 26 bp, Homo sapiens
caaaggaactcaatttcaaggacaat

SEQ ID NO: 7013 - DNA, 26 bp, Homo sapiens
aaaggaactcaatttcaaggacaatt

SEQ ID NO: 7014 - DNA, 26 bp, Homo sapiens
aaggaactcaatttcaaggacaatta

SEQ ID NO: 7015 - DNA, 26 bp, Homo sapiens
aggaactcaatttcaaggacaattaa

SEQ ID NO: 7016 - DNA, 26 bp, Homo sapiens
ggaactcaatttcaaggacaattaat

SEQ ID NO: 7017 - DNA, 26 bp, Homo sapiens
gaactcaatttcaaggacaattaatg

SEQ ID NO: 7018 - DNA, 26 bp, Homo sapiens
aactcaatttcaaggacaattaatga

SEQ ID NO: 7019 - DNA, 26 bp, Homo sapiens
actcaatttcaaggacaattaatgaa

SEQ ID NO: 7020 - DNA, 26 bp, Homo sapiens
ctcaatttcaaggacaattaatgaaa

SEQ ID NO: 7021 - DNA, 26 bp, Homo sapiens
tcaatttcaaggacaattaatgaaac

SEQ ID NO: 7022 - DNA, 26 bp, Homo sapiens
caatttcaaggacaattaatgaaacc

SEQ ID NO: 7023 - DNA, 26 bp, Homo sapiens
aatttcaaggacaattaatgaaaccc

SEQ ID NO: 7024 - DNA, 26 bp, Homo sapiens
atttcaaggacaattaatgaaaccca

SEQ ID NO: 7025 - DNA, 26 bp, Homo sapiens
tttcaaggacaattaatgaaacccaa

SEQ ID NO: 7026 - DNA, 26 bp, Homo sapiens
ttcaaggacaattaatgaaacccaaa

SEQ ID NO: 7027 - DNA, 26 bp, Homo sapiens
tcaaggacaattaatgaaacccaaaa

SEQ ID NO: 7028 - DNA, 26 bp, Homo sapiens
caaggacaattaatgaaacccaaaag

SEQ ID NO: 7029 - DNA, 26 bp, Homo sapiens
aaggacaattaatgaaacccaaaagg

SEQ ID NO: 7030 - DNA, 26 bp, Homo sapiens
aggacaattaatgaaacccaaaaggt

SEQ ID NO: 7031 - DNA, 26 bp, Homo sapiens
ggacaattaatgaaacccaaaaggtt

SEQ ID NO: 7032 - DNA, 26 bp, Homo sapiens
gacaattaatgaaacccaaaaggttt

SEQ ID NO: 7033 - DNA, 26 bp, Homo sapiens
acaattaatgaaacccaaaaggtttt

SEQ ID NO: 7034 - DNA, 26 bp, Homo sapiens
caattaatgaaacccaaaaggttttg

SEQ ID NO: 7035 - DNA, 26 bp, Homo sapiens
aattaatgaaacccaaaaggttttgt

SEQ ID NO: 7036 - DNA, 26 bp, Homo sapiens
attaatgaaacccaaaaggttttgtt

SEQ ID NO: 7037 - DNA, 26 bp, Homo sapiens
ttaatgaaacccaaaaggttttgtta

SEQ ID NO: 7038 - DNA, 26 bp, Homo sapiens
taatgaaacccaaaaggttttgttag

SEQ ID NO: 7039 - DNA, 26 bp, Homo sapiens
aatgaaacccaaaaggttttgttagt

SEQ ID NO: 7040 - DNA, 26 bp, Homo sapiens
atgaaacccaaaaggttttgttagta

SEQ ID NO: 7041 - DNA, 26 bp, Homo sapiens
tgaaacccaaaaggttttgttagtaa

SEQ ID NO: 7042 - DNA, 26 bp, Homo sapiens
gaaacccaaaaggttttgttagtaag

SEQ ID NO: 7043 - DNA, 26 bp, Homo sapiens
aaacccaaaaggttttgttagtaaga

SEQ ID NO: 7044 - DNA, 26 bp, Homo sapiens
aacccaaaaggttttgttagtaagac

SEQ ID NO: 7045 - DNA, 26 bp, Homo sapiens
acccaaaaggttttgttagtaagaca

SEQ ID NO: 7046 - DNA, 26 bp, Homo sapiens
cccaaaaggttttgttagtaagacaa

SEQ ID NO: 7047 - DNA, 26 bp, Homo sapiens
ccaaaaggttttgttagtaagacaat

SEQ ID NO: 7048 - DNA, 26 bp, Homo sapiens
caaaaggttttgttagtaagacaatg

SEQ ID NO: 7049 - DNA, 26 bp, Homo sapiens
aaaaggttttgttagtaagacaatgg

SEQ ID NO: 7050 - DNA, 26 bp, Homo sapiens
aaaggttttgttagtaagacaatgga

SEQ ID NO: 7051 - DNA, 26 bp, Homo sapiens
aaggttttgttagtaagacaatggag

SEQ ID NO: 7052 - DNA, 26 bp, Homo sapiens
aggttttgttagtaagacaatggaga

SEQ ID NO: 7053 - DNA, 26 bp, Homo sapiens
ggttttgttagtaagacaatggagaa

SEQ ID NO: 7054 - DNA, 26 bp, Homo sapiens
gttttgttagtaagacaatggagaaa

SEQ ID NO: 7055 - DNA, 26 bp, Homo sapiens
ttttgttagtaagacaatggagaaac

SEQ ID NO: 7056 - DNA, 26 bp, Homo sapiens
tttgttagtaagacaatggagaaact

SEQ ID NO: 7057 - DNA, 26 bp, Homo sapiens
ttgttagtaagacaatggagaaactt

SEQ ID NO: 7058 - DNA, 26 bp, Homo sapiens
tgttagtaagacaatggagaaacttc

SEQ ID NO: 7059 - DNA, 26 bp, Homo sapiens
gttagtaagacaatggagaaacttct

SEQ ID NO: 7060 - DNA, 26 bp, Homo sapiens
ttagtaagacaatggagaaacttctt

SEQ ID NO: 7061 - DNA, 26 bp, Homo sapiens
tagtaagacaatggagaaacttcttt

SEQ ID NO: 7062 - DNA, 26 bp, Homo sapiens
agtaagacaatggagaaacttcttta

SEQ ID NO: 7063 - DNA, 26 bp, Homo sapiens
gtaagacaatggagaaacttctttaa

SEQ ID NO: 7064 - DNA, 26 bp, Homo sapiens
taagacaatggagaaacttctttaac

SEQ ID NO: 7065 - DNA, 26 bp, Homo sapiens
aagacaatggagaaacttctttaacg

SEQ ID NO: 7066 - DNA, 26 bp, Homo sapiens
agacaatggagaaacttctttaacgt

SEQ ID NO: 7067 - DNA, 26 bp, Homo sapiens
gacaatggagaaacttctttaacgtc

SEQ ID NO: 7068 - DNA, 26 bp, Homo sapiens
acaatggagaaacttctttaacgtca

SEQ ID NO: 7069 - DNA, 26 bp, Homo sapiens
caatggagaaacttctttaacgtcaa

SEQ ID NO: 7070 - DNA, 26 bp, Homo sapiens
aatggagaaacttctttaacgtcaat

SEQ ID NO: 7071 - DNA, 26 bp, Homo sapiens
atggagaaacttctttaacgtcaatt

SEQ ID NO: 7072 - DNA, 26 bp, Homo sapiens
tggagaaacttctttaacgtcaattt

SEQ ID NO: 7073 - DNA, 26 bp, Homo sapiens
ggagaaacttctttaacgtcaatttt

SEQ ID NO: 7074 - DNA, 26 bp, Homo sapiens
gagaaacttctttaacgtcaattttc

SEQ ID NO: 7075 - DNA, 26 bp, Homo sapiens
agaaacttctttaacgtcaattttct

SEQ ID NO: 7076 - DNA, 26 bp, Homo sapiens
gaaacttctttaacgtcaattttctt

SEQ ID NO: 7077 - DNA, 26 bp, Homo sapiens
aaacttctttaacgtcaattttcttc

SEQ ID NO: 7078 - DNA, 26 bp, Homo sapiens
aacttctttaacgtcaattttcttcc

SEQ ID NO: 7079 - DNA, 26 bp, Homo sapiens
acttctttaacgtcaattttcttcca

SEQ ID NO: 7080 - DNA, 26 bp, Homo sapiens
cttctttaacgtcaattttcttccaa

SEQ ID NO: 7081 - DNA, 26 bp, Homo sapiens
ttctttaacgtcaattttcttccaat

SEQ ID NO: 7082 - DNA, 26 bp, Homo sapiens
tctttaacgtcaattttcttccaatt

SEQ ID NO: 7083 - DNA, 26 bp, Homo sapiens
ctttaacgtcaattttcttccaattg

SEQ ID NO: 7084 - DNA, 26 bp, Homo sapiens
tttaacgtcaattttcttccaattgt

SEQ ID NO: 7085 - DNA, 26 bp, Homo sapiens
ttaacgtcaattttcttccaattgtc

SEQ ID NO: 7086 - DNA, 26 bp, Homo sapiens
taacgtcaattttcttccaattgtca

SEQ ID NO: 7087 - DNA, 26 bp, Homo sapiens
aacgtcaattttcttccaattgtcaa

SEQ ID NO: 7088 - DNA, 26 bp, Homo sapiens
acgtcaattttcttccaattgtcaat

SEQ ID NO: 7089 - DNA, 26 bp, Homo sapiens
cgtcaattttcttccaattgtcaatg

SEQ ID NO: 7090 - DNA, 26 bp, Homo sapiens
gtcaattttcttccaattgtcaatga

SEQ ID NO: 7091 - DNA, 26 bp, Homo sapiens
tcaattttcttccaattgtcaatgat

SEQ ID NO: 7092 - DNA, 26 bp, Homo sapiens
caattttcttccaattgtcaatgatt

SEQ ID NO: 7093 - DNA, 26 bp, Homo sapiens
aattttcttccaattgtcaatgatta

SEQ ID NO: 7094 - DNA, 26 bp, Homo sapiens
attttcttccaattgtcaatgattag

SEQ ID NO: 7095 - DNA, 26 bp, Homo sapiens
ttttcttccaattgtcaatgattagt

SEQ ID NO: 7096 - DNA, 26 bp, Homo sapiens
tttcttccaattgtcaatgattagtt

SEQ ID NO: 7097 - DNA, 26 bp, Homo sapiens
ttcttccaattgtcaatgattagtta

SEQ ID NO: 7098 - DNA, 26 bp, Homo sapiens
tcttccaattgtcaatgattagttaa

SEQ ID NO: 7099 - DNA, 26 bp, Homo sapiens
cttccaattgtcaatgattagttaaa

SEQ ID NO: 7100 - DNA, 26 bp, Homo sapiens
ttccaattgtcaatgattagttaaaa

SEQ ID NO: 7101 - DNA, 26 bp, Homo sapiens
tccaattgtcaatgattagttaaaaa

SEQ ID NO: 7102 - DNA, 26 bp, Homo sapiens
ccaattgtcaatgattagttaaaaag

SEQ ID NO: 7103 - DNA, 26 bp, Homo sapiens
caattgtcaatgattagttaaaaaga

SEQ ID NO: 7104 - DNA, 26 bp, Homo sapiens
aattgtcaatgattagttaaaaagaa

SEQ ID NO: 7105 - DNA, 26 bp, Homo sapiens
attgtcaatgattagttaaaaagaaa

SEQ ID NO: 7106 - DNA, 26 bp, Homo sapiens
ttgtcaatgattagttaaaaagaaaa

SEQ ID NO: 7107 - DNA, 26 bp, Homo sapiens
tgtcaatgattagttaaaaagaaaag

SEQ ID NO: 7108 - DNA, 26 bp, Homo sapiens
gtcaatgattagttaaaaagaaaaga

SEQ ID NO: 7109 - DNA, 26 bp, Homo sapiens
tcaatgattagttaaaaagaaaagag

SEQ ID NO: 7110 - DNA, 26 bp, Homo sapiens
caatgattagttaaaaagaaaagagt

SEQ ID NO: 7111 - DNA, 26 bp, Homo sapiens
aatgattagttaaaaagaaaagagtg

SEQ ID NO: 7112 - DNA, 26 bp, Homo sapiens
atgattagttaaaaagaaaagagtgc

SEQ ID NO: 7113 - DNA, 26 bp, Homo sapiens
tgattagttaaaaagaaaagagtgca

SEQ ID NO: 7114 - DNA, 26 bp, Homo sapiens
gattagttaaaaagaaaagagtgcag

SEQ ID NO: 7115 - DNA, 26 bp, Homo sapiens
attagttaaaaagaaaagagtgcagc

SEQ ID NO: 7116 - DNA, 26 bp, Homo sapiens
ttagttaaaaagaaaagagtgcagct

SEQ ID NO: 7117 - DNA, 26 bp, Homo sapiens
tagttaaaaagaaaagagtgcagctc

SEQ ID NO: 7118 - DNA, 26 bp, Homo sapiens
agttaaaaagaaaagagtgcagctca

SEQ ID NO: 7119 - DNA, 26 bp, Homo sapiens
gttaaaaagaaaagagtgcagctcat

SEQ ID NO: 7120 - DNA, 26 bp, Homo sapiens
ttaaaaagaaaagagtgcagctcatg

SEQ ID NO: 7121 - DNA, 26 bp, Homo sapiens
taaaaagaaaagagtgcagctcatga

SEQ ID NO: 7122 - DNA, 26 bp, Homo sapiens
aaaaagaaaagagtgcagctcatgac

SEQ ID NO: 7123 - DNA, 26 bp, Homo sapiens
aaaagaaaagagtgcagctcatgaca

SEQ ID NO: 7124 - DNA, 26 bp, Homo sapiens
aaagaaaagagtgcagctcatgacaa

SEQ ID NO: 7125 - DNA, 26 bp, Homo sapiens
aagaaaagagtgcagctcatgacaag

SEQ ID NO: 7126 - DNA, 26 bp, Homo sapiens
agaaaagagtgcagctcatgacaagc

SEQ ID NO: 7127 - DNA, 26 bp, Homo sapiens
gaaaagagtgcagctcatgacaagca

SEQ ID NO: 7128 - DNA, 26 bp, Homo sapiens
aaaagagtgcagctcatgacaagcag

SEQ ID NO: 7129 - DNA, 26 bp, Homo sapiens
aaagagtgcagctcatgacaagcagg

SEQ ID NO: 7130 - DNA, 26 bp, Homo sapiens
aagagtgcagctcatgacaagcaggc

SEQ ID NO: 7131 - DNA, 26 bp, Homo sapiens
agagtgcagctcatgacaagcaggcc

SEQ ID NO: 7132 - DNA, 26 bp, Homo sapiens
gagtgcagctcatgacaagcaggccc

SEQ ID NO: 7133 - DNA, 26 bp, Homo sapiens
agtgcagctcatgacaagcaggccct

SEQ ID NO: 7134 - DNA, 26 bp, Homo sapiens
gtgcagctcatgacaagcaggccctg

SEQ ID NO: 7135 - DNA, 26 bp, Homo sapiens
tgcagctcatgacaagcaggccctgc

SEQ ID NO: 7136 - DNA, 26 bp, Homo sapiens
gcagctcatgacaagcaggccctgcc

SEQ ID NO: 7137 - DNA, 26 bp, Homo sapiens
cagctcatgacaagcaggccctgcct

SEQ ID NO: 7138 - DNA, 26 bp, Homo sapiens
agctcatgacaagcaggccctgcctc

SEQ ID NO: 7139 - DNA, 26 bp, Homo sapiens
gctcatgacaagcaggccctgcctct

SEQ ID NO: 7140 - DNA, 26 bp, Homo sapiens
ctcatgacaagcaggccctgcctctc

SEQ ID NO: 7141 - DNA, 26 bp, Homo sapiens
tcatgacaagcaggccctgcctctca

SEQ ID NO: 7142 - DNA, 26 bp, Homo sapiens
catgacaagcaggccctgcctctcat

SEQ ID NO: 7143 - DNA, 26 bp, Homo sapiens
atgacaagcaggccctgcctctcatc

SEQ ID NO: 7144 - DNA, 26 bp, Homo sapiens
tgacaagcaggccctgcctctcatcc

SEQ ID NO: 7145 - DNA, 26 bp, Homo sapiens
gacaagcaggccctgcctctcatcct

SEQ ID NO: 7146 - DNA, 26 bp, Homo sapiens
acaagcaggccctgcctctcatcctt

SEQ ID NO: 7147 - DNA, 26 bp, Homo sapiens
caagcaggccctgcctctcatccttc

SEQ ID NO: 7148 - DNA, 26 bp, Homo sapiens
aagcaggccctgcctctcatccttcc

SEQ ID NO: 7149 - DNA, 26 bp, Homo sapiens
agcaggccctgcctctcatccttccc

SEQ ID NO: 7150 - DNA, 26 bp, Homo sapiens
gcaggccctgcctctcatccttccca

SEQ ID NO: 7151 - DNA, 26 bp, Homo sapiens
caggccctgcctctcatccttcccag

SEQ ID NO: 7152 - DNA, 26 bp, Homo sapiens
aggccctgcctctcatccttcccaga

SEQ ID NO: 7153 - DNA, 26 bp, Homo sapiens
ggccctgcctctcatccttcccagat

SEQ ID NO: 7154 - DNA, 26 bp, Homo sapiens
gccctgcctctcatccttcccagatc

SEQ ID NO: 7155 - DNA, 26 bp, Homo sapiens
ccctgcctctcatccttcccagatct

SEQ ID NO: 7156 - DNA, 26 bp, Homo sapiens
cctgcctctcatccttcccagatctt

SEQ ID NO: 7157 - DNA, 26 bp, Homo sapiens
ctgcctctcatccttcccagatcttt

SEQ ID NO: 7158 - DNA, 26 bp, Homo sapiens
tgcctctcatccttcccagatcttta

SEQ ID NO: 7159 - DNA, 26 bp, Homo sapiens
gcctctcatccttcccagatctttac

SEQ ID NO: 7160 - DNA, 26 bp, Homo sapiens
cctctcatccttcccagatctttaca

SEQ ID NO: 7161 - DNA, 26 bp, Homo sapiens
ctctcatccttcccagatctttacat

SEQ ID NO: 7162 - DNA, 26 bp, Homo sapiens
tctcatccttcccagatctttacatg

SEQ ID NO: 7163 - DNA, 26 bp, Homo sapiens
ctcatccttcccagatctttacatga

SEQ ID NO: 7164 - DNA, 26 bp, Homo sapiens
tcatccttcccagatctttacatgat

SEQ ID NO: 7165 - DNA, 26 bp, Homo sapiens
catccttcccagatctttacatgata

SEQ ID NO: 7166 - DNA, 26 bp, Homo sapiens
atccttcccagatctttacatgatag

SEQ ID NO: 7167 - DNA, 26 bp, Homo sapiens
tccttcccagatctttacatgataga

SEQ ID NO: 7168 - DNA, 26 bp, Homo sapiens
ccttcccagatctttacatgatagag

SEQ ID NO: 7169 - DNA, 26 bp, Homo sapiens
cttcccagatctttacatgatagagg

SEQ ID NO: 7170 - DNA, 26 bp, Homo sapiens
ttcccagatctttacatgatagaggg

SEQ ID NO: 7171 - DNA, 26 bp, Homo sapiens
tcccagatctttacatgatagaggga

SEQ ID NO: 7172 - DNA, 26 bp, Homo sapiens
cccagatctttacatgatagagggag

SEQ ID NO: 7173 - DNA, 26 bp, Homo sapiens
ccagatctttacatgatagagggagc

SEQ ID NO: 7174 - DNA, 26 bp, Homo sapiens
cagatctttacatgatagagggagca

SEQ ID NO: 7175 - DNA, 26 bp, Homo sapiens
agatctttacatgatagagggagcaa

SEQ ID NO: 7176 - DNA, 26 bp, Homo sapiens
gatctttacatgatagagggagcaat

SEQ ID NO: 7177 - DNA, 26 bp, Homo sapiens
atctttacatgatagagggagcaata

SEQ ID NO: 7178 - DNA, 26 bp, Homo sapiens
tctttacatgatagagggagcaatag

SEQ ID NO: 7179 - DNA, 26 bp, Homo sapiens
ctttacatgatagagggagcaatagg

SEQ ID NO: 7180 - DNA, 26 bp, Homo sapiens
tttacatgatagagggagcaataggc

SEQ ID NO: 7181 - DNA, 26 bp, Homo sapiens
ttacatgatagagggagcaataggca

SEQ ID NO: 7182 - DNA, 26 bp, Homo sapiens
tacatgatagagggagcaataggcaa

SEQ ID NO: 7183 - DNA, 26 bp, Homo sapiens
acatgatagagggagcaataggcaaa

SEQ ID NO: 7184 - DNA, 26 bp, Homo sapiens
catgatagagggagcaataggcaaag

SEQ ID NO: 7185 - DNA, 26 bp, Homo sapiens
atgatagagggagcaataggcaaagg

SEQ ID NO: 7186 - DNA, 26 bp, Homo sapiens
tgatagagggagcaataggcaaagga

SEQ ID NO: 7187 - DNA, 26 bp, Homo sapiens
gatagagggagcaataggcaaaggac

SEQ ID NO: 7188 - DNA, 26 bp, Homo sapiens
atagagggagcaataggcaaaggaca

SEQ ID NO: 7189 - DNA, 26 bp, Homo sapiens
tagagggagcaataggcaaaggacag

SEQ ID NO: 7190 - DNA, 26 bp, Homo sapiens
agagggagcaataggcaaaggacagt

SEQ ID NO: 7191 - DNA, 26 bp, Homo sapiens
gagggagcaataggcaaaggacagta

SEQ ID NO: 7192 - DNA, 26 bp, Homo sapiens
agggagcaataggcaaaggacagtag

SEQ ID NO: 7193 - DNA, 26 bp, Homo sapiens
gggagcaataggcaaaggacagtaga

SEQ ID NO: 7194 - DNA, 26 bp, Homo sapiens
ggagcaataggcaaaggacagtagaa

SEQ ID NO: 7195 - DNA, 26 bp, Homo sapiens
gagcaataggcaaaggacagtagaaa

SEQ ID NO: 7196 - DNA, 26 bp, Homo sapiens
agcaataggcaaaggacagtagaaaa

SEQ ID NO: 7197 - DNA, 26 bp, Homo sapiens
gcaataggcaaaggacagtagaaaag

SEQ ID NO: 7198 - DNA, 26 bp, Homo sapiens
caataggcaaaggacagtagaaaagc

SEQ ID NO: 7199 - DNA, 26 bp, Homo sapiens
aataggcaaaggacagtagaaaagct

SEQ ID NO: 7200 - DNA, 26 bp, Homo sapiens
ataggcaaaggacagtagaaaagctc

SEQ ID NO: 7201 - DNA, 26 bp, Homo sapiens
taggcaaaggacagtagaaaagctca

SEQ ID NO: 7202 - DNA, 26 bp, Homo sapiens
aggcaaaggacagtagaaaagctcag

SEQ ID NO: 7203 - DNA, 26 bp, Homo sapiens
ggcaaaggacagtagaaaagctcagt

SEQ ID NO: 7204 - DNA, 26 bp, Homo sapiens
gcaaaggacagtagaaaagctcagtg

SEQ ID NO: 7205 - DNA, 26 bp, Homo sapiens
caaaggacagtagaaaagctcagtgt

SEQ ID NO: 7206 - DNA, 26 bp, Homo sapiens
aaaggacagtagaaaagctcagtgta

SEQ ID NO: 7207 - DNA, 26 bp, Homo sapiens
aaggacagtagaaaagctcagtgtaa

SEQ ID NO: 7208 - DNA, 26 bp, Homo sapiens
aggacagtagaaaagctcagtgtaac

SEQ ID NO: 7209 - DNA, 26 bp, Homo sapiens
ggacagtagaaaagctcagtgtaact

SEQ ID NO: 7210 - DNA, 26 bp, Homo sapiens
gacagtagaaaagctcagtgtaactt

SEQ ID NO: 7211 - DNA, 26 bp, Homo sapiens
acagtagaaaagctcagtgtaacttt

SEQ ID NO: 7212 - DNA, 26 bp, Homo sapiens
cagtagaaaagctcagtgtaactttg

SEQ ID NO: 7213 - DNA, 26 bp, Homo sapiens
agtagaaaagctcagtgtaactttgt

SEQ ID NO: 7214 - DNA, 26 bp, Homo sapiens
gtagaaaagctcagtgtaactttgtg

SEQ ID NO: 7215 - DNA, 26 bp, Homo sapiens
tagaaaagctcagtgtaactttgtgt

SEQ ID NO: 7216 - DNA, 26 bp, Homo sapiens
agaaaagctcagtgtaactttgtgtt

SEQ ID NO: 7217 - DNA, 26 bp, Homo sapiens
gaaaagctcagtgtaactttgtgttt

SEQ ID NO: 7218 - DNA, 26 bp, Homo sapiens
aaaagctcagtgtaactttgtgttta

SEQ ID NO: 7219 - DNA, 26 bp, Homo sapiens
aaagctcagtgtaactttgtgtttag

SEQ ID NO: 7220 - DNA, 26 bp, Homo sapiens
aagctcagtgtaactttgtgtttagg

SEQ ID NO: 7221 - DNA, 26 bp, Homo sapiens
agctcagtgtaactttgtgtttaggc

SEQ ID NO: 7222 - DNA, 26 bp, Homo sapiens
gctcagtgtaactttgtgtttaggca

SEQ ID NO: 7223 - DNA, 26 bp, Homo sapiens
ctcagtgtaactttgtgtttaggcag

SEQ ID NO: 7224 - DNA, 26 bp, Homo sapiens
tcagtgtaactttgtgtttaggcagt

SEQ ID NO: 7225 - DNA, 26 bp, Homo sapiens
cagtgtaactttgtgtttaggcagta

SEQ ID NO: 7226 - DNA, 26 bp, Homo sapiens
agtgtaactttgtgtttaggcagtaa

SEQ ID NO: 7227 - DNA, 26 bp, Homo sapiens
gtgtaactttgtgtttaggcagtaag

SEQ ID NO: 7228 - DNA, 26 bp, Homo sapiens
tgtaactttgtgtttaggcagtaaga

SEQ ID NO: 7229 - DNA, 26 bp, Homo sapiens
gtaactttgtgtttaggcagtaagag

SEQ ID NO: 7230 - DNA, 26 bp, Homo sapiens
taactttgtgtttaggcagtaagagg

SEQ ID NO: 7231 - DNA, 26 bp, Homo sapiens
aactttgtgtttaggcagtaagaggc

SEQ ID NO: 7232 - DNA, 26 bp, Homo sapiens
actttgtgtttaggcagtaagaggcc

SEQ ID NO: 7233 - DNA, 26 bp, Homo sapiens
ctttgtgtttaggcagtaagaggcct

SEQ ID NO: 7234 - DNA, 26 bp, Homo sapiens
tttgtgtttaggcagtaagaggcctc

SEQ ID NO: 7235 - DNA, 26 bp, Homo sapiens
ttgtgtttaggcagtaagaggcctct

SEQ ID NO: 7236 - DNA, 26 bp, Homo sapiens
tgtgtttaggcagtaagaggcctctt

SEQ ID NO: 7237 - DNA, 26 bp, Homo sapiens
gtgtttaggcagtaagaggcctcttt

SEQ ID NO: 7238 - DNA, 26 bp, Homo sapiens
tgtttaggcagtaagaggcctctttc

SEQ ID NO: 7239 - DNA, 26 bp, Homo sapiens
gtttaggcagtaagaggcctctttcc

SEQ ID NO: 7240 - DNA, 26 bp, Homo sapiens
tttaggcagtaagaggcctctttccc

SEQ ID NO: 7241 - DNA, 26 bp, Homo sapiens
ttaggcagtaagaggcctctttccct

SEQ ID NO: 7242 - DNA, 26 bp, Homo sapiens
taggcagtaagaggcctctttccctg

SEQ ID NO: 7243 - DNA, 26 bp, Homo sapiens
aggcagtaagaggcctctttccctgc

SEQ ID NO: 7244 - DNA, 26 bp, Homo sapiens
ggcagtaagaggcctctttccctgct

SEQ ID NO: 7245 - DNA, 26 bp, Homo sapiens
gcagtaagaggcctctttccctgctg

SEQ ID NO: 7246 - DNA, 26 bp, Homo sapiens
cagtaagaggcctctttccctgctgg

SEQ ID NO: 7247 - DNA, 26 bp, Homo sapiens
agtaagaggcctctttccctgctggt

SEQ ID NO: 7248 - DNA, 26 bp, Homo sapiens
gtaagaggcctctttccctgctggtt

SEQ ID NO: 7249 - DNA, 26 bp, Homo sapiens
taagaggcctctttccctgctggttg

SEQ ID NO: 7250 - DNA, 26 bp, Homo sapiens
aagaggcctctttccctgctggttgc

SEQ ID NO: 7251 - DNA, 26 bp, Homo sapiens
agaggcctctttccctgctggttgca

SEQ ID NO: 7252 - DNA, 26 bp, Homo sapiens
gaggcctctttccctgctggttgcaa

SEQ ID NO: 7253 - DNA, 26 bp, Homo sapiens
aggcctctttccctgctggttgcaaa

SEQ ID NO: 7254 - DNA, 26 bp, Homo sapiens
ggcctctttccctgctggttgcaaaa

SEQ ID NO: 7255 - DNA, 26 bp, Homo sapiens
gcctctttccctgctggttgcaaaaa

SEQ ID NO: 7256 - DNA, 26 bp, Homo sapiens
cctctttccctgctggttgcaaaaat

SEQ ID NO: 7257 - DNA, 26 bp, Homo sapiens
ctctttccctgctggttgcaaaaatt

SEQ ID NO: 7258 - DNA, 26 bp, Homo sapiens
tctttccctgctggttgcaaaaattc

SEQ ID NO: 7259 - DNA, 26 bp, Homo sapiens
ctttccctgctggttgcaaaaattct

SEQ ID NO: 7260 - DNA, 26 bp, Homo sapiens
tttccctgctggttgcaaaaattctt

SEQ ID NO: 7261 - DNA, 26 bp, Homo sapiens
ttccctgctggttgcaaaaattcttc

SEQ ID NO: 7262 - DNA, 26 bp, Homo sapiens
tccctgctggttgcaaaaattcttcc

SEQ ID NO: 7263 - DNA, 26 bp, Homo sapiens
ccctgctggttgcaaaaattcttcca

SEQ ID NO: 7264 - DNA, 26 bp, Homo sapiens
cctgctggttgcaaaaattcttccac

SEQ ID NO: 7265 - DNA, 26 bp, Homo sapiens
ctgctggttgcaaaaattcttccaca

SEQ ID NO: 7266 - DNA, 26 bp, Homo sapiens
tgctggttgcaaaaattcttccacaa

SEQ ID NO: 7267 - DNA, 26 bp, Homo sapiens
gctggttgcaaaaattcttccacaat

SEQ ID NO: 7268 - DNA, 26 bp, Homo sapiens
ctggttgcaaaaattcttccacaatc

SEQ ID NO: 7269 - DNA, 26 bp, Homo sapiens
tggttgcaaaaattcttccacaatct

SEQ ID NO: 7270 - DNA, 26 bp, Homo sapiens
ggttgcaaaaattcttccacaatctc

SEQ ID NO: 7271 - DNA, 26 bp, Homo sapiens
gttgcaaaaattcttccacaatctca

SEQ ID NO: 7272 - DNA, 26 bp, Homo sapiens
ttgcaaaaattcttccacaatctcag

SEQ ID NO: 7273 - DNA, 26 bp, Homo sapiens
tgcaaaaattcttccacaatctcaga

SEQ ID NO: 7274 - DNA, 26 bp, Homo sapiens
gcaaaaattcttccacaatctcagaa

SEQ ID NO: 7275 - DNA, 26 bp, Homo sapiens
caaaaattcttccacaatctcagaag

SEQ ID NO: 7276 - DNA, 26 bp, Homo sapiens
aaaaattcttccacaatctcagaagt

SEQ ID NO: 7277 - DNA, 26 bp, Homo sapiens
aaaattcttccacaatctcagaagtt

SEQ ID NO: 7278 - DNA, 26 bp, Homo sapiens
aaattcttccacaatctcagaagttc

SEQ ID NO: 7279 - DNA, 26 bp, Homo sapiens
aattcttccacaatctcagaagttct

SEQ ID NO: 7280 - DNA, 26 bp, Homo sapiens
attcttccacaatctcagaagttctg

SEQ ID NO: 7281 - DNA, 26 bp, Homo sapiens
ttcttccacaatctcagaagttctgt

SEQ ID NO: 7282 - DNA, 26 bp, Homo sapiens
tcttccacaatctcagaagttctgta

SEQ ID NO: 7283 - DNA, 26 bp, Homo sapiens
cttccacaatctcagaagttctgtag

SEQ ID NO: 7284 - DNA, 26 bp, Homo sapiens
ttccacaatctcagaagttctgtagc

SEQ ID NO: 7285 - DNA, 26 bp, Homo sapiens
tccacaatctcagaagttctgtagct

SEQ ID NO: 7286 - DNA, 26 bp, Homo sapiens
ccacaatctcagaagttctgtagctt

SEQ ID NO: 7287 - DNA, 26 bp, Homo sapiens
cacaatctcagaagttctgtagcttg

SEQ ID NO: 7288 - DNA, 26 bp, Homo sapiens
acaatctcagaagttctgtagcttgg

SEQ ID NO: 7289 - DNA, 26 bp, Homo sapiens
caatctcagaagttctgtagcttggc

SEQ ID NO: 7290 - DNA, 26 bp, Homo sapiens
aatctcagaagttctgtagcttggcc

SEQ ID NO: 7291 - DNA, 26 bp, Homo sapiens
atctcagaagttctgtagcttggcca

SEQ ID NO: 7292 - DNA, 26 bp, Homo sapiens
tctcagaagttctgtagcttggccac

SEQ ID NO: 7293 - DNA, 26 bp, Homo sapiens
ctcagaagttctgtagcttggccaca

SEQ ID NO: 7294 - DNA, 26 bp, Homo sapiens
tcagaagttctgtagcttggccacag

SEQ ID NO: 7295 - DNA, 26 bp, Homo sapiens
cagaagttctgtagcttggccacagg

SEQ ID NO: 7296 - DNA, 26 bp, Homo sapiens
agaagttctgtagcttggccacaggg

SEQ ID NO: 7297 - DNA, 26 bp, Homo sapiens
gaagttctgtagcttggccacagggt

SEQ ID NO: 7298 - DNA, 26 bp, Homo sapiens
aagttctgtagcttggccacagggtg

SEQ ID NO: 7299 - DNA, 26 bp, Homo sapiens
agttctgtagcttggccacagggtga

SEQ ID NO: 7300 - DNA, 26 bp, Homo sapiens
gttctgtagcttggccacagggtgaa

SEQ ID NO: 7301 - DNA, 26 bp, Homo sapiens
ttctgtagcttggccacagggtgaaa

SEQ ID NO: 7302 - DNA, 26 bp, Homo sapiens
tctgtagcttggccacagggtgaaat

SEQ ID NO: 7303 - DNA, 26 bp, Homo sapiens
ctgtagcttggccacagggtgaaata

SEQ ID NO: 7304 - DNA, 26 bp, Homo sapiens
tgtagcttggccacagggtgaaatac

SEQ ID NO: 7305 - DNA, 26 bp, Homo sapiens
gtagcttggccacagggtgaaataca

SEQ ID NO: 7306 - DNA, 26 bp, Homo sapiens
tagcttggccacagggtgaaatacaa

SEQ ID NO: 7307 - DNA, 26 bp, Homo sapiens
agcttggccacagggtgaaatacaaa

SEQ ID NO: 7308 - DNA, 26 bp, Homo sapiens
gcttggccacagggtgaaatacaaac

SEQ ID NO: 7309 - DNA, 26 bp, Homo sapiens
cttggccacagggtgaaatacaaacc

SEQ ID NO: 7310 - DNA, 26 bp, Homo sapiens
ttggccacagggtgaaatacaaacct

SEQ ID NO: 7311 - DNA, 26 bp, Homo sapiens
tggccacagggtgaaatacaaaccta

SEQ ID NO: 7312 - DNA, 26 bp, Homo sapiens
ggccacagggtgaaatacaaacctat

SEQ ID NO: 7313 - DNA, 26 bp, Homo sapiens
gccacagggtgaaatacaaacctatc

SEQ ID NO: 7314 - DNA, 26 bp, Homo sapiens
ccacagggtgaaatacaaacctatct

SEQ ID NO: 7315 - DNA, 26 bp, Homo sapiens
cacagggtgaaatacaaacctatctt

SEQ ID NO: 7316 - DNA, 26 bp, Homo sapiens
acagggtgaaatacaaacctatctta

SEQ ID NO: 7317 - DNA, 26 bp, Homo sapiens
cagggtgaaatacaaacctatcttag

SEQ ID NO: 7318 - DNA, 26 bp, Homo sapiens
agggtgaaatacaaacctatcttagc

SEQ ID NO: 7319 - DNA, 26 bp, Homo sapiens
gggtgaaatacaaacctatcttagcc

SEQ ID NO: 7320 - DNA, 26 bp, Homo sapiens
ggtgaaatacaaacctatcttagcct

SEQ ID NO: 7321 - DNA, 26 bp, Homo sapiens
gtgaaatacaaacctatcttagcctt

SEQ ID NO: 7322 - DNA, 26 bp, Homo sapiens
tgaaatacaaacctatcttagccttg

SEQ ID NO: 7323 - DNA, 26 bp, Homo sapiens
gaaatacaaacctatcttagccttgg

SEQ ID NO: 7324 - DNA, 26 bp, Homo sapiens
aaatacaaacctatcttagccttgga

SEQ ID NO: 7325 - DNA, 26 bp, Homo sapiens
aatacaaacctatcttagccttggaa

SEQ ID NO: 7326 - DNA, 26 bp, Homo sapiens
atacaaacctatcttagccttggaaa

SEQ ID NO: 7327 - DNA, 26 bp, Homo sapiens
tacaaacctatcttagccttggaaag

SEQ ID NO: 7328 - DNA, 26 bp, Homo sapiens
acaaacctatcttagccttggaaagc

SEQ ID NO: 7329 - DNA, 26 bp, Homo sapiens
caaacctatcttagccttggaaagcc

SEQ ID NO: 7330 - DNA, 26 bp, Homo sapiens
aaacctatcttagccttggaaagcca

SEQ ID NO: 7331 - DNA, 26 bp, Homo sapiens
aacctatcttagccttggaaagccac

SEQ ID NO: 7332 - DNA, 26 bp, Homo sapiens
acctatcttagccttggaaagccacc

SEQ ID NO: 7333 - DNA, 26 bp, Homo sapiens
cctatcttagccttggaaagccaccc

SEQ ID NO: 7334 - DNA, 26 bp, Homo sapiens
ctatcttagccttggaaagccaccca

SEQ ID NO: 7335 - DNA, 26 bp, Homo sapiens
tatcttagccttggaaagccacccag

SEQ ID NO: 7336 - DNA, 26 bp, Homo sapiens
atcttagccttggaaagccacccaga

SEQ ID NO: 7337 - DNA, 26 bp, Homo sapiens
tcttagccttggaaagccacccagat

SEQ ID NO: 7338 - DNA, 26 bp, Homo sapiens
cttagccttggaaagccacccagatt

SEQ ID NO: 7339 - DNA, 26 bp, Homo sapiens
ttagccttggaaagccacccagattt

SEQ ID NO: 7340 - DNA, 26 bp, Homo sapiens
tagccttggaaagccacccagatttt

SEQ ID NO: 7341 - DNA, 26 bp, Homo sapiens
agccttggaaagccacccagattttc

SEQ ID NO: 7342 - DNA, 26 bp, Homo sapiens
gccttggaaagccacccagattttcc

SEQ ID NO: 7343 - DNA, 26 bp, Homo sapiens
ccttggaaagccacccagattttcct

SEQ ID NO: 7344 - DNA, 26 bp, Homo sapiens
cttggaaagccacccagattttcctc

SEQ ID NO: 7345 - DNA, 26 bp, Homo sapiens
ttggaaagccacccagattttcctct

SEQ ID NO: 7346 - DNA, 26 bp, Homo sapiens
tggaaagccacccagattttcctctt

SEQ ID NO: 7347 - DNA, 26 bp, Homo sapiens
ggaaagccacccagattttcctcttc

SEQ ID NO: 7348 - DNA, 26 bp, Homo sapiens
gaaagccacccagattttcctcttcc

SEQ ID NO: 7349 - DNA, 26 bp, Homo sapiens
aaagccacccagattttcctcttcca

SEQ ID NO: 7350 - DNA, 26 bp, Homo sapiens
aagccacccagattttcctcttccag

SEQ ID NO: 7351 - DNA, 26 bp, Homo sapiens
agccacccagattttcctcttccaga

SEQ ID NO: 7352 - DNA, 26 bp, Homo sapiens
gccacccagattttcctcttccagag

SEQ ID NO: 7353 - DNA, 26 bp, Homo sapiens
ccacccagattttcctcttccagagt

SEQ ID NO: 7354 - DNA, 26 bp, Homo sapiens
cacccagattttcctcttccagagta

SEQ ID NO: 7355 - DNA, 26 bp, Homo sapiens
acccagattttcctcttccagagtaa

SEQ ID NO: 7356 - DNA, 26 bp, Homo sapiens
cccagattttcctcttccagagtaaa

SEQ ID NO: 7357 - DNA, 26 bp, Homo sapiens
ccagattttcctcttccagagtaaat

SEQ ID NO: 7358 - DNA, 26 bp, Homo sapiens
cagattttcctcttccagagtaaatt

SEQ ID NO: 7359 - DNA, 26 bp, Homo sapiens
agattttcctcttccagagtaaattc

SEQ ID NO: 7360 - DNA, 26 bp, Homo sapiens
gattttcctcttccagagtaaattcc

SEQ ID NO: 7361 - DNA, 26 bp, Homo sapiens
attttcctcttccagagtaaattcct

SEQ ID NO: 7362 - DNA, 26 bp, Homo sapiens
ttttcctcttccagagtaaattcctc

SEQ ID NO: 7363 - DNA, 26 bp, Homo sapiens
tttcctcttccagagtaaattcctca

SEQ ID NO: 7364 - DNA, 26 bp, Homo sapiens
ttcctcttccagagtaaattcctcat

SEQ ID NO: 7365 - DNA, 26 bp, Homo sapiens
tcctcttccagagtaaattcctcatg

SEQ ID NO: 7366 - DNA, 26 bp, Homo sapiens
cctcttccagagtaaattcctcatgt

SEQ ID NO: 7367 - DNA, 26 bp, Homo sapiens
ctcttccagagtaaattcctcatgtc

SEQ ID NO: 7368 - DNA, 26 bp, Homo sapiens
tcttccagagtaaattcctcatgtca

SEQ ID NO: 7369 - DNA, 26 bp, Homo sapiens
cttccagagtaaattcctcatgtcac

SEQ ID NO: 7370 - DNA, 26 bp, Homo sapiens
ttccagagtaaattcctcatgtcact

SEQ ID NO: 7371 - DNA, 26 bp, Homo sapiens
tccagagtaaattcctcatgtcactt

SEQ ID NO: 7372 - DNA, 26 bp, Homo sapiens
ccagagtaaattcctcatgtcacttt

SEQ ID NO: 7373 - DNA, 26 bp, Homo sapiens
cagagtaaattcctcatgtcactttt

SEQ ID NO: 7374 - DNA, 26 bp, Homo sapiens
agagtaaattcctcatgtcacttttg

SEQ ID NO: 7375 - DNA, 26 bp, Homo sapiens
gagtaaattcctcatgtcacttttgc

SEQ ID NO: 7376 - DNA, 26 bp, Homo sapiens
agtaaattcctcatgtcacttttgcc

SEQ ID NO: 7377 - DNA, 26 bp, Homo sapiens
gtaaattcctcatgtcacttttgccc

SEQ ID NO: 7378 - DNA, 26 bp, Homo sapiens
taaattcctcatgtcacttttgccca

SEQ ID NO: 7379 - DNA, 26 bp, Homo sapiens
aaattcctcatgtcacttttgcccag

SEQ ID NO: 7380 - DNA, 26 bp, Homo sapiens
aattcctcatgtcacttttgcccagg

SEQ ID NO: 7381 - DNA, 26 bp, Homo sapiens
attcctcatgtcacttttgcccaggg

SEQ ID NO: 7382 - DNA, 26 bp, Homo sapiens
ttcctcatgtcacttttgcccagggg

SEQ ID NO: 7383 - DNA, 26 bp, Homo sapiens
tcctcatgtcacttttgcccaggggc

SEQ ID NO: 7384 - DNA, 26 bp, Homo sapiens
cctcatgtcacttttgcccaggggcc

SEQ ID NO: 7385 - DNA, 26 bp, Homo sapiens
ctcatgtcacttttgcccaggggcca

SEQ ID NO: 7386 - DNA, 26 bp, Homo sapiens
tcatgtcacttttgcccaggggccag

SEQ ID NO: 7387 - DNA, 26 bp, Homo sapiens
catgtcacttttgcccaggggccagt

SEQ ID NO: 7388 - DNA, 26 bp, Homo sapiens
atgtcacttttgcccaggggccagtc

SEQ ID NO: 7389 - DNA, 26 bp, Homo sapiens
tgtcacttttgcccaggggccagtcc

SEQ ID NO: 7390 - DNA, 26 bp, Homo sapiens
gtcacttttgcccaggggccagtcct

SEQ ID NO: 7391 - DNA, 26 bp, Homo sapiens
tcacttttgcccaggggccagtcctc

SEQ ID NO: 7392 - DNA, 26 bp, Homo sapiens
cacttttgcccaggggccagtcctca

SEQ ID NO: 7393 - DNA, 26 bp, Homo sapiens
acttttgcccaggggccagtcctcat

SEQ ID NO: 7394 - DNA, 26 bp, Homo sapiens
cttttgcccaggggccagtcctcatt

SEQ ID NO: 7395 - DNA, 26 bp, Homo sapiens
ttttgcccaggggccagtcctcattt

SEQ ID NO: 7396 - DNA, 26 bp, Homo sapiens
tttgcccaggggccagtcctcatttt

SEQ ID NO: 7397 - DNA, 26 bp, Homo sapiens
ttgcccaggggccagtcctcattttc

SEQ ID NO: 7398 - DNA, 26 bp, Homo sapiens
tgcccaggggccagtcctcattttct

SEQ ID NO: 7399 - DNA, 26 bp, Homo sapiens
gcccaggggccagtcctcattttcta

SEQ ID NO: 7400 - DNA, 26 bp, Homo sapiens
cccaggggccagtcctcattttctag

SEQ ID NO: 7401 - DNA, 26 bp, Homo sapiens
ccaggggccagtcctcattttctaga

SEQ ID NO: 7402 - DNA, 26 bp, Homo sapiens
caggggccagtcctcattttctagat

SEQ ID NO: 7403 - DNA, 26 bp, Homo sapiens
aggggccagtcctcattttctagatt

SEQ ID NO: 7404 - DNA, 26 bp, Homo sapiens
ggggccagtcctcattttctagatta

SEQ ID NO: 7405 - DNA, 26 bp, Homo sapiens
gggccagtcctcattttctagattag

SEQ ID NO: 7406 - DNA, 26 bp, Homo sapiens
ggccagtcctcattttctagattagg

SEQ ID NO: 7407 - DNA, 26 bp, Homo sapiens
gccagtcctcattttctagattagga

SEQ ID NO: 7408 - DNA, 26 bp, Homo sapiens
ccagtcctcattttctagattaggat

SEQ ID NO: 7409 - DNA, 26 bp, Homo sapiens
cagtcctcattttctagattaggata

SEQ ID NO: 7410 - DNA, 26 bp, Homo sapiens
agtcctcattttctagattaggataa

SEQ ID NO: 7411 - DNA, 26 bp, Homo sapiens
gtcctcattttctagattaggataac

SEQ ID NO: 7412 - DNA, 26 bp, Homo sapiens
tcctcattttctagattaggataaca

SEQ ID NO: 7413 - DNA, 26 bp, Homo sapiens
cctcattttctagattaggataacag

SEQ ID NO: 7414 - DNA, 26 bp, Homo sapiens
ctcattttctagattaggataacagt

SEQ ID NO: 7415 - DNA, 26 bp, Homo sapiens
tcattttctagattaggataacagtt

SEQ ID NO: 7416 - DNA, 26 bp, Homo sapiens
cattttctagattaggataacagttg

SEQ ID NO: 7417 - DNA, 26 bp, Homo sapiens
attttctagattaggataacagttgg

SEQ ID NO: 7418 - DNA, 26 bp, Homo sapiens
ttttctagattaggataacagttgga

SEQ ID NO: 7419 - DNA, 26 bp, Homo sapiens
tttctagattaggataacagttggag

SEQ ID NO: 7420 - DNA, 26 bp, Homo sapiens
ttctagattaggataacagttggaga

SEQ ID NO: 7421 - DNA, 26 bp, Homo sapiens
tctagattaggataacagttggagac

SEQ ID NO: 7422 - DNA, 26 bp, Homo sapiens
ctagattaggataacagttggagacg

SEQ ID NO: 7423 - DNA, 26 bp, Homo sapiens
tagattaggataacagttggagacgc

SEQ ID NO: 7424 - DNA, 26 bp, Homo sapiens
agattaggataacagttggagacgca

SEQ ID NO: 7425 - DNA, 26 bp, Homo sapiens
gattaggataacagttggagacgcat

SEQ ID NO: 7426 - DNA, 26 bp, Homo sapiens
attaggataacagttggagacgcata

SEQ ID NO: 7427 - DNA, 26 bp, Homo sapiens
ttaggataacagttggagacgcatag

SEQ ID NO: 7428 - DNA, 26 bp, Homo sapiens
taggataacagttggagacgcataga

SEQ ID NO: 7429 - DNA, 26 bp, Homo sapiens
aggataacagttggagacgcatagag

SEQ ID NO: 7430 - DNA, 26 bp, Homo sapiens
ggataacagttggagacgcatagagg

SEQ ID NO: 7431 - DNA, 26 bp, Homo sapiens
gataacagttggagacgcatagaggg

SEQ ID NO: 7432 - DNA, 26 bp, Homo sapiens
ataacagttggagacgcatagagggt

SEQ ID NO: 7433 - DNA, 26 bp, Homo sapiens
taacagttggagacgcatagagggtc

SEQ ID NO: 7434 - DNA, 26 bp, Homo sapiens
aacagttggagacgcatagagggtct

SEQ ID NO: 7435 - DNA, 26 bp, Homo sapiens
acagttggagacgcatagagggtctt

SEQ ID NO: 7436 - DNA, 26 bp, Homo sapiens
cagttggagacgcatagagggtcttg

SEQ ID NO: 7437 - DNA, 26 bp, Homo sapiens
agttggagacgcatagagggtcttgt

SEQ ID NO: 7438 - DNA, 26 bp, Homo sapiens
gttggagacgcatagagggtcttgtg

SEQ ID NO: 7439 - DNA, 26 bp, Homo sapiens
ttggagacgcatagagggtcttgtgt

SEQ ID NO: 7440 - DNA, 26 bp, Homo sapiens
tggagacgcatagagggtcttgtgtt

SEQ ID NO: 7441 - DNA, 26 bp, Homo sapiens
ggagacgcatagagggtcttgtgttt

SEQ ID NO: 7442 - DNA, 26 bp, Homo sapiens
gagacgcatagagggtcttgtgtttg

SEQ ID NO: 7443 - DNA, 26 bp, Homo sapiens
agacgcatagagggtcttgtgtttgc

SEQ ID NO: 7444 - DNA, 26 bp, Homo sapiens
gacgcatagagggtcttgtgtttgcc

SEQ ID NO: 7445 - DNA, 26 bp, Homo sapiens
acgcatagagggtcttgtgtttgcca

SEQ ID NO: 7446 - DNA, 26 bp, Homo sapiens
cgcatagagggtcttgtgtttgccac

SEQ ID NO: 7447 - DNA, 26 bp, Homo sapiens
gcatagagggtcttgtgtttgccaca

SEQ ID NO: 7448 - DNA, 26 bp, Homo sapiens
catagagggtcttgtgtttgccacaa

SEQ ID NO: 7449 - DNA, 26 bp, Homo sapiens
atagagggtcttgtgtttgccacaag

SEQ ID NO: 7450 - DNA, 26 bp, Homo sapiens
tagagggtcttgtgtttgccacaaga

SEQ ID NO: 7451 - DNA, 26 bp, Homo sapiens
agagggtcttgtgtttgccacaagac

SEQ ID NO: 7452 - DNA, 26 bp, Homo sapiens
gagggtcttgtgtttgccacaagacc

SEQ ID NO: 7453 - DNA, 26 bp, Homo sapiens
agggtcttgtgtttgccacaagacca

SEQ ID NO: 7454 - DNA, 26 bp, Homo sapiens
gggtcttgtgtttgccacaagaccac

SEQ ID NO: 7455 - DNA, 26 bp, Homo sapiens
ggtcttgtgtttgccacaagaccact

SEQ ID NO: 7456 - DNA, 26 bp, Homo sapiens
gtcttgtgtttgccacaagaccactg

SEQ ID NO: 7457 - DNA, 26 bp, Homo sapiens
tcttgtgtttgccacaagaccactgc

SEQ ID NO: 7458 - DNA, 26 bp, Homo sapiens
cttgtgtttgccacaagaccactgca

SEQ ID NO: 7459 - DNA, 26 bp, Homo sapiens
ttgtgtttgccacaagaccactgcac

SEQ ID NO: 7460 - DNA, 26 bp, Homo sapiens
tgtgtttgccacaagaccactgcacc

SEQ ID NO: 7461 - DNA, 26 bp, Homo sapiens
gtgtttgccacaagaccactgcacca

SEQ ID NO: 7462 - DNA, 26 bp, Homo sapiens
tgtttgccacaagaccactgcaccaa

SEQ ID NO: 7463 - DNA, 26 bp, Homo sapiens
gtttgccacaagaccactgcaccaaa

SEQ ID NO: 7464 - DNA, 26 bp, Homo sapiens
tttgccacaagaccactgcaccaaaa

SEQ ID NO: 7465 - DNA, 26 bp, Homo sapiens
ttgccacaagaccactgcaccaaaaa

SEQ ID NO: 7466 - DNA, 26 bp, Homo sapiens
tgccacaagaccactgcaccaaaaaa

SEQ ID NO: 7467 - DNA, 26 bp, Homo sapiens
gccacaagaccactgcaccaaaaaat

SEQ ID NO: 7468 - DNA, 26 bp, Homo sapiens
ccacaagaccactgcaccaaaaaatg

SEQ ID NO: 7469 - DNA, 26 bp, Homo sapiens
cacaagaccactgcaccaaaaaatgc

SEQ ID NO: 7470 - DNA, 26 bp, Homo sapiens
acaagaccactgcaccaaaaaatgct

SEQ ID NO: 7471 - DNA, 26 bp, Homo sapiens
caagaccactgcaccaaaaaatgctt

SEQ ID NO: 7472 - DNA, 26 bp, Homo sapiens
aagaccactgcaccaaaaaatgcttt

SEQ ID NO: 7473 - DNA, 26 bp, Homo sapiens
agaccactgcaccaaaaaatgctttc

SEQ ID NO: 7474 - DNA, 26 bp, Homo sapiens
gaccactgcaccaaaaaatgctttct

SEQ ID NO: 7475 - DNA, 26 bp, Homo sapiens
accactgcaccaaaaaatgctttcta

SEQ ID NO: 7476 - DNA, 26 bp, Homo sapiens
ccactgcaccaaaaaatgctttctat

SEQ ID NO: 7477 - DNA, 26 bp, Homo sapiens
cactgcaccaaaaaatgctttctatc

SEQ ID NO: 7478 - DNA, 26 bp, Homo sapiens
actgcaccaaaaaatgctttctatcc

SEQ ID NO: 7479 - DNA, 26 bp, Homo sapiens
ctgcaccaaaaaatgctttctatcct

SEQ ID NO: 7480 - DNA, 26 bp, Homo sapiens
tgcaccaaaaaatgctttctatcctc

SEQ ID NO: 7481 - DNA, 26 bp, Homo sapiens
gcaccaaaaaatgctttctatcctct

SEQ ID NO: 7482 - DNA, 26 bp, Homo sapiens
caccaaaaaatgctttctatcctctg

SEQ ID NO: 7483 - DNA, 26 bp, Homo sapiens
accaaaaaatgctttctatcctctgc

SEQ ID NO: 7484 - DNA, 26 bp, Homo sapiens
ccaaaaaatgctttctatcctctgca

SEQ ID NO: 7485 - DNA, 26 bp, Homo sapiens
caaaaaatgctttctatcctctgcat

SEQ ID NO: 7486 - DNA, 26 bp, Homo sapiens
aaaaaatgctttctatcctctgcatc

SEQ ID NO: 7487 - DNA, 26 bp, Homo sapiens
aaaaatgctttctatcctctgcatct

SEQ ID NO: 7488 - DNA, 26 bp, Homo sapiens
aaaatgctttctatcctctgcatcta

SEQ ID NO: 7489 - DNA, 26 bp, Homo sapiens
aaatgctttctatcctctgcatctaa

SEQ ID NO: 7490 - DNA, 26 bp, Homo sapiens
aatgctttctatcctctgcatctaag

SEQ ID NO: 7491 - DNA, 26 bp, Homo sapiens
atgctttctatcctctgcatctaaga

SEQ ID NO: 7492 - DNA, 26 bp, Homo sapiens
tgctttctatcctctgcatctaagag

SEQ ID NO: 7493 - DNA, 26 bp, Homo sapiens
gctttctatcctctgcatctaagagg

SEQ ID NO: 7494 - DNA, 26 bp, Homo sapiens
ctttctatcctctgcatctaagagga

SEQ ID NO: 7495 - DNA, 26 bp, Homo sapiens
tttctatcctctgcatctaagaggaa

SEQ ID NO: 7496 - DNA, 26 bp, Homo sapiens
ttctatcctctgcatctaagaggaat

SEQ ID NO: 7497 - DNA, 26 bp, Homo sapiens
tctatcctctgcatctaagaggaata

SEQ ID NO: 7498 - DNA, 26 bp, Homo sapiens
ctatcctctgcatctaagaggaataa

SEQ ID NO: 7499 - DNA, 26 bp, Homo sapiens
tatcctctgcatctaagaggaataaa

SEQ ID NO: 7500 - DNA, 26 bp, Homo sapiens
atcctctgcatctaagaggaataaaa

SEQ ID NO: 7501 - DNA, 26 bp, Homo sapiens
tcctctgcatctaagaggaataaaaa

SEQ ID NO: 7502 - DNA, 26 bp, Homo sapiens
cctctgcatctaagaggaataaaaag

SEQ ID NO: 7503 - DNA, 26 bp, Homo sapiens
ctctgcatctaagaggaataaaaagg

SEQ ID NO: 7504 - DNA, 26 bp, Homo sapiens
tctgcatctaagaggaataaaaaggt

SEQ ID NO: 7505 - DNA, 26 bp, Homo sapiens
ctgcatctaagaggaataaaaaggtt

SEQ ID NO: 7506 - DNA, 26 bp, Homo sapiens
tgcatctaagaggaataaaaaggtta

SEQ ID NO: 7507 - DNA, 26 bp, Homo sapiens
gcatctaagaggaataaaaaggttac

SEQ ID NO: 7508 - DNA, 26 bp, Homo sapiens
catctaagaggaataaaaaggttaca

SEQ ID NO: 7509 - DNA, 26 bp, Homo sapiens
atctaagaggaataaaaaggttacac

SEQ ID NO: 7510 - DNA, 26 bp, Homo sapiens
tctaagaggaataaaaaggttacaca

SEQ ID NO: 7511 - DNA, 26 bp, Homo sapiens
ctaagaggaataaaaaggttacacat

SEQ ID NO: 7512 - DNA, 26 bp, Homo sapiens
taagaggaataaaaaggttacacata

SEQ ID NO: 7513 - DNA, 26 bp, Homo sapiens
aagaggaataaaaaggttacacataa

SEQ ID NO: 7514 - DNA, 26 bp, Homo sapiens
agaggaataaaaaggttacacataat

SEQ ID NO: 7515 - DNA, 26 bp, Homo sapiens
gaggaataaaaaggttacacataatc

SEQ ID NO: 7516 - DNA, 26 bp, Homo sapiens
aggaataaaaaggttacacataatcc

SEQ ID NO: 7517 - DNA, 26 bp, Homo sapiens
ggaataaaaaggttacacataatcca

SEQ ID NO: 7518 - DNA, 26 bp, Homo sapiens
gaataaaaaggttacacataatccag

SEQ ID NO: 7519 - DNA, 26 bp, Homo sapiens
aataaaaaggttacacataatccagg

SEQ ID NO: 7520 - DNA, 26 bp, Homo sapiens
ataaaaaggttacacataatccaggg

SEQ ID NO: 7521 - DNA, 26 bp, Homo sapiens
taaaaaggttacacataatccaggga

SEQ ID NO: 7522 - DNA, 26 bp, Homo sapiens
aaaaaggttacacataatccagggac

SEQ ID NO: 7523 - DNA, 26 bp, Homo sapiens
aaaaggttacacataatccagggact

SEQ ID NO: 7524 - DNA, 26 bp, Homo sapiens
aaaggttacacataatccagggacta

SEQ ID NO: 7525 - DNA, 26 bp, Homo sapiens
aaggttacacataatccagggactac

SEQ ID NO: 7526 - DNA, 26 bp, Homo sapiens
aggttacacataatccagggactaca

SEQ ID NO: 7527 - DNA, 26 bp, Homo sapiens
ggttacacataatccagggactacat

SEQ ID NO: 7528 - DNA, 26 bp, Homo sapiens
gttacacataatccagggactacatt

SEQ ID NO: 7529 - DNA, 26 bp, Homo sapiens
ttacacataatccagggactacattt

SEQ ID NO: 7530 - DNA, 26 bp, Homo sapiens
tacacataatccagggactacatttc

SEQ ID NO: 7531 - DNA, 26 bp, Homo sapiens
acacataatccagggactacatttcc

SEQ ID NO: 7532 - DNA, 26 bp, Homo sapiens
cacataatccagggactacatttcca

SEQ ID NO: 7533 - DNA, 26 bp, Homo sapiens
acataatccagggactacatttccat

SEQ ID NO: 7534 - DNA, 26 bp, Homo sapiens
cataatccagggactacatttccatc

SEQ ID NO: 7535 - DNA, 26 bp, Homo sapiens
ataatccagggactacatttccatca

SEQ ID NO: 7536 - DNA, 26 bp, Homo sapiens
taatccagggactacatttccatcag

SEQ ID NO: 7537 - DNA, 26 bp, Homo sapiens
aatccagggactacatttccatcaga

SEQ ID NO: 7538 - DNA, 26 bp, Homo sapiens
atccagggactacatttccatcagag

SEQ ID NO: 7539 - DNA, 26 bp, Homo sapiens
tccagggactacatttccatcagagg

SEQ ID NO: 7540 - DNA, 26 bp, Homo sapiens
ccagggactacatttccatcagagga

SEQ ID NO: 7541 - DNA, 26 bp, Homo sapiens
cagggactacatttccatcagaggac

SEQ ID NO: 7542 - DNA, 26 bp, Homo sapiens
agggactacatttccatcagaggact

SEQ ID NO: 7543 - DNA, 26 bp, Homo sapiens
gggactacatttccatcagaggactc

SEQ ID NO: 7544 - DNA, 26 bp, Homo sapiens
ggactacatttccatcagaggactct

SEQ ID NO: 7545 - DNA, 26 bp, Homo sapiens
gactacatttccatcagaggactctc

SEQ ID NO: 7546 - DNA, 26 bp, Homo sapiens
actacatttccatcagaggactctct

SEQ ID NO: 7547 - DNA, 26 bp, Homo sapiens
ctacatttccatcagaggactctctc

SEQ ID NO: 7548 - DNA, 26 bp, Homo sapiens
tacatttccatcagaggactctctcc

SEQ ID NO: 7549 - DNA, 26 bp, Homo sapiens
acatttccatcagaggactctctccc

SEQ ID NO: 7550 - DNA, 26 bp, Homo sapiens
catttccatcagaggactctctccca

SEQ ID NO: 7551 - DNA, 26 bp, Homo sapiens
atttccatcagaggactctctcccat

SEQ ID NO: 7552 - DNA, 26 bp, Homo sapiens
tttccatcagaggactctctcccatc

SEQ ID NO: 7553 - DNA, 26 bp, Homo sapiens
ttccatcagaggactctctcccatca

SEQ ID NO: 7554 - DNA, 26 bp, Homo sapiens
tccatcagaggactctctcccatcat

SEQ ID NO: 7555 - DNA, 26 bp, Homo sapiens
ccatcagaggactctctcccatcatg

SEQ ID NO: 7556 - DNA, 26 bp, Homo sapiens
catcagaggactctctcccatcatgg

SEQ ID NO: 7557 - DNA, 26 bp, Homo sapiens
atcagaggactctctcccatcatggt

SEQ ID NO: 7558 - DNA, 26 bp, Homo sapiens
tcagaggactctctcccatcatggtt

SEQ ID NO: 7559 - DNA, 26 bp, Homo sapiens
cagaggactctctcccatcatggttt

SEQ ID NO: 7560 - DNA, 26 bp, Homo sapiens
agaggactctctcccatcatggtttt

SEQ ID NO: 7561 - DNA, 26 bp, Homo sapiens
gaggactctctcccatcatggttttg

SEQ ID NO: 7562 - DNA, 26 bp, Homo sapiens
aggactctctcccatcatggttttgc

SEQ ID NO: 7563 - DNA, 26 bp, Homo sapiens
ggactctctcccatcatggttttgct

SEQ ID NO: 7564 - DNA, 26 bp, Homo sapiens
gactctctcccatcatggttttgctg

SEQ ID NO: 7565 - DNA, 26 bp, Homo sapiens
actctctcccatcatggttttgctga

SEQ ID NO: 7566 - DNA, 26 bp, Homo sapiens
ctctctcccatcatggttttgctgag

SEQ ID NO: 7567 - DNA, 26 bp, Homo sapiens
tctctcccatcatggttttgctgaga

SEQ ID NO: 7568 - DNA, 26 bp, Homo sapiens
ctctcccatcatggttttgctgagat

SEQ ID NO: 7569 - DNA, 26 bp, Homo sapiens
tctcccatcatggttttgctgagatt

SEQ ID NO: 7570 - DNA, 26 bp, Homo sapiens
ctcccatcatggttttgctgagatta

SEQ ID NO: 7571 - DNA, 26 bp, Homo sapiens
tcccatcatggttttgctgagattaa

SEQ ID NO: 7572 - DNA, 26 bp, Homo sapiens
cccatcatggttttgctgagattaat

SEQ ID NO: 7573 - DNA, 26 bp, Homo sapiens
ccatcatggttttgctgagattaatt

SEQ ID NO: 7574 - DNA, 26 bp, Homo sapiens
catcatggttttgctgagattaatta

SEQ ID NO: 7575 - DNA, 26 bp, Homo sapiens
atcatggttttgctgagattaattaa

SEQ ID NO: 7576 - DNA, 26 bp, Homo sapiens
tcatggttttgctgagattaattaaa

SEQ ID NO: 7577 - DNA, 26 bp, Homo sapiens
catggttttgctgagattaattaaaa

SEQ ID NO: 7578 - DNA, 26 bp, Homo sapiens
atggttttgctgagattaattaaaat

SEQ ID NO: 7579 - DNA, 26 bp, Homo sapiens
tggttttgctgagattaattaaaatt

SEQ ID NO: 7580 - DNA, 26 bp, Homo sapiens
ggttttgctgagattaattaaaattc

SEQ ID NO: 7581 - DNA, 26 bp, Homo sapiens
gttttgctgagattaattaaaattca

SEQ ID NO: 7582 - DNA, 26 bp, Homo sapiens
ttttgctgagattaattaaaattcac

SEQ ID NO: 7583 - DNA, 26 bp, Homo sapiens
tttgctgagattaattaaaattcaca

SEQ ID NO: 7584 - DNA, 26 bp, Homo sapiens
ttgctgagattaattaaaattcacaa

SEQ ID NO: 7585 - DNA, 26 bp, Homo sapiens
tgctgagattaattaaaattcacaaa

SEQ ID NO: 7586 - DNA, 26 bp, Homo sapiens
gctgagattaattaaaattcacaaaa

SEQ ID NO: 7587 - DNA, 26 bp, Homo sapiens
ctgagattaattaaaattcacaaaag

SEQ ID NO: 7588 - DNA, 26 bp, Homo sapiens
tgagattaattaaaattcacaaaagt

SEQ ID NO: 7589 - DNA, 26 bp, Homo sapiens
gagattaattaaaattcacaaaagta

SEQ ID NO: 7590 - DNA, 26 bp, Homo sapiens
agattaattaaaattcacaaaagtat

SEQ ID NO: 7591 - DNA, 26 bp, Homo sapiens
gattaattaaaattcacaaaagtatt

SEQ ID NO: 7592 - DNA, 26 bp, Homo sapiens
attaattaaaattcacaaaagtattg

SEQ ID NO: 7593 - DNA, 26 bp, Homo sapiens
ttaattaaaattcacaaaagtattgc

SEQ ID NO: 7594 - DNA, 26 bp, Homo sapiens
taattaaaattcacaaaagtattgct

SEQ ID NO: 7595 - DNA, 26 bp, Homo sapiens
aattaaaattcacaaaagtattgctc

SEQ ID NO: 7596 - DNA, 26 bp, Homo sapiens
attaaaattcacaaaagtattgctca

SEQ ID NO: 7597 - DNA, 26 bp, Homo sapiens
ttaaaattcacaaaagtattgctcag

SEQ ID NO: 7598 - DNA, 26 bp, Homo sapiens
taaaattcacaaaagtattgctcagt

SEQ ID NO: 7599 - DNA, 26 bp, Homo sapiens
aaaattcacaaaagtattgctcagtt

SEQ ID NO: 7600 - DNA, 26 bp, Homo sapiens
aaattcacaaaagtattgctcagttt

SEQ ID NO: 7601 - DNA, 26 bp, Homo sapiens
aattcacaaaagtattgctcagttta

SEQ ID NO: 7602 - DNA, 26 bp, Homo sapiens
attcacaaaagtattgctcagtttaa

SEQ ID NO: 7603 - DNA, 26 bp, Homo sapiens
ttcacaaaagtattgctcagtttaat

SEQ ID NO: 7604 - DNA, 26 bp, Homo sapiens
tcacaaaagtattgctcagtttaatt

SEQ ID NO: 7605 - DNA, 26 bp, Homo sapiens
cacaaaagtattgctcagtttaatta

SEQ ID NO: 7606 - DNA, 26 bp, Homo sapiens
acaaaagtattgctcagtttaattag

SEQ ID NO: 7607 - DNA, 26 bp, Homo sapiens
caaaagtattgctcagtttaattaga

SEQ ID NO: 7608 - DNA, 26 bp, Homo sapiens
aaaagtattgctcagtttaattagac

SEQ ID NO: 7609 - DNA, 26 bp, Homo sapiens
aaagtattgctcagtttaattagaca

SEQ ID NO: 7610 - DNA, 26 bp, Homo sapiens
aagtattgctcagtttaattagacac

SEQ ID NO: 7611 - DNA, 26 bp, Homo sapiens
agtattgctcagtttaattagacact

SEQ ID NO: 7612 - DNA, 26 bp, Homo sapiens
gtattgctcagtttaattagacactg

SEQ ID NO: 7613 - DNA, 26 bp, Homo sapiens
tattgctcagtttaattagacactgc

SEQ ID NO: 7614 - DNA, 26 bp, Homo sapiens
attgctcagtttaattagacactgct

SEQ ID NO: 7615 - DNA, 26 bp, Homo sapiens
ttgctcagtttaattagacactgctg

SEQ ID NO: 7616 - DNA, 26 bp, Homo sapiens
tgctcagtttaattagacactgctga

SEQ ID NO: 7617 - DNA, 26 bp, Homo sapiens
gctcagtttaattagacactgctgag

SEQ ID NO: 7618 - DNA, 26 bp, Homo sapiens
ctcagtttaattagacactgctgaga

SEQ ID NO: 7619 - DNA, 26 bp, Homo sapiens
tcagtttaattagacactgctgagag

SEQ ID NO: 7620 - DNA, 26 bp, Homo sapiens
cagtttaattagacactgctgagagt

SEQ ID NO: 7621 - DNA, 26 bp, Homo sapiens
agtttaattagacactgctgagagtt

SEQ ID NO: 7622 - DNA, 26 bp, Homo sapiens
gtttaattagacactgctgagagtta

SEQ ID NO: 7623 - DNA, 26 bp, Homo sapiens
tttaattagacactgctgagagttag

SEQ ID NO: 7624 - DNA, 26 bp, Homo sapiens
ttaattagacactgctgagagttagc

SEQ ID NO: 7625 - DNA, 26 bp, Homo sapiens
taattagacactgctgagagttagca

SEQ ID NO: 7626 - DNA, 26 bp, Homo sapiens
aattagacactgctgagagttagcaa

SEQ ID NO: 7627 - DNA, 26 bp, Homo sapiens
attagacactgctgagagttagcaaa

SEQ ID NO: 7628 - DNA, 26 bp, Homo sapiens
ttagacactgctgagagttagcaaaa

SEQ ID NO: 7629 - DNA, 26 bp, Homo sapiens
tagacactgctgagagttagcaaaat

SEQ ID NO: 7630 - DNA, 26 bp, Homo sapiens
agacactgctgagagttagcaaaatg

SEQ ID NO: 7631 - DNA, 26 bp, Homo sapiens
gacactgctgagagttagcaaaatga

SEQ ID NO: 7632 - DNA, 26 bp, Homo sapiens
acactgctgagagttagcaaaatgat

SEQ ID NO: 7633 - DNA, 26 bp, Homo sapiens
cactgctgagagttagcaaaatgatg

SEQ ID NO: 7634 - DNA, 26 bp, Homo sapiens
actgctgagagttagcaaaatgatgt

SEQ ID NO: 7635 - DNA, 26 bp, Homo sapiens
ctgctgagagttagcaaaatgatgtt

SEQ ID NO: 7636 - DNA, 26 bp, Homo sapiens
tgctgagagttagcaaaatgatgttt

SEQ ID NO: 7637 - DNA, 26 bp, Homo sapiens
gctgagagttagcaaaatgatgtttc

SEQ ID NO: 7638 - DNA, 26 bp, Homo sapiens
ctgagagttagcaaaatgatgtttca

SEQ ID NO: 7639 - DNA, 26 bp, Homo sapiens
tgagagttagcaaaatgatgtttcaa

SEQ ID NO: 7640 - DNA, 26 bp, Homo sapiens
gagagttagcaaaatgatgtttcaaa

SEQ ID NO: 7641 - DNA, 26 bp, Homo sapiens
agagttagcaaaatgatgtttcaaaa

SEQ ID NO: 7642 - DNA, 26 bp, Homo sapiens
gagttagcaaaatgatgtttcaaaaa

SEQ ID NO: 7643 - DNA, 26 bp, Homo sapiens
agttagcaaaatgatgtttcaaaaaa

SEQ ID NO: 7644 - DNA, 26 bp, Homo sapiens
gttagcaaaatgatgtttcaaaaaag

SEQ ID NO: 7645 - DNA, 26 bp, Homo sapiens
ttagcaaaatgatgtttcaaaaaagt

SEQ ID NO: 7646 - DNA, 26 bp, Homo sapiens
tagcaaaatgatgtttcaaaaaagtg

SEQ ID NO: 7647 - DNA, 26 bp, Homo sapiens
agcaaaatgatgtttcaaaaaagtgc

SEQ ID NO: 7648 - DNA, 26 bp, Homo sapiens
gcaaaatgatgtttcaaaaaagtgca

SEQ ID NO: 7649 - DNA, 26 bp, Homo sapiens
caaaatgatgtttcaaaaaagtgcac

SEQ ID NO: 7650 - DNA, 26 bp, Homo sapiens
aaaatgatgtttcaaaaaagtgcact

SEQ ID NO: 7651 - DNA, 26 bp, Homo sapiens
aaatgatgtttcaaaaaagtgcactt

SEQ ID NO: 7652 - DNA, 26 bp, Homo sapiens
aatgatgtttcaaaaaagtgcacttc

SEQ ID NO: 7653 - DNA, 26 bp, Homo sapiens
atgatgtttcaaaaaagtgcacttca

SEQ ID NO: 7654 - DNA, 26 bp, Homo sapiens
tgatgtttcaaaaaagtgcacttcag

SEQ ID NO: 7655 - DNA, 26 bp, Homo sapiens
gatgtttcaaaaaagtgcacttcaga

SEQ ID NO: 7656 - DNA, 26 bp, Homo sapiens
atgtttcaaaaaagtgcacttcagaa

SEQ ID NO: 7657 - DNA, 26 bp, Homo sapiens
tgtttcaaaaaagtgcacttcagaaa

SEQ ID NO: 7658 - DNA, 26 bp, Homo sapiens
gtttcaaaaaagtgcacttcagaaat

SEQ ID NO: 7659 - DNA, 26 bp, Homo sapiens
tttcaaaaaagtgcacttcagaaatg

SEQ ID NO: 7660 - DNA, 26 bp, Homo sapiens
ttcaaaaaagtgcacttcagaaatgc

SEQ ID NO: 7661 - DNA, 26 bp, Homo sapiens
tcaaaaaagtgcacttcagaaatgcc

SEQ ID NO: 7662 - DNA, 26 bp, Homo sapiens
caaaaaagtgcacttcagaaatgcct

SEQ ID NO: 7663 - DNA, 26 bp, Homo sapiens
aaaaaagtgcacttcagaaatgccta

SEQ ID NO: 7664 - DNA, 26 bp, Homo sapiens
aaaaagtgcacttcagaaatgcctac

SEQ ID NO: 7665 - DNA, 26 bp, Homo sapiens
aaaagtgcacttcagaaatgcctacg

SEQ ID NO: 7666 - DNA, 26 bp, Homo sapiens
aaagtgcacttcagaaatgcctacgg

SEQ ID NO: 7667 - DNA, 26 bp, Homo sapiens
aagtgcacttcagaaatgcctacggg

SEQ ID NO: 7668 - DNA, 26 bp, Homo sapiens
agtgcacttcagaaatgcctacgggc

SEQ ID NO: 7669 - DNA, 26 bp, Homo sapiens
gtgcacttcagaaatgcctacgggct

SEQ ID NO: 7670 - DNA, 26 bp, Homo sapiens
tgcacttcagaaatgcctacgggctg

SEQ ID NO: 7671 - DNA, 26 bp, Homo sapiens
gcacttcagaaatgcctacgggctgg

SEQ ID NO: 7672 - DNA, 26 bp, Homo sapiens
cacttcagaaatgcctacgggctggc

SEQ ID NO: 7673 - DNA, 26 bp, Homo sapiens
acttcagaaatgcctacgggctggcg

SEQ ID NO: 7674 - DNA, 26 bp, Homo sapiens
cttcagaaatgcctacgggctggcga

SEQ ID NO: 7675 - DNA, 26 bp, Homo sapiens
ttcagaaatgcctacgggctggcgat

SEQ ID NO: 7676 - DNA, 26 bp, Homo sapiens
tcagaaatgcctacgggctggcgata

SEQ ID NO: 7677 - DNA, 26 bp, Homo sapiens
cagaaatgcctacgggctggcgataa

SEQ ID NO: 7678 - DNA, 26 bp, Homo sapiens
agaaatgcctacgggctggcgataaa

SEQ ID NO: 7679 - DNA, 26 bp, Homo sapiens
gaaatgcctacgggctggcgataaag

SEQ ID NO: 7680 - DNA, 26 bp, Homo sapiens
aaatgcctacgggctggcgataaagt

SEQ ID NO: 7681 - DNA, 26 bp, Homo sapiens
aatgcctacgggctggcgataaagta

SEQ ID NO: 7682 - DNA, 26 bp, Homo sapiens
atgcctacgggctggcgataaagtaa

SEQ ID NO: 7683 - DNA, 26 bp, Homo sapiens
tgcctacgggctggcgataaagtaag

SEQ ID NO: 7684 - DNA, 26 bp, Homo sapiens
gcctacgggctggcgataaagtaagg

SEQ ID NO: 7685 - DNA, 26 bp, Homo sapiens
cctacgggctggcgataaagtaagga

SEQ ID NO: 7686 - DNA, 26 bp, Homo sapiens
ctacgggctggcgataaagtaaggac

SEQ ID NO: 7687 - DNA, 26 bp, Homo sapiens
tacgggctggcgataaagtaaggact

SEQ ID NO: 7688 - DNA, 26 bp, Homo sapiens
acgggctggcgataaagtaaggactc

SEQ ID NO: 7689 - DNA, 26 bp, Homo sapiens
cgggctggcgataaagtaaggactct

SEQ ID NO: 7690 - DNA, 26 bp, Homo sapiens
gggctggcgataaagtaaggactctg

SEQ ID NO: 7691 - DNA, 26 bp, Homo sapiens
ggctggcgataaagtaaggactctgc

SEQ ID NO: 7692 - DNA, 26 bp, Homo sapiens
gctggcgataaagtaaggactctgca

SEQ ID NO: 7693 - DNA, 26 bp, Homo sapiens
ctggcgataaagtaaggactctgcat

SEQ ID NO: 7694 - DNA, 26 bp, Homo sapiens
tggcgataaagtaaggactctgcatc

SEQ ID NO: 7695 - DNA, 26 bp, Homo sapiens
ggcgataaagtaaggactctgcatcc

SEQ ID NO: 7696 - DNA, 26 bp, Homo sapiens
gcgataaagtaaggactctgcatccc

SEQ ID NO: 7697 - DNA, 26 bp, Homo sapiens
cgataaagtaaggactctgcatccca

SEQ ID NO: 7698 - DNA, 26 bp, Homo sapiens
gataaagtaaggactctgcatcccag

SEQ ID NO: 7699 - DNA, 26 bp, Homo sapiens
ataaagtaaggactctgcatcccagt

SEQ ID NO: 7700 - DNA, 26 bp, Homo sapiens
taaagtaaggactctgcatcccagta

SEQ ID NO: 7701 - DNA, 26 bp, Homo sapiens
aaagtaaggactctgcatcccagtaa

SEQ ID NO: 7702 - DNA, 26 bp, Homo sapiens
aagtaaggactctgcatcccagtaat

SEQ ID NO: 7703 - DNA, 26 bp, Homo sapiens
agtaaggactctgcatcccagtaatt

SEQ ID NO: 7704 - DNA, 26 bp, Homo sapiens
gtaaggactctgcatcccagtaatta

SEQ ID NO: 7705 - DNA, 26 bp, Homo sapiens
taaggactctgcatcccagtaattaa

SEQ ID NO: 7706 - DNA, 26 bp, Homo sapiens
aaggactctgcatcccagtaattaag

SEQ ID NO: 7707 - DNA, 26 bp, Homo sapiens
aggactctgcatcccagtaattaagt

SEQ ID NO: 7708 - DNA, 26 bp, Homo sapiens
ggactctgcatcccagtaattaagtt

SEQ ID NO: 7709 - DNA, 26 bp, Homo sapiens
gactctgcatcccagtaattaagttt

SEQ ID NO: 7710 - DNA, 26 bp, Homo sapiens
actctgcatcccagtaattaagtttt

SEQ ID NO: 7711 - DNA, 26 bp, Homo sapiens
ctctgcatcccagtaattaagttttg

SEQ ID NO: 7712 - DNA, 26 bp, Homo sapiens
tctgcatcccagtaattaagttttga

SEQ ID NO: 7713 - DNA, 26 bp, Homo sapiens
ctgcatcccagtaattaagttttgat

SEQ ID NO: 7714 - DNA, 26 bp, Homo sapiens
tgcatcccagtaattaagttttgatt

SEQ ID NO: 7715 - DNA, 26 bp, Homo sapiens
gcatcccagtaattaagttttgattg

SEQ ID NO: 7716 - DNA, 26 bp, Homo sapiens
catcccagtaattaagttttgattgc

SEQ ID NO: 7717 - DNA, 26 bp, Homo sapiens
atcccagtaattaagttttgattgct

SEQ ID NO: 7718 - DNA, 26 bp, Homo sapiens
tcccagtaattaagttttgattgcta

SEQ ID NO: 7719 - DNA, 26 bp, Homo sapiens
cccagtaattaagttttgattgctaa

SEQ ID NO: 7720 - DNA, 26 bp, Homo sapiens
ccagtaattaagttttgattgctaat

SEQ ID NO: 7721 - DNA, 26 bp, Homo sapiens
cagtaattaagttttgattgctaatg

SEQ ID NO: 7722 - DNA, 26 bp, Homo sapiens
agtaattaagttttgattgctaatga

SEQ ID NO: 7723 - DNA, 26 bp, Homo sapiens
gtaattaagttttgattgctaatgag

SEQ ID NO: 7724 - DNA, 26 bp, Homo sapiens
taattaagttttgattgctaatgagg

SEQ ID NO: 7725 - DNA, 26 bp, Homo sapiens
aattaagttttgattgctaatgagga

SEQ ID NO: 7726 - DNA, 26 bp, Homo sapiens
attaagttttgattgctaatgaggaa

SEQ ID NO: 7727 - DNA, 26 bp, Homo sapiens
ttaagttttgattgctaatgaggaat

SEQ ID NO: 7728 - DNA, 26 bp, Homo sapiens
taagttttgattgctaatgaggaatc

SEQ ID NO: 7729 - DNA, 26 bp, Homo sapiens
aagttttgattgctaatgaggaatcc

SEQ ID NO: 7730 - DNA, 26 bp, Homo sapiens
agttttgattgctaatgaggaatccc

SEQ ID NO: 7731 - DNA, 26 bp, Homo sapiens
gttttgattgctaatgaggaatccca

SEQ ID NO: 7732 - DNA, 26 bp, Homo sapiens
ttttgattgctaatgaggaatcccag

SEQ ID NO: 7733 - DNA, 26 bp, Homo sapiens
tttgattgctaatgaggaatcccaga

SEQ ID NO: 7734 - DNA, 26 bp, Homo sapiens
ttgattgctaatgaggaatcccagac

SEQ ID NO: 7735 - DNA, 26 bp, Homo sapiens
tgattgctaatgaggaatcccagaca

SEQ ID NO: 7736 - DNA, 26 bp, Homo sapiens
gattgctaatgaggaatcccagacac

SEQ ID NO: 7737 - DNA, 26 bp, Homo sapiens
attgctaatgaggaatcccagacacc

SEQ ID NO: 7738 - DNA, 26 bp, Homo sapiens
ttgctaatgaggaatcccagacacct

SEQ ID NO: 7739 - DNA, 26 bp, Homo sapiens
tgctaatgaggaatcccagacacctc

SEQ ID NO: 7740 - DNA, 26 bp, Homo sapiens
gctaatgaggaatcccagacacctcc

SEQ ID NO: 7741 - DNA, 26 bp, Homo sapiens
ctaatgaggaatcccagacacctccc

SEQ ID NO: 7742 - DNA, 26 bp, Homo sapiens
taatgaggaatcccagacacctccct

SEQ ID NO: 7743 - DNA, 26 bp, Homo sapiens
aatgaggaatcccagacacctccctg

SEQ ID NO: 7744 - DNA, 26 bp, Homo sapiens
atgaggaatcccagacacctccctgt

SEQ ID NO: 7745 - DNA, 26 bp, Homo sapiens
tgaggaatcccagacacctccctgta

SEQ ID NO: 7746 - DNA, 26 bp, Homo sapiens
gaggaatcccagacacctccctgtaa

SEQ ID NO: 7747 - DNA, 26 bp, Homo sapiens
aggaatcccagacacctccctgtaaa

SEQ ID NO: 7748 - DNA, 26 bp, Homo sapiens
ggaatcccagacacctccctgtaaaa

SEQ ID NO: 7749 - DNA, 26 bp, Homo sapiens
gaatcccagacacctccctgtaaaag

SEQ ID NO: 7750 - DNA, 26 bp, Homo sapiens
aatcccagacacctccctgtaaaagc

SEQ ID NO: 7751 - DNA, 26 bp, Homo sapiens
atcccagacacctccctgtaaaagcc

SEQ ID NO: 7752 - DNA, 26 bp, Homo sapiens
tcccagacacctccctgtaaaagcca

SEQ ID NO: 7753 - DNA, 26 bp, Homo sapiens
cccagacacctccctgtaaaagccag

SEQ ID NO: 7754 - DNA, 26 bp, Homo sapiens
ccagacacctccctgtaaaagccagc

SEQ ID NO: 7755 - DNA, 26 bp, Homo sapiens
cagacacctccctgtaaaagccagca

SEQ ID NO: 7756 - DNA, 26 bp, Homo sapiens
agacacctccctgtaaaagccagcat

SEQ ID NO: 7757 - DNA, 26 bp, Homo sapiens
gacacctccctgtaaaagccagcatg

SEQ ID NO: 7758 - DNA, 26 bp, Homo sapiens
acacctccctgtaaaagccagcatgc

SEQ ID NO: 7759 - DNA, 26 bp, Homo sapiens
cacctccctgtaaaagccagcatgcg

SEQ ID NO: 7760 - DNA, 26 bp, Homo sapiens
acctccctgtaaaagccagcatgcga

SEQ ID NO: 7761 - DNA, 26 bp, Homo sapiens
cctccctgtaaaagccagcatgcgag

SEQ ID NO: 7762 - DNA, 26 bp, Homo sapiens
ctccctgtaaaagccagcatgcgagg

SEQ ID NO: 7763 - DNA, 26 bp, Homo sapiens
tccctgtaaaagccagcatgcgaggt

SEQ ID NO: 7764 - DNA, 26 bp, Homo sapiens
ccctgtaaaagccagcatgcgaggtg

SEQ ID NO: 7765 - DNA, 26 bp, Homo sapiens
cctgtaaaagccagcatgcgaggtgg

SEQ ID NO: 7766 - DNA, 26 bp, Homo sapiens
ctgtaaaagccagcatgcgaggtggg

SEQ ID NO: 7767 - DNA, 26 bp, Homo sapiens
tgtaaaagccagcatgcgaggtgggg

SEQ ID NO: 7768 - DNA, 26 bp, Homo sapiens
gtaaaagccagcatgcgaggtgggga

SEQ ID NO: 7769 - DNA, 26 bp, Homo sapiens
taaaagccagcatgcgaggtggggac

SEQ ID NO: 7770 - DNA, 26 bp, Homo sapiens
aaaagccagcatgcgaggtggggaca

SEQ ID NO: 7771 - DNA, 26 bp, Homo sapiens
aaagccagcatgcgaggtggggacaa

SEQ ID NO: 7772 - DNA, 26 bp, Homo sapiens
aagccagcatgcgaggtggggacaaa

SEQ ID NO: 7773 - DNA, 26 bp, Homo sapiens
agccagcatgcgaggtggggacaaac

SEQ ID NO: 7774 - DNA, 26 bp, Homo sapiens
gccagcatgcgaggtggggacaaacc

SEQ ID NO: 7775 - DNA, 26 bp, Homo sapiens
ccagcatgcgaggtggggacaaaccc

SEQ ID NO: 7776 - DNA, 26 bp, Homo sapiens
cagcatgcgaggtggggacaaacccc

SEQ ID NO: 7777 - DNA, 26 bp, Homo sapiens
agcatgcgaggtggggacaaacccct

SEQ ID NO: 7778 - DNA, 26 bp, Homo sapiens
gcatgcgaggtggggacaaaccccta

SEQ ID NO: 7779 - DNA, 26 bp, Homo sapiens
catgcgaggtggggacaaacccctaa

SEQ ID NO: 7780 - DNA, 26 bp, Homo sapiens
atgcgaggtggggacaaacccctaaa

SEQ ID NO: 7781 - DNA, 26 bp, Homo sapiens
tgcgaggtggggacaaacccctaaaa

SEQ ID NO: 7782 - DNA, 26 bp, Homo sapiens
gcgaggtggggacaaacccctaaaat

SEQ ID NO: 7783 - DNA, 26 bp, Homo sapiens
cgaggtggggacaaacccctaaaatt

SEQ ID NO: 7784 - DNA, 26 bp, Homo sapiens
gaggtggggacaaacccctaaaattc

SEQ ID NO: 7785 - DNA, 26 bp, Homo sapiens
aggtggggacaaacccctaaaattca

SEQ ID NO: 7786 - DNA, 26 bp, Homo sapiens
ggtggggacaaacccctaaaattcag

SEQ ID NO: 7787 - DNA, 26 bp, Homo sapiens
gtggggacaaacccctaaaattcaga

SEQ ID NO: 7788 - DNA, 26 bp, Homo sapiens
tggggacaaacccctaaaattcagat

SEQ ID NO: 7789 - DNA, 26 bp, Homo sapiens
ggggacaaacccctaaaattcagatt

SEQ ID NO: 7790 - DNA, 26 bp, Homo sapiens
gggacaaacccctaaaattcagattt

SEQ ID NO: 7791 - DNA, 26 bp, Homo sapiens
ggacaaacccctaaaattcagatttt

SEQ ID NO: 7792 - DNA, 26 bp, Homo sapiens
gacaaacccctaaaattcagatttta

SEQ ID NO: 7793 - DNA, 26 bp, Homo sapiens
acaaacccctaaaattcagattttat

SEQ ID NO: 7794 - DNA, 26 bp, Homo sapiens
caaacccctaaaattcagattttata

SEQ ID NO: 7795 - DNA, 26 bp, Homo sapiens
aaacccctaaaattcagattttatac

SEQ ID NO: 7796 - DNA, 26 bp, Homo sapiens
aacccctaaaattcagattttataca

SEQ ID NO: 7797 - DNA, 26 bp, Homo sapiens
acccctaaaattcagattttatacat

SEQ ID NO: 7798 - DNA, 26 bp, Homo sapiens
cccctaaaattcagattttatacatg

SEQ ID NO: 7799 - DNA, 26 bp, Homo sapiens
ccctaaaattcagattttatacatgg

SEQ ID NO: 7800 - DNA, 26 bp, Homo sapiens
cctaaaattcagattttatacatggg

SEQ ID NO: 7801 - DNA, 26 bp, Homo sapiens
ctaaaattcagattttatacatgggc

SEQ ID NO: 7802 - DNA, 26 bp, Homo sapiens
taaaattcagattttatacatgggcc

SEQ ID NO: 7803 - DNA, 26 bp, Homo sapiens
aaaattcagattttatacatgggcca

SEQ ID NO: 7804 - DNA, 26 bp, Homo sapiens
aaattcagattttatacatgggccac

SEQ ID NO: 7805 - DNA, 26 bp, Homo sapiens
aattcagattttatacatgggccacc

SEQ ID NO: 7806 - DNA, 26 bp, Homo sapiens
attcagattttatacatgggccacct

SEQ ID NO: 7807 - DNA, 26 bp, Homo sapiens
ttcagattttatacatgggccacctg

SEQ ID NO: 7808 - DNA, 26 bp, Homo sapiens
tcagattttatacatgggccacctgt

SEQ ID NO: 7809 - DNA, 26 bp, Homo sapiens
cagattttatacatgggccacctgta

SEQ ID NO: 7810 - DNA, 26 bp, Homo sapiens
agattttatacatgggccacctgtat

SEQ ID NO: 7811 - DNA, 26 bp, Homo sapiens
gattttatacatgggccacctgtatg

SEQ ID NO: 7812 - DNA, 26 bp, Homo sapiens
attttatacatgggccacctgtatgg

SEQ ID NO: 7813 - DNA, 26 bp, Homo sapiens
ttttatacatgggccacctgtatggt

SEQ ID NO: 7814 - DNA, 26 bp, Homo sapiens
tttatacatgggccacctgtatggtc

SEQ ID NO: 7815 - DNA, 26 bp, Homo sapiens
ttatacatgggccacctgtatggtca

SEQ ID NO: 7816 - DNA, 26 bp, Homo sapiens
tatacatgggccacctgtatggtcaa

SEQ ID NO: 7817 - DNA, 26 bp, Homo sapiens
atacatgggccacctgtatggtcaat

SEQ ID NO: 7818 - DNA, 26 bp, Homo sapiens
tacatgggccacctgtatggtcaatt

SEQ ID NO: 7819 - DNA, 26 bp, Homo sapiens
acatgggccacctgtatggtcaattt

SEQ ID NO: 7820 - DNA, 26 bp, Homo sapiens
catgggccacctgtatggtcaatttt

SEQ ID NO: 7821 - DNA, 26 bp, Homo sapiens
atgggccacctgtatggtcaattttg

SEQ ID NO: 7822 - DNA, 26 bp, Homo sapiens
tgggccacctgtatggtcaattttgc

SEQ ID NO: 7823 - DNA, 26 bp, Homo sapiens
gggccacctgtatggtcaattttgca

SEQ ID NO: 7824 - DNA, 26 bp, Homo sapiens
ggccacctgtatggtcaattttgcaa

SEQ ID NO: 7825 - DNA, 26 bp, Homo sapiens
gccacctgtatggtcaattttgcaac

SEQ ID NO: 7826 - DNA, 26 bp, Homo sapiens
ccacctgtatggtcaattttgcaaca

SEQ ID NO: 7827 - DNA, 26 bp, Homo sapiens
cacctgtatggtcaattttgcaacaa

SEQ ID NO: 7828 - DNA, 26 bp, Homo sapiens
acctgtatggtcaattttgcaacaac

SEQ ID NO: 7829 - DNA, 26 bp, Homo sapiens
cctgtatggtcaattttgcaacaaca

SEQ ID NO: 7830 - DNA, 26 bp, Homo sapiens
ctgtatggtcaattttgcaacaacac

SEQ ID NO: 7831 - DNA, 26 bp, Homo sapiens
tgtatggtcaattttgcaacaacact

SEQ ID NO: 7832 - DNA, 26 bp, Homo sapiens
gtatggtcaattttgcaacaacacta

SEQ ID NO: 7833 - DNA, 26 bp, Homo sapiens
tatggtcaattttgcaacaacactat

SEQ ID NO: 7834 - DNA, 26 bp, Homo sapiens
atggtcaattttgcaacaacactatg

SEQ ID NO: 7835 - DNA, 26 bp, Homo sapiens
tggtcaattttgcaacaacactatga

SEQ ID NO: 7836 - DNA, 26 bp, Homo sapiens
ggtcaattttgcaacaacactatgac

SEQ ID NO: 7837 - DNA, 26 bp, Homo sapiens
gtcaattttgcaacaacactatgacc

SEQ ID NO: 7838 - DNA, 26 bp, Homo sapiens
tcaattttgcaacaacactatgacca

SEQ ID NO: 7839 - DNA, 26 bp, Homo sapiens
caattttgcaacaacactatgaccaa

SEQ ID NO: 7840 - DNA, 26 bp, Homo sapiens
aattttgcaacaacactatgaccaag

SEQ ID NO: 7841 - DNA, 26 bp, Homo sapiens
attttgcaacaacactatgaccaagg

SEQ ID NO: 7842 - DNA, 26 bp, Homo sapiens
ttttgcaacaacactatgaccaaggc

SEQ ID NO: 7843 - DNA, 26 bp, Homo sapiens
tttgcaacaacactatgaccaaggca

SEQ ID NO: 7844 - DNA, 26 bp, Homo sapiens
ttgcaacaacactatgaccaaggcat

SEQ ID NO: 7845 - DNA, 26 bp, Homo sapiens
tgcaacaacactatgaccaaggcatt

SEQ ID NO: 7846 - DNA, 26 bp, Homo sapiens
gcaacaacactatgaccaaggcattc

SEQ ID NO: 7847 - DNA, 26 bp, Homo sapiens
caacaacactatgaccaaggcattct

SEQ ID NO: 7848 - DNA, 26 bp, Homo sapiens
aacaacactatgaccaaggcattctg

SEQ ID NO: 7849 - DNA, 26 bp, Homo sapiens
acaacactatgaccaaggcattctga

SEQ ID NO: 7850 - DNA, 26 bp, Homo sapiens
caacactatgaccaaggcattctgat

SEQ ID NO: 7851 - DNA, 26 bp, Homo sapiens
aacactatgaccaaggcattctgata

SEQ ID NO: 7852 - DNA, 26 bp, Homo sapiens
acactatgaccaaggcattctgatag

SEQ ID NO: 7853 - DNA, 26 bp, Homo sapiens
cactatgaccaaggcattctgatagc

SEQ ID NO: 7854 - DNA, 26 bp, Homo sapiens
actatgaccaaggcattctgatagct

SEQ ID NO: 7855 - DNA, 26 bp, Homo sapiens
ctatgaccaaggcattctgatagctg

SEQ ID NO: 7856 - DNA, 26 bp, Homo sapiens
tatgaccaaggcattctgatagctgt

SEQ ID NO: 7857 - DNA, 26 bp, Homo sapiens
atgaccaaggcattctgatagctgtc

SEQ ID NO: 7858 - DNA, 26 bp, Homo sapiens
tgaccaaggcattctgatagctgtca

SEQ ID NO: 7859 - DNA, 26 bp, Homo sapiens
gaccaaggcattctgatagctgtcaa

SEQ ID NO: 7860 - DNA, 26 bp, Homo sapiens
accaaggcattctgatagctgtcaag

SEQ ID NO: 7861 - DNA, 26 bp, Homo sapiens
ccaaggcattctgatagctgtcaaga

SEQ ID NO: 7862 - DNA, 26 bp, Homo sapiens
caaggcattctgatagctgtcaagat

SEQ ID NO: 7863 - DNA, 26 bp, Homo sapiens
aaggcattctgatagctgtcaagatt

SEQ ID NO: 7864 - DNA, 26 bp, Homo sapiens
aggcattctgatagctgtcaagattt

SEQ ID NO: 7865 - DNA, 26 bp, Homo sapiens
ggcattctgatagctgtcaagatttt

SEQ ID NO: 7866 - DNA, 26 bp, Homo sapiens
gcattctgatagctgtcaagattttc

SEQ ID NO: 7867 - DNA, 26 bp, Homo sapiens
cattctgatagctgtcaagattttct

SEQ ID NO: 7868 - DNA, 26 bp, Homo sapiens
attctgatagctgtcaagattttctg

SEQ ID NO: 7869 - DNA, 26 bp, Homo sapiens
ttctgatagctgtcaagattttctgt

SEQ ID NO: 7870 - DNA, 26 bp, Homo sapiens
tctgatagctgtcaagattttctgta

SEQ ID NO: 7871 - DNA, 26 bp, Homo sapiens
ctgatagctgtcaagattttctgtac

SEQ ID NO: 7872 - DNA, 26 bp, Homo sapiens
tgatagctgtcaagattttctgtact

SEQ ID NO: 7873 - DNA, 26 bp, Homo sapiens
gatagctgtcaagattttctgtacta

SEQ ID NO: 7874 - DNA, 26 bp, Homo sapiens
atagctgtcaagattttctgtactag

SEQ ID NO: 7875 - DNA, 26 bp, Homo sapiens
tagctgtcaagattttctgtactaga

SEQ ID NO: 7876 - DNA, 26 bp, Homo sapiens
agctgtcaagattttctgtactagaa

SEQ ID NO: 7877 - DNA, 26 bp, Homo sapiens
gctgtcaagattttctgtactagaaa

SEQ ID NO: 7878 - DNA, 26 bp, Homo sapiens
ctgtcaagattttctgtactagaaat

SEQ ID NO: 7879 - DNA, 26 bp, Homo sapiens
tgtcaagattttctgtactagaaatt

SEQ ID NO: 7880 - DNA, 26 bp, Homo sapiens
gtcaagattttctgtactagaaatta

SEQ ID NO: 7881 - DNA, 26 bp, Homo sapiens
tcaagattttctgtactagaaattaa

SEQ ID NO: 7882 - DNA, 26 bp, Homo sapiens
caagattttctgtactagaaattaat

SEQ ID NO: 7883 - DNA, 26 bp, Homo sapiens
aagattttctgtactagaaattaata

SEQ ID NO: 7884 - DNA, 26 bp, Homo sapiens
agattttctgtactagaaattaatat

SEQ ID NO: 7885 - DNA, 26 bp, Homo sapiens
gattttctgtactagaaattaatatg

SEQ ID NO: 7886 - DNA, 26 bp, Homo sapiens
attttctgtactagaaattaatatga

SEQ ID NO: 7887 - DNA, 26 bp, Homo sapiens
ttttctgtactagaaattaatatgaa

SEQ ID NO: 7888 - DNA, 26 bp, Homo sapiens
tttctgtactagaaattaatatgaag

SEQ ID NO: 7889 - DNA, 26 bp, Homo sapiens
ttctgtactagaaattaatatgaagt

SEQ ID NO: 7890 - DNA, 26 bp, Homo sapiens
tctgtactagaaattaatatgaagtg

SEQ ID NO: 7891 - DNA, 26 bp, Homo sapiens
ctgtactagaaattaatatgaagtgt

SEQ ID NO: 7892 - DNA, 26 bp, Homo sapiens
tgtactagaaattaatatgaagtgta

SEQ ID NO: 7893 - DNA, 26 bp, Homo sapiens
gtactagaaattaatatgaagtgtat

SEQ ID NO: 7894 - DNA, 26 bp, Homo sapiens
tactagaaattaatatgaagtgtatt

SEQ ID NO: 7895 - DNA, 26 bp, Homo sapiens
actagaaattaatatgaagtgtattg

SEQ ID NO: 7896 - DNA, 26 bp, Homo sapiens
ctagaaattaatatgaagtgtattga

SEQ ID NO: 7897 - DNA, 26 bp, Homo sapiens
tagaaattaatatgaagtgtattgac

SEQ ID NO: 7898 - DNA, 26 bp, Homo sapiens
agaaattaatatgaagtgtattgacg

SEQ ID NO: 7899 - DNA, 26 bp, Homo sapiens
gaaattaatatgaagtgtattgacgt

SEQ ID NO: 7900 - DNA, 26 bp, Homo sapiens
aaattaatatgaagtgtattgacgtg

SEQ ID NO: 7901 - DNA, 26 bp, Homo sapiens
aattaatatgaagtgtattgacgtga

SEQ ID NO: 7902 - DNA, 26 bp, Homo sapiens
attaatatgaagtgtattgacgtgaa

SEQ ID NO: 7903 - DNA, 26 bp, Homo sapiens
ttaatatgaagtgtattgacgtgaag

SEQ ID NO: 7904 - DNA, 26 bp, Homo sapiens
taatatgaagtgtattgacgtgaaga

SEQ ID NO: 7905 - DNA, 26 bp, Homo sapiens
aatatgaagtgtattgacgtgaagaa

SEQ ID NO: 7906 - DNA, 26 bp, Homo sapiens
atatgaagtgtattgacgtgaagaag

SEQ ID NO: 7907 - DNA, 26 bp, Homo sapiens
tatgaagtgtattgacgtgaagaaga

SEQ ID NO: 7908 - DNA, 26 bp, Homo sapiens
atgaagtgtattgacgtgaagaagaa

SEQ ID NO: 7909 - DNA, 26 bp, Homo sapiens
tgaagtgtattgacgtgaagaagaat

SEQ ID NO: 7910 - DNA, 26 bp, Homo sapiens
gaagtgtattgacgtgaagaagaatg

SEQ ID NO: 7911 - DNA, 26 bp, Homo sapiens
aagtgtattgacgtgaagaagaatga

SEQ ID NO: 7912 - DNA, 26 bp, Homo sapiens
agtgtattgacgtgaagaagaatgat

SEQ ID NO: 7913 - DNA, 26 bp, Homo sapiens
gtgtattgacgtgaagaagaatgatt

SEQ ID NO: 7914 - DNA, 26 bp, Homo sapiens
tgtattgacgtgaagaagaatgattt

SEQ ID NO: 7915 - DNA, 26 bp, Homo sapiens
gtattgacgtgaagaagaatgattta

SEQ ID NO: 7916 - DNA, 26 bp, Homo sapiens
tattgacgtgaagaagaatgatttat

SEQ ID NO: 7917 - DNA, 26 bp, Homo sapiens
attgacgtgaagaagaatgatttatc

SEQ ID NO: 7918 - DNA, 26 bp, Homo sapiens
ttgacgtgaagaagaatgatttatca

SEQ ID NO: 7919 - DNA, 26 bp, Homo sapiens
tgacgtgaagaagaatgatttatcat

SEQ ID NO: 7920 - DNA, 26 bp, Homo sapiens
gacgtgaagaagaatgatttatcata

SEQ ID NO: 7921 - DNA, 26 bp, Homo sapiens
acgtgaagaagaatgatttatcatat

SEQ ID NO: 7922 - DNA, 26 bp, Homo sapiens
cgtgaagaagaatgatttatcatatg

SEQ ID NO: 7923 - DNA, 26 bp, Homo sapiens
gtgaagaagaatgatttatcatatgg

SEQ ID NO: 7924 - DNA, 26 bp, Homo sapiens
tgaagaagaatgatttatcatatgga

SEQ ID NO: 7925 - DNA, 26 bp, Homo sapiens
gaagaagaatgatttatcatatggaa

SEQ ID NO: 7926 - DNA, 26 bp, Homo sapiens
aagaagaatgatttatcatatggaag

SEQ ID NO: 7927 - DNA, 26 bp, Homo sapiens
agaagaatgatttatcatatggaagg

SEQ ID NO: 7928 - DNA, 26 bp, Homo sapiens
gaagaatgatttatcatatggaagga

SEQ ID NO: 7929 - DNA, 26 bp, Homo sapiens
aagaatgatttatcatatggaaggaa

SEQ ID NO: 7930 - DNA, 26 bp, Homo sapiens
agaatgatttatcatatggaaggaag

SEQ ID NO: 7931 - DNA, 26 bp, Homo sapiens
gaatgatttatcatatggaaggaagt

SEQ ID NO: 7932 - DNA, 26 bp, Homo sapiens
aatgatttatcatatggaaggaagtc

SEQ ID NO: 7933 - DNA, 26 bp, Homo sapiens
atgatttatcatatggaaggaagtcc

SEQ ID NO: 7934 - DNA, 26 bp, Homo sapiens
tgatttatcatatggaaggaagtccc

SEQ ID NO: 7935 - DNA, 26 bp, Homo sapiens
gatttatcatatggaaggaagtccca

SEQ ID NO: 7936 - DNA, 26 bp, Homo sapiens
atttatcatatggaaggaagtcccaa

SEQ ID NO: 7937 - DNA, 26 bp, Homo sapiens
tttatcatatggaaggaagtcccaag

SEQ ID NO: 7938 - DNA, 26 bp, Homo sapiens
ttatcatatggaaggaagtcccaagg

SEQ ID NO: 7939 - DNA, 26 bp, Homo sapiens
tatcatatggaaggaagtcccaaggc

SEQ ID NO: 7940 - DNA, 26 bp, Homo sapiens
atcatatggaaggaagtcccaaggct

SEQ ID NO: 7941 - DNA, 26 bp, Homo sapiens
tcatatggaaggaagtcccaaggctc

SEQ ID NO: 7942 - DNA, 26 bp, Homo sapiens
catatggaaggaagtcccaaggctcc

SEQ ID NO: 7943 - DNA, 26 bp, Homo sapiens
atatggaaggaagtcccaaggctcct

SEQ ID NO: 7944 - DNA, 26 bp, Homo sapiens
tatggaaggaagtcccaaggctcctg

SEQ ID NO: 7945 - DNA, 26 bp, Homo sapiens
atggaaggaagtcccaaggctcctgg

SEQ ID NO: 7946 - DNA, 26 bp, Homo sapiens
tggaaggaagtcccaaggctcctggg

SEQ ID NO: 7947 - DNA, 26 bp, Homo sapiens
ggaaggaagtcccaaggctcctgggc

SEQ ID NO: 7948 - DNA, 26 bp, Homo sapiens
gaaggaagtcccaaggctcctgggcg

SEQ ID NO: 7949 - DNA, 26 bp, Homo sapiens
aaggaagtcccaaggctcctgggcgc

SEQ ID NO: 7950 - DNA, 26 bp, Homo sapiens
aggaagtcccaaggctcctgggcgct

SEQ ID NO: 7951 - DNA, 26 bp, Homo sapiens
ggaagtcccaaggctcctgggcgctg

SEQ ID NO: 7952 - DNA, 26 bp, Homo sapiens
gaagtcccaaggctcctgggcgctga

SEQ ID NO: 7953 - DNA, 26 bp, Homo sapiens
aagtcccaaggctcctgggcgctgag

SEQ ID NO: 7954 - DNA, 26 bp, Homo sapiens
agtcccaaggctcctgggcgctgagg

SEQ ID NO: 7955 - DNA, 26 bp, Homo sapiens
gtcccaaggctcctgggcgctgaggt

SEQ ID NO: 7956 - DNA, 26 bp, Homo sapiens
tcccaaggctcctgggcgctgaggtg

SEQ ID NO: 7957 - DNA, 26 bp, Homo sapiens
cccaaggctcctgggcgctgaggtgg

SEQ ID NO: 7958 - DNA, 26 bp, Homo sapiens
ccaaggctcctgggcgctgaggtggg

SEQ ID NO: 7959 - DNA, 26 bp, Homo sapiens
caaggctcctgggcgctgaggtgggc

SEQ ID NO: 7960 - DNA, 26 bp, Homo sapiens
aaggctcctgggcgctgaggtgggcg

SEQ ID NO: 7961 - DNA, 26 bp, Homo sapiens
aggctcctgggcgctgaggtgggcga

SEQ ID NO: 7962 - DNA, 26 bp, Homo sapiens
ggctcctgggcgctgaggtgggcgac

SEQ ID NO: 7963 - DNA, 26 bp, Homo sapiens
gctcctgggcgctgaggtgggcgacg

SEQ ID NO: 7964 - DNA, 26 bp, Homo sapiens
ctcctgggcgctgaggtgggcgacgg

SEQ ID NO: 7965 - DNA, 26 bp, Homo sapiens
tcctgggcgctgaggtgggcgacgga

SEQ ID NO: 7966 - DNA, 26 bp, Homo sapiens
cctgggcgctgaggtgggcgacggag

SEQ ID NO: 7967 - DNA, 26 bp, Homo sapiens
ctgggcgctgaggtgggcgacggagg

SEQ ID NO: 7968 - DNA, 26 bp, Homo sapiens
tgggcgctgaggtgggcgacggaggt

SEQ ID NO: 7969 - DNA, 26 bp, Homo sapiens
gggcgctgaggtgggcgacggaggtg

SEQ ID NO: 7970 - DNA, 26 bp, Homo sapiens
ggcgctgaggtgggcgacggaggtgg

SEQ ID NO: 7971 - DNA, 26 bp, Homo sapiens
gcgctgaggtgggcgacggaggtggg

SEQ ID NO: 7972 - DNA, 26 bp, Homo sapiens
cgctgaggtgggcgacggaggtgggt

SEQ ID NO: 7973 - DNA, 26 bp, Homo sapiens
gctgaggtgggcgacggaggtgggtg

SEQ ID NO: 7974 - DNA, 26 bp, Homo sapiens
ctgaggtgggcgacggaggtgggtgg

SEQ ID NO: 7975 - DNA, 26 bp, Homo sapiens
tgaggtgggcgacggaggtgggtggc

SEQ ID NO: 7976 - DNA, 26 bp, Homo sapiens
gaggtgggcgacggaggtgggtggcg

SEQ ID NO: 7977 - DNA, 26 bp, Homo sapiens
aggtgggcgacggaggtgggtggcgt

SEQ ID NO: 7978 - DNA, 26 bp, Homo sapiens
ggtgggcgacggaggtgggtggcgta

SEQ ID NO: 7979 - DNA, 26 bp, Homo sapiens
gtgggcgacggaggtgggtggcgtac

SEQ ID NO: 7980 - DNA, 26 bp, Homo sapiens
tgggcgacggaggtgggtggcgtacc

SEQ ID NO: 7981 - DNA, 26 bp, Homo sapiens
gggcgacggaggtgggtggcgtacct

SEQ ID NO: 7982 - DNA, 26 bp, Homo sapiens
ggcgacggaggtgggtggcgtacctt

SEQ ID NO: 7983 - DNA, 26 bp, Homo sapiens
gcgacggaggtgggtggcgtaccttc

SEQ ID NO: 7984 - DNA, 26 bp, Homo sapiens
cgacggaggtgggtggcgtaccttca

SEQ ID NO: 7985 - DNA, 26 bp, Homo sapiens
gacggaggtgggtggcgtaccttcag

SEQ ID NO: 7986 - DNA, 26 bp, Homo sapiens
acggaggtgggtggcgtaccttcaga

SEQ ID NO: 7987 - DNA, 26 bp, Homo sapiens
cggaggtgggtggcgtaccttcagag

SEQ ID NO: 7988 - DNA, 26 bp, Homo sapiens
ggaggtgggtggcgtaccttcagagg

SEQ ID NO: 7989 - DNA, 26 bp, Homo sapiens
gaggtgggtggcgtaccttcagagga

SEQ ID NO: 7990 - DNA, 26 bp, Homo sapiens
aggtgggtggcgtaccttcagaggaa

SEQ ID NO: 7991 - DNA, 26 bp, Homo sapiens
ggtgggtggcgtaccttcagaggaaa

SEQ ID NO: 7992 - DNA, 26 bp, Homo sapiens
gtgggtggcgtaccttcagaggaaag

SEQ ID NO: 7993 - DNA, 26 bp, Homo sapiens
tgggtggcgtaccttcagaggaaagg

SEQ ID NO: 7994 - DNA, 26 bp, Homo sapiens
gggtggcgtaccttcagaggaaaggg

SEQ ID NO: 7995 - DNA, 26 bp, Homo sapiens
ggtggcgtaccttcagaggaaaggga

SEQ ID NO: 7996 - DNA, 26 bp, Homo sapiens
gtggcgtaccttcagaggaaagggaa

SEQ ID NO: 7997 - DNA, 26 bp, Homo sapiens
tggcgtaccttcagaggaaagggaag

SEQ ID NO: 7998 - DNA, 26 bp, Homo sapiens
ggcgtaccttcagaggaaagggaagg

SEQ ID NO: 7999 - DNA, 26 bp, Homo sapiens
gcgtaccttcagaggaaagggaaggg

SEQ ID NO: 8000 - DNA, 26 bp, Homo sapiens
cgtaccttcagaggaaagggaagggg

SEQ ID NO: 8001 - DNA, 26 bp, Homo sapiens
gtaccttcagaggaaagggaaggggt

SEQ ID NO: 8002 - DNA, 26 bp, Homo sapiens
taccttcagaggaaagggaaggggtg

SEQ ID NO: 8003 - DNA, 26 bp, Homo sapiens
accttcagaggaaagggaaggggtgc

SEQ ID NO: 8004 - DNA, 26 bp, Homo sapiens
ccttcagaggaaagggaaggggtgct

SEQ ID NO: 8005 - DNA, 26 bp, Homo sapiens
cttcagaggaaagggaaggggtgctc

SEQ ID NO: 8006 - DNA, 26 bp, Homo sapiens
ttcagaggaaagggaaggggtgctcc

SEQ ID NO: 8007 - DNA, 26 bp, Homo sapiens
tcagaggaaagggaaggggtgctccc

SEQ ID NO: 8008 - DNA, 26 bp, Homo sapiens
cagaggaaagggaaggggtgctccct

SEQ ID NO: 8009 - DNA, 26 bp, Homo sapiens
agaggaaagggaaggggtgctccctt

SEQ ID NO: 8010 - DNA, 26 bp, Homo sapiens
gaggaaagggaaggggtgctcccttg

SEQ ID NO: 8011 - DNA, 26 bp, Homo sapiens
aggaaagggaaggggtgctcccttgt

SEQ ID NO: 8012 - DNA, 26 bp, Homo sapiens
ggaaagggaaggggtgctcccttgta

SEQ ID NO: 8013 - DNA, 26 bp, Homo sapiens
gaaagggaaggggtgctcccttgtac

SEQ ID NO: 8014 - DNA, 26 bp, Homo sapiens
aaagggaaggggtgctcccttgtacc

SEQ ID NO: 8015 - DNA, 26 bp, Homo sapiens
aagggaaggggtgctcccttgtaccg

SEQ ID NO: 8016 - DNA, 26 bp, Homo sapiens
agggaaggggtgctcccttgtaccgt

SEQ ID NO: 8017 - DNA, 26 bp, Homo sapiens
gggaaggggtgctcccttgtaccgtg

SEQ ID NO: 8018 - DNA, 26 bp, Homo sapiens
ggaaggggtgctcccttgtaccgtga

SEQ ID NO: 8019 - DNA, 26 bp, Homo sapiens
gaaggggtgctcccttgtaccgtgaa

SEQ ID NO: 8020 - DNA, 26 bp, Homo sapiens
aaggggtgctcccttgtaccgtgaat

SEQ ID NO: 8021 - DNA, 26 bp, Homo sapiens
aggggtgctcccttgtaccgtgaatt

SEQ ID NO: 8022 - DNA, 26 bp, Homo sapiens
ggggtgctcccttgtaccgtgaattg

SEQ ID NO: 8023 - DNA, 26 bp, Homo sapiens
gggtgctcccttgtaccgtgaattgg

SEQ ID NO: 8024 - DNA, 26 bp, Homo sapiens
ggtgctcccttgtaccgtgaattggg

SEQ ID NO: 8025 - DNA, 26 bp, Homo sapiens
gtgctcccttgtaccgtgaattgggc

SEQ ID NO: 8026 - DNA, 26 bp, Homo sapiens
tgctcccttgtaccgtgaattgggca

SEQ ID NO: 8027 - DNA, 26 bp, Homo sapiens
gctcccttgtaccgtgaattgggcaa

SEQ ID NO: 8028 - DNA, 26 bp, Homo sapiens
ctcccttgtaccgtgaattgggcaac

SEQ ID NO: 8029 - DNA, 26 bp, Homo sapiens
tcccttgtaccgtgaattgggcaaca

SEQ ID NO: 8030 - DNA, 26 bp, Homo sapiens
cccttgtaccgtgaattgggcaacag

SEQ ID NO: 8031 - DNA, 26 bp, Homo sapiens
ccttgtaccgtgaattgggcaacagg

SEQ ID NO: 8032 - DNA, 26 bp, Homo sapiens
cttgtaccgtgaattgggcaacaggc

SEQ ID NO: 8033 - DNA, 26 bp, Homo sapiens
ttgtaccgtgaattgggcaacaggct

SEQ ID NO: 8034 - DNA, 26 bp, Homo sapiens
tgtaccgtgaattgggcaacaggctt

SEQ ID NO: 8035 - DNA, 26 bp, Homo sapiens
gtaccgtgaattgggcaacaggcttg

SEQ ID NO: 8036 - DNA, 26 bp, Homo sapiens
taccgtgaattgggcaacaggcttgg

SEQ ID NO: 8037 - DNA, 26 bp, Homo sapiens
accgtgaattgggcaacaggcttgga

SEQ ID NO: 8038 - DNA, 26 bp, Homo sapiens
ccgtgaattgggcaacaggcttggag

SEQ ID NO: 8039 - DNA, 26 bp, Homo sapiens
cgtgaattgggcaacaggcttggagc

SEQ ID NO: 8040 - DNA, 26 bp, Homo sapiens
gtgaattgggcaacaggcttggagca

SEQ ID NO: 8041 - DNA, 26 bp, Homo sapiens
tgaattgggcaacaggcttggagcag

SEQ ID NO: 8042 - DNA, 26 bp, Homo sapiens
gaattgggcaacaggcttggagcagc

SEQ ID NO: 8043 - DNA, 26 bp, Homo sapiens
aattgggcaacaggcttggagcagct

SEQ ID NO: 8044 - DNA, 26 bp, Homo sapiens
attgggcaacaggcttggagcagctg

SEQ ID NO: 8045 - DNA, 26 bp, Homo sapiens
ttgggcaacaggcttggagcagctgt

SEQ ID NO: 8046 - DNA, 26 bp, Homo sapiens
tgggcaacaggcttggagcagctgtg

SEQ ID NO: 8047 - DNA, 26 bp, Homo sapiens
gggcaacaggcttggagcagctgtga

SEQ ID NO: 8048 - DNA, 26 bp, Homo sapiens
ggcaacaggcttggagcagctgtgaa

SEQ ID NO: 8049 - DNA, 26 bp, Homo sapiens
gcaacaggcttggagcagctgtgaaa

SEQ ID NO: 8050 - DNA, 26 bp, Homo sapiens
caacaggcttggagcagctgtgaaag

SEQ ID NO: 8051 - DNA, 26 bp, Homo sapiens
aacaggcttggagcagctgtgaaagg

SEQ ID NO: 8052 - DNA, 26 bp, Homo sapiens
acaggcttggagcagctgtgaaagga

SEQ ID NO: 8053 - DNA, 26 bp, Homo sapiens
caggcttggagcagctgtgaaaggaa

SEQ ID NO: 8054 - DNA, 26 bp, Homo sapiens
aggcttggagcagctgtgaaaggaaa

SEQ ID NO: 8055 - DNA, 26 bp, Homo sapiens
ggcttggagcagctgtgaaaggaaac

SEQ ID NO: 8056 - DNA, 26 bp, Homo sapiens
gcttggagcagctgtgaaaggaaaca

SEQ ID NO: 8057 - DNA, 26 bp, Homo sapiens
cttggagcagctgtgaaaggaaacat

SEQ ID NO: 8058 - DNA, 26 bp, Homo sapiens
ttggagcagctgtgaaaggaaacatc

SEQ ID NO: 8059 - DNA, 26 bp, Homo sapiens
tggagcagctgtgaaaggaaacatcc

SEQ ID NO: 8060 - DNA, 26 bp, Homo sapiens
ggagcagctgtgaaaggaaacatcct

SEQ ID NO: 8061 - DNA, 26 bp, Homo sapiens
gagcagctgtgaaaggaaacatcctc

SEQ ID NO: 8062 - DNA, 26 bp, Homo sapiens
agcagctgtgaaaggaaacatcctca

SEQ ID NO: 8063 - DNA, 26 bp, Homo sapiens
gcagctgtgaaaggaaacatcctcaa

SEQ ID NO: 8064 - DNA, 26 bp, Homo sapiens
cagctgtgaaaggaaacatcctcaat

SEQ ID NO: 8065 - DNA, 26 bp, Homo sapiens
agctgtgaaaggaaacatcctcaatt

SEQ ID NO: 8066 - DNA, 26 bp, Homo sapiens
gctgtgaaaggaaacatcctcaattt

SEQ ID NO: 8067 - DNA, 26 bp, Homo sapiens
ctgtgaaaggaaacatcctcaatttc

SEQ ID NO: 8068 - DNA, 26 bp, Homo sapiens
tgtgaaaggaaacatcctcaatttct

SEQ ID NO: 8069 - DNA, 26 bp, Homo sapiens
gtgaaaggaaacatcctcaatttctt

SEQ ID NO: 8070 - DNA, 26 bp, Homo sapiens
tgaaaggaaacatcctcaatttcttc

SEQ ID NO: 8071 - DNA, 26 bp, Homo sapiens
gaaaggaaacatcctcaatttcttct

SEQ ID NO: 8072 - DNA, 26 bp, Homo sapiens
aaaggaaacatcctcaatttcttctg

SEQ ID NO: 8073 - DNA, 26 bp, Homo sapiens
aaggaaacatcctcaatttcttctgg

SEQ ID NO: 8074 - DNA, 26 bp, Homo sapiens
aggaaacatcctcaatttcttctggc

SEQ ID NO: 8075 - DNA, 26 bp, Homo sapiens
ggaaacatcctcaatttcttctggct

SEQ ID NO: 8076 - DNA, 26 bp, Homo sapiens
gaaacatcctcaatttcttctggcta

SEQ ID NO: 8077 - DNA, 26 bp, Homo sapiens
aaacatcctcaatttcttctggctag

SEQ ID NO: 8078 - DNA, 26 bp, Homo sapiens
aacatcctcaatttcttctggctaga

SEQ ID NO: 8079 - DNA, 26 bp, Homo sapiens
acatcctcaatttcttctggctagat

SEQ ID NO: 8080 - DNA, 26 bp, Homo sapiens
catcctcaatttcttctggctagatg

SEQ ID NO: 8081 - DNA, 26 bp, Homo sapiens
atcctcaatttcttctggctagatgc

SEQ ID NO: 8082 - DNA, 26 bp, Homo sapiens
tcctcaatttcttctggctagatgcc

SEQ ID NO: 8083 - DNA, 26 bp, Homo sapiens
cctcaatttcttctggctagatgcca

SEQ ID NO: 8084 - DNA, 26 bp, Homo sapiens
ctcaatttcttctggctagatgccac

SEQ ID NO: 8085 - DNA, 26 bp, Homo sapiens
tcaatttcttctggctagatgccaca

SEQ ID NO: 8086 - DNA, 26 bp, Homo sapiens
caatttcttctggctagatgccacag

SEQ ID NO: 8087 - DNA, 26 bp, Homo sapiens
aatttcttctggctagatgccacagg

SEQ ID NO: 8088 - DNA, 26 bp, Homo sapiens
atttcttctggctagatgccacagga

SEQ ID NO: 8089 - DNA, 26 bp, Homo sapiens
tttcttctggctagatgccacaggaa

SEQ ID NO: 8090 - DNA, 26 bp, Homo sapiens
ttcttctggctagatgccacaggaaa

SEQ ID NO: 8091 - DNA, 26 bp, Homo sapiens
tcttctggctagatgccacaggaaat

SEQ ID NO: 8092 - DNA, 26 bp, Homo sapiens
cttctggctagatgccacaggaaata

SEQ ID NO: 8093 - DNA, 26 bp, Homo sapiens
ttctggctagatgccacaggaaataa

SEQ ID NO: 8094 - DNA, 26 bp, Homo sapiens
tctggctagatgccacaggaaataaa

SEQ ID NO: 8095 - DNA, 26 bp, Homo sapiens
ctggctagatgccacaggaaataaat

SEQ ID NO: 8096 - DNA, 26 bp, Homo sapiens
tggctagatgccacaggaaataaatt

SEQ ID NO: 8097 - DNA, 26 bp, Homo sapiens
ggctagatgccacaggaaataaatta

SEQ ID NO: 8098 - DNA, 26 bp, Homo sapiens
gctagatgccacaggaaataaattat

SEQ ID NO: 8099 - DNA, 26 bp, Homo sapiens
ctagatgccacaggaaataaattatc

SEQ ID NO: 8100 - DNA, 26 bp, Homo sapiens
tagatgccacaggaaataaattatcc

SEQ ID NO: 8101 - DNA, 26 bp, Homo sapiens
agatgccacaggaaataaattatccc

SEQ ID NO: 8102 - DNA, 26 bp, Homo sapiens
gatgccacaggaaataaattatccca

SEQ ID NO: 8103 - DNA, 26 bp, Homo sapiens
atgccacaggaaataaattatcccaa

SEQ ID NO: 8104 - DNA, 26 bp, Homo sapiens
tgccacaggaaataaattatcccaaa

SEQ ID NO: 8105 - DNA, 26 bp, Homo sapiens
gccacaggaaataaattatcccaaag

SEQ ID NO: 8106 - DNA, 26 bp, Homo sapiens
ccacaggaaataaattatcccaaagg

SEQ ID NO: 8107 - DNA, 26 bp, Homo sapiens
cacaggaaataaattatcccaaagga

SEQ ID NO: 8108 - DNA, 26 bp, Homo sapiens
acaggaaataaattatcccaaaggaa

SEQ ID NO: 8109 - DNA, 26 bp, Homo sapiens
caggaaataaattatcccaaaggaaa

SEQ ID NO: 8110 - DNA, 26 bp, Homo sapiens
aggaaataaattatcccaaaggaaaa

SEQ ID NO: 8111 - DNA, 26 bp, Homo sapiens
ggaaataaattatcccaaaggaaaat

SEQ ID NO: 8112 - DNA, 26 bp, Homo sapiens
gaaataaattatcccaaaggaaaatg

SEQ ID NO: 8113 - DNA, 26 bp, Homo sapiens
aaataaattatcccaaaggaaaatgt

SEQ ID NO: 8114 - DNA, 26 bp, Homo sapiens
aataaattatcccaaaggaaaatgtg

SEQ ID NO: 8115 - DNA, 26 bp, Homo sapiens
ataaattatcccaaaggaaaatgtgg

SEQ ID NO: 8116 - DNA, 26 bp, Homo sapiens
taaattatcccaaaggaaaatgtggt

SEQ ID NO: 8117 - DNA, 26 bp, Homo sapiens
aaattatcccaaaggaaaatgtggtt

SEQ ID NO: 8118 - DNA, 26 bp, Homo sapiens
aattatcccaaaggaaaatgtggttg

SEQ ID NO: 8119 - DNA, 26 bp, Homo sapiens
attatcccaaaggaaaatgtggttgg

SEQ ID NO: 8120 - DNA, 26 bp, Homo sapiens
ttatcccaaaggaaaatgtggttggc

SEQ ID NO: 8121 - DNA, 26 bp, Homo sapiens
tatcccaaaggaaaatgtggttggct

SEQ ID NO: 8122 - DNA, 26 bp, Homo sapiens
atcccaaaggaaaatgtggttggcta

SEQ ID NO: 8123 - DNA, 26 bp, Homo sapiens
tcccaaaggaaaatgtggttggctat

SEQ ID NO: 8124 - DNA, 26 bp, Homo sapiens
cccaaaggaaaatgtggttggctatg

SEQ ID NO: 8125 - DNA, 26 bp, Homo sapiens
ccaaaggaaaatgtggttggctatgg

SEQ ID NO: 8126 - DNA, 26 bp, Homo sapiens
caaaggaaaatgtggttggctatggg

SEQ ID NO: 8127 - DNA, 26 bp, Homo sapiens
aaaggaaaatgtggttggctatgggc

SEQ ID NO: 8128 - DNA, 26 bp, Homo sapiens
aaggaaaatgtggttggctatgggcc

SEQ ID NO: 8129 - DNA, 26 bp, Homo sapiens
aggaaaatgtggttggctatgggcca

SEQ ID NO: 8130 - DNA, 26 bp, Homo sapiens
ggaaaatgtggttggctatgggccag

SEQ ID NO: 8131 - DNA, 26 bp, Homo sapiens
gaaaatgtggttggctatgggccaga

SEQ ID NO: 8132 - DNA, 26 bp, Homo sapiens
aaaatgtggttggctatgggccagac

SEQ ID NO: 8133 - DNA, 26 bp, Homo sapiens
aaatgtggttggctatgggccagact

SEQ ID NO: 8134 - DNA, 26 bp, Homo sapiens
aatgtggttggctatgggccagactc

SEQ ID NO: 8135 - DNA, 26 bp, Homo sapiens
atgtggttggctatgggccagactct

SEQ ID NO: 8136 - DNA, 26 bp, Homo sapiens
tgtggttggctatgggccagactctc

SEQ ID NO: 8137 - DNA, 26 bp, Homo sapiens
gtggttggctatgggccagactctca

SEQ ID NO: 8138 - DNA, 26 bp, Homo sapiens
tggttggctatgggccagactctcag

SEQ ID NO: 8139 - DNA, 26 bp, Homo sapiens
ggttggctatgggccagactctcaga

SEQ ID NO: 8140 - DNA, 26 bp, Homo sapiens
gttggctatgggccagactctcagaa

SEQ ID NO: 8141 - DNA, 26 bp, Homo sapiens
ttggctatgggccagactctcagaat

SEQ ID NO: 8142 - DNA, 26 bp, Homo sapiens
tggctatgggccagactctcagaatc

SEQ ID NO: 8143 - DNA, 26 bp, Homo sapiens
ggctatgggccagactctcagaatct

SEQ ID NO: 8144 - DNA, 26 bp, Homo sapiens
gctatgggccagactctcagaatcta

SEQ ID NO: 8145 - DNA, 26 bp, Homo sapiens
ctatgggccagactctcagaatctag

SEQ ID NO: 8146 - DNA, 26 bp, Homo sapiens
tatgggccagactctcagaatctagg

SEQ ID NO: 8147 - DNA, 26 bp, Homo sapiens
atgggccagactctcagaatctaggc

SEQ ID NO: 8148 - DNA, 26 bp, Homo sapiens
tgggccagactctcagaatctaggca

SEQ ID NO: 8149 - DNA, 26 bp, Homo sapiens
gggccagactctcagaatctaggcaa

SEQ ID NO: 8150 - DNA, 26 bp, Homo sapiens
ggccagactctcagaatctaggcaaa

SEQ ID NO: 8151 - DNA, 26 bp, Homo sapiens
gccagactctcagaatctaggcaaat

SEQ ID NO: 8152 - DNA, 26 bp, Homo sapiens
ccagactctcagaatctaggcaaatc

SEQ ID NO: 8153 - DNA, 26 bp, Homo sapiens
cagactctcagaatctaggcaaatca

SEQ ID NO: 8154 - DNA, 26 bp, Homo sapiens
agactctcagaatctaggcaaatcag

SEQ ID NO: 8155 - DNA, 26 bp, Homo sapiens
gactctcagaatctaggcaaatcagt

SEQ ID NO: 8156 - DNA, 26 bp, Homo sapiens
actctcagaatctaggcaaatcagtg

SEQ ID NO: 8157 - DNA, 26 bp, Homo sapiens
ctctcagaatctaggcaaatcagtga

SEQ ID NO: 8158 - DNA, 26 bp, Homo sapiens
tctcagaatctaggcaaatcagtgac

SEQ ID NO: 8159 - DNA, 26 bp, Homo sapiens
ctcagaatctaggcaaatcagtgact

SEQ ID NO: 8160 - DNA, 26 bp, Homo sapiens
tcagaatctaggcaaatcagtgactg

SEQ ID NO: 8161 - DNA, 26 bp, Homo sapiens
cagaatctaggcaaatcagtgactgt

SEQ ID NO: 8162 - DNA, 26 bp, Homo sapiens
agaatctaggcaaatcagtgactgtt

SEQ ID NO: 8163 - DNA, 26 bp, Homo sapiens
gaatctaggcaaatcagtgactgttt

SEQ ID NO: 8164 - DNA, 26 bp, Homo sapiens
aatctaggcaaatcagtgactgtttc

SEQ ID NO: 8165 - DNA, 26 bp, Homo sapiens
atctaggcaaatcagtgactgtttcc

SEQ ID NO: 8166 - DNA, 26 bp, Homo sapiens
tctaggcaaatcagtgactgtttcct

SEQ ID NO: 8167 - DNA, 26 bp, Homo sapiens
ctaggcaaatcagtgactgtttcctc

SEQ ID NO: 8168 - DNA, 26 bp, Homo sapiens
taggcaaatcagtgactgtttcctcc

SEQ ID NO: 8169 - DNA, 26 bp, Homo sapiens
aggcaaatcagtgactgtttcctccc

SEQ ID NO: 8170 - DNA, 26 bp, Homo sapiens
ggcaaatcagtgactgtttcctccca

SEQ ID NO: 8171 - DNA, 26 bp, Homo sapiens
gcaaatcagtgactgtttcctcccat

SEQ ID NO: 8172 - DNA, 26 bp, Homo sapiens
caaatcagtgactgtttcctcccata

SEQ ID NO: 8173 - DNA, 26 bp, Homo sapiens
aaatcagtgactgtttcctcccatag

SEQ ID NO: 8174 - DNA, 26 bp, Homo sapiens
aatcagtgactgtttcctcccatagc

SEQ ID NO: 8175 - DNA, 26 bp, Homo sapiens
atcagtgactgtttcctcccatagca

SEQ ID NO: 8176 - DNA, 26 bp, Homo sapiens
tcagtgactgtttcctcccatagcat

SEQ ID NO: 8177 - DNA, 26 bp, Homo sapiens
cagtgactgtttcctcccatagcata

SEQ ID NO: 8178 - DNA, 26 bp, Homo sapiens
agtgactgtttcctcccatagcataa

SEQ ID NO: 8179 - DNA, 26 bp, Homo sapiens
gtgactgtttcctcccatagcataaa

SEQ ID NO: 8180 - DNA, 26 bp, Homo sapiens
tgactgtttcctcccatagcataaac

SEQ ID NO: 8181 - DNA, 26 bp, Homo sapiens
gactgtttcctcccatagcataaact

SEQ ID NO: 8182 - DNA, 26 bp, Homo sapiens
actgtttcctcccatagcataaactc

SEQ ID NO: 8183 - DNA, 26 bp, Homo sapiens
ctgtttcctcccatagcataaactct

SEQ ID NO: 8184 - DNA, 26 bp, Homo sapiens
tgtttcctcccatagcataaactctt

SEQ ID NO: 8185 - DNA, 26 bp, Homo sapiens
gtttcctcccatagcataaactcttg

SEQ ID NO: 8186 - DNA, 26 bp, Homo sapiens
tttcctcccatagcataaactcttgg

SEQ ID NO: 8187 - DNA, 26 bp, Homo sapiens
ttcctcccatagcataaactcttggc

SEQ ID NO: 8188 - DNA, 26 bp, Homo sapiens
tcctcccatagcataaactcttggcc

SEQ ID NO: 8189 - DNA, 26 bp, Homo sapiens
cctcccatagcataaactcttggcct

SEQ ID NO: 8190 - DNA, 26 bp, Homo sapiens
ctcccatagcataaactcttggcctc

SEQ ID NO: 8191 - DNA, 26 bp, Homo sapiens
tcccatagcataaactcttggcctcc

SEQ ID NO: 8192 - DNA, 26 bp, Homo sapiens
cccatagcataaactcttggcctcct

SEQ ID NO: 8193 - DNA, 26 bp, Homo sapiens
ccatagcataaactcttggcctcctt

SEQ ID NO: 8194 - DNA, 26 bp, Homo sapiens
catagcataaactcttggcctccttc

SEQ ID NO: 8195 - DNA, 26 bp, Homo sapiens
atagcataaactcttggcctccttca

SEQ ID NO: 8196 - DNA, 26 bp, Homo sapiens
tagcataaactcttggcctccttcat

SEQ ID NO: 8197 - DNA, 26 bp, Homo sapiens
agcataaactcttggcctccttcatg

SEQ ID NO: 8198 - DNA, 26 bp, Homo sapiens
gcataaactcttggcctccttcatgc

SEQ ID NO: 8199 - DNA, 26 bp, Homo sapiens
cataaactcttggcctccttcatgca

SEQ ID NO: 8200 - DNA, 26 bp, Homo sapiens
ataaactcttggcctccttcatgcac

SEQ ID NO: 8201 - DNA, 26 bp, Homo sapiens
taaactcttggcctccttcatgcact

SEQ ID NO: 8202 - DNA, 26 bp, Homo sapiens
aaactcttggcctccttcatgcactc

SEQ ID NO: 8203 - DNA, 26 bp, Homo sapiens
aactcttggcctccttcatgcactca

SEQ ID NO: 8204 - DNA, 26 bp, Homo sapiens
actcttggcctccttcatgcactcat

SEQ ID NO: 8205 - DNA, 26 bp, Homo sapiens
ctcttggcctccttcatgcactcatg

SEQ ID NO: 8206 - DNA, 26 bp, Homo sapiens
tcttggcctccttcatgcactcatga

SEQ ID NO: 8207 - DNA, 26 bp, Homo sapiens
cttggcctccttcatgcactcatgac

SEQ ID NO: 8208 - DNA, 26 bp, Homo sapiens
ttggcctccttcatgcactcatgaca

SEQ ID NO: 8209 - DNA, 26 bp, Homo sapiens
tggcctccttcatgcactcatgacag

SEQ ID NO: 8210 - DNA, 26 bp, Homo sapiens
ggcctccttcatgcactcatgacaga

SEQ ID NO: 8211 - DNA, 26 bp, Homo sapiens
gcctccttcatgcactcatgacagac

SEQ ID NO: 8212 - DNA, 26 bp, Homo sapiens
cctccttcatgcactcatgacagaca

SEQ ID NO: 8213 - DNA, 26 bp, Homo sapiens
ctccttcatgcactcatgacagacag

SEQ ID NO: 8214 - DNA, 26 bp, Homo sapiens
tccttcatgcactcatgacagacagc

SEQ ID NO: 8215 - DNA, 26 bp, Homo sapiens
ccttcatgcactcatgacagacagca

SEQ ID NO: 8216 - DNA, 26 bp, Homo sapiens
cttcatgcactcatgacagacagcaa

SEQ ID NO: 8217 - DNA, 26 bp, Homo sapiens
ttcatgcactcatgacagacagcaac

SEQ ID NO: 8218 - DNA, 26 bp, Homo sapiens
tcatgcactcatgacagacagcaacc

SEQ ID NO: 8219 - DNA, 26 bp, Homo sapiens
catgcactcatgacagacagcaacct

SEQ ID NO: 8220 - DNA, 26 bp, Homo sapiens
atgcactcatgacagacagcaacctt

SEQ ID NO: 8221 - DNA, 26 bp, Homo sapiens
tgcactcatgacagacagcaaccttc

SEQ ID NO: 8222 - DNA, 26 bp, Homo sapiens
gcactcatgacagacagcaaccttca

SEQ ID NO: 8223 - DNA, 26 bp, Homo sapiens
cactcatgacagacagcaaccttcag

SEQ ID NO: 8224 - DNA, 26 bp, Homo sapiens
actcatgacagacagcaaccttcaga

SEQ ID NO: 8225 - DNA, 26 bp, Homo sapiens
ctcatgacagacagcaaccttcagaa

SEQ ID NO: 8226 - DNA, 26 bp, Homo sapiens
tcatgacagacagcaaccttcagaag

SEQ ID NO: 8227 - DNA, 26 bp, Homo sapiens
catgacagacagcaaccttcagaagc

SEQ ID NO: 8228 - DNA, 26 bp, Homo sapiens
atgacagacagcaaccttcagaagcc

SEQ ID NO: 8229 - DNA, 26 bp, Homo sapiens
tgacagacagcaaccttcagaagcct

SEQ ID NO: 8230 - DNA, 26 bp, Homo sapiens
gacagacagcaaccttcagaagcctc

SEQ ID NO: 8231 - DNA, 26 bp, Homo sapiens
acagacagcaaccttcagaagcctca

SEQ ID NO: 8232 - DNA, 26 bp, Homo sapiens
cagacagcaaccttcagaagcctcag

SEQ ID NO: 8233 - DNA, 26 bp, Homo sapiens
agacagcaaccttcagaagcctcagg

SEQ ID NO: 8234 - DNA, 26 bp, Homo sapiens
gacagcaaccttcagaagcctcaggg

SEQ ID NO: 8235 - DNA, 26 bp, Homo sapiens
acagcaaccttcagaagcctcaggga

SEQ ID NO: 8236 - DNA, 26 bp, Homo sapiens
cagcaaccttcagaagcctcagggaa

SEQ ID NO: 8237 - DNA, 26 bp, Homo sapiens
agcaaccttcagaagcctcagggaag

SEQ ID NO: 8238 - DNA, 26 bp, Homo sapiens
gcaaccttcagaagcctcagggaaga

SEQ ID NO: 8239 - DNA, 26 bp, Homo sapiens
caaccttcagaagcctcagggaagag

SEQ ID NO: 8240 - DNA, 26 bp, Homo sapiens
aaccttcagaagcctcagggaagagg

SEQ ID NO: 8241 - DNA, 26 bp, Homo sapiens
accttcagaagcctcagggaagaggt

SEQ ID NO: 8242 - DNA, 26 bp, Homo sapiens
ccttcagaagcctcagggaagaggtg

SEQ ID NO: 8243 - DNA, 26 bp, Homo sapiens
cttcagaagcctcagggaagaggtgt

SEQ ID NO: 8244 - DNA, 26 bp, Homo sapiens
ttcagaagcctcagggaagaggtgtt

SEQ ID NO: 8245 - DNA, 26 bp, Homo sapiens
tcagaagcctcagggaagaggtgttc

SEQ ID NO: 8246 - DNA, 26 bp, Homo sapiens
cagaagcctcagggaagaggtgttct

SEQ ID NO: 8247 - DNA, 26 bp, Homo sapiens
agaagcctcagggaagaggtgttctc

SEQ ID NO: 8248 - DNA, 26 bp, Homo sapiens
gaagcctcagggaagaggtgttctca

SEQ ID NO: 8249 - DNA, 26 bp, Homo sapiens
aagcctcagggaagaggtgttctcag

SEQ ID NO: 8250 - DNA, 26 bp, Homo sapiens
agcctcagggaagaggtgttctcagc

SEQ ID NO: 8251 - DNA, 26 bp, Homo sapiens
gcctcagggaagaggtgttctcagcc

SEQ ID NO: 8252 - DNA, 26 bp, Homo sapiens
cctcagggaagaggtgttctcagccc

SEQ ID NO: 8253 - DNA, 26 bp, Homo sapiens
ctcagggaagaggtgttctcagccca

SEQ ID NO: 8254 - DNA, 26 bp, Homo sapiens
tcagggaagaggtgttctcagcccat

SEQ ID NO: 8255 - DNA, 26 bp, Homo sapiens
cagggaagaggtgttctcagcccatg

SEQ ID NO: 8256 - DNA, 26 bp, Homo sapiens
agggaagaggtgttctcagcccatgc

SEQ ID NO: 8257 - DNA, 26 bp, Homo sapiens
gggaagaggtgttctcagcccatgcg

SEQ ID NO: 8258 - DNA, 26 bp, Homo sapiens
ggaagaggtgttctcagcccatgcgc

SEQ ID NO: 8259 - DNA, 26 bp, Homo sapiens
gaagaggtgttctcagcccatgcgct

SEQ ID NO: 8260 - DNA, 26 bp, Homo sapiens
aagaggtgttctcagcccatgcgcta

SEQ ID NO: 8261 - DNA, 26 bp, Homo sapiens
agaggtgttctcagcccatgcgctaa

SEQ ID NO: 8262 - DNA, 26 bp, Homo sapiens
gaggtgttctcagcccatgcgctaaa

SEQ ID NO: 8263 - DNA, 26 bp, Homo sapiens
aggtgttctcagcccatgcgctaaag

SEQ ID NO: 8264 - DNA, 26 bp, Homo sapiens
ggtgttctcagcccatgcgctaaaga

SEQ ID NO: 8265 - DNA, 26 bp, Homo sapiens
gtgttctcagcccatgcgctaaagat

SEQ ID NO: 8266 - DNA, 26 bp, Homo sapiens
tgttctcagcccatgcgctaaagatg

SEQ ID NO: 8267 - DNA, 26 bp, Homo sapiens
gttctcagcccatgcgctaaagatgg

SEQ ID NO: 8268 - DNA, 26 bp, Homo sapiens
ttctcagcccatgcgctaaagatgga

SEQ ID NO: 8269 - DNA, 26 bp, Homo sapiens
tctcagcccatgcgctaaagatggac

SEQ ID NO: 8270 - DNA, 26 bp, Homo sapiens
ctcagcccatgcgctaaagatggaca

SEQ ID NO: 8271 - DNA, 26 bp, Homo sapiens
tcagcccatgcgctaaagatggacag

SEQ ID NO: 8272 - DNA, 26 bp, Homo sapiens
cagcccatgcgctaaagatggacagc

SEQ ID NO: 8273 - DNA, 26 bp, Homo sapiens
agcccatgcgctaaagatggacagca

SEQ ID NO: 8274 - DNA, 26 bp, Homo sapiens
gcccatgcgctaaagatggacagcat

SEQ ID NO: 8275 - DNA, 26 bp, Homo sapiens
cccatgcgctaaagatggacagcatc

SEQ ID NO: 8276 - DNA, 26 bp, Homo sapiens
ccatgcgctaaagatggacagcatca

SEQ ID NO: 8277 - DNA, 26 bp, Homo sapiens
catgcgctaaagatggacagcatcat

SEQ ID NO: 8278 - DNA, 26 bp, Homo sapiens
atgcgctaaagatggacagcatcatg

SEQ ID NO: 8279 - DNA, 26 bp, Homo sapiens
tgcgctaaagatggacagcatcatgc

SEQ ID NO: 8280 - DNA, 26 bp, Homo sapiens
gcgctaaagatggacagcatcatgct

SEQ ID NO: 8281 - DNA, 26 bp, Homo sapiens
cgctaaagatggacagcatcatgcta

SEQ ID NO: 8282 - DNA, 26 bp, Homo sapiens
gctaaagatggacagcatcatgctac

SEQ ID NO: 8283 - DNA, 26 bp, Homo sapiens
ctaaagatggacagcatcatgctacg

SEQ ID NO: 8284 - DNA, 26 bp, Homo sapiens
taaagatggacagcatcatgctacgg

SEQ ID NO: 8285 - DNA, 26 bp, Homo sapiens
aaagatggacagcatcatgctacggc

SEQ ID NO: 8286 - DNA, 26 bp, Homo sapiens
aagatggacagcatcatgctacggca

SEQ ID NO: 8287 - DNA, 26 bp, Homo sapiens
agatggacagcatcatgctacggcag

SEQ ID NO: 8288 - DNA, 26 bp, Homo sapiens
gatggacagcatcatgctacggcagt

SEQ ID NO: 8289 - DNA, 26 bp, Homo sapiens
atggacagcatcatgctacggcagtc

SEQ ID NO: 8290 - DNA, 26 bp, Homo sapiens
tggacagcatcatgctacggcagtct

SEQ ID NO: 8291 - DNA, 26 bp, Homo sapiens
ggacagcatcatgctacggcagtctg

SEQ ID NO: 8292 - DNA, 26 bp, Homo sapiens
gacagcatcatgctacggcagtctga

SEQ ID NO: 8293 - DNA, 26 bp, Homo sapiens
acagcatcatgctacggcagtctgag

SEQ ID NO: 8294 - DNA, 26 bp, Homo sapiens
cagcatcatgctacggcagtctgaga

SEQ ID NO: 8295 - DNA, 26 bp, Homo sapiens
agcatcatgctacggcagtctgagat

SEQ ID NO: 8296 - DNA, 26 bp, Homo sapiens
gcatcatgctacggcagtctgagatc

SEQ ID NO: 8297 - DNA, 26 bp, Homo sapiens
catcatgctacggcagtctgagatcc

SEQ ID NO: 8298 - DNA, 26 bp, Homo sapiens
atcatgctacggcagtctgagatcct

SEQ ID NO: 8299 - DNA, 26 bp, Homo sapiens
tcatgctacggcagtctgagatcctg

SEQ ID NO: 8300 - DNA, 26 bp, Homo sapiens
catgctacggcagtctgagatcctgg

SEQ ID NO: 8301 - DNA, 26 bp, Homo sapiens
atgctacggcagtctgagatcctggc

SEQ ID NO: 8302 - DNA, 26 bp, Homo sapiens
tgctacggcagtctgagatcctggct

SEQ ID NO: 8303 - DNA, 26 bp, Homo sapiens
gctacggcagtctgagatcctggctc

SEQ ID NO: 8304 - DNA, 26 bp, Homo sapiens
ctacggcagtctgagatcctggctca

SEQ ID NO: 8305 - DNA, 26 bp, Homo sapiens
tacggcagtctgagatcctggctcac

SEQ ID NO: 8306 - DNA, 26 bp, Homo sapiens
acggcagtctgagatcctggctcaca

SEQ ID NO: 8307 - DNA, 26 bp, Homo sapiens
cggcagtctgagatcctggctcacaa

SEQ ID NO: 8308 - DNA, 26 bp, Homo sapiens
ggcagtctgagatcctggctcacaaa

SEQ ID NO: 8309 - DNA, 26 bp, Homo sapiens
gcagtctgagatcctggctcacaaaa

SEQ ID NO: 8310 - DNA, 26 bp, Homo sapiens
cagtctgagatcctggctcacaaaag

SEQ ID NO: 8311 - DNA, 26 bp, Homo sapiens
agtctgagatcctggctcacaaaaga

SEQ ID NO: 8312 - DNA, 26 bp, Homo sapiens
gtctgagatcctggctcacaaaagaa

SEQ ID NO: 8313 - DNA, 26 bp, Homo sapiens
tctgagatcctggctcacaaaagaac

SEQ ID NO: 8314 - DNA, 26 bp, Homo sapiens
ctgagatcctggctcacaaaagaacc

SEQ ID NO: 8315 - DNA, 26 bp, Homo sapiens
tgagatcctggctcacaaaagaacct

SEQ ID NO: 8316 - DNA, 26 bp, Homo sapiens
gagatcctggctcacaaaagaacctt

SEQ ID NO: 8317 - DNA, 26 bp, Homo sapiens
agatcctggctcacaaaagaaccttt

SEQ ID NO: 8318 - DNA, 26 bp, Homo sapiens
gatcctggctcacaaaagaaccttta

SEQ ID NO: 8319 - DNA, 26 bp, Homo sapiens
atcctggctcacaaaagaacctttaa

SEQ ID NO: 8320 - DNA, 26 bp, Homo sapiens
tcctggctcacaaaagaacctttaaa

SEQ ID NO: 8321 - DNA, 26 bp, Homo sapiens
cctggctcacaaaagaacctttaaag

SEQ ID NO: 8322 - DNA, 26 bp, Homo sapiens
ctggctcacaaaagaacctttaaagt

SEQ ID NO: 8323 - DNA, 26 bp, Homo sapiens
tggctcacaaaagaacctttaaagtt

SEQ ID NO: 8324 - DNA, 26 bp, Homo sapiens
ggctcacaaaagaacctttaaagttg

SEQ ID NO: 8325 - DNA, 26 bp, Homo sapiens
gctcacaaaagaacctttaaagttgt

SEQ ID NO: 8326 - DNA, 26 bp, Homo sapiens
ctcacaaaagaacctttaaagttgtt

SEQ ID NO: 8327 - DNA, 26 bp, Homo sapiens
tcacaaaagaacctttaaagttgttt

SEQ ID NO: 8328 - DNA, 26 bp, Homo sapiens
cacaaaagaacctttaaagttgtttt

SEQ ID NO: 8329 - DNA, 26 bp, Homo sapiens
acaaaagaacctttaaagttgttttt

SEQ ID NO: 8330 - DNA, 26 bp, Homo sapiens
caaaagaacctttaaagttgttttta

SEQ ID NO: 8331 - DNA, 26 bp, Homo sapiens
aaaagaacctttaaagttgtttttaa

SEQ ID NO: 8332 - DNA, 26 bp, Homo sapiens
aaagaacctttaaagttgtttttaaa

SEQ ID NO: 8333 - DNA, 26 bp, Homo sapiens
aagaacctttaaagttgtttttaaag

SEQ ID NO: 8334 - DNA, 26 bp, Homo sapiens
agaacctttaaagttgtttttaaaga

SEQ ID NO: 8335 - DNA, 26 bp, Homo sapiens
gaacctttaaagttgtttttaaagat

SEQ ID NO: 8336 - DNA, 26 bp, Homo sapiens
aacctttaaagttgtttttaaagata

SEQ ID NO: 8337 - DNA, 26 bp, Homo sapiens
acctttaaagttgtttttaaagataa

SEQ ID NO: 8338 - DNA, 26 bp, Homo sapiens
cctttaaagttgtttttaaagataaa

SEQ ID NO: 8339 - DNA, 26 bp, Homo sapiens
ctttaaagttgtttttaaagataaac

SEQ ID NO: 8340 - DNA, 26 bp, Homo sapiens
tttaaagttgtttttaaagataaact

SEQ ID NO: 8341 - DNA, 26 bp, Homo sapiens
ttaaagttgtttttaaagataaacta

SEQ ID NO: 8342 - DNA, 26 bp, Homo sapiens
taaagttgtttttaaagataaactat

SEQ ID NO: 8343 - DNA, 26 bp, Homo sapiens
aaagttgtttttaaagataaactatg

SEQ ID NO: 8344 - DNA, 26 bp, Homo sapiens
aagttgtttttaaagataaactatgc

SEQ ID NO: 8345 - DNA, 26 bp, Homo sapiens
agttgtttttaaagataaactatgca

SEQ ID NO: 8346 - DNA, 26 bp, Homo sapiens
gttgtttttaaagataaactatgcaa

SEQ ID NO: 8347 - DNA, 26 bp, Homo sapiens
ttgtttttaaagataaactatgcaaa

SEQ ID NO: 8348 - DNA, 26 bp, Homo sapiens
tgtttttaaagataaactatgcaaac

SEQ ID NO: 8349 - DNA, 26 bp, Homo sapiens
gtttttaaagataaactatgcaaaca

SEQ ID NO: 8350 - DNA, 26 bp, Homo sapiens
tttttaaagataaactatgcaaacat

SEQ ID NO: 8351 - DNA, 26 bp, Homo sapiens
ttttaaagataaactatgcaaacatg

SEQ ID NO: 8352 - DNA, 26 bp, Homo sapiens
tttaaagataaactatgcaaacatgg

SEQ ID NO: 8353 - DNA, 26 bp, Homo sapiens
ttaaagataaactatgcaaacatggt

SEQ ID NO: 8354 - DNA, 26 bp, Homo sapiens
taaagataaactatgcaaacatggta

SEQ ID NO: 8355 - DNA, 26 bp, Homo sapiens
aaagataaactatgcaaacatggtat

SEQ ID NO: 8356 - DNA, 26 bp, Homo sapiens
aagataaactatgcaaacatggtata

SEQ ID NO: 8357 - DNA, 26 bp, Homo sapiens
agataaactatgcaaacatggtatac

SEQ ID NO: 8358 - DNA, 26 bp, Homo sapiens
gataaactatgcaaacatggtatact

SEQ ID NO: 8359 - DNA, 26 bp, Homo sapiens
ataaactatgcaaacatggtatactg

SEQ ID NO: 8360 - DNA, 26 bp, Homo sapiens
taaactatgcaaacatggtatactga

SEQ ID NO: 8361 - DNA, 26 bp, Homo sapiens
aaactatgcaaacatggtatactgaa

SEQ ID NO: 8362 - DNA, 26 bp, Homo sapiens
aactatgcaaacatggtatactgaag

SEQ ID NO: 8363 - DNA, 26 bp, Homo sapiens
actatgcaaacatggtatactgaagc

SEQ ID NO: 8364 - DNA, 26 bp, Homo sapiens
ctatgcaaacatggtatactgaagct

SEQ ID NO: 8365 - DNA, 26 bp, Homo sapiens
tatgcaaacatggtatactgaagctt

SEQ ID NO: 8366 - DNA, 26 bp, Homo sapiens
atgcaaacatggtatactgaagcttc

SEQ ID NO: 8367 - DNA, 26 bp, Homo sapiens
tgcaaacatggtatactgaagcttca

SEQ ID NO: 8368 - DNA, 26 bp, Homo sapiens
gcaaacatggtatactgaagcttcaa

SEQ ID NO: 8369 - DNA, 26 bp, Homo sapiens
caaacatggtatactgaagcttcaaa

SEQ ID NO: 8370 - DNA, 26 bp, Homo sapiens
aaacatggtatactgaagcttcaaaa

SEQ ID NO: 8371 - DNA, 26 bp, Homo sapiens
aacatggtatactgaagcttcaaaag

SEQ ID NO: 8372 - DNA, 26 bp, Homo sapiens
acatggtatactgaagcttcaaaaga

SEQ ID NO: 8373 - DNA, 26 bp, Homo sapiens
catggtatactgaagcttcaaaagag

SEQ ID NO: 8374 - DNA, 26 bp, Homo sapiens
atggtatactgaagcttcaaaagagc

SEQ ID NO: 8375 - DNA, 26 bp, Homo sapiens
tggtatactgaagcttcaaaagagcc

SEQ ID NO: 8376 - DNA, 26 bp, Homo sapiens
ggtatactgaagcttcaaaagagccc

SEQ ID NO: 8377 - DNA, 26 bp, Homo sapiens
gtatactgaagcttcaaaagagccct

SEQ ID NO: 8378 - DNA, 26 bp, Homo sapiens
tatactgaagcttcaaaagagccctt

SEQ ID NO: 8379 - DNA, 26 bp, Homo sapiens
atactgaagcttcaaaagagcccttc

SEQ ID NO: 8380 - DNA, 26 bp, Homo sapiens
tactgaagcttcaaaagagcccttcg

SEQ ID NO: 8381 - DNA, 26 bp, Homo sapiens
actgaagcttcaaaagagcccttcgt

SEQ ID NO: 8382 - DNA, 26 bp, Homo sapiens
ctgaagcttcaaaagagcccttcgta

SEQ ID NO: 8383 - DNA, 26 bp, Homo sapiens
tgaagcttcaaaagagcccttcgtat

SEQ ID NO: 8384 - DNA, 26 bp, Homo sapiens
gaagcttcaaaagagcccttcgtatc

SEQ ID NO: 8385 - DNA, 26 bp, Homo sapiens
aagcttcaaaagagcccttcgtatcc

SEQ ID NO: 8386 - DNA, 26 bp, Homo sapiens
agcttcaaaagagcccttcgtatcca

SEQ ID NO: 8387 - DNA, 26 bp, Homo sapiens
gcttcaaaagagcccttcgtatccaa

SEQ ID NO: 8388 - DNA, 26 bp, Homo sapiens
cttcaaaagagcccttcgtatccaat

SEQ ID NO: 8389 - DNA, 26 bp, Homo sapiens
ttcaaaagagcccttcgtatccaatg

SEQ ID NO: 8390 - DNA, 26 bp, Homo sapiens
tcaaaagagcccttcgtatccaatga

SEQ ID NO: 8391 - DNA, 26 bp, Homo sapiens
caaaagagcccttcgtatccaatgat

SEQ ID NO: 8392 - DNA, 26 bp, Homo sapiens
aaaagagcccttcgtatccaatgatc

SEQ ID NO: 8393 - DNA, 26 bp, Homo sapiens
aaagagcccttcgtatccaatgatct

SEQ ID NO: 8394 - DNA, 26 bp, Homo sapiens
aagagcccttcgtatccaatgatcta

SEQ ID NO: 8395 - DNA, 26 bp, Homo sapiens
agagcccttcgtatccaatgatctat

SEQ ID NO: 8396 - DNA, 26 bp, Homo sapiens
gagcccttcgtatccaatgatctatt

SEQ ID NO: 8397 - DNA, 26 bp, Homo sapiens
agcccttcgtatccaatgatctatta

SEQ ID NO: 8398 - DNA, 26 bp, Homo sapiens
gcccttcgtatccaatgatctattag

SEQ ID NO: 8399 - DNA, 26 bp, Homo sapiens
cccttcgtatccaatgatctattagc

SEQ ID NO: 8400 - DNA, 26 bp, Homo sapiens
ccttcgtatccaatgatctattagcc

SEQ ID NO: 8401 - DNA, 26 bp, Homo sapiens
cttcgtatccaatgatctattagcct

SEQ ID NO: 8402 - DNA, 26 bp, Homo sapiens
ttcgtatccaatgatctattagccta

SEQ ID NO: 8403 - DNA, 26 bp, Homo sapiens
tcgtatccaatgatctattagcctat

SEQ ID NO: 8404 - DNA, 26 bp, Homo sapiens
cgtatccaatgatctattagcctatc

SEQ ID NO: 8405 - DNA, 26 bp, Homo sapiens
gtatccaatgatctattagcctatcc

SEQ ID NO: 8406 - DNA, 26 bp, Homo sapiens
tatccaatgatctattagcctatcca

SEQ ID NO: 8407 - DNA, 26 bp, Homo sapiens
atccaatgatctattagcctatccag

SEQ ID NO: 8408 - DNA, 26 bp, Homo sapiens
tccaatgatctattagcctatccaga

SEQ ID NO: 8409 - DNA, 26 bp, Homo sapiens
ccaatgatctattagcctatccagaa

SEQ ID NO: 8410 - DNA, 26 bp, Homo sapiens
caatgatctattagcctatccagaag

SEQ ID NO: 8411 - DNA, 26 bp, Homo sapiens
aatgatctattagcctatccagaagt

SEQ ID NO: 8412 - DNA, 26 bp, Homo sapiens
atgatctattagcctatccagaagtc

SEQ ID NO: 8413 - DNA, 26 bp, Homo sapiens
tgatctattagcctatccagaagtcc

SEQ ID NO: 8414 - DNA, 26 bp, Homo sapiens
gatctattagcctatccagaagtccc

SEQ ID NO: 8415 - DNA, 26 bp, Homo sapiens
atctattagcctatccagaagtccct

SEQ ID NO: 8416 - DNA, 26 bp, Homo sapiens
tctattagcctatccagaagtccctg

SEQ ID NO: 8417 - DNA, 26 bp, Homo sapiens
ctattagcctatccagaagtccctgg

SEQ ID NO: 8418 - DNA, 26 bp, Homo sapiens
tattagcctatccagaagtccctgga

SEQ ID NO: 8419 - DNA, 26 bp, Homo sapiens
attagcctatccagaagtccctggag

SEQ ID NO: 8420 - DNA, 26 bp, Homo sapiens
ttagcctatccagaagtccctggagt

SEQ ID NO: 8421 - DNA, 26 bp, Homo sapiens
tagcctatccagaagtccctggagtt

SEQ ID NO: 8422 - DNA, 26 bp, Homo sapiens
agcctatccagaagtccctggagtta

SEQ ID NO: 8423 - DNA, 26 bp, Homo sapiens
gcctatccagaagtccctggagttaa

SEQ ID NO: 8424 - DNA, 26 bp, Homo sapiens
cctatccagaagtccctggagttaat

SEQ ID NO: 8425 - DNA, 26 bp, Homo sapiens
ctatccagaagtccctggagttaata

SEQ ID NO: 8426 - DNA, 26 bp, Homo sapiens
tatccagaagtccctggagttaatat

SEQ ID NO: 8427 - DNA, 26 bp, Homo sapiens
atccagaagtccctggagttaatatt

SEQ ID NO: 8428 - DNA, 26 bp, Homo sapiens
tccagaagtccctggagttaatatta

SEQ ID NO: 8429 - DNA, 26 bp, Homo sapiens
ccagaagtccctggagttaatattag

SEQ ID NO: 8430 - DNA, 26 bp, Homo sapiens
cagaagtccctggagttaatattagt

SEQ ID NO: 8431 - DNA, 26 bp, Homo sapiens
agaagtccctggagttaatattagtg

SEQ ID NO: 8432 - DNA, 26 bp, Homo sapiens
gaagtccctggagttaatattagtga

SEQ ID NO: 8433 - DNA, 26 bp, Homo sapiens
aagtccctggagttaatattagtgac

SEQ ID NO: 8434 - DNA, 26 bp, Homo sapiens
agtccctggagttaatattagtgact

SEQ ID NO: 8435 - DNA, 26 bp, Homo sapiens
gtccctggagttaatattagtgactc

SEQ ID NO: 8436 - DNA, 26 bp, Homo sapiens
tccctggagttaatattagtgactca

SEQ ID NO: 8437 - DNA, 26 bp, Homo sapiens
ccctggagttaatattagtgactcat

SEQ ID NO: 8438 - DNA, 26 bp, Homo sapiens
cctggagttaatattagtgactcata

SEQ ID NO: 8439 - DNA, 26 bp, Homo sapiens
ctggagttaatattagtgactcatat

SEQ ID NO: 8440 - DNA, 26 bp, Homo sapiens
tggagttaatattagtgactcatatg

SEQ ID NO: 8441 - DNA, 26 bp, Homo sapiens
ggagttaatattagtgactcatatga

SEQ ID NO: 8442 - DNA, 26 bp, Homo sapiens
gagttaatattagtgactcatatgac

SEQ ID NO: 8443 - DNA, 26 bp, Homo sapiens
agttaatattagtgactcatatgaca

SEQ ID NO: 8444 - DNA, 26 bp, Homo sapiens
gttaatattagtgactcatatgacac

SEQ ID NO: 8445 - DNA, 26 bp, Homo sapiens
ttaatattagtgactcatatgacacg

SEQ ID NO: 8446 - DNA, 26 bp, Homo sapiens
taatattagtgactcatatgacacgg

SEQ ID NO: 8447 - DNA, 26 bp, Homo sapiens
aatattagtgactcatatgacacgga

SEQ ID NO: 8448 - DNA, 26 bp, Homo sapiens
atattagtgactcatatgacacggac

SEQ ID NO: 8449 - DNA, 26 bp, Homo sapiens
tattagtgactcatatgacacggaca

SEQ ID NO: 8450 - DNA, 26 bp, Homo sapiens
attagtgactcatatgacacggacag

SEQ ID NO: 8451 - DNA, 26 bp, Homo sapiens
ttagtgactcatatgacacggacagt

SEQ ID NO: 8452 - DNA, 26 bp, Homo sapiens
tagtgactcatatgacacggacagtg

SEQ ID NO: 8453 - DNA, 26 bp, Homo sapiens
agtgactcatatgacacggacagtgc

SEQ ID NO: 8454 - DNA, 26 bp, Homo sapiens
gtgactcatatgacacggacagtgct

SEQ ID NO: 8455 - DNA, 26 bp, Homo sapiens
tgactcatatgacacggacagtgcta

SEQ ID NO: 8456 - DNA, 26 bp, Homo sapiens
gactcatatgacacggacagtgctat

SEQ ID NO: 8457 - DNA, 26 bp, Homo sapiens
actcatatgacacggacagtgctata

SEQ ID NO: 8458 - DNA, 26 bp, Homo sapiens
ctcatatgacacggacagtgctatag

SEQ ID NO: 8459 - DNA, 26 bp, Homo sapiens
tcatatgacacggacagtgctatagt

SEQ ID NO: 8460 - DNA, 26 bp, Homo sapiens
catatgacacggacagtgctatagtg

SEQ ID NO: 8461 - DNA, 26 bp, Homo sapiens
atatgacacggacagtgctatagtgg

SEQ ID NO: 8462 - DNA, 26 bp, Homo sapiens
tatgacacggacagtgctatagtggt

SEQ ID NO: 8463 - DNA, 26 bp, Homo sapiens
atgacacggacagtgctatagtggtg

SEQ ID NO: 8464 - DNA, 26 bp, Homo sapiens
tgacacggacagtgctatagtggtgc

SEQ ID NO: 8465 - DNA, 26 bp, Homo sapiens
gacacggacagtgctatagtggtgct

SEQ ID NO: 8466 - DNA, 26 bp, Homo sapiens
acacggacagtgctatagtggtgctg

SEQ ID NO: 8467 - DNA, 26 bp, Homo sapiens
cacggacagtgctatagtggtgctga

SEQ ID NO: 8468 - DNA, 26 bp, Homo sapiens
acggacagtgctatagtggtgctgat

SEQ ID NO: 8469 - DNA, 26 bp, Homo sapiens
cggacagtgctatagtggtgctgatg

SEQ ID NO: 8470 - DNA, 26 bp, Homo sapiens
ggacagtgctatagtggtgctgatgc

SEQ ID NO: 8471 - DNA, 26 bp, Homo sapiens
gacagtgctatagtggtgctgatgct

SEQ ID NO: 8472 - DNA, 26 bp, Homo sapiens
acagtgctatagtggtgctgatgcta

SEQ ID NO: 8473 - DNA, 26 bp, Homo sapiens
cagtgctatagtggtgctgatgctag

SEQ ID NO: 8474 - DNA, 26 bp, Homo sapiens
agtgctatagtggtgctgatgctagc

SEQ ID NO: 8475 - DNA, 26 bp, Homo sapiens
gtgctatagtggtgctgatgctagcc

SEQ ID NO: 8476 - DNA, 26 bp, Homo sapiens
tgctatagtggtgctgatgctagccg

SEQ ID NO: 8477 - DNA, 26 bp, Homo sapiens
gctatagtggtgctgatgctagccga

SEQ ID NO: 8478 - DNA, 26 bp, Homo sapiens
ctatagtggtgctgatgctagccgag

SEQ ID NO: 8479 - DNA, 26 bp, Homo sapiens
tatagtggtgctgatgctagccgagt

SEQ ID NO: 8480 - DNA, 26 bp, Homo sapiens
atagtggtgctgatgctagccgagta

SEQ ID NO: 8481 - DNA, 26 bp, Homo sapiens
tagtggtgctgatgctagccgagtat

SEQ ID NO: 8482 - DNA, 26 bp, Homo sapiens
agtggtgctgatgctagccgagtatt

SEQ ID NO: 8483 - DNA, 26 bp, Homo sapiens
gtggtgctgatgctagccgagtattt

SEQ ID NO: 8484 - DNA, 26 bp, Homo sapiens
tggtgctgatgctagccgagtatttc

SEQ ID NO: 8485 - DNA, 26 bp, Homo sapiens
ggtgctgatgctagccgagtatttca

SEQ ID NO: 8486 - DNA, 26 bp, Homo sapiens
gtgctgatgctagccgagtatttcaa

SEQ ID NO: 8487 - DNA, 26 bp, Homo sapiens
tgctgatgctagccgagtatttcaac

SEQ ID NO: 8488 - DNA, 26 bp, Homo sapiens
gctgatgctagccgagtatttcaaca

SEQ ID NO: 8489 - DNA, 26 bp, Homo sapiens
ctgatgctagccgagtatttcaacac

SEQ ID NO: 8490 - DNA, 26 bp, Homo sapiens
tgatgctagccgagtatttcaacact

SEQ ID NO: 8491 - DNA, 26 bp, Homo sapiens
gatgctagccgagtatttcaacacta

SEQ ID NO: 8492 - DNA, 26 bp, Homo sapiens
atgctagccgagtatttcaacactac

SEQ ID NO: 8493 - DNA, 26 bp, Homo sapiens
tgctagccgagtatttcaacactact

SEQ ID NO: 8494 - DNA, 26 bp, Homo sapiens
gctagccgagtatttcaacactactc

SEQ ID NO: 8495 - DNA, 26 bp, Homo sapiens
ctagccgagtatttcaacactactct

SEQ ID NO: 8496 - DNA, 26 bp, Homo sapiens
tagccgagtatttcaacactactcta

SEQ ID NO: 8497 - DNA, 26 bp, Homo sapiens
agccgagtatttcaacactactctaa

SEQ ID NO: 8498 - DNA, 26 bp, Homo sapiens
gccgagtatttcaacactactctaaa

SEQ ID NO: 8499 - DNA, 26 bp, Homo sapiens
ccgagtatttcaacactactctaaat

SEQ ID NO: 8500 - DNA, 26 bp, Homo sapiens
cgagtatttcaacactactctaaatg

SEQ ID NO: 8501 - DNA, 26 bp, Homo sapiens
gagtatttcaacactactctaaatgt

SEQ ID NO: 8502 - DNA, 26 bp, Homo sapiens
agtatttcaacactactctaaatgtc

SEQ ID NO: 8503 - DNA, 26 bp, Homo sapiens
gtatttcaacactactctaaatgtca

SEQ ID NO: 8504 - DNA, 26 bp, Homo sapiens
tatttcaacactactctaaatgtcag

SEQ ID NO: 8505 - DNA, 26 bp, Homo sapiens
atttcaacactactctaaatgtcaga

SEQ ID NO: 8506 - DNA, 26 bp, Homo sapiens
tttcaacactactctaaatgtcagaa

SEQ ID NO: 8507 - DNA, 26 bp, Homo sapiens
ttcaacactactctaaatgtcagaaa

SEQ ID NO: 8508 - DNA, 26 bp, Homo sapiens
tcaacactactctaaatgtcagaaat

SEQ ID NO: 8509 - DNA, 26 bp, Homo sapiens
caacactactctaaatgtcagaaata

SEQ ID NO: 8510 - DNA, 26 bp, Homo sapiens
aacactactctaaatgtcagaaatac

SEQ ID NO: 8511 - DNA, 26 bp, Homo sapiens
acactactctaaatgtcagaaatact

SEQ ID NO: 8512 - DNA, 26 bp, Homo sapiens
cactactctaaatgtcagaaatactg

SEQ ID NO: 8513 - DNA, 26 bp, Homo sapiens
actactctaaatgtcagaaatactgt

SEQ ID NO: 8514 - DNA, 26 bp, Homo sapiens
ctactctaaatgtcagaaatactgta

SEQ ID NO: 8515 - DNA, 26 bp, Homo sapiens
tactctaaatgtcagaaatactgtag

SEQ ID NO: 8516 - DNA, 26 bp, Homo sapiens
actctaaatgtcagaaatactgtagc

SEQ ID NO: 8517 - DNA, 26 bp, Homo sapiens
ctctaaatgtcagaaatactgtagca

SEQ ID NO: 8518 - DNA, 26 bp, Homo sapiens
tctaaatgtcagaaatactgtagcaa

SEQ ID NO: 8519 - DNA, 26 bp, Homo sapiens
ctaaatgtcagaaatactgtagcaag

SEQ ID NO: 8520 - DNA, 26 bp, Homo sapiens
taaatgtcagaaatactgtagcaagg

SEQ ID NO: 8521 - DNA, 26 bp, Homo sapiens
aaatgtcagaaatactgtagcaaggt

SEQ ID NO: 8522 - DNA, 26 bp, Homo sapiens
aatgtcagaaatactgtagcaaggta

SEQ ID NO: 8523 - DNA, 26 bp, Homo sapiens
atgtcagaaatactgtagcaaggtac

SEQ ID NO: 8524 - DNA, 26 bp, Homo sapiens
tgtcagaaatactgtagcaaggtacc

SEQ ID NO: 8525 - DNA, 26 bp, Homo sapiens
gtcagaaatactgtagcaaggtacca

SEQ ID NO: 8526 - DNA, 26 bp, Homo sapiens
tcagaaatactgtagcaaggtaccat

SEQ ID NO: 8527 - DNA, 26 bp, Homo sapiens
cagaaatactgtagcaaggtaccatt

SEQ ID NO: 8528 - DNA, 26 bp, Homo sapiens
agaaatactgtagcaaggtaccattc

SEQ ID NO: 8529 - DNA, 26 bp, Homo sapiens
gaaatactgtagcaaggtaccattca

SEQ ID NO: 8530 - DNA, 26 bp, Homo sapiens
aaatactgtagcaaggtaccattcaa

SEQ ID NO: 8531 - DNA, 26 bp, Homo sapiens
aatactgtagcaaggtaccattcaat

SEQ ID NO: 8532 - DNA, 26 bp, Homo sapiens
atactgtagcaaggtaccattcaatg

SEQ ID NO: 8533 - DNA, 26 bp, Homo sapiens
tactgtagcaaggtaccattcaatgt

SEQ ID NO: 8534 - DNA, 26 bp, Homo sapiens
actgtagcaaggtaccattcaatgta

SEQ ID NO: 8535 - DNA, 26 bp, Homo sapiens
ctgtagcaaggtaccattcaatgtat

SEQ ID NO: 8536 - DNA, 26 bp, Homo sapiens
tgtagcaaggtaccattcaatgtata

SEQ ID NO: 8537 - DNA, 26 bp, Homo sapiens
gtagcaaggtaccattcaatgtatat

SEQ ID NO: 8538 - DNA, 26 bp, Homo sapiens
tagcaaggtaccattcaatgtatatt

SEQ ID NO: 8539 - DNA, 26 bp, Homo sapiens
agcaaggtaccattcaatgtatatta

SEQ ID NO: 8540 - DNA, 26 bp, Homo sapiens
gcaaggtaccattcaatgtatattaa

SEQ ID NO: 8541 - DNA, 26 bp, Homo sapiens
caaggtaccattcaatgtatattaaa

SEQ ID NO: 8542 - DNA, 26 bp, Homo sapiens
aaggtaccattcaatgtatattaaat

SEQ ID NO: 8543 - DNA, 26 bp, Homo sapiens
aggtaccattcaatgtatattaaata

SEQ ID NO: 8544 - DNA, 26 bp, Homo sapiens
ggtaccattcaatgtatattaaataa

SEQ ID NO: 8545 - DNA, 26 bp, Homo sapiens
gtaccattcaatgtatattaaataag

SEQ ID NO: 8546 - DNA, 26 bp, Homo sapiens
taccattcaatgtatattaaataagt

SEQ ID NO: 8547 - DNA, 26 bp, Homo sapiens
accattcaatgtatattaaataagta

SEQ ID NO: 8548 - DNA, 26 bp, Homo sapiens
ccattcaatgtatattaaataagtaa

SEQ ID NO: 8549 - DNA, 26 bp, Homo sapiens
cattcaatgtatattaaataagtaaa

SEQ ID NO: 8550 - DNA, 26 bp, Homo sapiens
attcaatgtatattaaataagtaaaa

SEQ ID NO: 8551 - DNA, 26 bp, Homo sapiens
ttcaatgtatattaaataagtaaaat

SEQ ID NO: 8552 - DNA, 26 bp, Homo sapiens
tcaatgtatattaaataagtaaaata

SEQ ID NO: 8553 - DNA, 26 bp, Homo sapiens
caatgtatattaaataagtaaaatac

SEQ ID NO: 8554 - DNA, 26 bp, Homo sapiens
aatgtatattaaataagtaaaataca

SEQ ID NO: 8555 - DNA, 26 bp, Homo sapiens
atgtatattaaataagtaaaatacat

SEQ ID NO: 8556 - DNA, 26 bp, Homo sapiens
tgtatattaaataagtaaaatacata

SEQ ID NO: 8557 - DNA, 26 bp, Homo sapiens
gtatattaaataagtaaaatacatac

SEQ ID NO: 8558 - DNA, 26 bp, Homo sapiens
tatattaaataagtaaaatacataca

SEQ ID NO: 8559 - DNA, 26 bp, Homo sapiens
atattaaataagtaaaatacatacag

SEQ ID NO: 8560 - DNA, 26 bp, Homo sapiens
tattaaataagtaaaatacatacaga

SEQ ID NO: 8561 - DNA, 26 bp, Homo sapiens
attaaataagtaaaatacatacagac

SEQ ID NO: 8562 - DNA, 26 bp, Homo sapiens
ttaaataagtaaaatacatacagaca

SEQ ID NO: 8563 - DNA, 26 bp, Homo sapiens
taaataagtaaaatacatacagacat

SEQ ID NO: 8564 - DNA, 26 bp, Homo sapiens
aaataagtaaaatacatacagacatt

SEQ ID NO: 8565 - DNA, 26 bp, Homo sapiens
aataagtaaaatacatacagacattc

SEQ ID NO: 8566 - DNA, 26 bp, Homo sapiens
ataagtaaaatacatacagacattct

SEQ ID NO: 8567 - DNA, 26 bp, Homo sapiens
taagtaaaatacatacagacattcta

SEQ ID NO: 8568 - DNA, 26 bp, Homo sapiens
aagtaaaatacatacagacattctat

SEQ ID NO: 8569 - DNA, 26 bp, Homo sapiens
agtaaaatacatacagacattctata

SEQ ID NO: 8570 - DNA, 26 bp, Homo sapiens
gtaaaatacatacagacattctatat

SEQ ID NO: 8571 - DNA, 26 bp, Homo sapiens
taaaatacatacagacattctatata

SEQ ID NO: 8572 - DNA, 26 bp, Homo sapiens
aaaatacatacagacattctatatac

SEQ ID NO: 8573 - DNA, 26 bp, Homo sapiens
aaatacatacagacattctatataca

SEQ ID NO: 8574 - DNA, 26 bp, Homo sapiens
aatacatacagacattctatatacat

SEQ ID NO: 8575 - DNA, 26 bp, Homo sapiens
atacatacagacattctatatacata

SEQ ID NO: 8576 - DNA, 26 bp, Homo sapiens
tacatacagacattctatatacatag

SEQ ID NO: 8577 - DNA, 26 bp, Homo sapiens
acatacagacattctatatacataga

SEQ ID NO: 8578 - DNA, 26 bp, Homo sapiens
catacagacattctatatacatagat

SEQ ID NO: 8579 - DNA, 26 bp, Homo sapiens
atacagacattctatatacatagata

SEQ ID NO: 8580 - DNA, 26 bp, Homo sapiens
tacagacattctatatacatagatat

SEQ ID NO: 8581 - DNA, 26 bp, Homo sapiens
acagacattctatatacatagatata

SEQ ID NO: 8582 - DNA, 26 bp, Homo sapiens
cagacattctatatacatagatatag

SEQ ID NO: 8583 - DNA, 26 bp, Homo sapiens
agacattctatatacatagatataga

SEQ ID NO: 8584 - DNA, 26 bp, Homo sapiens
gacattctatatacatagatatagac

SEQ ID NO: 8585 - DNA, 26 bp, Homo sapiens
acattctatatacatagatatagact

SEQ ID NO: 8586 - DNA, 26 bp, Homo sapiens
cattctatatacatagatatagactg

SEQ ID NO: 8587 - DNA, 26 bp, Homo sapiens
attctatatacatagatatagactgt

SEQ ID NO: 8588 - DNA, 26 bp, Homo sapiens
ttctatatacatagatatagactgtg

SEQ ID NO: 8589 - DNA, 26 bp, Homo sapiens
tctatatacatagatatagactgtgg

SEQ ID NO: 8590 - DNA, 26 bp, Homo sapiens
ctatatacatagatatagactgtggg

SEQ ID NO: 8591 - DNA, 26 bp, Homo sapiens
tatatacatagatatagactgtgggc

SEQ ID NO: 8592 - DNA, 26 bp, Homo sapiens
atatacatagatatagactgtgggca

SEQ ID NO: 8593 - DNA, 26 bp, Homo sapiens
tatacatagatatagactgtgggcaa

SEQ ID NO: 8594 - DNA, 26 bp, Homo sapiens
atacatagatatagactgtgggcaaa

SEQ ID NO: 8595 - DNA, 26 bp, Homo sapiens
tacatagatatagactgtgggcaaac

SEQ ID NO: 8596 - DNA, 26 bp, Homo sapiens
acatagatatagactgtgggcaaaca

SEQ ID NO: 8597 - DNA, 26 bp, Homo sapiens
catagatatagactgtgggcaaacac

SEQ ID NO: 8598 - DNA, 26 bp, Homo sapiens
atagatatagactgtgggcaaacaca

SEQ ID NO: 8599 - DNA, 26 bp, Homo sapiens
tagatatagactgtgggcaaacacat

SEQ ID NO: 8600 - DNA, 26 bp, Homo sapiens
agatatagactgtgggcaaacacatt

SEQ ID NO: 8601 - DNA, 26 bp, Homo sapiens
gatatagactgtgggcaaacacattc

SEQ ID NO: 8602 - DNA, 26 bp, Homo sapiens
atatagactgtgggcaaacacattca

SEQ ID NO: 8603 - DNA, 26 bp, Homo sapiens
tatagactgtgggcaaacacattcaa

SEQ ID NO: 8604 - DNA, 26 bp, Homo sapiens
atagactgtgggcaaacacattcaag

SEQ ID NO: 8605 - DNA, 26 bp, Homo sapiens
tagactgtgggcaaacacattcaagc

SEQ ID NO: 8606 - DNA, 26 bp, Homo sapiens
agactgtgggcaaacacattcaagcc

SEQ ID NO: 8607 - DNA, 26 bp, Homo sapiens
gactgtgggcaaacacattcaagcca

SEQ ID NO: 8608 - DNA, 26 bp, Homo sapiens
actgtgggcaaacacattcaagccac

SEQ ID NO: 8609 - DNA, 26 bp, Homo sapiens
ctgtgggcaaacacattcaagccact

SEQ ID NO: 8610 - DNA, 26 bp, Homo sapiens
tgtgggcaaacacattcaagccactc

SEQ ID NO: 8611 - DNA, 26 bp, Homo sapiens
gtgggcaaacacattcaagccactca

SEQ ID NO: 8612 - DNA, 26 bp, Homo sapiens
tgggcaaacacattcaagccactcag

SEQ ID NO: 8613 - DNA, 26 bp, Homo sapiens
gggcaaacacattcaagccactcagg

SEQ ID NO: 8614 - DNA, 26 bp, Homo sapiens
ggcaaacacattcaagccactcaggg

SEQ ID NO: 8615 - DNA, 26 bp, Homo sapiens
gcaaacacattcaagccactcaggga

SEQ ID NO: 8616 - DNA, 26 bp, Homo sapiens
caaacacattcaagccactcagggaa

SEQ ID NO: 8617 - DNA, 26 bp, Homo sapiens
aaacacattcaagccactcagggaag

SEQ ID NO: 8618 - DNA, 26 bp, Homo sapiens
aacacattcaagccactcagggaagt

SEQ ID NO: 8619 - DNA, 26 bp, Homo sapiens
acacattcaagccactcagggaagtt

SEQ ID NO: 8620 - DNA, 26 bp, Homo sapiens
cacattcaagccactcagggaagttc

SEQ ID NO: 8621 - DNA, 26 bp, Homo sapiens
acattcaagccactcagggaagttcc

SEQ ID NO: 8622 - DNA, 26 bp, Homo sapiens
cattcaagccactcagggaagttcct

SEQ ID NO: 8623 - DNA, 26 bp, Homo sapiens
attcaagccactcagggaagttcctt

SEQ ID NO: 8624 - DNA, 26 bp, Homo sapiens
ttcaagccactcagggaagttccttt

SEQ ID NO: 8625 - DNA, 26 bp, Homo sapiens
tcaagccactcagggaagttcctttt

SEQ ID NO: 8626 - DNA, 26 bp, Homo sapiens
caagccactcagggaagttccttttt

SEQ ID NO: 8627 - DNA, 26 bp, Homo sapiens
aagccactcagggaagttcctttttc

SEQ ID NO: 8628 - DNA, 26 bp, Homo sapiens
agccactcagggaagttcctttttct

SEQ ID NO: 8629 - DNA, 26 bp, Homo sapiens
gccactcagggaagttcctttttctt

SEQ ID NO: 8630 - DNA, 26 bp, Homo sapiens
ccactcagggaagttcctttttcttt

SEQ ID NO: 8631 - DNA, 26 bp, Homo sapiens
cactcagggaagttcctttttcttta

SEQ ID NO: 8632 - DNA, 26 bp, Homo sapiens
actcagggaagttcctttttctttag

SEQ ID NO: 8633 - DNA, 26 bp, Homo sapiens
ctcagggaagttcctttttctttagt

SEQ ID NO: 8634 - DNA, 26 bp, Homo sapiens
tcagggaagttcctttttctttagtt

SEQ ID NO: 8635 - DNA, 26 bp, Homo sapiens
cagggaagttcctttttctttagtta

SEQ ID NO: 8636 - DNA, 26 bp, Homo sapiens
agggaagttcctttttctttagttac

SEQ ID NO: 8637 - DNA, 26 bp, Homo sapiens
gggaagttcctttttctttagttact

SEQ ID NO: 8638 - DNA, 26 bp, Homo sapiens
ggaagttcctttttctttagttactg

SEQ ID NO: 8639 - DNA, 26 bp, Homo sapiens
gaagttcctttttctttagttactga

SEQ ID NO: 8640 - DNA, 26 bp, Homo sapiens
aagttcctttttctttagttactgaa

SEQ ID NO: 8641 - DNA, 26 bp, Homo sapiens
agttcctttttctttagttactgaag

SEQ ID NO: 8642 - DNA, 26 bp, Homo sapiens
gttcctttttctttagttactgaagc

SEQ ID NO: 8643 - DNA, 26 bp, Homo sapiens
ttcctttttctttagttactgaagct

SEQ ID NO: 8644 - DNA, 26 bp, Homo sapiens
tcctttttctttagttactgaagctt

SEQ ID NO: 8645 - DNA, 26 bp, Homo sapiens
cctttttctttagttactgaagcttg

SEQ ID NO: 8646 - DNA, 26 bp, Homo sapiens
ctttttctttagttactgaagcttgt

SEQ ID NO: 8647 - DNA, 26 bp, Homo sapiens
tttttctttagttactgaagcttgta

SEQ ID NO: 8648 - DNA, 26 bp, Homo sapiens
ttttctttagttactgaagcttgtag

SEQ ID NO: 8649 - DNA, 26 bp, Homo sapiens
tttctttagttactgaagcttgtaga

SEQ ID NO: 8650 - DNA, 26 bp, Homo sapiens
ttctttagttactgaagcttgtagat

SEQ ID NO: 8651 - DNA, 26 bp, Homo sapiens
tctttagttactgaagcttgtagatg

SEQ ID NO: 8652 - DNA, 26 bp, Homo sapiens
ctttagttactgaagcttgtagatga

SEQ ID NO: 8653 - DNA, 26 bp, Homo sapiens
tttagttactgaagcttgtagatgac

SEQ ID NO: 8654 - DNA, 26 bp, Homo sapiens
ttagttactgaagcttgtagatgaca

SEQ ID NO: 8655 - DNA, 26 bp, Homo sapiens
tagttactgaagcttgtagatgacat

SEQ ID NO: 8656 - DNA, 26 bp, Homo sapiens
agttactgaagcttgtagatgacatg

SEQ ID NO: 8657 - DNA, 26 bp, Homo sapiens
gttactgaagcttgtagatgacatgg

SEQ ID NO: 8658 - DNA, 26 bp, Homo sapiens
ttactgaagcttgtagatgacatggt

SEQ ID NO: 8659 - DNA, 26 bp, Homo sapiens
tactgaagcttgtagatgacatggtc

SEQ ID NO: 8660 - DNA, 26 bp, Homo sapiens
actgaagcttgtagatgacatggtct

SEQ ID NO: 8661 - DNA, 26 bp, Homo sapiens
ctgaagcttgtagatgacatggtcta

SEQ ID NO: 8662 - DNA, 26 bp, Homo sapiens
tgaagcttgtagatgacatggtctag

SEQ ID NO: 8663 - DNA, 26 bp, Homo sapiens
gaagcttgtagatgacatggtctagg

SEQ ID NO: 8664 - DNA, 26 bp, Homo sapiens
aagcttgtagatgacatggtctaggt

SEQ ID NO: 8665 - DNA, 26 bp, Homo sapiens
agcttgtagatgacatggtctaggta

SEQ ID NO: 8666 - DNA, 26 bp, Homo sapiens
gcttgtagatgacatggtctaggtac

SEQ ID NO: 8667 - DNA, 26 bp, Homo sapiens
cttgtagatgacatggtctaggtacc

SEQ ID NO: 8668 - DNA, 26 bp, Homo sapiens
ttgtagatgacatggtctaggtacct

SEQ ID NO: 8669 - DNA, 26 bp, Homo sapiens
tgtagatgacatggtctaggtacctc

SEQ ID NO: 8670 - DNA, 26 bp, Homo sapiens
gtagatgacatggtctaggtacctct

SEQ ID NO: 8671 - DNA, 26 bp, Homo sapiens
tagatgacatggtctaggtacctctc

SEQ ID NO: 8672 - DNA, 26 bp, Homo sapiens
agatgacatggtctaggtacctctct

SEQ ID NO: 8673 - DNA, 26 bp, Homo sapiens
gatgacatggtctaggtacctctctc

SEQ ID NO: 8674 - DNA, 26 bp, Homo sapiens
atgacatggtctaggtacctctctcc

SEQ ID NO: 8675 - DNA, 26 bp, Homo sapiens
tgacatggtctaggtacctctctccc

SEQ ID NO: 8676 - DNA, 26 bp, Homo sapiens
gacatggtctaggtacctctctcccc

SEQ ID NO: 8677 - DNA, 26 bp, Homo sapiens
acatggtctaggtacctctctcccct

SEQ ID NO: 8678 - DNA, 26 bp, Homo sapiens
catggtctaggtacctctctcccctc

SEQ ID NO: 8679 - DNA, 26 bp, Homo sapiens
atggtctaggtacctctctcccctcg

SEQ ID NO: 8680 - DNA, 26 bp, Homo sapiens
tggtctaggtacctctctcccctcgg

SEQ ID NO: 8681 - DNA, 26 bp, Homo sapiens
ggtctaggtacctctctcccctcggc

SEQ ID NO: 8682 - DNA, 26 bp, Homo sapiens
gtctaggtacctctctcccctcggct

SEQ ID NO: 8683 - DNA, 26 bp, Homo sapiens
tctaggtacctctctcccctcggctt

SEQ ID NO: 8684 - DNA, 26 bp, Homo sapiens
ctaggtacctctctcccctcggctta

SEQ ID NO: 8685 - DNA, 26 bp, Homo sapiens
taggtacctctctcccctcggcttag

SEQ ID NO: 8686 - DNA, 26 bp, Homo sapiens
aggtacctctctcccctcggcttagt

SEQ ID NO: 8687 - DNA, 26 bp, Homo sapiens
ggtacctctctcccctcggcttagta

SEQ ID NO: 8688 - DNA, 26 bp, Homo sapiens
gtacctctctcccctcggcttagtat

SEQ ID NO: 8689 - DNA, 26 bp, Homo sapiens
tacctctctcccctcggcttagtata

SEQ ID NO: 8690 - DNA, 26 bp, Homo sapiens
acctctctcccctcggcttagtataa

SEQ ID NO: 8691 - DNA, 26 bp, Homo sapiens
cctctctcccctcggcttagtataaa

SEQ ID NO: 8692 - DNA, 26 bp, Homo sapiens
ctctctcccctcggcttagtataaac

SEQ ID NO: 8693 - DNA, 26 bp, Homo sapiens
tctctcccctcggcttagtataaaca

SEQ ID NO: 8694 - DNA, 26 bp, Homo sapiens
ctctcccctcggcttagtataaacat

SEQ ID NO: 8695 - DNA, 26 bp, Homo sapiens
tctcccctcggcttagtataaacatt

SEQ ID NO: 8696 - DNA, 26 bp, Homo sapiens
ctcccctcggcttagtataaacattt

SEQ ID NO: 8697 - DNA, 26 bp, Homo sapiens
tcccctcggcttagtataaacattta

SEQ ID NO: 8698 - DNA, 26 bp, Homo sapiens
cccctcggcttagtataaacatttag

SEQ ID NO: 8699 - DNA, 26 bp, Homo sapiens
ccctcggcttagtataaacatttagg

SEQ ID NO: 8700 - DNA, 26 bp, Homo sapiens
cctcggcttagtataaacatttaggc

SEQ ID NO: 8701 - DNA, 26 bp, Homo sapiens
ctcggcttagtataaacatttaggca

SEQ ID NO: 8702 - DNA, 26 bp, Homo sapiens
tcggcttagtataaacatttaggcag

SEQ ID NO: 8703 - DNA, 26 bp, Homo sapiens
cggcttagtataaacatttaggcaga

SEQ ID NO: 8704 - DNA, 26 bp, Homo sapiens
ggcttagtataaacatttaggcagaa

SEQ ID NO: 8705 - DNA, 26 bp, Homo sapiens
gcttagtataaacatttaggcagaaa

SEQ ID NO: 8706 - DNA, 26 bp, Homo sapiens
cttagtataaacatttaggcagaaaa

SEQ ID NO: 8707 - DNA, 26 bp, Homo sapiens
ttagtataaacatttaggcagaaaac

SEQ ID NO: 8708 - DNA, 26 bp, Homo sapiens
tagtataaacatttaggcagaaaaca

SEQ ID NO: 8709 - DNA, 26 bp, Homo sapiens
agtataaacatttaggcagaaaacaa

SEQ ID NO: 8710 - DNA, 26 bp, Homo sapiens
gtataaacatttaggcagaaaacaaa

SEQ ID NO: 8711 - DNA, 26 bp, Homo sapiens
tataaacatttaggcagaaaacaaat

SEQ ID NO: 8712 - DNA, 26 bp, Homo sapiens
ataaacatttaggcagaaaacaaata

SEQ ID NO: 8713 - DNA, 26 bp, Homo sapiens
taaacatttaggcagaaaacaaatat

SEQ ID NO: 8714 - DNA, 26 bp, Homo sapiens
aaacatttaggcagaaaacaaatatc

SEQ ID NO: 8715 - DNA, 26 bp, Homo sapiens
aacatttaggcagaaaacaaatatcc

SEQ ID NO: 8716 - DNA, 26 bp, Homo sapiens
acatttaggcagaaaacaaatatcct

SEQ ID NO: 8717 - DNA, 26 bp, Homo sapiens
catttaggcagaaaacaaatatcctg

SEQ ID NO: 8718 - DNA, 26 bp, Homo sapiens
atttaggcagaaaacaaatatcctga

SEQ ID NO: 8719 - DNA, 26 bp, Homo sapiens
tttaggcagaaaacaaatatcctgat

SEQ ID NO: 8720 - DNA, 26 bp, Homo sapiens
ttaggcagaaaacaaatatcctgata

SEQ ID NO: 8721 - DNA, 26 bp, Homo sapiens
taggcagaaaacaaatatcctgataa

SEQ ID NO: 8722 - DNA, 26 bp, Homo sapiens
aggcagaaaacaaatatcctgataat

SEQ ID NO: 8723 - DNA, 26 bp, Homo sapiens
ggcagaaaacaaatatcctgataatt

SEQ ID NO: 8724 - DNA, 26 bp, Homo sapiens
gcagaaaacaaatatcctgataattt

SEQ ID NO: 8725 - DNA, 26 bp, Homo sapiens
cagaaaacaaatatcctgataattta

SEQ ID NO: 8726 - DNA, 26 bp, Homo sapiens
agaaaacaaatatcctgataatttag

SEQ ID NO: 8727 - DNA, 26 bp, Homo sapiens
gaaaacaaatatcctgataatttaga

SEQ ID NO: 8728 - DNA, 26 bp, Homo sapiens
aaaacaaatatcctgataatttagat

SEQ ID NO: 8729 - DNA, 26 bp, Homo sapiens
aaacaaatatcctgataatttagatt

SEQ ID NO: 8730 - DNA, 26 bp, Homo sapiens
aacaaatatcctgataatttagatta

SEQ ID NO: 8731 - DNA, 26 bp, Homo sapiens
acaaatatcctgataatttagattat

SEQ ID NO: 8732 - DNA, 26 bp, Homo sapiens
caaatatcctgataatttagattatc

SEQ ID NO: 8733 - DNA, 26 bp, Homo sapiens
aaatatcctgataatttagattatca

SEQ ID NO: 8734 - DNA, 26 bp, Homo sapiens
aatatcctgataatttagattatcag

SEQ ID NO: 8735 - DNA, 26 bp, Homo sapiens
atatcctgataatttagattatcagg

SEQ ID NO: 8736 - DNA, 26 bp, Homo sapiens
tatcctgataatttagattatcaggt

SEQ ID NO: 8737 - DNA, 26 bp, Homo sapiens
atcctgataatttagattatcaggta

SEQ ID NO: 8738 - DNA, 26 bp, Homo sapiens
tcctgataatttagattatcaggtag

SEQ ID NO: 8739 - DNA, 26 bp, Homo sapiens
cctgataatttagattatcaggtaga

SEQ ID NO: 8740 - DNA, 26 bp, Homo sapiens
ctgataatttagattatcaggtagaa

SEQ ID NO: 8741 - DNA, 26 bp, Homo sapiens
tgataatttagattatcaggtagaaa

SEQ ID NO: 8742 - DNA, 26 bp, Homo sapiens
gataatttagattatcaggtagaaag

SEQ ID NO: 8743 - DNA, 26 bp, Homo sapiens
ataatttagattatcaggtagaaaga

SEQ ID NO: 8744 - DNA, 26 bp, Homo sapiens
taatttagattatcaggtagaaagac

SEQ ID NO: 8745 - DNA, 26 bp, Homo sapiens
aatttagattatcaggtagaaagaca

SEQ ID NO: 8746 - DNA, 26 bp, Homo sapiens
atttagattatcaggtagaaagacag

SEQ ID NO: 8747 - DNA, 26 bp, Homo sapiens
tttagattatcaggtagaaagacaga

SEQ ID NO: 8748 - DNA, 26 bp, Homo sapiens
ttagattatcaggtagaaagacagat

SEQ ID NO: 8749 - DNA, 26 bp, Homo sapiens
tagattatcaggtagaaagacagata

SEQ ID NO: 8750 - DNA, 26 bp, Homo sapiens
agattatcaggtagaaagacagataa

SEQ ID NO: 8751 - DNA, 26 bp, Homo sapiens
gattatcaggtagaaagacagataac

SEQ ID NO: 8752 - DNA, 26 bp, Homo sapiens
attatcaggtagaaagacagataact

SEQ ID NO: 8753 - DNA, 26 bp, Homo sapiens
ttatcaggtagaaagacagataactt

SEQ ID NO: 8754 - DNA, 26 bp, Homo sapiens
tatcaggtagaaagacagataacttg

SEQ ID NO: 8755 - DNA, 26 bp, Homo sapiens
atcaggtagaaagacagataacttgc

SEQ ID NO: 8756 - DNA, 26 bp, Homo sapiens
tcaggtagaaagacagataacttgct

SEQ ID NO: 8757 - DNA, 26 bp, Homo sapiens
caggtagaaagacagataacttgctt

SEQ ID NO: 8758 - DNA, 26 bp, Homo sapiens
aggtagaaagacagataacttgcttg

SEQ ID NO: 8759 - DNA, 26 bp, Homo sapiens
ggtagaaagacagataacttgcttgt

SEQ ID NO: 8760 - DNA, 26 bp, Homo sapiens
gtagaaagacagataacttgcttgtg

SEQ ID NO: 8761 - DNA, 26 bp, Homo sapiens
tagaaagacagataacttgcttgtgg

SEQ ID NO: 8762 - DNA, 26 bp, Homo sapiens
agaaagacagataacttgcttgtgga

SEQ ID NO: 8763 - DNA, 26 bp, Homo sapiens
gaaagacagataacttgcttgtggat

SEQ ID NO: 8764 - DNA, 26 bp, Homo sapiens
aaagacagataacttgcttgtggata

SEQ ID NO: 8765 - DNA, 26 bp, Homo sapiens
aagacagataacttgcttgtggatat

SEQ ID NO: 8766 - DNA, 26 bp, Homo sapiens
agacagataacttgcttgtggatatg

SEQ ID NO: 8767 - DNA, 26 bp, Homo sapiens
gacagataacttgcttgtggatatgt

SEQ ID NO: 8768 - DNA, 26 bp, Homo sapiens
acagataacttgcttgtggatatgtt

SEQ ID NO: 8769 - DNA, 26 bp, Homo sapiens
cagataacttgcttgtggatatgttg

SEQ ID NO: 8770 - DNA, 26 bp, Homo sapiens
agataacttgcttgtggatatgttgg

SEQ ID NO: 8771 - DNA, 26 bp, Homo sapiens
gataacttgcttgtggatatgttgga

SEQ ID NO: 8772 - DNA, 26 bp, Homo sapiens
ataacttgcttgtggatatgttggat

SEQ ID NO: 8773 - DNA, 26 bp, Homo sapiens
taacttgcttgtggatatgttggatt

SEQ ID NO: 8774 - DNA, 26 bp, Homo sapiens
aacttgcttgtggatatgttggattc

SEQ ID NO: 8775 - DNA, 26 bp, Homo sapiens
acttgcttgtggatatgttggattca

SEQ ID NO: 8776 - DNA, 26 bp, Homo sapiens
cttgcttgtggatatgttggattcag

SEQ ID NO: 8777 - DNA, 26 bp, Homo sapiens
ttgcttgtggatatgttggattcagt

SEQ ID NO: 8778 - DNA, 26 bp, Homo sapiens
tgcttgtggatatgttggattcagtg

SEQ ID NO: 8779 - DNA, 26 bp, Homo sapiens
gcttgtggatatgttggattcagtga

SEQ ID NO: 8780 - DNA, 26 bp, Homo sapiens
cttgtggatatgttggattcagtgag

SEQ ID NO: 8781 - DNA, 26 bp, Homo sapiens
ttgtggatatgttggattcagtgaga

SEQ ID NO: 8782 - DNA, 26 bp, Homo sapiens
tgtggatatgttggattcagtgagag

SEQ ID NO: 8783 - DNA, 26 bp, Homo sapiens
gtggatatgttggattcagtgagagg

SEQ ID NO: 8784 - DNA, 26 bp, Homo sapiens
tggatatgttggattcagtgagaggc

SEQ ID NO: 8785 - DNA, 26 bp, Homo sapiens
ggatatgttggattcagtgagaggct

SEQ ID NO: 8786 - DNA, 26 bp, Homo sapiens
gatatgttggattcagtgagaggcta

SEQ ID NO: 8787 - DNA, 26 bp, Homo sapiens
atatgttggattcagtgagaggctac

SEQ ID NO: 8788 - DNA, 26 bp, Homo sapiens
tatgttggattcagtgagaggctaca

SEQ ID NO: 8789 - DNA, 26 bp, Homo sapiens
atgttggattcagtgagaggctacaa

SEQ ID NO: 8790 - DNA, 26 bp, Homo sapiens
tgttggattcagtgagaggctacaaa

SEQ ID NO: 8791 - DNA, 26 bp, Homo sapiens
gttggattcagtgagaggctacaaaa

SEQ ID NO: 8792 - DNA, 26 bp, Homo sapiens
ttggattcagtgagaggctacaaaaa

SEQ ID NO: 8793 - DNA, 26 bp, Homo sapiens
tggattcagtgagaggctacaaaaat

SEQ ID NO: 8794 - DNA, 26 bp, Homo sapiens
ggattcagtgagaggctacaaaaatc

SEQ ID NO: 8795 - DNA, 26 bp, Homo sapiens
gattcagtgagaggctacaaaaatca

SEQ ID NO: 8796 - DNA, 26 bp, Homo sapiens
attcagtgagaggctacaaaaatcaa

SEQ ID NO: 8797 - DNA, 26 bp, Homo sapiens
ttcagtgagaggctacaaaaatcaat

SEQ ID NO: 8798 - DNA, 26 bp, Homo sapiens
tcagtgagaggctacaaaaatcaatc

SEQ ID NO: 8799 - DNA, 26 bp, Homo sapiens
cagtgagaggctacaaaaatcaatct

SEQ ID NO: 8800 - DNA, 26 bp, Homo sapiens
agtgagaggctacaaaaatcaatctg

SEQ ID NO: 8801 - DNA, 26 bp, Homo sapiens
gtgagaggctacaaaaatcaatctga

SEQ ID NO: 8802 - DNA, 26 bp, Homo sapiens
tgagaggctacaaaaatcaatctgat

SEQ ID NO: 8803 - DNA, 26 bp, Homo sapiens
gagaggctacaaaaatcaatctgata

SEQ ID NO: 8804 - DNA, 26 bp, Homo sapiens
agaggctacaaaaatcaatctgatac

SEQ ID NO: 8805 - DNA, 26 bp, Homo sapiens
gaggctacaaaaatcaatctgataca

SEQ ID NO: 8806 - DNA, 26 bp, Homo sapiens
aggctacaaaaatcaatctgatacat

SEQ ID NO: 8807 - DNA, 26 bp, Homo sapiens
ggctacaaaaatcaatctgatacatg

SEQ ID NO: 8808 - DNA, 26 bp, Homo sapiens
gctacaaaaatcaatctgatacatgg

SEQ ID NO: 8809 - DNA, 26 bp, Homo sapiens
ctacaaaaatcaatctgatacatggg

SEQ ID NO: 8810 - DNA, 26 bp, Homo sapiens
tacaaaaatcaatctgatacatgggc

SEQ ID NO: 8811 - DNA, 26 bp, Homo sapiens
acaaaaatcaatctgatacatgggcc

SEQ ID NO: 8812 - DNA, 26 bp, Homo sapiens
caaaaatcaatctgatacatgggcca

SEQ ID NO: 8813 - DNA, 26 bp, Homo sapiens
aaaaatcaatctgatacatgggccat

SEQ ID NO: 8814 - DNA, 26 bp, Homo sapiens
aaaatcaatctgatacatgggccata

SEQ ID NO: 8815 - DNA, 26 bp, Homo sapiens
aaatcaatctgatacatgggccatat

SEQ ID NO: 8816 - DNA, 26 bp, Homo sapiens
aatcaatctgatacatgggccatatt

SEQ ID NO: 8817 - DNA, 26 bp, Homo sapiens
atcaatctgatacatgggccatattg

SEQ ID NO: 8818 - DNA, 26 bp, Homo sapiens
tcaatctgatacatgggccatattgg

SEQ ID NO: 8819 - DNA, 26 bp, Homo sapiens
caatctgatacatgggccatattggt

SEQ ID NO: 8820 - DNA, 26 bp, Homo sapiens
aatctgatacatgggccatattggta

SEQ ID NO: 8821 - DNA, 26 bp, Homo sapiens
atctgatacatgggccatattggtaa

SEQ ID NO: 8822 - DNA, 26 bp, Homo sapiens
tctgatacatgggccatattggtaac

SEQ ID NO: 8823 - DNA, 26 bp, Homo sapiens
ctgatacatgggccatattggtaact

SEQ ID NO: 8824 - DNA, 26 bp, Homo sapiens
tgatacatgggccatattggtaacta

SEQ ID NO: 8825 - DNA, 26 bp, Homo sapiens
gatacatgggccatattggtaactat

SEQ ID NO: 8826 - DNA, 26 bp, Homo sapiens
atacatgggccatattggtaactatc

SEQ ID NO: 8827 - DNA, 26 bp, Homo sapiens
tacatgggccatattggtaactatcc

SEQ ID NO: 8828 - DNA, 26 bp, Homo sapiens
acatgggccatattggtaactatcct

SEQ ID NO: 8829 - DNA, 26 bp, Homo sapiens
catgggccatattggtaactatcctg

SEQ ID NO: 8830 - DNA, 26 bp, Homo sapiens
atgggccatattggtaactatcctgt

SEQ ID NO: 8831 - DNA, 26 bp, Homo sapiens
tgggccatattggtaactatcctgtt

SEQ ID NO: 8832 - DNA, 26 bp, Homo sapiens
gggccatattggtaactatcctgttt

SEQ ID NO: 8833 - DNA, 26 bp, Homo sapiens
ggccatattggtaactatcctgtttg

SEQ ID NO: 8834 - DNA, 26 bp, Homo sapiens
gccatattggtaactatcctgtttgt

SEQ ID NO: 8835 - DNA, 26 bp, Homo sapiens
ccatattggtaactatcctgtttgtt

SEQ ID NO: 8836 - DNA, 26 bp, Homo sapiens
catattggtaactatcctgtttgttt

SEQ ID NO: 8837 - DNA, 26 bp, Homo sapiens
atattggtaactatcctgtttgtttt

SEQ ID NO: 8838 - DNA, 26 bp, Homo sapiens
tattggtaactatcctgtttgttttg

SEQ ID NO: 8839 - DNA, 26 bp, Homo sapiens
attggtaactatcctgtttgttttgc

SEQ ID NO: 8840 - DNA, 26 bp, Homo sapiens
ttggtaactatcctgtttgttttgca

SEQ ID NO: 8841 - DNA, 26 bp, Homo sapiens
tggtaactatcctgtttgttttgcag

SEQ ID NO: 8842 - DNA, 26 bp, Homo sapiens
ggtaactatcctgtttgttttgcagt

SEQ ID NO: 8843 - DNA, 26 bp, Homo sapiens
gtaactatcctgtttgttttgcagtt

SEQ ID NO: 8844 - DNA, 26 bp, Homo sapiens
taactatcctgtttgttttgcagttc

SEQ ID NO: 8845 - DNA, 26 bp, Homo sapiens
aactatcctgtttgttttgcagttct

SEQ ID NO: 8846 - DNA, 26 bp, Homo sapiens
actatcctgtttgttttgcagttctg

SEQ ID NO: 8847 - DNA, 26 bp, Homo sapiens
ctatcctgtttgttttgcagttctga

SEQ ID NO: 8848 - DNA, 26 bp, Homo sapiens
tatcctgtttgttttgcagttctgaa

SEQ ID NO: 8849 - DNA, 26 bp, Homo sapiens
atcctgtttgttttgcagttctgaaa

SEQ ID NO: 8850 - DNA, 26 bp, Homo sapiens
tcctgtttgttttgcagttctgaaac

SEQ ID NO: 8851 - DNA, 26 bp, Homo sapiens
cctgtttgttttgcagttctgaaaca

SEQ ID NO: 8852 - DNA, 26 bp, Homo sapiens
ctgtttgttttgcagttctgaaacat

SEQ ID NO: 8853 - DNA, 26 bp, Homo sapiens
tgtttgttttgcagttctgaaacata

SEQ ID NO: 8854 - DNA, 26 bp, Homo sapiens
gtttgttttgcagttctgaaacataa

SEQ ID NO: 8855 - DNA, 26 bp, Homo sapiens
tttgttttgcagttctgaaacataaa

SEQ ID NO: 8856 - DNA, 26 bp, Homo sapiens
ttgttttgcagttctgaaacataaac

SEQ ID NO: 8857 - DNA, 26 bp, Homo sapiens
tgttttgcagttctgaaacataaact

SEQ ID NO: 8858 - DNA, 26 bp, Homo sapiens
gttttgcagttctgaaacataaactt

SEQ ID NO: 8859 - DNA, 26 bp, Homo sapiens
ttttgcagttctgaaacataaactta

SEQ ID NO: 8860 - DNA, 26 bp, Homo sapiens
tttgcagttctgaaacataaacttag

SEQ ID NO: 8861 - DNA, 26 bp, Homo sapiens
ttgcagttctgaaacataaacttagt

SEQ ID NO: 8862 - DNA, 26 bp, Homo sapiens
tgcagttctgaaacataaacttagtt

SEQ ID NO: 8863 - DNA, 26 bp, Homo sapiens
gcagttctgaaacataaacttagtta

SEQ ID NO: 8864 - DNA, 26 bp, Homo sapiens
cagttctgaaacataaacttagttac

SEQ ID NO: 8865 - DNA, 26 bp, Homo sapiens
agttctgaaacataaacttagttact

SEQ ID NO: 8866 - DNA, 26 bp, Homo sapiens
gttctgaaacataaacttagttactg

SEQ ID NO: 8867 - DNA, 26 bp, Homo sapiens
ttctgaaacataaacttagttactgc

SEQ ID NO: 8868 - DNA, 26 bp, Homo sapiens
tctgaaacataaacttagttactgcc

SEQ ID NO: 8869 - DNA, 26 bp, Homo sapiens
ctgaaacataaacttagttactgcct

SEQ ID NO: 8870 - DNA, 26 bp, Homo sapiens
tgaaacataaacttagttactgcctt

SEQ ID NO: 8871 - DNA, 26 bp, Homo sapiens
gaaacataaacttagttactgccttt

SEQ ID NO: 8872 - DNA, 26 bp, Homo sapiens
aaacataaacttagttactgccttta

SEQ ID NO: 8873 - DNA, 26 bp, Homo sapiens
aacataaacttagttactgcctttac

SEQ ID NO: 8874 - DNA, 26 bp, Homo sapiens
acataaacttagttactgcctttacc

SEQ ID NO: 8875 - DNA, 26 bp, Homo sapiens
cataaacttagttactgcctttaccc

SEQ ID NO: 8876 - DNA, 26 bp, Homo sapiens
ataaacttagttactgcctttaccca

SEQ ID NO: 8877 - DNA, 26 bp, Homo sapiens
taaacttagttactgcctttacccaa

SEQ ID NO: 8878 - DNA, 26 bp, Homo sapiens
aaacttagttactgcctttacccaaa

SEQ ID NO: 8879 - DNA, 26 bp, Homo sapiens
aacttagttactgcctttacccaaac

SEQ ID NO: 8880 - DNA, 26 bp, Homo sapiens
acttagttactgcctttacccaaaca

SEQ ID NO: 8881 - DNA, 26 bp, Homo sapiens
cttagttactgcctttacccaaacaa

SEQ ID NO: 8882 - DNA, 26 bp, Homo sapiens
ttagttactgcctttacccaaacaag

SEQ ID NO: 8883 - DNA, 26 bp, Homo sapiens
tagttactgcctttacccaaacaagg

SEQ ID NO: 8884 - DNA, 26 bp, Homo sapiens
agttactgcctttacccaaacaaggc

SEQ ID NO: 8885 - DNA, 26 bp, Homo sapiens
gttactgcctttacccaaacaaggca

SEQ ID NO: 8886 - DNA, 26 bp, Homo sapiens
ttactgcctttacccaaacaaggcag

SEQ ID NO: 8887 - DNA, 26 bp, Homo sapiens
tactgcctttacccaaacaaggcaga

SEQ ID NO: 8888 - DNA, 26 bp, Homo sapiens
actgcctttacccaaacaaggcagag

SEQ ID NO: 8889 - DNA, 26 bp, Homo sapiens
ctgcctttacccaaacaaggcagaga

SEQ ID NO: 8890 - DNA, 26 bp, Homo sapiens
tgcctttacccaaacaaggcagagag

SEQ ID NO: 8891 - DNA, 26 bp, Homo sapiens
gcctttacccaaacaaggcagagagt

SEQ ID NO: 8892 - DNA, 26 bp, Homo sapiens
cctttacccaaacaaggcagagagtt

SEQ ID NO: 8893 - DNA, 26 bp, Homo sapiens
ctttacccaaacaaggcagagagtta

SEQ ID NO: 8894 - DNA, 26 bp, Homo sapiens
tttacccaaacaaggcagagagttaa

SEQ ID NO: 8895 - DNA, 26 bp, Homo sapiens
ttacccaaacaaggcagagagttaaa

SEQ ID NO: 8896 - DNA, 26 bp, Homo sapiens
tacccaaacaaggcagagagttaaaa

SEQ ID NO: 8897 - DNA, 26 bp, Homo sapiens
acccaaacaaggcagagagttaaaag

SEQ ID NO: 8898 - DNA, 26 bp, Homo sapiens
cccaaacaaggcagagagttaaaagt

SEQ ID NO: 8899 - DNA, 26 bp, Homo sapiens
ccaaacaaggcagagagttaaaagtg

SEQ ID NO: 8900 - DNA, 26 bp, Homo sapiens
caaacaaggcagagagttaaaagtga

SEQ ID NO: 8901 - DNA, 26 bp, Homo sapiens
aaacaaggcagagagttaaaagtgag

SEQ ID NO: 8902 - DNA, 26 bp, Homo sapiens
aacaaggcagagagttaaaagtgagg

SEQ ID NO: 8903 - DNA, 26 bp, Homo sapiens
acaaggcagagagttaaaagtgaggt

SEQ ID NO: 8904 - DNA, 26 bp, Homo sapiens
caaggcagagagttaaaagtgaggtt

SEQ ID NO: 8905 - DNA, 26 bp, Homo sapiens
aaggcagagagttaaaagtgaggttt

SEQ ID NO: 8906 - DNA, 26 bp, Homo sapiens
aggcagagagttaaaagtgaggtttt

SEQ ID NO: 8907 - DNA, 26 bp, Homo sapiens
ggcagagagttaaaagtgaggttttt

SEQ ID NO: 8908 - DNA, 26 bp, Homo sapiens
gcagagagttaaaagtgaggtttttt

SEQ ID NO: 8909 - DNA, 26 bp, Homo sapiens
cagagagttaaaagtgaggttttttt

SEQ ID NO: 8910 - DNA, 26 bp, Homo sapiens
agagagttaaaagtgaggtttttttt

SEQ ID NO: 8911 - DNA, 26 bp, Homo sapiens
gagagttaaaagtgaggttttttttt

SEQ ID NO: 8912 - DNA, 26 bp, Homo sapiens
agagttaaaagtgaggtttttttttt

SEQ ID NO: 8913 - DNA, 26 bp, Homo sapiens
gagttaaaagtgaggttttttttttt

SEQ ID NO: 8914 - DNA, 26 bp, Homo sapiens
agttaaaagtgaggttttttttttta

SEQ ID NO: 8915 - DNA, 26 bp, Homo sapiens
gttaaaagtgaggtttttttttttac

SEQ ID NO: 8916 - DNA, 26 bp, Homo sapiens
ttaaaagtgaggtttttttttttaca

SEQ ID NO: 8917 - DNA, 26 bp, Homo sapiens
taaaagtgaggtttttttttttacag

SEQ ID NO: 8918 - DNA, 26 bp, Homo sapiens
aaaagtgaggtttttttttttacagg

SEQ ID NO: 8919 - DNA, 26 bp, Homo sapiens
aaagtgaggtttttttttttacaggt

SEQ ID NO: 8920 - DNA, 26 bp, Homo sapiens
aagtgaggtttttttttttacaggtg

SEQ ID NO: 8921 - DNA, 26 bp, Homo sapiens
agtgaggtttttttttttacaggtgt

SEQ ID NO: 8922 - DNA, 26 bp, Homo sapiens
gtgaggtttttttttttacaggtgtg

SEQ ID NO: 8923 - DNA, 26 bp, Homo sapiens
tgaggtttttttttttacaggtgtgg

SEQ ID NO: 8924 - DNA, 26 bp, Homo sapiens
gaggtttttttttttacaggtgtggc

SEQ ID NO: 8925 - DNA, 26 bp, Homo sapiens
aggtttttttttttacaggtgtggca

SEQ ID NO: 8926 - DNA, 26 bp, Homo sapiens
ggtttttttttttacaggtgtggcaa

SEQ ID NO: 8927 - DNA, 26 bp, Homo sapiens
gtttttttttttacaggtgtggcaaa

SEQ ID NO: 8928 - DNA, 26 bp, Homo sapiens
tttttttttttacaggtgtggcaaaa

SEQ ID NO: 8929 - DNA, 26 bp, Homo sapiens
ttttttttttacaggtgtggcaaaat

SEQ ID NO: 8930 - DNA, 26 bp, Homo sapiens
tttttttttacaggtgtggcaaaata

SEQ ID NO: 8931 - DNA, 26 bp, Homo sapiens
ttttttttacaggtgtggcaaaatac

SEQ ID NO: 8932 - DNA, 26 bp, Homo sapiens
tttttttacaggtgtggcaaaatact

SEQ ID NO: 8933 - DNA, 26 bp, Homo sapiens
ttttttacaggtgtggcaaaatactt

SEQ ID NO: 8934 - DNA, 26 bp, Homo sapiens
tttttacaggtgtggcaaaatactta

SEQ ID NO: 8935 - DNA, 26 bp, Homo sapiens
ttttacaggtgtggcaaaatacttat

SEQ ID NO: 8936 - DNA, 26 bp, Homo sapiens
tttacaggtgtggcaaaatacttatt

SEQ ID NO: 8937 - DNA, 26 bp, Homo sapiens
ttacaggtgtggcaaaatacttatta

SEQ ID NO: 8938 - DNA, 26 bp, Homo sapiens
tacaggtgtggcaaaatacttattac

SEQ ID NO: 8939 - DNA, 26 bp, Homo sapiens
acaggtgtggcaaaatacttattaca

SEQ ID NO: 8940 - DNA, 26 bp, Homo sapiens
caggtgtggcaaaatacttattacaa

SEQ ID NO: 8941 - DNA, 26 bp, Homo sapiens
aggtgtggcaaaatacttattacaaa

SEQ ID NO: 8942 - DNA, 26 bp, Homo sapiens
ggtgtggcaaaatacttattacaaag

SEQ ID NO: 8943 - DNA, 26 bp, Homo sapiens
gtgtggcaaaatacttattacaaaga

SEQ ID NO: 8944 - DNA, 26 bp, Homo sapiens
tgtggcaaaatacttattacaaagaa

SEQ ID NO: 8945 - DNA, 26 bp, Homo sapiens
gtggcaaaatacttattacaaagaaa

SEQ ID NO: 8946 - DNA, 26 bp, Homo sapiens
tggcaaaatacttattacaaagaaag

SEQ ID NO: 8947 - DNA, 26 bp, Homo sapiens
ggcaaaatacttattacaaagaaagc

SEQ ID NO: 8948 - DNA, 26 bp, Homo sapiens
gcaaaatacttattacaaagaaagca

SEQ ID NO: 8949 - DNA, 26 bp, Homo sapiens
caaaatacttattacaaagaaagcaa

SEQ ID NO: 8950 - DNA, 26 bp, Homo sapiens
aaaatacttattacaaagaaagcaac

SEQ ID NO: 8951 - DNA, 26 bp, Homo sapiens
aaatacttattacaaagaaagcaact

SEQ ID NO: 8952 - DNA, 26 bp, Homo sapiens
aatacttattacaaagaaagcaactg

SEQ ID NO: 8953 - DNA, 26 bp, Homo sapiens
atacttattacaaagaaagcaactgc

SEQ ID NO: 8954 - DNA, 26 bp, Homo sapiens
tacttattacaaagaaagcaactgca

SEQ ID NO: 8955 - DNA, 26 bp, Homo sapiens
acttattacaaagaaagcaactgcaa

SEQ ID NO: 8956 - DNA, 26 bp, Homo sapiens
cttattacaaagaaagcaactgcaac

SEQ ID NO: 8957 - DNA, 26 bp, Homo sapiens
ttattacaaagaaagcaactgcaacc

SEQ ID NO: 8958 - DNA, 26 bp, Homo sapiens
tattacaaagaaagcaactgcaaccc

SEQ ID NO: 8959 - DNA, 26 bp, Homo sapiens
attacaaagaaagcaactgcaaccct

SEQ ID NO: 8960 - DNA, 26 bp, Homo sapiens
ttacaaagaaagcaactgcaacccta

SEQ ID NO: 8961 - DNA, 26 bp, Homo sapiens
tacaaagaaagcaactgcaaccctag

SEQ ID NO: 8962 - DNA, 26 bp, Homo sapiens
acaaagaaagcaactgcaaccctaga

SEQ ID NO: 8963 - DNA, 26 bp, Homo sapiens
caaagaaagcaactgcaaccctagag

SEQ ID NO: 8964 - DNA, 26 bp, Homo sapiens
aaagaaagcaactgcaaccctagaga

SEQ ID NO: 8965 - DNA, 26 bp, Homo sapiens
aagaaagcaactgcaaccctagagag

SEQ ID NO: 8966 - DNA, 26 bp, Homo sapiens
agaaagcaactgcaaccctagagagg

SEQ ID NO: 8967 - DNA, 26 bp, Homo sapiens
gaaagcaactgcaaccctagagaggg

SEQ ID NO: 8968 - DNA, 26 bp, Homo sapiens
aaagcaactgcaaccctagagagggg

SEQ ID NO: 8969 - DNA, 26 bp, Homo sapiens
aagcaactgcaaccctagagaggggt

SEQ ID NO: 8970 - DNA, 26 bp, Homo sapiens
agcaactgcaaccctagagaggggta

SEQ ID NO: 8971 - DNA, 26 bp, Homo sapiens
gcaactgcaaccctagagaggggtaa

SEQ ID NO: 8972 - DNA, 26 bp, Homo sapiens
caactgcaaccctagagaggggtaag

SEQ ID NO: 8973 - DNA, 26 bp, Homo sapiens
aactgcaaccctagagaggggtaagc

SEQ ID NO: 8974 - DNA, 26 bp, Homo sapiens
actgcaaccctagagaggggtaagcc

SEQ ID NO: 8975 - DNA, 26 bp, Homo sapiens
ctgcaaccctagagaggggtaagcct

SEQ ID NO: 8976 - DNA, 26 bp, Homo sapiens
tgcaaccctagagaggggtaagcctt

SEQ ID NO: 8977 - DNA, 26 bp, Homo sapiens
gcaaccctagagaggggtaagccttc

SEQ ID NO: 8978 - DNA, 26 bp, Homo sapiens
caaccctagagaggggtaagccttct

SEQ ID NO: 8979 - DNA, 26 bp, Homo sapiens
aaccctagagaggggtaagccttctc

SEQ ID NO: 8980 - DNA, 26 bp, Homo sapiens
accctagagaggggtaagccttctct

SEQ ID NO: 8981 - DNA, 26 bp, Homo sapiens
ccctagagaggggtaagccttctctg

SEQ ID NO: 8982 - DNA, 26 bp, Homo sapiens
cctagagaggggtaagccttctctgg

SEQ ID NO: 8983 - DNA, 26 bp, Homo sapiens
ctagagaggggtaagccttctctggg

SEQ ID NO: 8984 - DNA, 26 bp, Homo sapiens
tagagaggggtaagccttctctgggc

SEQ ID NO: 8985 - DNA, 26 bp, Homo sapiens
agagaggggtaagccttctctgggca

SEQ ID NO: 8986 - DNA, 26 bp, Homo sapiens
gagaggggtaagccttctctgggcaa

SEQ ID NO: 8987 - DNA, 26 bp, Homo sapiens
agaggggtaagccttctctgggcaat

SEQ ID NO: 8988 - DNA, 26 bp, Homo sapiens
gaggggtaagccttctctgggcaata

SEQ ID NO: 8989 - DNA, 26 bp, Homo sapiens
aggggtaagccttctctgggcaatag

SEQ ID NO: 8990 - DNA, 26 bp, Homo sapiens
ggggtaagccttctctgggcaatagt

SEQ ID NO: 8991 - DNA, 26 bp, Homo sapiens
gggtaagccttctctgggcaatagtc

SEQ ID NO: 8992 - DNA, 26 bp, Homo sapiens
ggtaagccttctctgggcaatagtca

SEQ ID NO: 8993 - DNA, 26 bp, Homo sapiens
gtaagccttctctgggcaatagtcat

SEQ ID NO: 8994 - DNA, 26 bp, Homo sapiens
taagccttctctgggcaatagtcatg

SEQ ID NO: 8995 - DNA, 26 bp, Homo sapiens
aagccttctctgggcaatagtcatgg

SEQ ID NO: 8996 - DNA, 26 bp, Homo sapiens
agccttctctgggcaatagtcatgga

SEQ ID NO: 8997 - DNA, 26 bp, Homo sapiens
gccttctctgggcaatagtcatggac

SEQ ID NO: 8998 - DNA, 26 bp, Homo sapiens
ccttctctgggcaatagtcatggaca

SEQ ID NO: 8999 - DNA, 26 bp, Homo sapiens
cttctctgggcaatagtcatggacat

SEQ ID NO: 9000 - DNA, 26 bp, Homo sapiens
ttctctgggcaatagtcatggacatt

SEQ ID NO: 9001 - DNA, 26 bp, Homo sapiens
tctctgggcaatagtcatggacattt

SEQ ID NO: 9002 - DNA, 26 bp, Homo sapiens
ctctgggcaatagtcatggacattta

SEQ ID NO: 9003 - DNA, 26 bp, Homo sapiens
tctgggcaatagtcatggacatttac

SEQ ID NO: 9004 - DNA, 26 bp, Homo sapiens
ctgggcaatagtcatggacatttaca

SEQ ID NO: 9005 - DNA, 26 bp, Homo sapiens
tgggcaatagtcatggacatttacag

SEQ ID NO: 9006 - DNA, 26 bp, Homo sapiens
gggcaatagtcatggacatttacaga

SEQ ID NO: 9007 - DNA, 26 bp, Homo sapiens
ggcaatagtcatggacatttacagag

SEQ ID NO: 9008 - DNA, 26 bp, Homo sapiens
gcaatagtcatggacatttacagagg

SEQ ID NO: 9009 - DNA, 26 bp, Homo sapiens
caatagtcatggacatttacagaggg

SEQ ID NO: 9010 - DNA, 26 bp, Homo sapiens
aatagtcatggacatttacagagggg

SEQ ID NO: 9011 - DNA, 26 bp, Homo sapiens
atagtcatggacatttacagagggga

SEQ ID NO: 9012 - DNA, 26 bp, Homo sapiens
tagtcatggacatttacagaggggaa

SEQ ID NO: 9013 - DNA, 26 bp, Homo sapiens
agtcatggacatttacagaggggaag

SEQ ID NO: 9014 - DNA, 26 bp, Homo sapiens
gtcatggacatttacagaggggaagg

SEQ ID NO: 9015 - DNA, 26 bp, Homo sapiens
tcatggacatttacagaggggaagga

SEQ ID NO: 9016 - DNA, 26 bp, Homo sapiens
catggacatttacagaggggaaggaa

SEQ ID NO: 9017 - DNA, 26 bp, Homo sapiens
atggacatttacagaggggaaggaag

SEQ ID NO: 9018 - DNA, 26 bp, Homo sapiens
tggacatttacagaggggaaggaagt

SEQ ID NO: 9019 - DNA, 26 bp, Homo sapiens
ggacatttacagaggggaaggaagta

SEQ ID NO: 9020 - DNA, 26 bp, Homo sapiens
gacatttacagaggggaaggaagtaa

SEQ ID NO: 9021 - DNA, 26 bp, Homo sapiens
acatttacagaggggaaggaagtaaa

SEQ ID NO: 9022 - DNA, 26 bp, Homo sapiens
catttacagaggggaaggaagtaaac

SEQ ID NO: 9023 - DNA, 26 bp, Homo sapiens
atttacagaggggaaggaagtaaacg

SEQ ID NO: 9024 - DNA, 26 bp, Homo sapiens
tttacagaggggaaggaagtaaacgt

SEQ ID NO: 9025 - DNA, 26 bp, Homo sapiens
ttacagaggggaaggaagtaaacgtt

SEQ ID NO: 9026 - DNA, 26 bp, Homo sapiens
tacagaggggaaggaagtaaacgtta

SEQ ID NO: 9027 - DNA, 26 bp, Homo sapiens
acagaggggaaggaagtaaacgttaa

SEQ ID NO: 9028 - DNA, 26 bp, Homo sapiens
cagaggggaaggaagtaaacgttaat

SEQ ID NO: 9029 - DNA, 26 bp, Homo sapiens
agaggggaaggaagtaaacgttaata

SEQ ID NO: 9030 - DNA, 26 bp, Homo sapiens
gaggggaaggaagtaaacgttaataa

SEQ ID NO: 9031 - DNA, 26 bp, Homo sapiens
aggggaaggaagtaaacgttaataaa

SEQ ID NO: 9032 - DNA, 26 bp, Homo sapiens
ggggaaggaagtaaacgttaataaat

SEQ ID NO: 9033 - DNA, 26 bp, Homo sapiens
gggaaggaagtaaacgttaataaata

SEQ ID NO: 9034 - DNA, 26 bp, Homo sapiens
ggaaggaagtaaacgttaataaataa

SEQ ID NO: 9035 - DNA, 26 bp, Homo sapiens
gaaggaagtaaacgttaataaataat

SEQ ID NO: 9036 - DNA, 26 bp, Homo sapiens
aaggaagtaaacgttaataaataatt

SEQ ID NO: 9037 - DNA, 26 bp, Homo sapiens
aggaagtaaacgttaataaataattc

SEQ ID NO: 9038 - DNA, 26 bp, Homo sapiens
ggaagtaaacgttaataaataattct

SEQ ID NO: 9039 - DNA, 26 bp, Homo sapiens
gaagtaaacgttaataaataattctg

SEQ ID NO: 9040 - DNA, 26 bp, Homo sapiens
aagtaaacgttaataaataattctgt

SEQ ID NO: 9041 - DNA, 26 bp, Homo sapiens
agtaaacgttaataaataattctgta

SEQ ID NO: 9042 - DNA, 26 bp, Homo sapiens
gtaaacgttaataaataattctgtaa

SEQ ID NO: 9043 - DNA, 26 bp, Homo sapiens
taaacgttaataaataattctgtaaa

SEQ ID NO: 9044 - DNA, 26 bp, Homo sapiens
aaacgttaataaataattctgtaaat

SEQ ID NO: 9045 - DNA, 26 bp, Homo sapiens
aacgttaataaataattctgtaaata

SEQ ID NO: 9046 - DNA, 26 bp, Homo sapiens
acgttaataaataattctgtaaataa

SEQ ID NO: 9047 - DNA, 26 bp, Homo sapiens
cgttaataaataattctgtaaataaa

SEQ ID NO: 9048 - DNA, 26 bp, Homo sapiens
gttaataaataattctgtaaataaat

SEQ ID NO: 9049 - DNA, 26 bp, Homo sapiens
ttaataaataattctgtaaataaatg

SEQ ID NO: 9050 - DNA, 26 bp, Homo sapiens
taataaataattctgtaaataaatgc

SEQ ID NO: 9051 - DNA, 26 bp, Homo sapiens
aataaataattctgtaaataaatgct

SEQ ID NO: 9052 - DNA, 26 bp, Homo sapiens
ataaataattctgtaaataaatgcta

SEQ ID NO: 9053 - DNA, 26 bp, Homo sapiens
taaataattctgtaaataaatgctag

SEQ ID NO: 9054 - DNA, 26 bp, Homo sapiens
aaataattctgtaaataaatgctagt

SEQ ID NO: 9055 - DNA, 26 bp, Homo sapiens
aataattctgtaaataaatgctagta

SEQ ID NO: 9056 - DNA, 26 bp, Homo sapiens
ataattctgtaaataaatgctagtac

SEQ ID NO: 9057 - DNA, 26 bp, Homo sapiens
taattctgtaaataaatgctagtaca

SEQ ID NO: 9058 - DNA, 26 bp, Homo sapiens
aattctgtaaataaatgctagtacat

SEQ ID NO: 9059 - DNA, 26 bp, Homo sapiens
attctgtaaataaatgctagtacatc

SEQ ID NO: 9060 - DNA, 26 bp, Homo sapiens
ttctgtaaataaatgctagtacatca

SEQ ID NO: 9061 - DNA, 26 bp, Homo sapiens
tctgtaaataaatgctagtacatcat

SEQ ID NO: 9062 - DNA, 26 bp, Homo sapiens
ctgtaaataaatgctagtacatcata

SEQ ID NO: 9063 - DNA, 26 bp, Homo sapiens
tgtaaataaatgctagtacatcataa

SEQ ID NO: 9064 - DNA, 26 bp, Homo sapiens
gtaaataaatgctagtacatcataat

SEQ ID NO: 9065 - DNA, 26 bp, Homo sapiens
taaataaatgctagtacatcataata

SEQ ID NO: 9066 - DNA, 26 bp, Homo sapiens
aaataaatgctagtacatcataataa

SEQ ID NO: 9067 - DNA, 26 bp, Homo sapiens
aataaatgctagtacatcataataac

SEQ ID NO: 9068 - DNA, 26 bp, Homo sapiens
ataaatgctagtacatcataataaca

SEQ ID NO: 9069 - DNA, 26 bp, Homo sapiens
taaatgctagtacatcataataacat

SEQ ID NO: 9070 - DNA, 26 bp, Homo sapiens
aaatgctagtacatcataataacata

SEQ ID NO: 9071 - DNA, 26 bp, Homo sapiens
aatgctagtacatcataataacatac

SEQ ID NO: 9072 - DNA, 26 bp, Homo sapiens
atgctagtacatcataataacatacc

SEQ ID NO: 9073 - DNA, 26 bp, Homo sapiens
tgctagtacatcataataacatacca

SEQ ID NO: 9074 - DNA, 26 bp, Homo sapiens
gctagtacatcataataacataccac

SEQ ID NO: 9075 - DNA, 26 bp, Homo sapiens
ctagtacatcataataacataccact

SEQ ID NO: 9076 - DNA, 26 bp, Homo sapiens
tagtacatcataataacataccactt

SEQ ID NO: 9077 - DNA, 26 bp, Homo sapiens
agtacatcataataacataccactta

SEQ ID NO: 9078 - DNA, 26 bp, Homo sapiens
gtacatcataataacataccacttag

SEQ ID NO: 9079 - DNA, 26 bp, Homo sapiens
tacatcataataacataccacttaga

SEQ ID NO: 9080 - DNA, 26 bp, Homo sapiens
acatcataataacataccacttagac

SEQ ID NO: 9081 - DNA, 26 bp, Homo sapiens
catcataataacataccacttagaca

SEQ ID NO: 9082 - DNA, 26 bp, Homo sapiens
atcataataacataccacttagacac

SEQ ID NO: 9083 - DNA, 26 bp, Homo sapiens
tcataataacataccacttagacact

SEQ ID NO: 9084 - DNA, 26 bp, Homo sapiens
cataataacataccacttagacacta

SEQ ID NO: 9085 - DNA, 26 bp, Homo sapiens
ataataacataccacttagacactac

SEQ ID NO: 9086 - DNA, 26 bp, Homo sapiens
taataacataccacttagacactacc

SEQ ID NO: 9087 - DNA, 26 bp, Homo sapiens
aataacataccacttagacactacca

SEQ ID NO: 9088 - DNA, 26 bp, Homo sapiens
ataacataccacttagacactaccat

SEQ ID NO: 9089 - DNA, 26 bp, Homo sapiens
taacataccacttagacactaccatg

SEQ ID NO: 9090 - DNA, 26 bp, Homo sapiens
aacataccacttagacactaccatgg

SEQ ID NO: 9091 - DNA, 26 bp, Homo sapiens
acataccacttagacactaccatggc

SEQ ID NO: 9092 - DNA, 26 bp, Homo sapiens
cataccacttagacactaccatggct

SEQ ID NO: 9093 - DNA, 26 bp, Homo sapiens
ataccacttagacactaccatggctt

SEQ ID NO: 9094 - DNA, 26 bp, Homo sapiens
taccacttagacactaccatggcttt

SEQ ID NO: 9095 - DNA, 26 bp, Homo sapiens
accacttagacactaccatggcttta

SEQ ID NO: 9096 - DNA, 26 bp, Homo sapiens
ccacttagacactaccatggctttac

SEQ ID NO: 9097 - DNA, 26 bp, Homo sapiens
cacttagacactaccatggctttaca

SEQ ID NO: 9098 - DNA, 26 bp, Homo sapiens
acttagacactaccatggctttacag

SEQ ID NO: 9099 - DNA, 26 bp, Homo sapiens
cttagacactaccatggctttacagc

SEQ ID NO: 9100 - DNA, 26 bp, Homo sapiens
ttagacactaccatggctttacagca

SEQ ID NO: 9101 - DNA, 26 bp, Homo sapiens
tagacactaccatggctttacagcag

SEQ ID NO: 9102 - DNA, 26 bp, Homo sapiens
agacactaccatggctttacagcagg

SEQ ID NO: 9103 - DNA, 26 bp, Homo sapiens
gacactaccatggctttacagcaggt

SEQ ID NO: 9104 - DNA, 26 bp, Homo sapiens
acactaccatggctttacagcaggtt

SEQ ID NO: 9105 - DNA, 26 bp, Homo sapiens
cactaccatggctttacagcaggttt

SEQ ID NO: 9106 - DNA, 26 bp, Homo sapiens
actaccatggctttacagcaggtttt

SEQ ID NO: 9107 - DNA, 26 bp, Homo sapiens
ctaccatggctttacagcaggttttc

SEQ ID NO: 9108 - DNA, 26 bp, Homo sapiens
taccatggctttacagcaggttttct

SEQ ID NO: 9109 - DNA, 26 bp, Homo sapiens
accatggctttacagcaggttttctc

SEQ ID NO: 9110 - DNA, 26 bp, Homo sapiens
ccatggctttacagcaggttttctct

SEQ ID NO: 9111 - DNA, 26 bp, Homo sapiens
catggctttacagcaggttttctcta

SEQ ID NO: 9112 - DNA, 26 bp, Homo sapiens
atggctttacagcaggttttctctaa

SEQ ID NO: 9113 - DNA, 26 bp, Homo sapiens
tggctttacagcaggttttctctaat

SEQ ID NO: 9114 - DNA, 26 bp, Homo sapiens
ggctttacagcaggttttctctaatt

SEQ ID NO: 9115 - DNA, 26 bp, Homo sapiens
gctttacagcaggttttctctaattc

SEQ ID NO: 9116 - DNA, 26 bp, Homo sapiens
ctttacagcaggttttctctaattca

SEQ ID NO: 9117 - DNA, 26 bp, Homo sapiens
tttacagcaggttttctctaattcac

SEQ ID NO: 9118 - DNA, 26 bp, Homo sapiens
ttacagcaggttttctctaattcact

SEQ ID NO: 9119 - DNA, 26 bp, Homo sapiens
tacagcaggttttctctaattcactg

SEQ ID NO: 9120 - DNA, 26 bp, Homo sapiens
acagcaggttttctctaattcactgg

SEQ ID NO: 9121 - DNA, 26 bp, Homo sapiens
cagcaggttttctctaattcactgga

SEQ ID NO: 9122 - DNA, 26 bp, Homo sapiens
agcaggttttctctaattcactggaa

SEQ ID NO: 9123 - DNA, 26 bp, Homo sapiens
gcaggttttctctaattcactggaac

SEQ ID NO: 9124 - DNA, 26 bp, Homo sapiens
caggttttctctaattcactggaacc

SEQ ID NO: 9125 - DNA, 26 bp, Homo sapiens
aggttttctctaattcactggaacca

SEQ ID NO: 9126 - DNA, 26 bp, Homo sapiens
ggttttctctaattcactggaaccat

SEQ ID NO: 9127 - DNA, 26 bp, Homo sapiens
gttttctctaattcactggaaccatg

SEQ ID NO: 9128 - DNA, 26 bp, Homo sapiens
ttttctctaattcactggaaccatgc

SEQ ID NO: 9129 - DNA, 26 bp, Homo sapiens
tttctctaattcactggaaccatgct

SEQ ID NO: 9130 - DNA, 26 bp, Homo sapiens
ttctctaattcactggaaccatgcta

SEQ ID NO: 9131 - DNA, 26 bp, Homo sapiens
tctctaattcactggaaccatgctat

SEQ ID NO: 9132 - DNA, 26 bp, Homo sapiens
ctctaattcactggaaccatgctatt

SEQ ID NO: 9133 - DNA, 26 bp, Homo sapiens
tctaattcactggaaccatgctattc

SEQ ID NO: 9134 - DNA, 26 bp, Homo sapiens
ctaattcactggaaccatgctattcc

SEQ ID NO: 9135 - DNA, 26 bp, Homo sapiens
taattcactggaaccatgctattcct

SEQ ID NO: 9136 - DNA, 26 bp, Homo sapiens
aattcactggaaccatgctattcctg

SEQ ID NO: 9137 - DNA, 26 bp, Homo sapiens
attcactggaaccatgctattcctgt

SEQ ID NO: 9138 - DNA, 26 bp, Homo sapiens
ttcactggaaccatgctattcctgta

SEQ ID NO: 9139 - DNA, 26 bp, Homo sapiens
tcactggaaccatgctattcctgtag

SEQ ID NO: 9140 - DNA, 26 bp, Homo sapiens
cactggaaccatgctattcctgtaga

SEQ ID NO: 9141 - DNA, 26 bp, Homo sapiens
actggaaccatgctattcctgtagag

SEQ ID NO: 9142 - DNA, 26 bp, Homo sapiens
ctggaaccatgctattcctgtagagc

SEQ ID NO: 9143 - DNA, 26 bp, Homo sapiens
tggaaccatgctattcctgtagagca

SEQ ID NO: 9144 - DNA, 26 bp, Homo sapiens
ggaaccatgctattcctgtagagcag

SEQ ID NO: 9145 - DNA, 26 bp, Homo sapiens
gaaccatgctattcctgtagagcagc

SEQ ID NO: 9146 - DNA, 26 bp, Homo sapiens
aaccatgctattcctgtagagcagct

SEQ ID NO: 9147 - DNA, 26 bp, Homo sapiens
accatgctattcctgtagagcagctg

SEQ ID NO: 9148 - DNA, 26 bp, Homo sapiens
ccatgctattcctgtagagcagctga

SEQ ID NO: 9149 - DNA, 26 bp, Homo sapiens
catgctattcctgtagagcagctgat

SEQ ID NO: 9150 - DNA, 26 bp, Homo sapiens
atgctattcctgtagagcagctgatt

SEQ ID NO: 9151 - DNA, 26 bp, Homo sapiens
tgctattcctgtagagcagctgattc

SEQ ID NO: 9152 - DNA, 26 bp, Homo sapiens
gctattcctgtagagcagctgattct

SEQ ID NO: 9153 - DNA, 26 bp, Homo sapiens
ctattcctgtagagcagctgattctt

SEQ ID NO: 9154 - DNA, 26 bp, Homo sapiens
tattcctgtagagcagctgattcttt

SEQ ID NO: 9155 - DNA, 26 bp, Homo sapiens
attcctgtagagcagctgattctttg

SEQ ID NO: 9156 - DNA, 26 bp, Homo sapiens
ttcctgtagagcagctgattctttgg

SEQ ID NO: 9157 - DNA, 26 bp, Homo sapiens
tcctgtagagcagctgattctttggt

SEQ ID NO: 9158 - DNA, 26 bp, Homo sapiens
cctgtagagcagctgattctttggtc

SEQ ID NO: 9159 - DNA, 26 bp, Homo sapiens
ctgtagagcagctgattctttggtca

SEQ ID NO: 9160 - DNA, 26 bp, Homo sapiens
tgtagagcagctgattctttggtcat

SEQ ID NO: 9161 - DNA, 26 bp, Homo sapiens
gtagagcagctgattctttggtcata

SEQ ID NO: 9162 - DNA, 26 bp, Homo sapiens
tagagcagctgattctttggtcatag

SEQ ID NO: 9163 - DNA, 26 bp, Homo sapiens
agagcagctgattctttggtcatagt

SEQ ID NO: 9164 - DNA, 26 bp, Homo sapiens
gagcagctgattctttggtcatagta

SEQ ID NO: 9165 - DNA, 26 bp, Homo sapiens
agcagctgattctttggtcatagtac

SEQ ID NO: 9166 - DNA, 26 bp, Homo sapiens
gcagctgattctttggtcatagtacc

SEQ ID NO: 9167 - DNA, 26 bp, Homo sapiens
cagctgattctttggtcatagtacct

SEQ ID NO: 9168 - DNA, 26 bp, Homo sapiens
agctgattctttggtcatagtacctt

SEQ ID NO: 9169 - DNA, 26 bp, Homo sapiens
gctgattctttggtcatagtaccttc

SEQ ID NO: 9170 - DNA, 26 bp, Homo sapiens
ctgattctttggtcatagtaccttca

SEQ ID NO: 9171 - DNA, 26 bp, Homo sapiens
tgattctttggtcatagtaccttcaa

SEQ ID NO: 9172 - DNA, 26 bp, Homo sapiens
gattctttggtcatagtaccttcaac

SEQ ID NO: 9173 - DNA, 26 bp, Homo sapiens
attctttggtcatagtaccttcaaca

SEQ ID NO: 9174 - DNA, 26 bp, Homo sapiens
ttctttggtcatagtaccttcaacaa

SEQ ID NO: 9175 - DNA, 26 bp, Homo sapiens
tctttggtcatagtaccttcaacaaa

SEQ ID NO: 9176 - DNA, 26 bp, Homo sapiens
ctttggtcatagtaccttcaacaaat

SEQ ID NO: 9177 - DNA, 26 bp, Homo sapiens
tttggtcatagtaccttcaacaaata

SEQ ID NO: 9178 - DNA, 26 bp, Homo sapiens
ttggtcatagtaccttcaacaaataa

SEQ ID NO: 9179 - DNA, 26 bp, Homo sapiens
tggtcatagtaccttcaacaaataaa

SEQ ID NO: 9180 - DNA, 26 bp, Homo sapiens
ggtcatagtaccttcaacaaataaac

SEQ ID NO: 9181 - DNA, 26 bp, Homo sapiens
gtcatagtaccttcaacaaataaact

SEQ ID NO: 9182 - DNA, 26 bp, Homo sapiens
tcatagtaccttcaacaaataaacta

SEQ ID NO: 9183 - DNA, 26 bp, Homo sapiens
catagtaccttcaacaaataaactat

SEQ ID NO: 9184 - DNA, 26 bp, Homo sapiens
atagtaccttcaacaaataaactata

SEQ ID NO: 9185 - DNA, 26 bp, Homo sapiens
tagtaccttcaacaaataaactatag

SEQ ID NO: 9186 - DNA, 26 bp, Homo sapiens
agtaccttcaacaaataaactataga

SEQ ID NO: 9187 - DNA, 26 bp, Homo sapiens
gtaccttcaacaaataaactatagaa

SEQ ID NO: 9188 - DNA, 26 bp, Homo sapiens
taccttcaacaaataaactatagaac

SEQ ID NO: 9189 - DNA, 26 bp, Homo sapiens
accttcaacaaataaactatagaact

SEQ ID NO: 9190 - DNA, 26 bp, Homo sapiens
ccttcaacaaataaactatagaacta

SEQ ID NO: 9191 - DNA, 26 bp, Homo sapiens
cttcaacaaataaactatagaactag

SEQ ID NO: 9192 - DNA, 26 bp, Homo sapiens
ttcaacaaataaactatagaactaga

SEQ ID NO: 9193 - DNA, 26 bp, Homo sapiens
tcaacaaataaactatagaactagag

SEQ ID NO: 9194 - DNA, 26 bp, Homo sapiens
caacaaataaactatagaactagaga

SEQ ID NO: 9195 - DNA, 26 bp, Homo sapiens
aacaaataaactatagaactagagaa

SEQ ID NO: 9196 - DNA, 26 bp, Homo sapiens
acaaataaactatagaactagagaaa

SEQ ID NO: 9197 - DNA, 26 bp, Homo sapiens
caaataaactatagaactagagaaac

SEQ ID NO: 9198 - DNA, 26 bp, Homo sapiens
aaataaactatagaactagagaaact

SEQ ID NO: 9199 - DNA, 26 bp, Homo sapiens
aataaactatagaactagagaaactt

SEQ ID NO: 9200 - DNA, 26 bp, Homo sapiens
ataaactatagaactagagaaacttt

SEQ ID NO: 9201 - DNA, 26 bp, Homo sapiens
taaactatagaactagagaaactttc

SEQ ID NO: 9202 - DNA, 26 bp, Homo sapiens
aaactatagaactagagaaactttct

SEQ ID NO: 9203 - DNA, 26 bp, Homo sapiens
aactatagaactagagaaactttcta

SEQ ID NO: 9204 - DNA, 26 bp, Homo sapiens
actatagaactagagaaactttctaa

SEQ ID NO: 9205 - DNA, 26 bp, Homo sapiens
ctatagaactagagaaactttctaag

SEQ ID NO: 9206 - DNA, 26 bp, Homo sapiens
tatagaactagagaaactttctaagg

SEQ ID NO: 9207 - DNA, 26 bp, Homo sapiens
atagaactagagaaactttctaaggg

SEQ ID NO: 9208 - DNA, 26 bp, Homo sapiens
tagaactagagaaactttctaaggga

SEQ ID NO: 9209 - DNA, 26 bp, Homo sapiens
agaactagagaaactttctaagggag

SEQ ID NO: 9210 - DNA, 26 bp, Homo sapiens
gaactagagaaactttctaagggagg

SEQ ID NO: 9211 - DNA, 26 bp, Homo sapiens
aactagagaaactttctaagggagga

SEQ ID NO: 9212 - DNA, 26 bp, Homo sapiens
actagagaaactttctaagggaggaa

SEQ ID NO: 9213 - DNA, 26 bp, Homo sapiens
ctagagaaactttctaagggaggaaa

SEQ ID NO: 9214 - DNA, 26 bp, Homo sapiens
tagagaaactttctaagggaggaaaa

SEQ ID NO: 9215 - DNA, 26 bp, Homo sapiens
agagaaactttctaagggaggaaaaa

SEQ ID NO: 9216 - DNA, 26 bp, Homo sapiens
gagaaactttctaagggaggaaaaag

SEQ ID NO: 9217 - DNA, 26 bp, Homo sapiens
agaaactttctaagggaggaaaaaga

SEQ ID NO: 9218 - DNA, 26 bp, Homo sapiens
gaaactttctaagggaggaaaaagaa

SEQ ID NO: 9219 - DNA, 26 bp, Homo sapiens
aaactttctaagggaggaaaaagaaa

SEQ ID NO: 9220 - DNA, 26 bp, Homo sapiens
aactttctaagggaggaaaaagaaaa

SEQ ID NO: 9221 - DNA, 26 bp, Homo sapiens
actttctaagggaggaaaaagaaaaa

SEQ ID NO: 9222 - DNA, 26 bp, Homo sapiens
ctttctaagggaggaaaaagaaaaat

SEQ ID NO: 9223 - DNA, 26 bp, Homo sapiens
tttctaagggaggaaaaagaaaaatc

SEQ ID NO: 9224 - DNA, 26 bp, Homo sapiens
ttctaagggaggaaaaagaaaaatca

SEQ ID NO: 9225 - DNA, 26 bp, Homo sapiens
tctaagggaggaaaaagaaaaatcaa

SEQ ID NO: 9226 - DNA, 26 bp, Homo sapiens
ctaagggaggaaaaagaaaaatcaaa

SEQ ID NO: 9227 - DNA, 26 bp, Homo sapiens
taagggaggaaaaagaaaaatcaaag

SEQ ID NO: 9228 - DNA, 26 bp, Homo sapiens
aagggaggaaaaagaaaaatcaaagt

SEQ ID NO: 9229 - DNA, 26 bp, Homo sapiens
agggaggaaaaagaaaaatcaaagtg

SEQ ID NO: 9230 - DNA, 26 bp, Homo sapiens
gggaggaaaaagaaaaatcaaagtga

SEQ ID NO: 9231 - DNA, 26 bp, Homo sapiens
ggaggaaaaagaaaaatcaaagtgat

SEQ ID NO: 9232 - DNA, 26 bp, Homo sapiens
gaggaaaaagaaaaatcaaagtgata

SEQ ID NO: 9233 - DNA, 26 bp, Homo sapiens
aggaaaaagaaaaatcaaagtgatac

SEQ ID NO: 9234 - DNA, 26 bp, Homo sapiens
ggaaaaagaaaaatcaaagtgatact

SEQ ID NO: 9235 - DNA, 26 bp, Homo sapiens
gaaaaagaaaaatcaaagtgatacta

SEQ ID NO: 9236 - DNA, 26 bp, Homo sapiens
aaaaagaaaaatcaaagtgatactat

SEQ ID NO: 9237 - DNA, 26 bp, Homo sapiens
aaaagaaaaatcaaagtgatactatt

SEQ ID NO: 9238 - DNA, 26 bp, Homo sapiens
aaagaaaaatcaaagtgatactatta

SEQ ID NO: 9239 - DNA, 26 bp, Homo sapiens
aagaaaaatcaaagtgatactattag

SEQ ID NO: 9240 - DNA, 26 bp, Homo sapiens
agaaaaatcaaagtgatactattagt

SEQ ID NO: 9241 - DNA, 26 bp, Homo sapiens
gaaaaatcaaagtgatactattagtt

SEQ ID NO: 9242 - DNA, 26 bp, Homo sapiens
aaaaatcaaagtgatactattagttc

SEQ ID NO: 9243 - DNA, 26 bp, Homo sapiens
aaaatcaaagtgatactattagttct

SEQ ID NO: 9244 - DNA, 26 bp, Homo sapiens
aaatcaaagtgatactattagttctg

SEQ ID NO: 9245 - DNA, 26 bp, Homo sapiens
aatcaaagtgatactattagttctga

SEQ ID NO: 9246 - DNA, 26 bp, Homo sapiens
atcaaagtgatactattagttctgaa

SEQ ID NO: 9247 - DNA, 26 bp, Homo sapiens
tcaaagtgatactattagttctgaag

SEQ ID NO: 9248 - DNA, 26 bp, Homo sapiens
caaagtgatactattagttctgaagt

SEQ ID NO: 9249 - DNA, 26 bp, Homo sapiens
aaagtgatactattagttctgaagtt

SEQ ID NO: 9250 - DNA, 26 bp, Homo sapiens
aagtgatactattagttctgaagttg

SEQ ID NO: 9251 - DNA, 26 bp, Homo sapiens
agtgatactattagttctgaagttgt

SEQ ID NO: 9252 - DNA, 26 bp, Homo sapiens
gtgatactattagttctgaagttgtg

SEQ ID NO: 9253 - DNA, 26 bp, Homo sapiens
tgatactattagttctgaagttgtgc

SEQ ID NO: 9254 - DNA, 26 bp, Homo sapiens
gatactattagttctgaagttgtgcc

SEQ ID NO: 9255 - DNA, 26 bp, Homo sapiens
atactattagttctgaagttgtgcca

SEQ ID NO: 9256 - DNA, 26 bp, Homo sapiens
tactattagttctgaagttgtgccac

SEQ ID NO: 9257 - DNA, 26 bp, Homo sapiens
actattagttctgaagttgtgccact

SEQ ID NO: 9258 - DNA, 26 bp, Homo sapiens
ctattagttctgaagttgtgccactt

SEQ ID NO: 9259 - DNA, 26 bp, Homo sapiens
tattagttctgaagttgtgccacttg

SEQ ID NO: 9260 - DNA, 26 bp, Homo sapiens
attagttctgaagttgtgccacttgc

SEQ ID NO: 9261 - DNA, 26 bp, Homo sapiens
ttagttctgaagttgtgccacttgcg

SEQ ID NO: 9262 - DNA, 26 bp, Homo sapiens
tagttctgaagttgtgccacttgcgg

SEQ ID NO: 9263 - DNA, 26 bp, Homo sapiens
agttctgaagttgtgccacttgcgga

SEQ ID NO: 9264 - DNA, 26 bp, Homo sapiens
gttctgaagttgtgccacttgcggag

SEQ ID NO: 9265 - DNA, 26 bp, Homo sapiens
ttctgaagttgtgccacttgcggaga

SEQ ID NO: 9266 - DNA, 26 bp, Homo sapiens
tctgaagttgtgccacttgcggagat

SEQ ID NO: 9267 - DNA, 26 bp, Homo sapiens
ctgaagttgtgccacttgcggagatt

SEQ ID NO: 9268 - DNA, 26 bp, Homo sapiens
tgaagttgtgccacttgcggagattt

SEQ ID NO: 9269 - DNA, 26 bp, Homo sapiens
gaagttgtgccacttgcggagatttt

SEQ ID NO: 9270 - DNA, 26 bp, Homo sapiens
aagttgtgccacttgcggagatttta

SEQ ID NO: 9271 - DNA, 26 bp, Homo sapiens
agttgtgccacttgcggagattttaa

SEQ ID NO: 9272 - DNA, 26 bp, Homo sapiens
gttgtgccacttgcggagattttaac

SEQ ID NO: 9273 - DNA, 26 bp, Homo sapiens
ttgtgccacttgcggagattttaact

SEQ ID NO: 9274 - DNA, 26 bp, Homo sapiens
tgtgccacttgcggagattttaactt

SEQ ID NO: 9275 - DNA, 26 bp, Homo sapiens
gtgccacttgcggagattttaacttt

SEQ ID NO: 9276 - DNA, 26 bp, Homo sapiens
tgccacttgcggagattttaacttta

SEQ ID NO: 9277 - DNA, 26 bp, Homo sapiens
gccacttgcggagattttaactttag

SEQ ID NO: 9278 - DNA, 26 bp, Homo sapiens
ccacttgcggagattttaactttagg

SEQ ID NO: 9279 - DNA, 26 bp, Homo sapiens
cacttgcggagattttaactttaggg

SEQ ID NO: 9280 - DNA, 26 bp, Homo sapiens
acttgcggagattttaactttaggga

SEQ ID NO: 9281 - DNA, 26 bp, Homo sapiens
cttgcggagattttaactttagggat

SEQ ID NO: 9282 - DNA, 26 bp, Homo sapiens
ttgcggagattttaactttagggatt

SEQ ID NO: 9283 - DNA, 26 bp, Homo sapiens
tgcggagattttaactttagggatta

SEQ ID NO: 9284 - DNA, 26 bp, Homo sapiens
gcggagattttaactttagggattac

SEQ ID NO: 9285 - DNA, 26 bp, Homo sapiens
cggagattttaactttagggattaca

SEQ ID NO: 9286 - DNA, 26 bp, Homo sapiens
ggagattttaactttagggattacag

SEQ ID NO: 9287 - DNA, 26 bp, Homo sapiens
gagattttaactttagggattacaga

SEQ ID NO: 9288 - DNA, 26 bp, Homo sapiens
agattttaactttagggattacagag

SEQ ID NO: 9289 - DNA, 26 bp, Homo sapiens
gattttaactttagggattacagagt

SEQ ID NO: 9290 - DNA, 26 bp, Homo sapiens
attttaactttagggattacagagtt

SEQ ID NO: 9291 - DNA, 26 bp, Homo sapiens
ttttaactttagggattacagagttt

SEQ ID NO: 9292 - DNA, 26 bp, Homo sapiens
tttaactttagggattacagagtttc

SEQ ID NO: 9293 - DNA, 26 bp, Homo sapiens
ttaactttagggattacagagtttca

SEQ ID NO: 9294 - DNA, 26 bp, Homo sapiens
taactttagggattacagagtttcaa

SEQ ID NO: 9295 - DNA, 26 bp, Homo sapiens
aactttagggattacagagtttcaag

SEQ ID NO: 9296 - DNA, 26 bp, Homo sapiens
actttagggattacagagtttcaagg

SEQ ID NO: 9297 - DNA, 26 bp, Homo sapiens
ctttagggattacagagtttcaaggt

SEQ ID NO: 9298 - DNA, 26 bp, Homo sapiens
tttagggattacagagtttcaaggtt

SEQ ID NO: 9299 - DNA, 26 bp, Homo sapiens
ttagggattacagagtttcaaggtta

SEQ ID NO: 9300 - DNA, 26 bp, Homo sapiens
tagggattacagagtttcaaggttag

SEQ ID NO: 9301 - DNA, 26 bp, Homo sapiens
agggattacagagtttcaaggttagg

SEQ ID NO: 9302 - DNA, 26 bp, Homo sapiens
gggattacagagtttcaaggttagga

SEQ ID NO: 9303 - DNA, 26 bp, Homo sapiens
ggattacagagtttcaaggttaggaa

SEQ ID NO: 9304 - DNA, 26 bp, Homo sapiens
gattacagagtttcaaggttaggaaa

SEQ ID NO: 9305 - DNA, 26 bp, Homo sapiens
attacagagtttcaaggttaggaaat

SEQ ID NO: 9306 - DNA, 26 bp, Homo sapiens
ttacagagtttcaaggttaggaaatc

SEQ ID NO: 9307 - DNA, 26 bp, Homo sapiens
tacagagtttcaaggttaggaaatca

SEQ ID NO: 9308 - DNA, 26 bp, Homo sapiens
acagagtttcaaggttaggaaatcac

SEQ ID NO: 9309 - DNA, 26 bp, Homo sapiens
cagagtttcaaggttaggaaatcaca

SEQ ID NO: 9310 - DNA, 26 bp, Homo sapiens
agagtttcaaggttaggaaatcacaa

SEQ ID NO: 9311 - DNA, 26 bp, Homo sapiens
gagtttcaaggttaggaaatcacaaa

SEQ ID NO: 9312 - DNA, 26 bp, Homo sapiens
agtttcaaggttaggaaatcacaaag

SEQ ID NO: 9313 - DNA, 26 bp, Homo sapiens
gtttcaaggttaggaaatcacaaagc

SEQ ID NO: 9314 - DNA, 26 bp, Homo sapiens
tttcaaggttaggaaatcacaaagct

SEQ ID NO: 9315 - DNA, 26 bp, Homo sapiens
ttcaaggttaggaaatcacaaagctc

SEQ ID NO: 9316 - DNA, 26 bp, Homo sapiens
tcaaggttaggaaatcacaaagctct

SEQ ID NO: 9317 - DNA, 26 bp, Homo sapiens
caaggttaggaaatcacaaagctcta

SEQ ID NO: 9318 - DNA, 26 bp, Homo sapiens
aaggttaggaaatcacaaagctctag

SEQ ID NO: 9319 - DNA, 26 bp, Homo sapiens
aggttaggaaatcacaaagctctagg

SEQ ID NO: 9320 - DNA, 26 bp, Homo sapiens
ggttaggaaatcacaaagctctaggt

SEQ ID NO: 9321 - DNA, 26 bp, Homo sapiens
gttaggaaatcacaaagctctaggtc

SEQ ID NO: 9322 - DNA, 26 bp, Homo sapiens
ttaggaaatcacaaagctctaggtct

SEQ ID NO: 9323 - DNA, 26 bp, Homo sapiens
taggaaatcacaaagctctaggtctc

SEQ ID NO: 9324 - DNA, 26 bp, Homo sapiens
aggaaatcacaaagctctaggtctca

SEQ ID NO: 9325 - DNA, 26 bp, Homo sapiens
ggaaatcacaaagctctaggtctcag

SEQ ID NO: 9326 - DNA, 26 bp, Homo sapiens
gaaatcacaaagctctaggtctcagt

SEQ ID NO: 9327 - DNA, 26 bp, Homo sapiens
aaatcacaaagctctaggtctcagtg

SEQ ID NO: 9328 - DNA, 26 bp, Homo sapiens
aatcacaaagctctaggtctcagtgg

SEQ ID NO: 9329 - DNA, 26 bp, Homo sapiens
atcacaaagctctaggtctcagtggg

SEQ ID NO: 9330 - DNA, 26 bp, Homo sapiens
tcacaaagctctaggtctcagtgggc

SEQ ID NO: 9331 - DNA, 26 bp, Homo sapiens
cacaaagctctaggtctcagtgggct

SEQ ID NO: 9332 - DNA, 26 bp, Homo sapiens
acaaagctctaggtctcagtgggcta

SEQ ID NO: 9333 - DNA, 26 bp, Homo sapiens
caaagctctaggtctcagtgggctaa

SEQ ID NO: 9334 - DNA, 26 bp, Homo sapiens
aaagctctaggtctcagtgggctaaa

SEQ ID NO: 9335 - DNA, 26 bp, Homo sapiens
aagctctaggtctcagtgggctaaac

SEQ ID NO: 9336 - DNA, 26 bp, Homo sapiens
agctctaggtctcagtgggctaaact

SEQ ID NO: 9337 - DNA, 26 bp, Homo sapiens
gctctaggtctcagtgggctaaactt

SEQ ID NO: 9338 - DNA, 26 bp, Homo sapiens
ctctaggtctcagtgggctaaacttt

SEQ ID NO: 9339 - DNA, 26 bp, Homo sapiens
tctaggtctcagtgggctaaactttc

SEQ ID NO: 9340 - DNA, 26 bp, Homo sapiens
ctaggtctcagtgggctaaactttca

SEQ ID NO: 9341 - DNA, 26 bp, Homo sapiens
taggtctcagtgggctaaactttcac

SEQ ID NO: 9342 - DNA, 26 bp, Homo sapiens
aggtctcagtgggctaaactttcact

SEQ ID NO: 9343 - DNA, 26 bp, Homo sapiens
ggtctcagtgggctaaactttcactc

SEQ ID NO: 9344 - DNA, 26 bp, Homo sapiens
gtctcagtgggctaaactttcactcc

SEQ ID NO: 9345 - DNA, 26 bp, Homo sapiens
tctcagtgggctaaactttcactcct

SEQ ID NO: 9346 - DNA, 26 bp, Homo sapiens
ctcagtgggctaaactttcactcctt

SEQ ID NO: 9347 - DNA, 26 bp, Homo sapiens
tcagtgggctaaactttcactccttt

SEQ ID NO: 9348 - DNA, 26 bp, Homo sapiens
cagtgggctaaactttcactcctttc

SEQ ID NO: 9349 - DNA, 26 bp, Homo sapiens
agtgggctaaactttcactcctttct

SEQ ID NO: 9350 - DNA, 26 bp, Homo sapiens
gtgggctaaactttcactcctttctc

SEQ ID NO: 9351 - DNA, 26 bp, Homo sapiens
tgggctaaactttcactcctttctct

SEQ ID NO: 9352 - DNA, 26 bp, Homo sapiens
gggctaaactttcactcctttctctt

SEQ ID NO: 9353 - DNA, 26 bp, Homo sapiens
ggctaaactttcactcctttctcttc

SEQ ID NO: 9354 - DNA, 26 bp, Homo sapiens
gctaaactttcactcctttctcttcc

SEQ ID NO: 9355 - DNA, 26 bp, Homo sapiens
ctaaactttcactcctttctcttcct

SEQ ID NO: 9356 - DNA, 26 bp, Homo sapiens
taaactttcactcctttctcttcctc

SEQ ID NO: 9357 - DNA, 26 bp, Homo sapiens
aaactttcactcctttctcttcctct

SEQ ID NO: 9358 - DNA, 26 bp, Homo sapiens
aactttcactcctttctcttcctcta

SEQ ID NO: 9359 - DNA, 26 bp, Homo sapiens
actttcactcctttctcttcctctac

SEQ ID NO: 9360 - DNA, 26 bp, Homo sapiens
ctttcactcctttctcttcctctaca

SEQ ID NO: 9361 - DNA, 26 bp, Homo sapiens
tttcactcctttctcttcctctacag

SEQ ID NO: 9362 - DNA, 26 bp, Homo sapiens
ttcactcctttctcttcctctacaga

SEQ ID NO: 9363 - DNA, 26 bp, Homo sapiens
tcactcctttctcttcctctacagaa

SEQ ID NO: 9364 - DNA, 26 bp, Homo sapiens
cactcctttctcttcctctacagaag

SEQ ID NO: 9365 - DNA, 26 bp, Homo sapiens
actcctttctcttcctctacagaaga

SEQ ID NO: 9366 - DNA, 26 bp, Homo sapiens
ctcctttctcttcctctacagaagaa

SEQ ID NO: 9367 - DNA, 26 bp, Homo sapiens
tcctttctcttcctctacagaagaat

SEQ ID NO: 9368 - DNA, 26 bp, Homo sapiens
cctttctcttcctctacagaagaata

SEQ ID NO: 9369 - DNA, 26 bp, Homo sapiens
ctttctcttcctctacagaagaatat

SEQ ID NO: 9370 - DNA, 26 bp, Homo sapiens
tttctcttcctctacagaagaatatt

SEQ ID NO: 9371 - DNA, 26 bp, Homo sapiens
ttctcttcctctacagaagaatattc

SEQ ID NO: 9372 - DNA, 26 bp, Homo sapiens
tctcttcctctacagaagaatattct

SEQ ID NO: 9373 - DNA, 26 bp, Homo sapiens
ctcttcctctacagaagaatattctg

SEQ ID NO: 9374 - DNA, 26 bp, Homo sapiens
tcttcctctacagaagaatattctgt

SEQ ID NO: 9375 - DNA, 26 bp, Homo sapiens
cttcctctacagaagaatattctgtt

SEQ ID NO: 9376 - DNA, 26 bp, Homo sapiens
ttcctctacagaagaatattctgttt

SEQ ID NO: 9377 - DNA, 26 bp, Homo sapiens
tcctctacagaagaatattctgttta

SEQ ID NO: 9378 - DNA, 26 bp, Homo sapiens
cctctacagaagaatattctgtttat

SEQ ID NO: 9379 - DNA, 26 bp, Homo sapiens
ctctacagaagaatattctgtttatc

SEQ ID NO: 9380 - DNA, 26 bp, Homo sapiens
tctacagaagaatattctgtttatca

SEQ ID NO: 9381 - DNA, 26 bp, Homo sapiens
ctacagaagaatattctgtttatcac

SEQ ID NO: 9382 - DNA, 26 bp, Homo sapiens
tacagaagaatattctgtttatcacc

SEQ ID NO: 9383 - DNA, 26 bp, Homo sapiens
acagaagaatattctgtttatcaccc

SEQ ID NO: 9384 - DNA, 26 bp, Homo sapiens
cagaagaatattctgtttatcaccct

SEQ ID NO: 9385 - DNA, 26 bp, Homo sapiens
agaagaatattctgtttatcaccctg

SEQ ID NO: 9386 - DNA, 26 bp, Homo sapiens
gaagaatattctgtttatcaccctga

SEQ ID NO: 9387 - DNA, 26 bp, Homo sapiens
aagaatattctgtttatcaccctgaa

SEQ ID NO: 9388 - DNA, 26 bp, Homo sapiens
agaatattctgtttatcaccctgaac

SEQ ID NO: 9389 - DNA, 26 bp, Homo sapiens
gaatattctgtttatcaccctgaact

SEQ ID NO: 9390 - DNA, 26 bp, Homo sapiens
aatattctgtttatcaccctgaactt

SEQ ID NO: 9391 - DNA, 26 bp, Homo sapiens
atattctgtttatcaccctgaacttc

SEQ ID NO: 9392 - DNA, 26 bp, Homo sapiens
tattctgtttatcaccctgaacttca

SEQ ID NO: 9393 - DNA, 26 bp, Homo sapiens
attctgtttatcaccctgaacttcaa

SEQ ID NO: 9394 - DNA, 26 bp, Homo sapiens
ttctgtttatcaccctgaacttcaaa

SEQ ID NO: 9395 - DNA, 26 bp, Homo sapiens
tctgtttatcaccctgaacttcaaag

SEQ ID NO: 9396 - DNA, 26 bp, Homo sapiens
ctgtttatcaccctgaacttcaaagg

SEQ ID NO: 9397 - DNA, 26 bp, Homo sapiens
tgtttatcaccctgaacttcaaaggg

SEQ ID NO: 9398 - DNA, 26 bp, Homo sapiens
gtttatcaccctgaacttcaaaggga

SEQ ID NO: 9399 - DNA, 26 bp, Homo sapiens
tttatcaccctgaacttcaaagggac

SEQ ID NO: 9400 - DNA, 26 bp, Homo sapiens
ttatcaccctgaacttcaaagggact

SEQ ID NO: 9401 - DNA, 26 bp, Homo sapiens
tatcaccctgaacttcaaagggactg

SEQ ID NO: 9402 - DNA, 26 bp, Homo sapiens
atcaccctgaacttcaaagggactgt

SEQ ID NO: 9403 - DNA, 26 bp, Homo sapiens
tcaccctgaacttcaaagggactgta

SEQ ID NO: 9404 - DNA, 26 bp, Homo sapiens
caccctgaacttcaaagggactgtaa

SEQ ID NO: 9405 - DNA, 26 bp, Homo sapiens
accctgaacttcaaagggactgtaac

SEQ ID NO: 9406 - DNA, 26 bp, Homo sapiens
ccctgaacttcaaagggactgtaact

SEQ ID NO: 9407 - DNA, 26 bp, Homo sapiens
cctgaacttcaaagggactgtaactg

SEQ ID NO: 9408 - DNA, 26 bp, Homo sapiens
ctgaacttcaaagggactgtaactgg

SEQ ID NO: 9409 - DNA, 26 bp, Homo sapiens
tgaacttcaaagggactgtaactgga

SEQ ID NO: 9410 - DNA, 26 bp, Homo sapiens
gaacttcaaagggactgtaactggaa

SEQ ID NO: 9411 - DNA, 26 bp, Homo sapiens
aacttcaaagggactgtaactggaac

SEQ ID NO: 9412 - DNA, 26 bp, Homo sapiens
acttcaaagggactgtaactggaaca

SEQ ID NO: 9413 - DNA, 26 bp, Homo sapiens
cttcaaagggactgtaactggaacaa

SEQ ID NO: 9414 - DNA, 26 bp, Homo sapiens
ttcaaagggactgtaactggaacaag

SEQ ID NO: 9415 - DNA, 26 bp, Homo sapiens
tcaaagggactgtaactggaacaagc

SEQ ID NO: 9416 - DNA, 26 bp, Homo sapiens
caaagggactgtaactggaacaagct

SEQ ID NO: 9417 - DNA, 26 bp, Homo sapiens
aaagggactgtaactggaacaagctc

SEQ ID NO: 9418 - DNA, 26 bp, Homo sapiens
aagggactgtaactggaacaagctca

SEQ ID NO: 9419 - DNA, 26 bp, Homo sapiens
agggactgtaactggaacaagctcat

SEQ ID NO: 9420 - DNA, 26 bp, Homo sapiens
gggactgtaactggaacaagctcatg

SEQ ID NO: 9421 - DNA, 26 bp, Homo sapiens
ggactgtaactggaacaagctcatga

SEQ ID NO: 9422 - DNA, 26 bp, Homo sapiens
gactgtaactggaacaagctcatgac

SEQ ID NO: 9423 - DNA, 26 bp, Homo sapiens
actgtaactggaacaagctcatgact

SEQ ID NO: 9424 - DNA, 26 bp, Homo sapiens
ctgtaactggaacaagctcatgactg

SEQ ID NO: 9425 - DNA, 26 bp, Homo sapiens
tgtaactggaacaagctcatgactgc

SEQ ID NO: 9426 - DNA, 26 bp, Homo sapiens
gtaactggaacaagctcatgactgca

SEQ ID NO: 9427 - DNA, 26 bp, Homo sapiens
taactggaacaagctcatgactgcaa

SEQ ID NO: 9428 - DNA, 26 bp, Homo sapiens
aactggaacaagctcatgactgcaaa

SEQ ID NO: 9429 - DNA, 26 bp, Homo sapiens
actggaacaagctcatgactgcaaag

SEQ ID NO: 9430 - DNA, 26 bp, Homo sapiens
ctggaacaagctcatgactgcaaagt

SEQ ID NO: 9431 - DNA, 26 bp, Homo sapiens
tggaacaagctcatgactgcaaagtt

SEQ ID NO: 9432 - DNA, 26 bp, Homo sapiens
ggaacaagctcatgactgcaaagtta

SEQ ID NO: 9433 - DNA, 26 bp, Homo sapiens
gaacaagctcatgactgcaaagttaa

SEQ ID NO: 9434 - DNA, 26 bp, Homo sapiens
aacaagctcatgactgcaaagttaat

SEQ ID NO: 9435 - DNA, 26 bp, Homo sapiens
acaagctcatgactgcaaagttaata

SEQ ID NO: 9436 - DNA, 26 bp, Homo sapiens
caagctcatgactgcaaagttaatag

SEQ ID NO: 9437 - DNA, 26 bp, Homo sapiens
aagctcatgactgcaaagttaataga

SEQ ID NO: 9438 - DNA, 26 bp, Homo sapiens
agctcatgactgcaaagttaatagaa

SEQ ID NO: 9439 - DNA, 26 bp, Homo sapiens
gctcatgactgcaaagttaatagaac

SEQ ID NO: 9440 - DNA, 26 bp, Homo sapiens
ctcatgactgcaaagttaatagaacc

SEQ ID NO: 9441 - DNA, 26 bp, Homo sapiens
tcatgactgcaaagttaatagaacca

SEQ ID NO: 9442 - DNA, 26 bp, Homo sapiens
catgactgcaaagttaatagaaccat

SEQ ID NO: 9443 - DNA, 26 bp, Homo sapiens
atgactgcaaagttaatagaaccatt

SEQ ID NO: 9444 - DNA, 26 bp, Homo sapiens
tgactgcaaagttaatagaaccattt

SEQ ID NO: 9445 - DNA, 26 bp, Homo sapiens
gactgcaaagttaatagaaccatttt

SEQ ID NO: 9446 - DNA, 26 bp, Homo sapiens
actgcaaagttaatagaaccattttg

SEQ ID NO: 9447 - DNA, 26 bp, Homo sapiens
ctgcaaagttaatagaaccattttga

SEQ ID NO: 9448 - DNA, 26 bp, Homo sapiens
tgcaaagttaatagaaccattttgag

SEQ ID NO: 9449 - DNA, 26 bp, Homo sapiens
gcaaagttaatagaaccattttgagt

SEQ ID NO: 9450 - DNA, 26 bp, Homo sapiens
caaagttaatagaaccattttgagta

SEQ ID NO: 9451 - DNA, 26 bp, Homo sapiens
aaagttaatagaaccattttgagtag

SEQ ID NO: 9452 - DNA, 26 bp, Homo sapiens
aagttaatagaaccattttgagtaga

SEQ ID NO: 9453 - DNA, 26 bp, Homo sapiens
agttaatagaaccattttgagtagac

SEQ ID NO: 9454 - DNA, 26 bp, Homo sapiens
gttaatagaaccattttgagtagaca

SEQ ID NO: 9455 - DNA, 26 bp, Homo sapiens
ttaatagaaccattttgagtagacag

SEQ ID NO: 9456 - DNA, 26 bp, Homo sapiens
taatagaaccattttgagtagacaga

SEQ ID NO: 9457 - DNA, 26 bp, Homo sapiens
aatagaaccattttgagtagacagaa

SEQ ID NO: 9458 - DNA, 26 bp, Homo sapiens
atagaaccattttgagtagacagaaa

SEQ ID NO: 9459 - DNA, 26 bp, Homo sapiens
tagaaccattttgagtagacagaaag

SEQ ID NO: 9460 - DNA, 26 bp, Homo sapiens
agaaccattttgagtagacagaaaga

SEQ ID NO: 9461 - DNA, 26 bp, Homo sapiens
gaaccattttgagtagacagaaagaa

SEQ ID NO: 9462 - DNA, 26 bp, Homo sapiens
aaccattttgagtagacagaaagaaa

SEQ ID NO: 9463 - DNA, 26 bp, Homo sapiens
accattttgagtagacagaaagaaag

SEQ ID NO: 9464 - DNA, 26 bp, Homo sapiens
ccattttgagtagacagaaagaaagg

SEQ ID NO: 9465 - DNA, 26 bp, Homo sapiens
cattttgagtagacagaaagaaagga

SEQ ID NO: 9466 - DNA, 26 bp, Homo sapiens
attttgagtagacagaaagaaaggac

SEQ ID NO: 9467 - DNA, 26 bp, Homo sapiens
ttttgagtagacagaaagaaaggact

SEQ ID NO: 9468 - DNA, 26 bp, Homo sapiens
tttgagtagacagaaagaaaggactg

SEQ ID NO: 9469 - DNA, 26 bp, Homo sapiens
ttgagtagacagaaagaaaggactga

SEQ ID NO: 9470 - DNA, 26 bp, Homo sapiens
tgagtagacagaaagaaaggactgaa

SEQ ID NO: 9471 - DNA, 26 bp, Homo sapiens
gagtagacagaaagaaaggactgaaa

SEQ ID NO: 9472 - DNA, 26 bp, Homo sapiens
agtagacagaaagaaaggactgaaaa

SEQ ID NO: 9473 - DNA, 26 bp, Homo sapiens
gtagacagaaagaaaggactgaaaat

SEQ ID NO: 9474 - DNA, 26 bp, Homo sapiens
tagacagaaagaaaggactgaaaata

SEQ ID NO: 9475 - DNA, 26 bp, Homo sapiens
agacagaaagaaaggactgaaaatag

SEQ ID NO: 9476 - DNA, 26 bp, Homo sapiens
gacagaaagaaaggactgaaaataga

SEQ ID NO: 9477 - DNA, 26 bp, Homo sapiens
acagaaagaaaggactgaaaatagat

SEQ ID NO: 9478 - DNA, 26 bp, Homo sapiens
cagaaagaaaggactgaaaatagatg

SEQ ID NO: 9479 - DNA, 26 bp, Homo sapiens
agaaagaaaggactgaaaatagatga

SEQ ID NO: 9480 - DNA, 26 bp, Homo sapiens
gaaagaaaggactgaaaatagatgaa

SEQ ID NO: 9481 - DNA, 26 bp, Homo sapiens
aaagaaaggactgaaaatagatgaag

SEQ ID NO: 9482 - DNA, 26 bp, Homo sapiens
aagaaaggactgaaaatagatgaagt

SEQ ID NO: 9483 - DNA, 26 bp, Homo sapiens
agaaaggactgaaaatagatgaagta

SEQ ID NO: 9484 - DNA, 26 bp, Homo sapiens
gaaaggactgaaaatagatgaagtat

SEQ ID NO: 9485 - DNA, 26 bp, Homo sapiens
aaaggactgaaaatagatgaagtatt

SEQ ID NO: 9486 - DNA, 26 bp, Homo sapiens
aaggactgaaaatagatgaagtattt

SEQ ID NO: 9487 - DNA, 26 bp, Homo sapiens
aggactgaaaatagatgaagtatttt

SEQ ID NO: 9488 - DNA, 26 bp, Homo sapiens
ggactgaaaatagatgaagtattttt

SEQ ID NO: 9489 - DNA, 26 bp, Homo sapiens
gactgaaaatagatgaagtattttta

SEQ ID NO: 9490 - DNA, 26 bp, Homo sapiens
actgaaaatagatgaagtatttttag

SEQ ID NO: 9491 - DNA, 26 bp, Homo sapiens
ctgaaaatagatgaagtatttttagg

SEQ ID NO: 9492 - DNA, 26 bp, Homo sapiens
tgaaaatagatgaagtatttttagga

SEQ ID NO: 9493 - DNA, 26 bp, Homo sapiens
gaaaatagatgaagtatttttaggag

SEQ ID NO: 9494 - DNA, 26 bp, Homo sapiens
aaaatagatgaagtatttttaggaga

SEQ ID NO: 9495 - DNA, 26 bp, Homo sapiens
aaatagatgaagtatttttaggagaa

SEQ ID NO: 9496 - DNA, 26 bp, Homo sapiens
aatagatgaagtatttttaggagaaa

SEQ ID NO: 9497 - DNA, 26 bp, Homo sapiens
atagatgaagtatttttaggagaaag

SEQ ID NO: 9498 - DNA, 26 bp, Homo sapiens
tagatgaagtatttttaggagaaagt

SEQ ID NO: 9499 - DNA, 26 bp, Homo sapiens
agatgaagtatttttaggagaaagtt

SEQ ID NO: 9500 - DNA, 26 bp, Homo sapiens
gatgaagtatttttaggagaaagttg

SEQ ID NO: 9501 - DNA, 26 bp, Homo sapiens
atgaagtatttttaggagaaagttga

SEQ ID NO: 9502 - DNA, 26 bp, Homo sapiens
tgaagtatttttaggagaaagttgag

SEQ ID NO: 9503 - DNA, 26 bp, Homo sapiens
gaagtatttttaggagaaagttgagt

SEQ ID NO: 9504 - DNA, 26 bp, Homo sapiens
aagtatttttaggagaaagttgagta

SEQ ID NO: 9505 - DNA, 26 bp, Homo sapiens
agtatttttaggagaaagttgagtag

SEQ ID NO: 9506 - DNA, 26 bp, Homo sapiens
gtatttttaggagaaagttgagtagt

SEQ ID NO: 9507 - DNA, 26 bp, Homo sapiens
tatttttaggagaaagttgagtagta

SEQ ID NO: 9508 - DNA, 26 bp, Homo sapiens
atttttaggagaaagttgagtagtag

SEQ ID NO: 9509 - DNA, 26 bp, Homo sapiens
tttttaggagaaagttgagtagtagc

SEQ ID NO: 9510 - DNA, 26 bp, Homo sapiens
ttttaggagaaagttgagtagtagca

SEQ ID NO: 9511 - DNA, 26 bp, Homo sapiens
tttaggagaaagttgagtagtagcag

SEQ ID NO: 9512 - DNA, 26 bp, Homo sapiens
ttaggagaaagttgagtagtagcaga

SEQ ID NO: 9513 - DNA, 26 bp, Homo sapiens
taggagaaagttgagtagtagcagag

SEQ ID NO: 9514 - DNA, 26 bp, Homo sapiens
aggagaaagttgagtagtagcagagt

SEQ ID NO: 9515 - DNA, 26 bp, Homo sapiens
ggagaaagttgagtagtagcagagtg

SEQ ID NO: 9516 - DNA, 26 bp, Homo sapiens
gagaaagttgagtagtagcagagtga

SEQ ID NO: 9517 - DNA, 26 bp, Homo sapiens
agaaagttgagtagtagcagagtgaa

SEQ ID NO: 9518 - DNA, 26 bp, Homo sapiens
gaaagttgagtagtagcagagtgaag

SEQ ID NO: 9519 - DNA, 26 bp, Homo sapiens
aaagttgagtagtagcagagtgaagt

SEQ ID NO: 9520 - DNA, 26 bp, Homo sapiens
aagttgagtagtagcagagtgaagtg

SEQ ID NO: 9521 - DNA, 26 bp, Homo sapiens
agttgagtagtagcagagtgaagtgg

SEQ ID NO: 9522 - DNA, 26 bp, Homo sapiens
gttgagtagtagcagagtgaagtggc

SEQ ID NO: 9523 - DNA, 26 bp, Homo sapiens
ttgagtagtagcagagtgaagtggct

SEQ ID NO: 9524 - DNA, 26 bp, Homo sapiens
tgagtagtagcagagtgaagtggcta

SEQ ID NO: 9525 - DNA, 26 bp, Homo sapiens
gagtagtagcagagtgaagtggctat

SEQ ID NO: 9526 - DNA, 26 bp, Homo sapiens
agtagtagcagagtgaagtggctatc

SEQ ID NO: 9527 - DNA, 26 bp, Homo sapiens
gtagtagcagagtgaagtggctatca

SEQ ID NO: 9528 - DNA, 26 bp, Homo sapiens
tagtagcagagtgaagtggctatcaa

SEQ ID NO: 9529 - DNA, 26 bp, Homo sapiens
agtagcagagtgaagtggctatcaag

SEQ ID NO: 9530 - DNA, 26 bp, Homo sapiens
gtagcagagtgaagtggctatcaagg

SEQ ID NO: 9531 - DNA, 26 bp, Homo sapiens
tagcagagtgaagtggctatcaagga

SEQ ID NO: 9532 - DNA, 26 bp, Homo sapiens
agcagagtgaagtggctatcaaggag

SEQ ID NO: 9533 - DNA, 26 bp, Homo sapiens
gcagagtgaagtggctatcaaggaga

SEQ ID NO: 9534 - DNA, 26 bp, Homo sapiens
cagagtgaagtggctatcaaggagac

SEQ ID NO: 9535 - DNA, 26 bp, Homo sapiens
agagtgaagtggctatcaaggagact

SEQ ID NO: 9536 - DNA, 26 bp, Homo sapiens
gagtgaagtggctatcaaggagactg

SEQ ID NO: 9537 - DNA, 26 bp, Homo sapiens
agtgaagtggctatcaaggagactga

SEQ ID NO: 9538 - DNA, 26 bp, Homo sapiens
gtgaagtggctatcaaggagactgag

SEQ ID NO: 9539 - DNA, 26 bp, Homo sapiens
tgaagtggctatcaaggagactgaga

SEQ ID NO: 9540 - DNA, 26 bp, Homo sapiens
gaagtggctatcaaggagactgagac

SEQ ID NO: 9541 - DNA, 26 bp, Homo sapiens
aagtggctatcaaggagactgagaca

SEQ ID NO: 9542 - DNA, 26 bp, Homo sapiens
agtggctatcaaggagactgagacaa

SEQ ID NO: 9543 - DNA, 26 bp, Homo sapiens
gtggctatcaaggagactgagacaag

SEQ ID NO: 9544 - DNA, 26 bp, Homo sapiens
tggctatcaaggagactgagacaaga

SEQ ID NO: 9545 - DNA, 26 bp, Homo sapiens
ggctatcaaggagactgagacaagaa

SEQ ID NO: 9546 - DNA, 26 bp, Homo sapiens
gctatcaaggagactgagacaagaat

SEQ ID NO: 9547 - DNA, 26 bp, Homo sapiens
ctatcaaggagactgagacaagaata

SEQ ID NO: 9548 - DNA, 26 bp, Homo sapiens
tatcaaggagactgagacaagaataa

SEQ ID NO: 9549 - DNA, 26 bp, Homo sapiens
atcaaggagactgagacaagaataaa

SEQ ID NO: 9550 - DNA, 26 bp, Homo sapiens
tcaaggagactgagacaagaataaac

SEQ ID NO: 9551 - DNA, 26 bp, Homo sapiens
caaggagactgagacaagaataaaca

SEQ ID NO: 9552 - DNA, 26 bp, Homo sapiens
aaggagactgagacaagaataaacaa

SEQ ID NO: 9553 - DNA, 26 bp, Homo sapiens
aggagactgagacaagaataaacaaa

SEQ ID NO: 9554 - DNA, 26 bp, Homo sapiens
ggagactgagacaagaataaacaaag

SEQ ID NO: 9555 - DNA, 26 bp, Homo sapiens
gagactgagacaagaataaacaaagt

SEQ ID NO: 9556 - DNA, 26 bp, Homo sapiens
agactgagacaagaataaacaaagtc

SEQ ID NO: 9557 - DNA, 26 bp, Homo sapiens
gactgagacaagaataaacaaagtca

SEQ ID NO: 9558 - DNA, 26 bp, Homo sapiens
actgagacaagaataaacaaagtcac

SEQ ID NO: 9559 - DNA, 26 bp, Homo sapiens
ctgagacaagaataaacaaagtcact

SEQ ID NO: 9560 - DNA, 26 bp, Homo sapiens
tgagacaagaataaacaaagtcactt

SEQ ID NO: 9561 - DNA, 26 bp, Homo sapiens
gagacaagaataaacaaagtcacttt

SEQ ID NO: 9562 - DNA, 26 bp, Homo sapiens
agacaagaataaacaaagtcactttg

SEQ ID NO: 9563 - DNA, 26 bp, Homo sapiens
gacaagaataaacaaagtcactttgc

SEQ ID NO: 9564 - DNA, 26 bp, Homo sapiens
acaagaataaacaaagtcactttgca

SEQ ID NO: 9565 - DNA, 26 bp, Homo sapiens
caagaataaacaaagtcactttgcac

SEQ ID NO: 9566 - DNA, 26 bp, Homo sapiens
aagaataaacaaagtcactttgcacc

SEQ ID NO: 9567 - DNA, 26 bp, Homo sapiens
agaataaacaaagtcactttgcacct

SEQ ID NO: 9568 - DNA, 26 bp, Homo sapiens
gaataaacaaagtcactttgcacctg

SEQ ID NO: 9569 - DNA, 26 bp, Homo sapiens
aataaacaaagtcactttgcacctgc

SEQ ID NO: 9570 - DNA, 26 bp, Homo sapiens
ataaacaaagtcactttgcacctgca

SEQ ID NO: 9571 - DNA, 26 bp, Homo sapiens
taaacaaagtcactttgcacctgcaa

SEQ ID NO: 9572 - DNA, 26 bp, Homo sapiens
aaacaaagtcactttgcacctgcaac

SEQ ID NO: 9573 - DNA, 26 bp, Homo sapiens
aacaaagtcactttgcacctgcaacc

SEQ ID NO: 9574 - DNA, 26 bp, Homo sapiens
acaaagtcactttgcacctgcaacca

SEQ ID NO: 9575 - DNA, 26 bp, Homo sapiens
caaagtcactttgcacctgcaaccag

SEQ ID NO: 9576 - DNA, 26 bp, Homo sapiens
aaagtcactttgcacctgcaaccaga

SEQ ID NO: 9577 - DNA, 26 bp, Homo sapiens
aagtcactttgcacctgcaaccagaa

SEQ ID NO: 9578 - DNA, 26 bp, Homo sapiens
agtcactttgcacctgcaaccagaag

SEQ ID NO: 9579 - DNA, 26 bp, Homo sapiens
gtcactttgcacctgcaaccagaaga

SEQ ID NO: 9580 - DNA, 26 bp, Homo sapiens
tcactttgcacctgcaaccagaagat

SEQ ID NO: 9581 - DNA, 26 bp, Homo sapiens
cactttgcacctgcaaccagaagatt

SEQ ID NO: 9582 - DNA, 26 bp, Homo sapiens
actttgcacctgcaaccagaagattc

SEQ ID NO: 9583 - DNA, 26 bp, Homo sapiens
ctttgcacctgcaaccagaagattcc

SEQ ID NO: 9584 - DNA, 26 bp, Homo sapiens
tttgcacctgcaaccagaagattcct

SEQ ID NO: 9585 - DNA, 26 bp, Homo sapiens
ttgcacctgcaaccagaagattcctc

SEQ ID NO: 9586 - DNA, 26 bp, Homo sapiens
tgcacctgcaaccagaagattcctca

SEQ ID NO: 9587 - DNA, 26 bp, Homo sapiens
gcacctgcaaccagaagattcctcag

SEQ ID NO: 9588 - DNA, 26 bp, Homo sapiens
cacctgcaaccagaagattcctcagt

SEQ ID NO: 9589 - DNA, 26 bp, Homo sapiens
acctgcaaccagaagattcctcagtt

SEQ ID NO: 9590 - DNA, 26 bp, Homo sapiens
cctgcaaccagaagattcctcagttt

SEQ ID NO: 9591 - DNA, 26 bp, Homo sapiens
ctgcaaccagaagattcctcagtttt

SEQ ID NO: 9592 - DNA, 26 bp, Homo sapiens
tgcaaccagaagattcctcagttttc

SEQ ID NO: 9593 - DNA, 26 bp, Homo sapiens
gcaaccagaagattcctcagttttcc

SEQ ID NO: 9594 - DNA, 26 bp, Homo sapiens
caaccagaagattcctcagttttcca

SEQ ID NO: 9595 - DNA, 26 bp, Homo sapiens
aaccagaagattcctcagttttccaa

SEQ ID NO: 9596 - DNA, 26 bp, Homo sapiens
accagaagattcctcagttttccaac

SEQ ID NO: 9597 - DNA, 26 bp, Homo sapiens
ccagaagattcctcagttttccaacc

SEQ ID NO: 9598 - DNA, 26 bp, Homo sapiens
cagaagattcctcagttttccaacca

SEQ ID NO: 9599 - DNA, 26 bp, Homo sapiens
agaagattcctcagttttccaaccat

SEQ ID NO: 9600 - DNA, 26 bp, Homo sapiens
gaagattcctcagttttccaaccata

SEQ ID NO: 9601 - DNA, 26 bp, Homo sapiens
aagattcctcagttttccaaccataa

SEQ ID NO: 9602 - DNA, 26 bp, Homo sapiens
agattcctcagttttccaaccataat

SEQ ID NO: 9603 - DNA, 26 bp, Homo sapiens
gattcctcagttttccaaccataatt

SEQ ID NO: 9604 - DNA, 26 bp, Homo sapiens
attcctcagttttccaaccataattc

SEQ ID NO: 9605 - DNA, 26 bp, Homo sapiens
ttcctcagttttccaaccataattca

SEQ ID NO: 9606 - DNA, 26 bp, Homo sapiens
tcctcagttttccaaccataattcat

SEQ ID NO: 9607 - DNA, 26 bp, Homo sapiens
cctcagttttccaaccataattcatt

SEQ ID NO: 9608 - DNA, 26 bp, Homo sapiens
ctcagttttccaaccataattcattc

SEQ ID NO: 9609 - DNA, 26 bp, Homo sapiens
tcagttttccaaccataattcattct

SEQ ID NO: 9610 - DNA, 26 bp, Homo sapiens
cagttttccaaccataattcattctg

SEQ ID NO: 9611 - DNA, 26 bp, Homo sapiens
agttttccaaccataattcattctga

SEQ ID NO: 9612 - DNA, 26 bp, Homo sapiens
gttttccaaccataattcattctgac

SEQ ID NO: 9613 - DNA, 26 bp, Homo sapiens
ttttccaaccataattcattctgact

SEQ ID NO: 9614 - DNA, 26 bp, Homo sapiens
tttccaaccataattcattctgacta

SEQ ID NO: 9615 - DNA, 26 bp, Homo sapiens
ttccaaccataattcattctgactac

SEQ ID NO: 9616 - DNA, 26 bp, Homo sapiens
tccaaccataattcattctgactact

SEQ ID NO: 9617 - DNA, 26 bp, Homo sapiens
ccaaccataattcattctgactacta

SEQ ID NO: 9618 - DNA, 26 bp, Homo sapiens
caaccataattcattctgactactac

SEQ ID NO: 9619 - DNA, 26 bp, Homo sapiens
aaccataattcattctgactactact

SEQ ID NO: 9620 - DNA, 26 bp, Homo sapiens
accataattcattctgactactactt

SEQ ID NO: 9621 - DNA, 26 bp, Homo sapiens
ccataattcattctgactactacttt

SEQ ID NO: 9622 - DNA, 26 bp, Homo sapiens
cataattcattctgactactactttc

SEQ ID NO: 9623 - DNA, 26 bp, Homo sapiens
ataattcattctgactactactttca

SEQ ID NO: 9624 - DNA, 26 bp, Homo sapiens
taattcattctgactactactttcag

SEQ ID NO: 9625 - DNA, 26 bp, Homo sapiens
aattcattctgactactactttcaga

SEQ ID NO: 9626 - DNA, 26 bp, Homo sapiens
attcattctgactactactttcagat

SEQ ID NO: 9627 - DNA, 26 bp, Homo sapiens
ttcattctgactactactttcagata

SEQ ID NO: 9628 - DNA, 26 bp, Homo sapiens
tcattctgactactactttcagatat

SEQ ID NO: 9629 - DNA, 26 bp, Homo sapiens
cattctgactactactttcagatata

SEQ ID NO: 9630 - DNA, 26 bp, Homo sapiens
attctgactactactttcagatatat

SEQ ID NO: 9631 - DNA, 26 bp, Homo sapiens
ttctgactactactttcagatatatt

SEQ ID NO: 9632 - DNA, 26 bp, Homo sapiens
tctgactactactttcagatatattt

SEQ ID NO: 9633 - DNA, 26 bp, Homo sapiens
ctgactactactttcagatatatttt

SEQ ID NO: 9634 - DNA, 26 bp, Homo sapiens
tgactactactttcagatatatttta

SEQ ID NO: 9635 - DNA, 26 bp, Homo sapiens
gactactactttcagatatattttaa

SEQ ID NO: 9636 - DNA, 26 bp, Homo sapiens
actactactttcagatatattttaaa

SEQ ID NO: 9637 - DNA, 26 bp, Homo sapiens
ctactactttcagatatattttaaag

SEQ ID NO: 9638 - DNA, 26 bp, Homo sapiens
tactactttcagatatattttaaaga

SEQ ID NO: 9639 - DNA, 26 bp, Homo sapiens
actactttcagatatattttaaagaa

SEQ ID NO: 9640 - DNA, 26 bp, Homo sapiens
ctactttcagatatattttaaagaac

SEQ ID NO: 9641 - DNA, 26 bp, Homo sapiens
tactttcagatatattttaaagaacc

SEQ ID NO: 9642 - DNA, 26 bp, Homo sapiens
actttcagatatattttaaagaacca

SEQ ID NO: 9643 - DNA, 26 bp, Homo sapiens
ctttcagatatattttaaagaaccaa

SEQ ID NO: 9644 - DNA, 26 bp, Homo sapiens
tttcagatatattttaaagaaccaat

SEQ ID NO: 9645 - DNA, 26 bp, Homo sapiens
ttcagatatattttaaagaaccaata

SEQ ID NO: 9646 - DNA, 26 bp, Homo sapiens
tcagatatattttaaagaaccaatat

SEQ ID NO: 9647 - DNA, 26 bp, Homo sapiens
cagatatattttaaagaaccaatatc

SEQ ID NO: 9648 - DNA, 26 bp, Homo sapiens
agatatattttaaagaaccaatatcc

SEQ ID NO: 9649 - DNA, 26 bp, Homo sapiens
gatatattttaaagaaccaatatcca

SEQ ID NO: 9650 - DNA, 26 bp, Homo sapiens
atatattttaaagaaccaatatccat

SEQ ID NO: 9651 - DNA, 26 bp, Homo sapiens
tatattttaaagaaccaatatccatc

SEQ ID NO: 9652 - DNA, 26 bp, Homo sapiens
atattttaaagaaccaatatccatcg

SEQ ID NO: 9653 - DNA, 26 bp, Homo sapiens
tattttaaagaaccaatatccatcgt

SEQ ID NO: 9654 - DNA, 26 bp, Homo sapiens
attttaaagaaccaatatccatcgtg

SEQ ID NO: 9655 - DNA, 26 bp, Homo sapiens
ttttaaagaaccaatatccatcgtgg

SEQ ID NO: 9656 - DNA, 26 bp, Homo sapiens
tttaaagaaccaatatccatcgtgga

SEQ ID NO: 9657 - DNA, 26 bp, Homo sapiens
ttaaagaaccaatatccatcgtggac

SEQ ID NO: 9658 - DNA, 26 bp, Homo sapiens
taaagaaccaatatccatcgtggaca

SEQ ID NO: 9659 - DNA, 26 bp, Homo sapiens
aaagaaccaatatccatcgtggacaa

SEQ ID NO: 9660 - DNA, 26 bp, Homo sapiens
aagaaccaatatccatcgtggacaac

SEQ ID NO: 9661 - DNA, 26 bp, Homo sapiens
agaaccaatatccatcgtggacaact

SEQ ID NO: 9662 - DNA, 26 bp, Homo sapiens
gaaccaatatccatcgtggacaactg

SEQ ID NO: 9663 - DNA, 26 bp, Homo sapiens
aaccaatatccatcgtggacaactgc

SEQ ID NO: 9664 - DNA, 26 bp, Homo sapiens
accaatatccatcgtggacaactgca

SEQ ID NO: 9665 - DNA, 26 bp, Homo sapiens
ccaatatccatcgtggacaactgcag

SEQ ID NO: 9666 - DNA, 26 bp, Homo sapiens
caatatccatcgtggacaactgcagc

SEQ ID NO: 9667 - DNA, 26 bp, Homo sapiens
aatatccatcgtggacaactgcagct

SEQ ID NO: 9668 - DNA, 26 bp, Homo sapiens
atatccatcgtggacaactgcagcta

SEQ ID NO: 9669 - DNA, 26 bp, Homo sapiens
tatccatcgtggacaactgcagctac

SEQ ID NO: 9670 - DNA, 26 bp, Homo sapiens
atccatcgtggacaactgcagctacg

SEQ ID NO: 9671 - DNA, 26 bp, Homo sapiens
tccatcgtggacaactgcagctacgt

SEQ ID NO: 9672 - DNA, 26 bp, Homo sapiens
ccatcgtggacaactgcagctacgtt

SEQ ID NO: 9673 - DNA, 26 bp, Homo sapiens
catcgtggacaactgcagctacgttt

SEQ ID NO: 9674 - DNA, 26 bp, Homo sapiens
atcgtggacaactgcagctacgtttt

SEQ ID NO: 9675 - DNA, 26 bp, Homo sapiens
tcgtggacaactgcagctacgttttc

SEQ ID NO: 9676 - DNA, 26 bp, Homo sapiens
cgtggacaactgcagctacgttttcc

SEQ ID NO: 9677 - DNA, 26 bp, Homo sapiens
gtggacaactgcagctacgttttcct

SEQ ID NO: 9678 - DNA, 26 bp, Homo sapiens
tggacaactgcagctacgttttcctt

SEQ ID NO: 9679 - DNA, 26 bp, Homo sapiens
ggacaactgcagctacgttttccttc

SEQ ID NO: 9680 - DNA, 26 bp, Homo sapiens
gacaactgcagctacgttttccttcc

SEQ ID NO: 9681 - DNA, 26 bp, Homo sapiens
acaactgcagctacgttttccttcct

SEQ ID NO: 9682 - DNA, 26 bp, Homo sapiens
caactgcagctacgttttccttcctt

SEQ ID NO: 9683 - DNA, 26 bp, Homo sapiens
aactgcagctacgttttccttcctta

SEQ ID NO: 9684 - DNA, 26 bp, Homo sapiens
actgcagctacgttttccttccttat

SEQ ID NO: 9685 - DNA, 26 bp, Homo sapiens
ctgcagctacgttttccttccttatt

SEQ ID NO: 9686 - DNA, 26 bp, Homo sapiens
tgcagctacgttttccttccttattt

SEQ ID NO: 9687 - DNA, 26 bp, Homo sapiens
gcagctacgttttccttccttatttt

SEQ ID NO: 9688 - DNA, 26 bp, Homo sapiens
cagctacgttttccttccttattttg

SEQ ID NO: 9689 - DNA, 26 bp, Homo sapiens
agctacgttttccttccttattttgt

SEQ ID NO: 9690 - DNA, 26 bp, Homo sapiens
gctacgttttccttccttattttgtc

SEQ ID NO: 9691 - DNA, 26 bp, Homo sapiens
ctacgttttccttccttattttgtct

SEQ ID NO: 9692 - DNA, 26 bp, Homo sapiens
tacgttttccttccttattttgtctt

SEQ ID NO: 9693 - DNA, 26 bp, Homo sapiens
acgttttccttccttattttgtctta

SEQ ID NO: 9694 - DNA, 26 bp, Homo sapiens
cgttttccttccttattttgtcttaa

SEQ ID NO: 9695 - DNA, 26 bp, Homo sapiens
gttttccttccttattttgtcttaag

SEQ ID NO: 9696 - DNA, 26 bp, Homo sapiens
ttttccttccttattttgtcttaagg

SEQ ID NO: 9697 - DNA, 26 bp, Homo sapiens
tttccttccttattttgtcttaagga

SEQ ID NO: 9698 - DNA, 26 bp, Homo sapiens
ttccttccttattttgtcttaaggac

SEQ ID NO: 9699 - DNA, 26 bp, Homo sapiens
tccttccttattttgtcttaaggaca

SEQ ID NO: 9700 - DNA, 26 bp, Homo sapiens
ccttccttattttgtcttaaggacac

SEQ ID NO: 9701 - DNA, 26 bp, Homo sapiens
cttccttattttgtcttaaggacaca

SEQ ID NO: 9702 - DNA, 26 bp, Homo sapiens
ttccttattttgtcttaaggacacaa

SEQ ID NO: 9703 - DNA, 26 bp, Homo sapiens
tccttattttgtcttaaggacacaag

SEQ ID NO: 9704 - DNA, 26 bp, Homo sapiens
ccttattttgtcttaaggacacaaga

SEQ ID NO: 9705 - DNA, 26 bp, Homo sapiens
cttattttgtcttaaggacacaagaa

SEQ ID NO: 9706 - DNA, 26 bp, Homo sapiens
ttattttgtcttaaggacacaagaaa

SEQ ID NO: 9707 - DNA, 26 bp, Homo sapiens
tattttgtcttaaggacacaagaaaa

SEQ ID NO: 9708 - DNA, 26 bp, Homo sapiens
attttgtcttaaggacacaagaaaag

SEQ ID NO: 9709 - DNA, 26 bp, Homo sapiens
ttttgtcttaaggacacaagaaaagc

SEQ ID NO: 9710 - DNA, 26 bp, Homo sapiens
tttgtcttaaggacacaagaaaagct

SEQ ID NO: 9711 - DNA, 26 bp, Homo sapiens
ttgtcttaaggacacaagaaaagctg

SEQ ID NO: 9712 - DNA, 26 bp, Homo sapiens
tgtcttaaggacacaagaaaagctgt

SEQ ID NO: 9713 - DNA, 26 bp, Homo sapiens
gtcttaaggacacaagaaaagctgtt

SEQ ID NO: 9714 - DNA, 26 bp, Homo sapiens
tcttaaggacacaagaaaagctgttt

SEQ ID NO: 9715 - DNA, 26 bp, Homo sapiens
cttaaggacacaagaaaagctgtttc

SEQ ID NO: 9716 - DNA, 26 bp, Homo sapiens
ttaaggacacaagaaaagctgtttca

SEQ ID NO: 9717 - DNA, 26 bp, Homo sapiens
taaggacacaagaaaagctgtttcat

SEQ ID NO: 9718 - DNA, 26 bp, Homo sapiens
aaggacacaagaaaagctgtttcatt

SEQ ID NO: 9719 - DNA, 26 bp, Homo sapiens
aggacacaagaaaagctgtttcattt

SEQ ID NO: 9720 - DNA, 26 bp, Homo sapiens
ggacacaagaaaagctgtttcatttt

SEQ ID NO: 9721 - DNA, 26 bp, Homo sapiens
gacacaagaaaagctgtttcatttta

SEQ ID NO: 9722 - DNA, 26 bp, Homo sapiens
acacaagaaaagctgtttcattttag

SEQ ID NO: 9723 - DNA, 26 bp, Homo sapiens
cacaagaaaagctgtttcattttagt

SEQ ID NO: 9724 - DNA, 26 bp, Homo sapiens
acaagaaaagctgtttcattttagta

SEQ ID NO: 9725 - DNA, 26 bp, Homo sapiens
caagaaaagctgtttcattttagtat

SEQ ID NO: 9726 - DNA, 26 bp, Homo sapiens
aagaaaagctgtttcattttagtatt

SEQ ID NO: 9727 - DNA, 26 bp, Homo sapiens
agaaaagctgtttcattttagtatta

SEQ ID NO: 9728 - DNA, 26 bp, Homo sapiens
gaaaagctgtttcattttagtattaa

SEQ ID NO: 9729 - DNA, 26 bp, Homo sapiens
aaaagctgtttcattttagtattaat

SEQ ID NO: 9730 - DNA, 26 bp, Homo sapiens
aaagctgtttcattttagtattaatt

SEQ ID NO: 9731 - DNA, 26 bp, Homo sapiens
aagctgtttcattttagtattaattt

SEQ ID NO: 9732 - DNA, 26 bp, Homo sapiens
agctgtttcattttagtattaatttg

SEQ ID NO: 9733 - DNA, 26 bp, Homo sapiens
gctgtttcattttagtattaatttgt

SEQ ID NO: 9734 - DNA, 26 bp, Homo sapiens
ctgtttcattttagtattaatttgtt

SEQ ID NO: 9735 - DNA, 26 bp, Homo sapiens
tgtttcattttagtattaatttgtta

SEQ ID NO: 9736 - DNA, 26 bp, Homo sapiens
gtttcattttagtattaatttgttag

SEQ ID NO: 9737 - DNA, 26 bp, Homo sapiens
tttcattttagtattaatttgttagg

SEQ ID NO: 9738 - DNA, 26 bp, Homo sapiens
ttcattttagtattaatttgttagga

SEQ ID NO: 9739 - DNA, 26 bp, Homo sapiens
tcattttagtattaatttgttaggaa

SEQ ID NO: 9740 - DNA, 26 bp, Homo sapiens
cattttagtattaatttgttaggaag

SEQ ID NO: 9741 - DNA, 26 bp, Homo sapiens
attttagtattaatttgttaggaagg

SEQ ID NO: 9742 - DNA, 26 bp, Homo sapiens
ttttagtattaatttgttaggaagga

SEQ ID NO: 9743 - DNA, 26 bp, Homo sapiens
tttagtattaatttgttaggaaggaa

SEQ ID NO: 9744 - DNA, 26 bp, Homo sapiens
ttagtattaatttgttaggaaggaag

SEQ ID NO: 9745 - DNA, 26 bp, Homo sapiens
tagtattaatttgttaggaaggaaga

SEQ ID NO: 9746 - DNA, 26 bp, Homo sapiens
agtattaatttgttaggaaggaagac

SEQ ID NO: 9747 - DNA, 26 bp, Homo sapiens
gtattaatttgttaggaaggaagacc

SEQ ID NO: 9748 - DNA, 26 bp, Homo sapiens
tattaatttgttaggaaggaagacct

SEQ ID NO: 9749 - DNA, 26 bp, Homo sapiens
attaatttgttaggaaggaagacctc

SEQ ID NO: 9750 - DNA, 26 bp, Homo sapiens
ttaatttgttaggaaggaagacctca

SEQ ID NO: 9751 - DNA, 26 bp, Homo sapiens
taatttgttaggaaggaagacctcaa

SEQ ID NO: 9752 - DNA, 26 bp, Homo sapiens
aatttgttaggaaggaagacctcaat

SEQ ID NO: 9753 - DNA, 26 bp, Homo sapiens
atttgttaggaaggaagacctcaata

SEQ ID NO: 9754 - DNA, 26 bp, Homo sapiens
tttgttaggaaggaagacctcaatat

SEQ ID NO: 9755 - DNA, 26 bp, Homo sapiens
ttgttaggaaggaagacctcaatatc

SEQ ID NO: 9756 - DNA, 26 bp, Homo sapiens
tgttaggaaggaagacctcaatatca

SEQ ID NO: 9757 - DNA, 26 bp, Homo sapiens
gttaggaaggaagacctcaatatcac

SEQ ID NO: 9758 - DNA, 26 bp, Homo sapiens
ttaggaaggaagacctcaatatcaca

SEQ ID NO: 9759 - DNA, 26 bp, Homo sapiens
taggaaggaagacctcaatatcacaa

SEQ ID NO: 9760 - DNA, 26 bp, Homo sapiens
aggaaggaagacctcaatatcacaac

SEQ ID NO: 9761 - DNA, 26 bp, Homo sapiens
ggaaggaagacctcaatatcacaacc

SEQ ID NO: 9762 - DNA, 26 bp, Homo sapiens
gaaggaagacctcaatatcacaacca

SEQ ID NO: 9763 - DNA, 26 bp, Homo sapiens
aaggaagacctcaatatcacaaccag

SEQ ID NO: 9764 - DNA, 26 bp, Homo sapiens
aggaagacctcaatatcacaaccagg

SEQ ID NO: 9765 - DNA, 26 bp, Homo sapiens
ggaagacctcaatatcacaaccagga

SEQ ID NO: 9766 - DNA, 26 bp, Homo sapiens
gaagacctcaatatcacaaccaggac

SEQ ID NO: 9767 - DNA, 26 bp, Homo sapiens
aagacctcaatatcacaaccaggaca

SEQ ID NO: 9768 - DNA, 26 bp, Homo sapiens
agacctcaatatcacaaccaggacac

SEQ ID NO: 9769 - DNA, 26 bp, Homo sapiens
gacctcaatatcacaaccaggacaca

SEQ ID NO: 9770 - DNA, 26 bp, Homo sapiens
acctcaatatcacaaccaggacacaa

SEQ ID NO: 9771 - DNA, 26 bp, Homo sapiens
cctcaatatcacaaccaggacacaac

SEQ ID NO: 9772 - DNA, 26 bp, Homo sapiens
ctcaatatcacaaccaggacacaacc

SEQ ID NO: 9773 - DNA, 26 bp, Homo sapiens
tcaatatcacaaccaggacacaaccc

SEQ ID NO: 9774 - DNA, 26 bp, Homo sapiens
caatatcacaaccaggacacaacccc

SEQ ID NO: 9775 - DNA, 26 bp, Homo sapiens
aatatcacaaccaggacacaacccca

SEQ ID NO: 9776 - DNA, 26 bp, Homo sapiens
atatcacaaccaggacacaaccccat

SEQ ID NO: 9777 - DNA, 26 bp, Homo sapiens
tatcacaaccaggacacaaccccatg

SEQ ID NO: 9778 - DNA, 26 bp, Homo sapiens
atcacaaccaggacacaaccccatgc

SEQ ID NO: 9779 - DNA, 26 bp, Homo sapiens
tcacaaccaggacacaaccccatgcc

SEQ ID NO: 9780 - DNA, 26 bp, Homo sapiens
cacaaccaggacacaaccccatgccc

SEQ ID NO: 9781 - DNA, 26 bp, Homo sapiens
acaaccaggacacaaccccatgccca

SEQ ID NO: 9782 - DNA, 26 bp, Homo sapiens
caaccaggacacaaccccatgcccac

SEQ ID NO: 9783 - DNA, 26 bp, Homo sapiens
aaccaggacacaaccccatgcccaca

SEQ ID NO: 9784 - DNA, 26 bp, Homo sapiens
accaggacacaaccccatgcccacac

SEQ ID NO: 9785 - DNA, 26 bp, Homo sapiens
ccaggacacaaccccatgcccacaca

SEQ ID NO: 9786 - DNA, 26 bp, Homo sapiens
caggacacaaccccatgcccacacac

SEQ ID NO: 9787 - DNA, 26 bp, Homo sapiens
aggacacaaccccatgcccacacacg

SEQ ID NO: 9788 - DNA, 26 bp, Homo sapiens
ggacacaaccccatgcccacacacgc

SEQ ID NO: 9789 - DNA, 26 bp, Homo sapiens
gacacaaccccatgcccacacacgca

SEQ ID NO: 9790 - DNA, 26 bp, Homo sapiens
acacaaccccatgcccacacacgcac

SEQ ID NO: 9791 - DNA, 26 bp, Homo sapiens
cacaaccccatgcccacacacgcaca

SEQ ID NO: 9792 - DNA, 26 bp, Homo sapiens
acaaccccatgcccacacacgcacac

SEQ ID NO: 9793 - DNA, 26 bp, Homo sapiens
caaccccatgcccacacacgcacaca

SEQ ID NO: 9794 - DNA, 26 bp, Homo sapiens
aaccccatgcccacacacgcacacac

SEQ ID NO: 9795 - DNA, 26 bp, Homo sapiens
accccatgcccacacacgcacacaca

SEQ ID NO: 9796 - DNA, 26 bp, Homo sapiens
ccccatgcccacacacgcacacacac

SEQ ID NO: 9797 - DNA, 26 bp, Homo sapiens
cccatgcccacacacgcacacacacg

SEQ ID NO: 9798 - DNA, 26 bp, Homo sapiens
ccatgcccacacacgcacacacacgc

SEQ ID NO: 9799 - DNA, 26 bp, Homo sapiens
catgcccacacacgcacacacacgca

SEQ ID NO: 9800 - DNA, 26 bp, Homo sapiens
atgcccacacacgcacacacacgcac

SEQ ID NO: 9801 - DNA, 26 bp, Homo sapiens
tgcccacacacgcacacacacgcacg

SEQ ID NO: 9802 - DNA, 26 bp, Homo sapiens
gcccacacacgcacacacacgcacgc

SEQ ID NO: 9803 - DNA, 26 bp, Homo sapiens
cccacacacgcacacacacgcacgca

SEQ ID NO: 9804 - DNA, 26 bp, Homo sapiens
ccacacacgcacacacacgcacgcac

SEQ ID NO: 9805 - DNA, 26 bp, Homo sapiens
cacacacgcacacacacgcacgcaca

SEQ ID NO: 9806 - DNA, 26 bp, Homo sapiens
acacacgcacacacacgcacgcacac

SEQ ID NO: 9807 - DNA, 26 bp, Homo sapiens
cacacgcacacacacgcacgcacaca

SEQ ID NO: 9808 - DNA, 26 bp, Homo sapiens
acacgcacacacacgcacgcacacac

SEQ ID NO: 9809 - DNA, 26 bp, Homo sapiens
cacgcacacacacgcacgcacacaca

SEQ ID NO: 9810 - DNA, 26 bp, Homo sapiens
acgcacacacacgcacgcacacacac

SEQ ID NO: 9811 - DNA, 26 bp, Homo sapiens
cgcacacacacgcacgcacacacaca

SEQ ID NO: 9812 - DNA, 26 bp, Homo sapiens
gcacacacacgcacgcacacacacat

SEQ ID NO: 9813 - DNA, 26 bp, Homo sapiens
cacacacacgcacgcacacacacata

SEQ ID NO: 9814 - DNA, 26 bp, Homo sapiens
acacacacgcacgcacacacacatat

SEQ ID NO: 9815 - DNA, 26 bp, Homo sapiens
cacacacgcacgcacacacacatatg

SEQ ID NO: 9816 - DNA, 26 bp, Homo sapiens
acacacgcacgcacacacacatatgt

SEQ ID NO: 9817 - DNA, 26 bp, Homo sapiens
cacacgcacgcacacacacatatgta

SEQ ID NO: 9818 - DNA, 26 bp, Homo sapiens
acacgcacgcacacacacatatgtag

SEQ ID NO: 9819 - DNA, 26 bp, Homo sapiens
cacgcacgcacacacacatatgtaga

SEQ ID NO: 9820 - DNA, 26 bp, Homo sapiens
acgcacgcacacacacatatgtagag

SEQ ID NO: 9821 - DNA, 26 bp, Homo sapiens
cgcacgcacacacacatatgtagagt

SEQ ID NO: 9822 - DNA, 26 bp, Homo sapiens
gcacgcacacacacatatgtagagta

SEQ ID NO: 9823 - DNA, 26 bp, Homo sapiens
cacgcacacacacatatgtagagtaa

SEQ ID NO: 9824 - DNA, 26 bp, Homo sapiens
acgcacacacacatatgtagagtaag

SEQ ID NO: 9825 - DNA, 26 bp, Homo sapiens
cgcacacacacatatgtagagtaaga

SEQ ID NO: 9826 - DNA, 26 bp, Homo sapiens
gcacacacacatatgtagagtaagaa

SEQ ID NO: 9827 - DNA, 26 bp, Homo sapiens
cacacacacatatgtagagtaagaaa

SEQ ID NO: 9828 - DNA, 26 bp, Homo sapiens
acacacacatatgtagagtaagaaaa

SEQ ID NO: 9829 - DNA, 26 bp, Homo sapiens
cacacacatatgtagagtaagaaaaa

SEQ ID NO: 9830 - DNA, 26 bp, Homo sapiens
acacacatatgtagagtaagaaaaat

SEQ ID NO: 9831 - DNA, 26 bp, Homo sapiens
cacacatatgtagagtaagaaaaatc

SEQ ID NO: 9832 - DNA, 26 bp, Homo sapiens
acacatatgtagagtaagaaaaatct

SEQ ID NO: 9833 - DNA, 26 bp, Homo sapiens
cacatatgtagagtaagaaaaatcta

SEQ ID NO: 9834 - DNA, 26 bp, Homo sapiens
acatatgtagagtaagaaaaatctat

SEQ ID NO: 9835 - DNA, 26 bp, Homo sapiens
catatgtagagtaagaaaaatctatt

SEQ ID NO: 9836 - DNA, 26 bp, Homo sapiens
atatgtagagtaagaaaaatctattc

SEQ ID NO: 9837 - DNA, 26 bp, Homo sapiens
tatgtagagtaagaaaaatctattcc

SEQ ID NO: 9838 - DNA, 26 bp, Homo sapiens
atgtagagtaagaaaaatctattcct

SEQ ID NO: 9839 - DNA, 26 bp, Homo sapiens
tgtagagtaagaaaaatctattcctg

SEQ ID NO: 9840 - DNA, 26 bp, Homo sapiens
gtagagtaagaaaaatctattcctgg

SEQ ID NO: 9841 - DNA, 26 bp, Homo sapiens
tagagtaagaaaaatctattcctgga

SEQ ID NO: 9842 - DNA, 26 bp, Homo sapiens
agagtaagaaaaatctattcctggat

SEQ ID NO: 9843 - DNA, 26 bp, Homo sapiens
gagtaagaaaaatctattcctggatg

SEQ ID NO: 9844 - DNA, 26 bp, Homo sapiens
agtaagaaaaatctattcctggatgg

SEQ ID NO: 9845 - DNA, 26 bp, Homo sapiens
gtaagaaaaatctattcctggatgga

SEQ ID NO: 9846 - DNA, 26 bp, Homo sapiens
taagaaaaatctattcctggatggaa

SEQ ID NO: 9847 - DNA, 26 bp, Homo sapiens
aagaaaaatctattcctggatggaag

SEQ ID NO: 9848 - DNA, 26 bp, Homo sapiens
agaaaaatctattcctggatggaagg

SEQ ID NO: 9849 - DNA, 26 bp, Homo sapiens
gaaaaatctattcctggatggaagga

SEQ ID NO: 9850 - DNA, 26 bp, Homo sapiens
aaaaatctattcctggatggaaggat

SEQ ID NO: 9851 - DNA, 26 bp, Homo sapiens
aaaatctattcctggatggaaggata

SEQ ID NO: 9852 - DNA, 26 bp, Homo sapiens
aaatctattcctggatggaaggatat

SEQ ID NO: 9853 - DNA, 26 bp, Homo sapiens
aatctattcctggatggaaggatatc

SEQ ID NO: 9854 - DNA, 26 bp, Homo sapiens
atctattcctggatggaaggatatca

SEQ ID NO: 9855 - DNA, 26 bp, Homo sapiens
tctattcctggatggaaggatatcaa

SEQ ID NO: 9856 - DNA, 26 bp, Homo sapiens
ctattcctggatggaaggatatcaac

SEQ ID NO: 9857 - DNA, 26 bp, Homo sapiens
tattcctggatggaaggatatcaacg

SEQ ID NO: 9858 - DNA, 26 bp, Homo sapiens
attcctggatggaaggatatcaacga

SEQ ID NO: 9859 - DNA, 26 bp, Homo sapiens
ttcctggatggaaggatatcaacgat

SEQ ID NO: 9860 - DNA, 26 bp, Homo sapiens
tcctggatggaaggatatcaacgata

SEQ ID NO: 9861 - DNA, 26 bp, Homo sapiens
cctggatggaaggatatcaacgatag

SEQ ID NO: 9862 - DNA, 26 bp, Homo sapiens
ctggatggaaggatatcaacgataga

SEQ ID NO: 9863 - DNA, 26 bp, Homo sapiens
tggatggaaggatatcaacgatagag

SEQ ID NO: 9864 - DNA, 26 bp, Homo sapiens
ggatggaaggatatcaacgatagaga

SEQ ID NO: 9865 - DNA, 26 bp, Homo sapiens
gatggaaggatatcaacgatagagat

SEQ ID NO: 9866 - DNA, 26 bp, Homo sapiens
atggaaggatatcaacgatagagatg

SEQ ID NO: 9867 - DNA, 26 bp, Homo sapiens
tggaaggatatcaacgatagagatga

SEQ ID NO: 9868 - DNA, 26 bp, Homo sapiens
ggaaggatatcaacgatagagatgat

SEQ ID NO: 9869 - DNA, 26 bp, Homo sapiens
gaaggatatcaacgatagagatgatg

SEQ ID NO: 9870 - DNA, 26 bp, Homo sapiens
aaggatatcaacgatagagatgatgg

SEQ ID NO: 9871 - DNA, 26 bp, Homo sapiens
aggatatcaacgatagagatgatgga

SEQ ID NO: 9872 - DNA, 26 bp, Homo sapiens
ggatatcaacgatagagatgatggat

SEQ ID NO: 9873 - DNA, 26 bp, Homo sapiens
gatatcaacgatagagatgatggatt

SEQ ID NO: 9874 - DNA, 26 bp, Homo sapiens
atatcaacgatagagatgatggattt

SEQ ID NO: 9875 - DNA, 26 bp, Homo sapiens
tatcaacgatagagatgatggatttc

SEQ ID NO: 9876 - DNA, 26 bp, Homo sapiens
atcaacgatagagatgatggatttct

SEQ ID NO: 9877 - DNA, 26 bp, Homo sapiens
tcaacgatagagatgatggatttcta

SEQ ID NO: 9878 - DNA, 26 bp, Homo sapiens
caacgatagagatgatggatttctag

SEQ ID NO: 9879 - DNA, 26 bp, Homo sapiens
aacgatagagatgatggatttctagt

SEQ ID NO: 9880 - DNA, 26 bp, Homo sapiens
acgatagagatgatggatttctagtc

SEQ ID NO: 9881 - DNA, 26 bp, Homo sapiens
cgatagagatgatggatttctagtct

SEQ ID NO: 9882 - DNA, 26 bp, Homo sapiens
gatagagatgatggatttctagtcta

SEQ ID NO: 9883 - DNA, 26 bp, Homo sapiens
atagagatgatggatttctagtctag

SEQ ID NO: 9884 - DNA, 26 bp, Homo sapiens
tagagatgatggatttctagtctaga

SEQ ID NO: 9885 - DNA, 26 bp, Homo sapiens
agagatgatggatttctagtctagac

SEQ ID NO: 9886 - DNA, 26 bp, Homo sapiens
gagatgatggatttctagtctagacc

SEQ ID NO: 9887 - DNA, 26 bp, Homo sapiens
agatgatggatttctagtctagaccc

SEQ ID NO: 9888 - DNA, 26 bp, Homo sapiens
gatgatggatttctagtctagaccct

SEQ ID NO: 9889 - DNA, 26 bp, Homo sapiens
atgatggatttctagtctagaccctg

SEQ ID NO: 9890 - DNA, 26 bp, Homo sapiens
tgatggatttctagtctagaccctgt

SEQ ID NO: 9891 - DNA, 26 bp, Homo sapiens
gatggatttctagtctagaccctgtg

SEQ ID NO: 9892 - DNA, 26 bp, Homo sapiens
atggatttctagtctagaccctgtgg

SEQ ID NO: 9893 - DNA, 26 bp, Homo sapiens
tggatttctagtctagaccctgtggg

SEQ ID NO: 9894 - DNA, 26 bp, Homo sapiens
ggatttctagtctagaccctgtggga

SEQ ID NO: 9895 - DNA, 26 bp, Homo sapiens
gatttctagtctagaccctgtgggag

SEQ ID NO: 9896 - DNA, 26 bp, Homo sapiens
atttctagtctagaccctgtgggagt

SEQ ID NO: 9897 - DNA, 26 bp, Homo sapiens
tttctagtctagaccctgtgggagtg

SEQ ID NO: 9898 - DNA, 26 bp, Homo sapiens
ttctagtctagaccctgtgggagtga

SEQ ID NO: 9899 - DNA, 26 bp, Homo sapiens
tctagtctagaccctgtgggagtgag

SEQ ID NO: 9900 - DNA, 26 bp, Homo sapiens
ctagtctagaccctgtgggagtgagg

SEQ ID NO: 9901 - DNA, 26 bp, Homo sapiens
tagtctagaccctgtgggagtgaggt

SEQ ID NO: 9902 - DNA, 26 bp, Homo sapiens
agtctagaccctgtgggagtgaggta

SEQ ID NO: 9903 - DNA, 26 bp, Homo sapiens
gtctagaccctgtgggagtgaggtaa

SEQ ID NO: 9904 - DNA, 26 bp, Homo sapiens
tctagaccctgtgggagtgaggtaac

SEQ ID NO: 9905 - DNA, 26 bp, Homo sapiens
ctagaccctgtgggagtgaggtaaca

SEQ ID NO: 9906 - DNA, 26 bp, Homo sapiens
tagaccctgtgggagtgaggtaacaa

SEQ ID NO: 9907 - DNA, 26 bp, Homo sapiens
agaccctgtgggagtgaggtaacaat

SEQ ID NO: 9908 - DNA, 26 bp, Homo sapiens
gaccctgtgggagtgaggtaacaatt

SEQ ID NO: 9909 - DNA, 26 bp, Homo sapiens
accctgtgggagtgaggtaacaattc

SEQ ID NO: 9910 - DNA, 26 bp, Homo sapiens
ccctgtgggagtgaggtaacaattcc

SEQ ID NO: 9911 - DNA, 26 bp, Homo sapiens
cctgtgggagtgaggtaacaattcct

SEQ ID NO: 9912 - DNA, 26 bp, Homo sapiens
ctgtgggagtgaggtaacaattcctg

SEQ ID NO: 9913 - DNA, 26 bp, Homo sapiens
tgtgggagtgaggtaacaattcctgc

SEQ ID NO: 9914 - DNA, 26 bp, Homo sapiens
gtgggagtgaggtaacaattcctgca

SEQ ID NO: 9915 - DNA, 26 bp, Homo sapiens
tgggagtgaggtaacaattcctgcag

SEQ ID NO: 9916 - DNA, 26 bp, Homo sapiens
gggagtgaggtaacaattcctgcaga

SEQ ID NO: 9917 - DNA, 26 bp, Homo sapiens
ggagtgaggtaacaattcctgcagac

SEQ ID NO: 9918 - DNA, 26 bp, Homo sapiens
gagtgaggtaacaattcctgcagact

SEQ ID NO: 9919 - DNA, 26 bp, Homo sapiens
agtgaggtaacaattcctgcagactg

SEQ ID NO: 9920 - DNA, 26 bp, Homo sapiens
gtgaggtaacaattcctgcagactga

SEQ ID NO: 9921 - DNA, 26 bp, Homo sapiens
tgaggtaacaattcctgcagactgag

SEQ ID NO: 9922 - DNA, 26 bp, Homo sapiens
gaggtaacaattcctgcagactgagc

SEQ ID NO: 9923 - DNA, 26 bp, Homo sapiens
aggtaacaattcctgcagactgagca

SEQ ID NO: 9924 - DNA, 26 bp, Homo sapiens
ggtaacaattcctgcagactgagcac

SEQ ID NO: 9925 - DNA, 26 bp, Homo sapiens
gtaacaattcctgcagactgagcaca

SEQ ID NO: 9926 - DNA, 26 bp, Homo sapiens
taacaattcctgcagactgagcacat

SEQ ID NO: 9927 - DNA, 26 bp, Homo sapiens
aacaattcctgcagactgagcacatg

SEQ ID NO: 9928 - DNA, 26 bp, Homo sapiens
acaattcctgcagactgagcacatgc

SEQ ID NO: 9929 - DNA, 26 bp, Homo sapiens
caattcctgcagactgagcacatgcc

SEQ ID NO: 9930 - DNA, 26 bp, Homo sapiens
aattcctgcagactgagcacatgcct

SEQ ID NO: 9931 - DNA, 26 bp, Homo sapiens
attcctgcagactgagcacatgccta

SEQ ID NO: 9932 - DNA, 26 bp, Homo sapiens
ttcctgcagactgagcacatgcctac

SEQ ID NO: 9933 - DNA, 26 bp, Homo sapiens
tcctgcagactgagcacatgcctact

SEQ ID NO: 9934 - DNA, 26 bp, Homo sapiens
cctgcagactgagcacatgcctactg

SEQ ID NO: 9935 - DNA, 26 bp, Homo sapiens
ctgcagactgagcacatgcctactgc

SEQ ID NO: 9936 - DNA, 26 bp, Homo sapiens
tgcagactgagcacatgcctactgct

SEQ ID NO: 9937 - DNA, 26 bp, Homo sapiens
gcagactgagcacatgcctactgctg

SEQ ID NO: 9938 - DNA, 26 bp, Homo sapiens
cagactgagcacatgcctactgctgc

SEQ ID NO: 9939 - DNA, 26 bp, Homo sapiens
agactgagcacatgcctactgctgca

SEQ ID NO: 9940 - DNA, 26 bp, Homo sapiens
gactgagcacatgcctactgctgcag

SEQ ID NO: 9941 - DNA, 26 bp, Homo sapiens
actgagcacatgcctactgctgcagc

SEQ ID NO: 9942 - DNA, 26 bp, Homo sapiens
ctgagcacatgcctactgctgcagct

SEQ ID NO: 9943 - DNA, 26 bp, Homo sapiens
tgagcacatgcctactgctgcagctc

SEQ ID NO: 9944 - DNA, 26 bp, Homo sapiens
gagcacatgcctactgctgcagctcc

SEQ ID NO: 9945 - DNA, 26 bp, Homo sapiens
agcacatgcctactgctgcagctcct

SEQ ID NO: 9946 - DNA, 26 bp, Homo sapiens
gcacatgcctactgctgcagctcctc

SEQ ID NO: 9947 - DNA, 26 bp, Homo sapiens
cacatgcctactgctgcagctcctca

SEQ ID NO: 9948 - DNA, 26 bp, Homo sapiens
acatgcctactgctgcagctcctcaa

SEQ ID NO: 9949 - DNA, 26 bp, Homo sapiens
catgcctactgctgcagctcctcaag

SEQ ID NO: 9950 - DNA, 26 bp, Homo sapiens
atgcctactgctgcagctcctcaagg

SEQ ID NO: 9951 - DNA, 26 bp, Homo sapiens
tgcctactgctgcagctcctcaaggg

SEQ ID NO: 9952 - DNA, 26 bp, Homo sapiens
gcctactgctgcagctcctcaagggc

SEQ ID NO: 9953 - DNA, 26 bp, Homo sapiens
cctactgctgcagctcctcaagggcc

SEQ ID NO: 9954 - DNA, 26 bp, Homo sapiens
ctactgctgcagctcctcaagggccg

SEQ ID NO: 9955 - DNA, 26 bp, Homo sapiens
tactgctgcagctcctcaagggccga

SEQ ID NO: 9956 - DNA, 26 bp, Homo sapiens
actgctgcagctcctcaagggccgat

SEQ ID NO: 9957 - DNA, 26 bp, Homo sapiens
ctgctgcagctcctcaagggccgatt

SEQ ID NO: 9958 - DNA, 26 bp, Homo sapiens
tgctgcagctcctcaagggccgatta

SEQ ID NO: 9959 - DNA, 26 bp, Homo sapiens
gctgcagctcctcaagggccgattat

SEQ ID NO: 9960 - DNA, 26 bp, Homo sapiens
ctgcagctcctcaagggccgattatt

SEQ ID NO: 9961 - DNA, 26 bp, Homo sapiens
tgcagctcctcaagggccgattattg

SEQ ID NO: 9962 - DNA, 26 bp, Homo sapiens
gcagctcctcaagggccgattattgc

SEQ ID NO: 9963 - DNA, 26 bp, Homo sapiens
cagctcctcaagggccgattattgcc

SEQ ID NO: 9964 - DNA, 26 bp, Homo sapiens
agctcctcaagggccgattattgccc

SEQ ID NO: 9965 - DNA, 26 bp, Homo sapiens
gctcctcaagggccgattattgcccc

SEQ ID NO: 9966 - DNA, 26 bp, Homo sapiens
ctcctcaagggccgattattgccccc

SEQ ID NO: 9967 - DNA, 26 bp, Homo sapiens
tcctcaagggccgattattgccccca

SEQ ID NO: 9968 - DNA, 26 bp, Homo sapiens
cctcaagggccgattattgcccccat

SEQ ID NO: 9969 - DNA, 26 bp, Homo sapiens
ctcaagggccgattattgcccccatc

SEQ ID NO: 9970 - DNA, 26 bp, Homo sapiens
tcaagggccgattattgcccccatcc

SEQ ID NO: 9971 - DNA, 26 bp, Homo sapiens
caagggccgattattgcccccatcct

SEQ ID NO: 9972 - DNA, 26 bp, Homo sapiens
aagggccgattattgcccccatcctt

SEQ ID NO: 9973 - DNA, 26 bp, Homo sapiens
agggccgattattgcccccatccttt

SEQ ID NO: 9974 - DNA, 26 bp, Homo sapiens
gggccgattattgcccccatccttta

SEQ ID NO: 9975 - DNA, 26 bp, Homo sapiens
ggccgattattgcccccatcctttag

SEQ ID NO: 9976 - DNA, 26 bp, Homo sapiens
gccgattattgcccccatcctttagc

SEQ ID NO: 9977 - DNA, 26 bp, Homo sapiens
ccgattattgcccccatcctttagca

SEQ ID NO: 9978 - DNA, 26 bp, Homo sapiens
cgattattgcccccatcctttagcaa

SEQ ID NO: 9979 - DNA, 26 bp, Homo sapiens
gattattgcccccatcctttagcaaa

SEQ ID NO: 9980 - DNA, 26 bp, Homo sapiens
attattgcccccatcctttagcaaac

SEQ ID NO: 9981 - DNA, 26 bp, Homo sapiens
ttattgcccccatcctttagcaaaca

SEQ ID NO: 9982 - DNA, 26 bp, Homo sapiens
tattgcccccatcctttagcaaacaa

SEQ ID NO: 9983 - DNA, 26 bp, Homo sapiens
attgcccccatcctttagcaaacaaa

SEQ ID NO: 9984 - DNA, 26 bp, Homo sapiens
ttgcccccatcctttagcaaacaaaa

SEQ ID NO: 9985 - DNA, 26 bp, Homo sapiens
tgcccccatcctttagcaaacaaaat

SEQ ID NO: 9986 - DNA, 26 bp, Homo sapiens
gcccccatcctttagcaaacaaaatt

SEQ ID NO: 9987 - DNA, 26 bp, Homo sapiens
cccccatcctttagcaaacaaaatta

SEQ ID NO: 9988 - DNA, 26 bp, Homo sapiens
ccccatcctttagcaaacaaaattaa

SEQ ID NO: 9989 - DNA, 26 bp, Homo sapiens
cccatcctttagcaaacaaaattaac

SEQ ID NO: 9990 - DNA, 26 bp, Homo sapiens
ccatcctttagcaaacaaaattaact

SEQ ID NO: 9991 - DNA, 26 bp, Homo sapiens
catcctttagcaaacaaaattaactg

SEQ ID NO: 9992 - DNA, 26 bp, Homo sapiens
atcctttagcaaacaaaattaactgg

SEQ ID NO: 9993 - DNA, 26 bp, Homo sapiens
tcctttagcaaacaaaattaactggg

SEQ ID NO: 9994 - DNA, 26 bp, Homo sapiens
cctttagcaaacaaaattaactgggt

SEQ ID NO: 9995 - DNA, 26 bp, Homo sapiens
ctttagcaaacaaaattaactgggta

SEQ ID NO: 9996 - DNA, 26 bp, Homo sapiens
tttagcaaacaaaattaactgggtat

SEQ ID NO: 9997 - DNA, 26 bp, Homo sapiens
ttagcaaacaaaattaactgggtatc

SEQ ID NO: 9998 - DNA, 26 bp, Homo sapiens
tagcaaacaaaattaactgggtatca

SEQ ID NO: 9999 - DNA, 26 bp, Homo sapiens
agcaaacaaaattaactgggtatcaa

SEQ ID NO: 10000 - DNA, 26 bp, Homo sapiens
gcaaacaaaattaactgggtatcaat

SEQ ID NO: 10001 - DNA, 26 bp, Homo sapiens
caaacaaaattaactgggtatcaatc

SEQ ID NO: 10002 - DNA, 26 bp, Homo sapiens
aaacaaaattaactgggtatcaatct

SEQ ID NO: 10003 - DNA, 26 bp, Homo sapiens
aacaaaattaactgggtatcaatctt

SEQ ID NO: 10004 - DNA, 26 bp, Homo sapiens
acaaaattaactgggtatcaatcttt

SEQ ID NO: 10005 - DNA, 26 bp, Homo sapiens
caaaattaactgggtatcaatctttc

SEQ ID NO: 10006 - DNA, 26 bp, Homo sapiens
aaaattaactgggtatcaatctttcc

SEQ ID NO: 10007 - DNA, 26 bp, Homo sapiens
aaattaactgggtatcaatctttcct

SEQ ID NO: 10008 - DNA, 26 bp, Homo sapiens
aattaactgggtatcaatctttcctc

SEQ ID NO: 10009 - DNA, 26 bp, Homo sapiens
attaactgggtatcaatctttcctca

SEQ ID NO: 10010 - DNA, 26 bp, Homo sapiens
ttaactgggtatcaatctttcctcag

SEQ ID NO: 10011 - DNA, 26 bp, Homo sapiens
taactgggtatcaatctttcctcagc

SEQ ID NO: 10012 - DNA, 26 bp, Homo sapiens
aactgggtatcaatctttcctcagcc

SEQ ID NO: 10013 - DNA, 26 bp, Homo sapiens
actgggtatcaatctttcctcagcct

SEQ ID NO: 10014 - DNA, 26 bp, Homo sapiens
ctgggtatcaatctttcctcagcctt

SEQ ID NO: 10015 - DNA, 26 bp, Homo sapiens
tgggtatcaatctttcctcagccttc

SEQ ID NO: 10016 - DNA, 26 bp, Homo sapiens
gggtatcaatctttcctcagccttca

SEQ ID NO: 10017 - DNA, 26 bp, Homo sapiens
ggtatcaatctttcctcagccttcaa

SEQ ID NO: 10018 - DNA, 26 bp, Homo sapiens
gtatcaatctttcctcagccttcaaa

SEQ ID NO: 10019 - DNA, 26 bp, Homo sapiens
tatcaatctttcctcagccttcaaag

SEQ ID NO: 10020 - DNA, 26 bp, Homo sapiens
atcaatctttcctcagccttcaaagg

SEQ ID NO: 10021 - DNA, 26 bp, Homo sapiens
tcaatctttcctcagccttcaaaggc

SEQ ID NO: 10022 - DNA, 26 bp, Homo sapiens
caatctttcctcagccttcaaaggca

SEQ ID NO: 10023 - DNA, 26 bp, Homo sapiens
aatctttcctcagccttcaaaggcaa

SEQ ID NO: 10024 - DNA, 26 bp, Homo sapiens
atctttcctcagccttcaaaggcaaa

SEQ ID NO: 10025 - DNA, 26 bp, Homo sapiens
tctttcctcagccttcaaaggcaaaa

SEQ ID NO: 10026 - DNA, 26 bp, Homo sapiens
ctttcctcagccttcaaaggcaaaat

SEQ ID NO: 10027 - DNA, 26 bp, Homo sapiens
tttcctcagccttcaaaggcaaaatg

SEQ ID NO: 10028 - DNA, 26 bp, Homo sapiens
ttcctcagccttcaaaggcaaaatga

SEQ ID NO: 10029 - DNA, 26 bp, Homo sapiens
tcctcagccttcaaaggcaaaatgac

SEQ ID NO: 10030 - DNA, 26 bp, Homo sapiens
cctcagccttcaaaggcaaaatgact

SEQ ID NO: 10031 - DNA, 26 bp, Homo sapiens
ctcagccttcaaaggcaaaatgactc

SEQ ID NO: 10032 - DNA, 26 bp, Homo sapiens
tcagccttcaaaggcaaaatgactcc

SEQ ID NO: 10033 - DNA, 26 bp, Homo sapiens
cagccttcaaaggcaaaatgactcca

SEQ ID NO: 10034 - DNA, 26 bp, Homo sapiens
agccttcaaaggcaaaatgactccac

SEQ ID NO: 10035 - DNA, 26 bp, Homo sapiens
gccttcaaaggcaaaatgactccact

SEQ ID NO: 10036 - DNA, 26 bp, Homo sapiens
ccttcaaaggcaaaatgactccactt

SEQ ID NO: 10037 - DNA, 26 bp, Homo sapiens
cttcaaaggcaaaatgactccacttc

SEQ ID NO: 10038 - DNA, 26 bp, Homo sapiens
ttcaaaggcaaaatgactccacttcc

SEQ ID NO: 10039 - DNA, 26 bp, Homo sapiens
tcaaaggcaaaatgactccacttcct

SEQ ID NO: 10040 - DNA, 26 bp, Homo sapiens
caaaggcaaaatgactccacttcctc

SEQ ID NO: 10041 - DNA, 26 bp, Homo sapiens
aaaggcaaaatgactccacttcctct

SEQ ID NO: 10042 - DNA, 26 bp, Homo sapiens
aaggcaaaatgactccacttcctctt

SEQ ID NO: 10043 - DNA, 26 bp, Homo sapiens
aggcaaaatgactccacttcctcttt

SEQ ID NO: 10044 - DNA, 26 bp, Homo sapiens
ggcaaaatgactccacttcctctttc

SEQ ID NO: 10045 - DNA, 26 bp, Homo sapiens
gcaaaatgactccacttcctctttcc

SEQ ID NO: 10046 - DNA, 26 bp, Homo sapiens
caaaatgactccacttcctctttccc

SEQ ID NO: 10047 - DNA, 26 bp, Homo sapiens
aaaatgactccacttcctctttccct

SEQ ID NO: 10048 - DNA, 26 bp, Homo sapiens
aaatgactccacttcctctttccctt

SEQ ID NO: 10049 - DNA, 26 bp, Homo sapiens
aatgactccacttcctctttcccttg

SEQ ID NO: 10050 - DNA, 26 bp, Homo sapiens
atgactccacttcctctttcccttgc

SEQ ID NO: 10051 - DNA, 26 bp, Homo sapiens
tgactccacttcctctttcccttgct

SEQ ID NO: 10052 - DNA, 26 bp, Homo sapiens
gactccacttcctctttcccttgctt

SEQ ID NO: 10053 - DNA, 26 bp, Homo sapiens
actccacttcctctttcccttgcttg

SEQ ID NO: 10054 - DNA, 26 bp, Homo sapiens
ctccacttcctctttcccttgcttgg

SEQ ID NO: 10055 - DNA, 26 bp, Homo sapiens
tccacttcctctttcccttgcttggc

SEQ ID NO: 10056 - DNA, 26 bp, Homo sapiens
ccacttcctctttcccttgcttggct

SEQ ID NO: 10057 - DNA, 26 bp, Homo sapiens
cacttcctctttcccttgcttggctg

SEQ ID NO: 10058 - DNA, 26 bp, Homo sapiens
acttcctctttcccttgcttggctga

SEQ ID NO: 10059 - DNA, 26 bp, Homo sapiens
cttcctctttcccttgcttggctgaa

SEQ ID NO: 10060 - DNA, 26 bp, Homo sapiens
ttcctctttcccttgcttggctgaaa

SEQ ID NO: 10061 - DNA, 26 bp, Homo sapiens
tcctctttcccttgcttggctgaaat

SEQ ID NO: 10062 - DNA, 26 bp, Homo sapiens
cctctttcccttgcttggctgaaatg

SEQ ID NO: 10063 - DNA, 26 bp, Homo sapiens
ctctttcccttgcttggctgaaatgg

SEQ ID NO: 10064 - DNA, 26 bp, Homo sapiens
tctttcccttgcttggctgaaatgga

SEQ ID NO: 10065 - DNA, 26 bp, Homo sapiens
ctttcccttgcttggctgaaatggaa

SEQ ID NO: 10066 - DNA, 26 bp, Homo sapiens
tttcccttgcttggctgaaatggaat

SEQ ID NO: 10067 - DNA, 26 bp, Homo sapiens
ttcccttgcttggctgaaatggaatc

SEQ ID NO: 10068 - DNA, 26 bp, Homo sapiens
tcccttgcttggctgaaatggaatca

SEQ ID NO: 10069 - DNA, 26 bp, Homo sapiens
cccttgcttggctgaaatggaatcag

SEQ ID NO: 10070 - DNA, 26 bp, Homo sapiens
ccttgcttggctgaaatggaatcagc

SEQ ID NO: 10071 - DNA, 26 bp, Homo sapiens
cttgcttggctgaaatggaatcagca

SEQ ID NO: 10072 - DNA, 26 bp, Homo sapiens
ttgcttggctgaaatggaatcagcac

SEQ ID NO: 10073 - DNA, 26 bp, Homo sapiens
tgcttggctgaaatggaatcagcact

SEQ ID NO: 10074 - DNA, 26 bp, Homo sapiens
gcttggctgaaatggaatcagcactt

SEQ ID NO: 10075 - DNA, 26 bp, Homo sapiens
cttggctgaaatggaatcagcacttc

SEQ ID NO: 10076 - DNA, 26 bp, Homo sapiens
ttggctgaaatggaatcagcacttca

SEQ ID NO: 10077 - DNA, 26 bp, Homo sapiens
tggctgaaatggaatcagcacttcaa

SEQ ID NO: 10078 - DNA, 26 bp, Homo sapiens
ggctgaaatggaatcagcacttcaag

SEQ ID NO: 10079 - DNA, 26 bp, Homo sapiens
gctgaaatggaatcagcacttcaagc

SEQ ID NO: 10080 - DNA, 26 bp, Homo sapiens
ctgaaatggaatcagcacttcaagca

SEQ ID NO: 10081 - DNA, 26 bp, Homo sapiens
tgaaatggaatcagcacttcaagcaa

SEQ ID NO: 10082 - DNA, 26 bp, Homo sapiens
gaaatggaatcagcacttcaagcaag

SEQ ID NO: 10083 - DNA, 26 bp, Homo sapiens
aaatggaatcagcacttcaagcaagc

SEQ ID NO: 10084 - DNA, 26 bp, Homo sapiens
aatggaatcagcacttcaagcaagct

SEQ ID NO: 10085 - DNA, 26 bp, Homo sapiens
atggaatcagcacttcaagcaagcta

SEQ ID NO: 10086 - DNA, 26 bp, Homo sapiens
tggaatcagcacttcaagcaagctaa

SEQ ID NO: 10087 - DNA, 26 bp, Homo sapiens
ggaatcagcacttcaagcaagctaat

SEQ ID NO: 10088 - DNA, 26 bp, Homo sapiens
gaatcagcacttcaagcaagctaatg

SEQ ID NO: 10089 - DNA, 26 bp, Homo sapiens
aatcagcacttcaagcaagctaatgt

SEQ ID NO: 10090 - DNA, 26 bp, Homo sapiens
atcagcacttcaagcaagctaatgtg

SEQ ID NO: 10091 - DNA, 26 bp, Homo sapiens
tcagcacttcaagcaagctaatgtgc

SEQ ID NO: 10092 - DNA, 26 bp, Homo sapiens
cagcacttcaagcaagctaatgtgct

SEQ ID NO: 10093 - DNA, 26 bp, Homo sapiens
agcacttcaagcaagctaatgtgctt

SEQ ID NO: 10094 - DNA, 26 bp, Homo sapiens
gcacttcaagcaagctaatgtgcttc

SEQ ID NO: 10095 - DNA, 26 bp, Homo sapiens
cacttcaagcaagctaatgtgcttcc

SEQ ID NO: 10096 - DNA, 26 bp, Homo sapiens
acttcaagcaagctaatgtgcttccc

SEQ ID NO: 10097 - DNA, 26 bp, Homo sapiens
cttcaagcaagctaatgtgcttccct

SEQ ID NO: 10098 - DNA, 26 bp, Homo sapiens
ttcaagcaagctaatgtgcttcccta

SEQ ID NO: 10099 - DNA, 26 bp, Homo sapiens
tcaagcaagctaatgtgcttccctaa

SEQ ID NO: 10100 - DNA, 26 bp, Homo sapiens
caagcaagctaatgtgcttccctaag

SEQ ID NO: 10101 - DNA, 26 bp, Homo sapiens
aagcaagctaatgtgcttccctaagt

SEQ ID NO: 10102 - DNA, 26 bp, Homo sapiens
agcaagctaatgtgcttccctaagtt

SEQ ID NO: 10103 - DNA, 26 bp, Homo sapiens
gcaagctaatgtgcttccctaagttc

SEQ ID NO: 10104 - DNA, 26 bp, Homo sapiens
caagctaatgtgcttccctaagttct

SEQ ID NO: 10105 - DNA, 26 bp, Homo sapiens
aagctaatgtgcttccctaagttctc

SEQ ID NO: 10106 - DNA, 26 bp, Homo sapiens
agctaatgtgcttccctaagttctca

SEQ ID NO: 10107 - DNA, 26 bp, Homo sapiens
gctaatgtgcttccctaagttctcaa

SEQ ID NO: 10108 - DNA, 26 bp, Homo sapiens
ctaatgtgcttccctaagttctcaat

SEQ ID NO: 10109 - DNA, 26 bp, Homo sapiens
taatgtgcttccctaagttctcaatc

SEQ ID NO: 10110 - DNA, 26 bp, Homo sapiens
aatgtgcttccctaagttctcaatcc

SEQ ID NO: 10111 - DNA, 26 bp, Homo sapiens
atgtgcttccctaagttctcaatcct

SEQ ID NO: 10112 - DNA, 26 bp, Homo sapiens
tgtgcttccctaagttctcaatccta

SEQ ID NO: 10113 - DNA, 26 bp, Homo sapiens
gtgcttccctaagttctcaatcctac

SEQ ID NO: 10114 - DNA, 26 bp, Homo sapiens
tgcttccctaagttctcaatcctacg

SEQ ID NO: 10115 - DNA, 26 bp, Homo sapiens
gcttccctaagttctcaatcctacga

SEQ ID NO: 10116 - DNA, 26 bp, Homo sapiens
cttccctaagttctcaatcctacgat

SEQ ID NO: 10117 - DNA, 26 bp, Homo sapiens
ttccctaagttctcaatcctacgatc

SEQ ID NO: 10118 - DNA, 26 bp, Homo sapiens
tccctaagttctcaatcctacgatct

SEQ ID NO: 10119 - DNA, 26 bp, Homo sapiens
ccctaagttctcaatcctacgatctt

SEQ ID NO: 10120 - DNA, 26 bp, Homo sapiens
cctaagttctcaatcctacgatcttc

SEQ ID NO: 10121 - DNA, 26 bp, Homo sapiens
ctaagttctcaatcctacgatcttca

SEQ ID NO: 10122 - DNA, 26 bp, Homo sapiens
taagttctcaatcctacgatcttcac

SEQ ID NO: 10123 - DNA, 26 bp, Homo sapiens
aagttctcaatcctacgatcttcacg

SEQ ID NO: 10124 - DNA, 26 bp, Homo sapiens
agttctcaatcctacgatcttcacgc

SEQ ID NO: 10125 - DNA, 26 bp, Homo sapiens
gttctcaatcctacgatcttcacgct

SEQ ID NO: 10126 - DNA, 26 bp, Homo sapiens
ttctcaatcctacgatcttcacgctt

SEQ ID NO: 10127 - DNA, 26 bp, Homo sapiens
tctcaatcctacgatcttcacgcttc

SEQ ID NO: 10128 - DNA, 26 bp, Homo sapiens
ctcaatcctacgatcttcacgcttct

SEQ ID NO: 10129 - DNA, 26 bp, Homo sapiens
tcaatcctacgatcttcacgcttctt

SEQ ID NO: 10130 - DNA, 26 bp, Homo sapiens
caatcctacgatcttcacgcttcttt

SEQ ID NO: 10131 - DNA, 26 bp, Homo sapiens
aatcctacgatcttcacgcttctttt

SEQ ID NO: 10132 - DNA, 26 bp, Homo sapiens
atcctacgatcttcacgcttcttttc

SEQ ID NO: 10133 - DNA, 26 bp, Homo sapiens
tcctacgatcttcacgcttcttttcc

SEQ ID NO: 10134 - DNA, 26 bp, Homo sapiens
cctacgatcttcacgcttcttttccc

SEQ ID NO: 10135 - DNA, 26 bp, Homo sapiens
ctacgatcttcacgcttcttttccct

SEQ ID NO: 10136 - DNA, 26 bp, Homo sapiens
tacgatcttcacgcttcttttccctg

SEQ ID NO: 10137 - DNA, 26 bp, Homo sapiens
acgatcttcacgcttcttttccctgc

SEQ ID NO: 10138 - DNA, 26 bp, Homo sapiens
cgatcttcacgcttcttttccctgct

SEQ ID NO: 10139 - DNA, 26 bp, Homo sapiens
gatcttcacgcttcttttccctgctt

SEQ ID NO: 10140 - DNA, 26 bp, Homo sapiens
atcttcacgcttcttttccctgcttc

SEQ ID NO: 10141 - DNA, 26 bp, Homo sapiens
tcttcacgcttcttttccctgcttcc

SEQ ID NO: 10142 - DNA, 26 bp, Homo sapiens
cttcacgcttcttttccctgcttcca

SEQ ID NO: 10143 - DNA, 26 bp, Homo sapiens
ttcacgcttcttttccctgcttccag

SEQ ID NO: 10144 - DNA, 26 bp, Homo sapiens
tcacgcttcttttccctgcttccagc

SEQ ID NO: 10145 - DNA, 26 bp, Homo sapiens
cacgcttcttttccctgcttccagca

SEQ ID NO: 10146 - DNA, 26 bp, Homo sapiens
acgcttcttttccctgcttccagcag

SEQ ID NO: 10147 - DNA, 26 bp, Homo sapiens
cgcttcttttccctgcttccagcagg

SEQ ID NO: 10148 - DNA, 26 bp, Homo sapiens
gcttcttttccctgcttccagcaggg

SEQ ID NO: 10149 - DNA, 26 bp, Homo sapiens
cttcttttccctgcttccagcagggt

SEQ ID NO: 10150 - DNA, 26 bp, Homo sapiens
ttcttttccctgcttccagcagggtc

SEQ ID NO: 10151 - DNA, 26 bp, Homo sapiens
tcttttccctgcttccagcagggtcc

SEQ ID NO: 10152 - DNA, 26 bp, Homo sapiens
cttttccctgcttccagcagggtccg

SEQ ID NO: 10153 - DNA, 26 bp, Homo sapiens
ttttccctgcttccagcagggtccga

SEQ ID NO: 10154 - DNA, 26 bp, Homo sapiens
tttccctgcttccagcagggtccgat

SEQ ID NO: 10155 - DNA, 26 bp, Homo sapiens
ttccctgcttccagcagggtccgatc

SEQ ID NO: 10156 - DNA, 26 bp, Homo sapiens
tccctgcttccagcagggtccgatct

SEQ ID NO: 10157 - DNA, 26 bp, Homo sapiens
ccctgcttccagcagggtccgatctc

SEQ ID NO: 10158 - DNA, 26 bp, Homo sapiens
cctgcttccagcagggtccgatctca

SEQ ID NO: 10159 - DNA, 26 bp, Homo sapiens
ctgcttccagcagggtccgatctcaa

SEQ ID NO: 10160 - DNA, 26 bp, Homo sapiens
tgcttccagcagggtccgatctcaac

SEQ ID NO: 10161 - DNA, 26 bp, Homo sapiens
gcttccagcagggtccgatctcaaca

SEQ ID NO: 10162 - DNA, 26 bp, Homo sapiens
cttccagcagggtccgatctcaacaa

SEQ ID NO: 10163 - DNA, 26 bp, Homo sapiens
ttccagcagggtccgatctcaacaac

SEQ ID NO: 10164 - DNA, 26 bp, Homo sapiens
tccagcagggtccgatctcaacaaca

SEQ ID NO: 10165 - DNA, 26 bp, Homo sapiens
ccagcagggtccgatctcaacaacaa

SEQ ID NO: 10166 - DNA, 26 bp, Homo sapiens
cagcagggtccgatctcaacaacaag

SEQ ID NO: 10167 - DNA, 26 bp, Homo sapiens
agcagggtccgatctcaacaacaagt

SEQ ID NO: 10168 - DNA, 26 bp, Homo sapiens
gcagggtccgatctcaacaacaagtg

SEQ ID NO: 10169 - DNA, 26 bp, Homo sapiens
cagggtccgatctcaacaacaagtgc

SEQ ID NO: 10170 - DNA, 26 bp, Homo sapiens
agggtccgatctcaacaacaagtgct

SEQ ID NO: 10171 - DNA, 26 bp, Homo sapiens
gggtccgatctcaacaacaagtgcta

SEQ ID NO: 10172 - DNA, 26 bp, Homo sapiens
ggtccgatctcaacaacaagtgctaa

SEQ ID NO: 10173 - DNA, 26 bp, Homo sapiens
gtccgatctcaacaacaagtgctaag

SEQ ID NO: 10174 - DNA, 26 bp, Homo sapiens
tccgatctcaacaacaagtgctaagc

SEQ ID NO: 10175 - DNA, 26 bp, Homo sapiens
ccgatctcaacaacaagtgctaagct

SEQ ID NO: 10176 - DNA, 26 bp, Homo sapiens
cgatctcaacaacaagtgctaagctg

SEQ ID NO: 10177 - DNA, 26 bp, Homo sapiens
gatctcaacaacaagtgctaagctgc

SEQ ID NO: 10178 - DNA, 26 bp, Homo sapiens
atctcaacaacaagtgctaagctgca

SEQ ID NO: 10179 - DNA, 26 bp, Homo sapiens
tctcaacaacaagtgctaagctgcac

SEQ ID NO: 10180 - DNA, 26 bp, Homo sapiens
ctcaacaacaagtgctaagctgcaca

SEQ ID NO: 10181 - DNA, 26 bp, Homo sapiens
tcaacaacaagtgctaagctgcacat

SEQ ID NO: 10182 - DNA, 26 bp, Homo sapiens
caacaacaagtgctaagctgcacatg

SEQ ID NO: 10183 - DNA, 26 bp, Homo sapiens
aacaacaagtgctaagctgcacatga

SEQ ID NO: 10184 - DNA, 26 bp, Homo sapiens
acaacaagtgctaagctgcacatgaa

SEQ ID NO: 10185 - DNA, 26 bp, Homo sapiens
caacaagtgctaagctgcacatgaag

SEQ ID NO: 10186 - DNA, 26 bp, Homo sapiens
aacaagtgctaagctgcacatgaagc

SEQ ID NO: 10187 - DNA, 26 bp, Homo sapiens
acaagtgctaagctgcacatgaagct

SEQ ID NO: 10188 - DNA, 26 bp, Homo sapiens
caagtgctaagctgcacatgaagctg

SEQ ID NO: 10189 - DNA, 26 bp, Homo sapiens
aagtgctaagctgcacatgaagctgc

SEQ ID NO: 10190 - DNA, 26 bp, Homo sapiens
agtgctaagctgcacatgaagctgcc

SEQ ID NO: 10191 - DNA, 26 bp, Homo sapiens
gtgctaagctgcacatgaagctgcct

SEQ ID NO: 10192 - DNA, 26 bp, Homo sapiens
tgctaagctgcacatgaagctgcctc

SEQ ID NO: 10193 - DNA, 26 bp, Homo sapiens
gctaagctgcacatgaagctgcctca

SEQ ID NO: 10194 - DNA, 26 bp, Homo sapiens
ctaagctgcacatgaagctgcctcat

SEQ ID NO: 10195 - DNA, 26 bp, Homo sapiens
taagctgcacatgaagctgcctcata

SEQ ID NO: 10196 - DNA, 26 bp, Homo sapiens
aagctgcacatgaagctgcctcatat

SEQ ID NO: 10197 - DNA, 26 bp, Homo sapiens
agctgcacatgaagctgcctcatatt

SEQ ID NO: 10198 - DNA, 26 bp, Homo sapiens
gctgcacatgaagctgcctcatattg

SEQ ID NO: 10199 - DNA, 26 bp, Homo sapiens
ctgcacatgaagctgcctcatattgg

SEQ ID NO: 10200 - DNA, 26 bp, Homo sapiens
tgcacatgaagctgcctcatattgga

SEQ ID NO: 10201 - DNA, 26 bp, Homo sapiens
gcacatgaagctgcctcatattggag

SEQ ID NO: 10202 - DNA, 26 bp, Homo sapiens
cacatgaagctgcctcatattggagc

SEQ ID NO: 10203 - DNA, 26 bp, Homo sapiens
acatgaagctgcctcatattggagca

SEQ ID NO: 10204 - DNA, 26 bp, Homo sapiens
catgaagctgcctcatattggagcaa

SEQ ID NO: 10205 - DNA, 26 bp, Homo sapiens
atgaagctgcctcatattggagcaac

SEQ ID NO: 10206 - DNA, 26 bp, Homo sapiens
tgaagctgcctcatattggagcaact

SEQ ID NO: 10207 - DNA, 26 bp, Homo sapiens
gaagctgcctcatattggagcaacta

SEQ ID NO: 10208 - DNA, 26 bp, Homo sapiens
aagctgcctcatattggagcaactag

SEQ ID NO: 10209 - DNA, 26 bp, Homo sapiens
agctgcctcatattggagcaactaga

SEQ ID NO: 10210 - DNA, 26 bp, Homo sapiens
gctgcctcatattggagcaactagat

SEQ ID NO: 10211 - DNA, 26 bp, Homo sapiens
ctgcctcatattggagcaactagatt

SEQ ID NO: 10212 - DNA, 26 bp, Homo sapiens
tgcctcatattggagcaactagattc

SEQ ID NO: 10213 - DNA, 26 bp, Homo sapiens
gcctcatattggagcaactagattcc

SEQ ID NO: 10214 - DNA, 26 bp, Homo sapiens
cctcatattggagcaactagattccc

SEQ ID NO: 10215 - DNA, 26 bp, Homo sapiens
ctcatattggagcaactagattccca

SEQ ID NO: 10216 - DNA, 26 bp, Homo sapiens
tcatattggagcaactagattcccag

SEQ ID NO: 10217 - DNA, 26 bp, Homo sapiens
catattggagcaactagattcccagc

SEQ ID NO: 10218 - DNA, 26 bp, Homo sapiens
atattggagcaactagattcccagca

SEQ ID NO: 10219 - DNA, 26 bp, Homo sapiens
tattggagcaactagattcccagcac

SEQ ID NO: 10220 - DNA, 26 bp, Homo sapiens
attggagcaactagattcccagcact

SEQ ID NO: 10221 - DNA, 26 bp, Homo sapiens
ttggagcaactagattcccagcactg

SEQ ID NO: 10222 - DNA, 26 bp, Homo sapiens
tggagcaactagattcccagcactgt

SEQ ID NO: 10223 - DNA, 26 bp, Homo sapiens
ggagcaactagattcccagcactgtg

SEQ ID NO: 10224 - DNA, 26 bp, Homo sapiens
gagcaactagattcccagcactgtga

SEQ ID NO: 10225 - DNA, 26 bp, Homo sapiens
agcaactagattcccagcactgtgat

SEQ ID NO: 10226 - DNA, 26 bp, Homo sapiens
gcaactagattcccagcactgtgatt

SEQ ID NO: 10227 - DNA, 26 bp, Homo sapiens
caactagattcccagcactgtgattc

SEQ ID NO: 10228 - DNA, 26 bp, Homo sapiens
aactagattcccagcactgtgattct

SEQ ID NO: 10229 - DNA, 26 bp, Homo sapiens
actagattcccagcactgtgattctt

SEQ ID NO: 10230 - DNA, 26 bp, Homo sapiens
ctagattcccagcactgtgattctta

SEQ ID NO: 10231 - DNA, 26 bp, Homo sapiens
tagattcccagcactgtgattcttac

SEQ ID NO: 10232 - DNA, 26 bp, Homo sapiens
agattcccagcactgtgattcttact

SEQ ID NO: 10233 - DNA, 26 bp, Homo sapiens
gattcccagcactgtgattcttactg

SEQ ID NO: 10234 - DNA, 26 bp, Homo sapiens
attcccagcactgtgattcttactgg

SEQ ID NO: 10235 - DNA, 26 bp, Homo sapiens
ttcccagcactgtgattcttactgga

SEQ ID NO: 10236 - DNA, 26 bp, Homo sapiens
tcccagcactgtgattcttactggag

SEQ ID NO: 10237 - DNA, 26 bp, Homo sapiens
cccagcactgtgattcttactggagc

SEQ ID NO: 10238 - DNA, 26 bp, Homo sapiens
ccagcactgtgattcttactggagca

SEQ ID NO: 10239 - DNA, 26 bp, Homo sapiens
cagcactgtgattcttactggagcat

SEQ ID NO: 10240 - DNA, 26 bp, Homo sapiens
agcactgtgattcttactggagcatc

SEQ ID NO: 10241 - DNA, 26 bp, Homo sapiens
gcactgtgattcttactggagcatct

SEQ ID NO: 10242 - DNA, 26 bp, Homo sapiens
cactgtgattcttactggagcatctg

SEQ ID NO: 10243 - DNA, 26 bp, Homo sapiens
actgtgattcttactggagcatctgt

SEQ ID NO: 10244 - DNA, 26 bp, Homo sapiens
ctgtgattcttactggagcatctgtg

SEQ ID NO: 10245 - DNA, 26 bp, Homo sapiens
tgtgattcttactggagcatctgtga

SEQ ID NO: 10246 - DNA, 26 bp, Homo sapiens
gtgattcttactggagcatctgtgag

SEQ ID NO: 10247 - DNA, 26 bp, Homo sapiens
tgattcttactggagcatctgtgagt

SEQ ID NO: 10248 - DNA, 26 bp, Homo sapiens
gattcttactggagcatctgtgagtg

SEQ ID NO: 10249 - DNA, 26 bp, Homo sapiens
attcttactggagcatctgtgagtgc

SEQ ID NO: 10250 - DNA, 26 bp, Homo sapiens
ttcttactggagcatctgtgagtgct

SEQ ID NO: 10251 - DNA, 26 bp, Homo sapiens
tcttactggagcatctgtgagtgctc

SEQ ID NO: 10252 - DNA, 26 bp, Homo sapiens
cttactggagcatctgtgagtgctca

SEQ ID NO: 10253 - DNA, 26 bp, Homo sapiens
ttactggagcatctgtgagtgctcaa

SEQ ID NO: 10254 - DNA, 26 bp, Homo sapiens
tactggagcatctgtgagtgctcaat

SEQ ID NO: 10255 - DNA, 26 bp, Homo sapiens
actggagcatctgtgagtgctcaatt

SEQ ID NO: 10256 - DNA, 26 bp, Homo sapiens
ctggagcatctgtgagtgctcaattc

SEQ ID NO: 10257 - DNA, 26 bp, Homo sapiens
tggagcatctgtgagtgctcaattct

SEQ ID NO: 10258 - DNA, 26 bp, Homo sapiens
ggagcatctgtgagtgctcaattcta

SEQ ID NO: 10259 - DNA, 26 bp, Homo sapiens
gagcatctgtgagtgctcaattctac

SEQ ID NO: 10260 - DNA, 26 bp, Homo sapiens
agcatctgtgagtgctcaattctacc

SEQ ID NO: 10261 - DNA, 26 bp, Homo sapiens
gcatctgtgagtgctcaattctacct

SEQ ID NO: 10262 - DNA, 26 bp, Homo sapiens
catctgtgagtgctcaattctacctc

SEQ ID NO: 10263 - DNA, 26 bp, Homo sapiens
atctgtgagtgctcaattctacctct

SEQ ID NO: 10264 - DNA, 26 bp, Homo sapiens
tctgtgagtgctcaattctacctctg

SEQ ID NO: 10265 - DNA, 26 bp, Homo sapiens
ctgtgagtgctcaattctacctctgt

SEQ ID NO: 10266 - DNA, 26 bp, Homo sapiens
tgtgagtgctcaattctacctctgtg

SEQ ID NO: 10267 - DNA, 26 bp, Homo sapiens
gtgagtgctcaattctacctctgtga

SEQ ID NO: 10268 - DNA, 26 bp, Homo sapiens
tgagtgctcaattctacctctgtgac

SEQ ID NO: 10269 - DNA, 26 bp, Homo sapiens
gagtgctcaattctacctctgtgact

SEQ ID NO: 10270 - DNA, 26 bp, Homo sapiens
agtgctcaattctacctctgtgactg

SEQ ID NO: 10271 - DNA, 26 bp, Homo sapiens
gtgctcaattctacctctgtgactgg

SEQ ID NO: 10272 - DNA, 26 bp, Homo sapiens
tgctcaattctacctctgtgactggg

SEQ ID NO: 10273 - DNA, 26 bp, Homo sapiens
gctcaattctacctctgtgactgggc

SEQ ID NO: 10274 - DNA, 26 bp, Homo sapiens
ctcaattctacctctgtgactgggca

SEQ ID NO: 10275 - DNA, 26 bp, Homo sapiens
tcaattctacctctgtgactgggcaa

SEQ ID NO: 10276 - DNA, 26 bp, Homo sapiens
caattctacctctgtgactgggcaag

SEQ ID NO: 10277 - DNA, 26 bp, Homo sapiens
aattctacctctgtgactgggcaaga

SEQ ID NO: 10278 - DNA, 26 bp, Homo sapiens
attctacctctgtgactgggcaagat

SEQ ID NO: 10279 - DNA, 26 bp, Homo sapiens
ttctacctctgtgactgggcaagatt

SEQ ID NO: 10280 - DNA, 26 bp, Homo sapiens
tctacctctgtgactgggcaagattt

SEQ ID NO: 10281 - DNA, 26 bp, Homo sapiens
ctacctctgtgactgggcaagatttc

SEQ ID NO: 10282 - DNA, 26 bp, Homo sapiens
tacctctgtgactgggcaagatttca

SEQ ID NO: 10283 - DNA, 26 bp, Homo sapiens
acctctgtgactgggcaagatttcac

SEQ ID NO: 10284 - DNA, 26 bp, Homo sapiens
cctctgtgactgggcaagatttcaca

SEQ ID NO: 10285 - DNA, 26 bp, Homo sapiens
ctctgtgactgggcaagatttcacat

SEQ ID NO: 10286 - DNA, 26 bp, Homo sapiens
tctgtgactgggcaagatttcacata

SEQ ID NO: 10287 - DNA, 26 bp, Homo sapiens
ctgtgactgggcaagatttcacatat

SEQ ID NO: 10288 - DNA, 26 bp, Homo sapiens
tgtgactgggcaagatttcacatata

SEQ ID NO: 10289 - DNA, 26 bp, Homo sapiens
gtgactgggcaagatttcacatataa

SEQ ID NO: 10290 - DNA, 26 bp, Homo sapiens
tgactgggcaagatttcacatataaa

SEQ ID NO: 10291 - DNA, 26 bp, Homo sapiens
gactgggcaagatttcacatataaag

SEQ ID NO: 10292 - DNA, 26 bp, Homo sapiens
actgggcaagatttcacatataaagg

SEQ ID NO: 10293 - DNA, 26 bp, Homo sapiens
ctgggcaagatttcacatataaaggc

SEQ ID NO: 10294 - DNA, 26 bp, Homo sapiens
tgggcaagatttcacatataaaggcg

SEQ ID NO: 10295 - DNA, 26 bp, Homo sapiens
gggcaagatttcacatataaaggcgt

SEQ ID NO: 10296 - DNA, 26 bp, Homo sapiens
ggcaagatttcacatataaaggcgta

SEQ ID NO: 10297 - DNA, 26 bp, Homo sapiens
gcaagatttcacatataaaggcgtat

SEQ ID NO: 10298 - DNA, 26 bp, Homo sapiens
caagatttcacatataaaggcgtata

SEQ ID NO: 10299 - DNA, 26 bp, Homo sapiens
aagatttcacatataaaggcgtatat

SEQ ID NO: 10300 - DNA, 26 bp, Homo sapiens
agatttcacatataaaggcgtatatt

SEQ ID NO: 10301 - DNA, 26 bp, Homo sapiens
gatttcacatataaaggcgtatatta

SEQ ID NO: 10302 - DNA, 26 bp, Homo sapiens
atttcacatataaaggcgtatattaa

SEQ ID NO: 10303 - DNA, 26 bp, Homo sapiens
tttcacatataaaggcgtatattaac

SEQ ID NO: 10304 - DNA, 26 bp, Homo sapiens
ttcacatataaaggcgtatattaact

SEQ ID NO: 10305 - DNA, 26 bp, Homo sapiens
tcacatataaaggcgtatattaactc

SEQ ID NO: 10306 - DNA, 26 bp, Homo sapiens
cacatataaaggcgtatattaactcc

SEQ ID NO: 10307 - DNA, 26 bp, Homo sapiens
acatataaaggcgtatattaactcca

SEQ ID NO: 10308 - DNA, 26 bp, Homo sapiens
catataaaggcgtatattaactccag

SEQ ID NO: 10309 - DNA, 26 bp, Homo sapiens
atataaaggcgtatattaactccagc

SEQ ID NO: 10310 - DNA, 26 bp, Homo sapiens
tataaaggcgtatattaactccagct

SEQ ID NO: 10311 - DNA, 26 bp, Homo sapiens
ataaaggcgtatattaactccagcta

SEQ ID NO: 10312 - DNA, 26 bp, Homo sapiens
taaaggcgtatattaactccagctag

SEQ ID NO: 10313 - DNA, 26 bp, Homo sapiens
aaaggcgtatattaactccagctaga

SEQ ID NO: 10314 - DNA, 26 bp, Homo sapiens
aaggcgtatattaactccagctagaa

SEQ ID NO: 10315 - DNA, 26 bp, Homo sapiens
aggcgtatattaactccagctagaat

SEQ ID NO: 10316 - DNA, 26 bp, Homo sapiens
ggcgtatattaactccagctagaatt

SEQ ID NO: 10317 - DNA, 26 bp, Homo sapiens
gcgtatattaactccagctagaattt

SEQ ID NO: 10318 - DNA, 26 bp, Homo sapiens
cgtatattaactccagctagaattta

SEQ ID NO: 10319 - DNA, 26 bp, Homo sapiens
gtatattaactccagctagaatttac

SEQ ID NO: 10320 - DNA, 26 bp, Homo sapiens
tatattaactccagctagaatttact

SEQ ID NO: 10321 - DNA, 26 bp, Homo sapiens
atattaactccagctagaatttacta

SEQ ID NO: 10322 - DNA, 26 bp, Homo sapiens
tattaactccagctagaatttactaa

SEQ ID NO: 10323 - DNA, 26 bp, Homo sapiens
attaactccagctagaatttactaaa

SEQ ID NO: 10324 - DNA, 26 bp, Homo sapiens
ttaactccagctagaatttactaaaa

SEQ ID NO: 10325 - DNA, 26 bp, Homo sapiens
taactccagctagaatttactaaaac

SEQ ID NO: 10326 - DNA, 26 bp, Homo sapiens
aactccagctagaatttactaaaact

SEQ ID NO: 10327 - DNA, 26 bp, Homo sapiens
actccagctagaatttactaaaacta

SEQ ID NO: 10328 - DNA, 26 bp, Homo sapiens
ctccagctagaatttactaaaactac

SEQ ID NO: 10329 - DNA, 26 bp, Homo sapiens
tccagctagaatttactaaaactaca

SEQ ID NO: 10330 - DNA, 26 bp, Homo sapiens
ccagctagaatttactaaaactacag

SEQ ID NO: 10331 - DNA, 26 bp, Homo sapiens
cagctagaatttactaaaactacagt

SEQ ID NO: 10332 - DNA, 26 bp, Homo sapiens
agctagaatttactaaaactacagtt

SEQ ID NO: 10333 - DNA, 26 bp, Homo sapiens
gctagaatttactaaaactacagttt

SEQ ID NO: 10334 - DNA, 26 bp, Homo sapiens
ctagaatttactaaaactacagtttg

SEQ ID NO: 10335 - DNA, 26 bp, Homo sapiens
tagaatttactaaaactacagtttgt

SEQ ID NO: 10336 - DNA, 26 bp, Homo sapiens
agaatttactaaaactacagtttgtc

SEQ ID NO: 10337 - DNA, 26 bp, Homo sapiens
gaatttactaaaactacagtttgtcc

SEQ ID NO: 10338 - DNA, 26 bp, Homo sapiens
aatttactaaaactacagtttgtcca

SEQ ID NO: 10339 - DNA, 26 bp, Homo sapiens
atttactaaaactacagtttgtccag

SEQ ID NO: 10340 - DNA, 26 bp, Homo sapiens
tttactaaaactacagtttgtccagt

SEQ ID NO: 10341 - DNA, 26 bp, Homo sapiens
ttactaaaactacagtttgtccagtt

SEQ ID NO: 10342 - DNA, 26 bp, Homo sapiens
tactaaaactacagtttgtccagtta

SEQ ID NO: 10343 - DNA, 26 bp, Homo sapiens
actaaaactacagtttgtccagttaa

SEQ ID NO: 10344 - DNA, 26 bp, Homo sapiens
ctaaaactacagtttgtccagttaag

SEQ ID NO: 10345 - DNA, 26 bp, Homo sapiens
taaaactacagtttgtccagttaagt

SEQ ID NO: 10346 - DNA, 26 bp, Homo sapiens
aaaactacagtttgtccagttaagtg

SEQ ID NO: 10347 - DNA, 26 bp, Homo sapiens
aaactacagtttgtccagttaagtgt

SEQ ID NO: 10348 - DNA, 26 bp, Homo sapiens
aactacagtttgtccagttaagtgtt

SEQ ID NO: 10349 - DNA, 26 bp, Homo sapiens
actacagtttgtccagttaagtgttt

SEQ ID NO: 10350 - DNA, 26 bp, Homo sapiens
ctacagtttgtccagttaagtgtttc

SEQ ID NO: 10351 - DNA, 26 bp, Homo sapiens
tacagtttgtccagttaagtgtttca

SEQ ID NO: 10352 - DNA, 26 bp, Homo sapiens
acagtttgtccagttaagtgtttcac

SEQ ID NO: 10353 - DNA, 26 bp, Homo sapiens
cagtttgtccagttaagtgtttcaca

SEQ ID NO: 10354 - DNA, 26 bp, Homo sapiens
agtttgtccagttaagtgtttcacaa

SEQ ID NO: 10355 - DNA, 26 bp, Homo sapiens
gtttgtccagttaagtgtttcacaat

SEQ ID NO: 10356 - DNA, 26 bp, Homo sapiens
tttgtccagttaagtgtttcacaatg

SEQ ID NO: 10357 - DNA, 26 bp, Homo sapiens
ttgtccagttaagtgtttcacaatgg

SEQ ID NO: 10358 - DNA, 26 bp, Homo sapiens
tgtccagttaagtgtttcacaatgga

SEQ ID NO: 10359 - DNA, 26 bp, Homo sapiens
gtccagttaagtgtttcacaatggat

SEQ ID NO: 10360 - DNA, 26 bp, Homo sapiens
tccagttaagtgtttcacaatggatt

SEQ ID NO: 10361 - DNA, 26 bp, Homo sapiens
ccagttaagtgtttcacaatggatta

SEQ ID NO: 10362 - DNA, 26 bp, Homo sapiens
cagttaagtgtttcacaatggattaa

SEQ ID NO: 10363 - DNA, 26 bp, Homo sapiens
agttaagtgtttcacaatggattaaa

SEQ ID NO: 10364 - DNA, 26 bp, Homo sapiens
gttaagtgtttcacaatggattaaat

SEQ ID NO: 10365 - DNA, 26 bp, Homo sapiens
ttaagtgtttcacaatggattaaatt

SEQ ID NO: 10366 - DNA, 26 bp, Homo sapiens
taagtgtttcacaatggattaaattc

SEQ ID NO: 10367 - DNA, 26 bp, Homo sapiens
aagtgtttcacaatggattaaattct

SEQ ID NO: 10368 - DNA, 26 bp, Homo sapiens
agtgtttcacaatggattaaattctt

SEQ ID NO: 10369 - DNA, 26 bp, Homo sapiens
gtgtttcacaatggattaaattcttt

SEQ ID NO: 10370 - DNA, 26 bp, Homo sapiens
tgtttcacaatggattaaattcttta

SEQ ID NO: 10371 - DNA, 26 bp, Homo sapiens
gtttcacaatggattaaattctttaa

SEQ ID NO: 10372 - DNA, 26 bp, Homo sapiens
tttcacaatggattaaattctttaac

SEQ ID NO: 10373 - DNA, 26 bp, Homo sapiens
ttcacaatggattaaattctttaacc

SEQ ID NO: 10374 - DNA, 26 bp, Homo sapiens
tcacaatggattaaattctttaacct

SEQ ID NO: 10375 - DNA, 26 bp, Homo sapiens
cacaatggattaaattctttaacctt

SEQ ID NO: 10376 - DNA, 26 bp, Homo sapiens
acaatggattaaattctttaacctta

SEQ ID NO: 10377 - DNA, 26 bp, Homo sapiens
caatggattaaattctttaaccttaa

SEQ ID NO: 10378 - DNA, 26 bp, Homo sapiens
aatggattaaattctttaaccttaaa

SEQ ID NO: 10379 - DNA, 26 bp, Homo sapiens
atggattaaattctttaaccttaaaa

SEQ ID NO: 10380 - DNA, 26 bp, Homo sapiens
tggattaaattctttaaccttaaaaa

SEQ ID NO: 10381 - DNA, 26 bp, Homo sapiens
ggattaaattctttaaccttaaaaaa

SEQ ID NO: 10382 - DNA, 26 bp, Homo sapiens
gattaaattctttaaccttaaaaaaa

SEQ ID NO: 10383 - DNA, 26 bp, Homo sapiens
attaaattctttaaccttaaaaaaaa

SEQ ID NO: 10384 - DNA, 26 bp, Homo sapiens
ttaaattctttaaccttaaaaaaaag

SEQ ID NO: 10385 - DNA, 26 bp, Homo sapiens
taaattctttaaccttaaaaaaaagt

SEQ ID NO: 10386 - DNA, 26 bp, Homo sapiens
aaattctttaaccttaaaaaaaagtt

SEQ ID NO: 10387 - DNA, 26 bp, Homo sapiens
aattctttaaccttaaaaaaaagttt

SEQ ID NO: 10388 - DNA, 26 bp, Homo sapiens
attctttaaccttaaaaaaaagttta

SEQ ID NO: 10389 - DNA, 26 bp, Homo sapiens
ttctttaaccttaaaaaaaagtttaa

SEQ ID NO: 10390 - DNA, 26 bp, Homo sapiens
tctttaaccttaaaaaaaagtttaac

SEQ ID NO: 10391 - DNA, 26 bp, Homo sapiens
ctttaaccttaaaaaaaagtttaaca

SEQ ID NO: 10392 - DNA, 26 bp, Homo sapiens
tttaaccttaaaaaaaagtttaacag

SEQ ID NO: 10393 - DNA, 26 bp, Homo sapiens
ttaaccttaaaaaaaagtttaacagt

SEQ ID NO: 10394 - DNA, 26 bp, Homo sapiens
taaccttaaaaaaaagtttaacagtt

SEQ ID NO: 10395 - DNA, 26 bp, Homo sapiens
aaccttaaaaaaaagtttaacagttg

SEQ ID NO: 10396 - DNA, 26 bp, Homo sapiens
accttaaaaaaaagtttaacagttga

SEQ ID NO: 10397 - DNA, 26 bp, Homo sapiens
ccttaaaaaaaagtttaacagttgat

SEQ ID NO: 10398 - DNA, 26 bp, Homo sapiens
cttaaaaaaaagtttaacagttgata

SEQ ID NO: 10399 - DNA, 26 bp, Homo sapiens
ttaaaaaaaagtttaacagttgatat

SEQ ID NO: 10400 - DNA, 26 bp, Homo sapiens
taaaaaaaagtttaacagttgatatg

SEQ ID NO: 10401 - DNA, 26 bp, Homo sapiens
aaaaaaaagtttaacagttgatatga

SEQ ID NO: 10402 - DNA, 26 bp, Homo sapiens
aaaaaaagtttaacagttgatatgag

SEQ ID NO: 10403 - DNA, 26 bp, Homo sapiens
aaaaaagtttaacagttgatatgaga

SEQ ID NO: 10404 - DNA, 26 bp, Homo sapiens
aaaaagtttaacagttgatatgagaa

SEQ ID NO: 10405 - DNA, 26 bp, Homo sapiens
aaaagtttaacagttgatatgagaat

SEQ ID NO: 10406 - DNA, 26 bp, Homo sapiens
aaagtttaacagttgatatgagaata

SEQ ID NO: 10407 - DNA, 26 bp, Homo sapiens
aagtttaacagttgatatgagaatac

SEQ ID NO: 10408 - DNA, 26 bp, Homo sapiens
agtttaacagttgatatgagaataca

SEQ ID NO: 10409 - DNA, 26 bp, Homo sapiens
gtttaacagttgatatgagaatacat

SEQ ID NO: 10410 - DNA, 26 bp, Homo sapiens
tttaacagttgatatgagaatacata

SEQ ID NO: 10411 - DNA, 26 bp, Homo sapiens
ttaacagttgatatgagaatacataa

SEQ ID NO: 10412 - DNA, 26 bp, Homo sapiens
taacagttgatatgagaatacataaa

SEQ ID NO: 10413 - DNA, 26 bp, Homo sapiens
aacagttgatatgagaatacataaaa

SEQ ID NO: 10414 - DNA, 26 bp, Homo sapiens
acagttgatatgagaatacataaaac

SEQ ID NO: 10415 - DNA, 26 bp, Homo sapiens
cagttgatatgagaatacataaaaca

SEQ ID NO: 10416 - DNA, 26 bp, Homo sapiens
agttgatatgagaatacataaaacaa

SEQ ID NO: 10417 - DNA, 26 bp, Homo sapiens
gttgatatgagaatacataaaacaac

SEQ ID NO: 10418 - DNA, 26 bp, Homo sapiens
ttgatatgagaatacataaaacaact

SEQ ID NO: 10419 - DNA, 26 bp, Homo sapiens
tgatatgagaatacataaaacaactg

SEQ ID NO: 10420 - DNA, 26 bp, Homo sapiens
gatatgagaatacataaaacaactga

SEQ ID NO: 10421 - DNA, 26 bp, Homo sapiens
atatgagaatacataaaacaactgag

SEQ ID NO: 10422 - DNA, 26 bp, Homo sapiens
tatgagaatacataaaacaactgagc

SEQ ID NO: 10423 - DNA, 26 bp, Homo sapiens
atgagaatacataaaacaactgagca

SEQ ID NO: 10424 - DNA, 26 bp, Homo sapiens
tgagaatacataaaacaactgagcag

SEQ ID NO: 10425 - DNA, 26 bp, Homo sapiens
gagaatacataaaacaactgagcaga

SEQ ID NO: 10426 - DNA, 26 bp, Homo sapiens
agaatacataaaacaactgagcagac

SEQ ID NO: 10427 - DNA, 26 bp, Homo sapiens
gaatacataaaacaactgagcagact

SEQ ID NO: 10428 - DNA, 26 bp, Homo sapiens
aatacataaaacaactgagcagactg

SEQ ID NO: 10429 - DNA, 26 bp, Homo sapiens
atacataaaacaactgagcagactgc

SEQ ID NO: 10430 - DNA, 26 bp, Homo sapiens
tacataaaacaactgagcagactgca

SEQ ID NO: 10431 - DNA, 26 bp, Homo sapiens
acataaaacaactgagcagactgcaa

SEQ ID NO: 10432 - DNA, 26 bp, Homo sapiens
cataaaacaactgagcagactgcaaa

SEQ ID NO: 10433 - DNA, 26 bp, Homo sapiens
ataaaacaactgagcagactgcaaac

SEQ ID NO: 10434 - DNA, 26 bp, Homo sapiens
taaaacaactgagcagactgcaaaca

SEQ ID NO: 10435 - DNA, 26 bp, Homo sapiens
aaaacaactgagcagactgcaaacaa

SEQ ID NO: 10436 - DNA, 26 bp, Homo sapiens
aaacaactgagcagactgcaaacaag

SEQ ID NO: 10437 - DNA, 26 bp, Homo sapiens
aacaactgagcagactgcaaacaaga

SEQ ID NO: 10438 - DNA, 26 bp, Homo sapiens
acaactgagcagactgcaaacaagag

SEQ ID NO: 10439 - DNA, 26 bp, Homo sapiens
caactgagcagactgcaaacaagaga

SEQ ID NO: 10440 - DNA, 26 bp, Homo sapiens
aactgagcagactgcaaacaagagaa

SEQ ID NO: 10441 - DNA, 26 bp, Homo sapiens
actgagcagactgcaaacaagagaaa

SEQ ID NO: 10442 - DNA, 26 bp, Homo sapiens
ctgagcagactgcaaacaagagaaaa

SEQ ID NO: 10443 - DNA, 26 bp, Homo sapiens
tgagcagactgcaaacaagagaaaac

SEQ ID NO: 10444 - DNA, 26 bp, Homo sapiens
gagcagactgcaaacaagagaaaacc

SEQ ID NO: 10445 - DNA, 26 bp, Homo sapiens
agcagactgcaaacaagagaaaacca

SEQ ID NO: 10446 - DNA, 26 bp, Homo sapiens
gcagactgcaaacaagagaaaaccaa

SEQ ID NO: 10447 - DNA, 26 bp, Homo sapiens
cagactgcaaacaagagaaaaccaaa

SEQ ID NO: 10448 - DNA, 26 bp, Homo sapiens
agactgcaaacaagagaaaaccaaaa

SEQ ID NO: 10449 - DNA, 26 bp, Homo sapiens
gactgcaaacaagagaaaaccaaaag

SEQ ID NO: 10450 - DNA, 26 bp, Homo sapiens
actgcaaacaagagaaaaccaaaaga

SEQ ID NO: 10451 - DNA, 26 bp, Homo sapiens
ctgcaaacaagagaaaaccaaaagag

SEQ ID NO: 10452 - DNA, 26 bp, Homo sapiens
tgcaaacaagagaaaaccaaaagaga

SEQ ID NO: 10453 - DNA, 26 bp, Homo sapiens
gcaaacaagagaaaaccaaaagagaa

SEQ ID NO: 10454 - DNA, 26 bp, Homo sapiens
caaacaagagaaaaccaaaagagaag

SEQ ID NO: 10455 - DNA, 26 bp, Homo sapiens
aaacaagagaaaaccaaaagagaagg

SEQ ID NO: 10456 - DNA, 26 bp, Homo sapiens
aacaagagaaaaccaaaagagaaggg

SEQ ID NO: 10457 - DNA, 26 bp, Homo sapiens
acaagagaaaaccaaaagagaaggga

SEQ ID NO: 10458 - DNA, 26 bp, Homo sapiens
caagagaaaaccaaaagagaagggat

SEQ ID NO: 10459 - DNA, 26 bp, Homo sapiens
aagagaaaaccaaaagagaagggata

SEQ ID NO: 10460 - DNA, 26 bp, Homo sapiens
agagaaaaccaaaagagaagggatac

SEQ ID NO: 10461 - DNA, 26 bp, Homo sapiens
gagaaaaccaaaagagaagggataca

SEQ ID NO: 10462 - DNA, 26 bp, Homo sapiens
agaaaaccaaaagagaagggatacat

SEQ ID NO: 10463 - DNA, 26 bp, Homo sapiens
gaaaaccaaaagagaagggatacata

SEQ ID NO: 10464 - DNA, 26 bp, Homo sapiens
aaaaccaaaagagaagggatacataa

SEQ ID NO: 10465 - DNA, 26 bp, Homo sapiens
aaaccaaaagagaagggatacataat

SEQ ID NO: 10466 - DNA, 26 bp, Homo sapiens
aaccaaaagagaagggatacataatt

SEQ ID NO: 10467 - DNA, 26 bp, Homo sapiens
accaaaagagaagggatacataattc

SEQ ID NO: 10468 - DNA, 26 bp, Homo sapiens
ccaaaagagaagggatacataattca

SEQ ID NO: 10469 - DNA, 26 bp, Homo sapiens
caaaagagaagggatacataattcat

SEQ ID NO: 10470 - DNA, 26 bp, Homo sapiens
aaaagagaagggatacataattcatt

SEQ ID NO: 10471 - DNA, 26 bp, Homo sapiens
aaagagaagggatacataattcattc

SEQ ID NO: 10472 - DNA, 26 bp, Homo sapiens
aagagaagggatacataattcattct

SEQ ID NO: 10473 - DNA, 26 bp, Homo sapiens
agagaagggatacataattcattctg

SEQ ID NO: 10474 - DNA, 26 bp, Homo sapiens
gagaagggatacataattcattctga

SEQ ID NO: 10475 - DNA, 26 bp, Homo sapiens
agaagggatacataattcattctgaa

SEQ ID NO: 10476 - DNA, 26 bp, Homo sapiens
gaagggatacataattcattctgaaa

SEQ ID NO: 10477 - DNA, 26 bp, Homo sapiens
aagggatacataattcattctgaaat

SEQ ID NO: 10478 - DNA, 26 bp, Homo sapiens
agggatacataattcattctgaaatc

SEQ ID NO: 10479 - DNA, 26 bp, Homo sapiens
gggatacataattcattctgaaatca

SEQ ID NO: 10480 - DNA, 26 bp, Homo sapiens
ggatacataattcattctgaaatcac

SEQ ID NO: 10481 - DNA, 26 bp, Homo sapiens
gatacataattcattctgaaatcacg

SEQ ID NO: 10482 - DNA, 26 bp, Homo sapiens
atacataattcattctgaaatcacga

SEQ ID NO: 10483 - DNA, 26 bp, Homo sapiens
tacataattcattctgaaatcacgat

SEQ ID NO: 10484 - DNA, 26 bp, Homo sapiens
acataattcattctgaaatcacgatc

SEQ ID NO: 10485 - DNA, 26 bp, Homo sapiens
cataattcattctgaaatcacgatcc

SEQ ID NO: 10486 - DNA, 26 bp, Homo sapiens
ataattcattctgaaatcacgatccc

SEQ ID NO: 10487 - DNA, 26 bp, Homo sapiens
taattcattctgaaatcacgatcccc

SEQ ID NO: 10488 - DNA, 26 bp, Homo sapiens
aattcattctgaaatcacgatcccct

SEQ ID NO: 10489 - DNA, 26 bp, Homo sapiens
attcattctgaaatcacgatcccctc

SEQ ID NO: 10490 - DNA, 26 bp, Homo sapiens
ttcattctgaaatcacgatcccctcc

SEQ ID NO: 10491 - DNA, 26 bp, Homo sapiens
tcattctgaaatcacgatcccctcct

SEQ ID NO: 10492 - DNA, 26 bp, Homo sapiens
cattctgaaatcacgatcccctcctc

SEQ ID NO: 10493 - DNA, 26 bp, Homo sapiens
attctgaaatcacgatcccctcctcc

SEQ ID NO: 10494 - DNA, 26 bp, Homo sapiens
ttctgaaatcacgatcccctcctcct

SEQ ID NO: 10495 - DNA, 26 bp, Homo sapiens
tctgaaatcacgatcccctcctcctc

SEQ ID NO: 10496 - DNA, 26 bp, Homo sapiens
ctgaaatcacgatcccctcctcctca

SEQ ID NO: 10497 - DNA, 26 bp, Homo sapiens
tgaaatcacgatcccctcctcctcac

SEQ ID NO: 10498 - DNA, 26 bp, Homo sapiens
gaaatcacgatcccctcctcctcaca

SEQ ID NO: 10499 - DNA, 26 bp, Homo sapiens
aaatcacgatcccctcctcctcacag

SEQ ID NO: 10500 - DNA, 26 bp, Homo sapiens
aatcacgatcccctcctcctcacaga

SEQ ID NO: 10501 - DNA, 26 bp, Homo sapiens
atcacgatcccctcctcctcacagaa

SEQ ID NO: 10502 - DNA, 26 bp, Homo sapiens
tcacgatcccctcctcctcacagaaa

SEQ ID NO: 10503 - DNA, 26 bp, Homo sapiens
cacgatcccctcctcctcacagaaaa

SEQ ID NO: 10504 - DNA, 26 bp, Homo sapiens
acgatcccctcctcctcacagaaaag

SEQ ID NO: 10505 - DNA, 26 bp, Homo sapiens
cgatcccctcctcctcacagaaaagg

SEQ ID NO: 10506 - DNA, 26 bp, Homo sapiens
gatcccctcctcctcacagaaaaggt

SEQ ID NO: 10507 - DNA, 26 bp, Homo sapiens
atcccctcctcctcacagaaaaggtg

SEQ ID NO: 10508 - DNA, 26 bp, Homo sapiens
tcccctcctcctcacagaaaaggtgc

SEQ ID NO: 10509 - DNA, 26 bp, Homo sapiens
cccctcctcctcacagaaaaggtgca

SEQ ID NO: 10510 - DNA, 26 bp, Homo sapiens
ccctcctcctcacagaaaaggtgcat

SEQ ID NO: 10511 - DNA, 26 bp, Homo sapiens
cctcctcctcacagaaaaggtgcatt

SEQ ID NO: 10512 - DNA, 26 bp, Homo sapiens
ctcctcctcacagaaaaggtgcatta

SEQ ID NO: 10513 - DNA, 26 bp, Homo sapiens
tcctcctcacagaaaaggtgcattag

SEQ ID NO: 10514 - DNA, 26 bp, Homo sapiens
cctcctcacagaaaaggtgcattagc

SEQ ID NO: 10515 - DNA, 26 bp, Homo sapiens
ctcctcacagaaaaggtgcattagct

SEQ ID NO: 10516 - DNA, 26 bp, Homo sapiens
tcctcacagaaaaggtgcattagcta

SEQ ID NO: 10517 - DNA, 26 bp, Homo sapiens
cctcacagaaaaggtgcattagctat

SEQ ID NO: 10518 - DNA, 26 bp, Homo sapiens
ctcacagaaaaggtgcattagctatc

SEQ ID NO: 10519 - DNA, 26 bp, Homo sapiens
tcacagaaaaggtgcattagctatca

SEQ ID NO: 10520 - DNA, 26 bp, Homo sapiens
cacagaaaaggtgcattagctatcaa

SEQ ID NO: 10521 - DNA, 26 bp, Homo sapiens
acagaaaaggtgcattagctatcaag

SEQ ID NO: 10522 - DNA, 26 bp, Homo sapiens
cagaaaaggtgcattagctatcaagt

SEQ ID NO: 10523 - DNA, 26 bp, Homo sapiens
agaaaaggtgcattagctatcaagtt

SEQ ID NO: 10524 - DNA, 26 bp, Homo sapiens
gaaaaggtgcattagctatcaagttg

SEQ ID NO: 10525 - DNA, 26 bp, Homo sapiens
aaaaggtgcattagctatcaagttgc

SEQ ID NO: 10526 - DNA, 26 bp, Homo sapiens
aaaggtgcattagctatcaagttgca

SEQ ID NO: 10527 - DNA, 26 bp, Homo sapiens
aaggtgcattagctatcaagttgcaa

SEQ ID NO: 10528 - DNA, 26 bp, Homo sapiens
aggtgcattagctatcaagttgcaaa

SEQ ID NO: 10529 - DNA, 26 bp, Homo sapiens
ggtgcattagctatcaagttgcaaaa

SEQ ID NO: 10530 - DNA, 26 bp, Homo sapiens
gtgcattagctatcaagttgcaaaaa

SEQ ID NO: 10531 - DNA, 26 bp, Homo sapiens
tgcattagctatcaagttgcaaaaat

SEQ ID NO: 10532 - DNA, 26 bp, Homo sapiens
gcattagctatcaagttgcaaaaatc

SEQ ID NO: 10533 - DNA, 26 bp, Homo sapiens
cattagctatcaagttgcaaaaatca

SEQ ID NO: 10534 - DNA, 26 bp, Homo sapiens
attagctatcaagttgcaaaaatcat

SEQ ID NO: 10535 - DNA, 26 bp, Homo sapiens
ttagctatcaagttgcaaaaatcatc

SEQ ID NO: 10536 - DNA, 26 bp, Homo sapiens
tagctatcaagttgcaaaaatcatca

SEQ ID NO: 10537 - DNA, 26 bp, Homo sapiens
agctatcaagttgcaaaaatcatcaa

SEQ ID NO: 10538 - DNA, 26 bp, Homo sapiens
gctatcaagttgcaaaaatcatcaaa

SEQ ID NO: 10539 - DNA, 26 bp, Homo sapiens
ctatcaagttgcaaaaatcatcaaag

SEQ ID NO: 10540 - DNA, 26 bp, Homo sapiens
tatcaagttgcaaaaatcatcaaagc

SEQ ID NO: 10541 - DNA, 26 bp, Homo sapiens
atcaagttgcaaaaatcatcaaagca

SEQ ID NO: 10542 - DNA, 26 bp, Homo sapiens
tcaagttgcaaaaatcatcaaagcaa

SEQ ID NO: 10543 - DNA, 26 bp, Homo sapiens
caagttgcaaaaatcatcaaagcaaa

SEQ ID NO: 10544 - DNA, 26 bp, Homo sapiens
aagttgcaaaaatcatcaaagcaaaa

SEQ ID NO: 10545 - DNA, 26 bp, Homo sapiens
agttgcaaaaatcatcaaagcaaaag

SEQ ID NO: 10546 - DNA, 26 bp, Homo sapiens
gttgcaaaaatcatcaaagcaaaaga

SEQ ID NO: 10547 - DNA, 26 bp, Homo sapiens
ttgcaaaaatcatcaaagcaaaagaa

SEQ ID NO: 10548 - DNA, 26 bp, Homo sapiens
tgcaaaaatcatcaaagcaaaagaaa

SEQ ID NO: 10549 - DNA, 26 bp, Homo sapiens
gcaaaaatcatcaaagcaaaagaaat

SEQ ID NO: 10550 - DNA, 26 bp, Homo sapiens
caaaaatcatcaaagcaaaagaaatc

SEQ ID NO: 10551 - DNA, 26 bp, Homo sapiens
aaaaatcatcaaagcaaaagaaatca

SEQ ID NO: 10552 - DNA, 26 bp, Homo sapiens
aaaatcatcaaagcaaaagaaatcaa

SEQ ID NO: 10553 - DNA, 26 bp, Homo sapiens
aaatcatcaaagcaaaagaaatcaag

SEQ ID NO: 10554 - DNA, 26 bp, Homo sapiens
aatcatcaaagcaaaagaaatcaaga

SEQ ID NO: 10555 - DNA, 26 bp, Homo sapiens
atcatcaaagcaaaagaaatcaagag

SEQ ID NO: 10556 - DNA, 26 bp, Homo sapiens
tcatcaaagcaaaagaaatcaagagc

SEQ ID NO: 10557 - DNA, 26 bp, Homo sapiens
catcaaagcaaaagaaatcaagagca

SEQ ID NO: 10558 - DNA, 26 bp, Homo sapiens
atcaaagcaaaagaaatcaagagcaa

SEQ ID NO: 10559 - DNA, 26 bp, Homo sapiens
tcaaagcaaaagaaatcaagagcaaa

SEQ ID NO: 10560 - DNA, 26 bp, Homo sapiens
caaagcaaaagaaatcaagagcaaag

SEQ ID NO: 10561 - DNA, 26 bp, Homo sapiens
aaagcaaaagaaatcaagagcaaaga

SEQ ID NO: 10562 - DNA, 26 bp, Homo sapiens
aagcaaaagaaatcaagagcaaagac

SEQ ID NO: 10563 - DNA, 26 bp, Homo sapiens
agcaaaagaaatcaagagcaaagaca

SEQ ID NO: 10564 - DNA, 26 bp, Homo sapiens
gcaaaagaaatcaagagcaaagacaa

SEQ ID NO: 10565 - DNA, 26 bp, Homo sapiens
caaaagaaatcaagagcaaagacaat

SEQ ID NO: 10566 - DNA, 26 bp, Homo sapiens
aaaagaaatcaagagcaaagacaatc

SEQ ID NO: 10567 - DNA, 26 bp, Homo sapiens
aaagaaatcaagagcaaagacaatct

SEQ ID NO: 10568 - DNA, 26 bp, Homo sapiens
aagaaatcaagagcaaagacaatctg

SEQ ID NO: 10569 - DNA, 26 bp, Homo sapiens
agaaatcaagagcaaagacaatctgt

SEQ ID NO: 10570 - DNA, 26 bp, Homo sapiens
gaaatcaagagcaaagacaatctgta

SEQ ID NO: 10571 - DNA, 26 bp, Homo sapiens
aaatcaagagcaaagacaatctgtac

SEQ ID NO: 10572 - DNA, 26 bp, Homo sapiens
aatcaagagcaaagacaatctgtaca

SEQ ID NO: 10573 - DNA, 26 bp, Homo sapiens
atcaagagcaaagacaatctgtacag

SEQ ID NO: 10574 - DNA, 26 bp, Homo sapiens
tcaagagcaaagacaatctgtacaga

SEQ ID NO: 10575 - DNA, 26 bp, Homo sapiens
caagagcaaagacaatctgtacagaa

SEQ ID NO: 10576 - DNA, 26 bp, Homo sapiens
aagagcaaagacaatctgtacagaaa

SEQ ID NO: 10577 - DNA, 26 bp, Homo sapiens
agagcaaagacaatctgtacagaaac

SEQ ID NO: 10578 - DNA, 26 bp, Homo sapiens
gagcaaagacaatctgtacagaaact

SEQ ID NO: 10579 - DNA, 26 bp, Homo sapiens
agcaaagacaatctgtacagaaacta

SEQ ID NO: 10580 - DNA, 26 bp, Homo sapiens
gcaaagacaatctgtacagaaactaa

SEQ ID NO: 10581 - DNA, 26 bp, Homo sapiens
caaagacaatctgtacagaaactaac

SEQ ID NO: 10582 - DNA, 26 bp, Homo sapiens
aaagacaatctgtacagaaactaaca

SEQ ID NO: 10583 - DNA, 26 bp, Homo sapiens
aagacaatctgtacagaaactaacaa

SEQ ID NO: 10584 - DNA, 26 bp, Homo sapiens
agacaatctgtacagaaactaacaaa

SEQ ID NO: 10585 - DNA, 26 bp, Homo sapiens
gacaatctgtacagaaactaacaaaa

SEQ ID NO: 10586 - DNA, 26 bp, Homo sapiens
acaatctgtacagaaactaacaaaaa

SEQ ID NO: 10587 - DNA, 26 bp, Homo sapiens
caatctgtacagaaactaacaaaaat

SEQ ID NO: 10588 - DNA, 26 bp, Homo sapiens
aatctgtacagaaactaacaaaaata

SEQ ID NO: 10589 - DNA, 26 bp, Homo sapiens
atctgtacagaaactaacaaaaatat

SEQ ID NO: 10590 - DNA, 26 bp, Homo sapiens
tctgtacagaaactaacaaaaatata

SEQ ID NO: 10591 - DNA, 26 bp, Homo sapiens
ctgtacagaaactaacaaaaatatac

SEQ ID NO: 10592 - DNA, 26 bp, Homo sapiens
tgtacagaaactaacaaaaatataca

SEQ ID NO: 10593 - DNA, 26 bp, Homo sapiens
gtacagaaactaacaaaaatatacaa

SEQ ID NO: 10594 - DNA, 26 bp, Homo sapiens
tacagaaactaacaaaaatatacaat

SEQ ID NO: 10595 - DNA, 26 bp, Homo sapiens
acagaaactaacaaaaatatacaata

SEQ ID NO: 10596 - DNA, 26 bp, Homo sapiens
cagaaactaacaaaaatatacaatag

SEQ ID NO: 10597 - DNA, 26 bp, Homo sapiens
agaaactaacaaaaatatacaataga

SEQ ID NO: 10598 - DNA, 26 bp, Homo sapiens
gaaactaacaaaaatatacaatagaa

SEQ ID NO: 10599 - DNA, 26 bp, Homo sapiens
aaactaacaaaaatatacaatagaaa

SEQ ID NO: 10600 - DNA, 26 bp, Homo sapiens
aactaacaaaaatatacaatagaaaa

SEQ ID NO: 10601 - DNA, 26 bp, Homo sapiens
actaacaaaaatatacaatagaaaaa

SEQ ID NO: 10602 - DNA, 26 bp, Homo sapiens
ctaacaaaaatatacaatagaaaaaa

SEQ ID NO: 10603 - DNA, 26 bp, Homo sapiens
taacaaaaatatacaatagaaaaaat

SEQ ID NO: 10604 - DNA, 26 bp, Homo sapiens
aacaaaaatatacaatagaaaaaatt

SEQ ID NO: 10605 - DNA, 26 bp, Homo sapiens
acaaaaatatacaatagaaaaaatta

SEQ ID NO: 10606 - DNA, 26 bp, Homo sapiens
caaaaatatacaatagaaaaaattac

SEQ ID NO: 10607 - DNA, 26 bp, Homo sapiens
aaaaatatacaatagaaaaaattact

SEQ ID NO: 10608 - DNA, 26 bp, Homo sapiens
aaaatatacaatagaaaaaattacta

SEQ ID NO: 10609 - DNA, 26 bp, Homo sapiens
aaatatacaatagaaaaaattactaa

SEQ ID NO: 10610 - DNA, 26 bp, Homo sapiens
aatatacaatagaaaaaattactaat

SEQ ID NO: 10611 - DNA, 26 bp, Homo sapiens
atatacaatagaaaaaattactaatg

SEQ ID NO: 10612 - DNA, 26 bp, Homo sapiens
tatacaatagaaaaaattactaatgc

SEQ ID NO: 10613 - DNA, 26 bp, Homo sapiens
atacaatagaaaaaattactaatgca

SEQ ID NO: 10614 - DNA, 26 bp, Homo sapiens
tacaatagaaaaaattactaatgcac

SEQ ID NO: 10615 - DNA, 26 bp, Homo sapiens
acaatagaaaaaattactaatgcacc

SEQ ID NO: 10616 - DNA, 26 bp, Homo sapiens
caatagaaaaaattactaatgcaccg

SEQ ID NO: 10617 - DNA, 26 bp, Homo sapiens
aatagaaaaaattactaatgcaccgt

SEQ ID NO: 10618 - DNA, 26 bp, Homo sapiens
atagaaaaaattactaatgcaccgtt

SEQ ID NO: 10619 - DNA, 26 bp, Homo sapiens
tagaaaaaattactaatgcaccgttt

SEQ ID NO: 10620 - DNA, 26 bp, Homo sapiens
agaaaaaattactaatgcaccgtttt

SEQ ID NO: 10621 - DNA, 26 bp, Homo sapiens
gaaaaaattactaatgcaccgttttg

SEQ ID NO: 10622 - DNA, 26 bp, Homo sapiens
aaaaaattactaatgcaccgttttgt

SEQ ID NO: 10623 - DNA, 26 bp, Homo sapiens
aaaaattactaatgcaccgttttgtc

SEQ ID NO: 10624 - DNA, 26 bp, Homo sapiens
aaaattactaatgcaccgttttgtca

SEQ ID NO: 10625 - DNA, 26 bp, Homo sapiens
aaattactaatgcaccgttttgtcac

SEQ ID NO: 10626 - DNA, 26 bp, Homo sapiens
aattactaatgcaccgttttgtcaca

SEQ ID NO: 10627 - DNA, 26 bp, Homo sapiens
attactaatgcaccgttttgtcacag

SEQ ID NO: 10628 - DNA, 26 bp, Homo sapiens
ttactaatgcaccgttttgtcacaga

SEQ ID NO: 10629 - DNA, 26 bp, Homo sapiens
tactaatgcaccgttttgtcacagac

SEQ ID NO: 10630 - DNA, 26 bp, Homo sapiens
actaatgcaccgttttgtcacagact

SEQ ID NO: 10631 - DNA, 26 bp, Homo sapiens
ctaatgcaccgttttgtcacagactt

SEQ ID NO: 10632 - DNA, 26 bp, Homo sapiens
taatgcaccgttttgtcacagacttt

SEQ ID NO: 10633 - DNA, 26 bp, Homo sapiens
aatgcaccgttttgtcacagactttt

SEQ ID NO: 10634 - DNA, 26 bp, Homo sapiens
atgcaccgttttgtcacagacttttt

SEQ ID NO: 10635 - DNA, 26 bp, Homo sapiens
tgcaccgttttgtcacagactttttt

SEQ ID NO: 10636 - DNA, 26 bp, Homo sapiens
gcaccgttttgtcacagacttttttt

SEQ ID NO: 10637 - DNA, 26 bp, Homo sapiens
caccgttttgtcacagactttttttt

SEQ ID NO: 10638 - DNA, 26 bp, Homo sapiens
accgttttgtcacagacttttttttt

SEQ ID NO: 10639 - DNA, 26 bp, Homo sapiens
ccgttttgtcacagactttttttttt

SEQ ID NO: 10640 - DNA, 26 bp, Homo sapiens
cgttttgtcacagacttttttttttt

SEQ ID NO: 10641 - DNA, 26 bp, Homo sapiens
gttttgtcacagacttttttttttta

SEQ ID NO: 10642 - DNA, 26 bp, Homo sapiens
ttttgtcacagactttttttttttaa

SEQ ID NO: 10643 - DNA, 26 bp, Homo sapiens
tttgtcacagactttttttttttaaa

SEQ ID NO: 10644 - DNA, 26 bp, Homo sapiens
ttgtcacagactttttttttttaaat

SEQ ID NO: 10645 - DNA, 26 bp, Homo sapiens
tgtcacagactttttttttttaaata

SEQ ID NO: 10646 - DNA, 26 bp, Homo sapiens
gtcacagactttttttttttaaatat

SEQ ID NO: 10647 - DNA, 26 bp, Homo sapiens
tcacagactttttttttttaaatata

SEQ ID NO: 10648 - DNA, 26 bp, Homo sapiens
cacagactttttttttttaaatatat

SEQ ID NO: 10649 - DNA, 26 bp, Homo sapiens
acagactttttttttttaaatatatt

SEQ ID NO: 10650 - DNA, 26 bp, Homo sapiens
cagactttttttttttaaatatattc

SEQ ID NO: 10651 - DNA, 26 bp, Homo sapiens
agactttttttttttaaatatattca

SEQ ID NO: 10652 - DNA, 26 bp, Homo sapiens
gactttttttttttaaatatattcac

SEQ ID NO: 10653 - DNA, 26 bp, Homo sapiens
actttttttttttaaatatattcacg

SEQ ID NO: 10654 - DNA, 26 bp, Homo sapiens
ctttttttttttaaatatattcacgg

SEQ ID NO: 10655 - DNA, 26 bp, Homo sapiens
tttttttttttaaatatattcacgga

SEQ ID NO: 10656 - DNA, 26 bp, Homo sapiens
ttttttttttaaatatattcacggat

SEQ ID NO: 10657 - DNA, 26 bp, Homo sapiens
tttttttttaaatatattcacggatt

SEQ ID NO: 10658 - DNA, 26 bp, Homo sapiens
ttttttttaaatatattcacggatta

SEQ ID NO: 10659 - DNA, 26 bp, Homo sapiens
tttttttaaatatattcacggattac

SEQ ID NO: 10660 - DNA, 26 bp, Homo sapiens
ttttttaaatatattcacggattacc

SEQ ID NO: 10661 - DNA, 26 bp, Homo sapiens
tttttaaatatattcacggattacca

SEQ ID NO: 10662 - DNA, 26 bp, Homo sapiens
ttttaaatatattcacggattaccag

SEQ ID NO: 10663 - DNA, 26 bp, Homo sapiens
tttaaatatattcacggattaccaga

SEQ ID NO: 10664 - DNA, 26 bp, Homo sapiens
ttaaatatattcacggattaccagaa

SEQ ID NO: 10665 - DNA, 26 bp, Homo sapiens
taaatatattcacggattaccagaaa

SEQ ID NO: 10666 - DNA, 26 bp, Homo sapiens
aaatatattcacggattaccagaaag

SEQ ID NO: 10667 - DNA, 26 bp, Homo sapiens
aatatattcacggattaccagaaaga

SEQ ID NO: 10668 - DNA, 26 bp, Homo sapiens
atatattcacggattaccagaaagat

SEQ ID NO: 10669 - DNA, 26 bp, Homo sapiens
tatattcacggattaccagaaagatc

SEQ ID NO: 10670 - DNA, 26 bp, Homo sapiens
atattcacggattaccagaaagatct

SEQ ID NO: 10671 - DNA, 26 bp, Homo sapiens
tattcacggattaccagaaagatctt

SEQ ID NO: 10672 - DNA, 26 bp, Homo sapiens
attcacggattaccagaaagatcttg

SEQ ID NO: 10673 - DNA, 26 bp, Homo sapiens
ttcacggattaccagaaagatcttga

SEQ ID NO: 10674 - DNA, 26 bp, Homo sapiens
tcacggattaccagaaagatcttgaa

SEQ ID NO: 10675 - DNA, 26 bp, Homo sapiens
cacggattaccagaaagatcttgaaa

SEQ ID NO: 10676 - DNA, 26 bp, Homo sapiens
acggattaccagaaagatcttgaaaa

SEQ ID NO: 10677 - DNA, 26 bp, Homo sapiens
cggattaccagaaagatcttgaaaaa

SEQ ID NO: 10678 - DNA, 26 bp, Homo sapiens
ggattaccagaaagatcttgaaaaac

SEQ ID NO: 10679 - DNA, 26 bp, Homo sapiens
gattaccagaaagatcttgaaaaacc

SEQ ID NO: 10680 - DNA, 26 bp, Homo sapiens
attaccagaaagatcttgaaaaaccc

SEQ ID NO: 10681 - DNA, 26 bp, Homo sapiens
ttaccagaaagatcttgaaaaaccct

SEQ ID NO: 10682 - DNA, 26 bp, Homo sapiens
taccagaaagatcttgaaaaacccta

SEQ ID NO: 10683 - DNA, 26 bp, Homo sapiens
accagaaagatcttgaaaaaccctat

SEQ ID NO: 10684 - DNA, 26 bp, Homo sapiens
ccagaaagatcttgaaaaaccctatt

SEQ ID NO: 10685 - DNA, 26 bp, Homo sapiens
cagaaagatcttgaaaaaccctattt

SEQ ID NO: 10686 - DNA, 26 bp, Homo sapiens
agaaagatcttgaaaaaccctatttt

SEQ ID NO: 10687 - DNA, 26 bp, Homo sapiens
gaaagatcttgaaaaaccctattttg

SEQ ID NO: 10688 - DNA, 26 bp, Homo sapiens
aaagatcttgaaaaaccctattttgc

SEQ ID NO: 10689 - DNA, 26 bp, Homo sapiens
aagatcttgaaaaaccctattttgct

SEQ ID NO: 10690 - DNA, 26 bp, Homo sapiens
agatcttgaaaaaccctattttgctc

SEQ ID NO: 10691 - DNA, 26 bp, Homo sapiens
gatcttgaaaaaccctattttgctcc

SEQ ID NO: 10692 - DNA, 26 bp, Homo sapiens
atcttgaaaaaccctattttgctcca

SEQ ID NO: 10693 - DNA, 26 bp, Homo sapiens
tcttgaaaaaccctattttgctccat

SEQ ID NO: 10694 - DNA, 26 bp, Homo sapiens
cttgaaaaaccctattttgctccatg

SEQ ID NO: 10695 - DNA, 26 bp, Homo sapiens
ttgaaaaaccctattttgctccatga

SEQ ID NO: 10696 - DNA, 26 bp, Homo sapiens
tgaaaaaccctattttgctccatgac

SEQ ID NO: 10697 - DNA, 26 bp, Homo sapiens
gaaaaaccctattttgctccatgacc

SEQ ID NO: 10698 - DNA, 26 bp, Homo sapiens
aaaaaccctattttgctccatgacca

SEQ ID NO: 10699 - DNA, 26 bp, Homo sapiens
aaaaccctattttgctccatgaccag

SEQ ID NO: 10700 - DNA, 26 bp, Homo sapiens
aaaccctattttgctccatgaccagc

SEQ ID NO: 10701 - DNA, 26 bp, Homo sapiens
aaccctattttgctccatgaccagca

SEQ ID NO: 10702 - DNA, 26 bp, Homo sapiens
accctattttgctccatgaccagcac

SEQ ID NO: 10703 - DNA, 26 bp, Homo sapiens
ccctattttgctccatgaccagcact

SEQ ID NO: 10704 - DNA, 26 bp, Homo sapiens
cctattttgctccatgaccagcactt

SEQ ID NO: 10705 - DNA, 26 bp, Homo sapiens
ctattttgctccatgaccagcacttc

SEQ ID NO: 10706 - DNA, 26 bp, Homo sapiens
tattttgctccatgaccagcacttcc

SEQ ID NO: 10707 - DNA, 26 bp, Homo sapiens
attttgctccatgaccagcacttcct

SEQ ID NO: 10708 - DNA, 26 bp, Homo sapiens
ttttgctccatgaccagcacttcctg

SEQ ID NO: 10709 - DNA, 26 bp, Homo sapiens
tttgctccatgaccagcacttcctgg

SEQ ID NO: 10710 - DNA, 26 bp, Homo sapiens
ttgctccatgaccagcacttcctggc

SEQ ID NO: 10711 - DNA, 26 bp, Homo sapiens
tgctccatgaccagcacttcctggcc

SEQ ID NO: 10712 - DNA, 26 bp, Homo sapiens
gctccatgaccagcacttcctggccg

SEQ ID NO: 10713 - DNA, 26 bp, Homo sapiens
ctccatgaccagcacttcctggccgc

SEQ ID NO: 10714 - DNA, 26 bp, Homo sapiens
tccatgaccagcacttcctggccgca

SEQ ID NO: 10715 - DNA, 26 bp, Homo sapiens
ccatgaccagcacttcctggccgcag

SEQ ID NO: 10716 - DNA, 26 bp, Homo sapiens
catgaccagcacttcctggccgcaga

SEQ ID NO: 10717 - DNA, 26 bp, Homo sapiens
atgaccagcacttcctggccgcagat

SEQ ID NO: 10718 - DNA, 26 bp, Homo sapiens
tgaccagcacttcctggccgcagatg

SEQ ID NO: 10719 - DNA, 26 bp, Homo sapiens
gaccagcacttcctggccgcagatgg

SEQ ID NO: 10720 - DNA, 26 bp, Homo sapiens
accagcacttcctggccgcagatgga

SEQ ID NO: 10721 - DNA, 26 bp, Homo sapiens
ccagcacttcctggccgcagatggac

SEQ ID NO: 10722 - DNA, 26 bp, Homo sapiens
cagcacttcctggccgcagatggact

SEQ ID NO: 10723 - DNA, 26 bp, Homo sapiens
agcacttcctggccgcagatggactc

SEQ ID NO: 10724 - DNA, 26 bp, Homo sapiens
gcacttcctggccgcagatggactct

SEQ ID NO: 10725 - DNA, 26 bp, Homo sapiens
cacttcctggccgcagatggactcta

SEQ ID NO: 10726 - DNA, 26 bp, Homo sapiens
acttcctggccgcagatggactctaa

SEQ ID NO: 10727 - DNA, 26 bp, Homo sapiens
cttcctggccgcagatggactctaag

SEQ ID NO: 10728 - DNA, 26 bp, Homo sapiens
ttcctggccgcagatggactctaagt

SEQ ID NO: 10729 - DNA, 26 bp, Homo sapiens
tcctggccgcagatggactctaagta

SEQ ID NO: 10730 - DNA, 26 bp, Homo sapiens
cctggccgcagatggactctaagtaa

SEQ ID NO: 10731 - DNA, 26 bp, Homo sapiens
ctggccgcagatggactctaagtaac

SEQ ID NO: 10732 - DNA, 26 bp, Homo sapiens
tggccgcagatggactctaagtaact

SEQ ID NO: 10733 - DNA, 26 bp, Homo sapiens
ggccgcagatggactctaagtaactt

SEQ ID NO: 10734 - DNA, 26 bp, Homo sapiens
gccgcagatggactctaagtaacttt

SEQ ID NO: 10735 - DNA, 26 bp, Homo sapiens
ccgcagatggactctaagtaactttt

SEQ ID NO: 10736 - DNA, 26 bp, Homo sapiens
cgcagatggactctaagtaacttttt

SEQ ID NO: 10737 - DNA, 26 bp, Homo sapiens
gcagatggactctaagtaactttttg

SEQ ID NO: 10738 - DNA, 26 bp, Homo sapiens
cagatggactctaagtaactttttgc

SEQ ID NO: 10739 - DNA, 26 bp, Homo sapiens
agatggactctaagtaactttttgct

SEQ ID NO: 10740 - DNA, 26 bp, Homo sapiens
gatggactctaagtaactttttgctt

SEQ ID NO: 10741 - DNA, 26 bp, Homo sapiens
atggactctaagtaactttttgctta

SEQ ID NO: 10742 - DNA, 26 bp, Homo sapiens
tggactctaagtaactttttgcttaa

SEQ ID NO: 10743 - DNA, 26 bp, Homo sapiens
ggactctaagtaactttttgcttaat

SEQ ID NO: 10744 - DNA, 26 bp, Homo sapiens
gactctaagtaactttttgcttaatg

SEQ ID NO: 10745 - DNA, 26 bp, Homo sapiens
actctaagtaactttttgcttaatgc

SEQ ID NO: 10746 - DNA, 26 bp, Homo sapiens
ctctaagtaactttttgcttaatgct

SEQ ID NO: 10747 - DNA, 26 bp, Homo sapiens
tctaagtaactttttgcttaatgctt

SEQ ID NO: 10748 - DNA, 26 bp, Homo sapiens
ctaagtaactttttgcttaatgcttg

SEQ ID NO: 10749 - DNA, 26 bp, Homo sapiens
taagtaactttttgcttaatgcttgg

SEQ ID NO: 10750 - DNA, 26 bp, Homo sapiens
aagtaactttttgcttaatgcttggt

SEQ ID NO: 10751 - DNA, 26 bp, Homo sapiens
agtaactttttgcttaatgcttggtg

SEQ ID NO: 10752 - DNA, 26 bp, Homo sapiens
gtaactttttgcttaatgcttggtgt

SEQ ID NO: 10753 - DNA, 26 bp, Homo sapiens
taactttttgcttaatgcttggtgtt

SEQ ID NO: 10754 - DNA, 26 bp, Homo sapiens
aactttttgcttaatgcttggtgttt

SEQ ID NO: 10755 - DNA, 26 bp, Homo sapiens
actttttgcttaatgcttggtgtttc

SEQ ID NO: 10756 - DNA, 26 bp, Homo sapiens
ctttttgcttaatgcttggtgtttca

SEQ ID NO: 10757 - DNA, 26 bp, Homo sapiens
tttttgcttaatgcttggtgtttcag

SEQ ID NO: 10758 - DNA, 26 bp, Homo sapiens
ttttgcttaatgcttggtgtttcagg

SEQ ID NO: 10759 - DNA, 26 bp, Homo sapiens
tttgcttaatgcttggtgtttcaggt

SEQ ID NO: 10760 - DNA, 26 bp, Homo sapiens
ttgcttaatgcttggtgtttcaggtc

SEQ ID NO: 10761 - DNA, 26 bp, Homo sapiens
tgcttaatgcttggtgtttcaggtcg

SEQ ID NO: 10762 - DNA, 26 bp, Homo sapiens
gcttaatgcttggtgtttcaggtcgg

SEQ ID NO: 10763 - DNA, 26 bp, Homo sapiens
cttaatgcttggtgtttcaggtcggt

SEQ ID NO: 10764 - DNA, 26 bp, Homo sapiens
ttaatgcttggtgtttcaggtcggtg

SEQ ID NO: 10765 - DNA, 26 bp, Homo sapiens
taatgcttggtgtttcaggtcggtga

SEQ ID NO: 10766 - DNA, 26 bp, Homo sapiens
aatgcttggtgtttcaggtcggtgat

SEQ ID NO: 10767 - DNA, 26 bp, Homo sapiens
atgcttggtgtttcaggtcggtgatc

SEQ ID NO: 10768 - DNA, 26 bp, Homo sapiens
tgcttggtgtttcaggtcggtgatcc

SEQ ID NO: 10769 - DNA, 26 bp, Homo sapiens
gcttggtgtttcaggtcggtgatcct

SEQ ID NO: 10770 - DNA, 26 bp, Homo sapiens
cttggtgtttcaggtcggtgatcctt

SEQ ID NO: 10771 - DNA, 26 bp, Homo sapiens
ttggtgtttcaggtcggtgatccttc

SEQ ID NO: 10772 - DNA, 26 bp, Homo sapiens
tggtgtttcaggtcggtgatccttcc

SEQ ID NO: 10773 - DNA, 26 bp, Homo sapiens
ggtgtttcaggtcggtgatccttcct

SEQ ID NO: 10774 - DNA, 26 bp, Homo sapiens
gtgtttcaggtcggtgatccttcctc

SEQ ID NO: 10775 - DNA, 26 bp, Homo sapiens
tgtttcaggtcggtgatccttcctct

SEQ ID NO: 10776 - DNA, 26 bp, Homo sapiens
gtttcaggtcggtgatccttcctctc

SEQ ID NO: 10777 - DNA, 26 bp, Homo sapiens
tttcaggtcggtgatccttcctctct

SEQ ID NO: 10778 - DNA, 26 bp, Homo sapiens
ttcaggtcggtgatccttcctctctg

SEQ ID NO: 10779 - DNA, 26 bp, Homo sapiens
tcaggtcggtgatccttcctctctga

SEQ ID NO: 10780 - DNA, 26 bp, Homo sapiens
caggtcggtgatccttcctctctgac

SEQ ID NO: 10781 - DNA, 26 bp, Homo sapiens
aggtcggtgatccttcctctctgaca

SEQ ID NO: 10782 - DNA, 26 bp, Homo sapiens
ggtcggtgatccttcctctctgacac

SEQ ID NO: 10783 - DNA, 26 bp, Homo sapiens
gtcggtgatccttcctctctgacacg

SEQ ID NO: 10784 - DNA, 26 bp, Homo sapiens
tcggtgatccttcctctctgacacgt

SEQ ID NO: 10785 - DNA, 26 bp, Homo sapiens
cggtgatccttcctctctgacacgtt

SEQ ID NO: 10786 - DNA, 26 bp, Homo sapiens
ggtgatccttcctctctgacacgtta

SEQ ID NO: 10787 - DNA, 26 bp, Homo sapiens
gtgatccttcctctctgacacgttac

SEQ ID NO: 10788 - DNA, 26 bp, Homo sapiens
tgatccttcctctctgacacgttacg

SEQ ID NO: 10789 - DNA, 26 bp, Homo sapiens
gatccttcctctctgacacgttacgc

SEQ ID NO: 10790 - DNA, 26 bp, Homo sapiens
atccttcctctctgacacgttacgct

SEQ ID NO: 10791 - DNA, 26 bp, Homo sapiens
tccttcctctctgacacgttacgctt

SEQ ID NO: 10792 - DNA, 26 bp, Homo sapiens
ccttcctctctgacacgttacgcttg

SEQ ID NO: 10793 - DNA, 26 bp, Homo sapiens
cttcctctctgacacgttacgcttga

SEQ ID NO: 10794 - DNA, 26 bp, Homo sapiens
ttcctctctgacacgttacgcttgac

SEQ ID NO: 10795 - DNA, 26 bp, Homo sapiens
tcctctctgacacgttacgcttgact

SEQ ID NO: 10796 - DNA, 26 bp, Homo sapiens
cctctctgacacgttacgcttgactt

SEQ ID NO: 10797 - DNA, 26 bp, Homo sapiens
ctctctgacacgttacgcttgacttt

SEQ ID NO: 10798 - DNA, 26 bp, Homo sapiens
tctctgacacgttacgcttgactttg

SEQ ID NO: 10799 - DNA, 26 bp, Homo sapiens
ctctgacacgttacgcttgactttgg

SEQ ID NO: 10800 - DNA, 26 bp, Homo sapiens
tctgacacgttacgcttgactttggc

SEQ ID NO: 10801 - DNA, 26 bp, Homo sapiens
ctgacacgttacgcttgactttggca

SEQ ID NO: 10802 - DNA, 26 bp, Homo sapiens
tgacacgttacgcttgactttggcag

SEQ ID NO: 10803 - DNA, 26 bp, Homo sapiens
gacacgttacgcttgactttggcagt

SEQ ID NO: 10804 - DNA, 26 bp, Homo sapiens
acacgttacgcttgactttggcagtg

SEQ ID NO: 10805 - DNA, 26 bp, Homo sapiens
cacgttacgcttgactttggcagtga

SEQ ID NO: 10806 - DNA, 26 bp, Homo sapiens
acgttacgcttgactttggcagtgat

SEQ ID NO: 10807 - DNA, 26 bp, Homo sapiens
cgttacgcttgactttggcagtgatt

SEQ ID NO: 10808 - DNA, 26 bp, Homo sapiens
gttacgcttgactttggcagtgattg

SEQ ID NO: 10809 - DNA, 26 bp, Homo sapiens
ttacgcttgactttggcagtgattgg

SEQ ID NO: 10810 - DNA, 26 bp, Homo sapiens
tacgcttgactttggcagtgattgga

SEQ ID NO: 10811 - DNA, 26 bp, Homo sapiens
acgcttgactttggcagtgattggag

SEQ ID NO: 10812 - DNA, 26 bp, Homo sapiens
cgcttgactttggcagtgattggaga

SEQ ID NO: 10813 - DNA, 26 bp, Homo sapiens
gcttgactttggcagtgattggagaa

SEQ ID NO: 10814 - DNA, 26 bp, Homo sapiens
cttgactttggcagtgattggagaag

SEQ ID NO: 10815 - DNA, 26 bp, Homo sapiens
ttgactttggcagtgattggagaagt

SEQ ID NO: 10816 - DNA, 26 bp, Homo sapiens
tgactttggcagtgattggagaagta

SEQ ID NO: 10817 - DNA, 26 bp, Homo sapiens
gactttggcagtgattggagaagtat

SEQ ID NO: 10818 - DNA, 26 bp, Homo sapiens
actttggcagtgattggagaagtatc

SEQ ID NO: 10819 - DNA, 26 bp, Homo sapiens
ctttggcagtgattggagaagtatcc

SEQ ID NO: 10820 - DNA, 26 bp, Homo sapiens
tttggcagtgattggagaagtatccg

SEQ ID NO: 10821 - DNA, 26 bp, Homo sapiens
ttggcagtgattggagaagtatccgg

SEQ ID NO: 10822 - DNA, 26 bp, Homo sapiens
tggcagtgattggagaagtatccggg

SEQ ID NO: 10823 - DNA, 26 bp, Homo sapiens
ggcagtgattggagaagtatccgggt

SEQ ID NO: 10824 - DNA, 26 bp, Homo sapiens
gcagtgattggagaagtatccgggtt

SEQ ID NO: 10825 - DNA, 26 bp, Homo sapiens
cagtgattggagaagtatccgggttc

SEQ ID NO: 10826 - DNA, 26 bp, Homo sapiens
agtgattggagaagtatccgggttca

SEQ ID NO: 10827 - DNA, 26 bp, Homo sapiens
gtgattggagaagtatccgggttcag

SEQ ID NO: 10828 - DNA, 26 bp, Homo sapiens
tgattggagaagtatccgggttcagc

SEQ ID NO: 10829 - DNA, 26 bp, Homo sapiens
gattggagaagtatccgggttcagcg

SEQ ID NO: 10830 - DNA, 26 bp, Homo sapiens
attggagaagtatccgggttcagcga

SEQ ID NO: 10831 - DNA, 26 bp, Homo sapiens
ttggagaagtatccgggttcagcgaa

SEQ ID NO: 10832 - DNA, 26 bp, Homo sapiens
tggagaagtatccgggttcagcgaag

SEQ ID NO: 10833 - DNA, 26 bp, Homo sapiens
ggagaagtatccgggttcagcgaagg

SEQ ID NO: 10834 - DNA, 26 bp, Homo sapiens
gagaagtatccgggttcagcgaagga

SEQ ID NO: 10835 - DNA, 26 bp, Homo sapiens
agaagtatccgggttcagcgaaggac

SEQ ID NO: 10836 - DNA, 26 bp, Homo sapiens
gaagtatccgggttcagcgaaggact

SEQ ID NO: 10837 - DNA, 26 bp, Homo sapiens
aagtatccgggttcagcgaaggactc

SEQ ID NO: 10838 - DNA, 26 bp, Homo sapiens
agtatccgggttcagcgaaggactcg

SEQ ID NO: 10839 - DNA, 26 bp, Homo sapiens
gtatccgggttcagcgaaggactcga

SEQ ID NO: 10840 - DNA, 26 bp, Homo sapiens
tatccgggttcagcgaaggactcgag

SEQ ID NO: 10841 - DNA, 26 bp, Homo sapiens
atccgggttcagcgaaggactcgagt

SEQ ID NO: 10842 - DNA, 26 bp, Homo sapiens
tccgggttcagcgaaggactcgagtg

SEQ ID NO: 10843 - DNA, 26 bp, Homo sapiens
ccgggttcagcgaaggactcgagtgc

SEQ ID NO: 10844 - DNA, 26 bp, Homo sapiens
cgggttcagcgaaggactcgagtgcg

SEQ ID NO: 10845 - DNA, 26 bp, Homo sapiens
gggttcagcgaaggactcgagtgcga

SEQ ID NO: 10846 - DNA, 26 bp, Homo sapiens
ggttcagcgaaggactcgagtgcgac

SEQ ID NO: 10847 - DNA, 26 bp, Homo sapiens
gttcagcgaaggactcgagtgcgact

SEQ ID NO: 10848 - DNA, 26 bp, Homo sapiens
ttcagcgaaggactcgagtgcgactt

SEQ ID NO: 10849 - DNA, 26 bp, Homo sapiens
tcagcgaaggactcgagtgcgacttc

SEQ ID NO: 10850 - DNA, 26 bp, Homo sapiens
cagcgaaggactcgagtgcgacttct

SEQ ID NO: 10851 - DNA, 26 bp, Homo sapiens
agcgaaggactcgagtgcgacttctt

SEQ ID NO: 10852 - DNA, 26 bp, Homo sapiens
gcgaaggactcgagtgcgacttcttc

SEQ ID NO: 10853 - DNA, 26 bp, Homo sapiens
cgaaggactcgagtgcgacttcttca

SEQ ID NO: 10854 - DNA, 26 bp, Homo sapiens
gaaggactcgagtgcgacttcttcag

SEQ ID NO: 10855 - DNA, 26 bp, Homo sapiens
aaggactcgagtgcgacttcttcagt

SEQ ID NO: 10856 - DNA, 26 bp, Homo sapiens
aggactcgagtgcgacttcttcagtc

SEQ ID NO: 10857 - DNA, 26 bp, Homo sapiens
ggactcgagtgcgacttcttcagtcc

SEQ ID NO: 10858 - DNA, 26 bp, Homo sapiens
gactcgagtgcgacttcttcagtcct

SEQ ID NO: 10859 - DNA, 26 bp, Homo sapiens
actcgagtgcgacttcttcagtcctg

SEQ ID NO: 10860 - DNA, 26 bp, Homo sapiens
ctcgagtgcgacttcttcagtcctgc

SEQ ID NO: 10861 - DNA, 26 bp, Homo sapiens
tcgagtgcgacttcttcagtcctgca

SEQ ID NO: 10862 - DNA, 26 bp, Homo sapiens
cgagtgcgacttcttcagtcctgcag

SEQ ID NO: 10863 - DNA, 26 bp, Homo sapiens
gagtgcgacttcttcagtcctgcagc

SEQ ID NO: 10864 - DNA, 26 bp, Homo sapiens
agtgcgacttcttcagtcctgcagcc

SEQ ID NO: 10865 - DNA, 26 bp, Homo sapiens
gtgcgacttcttcagtcctgcagcct

SEQ ID NO: 10866 - DNA, 26 bp, Homo sapiens
tgcgacttcttcagtcctgcagcctc

SEQ ID NO: 10867 - DNA, 26 bp, Homo sapiens
gcgacttcttcagtcctgcagcctcg

SEQ ID NO: 10868 - DNA, 26 bp, Homo sapiens
cgacttcttcagtcctgcagcctcgc

SEQ ID NO: 10869 - DNA, 26 bp, Homo sapiens
gacttcttcagtcctgcagcctcgct

SEQ ID NO: 10870 - DNA, 26 bp, Homo sapiens
acttcttcagtcctgcagcctcgctt

SEQ ID NO: 10871 - DNA, 26 bp, Homo sapiens
cttcttcagtcctgcagcctcgcttt

SEQ ID NO: 10872 - DNA, 26 bp, Homo sapiens
ttcttcagtcctgcagcctcgctttc

SEQ ID NO: 10873 - DNA, 26 bp, Homo sapiens
tcttcagtcctgcagcctcgctttca

SEQ ID NO: 10874 - DNA, 26 bp, Homo sapiens
cttcagtcctgcagcctcgctttcat

SEQ ID NO: 10875 - DNA, 26 bp, Homo sapiens
ttcagtcctgcagcctcgctttcatc

SEQ ID NO: 10876 - DNA, 26 bp, Homo sapiens
tcagtcctgcagcctcgctttcatcg

SEQ ID NO: 10877 - DNA, 26 bp, Homo sapiens
cagtcctgcagcctcgctttcatcgt

SEQ ID NO: 10878 - DNA, 26 bp, Homo sapiens
agtcctgcagcctcgctttcatcgtt

SEQ ID NO: 10879 - DNA, 26 bp, Homo sapiens
gtcctgcagcctcgctttcatcgtta

SEQ ID NO: 10880 - DNA, 26 bp, Homo sapiens
tcctgcagcctcgctttcatcgttac

SEQ ID NO: 10881 - DNA, 26 bp, Homo sapiens
cctgcagcctcgctttcatcgttact

SEQ ID NO: 10882 - DNA, 26 bp, Homo sapiens
ctgcagcctcgctttcatcgttactc

SEQ ID NO: 10883 - DNA, 26 bp, Homo sapiens
tgcagcctcgctttcatcgttactca

SEQ ID NO: 10884 - DNA, 26 bp, Homo sapiens
gcagcctcgctttcatcgttactcag

SEQ ID NO: 10885 - DNA, 26 bp, Homo sapiens
cagcctcgctttcatcgttactcagt

SEQ ID NO: 10886 - DNA, 26 bp, Homo sapiens
agcctcgctttcatcgttactcagta

SEQ ID NO: 10887 - DNA, 26 bp, Homo sapiens
gcctcgctttcatcgttactcagtag

SEQ ID NO: 10888 - DNA, 26 bp, Homo sapiens
cctcgctttcatcgttactcagtagc

SEQ ID NO: 10889 - DNA, 26 bp, Homo sapiens
ctcgctttcatcgttactcagtagct

SEQ ID NO: 10890 - DNA, 26 bp, Homo sapiens
tcgctttcatcgttactcagtagctc

SEQ ID NO: 10891 - DNA, 26 bp, Homo sapiens
cgctttcatcgttactcagtagctct

SEQ ID NO: 10892 - DNA, 26 bp, Homo sapiens
gctttcatcgttactcagtagctctt

SEQ ID NO: 10893 - DNA, 26 bp, Homo sapiens
ctttcatcgttactcagtagctcttt

SEQ ID NO: 10894 - DNA, 26 bp, Homo sapiens
tttcatcgttactcagtagctctttg

SEQ ID NO: 10895 - DNA, 26 bp, Homo sapiens
ttcatcgttactcagtagctctttgc

SEQ ID NO: 10896 - DNA, 26 bp, Homo sapiens
tcatcgttactcagtagctctttgcc

SEQ ID NO: 10897 - DNA, 26 bp, Homo sapiens
catcgttactcagtagctctttgcct

SEQ ID NO: 10898 - DNA, 26 bp, Homo sapiens
atcgttactcagtagctctttgcctc

SEQ ID NO: 10899 - DNA, 26 bp, Homo sapiens
tcgttactcagtagctctttgcctcc

SEQ ID NO: 10900 - DNA, 26 bp, Homo sapiens
cgttactcagtagctctttgcctcct

SEQ ID NO: 10901 - DNA, 26 bp, Homo sapiens
gttactcagtagctctttgcctcctt

SEQ ID NO: 10902 - DNA, 26 bp, Homo sapiens
ttactcagtagctctttgcctccttc

SEQ ID NO: 10903 - DNA, 26 bp, Homo sapiens
tactcagtagctctttgcctccttcc

SEQ ID NO: 10904 - DNA, 26 bp, Homo sapiens
actcagtagctctttgcctccttcct

SEQ ID NO: 10905 - DNA, 26 bp, Homo sapiens
ctcagtagctctttgcctccttcctt

SEQ ID NO: 10906 - DNA, 26 bp, Homo sapiens
tcagtagctctttgcctccttccttg

SEQ ID NO: 10907 - DNA, 26 bp, Homo sapiens
cagtagctctttgcctccttccttga

SEQ ID NO: 10908 - DNA, 26 bp, Homo sapiens
agtagctctttgcctccttccttgag

SEQ ID NO: 10909 - DNA, 26 bp, Homo sapiens
gtagctctttgcctccttccttgaga

SEQ ID NO: 10910 - DNA, 26 bp, Homo sapiens
tagctctttgcctccttccttgagaa

SEQ ID NO: 10911 - DNA, 26 bp, Homo sapiens
agctctttgcctccttccttgagaat

SEQ ID NO: 10912 - DNA, 26 bp, Homo sapiens
gctctttgcctccttccttgagaatg

SEQ ID NO: 10913 - DNA, 26 bp, Homo sapiens
ctctttgcctccttccttgagaatgc

SEQ ID NO: 10914 - DNA, 26 bp, Homo sapiens
tctttgcctccttccttgagaatgct

SEQ ID NO: 10915 - DNA, 26 bp, Homo sapiens
ctttgcctccttccttgagaatgctg

SEQ ID NO: 10916 - DNA, 26 bp, Homo sapiens
tttgcctccttccttgagaatgctga

SEQ ID NO: 10917 - DNA, 26 bp, Homo sapiens
ttgcctccttccttgagaatgctgac

SEQ ID NO: 10918 - DNA, 26 bp, Homo sapiens
tgcctccttccttgagaatgctgaca

SEQ ID NO: 10919 - DNA, 26 bp, Homo sapiens
gcctccttccttgagaatgctgacat

SEQ ID NO: 10920 - DNA, 26 bp, Homo sapiens
cctccttccttgagaatgctgacata

SEQ ID NO: 10921 - DNA, 26 bp, Homo sapiens
ctccttccttgagaatgctgacatac

SEQ ID NO: 10922 - DNA, 26 bp, Homo sapiens
tccttccttgagaatgctgacataca

SEQ ID NO: 10923 - DNA, 26 bp, Homo sapiens
ccttccttgagaatgctgacatacat

SEQ ID NO: 10924 - DNA, 26 bp, Homo sapiens
cttccttgagaatgctgacatacatt

SEQ ID NO: 10925 - DNA, 26 bp, Homo sapiens
ttccttgagaatgctgacatacattt

SEQ ID NO: 10926 - DNA, 26 bp, Homo sapiens
tccttgagaatgctgacatacatttc

SEQ ID NO: 10927 - DNA, 26 bp, Homo sapiens
ccttgagaatgctgacatacatttca

SEQ ID NO: 10928 - DNA, 26 bp, Homo sapiens
cttgagaatgctgacatacatttcat

SEQ ID NO: 10929 - DNA, 26 bp, Homo sapiens
ttgagaatgctgacatacatttcata

SEQ ID NO: 10930 - DNA, 26 bp, Homo sapiens
tgagaatgctgacatacatttcatag

SEQ ID NO: 10931 - DNA, 26 bp, Homo sapiens
gagaatgctgacatacatttcatagc

SEQ ID NO: 10932 - DNA, 26 bp, Homo sapiens
agaatgctgacatacatttcatagcg

SEQ ID NO: 10933 - DNA, 26 bp, Homo sapiens
gaatgctgacatacatttcatagcgg

SEQ ID NO: 10934 - DNA, 26 bp, Homo sapiens
aatgctgacatacatttcatagcggg

SEQ ID NO: 10935 - DNA, 26 bp, Homo sapiens
atgctgacatacatttcatagcgggt

SEQ ID NO: 10936 - DNA, 26 bp, Homo sapiens
tgctgacatacatttcatagcgggtt

SEQ ID NO: 10937 - DNA, 26 bp, Homo sapiens
gctgacatacatttcatagcgggttt

SEQ ID NO: 10938 - DNA, 26 bp, Homo sapiens
ctgacatacatttcatagcgggtttt

SEQ ID NO: 10939 - DNA, 26 bp, Homo sapiens
tgacatacatttcatagcgggttttc

SEQ ID NO: 10940 - DNA, 26 bp, Homo sapiens
gacatacatttcatagcgggttttct

SEQ ID NO: 10941 - DNA, 26 bp, Homo sapiens
acatacatttcatagcgggttttctc

SEQ ID NO: 10942 - DNA, 26 bp, Homo sapiens
catacatttcatagcgggttttctca

SEQ ID NO: 10943 - DNA, 26 bp, Homo sapiens
atacatttcatagcgggttttctcaa

SEQ ID NO: 10944 - DNA, 26 bp, Homo sapiens
tacatttcatagcgggttttctcaaa

SEQ ID NO: 10945 - DNA, 26 bp, Homo sapiens
acatttcatagcgggttttctcaaac

SEQ ID NO: 10946 - DNA, 26 bp, Homo sapiens
catttcatagcgggttttctcaaact

SEQ ID NO: 10947 - DNA, 26 bp, Homo sapiens
atttcatagcgggttttctcaaactc

SEQ ID NO: 10948 - DNA, 26 bp, Homo sapiens
tttcatagcgggttttctcaaactcc

SEQ ID NO: 10949 - DNA, 26 bp, Homo sapiens
ttcatagcgggttttctcaaactcca

SEQ ID NO: 10950 - DNA, 26 bp, Homo sapiens
tcatagcgggttttctcaaactccag

SEQ ID NO: 10951 - DNA, 26 bp, Homo sapiens
catagcgggttttctcaaactccaga

SEQ ID NO: 10952 - DNA, 26 bp, Homo sapiens
atagcgggttttctcaaactccagat

SEQ ID NO: 10953 - DNA, 26 bp, Homo sapiens
tagcgggttttctcaaactccagata

SEQ ID NO: 10954 - DNA, 26 bp, Homo sapiens
agcgggttttctcaaactccagatag

SEQ ID NO: 10955 - DNA, 26 bp, Homo sapiens
gcgggttttctcaaactccagatagt

SEQ ID NO: 10956 - DNA, 26 bp, Homo sapiens
cgggttttctcaaactccagatagtg

SEQ ID NO: 10957 - DNA, 26 bp, Homo sapiens
gggttttctcaaactccagatagtgg

SEQ ID NO: 10958 - DNA, 26 bp, Homo sapiens
ggttttctcaaactccagatagtggt

SEQ ID NO: 10959 - DNA, 26 bp, Homo sapiens
gttttctcaaactccagatagtggtc

SEQ ID NO: 10960 - DNA, 26 bp, Homo sapiens
ttttctcaaactccagatagtggtct

SEQ ID NO: 10961 - DNA, 26 bp, Homo sapiens
tttctcaaactccagatagtggtctt

SEQ ID NO: 10962 - DNA, 26 bp, Homo sapiens
ttctcaaactccagatagtggtcttt

SEQ ID NO: 10963 - DNA, 26 bp, Homo sapiens
tctcaaactccagatagtggtctttc

SEQ ID NO: 10964 - DNA, 26 bp, Homo sapiens
ctcaaactccagatagtggtctttca

SEQ ID NO: 10965 - DNA, 26 bp, Homo sapiens
tcaaactccagatagtggtctttcag

SEQ ID NO: 10966 - DNA, 26 bp, Homo sapiens
caaactccagatagtggtctttcagt

SEQ ID NO: 10967 - DNA, 26 bp, Homo sapiens
aaactccagatagtggtctttcagtt

SEQ ID NO: 10968 - DNA, 26 bp, Homo sapiens
aactccagatagtggtctttcagttt

SEQ ID NO: 10969 - DNA, 26 bp, Homo sapiens
actccagatagtggtctttcagtttg

SEQ ID NO: 10970 - DNA, 26 bp, Homo sapiens
ctccagatagtggtctttcagtttgt

SEQ ID NO: 10971 - DNA, 26 bp, Homo sapiens
tccagatagtggtctttcagtttgta

SEQ ID NO: 10972 - DNA, 26 bp, Homo sapiens
ccagatagtggtctttcagtttgtac

SEQ ID NO: 10973 - DNA, 26 bp, Homo sapiens
cagatagtggtctttcagtttgtact

SEQ ID NO: 10974 - DNA, 26 bp, Homo sapiens
agatagtggtctttcagtttgtactc

SEQ ID NO: 10975 - DNA, 26 bp, Homo sapiens
gatagtggtctttcagtttgtactca

SEQ ID NO: 10976 - DNA, 26 bp, Homo sapiens
atagtggtctttcagtttgtactcat

SEQ ID NO: 10977 - DNA, 26 bp, Homo sapiens
tagtggtctttcagtttgtactcatc

SEQ ID NO: 10978 - DNA, 26 bp, Homo sapiens
agtggtctttcagtttgtactcatcg

SEQ ID NO: 10979 - DNA, 26 bp, Homo sapiens
gtggtctttcagtttgtactcatcga

SEQ ID NO: 10980 - DNA, 26 bp, Homo sapiens
tggtctttcagtttgtactcatcgac

SEQ ID NO: 10981 - DNA, 26 bp, Homo sapiens
ggtctttcagtttgtactcatcgacg

SEQ ID NO: 10982 - DNA, 26 bp, Homo sapiens
gtctttcagtttgtactcatcgacgt

SEQ ID NO: 10983 - DNA, 26 bp, Homo sapiens
tctttcagtttgtactcatcgacgtc

SEQ ID NO: 10984 - DNA, 26 bp, Homo sapiens
ctttcagtttgtactcatcgacgtcc

SEQ ID NO: 10985 - DNA, 26 bp, Homo sapiens
tttcagtttgtactcatcgacgtcct

SEQ ID NO: 10986 - DNA, 26 bp, Homo sapiens
ttcagtttgtactcatcgacgtcctt

SEQ ID NO: 10987 - DNA, 26 bp, Homo sapiens
tcagtttgtactcatcgacgtccttg

SEQ ID NO: 10988 - DNA, 26 bp, Homo sapiens
cagtttgtactcatcgacgtccttgg

SEQ ID NO: 10989 - DNA, 26 bp, Homo sapiens
agtttgtactcatcgacgtccttggc

SEQ ID NO: 10990 - DNA, 26 bp, Homo sapiens
gtttgtactcatcgacgtccttggct

SEQ ID NO: 10991 - DNA, 26 bp, Homo sapiens
tttgtactcatcgacgtccttggctt

SEQ ID NO: 10992 - DNA, 26 bp, Homo sapiens
ttgtactcatcgacgtccttggcttt

SEQ ID NO: 10993 - DNA, 26 bp, Homo sapiens
tgtactcatcgacgtccttggctttg

SEQ ID NO: 10994 - DNA, 26 bp, Homo sapiens
gtactcatcgacgtccttggctttga

SEQ ID NO: 10995 - DNA, 26 bp, Homo sapiens
tactcatcgacgtccttggctttgac

SEQ ID NO: 10996 - DNA, 26 bp, Homo sapiens
actcatcgacgtccttggctttgacc

SEQ ID NO: 10997 - DNA, 26 bp, Homo sapiens
ctcatcgacgtccttggctttgacct

SEQ ID NO: 10998 - DNA, 26 bp, Homo sapiens
tcatcgacgtccttggctttgacctt

SEQ ID NO: 10999 - DNA, 26 bp, Homo sapiens
catcgacgtccttggctttgaccttc

SEQ ID NO: 11000 - DNA, 26 bp, Homo sapiens
atcgacgtccttggctttgaccttct

SEQ ID NO: 11001 - DNA, 26 bp, Homo sapiens
tcgacgtccttggctttgaccttctt

SEQ ID NO: 11002 - DNA, 26 bp, Homo sapiens
cgacgtccttggctttgaccttcttg

SEQ ID NO: 11003 - DNA, 26 bp, Homo sapiens
gacgtccttggctttgaccttcttgt

SEQ ID NO: 11004 - DNA, 26 bp, Homo sapiens
acgtccttggctttgaccttcttgtc

SEQ ID NO: 11005 - DNA, 26 bp, Homo sapiens
cgtccttggctttgaccttcttgtcg

SEQ ID NO: 11006 - DNA, 26 bp, Homo sapiens
gtccttggctttgaccttcttgtcgg

SEQ ID NO: 11007 - DNA, 26 bp, Homo sapiens
tccttggctttgaccttcttgtcggg

SEQ ID NO: 11008 - DNA, 26 bp, Homo sapiens
ccttggctttgaccttcttgtcgggg

SEQ ID NO: 11009 - DNA, 26 bp, Homo sapiens
cttggctttgaccttcttgtcggggg

SEQ ID NO: 11010 - DNA, 26 bp, Homo sapiens
ttggctttgaccttcttgtcgggggg

SEQ ID NO: 11011 - DNA, 26 bp, Homo sapiens
tggctttgaccttcttgtcgggggga

SEQ ID NO: 11012 - DNA, 26 bp, Homo sapiens
ggctttgaccttcttgtcggggggat

SEQ ID NO: 11013 - DNA, 26 bp, Homo sapiens
gctttgaccttcttgtcggggggata

SEQ ID NO: 11014 - DNA, 26 bp, Homo sapiens
ctttgaccttcttgtcggggggatat

SEQ ID NO: 11015 - DNA, 26 bp, Homo sapiens
tttgaccttcttgtcggggggatatg

SEQ ID NO: 11016 - DNA, 26 bp, Homo sapiens
ttgaccttcttgtcggggggatatga

SEQ ID NO: 11017 - DNA, 26 bp, Homo sapiens
tgaccttcttgtcggggggatatgag

SEQ ID NO: 11018 - DNA, 26 bp, Homo sapiens
gaccttcttgtcggggggatatgagc

SEQ ID NO: 11019 - DNA, 26 bp, Homo sapiens
accttcttgtcggggggatatgagcg

SEQ ID NO: 11020 - DNA, 26 bp, Homo sapiens
ccttcttgtcggggggatatgagcgg

SEQ ID NO: 11021 - DNA, 26 bp, Homo sapiens
cttcttgtcggggggatatgagcggt

SEQ ID NO: 11022 - DNA, 26 bp, Homo sapiens
ttcttgtcggggggatatgagcggtg

SEQ ID NO: 11023 - DNA, 26 bp, Homo sapiens
tcttgtcggggggatatgagcggtgc

SEQ ID NO: 11024 - DNA, 26 bp, Homo sapiens
cttgtcggggggatatgagcggtgct

SEQ ID NO: 11025 - DNA, 26 bp, Homo sapiens
ttgtcggggggatatgagcggtgctc

SEQ ID NO: 11026 - DNA, 26 bp, Homo sapiens
tgtcggggggatatgagcggtgctcg

SEQ ID NO: 11027 - DNA, 26 bp, Homo sapiens
gtcggggggatatgagcggtgctcgg

SEQ ID NO: 11028 - DNA, 26 bp, Homo sapiens
tcggggggatatgagcggtgctcggc

SEQ ID NO: 11029 - DNA, 26 bp, Homo sapiens
cggggggatatgagcggtgctcggcc

SEQ ID NO: 11030 - DNA, 26 bp, Homo sapiens
ggggggatatgagcggtgctcggcca

SEQ ID NO: 11031 - DNA, 26 bp, Homo sapiens
gggggatatgagcggtgctcggccag

SEQ ID NO: 11032 - DNA, 26 bp, Homo sapiens
ggggatatgagcggtgctcggccagc

SEQ ID NO: 11033 - DNA, 26 bp, Homo sapiens
gggatatgagcggtgctcggccagct

SEQ ID NO: 11034 - DNA, 26 bp, Homo sapiens
ggatatgagcggtgctcggccagctc

SEQ ID NO: 11035 - DNA, 26 bp, Homo sapiens
gatatgagcggtgctcggccagctcg

SEQ ID NO: 11036 - DNA, 26 bp, Homo sapiens
atatgagcggtgctcggccagctcgg

SEQ ID NO: 11037 - DNA, 26 bp, Homo sapiens
tatgagcggtgctcggccagctcggt

SEQ ID NO: 11038 - DNA, 26 bp, Homo sapiens
atgagcggtgctcggccagctcggtg

SEQ ID NO: 11039 - DNA, 26 bp, Homo sapiens
tgagcggtgctcggccagctcggtgg

SEQ ID NO: 11040 - DNA, 26 bp, Homo sapiens
gagcggtgctcggccagctcggtggt

SEQ ID NO: 11041 - DNA, 26 bp, Homo sapiens
agcggtgctcggccagctcggtggtg

SEQ ID NO: 11042 - DNA, 26 bp, Homo sapiens
gcggtgctcggccagctcggtggtga

SEQ ID NO: 11043 - DNA, 26 bp, Homo sapiens
cggtgctcggccagctcggtggtgat

SEQ ID NO: 11044 - DNA, 26 bp, Homo sapiens
ggtgctcggccagctcggtggtgatc

SEQ ID NO: 11045 - DNA, 26 bp, Homo sapiens
gtgctcggccagctcggtggtgatct

SEQ ID NO: 11046 - DNA, 26 bp, Homo sapiens
tgctcggccagctcggtggtgatctg

SEQ ID NO: 11047 - DNA, 26 bp, Homo sapiens
gctcggccagctcggtggtgatctgc

SEQ ID NO: 11048 - DNA, 26 bp, Homo sapiens
ctcggccagctcggtggtgatctgct

SEQ ID NO: 11049 - DNA, 26 bp, Homo sapiens
tcggccagctcggtggtgatctgctt

SEQ ID NO: 11050 - DNA, 26 bp, Homo sapiens
cggccagctcggtggtgatctgcttc

SEQ ID NO: 11051 - DNA, 26 bp, Homo sapiens
ggccagctcggtggtgatctgcttca

SEQ ID NO: 11052 - DNA, 26 bp, Homo sapiens
gccagctcggtggtgatctgcttcag

SEQ ID NO: 11053 - DNA, 26 bp, Homo sapiens
ccagctcggtggtgatctgcttcagc

SEQ ID NO: 11054 - DNA, 26 bp, Homo sapiens
cagctcggtggtgatctgcttcagct

SEQ ID NO: 11055 - DNA, 26 bp, Homo sapiens
agctcggtggtgatctgcttcagctt

SEQ ID NO: 11056 - DNA, 26 bp, Homo sapiens
gctcggtggtgatctgcttcagctta

SEQ ID NO: 11057 - DNA, 26 bp, Homo sapiens
ctcggtggtgatctgcttcagcttac

SEQ ID NO: 11058 - DNA, 26 bp, Homo sapiens
tcggtggtgatctgcttcagcttact

SEQ ID NO: 11059 - DNA, 26 bp, Homo sapiens
cggtggtgatctgcttcagcttactt

SEQ ID NO: 11060 - DNA, 26 bp, Homo sapiens
ggtggtgatctgcttcagcttacttt

SEQ ID NO: 11061 - DNA, 26 bp, Homo sapiens
gtggtgatctgcttcagcttactttc

SEQ ID NO: 11062 - DNA, 26 bp, Homo sapiens
tggtgatctgcttcagcttactttca

SEQ ID NO: 11063 - DNA, 26 bp, Homo sapiens
ggtgatctgcttcagcttactttcat

SEQ ID NO: 11064 - DNA, 26 bp, Homo sapiens
gtgatctgcttcagcttactttcatg

SEQ ID NO: 11065 - DNA, 26 bp, Homo sapiens
tgatctgcttcagcttactttcatgt

SEQ ID NO: 11066 - DNA, 26 bp, Homo sapiens
gatctgcttcagcttactttcatgtg

SEQ ID NO: 11067 - DNA, 26 bp, Homo sapiens
atctgcttcagcttactttcatgtga

SEQ ID NO: 11068 - DNA, 26 bp, Homo sapiens
tctgcttcagcttactttcatgtgac

SEQ ID NO: 11069 - DNA, 26 bp, Homo sapiens
ctgcttcagcttactttcatgtgact

SEQ ID NO: 11070 - DNA, 26 bp, Homo sapiens
tgcttcagcttactttcatgtgactt

SEQ ID NO: 11071 - DNA, 26 bp, Homo sapiens
gcttcagcttactttcatgtgacttc

SEQ ID NO: 11072 - DNA, 26 bp, Homo sapiens
cttcagcttactttcatgtgacttca

SEQ ID NO: 11073 - DNA, 26 bp, Homo sapiens
ttcagcttactttcatgtgacttcag

SEQ ID NO: 11074 - DNA, 26 bp, Homo sapiens
tcagcttactttcatgtgacttcagt

SEQ ID NO: 11075 - DNA, 26 bp, Homo sapiens
cagcttactttcatgtgacttcagtt

SEQ ID NO: 11076 - DNA, 26 bp, Homo sapiens
agcttactttcatgtgacttcagttg

SEQ ID NO: 11077 - DNA, 26 bp, Homo sapiens
gcttactttcatgtgacttcagttgc

SEQ ID NO: 11078 - DNA, 26 bp, Homo sapiens
cttactttcatgtgacttcagttgct

SEQ ID NO: 11079 - DNA, 26 bp, Homo sapiens
ttactttcatgtgacttcagttgctc

SEQ ID NO: 11080 - DNA, 26 bp, Homo sapiens
tactttcatgtgacttcagttgctcc

SEQ ID NO: 11081 - DNA, 26 bp, Homo sapiens
actttcatgtgacttcagttgctcct

SEQ ID NO: 11082 - DNA, 26 bp, Homo sapiens
ctttcatgtgacttcagttgctcctc

SEQ ID NO: 11083 - DNA, 26 bp, Homo sapiens
tttcatgtgacttcagttgctcctcc

SEQ ID NO: 11084 - DNA, 26 bp, Homo sapiens
ttcatgtgacttcagttgctcctcct

SEQ ID NO: 11085 - DNA, 26 bp, Homo sapiens
tcatgtgacttcagttgctcctcctg

SEQ ID NO: 11086 - DNA, 26 bp, Homo sapiens
catgtgacttcagttgctcctcctga

SEQ ID NO: 11087 - DNA, 26 bp, Homo sapiens
atgtgacttcagttgctcctcctgag

SEQ ID NO: 11088 - DNA, 26 bp, Homo sapiens
tgtgacttcagttgctcctcctgaga

SEQ ID NO: 11089 - DNA, 26 bp, Homo sapiens
gtgacttcagttgctcctcctgagac

SEQ ID NO: 11090 - DNA, 26 bp, Homo sapiens
tgacttcagttgctcctcctgagaca

SEQ ID NO: 11091 - DNA, 26 bp, Homo sapiens
gacttcagttgctcctcctgagacag

SEQ ID NO: 11092 - DNA, 26 bp, Homo sapiens
acttcagttgctcctcctgagacagt

SEQ ID NO: 11093 - DNA, 26 bp, Homo sapiens
cttcagttgctcctcctgagacagtt

SEQ ID NO: 11094 - DNA, 26 bp, Homo sapiens
ttcagttgctcctcctgagacagttt

SEQ ID NO: 11095 - DNA, 26 bp, Homo sapiens
tcagttgctcctcctgagacagtttt

SEQ ID NO: 11096 - DNA, 26 bp, Homo sapiens
cagttgctcctcctgagacagttttg

SEQ ID NO: 11097 - DNA, 26 bp, Homo sapiens
agttgctcctcctgagacagttttgt

SEQ ID NO: 11098 - DNA, 26 bp, Homo sapiens
gttgctcctcctgagacagttttgtt

SEQ ID NO: 11099 - DNA, 26 bp, Homo sapiens
ttgctcctcctgagacagttttgttg

SEQ ID NO: 11100 - DNA, 26 bp, Homo sapiens
tgctcctcctgagacagttttgttgt

SEQ ID NO: 11101 - DNA, 26 bp, Homo sapiens
gctcctcctgagacagttttgttgta

SEQ ID NO: 11102 - DNA, 26 bp, Homo sapiens
ctcctcctgagacagttttgttgtag

SEQ ID NO: 11103 - DNA, 26 bp, Homo sapiens
tcctcctgagacagttttgttgtagt

SEQ ID NO: 11104 - DNA, 26 bp, Homo sapiens
cctcctgagacagttttgttgtagtg

SEQ ID NO: 11105 - DNA, 26 bp, Homo sapiens
ctcctgagacagttttgttgtagtgg

SEQ ID NO: 11106 - DNA, 26 bp, Homo sapiens
tcctgagacagttttgttgtagtggc

SEQ ID NO: 11107 - DNA, 26 bp, Homo sapiens
cctgagacagttttgttgtagtggca

SEQ ID NO: 11108 - DNA, 26 bp, Homo sapiens
ctgagacagttttgttgtagtggcag

SEQ ID NO: 11109 - DNA, 26 bp, Homo sapiens
tgagacagttttgttgtagtggcagg

SEQ ID NO: 11110 - DNA, 26 bp, Homo sapiens
gagacagttttgttgtagtggcaggc

SEQ ID NO: 11111 - DNA, 26 bp, Homo sapiens
agacagttttgttgtagtggcaggca

SEQ ID NO: 11112 - DNA, 26 bp, Homo sapiens
gacagttttgttgtagtggcaggcag

SEQ ID NO: 11113 - DNA, 26 bp, Homo sapiens
acagttttgttgtagtggcaggcaga

SEQ ID NO: 11114 - DNA, 26 bp, Homo sapiens
cagttttgttgtagtggcaggcagaa

SEQ ID NO: 11115 - DNA, 26 bp, Homo sapiens
agttttgttgtagtggcaggcagaag

SEQ ID NO: 11116 - DNA, 26 bp, Homo sapiens
gttttgttgtagtggcaggcagaagt

SEQ ID NO: 11117 - DNA, 26 bp, Homo sapiens
ttttgttgtagtggcaggcagaagtg

SEQ ID NO: 11118 - DNA, 26 bp, Homo sapiens
tttgttgtagtggcaggcagaagtgg

SEQ ID NO: 11119 - DNA, 26 bp, Homo sapiens
ttgttgtagtggcaggcagaagtggg

SEQ ID NO: 11120 - DNA, 26 bp, Homo sapiens
tgttgtagtggcaggcagaagtgggc

SEQ ID NO: 11121 - DNA, 26 bp, Homo sapiens
gttgtagtggcaggcagaagtgggcg

SEQ ID NO: 11122 - DNA, 26 bp, Homo sapiens
ttgtagtggcaggcagaagtgggcgg

SEQ ID NO: 11123 - DNA, 26 bp, Homo sapiens
tgtagtggcaggcagaagtgggcggc

SEQ ID NO: 11124 - DNA, 26 bp, Homo sapiens
gtagtggcaggcagaagtgggcggct

SEQ ID NO: 11125 - DNA, 26 bp, Homo sapiens
tagtggcaggcagaagtgggcggcta

SEQ ID NO: 11126 - DNA, 26 bp, Homo sapiens
agtggcaggcagaagtgggcggctaa

SEQ ID NO: 11127 - DNA, 26 bp, Homo sapiens
gtggcaggcagaagtgggcggctaaa

SEQ ID NO: 11128 - DNA, 26 bp, Homo sapiens
tggcaggcagaagtgggcggctaaac

SEQ ID NO: 11129 - DNA, 26 bp, Homo sapiens
ggcaggcagaagtgggcggctaaact

SEQ ID NO: 11130 - DNA, 26 bp, Homo sapiens
gcaggcagaagtgggcggctaaactt

SEQ ID NO: 11131 - DNA, 26 bp, Homo sapiens
caggcagaagtgggcggctaaacttc

SEQ ID NO: 11132 - DNA, 26 bp, Homo sapiens
aggcagaagtgggcggctaaacttct

SEQ ID NO: 11133 - DNA, 26 bp, Homo sapiens
ggcagaagtgggcggctaaacttctt

SEQ ID NO: 11134 - DNA, 26 bp, Homo sapiens
gcagaagtgggcggctaaacttcttc

SEQ ID NO: 11135 - DNA, 26 bp, Homo sapiens
cagaagtgggcggctaaacttcttct

SEQ ID NO: 11136 - DNA, 26 bp, Homo sapiens
agaagtgggcggctaaacttcttctg

SEQ ID NO: 11137 - DNA, 26 bp, Homo sapiens
gaagtgggcggctaaacttcttctga

SEQ ID NO: 11138 - DNA, 26 bp, Homo sapiens
aagtgggcggctaaacttcttctgag

SEQ ID NO: 11139 - DNA, 26 bp, Homo sapiens
agtgggcggctaaacttcttctgaga

SEQ ID NO: 11140 - DNA, 26 bp, Homo sapiens
gtgggcggctaaacttcttctgagag

SEQ ID NO: 11141 - DNA, 26 bp, Homo sapiens
tgggcggctaaacttcttctgagagc

SEQ ID NO: 11142 - DNA, 26 bp, Homo sapiens
gggcggctaaacttcttctgagagcc

SEQ ID NO: 11143 - DNA, 26 bp, Homo sapiens
ggcggctaaacttcttctgagagccg

SEQ ID NO: 11144 - DNA, 26 bp, Homo sapiens
gcggctaaacttcttctgagagccga

SEQ ID NO: 11145 - DNA, 26 bp, Homo sapiens
cggctaaacttcttctgagagccgat

SEQ ID NO: 11146 - DNA, 26 bp, Homo sapiens
ggctaaacttcttctgagagccgatt

SEQ ID NO: 11147 - DNA, 26 bp, Homo sapiens
gctaaacttcttctgagagccgattg

SEQ ID NO: 11148 - DNA, 26 bp, Homo sapiens
ctaaacttcttctgagagccgattgc

SEQ ID NO: 11149 - DNA, 26 bp, Homo sapiens
taaacttcttctgagagccgattgct

SEQ ID NO: 11150 - DNA, 26 bp, Homo sapiens
aaacttcttctgagagccgattgctg

SEQ ID NO: 11151 - DNA, 26 bp, Homo sapiens
aacttcttctgagagccgattgctgc

SEQ ID NO: 11152 - DNA, 26 bp, Homo sapiens
acttcttctgagagccgattgctgct

SEQ ID NO: 11153 - DNA, 26 bp, Homo sapiens
cttcttctgagagccgattgctgctg

SEQ ID NO: 11154 - DNA, 26 bp, Homo sapiens
ttcttctgagagccgattgctgctgg

SEQ ID NO: 11155 - DNA, 26 bp, Homo sapiens
tcttctgagagccgattgctgctgga

SEQ ID NO: 11156 - DNA, 26 bp, Homo sapiens
cttctgagagccgattgctgctggaa

SEQ ID NO: 11157 - DNA, 26 bp, Homo sapiens
ttctgagagccgattgctgctggaaa

SEQ ID NO: 11158 - DNA, 26 bp, Homo sapiens
tctgagagccgattgctgctggaaat

SEQ ID NO: 11159 - DNA, 26 bp, Homo sapiens
ctgagagccgattgctgctggaaatg

SEQ ID NO: 11160 - DNA, 26 bp, Homo sapiens
tgagagccgattgctgctggaaatgg

SEQ ID NO: 11161 - DNA, 26 bp, Homo sapiens
gagagccgattgctgctggaaatggt

SEQ ID NO: 11162 - DNA, 26 bp, Homo sapiens
agagccgattgctgctggaaatggtg

SEQ ID NO: 11163 - DNA, 26 bp, Homo sapiens
gagccgattgctgctggaaatggtgg

SEQ ID NO: 11164 - DNA, 26 bp, Homo sapiens
agccgattgctgctggaaatggtggt

SEQ ID NO: 11165 - DNA, 26 bp, Homo sapiens
gccgattgctgctggaaatggtggtg

SEQ ID NO: 11166 - DNA, 26 bp, Homo sapiens
ccgattgctgctggaaatggtggtgc

SEQ ID NO: 11167 - DNA, 26 bp, Homo sapiens
cgattgctgctggaaatggtggtgca

SEQ ID NO: 11168 - DNA, 26 bp, Homo sapiens
gattgctgctggaaatggtggtgcag

SEQ ID NO: 11169 - DNA, 26 bp, Homo sapiens
attgctgctggaaatggtggtgcaga

SEQ ID NO: 11170 - DNA, 26 bp, Homo sapiens
ttgctgctggaaatggtggtgcagaa

SEQ ID NO: 11171 - DNA, 26 bp, Homo sapiens
tgctgctggaaatggtggtgcagaaa

SEQ ID NO: 11172 - DNA, 26 bp, Homo sapiens
gctgctggaaatggtggtgcagaaaa

SEQ ID NO: 11173 - DNA, 26 bp, Homo sapiens
ctgctggaaatggtggtgcagaaaat

SEQ ID NO: 11174 - DNA, 26 bp, Homo sapiens
tgctggaaatggtggtgcagaaaata

SEQ ID NO: 11175 - DNA, 26 bp, Homo sapiens
gctggaaatggtggtgcagaaaatac

SEQ ID NO: 11176 - DNA, 26 bp, Homo sapiens
ctggaaatggtggtgcagaaaataca

SEQ ID NO: 11177 - DNA, 26 bp, Homo sapiens
tggaaatggtggtgcagaaaatacag

SEQ ID NO: 11178 - DNA, 26 bp, Homo sapiens
ggaaatggtggtgcagaaaatacagc

SEQ ID NO: 11179 - DNA, 26 bp, Homo sapiens
gaaatggtggtgcagaaaatacagct

SEQ ID NO: 11180 - DNA, 26 bp, Homo sapiens
aaatggtggtgcagaaaatacagctg

SEQ ID NO: 11181 - DNA, 26 bp, Homo sapiens
aatggtggtgcagaaaatacagctgc

SEQ ID NO: 11182 - DNA, 26 bp, Homo sapiens
atggtggtgcagaaaatacagctgcc

SEQ ID NO: 11183 - DNA, 26 bp, Homo sapiens
tggtggtgcagaaaatacagctgcca

SEQ ID NO: 11184 - DNA, 26 bp, Homo sapiens
ggtggtgcagaaaatacagctgccac

SEQ ID NO: 11185 - DNA, 26 bp, Homo sapiens
gtggtgcagaaaatacagctgccaca

SEQ ID NO: 11186 - DNA, 26 bp, Homo sapiens
tggtgcagaaaatacagctgccacac

SEQ ID NO: 11187 - DNA, 26 bp, Homo sapiens
ggtgcagaaaatacagctgccacaca

SEQ ID NO: 11188 - DNA, 26 bp, Homo sapiens
gtgcagaaaatacagctgccacacaa

SEQ ID NO: 11189 - DNA, 26 bp, Homo sapiens
tgcagaaaatacagctgccacacaat

SEQ ID NO: 11190 - DNA, 26 bp, Homo sapiens
gcagaaaatacagctgccacacaatt

SEQ ID NO: 11191 - DNA, 26 bp, Homo sapiens
cagaaaatacagctgccacacaattg

SEQ ID NO: 11192 - DNA, 26 bp, Homo sapiens
agaaaatacagctgccacacaattga

SEQ ID NO: 11193 - DNA, 26 bp, Homo sapiens
gaaaatacagctgccacacaattgat

SEQ ID NO: 11194 - DNA, 26 bp, Homo sapiens
aaaatacagctgccacacaattgatt

SEQ ID NO: 11195 - DNA, 26 bp, Homo sapiens
aaatacagctgccacacaattgattt

SEQ ID NO: 11196 - DNA, 26 bp, Homo sapiens
aatacagctgccacacaattgatttt

SEQ ID NO: 11197 - DNA, 26 bp, Homo sapiens
atacagctgccacacaattgattttg

SEQ ID NO: 11198 - DNA, 26 bp, Homo sapiens
tacagctgccacacaattgattttgt

SEQ ID NO: 11199 - DNA, 26 bp, Homo sapiens
acagctgccacacaattgattttgtt

SEQ ID NO: 11200 - DNA, 26 bp, Homo sapiens
cagctgccacacaattgattttgttt

SEQ ID NO: 11201 - DNA, 26 bp, Homo sapiens
agctgccacacaattgattttgttta

SEQ ID NO: 11202 - DNA, 26 bp, Homo sapiens
gctgccacacaattgattttgtttat

SEQ ID NO: 11203 - DNA, 26 bp, Homo sapiens
ctgccacacaattgattttgtttatc

SEQ ID NO: 11204 - DNA, 26 bp, Homo sapiens
tgccacacaattgattttgtttatcc

SEQ ID NO: 11205 - DNA, 26 bp, Homo sapiens
gccacacaattgattttgtttatcca

SEQ ID NO: 11206 - DNA, 26 bp, Homo sapiens
ccacacaattgattttgtttatccac

SEQ ID NO: 11207 - DNA, 26 bp, Homo sapiens
cacacaattgattttgtttatccacc

SEQ ID NO: 11208 - DNA, 26 bp, Homo sapiens
acacaattgattttgtttatccaccc

SEQ ID NO: 11209 - DNA, 26 bp, Homo sapiens
cacaattgattttgtttatccaccct

SEQ ID NO: 11210 - DNA, 26 bp, Homo sapiens
acaattgattttgtttatccaccctt

SEQ ID NO: 11211 - DNA, 26 bp, Homo sapiens
caattgattttgtttatccacccttg

SEQ ID NO: 11212 - DNA, 26 bp, Homo sapiens
aattgattttgtttatccacccttgc

SEQ ID NO: 11213 - DNA, 26 bp, Homo sapiens
attgattttgtttatccacccttgca

SEQ ID NO: 11214 - DNA, 26 bp, Homo sapiens
ttgattttgtttatccacccttgcat

SEQ ID NO: 11215 - DNA, 26 bp, Homo sapiens
tgattttgtttatccacccttgcatt

SEQ ID NO: 11216 - DNA, 26 bp, Homo sapiens
gattttgtttatccacccttgcattt

SEQ ID NO: 11217 - DNA, 26 bp, Homo sapiens
attttgtttatccacccttgcatttc

SEQ ID NO: 11218 - DNA, 26 bp, Homo sapiens
ttttgtttatccacccttgcatttcc

SEQ ID NO: 11219 - DNA, 26 bp, Homo sapiens
tttgtttatccacccttgcatttcct

SEQ ID NO: 11220 - DNA, 26 bp, Homo sapiens
ttgtttatccacccttgcatttcctc

SEQ ID NO: 11221 - DNA, 26 bp, Homo sapiens
tgtttatccacccttgcatttcctct

SEQ ID NO: 11222 - DNA, 26 bp, Homo sapiens
gtttatccacccttgcatttcctctg

SEQ ID NO: 11223 - DNA, 26 bp, Homo sapiens
tttatccacccttgcatttcctctgg

SEQ ID NO: 11224 - DNA, 26 bp, Homo sapiens
ttatccacccttgcatttcctctggg

SEQ ID NO: 11225 - DNA, 26 bp, Homo sapiens
tatccacccttgcatttcctctgggc

SEQ ID NO: 11226 - DNA, 26 bp, Homo sapiens
atccacccttgcatttcctctgggct

SEQ ID NO: 11227 - DNA, 26 bp, Homo sapiens
tccacccttgcatttcctctgggctc

SEQ ID NO: 11228 - DNA, 26 bp, Homo sapiens
ccacccttgcatttcctctgggctct

SEQ ID NO: 11229 - DNA, 26 bp, Homo sapiens
cacccttgcatttcctctgggctctg

SEQ ID NO: 11230 - DNA, 26 bp, Homo sapiens
acccttgcatttcctctgggctctga

SEQ ID NO: 11231 - DNA, 26 bp, Homo sapiens
cccttgcatttcctctgggctctgag

SEQ ID NO: 11232 - DNA, 26 bp, Homo sapiens
ccttgcatttcctctgggctctgagt

SEQ ID NO: 11233 - DNA, 26 bp, Homo sapiens
cttgcatttcctctgggctctgagtt

SEQ ID NO: 11234 - DNA, 26 bp, Homo sapiens
ttgcatttcctctgggctctgagttt

SEQ ID NO: 11235 - DNA, 26 bp, Homo sapiens
tgcatttcctctgggctctgagtttg

SEQ ID NO: 11236 - DNA, 26 bp, Homo sapiens
gcatttcctctgggctctgagtttga

SEQ ID NO: 11237 - DNA, 26 bp, Homo sapiens
catttcctctgggctctgagtttgaa

SEQ ID NO: 11238 - DNA, 26 bp, Homo sapiens
atttcctctgggctctgagtttgaaa

SEQ ID NO: 11239 - DNA, 26 bp, Homo sapiens
tttcctctgggctctgagtttgaaaa

SEQ ID NO: 11240 - DNA, 26 bp, Homo sapiens
ttcctctgggctctgagtttgaaaaa

SEQ ID NO: 11241 - DNA, 26 bp, Homo sapiens
tcctctgggctctgagtttgaaaaag

SEQ ID NO: 11242 - DNA, 26 bp, Homo sapiens
cctctgggctctgagtttgaaaaagc

SEQ ID NO: 11243 - DNA, 26 bp, Homo sapiens
ctctgggctctgagtttgaaaaagca

SEQ ID NO: 11244 - DNA, 26 bp, Homo sapiens
tctgggctctgagtttgaaaaagcaa

SEQ ID NO: 11245 - DNA, 26 bp, Homo sapiens
ctgggctctgagtttgaaaaagcaag

SEQ ID NO: 11246 - DNA, 26 bp, Homo sapiens
tgggctctgagtttgaaaaagcaaga

SEQ ID NO: 11247 - DNA, 26 bp, Homo sapiens
gggctctgagtttgaaaaagcaagac

SEQ ID NO: 11248 - DNA, 26 bp, Homo sapiens
ggctctgagtttgaaaaagcaagacc

SEQ ID NO: 11249 - DNA, 26 bp, Homo sapiens
gctctgagtttgaaaaagcaagaccc

SEQ ID NO: 11250 - DNA, 26 bp, Homo sapiens
ctctgagtttgaaaaagcaagaccct

SEQ ID NO: 11251 - DNA, 26 bp, Homo sapiens
tctgagtttgaaaaagcaagaccctc

SEQ ID NO: 11252 - DNA, 26 bp, Homo sapiens
ctgagtttgaaaaagcaagaccctcc

SEQ ID NO: 11253 - DNA, 26 bp, Homo sapiens
tgagtttgaaaaagcaagaccctcca

SEQ ID NO: 11254 - DNA, 26 bp, Homo sapiens
gagtttgaaaaagcaagaccctccag

SEQ ID NO: 11255 - DNA, 26 bp, Homo sapiens
agtttgaaaaagcaagaccctccagt

SEQ ID NO: 11256 - DNA, 26 bp, Homo sapiens
gtttgaaaaagcaagaccctccagtc

SEQ ID NO: 11257 - DNA, 26 bp, Homo sapiens
tttgaaaaagcaagaccctccagtcg

SEQ ID NO: 11258 - DNA, 26 bp, Homo sapiens
ttgaaaaagcaagaccctccagtcgg

SEQ ID NO: 11259 - DNA, 26 bp, Homo sapiens
tgaaaaagcaagaccctccagtcggc

SEQ ID NO: 11260 - DNA, 26 bp, Homo sapiens
gaaaaagcaagaccctccagtcggca

SEQ ID NO: 11261 - DNA, 26 bp, Homo sapiens
aaaaagcaagaccctccagtcggcag

SEQ ID NO: 11262 - DNA, 26 bp, Homo sapiens
aaaagcaagaccctccagtcggcagt

SEQ ID NO: 11263 - DNA, 26 bp, Homo sapiens
aaagcaagaccctccagtcggcagtt

SEQ ID NO: 11264 - DNA, 26 bp, Homo sapiens
aagcaagaccctccagtcggcagttt

SEQ ID NO: 11265 - DNA, 26 bp, Homo sapiens
agcaagaccctccagtcggcagtttt

SEQ ID NO: 11266 - DNA, 26 bp, Homo sapiens
gcaagaccctccagtcggcagtttta

SEQ ID NO: 11267 - DNA, 26 bp, Homo sapiens
caagaccctccagtcggcagttttaa

SEQ ID NO: 11268 - DNA, 26 bp, Homo sapiens
aagaccctccagtcggcagttttaag

SEQ ID NO: 11269 - DNA, 26 bp, Homo sapiens
agaccctccagtcggcagttttaagt

SEQ ID NO: 11270 - DNA, 26 bp, Homo sapiens
gaccctccagtcggcagttttaagtt

SEQ ID NO: 11271 - DNA, 26 bp, Homo sapiens
accctccagtcggcagttttaagttt

SEQ ID NO: 11272 - DNA, 26 bp, Homo sapiens
ccctccagtcggcagttttaagttta

SEQ ID NO: 11273 - DNA, 26 bp, Homo sapiens
cctccagtcggcagttttaagtttaa

SEQ ID NO: 11274 - DNA, 26 bp, Homo sapiens
ctccagtcggcagttttaagtttaaa

SEQ ID NO: 11275 - DNA, 26 bp, Homo sapiens
tccagtcggcagttttaagtttaaac

SEQ ID NO: 11276 - DNA, 26 bp, Homo sapiens
ccagtcggcagttttaagtttaaaca

SEQ ID NO: 11277 - DNA, 26 bp, Homo sapiens
cagtcggcagttttaagtttaaacac

SEQ ID NO: 11278 - DNA, 26 bp, Homo sapiens
agtcggcagttttaagtttaaacacg

SEQ ID NO: 11279 - DNA, 26 bp, Homo sapiens
gtcggcagttttaagtttaaacacgt

SEQ ID NO: 11280 - DNA, 26 bp, Homo sapiens
tcggcagttttaagtttaaacacgtt

SEQ ID NO: 11281 - DNA, 26 bp, Homo sapiens
cggcagttttaagtttaaacacgttt

SEQ ID NO: 11282 - DNA, 26 bp, Homo sapiens
ggcagttttaagtttaaacacgtttg

SEQ ID NO: 11283 - DNA, 26 bp, Homo sapiens
gcagttttaagtttaaacacgtttgg

SEQ ID NO: 11284 - DNA, 26 bp, Homo sapiens
cagttttaagtttaaacacgtttggt

SEQ ID NO: 11285 - DNA, 26 bp, Homo sapiens
agttttaagtttaaacacgtttggtt

SEQ ID NO: 11286 - DNA, 26 bp, Homo sapiens
gttttaagtttaaacacgtttggttt

SEQ ID NO: 11287 - DNA, 26 bp, Homo sapiens
ttttaagtttaaacacgtttggtttc

SEQ ID NO: 11288 - DNA, 26 bp, Homo sapiens
tttaagtttaaacacgtttggtttct

SEQ ID NO: 11289 - DNA, 26 bp, Homo sapiens
ttaagtttaaacacgtttggtttctt

SEQ ID NO: 11290 - DNA, 26 bp, Homo sapiens
taagtttaaacacgtttggtttcttc

SEQ ID NO: 11291 - DNA, 26 bp, Homo sapiens
aagtttaaacacgtttggtttcttct

SEQ ID NO: 11292 - DNA, 26 bp, Homo sapiens
agtttaaacacgtttggtttcttctc

SEQ ID NO: 11293 - DNA, 26 bp, Homo sapiens
gtttaaacacgtttggtttcttctca

SEQ ID NO: 11294 - DNA, 26 bp, Homo sapiens
tttaaacacgtttggtttcttctcat

SEQ ID NO: 11295 - DNA, 26 bp, Homo sapiens
ttaaacacgtttggtttcttctcata

SEQ ID NO: 11296 - DNA, 26 bp, Homo sapiens
taaacacgtttggtttcttctcatag

SEQ ID NO: 11297 - DNA, 26 bp, Homo sapiens
aaacacgtttggtttcttctcatagt

SEQ ID NO: 11298 - DNA, 26 bp, Homo sapiens
aacacgtttggtttcttctcatagtc

SEQ ID NO: 11299 - DNA, 26 bp, Homo sapiens
acacgtttggtttcttctcatagtcc

SEQ ID NO: 11300 - DNA, 26 bp, Homo sapiens
cacgtttggtttcttctcatagtccg

SEQ ID NO: 11301 - DNA, 26 bp, Homo sapiens
acgtttggtttcttctcatagtccgt

SEQ ID NO: 11302 - DNA, 26 bp, Homo sapiens
cgtttggtttcttctcatagtccgtg

SEQ ID NO: 11303 - DNA, 26 bp, Homo sapiens
gtttggtttcttctcatagtccgtgg

SEQ ID NO: 11304 - DNA, 26 bp, Homo sapiens
tttggtttcttctcatagtccgtggc

SEQ ID NO: 11305 - DNA, 26 bp, Homo sapiens
ttggtttcttctcatagtccgtggcc

SEQ ID NO: 11306 - DNA, 26 bp, Homo sapiens
tggtttcttctcatagtccgtggcct

SEQ ID NO: 11307 - DNA, 26 bp, Homo sapiens
ggtttcttctcatagtccgtggcctt

SEQ ID NO: 11308 - DNA, 26 bp, Homo sapiens
gtttcttctcatagtccgtggccttg

SEQ ID NO: 11309 - DNA, 26 bp, Homo sapiens
tttcttctcatagtccgtggccttgg

SEQ ID NO: 11310 - DNA, 26 bp, Homo sapiens
ttcttctcatagtccgtggccttgga

SEQ ID NO: 11311 - DNA, 26 bp, Homo sapiens
tcttctcatagtccgtggccttggat

SEQ ID NO: 11312 - DNA, 26 bp, Homo sapiens
cttctcatagtccgtggccttggatg

SEQ ID NO: 11313 - DNA, 26 bp, Homo sapiens
ttctcatagtccgtggccttggatgc

SEQ ID NO: 11314 - DNA, 26 bp, Homo sapiens
tctcatagtccgtggccttggatgcc

SEQ ID NO: 11315 - DNA, 26 bp, Homo sapiens
ctcatagtccgtggccttggatgcca

SEQ ID NO: 11316 - DNA, 26 bp, Homo sapiens
tcatagtccgtggccttggatgccaa

SEQ ID NO: 11317 - DNA, 26 bp, Homo sapiens
catagtccgtggccttggatgccaat

SEQ ID NO: 11318 - DNA, 26 bp, Homo sapiens
atagtccgtggccttggatgccaatg

SEQ ID NO: 11319 - DNA, 26 bp, Homo sapiens
tagtccgtggccttggatgccaatgc

SEQ ID NO: 11320 - DNA, 26 bp, Homo sapiens
agtccgtggccttggatgccaatgcg

SEQ ID NO: 11321 - DNA, 26 bp, Homo sapiens
gtccgtggccttggatgccaatgcgt

SEQ ID NO: 11322 - DNA, 26 bp, Homo sapiens
tccgtggccttggatgccaatgcgtg

SEQ ID NO: 11323 - DNA, 26 bp, Homo sapiens
ccgtggccttggatgccaatgcgtgg

SEQ ID NO: 11324 - DNA, 26 bp, Homo sapiens
cgtggccttggatgccaatgcgtggt

SEQ ID NO: 11325 - DNA, 26 bp, Homo sapiens
gtggccttggatgccaatgcgtggtg

SEQ ID NO: 11326 - DNA, 26 bp, Homo sapiens
tggccttggatgccaatgcgtggtgc

SEQ ID NO: 11327 - DNA, 26 bp, Homo sapiens
ggccttggatgccaatgcgtggtgca

SEQ ID NO: 11328 - DNA, 26 bp, Homo sapiens
gccttggatgccaatgcgtggtgcac

SEQ ID NO: 11329 - DNA, 26 bp, Homo sapiens
ccttggatgccaatgcgtggtgcaca

SEQ ID NO: 11330 - DNA, 26 bp, Homo sapiens
cttggatgccaatgcgtggtgcacac

SEQ ID NO: 11331 - DNA, 26 bp, Homo sapiens
ttggatgccaatgcgtggtgcacact

SEQ ID NO: 11332 - DNA, 26 bp, Homo sapiens
tggatgccaatgcgtggtgcacactc

SEQ ID NO: 11333 - DNA, 26 bp, Homo sapiens
ggatgccaatgcgtggtgcacactca

SEQ ID NO: 11334 - DNA, 26 bp, Homo sapiens
gatgccaatgcgtggtgcacactcac

SEQ ID NO: 11335 - DNA, 26 bp, Homo sapiens
atgccaatgcgtggtgcacactcaca

SEQ ID NO: 11336 - DNA, 26 bp, Homo sapiens
tgccaatgcgtggtgcacactcacag

SEQ ID NO: 11337 - DNA, 26 bp, Homo sapiens
gccaatgcgtggtgcacactcacagc

SEQ ID NO: 11338 - DNA, 26 bp, Homo sapiens
ccaatgcgtggtgcacactcacagcg

SEQ ID NO: 11339 - DNA, 26 bp, Homo sapiens
caatgcgtggtgcacactcacagcgt

SEQ ID NO: 11340 - DNA, 26 bp, Homo sapiens
aatgcgtggtgcacactcacagcgtt

SEQ ID NO: 11341 - DNA, 26 bp, Homo sapiens
atgcgtggtgcacactcacagcgttt

SEQ ID NO: 11342 - DNA, 26 bp, Homo sapiens
tgcgtggtgcacactcacagcgtttt

SEQ ID NO: 11343 - DNA, 26 bp, Homo sapiens
gcgtggtgcacactcacagcgttttt

SEQ ID NO: 11344 - DNA, 26 bp, Homo sapiens
cgtggtgcacactcacagcgtttttc

SEQ ID NO: 11345 - DNA, 26 bp, Homo sapiens
gtggtgcacactcacagcgtttttca

SEQ ID NO: 11346 - DNA, 26 bp, Homo sapiens
tggtgcacactcacagcgtttttcaa

SEQ ID NO: 11347 - DNA, 26 bp, Homo sapiens
ggtgcacactcacagcgtttttcaag

SEQ ID NO: 11348 - DNA, 26 bp, Homo sapiens
gtgcacactcacagcgtttttcaagt

SEQ ID NO: 11349 - DNA, 26 bp, Homo sapiens
tgcacactcacagcgtttttcaagtc

SEQ ID NO: 11350 - DNA, 26 bp, Homo sapiens
gcacactcacagcgtttttcaagtcc

SEQ ID NO: 11351 - DNA, 26 bp, Homo sapiens
cacactcacagcgtttttcaagtcct

SEQ ID NO: 11352 - DNA, 26 bp, Homo sapiens
acactcacagcgtttttcaagtcctc

SEQ ID NO: 11353 - DNA, 26 bp, Homo sapiens
cactcacagcgtttttcaagtcctct

SEQ ID NO: 11354 - DNA, 26 bp, Homo sapiens
actcacagcgtttttcaagtcctctt

SEQ ID NO: 11355 - DNA, 26 bp, Homo sapiens
ctcacagcgtttttcaagtcctcttc

SEQ ID NO: 11356 - DNA, 26 bp, Homo sapiens
tcacagcgtttttcaagtcctcttca

SEQ ID NO: 11357 - DNA, 26 bp, Homo sapiens
cacagcgtttttcaagtcctcttcag

SEQ ID NO: 11358 - DNA, 26 bp, Homo sapiens
acagcgtttttcaagtcctcttcaga

SEQ ID NO: 11359 - DNA, 26 bp, Homo sapiens
cagcgtttttcaagtcctcttcagac

SEQ ID NO: 11360 - DNA, 26 bp, Homo sapiens
agcgtttttcaagtcctcttcagaca

SEQ ID NO: 11361 - DNA, 26 bp, Homo sapiens
gcgtttttcaagtcctcttcagacaa

SEQ ID NO: 11362 - DNA, 26 bp, Homo sapiens
cgtttttcaagtcctcttcagacaag

SEQ ID NO: 11363 - DNA, 26 bp, Homo sapiens
gtttttcaagtcctcttcagacaagg

SEQ ID NO: 11364 - DNA, 26 bp, Homo sapiens
tttttcaagtcctcttcagacaaggc

SEQ ID NO: 11365 - DNA, 26 bp, Homo sapiens
ttttcaagtcctcttcagacaaggcc

SEQ ID NO: 11366 - DNA, 26 bp, Homo sapiens
tttcaagtcctcttcagacaaggcct

SEQ ID NO: 11367 - DNA, 26 bp, Homo sapiens
ttcaagtcctcttcagacaaggcctt

SEQ ID NO: 11368 - DNA, 26 bp, Homo sapiens
tcaagtcctcttcagacaaggccttt

SEQ ID NO: 11369 - DNA, 26 bp, Homo sapiens
caagtcctcttcagacaaggcctttt

SEQ ID NO: 11370 - DNA, 26 bp, Homo sapiens
aagtcctcttcagacaaggccttttc

SEQ ID NO: 11371 - DNA, 26 bp, Homo sapiens
agtcctcttcagacaaggccttttct

SEQ ID NO: 11372 - DNA, 26 bp, Homo sapiens
gtcctcttcagacaaggccttttctg

SEQ ID NO: 11373 - DNA, 26 bp, Homo sapiens
tcctcttcagacaaggccttttctgg

SEQ ID NO: 11374 - DNA, 26 bp, Homo sapiens
cctcttcagacaaggccttttctggc

SEQ ID NO: 11375 - DNA, 26 bp, Homo sapiens
ctcttcagacaaggccttttctggct

SEQ ID NO: 11376 - DNA, 26 bp, Homo sapiens
tcttcagacaaggccttttctggctt

SEQ ID NO: 11377 - DNA, 26 bp, Homo sapiens
cttcagacaaggccttttctggcttg

SEQ ID NO: 11378 - DNA, 26 bp, Homo sapiens
ttcagacaaggccttttctggcttgt

SEQ ID NO: 11379 - DNA, 26 bp, Homo sapiens
tcagacaaggccttttctggcttgta

SEQ ID NO: 11380 - DNA, 26 bp, Homo sapiens
cagacaaggccttttctggcttgtat

SEQ ID NO: 11381 - DNA, 26 bp, Homo sapiens
agacaaggccttttctggcttgtatt

SEQ ID NO: 11382 - DNA, 26 bp, Homo sapiens
gacaaggccttttctggcttgtattc

SEQ ID NO: 11383 - DNA, 26 bp, Homo sapiens
acaaggccttttctggcttgtattca

SEQ ID NO: 11384 - DNA, 26 bp, Homo sapiens
caaggccttttctggcttgtattcat

SEQ ID NO: 11385 - DNA, 26 bp, Homo sapiens
aaggccttttctggcttgtattcatc

SEQ ID NO: 11386 - DNA, 26 bp, Homo sapiens
aggccttttctggcttgtattcatcc

SEQ ID NO: 11387 - DNA, 26 bp, Homo sapiens
ggccttttctggcttgtattcatcct

SEQ ID NO: 11388 - DNA, 26 bp, Homo sapiens
gccttttctggcttgtattcatcctt

SEQ ID NO: 11389 - DNA, 26 bp, Homo sapiens
ccttttctggcttgtattcatccttt

SEQ ID NO: 11390 - DNA, 26 bp, Homo sapiens
cttttctggcttgtattcatcctttt

SEQ ID NO: 11391 - DNA, 26 bp, Homo sapiens
ttttctggcttgtattcatccttttg

SEQ ID NO: 11392 - DNA, 26 bp, Homo sapiens
tttctggcttgtattcatccttttgc

SEQ ID NO: 11393 - DNA, 26 bp, Homo sapiens
ttctggcttgtattcatccttttgca

SEQ ID NO: 11394 - DNA, 26 bp, Homo sapiens
tctggcttgtattcatccttttgcaa

SEQ ID NO: 11395 - DNA, 26 bp, Homo sapiens
ctggcttgtattcatccttttgcaag

SEQ ID NO: 11396 - DNA, 26 bp, Homo sapiens
tggcttgtattcatccttttgcaagt

SEQ ID NO: 11397 - DNA, 26 bp, Homo sapiens
ggcttgtattcatccttttgcaagta

SEQ ID NO: 11398 - DNA, 26 bp, Homo sapiens
gcttgtattcatccttttgcaagtaa

SEQ ID NO: 11399 - DNA, 26 bp, Homo sapiens
cttgtattcatccttttgcaagtaaa

SEQ ID NO: 11400 - DNA, 26 bp, Homo sapiens
ttgtattcatccttttgcaagtaaag

SEQ ID NO: 11401 - DNA, 26 bp, Homo sapiens
tgtattcatccttttgcaagtaaaga

SEQ ID NO: 11402 - DNA, 26 bp, Homo sapiens
gtattcatccttttgcaagtaaagaa

SEQ ID NO: 11403 - DNA, 26 bp, Homo sapiens
tattcatccttttgcaagtaaagaac

SEQ ID NO: 11404 - DNA, 26 bp, Homo sapiens
attcatccttttgcaagtaaagaact

SEQ ID NO: 11405 - DNA, 26 bp, Homo sapiens
ttcatccttttgcaagtaaagaactg

SEQ ID NO: 11406 - DNA, 26 bp, Homo sapiens
tcatccttttgcaagtaaagaactgt

SEQ ID NO: 11407 - DNA, 26 bp, Homo sapiens
catccttttgcaagtaaagaactgtt

SEQ ID NO: 11408 - DNA, 26 bp, Homo sapiens
atccttttgcaagtaaagaactgttc

SEQ ID NO: 11409 - DNA, 26 bp, Homo sapiens
tccttttgcaagtaaagaactgttcc

SEQ ID NO: 11410 - DNA, 26 bp, Homo sapiens
ccttttgcaagtaaagaactgttccc

SEQ ID NO: 11411 - DNA, 26 bp, Homo sapiens
cttttgcaagtaaagaactgttccct

SEQ ID NO: 11412 - DNA, 26 bp, Homo sapiens
ttttgcaagtaaagaactgttccctt

SEQ ID NO: 11413 - DNA, 26 bp, Homo sapiens
tttgcaagtaaagaactgttcccttc

SEQ ID NO: 11414 - DNA, 26 bp, Homo sapiens
ttgcaagtaaagaactgttcccttca

SEQ ID NO: 11415 - DNA, 26 bp, Homo sapiens
tgcaagtaaagaactgttcccttcag

SEQ ID NO: 11416 - DNA, 26 bp, Homo sapiens
gcaagtaaagaactgttcccttcagt

SEQ ID NO: 11417 - DNA, 26 bp, Homo sapiens
caagtaaagaactgttcccttcagta

SEQ ID NO: 11418 - DNA, 26 bp, Homo sapiens
aagtaaagaactgttcccttcagtac

SEQ ID NO: 11419 - DNA, 26 bp, Homo sapiens
agtaaagaactgttcccttcagtaca

SEQ ID NO: 11420 - DNA, 26 bp, Homo sapiens
gtaaagaactgttcccttcagtacag

SEQ ID NO: 11421 - DNA, 26 bp, Homo sapiens
taaagaactgttcccttcagtacagc

SEQ ID NO: 11422 - DNA, 26 bp, Homo sapiens
aaagaactgttcccttcagtacagca

SEQ ID NO: 11423 - DNA, 26 bp, Homo sapiens
aagaactgttcccttcagtacagcat

SEQ ID NO: 11424 - DNA, 26 bp, Homo sapiens
agaactgttcccttcagtacagcata

SEQ ID NO: 11425 - DNA, 26 bp, Homo sapiens
gaactgttcccttcagtacagcataa

SEQ ID NO: 11426 - DNA, 26 bp, Homo sapiens
aactgttcccttcagtacagcataaa

SEQ ID NO: 11427 - DNA, 26 bp, Homo sapiens
actgttcccttcagtacagcataaaa

SEQ ID NO: 11428 - DNA, 26 bp, Homo sapiens
ctgttcccttcagtacagcataaaag

SEQ ID NO: 11429 - DNA, 26 bp, Homo sapiens
tgttcccttcagtacagcataaaagg

SEQ ID NO: 11430 - DNA, 26 bp, Homo sapiens
gttcccttcagtacagcataaaaggt

SEQ ID NO: 11431 - DNA, 26 bp, Homo sapiens
ttcccttcagtacagcataaaaggtt

SEQ ID NO: 11432 - DNA, 26 bp, Homo sapiens
tcccttcagtacagcataaaaggttt

SEQ ID NO: 11433 - DNA, 26 bp, Homo sapiens
cccttcagtacagcataaaaggtttt

SEQ ID NO: 11434 - DNA, 26 bp, Homo sapiens
ccttcagtacagcataaaaggttttc

SEQ ID NO: 11435 - DNA, 26 bp, Homo sapiens
cttcagtacagcataaaaggttttcc

SEQ ID NO: 11436 - DNA, 26 bp, Homo sapiens
ttcagtacagcataaaaggttttcca

SEQ ID NO: 11437 - DNA, 26 bp, Homo sapiens
tcagtacagcataaaaggttttccat

SEQ ID NO: 11438 - DNA, 26 bp, Homo sapiens
cagtacagcataaaaggttttccatc

SEQ ID NO: 11439 - DNA, 26 bp, Homo sapiens
agtacagcataaaaggttttccatcc

SEQ ID NO: 11440 - DNA, 26 bp, Homo sapiens
gtacagcataaaaggttttccatcct

SEQ ID NO: 11441 - DNA, 26 bp, Homo sapiens
tacagcataaaaggttttccatcctc

SEQ ID NO: 11442 - DNA, 26 bp, Homo sapiens
acagcataaaaggttttccatcctcg

SEQ ID NO: 11443 - DNA, 26 bp, Homo sapiens
cagcataaaaggttttccatcctcgt

SEQ ID NO: 11444 - DNA, 26 bp, Homo sapiens
agcataaaaggttttccatcctcgtt

SEQ ID NO: 11445 - DNA, 26 bp, Homo sapiens
gcataaaaggttttccatcctcgttt

SEQ ID NO: 11446 - DNA, 26 bp, Homo sapiens
cataaaaggttttccatcctcgtttt

SEQ ID NO: 11447 - DNA, 26 bp, Homo sapiens
ataaaaggttttccatcctcgttttc

SEQ ID NO: 11448 - DNA, 26 bp, Homo sapiens
taaaaggttttccatcctcgttttcc

SEQ ID NO: 11449 - DNA, 26 bp, Homo sapiens
aaaaggttttccatcctcgttttcct

SEQ ID NO: 11450 - DNA, 26 bp, Homo sapiens
aaaggttttccatcctcgttttcctc

SEQ ID NO: 11451 - DNA, 26 bp, Homo sapiens
aaggttttccatcctcgttttcctct

SEQ ID NO: 11452 - DNA, 26 bp, Homo sapiens
aggttttccatcctcgttttcctctt

SEQ ID NO: 11453 - DNA, 26 bp, Homo sapiens
ggttttccatcctcgttttcctcttg

SEQ ID NO: 11454 - DNA, 26 bp, Homo sapiens
gttttccatcctcgttttcctcttgg

SEQ ID NO: 11455 - DNA, 26 bp, Homo sapiens
ttttccatcctcgttttcctcttgga

SEQ ID NO: 11456 - DNA, 26 bp, Homo sapiens
tttccatcctcgttttcctcttggag

SEQ ID NO: 11457 - DNA, 26 bp, Homo sapiens
ttccatcctcgttttcctcttggagt

SEQ ID NO: 11458 - DNA, 26 bp, Homo sapiens
tccatcctcgttttcctcttggagtc

SEQ ID NO: 11459 - DNA, 26 bp, Homo sapiens
ccatcctcgttttcctcttggagtct

SEQ ID NO: 11460 - DNA, 26 bp, Homo sapiens
catcctcgttttcctcttggagtctt

SEQ ID NO: 11461 - DNA, 26 bp, Homo sapiens
atcctcgttttcctcttggagtcttc

SEQ ID NO: 11462 - DNA, 26 bp, Homo sapiens
tcctcgttttcctcttggagtcttct

SEQ ID NO: 11463 - DNA, 26 bp, Homo sapiens
cctcgttttcctcttggagtcttctt

SEQ ID NO: 11464 - DNA, 26 bp, Homo sapiens
ctcgttttcctcttggagtcttcttt

SEQ ID NO: 11465 - DNA, 26 bp, Homo sapiens
tcgttttcctcttggagtcttctttc

SEQ ID NO: 11466 - DNA, 26 bp, Homo sapiens
cgttttcctcttggagtcttctttcc

SEQ ID NO: 11467 - DNA, 26 bp, Homo sapiens
gttttcctcttggagtcttctttcca

SEQ ID NO: 11468 - DNA, 26 bp, Homo sapiens
ttttcctcttggagtcttctttccat

SEQ ID NO: 11469 - DNA, 26 bp, Homo sapiens
tttcctcttggagtcttctttccatc

SEQ ID NO: 11470 - DNA, 26 bp, Homo sapiens
ttcctcttggagtcttctttccatcc

SEQ ID NO: 11471 - DNA, 26 bp, Homo sapiens
tcctcttggagtcttctttccatcca

SEQ ID NO: 11472 - DNA, 26 bp, Homo sapiens
cctcttggagtcttctttccatccat

SEQ ID NO: 11473 - DNA, 26 bp, Homo sapiens
ctcttggagtcttctttccatccata

SEQ ID NO: 11474 - DNA, 26 bp, Homo sapiens
tcttggagtcttctttccatccatat

SEQ ID NO: 11475 - DNA, 26 bp, Homo sapiens
cttggagtcttctttccatccatatc

SEQ ID NO: 11476 - DNA, 26 bp, Homo sapiens
ttggagtcttctttccatccatatct

SEQ ID NO: 11477 - DNA, 26 bp, Homo sapiens
tggagtcttctttccatccatatctg

SEQ ID NO: 11478 - DNA, 26 bp, Homo sapiens
ggagtcttctttccatccatatctgc

SEQ ID NO: 11479 - DNA, 26 bp, Homo sapiens
gagtcttctttccatccatatctgca

SEQ ID NO: 11480 - DNA, 26 bp, Homo sapiens
agtcttctttccatccatatctgcat

SEQ ID NO: 11481 - DNA, 26 bp, Homo sapiens
gtcttctttccatccatatctgcatg

SEQ ID NO: 11482 - DNA, 26 bp, Homo sapiens
tcttctttccatccatatctgcatga

SEQ ID NO: 11483 - DNA, 26 bp, Homo sapiens
cttctttccatccatatctgcatgaa

SEQ ID NO: 11484 - DNA, 26 bp, Homo sapiens
ttctttccatccatatctgcatgaat

SEQ ID NO: 11485 - DNA, 26 bp, Homo sapiens
tctttccatccatatctgcatgaatt

SEQ ID NO: 11486 - DNA, 26 bp, Homo sapiens
ctttccatccatatctgcatgaattt

SEQ ID NO: 11487 - DNA, 26 bp, Homo sapiens
tttccatccatatctgcatgaatttt

SEQ ID NO: 11488 - DNA, 26 bp, Homo sapiens
ttccatccatatctgcatgaattttc

SEQ ID NO: 11489 - DNA, 26 bp, Homo sapiens
tccatccatatctgcatgaattttcc

SEQ ID NO: 11490 - DNA, 26 bp, Homo sapiens
ccatccatatctgcatgaattttccg

SEQ ID NO: 11491 - DNA, 26 bp, Homo sapiens
catccatatctgcatgaattttccga

SEQ ID NO: 11492 - DNA, 26 bp, Homo sapiens
atccatatctgcatgaattttccgag

SEQ ID NO: 11493 - DNA, 26 bp, Homo sapiens
tccatatctgcatgaattttccgagc

SEQ ID NO: 11494 - DNA, 26 bp, Homo sapiens
ccatatctgcatgaattttccgagcc

SEQ ID NO: 11495 - DNA, 26 bp, Homo sapiens
catatctgcatgaattttccgagcca

SEQ ID NO: 11496 - DNA, 26 bp, Homo sapiens
atatctgcatgaattttccgagccaa

SEQ ID NO: 11497 - DNA, 26 bp, Homo sapiens
tatctgcatgaattttccgagccaag

SEQ ID NO: 11498 - DNA, 26 bp, Homo sapiens
atctgcatgaattttccgagccaaga

SEQ ID NO: 11499 - DNA, 26 bp, Homo sapiens
tctgcatgaattttccgagccaagaa

SEQ ID NO: 11500 - DNA, 26 bp, Homo sapiens
ctgcatgaattttccgagccaagaat

SEQ ID NO: 11501 - DNA, 26 bp, Homo sapiens
tgcatgaattttccgagccaagaatc

SEQ ID NO: 11502 - DNA, 26 bp, Homo sapiens
gcatgaattttccgagccaagaatcc

SEQ ID NO: 11503 - DNA, 26 bp, Homo sapiens
catgaattttccgagccaagaatcca

SEQ ID NO: 11504 - DNA, 26 bp, Homo sapiens
atgaattttccgagccaagaatccac

SEQ ID NO: 11505 - DNA, 26 bp, Homo sapiens
tgaattttccgagccaagaatccact

SEQ ID NO: 11506 - DNA, 26 bp, Homo sapiens
gaattttccgagccaagaatccactt

SEQ ID NO: 11507 - DNA, 26 bp, Homo sapiens
aattttccgagccaagaatccacttt

SEQ ID NO: 11508 - DNA, 26 bp, Homo sapiens
attttccgagccaagaatccactttt

SEQ ID NO: 11509 - DNA, 26 bp, Homo sapiens
ttttccgagccaagaatccacttttg

SEQ ID NO: 11510 - DNA, 26 bp, Homo sapiens
tttccgagccaagaatccacttttgt

SEQ ID NO: 11511 - DNA, 26 bp, Homo sapiens
ttccgagccaagaatccacttttgta

SEQ ID NO: 11512 - DNA, 26 bp, Homo sapiens
tccgagccaagaatccacttttgtac

SEQ ID NO: 11513 - DNA, 26 bp, Homo sapiens
ccgagccaagaatccacttttgtaca

SEQ ID NO: 11514 - DNA, 26 bp, Homo sapiens
cgagccaagaatccacttttgtacac

SEQ ID NO: 11515 - DNA, 26 bp, Homo sapiens
gagccaagaatccacttttgtacaca

SEQ ID NO: 11516 - DNA, 26 bp, Homo sapiens
agccaagaatccacttttgtacacag

SEQ ID NO: 11517 - DNA, 26 bp, Homo sapiens
gccaagaatccacttttgtacacagc

SEQ ID NO: 11518 - DNA, 26 bp, Homo sapiens
ccaagaatccacttttgtacacagca

SEQ ID NO: 11519 - DNA, 26 bp, Homo sapiens
caagaatccacttttgtacacagcag

SEQ ID NO: 11520 - DNA, 26 bp, Homo sapiens
aagaatccacttttgtacacagcagc

SEQ ID NO: 11521 - DNA, 26 bp, Homo sapiens
agaatccacttttgtacacagcagca

SEQ ID NO: 11522 - DNA, 26 bp, Homo sapiens
gaatccacttttgtacacagcagcat

SEQ ID NO: 11523 - DNA, 26 bp, Homo sapiens
aatccacttttgtacacagcagcatt

SEQ ID NO: 11524 - DNA, 26 bp, Homo sapiens
atccacttttgtacacagcagcattt

SEQ ID NO: 11525 - DNA, 26 bp, Homo sapiens
tccacttttgtacacagcagcatttg

SEQ ID NO: 11526 - DNA, 26 bp, Homo sapiens
ccacttttgtacacagcagcatttgg

SEQ ID NO: 11527 - DNA, 26 bp, Homo sapiens
cacttttgtacacagcagcatttgga

SEQ ID NO: 11528 - DNA, 26 bp, Homo sapiens
acttttgtacacagcagcatttggat

SEQ ID NO: 11529 - DNA, 26 bp, Homo sapiens
cttttgtacacagcagcatttggatc

SEQ ID NO: 11530 - DNA, 26 bp, Homo sapiens
ttttgtacacagcagcatttggatca

SEQ ID NO: 11531 - DNA, 26 bp, Homo sapiens
tttgtacacagcagcatttggatcat

SEQ ID NO: 11532 - DNA, 26 bp, Homo sapiens
ttgtacacagcagcatttggatcatg

SEQ ID NO: 11533 - DNA, 26 bp, Homo sapiens
tgtacacagcagcatttggatcatga

SEQ ID NO: 11534 - DNA, 26 bp, Homo sapiens
gtacacagcagcatttggatcatgag

SEQ ID NO: 11535 - DNA, 26 bp, Homo sapiens
tacacagcagcatttggatcatgagg

SEQ ID NO: 11536 - DNA, 26 bp, Homo sapiens
acacagcagcatttggatcatgagga

SEQ ID NO: 11537 - DNA, 26 bp, Homo sapiens
cacagcagcatttggatcatgaggaa

SEQ ID NO: 11538 - DNA, 26 bp, Homo sapiens
acagcagcatttggatcatgaggaat

SEQ ID NO: 11539 - DNA, 26 bp, Homo sapiens
cagcagcatttggatcatgaggaatg

SEQ ID NO: 11540 - DNA, 26 bp, Homo sapiens
agcagcatttggatcatgaggaatgt

SEQ ID NO: 11541 - DNA, 26 bp, Homo sapiens
gcagcatttggatcatgaggaatgtc

SEQ ID NO: 11542 - DNA, 26 bp, Homo sapiens
cagcatttggatcatgaggaatgtcc

SEQ ID NO: 11543 - DNA, 26 bp, Homo sapiens
agcatttggatcatgaggaatgtcca

SEQ ID NO: 11544 - DNA, 26 bp, Homo sapiens
gcatttggatcatgaggaatgtccaa

SEQ ID NO: 11545 - DNA, 26 bp, Homo sapiens
catttggatcatgaggaatgtccaaa

SEQ ID NO: 11546 - DNA, 26 bp, Homo sapiens
atttggatcatgaggaatgtccaaaa

SEQ ID NO: 11547 - DNA, 26 bp, Homo sapiens
tttggatcatgaggaatgtccaaaaa

SEQ ID NO: 11548 - DNA, 26 bp, Homo sapiens
ttggatcatgaggaatgtccaaaaat

SEQ ID NO: 11549 - DNA, 26 bp, Homo sapiens
tggatcatgaggaatgtccaaaaatg

SEQ ID NO: 11550 - DNA, 26 bp, Homo sapiens
ggatcatgaggaatgtccaaaaatgg

SEQ ID NO: 11551 - DNA, 26 bp, Homo sapiens
gatcatgaggaatgtccaaaaatggg

SEQ ID NO: 11552 - DNA, 26 bp, Homo sapiens
atcatgaggaatgtccaaaaatgggt

SEQ ID NO: 11553 - DNA, 26 bp, Homo sapiens
tcatgaggaatgtccaaaaatgggtt

SEQ ID NO: 11554 - DNA, 26 bp, Homo sapiens
catgaggaatgtccaaaaatgggtta

SEQ ID NO: 11555 - DNA, 26 bp, Homo sapiens
atgaggaatgtccaaaaatgggttag

SEQ ID NO: 11556 - DNA, 26 bp, Homo sapiens
tgaggaatgtccaaaaatgggttagt

SEQ ID NO: 11557 - DNA, 26 bp, Homo sapiens
gaggaatgtccaaaaatgggttagta

SEQ ID NO: 11558 - DNA, 26 bp, Homo sapiens
aggaatgtccaaaaatgggttagtag

SEQ ID NO: 11559 - DNA, 26 bp, Homo sapiens
ggaatgtccaaaaatgggttagtagt

SEQ ID NO: 11560 - DNA, 26 bp, Homo sapiens
gaatgtccaaaaatgggttagtagta

SEQ ID NO: 11561 - DNA, 26 bp, Homo sapiens
aatgtccaaaaatgggttagtagtac

SEQ ID NO: 11562 - DNA, 26 bp, Homo sapiens
atgtccaaaaatgggttagtagtact

SEQ ID NO: 11563 - DNA, 26 bp, Homo sapiens
tgtccaaaaatgggttagtagtactt

SEQ ID NO: 11564 - DNA, 26 bp, Homo sapiens
gtccaaaaatgggttagtagtacttc

SEQ ID NO: 11565 - DNA, 26 bp, Homo sapiens
tccaaaaatgggttagtagtacttcc

SEQ ID NO: 11566 - DNA, 26 bp, Homo sapiens
ccaaaaatgggttagtagtacttcca

SEQ ID NO: 11567 - DNA, 26 bp, Homo sapiens
caaaaatgggttagtagtacttccaa

SEQ ID NO: 11568 - DNA, 26 bp, Homo sapiens
aaaaatgggttagtagtacttccaat

SEQ ID NO: 11569 - DNA, 26 bp, Homo sapiens
aaaatgggttagtagtacttccaata

SEQ ID NO: 11570 - DNA, 26 bp, Homo sapiens
aaatgggttagtagtacttccaatac

SEQ ID NO: 11571 - DNA, 26 bp, Homo sapiens
aatgggttagtagtacttccaatacg

SEQ ID NO: 11572 - DNA, 26 bp, Homo sapiens
atgggttagtagtacttccaatacga

SEQ ID NO: 11573 - DNA, 26 bp, Homo sapiens
tgggttagtagtacttccaatacgac

SEQ ID NO: 11574 - DNA, 26 bp, Homo sapiens
gggttagtagtacttccaatacgact

SEQ ID NO: 11575 - DNA, 26 bp, Homo sapiens
ggttagtagtacttccaatacgactg

SEQ ID NO: 11576 - DNA, 26 bp, Homo sapiens
gttagtagtacttccaatacgactga

SEQ ID NO: 11577 - DNA, 26 bp, Homo sapiens
ttagtagtacttccaatacgactgat

SEQ ID NO: 11578 - DNA, 26 bp, Homo sapiens
tagtagtacttccaatacgactgatg

SEQ ID NO: 11579 - DNA, 26 bp, Homo sapiens
agtagtacttccaatacgactgatgg

SEQ ID NO: 11580 - DNA, 26 bp, Homo sapiens
gtagtacttccaatacgactgatggt

SEQ ID NO: 11581 - DNA, 26 bp, Homo sapiens
tagtacttccaatacgactgatggtc

SEQ ID NO: 11582 - DNA, 26 bp, Homo sapiens
agtacttccaatacgactgatggtct

SEQ ID NO: 11583 - DNA, 26 bp, Homo sapiens
gtacttccaatacgactgatggtctt

SEQ ID NO: 11584 - DNA, 26 bp, Homo sapiens
tacttccaatacgactgatggtcttt

SEQ ID NO: 11585 - DNA, 26 bp, Homo sapiens
acttccaatacgactgatggtctttg

SEQ ID NO: 11586 - DNA, 26 bp, Homo sapiens
cttccaatacgactgatggtctttgg

SEQ ID NO: 11587 - DNA, 26 bp, Homo sapiens
ttccaatacgactgatggtctttgga

SEQ ID NO: 11588 - DNA, 26 bp, Homo sapiens
tccaatacgactgatggtctttggat

SEQ ID NO: 11589 - DNA, 26 bp, Homo sapiens
ccaatacgactgatggtctttggatg

SEQ ID NO: 11590 - DNA, 26 bp, Homo sapiens
caatacgactgatggtctttggatgt

SEQ ID NO: 11591 - DNA, 26 bp, Homo sapiens
aatacgactgatggtctttggatgtg

SEQ ID NO: 11592 - DNA, 26 bp, Homo sapiens
atacgactgatggtctttggatgtgt

SEQ ID NO: 11593 - DNA, 26 bp, Homo sapiens
tacgactgatggtctttggatgtgtt

SEQ ID NO: 11594 - DNA, 26 bp, Homo sapiens
acgactgatggtctttggatgtgttc

SEQ ID NO: 11595 - DNA, 26 bp, Homo sapiens
cgactgatggtctttggatgtgttcc

SEQ ID NO: 11596 - DNA, 26 bp, Homo sapiens
gactgatggtctttggatgtgttccg

SEQ ID NO: 11597 - DNA, 26 bp, Homo sapiens
actgatggtctttggatgtgttccgt

SEQ ID NO: 11598 - DNA, 26 bp, Homo sapiens
ctgatggtctttggatgtgttccgtt

SEQ ID NO: 11599 - DNA, 26 bp, Homo sapiens
tgatggtctttggatgtgttccgtta

SEQ ID NO: 11600 - DNA, 26 bp, Homo sapiens
gatggtctttggatgtgttccgttag

SEQ ID NO: 11601 - DNA, 26 bp, Homo sapiens
atggtctttggatgtgttccgttagc

SEQ ID NO: 11602 - DNA, 26 bp, Homo sapiens
tggtctttggatgtgttccgttagct

SEQ ID NO: 11603 - DNA, 26 bp, Homo sapiens
ggtctttggatgtgttccgttagctt

SEQ ID NO: 11604 - DNA, 26 bp, Homo sapiens
gtctttggatgtgttccgttagcttt

SEQ ID NO: 11605 - DNA, 26 bp, Homo sapiens
tctttggatgtgttccgttagctttc

SEQ ID NO: 11606 - DNA, 26 bp, Homo sapiens
ctttggatgtgttccgttagctttct

SEQ ID NO: 11607 - DNA, 26 bp, Homo sapiens
tttggatgtgttccgttagctttctc

SEQ ID NO: 11608 - DNA, 26 bp, Homo sapiens
ttggatgtgttccgttagctttctcc

SEQ ID NO: 11609 - DNA, 26 bp, Homo sapiens
tggatgtgttccgttagctttctcct

SEQ ID NO: 11610 - DNA, 26 bp, Homo sapiens
ggatgtgttccgttagctttctcctc

SEQ ID NO: 11611 - DNA, 26 bp, Homo sapiens
gatgtgttccgttagctttctcctca

SEQ ID NO: 11612 - DNA, 26 bp, Homo sapiens
atgtgttccgttagctttctcctcag

SEQ ID NO: 11613 - DNA, 26 bp, Homo sapiens
tgtgttccgttagctttctcctcagt

SEQ ID NO: 11614 - DNA, 26 bp, Homo sapiens
gtgttccgttagctttctcctcagta

SEQ ID NO: 11615 - DNA, 26 bp, Homo sapiens
tgttccgttagctttctcctcagtac

SEQ ID NO: 11616 - DNA, 26 bp, Homo sapiens
gttccgttagctttctcctcagtact

SEQ ID NO: 11617 - DNA, 26 bp, Homo sapiens
ttccgttagctttctcctcagtactt

SEQ ID NO: 11618 - DNA, 26 bp, Homo sapiens
tccgttagctttctcctcagtacttt

SEQ ID NO: 11619 - DNA, 26 bp, Homo sapiens
ccgttagctttctcctcagtactttc

SEQ ID NO: 11620 - DNA, 26 bp, Homo sapiens
cgttagctttctcctcagtactttct

SEQ ID NO: 11621 - DNA, 26 bp, Homo sapiens
gttagctttctcctcagtactttctg

SEQ ID NO: 11622 - DNA, 26 bp, Homo sapiens
ttagctttctcctcagtactttctga

SEQ ID NO: 11623 - DNA, 26 bp, Homo sapiens
tagctttctcctcagtactttctgag

SEQ ID NO: 11624 - DNA, 26 bp, Homo sapiens
agctttctcctcagtactttctgagg

SEQ ID NO: 11625 - DNA, 26 bp, Homo sapiens
gctttctcctcagtactttctgaggg

SEQ ID NO: 11626 - DNA, 26 bp, Homo sapiens
ctttctcctcagtactttctgaggga

SEQ ID NO: 11627 - DNA, 26 bp, Homo sapiens
tttctcctcagtactttctgagggag

SEQ ID NO: 11628 - DNA, 26 bp, Homo sapiens
ttctcctcagtactttctgagggaga

SEQ ID NO: 11629 - DNA, 26 bp, Homo sapiens
tctcctcagtactttctgagggagac

SEQ ID NO: 11630 - DNA, 26 bp, Homo sapiens
ctcctcagtactttctgagggagact

SEQ ID NO: 11631 - DNA, 26 bp, Homo sapiens
tcctcagtactttctgagggagactt

SEQ ID NO: 11632 - DNA, 26 bp, Homo sapiens
cctcagtactttctgagggagacttt

SEQ ID NO: 11633 - DNA, 26 bp, Homo sapiens
ctcagtactttctgagggagactttt

SEQ ID NO: 11634 - DNA, 26 bp, Homo sapiens
tcagtactttctgagggagacttttt

SEQ ID NO: 11635 - DNA, 26 bp, Homo sapiens
cagtactttctgagggagactttttt

SEQ ID NO: 11636 - DNA, 26 bp, Homo sapiens
agtactttctgagggagacttttttt

SEQ ID NO: 11637 - DNA, 26 bp, Homo sapiens
gtactttctgagggagactttttttt

SEQ ID NO: 11638 - DNA, 26 bp, Homo sapiens
tactttctgagggagacttttttttc

SEQ ID NO: 11639 - DNA, 26 bp, Homo sapiens
actttctgagggagacttttttttct

SEQ ID NO: 11640 - DNA, 26 bp, Homo sapiens
ctttctgagggagacttttttttctc

SEQ ID NO: 11641 - DNA, 26 bp, Homo sapiens
tttctgagggagacttttttttctct

SEQ ID NO: 11642 - DNA, 26 bp, Homo sapiens
ttctgagggagacttttttttctctt

SEQ ID NO: 11643 - DNA, 26 bp, Homo sapiens
tctgagggagacttttttttctcttc

SEQ ID NO: 11644 - DNA, 26 bp, Homo sapiens
ctgagggagacttttttttctcttca

SEQ ID NO: 11645 - DNA, 26 bp, Homo sapiens
tgagggagacttttttttctcttcat

SEQ ID NO: 11646 - DNA, 26 bp, Homo sapiens
gagggagacttttttttctcttcatc

SEQ ID NO: 11647 - DNA, 26 bp, Homo sapiens
agggagacttttttttctcttcatca

SEQ ID NO: 11648 - DNA, 26 bp, Homo sapiens
gggagacttttttttctcttcatcat

SEQ ID NO: 11649 - DNA, 26 bp, Homo sapiens
ggagacttttttttctcttcatcatc

SEQ ID NO: 11650 - DNA, 26 bp, Homo sapiens
gagacttttttttctcttcatcatct

SEQ ID NO: 11651 - DNA, 26 bp, Homo sapiens
agacttttttttctcttcatcatcta

SEQ ID NO: 11652 - DNA, 26 bp, Homo sapiens
gacttttttttctcttcatcatctac

SEQ ID NO: 11653 - DNA, 26 bp, Homo sapiens
acttttttttctcttcatcatctact

SEQ ID NO: 11654 - DNA, 26 bp, Homo sapiens
cttttttttctcttcatcatctactg

SEQ ID NO: 11655 - DNA, 26 bp, Homo sapiens
ttttttttctcttcatcatctactgc

SEQ ID NO: 11656 - DNA, 26 bp, Homo sapiens
tttttttctcttcatcatctactgcc

SEQ ID NO: 11657 - DNA, 26 bp, Homo sapiens
ttttttctcttcatcatctactgccc

SEQ ID NO: 11658 - DNA, 26 bp, Homo sapiens
tttttctcttcatcatctactgccca

SEQ ID NO: 11659 - DNA, 26 bp, Homo sapiens
ttttctcttcatcatctactgcccat

SEQ ID NO: 11660 - DNA, 26 bp, Homo sapiens
tttctcttcatcatctactgcccatt

SEQ ID NO: 11661 - DNA, 26 bp, Homo sapiens
ttctcttcatcatctactgcccattc

SEQ ID NO: 11662 - DNA, 26 bp, Homo sapiens
tctcttcatcatctactgcccattca

SEQ ID NO: 11663 - DNA, 26 bp, Homo sapiens
ctcttcatcatctactgcccattcaa

SEQ ID NO: 11664 - DNA, 26 bp, Homo sapiens
tcttcatcatctactgcccattcaag

SEQ ID NO: 11665 - DNA, 26 bp, Homo sapiens
cttcatcatctactgcccattcaagc

SEQ ID NO: 11666 - DNA, 26 bp, Homo sapiens
ttcatcatctactgcccattcaagct

SEQ ID NO: 11667 - DNA, 26 bp, Homo sapiens
tcatcatctactgcccattcaagctt

SEQ ID NO: 11668 - DNA, 26 bp, Homo sapiens
catcatctactgcccattcaagcttc

SEQ ID NO: 11669 - DNA, 26 bp, Homo sapiens
atcatctactgcccattcaagcttct

SEQ ID NO: 11670 - DNA, 26 bp, Homo sapiens
tcatctactgcccattcaagcttctc

SEQ ID NO: 11671 - DNA, 26 bp, Homo sapiens
catctactgcccattcaagcttctca

SEQ ID NO: 11672 - DNA, 26 bp, Homo sapiens
atctactgcccattcaagcttctcat

SEQ ID NO: 11673 - DNA, 26 bp, Homo sapiens
tctactgcccattcaagcttctcatt

SEQ ID NO: 11674 - DNA, 26 bp, Homo sapiens
ctactgcccattcaagcttctcattc

SEQ ID NO: 11675 - DNA, 26 bp, Homo sapiens
tactgcccattcaagcttctcattct

SEQ ID NO: 11676 - DNA, 26 bp, Homo sapiens
actgcccattcaagcttctcattctt

SEQ ID NO: 11677 - DNA, 26 bp, Homo sapiens
ctgcccattcaagcttctcattcttg

SEQ ID NO: 11678 - DNA, 26 bp, Homo sapiens
tgcccattcaagcttctcattcttga

SEQ ID NO: 11679 - DNA, 26 bp, Homo sapiens
gcccattcaagcttctcattcttgat

SEQ ID NO: 11680 - DNA, 26 bp, Homo sapiens
cccattcaagcttctcattcttgatt

SEQ ID NO: 11681 - DNA, 26 bp, Homo sapiens
ccattcaagcttctcattcttgattg

SEQ ID NO: 11682 - DNA, 26 bp, Homo sapiens
cattcaagcttctcattcttgattga

SEQ ID NO: 11683 - DNA, 26 bp, Homo sapiens
attcaagcttctcattcttgattgag

SEQ ID NO: 11684 - DNA, 26 bp, Homo sapiens
ttcaagcttctcattcttgattgagt

SEQ ID NO: 11685 - DNA, 26 bp, Homo sapiens
tcaagcttctcattcttgattgagtt

SEQ ID NO: 11686 - DNA, 26 bp, Homo sapiens
caagcttctcattcttgattgagttg

SEQ ID NO: 11687 - DNA, 26 bp, Homo sapiens
aagcttctcattcttgattgagttgt

SEQ ID NO: 11688 - DNA, 26 bp, Homo sapiens
agcttctcattcttgattgagttgta

SEQ ID NO: 11689 - DNA, 26 bp, Homo sapiens
gcttctcattcttgattgagttgtac

SEQ ID NO: 11690 - DNA, 26 bp, Homo sapiens
cttctcattcttgattgagttgtaca

SEQ ID NO: 11691 - DNA, 26 bp, Homo sapiens
ttctcattcttgattgagttgtacag

SEQ ID NO: 11692 - DNA, 26 bp, Homo sapiens
tctcattcttgattgagttgtacaga

SEQ ID NO: 11693 - DNA, 26 bp, Homo sapiens
ctcattcttgattgagttgtacagag

SEQ ID NO: 11694 - DNA, 26 bp, Homo sapiens
tcattcttgattgagttgtacagagc

SEQ ID NO: 11695 - DNA, 26 bp, Homo sapiens
cattcttgattgagttgtacagagct

SEQ ID NO: 11696 - DNA, 26 bp, Homo sapiens
attcttgattgagttgtacagagctt

SEQ ID NO: 11697 - DNA, 26 bp, Homo sapiens
ttcttgattgagttgtacagagcttt

SEQ ID NO: 11698 - DNA, 26 bp, Homo sapiens
tcttgattgagttgtacagagctttc

SEQ ID NO: 11699 - DNA, 26 bp, Homo sapiens
cttgattgagttgtacagagctttca

SEQ ID NO: 11700 - DNA, 26 bp, Homo sapiens
ttgattgagttgtacagagctttcag

SEQ ID NO: 11701 - DNA, 26 bp, Homo sapiens
tgattgagttgtacagagctttcagc

SEQ ID NO: 11702 - DNA, 26 bp, Homo sapiens
gattgagttgtacagagctttcagca

SEQ ID NO: 11703 - DNA, 26 bp, Homo sapiens
attgagttgtacagagctttcagcag

SEQ ID NO: 11704 - DNA, 26 bp, Homo sapiens
ttgagttgtacagagctttcagcaga

SEQ ID NO: 11705 - DNA, 26 bp, Homo sapiens
tgagttgtacagagctttcagcagat

SEQ ID NO: 11706 - DNA, 26 bp, Homo sapiens
gagttgtacagagctttcagcagatc

SEQ ID NO: 11707 - DNA, 26 bp, Homo sapiens
agttgtacagagctttcagcagatcc

SEQ ID NO: 11708 - DNA, 26 bp, Homo sapiens
gttgtacagagctttcagcagatcct

SEQ ID NO: 11709 - DNA, 26 bp, Homo sapiens
ttgtacagagctttcagcagatcctt

SEQ ID NO: 11710 - DNA, 26 bp, Homo sapiens
tgtacagagctttcagcagatccttg

SEQ ID NO: 11711 - DNA, 26 bp, Homo sapiens
gtacagagctttcagcagatccttgg

SEQ ID NO: 11712 - DNA, 26 bp, Homo sapiens
tacagagctttcagcagatccttgga

SEQ ID NO: 11713 - DNA, 26 bp, Homo sapiens
acagagctttcagcagatccttggag

SEQ ID NO: 11714 - DNA, 26 bp, Homo sapiens
cagagctttcagcagatccttggaga

SEQ ID NO: 11715 - DNA, 26 bp, Homo sapiens
agagctttcagcagatccttggagaa

SEQ ID NO: 11716 - DNA, 26 bp, Homo sapiens
gagctttcagcagatccttggagaaa

SEQ ID NO: 11717 - DNA, 26 bp, Homo sapiens
agctttcagcagatccttggagaaat

SEQ ID NO: 11718 - DNA, 26 bp, Homo sapiens
gctttcagcagatccttggagaaatc

SEQ ID NO: 11719 - DNA, 26 bp, Homo sapiens
ctttcagcagatccttggagaaatca

SEQ ID NO: 11720 - DNA, 26 bp, Homo sapiens
tttcagcagatccttggagaaatcaa

SEQ ID NO: 11721 - DNA, 26 bp, Homo sapiens
ttcagcagatccttggagaaatcaac

SEQ ID NO: 11722 - DNA, 26 bp, Homo sapiens
tcagcagatccttggagaaatcaaca

SEQ ID NO: 11723 - DNA, 26 bp, Homo sapiens
cagcagatccttggagaaatcaacac

SEQ ID NO: 11724 - DNA, 26 bp, Homo sapiens
agcagatccttggagaaatcaacacc

SEQ ID NO: 11725 - DNA, 26 bp, Homo sapiens
gcagatccttggagaaatcaacaccc

SEQ ID NO: 11726 - DNA, 26 bp, Homo sapiens
cagatccttggagaaatcaacaccct

SEQ ID NO: 11727 - DNA, 26 bp, Homo sapiens
agatccttggagaaatcaacaccctc

SEQ ID NO: 11728 - DNA, 26 bp, Homo sapiens
gatccttggagaaatcaacaccctca

SEQ ID NO: 11729 - DNA, 26 bp, Homo sapiens
atccttggagaaatcaacaccctcat

SEQ ID NO: 11730 - DNA, 26 bp, Homo sapiens
tccttggagaaatcaacaccctcatt

SEQ ID NO: 11731 - DNA, 26 bp, Homo sapiens
ccttggagaaatcaacaccctcattt

SEQ ID NO: 11732 - DNA, 26 bp, Homo sapiens
cttggagaaatcaacaccctcattta

SEQ ID NO: 11733 - DNA, 26 bp, Homo sapiens
ttggagaaatcaacaccctcatttac

SEQ ID NO: 11734 - DNA, 26 bp, Homo sapiens
tggagaaatcaacaccctcatttacc

SEQ ID NO: 11735 - DNA, 26 bp, Homo sapiens
ggagaaatcaacaccctcatttaccc

SEQ ID NO: 11736 - DNA, 26 bp, Homo sapiens
gagaaatcaacaccctcatttacccc

SEQ ID NO: 11737 - DNA, 26 bp, Homo sapiens
agaaatcaacaccctcatttacccct

SEQ ID NO: 11738 - DNA, 26 bp, Homo sapiens
gaaatcaacaccctcatttacccctt

SEQ ID NO: 11739 - DNA, 26 bp, Homo sapiens
aaatcaacaccctcatttaccccttg

SEQ ID NO: 11740 - DNA, 26 bp, Homo sapiens
aatcaacaccctcatttaccccttgc

SEQ ID NO: 11741 - DNA, 26 bp, Homo sapiens
atcaacaccctcatttaccccttgca

SEQ ID NO: 11742 - DNA, 26 bp, Homo sapiens
tcaacaccctcatttaccccttgcag

SEQ ID NO: 11743 - DNA, 26 bp, Homo sapiens
caacaccctcatttaccccttgcaga

SEQ ID NO: 11744 - DNA, 26 bp, Homo sapiens
aacaccctcatttaccccttgcagat

SEQ ID NO: 11745 - DNA, 26 bp, Homo sapiens
acaccctcatttaccccttgcagatt

SEQ ID NO: 11746 - DNA, 26 bp, Homo sapiens
caccctcatttaccccttgcagattt

SEQ ID NO: 11747 - DNA, 26 bp, Homo sapiens
accctcatttaccccttgcagatttg

SEQ ID NO: 11748 - DNA, 26 bp, Homo sapiens
ccctcatttaccccttgcagatttgc

SEQ ID NO: 11749 - DNA, 26 bp, Homo sapiens
cctcatttaccccttgcagatttgca

SEQ ID NO: 11750 - DNA, 26 bp, Homo sapiens
ctcatttaccccttgcagatttgcaa

SEQ ID NO: 11751 - DNA, 26 bp, Homo sapiens
tcatttaccccttgcagatttgcaat

SEQ ID NO: 11752 - DNA, 26 bp, Homo sapiens
catttaccccttgcagatttgcaatg

SEQ ID NO: 11753 - DNA, 26 bp, Homo sapiens
atttaccccttgcagatttgcaatga

SEQ ID NO: 11754 - DNA, 26 bp, Homo sapiens
tttaccccttgcagatttgcaatgaa

SEQ ID NO: 11755 - DNA, 26 bp, Homo sapiens
ttaccccttgcagatttgcaatgaac

SEQ ID NO: 11756 - DNA, 26 bp, Homo sapiens
taccccttgcagatttgcaatgaact

SEQ ID NO: 11757 - DNA, 26 bp, Homo sapiens
accccttgcagatttgcaatgaactc

SEQ ID NO: 11758 - DNA, 26 bp, Homo sapiens
ccccttgcagatttgcaatgaactcc

SEQ ID NO: 11759 - DNA, 26 bp, Homo sapiens
cccttgcagatttgcaatgaactcct

SEQ ID NO: 11760 - DNA, 26 bp, Homo sapiens
ccttgcagatttgcaatgaactcctg

SEQ ID NO: 11761 - DNA, 26 bp, Homo sapiens
cttgcagatttgcaatgaactcctga

SEQ ID NO: 11762 - DNA, 26 bp, Homo sapiens
ttgcagatttgcaatgaactcctgac

SEQ ID NO: 11763 - DNA, 26 bp, Homo sapiens
tgcagatttgcaatgaactcctgaca

SEQ ID NO: 11764 - DNA, 26 bp, Homo sapiens
gcagatttgcaatgaactcctgacag

SEQ ID NO: 11765 - DNA, 26 bp, Homo sapiens
cagatttgcaatgaactcctgacagg

SEQ ID NO: 11766 - DNA, 26 bp, Homo sapiens
agatttgcaatgaactcctgacaggt

SEQ ID NO: 11767 - DNA, 26 bp, Homo sapiens
gatttgcaatgaactcctgacaggtc

SEQ ID NO: 11768 - DNA, 26 bp, Homo sapiens
atttgcaatgaactcctgacaggtca

SEQ ID NO: 11769 - DNA, 26 bp, Homo sapiens
tttgcaatgaactcctgacaggtcat

SEQ ID NO: 11770 - DNA, 26 bp, Homo sapiens
ttgcaatgaactcctgacaggtcatc

SEQ ID NO: 11771 - DNA, 26 bp, Homo sapiens
tgcaatgaactcctgacaggtcatct

SEQ ID NO: 11772 - DNA, 26 bp, Homo sapiens
gcaatgaactcctgacaggtcatctt

SEQ ID NO: 11773 - DNA, 26 bp, Homo sapiens
caatgaactcctgacaggtcatcttc

SEQ ID NO: 11774 - DNA, 26 bp, Homo sapiens
aatgaactcctgacaggtcatcttct

SEQ ID NO: 11775 - DNA, 26 bp, Homo sapiens
atgaactcctgacaggtcatcttctt

SEQ ID NO: 11776 - DNA, 26 bp, Homo sapiens
tgaactcctgacaggtcatcttcttt

SEQ ID NO: 11777 - DNA, 26 bp, Homo sapiens
gaactcctgacaggtcatcttctttc

SEQ ID NO: 11778 - DNA, 26 bp, Homo sapiens
aactcctgacaggtcatcttctttcc

SEQ ID NO: 11779 - DNA, 26 bp, Homo sapiens
actcctgacaggtcatcttctttcca

SEQ ID NO: 11780 - DNA, 26 bp, Homo sapiens
ctcctgacaggtcatcttctttccaa

SEQ ID NO: 11781 - DNA, 26 bp, Homo sapiens
tcctgacaggtcatcttctttccaat

SEQ ID NO: 11782 - DNA, 26 bp, Homo sapiens
cctgacaggtcatcttctttccaata

SEQ ID NO: 11783 - DNA, 26 bp, Homo sapiens
ctgacaggtcatcttctttccaatat

SEQ ID NO: 11784 - DNA, 26 bp, Homo sapiens
tgacaggtcatcttctttccaatatt

SEQ ID NO: 11785 - DNA, 26 bp, Homo sapiens
gacaggtcatcttctttccaatattg

SEQ ID NO: 11786 - DNA, 26 bp, Homo sapiens
acaggtcatcttctttccaatattgt

SEQ ID NO: 11787 - DNA, 26 bp, Homo sapiens
caggtcatcttctttccaatattgtg

SEQ ID NO: 11788 - DNA, 26 bp, Homo sapiens
aggtcatcttctttccaatattgtgg

SEQ ID NO: 11789 - DNA, 26 bp, Homo sapiens
ggtcatcttctttccaatattgtggc

SEQ ID NO: 11790 - DNA, 26 bp, Homo sapiens
gtcatcttctttccaatattgtggcc

SEQ ID NO: 11791 - DNA, 26 bp, Homo sapiens
tcatcttctttccaatattgtggcca

SEQ ID NO: 11792 - DNA, 26 bp, Homo sapiens
catcttctttccaatattgtggccat

SEQ ID NO: 11793 - DNA, 26 bp, Homo sapiens
atcttctttccaatattgtggccatg

SEQ ID NO: 11794 - DNA, 26 bp, Homo sapiens
tcttctttccaatattgtggccatgt

SEQ ID NO: 11795 - DNA, 26 bp, Homo sapiens
cttctttccaatattgtggccatgta

SEQ ID NO: 11796 - DNA, 26 bp, Homo sapiens
ttctttccaatattgtggccatgtag

SEQ ID NO: 11797 - DNA, 26 bp, Homo sapiens
tctttccaatattgtggccatgtaga

SEQ ID NO: 11798 - DNA, 26 bp, Homo sapiens
ctttccaatattgtggccatgtagat

SEQ ID NO: 11799 - DNA, 26 bp, Homo sapiens
tttccaatattgtggccatgtagatc

SEQ ID NO: 11800 - DNA, 26 bp, Homo sapiens
ttccaatattgtggccatgtagatcg

SEQ ID NO: 11801 - DNA, 26 bp, Homo sapiens
tccaatattgtggccatgtagatcgg

SEQ ID NO: 11802 - DNA, 26 bp, Homo sapiens
ccaatattgtggccatgtagatcggt

SEQ ID NO: 11803 - DNA, 26 bp, Homo sapiens
caatattgtggccatgtagatcggta

SEQ ID NO: 11804 - DNA, 26 bp, Homo sapiens
aatattgtggccatgtagatcggtat

SEQ ID NO: 11805 - DNA, 26 bp, Homo sapiens
atattgtggccatgtagatcggtatt

SEQ ID NO: 11806 - DNA, 26 bp, Homo sapiens
tattgtggccatgtagatcggtatta

SEQ ID NO: 11807 - DNA, 26 bp, Homo sapiens
attgtggccatgtagatcggtattaa

SEQ ID NO: 11808 - DNA, 26 bp, Homo sapiens
ttgtggccatgtagatcggtattaag

SEQ ID NO: 11809 - DNA, 26 bp, Homo sapiens
tgtggccatgtagatcggtattaaga

SEQ ID NO: 11810 - DNA, 26 bp, Homo sapiens
gtggccatgtagatcggtattaagaa

SEQ ID NO: 11811 - DNA, 26 bp, Homo sapiens
tggccatgtagatcggtattaagaag

SEQ ID NO: 11812 - DNA, 26 bp, Homo sapiens
ggccatgtagatcggtattaagaagc

SEQ ID NO: 11813 - DNA, 26 bp, Homo sapiens
gccatgtagatcggtattaagaagca

SEQ ID NO: 11814 - DNA, 26 bp, Homo sapiens
ccatgtagatcggtattaagaagcat

SEQ ID NO: 11815 - DNA, 26 bp, Homo sapiens
catgtagatcggtattaagaagcatt

SEQ ID NO: 11816 - DNA, 26 bp, Homo sapiens
atgtagatcggtattaagaagcatta

SEQ ID NO: 11817 - DNA, 26 bp, Homo sapiens
tgtagatcggtattaagaagcattat

SEQ ID NO: 11818 - DNA, 26 bp, Homo sapiens
gtagatcggtattaagaagcattatt

SEQ ID NO: 11819 - DNA, 26 bp, Homo sapiens
tagatcggtattaagaagcattattg

SEQ ID NO: 11820 - DNA, 26 bp, Homo sapiens
agatcggtattaagaagcattattgc

SEQ ID NO: 11821 - DNA, 26 bp, Homo sapiens
gatcggtattaagaagcattattgca

SEQ ID NO: 11822 - DNA, 26 bp, Homo sapiens
atcggtattaagaagcattattgcac

SEQ ID NO: 11823 - DNA, 26 bp, Homo sapiens
tcggtattaagaagcattattgcaca

SEQ ID NO: 11824 - DNA, 26 bp, Homo sapiens
cggtattaagaagcattattgcacag

SEQ ID NO: 11825 - DNA, 26 bp, Homo sapiens
ggtattaagaagcattattgcacagg

SEQ ID NO: 11826 - DNA, 26 bp, Homo sapiens
gtattaagaagcattattgcacaggt

SEQ ID NO: 11827 - DNA, 26 bp, Homo sapiens
tattaagaagcattattgcacaggta

SEQ ID NO: 11828 - DNA, 26 bp, Homo sapiens
attaagaagcattattgcacaggtaa

SEQ ID NO: 11829 - DNA, 26 bp, Homo sapiens
ttaagaagcattattgcacaggtaag

SEQ ID NO: 11830 - DNA, 26 bp, Homo sapiens
taagaagcattattgcacaggtaagg

SEQ ID NO: 11831 - DNA, 26 bp, Homo sapiens
aagaagcattattgcacaggtaaggc

SEQ ID NO: 11832 - DNA, 26 bp, Homo sapiens
agaagcattattgcacaggtaaggca

SEQ ID NO: 11833 - DNA, 26 bp, Homo sapiens
gaagcattattgcacaggtaaggcaa

SEQ ID NO: 11834 - DNA, 26 bp, Homo sapiens
aagcattattgcacaggtaaggcaat

SEQ ID NO: 11835 - DNA, 26 bp, Homo sapiens
agcattattgcacaggtaaggcaatg

SEQ ID NO: 11836 - DNA, 26 bp, Homo sapiens
gcattattgcacaggtaaggcaatgg

SEQ ID NO: 11837 - DNA, 26 bp, Homo sapiens
cattattgcacaggtaaggcaatgga

SEQ ID NO: 11838 - DNA, 26 bp, Homo sapiens
attattgcacaggtaaggcaatggac

SEQ ID NO: 11839 - DNA, 26 bp, Homo sapiens
ttattgcacaggtaaggcaatggact

SEQ ID NO: 11840 - DNA, 26 bp, Homo sapiens
tattgcacaggtaaggcaatggactc

SEQ ID NO: 11841 - DNA, 26 bp, Homo sapiens
attgcacaggtaaggcaatggactcc

SEQ ID NO: 11842 - DNA, 26 bp, Homo sapiens
ttgcacaggtaaggcaatggactcca

SEQ ID NO: 11843 - DNA, 26 bp, Homo sapiens
tgcacaggtaaggcaatggactccat

SEQ ID NO: 11844 - DNA, 26 bp, Homo sapiens
gcacaggtaaggcaatggactccatc

SEQ ID NO: 11845 - DNA, 26 bp, Homo sapiens
cacaggtaaggcaatggactccatct

SEQ ID NO: 11846 - DNA, 26 bp, Homo sapiens
acaggtaaggcaatggactccatctt

SEQ ID NO: 11847 - DNA, 26 bp, Homo sapiens
caggtaaggcaatggactccatcttg

SEQ ID NO: 11848 - DNA, 26 bp, Homo sapiens
aggtaaggcaatggactccatcttgt

SEQ ID NO: 11849 - DNA, 26 bp, Homo sapiens
ggtaaggcaatggactccatcttgtg

SEQ ID NO: 11850 - DNA, 26 bp, Homo sapiens
gtaaggcaatggactccatcttgtga

SEQ ID NO: 11851 - DNA, 26 bp, Homo sapiens
taaggcaatggactccatcttgtgaa

SEQ ID NO: 11852 - DNA, 26 bp, Homo sapiens
aaggcaatggactccatcttgtgaag

SEQ ID NO: 11853 - DNA, 26 bp, Homo sapiens
aggcaatggactccatcttgtgaagc

SEQ ID NO: 11854 - DNA, 26 bp, Homo sapiens
ggcaatggactccatcttgtgaagca

SEQ ID NO: 11855 - DNA, 26 bp, Homo sapiens
gcaatggactccatcttgtgaagcaa

SEQ ID NO: 11856 - DNA, 26 bp, Homo sapiens
caatggactccatcttgtgaagcaat

SEQ ID NO: 11857 - DNA, 26 bp, Homo sapiens
aatggactccatcttgtgaagcaatg

SEQ ID NO: 11858 - DNA, 26 bp, Homo sapiens
atggactccatcttgtgaagcaatgg

SEQ ID NO: 11859 - DNA, 26 bp, Homo sapiens
tggactccatcttgtgaagcaatggt

SEQ ID NO: 11860 - DNA, 26 bp, Homo sapiens
ggactccatcttgtgaagcaatggta

SEQ ID NO: 11861 - DNA, 26 bp, Homo sapiens
gactccatcttgtgaagcaatggtat

SEQ ID NO: 11862 - DNA, 26 bp, Homo sapiens
actccatcttgtgaagcaatggtatc

SEQ ID NO: 11863 - DNA, 26 bp, Homo sapiens
ctccatcttgtgaagcaatggtatct

SEQ ID NO: 11864 - DNA, 26 bp, Homo sapiens
tccatcttgtgaagcaatggtatctg

SEQ ID NO: 11865 - DNA, 26 bp, Homo sapiens
ccatcttgtgaagcaatggtatctgg

SEQ ID NO: 11866 - DNA, 26 bp, Homo sapiens
catcttgtgaagcaatggtatctggg

SEQ ID NO: 11867 - DNA, 26 bp, Homo sapiens
atcttgtgaagcaatggtatctgggt

SEQ ID NO: 11868 - DNA, 26 bp, Homo sapiens
tcttgtgaagcaatggtatctgggtt

SEQ ID NO: 11869 - DNA, 26 bp, Homo sapiens
cttgtgaagcaatggtatctgggtta

SEQ ID NO: 11870 - DNA, 26 bp, Homo sapiens
ttgtgaagcaatggtatctgggttac

SEQ ID NO: 11871 - DNA, 26 bp, Homo sapiens
tgtgaagcaatggtatctgggttaca

SEQ ID NO: 11872 - DNA, 26 bp, Homo sapiens
gtgaagcaatggtatctgggttacaa

SEQ ID NO: 11873 - DNA, 26 bp, Homo sapiens
tgaagcaatggtatctgggttacaat

SEQ ID NO: 11874 - DNA, 26 bp, Homo sapiens
gaagcaatggtatctgggttacaata

SEQ ID NO: 11875 - DNA, 26 bp, Homo sapiens
aagcaatggtatctgggttacaataa

SEQ ID NO: 11876 - DNA, 26 bp, Homo sapiens
agcaatggtatctgggttacaataaa

SEQ ID NO: 11877 - DNA, 26 bp, Homo sapiens
gcaatggtatctgggttacaataaaa

SEQ ID NO: 11878 - DNA, 26 bp, Homo sapiens
caatggtatctgggttacaataaaaa

SEQ ID NO: 11879 - DNA, 26 bp, Homo sapiens
aatggtatctgggttacaataaaaat

SEQ ID NO: 11880 - DNA, 26 bp, Homo sapiens
atggtatctgggttacaataaaaata

SEQ ID NO: 11881 - DNA, 26 bp, Homo sapiens
tggtatctgggttacaataaaaatat

SEQ ID NO: 11882 - DNA, 26 bp, Homo sapiens
ggtatctgggttacaataaaaatatc

SEQ ID NO: 11883 - DNA, 26 bp, Homo sapiens
gtatctgggttacaataaaaatatct

SEQ ID NO: 11884 - DNA, 26 bp, Homo sapiens
tatctgggttacaataaaaatatcta

SEQ ID NO: 11885 - DNA, 26 bp, Homo sapiens
atctgggttacaataaaaatatctat

SEQ ID NO: 11886 - DNA, 26 bp, Homo sapiens
tctgggttacaataaaaatatctatt

SEQ ID NO: 11887 - DNA, 26 bp, Homo sapiens
ctgggttacaataaaaatatctattg

SEQ ID NO: 11888 - DNA, 26 bp, Homo sapiens
tgggttacaataaaaatatctattgg

SEQ ID NO: 11889 - DNA, 26 bp, Homo sapiens
gggttacaataaaaatatctattgga

SEQ ID NO: 11890 - DNA, 26 bp, Homo sapiens
ggttacaataaaaatatctattggag

SEQ ID NO: 11891 - DNA, 26 bp, Homo sapiens
gttacaataaaaatatctattggaga

SEQ ID NO: 11892 - DNA, 26 bp, Homo sapiens
ttacaataaaaatatctattggagaa

SEQ ID NO: 11893 - DNA, 26 bp, Homo sapiens
tacaataaaaatatctattggagaag

SEQ ID NO: 11894 - DNA, 26 bp, Homo sapiens
acaataaaaatatctattggagaagt

SEQ ID NO: 11895 - DNA, 26 bp, Homo sapiens
caataaaaatatctattggagaagtg

SEQ ID NO: 11896 - DNA, 26 bp, Homo sapiens
aataaaaatatctattggagaagtgt

SEQ ID NO: 11897 - DNA, 26 bp, Homo sapiens
ataaaaatatctattggagaagtgta

SEQ ID NO: 11898 - DNA, 26 bp, Homo sapiens
taaaaatatctattggagaagtgtat

SEQ ID NO: 11899 - DNA, 26 bp, Homo sapiens
aaaaatatctattggagaagtgtatt

SEQ ID NO: 11900 - DNA, 26 bp, Homo sapiens
aaaatatctattggagaagtgtatta

SEQ ID NO: 11901 - DNA, 26 bp, Homo sapiens
aaatatctattggagaagtgtattaa

SEQ ID NO: 11902 - DNA, 26 bp, Homo sapiens
aatatctattggagaagtgtattaaa

SEQ ID NO: 11903 - DNA, 26 bp, Homo sapiens
atatctattggagaagtgtattaaaa

SEQ ID NO: 11904 - DNA, 26 bp, Homo sapiens
tatctattggagaagtgtattaaaac

SEQ ID NO: 11905 - DNA, 26 bp, Homo sapiens
atctattggagaagtgtattaaaact

SEQ ID NO: 11906 - DNA, 26 bp, Homo sapiens
tctattggagaagtgtattaaaactc

SEQ ID NO: 11907 - DNA, 26 bp, Homo sapiens
ctattggagaagtgtattaaaactct

SEQ ID NO: 11908 - DNA, 26 bp, Homo sapiens
tattggagaagtgtattaaaactctc

SEQ ID NO: 11909 - DNA, 26 bp, Homo sapiens
attggagaagtgtattaaaactctct

SEQ ID NO: 11910 - DNA, 26 bp, Homo sapiens
ttggagaagtgtattaaaactctctc

SEQ ID NO: 11911 - DNA, 26 bp, Homo sapiens
tggagaagtgtattaaaactctctct

SEQ ID NO: 11912 - DNA, 26 bp, Homo sapiens
ggagaagtgtattaaaactctctctc

SEQ ID NO: 11913 - DNA, 26 bp, Homo sapiens
gagaagtgtattaaaactctctctcg

SEQ ID NO: 11914 - DNA, 26 bp, Homo sapiens
agaagtgtattaaaactctctctcgt

SEQ ID NO: 11915 - DNA, 26 bp, Homo sapiens
gaagtgtattaaaactctctctcgtt

SEQ ID NO: 11916 - DNA, 26 bp, Homo sapiens
aagtgtattaaaactctctctcgttc

SEQ ID NO: 11917 - DNA, 26 bp, Homo sapiens
agtgtattaaaactctctctcgttct

SEQ ID NO: 11918 - DNA, 26 bp, Homo sapiens
gtgtattaaaactctctctcgttctt

SEQ ID NO: 11919 - DNA, 26 bp, Homo sapiens
tgtattaaaactctctctcgttcttg

SEQ ID NO: 11920 - DNA, 26 bp, Homo sapiens
gtattaaaactctctctcgttcttga

SEQ ID NO: 11921 - DNA, 26 bp, Homo sapiens
tattaaaactctctctcgttcttgag

SEQ ID NO: 11922 - DNA, 26 bp, Homo sapiens
attaaaactctctctcgttcttgagt

SEQ ID NO: 11923 - DNA, 26 bp, Homo sapiens
ttaaaactctctctcgttcttgagtt

SEQ ID NO: 11924 - DNA, 26 bp, Homo sapiens
taaaactctctctcgttcttgagttt

SEQ ID NO: 11925 - DNA, 26 bp, Homo sapiens
aaaactctctctcgttcttgagtttc

SEQ ID NO: 11926 - DNA, 26 bp, Homo sapiens
aaactctctctcgttcttgagtttct

SEQ ID NO: 11927 - DNA, 26 bp, Homo sapiens
aactctctctcgttcttgagtttctc

SEQ ID NO: 11928 - DNA, 26 bp, Homo sapiens
actctctctcgttcttgagtttctcc

SEQ ID NO: 11929 - DNA, 26 bp, Homo sapiens
ctctctctcgttcttgagtttctccc

SEQ ID NO: 11930 - DNA, 26 bp, Homo sapiens
tctctctcgttcttgagtttctccca

SEQ ID NO: 11931 - DNA, 26 bp, Homo sapiens
ctctctcgttcttgagtttctcccac

SEQ ID NO: 11932 - DNA, 26 bp, Homo sapiens
tctctcgttcttgagtttctcccaca

SEQ ID NO: 11933 - DNA, 26 bp, Homo sapiens
ctctcgttcttgagtttctcccacaa

SEQ ID NO: 11934 - DNA, 26 bp, Homo sapiens
tctcgttcttgagtttctcccacaag

SEQ ID NO: 11935 - DNA, 26 bp, Homo sapiens
ctcgttcttgagtttctcccacaaga

SEQ ID NO: 11936 - DNA, 26 bp, Homo sapiens
tcgttcttgagtttctcccacaagag

SEQ ID NO: 11937 - DNA, 26 bp, Homo sapiens
cgttcttgagtttctcccacaagaga

SEQ ID NO: 11938 - DNA, 26 bp, Homo sapiens
gttcttgagtttctcccacaagagag

SEQ ID NO: 11939 - DNA, 26 bp, Homo sapiens
ttcttgagtttctcccacaagagaga

SEQ ID NO: 11940 - DNA, 26 bp, Homo sapiens
tcttgagtttctcccacaagagagaa

SEQ ID NO: 11941 - DNA, 26 bp, Homo sapiens
cttgagtttctcccacaagagagaat

SEQ ID NO: 11942 - DNA, 26 bp, Homo sapiens
ttgagtttctcccacaagagagaatg

SEQ ID NO: 11943 - DNA, 26 bp, Homo sapiens
tgagtttctcccacaagagagaatgc

SEQ ID NO: 11944 - DNA, 26 bp, Homo sapiens
gagtttctcccacaagagagaatgct

SEQ ID NO: 11945 - DNA, 26 bp, Homo sapiens
agtttctcccacaagagagaatgctt

SEQ ID NO: 11946 - DNA, 26 bp, Homo sapiens
gtttctcccacaagagagaatgcttt

SEQ ID NO: 11947 - DNA, 26 bp, Homo sapiens
tttctcccacaagagagaatgcttta

SEQ ID NO: 11948 - DNA, 26 bp, Homo sapiens
ttctcccacaagagagaatgctttaa

SEQ ID NO: 11949 - DNA, 26 bp, Homo sapiens
tctcccacaagagagaatgctttaaa

SEQ ID NO: 11950 - DNA, 26 bp, Homo sapiens
ctcccacaagagagaatgctttaaag

SEQ ID NO: 11951 - DNA, 26 bp, Homo sapiens
tcccacaagagagaatgctttaaaga

SEQ ID NO: 11952 - DNA, 26 bp, Homo sapiens
cccacaagagagaatgctttaaagaa

SEQ ID NO: 11953 - DNA, 26 bp, Homo sapiens
ccacaagagagaatgctttaaagaaa

SEQ ID NO: 11954 - DNA, 26 bp, Homo sapiens
cacaagagagaatgctttaaagaaat

SEQ ID NO: 11955 - DNA, 26 bp, Homo sapiens
acaagagagaatgctttaaagaaata

SEQ ID NO: 11956 - DNA, 26 bp, Homo sapiens
caagagagaatgctttaaagaaatac

SEQ ID NO: 11957 - DNA, 26 bp, Homo sapiens
aagagagaatgctttaaagaaatacc

SEQ ID NO: 11958 - DNA, 26 bp, Homo sapiens
agagagaatgctttaaagaaatacct

SEQ ID NO: 11959 - DNA, 26 bp, Homo sapiens
gagagaatgctttaaagaaatacctg

SEQ ID NO: 11960 - DNA, 26 bp, Homo sapiens
agagaatgctttaaagaaatacctga

SEQ ID NO: 11961 - DNA, 26 bp, Homo sapiens
gagaatgctttaaagaaatacctgag

SEQ ID NO: 11962 - DNA, 26 bp, Homo sapiens
agaatgctttaaagaaatacctgagt

SEQ ID NO: 11963 - DNA, 26 bp, Homo sapiens
gaatgctttaaagaaatacctgagtg

SEQ ID NO: 11964 - DNA, 26 bp, Homo sapiens
aatgctttaaagaaatacctgagtga

SEQ ID NO: 11965 - DNA, 26 bp, Homo sapiens
atgctttaaagaaatacctgagtgac

SEQ ID NO: 11966 - DNA, 26 bp, Homo sapiens
tgctttaaagaaatacctgagtgact

SEQ ID NO: 11967 - DNA, 26 bp, Homo sapiens
gctttaaagaaatacctgagtgactg

SEQ ID NO: 11968 - DNA, 26 bp, Homo sapiens
ctttaaagaaatacctgagtgactga

SEQ ID NO: 11969 - DNA, 26 bp, Homo sapiens
tttaaagaaatacctgagtgactgat

SEQ ID NO: 11970 - DNA, 26 bp, Homo sapiens
ttaaagaaatacctgagtgactgatc

SEQ ID NO: 11971 - DNA, 26 bp, Homo sapiens
taaagaaatacctgagtgactgatcc

SEQ ID NO: 11972 - DNA, 26 bp, Homo sapiens
aaagaaatacctgagtgactgatcca

SEQ ID NO: 11973 - DNA, 26 bp, Homo sapiens
aagaaatacctgagtgactgatccag

SEQ ID NO: 11974 - DNA, 26 bp, Homo sapiens
agaaatacctgagtgactgatccagc

SEQ ID NO: 11975 - DNA, 26 bp, Homo sapiens
gaaatacctgagtgactgatccagcg

SEQ ID NO: 11976 - DNA, 26 bp, Homo sapiens
aaatacctgagtgactgatccagcgt

SEQ ID NO: 11977 - DNA, 26 bp, Homo sapiens
aatacctgagtgactgatccagcgtc

SEQ ID NO: 11978 - DNA, 26 bp, Homo sapiens
atacctgagtgactgatccagcgtca

SEQ ID NO: 11979 - DNA, 26 bp, Homo sapiens
tacctgagtgactgatccagcgtcat

SEQ ID NO: 11980 - DNA, 26 bp, Homo sapiens
acctgagtgactgatccagcgtcatt

SEQ ID NO: 11981 - DNA, 26 bp, Homo sapiens
cctgagtgactgatccagcgtcattc

SEQ ID NO: 11982 - DNA, 26 bp, Homo sapiens
ctgagtgactgatccagcgtcattcc

SEQ ID NO: 11983 - DNA, 26 bp, Homo sapiens
tgagtgactgatccagcgtcattcct

SEQ ID NO: 11984 - DNA, 26 bp, Homo sapiens
gagtgactgatccagcgtcattcctg

SEQ ID NO: 11985 - DNA, 26 bp, Homo sapiens
agtgactgatccagcgtcattcctgt

SEQ ID NO: 11986 - DNA, 26 bp, Homo sapiens
gtgactgatccagcgtcattcctgta

SEQ ID NO: 11987 - DNA, 26 bp, Homo sapiens
tgactgatccagcgtcattcctgtaa

SEQ ID NO: 11988 - DNA, 26 bp, Homo sapiens
gactgatccagcgtcattcctgtaaa

SEQ ID NO: 11989 - DNA, 26 bp, Homo sapiens
actgatccagcgtcattcctgtaaaa

SEQ ID NO: 11990 - DNA, 26 bp, Homo sapiens
ctgatccagcgtcattcctgtaaaat

SEQ ID NO: 11991 - DNA, 26 bp, Homo sapiens
tgatccagcgtcattcctgtaaaatc

SEQ ID NO: 11992 - DNA, 26 bp, Homo sapiens
gatccagcgtcattcctgtaaaatca

SEQ ID NO: 11993 - DNA, 26 bp, Homo sapiens
atccagcgtcattcctgtaaaatcaa

SEQ ID NO: 11994 - DNA, 26 bp, Homo sapiens
tccagcgtcattcctgtaaaatcaaa

SEQ ID NO: 11995 - DNA, 26 bp, Homo sapiens
ccagcgtcattcctgtaaaatcaaaa

SEQ ID NO: 11996 - DNA, 26 bp, Homo sapiens
cagcgtcattcctgtaaaatcaaaaa

SEQ ID NO: 11997 - DNA, 26 bp, Homo sapiens
agcgtcattcctgtaaaatcaaaaaa

SEQ ID NO: 11998 - DNA, 26 bp, Homo sapiens
gcgtcattcctgtaaaatcaaaaaac

SEQ ID NO: 11999 - DNA, 26 bp, Homo sapiens
cgtcattcctgtaaaatcaaaaaact

SEQ ID NO: 12000 - DNA, 26 bp, Homo sapiens
gtcattcctgtaaaatcaaaaaactt

SEQ ID NO: 12001 - DNA, 26 bp, Homo sapiens
tcattcctgtaaaatcaaaaaacttc

SEQ ID NO: 12002 - DNA, 26 bp, Homo sapiens
cattcctgtaaaatcaaaaaacttca

SEQ ID NO: 12003 - DNA, 26 bp, Homo sapiens
attcctgtaaaatcaaaaaacttcag

SEQ ID NO: 12004 - DNA, 26 bp, Homo sapiens
ttcctgtaaaatcaaaaaacttcaga

SEQ ID NO: 12005 - DNA, 26 bp, Homo sapiens
tcctgtaaaatcaaaaaacttcagat

SEQ ID NO: 12006 - DNA, 26 bp, Homo sapiens
cctgtaaaatcaaaaaacttcagata

SEQ ID NO: 12007 - DNA, 26 bp, Homo sapiens
ctgtaaaatcaaaaaacttcagatat

SEQ ID NO: 12008 - DNA, 26 bp, Homo sapiens
tgtaaaatcaaaaaacttcagatatt

SEQ ID NO: 12009 - DNA, 26 bp, Homo sapiens
gtaaaatcaaaaaacttcagatattc

SEQ ID NO: 12010 - DNA, 26 bp, Homo sapiens
taaaatcaaaaaacttcagatattct

SEQ ID NO: 12011 - DNA, 26 bp, Homo sapiens
aaaatcaaaaaacttcagatattctt

SEQ ID NO: 12012 - DNA, 26 bp, Homo sapiens
aaatcaaaaaacttcagatattcttc

SEQ ID NO: 12013 - DNA, 26 bp, Homo sapiens
aatcaaaaaacttcagatattcttct

SEQ ID NO: 12014 - DNA, 26 bp, Homo sapiens
atcaaaaaacttcagatattcttctg

SEQ ID NO: 12015 - DNA, 26 bp, Homo sapiens
tcaaaaaacttcagatattcttctgc

SEQ ID NO: 12016 - DNA, 26 bp, Homo sapiens
caaaaaacttcagatattcttctgca

SEQ ID NO: 12017 - DNA, 26 bp, Homo sapiens
aaaaaacttcagatattcttctgcaa

SEQ ID NO: 12018 - DNA, 26 bp, Homo sapiens
aaaaacttcagatattcttctgcaac

SEQ ID NO: 12019 - DNA, 26 bp, Homo sapiens
aaaacttcagatattcttctgcaact

SEQ ID NO: 12020 - DNA, 26 bp, Homo sapiens
aaacttcagatattcttctgcaacta

SEQ ID NO: 12021 - DNA, 26 bp, Homo sapiens
aacttcagatattcttctgcaactag

SEQ ID NO: 12022 - DNA, 26 bp, Homo sapiens
acttcagatattcttctgcaactagt

SEQ ID NO: 12023 - DNA, 26 bp, Homo sapiens
cttcagatattcttctgcaactagtt

SEQ ID NO: 12024 - DNA, 26 bp, Homo sapiens
ttcagatattcttctgcaactagttt

SEQ ID NO: 12025 - DNA, 26 bp, Homo sapiens
tcagatattcttctgcaactagtttg

SEQ ID NO: 12026 - DNA, 26 bp, Homo sapiens
cagatattcttctgcaactagtttgc

SEQ ID NO: 12027 - DNA, 26 bp, Homo sapiens
agatattcttctgcaactagtttgct

SEQ ID NO: 12028 - DNA, 26 bp, Homo sapiens
gatattcttctgcaactagtttgcta

SEQ ID NO: 12029 - DNA, 26 bp, Homo sapiens
atattcttctgcaactagtttgctaa

SEQ ID NO: 12030 - DNA, 26 bp, Homo sapiens
tattcttctgcaactagtttgctaaa

SEQ ID NO: 12031 - DNA, 26 bp, Homo sapiens
attcttctgcaactagtttgctaaat

SEQ ID NO: 12032 - DNA, 26 bp, Homo sapiens
ttcttctgcaactagtttgctaaatt

SEQ ID NO: 12033 - DNA, 26 bp, Homo sapiens
tcttctgcaactagtttgctaaattc

SEQ ID NO: 12034 - DNA, 26 bp, Homo sapiens
cttctgcaactagtttgctaaattcg

SEQ ID NO: 12035 - DNA, 26 bp, Homo sapiens
ttctgcaactagtttgctaaattcgt

SEQ ID NO: 12036 - DNA, 26 bp, Homo sapiens
tctgcaactagtttgctaaattcgtt

SEQ ID NO: 12037 - DNA, 26 bp, Homo sapiens
ctgcaactagtttgctaaattcgttg

SEQ ID NO: 12038 - DNA, 26 bp, Homo sapiens
tgcaactagtttgctaaattcgttgt

SEQ ID NO: 12039 - DNA, 26 bp, Homo sapiens
gcaactagtttgctaaattcgttgtt

SEQ ID NO: 12040 - DNA, 26 bp, Homo sapiens
caactagtttgctaaattcgttgttc

SEQ ID NO: 12041 - DNA, 26 bp, Homo sapiens
aactagtttgctaaattcgttgttct

SEQ ID NO: 12042 - DNA, 26 bp, Homo sapiens
actagtttgctaaattcgttgttctt

SEQ ID NO: 12043 - DNA, 26 bp, Homo sapiens
ctagtttgctaaattcgttgttcttg

SEQ ID NO: 12044 - DNA, 26 bp, Homo sapiens
tagtttgctaaattcgttgttcttgc

SEQ ID NO: 12045 - DNA, 26 bp, Homo sapiens
agtttgctaaattcgttgttcttgcc

SEQ ID NO: 12046 - DNA, 26 bp, Homo sapiens
gtttgctaaattcgttgttcttgcca

SEQ ID NO: 12047 - DNA, 26 bp, Homo sapiens
tttgctaaattcgttgttcttgccaa

SEQ ID NO: 12048 - DNA, 26 bp, Homo sapiens
ttgctaaattcgttgttcttgccaag

SEQ ID NO: 12049 - DNA, 26 bp, Homo sapiens
tgctaaattcgttgttcttgccaagg

SEQ ID NO: 12050 - DNA, 26 bp, Homo sapiens
gctaaattcgttgttcttgccaaggt

SEQ ID NO: 12051 - DNA, 26 bp, Homo sapiens
ctaaattcgttgttcttgccaaggtg

SEQ ID NO: 12052 - DNA, 26 bp, Homo sapiens
taaattcgttgttcttgccaaggtgt

SEQ ID NO: 12053 - DNA, 26 bp, Homo sapiens
aaattcgttgttcttgccaaggtgtt

SEQ ID NO: 12054 - DNA, 26 bp, Homo sapiens
aattcgttgttcttgccaaggtgttt

SEQ ID NO: 12055 - DNA, 26 bp, Homo sapiens
attcgttgttcttgccaaggtgtttt

SEQ ID NO: 12056 - DNA, 26 bp, Homo sapiens
ttcgttgttcttgccaaggtgttttg

SEQ ID NO: 12057 - DNA, 26 bp, Homo sapiens
tcgttgttcttgccaaggtgttttgc

SEQ ID NO: 12058 - DNA, 26 bp, Homo sapiens
cgttgttcttgccaaggtgttttgca

SEQ ID NO: 12059 - DNA, 26 bp, Homo sapiens
gttgttcttgccaaggtgttttgcaa

SEQ ID NO: 12060 - DNA, 26 bp, Homo sapiens
ttgttcttgccaaggtgttttgcaac

SEQ ID NO: 12061 - DNA, 26 bp, Homo sapiens
tgttcttgccaaggtgttttgcaaca

SEQ ID NO: 12062 - DNA, 26 bp, Homo sapiens
gttcttgccaaggtgttttgcaacat

SEQ ID NO: 12063 - DNA, 26 bp, Homo sapiens
ttcttgccaaggtgttttgcaacatc

SEQ ID NO: 12064 - DNA, 26 bp, Homo sapiens
tcttgccaaggtgttttgcaacatct

SEQ ID NO: 12065 - DNA, 26 bp, Homo sapiens
cttgccaaggtgttttgcaacatctg

SEQ ID NO: 12066 - DNA, 26 bp, Homo sapiens
ttgccaaggtgttttgcaacatctga

SEQ ID NO: 12067 - DNA, 26 bp, Homo sapiens
tgccaaggtgttttgcaacatctgat

SEQ ID NO: 12068 - DNA, 26 bp, Homo sapiens
gccaaggtgttttgcaacatctgatc

SEQ ID NO: 12069 - DNA, 26 bp, Homo sapiens
ccaaggtgttttgcaacatctgatct

SEQ ID NO: 12070 - DNA, 26 bp, Homo sapiens
caaggtgttttgcaacatctgatctt

SEQ ID NO: 12071 - DNA, 26 bp, Homo sapiens
aaggtgttttgcaacatctgatcttt

SEQ ID NO: 12072 - DNA, 26 bp, Homo sapiens
aggtgttttgcaacatctgatctttt

SEQ ID NO: 12073 - DNA, 26 bp, Homo sapiens
ggtgttttgcaacatctgatcttttg

SEQ ID NO: 12074 - DNA, 26 bp, Homo sapiens
gtgttttgcaacatctgatcttttga

SEQ ID NO: 12075 - DNA, 26 bp, Homo sapiens
tgttttgcaacatctgatcttttgaa

SEQ ID NO: 12076 - DNA, 26 bp, Homo sapiens
gttttgcaacatctgatcttttgaat

SEQ ID NO: 12077 - DNA, 26 bp, Homo sapiens
ttttgcaacatctgatcttttgaatc

SEQ ID NO: 12078 - DNA, 26 bp, Homo sapiens
tttgcaacatctgatcttttgaatct

SEQ ID NO: 12079 - DNA, 26 bp, Homo sapiens
ttgcaacatctgatcttttgaatctg

SEQ ID NO: 12080 - DNA, 26 bp, Homo sapiens
tgcaacatctgatcttttgaatctgt

SEQ ID NO: 12081 - DNA, 26 bp, Homo sapiens
gcaacatctgatcttttgaatctgtc

SEQ ID NO: 12082 - DNA, 26 bp, Homo sapiens
caacatctgatcttttgaatctgtcc

SEQ ID NO: 12083 - DNA, 26 bp, Homo sapiens
aacatctgatcttttgaatctgtcca

SEQ ID NO: 12084 - DNA, 26 bp, Homo sapiens
acatctgatcttttgaatctgtccag

SEQ ID NO: 12085 - DNA, 26 bp, Homo sapiens
catctgatcttttgaatctgtccagc

SEQ ID NO: 12086 - DNA, 26 bp, Homo sapiens
atctgatcttttgaatctgtccagct

SEQ ID NO: 12087 - DNA, 26 bp, Homo sapiens
tctgatcttttgaatctgtccagctg

SEQ ID NO: 12088 - DNA, 26 bp, Homo sapiens
ctgatcttttgaatctgtccagctga

SEQ ID NO: 12089 - DNA, 26 bp, Homo sapiens
tgatcttttgaatctgtccagctgat

SEQ ID NO: 12090 - DNA, 26 bp, Homo sapiens
gatcttttgaatctgtccagctgata

SEQ ID NO: 12091 - DNA, 26 bp, Homo sapiens
atcttttgaatctgtccagctgataa

SEQ ID NO: 12092 - DNA, 26 bp, Homo sapiens
tcttttgaatctgtccagctgataaa

SEQ ID NO: 12093 - DNA, 26 bp, Homo sapiens
cttttgaatctgtccagctgataaag

SEQ ID NO: 12094 - DNA, 26 bp, Homo sapiens
ttttgaatctgtccagctgataaagg

SEQ ID NO: 12095 - DNA, 26 bp, Homo sapiens
tttgaatctgtccagctgataaaggc

SEQ ID NO: 12096 - DNA, 26 bp, Homo sapiens
ttgaatctgtccagctgataaaggcg

SEQ ID NO: 12097 - DNA, 26 bp, Homo sapiens
tgaatctgtccagctgataaaggcgt

SEQ ID NO: 12098 - DNA, 26 bp, Homo sapiens
gaatctgtccagctgataaaggcgtt

SEQ ID NO: 12099 - DNA, 26 bp, Homo sapiens
aatctgtccagctgataaaggcgttt

SEQ ID NO: 12100 - DNA, 26 bp, Homo sapiens
atctgtccagctgataaaggcgtttg

SEQ ID NO: 12101 - DNA, 26 bp, Homo sapiens
tctgtccagctgataaaggcgtttgg

SEQ ID NO: 12102 - DNA, 26 bp, Homo sapiens
ctgtccagctgataaaggcgtttggc

SEQ ID NO: 12103 - DNA, 26 bp, Homo sapiens
tgtccagctgataaaggcgtttggcc

SEQ ID NO: 12104 - DNA, 26 bp, Homo sapiens
gtccagctgataaaggcgtttggcca

SEQ ID NO: 12105 - DNA, 26 bp, Homo sapiens
tccagctgataaaggcgtttggccaa

SEQ ID NO: 12106 - DNA, 26 bp, Homo sapiens
ccagctgataaaggcgtttggccaac

SEQ ID NO: 12107 - DNA, 26 bp, Homo sapiens
cagctgataaaggcgtttggccaacc

SEQ ID NO: 12108 - DNA, 26 bp, Homo sapiens
agctgataaaggcgtttggccaacct

SEQ ID NO: 12109 - DNA, 26 bp, Homo sapiens
gctgataaaggcgtttggccaacctt

SEQ ID NO: 12110 - DNA, 26 bp, Homo sapiens
ctgataaaggcgtttggccaaccttt

SEQ ID NO: 12111 - DNA, 26 bp, Homo sapiens
tgataaaggcgtttggccaacctttt

SEQ ID NO: 12112 - DNA, 26 bp, Homo sapiens
gataaaggcgtttggccaaccttttg

SEQ ID NO: 12113 - DNA, 26 bp, Homo sapiens
ataaaggcgtttggccaaccttttgg

SEQ ID NO: 12114 - DNA, 26 bp, Homo sapiens
taaaggcgtttggccaaccttttggc

SEQ ID NO: 12115 - DNA, 26 bp, Homo sapiens
aaaggcgtttggccaaccttttggct

SEQ ID NO: 12116 - DNA, 26 bp, Homo sapiens
aaggcgtttggccaaccttttggctg

SEQ ID NO: 12117 - DNA, 26 bp, Homo sapiens
aggcgtttggccaaccttttggctgc

SEQ ID NO: 12118 - DNA, 26 bp, Homo sapiens
ggcgtttggccaaccttttggctgct

SEQ ID NO: 12119 - DNA, 26 bp, Homo sapiens
gcgtttggccaaccttttggctgctt

SEQ ID NO: 12120 - DNA, 26 bp, Homo sapiens
cgtttggccaaccttttggctgcttc

SEQ ID NO: 12121 - DNA, 26 bp, Homo sapiens
gtttggccaaccttttggctgcttcc

SEQ ID NO: 12122 - DNA, 26 bp, Homo sapiens
tttggccaaccttttggctgcttcca

SEQ ID NO: 12123 - DNA, 26 bp, Homo sapiens
ttggccaaccttttggctgcttccac

SEQ ID NO: 12124 - DNA, 26 bp, Homo sapiens
tggccaaccttttggctgcttccaca

SEQ ID NO: 12125 - DNA, 26 bp, Homo sapiens
ggccaaccttttggctgcttccacat

SEQ ID NO: 12126 - DNA, 26 bp, Homo sapiens
gccaaccttttggctgcttccacatt

SEQ ID NO: 12127 - DNA, 26 bp, Homo sapiens
ccaaccttttggctgcttccacattg

SEQ ID NO: 12128 - DNA, 26 bp, Homo sapiens
caaccttttggctgcttccacattgc

SEQ ID NO: 12129 - DNA, 26 bp, Homo sapiens
aaccttttggctgcttccacattgct

SEQ ID NO: 12130 - DNA, 26 bp, Homo sapiens
accttttggctgcttccacattgctg

SEQ ID NO: 12131 - DNA, 26 bp, Homo sapiens
ccttttggctgcttccacattgctgc

SEQ ID NO: 12132 - DNA, 26 bp, Homo sapiens
cttttggctgcttccacattgctgct

SEQ ID NO: 12133 - DNA, 26 bp, Homo sapiens
ttttggctgcttccacattgctgctg

SEQ ID NO: 12134 - DNA, 26 bp, Homo sapiens
tttggctgcttccacattgctgctgg

SEQ ID NO: 12135 - DNA, 26 bp, Homo sapiens
ttggctgcttccacattgctgctggt

SEQ ID NO: 12136 - DNA, 26 bp, Homo sapiens
tggctgcttccacattgctgctggta

SEQ ID NO: 12137 - DNA, 26 bp, Homo sapiens
ggctgcttccacattgctgctggtac

SEQ ID NO: 12138 - DNA, 26 bp, Homo sapiens
gctgcttccacattgctgctggtacc

SEQ ID NO: 12139 - DNA, 26 bp, Homo sapiens
ctgcttccacattgctgctggtacca

SEQ ID NO: 12140 - DNA, 26 bp, Homo sapiens
tgcttccacattgctgctggtaccat

SEQ ID NO: 12141 - DNA, 26 bp, Homo sapiens
gcttccacattgctgctggtaccatt

SEQ ID NO: 12142 - DNA, 26 bp, Homo sapiens
cttccacattgctgctggtaccatta

SEQ ID NO: 12143 - DNA, 26 bp, Homo sapiens
ttccacattgctgctggtaccattac

SEQ ID NO: 12144 - DNA, 26 bp, Homo sapiens
tccacattgctgctggtaccattact

SEQ ID NO: 12145 - DNA, 26 bp, Homo sapiens
ccacattgctgctggtaccattactg

SEQ ID NO: 12146 - DNA, 26 bp, Homo sapiens
cacattgctgctggtaccattactga

SEQ ID NO: 12147 - DNA, 26 bp, Homo sapiens
acattgctgctggtaccattactgag

SEQ ID NO: 12148 - DNA, 26 bp, Homo sapiens
cattgctgctggtaccattactgaga

SEQ ID NO: 12149 - DNA, 26 bp, Homo sapiens
attgctgctggtaccattactgagat

SEQ ID NO: 12150 - DNA, 26 bp, Homo sapiens
ttgctgctggtaccattactgagatt

SEQ ID NO: 12151 - DNA, 26 bp, Homo sapiens
tgctgctggtaccattactgagattt

SEQ ID NO: 12152 - DNA, 26 bp, Homo sapiens
gctgctggtaccattactgagatttt

SEQ ID NO: 12153 - DNA, 26 bp, Homo sapiens
ctgctggtaccattactgagattttc

SEQ ID NO: 12154 - DNA, 26 bp, Homo sapiens
tgctggtaccattactgagattttct

SEQ ID NO: 12155 - DNA, 26 bp, Homo sapiens
gctggtaccattactgagattttctg

SEQ ID NO: 12156 - DNA, 26 bp, Homo sapiens
ctggtaccattactgagattttctgg

SEQ ID NO: 12157 - DNA, 26 bp, Homo sapiens
tggtaccattactgagattttctggg

SEQ ID NO: 12158 - DNA, 26 bp, Homo sapiens
ggtaccattactgagattttctgggg

SEQ ID NO: 12159 - DNA, 26 bp, Homo sapiens
gtaccattactgagattttctggggt

SEQ ID NO: 12160 - DNA, 26 bp, Homo sapiens
taccattactgagattttctggggtc

SEQ ID NO: 12161 - DNA, 26 bp, Homo sapiens
accattactgagattttctggggtct

SEQ ID NO: 12162 - DNA, 26 bp, Homo sapiens
ccattactgagattttctggggtctc

SEQ ID NO: 12163 - DNA, 26 bp, Homo sapiens
cattactgagattttctggggtctcc

SEQ ID NO: 12164 - DNA, 26 bp, Homo sapiens
attactgagattttctggggtctcct

SEQ ID NO: 12165 - DNA, 26 bp, Homo sapiens
ttactgagattttctggggtctcctt

SEQ ID NO: 12166 - DNA, 26 bp, Homo sapiens
tactgagattttctggggtctccttt

SEQ ID NO: 12167 - DNA, 26 bp, Homo sapiens
actgagattttctggggtctcctttt

SEQ ID NO: 12168 - DNA, 26 bp, Homo sapiens
ctgagattttctggggtctccttttc

SEQ ID NO: 12169 - DNA, 26 bp, Homo sapiens
tgagattttctggggtctccttttcc

SEQ ID NO: 12170 - DNA, 26 bp, Homo sapiens
gagattttctggggtctccttttcca

SEQ ID NO: 12171 - DNA, 26 bp, Homo sapiens
agattttctggggtctccttttccaa

SEQ ID NO: 12172 - DNA, 26 bp, Homo sapiens
gattttctggggtctccttttccaaa

SEQ ID NO: 12173 - DNA, 26 bp, Homo sapiens
attttctggggtctccttttccaaaa

SEQ ID NO: 12174 - DNA, 26 bp, Homo sapiens
ttttctggggtctccttttccaaaat

SEQ ID NO: 12175 - DNA, 26 bp, Homo sapiens
tttctggggtctccttttccaaaatt

SEQ ID NO: 12176 - DNA, 26 bp, Homo sapiens
ttctggggtctccttttccaaaattt

SEQ ID NO: 12177 - DNA, 26 bp, Homo sapiens
tctggggtctccttttccaaaatttc

SEQ ID NO: 12178 - DNA, 26 bp, Homo sapiens
ctggggtctccttttccaaaatttca

SEQ ID NO: 12179 - DNA, 26 bp, Homo sapiens
tggggtctccttttccaaaatttcag

SEQ ID NO: 12180 - DNA, 26 bp, Homo sapiens
ggggtctccttttccaaaatttcagt

SEQ ID NO: 12181 - DNA, 26 bp, Homo sapiens
gggtctccttttccaaaatttcagtg

SEQ ID NO: 12182 - DNA, 26 bp, Homo sapiens
ggtctccttttccaaaatttcagtgc

SEQ ID NO: 12183 - DNA, 26 bp, Homo sapiens
gtctccttttccaaaatttcagtgct

SEQ ID NO: 12184 - DNA, 26 bp, Homo sapiens
tctccttttccaaaatttcagtgctc

SEQ ID NO: 12185 - DNA, 26 bp, Homo sapiens
ctccttttccaaaatttcagtgctcc

SEQ ID NO: 12186 - DNA, 26 bp, Homo sapiens
tccttttccaaaatttcagtgctccc

SEQ ID NO: 12187 - DNA, 26 bp, Homo sapiens
ccttttccaaaatttcagtgctcccc

SEQ ID NO: 12188 - DNA, 26 bp, Homo sapiens
cttttccaaaatttcagtgctcccca

SEQ ID NO: 12189 - DNA, 26 bp, Homo sapiens
ttttccaaaatttcagtgctccccat

SEQ ID NO: 12190 - DNA, 26 bp, Homo sapiens
tttccaaaatttcagtgctccccatt

SEQ ID NO: 12191 - DNA, 26 bp, Homo sapiens
ttccaaaatttcagtgctccccattt

SEQ ID NO: 12192 - DNA, 26 bp, Homo sapiens
tccaaaatttcagtgctccccatttc

SEQ ID NO: 12193 - DNA, 26 bp, Homo sapiens
ccaaaatttcagtgctccccatttca

SEQ ID NO: 12194 - DNA, 26 bp, Homo sapiens
caaaatttcagtgctccccatttcag

SEQ ID NO: 12195 - DNA, 26 bp, Homo sapiens
aaaatttcagtgctccccatttcaga

SEQ ID NO: 12196 - DNA, 26 bp, Homo sapiens
aaatttcagtgctccccatttcagaa

SEQ ID NO: 12197 - DNA, 26 bp, Homo sapiens
aatttcagtgctccccatttcagaat

SEQ ID NO: 12198 - DNA, 26 bp, Homo sapiens
atttcagtgctccccatttcagaatg

SEQ ID NO: 12199 - DNA, 26 bp, Homo sapiens
tttcagtgctccccatttcagaatga

SEQ ID NO: 12200 - DNA, 26 bp, Homo sapiens
ttcagtgctccccatttcagaatgag

SEQ ID NO: 12201 - DNA, 26 bp, Homo sapiens
tcagtgctccccatttcagaatgagc

SEQ ID NO: 12202 - DNA, 26 bp, Homo sapiens
cagtgctccccatttcagaatgagct

SEQ ID NO: 12203 - DNA, 26 bp, Homo sapiens
agtgctccccatttcagaatgagctt

SEQ ID NO: 12204 - DNA, 26 bp, Homo sapiens
gtgctccccatttcagaatgagcttc

SEQ ID NO: 12205 - DNA, 26 bp, Homo sapiens
tgctccccatttcagaatgagcttct

SEQ ID NO: 12206 - DNA, 26 bp, Homo sapiens
gctccccatttcagaatgagcttcta

SEQ ID NO: 12207 - DNA, 26 bp, Homo sapiens
ctccccatttcagaatgagcttctag

SEQ ID NO: 12208 - DNA, 26 bp, Homo sapiens
tccccatttcagaatgagcttctagc

SEQ ID NO: 12209 - DNA, 26 bp, Homo sapiens
ccccatttcagaatgagcttctagcc

SEQ ID NO: 12210 - DNA, 26 bp, Homo sapiens
cccatttcagaatgagcttctagccg

SEQ ID NO: 12211 - DNA, 26 bp, Homo sapiens
ccatttcagaatgagcttctagccgt

SEQ ID NO: 12212 - DNA, 26 bp, Homo sapiens
catttcagaatgagcttctagccgtg

SEQ ID NO: 12213 - DNA, 26 bp, Homo sapiens
atttcagaatgagcttctagccgtgt

SEQ ID NO: 12214 - DNA, 26 bp, Homo sapiens
tttcagaatgagcttctagccgtgtt

SEQ ID NO: 12215 - DNA, 26 bp, Homo sapiens
ttcagaatgagcttctagccgtgttg

SEQ ID NO: 12216 - DNA, 26 bp, Homo sapiens
tcagaatgagcttctagccgtgttgt

SEQ ID NO: 12217 - DNA, 26 bp, Homo sapiens
cagaatgagcttctagccgtgttgtt

SEQ ID NO: 12218 - DNA, 26 bp, Homo sapiens
agaatgagcttctagccgtgttgttt

SEQ ID NO: 12219 - DNA, 26 bp, Homo sapiens
gaatgagcttctagccgtgttgtttt

SEQ ID NO: 12220 - DNA, 26 bp, Homo sapiens
aatgagcttctagccgtgttgttttc

SEQ ID NO: 12221 - DNA, 26 bp, Homo sapiens
atgagcttctagccgtgttgttttca

SEQ ID NO: 12222 - DNA, 26 bp, Homo sapiens
tgagcttctagccgtgttgttttcac

SEQ ID NO: 12223 - DNA, 26 bp, Homo sapiens
gagcttctagccgtgttgttttcacc

SEQ ID NO: 12224 - DNA, 26 bp, Homo sapiens
agcttctagccgtgttgttttcaccc

SEQ ID NO: 12225 - DNA, 26 bp, Homo sapiens
gcttctagccgtgttgttttcacccc

SEQ ID NO: 12226 - DNA, 26 bp, Homo sapiens
cttctagccgtgttgttttcacccca

SEQ ID NO: 12227 - DNA, 26 bp, Homo sapiens
ttctagccgtgttgttttcaccccag

SEQ ID NO: 12228 - DNA, 26 bp, Homo sapiens
tctagccgtgttgttttcaccccagc

SEQ ID NO: 12229 - DNA, 26 bp, Homo sapiens
ctagccgtgttgttttcaccccagca

SEQ ID NO: 12230 - DNA, 26 bp, Homo sapiens
tagccgtgttgttttcaccccagcat

SEQ ID NO: 12231 - DNA, 26 bp, Homo sapiens
agccgtgttgttttcaccccagcatt

SEQ ID NO: 12232 - DNA, 26 bp, Homo sapiens
gccgtgttgttttcaccccagcattg

SEQ ID NO: 12233 - DNA, 26 bp, Homo sapiens
ccgtgttgttttcaccccagcattgc

SEQ ID NO: 12234 - DNA, 26 bp, Homo sapiens
cgtgttgttttcaccccagcattgct

SEQ ID NO: 12235 - DNA, 26 bp, Homo sapiens
gtgttgttttcaccccagcattgctt

SEQ ID NO: 12236 - DNA, 26 bp, Homo sapiens
tgttgttttcaccccagcattgcttc

SEQ ID NO: 12237 - DNA, 26 bp, Homo sapiens
gttgttttcaccccagcattgcttcc

SEQ ID NO: 12238 - DNA, 26 bp, Homo sapiens
ttgttttcaccccagcattgcttccc

SEQ ID NO: 12239 - DNA, 26 bp, Homo sapiens
tgttttcaccccagcattgcttcccc

SEQ ID NO: 12240 - DNA, 26 bp, Homo sapiens
gttttcaccccagcattgcttcccca

SEQ ID NO: 12241 - DNA, 26 bp, Homo sapiens
ttttcaccccagcattgcttccccag

SEQ ID NO: 12242 - DNA, 26 bp, Homo sapiens
tttcaccccagcattgcttccccaga

SEQ ID NO: 12243 - DNA, 26 bp, Homo sapiens
ttcaccccagcattgcttccccagaa

SEQ ID NO: 12244 - DNA, 26 bp, Homo sapiens
tcaccccagcattgcttccccagaaa

SEQ ID NO: 12245 - DNA, 26 bp, Homo sapiens
caccccagcattgcttccccagaaag

SEQ ID NO: 12246 - DNA, 26 bp, Homo sapiens
accccagcattgcttccccagaaagc

SEQ ID NO: 12247 - DNA, 26 bp, Homo sapiens
ccccagcattgcttccccagaaagca

SEQ ID NO: 12248 - DNA, 26 bp, Homo sapiens
cccagcattgcttccccagaaagcaa

SEQ ID NO: 12249 - DNA, 26 bp, Homo sapiens
ccagcattgcttccccagaaagcaat

SEQ ID NO: 12250 - DNA, 26 bp, Homo sapiens
cagcattgcttccccagaaagcaatc

SEQ ID NO: 12251 - DNA, 26 bp, Homo sapiens
agcattgcttccccagaaagcaatct

SEQ ID NO: 12252 - DNA, 26 bp, Homo sapiens
gcattgcttccccagaaagcaatctc

SEQ ID NO: 12253 - DNA, 26 bp, Homo sapiens
cattgcttccccagaaagcaatctcc

SEQ ID NO: 12254 - DNA, 26 bp, Homo sapiens
attgcttccccagaaagcaatctccg

SEQ ID NO: 12255 - DNA, 26 bp, Homo sapiens
ttgcttccccagaaagcaatctccgg

SEQ ID NO: 12256 - DNA, 26 bp, Homo sapiens
tgcttccccagaaagcaatctccggg

SEQ ID NO: 12257 - DNA, 26 bp, Homo sapiens
gcttccccagaaagcaatctccgggg

SEQ ID NO: 12258 - DNA, 26 bp, Homo sapiens
cttccccagaaagcaatctccggggt

SEQ ID NO: 12259 - DNA, 26 bp, Homo sapiens
ttccccagaaagcaatctccggggtg

SEQ ID NO: 12260 - DNA, 26 bp, Homo sapiens
tccccagaaagcaatctccggggtgc

SEQ ID NO: 12261 - DNA, 26 bp, Homo sapiens
ccccagaaagcaatctccggggtgcc

SEQ ID NO: 12262 - DNA, 26 bp, Homo sapiens
cccagaaagcaatctccggggtgcct

SEQ ID NO: 12263 - DNA, 26 bp, Homo sapiens
ccagaaagcaatctccggggtgcctt

SEQ ID NO: 12264 - DNA, 26 bp, Homo sapiens
cagaaagcaatctccggggtgccttt

SEQ ID NO: 12265 - DNA, 26 bp, Homo sapiens
agaaagcaatctccggggtgcctttc

SEQ ID NO: 12266 - DNA, 26 bp, Homo sapiens
gaaagcaatctccggggtgcctttcg

SEQ ID NO: 12267 - DNA, 26 bp, Homo sapiens
aaagcaatctccggggtgcctttcgt

SEQ ID NO: 12268 - DNA, 26 bp, Homo sapiens
aagcaatctccggggtgcctttcgtg

SEQ ID NO: 12269 - DNA, 26 bp, Homo sapiens
agcaatctccggggtgcctttcgtgt

SEQ ID NO: 12270 - DNA, 26 bp, Homo sapiens
gcaatctccggggtgcctttcgtgta

SEQ ID NO: 12271 - DNA, 26 bp, Homo sapiens
caatctccggggtgcctttcgtgtag

SEQ ID NO: 12272 - DNA, 26 bp, Homo sapiens
aatctccggggtgcctttcgtgtaga

SEQ ID NO: 12273 - DNA, 26 bp, Homo sapiens
atctccggggtgcctttcgtgtagat

SEQ ID NO: 12274 - DNA, 26 bp, Homo sapiens
tctccggggtgcctttcgtgtagatg

SEQ ID NO: 12275 - DNA, 26 bp, Homo sapiens
ctccggggtgcctttcgtgtagatgg

SEQ ID NO: 12276 - DNA, 26 bp, Homo sapiens
tccggggtgcctttcgtgtagatgga

SEQ ID NO: 12277 - DNA, 26 bp, Homo sapiens
ccggggtgcctttcgtgtagatggag

SEQ ID NO: 12278 - DNA, 26 bp, Homo sapiens
cggggtgcctttcgtgtagatggagt

SEQ ID NO: 12279 - DNA, 26 bp, Homo sapiens
ggggtgcctttcgtgtagatggagtc

SEQ ID NO: 12280 - DNA, 26 bp, Homo sapiens
gggtgcctttcgtgtagatggagtcg

SEQ ID NO: 12281 - DNA, 26 bp, Homo sapiens
ggtgcctttcgtgtagatggagtcgc

SEQ ID NO: 12282 - DNA, 26 bp, Homo sapiens
gtgcctttcgtgtagatggagtcgct

SEQ ID NO: 12283 - DNA, 26 bp, Homo sapiens
tgcctttcgtgtagatggagtcgctg

SEQ ID NO: 12284 - DNA, 26 bp, Homo sapiens
gcctttcgtgtagatggagtcgctgg

SEQ ID NO: 12285 - DNA, 26 bp, Homo sapiens
cctttcgtgtagatggagtcgctggc

SEQ ID NO: 12286 - DNA, 26 bp, Homo sapiens
ctttcgtgtagatggagtcgctggca

SEQ ID NO: 12287 - DNA, 26 bp, Homo sapiens
tttcgtgtagatggagtcgctggcat

SEQ ID NO: 12288 - DNA, 26 bp, Homo sapiens
ttcgtgtagatggagtcgctggcatc

SEQ ID NO: 12289 - DNA, 26 bp, Homo sapiens
tcgtgtagatggagtcgctggcatca

SEQ ID NO: 12290 - DNA, 26 bp, Homo sapiens
cgtgtagatggagtcgctggcatcat

SEQ ID NO: 12291 - DNA, 26 bp, Homo sapiens
gtgtagatggagtcgctggcatcatt

SEQ ID NO: 12292 - DNA, 26 bp, Homo sapiens
tgtagatggagtcgctggcatcattc

SEQ ID NO: 12293 - DNA, 26 bp, Homo sapiens
gtagatggagtcgctggcatcattca

SEQ ID NO: 12294 - DNA, 26 bp, Homo sapiens
tagatggagtcgctggcatcattcag

SEQ ID NO: 12295 - DNA, 26 bp, Homo sapiens
agatggagtcgctggcatcattcagc

SEQ ID NO: 12296 - DNA, 26 bp, Homo sapiens
gatggagtcgctggcatcattcagcc

SEQ ID NO: 12297 - DNA, 26 bp, Homo sapiens
atggagtcgctggcatcattcagccc

SEQ ID NO: 12298 - DNA, 26 bp, Homo sapiens
tggagtcgctggcatcattcagccca

SEQ ID NO: 12299 - DNA, 26 bp, Homo sapiens
ggagtcgctggcatcattcagcccat

SEQ ID NO: 12300 - DNA, 26 bp, Homo sapiens
gagtcgctggcatcattcagcccatt

SEQ ID NO: 12301 - DNA, 26 bp, Homo sapiens
agtcgctggcatcattcagcccattg

SEQ ID NO: 12302 - DNA, 26 bp, Homo sapiens
gtcgctggcatcattcagcccattgg

SEQ ID NO: 12303 - DNA, 26 bp, Homo sapiens
tcgctggcatcattcagcccattggt

SEQ ID NO: 12304 - DNA, 26 bp, Homo sapiens
cgctggcatcattcagcccattggtg

SEQ ID NO: 12305 - DNA, 26 bp, Homo sapiens
gctggcatcattcagcccattggtga

SEQ ID NO: 12306 - DNA, 26 bp, Homo sapiens
ctggcatcattcagcccattggtgac

SEQ ID NO: 12307 - DNA, 26 bp, Homo sapiens
tggcatcattcagcccattggtgacg

SEQ ID NO: 12308 - DNA, 26 bp, Homo sapiens
ggcatcattcagcccattggtgacgc

SEQ ID NO: 12309 - DNA, 26 bp, Homo sapiens
gcatcattcagcccattggtgacgcc

SEQ ID NO: 12310 - DNA, 26 bp, Homo sapiens
catcattcagcccattggtgacgcca

SEQ ID NO: 12311 - DNA, 26 bp, Homo sapiens
atcattcagcccattggtgacgccac

SEQ ID NO: 12312 - DNA, 26 bp, Homo sapiens
tcattcagcccattggtgacgccact

SEQ ID NO: 12313 - DNA, 26 bp, Homo sapiens
cattcagcccattggtgacgccacta

SEQ ID NO: 12314 - DNA, 26 bp, Homo sapiens
attcagcccattggtgacgccactag

SEQ ID NO: 12315 - DNA, 26 bp, Homo sapiens
ttcagcccattggtgacgccactaga

SEQ ID NO: 12316 - DNA, 26 bp, Homo sapiens
tcagcccattggtgacgccactagaa

SEQ ID NO: 12317 - DNA, 26 bp, Homo sapiens
cagcccattggtgacgccactagaat

SEQ ID NO: 12318 - DNA, 26 bp, Homo sapiens
agcccattggtgacgccactagaata

SEQ ID NO: 12319 - DNA, 26 bp, Homo sapiens
gcccattggtgacgccactagaatag

SEQ ID NO: 12320 - DNA, 26 bp, Homo sapiens
cccattggtgacgccactagaatagc

SEQ ID NO: 12321 - DNA, 26 bp, Homo sapiens
ccattggtgacgccactagaatagcc

SEQ ID NO: 12322 - DNA, 26 bp, Homo sapiens
cattggtgacgccactagaatagccc

SEQ ID NO: 12323 - DNA, 26 bp, Homo sapiens
attggtgacgccactagaatagccca

SEQ ID NO: 12324 - DNA, 26 bp, Homo sapiens
ttggtgacgccactagaatagcccat

SEQ ID NO: 12325 - DNA, 26 bp, Homo sapiens
tggtgacgccactagaatagcccatc

SEQ ID NO: 12326 - DNA, 26 bp, Homo sapiens
ggtgacgccactagaatagcccatca

SEQ ID NO: 12327 - DNA, 26 bp, Homo sapiens
gtgacgccactagaatagcccatcac

SEQ ID NO: 12328 - DNA, 26 bp, Homo sapiens
tgacgccactagaatagcccatcacg

SEQ ID NO: 12329 - DNA, 26 bp, Homo sapiens
gacgccactagaatagcccatcacga

SEQ ID NO: 12330 - DNA, 26 bp, Homo sapiens
acgccactagaatagcccatcacgat

SEQ ID NO: 12331 - DNA, 26 bp, Homo sapiens
cgccactagaatagcccatcacgatg

SEQ ID NO: 12332 - DNA, 26 bp, Homo sapiens
gccactagaatagcccatcacgatgc

SEQ ID NO: 12333 - DNA, 26 bp, Homo sapiens
ccactagaatagcccatcacgatgcc

SEQ ID NO: 12334 - DNA, 26 bp, Homo sapiens
cactagaatagcccatcacgatgcca

SEQ ID NO: 12335 - DNA, 26 bp, Homo sapiens
actagaatagcccatcacgatgccac

SEQ ID NO: 12336 - DNA, 26 bp, Homo sapiens
ctagaatagcccatcacgatgccacc

SEQ ID NO: 12337 - DNA, 26 bp, Homo sapiens
tagaatagcccatcacgatgccacca

SEQ ID NO: 12338 - DNA, 26 bp, Homo sapiens
agaatagcccatcacgatgccaccat

SEQ ID NO: 12339 - DNA, 26 bp, Homo sapiens
gaatagcccatcacgatgccaccatc

SEQ ID NO: 12340 - DNA, 26 bp, Homo sapiens
aatagcccatcacgatgccaccatct

SEQ ID NO: 12341 - DNA, 26 bp, Homo sapiens
atagcccatcacgatgccaccatctg

SEQ ID NO: 12342 - DNA, 26 bp, Homo sapiens
tagcccatcacgatgccaccatctgc

SEQ ID NO: 12343 - DNA, 26 bp, Homo sapiens
agcccatcacgatgccaccatctgca

SEQ ID NO: 12344 - DNA, 26 bp, Homo sapiens
gcccatcacgatgccaccatctgcag

SEQ ID NO: 12345 - DNA, 26 bp, Homo sapiens
cccatcacgatgccaccatctgcaga

SEQ ID NO: 12346 - DNA, 26 bp, Homo sapiens
ccatcacgatgccaccatctgcagac

SEQ ID NO: 12347 - DNA, 26 bp, Homo sapiens
catcacgatgccaccatctgcagaca

SEQ ID NO: 12348 - DNA, 26 bp, Homo sapiens
atcacgatgccaccatctgcagacac

SEQ ID NO: 12349 - DNA, 26 bp, Homo sapiens
tcacgatgccaccatctgcagacaca

SEQ ID NO: 12350 - DNA, 26 bp, Homo sapiens
cacgatgccaccatctgcagacacac

SEQ ID NO: 12351 - DNA, 26 bp, Homo sapiens
acgatgccaccatctgcagacacact

SEQ ID NO: 12352 - DNA, 26 bp, Homo sapiens
cgatgccaccatctgcagacacactc

SEQ ID NO: 12353 - DNA, 26 bp, Homo sapiens
gatgccaccatctgcagacacactca

SEQ ID NO: 12354 - DNA, 26 bp, Homo sapiens
atgccaccatctgcagacacactcag

SEQ ID NO: 12355 - DNA, 26 bp, Homo sapiens
tgccaccatctgcagacacactcagg

SEQ ID NO: 12356 - DNA, 26 bp, Homo sapiens
gccaccatctgcagacacactcagga

SEQ ID NO: 12357 - DNA, 26 bp, Homo sapiens
ccaccatctgcagacacactcaggat

SEQ ID NO: 12358 - DNA, 26 bp, Homo sapiens
caccatctgcagacacactcaggata

SEQ ID NO: 12359 - DNA, 26 bp, Homo sapiens
accatctgcagacacactcaggatat

SEQ ID NO: 12360 - DNA, 26 bp, Homo sapiens
ccatctgcagacacactcaggatatc

SEQ ID NO: 12361 - DNA, 26 bp, Homo sapiens
catctgcagacacactcaggatatcc

SEQ ID NO: 12362 - DNA, 26 bp, Homo sapiens
atctgcagacacactcaggatatcct

SEQ ID NO: 12363 - DNA, 26 bp, Homo sapiens
tctgcagacacactcaggatatcctg

SEQ ID NO: 12364 - DNA, 26 bp, Homo sapiens
ctgcagacacactcaggatatcctga

SEQ ID NO: 12365 - DNA, 26 bp, Homo sapiens
tgcagacacactcaggatatcctgat

SEQ ID NO: 12366 - DNA, 26 bp, Homo sapiens
gcagacacactcaggatatcctgatg

SEQ ID NO: 12367 - DNA, 26 bp, Homo sapiens
cagacacactcaggatatcctgatgt

SEQ ID NO: 12368 - DNA, 26 bp, Homo sapiens
agacacactcaggatatcctgatgtc

SEQ ID NO: 12369 - DNA, 26 bp, Homo sapiens
gacacactcaggatatcctgatgtcc

SEQ ID NO: 12370 - DNA, 26 bp, Homo sapiens
acacactcaggatatcctgatgtcct

SEQ ID NO: 12371 - DNA, 26 bp, Homo sapiens
cacactcaggatatcctgatgtcctc

SEQ ID NO: 12372 - DNA, 26 bp, Homo sapiens
acactcaggatatcctgatgtcctcc

SEQ ID NO: 12373 - DNA, 26 bp, Homo sapiens
cactcaggatatcctgatgtcctccc

SEQ ID NO: 12374 - DNA, 26 bp, Homo sapiens
actcaggatatcctgatgtcctcccc

SEQ ID NO: 12375 - DNA, 26 bp, Homo sapiens
ctcaggatatcctgatgtcctccccc

SEQ ID NO: 12376 - DNA, 26 bp, Homo sapiens
tcaggatatcctgatgtcctccccct

SEQ ID NO: 12377 - DNA, 26 bp, Homo sapiens
caggatatcctgatgtcctccccctg

SEQ ID NO: 12378 - DNA, 26 bp, Homo sapiens
aggatatcctgatgtcctccccctga

SEQ ID NO: 12379 - DNA, 26 bp, Homo sapiens
ggatatcctgatgtcctccccctgat

SEQ ID NO: 12380 - DNA, 26 bp, Homo sapiens
gatatcctgatgtcctccccctgatg

SEQ ID NO: 12381 - DNA, 26 bp, Homo sapiens
atatcctgatgtcctccccctgatgt

SEQ ID NO: 12382 - DNA, 26 bp, Homo sapiens
tatcctgatgtcctccccctgatgtc

SEQ ID NO: 12383 - DNA, 26 bp, Homo sapiens
atcctgatgtcctccccctgatgtcc

SEQ ID NO: 12384 - DNA, 26 bp, Homo sapiens
tcctgatgtcctccccctgatgtcct

SEQ ID NO: 12385 - DNA, 26 bp, Homo sapiens
cctgatgtcctccccctgatgtcctc

SEQ ID NO: 12386 - DNA, 26 bp, Homo sapiens
ctgatgtcctccccctgatgtcctct

SEQ ID NO: 12387 - DNA, 26 bp, Homo sapiens
tgatgtcctccccctgatgtcctctc

SEQ ID NO: 12388 - DNA, 26 bp, Homo sapiens
gatgtcctccccctgatgtcctctcc

SEQ ID NO: 12389 - DNA, 26 bp, Homo sapiens
atgtcctccccctgatgtcctctcca

SEQ ID NO: 12390 - DNA, 26 bp, Homo sapiens
tgtcctccccctgatgtcctctccaa

SEQ ID NO: 12391 - DNA, 26 bp, Homo sapiens
gtcctccccctgatgtcctctccaag

SEQ ID NO: 12392 - DNA, 26 bp, Homo sapiens
tcctccccctgatgtcctctccaaga

SEQ ID NO: 12393 - DNA, 26 bp, Homo sapiens
cctccccctgatgtcctctccaagaa

SEQ ID NO: 12394 - DNA, 26 bp, Homo sapiens
ctccccctgatgtcctctccaagaac

SEQ ID NO: 12395 - DNA, 26 bp, Homo sapiens
tccccctgatgtcctctccaagaact

SEQ ID NO: 12396 - DNA, 26 bp, Homo sapiens
ccccctgatgtcctctccaagaactg

SEQ ID NO: 12397 - DNA, 26 bp, Homo sapiens
cccctgatgtcctctccaagaactga

SEQ ID NO: 12398 - DNA, 26 bp, Homo sapiens
ccctgatgtcctctccaagaactgac

SEQ ID NO: 12399 - DNA, 26 bp, Homo sapiens
cctgatgtcctctccaagaactgacc

SEQ ID NO: 12400 - DNA, 26 bp, Homo sapiens
ctgatgtcctctccaagaactgacca

SEQ ID NO: 12401 - DNA, 26 bp, Homo sapiens
tgatgtcctctccaagaactgaccac

SEQ ID NO: 12402 - DNA, 26 bp, Homo sapiens
gatgtcctctccaagaactgaccacc

SEQ ID NO: 12403 - DNA, 26 bp, Homo sapiens
atgtcctctccaagaactgaccacct

SEQ ID NO: 12404 - DNA, 26 bp, Homo sapiens
tgtcctctccaagaactgaccacctt

SEQ ID NO: 12405 - DNA, 26 bp, Homo sapiens
gtcctctccaagaactgaccaccttc

SEQ ID NO: 12406 - DNA, 26 bp, Homo sapiens
tcctctccaagaactgaccaccttct

SEQ ID NO: 12407 - DNA, 26 bp, Homo sapiens
cctctccaagaactgaccaccttctt

SEQ ID NO: 12408 - DNA, 26 bp, Homo sapiens
ctctccaagaactgaccaccttcttt

SEQ ID NO: 12409 - DNA, 26 bp, Homo sapiens
tctccaagaactgaccaccttcttta

SEQ ID NO: 12410 - DNA, 26 bp, Homo sapiens
ctccaagaactgaccaccttctttaa

SEQ ID NO: 12411 - DNA, 26 bp, Homo sapiens
tccaagaactgaccaccttctttaat

SEQ ID NO: 12412 - DNA, 26 bp, Homo sapiens
ccaagaactgaccaccttctttaatg

SEQ ID NO: 12413 - DNA, 26 bp, Homo sapiens
caagaactgaccaccttctttaatgc

SEQ ID NO: 12414 - DNA, 26 bp, Homo sapiens
aagaactgaccaccttctttaatgcg

SEQ ID NO: 12415 - DNA, 26 bp, Homo sapiens
agaactgaccaccttctttaatgcgc

SEQ ID NO: 12416 - DNA, 26 bp, Homo sapiens
gaactgaccaccttctttaatgcgct

SEQ ID NO: 12417 - DNA, 26 bp, Homo sapiens
aactgaccaccttctttaatgcgctg

SEQ ID NO: 12418 - DNA, 26 bp, Homo sapiens
actgaccaccttctttaatgcgctgt

SEQ ID NO: 12419 - DNA, 26 bp, Homo sapiens
ctgaccaccttctttaatgcgctgtt

SEQ ID NO: 12420 - DNA, 26 bp, Homo sapiens
tgaccaccttctttaatgcgctgttg

SEQ ID NO: 12421 - DNA, 26 bp, Homo sapiens
gaccaccttctttaatgcgctgttgt

SEQ ID NO: 12422 - DNA, 26 bp, Homo sapiens
accaccttctttaatgcgctgttgta

SEQ ID NO: 12423 - DNA, 26 bp, Homo sapiens
ccaccttctttaatgcgctgttgtat

SEQ ID NO: 12424 - DNA, 26 bp, Homo sapiens
caccttctttaatgcgctgttgtatc

SEQ ID NO: 12425 - DNA, 26 bp, Homo sapiens
accttctttaatgcgctgttgtatca

SEQ ID NO: 12426 - DNA, 26 bp, Homo sapiens
ccttctttaatgcgctgttgtatcat

SEQ ID NO: 12427 - DNA, 26 bp, Homo sapiens
cttctttaatgcgctgttgtatcatt

SEQ ID NO: 12428 - DNA, 26 bp, Homo sapiens
ttctttaatgcgctgttgtatcattg

SEQ ID NO: 12429 - DNA, 26 bp, Homo sapiens
tctttaatgcgctgttgtatcattgg

SEQ ID NO: 12430 - DNA, 26 bp, Homo sapiens
ctttaatgcgctgttgtatcattgga

SEQ ID NO: 12431 - DNA, 26 bp, Homo sapiens
tttaatgcgctgttgtatcattggag

SEQ ID NO: 12432 - DNA, 26 bp, Homo sapiens
ttaatgcgctgttgtatcattggagt

SEQ ID NO: 12433 - DNA, 26 bp, Homo sapiens
taatgcgctgttgtatcattggagtg

SEQ ID NO: 12434 - DNA, 26 bp, Homo sapiens
aatgcgctgttgtatcattggagtga

SEQ ID NO: 12435 - DNA, 26 bp, Homo sapiens
atgcgctgttgtatcattggagtgag

SEQ ID NO: 12436 - DNA, 26 bp, Homo sapiens
tgcgctgttgtatcattggagtgagg

SEQ ID NO: 12437 - DNA, 26 bp, Homo sapiens
gcgctgttgtatcattggagtgaggg

SEQ ID NO: 12438 - DNA, 26 bp, Homo sapiens
cgctgttgtatcattggagtgagggg

SEQ ID NO: 12439 - DNA, 26 bp, Homo sapiens
gctgttgtatcattggagtgaggggc

SEQ ID NO: 12440 - DNA, 26 bp, Homo sapiens
ctgttgtatcattggagtgaggggca

SEQ ID NO: 12441 - DNA, 26 bp, Homo sapiens
tgttgtatcattggagtgaggggcat

SEQ ID NO: 12442 - DNA, 26 bp, Homo sapiens
gttgtatcattggagtgaggggcatt

SEQ ID NO: 12443 - DNA, 26 bp, Homo sapiens
ttgtatcattggagtgaggggcattt

SEQ ID NO: 12444 - DNA, 26 bp, Homo sapiens
tgtatcattggagtgaggggcatttc

SEQ ID NO: 12445 - DNA, 26 bp, Homo sapiens
gtatcattggagtgaggggcatttca

SEQ ID NO: 12446 - DNA, 26 bp, Homo sapiens
tatcattggagtgaggggcatttcaa

SEQ ID NO: 12447 - DNA, 26 bp, Homo sapiens
atcattggagtgaggggcatttcaaa

SEQ ID NO: 12448 - DNA, 26 bp, Homo sapiens
tcattggagtgaggggcatttcaaag

SEQ ID NO: 12449 - DNA, 26 bp, Homo sapiens
cattggagtgaggggcatttcaaagc

SEQ ID NO: 12450 - DNA, 26 bp, Homo sapiens
attggagtgaggggcatttcaaagct

SEQ ID NO: 12451 - DNA, 26 bp, Homo sapiens
ttggagtgaggggcatttcaaagcta

SEQ ID NO: 12452 - DNA, 26 bp, Homo sapiens
tggagtgaggggcatttcaaagctaa

SEQ ID NO: 12453 - DNA, 26 bp, Homo sapiens
ggagtgaggggcatttcaaagctaaa

SEQ ID NO: 12454 - DNA, 26 bp, Homo sapiens
gagtgaggggcatttcaaagctaaaa

SEQ ID NO: 12455 - DNA, 26 bp, Homo sapiens
agtgaggggcatttcaaagctaaaat

SEQ ID NO: 12456 - DNA, 26 bp, Homo sapiens
gtgaggggcatttcaaagctaaaata

SEQ ID NO: 12457 - DNA, 26 bp, Homo sapiens
tgaggggcatttcaaagctaaaatag

SEQ ID NO: 12458 - DNA, 26 bp, Homo sapiens
gaggggcatttcaaagctaaaatagc

SEQ ID NO: 12459 - DNA, 26 bp, Homo sapiens
aggggcatttcaaagctaaaatagct

SEQ ID NO: 12460 - DNA, 26 bp, Homo sapiens
ggggcatttcaaagctaaaatagcta

SEQ ID NO: 12461 - DNA, 26 bp, Homo sapiens
gggcatttcaaagctaaaatagctat

SEQ ID NO: 12462 - DNA, 26 bp, Homo sapiens
ggcatttcaaagctaaaatagctatc

SEQ ID NO: 12463 - DNA, 26 bp, Homo sapiens
gcatttcaaagctaaaatagctatca

SEQ ID NO: 12464 - DNA, 26 bp, Homo sapiens
catttcaaagctaaaatagctatcag

SEQ ID NO: 12465 - DNA, 26 bp, Homo sapiens
atttcaaagctaaaatagctatcagg

SEQ ID NO: 12466 - DNA, 26 bp, Homo sapiens
tttcaaagctaaaatagctatcaggc

SEQ ID NO: 12467 - DNA, 26 bp, Homo sapiens
ttcaaagctaaaatagctatcaggct

SEQ ID NO: 12468 - DNA, 26 bp, Homo sapiens
tcaaagctaaaatagctatcaggctc

SEQ ID NO: 12469 - DNA, 26 bp, Homo sapiens
caaagctaaaatagctatcaggctct

SEQ ID NO: 12470 - DNA, 26 bp, Homo sapiens
aaagctaaaatagctatcaggctctg

SEQ ID NO: 12471 - DNA, 26 bp, Homo sapiens
aagctaaaatagctatcaggctctga

SEQ ID NO: 12472 - DNA, 26 bp, Homo sapiens
agctaaaatagctatcaggctctgag

SEQ ID NO: 12473 - DNA, 26 bp, Homo sapiens
gctaaaatagctatcaggctctgagt

SEQ ID NO: 12474 - DNA, 26 bp, Homo sapiens
ctaaaatagctatcaggctctgagta

SEQ ID NO: 12475 - DNA, 26 bp, Homo sapiens
taaaatagctatcaggctctgagtat

SEQ ID NO: 12476 - DNA, 26 bp, Homo sapiens
aaaatagctatcaggctctgagtata

SEQ ID NO: 12477 - DNA, 26 bp, Homo sapiens
aaatagctatcaggctctgagtataa

SEQ ID NO: 12478 - DNA, 26 bp, Homo sapiens
aatagctatcaggctctgagtataat

SEQ ID NO: 12479 - DNA, 26 bp, Homo sapiens
atagctatcaggctctgagtataatg

SEQ ID NO: 12480 - DNA, 26 bp, Homo sapiens
tagctatcaggctctgagtataatgt

SEQ ID NO: 12481 - DNA, 26 bp, Homo sapiens
agctatcaggctctgagtataatgtc

SEQ ID NO: 12482 - DNA, 26 bp, Homo sapiens
gctatcaggctctgagtataatgtct

SEQ ID NO: 12483 - DNA, 26 bp, Homo sapiens
ctatcaggctctgagtataatgtctc

SEQ ID NO: 12484 - DNA, 26 bp, Homo sapiens
tatcaggctctgagtataatgtctcc

SEQ ID NO: 12485 - DNA, 26 bp, Homo sapiens
atcaggctctgagtataatgtctcca

SEQ ID NO: 12486 - DNA, 26 bp, Homo sapiens
tcaggctctgagtataatgtctccag

SEQ ID NO: 12487 - DNA, 26 bp, Homo sapiens
caggctctgagtataatgtctccagg

SEQ ID NO: 12488 - DNA, 26 bp, Homo sapiens
aggctctgagtataatgtctccaggg

SEQ ID NO: 12489 - DNA, 26 bp, Homo sapiens
ggctctgagtataatgtctccaggga

SEQ ID NO: 12490 - DNA, 26 bp, Homo sapiens
gctctgagtataatgtctccagggac

SEQ ID NO: 12491 - DNA, 26 bp, Homo sapiens
ctctgagtataatgtctccagggact

SEQ ID NO: 12492 - DNA, 26 bp, Homo sapiens
tctgagtataatgtctccagggactc

SEQ ID NO: 12493 - DNA, 26 bp, Homo sapiens
ctgagtataatgtctccagggactct

SEQ ID NO: 12494 - DNA, 26 bp, Homo sapiens
tgagtataatgtctccagggactctg

SEQ ID NO: 12495 - DNA, 26 bp, Homo sapiens
gagtataatgtctccagggactctgc

SEQ ID NO: 12496 - DNA, 26 bp, Homo sapiens
agtataatgtctccagggactctgca

SEQ ID NO: 12497 - DNA, 26 bp, Homo sapiens
gtataatgtctccagggactctgcac

SEQ ID NO: 12498 - DNA, 26 bp, Homo sapiens
tataatgtctccagggactctgcact

SEQ ID NO: 12499 - DNA, 26 bp, Homo sapiens
ataatgtctccagggactctgcactg

SEQ ID NO: 12500 - DNA, 26 bp, Homo sapiens
taatgtctccagggactctgcactgt

SEQ ID NO: 12501 - DNA, 26 bp, Homo sapiens
aatgtctccagggactctgcactgta

SEQ ID NO: 12502 - DNA, 26 bp, Homo sapiens
atgtctccagggactctgcactgtag

SEQ ID NO: 12503 - DNA, 26 bp, Homo sapiens
tgtctccagggactctgcactgtagt

SEQ ID NO: 12504 - DNA, 26 bp, Homo sapiens
gtctccagggactctgcactgtagta

SEQ ID NO: 12505 - DNA, 26 bp, Homo sapiens
tctccagggactctgcactgtagtat

SEQ ID NO: 12506 - DNA, 26 bp, Homo sapiens
ctccagggactctgcactgtagtata

SEQ ID NO: 12507 - DNA, 26 bp, Homo sapiens
tccagggactctgcactgtagtataa

SEQ ID NO: 12508 - DNA, 26 bp, Homo sapiens
ccagggactctgcactgtagtataaa

SEQ ID NO: 12509 - DNA, 26 bp, Homo sapiens
cagggactctgcactgtagtataaag

SEQ ID NO: 12510 - DNA, 26 bp, Homo sapiens
agggactctgcactgtagtataaaga

SEQ ID NO: 12511 - DNA, 26 bp, Homo sapiens
gggactctgcactgtagtataaagaa

SEQ ID NO: 12512 - DNA, 26 bp, Homo sapiens
ggactctgcactgtagtataaagaag

SEQ ID NO: 12513 - DNA, 26 bp, Homo sapiens
gactctgcactgtagtataaagaagt

SEQ ID NO: 12514 - DNA, 26 bp, Homo sapiens
actctgcactgtagtataaagaagtg

SEQ ID NO: 12515 - DNA, 26 bp, Homo sapiens
ctctgcactgtagtataaagaagtgt

SEQ ID NO: 12516 - DNA, 26 bp, Homo sapiens
tctgcactgtagtataaagaagtgtt

SEQ ID NO: 12517 - DNA, 26 bp, Homo sapiens
ctgcactgtagtataaagaagtgttg

SEQ ID NO: 12518 - DNA, 26 bp, Homo sapiens
tgcactgtagtataaagaagtgttgt

SEQ ID NO: 12519 - DNA, 26 bp, Homo sapiens
gcactgtagtataaagaagtgttgtc

SEQ ID NO: 12520 - DNA, 26 bp, Homo sapiens
cactgtagtataaagaagtgttgtcc

SEQ ID NO: 12521 - DNA, 26 bp, Homo sapiens
actgtagtataaagaagtgttgtcca

SEQ ID NO: 12522 - DNA, 26 bp, Homo sapiens
ctgtagtataaagaagtgttgtccaa

SEQ ID NO: 12523 - DNA, 26 bp, Homo sapiens
tgtagtataaagaagtgttgtccaaa

SEQ ID NO: 12524 - DNA, 26 bp, Homo sapiens
gtagtataaagaagtgttgtccaaaa

SEQ ID NO: 12525 - DNA, 26 bp, Homo sapiens
tagtataaagaagtgttgtccaaaat

SEQ ID NO: 12526 - DNA, 26 bp, Homo sapiens
agtataaagaagtgttgtccaaaatg

SEQ ID NO: 12527 - DNA, 26 bp, Homo sapiens
gtataaagaagtgttgtccaaaatgg

SEQ ID NO: 12528 - DNA, 26 bp, Homo sapiens
tataaagaagtgttgtccaaaatggt

SEQ ID NO: 12529 - DNA, 26 bp, Homo sapiens
ataaagaagtgttgtccaaaatggtt

SEQ ID NO: 12530 - DNA, 26 bp, Homo sapiens
taaagaagtgttgtccaaaatggttt

SEQ ID NO: 12531 - DNA, 26 bp, Homo sapiens
aaagaagtgttgtccaaaatggtttc

SEQ ID NO: 12532 - DNA, 26 bp, Homo sapiens
aagaagtgttgtccaaaatggtttca

SEQ ID NO: 12533 - DNA, 26 bp, Homo sapiens
agaagtgttgtccaaaatggtttcaa

SEQ ID NO: 12534 - DNA, 26 bp, Homo sapiens
gaagtgttgtccaaaatggtttcaaa

SEQ ID NO: 12535 - DNA, 26 bp, Homo sapiens
aagtgttgtccaaaatggtttcaaac

SEQ ID NO: 12536 - DNA, 26 bp, Homo sapiens
agtgttgtccaaaatggtttcaaact

SEQ ID NO: 12537 - DNA, 26 bp, Homo sapiens
gtgttgtccaaaatggtttcaaactg

SEQ ID NO: 12538 - DNA, 26 bp, Homo sapiens
tgttgtccaaaatggtttcaaactgg

SEQ ID NO: 12539 - DNA, 26 bp, Homo sapiens
gttgtccaaaatggtttcaaactggg

SEQ ID NO: 12540 - DNA, 26 bp, Homo sapiens
ttgtccaaaatggtttcaaactggga

SEQ ID NO: 12541 - DNA, 26 bp, Homo sapiens
tgtccaaaatggtttcaaactgggag

SEQ ID NO: 12542 - DNA, 26 bp, Homo sapiens
gtccaaaatggtttcaaactgggagc

SEQ ID NO: 12543 - DNA, 26 bp, Homo sapiens
tccaaaatggtttcaaactgggagct

SEQ ID NO: 12544 - DNA, 26 bp, Homo sapiens
ccaaaatggtttcaaactgggagctg

SEQ ID NO: 12545 - DNA, 26 bp, Homo sapiens
caaaatggtttcaaactgggagctgt

SEQ ID NO: 12546 - DNA, 26 bp, Homo sapiens
aaaatggtttcaaactgggagctgta

SEQ ID NO: 12547 - DNA, 26 bp, Homo sapiens
aaatggtttcaaactgggagctgtac

SEQ ID NO: 12548 - DNA, 26 bp, Homo sapiens
aatggtttcaaactgggagctgtaca

SEQ ID NO: 12549 - DNA, 26 bp, Homo sapiens
atggtttcaaactgggagctgtacac

SEQ ID NO: 12550 - DNA, 26 bp, Homo sapiens
tggtttcaaactgggagctgtacacg

SEQ ID NO: 12551 - DNA, 26 bp, Homo sapiens
ggtttcaaactgggagctgtacacgt

SEQ ID NO: 12552 - DNA, 26 bp, Homo sapiens
gtttcaaactgggagctgtacacgtc

SEQ ID NO: 12553 - DNA, 26 bp, Homo sapiens
tttcaaactgggagctgtacacgtcg

SEQ ID NO: 12554 - DNA, 26 bp, Homo sapiens
ttcaaactgggagctgtacacgtcgg

SEQ ID NO: 12555 - DNA, 26 bp, Homo sapiens
tcaaactgggagctgtacacgtcggt

SEQ ID NO: 12556 - DNA, 26 bp, Homo sapiens
caaactgggagctgtacacgtcggtg

SEQ ID NO: 12557 - DNA, 26 bp, Homo sapiens
aaactgggagctgtacacgtcggtgg

SEQ ID NO: 12558 - DNA, 26 bp, Homo sapiens
aactgggagctgtacacgtcggtgga

SEQ ID NO: 12559 - DNA, 26 bp, Homo sapiens
actgggagctgtacacgtcggtggag

SEQ ID NO: 12560 - DNA, 26 bp, Homo sapiens
ctgggagctgtacacgtcggtggagt

SEQ ID NO: 12561 - DNA, 26 bp, Homo sapiens
tgggagctgtacacgtcggtggagtc

SEQ ID NO: 12562 - DNA, 26 bp, Homo sapiens
gggagctgtacacgtcggtggagtcc

SEQ ID NO: 12563 - DNA, 26 bp, Homo sapiens
ggagctgtacacgtcggtggagtcct

SEQ ID NO: 12564 - DNA, 26 bp, Homo sapiens
gagctgtacacgtcggtggagtcctc

SEQ ID NO: 12565 - DNA, 26 bp, Homo sapiens
agctgtacacgtcggtggagtcctcc

SEQ ID NO: 12566 - DNA, 26 bp, Homo sapiens
gctgtacacgtcggtggagtcctccg

SEQ ID NO: 12567 - DNA, 26 bp, Homo sapiens
ctgtacacgtcggtggagtcctccgt

SEQ ID NO: 12568 - DNA, 26 bp, Homo sapiens
tgtacacgtcggtggagtcctccgta

SEQ ID NO: 12569 - DNA, 26 bp, Homo sapiens
gtacacgtcggtggagtcctccgtat

SEQ ID NO: 12570 - DNA, 26 bp, Homo sapiens
tacacgtcggtggagtcctccgtata

SEQ ID NO: 12571 - DNA, 26 bp, Homo sapiens
acacgtcggtggagtcctccgtatat

SEQ ID NO: 12572 - DNA, 26 bp, Homo sapiens
cacgtcggtggagtcctccgtatatc

SEQ ID NO: 12573 - DNA, 26 bp, Homo sapiens
acgtcggtggagtcctccgtatatcc

SEQ ID NO: 12574 - DNA, 26 bp, Homo sapiens
cgtcggtggagtcctccgtatatcca

SEQ ID NO: 12575 - DNA, 26 bp, Homo sapiens
gtcggtggagtcctccgtatatccag

SEQ ID NO: 12576 - DNA, 26 bp, Homo sapiens
tcggtggagtcctccgtatatccagg

SEQ ID NO: 12577 - DNA, 26 bp, Homo sapiens
cggtggagtcctccgtatatccaggc

SEQ ID NO: 12578 - DNA, 26 bp, Homo sapiens
ggtggagtcctccgtatatccaggcc

SEQ ID NO: 12579 - DNA, 26 bp, Homo sapiens
gtggagtcctccgtatatccaggccc

SEQ ID NO: 12580 - DNA, 26 bp, Homo sapiens
tggagtcctccgtatatccaggccca

SEQ ID NO: 12581 - DNA, 26 bp, Homo sapiens
ggagtcctccgtatatccaggcccaa

SEQ ID NO: 12582 - DNA, 26 bp, Homo sapiens
gagtcctccgtatatccaggcccaag

SEQ ID NO: 12583 - DNA, 26 bp, Homo sapiens
agtcctccgtatatccaggcccaagg

SEQ ID NO: 12584 - DNA, 26 bp, Homo sapiens
gtcctccgtatatccaggcccaagga

SEQ ID NO: 12585 - DNA, 26 bp, Homo sapiens
tcctccgtatatccaggcccaaggat

SEQ ID NO: 12586 - DNA, 26 bp, Homo sapiens
cctccgtatatccaggcccaaggatg

SEQ ID NO: 12587 - DNA, 26 bp, Homo sapiens
ctccgtatatccaggcccaaggatgt

SEQ ID NO: 12588 - DNA, 26 bp, Homo sapiens
tccgtatatccaggcccaaggatgtc

SEQ ID NO: 12589 - DNA, 26 bp, Homo sapiens
ccgtatatccaggcccaaggatgtct

SEQ ID NO: 12590 - DNA, 26 bp, Homo sapiens
cgtatatccaggcccaaggatgtctt

SEQ ID NO: 12591 - DNA, 26 bp, Homo sapiens
gtatatccaggcccaaggatgtcttc

SEQ ID NO: 12592 - DNA, 26 bp, Homo sapiens
tatatccaggcccaaggatgtcttca

SEQ ID NO: 12593 - DNA, 26 bp, Homo sapiens
atatccaggcccaaggatgtcttcat

SEQ ID NO: 12594 - DNA, 26 bp, Homo sapiens
tatccaggcccaaggatgtcttcatc

SEQ ID NO: 12595 - DNA, 26 bp, Homo sapiens
atccaggcccaaggatgtcttcatct

SEQ ID NO: 12596 - DNA, 26 bp, Homo sapiens
tccaggcccaaggatgtcttcatctt

SEQ ID NO: 12597 - DNA, 26 bp, Homo sapiens
ccaggcccaaggatgtcttcatcttc

SEQ ID NO: 12598 - DNA, 26 bp, Homo sapiens
caggcccaaggatgtcttcatcttcc

SEQ ID NO: 12599 - DNA, 26 bp, Homo sapiens
aggcccaaggatgtcttcatcttccc

SEQ ID NO: 12600 - DNA, 26 bp, Homo sapiens
ggcccaaggatgtcttcatcttcccc

SEQ ID NO: 12601 - DNA, 26 bp, Homo sapiens
gcccaaggatgtcttcatcttccccc

SEQ ID NO: 12602 - DNA, 26 bp, Homo sapiens
cccaaggatgtcttcatcttccccct

SEQ ID NO: 12603 - DNA, 26 bp, Homo sapiens
ccaaggatgtcttcatcttccccctt

SEQ ID NO: 12604 - DNA, 26 bp, Homo sapiens
caaggatgtcttcatcttccccctta

SEQ ID NO: 12605 - DNA, 26 bp, Homo sapiens
aaggatgtcttcatcttcccccttaa

SEQ ID NO: 12606 - DNA, 26 bp, Homo sapiens
aggatgtcttcatcttcccccttaac

SEQ ID NO: 12607 - DNA, 26 bp, Homo sapiens
ggatgtcttcatcttcccccttaacg

SEQ ID NO: 12608 - DNA, 26 bp, Homo sapiens
gatgtcttcatcttcccccttaacgt

SEQ ID NO: 12609 - DNA, 26 bp, Homo sapiens
atgtcttcatcttcccccttaacgtg

SEQ ID NO: 12610 - DNA, 26 bp, Homo sapiens
tgtcttcatcttcccccttaacgtgc

SEQ ID NO: 12611 - DNA, 26 bp, Homo sapiens
gtcttcatcttcccccttaacgtgct

SEQ ID NO: 12612 - DNA, 26 bp, Homo sapiens
tcttcatcttcccccttaacgtgctc

SEQ ID NO: 12613 - DNA, 26 bp, Homo sapiens
cttcatcttcccccttaacgtgctcc

SEQ ID NO: 12614 - DNA, 26 bp, Homo sapiens
ttcatcttcccccttaacgtgctcct

SEQ ID NO: 12615 - DNA, 26 bp, Homo sapiens
tcatcttcccccttaacgtgctcctc

SEQ ID NO: 12616 - DNA, 26 bp, Homo sapiens
catcttcccccttaacgtgctcctct

SEQ ID NO: 12617 - DNA, 26 bp, Homo sapiens
atcttcccccttaacgtgctcctctt

SEQ ID NO: 12618 - DNA, 26 bp, Homo sapiens
tcttcccccttaacgtgctcctcttg

SEQ ID NO: 12619 - DNA, 26 bp, Homo sapiens
cttcccccttaacgtgctcctcttgt

SEQ ID NO: 12620 - DNA, 26 bp, Homo sapiens
ttcccccttaacgtgctcctcttgtt

SEQ ID NO: 12621 - DNA, 26 bp, Homo sapiens
tcccccttaacgtgctcctcttgttc

SEQ ID NO: 12622 - DNA, 26 bp, Homo sapiens
cccccttaacgtgctcctcttgttcg

SEQ ID NO: 12623 - DNA, 26 bp, Homo sapiens
ccccttaacgtgctcctcttgttcgc

SEQ ID NO: 12624 - DNA, 26 bp, Homo sapiens
cccttaacgtgctcctcttgttcgct

SEQ ID NO: 12625 - DNA, 26 bp, Homo sapiens
ccttaacgtgctcctcttgttcgctg

SEQ ID NO: 12626 - DNA, 26 bp, Homo sapiens
cttaacgtgctcctcttgttcgctga

SEQ ID NO: 12627 - DNA, 26 bp, Homo sapiens
ttaacgtgctcctcttgttcgctgat

SEQ ID NO: 12628 - DNA, 26 bp, Homo sapiens
taacgtgctcctcttgttcgctgatc

SEQ ID NO: 12629 - DNA, 26 bp, Homo sapiens
aacgtgctcctcttgttcgctgatcc

SEQ ID NO: 12630 - DNA, 26 bp, Homo sapiens
acgtgctcctcttgttcgctgatcct

SEQ ID NO: 12631 - DNA, 26 bp, Homo sapiens
cgtgctcctcttgttcgctgatcctt

SEQ ID NO: 12632 - DNA, 26 bp, Homo sapiens
gtgctcctcttgttcgctgatccttt

SEQ ID NO: 12633 - DNA, 26 bp, Homo sapiens
tgctcctcttgttcgctgatcctttc

SEQ ID NO: 12634 - DNA, 26 bp, Homo sapiens
gctcctcttgttcgctgatcctttcc

SEQ ID NO: 12635 - DNA, 26 bp, Homo sapiens
ctcctcttgttcgctgatcctttccc

SEQ ID NO: 12636 - DNA, 26 bp, Homo sapiens
tcctcttgttcgctgatcctttccct

SEQ ID NO: 12637 - DNA, 26 bp, Homo sapiens
cctcttgttcgctgatcctttccctg

SEQ ID NO: 12638 - DNA, 26 bp, Homo sapiens
ctcttgttcgctgatcctttccctgt

SEQ ID NO: 12639 - DNA, 26 bp, Homo sapiens
tcttgttcgctgatcctttccctgtc

SEQ ID NO: 12640 - DNA, 26 bp, Homo sapiens
cttgttcgctgatcctttccctgtct

SEQ ID NO: 12641 - DNA, 26 bp, Homo sapiens
ttgttcgctgatcctttccctgtctc

SEQ ID NO: 12642 - DNA, 26 bp, Homo sapiens
tgttcgctgatcctttccctgtctct

SEQ ID NO: 12643 - DNA, 26 bp, Homo sapiens
gttcgctgatcctttccctgtctctc

SEQ ID NO: 12644 - DNA, 26 bp, Homo sapiens
ttcgctgatcctttccctgtctctct

SEQ ID NO: 12645 - DNA, 26 bp, Homo sapiens
tcgctgatcctttccctgtctctctc

SEQ ID NO: 12646 - DNA, 26 bp, Homo sapiens
cgctgatcctttccctgtctctctct

SEQ ID NO: 12647 - DNA, 26 bp, Homo sapiens
gctgatcctttccctgtctctctctg

SEQ ID NO: 12648 - DNA, 26 bp, Homo sapiens
ctgatcctttccctgtctctctctgg

SEQ ID NO: 12649 - DNA, 26 bp, Homo sapiens
tgatcctttccctgtctctctctggt

SEQ ID NO: 12650 - DNA, 26 bp, Homo sapiens
gatcctttccctgtctctctctggtt

SEQ ID NO: 12651 - DNA, 26 bp, Homo sapiens
atcctttccctgtctctctctggttt

SEQ ID NO: 12652 - DNA, 26 bp, Homo sapiens
tcctttccctgtctctctctggttta

SEQ ID NO: 12653 - DNA, 26 bp, Homo sapiens
cctttccctgtctctctctggtttag

SEQ ID NO: 12654 - DNA, 26 bp, Homo sapiens
ctttccctgtctctctctggtttagg

SEQ ID NO: 12655 - DNA, 26 bp, Homo sapiens
tttccctgtctctctctggtttaggt

SEQ ID NO: 12656 - DNA, 26 bp, Homo sapiens
ttccctgtctctctctggtttaggtg

SEQ ID NO: 12657 - DNA, 26 bp, Homo sapiens
tccctgtctctctctggtttaggtgt

SEQ ID NO: 12658 - DNA, 26 bp, Homo sapiens
ccctgtctctctctggtttaggtgtc

SEQ ID NO: 12659 - DNA, 26 bp, Homo sapiens
cctgtctctctctggtttaggtgtct

SEQ ID NO: 12660 - DNA, 26 bp, Homo sapiens
ctgtctctctctggtttaggtgtctt

SEQ ID NO: 12661 - DNA, 26 bp, Homo sapiens
tgtctctctctggtttaggtgtcttc

SEQ ID NO: 12662 - DNA, 26 bp, Homo sapiens
gtctctctctggtttaggtgtcttct

SEQ ID NO: 12663 - DNA, 26 bp, Homo sapiens
tctctctctggtttaggtgtcttctc

SEQ ID NO: 12664 - DNA, 26 bp, Homo sapiens
ctctctctggtttaggtgtcttctca

SEQ ID NO: 12665 - DNA, 26 bp, Homo sapiens
tctctctggtttaggtgtcttctcaa

SEQ ID NO: 12666 - DNA, 26 bp, Homo sapiens
ctctctggtttaggtgtcttctcaag

SEQ ID NO: 12667 - DNA, 26 bp, Homo sapiens
tctctggtttaggtgtcttctcaaga

SEQ ID NO: 12668 - DNA, 26 bp, Homo sapiens
ctctggtttaggtgtcttctcaagat

SEQ ID NO: 12669 - DNA, 26 bp, Homo sapiens
tctggtttaggtgtcttctcaagatg

SEQ ID NO: 12670 - DNA, 26 bp, Homo sapiens
ctggtttaggtgtcttctcaagatgc

SEQ ID NO: 12671 - DNA, 26 bp, Homo sapiens
tggtttaggtgtcttctcaagatgct

SEQ ID NO: 12672 - DNA, 26 bp, Homo sapiens
ggtttaggtgtcttctcaagatgctg

SEQ ID NO: 12673 - DNA, 26 bp, Homo sapiens
gtttaggtgtcttctcaagatgctgt

SEQ ID NO: 12674 - DNA, 26 bp, Homo sapiens
tttaggtgtcttctcaagatgctgtt

SEQ ID NO: 12675 - DNA, 26 bp, Homo sapiens
ttaggtgtcttctcaagatgctgttt

SEQ ID NO: 12676 - DNA, 26 bp, Homo sapiens
taggtgtcttctcaagatgctgtttg

SEQ ID NO: 12677 - DNA, 26 bp, Homo sapiens
aggtgtcttctcaagatgctgtttgt

SEQ ID NO: 12678 - DNA, 26 bp, Homo sapiens
ggtgtcttctcaagatgctgtttgtt

SEQ ID NO: 12679 - DNA, 26 bp, Homo sapiens
gtgtcttctcaagatgctgtttgttt

SEQ ID NO: 12680 - DNA, 26 bp, Homo sapiens
tgtcttctcaagatgctgtttgtttt

SEQ ID NO: 12681 - DNA, 26 bp, Homo sapiens
gtcttctcaagatgctgtttgttttc

SEQ ID NO: 12682 - DNA, 26 bp, Homo sapiens
tcttctcaagatgctgtttgttttcc

SEQ ID NO: 12683 - DNA, 26 bp, Homo sapiens
cttctcaagatgctgtttgttttcct

SEQ ID NO: 12684 - DNA, 26 bp, Homo sapiens
ttctcaagatgctgtttgttttcctg

SEQ ID NO: 12685 - DNA, 26 bp, Homo sapiens
tctcaagatgctgtttgttttcctgt

SEQ ID NO: 12686 - DNA, 26 bp, Homo sapiens
ctcaagatgctgtttgttttcctgta

SEQ ID NO: 12687 - DNA, 26 bp, Homo sapiens
tcaagatgctgtttgttttcctgtag

SEQ ID NO: 12688 - DNA, 26 bp, Homo sapiens
caagatgctgtttgttttcctgtagg

SEQ ID NO: 12689 - DNA, 26 bp, Homo sapiens
aagatgctgtttgttttcctgtagga

SEQ ID NO: 12690 - DNA, 26 bp, Homo sapiens
agatgctgtttgttttcctgtaggaa

SEQ ID NO: 12691 - DNA, 26 bp, Homo sapiens
gatgctgtttgttttcctgtaggaag

SEQ ID NO: 12692 - DNA, 26 bp, Homo sapiens
atgctgtttgttttcctgtaggaaga

SEQ ID NO: 12693 - DNA, 26 bp, Homo sapiens
tgctgtttgttttcctgtaggaagac

SEQ ID NO: 12694 - DNA, 26 bp, Homo sapiens
gctgtttgttttcctgtaggaagact

SEQ ID NO: 12695 - DNA, 26 bp, Homo sapiens
ctgtttgttttcctgtaggaagactt

SEQ ID NO: 12696 - DNA, 26 bp, Homo sapiens
tgtttgttttcctgtaggaagacttc

SEQ ID NO: 12697 - DNA, 26 bp, Homo sapiens
gtttgttttcctgtaggaagacttca

SEQ ID NO: 12698 - DNA, 26 bp, Homo sapiens
tttgttttcctgtaggaagacttcat

SEQ ID NO: 12699 - DNA, 26 bp, Homo sapiens
ttgttttcctgtaggaagacttcatc

SEQ ID NO: 12700 - DNA, 26 bp, Homo sapiens
tgttttcctgtaggaagacttcatcc

SEQ ID NO: 12701 - DNA, 26 bp, Homo sapiens
gttttcctgtaggaagacttcatcct

SEQ ID NO: 12702 - DNA, 26 bp, Homo sapiens
ttttcctgtaggaagacttcatcctc

SEQ ID NO: 12703 - DNA, 26 bp, Homo sapiens
tttcctgtaggaagacttcatcctct

SEQ ID NO: 12704 - DNA, 26 bp, Homo sapiens
ttcctgtaggaagacttcatcctctc

SEQ ID NO: 12705 - DNA, 26 bp, Homo sapiens
tcctgtaggaagacttcatcctctcc

SEQ ID NO: 12706 - DNA, 26 bp, Homo sapiens
cctgtaggaagacttcatcctctcca

SEQ ID NO: 12707 - DNA, 26 bp, Homo sapiens
ctgtaggaagacttcatcctctccac

SEQ ID NO: 12708 - DNA, 26 bp, Homo sapiens
tgtaggaagacttcatcctctccact

SEQ ID NO: 12709 - DNA, 26 bp, Homo sapiens
gtaggaagacttcatcctctccactc

SEQ ID NO: 12710 - DNA, 26 bp, Homo sapiens
taggaagacttcatcctctccactct

SEQ ID NO: 12711 - DNA, 26 bp, Homo sapiens
aggaagacttcatcctctccactctc

SEQ ID NO: 12712 - DNA, 26 bp, Homo sapiens
ggaagacttcatcctctccactctca

SEQ ID NO: 12713 - DNA, 26 bp, Homo sapiens
gaagacttcatcctctccactctcat

SEQ ID NO: 12714 - DNA, 26 bp, Homo sapiens
aagacttcatcctctccactctcatc

SEQ ID NO: 12715 - DNA, 26 bp, Homo sapiens
agacttcatcctctccactctcatca

SEQ ID NO: 12716 - DNA, 26 bp, Homo sapiens
gacttcatcctctccactctcatcaa

SEQ ID NO: 12717 - DNA, 26 bp, Homo sapiens
acttcatcctctccactctcatcaag

SEQ ID NO: 12718 - DNA, 26 bp, Homo sapiens
cttcatcctctccactctcatcaaga

SEQ ID NO: 12719 - DNA, 26 bp, Homo sapiens
ttcatcctctccactctcatcaagac

SEQ ID NO: 12720 - DNA, 26 bp, Homo sapiens
tcatcctctccactctcatcaagacg

SEQ ID NO: 12721 - DNA, 26 bp, Homo sapiens
catcctctccactctcatcaagacgc

SEQ ID NO: 12722 - DNA, 26 bp, Homo sapiens
atcctctccactctcatcaagacgca

SEQ ID NO: 12723 - DNA, 26 bp, Homo sapiens
tcctctccactctcatcaagacgcac

SEQ ID NO: 12724 - DNA, 26 bp, Homo sapiens
cctctccactctcatcaagacgcaca

SEQ ID NO: 12725 - DNA, 26 bp, Homo sapiens
ctctccactctcatcaagacgcacag

SEQ ID NO: 12726 - DNA, 26 bp, Homo sapiens
tctccactctcatcaagacgcacagg

SEQ ID NO: 12727 - DNA, 26 bp, Homo sapiens
ctccactctcatcaagacgcacaggg

SEQ ID NO: 12728 - DNA, 26 bp, Homo sapiens
tccactctcatcaagacgcacagggg

SEQ ID NO: 12729 - DNA, 26 bp, Homo sapiens
ccactctcatcaagacgcacagggga

SEQ ID NO: 12730 - DNA, 26 bp, Homo sapiens
cactctcatcaagacgcacaggggaa

SEQ ID NO: 12731 - DNA, 26 bp, Homo sapiens
actctcatcaagacgcacaggggaaa

SEQ ID NO: 12732 - DNA, 26 bp, Homo sapiens
ctctcatcaagacgcacaggggaaaa

SEQ ID NO: 12733 - DNA, 26 bp, Homo sapiens
tctcatcaagacgcacaggggaaaat

SEQ ID NO: 12734 - DNA, 26 bp, Homo sapiens
ctcatcaagacgcacaggggaaaatg

SEQ ID NO: 12735 - DNA, 26 bp, Homo sapiens
tcatcaagacgcacaggggaaaatgt

SEQ ID NO: 12736 - DNA, 26 bp, Homo sapiens
catcaagacgcacaggggaaaatgtc

SEQ ID NO: 12737 - DNA, 26 bp, Homo sapiens
atcaagacgcacaggggaaaatgtcc

SEQ ID NO: 12738 - DNA, 26 bp, Homo sapiens
tcaagacgcacaggggaaaatgtccc

SEQ ID NO: 12739 - DNA, 26 bp, Homo sapiens
caagacgcacaggggaaaatgtcccc

SEQ ID NO: 12740 - DNA, 26 bp, Homo sapiens
aagacgcacaggggaaaatgtccccg

SEQ ID NO: 12741 - DNA, 26 bp, Homo sapiens
agacgcacaggggaaaatgtccccga

SEQ ID NO: 12742 - DNA, 26 bp, Homo sapiens
gacgcacaggggaaaatgtccccgag

SEQ ID NO: 12743 - DNA, 26 bp, Homo sapiens
acgcacaggggaaaatgtccccgagc

SEQ ID NO: 12744 - DNA, 26 bp, Homo sapiens
cgcacaggggaaaatgtccccgagct

SEQ ID NO: 12745 - DNA, 26 bp, Homo sapiens
gcacaggggaaaatgtccccgagcta

SEQ ID NO: 12746 - DNA, 26 bp, Homo sapiens
cacaggggaaaatgtccccgagctag

SEQ ID NO: 12747 - DNA, 26 bp, Homo sapiens
acaggggaaaatgtccccgagctagt

SEQ ID NO: 12748 - DNA, 26 bp, Homo sapiens
caggggaaaatgtccccgagctagtg

SEQ ID NO: 12749 - DNA, 26 bp, Homo sapiens
aggggaaaatgtccccgagctagtgc

SEQ ID NO: 12750 - DNA, 26 bp, Homo sapiens
ggggaaaatgtccccgagctagtgcc

SEQ ID NO: 12751 - DNA, 26 bp, Homo sapiens
gggaaaatgtccccgagctagtgcca

SEQ ID NO: 12752 - DNA, 26 bp, Homo sapiens
ggaaaatgtccccgagctagtgccag

SEQ ID NO: 12753 - DNA, 26 bp, Homo sapiens
gaaaatgtccccgagctagtgccagg

SEQ ID NO: 12754 - DNA, 26 bp, Homo sapiens
aaaatgtccccgagctagtgccaggc

SEQ ID NO: 12755 - DNA, 26 bp, Homo sapiens
aaatgtccccgagctagtgccaggcc

SEQ ID NO: 12756 - DNA, 26 bp, Homo sapiens
aatgtccccgagctagtgccaggcct

SEQ ID NO: 12757 - DNA, 26 bp, Homo sapiens
atgtccccgagctagtgccaggcctc

SEQ ID NO: 12758 - DNA, 26 bp, Homo sapiens
tgtccccgagctagtgccaggcctct

SEQ ID NO: 12759 - DNA, 26 bp, Homo sapiens
gtccccgagctagtgccaggcctctc

SEQ ID NO: 12760 - DNA, 26 bp, Homo sapiens
tccccgagctagtgccaggcctctct

SEQ ID NO: 12761 - DNA, 26 bp, Homo sapiens
ccccgagctagtgccaggcctctctg

SEQ ID NO: 12762 - DNA, 26 bp, Homo sapiens
cccgagctagtgccaggcctctctga

SEQ ID NO: 12763 - DNA, 26 bp, Homo sapiens
ccgagctagtgccaggcctctctgaa

SEQ ID NO: 12764 - DNA, 26 bp, Homo sapiens
cgagctagtgccaggcctctctgaag

SEQ ID NO: 12765 - DNA, 26 bp, Homo sapiens
gagctagtgccaggcctctctgaagg

SEQ ID NO: 12766 - DNA, 26 bp, Homo sapiens
agctagtgccaggcctctctgaagga

SEQ ID NO: 12767 - DNA, 26 bp, Homo sapiens
gctagtgccaggcctctctgaaggag

SEQ ID NO: 12768 - DNA, 26 bp, Homo sapiens
ctagtgccaggcctctctgaaggagc

SEQ ID NO: 12769 - DNA, 26 bp, Homo sapiens
tagtgccaggcctctctgaaggagct

SEQ ID NO: 12770 - DNA, 26 bp, Homo sapiens
agtgccaggcctctctgaaggagctt

SEQ ID NO: 12771 - DNA, 26 bp, Homo sapiens
gtgccaggcctctctgaaggagcttt

SEQ ID NO: 12772 - DNA, 26 bp, Homo sapiens
tgccaggcctctctgaaggagctttc

SEQ ID NO: 12773 - DNA, 26 bp, Homo sapiens
gccaggcctctctgaaggagctttcc

SEQ ID NO: 12774 - DNA, 26 bp, Homo sapiens
ccaggcctctctgaaggagctttcca

SEQ ID NO: 12775 - DNA, 26 bp, Homo sapiens
caggcctctctgaaggagctttccag

SEQ ID NO: 12776 - DNA, 26 bp, Homo sapiens
aggcctctctgaaggagctttccagg

SEQ ID NO: 12777 - DNA, 26 bp, Homo sapiens
ggcctctctgaaggagctttccagga

SEQ ID NO: 12778 - DNA, 26 bp, Homo sapiens
gcctctctgaaggagctttccaggat

SEQ ID NO: 12779 - DNA, 26 bp, Homo sapiens
cctctctgaaggagctttccaggatt

SEQ ID NO: 12780 - DNA, 26 bp, Homo sapiens
ctctctgaaggagctttccaggattc

SEQ ID NO: 12781 - DNA, 26 bp, Homo sapiens
tctctgaaggagctttccaggattca

SEQ ID NO: 12782 - DNA, 26 bp, Homo sapiens
ctctgaaggagctttccaggattcat

SEQ ID NO: 12783 - DNA, 26 bp, Homo sapiens
tctgaaggagctttccaggattcatc

SEQ ID NO: 12784 - DNA, 26 bp, Homo sapiens
ctgaaggagctttccaggattcatcc

SEQ ID NO: 12785 - DNA, 26 bp, Homo sapiens
tgaaggagctttccaggattcatccc

SEQ ID NO: 12786 - DNA, 26 bp, Homo sapiens
gaaggagctttccaggattcatccca

SEQ ID NO: 12787 - DNA, 26 bp, Homo sapiens
aaggagctttccaggattcatcccaa

SEQ ID NO: 12788 - DNA, 26 bp, Homo sapiens
aggagctttccaggattcatcccaaa

SEQ ID NO: 12789 - DNA, 26 bp, Homo sapiens
ggagctttccaggattcatcccaaac

SEQ ID NO: 12790 - DNA, 26 bp, Homo sapiens
gagctttccaggattcatcccaaaca

SEQ ID NO: 12791 - DNA, 26 bp, Homo sapiens
agctttccaggattcatcccaaacat

SEQ ID NO: 12792 - DNA, 26 bp, Homo sapiens
gctttccaggattcatcccaaacatt

SEQ ID NO: 12793 - DNA, 26 bp, Homo sapiens
ctttccaggattcatcccaaacattc

SEQ ID NO: 12794 - DNA, 26 bp, Homo sapiens
tttccaggattcatcccaaacattct

SEQ ID NO: 12795 - DNA, 26 bp, Homo sapiens
ttccaggattcatcccaaacattctc

SEQ ID NO: 12796 - DNA, 26 bp, Homo sapiens
tccaggattcatcccaaacattctca

SEQ ID NO: 12797 - DNA, 26 bp, Homo sapiens
ccaggattcatcccaaacattctcag

SEQ ID NO: 12798 - DNA, 26 bp, Homo sapiens
caggattcatcccaaacattctcagt

SEQ ID NO: 12799 - DNA, 26 bp, Homo sapiens
aggattcatcccaaacattctcagtt

SEQ ID NO: 12800 - DNA, 26 bp, Homo sapiens
ggattcatcccaaacattctcagtta

SEQ ID NO: 12801 - DNA, 26 bp, Homo sapiens
gattcatcccaaacattctcagttaa

SEQ ID NO: 12802 - DNA, 26 bp, Homo sapiens
attcatcccaaacattctcagttaaa

SEQ ID NO: 12803 - DNA, 26 bp, Homo sapiens
ttcatcccaaacattctcagttaaac

SEQ ID NO: 12804 - DNA, 26 bp, Homo sapiens
tcatcccaaacattctcagttaaact

SEQ ID NO: 12805 - DNA, 26 bp, Homo sapiens
catcccaaacattctcagttaaacta

SEQ ID NO: 12806 - DNA, 26 bp, Homo sapiens
atcccaaacattctcagttaaactac

SEQ ID NO: 12807 - DNA, 26 bp, Homo sapiens
tcccaaacattctcagttaaactact

SEQ ID NO: 12808 - DNA, 26 bp, Homo sapiens
cccaaacattctcagttaaactactt

SEQ ID NO: 12809 - DNA, 26 bp, Homo sapiens
ccaaacattctcagttaaactacttg

SEQ ID NO: 12810 - DNA, 26 bp, Homo sapiens
caaacattctcagttaaactacttga

SEQ ID NO: 12811 - DNA, 26 bp, Homo sapiens
aaacattctcagttaaactacttgaa

SEQ ID NO: 12812 - DNA, 26 bp, Homo sapiens
aacattctcagttaaactacttgaat

SEQ ID NO: 12813 - DNA, 26 bp, Homo sapiens
acattctcagttaaactacttgaatt

SEQ ID NO: 12814 - DNA, 26 bp, Homo sapiens
cattctcagttaaactacttgaatta

SEQ ID NO: 12815 - DNA, 26 bp, Homo sapiens
attctcagttaaactacttgaattac

SEQ ID NO: 12816 - DNA, 26 bp, Homo sapiens
ttctcagttaaactacttgaattaca

SEQ ID NO: 12817 - DNA, 26 bp, Homo sapiens
tctcagttaaactacttgaattacac

SEQ ID NO: 12818 - DNA, 26 bp, Homo sapiens
ctcagttaaactacttgaattacaca

SEQ ID NO: 12819 - DNA, 26 bp, Homo sapiens
tcagttaaactacttgaattacacaa

SEQ ID NO: 12820 - DNA, 26 bp, Homo sapiens
cagttaaactacttgaattacacaaa

SEQ ID NO: 12821 - DNA, 26 bp, Homo sapiens
agttaaactacttgaattacacaaac

SEQ ID NO: 12822 - DNA, 26 bp, Homo sapiens
gttaaactacttgaattacacaaacc

SEQ ID NO: 12823 - DNA, 26 bp, Homo sapiens
ttaaactacttgaattacacaaacca

SEQ ID NO: 12824 - DNA, 26 bp, Homo sapiens
taaactacttgaattacacaaaccag

SEQ ID NO: 12825 - DNA, 26 bp, Homo sapiens
aaactacttgaattacacaaaccagc

SEQ ID NO: 12826 - DNA, 26 bp, Homo sapiens
aactacttgaattacacaaaccagct

SEQ ID NO: 12827 - DNA, 26 bp, Homo sapiens
actacttgaattacacaaaccagctg

SEQ ID NO: 12828 - DNA, 26 bp, Homo sapiens
ctacttgaattacacaaaccagctga

SEQ ID NO: 12829 - DNA, 26 bp, Homo sapiens
tacttgaattacacaaaccagctgat

SEQ ID NO: 12830 - DNA, 26 bp, Homo sapiens
acttgaattacacaaaccagctgatg

SEQ ID NO: 12831 - DNA, 26 bp, Homo sapiens
cttgaattacacaaaccagctgatga

SEQ ID NO: 12832 - DNA, 26 bp, Homo sapiens
ttgaattacacaaaccagctgatgag

SEQ ID NO: 12833 - DNA, 26 bp, Homo sapiens
tgaattacacaaaccagctgatgaga

SEQ ID NO: 12834 - DNA, 26 bp, Homo sapiens
gaattacacaaaccagctgatgagat

SEQ ID NO: 12835 - DNA, 26 bp, Homo sapiens
aattacacaaaccagctgatgagatg

SEQ ID NO: 12836 - DNA, 26 bp, Homo sapiens
attacacaaaccagctgatgagatga

SEQ ID NO: 12837 - DNA, 26 bp, Homo sapiens
ttacacaaaccagctgatgagatgag

SEQ ID NO: 12838 - DNA, 26 bp, Homo sapiens
tacacaaaccagctgatgagatgaga

SEQ ID NO: 12839 - DNA, 26 bp, Homo sapiens
acacaaaccagctgatgagatgagat

SEQ ID NO: 12840 - DNA, 26 bp, Homo sapiens
cacaaaccagctgatgagatgagatg

SEQ ID NO: 12841 - DNA, 26 bp, Homo sapiens
acaaaccagctgatgagatgagatgg

SEQ ID NO: 12842 - DNA, 26 bp, Homo sapiens
caaaccagctgatgagatgagatggc

SEQ ID NO: 12843 - DNA, 26 bp, Homo sapiens
aaaccagctgatgagatgagatggcg

SEQ ID NO: 12844 - DNA, 26 bp, Homo sapiens
aaccagctgatgagatgagatggcgt

SEQ ID NO: 12845 - DNA, 26 bp, Homo sapiens
accagctgatgagatgagatggcgtg

SEQ ID NO: 12846 - DNA, 26 bp, Homo sapiens
ccagctgatgagatgagatggcgtgg

SEQ ID NO: 12847 - DNA, 26 bp, Homo sapiens
cagctgatgagatgagatggcgtggc

SEQ ID NO: 12848 - DNA, 26 bp, Homo sapiens
agctgatgagatgagatggcgtggca

SEQ ID NO: 12849 - DNA, 26 bp, Homo sapiens
gctgatgagatgagatggcgtggcac

SEQ ID NO: 12850 - DNA, 26 bp, Homo sapiens
ctgatgagatgagatggcgtggcact

SEQ ID NO: 12851 - DNA, 26 bp, Homo sapiens
tgatgagatgagatggcgtggcactt

SEQ ID NO: 12852 - DNA, 26 bp, Homo sapiens
gatgagatgagatggcgtggcacttt

SEQ ID NO: 12853 - DNA, 26 bp, Homo sapiens
atgagatgagatggcgtggcactttg

SEQ ID NO: 12854 - DNA, 26 bp, Homo sapiens
tgagatgagatggcgtggcactttgg

SEQ ID NO: 12855 - DNA, 26 bp, Homo sapiens
gagatgagatggcgtggcactttgga

SEQ ID NO: 12856 - DNA, 26 bp, Homo sapiens
agatgagatggcgtggcactttggaa

SEQ ID NO: 12857 - DNA, 26 bp, Homo sapiens
gatgagatggcgtggcactttggaag

SEQ ID NO: 12858 - DNA, 26 bp, Homo sapiens
atgagatggcgtggcactttggaaga

SEQ ID NO: 12859 - DNA, 26 bp, Homo sapiens
tgagatggcgtggcactttggaagac

SEQ ID NO: 12860 - DNA, 26 bp, Homo sapiens
gagatggcgtggcactttggaagact

SEQ ID NO: 12861 - DNA, 26 bp, Homo sapiens
agatggcgtggcactttggaagactc

SEQ ID NO: 12862 - DNA, 26 bp, Homo sapiens
gatggcgtggcactttggaagactct

SEQ ID NO: 12863 - DNA, 26 bp, Homo sapiens
atggcgtggcactttggaagactctt

SEQ ID NO: 12864 - DNA, 26 bp, Homo sapiens
tggcgtggcactttggaagactcttt

SEQ ID NO: 12865 - DNA, 26 bp, Homo sapiens
ggcgtggcactttggaagactctttg

SEQ ID NO: 12866 - DNA, 26 bp, Homo sapiens
gcgtggcactttggaagactctttgc

SEQ ID NO: 12867 - DNA, 26 bp, Homo sapiens
cgtggcactttggaagactctttgct

SEQ ID NO: 12868 - DNA, 26 bp, Homo sapiens
gtggcactttggaagactctttgctg

SEQ ID NO: 12869 - DNA, 26 bp, Homo sapiens
tggcactttggaagactctttgctgt

SEQ ID NO: 12870 - DNA, 26 bp, Homo sapiens
ggcactttggaagactctttgctgtc

SEQ ID NO: 12871 - DNA, 26 bp, Homo sapiens
gcactttggaagactctttgctgtca

SEQ ID NO: 12872 - DNA, 26 bp, Homo sapiens
cactttggaagactctttgctgtcag

SEQ ID NO: 12873 - DNA, 26 bp, Homo sapiens
actttggaagactctttgctgtcagg

SEQ ID NO: 12874 - DNA, 26 bp, Homo sapiens
ctttggaagactctttgctgtcagga

SEQ ID NO: 12875 - DNA, 26 bp, Homo sapiens
tttggaagactctttgctgtcaggag

SEQ ID NO: 12876 - DNA, 26 bp, Homo sapiens
ttggaagactctttgctgtcaggaga

SEQ ID NO: 12877 - DNA, 26 bp, Homo sapiens
tggaagactctttgctgtcaggagag

SEQ ID NO: 12878 - DNA, 26 bp, Homo sapiens
ggaagactctttgctgtcaggagagg

SEQ ID NO: 12879 - DNA, 26 bp, Homo sapiens
gaagactctttgctgtcaggagaggc

SEQ ID NO: 12880 - DNA, 26 bp, Homo sapiens
aagactctttgctgtcaggagaggct

SEQ ID NO: 12881 - DNA, 26 bp, Homo sapiens
agactctttgctgtcaggagaggctg

SEQ ID NO: 12882 - DNA, 26 bp, Homo sapiens
gactctttgctgtcaggagaggctgt

SEQ ID NO: 12883 - DNA, 26 bp, Homo sapiens
actctttgctgtcaggagaggctgtt

SEQ ID NO: 12884 - DNA, 26 bp, Homo sapiens
ctctttgctgtcaggagaggctgttc

SEQ ID NO: 12885 - DNA, 26 bp, Homo sapiens
tctttgctgtcaggagaggctgttct

SEQ ID NO: 12886 - DNA, 26 bp, Homo sapiens
ctttgctgtcaggagaggctgttctt

SEQ ID NO: 12887 - DNA, 26 bp, Homo sapiens
tttgctgtcaggagaggctgttcttt

SEQ ID NO: 12888 - DNA, 26 bp, Homo sapiens
ttgctgtcaggagaggctgttctttg

SEQ ID NO: 12889 - DNA, 26 bp, Homo sapiens
tgctgtcaggagaggctgttctttgc

SEQ ID NO: 12890 - DNA, 26 bp, Homo sapiens
gctgtcaggagaggctgttctttgca

SEQ ID NO: 12891 - DNA, 26 bp, Homo sapiens
ctgtcaggagaggctgttctttgcag

SEQ ID NO: 12892 - DNA, 26 bp, Homo sapiens
tgtcaggagaggctgttctttgcagt

SEQ ID NO: 12893 - DNA, 26 bp, Homo sapiens
gtcaggagaggctgttctttgcagtg

SEQ ID NO: 12894 - DNA, 26 bp, Homo sapiens
tcaggagaggctgttctttgcagtga

SEQ ID NO: 12895 - DNA, 26 bp, Homo sapiens
caggagaggctgttctttgcagtgat

SEQ ID NO: 12896 - DNA, 26 bp, Homo sapiens
aggagaggctgttctttgcagtgatg

SEQ ID NO: 12897 - DNA, 26 bp, Homo sapiens
ggagaggctgttctttgcagtgatgt

SEQ ID NO: 12898 - DNA, 26 bp, Homo sapiens
gagaggctgttctttgcagtgatgtc

SEQ ID NO: 12899 - DNA, 26 bp, Homo sapiens
agaggctgttctttgcagtgatgtct

SEQ ID NO: 12900 - DNA, 26 bp, Homo sapiens
gaggctgttctttgcagtgatgtctc

SEQ ID NO: 12901 - DNA, 26 bp, Homo sapiens
aggctgttctttgcagtgatgtctca

SEQ ID NO: 12902 - DNA, 26 bp, Homo sapiens
ggctgttctttgcagtgatgtctcaa

SEQ ID NO: 12903 - DNA, 26 bp, Homo sapiens
gctgttctttgcagtgatgtctcaaa

SEQ ID NO: 12904 - DNA, 26 bp, Homo sapiens
ctgttctttgcagtgatgtctcaaaa

SEQ ID NO: 12905 - DNA, 26 bp, Homo sapiens
tgttctttgcagtgatgtctcaaaat

SEQ ID NO: 12906 - DNA, 26 bp, Homo sapiens
gttctttgcagtgatgtctcaaaatc

SEQ ID NO: 12907 - DNA, 26 bp, Homo sapiens
ttctttgcagtgatgtctcaaaatct

SEQ ID NO: 12908 - DNA, 26 bp, Homo sapiens
tctttgcagtgatgtctcaaaatcta

SEQ ID NO: 12909 - DNA, 26 bp, Homo sapiens
ctttgcagtgatgtctcaaaatctat

SEQ ID NO: 12910 - DNA, 26 bp, Homo sapiens
tttgcagtgatgtctcaaaatctata

SEQ ID NO: 12911 - DNA, 26 bp, Homo sapiens
ttgcagtgatgtctcaaaatctatag

SEQ ID NO: 12912 - DNA, 26 bp, Homo sapiens
tgcagtgatgtctcaaaatctatagg

SEQ ID NO: 12913 - DNA, 26 bp, Homo sapiens
gcagtgatgtctcaaaatctatagga

SEQ ID NO: 12914 - DNA, 26 bp, Homo sapiens
cagtgatgtctcaaaatctataggat

SEQ ID NO: 12915 - DNA, 26 bp, Homo sapiens
agtgatgtctcaaaatctataggatg

SEQ ID NO: 12916 - DNA, 26 bp, Homo sapiens
gtgatgtctcaaaatctataggatgc

SEQ ID NO: 12917 - DNA, 26 bp, Homo sapiens
tgatgtctcaaaatctataggatgct

SEQ ID NO: 12918 - DNA, 26 bp, Homo sapiens
gatgtctcaaaatctataggatgctg

SEQ ID NO: 12919 - DNA, 26 bp, Homo sapiens
atgtctcaaaatctataggatgctgg

SEQ ID NO: 12920 - DNA, 26 bp, Homo sapiens
tgtctcaaaatctataggatgctggg

SEQ ID NO: 12921 - DNA, 26 bp, Homo sapiens
gtctcaaaatctataggatgctgggt

SEQ ID NO: 12922 - DNA, 26 bp, Homo sapiens
tctcaaaatctataggatgctgggtc

SEQ ID NO: 12923 - DNA, 26 bp, Homo sapiens
ctcaaaatctataggatgctgggtct

SEQ ID NO: 12924 - DNA, 26 bp, Homo sapiens
tcaaaatctataggatgctgggtctc

SEQ ID NO: 12925 - DNA, 26 bp, Homo sapiens
caaaatctataggatgctgggtctct

SEQ ID NO: 12926 - DNA, 26 bp, Homo sapiens
aaaatctataggatgctgggtctctc

SEQ ID NO: 12927 - DNA, 26 bp, Homo sapiens
aaatctataggatgctgggtctctct

SEQ ID NO: 12928 - DNA, 26 bp, Homo sapiens
aatctataggatgctgggtctctctc

SEQ ID NO: 12929 - DNA, 26 bp, Homo sapiens
atctataggatgctgggtctctctct

SEQ ID NO: 12930 - DNA, 26 bp, Homo sapiens
tctataggatgctgggtctctctctt

SEQ ID NO: 12931 - DNA, 26 bp, Homo sapiens
ctataggatgctgggtctctctcttg

SEQ ID NO: 12932 - DNA, 26 bp, Homo sapiens
tataggatgctgggtctctctcttgt

SEQ ID NO: 12933 - DNA, 26 bp, Homo sapiens
ataggatgctgggtctctctcttgtc

SEQ ID NO: 12934 - DNA, 26 bp, Homo sapiens
taggatgctgggtctctctcttgtct

SEQ ID NO: 12935 - DNA, 26 bp, Homo sapiens
aggatgctgggtctctctcttgtctc

SEQ ID NO: 12936 - DNA, 26 bp, Homo sapiens
ggatgctgggtctctctcttgtctcc

SEQ ID NO: 12937 - DNA, 26 bp, Homo sapiens
gatgctgggtctctctcttgtctcct

SEQ ID NO: 12938 - DNA, 26 bp, Homo sapiens
atgctgggtctctctcttgtctcctc

SEQ ID NO: 12939 - DNA, 26 bp, Homo sapiens
tgctgggtctctctcttgtctcctcc

SEQ ID NO: 12940 - DNA, 26 bp, Homo sapiens
gctgggtctctctcttgtctcctcct

SEQ ID NO: 12941 - DNA, 26 bp, Homo sapiens
ctgggtctctctcttgtctcctcctg

SEQ ID NO: 12942 - DNA, 26 bp, Homo sapiens
tgggtctctctcttgtctcctcctgt

SEQ ID NO: 12943 - DNA, 26 bp, Homo sapiens
gggtctctctcttgtctcctcctgtc

SEQ ID NO: 12944 - DNA, 26 bp, Homo sapiens
ggtctctctcttgtctcctcctgtcc

SEQ ID NO: 12945 - DNA, 26 bp, Homo sapiens
gtctctctcttgtctcctcctgtcca

SEQ ID NO: 12946 - DNA, 26 bp, Homo sapiens
tctctctcttgtctcctcctgtccac

SEQ ID NO: 12947 - DNA, 26 bp, Homo sapiens
ctctctcttgtctcctcctgtccaca

SEQ ID NO: 12948 - DNA, 26 bp, Homo sapiens
tctctcttgtctcctcctgtccacag

SEQ ID NO: 12949 - DNA, 26 bp, Homo sapiens
ctctcttgtctcctcctgtccacagt

SEQ ID NO: 12950 - DNA, 26 bp, Homo sapiens
tctcttgtctcctcctgtccacagta

SEQ ID NO: 12951 - DNA, 26 bp, Homo sapiens
ctcttgtctcctcctgtccacagtat

SEQ ID NO: 12952 - DNA, 26 bp, Homo sapiens
tcttgtctcctcctgtccacagtatt

SEQ ID NO: 12953 - DNA, 26 bp, Homo sapiens
cttgtctcctcctgtccacagtattt

SEQ ID NO: 12954 - DNA, 26 bp, Homo sapiens
ttgtctcctcctgtccacagtatttc

SEQ ID NO: 12955 - DNA, 26 bp, Homo sapiens
tgtctcctcctgtccacagtatttcc

SEQ ID NO: 12956 - DNA, 26 bp, Homo sapiens
gtctcctcctgtccacagtatttcca

SEQ ID NO: 12957 - DNA, 26 bp, Homo sapiens
tctcctcctgtccacagtatttccac

SEQ ID NO: 12958 - DNA, 26 bp, Homo sapiens
ctcctcctgtccacagtatttccact

SEQ ID NO: 12959 - DNA, 26 bp, Homo sapiens
tcctcctgtccacagtatttccactc

SEQ ID NO: 12960 - DNA, 26 bp, Homo sapiens
cctcctgtccacagtatttccactcc

SEQ ID NO: 12961 - DNA, 26 bp, Homo sapiens
ctcctgtccacagtatttccactcct

SEQ ID NO: 12962 - DNA, 26 bp, Homo sapiens
tcctgtccacagtatttccactcctt

SEQ ID NO: 12963 - DNA, 26 bp, Homo sapiens
cctgtccacagtatttccactccttg

SEQ ID NO: 12964 - DNA, 26 bp, Homo sapiens
ctgtccacagtatttccactccttga

SEQ ID NO: 12965 - DNA, 26 bp, Homo sapiens
tgtccacagtatttccactccttgaa

SEQ ID NO: 12966 - DNA, 26 bp, Homo sapiens
gtccacagtatttccactccttgaaa

SEQ ID NO: 12967 - DNA, 26 bp, Homo sapiens
tccacagtatttccactccttgaaat

SEQ ID NO: 12968 - DNA, 26 bp, Homo sapiens
ccacagtatttccactccttgaaatt

SEQ ID NO: 12969 - DNA, 26 bp, Homo sapiens
cacagtatttccactccttgaaattc

SEQ ID NO: 12970 - DNA, 26 bp, Homo sapiens
acagtatttccactccttgaaattcc

SEQ ID NO: 12971 - DNA, 26 bp, Homo sapiens
cagtatttccactccttgaaattcca

SEQ ID NO: 12972 - DNA, 26 bp, Homo sapiens
agtatttccactccttgaaattccac

SEQ ID NO: 12973 - DNA, 26 bp, Homo sapiens
gtatttccactccttgaaattccaca

SEQ ID NO: 12974 - DNA, 26 bp, Homo sapiens
tatttccactccttgaaattccacat

SEQ ID NO: 12975 - DNA, 26 bp, Homo sapiens
atttccactccttgaaattccacatg

SEQ ID NO: 12976 - DNA, 26 bp, Homo sapiens
tttccactccttgaaattccacatgt

SEQ ID NO: 12977 - DNA, 26 bp, Homo sapiens
ttccactccttgaaattccacatgtt

SEQ ID NO: 12978 - DNA, 26 bp, Homo sapiens
tccactccttgaaattccacatgttt

SEQ ID NO: 12979 - DNA, 26 bp, Homo sapiens
ccactccttgaaattccacatgtttg

SEQ ID NO: 12980 - DNA, 26 bp, Homo sapiens
cactccttgaaattccacatgtttga

SEQ ID NO: 12981 - DNA, 26 bp, Homo sapiens
actccttgaaattccacatgtttgac

SEQ ID NO: 12982 - DNA, 26 bp, Homo sapiens
ctccttgaaattccacatgtttgacc

SEQ ID NO: 12983 - DNA, 26 bp, Homo sapiens
tccttgaaattccacatgtttgaccc

SEQ ID NO: 12984 - DNA, 26 bp, Homo sapiens
ccttgaaattccacatgtttgacccg

SEQ ID NO: 12985 - DNA, 26 bp, Homo sapiens
cttgaaattccacatgtttgacccgg

SEQ ID NO: 12986 - DNA, 26 bp, Homo sapiens
ttgaaattccacatgtttgacccggc

SEQ ID NO: 12987 - DNA, 26 bp, Homo sapiens
tgaaattccacatgtttgacccggcc

SEQ ID NO: 12988 - DNA, 26 bp, Homo sapiens
gaaattccacatgtttgacccggcct

SEQ ID NO: 12989 - DNA, 26 bp, Homo sapiens
aaattccacatgtttgacccggcctg

SEQ ID NO: 12990 - DNA, 26 bp, Homo sapiens
aattccacatgtttgacccggcctgg

SEQ ID NO: 12991 - DNA, 26 bp, Homo sapiens
attccacatgtttgacccggcctggg

SEQ ID NO: 12992 - DNA, 26 bp, Homo sapiens
ttccacatgtttgacccggcctgggc

SEQ ID NO: 12993 - DNA, 26 bp, Homo sapiens
tccacatgtttgacccggcctgggcg

SEQ ID NO: 12994 - DNA, 26 bp, Homo sapiens
ccacatgtttgacccggcctgggcgt

SEQ ID NO: 12995 - DNA, 26 bp, Homo sapiens
cacatgtttgacccggcctgggcgtc

SEQ ID NO: 12996 - DNA, 26 bp, Homo sapiens
acatgtttgacccggcctgggcgtcc

SEQ ID NO: 12997 - DNA, 26 bp, Homo sapiens
catgtttgacccggcctgggcgtccc

SEQ ID NO: 12998 - DNA, 26 bp, Homo sapiens
atgtttgacccggcctgggcgtccca

SEQ ID NO: 12999 - DNA, 26 bp, Homo sapiens
tgtttgacccggcctgggcgtcccat

SEQ ID NO: 13000 - DNA, 26 bp, Homo sapiens
gtttgacccggcctgggcgtcccatg

SEQ ID NO: 13001 - DNA, 26 bp, Homo sapiens
tttgacccggcctgggcgtcccatgg

SEQ ID NO: 13002 - DNA, 26 bp, Homo sapiens
ttgacccggcctgggcgtcccatgga

SEQ ID NO: 13003 - DNA, 26 bp, Homo sapiens
tgacccggcctgggcgtcccatggag

SEQ ID NO: 13004 - DNA, 26 bp, Homo sapiens
gacccggcctgggcgtcccatggagc

SEQ ID NO: 13005 - DNA, 26 bp, Homo sapiens
acccggcctgggcgtcccatggagct

SEQ ID NO: 13006 - DNA, 26 bp, Homo sapiens
cccggcctgggcgtcccatggagctg

SEQ ID NO: 13007 - DNA, 26 bp, Homo sapiens
ccggcctgggcgtcccatggagctgc

SEQ ID NO: 13008 - DNA, 26 bp, Homo sapiens
cggcctgggcgtcccatggagctgct

SEQ ID NO: 13009 - DNA, 26 bp, Homo sapiens
ggcctgggcgtcccatggagctgctt

SEQ ID NO: 13010 - DNA, 26 bp, Homo sapiens
gcctgggcgtcccatggagctgcttc

SEQ ID NO: 13011 - DNA, 26 bp, Homo sapiens
cctgggcgtcccatggagctgcttcg

SEQ ID NO: 13012 - DNA, 26 bp, Homo sapiens
ctgggcgtcccatggagctgcttcga

SEQ ID NO: 13013 - DNA, 26 bp, Homo sapiens
tgggcgtcccatggagctgcttcgat

SEQ ID NO: 13014 - DNA, 26 bp, Homo sapiens
gggcgtcccatggagctgcttcgatc

SEQ ID NO: 13015 - DNA, 26 bp, Homo sapiens
ggcgtcccatggagctgcttcgatca

SEQ ID NO: 13016 - DNA, 26 bp, Homo sapiens
gcgtcccatggagctgcttcgatcac

SEQ ID NO: 13017 - DNA, 26 bp, Homo sapiens
cgtcccatggagctgcttcgatcaca

SEQ ID NO: 13018 - DNA, 26 bp, Homo sapiens
gtcccatggagctgcttcgatcacat

SEQ ID NO: 13019 - DNA, 26 bp, Homo sapiens
tcccatggagctgcttcgatcacatc

SEQ ID NO: 13020 - DNA, 26 bp, Homo sapiens
cccatggagctgcttcgatcacatcc

SEQ ID NO: 13021 - DNA, 26 bp, Homo sapiens
ccatggagctgcttcgatcacatccc

SEQ ID NO: 13022 - DNA, 26 bp, Homo sapiens
catggagctgcttcgatcacatcccc

SEQ ID NO: 13023 - DNA, 26 bp, Homo sapiens
atggagctgcttcgatcacatccccc

SEQ ID NO: 13024 - DNA, 26 bp, Homo sapiens
tggagctgcttcgatcacatccccct

SEQ ID NO: 13025 - DNA, 26 bp, Homo sapiens
ggagctgcttcgatcacatccccctg

SEQ ID NO: 13026 - DNA, 26 bp, Homo sapiens
gagctgcttcgatcacatccccctgg

SEQ ID NO: 13027 - DNA, 26 bp, Homo sapiens
agctgcttcgatcacatccccctggg

SEQ ID NO: 13028 - DNA, 26 bp, Homo sapiens
gctgcttcgatcacatccccctgggt

SEQ ID NO: 13029 - DNA, 26 bp, Homo sapiens
ctgcttcgatcacatccccctgggtg

SEQ ID NO: 13030 - DNA, 26 bp, Homo sapiens
tgcttcgatcacatccccctgggtgc

SEQ ID NO: 13031 - DNA, 26 bp, Homo sapiens
gcttcgatcacatccccctgggtgct

SEQ ID NO: 13032 - DNA, 26 bp, Homo sapiens
cttcgatcacatccccctgggtgctc

SEQ ID NO: 13033 - DNA, 26 bp, Homo sapiens
ttcgatcacatccccctgggtgctct

SEQ ID NO: 13034 - DNA, 26 bp, Homo sapiens
tcgatcacatccccctgggtgctctc

SEQ ID NO: 13035 - DNA, 26 bp, Homo sapiens
cgatcacatccccctgggtgctctct

SEQ ID NO: 13036 - DNA, 26 bp, Homo sapiens
gatcacatccccctgggtgctctctc

SEQ ID NO: 13037 - DNA, 26 bp, Homo sapiens
atcacatccccctgggtgctctctcc

SEQ ID NO: 13038 - DNA, 26 bp, Homo sapiens
tcacatccccctgggtgctctctccc

SEQ ID NO: 13039 - DNA, 26 bp, Homo sapiens
cacatccccctgggtgctctctccca

SEQ ID NO: 13040 - DNA, 26 bp, Homo sapiens
acatccccctgggtgctctctcccaa

SEQ ID NO: 13041 - DNA, 26 bp, Homo sapiens
catccccctgggtgctctctcccaag

SEQ ID NO: 13042 - DNA, 26 bp, Homo sapiens
atccccctgggtgctctctcccaaga

SEQ ID NO: 13043 - DNA, 26 bp, Homo sapiens
tccccctgggtgctctctcccaagag

SEQ ID NO: 13044 - DNA, 26 bp, Homo sapiens
ccccctgggtgctctctcccaagagc

SEQ ID NO: 13045 - DNA, 26 bp, Homo sapiens
cccctgggtgctctctcccaagagca

SEQ ID NO: 13046 - DNA, 26 bp, Homo sapiens
ccctgggtgctctctcccaagagcag

SEQ ID NO: 13047 - DNA, 26 bp, Homo sapiens
cctgggtgctctctcccaagagcaga

SEQ ID NO: 13048 - DNA, 26 bp, Homo sapiens
ctgggtgctctctcccaagagcagac

SEQ ID NO: 13049 - DNA, 26 bp, Homo sapiens
tgggtgctctctcccaagagcagacc

SEQ ID NO: 13050 - DNA, 26 bp, Homo sapiens
gggtgctctctcccaagagcagacct

SEQ ID NO: 13051 - DNA, 26 bp, Homo sapiens
ggtgctctctcccaagagcagacctc

SEQ ID NO: 13052 - DNA, 26 bp, Homo sapiens
gtgctctctcccaagagcagacctct

SEQ ID NO: 13053 - DNA, 26 bp, Homo sapiens
tgctctctcccaagagcagacctctg

SEQ ID NO: 13054 - DNA, 26 bp, Homo sapiens
gctctctcccaagagcagacctctgc

SEQ ID NO: 13055 - DNA, 26 bp, Homo sapiens
ctctctcccaagagcagacctctgct

SEQ ID NO: 13056 - DNA, 26 bp, Homo sapiens
tctctcccaagagcagacctctgctc

SEQ ID NO: 13057 - DNA, 26 bp, Homo sapiens
ctctcccaagagcagacctctgctct

SEQ ID NO: 13058 - DNA, 26 bp, Homo sapiens
tctcccaagagcagacctctgctctt

SEQ ID NO: 13059 - DNA, 26 bp, Homo sapiens
ctcccaagagcagacctctgctcttt

SEQ ID NO: 13060 - DNA, 26 bp, Homo sapiens
tcccaagagcagacctctgctctttc

SEQ ID NO: 13061 - DNA, 26 bp, Homo sapiens
cccaagagcagacctctgctctttca

SEQ ID NO: 13062 - DNA, 26 bp, Homo sapiens
ccaagagcagacctctgctctttcaa

SEQ ID NO: 13063 - DNA, 26 bp, Homo sapiens
caagagcagacctctgctctttcaag

SEQ ID NO: 13064 - DNA, 26 bp, Homo sapiens
aagagcagacctctgctctttcaaga

SEQ ID NO: 13065 - DNA, 26 bp, Homo sapiens
agagcagacctctgctctttcaagaa

SEQ ID NO: 13066 - DNA, 26 bp, Homo sapiens
gagcagacctctgctctttcaagaaa

SEQ ID NO: 13067 - DNA, 26 bp, Homo sapiens
agcagacctctgctctttcaagaaac

SEQ ID NO: 13068 - DNA, 26 bp, Homo sapiens
gcagacctctgctctttcaagaaacc

SEQ ID NO: 13069 - DNA, 26 bp, Homo sapiens
cagacctctgctctttcaagaaacca

SEQ ID NO: 13070 - DNA, 26 bp, Homo sapiens
agacctctgctctttcaagaaaccaa

SEQ ID NO: 13071 - DNA, 26 bp, Homo sapiens
gacctctgctctttcaagaaaccaac

SEQ ID NO: 13072 - DNA, 26 bp, Homo sapiens
acctctgctctttcaagaaaccaaca

SEQ ID NO: 13073 - DNA, 26 bp, Homo sapiens
cctctgctctttcaagaaaccaacac

SEQ ID NO: 13074 - DNA, 26 bp, Homo sapiens
ctctgctctttcaagaaaccaacact

SEQ ID NO: 13075 - DNA, 26 bp, Homo sapiens
tctgctctttcaagaaaccaacactg

SEQ ID NO: 13076 - DNA, 26 bp, Homo sapiens
ctgctctttcaagaaaccaacactgc

SEQ ID NO: 13077 - DNA, 26 bp, Homo sapiens
tgctctttcaagaaaccaacactgcc

SEQ ID NO: 13078 - DNA, 26 bp, Homo sapiens
gctctttcaagaaaccaacactgcct

SEQ ID NO: 13079 - DNA, 26 bp, Homo sapiens
ctctttcaagaaaccaacactgcctg

SEQ ID NO: 13080 - DNA, 26 bp, Homo sapiens
tctttcaagaaaccaacactgcctgc

SEQ ID NO: 13081 - DNA, 26 bp, Homo sapiens
ctttcaagaaaccaacactgcctgca

SEQ ID NO: 13082 - DNA, 26 bp, Homo sapiens
tttcaagaaaccaacactgcctgcag

SEQ ID NO: 13083 - DNA, 26 bp, Homo sapiens
ttcaagaaaccaacactgcctgcaga

SEQ ID NO: 13084 - DNA, 26 bp, Homo sapiens
tcaagaaaccaacactgcctgcagag

SEQ ID NO: 13085 - DNA, 26 bp, Homo sapiens
caagaaaccaacactgcctgcagagt

SEQ ID NO: 13086 - DNA, 26 bp, Homo sapiens
aagaaaccaacactgcctgcagagtg

SEQ ID NO: 13087 - DNA, 26 bp, Homo sapiens
agaaaccaacactgcctgcagagtgg

SEQ ID NO: 13088 - DNA, 26 bp, Homo sapiens
gaaaccaacactgcctgcagagtggc

SEQ ID NO: 13089 - DNA, 26 bp, Homo sapiens
aaaccaacactgcctgcagagtggca

SEQ ID NO: 13090 - DNA, 26 bp, Homo sapiens
aaccaacactgcctgcagagtggcag

SEQ ID NO: 13091 - DNA, 26 bp, Homo sapiens
accaacactgcctgcagagtggcagg

SEQ ID NO: 13092 - DNA, 26 bp, Homo sapiens
ccaacactgcctgcagagtggcaggt

SEQ ID NO: 13093 - DNA, 26 bp, Homo sapiens
caacactgcctgcagagtggcaggtc

SEQ ID NO: 13094 - DNA, 26 bp, Homo sapiens
aacactgcctgcagagtggcaggtca

SEQ ID NO: 13095 - DNA, 26 bp, Homo sapiens
acactgcctgcagagtggcaggtcac

SEQ ID NO: 13096 - DNA, 26 bp, Homo sapiens
cactgcctgcagagtggcaggtcact

SEQ ID NO: 13097 - DNA, 26 bp, Homo sapiens
actgcctgcagagtggcaggtcactg

SEQ ID NO: 13098 - DNA, 26 bp, Homo sapiens
ctgcctgcagagtggcaggtcactgc

SEQ ID NO: 13099 - DNA, 26 bp, Homo sapiens
tgcctgcagagtggcaggtcactgct

SEQ ID NO: 13100 - DNA, 26 bp, Homo sapiens
gcctgcagagtggcaggtcactgctg

SEQ ID NO: 13101 - DNA, 26 bp, Homo sapiens
cctgcagagtggcaggtcactgctga

SEQ ID NO: 13102 - DNA, 26 bp, Homo sapiens
ctgcagagtggcaggtcactgctgag

SEQ ID NO: 13103 - DNA, 26 bp, Homo sapiens
tgcagagtggcaggtcactgctgagc

SEQ ID NO: 13104 - DNA, 26 bp, Homo sapiens
gcagagtggcaggtcactgctgagct

SEQ ID NO: 13105 - DNA, 26 bp, Homo sapiens
cagagtggcaggtcactgctgagctc

SEQ ID NO: 13106 - DNA, 26 bp, Homo sapiens
agagtggcaggtcactgctgagctcc

SEQ ID NO: 13107 - DNA, 26 bp, Homo sapiens
gagtggcaggtcactgctgagctccc

SEQ ID NO: 13108 - DNA, 26 bp, Homo sapiens
agtggcaggtcactgctgagctcccg

SEQ ID NO: 13109 - DNA, 26 bp, Homo sapiens
gtggcaggtcactgctgagctcccga

SEQ ID NO: 13110 - DNA, 26 bp, Homo sapiens
tggcaggtcactgctgagctcccgag

SEQ ID NO: 13111 - DNA, 26 bp, Homo sapiens
ggcaggtcactgctgagctcccgagg

SEQ ID NO: 13112 - DNA, 26 bp, Homo sapiens
gcaggtcactgctgagctcccgaggg

SEQ ID NO: 13113 - DNA, 26 bp, Homo sapiens
caggtcactgctgagctcccgaggga

SEQ ID NO: 13114 - DNA, 26 bp, Homo sapiens
aggtcactgctgagctcccgagggag

SEQ ID NO: 13115 - DNA, 26 bp, Homo sapiens
ggtcactgctgagctcccgagggagg

SEQ ID NO: 13116 - DNA, 26 bp, Homo sapiens
gtcactgctgagctcccgagggaggc

SEQ ID NO: 13117 - DNA, 26 bp, Homo sapiens
tcactgctgagctcccgagggaggcc

SEQ ID NO: 13118 - DNA, 26 bp, Homo sapiens
cactgctgagctcccgagggaggcca

SEQ ID NO: 13119 - DNA, 26 bp, Homo sapiens
actgctgagctcccgagggaggccaa

SEQ ID NO: 13120 - DNA, 26 bp, Homo sapiens
ctgctgagctcccgagggaggccaaa

SEQ ID NO: 13121 - DNA, 26 bp, Homo sapiens
tgctgagctcccgagggaggccaaag

SEQ ID NO: 13122 - DNA, 26 bp, Homo sapiens
gctgagctcccgagggaggccaaagg

SEQ ID NO: 13123 - DNA, 26 bp, Homo sapiens
ctgagctcccgagggaggccaaagga

SEQ ID NO: 13124 - DNA, 26 bp, Homo sapiens
tgagctcccgagggaggccaaaggac

SEQ ID NO: 13125 - DNA, 26 bp, Homo sapiens
gagctcccgagggaggccaaaggaca

SEQ ID NO: 13126 - DNA, 26 bp, Homo sapiens
agctcccgagggaggccaaaggacaa

SEQ ID NO: 13127 - DNA, 26 bp, Homo sapiens
gctcccgagggaggccaaaggacaag

SEQ ID NO: 13128 - DNA, 26 bp, Homo sapiens
ctcccgagggaggccaaaggacaaga

SEQ ID NO: 13129 - DNA, 26 bp, Homo sapiens
tcccgagggaggccaaaggacaagat

SEQ ID NO: 13130 - DNA, 26 bp, Homo sapiens
cccgagggaggccaaaggacaagatg

SEQ ID NO: 13131 - DNA, 26 bp, Homo sapiens
ccgagggaggccaaaggacaagatgg

SEQ ID NO: 13132 - DNA, 26 bp, Homo sapiens
cgagggaggccaaaggacaagatggc

SEQ ID NO: 13133 - DNA, 26 bp, Homo sapiens
gagggaggccaaaggacaagatggct

SEQ ID NO: 13134 - DNA, 26 bp, Homo sapiens
agggaggccaaaggacaagatggctc

SEQ ID NO: 13135 - DNA, 26 bp, Homo sapiens
gggaggccaaaggacaagatggctcc

SEQ ID NO: 13136 - DNA, 26 bp, Homo sapiens
ggaggccaaaggacaagatggctcct

SEQ ID NO: 13137 - DNA, 26 bp, Homo sapiens
gaggccaaaggacaagatggctcctg

SEQ ID NO: 13138 - DNA, 26 bp, Homo sapiens
aggccaaaggacaagatggctcctgc

SEQ ID NO: 13139 - DNA, 26 bp, Homo sapiens
ggccaaaggacaagatggctcctgca

SEQ ID NO: 13140 - DNA, 26 bp, Homo sapiens
gccaaaggacaagatggctcctgcac

SEQ ID NO: 13141 - DNA, 26 bp, Homo sapiens
ccaaaggacaagatggctcctgcaca

SEQ ID NO: 13142 - DNA, 26 bp, Homo sapiens
caaaggacaagatggctcctgcacac

SEQ ID NO: 13143 - DNA, 26 bp, Homo sapiens
aaaggacaagatggctcctgcacaca

SEQ ID NO: 13144 - DNA, 26 bp, Homo sapiens
aaggacaagatggctcctgcacacag

SEQ ID NO: 13145 - DNA, 26 bp, Homo sapiens
aggacaagatggctcctgcacacaga

SEQ ID NO: 13146 - DNA, 26 bp, Homo sapiens
ggacaagatggctcctgcacacagac

SEQ ID NO: 13147 - DNA, 26 bp, Homo sapiens
gacaagatggctcctgcacacagaca

SEQ ID NO: 13148 - DNA, 26 bp, Homo sapiens
acaagatggctcctgcacacagacag

SEQ ID NO: 13149 - DNA, 26 bp, Homo sapiens
caagatggctcctgcacacagacagc

SEQ ID NO: 13150 - DNA, 26 bp, Homo sapiens
aagatggctcctgcacacagacagcc

SEQ ID NO: 13151 - DNA, 26 bp, Homo sapiens
agatggctcctgcacacagacagccc

SEQ ID NO: 13152 - DNA, 26 bp, Homo sapiens
gatggctcctgcacacagacagcccc

SEQ ID NO: 13153 - DNA, 26 bp, Homo sapiens
atggctcctgcacacagacagcccct

SEQ ID NO: 13154 - DNA, 26 bp, Homo sapiens
tggctcctgcacacagacagcccctt

SEQ ID NO: 13155 - DNA, 26 bp, Homo sapiens
ggctcctgcacacagacagccccttt

SEQ ID NO: 13156 - DNA, 26 bp, Homo sapiens
gctcctgcacacagacagcccctttc

SEQ ID NO: 13157 - DNA, 26 bp, Homo sapiens
ctcctgcacacagacagcccctttcc

SEQ ID NO: 13158 - DNA, 26 bp, Homo sapiens
tcctgcacacagacagcccctttcct

SEQ ID NO: 13159 - DNA, 26 bp, Homo sapiens
cctgcacacagacagcccctttcctc

SEQ ID NO: 13160 - DNA, 26 bp, Homo sapiens
ctgcacacagacagcccctttcctcc

SEQ ID NO: 13161 - DNA, 26 bp, Homo sapiens
tgcacacagacagcccctttcctccc

SEQ ID NO: 13162 - DNA, 26 bp, Homo sapiens
gcacacagacagcccctttcctccca

SEQ ID NO: 13163 - DNA, 26 bp, Homo sapiens
cacacagacagcccctttcctcccat

SEQ ID NO: 13164 - DNA, 26 bp, Homo sapiens
acacagacagcccctttcctcccatt

SEQ ID NO: 13165 - DNA, 26 bp, Homo sapiens
cacagacagcccctttcctcccatta

SEQ ID NO: 13166 - DNA, 26 bp, Homo sapiens
acagacagcccctttcctcccattat

SEQ ID NO: 13167 - DNA, 26 bp, Homo sapiens
cagacagcccctttcctcccattatt

SEQ ID NO: 13168 - DNA, 26 bp, Homo sapiens
agacagcccctttcctcccattattc

SEQ ID NO: 13169 - DNA, 26 bp, Homo sapiens
gacagcccctttcctcccattattca

SEQ ID NO: 13170 - DNA, 26 bp, Homo sapiens
acagcccctttcctcccattattcat

SEQ ID NO: 13171 - DNA, 26 bp, Homo sapiens
cagcccctttcctcccattattcatt

SEQ ID NO: 13172 - DNA, 26 bp, Homo sapiens
agcccctttcctcccattattcatta

SEQ ID NO: 13173 - DNA, 26 bp, Homo sapiens
gcccctttcctcccattattcattat

SEQ ID NO: 13174 - DNA, 26 bp, Homo sapiens
cccctttcctcccattattcattatc

SEQ ID NO: 13175 - DNA, 26 bp, Homo sapiens
ccctttcctcccattattcattatct

SEQ ID NO: 13176 - DNA, 26 bp, Homo sapiens
cctttcctcccattattcattatctg

SEQ ID NO: 13177 - DNA, 26 bp, Homo sapiens
ctttcctcccattattcattatctgg

SEQ ID NO: 13178 - DNA, 26 bp, Homo sapiens
tttcctcccattattcattatctggg

SEQ ID NO: 13179 - DNA, 26 bp, Homo sapiens
ttcctcccattattcattatctggga

SEQ ID NO: 13180 - DNA, 26 bp, Homo sapiens
tcctcccattattcattatctgggaa

SEQ ID NO: 13181 - DNA, 26 bp, Homo sapiens
cctcccattattcattatctgggaaa

SEQ ID NO: 13182 - DNA, 26 bp, Homo sapiens
ctcccattattcattatctgggaaat

SEQ ID NO: 13183 - DNA, 26 bp, Homo sapiens
tcccattattcattatctgggaaatc

SEQ ID NO: 13184 - DNA, 26 bp, Homo sapiens
cccattattcattatctgggaaatct

SEQ ID NO: 13185 - DNA, 26 bp, Homo sapiens
ccattattcattatctgggaaatctc

SEQ ID NO: 13186 - DNA, 26 bp, Homo sapiens
cattattcattatctgggaaatctct

SEQ ID NO: 13187 - DNA, 26 bp, Homo sapiens
attattcattatctgggaaatctctg

SEQ ID NO: 13188 - DNA, 26 bp, Homo sapiens
ttattcattatctgggaaatctctgc

SEQ ID NO: 13189 - DNA, 26 bp, Homo sapiens
tattcattatctgggaaatctctgcc

SEQ ID NO: 13190 - DNA, 26 bp, Homo sapiens
attcattatctgggaaatctctgcct

SEQ ID NO: 13191 - DNA, 26 bp, Homo sapiens
ttcattatctgggaaatctctgcctg

SEQ ID NO: 13192 - DNA, 26 bp, Homo sapiens
tcattatctgggaaatctctgcctga

SEQ ID NO: 13193 - DNA, 26 bp, Homo sapiens
cattatctgggaaatctctgcctgag

SEQ ID NO: 13194 - DNA, 26 bp, Homo sapiens
attatctgggaaatctctgcctgagt

SEQ ID NO: 13195 - DNA, 26 bp, Homo sapiens
ttatctgggaaatctctgcctgagtg

SEQ ID NO: 13196 - DNA, 26 bp, Homo sapiens
tatctgggaaatctctgcctgagtgt

SEQ ID NO: 13197 - DNA, 26 bp, Homo sapiens
atctgggaaatctctgcctgagtgtc

SEQ ID NO: 13198 - DNA, 26 bp, Homo sapiens
tctgggaaatctctgcctgagtgtct

SEQ ID NO: 13199 - DNA, 26 bp, Homo sapiens
ctgggaaatctctgcctgagtgtctc

SEQ ID NO: 13200 - DNA, 26 bp, Homo sapiens
tgggaaatctctgcctgagtgtctcc

SEQ ID NO: 13201 - DNA, 26 bp, Homo sapiens
gggaaatctctgcctgagtgtctcca

SEQ ID NO: 13202 - DNA, 26 bp, Homo sapiens
ggaaatctctgcctgagtgtctccag

SEQ ID NO: 13203 - DNA, 26 bp, Homo sapiens
gaaatctctgcctgagtgtctccagt

SEQ ID NO: 13204 - DNA, 26 bp, Homo sapiens
aaatctctgcctgagtgtctccagtt

SEQ ID NO: 13205 - DNA, 26 bp, Homo sapiens
aatctctgcctgagtgtctccagtta

SEQ ID NO: 13206 - DNA, 26 bp, Homo sapiens
atctctgcctgagtgtctccagttaa

SEQ ID NO: 13207 - DNA, 26 bp, Homo sapiens
tctctgcctgagtgtctccagttaac

SEQ ID NO: 13208 - DNA, 26 bp, Homo sapiens
ctctgcctgagtgtctccagttaaca

SEQ ID NO: 13209 - DNA, 26 bp, Homo sapiens
tctgcctgagtgtctccagttaacag

SEQ ID NO: 13210 - DNA, 26 bp, Homo sapiens
ctgcctgagtgtctccagttaacagc

SEQ ID NO: 13211 - DNA, 26 bp, Homo sapiens
tgcctgagtgtctccagttaacagcg

SEQ ID NO: 13212 - DNA, 26 bp, Homo sapiens
gcctgagtgtctccagttaacagcgc

SEQ ID NO: 13213 - DNA, 26 bp, Homo sapiens
cctgagtgtctccagttaacagcgcg

SEQ ID NO: 13214 - DNA, 26 bp, Homo sapiens
ctgagtgtctccagttaacagcgcgg

SEQ ID NO: 13215 - DNA, 26 bp, Homo sapiens
tgagtgtctccagttaacagcgcggt

SEQ ID NO: 13216 - DNA, 26 bp, Homo sapiens
gagtgtctccagttaacagcgcggtg

SEQ ID NO: 13217 - DNA, 26 bp, Homo sapiens
agtgtctccagttaacagcgcggtga

SEQ ID NO: 13218 - DNA, 26 bp, Homo sapiens
gtgtctccagttaacagcgcggtgag

SEQ ID NO: 13219 - DNA, 26 bp, Homo sapiens
tgtctccagttaacagcgcggtgaga

SEQ ID NO: 13220 - DNA, 26 bp, Homo sapiens
gtctccagttaacagcgcggtgagat

SEQ ID NO: 13221 - DNA, 26 bp, Homo sapiens
tctccagttaacagcgcggtgagatc

SEQ ID NO: 13222 - DNA, 26 bp, Homo sapiens
ctccagttaacagcgcggtgagatct

SEQ ID NO: 13223 - DNA, 26 bp, Homo sapiens
tccagttaacagcgcggtgagatctt

SEQ ID NO: 13224 - DNA, 26 bp, Homo sapiens
ccagttaacagcgcggtgagatcttt

SEQ ID NO: 13225 - DNA, 26 bp, Homo sapiens
cagttaacagcgcggtgagatctttc

SEQ ID NO: 13226 - DNA, 26 bp, Homo sapiens
agttaacagcgcggtgagatctttct

SEQ ID NO: 13227 - DNA, 26 bp, Homo sapiens
gttaacagcgcggtgagatctttctg

SEQ ID NO: 13228 - DNA, 26 bp, Homo sapiens
ttaacagcgcggtgagatctttctgg

SEQ ID NO: 13229 - DNA, 26 bp, Homo sapiens
taacagcgcggtgagatctttctgga

SEQ ID NO: 13230 - DNA, 26 bp, Homo sapiens
aacagcgcggtgagatctttctggat

SEQ ID NO: 13231 - DNA, 26 bp, Homo sapiens
acagcgcggtgagatctttctggatg

SEQ ID NO: 13232 - DNA, 26 bp, Homo sapiens
cagcgcggtgagatctttctggatgc

SEQ ID NO: 13233 - DNA, 26 bp, Homo sapiens
agcgcggtgagatctttctggatgct

SEQ ID NO: 13234 - DNA, 26 bp, Homo sapiens
gcgcggtgagatctttctggatgctc

SEQ ID NO: 13235 - DNA, 26 bp, Homo sapiens
cgcggtgagatctttctggatgctca

SEQ ID NO: 13236 - DNA, 26 bp, Homo sapiens
gcggtgagatctttctggatgctcaa

SEQ ID NO: 13237 - DNA, 26 bp, Homo sapiens
cggtgagatctttctggatgctcaaa

SEQ ID NO: 13238 - DNA, 26 bp, Homo sapiens
ggtgagatctttctggatgctcaaat

SEQ ID NO: 13239 - DNA, 26 bp, Homo sapiens
gtgagatctttctggatgctcaaata

SEQ ID NO: 13240 - DNA, 26 bp, Homo sapiens
tgagatctttctggatgctcaaataa

SEQ ID NO: 13241 - DNA, 26 bp, Homo sapiens
gagatctttctggatgctcaaataaa

SEQ ID NO: 13242 - DNA, 26 bp, Homo sapiens
agatctttctggatgctcaaataaaa

SEQ ID NO: 13243 - DNA, 26 bp, Homo sapiens
gatctttctggatgctcaaataaaaa

SEQ ID NO: 13244 - DNA, 26 bp, Homo sapiens
atctttctggatgctcaaataaaaac

SEQ ID NO: 13245 - DNA, 26 bp, Homo sapiens
tctttctggatgctcaaataaaaact

SEQ ID NO: 13246 - DNA, 26 bp, Homo sapiens
ctttctggatgctcaaataaaaactt

SEQ ID NO: 13247 - DNA, 26 bp, Homo sapiens
tttctggatgctcaaataaaaacttt

SEQ ID NO: 13248 - DNA, 26 bp, Homo sapiens
ttctggatgctcaaataaaaactttc

SEQ ID NO: 13249 - DNA, 26 bp, Homo sapiens
tctggatgctcaaataaaaactttcc

SEQ ID NO: 13250 - DNA, 26 bp, Homo sapiens
ctggatgctcaaataaaaactttcct

SEQ ID NO: 13251 - DNA, 26 bp, Homo sapiens
tggatgctcaaataaaaactttcctc

SEQ ID NO: 13252 - DNA, 26 bp, Homo sapiens
ggatgctcaaataaaaactttcctcc

SEQ ID NO: 13253 - DNA, 26 bp, Homo sapiens
gatgctcaaataaaaactttcctccg

SEQ ID NO: 13254 - DNA, 26 bp, Homo sapiens
atgctcaaataaaaactttcctccgt

SEQ ID NO: 13255 - DNA, 26 bp, Homo sapiens
tgctcaaataaaaactttcctccgtt

SEQ ID NO: 13256 - DNA, 26 bp, Homo sapiens
gctcaaataaaaactttcctccgttg

SEQ ID NO: 13257 - DNA, 26 bp, Homo sapiens
ctcaaataaaaactttcctccgttgt

SEQ ID NO: 13258 - DNA, 26 bp, Homo sapiens
tcaaataaaaactttcctccgttgtt

SEQ ID NO: 13259 - DNA, 26 bp, Homo sapiens
caaataaaaactttcctccgttgtta

SEQ ID NO: 13260 - DNA, 26 bp, Homo sapiens
aaataaaaactttcctccgttgttac

SEQ ID NO: 13261 - DNA, 26 bp, Homo sapiens
aataaaaactttcctccgttgttact

SEQ ID NO: 13262 - DNA, 26 bp, Homo sapiens
ataaaaactttcctccgttgttactt

SEQ ID NO: 13263 - DNA, 26 bp, Homo sapiens
taaaaactttcctccgttgttacttc

SEQ ID NO: 13264 - DNA, 26 bp, Homo sapiens
aaaaactttcctccgttgttacttca

SEQ ID NO: 13265 - DNA, 26 bp, Homo sapiens
aaaactttcctccgttgttacttcag

SEQ ID NO: 13266 - DNA, 26 bp, Homo sapiens
aaactttcctccgttgttacttcagc

SEQ ID NO: 13267 - DNA, 26 bp, Homo sapiens
aactttcctccgttgttacttcagct

SEQ ID NO: 13268 - DNA, 26 bp, Homo sapiens
actttcctccgttgttacttcagctg

SEQ ID NO: 13269 - DNA, 26 bp, Homo sapiens
ctttcctccgttgttacttcagctga

SEQ ID NO: 13270 - DNA, 26 bp, Homo sapiens
tttcctccgttgttacttcagctgaa

SEQ ID NO: 13271 - DNA, 26 bp, Homo sapiens
ttcctccgttgttacttcagctgaaa

SEQ ID NO: 13272 - DNA, 26 bp, Homo sapiens
tcctccgttgttacttcagctgaaag

SEQ ID NO: 13273 - DNA, 26 bp, Homo sapiens
cctccgttgttacttcagctgaaaga

SEQ ID NO: 13274 - DNA, 26 bp, Homo sapiens
ctccgttgttacttcagctgaaagag

SEQ ID NO: 13275 - DNA, 26 bp, Homo sapiens
tccgttgttacttcagctgaaagagg

SEQ ID NO: 13276 - DNA, 26 bp, Homo sapiens
ccgttgttacttcagctgaaagaggt

SEQ ID NO: 13277 - DNA, 26 bp, Homo sapiens
cgttgttacttcagctgaaagaggta

SEQ ID NO: 13278 - DNA, 26 bp, Homo sapiens
gttgttacttcagctgaaagaggtat

SEQ ID NO: 13279 - DNA, 26 bp, Homo sapiens
ttgttacttcagctgaaagaggtatt

SEQ ID NO: 13280 - DNA, 26 bp, Homo sapiens
tgttacttcagctgaaagaggtattt

SEQ ID NO: 13281 - DNA, 26 bp, Homo sapiens
gttacttcagctgaaagaggtatttc

SEQ ID NO: 13282 - DNA, 26 bp, Homo sapiens
ttacttcagctgaaagaggtatttct

SEQ ID NO: 13283 - DNA, 26 bp, Homo sapiens
tacttcagctgaaagaggtatttctg

SEQ ID NO: 13284 - DNA, 26 bp, Homo sapiens
acttcagctgaaagaggtatttctgg

SEQ ID NO: 13285 - DNA, 26 bp, Homo sapiens
cttcagctgaaagaggtatttctggt

SEQ ID NO: 13286 - DNA, 26 bp, Homo sapiens
ttcagctgaaagaggtatttctggta

SEQ ID NO: 13287 - DNA, 26 bp, Homo sapiens
tcagctgaaagaggtatttctggtaa

SEQ ID NO: 13288 - DNA, 26 bp, Homo sapiens
cagctgaaagaggtatttctggtaaa

SEQ ID NO: 13289 - DNA, 26 bp, Homo sapiens
agctgaaagaggtatttctggtaaat

SEQ ID NO: 13290 - DNA, 26 bp, Homo sapiens
gctgaaagaggtatttctggtaaatt

SEQ ID NO: 13291 - DNA, 26 bp, Homo sapiens
ctgaaagaggtatttctggtaaattt

SEQ ID NO: 13292 - DNA, 26 bp, Homo sapiens
tgaaagaggtatttctggtaaatttt

SEQ ID NO: 13293 - DNA, 26 bp, Homo sapiens
gaaagaggtatttctggtaaattttt

SEQ ID NO: 13294 - DNA, 26 bp, Homo sapiens
aaagaggtatttctggtaaatttttt

SEQ ID NO: 13295 - DNA, 26 bp, Homo sapiens
aagaggtatttctggtaaattttttt

SEQ ID NO: 13296 - DNA, 26 bp, Homo sapiens
agaggtatttctggtaaatttttttg

SEQ ID NO: 13297 - DNA, 26 bp, Homo sapiens
gaggtatttctggtaaatttttttgg

SEQ ID NO: 13298 - DNA, 26 bp, Homo sapiens
aggtatttctggtaaatttttttggc

SEQ ID NO: 13299 - DNA, 26 bp, Homo sapiens
ggtatttctggtaaatttttttggcc

SEQ ID NO: 13300 - DNA, 26 bp, Homo sapiens
gtatttctggtaaatttttttggcca

SEQ ID NO: 13301 - DNA, 26 bp, Homo sapiens
tatttctggtaaatttttttggccag

SEQ ID NO: 13302 - DNA, 26 bp, Homo sapiens
atttctggtaaatttttttggccagc

SEQ ID NO: 13303 - DNA, 26 bp, Homo sapiens
tttctggtaaatttttttggccagca

SEQ ID NO: 13304 - DNA, 26 bp, Homo sapiens
ttctggtaaatttttttggccagcag

SEQ ID NO: 13305 - DNA, 26 bp, Homo sapiens
tctggtaaatttttttggccagcagg

SEQ ID NO: 13306 - DNA, 26 bp, Homo sapiens
ctggtaaatttttttggccagcaggg

SEQ ID NO: 13307 - DNA, 26 bp, Homo sapiens
tggtaaatttttttggccagcaggga

SEQ ID NO: 13308 - DNA, 26 bp, Homo sapiens
ggtaaatttttttggccagcagggag

SEQ ID NO: 13309 - DNA, 26 bp, Homo sapiens
gtaaatttttttggccagcagggagc

SEQ ID NO: 13310 - DNA, 26 bp, Homo sapiens
taaatttttttggccagcagggagcg

SEQ ID NO: 13311 - DNA, 26 bp, Homo sapiens
aaatttttttggccagcagggagcgt

SEQ ID NO: 13312 - DNA, 26 bp, Homo sapiens
aatttttttggccagcagggagcgtt

SEQ ID NO: 13313 - DNA, 26 bp, Homo sapiens
atttttttggccagcagggagcgttt

SEQ ID NO: 13314 - DNA, 26 bp, Homo sapiens
tttttttggccagcagggagcgtttt

SEQ ID NO: 13315 - DNA, 26 bp, Homo sapiens
ttttttggccagcagggagcgttttg

SEQ ID NO: 13316 - DNA, 26 bp, Homo sapiens
tttttggccagcagggagcgttttgt

SEQ ID NO: 13317 - DNA, 26 bp, Homo sapiens
ttttggccagcagggagcgttttgtt

SEQ ID NO: 13318 - DNA, 26 bp, Homo sapiens
tttggccagcagggagcgttttgttg

SEQ ID NO: 13319 - DNA, 26 bp, Homo sapiens
ttggccagcagggagcgttttgttga

SEQ ID NO: 13320 - DNA, 26 bp, Homo sapiens
tggccagcagggagcgttttgttgac

SEQ ID NO: 13321 - DNA, 26 bp, Homo sapiens
ggccagcagggagcgttttgttgact

SEQ ID NO: 13322 - DNA, 26 bp, Homo sapiens
gccagcagggagcgttttgttgactc

SEQ ID NO: 13323 - DNA, 26 bp, Homo sapiens
ccagcagggagcgttttgttgactct

SEQ ID NO: 13324 - DNA, 26 bp, Homo sapiens
cagcagggagcgttttgttgactctc

SEQ ID NO: 13325 - DNA, 26 bp, Homo sapiens
agcagggagcgttttgttgactctct

SEQ ID NO: 13326 - DNA, 26 bp, Homo sapiens
gcagggagcgttttgttgactctctg

SEQ ID NO: 13327 - DNA, 26 bp, Homo sapiens
cagggagcgttttgttgactctctgt

SEQ ID NO: 13328 - DNA, 26 bp, Homo sapiens
agggagcgttttgttgactctctgtg

SEQ ID NO: 13329 - DNA, 26 bp, Homo sapiens
gggagcgttttgttgactctctgtgt

SEQ ID NO: 13330 - DNA, 26 bp, Homo sapiens
ggagcgttttgttgactctctgtgtt

SEQ ID NO: 13331 - DNA, 26 bp, Homo sapiens
gagcgttttgttgactctctgtgttt

SEQ ID NO: 13332 - DNA, 26 bp, Homo sapiens
agcgttttgttgactctctgtgtttt

SEQ ID NO: 13333 - DNA, 26 bp, Homo sapiens
gcgttttgttgactctctgtgtttta

SEQ ID NO: 13334 - DNA, 26 bp, Homo sapiens
cgttttgttgactctctgtgttttac

SEQ ID NO: 13335 - DNA, 26 bp, Homo sapiens
gttttgttgactctctgtgttttacg

SEQ ID NO: 13336 - DNA, 26 bp, Homo sapiens
ttttgttgactctctgtgttttacga

SEQ ID NO: 13337 - DNA, 26 bp, Homo sapiens
tttgttgactctctgtgttttacgac

SEQ ID NO: 13338 - DNA, 26 bp, Homo sapiens
ttgttgactctctgtgttttacgact

SEQ ID NO: 13339 - DNA, 26 bp, Homo sapiens
tgttgactctctgtgttttacgactg

SEQ ID NO: 13340 - DNA, 26 bp, Homo sapiens
gttgactctctgtgttttacgactgg

SEQ ID NO: 13341 - DNA, 26 bp, Homo sapiens
ttgactctctgtgttttacgactggc

SEQ ID NO: 13342 - DNA, 26 bp, Homo sapiens
tgactctctgtgttttacgactggca

SEQ ID NO: 13343 - DNA, 26 bp, Homo sapiens
gactctctgtgttttacgactggcag

SEQ ID NO: 13344 - DNA, 26 bp, Homo sapiens
actctctgtgttttacgactggcagt

SEQ ID NO: 13345 - DNA, 26 bp, Homo sapiens
ctctctgtgttttacgactggcagtg

SEQ ID NO: 13346 - DNA, 26 bp, Homo sapiens
tctctgtgttttacgactggcagtgt

SEQ ID NO: 13347 - DNA, 26 bp, Homo sapiens
ctctgtgttttacgactggcagtgtc

SEQ ID NO: 13348 - DNA, 26 bp, Homo sapiens
tctgtgttttacgactggcagtgtcc

SEQ ID NO: 13349 - DNA, 26 bp, Homo sapiens
ctgtgttttacgactggcagtgtcca

SEQ ID NO: 13350 - DNA, 26 bp, Homo sapiens
tgtgttttacgactggcagtgtccag

SEQ ID NO: 13351 - DNA, 26 bp, Homo sapiens
gtgttttacgactggcagtgtccagc

SEQ ID NO: 13352 - DNA, 26 bp, Homo sapiens
tgttttacgactggcagtgtccagct

SEQ ID NO: 13353 - DNA, 26 bp, Homo sapiens
gttttacgactggcagtgtccagctc

SEQ ID NO: 13354 - DNA, 26 bp, Homo sapiens
ttttacgactggcagtgtccagctct

SEQ ID NO: 13355 - DNA, 26 bp, Homo sapiens
tttacgactggcagtgtccagctctt

SEQ ID NO: 13356 - DNA, 26 bp, Homo sapiens
ttacgactggcagtgtccagctcttt

SEQ ID NO: 13357 - DNA, 26 bp, Homo sapiens
tacgactggcagtgtccagctctttt

SEQ ID NO: 13358 - DNA, 26 bp, Homo sapiens
acgactggcagtgtccagctcttttt

SEQ ID NO: 13359 - DNA, 26 bp, Homo sapiens
cgactggcagtgtccagctctttttc

SEQ ID NO: 13360 - DNA, 26 bp, Homo sapiens
gactggcagtgtccagctctttttcc

SEQ ID NO: 13361 - DNA, 26 bp, Homo sapiens
actggcagtgtccagctctttttcca

SEQ ID NO: 13362 - DNA, 26 bp, Homo sapiens
ctggcagtgtccagctctttttccac

SEQ ID NO: 13363 - DNA, 26 bp, Homo sapiens
tggcagtgtccagctctttttccacc

SEQ ID NO: 13364 - DNA, 26 bp, Homo sapiens
ggcagtgtccagctctttttccacct

SEQ ID NO: 13365 - DNA, 26 bp, Homo sapiens
gcagtgtccagctctttttccacctg

SEQ ID NO: 13366 - DNA, 26 bp, Homo sapiens
cagtgtccagctctttttccacctgc

SEQ ID NO: 13367 - DNA, 26 bp, Homo sapiens
agtgtccagctctttttccacctgct

SEQ ID NO: 13368 - DNA, 26 bp, Homo sapiens
gtgtccagctctttttccacctgctg

SEQ ID NO: 13369 - DNA, 26 bp, Homo sapiens
tgtccagctctttttccacctgctga

SEQ ID NO: 13370 - DNA, 26 bp, Homo sapiens
gtccagctctttttccacctgctgaa

SEQ ID NO: 13371 - DNA, 26 bp, Homo sapiens
tccagctctttttccacctgctgaac

SEQ ID NO: 13372 - DNA, 26 bp, Homo sapiens
ccagctctttttccacctgctgaact

SEQ ID NO: 13373 - DNA, 26 bp, Homo sapiens
cagctctttttccacctgctgaactg

SEQ ID NO: 13374 - DNA, 26 bp, Homo sapiens
agctctttttccacctgctgaactga

SEQ ID NO: 13375 - DNA, 26 bp, Homo sapiens
gctctttttccacctgctgaactgaa

SEQ ID NO: 13376 - DNA, 26 bp, Homo sapiens
ctctttttccacctgctgaactgaaa

SEQ ID NO: 13377 - DNA, 26 bp, Homo sapiens
tctttttccacctgctgaactgaaaa

SEQ ID NO: 13378 - DNA, 26 bp, Homo sapiens
ctttttccacctgctgaactgaaaaa

SEQ ID NO: 13379 - DNA, 26 bp, Homo sapiens
tttttccacctgctgaactgaaaaac

SEQ ID NO: 13380 - DNA, 26 bp, Homo sapiens
ttttccacctgctgaactgaaaaact

SEQ ID NO: 13381 - DNA, 26 bp, Homo sapiens
tttccacctgctgaactgaaaaacta

SEQ ID NO: 13382 - DNA, 26 bp, Homo sapiens
ttccacctgctgaactgaaaaactag

SEQ ID NO: 13383 - DNA, 26 bp, Homo sapiens
tccacctgctgaactgaaaaactaga

SEQ ID NO: 13384 - DNA, 26 bp, Homo sapiens
ccacctgctgaactgaaaaactagaa

SEQ ID NO: 13385 - DNA, 26 bp, Homo sapiens
cacctgctgaactgaaaaactagaaa

SEQ ID NO: 13386 - DNA, 26 bp, Homo sapiens
acctgctgaactgaaaaactagaaac

SEQ ID NO: 13387 - DNA, 26 bp, Homo sapiens
cctgctgaactgaaaaactagaaaca

SEQ ID NO: 13388 - DNA, 26 bp, Homo sapiens
ctgctgaactgaaaaactagaaacag

SEQ ID NO: 13389 - DNA, 26 bp, Homo sapiens
tgctgaactgaaaaactagaaacagc

SEQ ID NO: 13390 - DNA, 26 bp, Homo sapiens
gctgaactgaaaaactagaaacagca

SEQ ID NO: 13391 - DNA, 26 bp, Homo sapiens
ctgaactgaaaaactagaaacagcat

SEQ ID NO: 13392 - DNA, 26 bp, Homo sapiens
tgaactgaaaaactagaaacagcatc

SEQ ID NO: 13393 - DNA, 26 bp, Homo sapiens
gaactgaaaaactagaaacagcatct

SEQ ID NO: 13394 - DNA, 26 bp, Homo sapiens
aactgaaaaactagaaacagcatctt

SEQ ID NO: 13395 - DNA, 26 bp, Homo sapiens
actgaaaaactagaaacagcatcttg

SEQ ID NO: 13396 - DNA, 26 bp, Homo sapiens
ctgaaaaactagaaacagcatcttgg

SEQ ID NO: 13397 - DNA, 26 bp, Homo sapiens
tgaaaaactagaaacagcatcttggt

SEQ ID NO: 13398 - DNA, 26 bp, Homo sapiens
gaaaaactagaaacagcatcttggtc

SEQ ID NO: 13399 - DNA, 26 bp, Homo sapiens
aaaaactagaaacagcatcttggtcc

SEQ ID NO: 13400 - DNA, 26 bp, Homo sapiens
aaaactagaaacagcatcttggtcca

SEQ ID NO: 13401 - DNA, 26 bp, Homo sapiens
aaactagaaacagcatcttggtccag

SEQ ID NO: 13402 - DNA, 26 bp, Homo sapiens
aactagaaacagcatcttggtccagt

SEQ ID NO: 13403 - DNA, 26 bp, Homo sapiens
actagaaacagcatcttggtccagta

SEQ ID NO: 13404 - DNA, 26 bp, Homo sapiens
ctagaaacagcatcttggtccagtac

SEQ ID NO: 13405 - DNA, 26 bp, Homo sapiens
tagaaacagcatcttggtccagtacc

SEQ ID NO: 13406 - DNA, 26 bp, Homo sapiens
agaaacagcatcttggtccagtacct

SEQ ID NO: 13407 - DNA, 26 bp, Homo sapiens
gaaacagcatcttggtccagtacctt

SEQ ID NO: 13408 - DNA, 26 bp, Homo sapiens
aaacagcatcttggtccagtaccttt

SEQ ID NO: 13409 - DNA, 26 bp, Homo sapiens
aacagcatcttggtccagtacctttg

SEQ ID NO: 13410 - DNA, 26 bp, Homo sapiens
acagcatcttggtccagtacctttgt

SEQ ID NO: 13411 - DNA, 26 bp, Homo sapiens
cagcatcttggtccagtacctttgta

SEQ ID NO: 13412 - DNA, 26 bp, Homo sapiens
agcatcttggtccagtacctttgtag

SEQ ID NO: 13413 - DNA, 26 bp, Homo sapiens
gcatcttggtccagtacctttgtagc

SEQ ID NO: 13414 - DNA, 26 bp, Homo sapiens
catcttggtccagtacctttgtagcc

SEQ ID NO: 13415 - DNA, 26 bp, Homo sapiens
atcttggtccagtacctttgtagcct

SEQ ID NO: 13416 - DNA, 26 bp, Homo sapiens
tcttggtccagtacctttgtagcctg

SEQ ID NO: 13417 - DNA, 26 bp, Homo sapiens
cttggtccagtacctttgtagcctgt

SEQ ID NO: 13418 - DNA, 26 bp, Homo sapiens
ttggtccagtacctttgtagcctgta

SEQ ID NO: 13419 - DNA, 26 bp, Homo sapiens
tggtccagtacctttgtagcctgtaa

SEQ ID NO: 13420 - DNA, 26 bp, Homo sapiens
ggtccagtacctttgtagcctgtaat

SEQ ID NO: 13421 - DNA, 26 bp, Homo sapiens
gtccagtacctttgtagcctgtaatg

SEQ ID NO: 13422 - DNA, 26 bp, Homo sapiens
tccagtacctttgtagcctgtaatgt

SEQ ID NO: 13423 - DNA, 26 bp, Homo sapiens
ccagtacctttgtagcctgtaatgtt

SEQ ID NO: 13424 - DNA, 26 bp, Homo sapiens
cagtacctttgtagcctgtaatgttc

SEQ ID NO: 13425 - DNA, 26 bp, Homo sapiens
agtacctttgtagcctgtaatgttcc

SEQ ID NO: 13426 - DNA, 26 bp, Homo sapiens
gtacctttgtagcctgtaatgttccg

SEQ ID NO: 13427 - DNA, 26 bp, Homo sapiens
tacctttgtagcctgtaatgttccgg

SEQ ID NO: 13428 - DNA, 26 bp, Homo sapiens
acctttgtagcctgtaatgttccgga

SEQ ID NO: 13429 - DNA, 26 bp, Homo sapiens
cctttgtagcctgtaatgttccggaa

SEQ ID NO: 13430 - DNA, 26 bp, Homo sapiens
ctttgtagcctgtaatgttccggaaa

SEQ ID NO: 13431 - DNA, 26 bp, Homo sapiens
tttgtagcctgtaatgttccggaaat

SEQ ID NO: 13432 - DNA, 26 bp, Homo sapiens
ttgtagcctgtaatgttccggaaatg

SEQ ID NO: 13433 - DNA, 26 bp, Homo sapiens
tgtagcctgtaatgttccggaaatga

SEQ ID NO: 13434 - DNA, 26 bp, Homo sapiens
gtagcctgtaatgttccggaaatgat

SEQ ID NO: 13435 - DNA, 26 bp, Homo sapiens
tagcctgtaatgttccggaaatgatt

SEQ ID NO: 13436 - DNA, 26 bp, Homo sapiens
agcctgtaatgttccggaaatgattc

SEQ ID NO: 13437 - DNA, 26 bp, Homo sapiens
gcctgtaatgttccggaaatgattct

SEQ ID NO: 13438 - DNA, 26 bp, Homo sapiens
cctgtaatgttccggaaatgattctg

SEQ ID NO: 13439 - DNA, 26 bp, Homo sapiens
ctgtaatgttccggaaatgattctgg

SEQ ID NO: 13440 - DNA, 26 bp, Homo sapiens
tgtaatgttccggaaatgattctggc

SEQ ID NO: 13441 - DNA, 26 bp, Homo sapiens
gtaatgttccggaaatgattctggct

SEQ ID NO: 13442 - DNA, 26 bp, Homo sapiens
taatgttccggaaatgattctggctt

SEQ ID NO: 13443 - DNA, 26 bp, Homo sapiens
aatgttccggaaatgattctggcttc

SEQ ID NO: 13444 - DNA, 26 bp, Homo sapiens
atgttccggaaatgattctggcttct

SEQ ID NO: 13445 - DNA, 26 bp, Homo sapiens
tgttccggaaatgattctggcttctg

SEQ ID NO: 13446 - DNA, 26 bp, Homo sapiens
gttccggaaatgattctggcttctgt

SEQ ID NO: 13447 - DNA, 26 bp, Homo sapiens
ttccggaaatgattctggcttctgtg

SEQ ID NO: 13448 - DNA, 26 bp, Homo sapiens
tccggaaatgattctggcttctgtgg

SEQ ID NO: 13449 - DNA, 26 bp, Homo sapiens
ccggaaatgattctggcttctgtggc

SEQ ID NO: 13450 - DNA, 26 bp, Homo sapiens
cggaaatgattctggcttctgtggct

SEQ ID NO: 13451 - DNA, 26 bp, Homo sapiens
ggaaatgattctggcttctgtggctt

SEQ ID NO: 13452 - DNA, 26 bp, Homo sapiens
gaaatgattctggcttctgtggcttt

SEQ ID NO: 13453 - DNA, 26 bp, Homo sapiens
aaatgattctggcttctgtggctttc

SEQ ID NO: 13454 - DNA, 26 bp, Homo sapiens
aatgattctggcttctgtggctttca

SEQ ID NO: 13455 - DNA, 26 bp, Homo sapiens
atgattctggcttctgtggctttcag

SEQ ID NO: 13456 - DNA, 26 bp, Homo sapiens
tgattctggcttctgtggctttcaga

SEQ ID NO: 13457 - DNA, 26 bp, Homo sapiens
gattctggcttctgtggctttcagag

SEQ ID NO: 13458 - DNA, 26 bp, Homo sapiens
attctggcttctgtggctttcagagc

SEQ ID NO: 13459 - DNA, 26 bp, Homo sapiens
ttctggcttctgtggctttcagagct

SEQ ID NO: 13460 - DNA, 26 bp, Homo sapiens
tctggcttctgtggctttcagagctg

SEQ ID NO: 13461 - DNA, 26 bp, Homo sapiens
ctggcttctgtggctttcagagctga

SEQ ID NO: 13462 - DNA, 26 bp, Homo sapiens
tggcttctgtggctttcagagctgaa

SEQ ID NO: 13463 - DNA, 26 bp, Homo sapiens
ggcttctgtggctttcagagctgaaa

SEQ ID NO: 13464 - DNA, 26 bp, Homo sapiens
gcttctgtggctttcagagctgaaat

SEQ ID NO: 13465 - DNA, 26 bp, Homo sapiens
cttctgtggctttcagagctgaaatc

SEQ ID NO: 13466 - DNA, 26 bp, Homo sapiens
ttctgtggctttcagagctgaaatca

SEQ ID NO: 13467 - DNA, 26 bp, Homo sapiens
tctgtggctttcagagctgaaatcaa

SEQ ID NO: 13468 - DNA, 26 bp, Homo sapiens
ctgtggctttcagagctgaaatcaaa

SEQ ID NO: 13469 - DNA, 26 bp, Homo sapiens
tgtggctttcagagctgaaatcaaag

SEQ ID NO: 13470 - DNA, 26 bp, Homo sapiens
gtggctttcagagctgaaatcaaaga

SEQ ID NO: 13471 - DNA, 26 bp, Homo sapiens
tggctttcagagctgaaatcaaagag

SEQ ID NO: 13472 - DNA, 26 bp, Homo sapiens
ggctttcagagctgaaatcaaagagt

SEQ ID NO: 13473 - DNA, 26 bp, Homo sapiens
gctttcagagctgaaatcaaagagtc

SEQ ID NO: 13474 - DNA, 26 bp, Homo sapiens
ctttcagagctgaaatcaaagagtca

SEQ ID NO: 13475 - DNA, 26 bp, Homo sapiens
tttcagagctgaaatcaaagagtcaa

SEQ ID NO: 13476 - DNA, 26 bp, Homo sapiens
ttcagagctgaaatcaaagagtcaat

SEQ ID NO: 13477 - DNA, 26 bp, Homo sapiens
tcagagctgaaatcaaagagtcaatg

SEQ ID NO: 13478 - DNA, 26 bp, Homo sapiens
cagagctgaaatcaaagagtcaatgg

SEQ ID NO: 13479 - DNA, 26 bp, Homo sapiens
agagctgaaatcaaagagtcaatggg

SEQ ID NO: 13480 - DNA, 26 bp, Homo sapiens
gagctgaaatcaaagagtcaatgggc

SEQ ID NO: 13481 - DNA, 26 bp, Homo sapiens
agctgaaatcaaagagtcaatgggct

SEQ ID NO: 13482 - DNA, 26 bp, Homo sapiens
gctgaaatcaaagagtcaatgggctg

SEQ ID NO: 13483 - DNA, 26 bp, Homo sapiens
ctgaaatcaaagagtcaatgggctgt

SEQ ID NO: 13484 - DNA, 26 bp, Homo sapiens
tgaaatcaaagagtcaatgggctgta

SEQ ID NO: 13485 - DNA, 26 bp, Homo sapiens
gaaatcaaagagtcaatgggctgtaa

SEQ ID NO: 13486 - DNA, 26 bp, Homo sapiens
aaatcaaagagtcaatgggctgtaaa

SEQ ID NO: 13487 - DNA, 26 bp, Homo sapiens
aatcaaagagtcaatgggctgtaaac

SEQ ID NO: 13488 - DNA, 26 bp, Homo sapiens
atcaaagagtcaatgggctgtaaact

SEQ ID NO: 13489 - DNA, 26 bp, Homo sapiens
tcaaagagtcaatgggctgtaaactt

SEQ ID NO: 13490 - DNA, 26 bp, Homo sapiens
caaagagtcaatgggctgtaaacttt

SEQ ID NO: 13491 - DNA, 26 bp, Homo sapiens
aaagagtcaatgggctgtaaactttg

SEQ ID NO: 13492 - DNA, 26 bp, Homo sapiens
aagagtcaatgggctgtaaactttgt

SEQ ID NO: 13493 - DNA, 26 bp, Homo sapiens
agagtcaatgggctgtaaactttgtt

SEQ ID NO: 13494 - DNA, 26 bp, Homo sapiens
gagtcaatgggctgtaaactttgttc

SEQ ID NO: 13495 - DNA, 26 bp, Homo sapiens
agtcaatgggctgtaaactttgttcc

SEQ ID NO: 13496 - DNA, 26 bp, Homo sapiens
gtcaatgggctgtaaactttgttcct

SEQ ID NO: 13497 - DNA, 26 bp, Homo sapiens
tcaatgggctgtaaactttgttcctt

SEQ ID NO: 13498 - DNA, 26 bp, Homo sapiens
caatgggctgtaaactttgttccttg

SEQ ID NO: 13499 - DNA, 26 bp, Homo sapiens
aatgggctgtaaactttgttccttga

SEQ ID NO: 13500 - DNA, 26 bp, Homo sapiens
atgggctgtaaactttgttccttgag

SEQ ID NO: 13501 - DNA, 26 bp, Homo sapiens
tgggctgtaaactttgttccttgaga

SEQ ID NO: 13502 - DNA, 26 bp, Homo sapiens
gggctgtaaactttgttccttgagat

SEQ ID NO: 13503 - DNA, 26 bp, Homo sapiens
ggctgtaaactttgttccttgagatg

SEQ ID NO: 13504 - DNA, 26 bp, Homo sapiens
gctgtaaactttgttccttgagatga

SEQ ID NO: 13505 - DNA, 26 bp, Homo sapiens
ctgtaaactttgttccttgagatgac

SEQ ID NO: 13506 - DNA, 26 bp, Homo sapiens
tgtaaactttgttccttgagatgact

SEQ ID NO: 13507 - DNA, 26 bp, Homo sapiens
gtaaactttgttccttgagatgactt

SEQ ID NO: 13508 - DNA, 26 bp, Homo sapiens
taaactttgttccttgagatgacttt

SEQ ID NO: 13509 - DNA, 26 bp, Homo sapiens
aaactttgttccttgagatgactttg

SEQ ID NO: 13510 - DNA, 26 bp, Homo sapiens
aactttgttccttgagatgactttga

SEQ ID NO: 13511 - DNA, 26 bp, Homo sapiens
actttgttccttgagatgactttgag

SEQ ID NO: 13512 - DNA, 26 bp, Homo sapiens
ctttgttccttgagatgactttgaga

SEQ ID NO: 13513 - DNA, 26 bp, Homo sapiens
tttgttccttgagatgactttgagag

SEQ ID NO: 13514 - DNA, 26 bp, Homo sapiens
ttgttccttgagatgactttgagagg

SEQ ID NO: 13515 - DNA, 26 bp, Homo sapiens
tgttccttgagatgactttgagaggg

SEQ ID NO: 13516 - DNA, 26 bp, Homo sapiens
gttccttgagatgactttgagagggg

SEQ ID NO: 13517 - DNA, 26 bp, Homo sapiens
ttccttgagatgactttgagaggggg

SEQ ID NO: 13518 - DNA, 26 bp, Homo sapiens
tccttgagatgactttgagagggggc

SEQ ID NO: 13519 - DNA, 26 bp, Homo sapiens
ccttgagatgactttgagagggggcc

SEQ ID NO: 13520 - DNA, 26 bp, Homo sapiens
cttgagatgactttgagagggggcct

SEQ ID NO: 13521 - DNA, 26 bp, Homo sapiens
ttgagatgactttgagagggggcctc

SEQ ID NO: 13522 - DNA, 26 bp, Homo sapiens
tgagatgactttgagagggggcctct

SEQ ID NO: 13523 - DNA, 26 bp, Homo sapiens
gagatgactttgagagggggcctctc

SEQ ID NO: 13524 - DNA, 26 bp, Homo sapiens
agatgactttgagagggggcctctct

SEQ ID NO: 13525 - DNA, 26 bp, Homo sapiens
gatgactttgagagggggcctctctg

SEQ ID NO: 13526 - DNA, 26 bp, Homo sapiens
atgactttgagagggggcctctctga

SEQ ID NO: 13527 - DNA, 26 bp, Homo sapiens
tgactttgagagggggcctctctgac

SEQ ID NO: 13528 - DNA, 26 bp, Homo sapiens
gactttgagagggggcctctctgaca

SEQ ID NO: 13529 - DNA, 26 bp, Homo sapiens
actttgagagggggcctctctgacat

SEQ ID NO: 13530 - DNA, 26 bp, Homo sapiens
ctttgagagggggcctctctgacatc

SEQ ID NO: 13531 - DNA, 26 bp, Homo sapiens
tttgagagggggcctctctgacatct

SEQ ID NO: 13532 - DNA, 26 bp, Homo sapiens
ttgagagggggcctctctgacatctt

SEQ ID NO: 13533 - DNA, 26 bp, Homo sapiens
tgagagggggcctctctgacatcttt

SEQ ID NO: 13534 - DNA, 26 bp, Homo sapiens
gagagggggcctctctgacatctttt

SEQ ID NO: 13535 - DNA, 26 bp, Homo sapiens
agagggggcctctctgacatcttttg

SEQ ID NO: 13536 - DNA, 26 bp, Homo sapiens
gagggggcctctctgacatcttttgg

SEQ ID NO: 13537 - DNA, 26 bp, Homo sapiens
agggggcctctctgacatcttttggt

SEQ ID NO: 13538 - DNA, 26 bp, Homo sapiens
gggggcctctctgacatcttttggtc

SEQ ID NO: 13539 - DNA, 26 bp, Homo sapiens
ggggcctctctgacatcttttggtcc

SEQ ID NO: 13540 - DNA, 26 bp, Homo sapiens
gggcctctctgacatcttttggtcct

SEQ ID NO: 13541 - DNA, 26 bp, Homo sapiens
ggcctctctgacatcttttggtcctt

SEQ ID NO: 13542 - DNA, 26 bp, Homo sapiens
gcctctctgacatcttttggtccttc

SEQ ID NO: 13543 - DNA, 26 bp, Homo sapiens
cctctctgacatcttttggtccttct

SEQ ID NO: 13544 - DNA, 26 bp, Homo sapiens
ctctctgacatcttttggtccttctg

SEQ ID NO: 13545 - DNA, 26 bp, Homo sapiens
tctctgacatcttttggtccttctgt

SEQ ID NO: 13546 - DNA, 26 bp, Homo sapiens
ctctgacatcttttggtccttctgta

SEQ ID NO: 13547 - DNA, 26 bp, Homo sapiens
tctgacatcttttggtccttctgtaa

SEQ ID NO: 13548 - DNA, 26 bp, Homo sapiens
ctgacatcttttggtccttctgtaac

SEQ ID NO: 13549 - DNA, 26 bp, Homo sapiens
tgacatcttttggtccttctgtaaca

SEQ ID NO: 13550 - DNA, 26 bp, Homo sapiens
gacatcttttggtccttctgtaacac

SEQ ID NO: 13551 - DNA, 26 bp, Homo sapiens
acatcttttggtccttctgtaacact

SEQ ID NO: 13552 - DNA, 26 bp, Homo sapiens
catcttttggtccttctgtaacactg

SEQ ID NO: 13553 - DNA, 26 bp, Homo sapiens
atcttttggtccttctgtaacactgt

SEQ ID NO: 13554 - DNA, 26 bp, Homo sapiens
tcttttggtccttctgtaacactgtc

SEQ ID NO: 13555 - DNA, 26 bp, Homo sapiens
cttttggtccttctgtaacactgtcg

SEQ ID NO: 13556 - DNA, 26 bp, Homo sapiens
ttttggtccttctgtaacactgtcga

SEQ ID NO: 13557 - DNA, 26 bp, Homo sapiens
tttggtccttctgtaacactgtcgag

SEQ ID NO: 13558 - DNA, 26 bp, Homo sapiens
ttggtccttctgtaacactgtcgagc

SEQ ID NO: 13559 - DNA, 26 bp, Homo sapiens
tggtccttctgtaacactgtcgagcc

SEQ ID NO: 13560 - DNA, 26 bp, Homo sapiens
ggtccttctgtaacactgtcgagccc

SEQ ID NO: 13561 - DNA, 26 bp, Homo sapiens
gtccttctgtaacactgtcgagccca

SEQ ID NO: 13562 - DNA, 26 bp, Homo sapiens
tccttctgtaacactgtcgagcccag

SEQ ID NO: 13563 - DNA, 26 bp, Homo sapiens
ccttctgtaacactgtcgagcccaga

SEQ ID NO: 13564 - DNA, 26 bp, Homo sapiens
cttctgtaacactgtcgagcccagag

SEQ ID NO: 13565 - DNA, 26 bp, Homo sapiens
ttctgtaacactgtcgagcccagagt

SEQ ID NO: 13566 - DNA, 26 bp, Homo sapiens
tctgtaacactgtcgagcccagagtg

SEQ ID NO: 13567 - DNA, 26 bp, Homo sapiens
ctgtaacactgtcgagcccagagtgg

SEQ ID NO: 13568 - DNA, 26 bp, Homo sapiens
tgtaacactgtcgagcccagagtggc

SEQ ID NO: 13569 - DNA, 26 bp, Homo sapiens
gtaacactgtcgagcccagagtggca

SEQ ID NO: 13570 - DNA, 26 bp, Homo sapiens
taacactgtcgagcccagagtggcag

SEQ ID NO: 13571 - DNA, 26 bp, Homo sapiens
aacactgtcgagcccagagtggcagc

SEQ ID NO: 13572 - DNA, 26 bp, Homo sapiens
acactgtcgagcccagagtggcagcc

SEQ ID NO: 13573 - DNA, 26 bp, Homo sapiens
cactgtcgagcccagagtggcagcca

SEQ ID NO: 13574 - DNA, 26 bp, Homo sapiens
actgtcgagcccagagtggcagccag

SEQ ID NO: 13575 - DNA, 26 bp, Homo sapiens
ctgtcgagcccagagtggcagccagt

SEQ ID NO: 13576 - DNA, 26 bp, Homo sapiens
tgtcgagcccagagtggcagccagta

SEQ ID NO: 13577 - DNA, 26 bp, Homo sapiens
gtcgagcccagagtggcagccagtaa

SEQ ID NO: 13578 - DNA, 26 bp, Homo sapiens
tcgagcccagagtggcagccagtaag

SEQ ID NO: 13579 - DNA, 26 bp, Homo sapiens
cgagcccagagtggcagccagtaaga

SEQ ID NO: 13580 - DNA, 26 bp, Homo sapiens
gagcccagagtggcagccagtaagag

SEQ ID NO: 13581 - DNA, 26 bp, Homo sapiens
agcccagagtggcagccagtaagagg

SEQ ID NO: 13582 - DNA, 26 bp, Homo sapiens
gcccagagtggcagccagtaagaggc

SEQ ID NO: 13583 - DNA, 26 bp, Homo sapiens
cccagagtggcagccagtaagaggct

SEQ ID NO: 13584 - DNA, 26 bp, Homo sapiens
ccagagtggcagccagtaagaggctg

SEQ ID NO: 13585 - DNA, 26 bp, Homo sapiens
cagagtggcagccagtaagaggctgg

SEQ ID NO: 13586 - DNA, 26 bp, Homo sapiens
agagtggcagccagtaagaggctgga

SEQ ID NO: 13587 - DNA, 26 bp, Homo sapiens
gagtggcagccagtaagaggctggac

SEQ ID NO: 13588 - DNA, 26 bp, Homo sapiens
agtggcagccagtaagaggctggaca

SEQ ID NO: 13589 - DNA, 26 bp, Homo sapiens
gtggcagccagtaagaggctggacac

SEQ ID NO: 13590 - DNA, 26 bp, Homo sapiens
tggcagccagtaagaggctggacacc

SEQ ID NO: 13591 - DNA, 26 bp, Homo sapiens
ggcagccagtaagaggctggacaccc

SEQ ID NO: 13592 - DNA, 26 bp, Homo sapiens
gcagccagtaagaggctggacaccct

SEQ ID NO: 13593 - DNA, 26 bp, Homo sapiens
cagccagtaagaggctggacaccctg

SEQ ID NO: 13594 - DNA, 26 bp, Homo sapiens
agccagtaagaggctggacaccctgc

SEQ ID NO: 13595 - DNA, 26 bp, Homo sapiens
gccagtaagaggctggacaccctgct

SEQ ID NO: 13596 - DNA, 26 bp, Homo sapiens
ccagtaagaggctggacaccctgctg

SEQ ID NO: 13597 - DNA, 26 bp, Homo sapiens
cagtaagaggctggacaccctgctgc

SEQ ID NO: 13598 - DNA, 26 bp, Homo sapiens
agtaagaggctggacaccctgctgct

SEQ ID NO: 13599 - DNA, 26 bp, Homo sapiens
gtaagaggctggacaccctgctgctc

SEQ ID NO: 13600 - DNA, 26 bp, Homo sapiens
taagaggctggacaccctgctgctct

SEQ ID NO: 13601 - DNA, 26 bp, Homo sapiens
aagaggctggacaccctgctgctctt

SEQ ID NO: 13602 - DNA, 26 bp, Homo sapiens
agaggctggacaccctgctgctcttg

SEQ ID NO: 13603 - DNA, 26 bp, Homo sapiens
gaggctggacaccctgctgctcttgt

SEQ ID NO: 13604 - DNA, 26 bp, Homo sapiens
aggctggacaccctgctgctcttgtg

SEQ ID NO: 13605 - DNA, 26 bp, Homo sapiens
ggctggacaccctgctgctcttgtgg

SEQ ID NO: 13606 - DNA, 26 bp, Homo sapiens
gctggacaccctgctgctcttgtggg

SEQ ID NO: 13607 - DNA, 26 bp, Homo sapiens
ctggacaccctgctgctcttgtgggt

SEQ ID NO: 13608 - DNA, 26 bp, Homo sapiens
tggacaccctgctgctcttgtgggtg

SEQ ID NO: 13609 - DNA, 26 bp, Homo sapiens
ggacaccctgctgctcttgtgggtgg

SEQ ID NO: 13610 - DNA, 26 bp, Homo sapiens
gacaccctgctgctcttgtgggtggc

SEQ ID NO: 13611 - DNA, 26 bp, Homo sapiens
acaccctgctgctcttgtgggtggca

SEQ ID NO: 13612 - DNA, 26 bp, Homo sapiens
caccctgctgctcttgtgggtggcat

SEQ ID NO: 13613 - DNA, 26 bp, Homo sapiens
accctgctgctcttgtgggtggcatg

SEQ ID NO: 13614 - DNA, 26 bp, Homo sapiens
ccctgctgctcttgtgggtggcatgg

SEQ ID NO: 13615 - DNA, 26 bp, Homo sapiens
cctgctgctcttgtgggtggcatggc

SEQ ID NO: 13616 - DNA, 26 bp, Homo sapiens
ctgctgctcttgtgggtggcatggca

SEQ ID NO: 13617 - DNA, 26 bp, Homo sapiens
tgctgctcttgtgggtggcatggcag

SEQ ID NO: 13618 - DNA, 26 bp, Homo sapiens
gctgctcttgtgggtggcatggcaga

SEQ ID NO: 13619 - DNA, 26 bp, Homo sapiens
ctgctcttgtgggtggcatggcagag

SEQ ID NO: 13620 - DNA, 26 bp, Homo sapiens
tgctcttgtgggtggcatggcagagc

SEQ ID NO: 13621 - DNA, 26 bp, Homo sapiens
gctcttgtgggtggcatggcagagcc

SEQ ID NO: 13622 - DNA, 26 bp, Homo sapiens
ctcttgtgggtggcatggcagagcct

SEQ ID NO: 13623 - DNA, 26 bp, Homo sapiens
tcttgtgggtggcatggcagagcctc

SEQ ID NO: 13624 - DNA, 26 bp, Homo sapiens
cttgtgggtggcatggcagagcctca

SEQ ID NO: 13625 - DNA, 26 bp, Homo sapiens
ttgtgggtggcatggcagagcctcac

SEQ ID NO: 13626 - DNA, 26 bp, Homo sapiens
tgtgggtggcatggcagagcctcacc

SEQ ID NO: 13627 - DNA, 26 bp, Homo sapiens
gtgggtggcatggcagagcctcacca

SEQ ID NO: 13628 - DNA, 26 bp, Homo sapiens
tgggtggcatggcagagcctcaccat

SEQ ID NO: 13629 - DNA, 26 bp, Homo sapiens
gggtggcatggcagagcctcaccatc

SEQ ID NO: 13630 - DNA, 26 bp, Homo sapiens
ggtggcatggcagagcctcaccatca

SEQ ID NO: 13631 - DNA, 26 bp, Homo sapiens
gtggcatggcagagcctcaccatcaa

SEQ ID NO: 13632 - DNA, 26 bp, Homo sapiens
tggcatggcagagcctcaccatcaaa

SEQ ID NO: 13633 - DNA, 26 bp, Homo sapiens
ggcatggcagagcctcaccatcaaat

SEQ ID NO: 13634 - DNA, 26 bp, Homo sapiens
gcatggcagagcctcaccatcaaatt

SEQ ID NO: 13635 - DNA, 26 bp, Homo sapiens
catggcagagcctcaccatcaaattc

SEQ ID NO: 13636 - DNA, 26 bp, Homo sapiens
atggcagagcctcaccatcaaattcc

SEQ ID NO: 13637 - DNA, 26 bp, Homo sapiens
tggcagagcctcaccatcaaattcca

SEQ ID NO: 13638 - DNA, 26 bp, Homo sapiens
ggcagagcctcaccatcaaattccag

SEQ ID NO: 13639 - DNA, 26 bp, Homo sapiens
gcagagcctcaccatcaaattccaga

SEQ ID NO: 13640 - DNA, 26 bp, Homo sapiens
cagagcctcaccatcaaattccagag

SEQ ID NO: 13641 - DNA, 26 bp, Homo sapiens
agagcctcaccatcaaattccagaga

SEQ ID NO: 13642 - DNA, 26 bp, Homo sapiens
gagcctcaccatcaaattccagagaa

SEQ ID NO: 13643 - DNA, 26 bp, Homo sapiens
agcctcaccatcaaattccagagaag

SEQ ID NO: 13644 - DNA, 26 bp, Homo sapiens
gcctcaccatcaaattccagagaagc

SEQ ID NO: 13645 - DNA, 26 bp, Homo sapiens
cctcaccatcaaattccagagaagcc

SEQ ID NO: 13646 - DNA, 26 bp, Homo sapiens
ctcaccatcaaattccagagaagccc

SEQ ID NO: 13647 - DNA, 26 bp, Homo sapiens
tcaccatcaaattccagagaagccct

SEQ ID NO: 13648 - DNA, 26 bp, Homo sapiens
caccatcaaattccagagaagccctt

SEQ ID NO: 13649 - DNA, 26 bp, Homo sapiens
accatcaaattccagagaagccctta

SEQ ID NO: 13650 - DNA, 26 bp, Homo sapiens
ccatcaaattccagagaagcccttag

SEQ ID NO: 13651 - DNA, 26 bp, Homo sapiens
catcaaattccagagaagcccttagg

SEQ ID NO: 13652 - DNA, 26 bp, Homo sapiens
atcaaattccagagaagcccttaggc

SEQ ID NO: 13653 - DNA, 26 bp, Homo sapiens
tcaaattccagagaagcccttaggcc

SEQ ID NO: 13654 - DNA, 26 bp, Homo sapiens
caaattccagagaagcccttaggcct

SEQ ID NO: 13655 - DNA, 26 bp, Homo sapiens
aaattccagagaagcccttaggcctt

SEQ ID NO: 13656 - DNA, 26 bp, Homo sapiens
aattccagagaagcccttaggccttc

SEQ ID NO: 13657 - DNA, 26 bp, Homo sapiens
attccagagaagcccttaggccttct

SEQ ID NO: 13658 - DNA, 26 bp, Homo sapiens
ttccagagaagcccttaggccttctc

SEQ ID NO: 13659 - DNA, 26 bp, Homo sapiens
tccagagaagcccttaggccttctcc

SEQ ID NO: 13660 - DNA, 26 bp, Homo sapiens
ccagagaagcccttaggccttctcca

SEQ ID NO: 13661 - DNA, 26 bp, Homo sapiens
cagagaagcccttaggccttctccac

SEQ ID NO: 13662 - DNA, 26 bp, Homo sapiens
agagaagcccttaggccttctccacc

SEQ ID NO: 13663 - DNA, 26 bp, Homo sapiens
gagaagcccttaggccttctccacct

SEQ ID NO: 13664 - DNA, 26 bp, Homo sapiens
agaagcccttaggccttctccacctt

SEQ ID NO: 13665 - DNA, 26 bp, Homo sapiens
gaagcccttaggccttctccaccttc

SEQ ID NO: 13666 - DNA, 26 bp, Homo sapiens
aagcccttaggccttctccaccttcc

SEQ ID NO: 13667 - DNA, 26 bp, Homo sapiens
agcccttaggccttctccaccttcct

SEQ ID NO: 13668 - DNA, 26 bp, Homo sapiens
gcccttaggccttctccaccttcctc

SEQ ID NO: 13669 - DNA, 26 bp, Homo sapiens
cccttaggccttctccaccttcctcc

SEQ ID NO: 13670 - DNA, 26 bp, Homo sapiens
ccttaggccttctccaccttcctcca

SEQ ID NO: 13671 - DNA, 26 bp, Homo sapiens
cttaggccttctccaccttcctccat

SEQ ID NO: 13672 - DNA, 26 bp, Homo sapiens
ttaggccttctccaccttcctccatg

SEQ ID NO: 13673 - DNA, 26 bp, Homo sapiens
taggccttctccaccttcctccatgg

SEQ ID NO: 13674 - DNA, 26 bp, Homo sapiens
aggccttctccaccttcctccatggt

SEQ ID NO: 13675 - DNA, 26 bp, Homo sapiens
ggccttctccaccttcctccatggtc

SEQ ID NO: 13676 - DNA, 26 bp, Homo sapiens
gccttctccaccttcctccatggtcc

SEQ ID NO: 13677 - DNA, 26 bp, Homo sapiens
ccttctccaccttcctccatggtccc

SEQ ID NO: 13678 - DNA, 26 bp, Homo sapiens
cttctccaccttcctccatggtccca

SEQ ID NO: 13679 - DNA, 26 bp, Homo sapiens
ttctccaccttcctccatggtcccat

SEQ ID NO: 13680 - DNA, 26 bp, Homo sapiens
tctccaccttcctccatggtcccata

SEQ ID NO: 13681 - DNA, 26 bp, Homo sapiens
ctccaccttcctccatggtcccatat

SEQ ID NO: 13682 - DNA, 26 bp, Homo sapiens
tccaccttcctccatggtcccatatt

SEQ ID NO: 13683 - DNA, 26 bp, Homo sapiens
ccaccttcctccatggtcccatattc

SEQ ID NO: 13684 - DNA, 26 bp, Homo sapiens
caccttcctccatggtcccatattct

SEQ ID NO: 13685 - DNA, 26 bp, Homo sapiens
accttcctccatggtcccatattctg

SEQ ID NO: 13686 - DNA, 26 bp, Homo sapiens
ccttcctccatggtcccatattctgg

SEQ ID NO: 13687 - DNA, 26 bp, Homo sapiens
cttcctccatggtcccatattctgga

SEQ ID NO: 13688 - DNA, 26 bp, Homo sapiens
ttcctccatggtcccatattctggaa

SEQ ID NO: 13689 - DNA, 26 bp, Homo sapiens
tcctccatggtcccatattctggaaa

SEQ ID NO: 13690 - DNA, 26 bp, Homo sapiens
cctccatggtcccatattctggaaat

SEQ ID NO: 13691 - DNA, 26 bp, Homo sapiens
ctccatggtcccatattctggaaatt

SEQ ID NO: 13692 - DNA, 26 bp, Homo sapiens
tccatggtcccatattctggaaattc

SEQ ID NO: 13693 - DNA, 26 bp, Homo sapiens
ccatggtcccatattctggaaattca

SEQ ID NO: 13694 - DNA, 26 bp, Homo sapiens
catggtcccatattctggaaattcat

SEQ ID NO: 13695 - DNA, 26 bp, Homo sapiens
atggtcccatattctggaaattcatt

SEQ ID NO: 13696 - DNA, 26 bp, Homo sapiens
tggtcccatattctggaaattcattt

SEQ ID NO: 13697 - DNA, 26 bp, Homo sapiens
ggtcccatattctggaaattcatttg

SEQ ID NO: 13698 - DNA, 26 bp, Homo sapiens
gtcccatattctggaaattcatttgt

SEQ ID NO: 13699 - DNA, 26 bp, Homo sapiens
tcccatattctggaaattcatttgtg

SEQ ID NO: 13700 - DNA, 26 bp, Homo sapiens
cccatattctggaaattcatttgtga

SEQ ID NO: 13701 - DNA, 26 bp, Homo sapiens
ccatattctggaaattcatttgtgac

SEQ ID NO: 13702 - DNA, 26 bp, Homo sapiens
catattctggaaattcatttgtgaca

SEQ ID NO: 13703 - DNA, 26 bp, Homo sapiens
atattctggaaattcatttgtgacat

SEQ ID NO: 13704 - DNA, 26 bp, Homo sapiens
tattctggaaattcatttgtgacatt

SEQ ID NO: 13705 - DNA, 26 bp, Homo sapiens
attctggaaattcatttgtgacattt

SEQ ID NO: 13706 - DNA, 26 bp, Homo sapiens
ttctggaaattcatttgtgacatttg

SEQ ID NO: 13707 - DNA, 26 bp, Homo sapiens
tctggaaattcatttgtgacatttgg

SEQ ID NO: 13708 - DNA, 26 bp, Homo sapiens
ctggaaattcatttgtgacatttggt

SEQ ID NO: 13709 - DNA, 26 bp, Homo sapiens
tggaaattcatttgtgacatttggtg

SEQ ID NO: 13710 - DNA, 26 bp, Homo sapiens
ggaaattcatttgtgacatttggtgg

SEQ ID NO: 13711 - DNA, 26 bp, Homo sapiens
gaaattcatttgtgacatttggtggg

SEQ ID NO: 13712 - DNA, 26 bp, Homo sapiens
aaattcatttgtgacatttggtggga

SEQ ID NO: 13713 - DNA, 26 bp, Homo sapiens
aattcatttgtgacatttggtgggag

SEQ ID NO: 13714 - DNA, 26 bp, Homo sapiens
attcatttgtgacatttggtgggagt

SEQ ID NO: 13715 - DNA, 26 bp, Homo sapiens
ttcatttgtgacatttggtgggagta

SEQ ID NO: 13716 - DNA, 26 bp, Homo sapiens
tcatttgtgacatttggtgggagtaa

SEQ ID NO: 13717 - DNA, 26 bp, Homo sapiens
catttgtgacatttggtgggagtaaa

SEQ ID NO: 13718 - DNA, 26 bp, Homo sapiens
atttgtgacatttggtgggagtaaag

SEQ ID NO: 13719 - DNA, 26 bp, Homo sapiens
tttgtgacatttggtgggagtaaagt

SEQ ID NO: 13720 - DNA, 26 bp, Homo sapiens
ttgtgacatttggtgggagtaaagtg

SEQ ID NO: 13721 - DNA, 26 bp, Homo sapiens
tgtgacatttggtgggagtaaagtgc

SEQ ID NO: 13722 - DNA, 26 bp, Homo sapiens
gtgacatttggtgggagtaaagtgct

SEQ ID NO: 13723 - DNA, 26 bp, Homo sapiens
tgacatttggtgggagtaaagtgctt

SEQ ID NO: 13724 - DNA, 26 bp, Homo sapiens
gacatttggtgggagtaaagtgcttc

SEQ ID NO: 13725 - DNA, 26 bp, Homo sapiens
acatttggtgggagtaaagtgcttcc

SEQ ID NO: 13726 - DNA, 26 bp, Homo sapiens
catttggtgggagtaaagtgcttcct

SEQ ID NO: 13727 - DNA, 26 bp, Homo sapiens
atttggtgggagtaaagtgcttcctc

SEQ ID NO: 13728 - DNA, 26 bp, Homo sapiens
tttggtgggagtaaagtgcttcctcc

SEQ ID NO: 13729 - DNA, 26 bp, Homo sapiens
ttggtgggagtaaagtgcttcctcca

SEQ ID NO: 13730 - DNA, 26 bp, Homo sapiens
tggtgggagtaaagtgcttcctccat

SEQ ID NO: 13731 - DNA, 26 bp, Homo sapiens
ggtgggagtaaagtgcttcctccatg

SEQ ID NO: 13732 - DNA, 26 bp, Homo sapiens
gtgggagtaaagtgcttcctccatga

SEQ ID NO: 13733 - DNA, 26 bp, Homo sapiens
tgggagtaaagtgcttcctccatgat

SEQ ID NO: 13734 - DNA, 26 bp, Homo sapiens
gggagtaaagtgcttcctccatgatc

SEQ ID NO: 13735 - DNA, 26 bp, Homo sapiens
ggagtaaagtgcttcctccatgatca

SEQ ID NO: 13736 - DNA, 26 bp, Homo sapiens
gagtaaagtgcttcctccatgatcac

SEQ ID NO: 13737 - DNA, 26 bp, Homo sapiens
agtaaagtgcttcctccatgatcact

SEQ ID NO: 13738 - DNA, 26 bp, Homo sapiens
gtaaagtgcttcctccatgatcacta

SEQ ID NO: 13739 - DNA, 26 bp, Homo sapiens
taaagtgcttcctccatgatcactag

SEQ ID NO: 13740 - DNA, 26 bp, Homo sapiens
aaagtgcttcctccatgatcactagt

SEQ ID NO: 13741 - DNA, 26 bp, Homo sapiens
aagtgcttcctccatgatcactagta

SEQ ID NO: 13742 - DNA, 26 bp, Homo sapiens
agtgcttcctccatgatcactagtat

SEQ ID NO: 13743 - DNA, 26 bp, Homo sapiens
gtgcttcctccatgatcactagtatc

SEQ ID NO: 13744 - DNA, 26 bp, Homo sapiens
tgcttcctccatgatcactagtatct

SEQ ID NO: 13745 - DNA, 26 bp, Homo sapiens
gcttcctccatgatcactagtatctg

SEQ ID NO: 13746 - DNA, 26 bp, Homo sapiens
cttcctccatgatcactagtatctgg

SEQ ID NO: 13747 - DNA, 26 bp, Homo sapiens
ttcctccatgatcactagtatctgga

SEQ ID NO: 13748 - DNA, 26 bp, Homo sapiens
tcctccatgatcactagtatctggag

SEQ ID NO: 13749 - DNA, 26 bp, Homo sapiens
cctccatgatcactagtatctggagc

SEQ ID NO: 13750 - DNA, 26 bp, Homo sapiens
ctccatgatcactagtatctggagct

SEQ ID NO: 13751 - DNA, 26 bp, Homo sapiens
tccatgatcactagtatctggagctt

SEQ ID NO: 13752 - DNA, 26 bp, Homo sapiens
ccatgatcactagtatctggagcttt

SEQ ID NO: 13753 - DNA, 26 bp, Homo sapiens
catgatcactagtatctggagctttc

SEQ ID NO: 13754 - DNA, 26 bp, Homo sapiens
atgatcactagtatctggagctttcc

SEQ ID NO: 13755 - DNA, 26 bp, Homo sapiens
tgatcactagtatctggagctttccc

SEQ ID NO: 13756 - DNA, 26 bp, Homo sapiens
gatcactagtatctggagctttccct

SEQ ID NO: 13757 - DNA, 26 bp, Homo sapiens
atcactagtatctggagctttccctt

SEQ ID NO: 13758 - DNA, 26 bp, Homo sapiens
tcactagtatctggagctttcccttc

SEQ ID NO: 13759 - DNA, 26 bp, Homo sapiens
cactagtatctggagctttcccttca

SEQ ID NO: 13760 - DNA, 26 bp, Homo sapiens
actagtatctggagctttcccttcag

SEQ ID NO: 13761 - DNA, 26 bp, Homo sapiens
ctagtatctggagctttcccttcaga

SEQ ID NO: 13762 - DNA, 26 bp, Homo sapiens
tagtatctggagctttcccttcagat

SEQ ID NO: 13763 - DNA, 26 bp, Homo sapiens
agtatctggagctttcccttcagatc

SEQ ID NO: 13764 - DNA, 26 bp, Homo sapiens
gtatctggagctttcccttcagatct

SEQ ID NO: 13765 - DNA, 26 bp, Homo sapiens
tatctggagctttcccttcagatctg

SEQ ID NO: 13766 - DNA, 26 bp, Homo sapiens
atctggagctttcccttcagatctgc

SEQ ID NO: 13767 - DNA, 26 bp, Homo sapiens
tctggagctttcccttcagatctgcc

SEQ ID NO: 13768 - DNA, 26 bp, Homo sapiens
ctggagctttcccttcagatctgcca

SEQ ID NO: 13769 - DNA, 26 bp, Homo sapiens
tggagctttcccttcagatctgccaa

SEQ ID NO: 13770 - DNA, 26 bp, Homo sapiens
ggagctttcccttcagatctgccaaa

SEQ ID NO: 13771 - DNA, 26 bp, Homo sapiens
gagctttcccttcagatctgccaaat

SEQ ID NO: 13772 - DNA, 26 bp, Homo sapiens
agctttcccttcagatctgccaaata

SEQ ID NO: 13773 - DNA, 26 bp, Homo sapiens
gctttcccttcagatctgccaaataa

SEQ ID NO: 13774 - DNA, 26 bp, Homo sapiens
ctttcccttcagatctgccaaataaa

SEQ ID NO: 13775 - DNA, 26 bp, Homo sapiens
tttcccttcagatctgccaaataaaa

SEQ ID NO: 13776 - DNA, 26 bp, Homo sapiens
ttcccttcagatctgccaaataaaaa

SEQ ID NO: 13777 - DNA, 26 bp, Homo sapiens
tcccttcagatctgccaaataaaaat

SEQ ID NO: 13778 - DNA, 26 bp, Homo sapiens
cccttcagatctgccaaataaaaatt

SEQ ID NO: 13779 - DNA, 26 bp, Homo sapiens
ccttcagatctgccaaataaaaattc

SEQ ID NO: 13780 - DNA, 26 bp, Homo sapiens
cttcagatctgccaaataaaaattca

SEQ ID NO: 13781 - DNA, 26 bp, Homo sapiens
ttcagatctgccaaataaaaattcat

SEQ ID NO: 13782 - DNA, 26 bp, Homo sapiens
tcagatctgccaaataaaaattcata

SEQ ID NO: 13783 - DNA, 26 bp, Homo sapiens
cagatctgccaaataaaaattcatat

SEQ ID NO: 13784 - DNA, 26 bp, Homo sapiens
agatctgccaaataaaaattcatatt

SEQ ID NO: 13785 - DNA, 26 bp, Homo sapiens
gatctgccaaataaaaattcatattt

SEQ ID NO: 13786 - DNA, 26 bp, Homo sapiens
atctgccaaataaaaattcatatttg

SEQ ID NO: 13787 - DNA, 26 bp, Homo sapiens
tctgccaaataaaaattcatatttgg

SEQ ID NO: 13788 - DNA, 26 bp, Homo sapiens
ctgccaaataaaaattcatatttggc

SEQ ID NO: 13789 - DNA, 26 bp, Homo sapiens
tgccaaataaaaattcatatttggcc

SEQ ID NO: 13790 - DNA, 26 bp, Homo sapiens
gccaaataaaaattcatatttggcct

SEQ ID NO: 13791 - DNA, 26 bp, Homo sapiens
ccaaataaaaattcatatttggcctt

SEQ ID NO: 13792 - DNA, 26 bp, Homo sapiens
caaataaaaattcatatttggccttg

SEQ ID NO: 13793 - DNA, 26 bp, Homo sapiens
aaataaaaattcatatttggccttgg

SEQ ID NO: 13794 - DNA, 26 bp, Homo sapiens
aataaaaattcatatttggccttggc

SEQ ID NO: 13795 - DNA, 26 bp, Homo sapiens
ataaaaattcatatttggccttggca

SEQ ID NO: 13796 - DNA, 26 bp, Homo sapiens
taaaaattcatatttggccttggcaa

SEQ ID NO: 13797 - DNA, 26 bp, Homo sapiens
aaaaattcatatttggccttggcaac

SEQ ID NO: 13798 - DNA, 26 bp, Homo sapiens
aaaattcatatttggccttggcaaca

SEQ ID NO: 13799 - DNA, 26 bp, Homo sapiens
aaattcatatttggccttggcaacac

SEQ ID NO: 13800 - DNA, 26 bp, Homo sapiens
aattcatatttggccttggcaacact

SEQ ID NO: 13801 - DNA, 26 bp, Homo sapiens
attcatatttggccttggcaacactc

SEQ ID NO: 13802 - DNA, 26 bp, Homo sapiens
ttcatatttggccttggcaacactct

SEQ ID NO: 13803 - DNA, 26 bp, Homo sapiens
tcatatttggccttggcaacactctg

SEQ ID NO: 13804 - DNA, 26 bp, Homo sapiens
catatttggccttggcaacactctgg

SEQ ID NO: 13805 - DNA, 26 bp, Homo sapiens
atatttggccttggcaacactctggg

SEQ ID NO: 13806 - DNA, 26 bp, Homo sapiens
tatttggccttggcaacactctggga

SEQ ID NO: 13807 - DNA, 26 bp, Homo sapiens
atttggccttggcaacactctgggaa

SEQ ID NO: 13808 - DNA, 26 bp, Homo sapiens
tttggccttggcaacactctgggaat

SEQ ID NO: 13809 - DNA, 26 bp, Homo sapiens
ttggccttggcaacactctgggaatg

SEQ ID NO: 13810 - DNA, 26 bp, Homo sapiens
tggccttggcaacactctgggaatgt

SEQ ID NO: 13811 - DNA, 26 bp, Homo sapiens
ggccttggcaacactctgggaatgtg

SEQ ID NO: 13812 - DNA, 26 bp, Homo sapiens
gccttggcaacactctgggaatgtgc

SEQ ID NO: 13813 - DNA, 26 bp, Homo sapiens
ccttggcaacactctgggaatgtgca

SEQ ID NO: 13814 - DNA, 26 bp, Homo sapiens
cttggcaacactctgggaatgtgcag

SEQ ID NO: 13815 - DNA, 26 bp, Homo sapiens
ttggcaacactctgggaatgtgcaga

SEQ ID NO: 13816 - DNA, 26 bp, Homo sapiens
tggcaacactctgggaatgtgcagat

SEQ ID NO: 13817 - DNA, 26 bp, Homo sapiens
ggcaacactctgggaatgtgcagatg

SEQ ID NO: 13818 - DNA, 26 bp, Homo sapiens
gcaacactctgggaatgtgcagatgc

SEQ ID NO: 13819 - DNA, 26 bp, Homo sapiens
caacactctgggaatgtgcagatgca

SEQ ID NO: 13820 - DNA, 26 bp, Homo sapiens
aacactctgggaatgtgcagatgcat

SEQ ID NO: 13821 - DNA, 26 bp, Homo sapiens
acactctgggaatgtgcagatgcatt

SEQ ID NO: 13822 - DNA, 26 bp, Homo sapiens
cactctgggaatgtgcagatgcattg

SEQ ID NO: 13823 - DNA, 26 bp, Homo sapiens
actctgggaatgtgcagatgcattgt

SEQ ID NO: 13824 - DNA, 26 bp, Homo sapiens
ctctgggaatgtgcagatgcattgtt

SEQ ID NO: 13825 - DNA, 26 bp, Homo sapiens
tctgggaatgtgcagatgcattgttc

SEQ ID NO: 13826 - DNA, 26 bp, Homo sapiens
ctgggaatgtgcagatgcattgttca

SEQ ID NO: 13827 - DNA, 26 bp, Homo sapiens
tgggaatgtgcagatgcattgttcac

SEQ ID NO: 13828 - DNA, 26 bp, Homo sapiens
gggaatgtgcagatgcattgttcacc

SEQ ID NO: 13829 - DNA, 26 bp, Homo sapiens
ggaatgtgcagatgcattgttcaccc

SEQ ID NO: 13830 - DNA, 26 bp, Homo sapiens
gaatgtgcagatgcattgttcaccca

SEQ ID NO: 13831 - DNA, 26 bp, Homo sapiens
aatgtgcagatgcattgttcacccaa

SEQ ID NO: 13832 - DNA, 26 bp, Homo sapiens
atgtgcagatgcattgttcacccaaa

SEQ ID NO: 13833 - DNA, 26 bp, Homo sapiens
tgtgcagatgcattgttcacccaaac

SEQ ID NO: 13834 - DNA, 26 bp, Homo sapiens
gtgcagatgcattgttcacccaaaca

SEQ ID NO: 13835 - DNA, 26 bp, Homo sapiens
tgcagatgcattgttcacccaaacaa

SEQ ID NO: 13836 - DNA, 26 bp, Homo sapiens
gcagatgcattgttcacccaaacaaa

SEQ ID NO: 13837 - DNA, 26 bp, Homo sapiens
cagatgcattgttcacccaaacaaat

SEQ ID NO: 13838 - DNA, 26 bp, Homo sapiens
agatgcattgttcacccaaacaaatg

SEQ ID NO: 13839 - DNA, 26 bp, Homo sapiens
gatgcattgttcacccaaacaaatgt

SEQ ID NO: 13840 - DNA, 26 bp, Homo sapiens
atgcattgttcacccaaacaaatgtc

SEQ ID NO: 13841 - DNA, 26 bp, Homo sapiens
tgcattgttcacccaaacaaatgtct

SEQ ID NO: 13842 - DNA, 26 bp, Homo sapiens
gcattgttcacccaaacaaatgtctc

SEQ ID NO: 13843 - DNA, 26 bp, Homo sapiens
cattgttcacccaaacaaatgtctct

SEQ ID NO: 13844 - DNA, 26 bp, Homo sapiens
attgttcacccaaacaaatgtctctg

SEQ ID NO: 13845 - DNA, 26 bp, Homo sapiens
ttgttcacccaaacaaatgtctctgc

SEQ ID NO: 13846 - DNA, 26 bp, Homo sapiens
tgttcacccaaacaaatgtctctgcc

SEQ ID NO: 13847 - DNA, 26 bp, Homo sapiens
gttcacccaaacaaatgtctctgccg

SEQ ID NO: 13848 - DNA, 26 bp, Homo sapiens
ttcacccaaacaaatgtctctgccgc

SEQ ID NO: 13849 - DNA, 26 bp, Homo sapiens
tcacccaaacaaatgtctctgccgct

SEQ ID NO: 13850 - DNA, 26 bp, Homo sapiens
cacccaaacaaatgtctctgccgctg

SEQ ID NO: 13851 - DNA, 26 bp, Homo sapiens
acccaaacaaatgtctctgccgctgc

SEQ ID NO: 13852 - DNA, 26 bp, Homo sapiens
cccaaacaaatgtctctgccgctgcg

SEQ ID NO: 13853 - DNA, 26 bp, Homo sapiens
ccaaacaaatgtctctgccgctgcgc

SEQ ID NO: 13854 - DNA, 26 bp, Homo sapiens
caaacaaatgtctctgccgctgcgct

SEQ ID NO: 13855 - DNA, 26 bp, Homo sapiens
aaacaaatgtctctgccgctgcgctc

SEQ ID NO: 13856 - DNA, 26 bp, Homo sapiens
aacaaatgtctctgccgctgcgctcc

SEQ ID NO: 13857 - DNA, 26 bp, Homo sapiens
acaaatgtctctgccgctgcgctcct

SEQ ID NO: 13858 - DNA, 26 bp, Homo sapiens
caaatgtctctgccgctgcgctcctt

SEQ ID NO: 13859 - DNA, 26 bp, Homo sapiens
aaatgtctctgccgctgcgctccttc

SEQ ID NO: 13860 - DNA, 26 bp, Homo sapiens
aatgtctctgccgctgcgctccttcc

SEQ ID NO: 13861 - DNA, 26 bp, Homo sapiens
atgtctctgccgctgcgctccttcct

SEQ ID NO: 13862 - DNA, 26 bp, Homo sapiens
tgtctctgccgctgcgctccttcctt

SEQ ID NO: 13863 - DNA, 26 bp, Homo sapiens
gtctctgccgctgcgctccttccttc

SEQ ID NO: 13864 - DNA, 26 bp, Homo sapiens
tctctgccgctgcgctccttccttcc

SEQ ID NO: 13865 - DNA, 26 bp, Homo sapiens
ctctgccgctgcgctccttccttcca

SEQ ID NO: 13866 - DNA, 26 bp, Homo sapiens
tctgccgctgcgctccttccttccat

SEQ ID NO: 13867 - DNA, 26 bp, Homo sapiens
ctgccgctgcgctccttccttccatc

SEQ ID NO: 13868 - DNA, 26 bp, Homo sapiens
tgccgctgcgctccttccttccatct

SEQ ID NO: 13869 - DNA, 26 bp, Homo sapiens
gccgctgcgctccttccttccatctt

SEQ ID NO: 13870 - DNA, 26 bp, Homo sapiens
ccgctgcgctccttccttccatcttc

SEQ ID NO: 13871 - DNA, 26 bp, Homo sapiens
cgctgcgctccttccttccatcttcc

SEQ ID NO: 13872 - DNA, 26 bp, Homo sapiens
gctgcgctccttccttccatcttcca

SEQ ID NO: 13873 - DNA, 26 bp, Homo sapiens
ctgcgctccttccttccatcttccat

SEQ ID NO: 13874 - DNA, 26 bp, Homo sapiens
tgcgctccttccttccatcttccatc

SEQ ID NO: 13875 - DNA, 26 bp, Homo sapiens
gcgctccttccttccatcttccatcg

SEQ ID NO: 13876 - DNA, 26 bp, Homo sapiens
cgctccttccttccatcttccatcgc

SEQ ID NO: 13877 - DNA, 26 bp, Homo sapiens
gctccttccttccatcttccatcgcc

SEQ ID NO: 13878 - DNA, 26 bp, Homo sapiens
ctccttccttccatcttccatcgcca

SEQ ID NO: 13879 - DNA, 26 bp, Homo sapiens
tccttccttccatcttccatcgccag

SEQ ID NO: 13880 - DNA, 26 bp, Homo sapiens
ccttccttccatcttccatcgccagc

SEQ ID NO: 13881 - DNA, 26 bp, Homo sapiens
cttccttccatcttccatcgccagcc

SEQ ID NO: 13882 - DNA, 26 bp, Homo sapiens
ttccttccatcttccatcgccagccc

SEQ ID NO: 13883 - DNA, 26 bp, Homo sapiens
tccttccatcttccatcgccagcccg

SEQ ID NO: 13884 - DNA, 26 bp, Homo sapiens
ccttccatcttccatcgccagcccgg

SEQ ID NO: 13885 - DNA, 26 bp, Homo sapiens
cttccatcttccatcgccagcccggc

SEQ ID NO: 13886 - DNA, 26 bp, Homo sapiens
ttccatcttccatcgccagcccggcc

SEQ ID NO: 13887 - DNA, 26 bp, Homo sapiens
tccatcttccatcgccagcccggccg

SEQ ID NO: 13888 - DNA, 26 bp, Homo sapiens
ccatcttccatcgccagcccggccgc

SEQ ID NO: 13889 - DNA, 26 bp, Homo sapiens
catcttccatcgccagcccggccgcg

SEQ ID NO: 13890 - DNA, 26 bp, Homo sapiens
atcttccatcgccagcccggccgcgc

SEQ ID NO: 13891 - DNA, 26 bp, Homo sapiens
tcttccatcgccagcccggccgcgcg

SEQ ID NO: 13892 - DNA, 26 bp, Homo sapiens
cttccatcgccagcccggccgcgcgc

SEQ ID NO: 13893 - DNA, 26 bp, Homo sapiens
ttccatcgccagcccggccgcgcgcc

SEQ ID NO: 13894 - DNA, 26 bp, Homo sapiens
tccatcgccagcccggccgcgcgccg

SEQ ID NO: 13895 - DNA, 26 bp, Homo sapiens
ccatcgccagcccggccgcgcgccga

SEQ ID NO: 13896 - DNA, 26 bp, Homo sapiens
catcgccagcccggccgcgcgccgaa

SEQ ID NO: 13897 - DNA, 26 bp, Homo sapiens
atcgccagcccggccgcgcgccgaaa

SEQ ID NO: 13898 - DNA, 26 bp, Homo sapiens
tcgccagcccggccgcgcgccgaaac

SEQ ID NO: 13899 - DNA, 26 bp, Homo sapiens
cgccagcccggccgcgcgccgaaacc

SEQ ID NO: 13900 - DNA, 26 bp, Homo sapiens
gccagcccggccgcgcgccgaaaccg

SEQ ID NO: 13901 - DNA, 26 bp, Homo sapiens
ccagcccggccgcgcgccgaaaccgc

SEQ ID NO: 13902 - DNA, 26 bp, Homo sapiens
cagcccggccgcgcgccgaaaccgcc

SEQ ID NO: 13903 - DNA, 26 bp, Homo sapiens
agcccggccgcgcgccgaaaccgccg

SEQ ID NO: 13904 - DNA, 26 bp, Homo sapiens
gcccggccgcgcgccgaaaccgccgc

SEQ ID NO: 13905 - DNA, 26 bp, Homo sapiens
cccggccgcgcgccgaaaccgccgcc

SEQ ID NO: 13906 - DNA, 26 bp, Homo sapiens
ccggccgcgcgccgaaaccgccgccg

SEQ ID NO: 13907 - DNA, 26 bp, Homo sapiens
cggccgcgcgccgaaaccgccgccgg

SEQ ID NO: 13908 - DNA, 26 bp, Homo sapiens
ggccgcgcgccgaaaccgccgccggg

SEQ ID NO: 13909 - DNA, 26 bp, Homo sapiens
gccgcgcgccgaaaccgccgccgggc

SEQ ID NO: 13910 - DNA, 26 bp, Homo sapiens
ccgcgcgccgaaaccgccgccgggcg

SEQ ID NO: 13911 - DNA, 26 bp, Homo sapiens
cgcgcgccgaaaccgccgccgggcgc

SEQ ID NO: 13912 - DNA, 26 bp, Homo sapiens
gcgcgccgaaaccgccgccgggcgct

SEQ ID NO: 13913 - DNA, 26 bp, Homo sapiens
cgcgccgaaaccgccgccgggcgctc

SEQ ID NO: 13914 - DNA, 26 bp, Homo sapiens
gcgccgaaaccgccgccgggcgctcc

SEQ ID NO: 13915 - DNA, 26 bp, Homo sapiens
cgccgaaaccgccgccgggcgctccg

SEQ ID NO: 13916 - DNA, 26 bp, Homo sapiens
gccgaaaccgccgccgggcgctccgg

SEQ ID NO: 13917 - DNA, 26 bp, Homo sapiens
ccgaaaccgccgccgggcgctccggg

SEQ ID NO: 13918 - DNA, 26 bp, Homo sapiens
cgaaaccgccgccgggcgctccgggg

SEQ ID NO: 13919 - DNA, 26 bp, Homo sapiens
gaaaccgccgccgggcgctccggggc

SEQ ID NO: 13920 - DNA, 26 bp, Homo sapiens
aaaccgccgccgggcgctccggggcc

SEQ ID NO: 13921 - DNA, 26 bp, Homo sapiens
aaccgccgccgggcgctccggggccg

SEQ ID NO: 13922 - DNA, 26 bp, Homo sapiens
accgccgccgggcgctccggggccgc

SEQ ID NO: 13923 - DNA, 26 bp, Homo sapiens
ccgccgccgggcgctccggggccgca

SEQ ID NO: 13924 - DNA, 26 bp, Homo sapiens
cgccgccgggcgctccggggccgcag

SEQ ID NO: 13925 - DNA, 26 bp, Homo sapiens
gccgccgggcgctccggggccgcagc

SEQ ID NO: 13926 - DNA, 26 bp, Homo sapiens
ccgccgggcgctccggggccgcagcc

SEQ ID NO: 13927 - DNA, 26 bp, Homo sapiens
cgccgggcgctccggggccgcagcct

SEQ ID NO: 13928 - DNA, 26 bp, Homo sapiens
gccgggcgctccggggccgcagcctc

SEQ ID NO: 13929 - DNA, 26 bp, Homo sapiens
ccgggcgctccggggccgcagcctca

SEQ ID NO: 13930 - DNA, 26 bp, Homo sapiens
cgggcgctccggggccgcagcctcag

SEQ ID NO: 13931 - DNA, 26 bp, Homo sapiens
gggcgctccggggccgcagcctcagg

SEQ ID NO: 13932 - DNA, 26 bp, Homo sapiens
ggcgctccggggccgcagcctcaggg

SEQ ID NO: 13933 - DNA, 26 bp, Homo sapiens
gcgctccggggccgcagcctcagggc

SEQ ID NO: 13934 - DNA, 26 bp, Homo sapiens
cgctccggggccgcagcctcagggcg

SEQ ID NO: 13935 - DNA, 26 bp, Homo sapiens
gctccggggccgcagcctcagggcgc

SEQ ID NO: 13936 - DNA, 26 bp, Homo sapiens
ctccggggccgcagcctcagggcgcg

SEQ ID NO: 13937 - DNA, 26 bp, Homo sapiens
tccggggccgcagcctcagggcgcga

SEQ ID NO: 13938 - DNA, 26 bp, Homo sapiens
ccggggccgcagcctcagggcgcgag

SEQ ID NO: 13939 - DNA, 26 bp, Homo sapiens
cggggccgcagcctcagggcgcgagt

SEQ ID NO: 13940 - DNA, 26 bp, Homo sapiens
ggggccgcagcctcagggcgcgagtg

SEQ ID NO: 13941 - DNA, 26 bp, Homo sapiens
gggccgcagcctcagggcgcgagtgc

SEQ ID NO: 13942 - DNA, 26 bp, Homo sapiens
ggccgcagcctcagggcgcgagtgcc

SEQ ID NO: 13943 - DNA, 26 bp, Homo sapiens
gccgcagcctcagggcgcgagtgccg

SEQ ID NO: 13944 - DNA, 26 bp, Homo sapiens
ccgcagcctcagggcgcgagtgccgg

SEQ ID NO: 13945 - DNA, 26 bp, Homo sapiens
cgcagcctcagggcgcgagtgccggc

SEQ ID NO: 13946 - DNA, 26 bp, Homo sapiens
gcagcctcagggcgcgagtgccggcg

SEQ ID NO: 13947 - DNA, 26 bp, Homo sapiens
cagcctcagggcgcgagtgccggcgg

SEQ ID NO: 13948 - DNA, 26 bp, Homo sapiens
agcctcagggcgcgagtgccggcggc

SEQ ID NO: 13949 - DNA, 26 bp, Homo sapiens
gcctcagggcgcgagtgccggcggcc

SEQ ID NO: 13950 - DNA, 26 bp, Homo sapiens
cctcagggcgcgagtgccggcggcca

SEQ ID NO: 13951 - DNA, 26 bp, Homo sapiens
ctcagggcgcgagtgccggcggccag

SEQ ID NO: 13952 - DNA, 26 bp, Homo sapiens
tcagggcgcgagtgccggcggccagc

SEQ ID NO: 13953 - DNA, 26 bp, Homo sapiens
cagggcgcgagtgccggcggccagcg

SEQ ID NO: 13954 - DNA, 26 bp, Homo sapiens
agggcgcgagtgccggcggccagcgc

SEQ ID NO: 13955 - DNA, 26 bp, Homo sapiens
gggcgcgagtgccggcggccagcgcc

SEQ ID NO: 13956 - DNA, 26 bp, Homo sapiens
ggcgcgagtgccggcggccagcgccg

SEQ ID NO: 13957 - DNA, 26 bp, Homo sapiens
gcgcgagtgccggcggccagcgccgc

SEQ ID NO: 13958 - DNA, 26 bp, Homo sapiens
cgcgagtgccggcggccagcgccgcg

SEQ ID NO: 13959 - DNA, 26 bp, Homo sapiens
gcgagtgccggcggccagcgccgcgt

SEQ ID NO: 13960 - DNA, 26 bp, Homo sapiens
cgagtgccggcggccagcgccgcgtg

SEQ ID NO: 13961 - DNA, 26 bp, Homo sapiens
gagtgccggcggccagcgccgcgtgc

SEQ ID NO: 13962 - DNA, 26 bp, Homo sapiens
agtgccggcggccagcgccgcgtgct

SEQ ID NO: 13963 - DNA, 26 bp, Homo sapiens
gtgccggcggccagcgccgcgtgctc

SEQ ID NO: 13964 - DNA, 26 bp, Homo sapiens
tgccggcggccagcgccgcgtgctct

SEQ ID NO: 13965 - DNA, 26 bp, Homo sapiens
gccggcggccagcgccgcgtgctctt

SEQ ID NO: 13966 - DNA, 26 bp, Homo sapiens
ccggcggccagcgccgcgtgctcttt

SEQ ID NO: 13967 - DNA, 26 bp, Homo sapiens
cggcggccagcgccgcgtgctctttg

SEQ ID NO: 13968 - DNA, 26 bp, Homo sapiens
ggcggccagcgccgcgtgctctttgt

SEQ ID NO: 13969 - DNA, 26 bp, Homo sapiens
gcggccagcgccgcgtgctctttgtt

SEQ ID NO: 13970 - DNA, 26 bp, Homo sapiens
cggccagcgccgcgtgctctttgttg

SEQ ID NO: 13971 - DNA, 26 bp, Homo sapiens
ggccagcgccgcgtgctctttgttga

SEQ ID NO: 13972 - DNA, 26 bp, Homo sapiens
gccagcgccgcgtgctctttgttgag

SEQ ID NO: 13973 - DNA, 26 bp, Homo sapiens
ccagcgccgcgtgctctttgttgagc

SEQ ID NO: 13974 - DNA, 26 bp, Homo sapiens
cagcgccgcgtgctctttgttgagct

SEQ ID NO: 13975 - DNA, 26 bp, Homo sapiens
agcgccgcgtgctctttgttgagctc

SEQ ID NO: 13976 - DNA, 26 bp, Homo sapiens
gcgccgcgtgctctttgttgagctcc

SEQ ID NO: 13977 - DNA, 26 bp, Homo sapiens
cgccgcgtgctctttgttgagctccc

SEQ ID NO: 13978 - DNA, 26 bp, Homo sapiens
gccgcgtgctctttgttgagctcccg

SEQ ID NO: 13979 - DNA, 26 bp, Homo sapiens
ccgcgtgctctttgttgagctcccgg

SEQ ID NO: 13980 - DNA, 26 bp, Homo sapiens
cgcgtgctctttgttgagctcccggg

SEQ ID NO: 13981 - DNA, 26 bp, Homo sapiens
gcgtgctctttgttgagctcccggga

SEQ ID NO: 13982 - DNA, 26 bp, Homo sapiens
cgtgctctttgttgagctcccgggac

SEQ ID NO: 13983 - DNA, 26 bp, Homo sapiens
gtgctctttgttgagctcccgggact

SEQ ID NO: 13984 - DNA, 26 bp, Homo sapiens
tgctctttgttgagctcccgggactg

SEQ ID NO: 13985 - DNA, 26 bp, Homo sapiens
gctctttgttgagctcccgggactgc

SEQ ID NO: 13986 - DNA, 26 bp, Homo sapiens
ctctttgttgagctcccgggactgcc

SEQ ID NO: 13987 - DNA, 26 bp, Homo sapiens
gagtgccacaggatgttttaacgggt

SEQ ID NO: 13988 - DNA, 26 bp, Homo sapiens
agtgccacaggatgttttaacgggtt

SEQ ID NO: 13989 - DNA, 26 bp, Homo sapiens
gtgccacaggatgttttaacgggttc

SEQ ID NO: 13990 - DNA, 26 bp, Homo sapiens
tgccacaggatgttttaacgggttca

SEQ ID NO: 13991 - DNA, 26 bp, Homo sapiens
gccacaggatgttttaacgggttcaa

SEQ ID NO: 13992 - DNA, 26 bp, Homo sapiens
ccacaggatgttttaacgggttcaaa

SEQ ID NO: 13993 - DNA, 26 bp, Homo sapiens
cacaggatgttttaacgggttcaaag

SEQ ID NO: 13994 - DNA, 26 bp, Homo sapiens
acaggatgttttaacgggttcaaagg

SEQ ID NO: 13995 - DNA, 26 bp, Homo sapiens
caggatgttttaacgggttcaaagga

SEQ ID NO: 13996 - DNA, 26 bp, Homo sapiens
aggatgttttaacgggttcaaaggag

SEQ ID NO: 13997 - DNA, 26 bp, Homo sapiens
ggatgttttaacgggttcaaaggaga

SEQ ID NO: 13998 - DNA, 26 bp, Homo sapiens
gatgttttaacgggttcaaaggagaa

SEQ ID NO: 13999 - DNA, 26 bp, Homo sapiens
atgttttaacgggttcaaaggagaat

SEQ ID NO: 14000 - DNA, 26 bp, Homo sapiens
tgttttaacgggttcaaaggagaata

SEQ ID NO: 14001 - DNA, 26 bp, Homo sapiens
gttttaacgggttcaaaggagaatac

SEQ ID NO: 14002 - DNA, 26 bp, Homo sapiens
ttttaacgggttcaaaggagaataca

SEQ ID NO: 14003 - DNA, 26 bp, Homo sapiens
tttaacgggttcaaaggagaatacaa

SEQ ID NO: 14004 - DNA, 26 bp, Homo sapiens
ttaacgggttcaaaggagaatacaaa

SEQ ID NO: 14005 - DNA, 26 bp, Homo sapiens
taacgggttcaaaggagaatacaaag

SEQ ID NO: 14006 - DNA, 26 bp, Homo sapiens
aacgggttcaaaggagaatacaaaga

SEQ ID NO: 14007 - DNA, 26 bp, Homo sapiens
acgggttcaaaggagaatacaaagag

SEQ ID NO: 14008 - DNA, 26 bp, Homo sapiens
cgggttcaaaggagaatacaaagagc

SEQ ID NO: 14009 - DNA, 26 bp, Homo sapiens
gggttcaaaggagaatacaaagagca

SEQ ID NO: 14010 - DNA, 26 bp, Homo sapiens
ggttcaaaggagaatacaaagagcag

SEQ ID NO: 14011 - DNA, 26 bp, Homo sapiens
gttcaaaggagaatacaaagagcaga

SEQ ID NO: 14012 - DNA, 26 bp, Homo sapiens
ttcaaaggagaatacaaagagcagag

SEQ ID NO: 14013 - DNA, 26 bp, Homo sapiens
tcaaaggagaatacaaagagcagaga

SEQ ID NO: 14014 - DNA, 26 bp, Homo sapiens
caaaggagaatacaaagagcagagaa

SEQ ID NO: 14015 - DNA, 26 bp, Homo sapiens
aaaggagaatacaaagagcagagaat

SEQ ID NO: 14016 - DNA, 26 bp, Homo sapiens
aaggagaatacaaagagcagagaata

SEQ ID NO: 14017 - DNA, 26 bp, Homo sapiens
aggagaatacaaagagcagagaatat

SEQ ID NO: 14018 - DNA, 26 bp, Homo sapiens
ggagaatacaaagagcagagaatata

SEQ ID NO: 14019 - DNA, 26 bp, Homo sapiens
gagaatacaaagagcagagaatatat

SEQ ID NO: 14020 - DNA, 26 bp, Homo sapiens
agaatacaaagagcagagaatatata

SEQ ID NO: 14021 - DNA, 26 bp, Homo sapiens
gaatacaaagagcagagaatatatag

SEQ ID NO: 14022 - DNA, 26 bp, Homo sapiens
aatacaaagagcagagaatatatagg

SEQ ID NO: 14023 - DNA, 26 bp, Homo sapiens
atacaaagagcagagaatatataggc

SEQ ID NO: 14024 - DNA, 26 bp, Homo sapiens
tacaaagagcagagaatatataggca

SEQ ID NO: 14025 - DNA, 26 bp, Homo sapiens
acaaagagcagagaatatataggcag

SEQ ID NO: 14026 - DNA, 26 bp, Homo sapiens
caaagagcagagaatatataggcaga

SEQ ID NO: 14027 - DNA, 26 bp, Homo sapiens
aaagagcagagaatatataggcagac

SEQ ID NO: 14028 - DNA, 26 bp, Homo sapiens
aagagcagagaatatataggcagaca

SEQ ID NO: 14029 - DNA, 26 bp, Homo sapiens
agagcagagaatatataggcagacat

SEQ ID NO: 14030 - DNA, 26 bp, Homo sapiens
gagcagagaatatataggcagacatt

SEQ ID NO: 14031 - DNA, 26 bp, Homo sapiens
agcagagaatatataggcagacattc

SEQ ID NO: 14032 - DNA, 26 bp, Homo sapiens
gcagagaatatataggcagacattca

SEQ ID NO: 14033 - DNA, 26 bp, Homo sapiens
cagagaatatataggcagacattcag

SEQ ID NO: 14034 - DNA, 26 bp, Homo sapiens
agagaatatataggcagacattcagg

SEQ ID NO: 14035 - DNA, 26 bp, Homo sapiens
gagaatatataggcagacattcaggc

SEQ ID NO: 14036 - DNA, 26 bp, Homo sapiens
agaatatataggcagacattcaggct

SEQ ID NO: 14037 - DNA, 26 bp, Homo sapiens
gaatatataggcagacattcaggctg

SEQ ID NO: 14038 - DNA, 26 bp, Homo sapiens
aatatataggcagacattcaggctga

SEQ ID NO: 14039 - DNA, 26 bp, Homo sapiens
atatataggcagacattcaggctgaa

SEQ ID NO: 14040 - DNA, 26 bp, Homo sapiens
tatataggcagacattcaggctgaaa

SEQ ID NO: 14041 - DNA, 26 bp, Homo sapiens
atataggcagacattcaggctgaaat

SEQ ID NO: 14042 - DNA, 26 bp, Homo sapiens
tataggcagacattcaggctgaaatg

SEQ ID NO: 14043 - DNA, 26 bp, Homo sapiens
ataggcagacattcaggctgaaatga

SEQ ID NO: 14044 - DNA, 26 bp, Homo sapiens
taggcagacattcaggctgaaatgaa

SEQ ID NO: 14045 - DNA, 26 bp, Homo sapiens
aggcagacattcaggctgaaatgaat

SEQ ID NO: 14046 - DNA, 26 bp, Homo sapiens
ggcagacattcaggctgaaatgaatt

SEQ ID NO: 14047 - DNA, 26 bp, Homo sapiens
gcagacattcaggctgaaatgaattt

SEQ ID NO: 14048 - DNA, 26 bp, Homo sapiens
cagacattcaggctgaaatgaatttg

SEQ ID NO: 14049 - DNA, 26 bp, Homo sapiens
agacattcaggctgaaatgaatttgc

SEQ ID NO: 14050 - DNA, 26 bp, Homo sapiens
gacattcaggctgaaatgaatttgct

SEQ ID NO: 14051 - DNA, 26 bp, Homo sapiens
acattcaggctgaaatgaatttgctt

SEQ ID NO: 14052 - DNA, 26 bp, Homo sapiens
cattcaggctgaaatgaatttgctta

SEQ ID NO: 14053 - DNA, 26 bp, Homo sapiens
attcaggctgaaatgaatttgcttaa

SEQ ID NO: 14054 - DNA, 26 bp, Homo sapiens
ttcaggctgaaatgaatttgcttaat

SEQ ID NO: 14055 - DNA, 26 bp, Homo sapiens
tcaggctgaaatgaatttgcttaata

SEQ ID NO: 14056 - DNA, 26 bp, Homo sapiens
caggctgaaatgaatttgcttaataa

SEQ ID NO: 14057 - DNA, 26 bp, Homo sapiens
aggctgaaatgaatttgcttaataaa

SEQ ID NO: 14058 - DNA, 26 bp, Homo sapiens
ggctgaaatgaatttgcttaataaag

SEQ ID NO: 14059 - DNA, 26 bp, Homo sapiens
gctgaaatgaatttgcttaataaagg

SEQ ID NO: 14060 - DNA, 26 bp, Homo sapiens
ctgaaatgaatttgcttaataaaggc

SEQ ID NO: 14061 - DNA, 26 bp, Homo sapiens
tgaaatgaatttgcttaataaaggca

SEQ ID NO: 14062 - DNA, 26 bp, Homo sapiens
gaaatgaatttgcttaataaaggcaa

SEQ ID NO: 14063 - DNA, 26 bp, Homo sapiens
aaatgaatttgcttaataaaggcaaa

SEQ ID NO: 14064 - DNA, 26 bp, Homo sapiens
aatgaatttgcttaataaaggcaaaa

SEQ ID NO: 14065 - DNA, 26 bp, Homo sapiens
atgaatttgcttaataaaggcaaaac

SEQ ID NO: 14066 - DNA, 26 bp, Homo sapiens
tgaatttgcttaataaaggcaaaact

SEQ ID NO: 14067 - DNA, 26 bp, Homo sapiens
gaatttgcttaataaaggcaaaacta

SEQ ID NO: 14068 - DNA, 26 bp, Homo sapiens
aatttgcttaataaaggcaaaactag

SEQ ID NO: 14069 - DNA, 26 bp, Homo sapiens
atttgcttaataaaggcaaaactagc

SEQ ID NO: 14070 - DNA, 26 bp, Homo sapiens
tttgcttaataaaggcaaaactagcc

SEQ ID NO: 14071 - DNA, 26 bp, Homo sapiens
ttgcttaataaaggcaaaactagcca

SEQ ID NO: 14072 - DNA, 26 bp, Homo sapiens
tgcttaataaaggcaaaactagccaa

SEQ ID NO: 14073 - DNA, 26 bp, Homo sapiens
gcttaataaaggcaaaactagccaat

SEQ ID NO: 14074 - DNA, 26 bp, Homo sapiens
cttaataaaggcaaaactagccaata

SEQ ID NO: 14075 - DNA, 26 bp, Homo sapiens
ttaataaaggcaaaactagccaatat

SEQ ID NO: 14076 - DNA, 26 bp, Homo sapiens
taataaaggcaaaactagccaatatc

SEQ ID NO: 14077 - DNA, 26 bp, Homo sapiens
aataaaggcaaaactagccaatatcc

SEQ ID NO: 14078 - DNA, 26 bp, Homo sapiens
ataaaggcaaaactagccaatatcca

SEQ ID NO: 14079 - DNA, 26 bp, Homo sapiens
taaaggcaaaactagccaatatccat

SEQ ID NO: 14080 - DNA, 26 bp, Homo sapiens
aaaggcaaaactagccaatatccata

SEQ ID NO: 14081 - DNA, 26 bp, Homo sapiens
aaggcaaaactagccaatatccatag

SEQ ID NO: 14082 - DNA, 26 bp, Homo sapiens
aggcaaaactagccaatatccatagg

SEQ ID NO: 14083 - DNA, 26 bp, Homo sapiens
ggcaaaactagccaatatccataggg

SEQ ID NO: 14084 - DNA, 26 bp, Homo sapiens
gcaaaactagccaatatccatagggt

SEQ ID NO: 14085 - DNA, 26 bp, Homo sapiens
caaaactagccaatatccatagggtg

SEQ ID NO: 14086 - DNA, 26 bp, Homo sapiens
aaaactagccaatatccatagggtga

SEQ ID NO: 14087 - DNA, 26 bp, Homo sapiens
aaactagccaatatccatagggtgat

SEQ ID NO: 14088 - DNA, 26 bp, Homo sapiens
aactagccaatatccatagggtgatg

SEQ ID NO: 14089 - DNA, 26 bp, Homo sapiens
actagccaatatccatagggtgatgg

SEQ ID NO: 14090 - DNA, 26 bp, Homo sapiens
ctagccaatatccatagggtgatggt

SEQ ID NO: 14091 - DNA, 26 bp, Homo sapiens
tagccaatatccatagggtgatggtc

SEQ ID NO: 14092 - DNA, 26 bp, Homo sapiens
agccaatatccatagggtgatggtca

SEQ ID NO: 14093 - DNA, 26 bp, Homo sapiens
gccaatatccatagggtgatggtcaa

SEQ ID NO: 14094 - DNA, 26 bp, Homo sapiens
ccaatatccatagggtgatggtcaaa

SEQ ID NO: 14095 - DNA, 26 bp, Homo sapiens
caatatccatagggtgatggtcaaat

SEQ ID NO: 14096 - DNA, 26 bp, Homo sapiens
aatatccatagggtgatggtcaaata

SEQ ID NO: 14097 - DNA, 26 bp, Homo sapiens
atatccatagggtgatggtcaaatat

SEQ ID NO: 14098 - DNA, 26 bp, Homo sapiens
tatccatagggtgatggtcaaatata

SEQ ID NO: 14099 - DNA, 26 bp, Homo sapiens
atccatagggtgatggtcaaatatat

SEQ ID NO: 14100 - DNA, 26 bp, Homo sapiens
tccatagggtgatggtcaaatatatc

SEQ ID NO: 14101 - DNA, 26 bp, Homo sapiens
ccatagggtgatggtcaaatatatct

SEQ ID NO: 14102 - DNA, 26 bp, Homo sapiens
catagggtgatggtcaaatatatcta

SEQ ID NO: 14103 - DNA, 26 bp, Homo sapiens
atagggtgatggtcaaatatatctac

SEQ ID NO: 14104 - DNA, 26 bp, Homo sapiens
tagggtgatggtcaaatatatctaca

SEQ ID NO: 14105 - DNA, 26 bp, Homo sapiens
agggtgatggtcaaatatatctacac

SEQ ID NO: 14106 - DNA, 26 bp, Homo sapiens
gggtgatggtcaaatatatctacact

SEQ ID NO: 14107 - DNA, 26 bp, Homo sapiens
ggtgatggtcaaatatatctacactg

SEQ ID NO: 14108 - DNA, 26 bp, Homo sapiens
gtgatggtcaaatatatctacactgg

SEQ ID NO: 14109 - DNA, 26 bp, Homo sapiens
tgatggtcaaatatatctacactgga

SEQ ID NO: 14110 - DNA, 26 bp, Homo sapiens
gatggtcaaatatatctacactggat

SEQ ID NO: 14111 - DNA, 26 bp, Homo sapiens
atggtcaaatatatctacactggata

SEQ ID NO: 14112 - DNA, 26 bp, Homo sapiens
tggtcaaatatatctacactggataa

SEQ ID NO: 14113 - DNA, 26 bp, Homo sapiens
ggtcaaatatatctacactggataat

SEQ ID NO: 14114 - DNA, 26 bp, Homo sapiens
gtcaaatatatctacactggataatt

SEQ ID NO: 14115 - DNA, 26 bp, Homo sapiens
tcaaatatatctacactggataattt

SEQ ID NO: 14116 - DNA, 26 bp, Homo sapiens
caaatatatctacactggataatttg

SEQ ID NO: 14117 - DNA, 26 bp, Homo sapiens
aaatatatctacactggataatttgc

SEQ ID NO: 14118 - DNA, 26 bp, Homo sapiens
aatatatctacactggataatttgca

SEQ ID NO: 14119 - DNA, 26 bp, Homo sapiens
atatatctacactggataatttgcat

SEQ ID NO: 14120 - DNA, 26 bp, Homo sapiens
tatatctacactggataatttgcatt

SEQ ID NO: 14121 - DNA, 26 bp, Homo sapiens
atatctacactggataatttgcattt

SEQ ID NO: 14122 - DNA, 26 bp, Homo sapiens
tatctacactggataatttgcatttt

SEQ ID NO: 14123 - DNA, 26 bp, Homo sapiens
atctacactggataatttgcattttc

SEQ ID NO: 14124 - DNA, 26 bp, Homo sapiens
tctacactggataatttgcattttca

SEQ ID NO: 14125 - DNA, 26 bp, Homo sapiens
ctacactggataatttgcattttcat

SEQ ID NO: 14126 - DNA, 26 bp, Homo sapiens
tacactggataatttgcattttcatg

SEQ ID NO: 14127 - DNA, 26 bp, Homo sapiens
acactggataatttgcattttcatgg

SEQ ID NO: 14128 - DNA, 26 bp, Homo sapiens
cactggataatttgcattttcatgga

SEQ ID NO: 14129 - DNA, 26 bp, Homo sapiens
actggataatttgcattttcatggac

SEQ ID NO: 14130 - DNA, 26 bp, Homo sapiens
ctggataatttgcattttcatggaca

SEQ ID NO: 14131 - DNA, 26 bp, Homo sapiens
tggataatttgcattttcatggacag

SEQ ID NO: 14132 - DNA, 26 bp, Homo sapiens
ggataatttgcattttcatggacagg

SEQ ID NO: 14133 - DNA, 26 bp, Homo sapiens
gataatttgcattttcatggacagga

SEQ ID NO: 14134 - DNA, 26 bp, Homo sapiens
ataatttgcattttcatggacaggaa

SEQ ID NO: 14135 - DNA, 26 bp, Homo sapiens
taatttgcattttcatggacaggaat

SEQ ID NO: 14136 - DNA, 26 bp, Homo sapiens
aatttgcattttcatggacaggaatt

SEQ ID NO: 14137 - DNA, 26 bp, Homo sapiens
atttgcattttcatggacaggaatta

SEQ ID NO: 14138 - DNA, 26 bp, Homo sapiens
tttgcattttcatggacaggaattat

SEQ ID NO: 14139 - DNA, 26 bp, Homo sapiens
ttgcattttcatggacaggaattatt

SEQ ID NO: 14140 - DNA, 26 bp, Homo sapiens
tgcattttcatggacaggaattattg

SEQ ID NO: 14141 - DNA, 26 bp, Homo sapiens
gcattttcatggacaggaattattgg

SEQ ID NO: 14142 - DNA, 26 bp, Homo sapiens
cattttcatggacaggaattattggc

SEQ ID NO: 14143 - DNA, 26 bp, Homo sapiens
attttcatggacaggaattattggca

SEQ ID NO: 14144 - DNA, 26 bp, Homo sapiens
ttttcatggacaggaattattggcaa

SEQ ID NO: 14145 - DNA, 26 bp, Homo sapiens
tttcatggacaggaattattggcaat

SEQ ID NO: 14146 - DNA, 26 bp, Homo sapiens
ttcatggacaggaattattggcaatt

SEQ ID NO: 14147 - DNA, 26 bp, Homo sapiens
tcatggacaggaattattggcaattt

SEQ ID NO: 14148 - DNA, 26 bp, Homo sapiens
catggacaggaattattggcaattta

SEQ ID NO: 14149 - DNA, 26 bp, Homo sapiens
atggacaggaattattggcaatttac

SEQ ID NO: 14150 - DNA, 26 bp, Homo sapiens
tggacaggaattattggcaatttaca

SEQ ID NO: 14151 - DNA, 26 bp, Homo sapiens
ggacaggaattattggcaatttacac

SEQ ID NO: 14152 - DNA, 26 bp, Homo sapiens
gacaggaattattggcaatttacaca

SEQ ID NO: 14153 - DNA, 26 bp, Homo sapiens
acaggaattattggcaatttacacag

SEQ ID NO: 14154 - DNA, 26 bp, Homo sapiens
caggaattattggcaatttacacagt

SEQ ID NO: 14155 - DNA, 26 bp, Homo sapiens
aggaattattggcaatttacacagtt

SEQ ID NO: 14156 - DNA, 26 bp, Homo sapiens
ggaattattggcaatttacacagttg

SEQ ID NO: 14157 - DNA, 26 bp, Homo sapiens
gaattattggcaatttacacagttgt

SEQ ID NO: 14158 - DNA, 26 bp, Homo sapiens
aattattggcaatttacacagttgtg

SEQ ID NO: 14159 - DNA, 26 bp, Homo sapiens
attattggcaatttacacagttgtga

SEQ ID NO: 14160 - DNA, 26 bp, Homo sapiens
ttattggcaatttacacagttgtgaa

SEQ ID NO: 14161 - DNA, 26 bp, Homo sapiens
tattggcaatttacacagttgtgaaa

SEQ ID NO: 14162 - DNA, 26 bp, Homo sapiens
attggcaatttacacagttgtgaaat

SEQ ID NO: 14163 - DNA, 26 bp, Homo sapiens
ttggcaatttacacagttgtgaaata

SEQ ID NO: 14164 - DNA, 26 bp, Homo sapiens
tggcaatttacacagttgtgaaatag

SEQ ID NO: 14165 - DNA, 26 bp, Homo sapiens
ggcaatttacacagttgtgaaatagg

SEQ ID NO: 14166 - DNA, 26 bp, Homo sapiens
gcaatttacacagttgtgaaataggt

SEQ ID NO: 14167 - DNA, 26 bp, Homo sapiens
caatttacacagttgtgaaataggta

SEQ ID NO: 14168 - DNA, 26 bp, Homo sapiens
aatttacacagttgtgaaataggtaa

SEQ ID NO: 14169 - DNA, 26 bp, Homo sapiens
atttacacagttgtgaaataggtaaa

SEQ ID NO: 14170 - DNA, 26 bp, Homo sapiens
tttacacagttgtgaaataggtaaaa

SEQ ID NO: 14171 - DNA, 26 bp, Homo sapiens
ttacacagttgtgaaataggtaaaac

SEQ ID NO: 14172 - DNA, 26 bp, Homo sapiens
tacacagttgtgaaataggtaaaaca

SEQ ID NO: 14173 - DNA, 26 bp, Homo sapiens
acacagttgtgaaataggtaaaacaa

SEQ ID NO: 14174 - DNA, 26 bp, Homo sapiens
cacagttgtgaaataggtaaaacaaa

SEQ ID NO: 14175 - DNA, 26 bp, Homo sapiens
acagttgtgaaataggtaaaacaaac

SEQ ID NO: 14176 - DNA, 26 bp, Homo sapiens
cagttgtgaaataggtaaaacaaaca

SEQ ID NO: 14177 - DNA, 26 bp, Homo sapiens
agttgtgaaataggtaaaacaaacaa

SEQ ID NO: 14178 - DNA, 26 bp, Homo sapiens
gttgtgaaataggtaaaacaaacaaa

SEQ ID NO: 14179 - DNA, 26 bp, Homo sapiens
ttgtgaaataggtaaaacaaacaaaa

SEQ ID NO: 14180 - DNA, 26 bp, Homo sapiens
tgtgaaataggtaaaacaaacaaaaa

SEQ ID NO: 14181 - DNA, 26 bp, Homo sapiens
gtgaaataggtaaaacaaacaaaaag

SEQ ID NO: 14182 - DNA, 26 bp, Homo sapiens
tgaaataggtaaaacaaacaaaaagt

SEQ ID NO: 14183 - DNA, 26 bp, Homo sapiens
gaaataggtaaaacaaacaaaaagtg

SEQ ID NO: 14184 - DNA, 26 bp, Homo sapiens
aaataggtaaaacaaacaaaaagtga

SEQ ID NO: 14185 - DNA, 26 bp, Homo sapiens
aataggtaaaacaaacaaaaagtgaa

SEQ ID NO: 14186 - DNA, 26 bp, Homo sapiens
ataggtaaaacaaacaaaaagtgaaa

SEQ ID NO: 14187 - DNA, 26 bp, Homo sapiens
taggtaaaacaaacaaaaagtgaaag

SEQ ID NO: 14188 - DNA, 26 bp, Homo sapiens
aggtaaaacaaacaaaaagtgaaagg

SEQ ID NO: 14189 - DNA, 26 bp, Homo sapiens
ggtaaaacaaacaaaaagtgaaaggt

SEQ ID NO: 14190 - DNA, 26 bp, Homo sapiens
gtaaaacaaacaaaaagtgaaaggtt

SEQ ID NO: 14191 - DNA, 26 bp, Homo sapiens
taaaacaaacaaaaagtgaaaggttc

SEQ ID NO: 14192 - DNA, 26 bp, Homo sapiens
aaaacaaacaaaaagtgaaaggttcg

SEQ ID NO: 14193 - DNA, 26 bp, Homo sapiens
aaacaaacaaaaagtgaaaggttcga

SEQ ID NO: 14194 - DNA, 26 bp, Homo sapiens
aacaaacaaaaagtgaaaggttcgaa

SEQ ID NO: 14195 - DNA, 26 bp, Homo sapiens
acaaacaaaaagtgaaaggttcgaaa

SEQ ID NO: 14196 - DNA, 26 bp, Homo sapiens
caaacaaaaagtgaaaggttcgaaaa

SEQ ID NO: 14197 - DNA, 26 bp, Homo sapiens
aaacaaaaagtgaaaggttcgaaaac

SEQ ID NO: 14198 - DNA, 26 bp, Homo sapiens
aacaaaaagtgaaaggttcgaaaacc

SEQ ID NO: 14199 - DNA, 26 bp, Homo sapiens
acaaaaagtgaaaggttcgaaaaccc

SEQ ID NO: 14200 - DNA, 26 bp, Homo sapiens
caaaaagtgaaaggttcgaaaacccc

SEQ ID NO: 14201 - DNA, 26 bp, Homo sapiens
aaaaagtgaaaggttcgaaaacccca

SEQ ID NO: 14202 - DNA, 26 bp, Homo sapiens
aaaagtgaaaggttcgaaaaccccat

SEQ ID NO: 14203 - DNA, 26 bp, Homo sapiens
aaagtgaaaggttcgaaaaccccata

SEQ ID NO: 14204 - DNA, 26 bp, Homo sapiens
aagtgaaaggttcgaaaaccccatac

SEQ ID NO: 14205 - DNA, 26 bp, Homo sapiens
agtgaaaggttcgaaaaccccataca

SEQ ID NO: 14206 - DNA, 26 bp, Homo sapiens
gtgaaaggttcgaaaaccccatacaa

SEQ ID NO: 14207 - DNA, 26 bp, Homo sapiens
tgaaaggttcgaaaaccccatacaat

SEQ ID NO: 14208 - DNA, 26 bp, Homo sapiens
gaaaggttcgaaaaccccatacaatc

SEQ ID NO: 14209 - DNA, 26 bp, Homo sapiens
aaaggttcgaaaaccccatacaatca

SEQ ID NO: 14210 - DNA, 26 bp, Homo sapiens
aaggttcgaaaaccccatacaatcag

SEQ ID NO: 14211 - DNA, 26 bp, Homo sapiens
aggttcgaaaaccccatacaatcagc

SEQ ID NO: 14212 - DNA, 26 bp, Homo sapiens
ggttcgaaaaccccatacaatcagct

SEQ ID NO: 14213 - DNA, 26 bp, Homo sapiens
gttcgaaaaccccatacaatcagcta

SEQ ID NO: 14214 - DNA, 26 bp, Homo sapiens
ttcgaaaaccccatacaatcagctaa

SEQ ID NO: 14215 - DNA, 26 bp, Homo sapiens
tcgaaaaccccatacaatcagctaaa

SEQ ID NO: 14216 - DNA, 26 bp, Homo sapiens
cgaaaaccccatacaatcagctaaac

SEQ ID NO: 14217 - DNA, 26 bp, Homo sapiens
gaaaaccccatacaatcagctaaact

SEQ ID NO: 14218 - DNA, 26 bp, Homo sapiens
aaaaccccatacaatcagctaaacta

SEQ ID NO: 14219 - DNA, 26 bp, Homo sapiens
aaaccccatacaatcagctaaactaa

SEQ ID NO: 14220 - DNA, 26 bp, Homo sapiens
aaccccatacaatcagctaaactaac

SEQ ID NO: 14221 - DNA, 26 bp, Homo sapiens
accccatacaatcagctaaactaaca

SEQ ID NO: 14222 - DNA, 26 bp, Homo sapiens
ccccatacaatcagctaaactaacat

SEQ ID NO: 14223 - DNA, 26 bp, Homo sapiens
cccatacaatcagctaaactaacatt

SEQ ID NO: 14224 - DNA, 26 bp, Homo sapiens
ccatacaatcagctaaactaacattt

SEQ ID NO: 14225 - DNA, 26 bp, Homo sapiens
catacaatcagctaaactaacattta

SEQ ID NO: 14226 - DNA, 26 bp, Homo sapiens
atacaatcagctaaactaacatttag

SEQ ID NO: 14227 - DNA, 26 bp, Homo sapiens
tacaatcagctaaactaacatttagt

SEQ ID NO: 14228 - DNA, 26 bp, Homo sapiens
acaatcagctaaactaacatttagtt

SEQ ID NO: 14229 - DNA, 26 bp, Homo sapiens
caatcagctaaactaacatttagttt

SEQ ID NO: 14230 - DNA, 26 bp, Homo sapiens
aatcagctaaactaacatttagtttt

SEQ ID NO: 14231 - DNA, 26 bp, Homo sapiens
atcagctaaactaacatttagttttc

SEQ ID NO: 14232 - DNA, 26 bp, Homo sapiens
tcagctaaactaacatttagttttcc

SEQ ID NO: 14233 - DNA, 26 bp, Homo sapiens
cagctaaactaacatttagttttcca

SEQ ID NO: 14234 - DNA, 26 bp, Homo sapiens
agctaaactaacatttagttttccat

SEQ ID NO: 14235 - DNA, 26 bp, Homo sapiens
gctaaactaacatttagttttccatt

SEQ ID NO: 14236 - DNA, 26 bp, Homo sapiens
ctaaactaacatttagttttccattg

SEQ ID NO: 14237 - DNA, 26 bp, Homo sapiens
taaactaacatttagttttccattga

SEQ ID NO: 14238 - DNA, 26 bp, Homo sapiens
aaactaacatttagttttccattgaa

SEQ ID NO: 14239 - DNA, 26 bp, Homo sapiens
aactaacatttagttttccattgaaa

SEQ ID NO: 14240 - DNA, 26 bp, Homo sapiens
actaacatttagttttccattgaaaa

SEQ ID NO: 14241 - DNA, 26 bp, Homo sapiens
ctaacatttagttttccattgaaaat

SEQ ID NO: 14242 - DNA, 26 bp, Homo sapiens
taacatttagttttccattgaaaata

SEQ ID NO: 14243 - DNA, 26 bp, Homo sapiens
aacatttagttttccattgaaaatat

SEQ ID NO: 14244 - DNA, 26 bp, Homo sapiens
acatttagttttccattgaaaatatt

SEQ ID NO: 14245 - DNA, 26 bp, Homo sapiens
catttagttttccattgaaaatattt

SEQ ID NO: 14246 - DNA, 26 bp, Homo sapiens
atttagttttccattgaaaatattta

SEQ ID NO: 14247 - DNA, 26 bp, Homo sapiens
tttagttttccattgaaaatatttag

SEQ ID NO: 14248 - DNA, 26 bp, Homo sapiens
ttagttttccattgaaaatatttagc

SEQ ID NO: 14249 - DNA, 26 bp, Homo sapiens
tagttttccattgaaaatatttagca

SEQ ID NO: 14250 - DNA, 26 bp, Homo sapiens
agttttccattgaaaatatttagcaa

SEQ ID NO: 14251 - DNA, 26 bp, Homo sapiens
gttttccattgaaaatatttagcaat

SEQ ID NO: 14252 - DNA, 26 bp, Homo sapiens
ttttccattgaaaatatttagcaatt

SEQ ID NO: 14253 - DNA, 26 bp, Homo sapiens
tttccattgaaaatatttagcaattt

SEQ ID NO: 14254 - DNA, 26 bp, Homo sapiens
ttccattgaaaatatttagcaatttt

SEQ ID NO: 14255 - DNA, 26 bp, Homo sapiens
tccattgaaaatatttagcaattttt

SEQ ID NO: 14256 - DNA, 26 bp, Homo sapiens
ccattgaaaatatttagcaatttttt

SEQ ID NO: 14257 - DNA, 26 bp, Homo sapiens
cattgaaaatatttagcaattttttg

SEQ ID NO: 14258 - DNA, 26 bp, Homo sapiens
attgaaaatatttagcaattttttga

SEQ ID NO: 14259 - DNA, 26 bp, Homo sapiens
ttgaaaatatttagcaattttttgag

SEQ ID NO: 14260 - DNA, 26 bp, Homo sapiens
tgaaaatatttagcaattttttgaga

SEQ ID NO: 14261 - DNA, 26 bp, Homo sapiens
gaaaatatttagcaattttttgagac

SEQ ID NO: 14262 - DNA, 26 bp, Homo sapiens
aaaatatttagcaattttttgagacc

SEQ ID NO: 14263 - DNA, 26 bp, Homo sapiens
aaatatttagcaattttttgagacca

SEQ ID NO: 14264 - DNA, 26 bp, Homo sapiens
aatatttagcaattttttgagaccat

SEQ ID NO: 14265 - DNA, 26 bp, Homo sapiens
atatttagcaattttttgagaccatt

SEQ ID NO: 14266 - DNA, 26 bp, Homo sapiens
tatttagcaattttttgagaccattt

SEQ ID NO: 14267 - DNA, 26 bp, Homo sapiens
atttagcaattttttgagaccatttc

SEQ ID NO: 14268 - DNA, 26 bp, Homo sapiens
tttagcaattttttgagaccatttca

SEQ ID NO: 14269 - DNA, 26 bp, Homo sapiens
ttagcaattttttgagaccatttcaa

SEQ ID NO: 14270 - DNA, 26 bp, Homo sapiens
tagcaattttttgagaccatttcaaa

SEQ ID NO: 14271 - DNA, 26 bp, Homo sapiens
agcaattttttgagaccatttcaaag

SEQ ID NO: 14272 - DNA, 26 bp, Homo sapiens
gcaattttttgagaccatttcaaagt

SEQ ID NO: 14273 - DNA, 26 bp, Homo sapiens
caattttttgagaccatttcaaagtt

SEQ ID NO: 14274 - DNA, 26 bp, Homo sapiens
aattttttgagaccatttcaaagttt

SEQ ID NO: 14275 - DNA, 26 bp, Homo sapiens
attttttgagaccatttcaaagtttt

SEQ ID NO: 14276 - DNA, 26 bp, Homo sapiens
ttttttgagaccatttcaaagttttt

SEQ ID NO: 14277 - DNA, 26 bp, Homo sapiens
tttttgagaccatttcaaagtttttc

SEQ ID NO: 14278 - DNA, 26 bp, Homo sapiens
ttttgagaccatttcaaagtttttct

SEQ ID NO: 14279 - DNA, 26 bp, Homo sapiens
tttgagaccatttcaaagtttttctt

SEQ ID NO: 14280 - DNA, 26 bp, Homo sapiens
ttgagaccatttcaaagtttttctta

SEQ ID NO: 14281 - DNA, 26 bp, Homo sapiens
tgagaccatttcaaagtttttcttaa

SEQ ID NO: 14282 - DNA, 26 bp, Homo sapiens
gagaccatttcaaagtttttcttaat

SEQ ID NO: 14283 - DNA, 26 bp, Homo sapiens
agaccatttcaaagtttttcttaatt

SEQ ID NO: 14284 - DNA, 26 bp, Homo sapiens
gaccatttcaaagtttttcttaattt

SEQ ID NO: 14285 - DNA, 26 bp, Homo sapiens
accatttcaaagtttttcttaatttt

SEQ ID NO: 14286 - DNA, 26 bp, Homo sapiens
ccatttcaaagtttttcttaattttt

SEQ ID NO: 14287 - DNA, 26 bp, Homo sapiens
catttcaaagtttttcttaatttttc

SEQ ID NO: 14288 - DNA, 26 bp, Homo sapiens
atttcaaagtttttcttaatttttct

SEQ ID NO: 14289 - DNA, 26 bp, Homo sapiens
tttcaaagtttttcttaatttttctc

SEQ ID NO: 14290 - DNA, 26 bp, Homo sapiens
ttcaaagtttttcttaatttttctct

SEQ ID NO: 14291 - DNA, 26 bp, Homo sapiens
tcaaagtttttcttaatttttctctg

SEQ ID NO: 14292 - DNA, 26 bp, Homo sapiens
caaagtttttcttaatttttctctgc

SEQ ID NO: 14293 - DNA, 26 bp, Homo sapiens
aaagtttttcttaatttttctctgct

SEQ ID NO: 14294 - DNA, 26 bp, Homo sapiens
aagtttttcttaatttttctctgctc

SEQ ID NO: 14295 - DNA, 26 bp, Homo sapiens
agtttttcttaatttttctctgctct

SEQ ID NO: 14296 - DNA, 26 bp, Homo sapiens
gtttttcttaatttttctctgctcta

SEQ ID NO: 14297 - DNA, 26 bp, Homo sapiens
tttttcttaatttttctctgctctaa

SEQ ID NO: 14298 - DNA, 26 bp, Homo sapiens
ttttcttaatttttctctgctctaaa

SEQ ID NO: 14299 - DNA, 26 bp, Homo sapiens
tttcttaatttttctctgctctaaac

SEQ ID NO: 14300 - DNA, 26 bp, Homo sapiens
ttcttaatttttctctgctctaaaca

SEQ ID NO: 14301 - DNA, 26 bp, Homo sapiens
tcttaatttttctctgctctaaacaa

SEQ ID NO: 14302 - DNA, 26 bp, Homo sapiens
cttaatttttctctgctctaaacaag

SEQ ID NO: 14303 - DNA, 26 bp, Homo sapiens
ttaatttttctctgctctaaacaagg

SEQ ID NO: 14304 - DNA, 26 bp, Homo sapiens
taatttttctctgctctaaacaagga

SEQ ID NO: 14305 - DNA, 26 bp, Homo sapiens
aatttttctctgctctaaacaaggat

SEQ ID NO: 14306 - DNA, 26 bp, Homo sapiens
atttttctctgctctaaacaaggata

SEQ ID NO: 14307 - DNA, 26 bp, Homo sapiens
tttttctctgctctaaacaaggataa

SEQ ID NO: 14308 - DNA, 26 bp, Homo sapiens
ttttctctgctctaaacaaggataaa

SEQ ID NO: 14309 - DNA, 26 bp, Homo sapiens
tttctctgctctaaacaaggataaat

SEQ ID NO: 14310 - DNA, 26 bp, Homo sapiens
ttctctgctctaaacaaggataaatt

SEQ ID NO: 14311 - DNA, 26 bp, Homo sapiens
tctctgctctaaacaaggataaattt

SEQ ID NO: 14312 - DNA, 26 bp, Homo sapiens
ctctgctctaaacaaggataaatttg

SEQ ID NO: 14313 - DNA, 26 bp, Homo sapiens
tctgctctaaacaaggataaatttga

SEQ ID NO: 14314 - DNA, 26 bp, Homo sapiens
ctgctctaaacaaggataaatttgag

SEQ ID NO: 14315 - DNA, 26 bp, Homo sapiens
tgctctaaacaaggataaatttgagt

SEQ ID NO: 14316 - DNA, 26 bp, Homo sapiens
gctctaaacaaggataaatttgagtt

SEQ ID NO: 14317 - DNA, 26 bp, Homo sapiens
ctctaaacaaggataaatttgagttt

SEQ ID NO: 14318 - DNA, 26 bp, Homo sapiens
tctaaacaaggataaatttgagttta

SEQ ID NO: 14319 - DNA, 26 bp, Homo sapiens
ctaaacaaggataaatttgagtttat

SEQ ID NO: 14320 - DNA, 26 bp, Homo sapiens
taaacaaggataaatttgagtttatt

SEQ ID NO: 14321 - DNA, 26 bp, Homo sapiens
aaacaaggataaatttgagtttattt

SEQ ID NO: 14322 - DNA, 26 bp, Homo sapiens
aacaaggataaatttgagtttatttt

SEQ ID NO: 14323 - DNA, 26 bp, Homo sapiens
acaaggataaatttgagtttatttta

SEQ ID NO: 14324 - DNA, 26 bp, Homo sapiens
caaggataaatttgagtttattttag

SEQ ID NO: 14325 - DNA, 26 bp, Homo sapiens
aaggataaatttgagtttattttagg

SEQ ID NO: 14326 - DNA, 26 bp, Homo sapiens
aggataaatttgagtttattttagga

SEQ ID NO: 14327 - DNA, 26 bp, Homo sapiens
ggataaatttgagtttattttaggaa

SEQ ID NO: 14328 - DNA, 26 bp, Homo sapiens
gataaatttgagtttattttaggaaa

SEQ ID NO: 14329 - DNA, 26 bp, Homo sapiens
ataaatttgagtttattttaggaaaa

SEQ ID NO: 14330 - DNA, 26 bp, Homo sapiens
taaatttgagtttattttaggaaaaa

SEQ ID NO: 14331 - DNA, 26 bp, Homo sapiens
aaatttgagtttattttaggaaaaaa

SEQ ID NO: 14332 - DNA, 26 bp, Homo sapiens
aatttgagtttattttaggaaaaaaa

SEQ ID NO: 14333 - DNA, 26 bp, Homo sapiens
atttgagtttattttaggaaaaaaaa

SEQ ID NO: 14334 - DNA, 26 bp, Homo sapiens
tttgagtttattttaggaaaaaaaag

SEQ ID NO: 14335 - DNA, 26 bp, Homo sapiens
ttgagtttattttaggaaaaaaaaga

SEQ ID NO: 14336 - DNA, 26 bp, Homo sapiens
tgagtttattttaggaaaaaaaagag

SEQ ID NO: 14337 - DNA, 26 bp, Homo sapiens
gagtttattttaggaaaaaaaagagc

SEQ ID NO: 14338 - DNA, 26 bp, Homo sapiens
agtttattttaggaaaaaaaagagct

SEQ ID NO: 14339 - DNA, 26 bp, Homo sapiens
gtttattttaggaaaaaaaagagctt

SEQ ID NO: 14340 - DNA, 26 bp, Homo sapiens
tttattttaggaaaaaaaagagcttt

SEQ ID NO: 14341 - DNA, 26 bp, Homo sapiens
ttattttaggaaaaaaaagagctttt

SEQ ID NO: 14342 - DNA, 26 bp, Homo sapiens
tattttaggaaaaaaaagagcttttt

SEQ ID NO: 14343 - DNA, 26 bp, Homo sapiens
attttaggaaaaaaaagagctttttc

SEQ ID NO: 14344 - DNA, 26 bp, Homo sapiens
ttttaggaaaaaaaagagctttttct

SEQ ID NO: 14345 - DNA, 26 bp, Homo sapiens
tttaggaaaaaaaagagctttttctt

SEQ ID NO: 14346 - DNA, 26 bp, Homo sapiens
ttaggaaaaaaaagagctttttcttt

SEQ ID NO: 14347 - DNA, 26 bp, Homo sapiens
taggaaaaaaaagagctttttctttg

SEQ ID NO: 14348 - DNA, 26 bp, Homo sapiens
aggaaaaaaaagagctttttctttgt

SEQ ID NO: 14349 - DNA, 26 bp, Homo sapiens
ggaaaaaaaagagctttttctttgtt

SEQ ID NO: 14350 - DNA, 26 bp, Homo sapiens
gaaaaaaaagagctttttctttgttg

SEQ ID NO: 14351 - DNA, 26 bp, Homo sapiens
aaaaaaaagagctttttctttgttga

SEQ ID NO: 14352 - DNA, 26 bp, Homo sapiens
aaaaaaagagctttttctttgttgaa

SEQ ID NO: 14353 - DNA, 26 bp, Homo sapiens
aaaaaagagctttttctttgttgaat

SEQ ID NO: 14354 - DNA, 26 bp, Homo sapiens
aaaaagagctttttctttgttgaatt

SEQ ID NO: 14355 - DNA, 26 bp, Homo sapiens
aaaagagctttttctttgttgaatta

SEQ ID NO: 14356 - DNA, 26 bp, Homo sapiens
aaagagctttttctttgttgaattag

SEQ ID NO: 14357 - DNA, 26 bp, Homo sapiens
aagagctttttctttgttgaattagt

SEQ ID NO: 14358 - DNA, 26 bp, Homo sapiens
agagctttttctttgttgaattagta

SEQ ID NO: 14359 - DNA, 26 bp, Homo sapiens
gagctttttctttgttgaattagtat

SEQ ID NO: 14360 - DNA, 26 bp, Homo sapiens
agctttttctttgttgaattagtatt

SEQ ID NO: 14361 - DNA, 26 bp, Homo sapiens
gctttttctttgttgaattagtattt

SEQ ID NO: 14362 - DNA, 26 bp, Homo sapiens
ctttttctttgttgaattagtatttt

SEQ ID NO: 14363 - DNA, 26 bp, Homo sapiens
tttttctttgttgaattagtattttg

SEQ ID NO: 14364 - DNA, 26 bp, Homo sapiens
ttttctttgttgaattagtattttga

SEQ ID NO: 14365 - DNA, 26 bp, Homo sapiens
tttctttgttgaattagtattttgaa

SEQ ID NO: 14366 - DNA, 26 bp, Homo sapiens
ttctttgttgaattagtattttgaaa

SEQ ID NO: 14367 - DNA, 26 bp, Homo sapiens
tctttgttgaattagtattttgaaaa

SEQ ID NO: 14368 - DNA, 26 bp, Homo sapiens
ctttgttgaattagtattttgaaaaa

SEQ ID NO: 14369 - DNA, 26 bp, Homo sapiens
tttgttgaattagtattttgaaaaat

SEQ ID NO: 14370 - DNA, 26 bp, Homo sapiens
ttgttgaattagtattttgaaaaatt

SEQ ID NO: 14371 - DNA, 26 bp, Homo sapiens
tgttgaattagtattttgaaaaattt

SEQ ID NO: 14372 - DNA, 26 bp, Homo sapiens
gttgaattagtattttgaaaaattta

SEQ ID NO: 14373 - DNA, 26 bp, Homo sapiens
ttgaattagtattttgaaaaatttat

SEQ ID NO: 14374 - DNA, 26 bp, Homo sapiens
tgaattagtattttgaaaaatttatg

SEQ ID NO: 14375 - DNA, 26 bp, Homo sapiens
gaattagtattttgaaaaatttatgg

SEQ ID NO: 14376 - DNA, 26 bp, Homo sapiens
aattagtattttgaaaaatttatgga

SEQ ID NO: 14377 - DNA, 26 bp, Homo sapiens
attagtattttgaaaaatttatggaa

SEQ ID NO: 14378 - DNA, 26 bp, Homo sapiens
ttagtattttgaaaaatttatggaag

SEQ ID NO: 14379 - DNA, 26 bp, Homo sapiens
tagtattttgaaaaatttatggaagg

SEQ ID NO: 14380 - DNA, 26 bp, Homo sapiens
agtattttgaaaaatttatggaagga

SEQ ID NO: 14381 - DNA, 26 bp, Homo sapiens
gtattttgaaaaatttatggaaggag

SEQ ID NO: 14382 - DNA, 26 bp, Homo sapiens
tattttgaaaaatttatggaaggaga

SEQ ID NO: 14383 - DNA, 26 bp, Homo sapiens
attttgaaaaatttatggaaggagac

SEQ ID NO: 14384 - DNA, 26 bp, Homo sapiens
ttttgaaaaatttatggaaggagaca

SEQ ID NO: 14385 - DNA, 26 bp, Homo sapiens
tttgaaaaatttatggaaggagacag

SEQ ID NO: 14386 - DNA, 26 bp, Homo sapiens
ttgaaaaatttatggaaggagacaga

SEQ ID NO: 14387 - DNA, 26 bp, Homo sapiens
tgaaaaatttatggaaggagacagaa

SEQ ID NO: 14388 - DNA, 26 bp, Homo sapiens
gaaaaatttatggaaggagacagaac

SEQ ID NO: 14389 - DNA, 26 bp, Homo sapiens
aaaaatttatggaaggagacagaaca

SEQ ID NO: 14390 - DNA, 26 bp, Homo sapiens
aaaatttatggaaggagacagaacat

SEQ ID NO: 14391 - DNA, 26 bp, Homo sapiens
aaatttatggaaggagacagaacata

SEQ ID NO: 14392 - DNA, 26 bp, Homo sapiens
aatttatggaaggagacagaacataa

SEQ ID NO: 14393 - DNA, 26 bp, Homo sapiens
atttatggaaggagacagaacataaa

SEQ ID NO: 14394 - DNA, 26 bp, Homo sapiens
tttatggaaggagacagaacataaaa

SEQ ID NO: 14395 - DNA, 26 bp, Homo sapiens
ttatggaaggagacagaacataaaag

SEQ ID NO: 14396 - DNA, 26 bp, Homo sapiens
tatggaaggagacagaacataaaagc

SEQ ID NO: 14397 - DNA, 26 bp, Homo sapiens
atggaaggagacagaacataaaagca

SEQ ID NO: 14398 - DNA, 26 bp, Homo sapiens
tggaaggagacagaacataaaagcag

SEQ ID NO: 14399 - DNA, 26 bp, Homo sapiens
ggaaggagacagaacataaaagcagt

SEQ ID NO: 14400 - DNA, 26 bp, Homo sapiens
gaaggagacagaacataaaagcagtt

SEQ ID NO: 14401 - DNA, 26 bp, Homo sapiens
aaggagacagaacataaaagcagttg

SEQ ID NO: 14402 - DNA, 26 bp, Homo sapiens
aggagacagaacataaaagcagttgc

SEQ ID NO: 14403 - DNA, 26 bp, Homo sapiens
ggagacagaacataaaagcagttgcc

SEQ ID NO: 14404 - DNA, 26 bp, Homo sapiens
gagacagaacataaaagcagttgcca

SEQ ID NO: 14405 - DNA, 26 bp, Homo sapiens
agacagaacataaaagcagttgccaa

SEQ ID NO: 14406 - DNA, 26 bp, Homo sapiens
gacagaacataaaagcagttgccaag

SEQ ID NO: 14407 - DNA, 26 bp, Homo sapiens
acagaacataaaagcagttgccaagt

SEQ ID NO: 14408 - DNA, 26 bp, Homo sapiens
cagaacataaaagcagttgccaagtt

SEQ ID NO: 14409 - DNA, 26 bp, Homo sapiens
agaacataaaagcagttgccaagttt

SEQ ID NO: 14410 - DNA, 26 bp, Homo sapiens
gaacataaaagcagttgccaagttta

SEQ ID NO: 14411 - DNA, 26 bp, Homo sapiens
aacataaaagcagttgccaagtttat

SEQ ID NO: 14412 - DNA, 26 bp, Homo sapiens
acataaaagcagttgccaagtttatc

SEQ ID NO: 14413 - DNA, 26 bp, Homo sapiens
cataaaagcagttgccaagtttatca

SEQ ID NO: 14414 - DNA, 26 bp, Homo sapiens
ataaaagcagttgccaagtttatcaa

SEQ ID NO: 14415 - DNA, 26 bp, Homo sapiens
taaaagcagttgccaagtttatcaat

SEQ ID NO: 14416 - DNA, 26 bp, Homo sapiens
aaaagcagttgccaagtttatcaatt

SEQ ID NO: 14417 - DNA, 26 bp, Homo sapiens
aaagcagttgccaagtttatcaatta

SEQ ID NO: 14418 - DNA, 26 bp, Homo sapiens
aagcagttgccaagtttatcaattaa

SEQ ID NO: 14419 - DNA, 26 bp, Homo sapiens
agcagttgccaagtttatcaattaag

SEQ ID NO: 14420 - DNA, 26 bp, Homo sapiens
gcagttgccaagtttatcaattaagt

SEQ ID NO: 14421 - DNA, 26 bp, Homo sapiens
cagttgccaagtttatcaattaagtt

SEQ ID NO: 14422 - DNA, 26 bp, Homo sapiens
agttgccaagtttatcaattaagttg

SEQ ID NO: 14423 - DNA, 26 bp, Homo sapiens
gttgccaagtttatcaattaagttgg

SEQ ID NO: 14424 - DNA, 26 bp, Homo sapiens
ttgccaagtttatcaattaagttggt

SEQ ID NO: 14425 - DNA, 26 bp, Homo sapiens
tgccaagtttatcaattaagttggta

SEQ ID NO: 14426 - DNA, 26 bp, Homo sapiens
gccaagtttatcaattaagttggtac

SEQ ID NO: 14427 - DNA, 26 bp, Homo sapiens
ccaagtttatcaattaagttggtacg

SEQ ID NO: 14428 - DNA, 26 bp, Homo sapiens
caagtttatcaattaagttggtacga

SEQ ID NO: 14429 - DNA, 26 bp, Homo sapiens
aagtttatcaattaagttggtacgat

SEQ ID NO: 14430 - DNA, 26 bp, Homo sapiens
agtttatcaattaagttggtacgatt

SEQ ID NO: 14431 - DNA, 26 bp, Homo sapiens
gtttatcaattaagttggtacgatta

SEQ ID NO: 14432 - DNA, 26 bp, Homo sapiens
tttatcaattaagttggtacgattac

SEQ ID NO: 14433 - DNA, 26 bp, Homo sapiens
ttatcaattaagttggtacgattaca

SEQ ID NO: 14434 - DNA, 26 bp, Homo sapiens
tatcaattaagttggtacgattacaa

SEQ ID NO: 14435 - DNA, 26 bp, Homo sapiens
atcaattaagttggtacgattacaaa

SEQ ID NO: 14436 - DNA, 26 bp, Homo sapiens
tcaattaagttggtacgattacaaat

SEQ ID NO: 14437 - DNA, 26 bp, Homo sapiens
caattaagttggtacgattacaaatc

SEQ ID NO: 14438 - DNA, 26 bp, Homo sapiens
aattaagttggtacgattacaaatcc

SEQ ID NO: 14439 - DNA, 26 bp, Homo sapiens
attaagttggtacgattacaaatccc

SEQ ID NO: 14440 - DNA, 26 bp, Homo sapiens
ttaagttggtacgattacaaatccca

SEQ ID NO: 14441 - DNA, 26 bp, Homo sapiens
taagttggtacgattacaaatcccaa

SEQ ID NO: 14442 - DNA, 26 bp, Homo sapiens
aagttggtacgattacaaatcccaat

SEQ ID NO: 14443 - DNA, 26 bp, Homo sapiens
agttggtacgattacaaatcccaatt

SEQ ID NO: 14444 - DNA, 26 bp, Homo sapiens
gttggtacgattacaaatcccaatta

SEQ ID NO: 14445 - DNA, 26 bp, Homo sapiens
ttggtacgattacaaatcccaattaa

SEQ ID NO: 14446 - DNA, 26 bp, Homo sapiens
tggtacgattacaaatcccaattaag

SEQ ID NO: 14447 - DNA, 26 bp, Homo sapiens
ggtacgattacaaatcccaattaaga

SEQ ID NO: 14448 - DNA, 26 bp, Homo sapiens
gtacgattacaaatcccaattaagaa

SEQ ID NO: 14449 - DNA, 26 bp, Homo sapiens
tacgattacaaatcccaattaagaaa

SEQ ID NO: 14450 - DNA, 26 bp, Homo sapiens
acgattacaaatcccaattaagaaat

SEQ ID NO: 14451 - DNA, 26 bp, Homo sapiens
cgattacaaatcccaattaagaaata

SEQ ID NO: 14452 - DNA, 26 bp, Homo sapiens
gattacaaatcccaattaagaaatat

SEQ ID NO: 14453 - DNA, 26 bp, Homo sapiens
attacaaatcccaattaagaaatatt

SEQ ID NO: 14454 - DNA, 26 bp, Homo sapiens
ttacaaatcccaattaagaaatattt

SEQ ID NO: 14455 - DNA, 26 bp, Homo sapiens
tacaaatcccaattaagaaatatttt

SEQ ID NO: 14456 - DNA, 26 bp, Homo sapiens
acaaatcccaattaagaaatattttt

SEQ ID NO: 14457 - DNA, 26 bp, Homo sapiens
caaatcccaattaagaaatattttta

SEQ ID NO: 14458 - DNA, 26 bp, Homo sapiens
aaatcccaattaagaaatatttttaa

SEQ ID NO: 14459 - DNA, 26 bp, Homo sapiens
aatcccaattaagaaatatttttaag

SEQ ID NO: 14460 - DNA, 26 bp, Homo sapiens
atcccaattaagaaatatttttaagt

SEQ ID NO: 14461 - DNA, 26 bp, Homo sapiens
tcccaattaagaaatatttttaagta

SEQ ID NO: 14462 - DNA, 26 bp, Homo sapiens
cccaattaagaaatatttttaagtat

SEQ ID NO: 14463 - DNA, 26 bp, Homo sapiens
ccaattaagaaatatttttaagtata

SEQ ID NO: 14464 - DNA, 26 bp, Homo sapiens
caattaagaaatatttttaagtatat

SEQ ID NO: 14465 - DNA, 26 bp, Homo sapiens
aattaagaaatatttttaagtatatt

SEQ ID NO: 14466 - DNA, 26 bp, Homo sapiens
attaagaaatatttttaagtatatta

SEQ ID NO: 14467 - DNA, 26 bp, Homo sapiens
ttaagaaatatttttaagtatattat

SEQ ID NO: 14468 - DNA, 26 bp, Homo sapiens
taagaaatatttttaagtatattata

SEQ ID NO: 14469 - DNA, 26 bp, Homo sapiens
aagaaatatttttaagtatattatat

SEQ ID NO: 14470 - DNA, 26 bp, Homo sapiens
agaaatatttttaagtatattatatg

SEQ ID NO: 14471 - DNA, 26 bp, Homo sapiens
gaaatatttttaagtatattatatga

SEQ ID NO: 14472 - DNA, 26 bp, Homo sapiens
aaatatttttaagtatattatatgaa

SEQ ID NO: 14473 - DNA, 26 bp, Homo sapiens
aatatttttaagtatattatatgaag

SEQ ID NO: 14474 - DNA, 26 bp, Homo sapiens
atatttttaagtatattatatgaaga

SEQ ID NO: 14475 - DNA, 26 bp, Homo sapiens
tatttttaagtatattatatgaagat

SEQ ID NO: 14476 - DNA, 26 bp, Homo sapiens
atttttaagtatattatatgaagatg

SEQ ID NO: 14477 - DNA, 26 bp, Homo sapiens
tttttaagtatattatatgaagatgg

SEQ ID NO: 14478 - DNA, 26 bp, Homo sapiens
ttttaagtatattatatgaagatggt

SEQ ID NO: 14479 - DNA, 26 bp, Homo sapiens
tttaagtatattatatgaagatggta

SEQ ID NO: 14480 - DNA, 26 bp, Homo sapiens
ttaagtatattatatgaagatggtat

SEQ ID NO: 14481 - DNA, 26 bp, Homo sapiens
taagtatattatatgaagatggtata

SEQ ID NO: 14482 - DNA, 26 bp, Homo sapiens
aagtatattatatgaagatggtatac

SEQ ID NO: 14483 - DNA, 26 bp, Homo sapiens
agtatattatatgaagatggtataca

SEQ ID NO: 14484 - DNA, 26 bp, Homo sapiens
gtatattatatgaagatggtatacaa

SEQ ID NO: 14485 - DNA, 26 bp, Homo sapiens
tatattatatgaagatggtatacaaa

SEQ ID NO: 14486 - DNA, 26 bp, Homo sapiens
atattatatgaagatggtatacaaaa

SEQ ID NO: 14487 - DNA, 26 bp, Homo sapiens
tattatatgaagatggtatacaaaat

SEQ ID NO: 14488 - DNA, 26 bp, Homo sapiens
attatatgaagatggtatacaaaata

SEQ ID NO: 14489 - DNA, 26 bp, Homo sapiens
ttatatgaagatggtatacaaaatac

SEQ ID NO: 14490 - DNA, 26 bp, Homo sapiens
tatatgaagatggtatacaaaataca

SEQ ID NO: 14491 - DNA, 26 bp, Homo sapiens
atatgaagatggtatacaaaatacat

SEQ ID NO: 14492 - DNA, 26 bp, Homo sapiens
tatgaagatggtatacaaaatacatt

SEQ ID NO: 14493 - DNA, 26 bp, Homo sapiens
atgaagatggtatacaaaatacattc

SEQ ID NO: 14494 - DNA, 26 bp, Homo sapiens
tgaagatggtatacaaaatacattca

SEQ ID NO: 14495 - DNA, 26 bp, Homo sapiens
gaagatggtatacaaaatacattcat

SEQ ID NO: 14496 - DNA, 26 bp, Homo sapiens
aagatggtatacaaaatacattcatc

SEQ ID NO: 14497 - DNA, 26 bp, Homo sapiens
agatggtatacaaaatacattcatca

SEQ ID NO: 14498 - DNA, 26 bp, Homo sapiens
gatggtatacaaaatacattcatcat

SEQ ID NO: 14499 - DNA, 26 bp, Homo sapiens
atggtatacaaaatacattcatcatg

SEQ ID NO: 14500 - DNA, 26 bp, Homo sapiens
tggtatacaaaatacattcatcatga

SEQ ID NO: 14501 - DNA, 26 bp, Homo sapiens
ggtatacaaaatacattcatcatgac

SEQ ID NO: 14502 - DNA, 26 bp, Homo sapiens
gtatacaaaatacattcatcatgact

SEQ ID NO: 14503 - DNA, 26 bp, Homo sapiens
tatacaaaatacattcatcatgacta

SEQ ID NO: 14504 - DNA, 26 bp, Homo sapiens
atacaaaatacattcatcatgactag

SEQ ID NO: 14505 - DNA, 26 bp, Homo sapiens
tacaaaatacattcatcatgactaga

SEQ ID NO: 14506 - DNA, 26 bp, Homo sapiens
acaaaatacattcatcatgactagaa

SEQ ID NO: 14507 - DNA, 26 bp, Homo sapiens
caaaatacattcatcatgactagaaa

SEQ ID NO: 14508 - DNA, 26 bp, Homo sapiens
aaaatacattcatcatgactagaaat

SEQ ID NO: 14509 - DNA, 26 bp, Homo sapiens
aaatacattcatcatgactagaaata

SEQ ID NO: 14510 - DNA, 26 bp, Homo sapiens
aatacattcatcatgactagaaatat

SEQ ID NO: 14511 - DNA, 26 bp, Homo sapiens
atacattcatcatgactagaaatata

SEQ ID NO: 14512 - DNA, 26 bp, Homo sapiens
tacattcatcatgactagaaatatag

SEQ ID NO: 14513 - DNA, 26 bp, Homo sapiens
acattcatcatgactagaaatatagg

SEQ ID NO: 14514 - DNA, 26 bp, Homo sapiens
cattcatcatgactagaaatatagga

SEQ ID NO: 14515 - DNA, 26 bp, Homo sapiens
attcatcatgactagaaatataggac

SEQ ID NO: 14516 - DNA, 26 bp, Homo sapiens
ttcatcatgactagaaatataggacc

SEQ ID NO: 14517 - DNA, 26 bp, Homo sapiens
tcatcatgactagaaatataggacca

SEQ ID NO: 14518 - DNA, 26 bp, Homo sapiens
catcatgactagaaatataggaccaa

SEQ ID NO: 14519 - DNA, 26 bp, Homo sapiens
atcatgactagaaatataggaccaaa

SEQ ID NO: 14520 - DNA, 26 bp, Homo sapiens
tcatgactagaaatataggaccaaac

SEQ ID NO: 14521 - DNA, 26 bp, Homo sapiens
catgactagaaatataggaccaaacc

SEQ ID NO: 14522 - DNA, 26 bp, Homo sapiens
atgactagaaatataggaccaaacca

SEQ ID NO: 14523 - DNA, 26 bp, Homo sapiens
tgactagaaatataggaccaaaccat

SEQ ID NO: 14524 - DNA, 26 bp, Homo sapiens
gactagaaatataggaccaaaccatg

SEQ ID NO: 14525 - DNA, 26 bp, Homo sapiens
actagaaatataggaccaaaccatgt

SEQ ID NO: 14526 - DNA, 26 bp, Homo sapiens
ctagaaatataggaccaaaccatgtc

SEQ ID NO: 14527 - DNA, 26 bp, Homo sapiens
tagaaatataggaccaaaccatgtct

SEQ ID NO: 14528 - DNA, 26 bp, Homo sapiens
agaaatataggaccaaaccatgtctg

SEQ ID NO: 14529 - DNA, 26 bp, Homo sapiens
gaaatataggaccaaaccatgtctgt

SEQ ID NO: 14530 - DNA, 26 bp, Homo sapiens
aaatataggaccaaaccatgtctgtc

SEQ ID NO: 14531 - DNA, 26 bp, Homo sapiens
aatataggaccaaaccatgtctgtct

SEQ ID NO: 14532 - DNA, 26 bp, Homo sapiens
atataggaccaaaccatgtctgtctt

SEQ ID NO: 14533 - DNA, 26 bp, Homo sapiens
tataggaccaaaccatgtctgtctta

SEQ ID NO: 14534 - DNA, 26 bp, Homo sapiens
ataggaccaaaccatgtctgtcttat

SEQ ID NO: 14535 - DNA, 26 bp, Homo sapiens
taggaccaaaccatgtctgtcttata

SEQ ID NO: 14536 - DNA, 26 bp, Homo sapiens
aggaccaaaccatgtctgtcttatat

SEQ ID NO: 14537 - DNA, 26 bp, Homo sapiens
ggaccaaaccatgtctgtcttatatc

SEQ ID NO: 14538 - DNA, 26 bp, Homo sapiens
gaccaaaccatgtctgtcttatatct

SEQ ID NO: 14539 - DNA, 26 bp, Homo sapiens
accaaaccatgtctgtcttatatctg

SEQ ID NO: 14540 - DNA, 26 bp, Homo sapiens
ccaaaccatgtctgtcttatatctgt

SEQ ID NO: 14541 - DNA, 26 bp, Homo sapiens
caaaccatgtctgtcttatatctgta

SEQ ID NO: 14542 - DNA, 26 bp, Homo sapiens
aaaccatgtctgtcttatatctgtag

SEQ ID NO: 14543 - DNA, 26 bp, Homo sapiens
aaccatgtctgtcttatatctgtagc

SEQ ID NO: 14544 - DNA, 26 bp, Homo sapiens
accatgtctgtcttatatctgtagca

SEQ ID NO: 14545 - DNA, 26 bp, Homo sapiens
ccatgtctgtcttatatctgtagcat

SEQ ID NO: 14546 - DNA, 26 bp, Homo sapiens
catgtctgtcttatatctgtagcata

SEQ ID NO: 14547 - DNA, 26 bp, Homo sapiens
atgtctgtcttatatctgtagcatat

SEQ ID NO: 14548 - DNA, 26 bp, Homo sapiens
tgtctgtcttatatctgtagcatata

SEQ ID NO: 14549 - DNA, 26 bp, Homo sapiens
gtctgtcttatatctgtagcatatat

SEQ ID NO: 14550 - DNA, 26 bp, Homo sapiens
tctgtcttatatctgtagcatatatt

SEQ ID NO: 14551 - DNA, 26 bp, Homo sapiens
ctgtcttatatctgtagcatatattc

SEQ ID NO: 14552 - DNA, 26 bp, Homo sapiens
tgtcttatatctgtagcatatattct

SEQ ID NO: 14553 - DNA, 26 bp, Homo sapiens
gtcttatatctgtagcatatattctt

SEQ ID NO: 14554 - DNA, 26 bp, Homo sapiens
tcttatatctgtagcatatattcttg

SEQ ID NO: 14555 - DNA, 26 bp, Homo sapiens
cttatatctgtagcatatattcttgg

SEQ ID NO: 14556 - DNA, 26 bp, Homo sapiens
ttatatctgtagcatatattcttggt

SEQ ID NO: 14557 - DNA, 26 bp, Homo sapiens
tatatctgtagcatatattcttggtt

SEQ ID NO: 14558 - DNA, 26 bp, Homo sapiens
atatctgtagcatatattcttggttt

SEQ ID NO: 14559 - DNA, 26 bp, Homo sapiens
tatctgtagcatatattcttggtttg

SEQ ID NO: 14560 - DNA, 26 bp, Homo sapiens
atctgtagcatatattcttggtttgt

SEQ ID NO: 14561 - DNA, 26 bp, Homo sapiens
tctgtagcatatattcttggtttgta

SEQ ID NO: 14562 - DNA, 26 bp, Homo sapiens
ctgtagcatatattcttggtttgtat

SEQ ID NO: 14563 - DNA, 26 bp, Homo sapiens
tgtagcatatattcttggtttgtata

SEQ ID NO: 14564 - DNA, 26 bp, Homo sapiens
gtagcatatattcttggtttgtataa

SEQ ID NO: 14565 - DNA, 26 bp, Homo sapiens
tagcatatattcttggtttgtataaa

SEQ ID NO: 14566 - DNA, 26 bp, Homo sapiens
agcatatattcttggtttgtataaaa

SEQ ID NO: 14567 - DNA, 26 bp, Homo sapiens
gcatatattcttggtttgtataaaag

SEQ ID NO: 14568 - DNA, 26 bp, Homo sapiens
catatattcttggtttgtataaaagt

SEQ ID NO: 14569 - DNA, 26 bp, Homo sapiens
atatattcttggtttgtataaaagta

SEQ ID NO: 14570 - DNA, 26 bp, Homo sapiens
tatattcttggtttgtataaaagtaa

SEQ ID NO: 14571 - DNA, 26 bp, Homo sapiens
atattcttggtttgtataaaagtaac

SEQ ID NO: 14572 - DNA, 26 bp, Homo sapiens
tattcttggtttgtataaaagtaact

SEQ ID NO: 14573 - DNA, 26 bp, Homo sapiens
attcttggtttgtataaaagtaactt

SEQ ID NO: 14574 - DNA, 26 bp, Homo sapiens
ttcttggtttgtataaaagtaacttt

SEQ ID NO: 14575 - DNA, 26 bp, Homo sapiens
tcttggtttgtataaaagtaacttta

SEQ ID NO: 14576 - DNA, 26 bp, Homo sapiens
cttggtttgtataaaagtaactttaa

SEQ ID NO: 14577 - DNA, 26 bp, Homo sapiens
ttggtttgtataaaagtaactttaaa

SEQ ID NO: 14578 - DNA, 26 bp, Homo sapiens
tggtttgtataaaagtaactttaaaa

SEQ ID NO: 14579 - DNA, 26 bp, Homo sapiens
ggtttgtataaaagtaactttaaaat

SEQ ID NO: 14580 - DNA, 26 bp, Homo sapiens
gtttgtataaaagtaactttaaaatt

SEQ ID NO: 14581 - DNA, 26 bp, Homo sapiens
tttgtataaaagtaactttaaaattc

SEQ ID NO: 14582 - DNA, 26 bp, Homo sapiens
ttgtataaaagtaactttaaaattcc

SEQ ID NO: 14583 - DNA, 26 bp, Homo sapiens
tgtataaaagtaactttaaaattcca

SEQ ID NO: 14584 - DNA, 26 bp, Homo sapiens
gtataaaagtaactttaaaattccag

SEQ ID NO: 14585 - DNA, 26 bp, Homo sapiens
tataaaagtaactttaaaattccagt

SEQ ID NO: 14586 - DNA, 26 bp, Homo sapiens
ataaaagtaactttaaaattccagtt

SEQ ID NO: 14587 - DNA, 26 bp, Homo sapiens
taaaagtaactttaaaattccagttt

SEQ ID NO: 14588 - DNA, 26 bp, Homo sapiens
aaaagtaactttaaaattccagtttc

SEQ ID NO: 14589 - DNA, 26 bp, Homo sapiens
aaagtaactttaaaattccagtttcc

SEQ ID NO: 14590 - DNA, 26 bp, Homo sapiens
aagtaactttaaaattccagtttcct

SEQ ID NO: 14591 - DNA, 26 bp, Homo sapiens
agtaactttaaaattccagtttcctt

SEQ ID NO: 14592 - DNA, 26 bp, Homo sapiens
gtaactttaaaattccagtttcctta

SEQ ID NO: 14593 - DNA, 26 bp, Homo sapiens
taactttaaaattccagtttccttaa

SEQ ID NO: 14594 - DNA, 26 bp, Homo sapiens
aactttaaaattccagtttccttaaa

SEQ ID NO: 14595 - DNA, 26 bp, Homo sapiens
actttaaaattccagtttccttaaat

SEQ ID NO: 14596 - DNA, 26 bp, Homo sapiens
ctttaaaattccagtttccttaaata

SEQ ID NO: 14597 - DNA, 26 bp, Homo sapiens
tttaaaattccagtttccttaaatag

SEQ ID NO: 14598 - DNA, 26 bp, Homo sapiens
ttaaaattccagtttccttaaatagt

SEQ ID NO: 14599 - DNA, 26 bp, Homo sapiens
taaaattccagtttccttaaatagtt

SEQ ID NO: 14600 - DNA, 26 bp, Homo sapiens
aaaattccagtttccttaaatagtta

SEQ ID NO: 14601 - DNA, 26 bp, Homo sapiens
aaattccagtttccttaaatagttat

SEQ ID NO: 14602 - DNA, 26 bp, Homo sapiens
aattccagtttccttaaatagttatg

SEQ ID NO: 14603 - DNA, 26 bp, Homo sapiens
attccagtttccttaaatagttatgc

SEQ ID NO: 14604 - DNA, 26 bp, Homo sapiens
ttccagtttccttaaatagttatgca

SEQ ID NO: 14605 - DNA, 26 bp, Homo sapiens
tccagtttccttaaatagttatgcac

SEQ ID NO: 14606 - DNA, 26 bp, Homo sapiens
ccagtttccttaaatagttatgcaca

SEQ ID NO: 14607 - DNA, 26 bp, Homo sapiens
cagtttccttaaatagttatgcacaa

SEQ ID NO: 14608 - DNA, 26 bp, Homo sapiens
agtttccttaaatagttatgcacaaa

SEQ ID NO: 14609 - DNA, 26 bp, Homo sapiens
gtttccttaaatagttatgcacaaaa

SEQ ID NO: 14610 - DNA, 26 bp, Homo sapiens
tttccttaaatagttatgcacaaaac

SEQ ID NO: 14611 - DNA, 26 bp, Homo sapiens
ttccttaaatagttatgcacaaaaca

SEQ ID NO: 14612 - DNA, 26 bp, Homo sapiens
tccttaaatagttatgcacaaaacac

SEQ ID NO: 14613 - DNA, 26 bp, Homo sapiens
ccttaaatagttatgcacaaaacaca

SEQ ID NO: 14614 - DNA, 26 bp, Homo sapiens
cttaaatagttatgcacaaaacacac

SEQ ID NO: 14615 - DNA, 26 bp, Homo sapiens
ttaaatagttatgcacaaaacacaca

SEQ ID NO: 14616 - DNA, 26 bp, Homo sapiens
taaatagttatgcacaaaacacacat

SEQ ID NO: 14617 - DNA, 26 bp, Homo sapiens
aaatagttatgcacaaaacacacata

SEQ ID NO: 14618 - DNA, 26 bp, Homo sapiens
aatagttatgcacaaaacacacatac

SEQ ID NO: 14619 - DNA, 26 bp, Homo sapiens
atagttatgcacaaaacacacataca

SEQ ID NO: 14620 - DNA, 26 bp, Homo sapiens
tagttatgcacaaaacacacatacac

SEQ ID NO: 14621 - DNA, 26 bp, Homo sapiens
agttatgcacaaaacacacatacacc

SEQ ID NO: 14622 - DNA, 26 bp, Homo sapiens
gttatgcacaaaacacacatacaccc

SEQ ID NO: 14623 - DNA, 26 bp, Homo sapiens
ttatgcacaaaacacacatacaccca

SEQ ID NO: 14624 - DNA, 26 bp, Homo sapiens
tatgcacaaaacacacatacacccac

SEQ ID NO: 14625 - DNA, 26 bp, Homo sapiens
atgcacaaaacacacatacacccaca

SEQ ID NO: 14626 - DNA, 26 bp, Homo sapiens
tgcacaaaacacacatacacccacac

SEQ ID NO: 14627 - DNA, 26 bp, Homo sapiens
gcacaaaacacacatacacccacacc

SEQ ID NO: 14628 - DNA, 26 bp, Homo sapiens
cacaaaacacacatacacccacaccc

SEQ ID NO: 14629 - DNA, 26 bp, Homo sapiens
acaaaacacacatacacccacaccca

SEQ ID NO: 14630 - DNA, 26 bp, Homo sapiens
caaaacacacatacacccacacccac

SEQ ID NO: 14631 - DNA, 26 bp, Homo sapiens
aaaacacacatacacccacacccaca

SEQ ID NO: 14632 - DNA, 26 bp, Homo sapiens
aaacacacatacacccacacccacac

SEQ ID NO: 14633 - DNA, 26 bp, Homo sapiens
aacacacatacacccacacccacaca

SEQ ID NO: 14634 - DNA, 26 bp, Homo sapiens
acacacatacacccacacccacacac

SEQ ID NO: 14635 - DNA, 26 bp, Homo sapiens
cacacatacacccacacccacacaca

SEQ ID NO: 14636 - DNA, 26 bp, Homo sapiens
acacatacacccacacccacacacac

SEQ ID NO: 14637 - DNA, 26 bp, Homo sapiens
cacatacacccacacccacacacaca

SEQ ID NO: 14638 - DNA, 26 bp, Homo sapiens
acatacacccacacccacacacacac

SEQ ID NO: 14639 - DNA, 26 bp, Homo sapiens
catacacccacacccacacacacaca

SEQ ID NO: 14640 - DNA, 26 bp, Homo sapiens
atacacccacacccacacacacacac

SEQ ID NO: 14641 - DNA, 26 bp, Homo sapiens
tacacccacacccacacacacacaca

SEQ ID NO: 14642 - DNA, 26 bp, Homo sapiens
acacccacacccacacacacacacac

SEQ ID NO: 14643 - DNA, 26 bp, Homo sapiens
cacccacacccacacacacacacaca

SEQ ID NO: 14644 - DNA, 26 bp, Homo sapiens
acccacacccacacacacacacacac

SEQ ID NO: 14645 - DNA, 26 bp, Homo sapiens
cccacacccacacacacacacacaca

SEQ ID NO: 14646 - DNA, 26 bp, Homo sapiens
ccacacccacacacacacacacacac

SEQ ID NO: 14647 - DNA, 26 bp, Homo sapiens
cacacccacacacacacacacacaca

SEQ ID NO: 14648 - DNA, 26 bp, Homo sapiens
acacccacacacacacacacacacac

SEQ ID NO: 14649 - DNA, 26 bp, Homo sapiens
cacccacacacacacacacacacaca

SEQ ID NO: 14650 - DNA, 26 bp, Homo sapiens
acccacacacacacacacacacacac

SEQ ID NO: 14651 - DNA, 26 bp, Homo sapiens
cccacacacacacacacacacacaca

SEQ ID NO: 14652 - DNA, 26 bp, Homo sapiens
ccacacacacacacacacacacacac

SEQ ID NO: 14653 - DNA, 26 bp, Homo sapiens
cacacacacacacacacacacacaca

SEQ ID NO: 14654 - DNA, 26 bp, Homo sapiens
acacacacacacacacacacacacac

SEQ ID NO: 14655 - DNA, 26 bp, Homo sapiens
cacacacacacacacacacacacaca

SEQ ID NO: 14656 - DNA, 26 bp, Homo sapiens
acacacacacacacacacacacacac

SEQ ID NO: 14657 - DNA, 26 bp, Homo sapiens
cacacacacacacacacacacacaca

SEQ ID NO: 14658 - DNA, 26 bp, Homo sapiens
acacacacacacacacacacacacac

SEQ ID NO: 14659 - DNA, 26 bp, Homo sapiens
cacacacacacacacacacacacaca

SEQ ID NO: 14660 - DNA, 26 bp, Homo sapiens
acacacacacacacacacacacacac

SEQ ID NO: 14661 - DNA, 26 bp, Homo sapiens
cacacacacacacacacacacacaca

SEQ ID NO: 14662 - DNA, 26 bp, Homo sapiens
acacacacacacacacacacacacac

SEQ ID NO: 14663 - DNA, 26 bp, Homo sapiens
cacacacacacacacacacacacaca

SEQ ID NO: 14664 - DNA, 26 bp, Homo sapiens
acacacacacacacacacacacacac

SEQ ID NO: 14665 - DNA, 26 bp, Homo sapiens
cacacacacacacacacacacacaca

SEQ ID NO: 14666 - DNA, 26 bp, Homo sapiens
acacacacacacacacacacacacac

SEQ ID NO: 14667 - DNA, 26 bp, Homo sapiens
cacacacacacacacacacacacaca

SEQ ID NO: 14668 - DNA, 26 bp, Homo sapiens
acacacacacacacacacacacacac

SEQ ID NO: 14669 - DNA, 26 bp, Homo sapiens
cacacacacacacacacacacacaca

SEQ ID NO: 14670 - DNA, 26 bp, Homo sapiens
acacacacacacacacacacacacag

SEQ ID NO: 14671 - DNA, 26 bp, Homo sapiens
cacacacacacacacacacacacagt

SEQ ID NO: 14672 - DNA, 26 bp, Homo sapiens
acacacacacacacacacacacagtt

SEQ ID NO: 14673 - DNA, 26 bp, Homo sapiens
cacacacacacacacacacacagtta

SEQ ID NO: 14674 - DNA, 26 bp, Homo sapiens
acacacacacacacacacacagttac

SEQ ID NO: 14675 - DNA, 26 bp, Homo sapiens
cacacacacacacacacacagttaca

SEQ ID NO: 14676 - DNA, 26 bp, Homo sapiens
acacacacacacacacacagttacac

SEQ ID NO: 14677 - DNA, 26 bp, Homo sapiens
cacacacacacacacacagttacacc

SEQ ID NO: 14678 - DNA, 26 bp, Homo sapiens
acacacacacacacacagttacacca

SEQ ID NO: 14679 - DNA, 26 bp, Homo sapiens
cacacacacacacacagttacaccac

SEQ ID NO: 14680 - DNA, 26 bp, Homo sapiens
acacacacacacacagttacaccact

SEQ ID NO: 14681 - DNA, 26 bp, Homo sapiens
cacacacacacacagttacaccactg

SEQ ID NO: 14682 - DNA, 26 bp, Homo sapiens
acacacacacacagttacaccactgt

SEQ ID NO: 14683 - DNA, 26 bp, Homo sapiens
cacacacacacagttacaccactgtc

SEQ ID NO: 14684 - DNA, 26 bp, Homo sapiens
acacacacacagttacaccactgtcg

SEQ ID NO: 14685 - DNA, 26 bp, Homo sapiens
cacacacacagttacaccactgtcgg

SEQ ID NO: 14686 - DNA, 26 bp, Homo sapiens
acacacacagttacaccactgtcggc

SEQ ID NO: 14687 - DNA, 26 bp, Homo sapiens
cacacacagttacaccactgtcggcc

SEQ ID NO: 14688 - DNA, 26 bp, Homo sapiens
acacacagttacaccactgtcggcca

SEQ ID NO: 14689 - DNA, 26 bp, Homo sapiens
cacacagttacaccactgtcggccaa

SEQ ID NO: 14690 - DNA, 26 bp, Homo sapiens
acacagttacaccactgtcggccaaa

SEQ ID NO: 14691 - DNA, 26 bp, Homo sapiens
cacagttacaccactgtcggccaaag

SEQ ID NO: 14692 - DNA, 26 bp, Homo sapiens
acagttacaccactgtcggccaaaga

SEQ ID NO: 14693 - DNA, 26 bp, Homo sapiens
cagttacaccactgtcggccaaagat

SEQ ID NO: 14694 - DNA, 26 bp, Homo sapiens
agttacaccactgtcggccaaagatg

SEQ ID NO: 14695 - DNA, 26 bp, Homo sapiens
gttacaccactgtcggccaaagatgc

SEQ ID NO: 14696 - DNA, 26 bp, Homo sapiens
ttacaccactgtcggccaaagatgca

SEQ ID NO: 14697 - DNA, 26 bp, Homo sapiens
tacaccactgtcggccaaagatgcac

SEQ ID NO: 14698 - DNA, 26 bp, Homo sapiens
acaccactgtcggccaaagatgcact

SEQ ID NO: 14699 - DNA, 26 bp, Homo sapiens
caccactgtcggccaaagatgcactc

SEQ ID NO: 14700 - DNA, 26 bp, Homo sapiens
accactgtcggccaaagatgcactcc

SEQ ID NO: 14701 - DNA, 26 bp, Homo sapiens
ccactgtcggccaaagatgcactcct

SEQ ID NO: 14702 - DNA, 26 bp, Homo sapiens
cactgtcggccaaagatgcactcctc

SEQ ID NO: 14703 - DNA, 26 bp, Homo sapiens
actgtcggccaaagatgcactcctcc

SEQ ID NO: 14704 - DNA, 26 bp, Homo sapiens
ctgtcggccaaagatgcactcctcct

SEQ ID NO: 14705 - DNA, 26 bp, Homo sapiens
tgtcggccaaagatgcactcctcctt

SEQ ID NO: 14706 - DNA, 26 bp, Homo sapiens
gtcggccaaagatgcactcctccttt

SEQ ID NO: 14707 - DNA, 26 bp, Homo sapiens
tcggccaaagatgcactcctccttta

SEQ ID NO: 14708 - DNA, 26 bp, Homo sapiens
cggccaaagatgcactcctcctttaa

SEQ ID NO: 14709 - DNA, 26 bp, Homo sapiens
ggccaaagatgcactcctcctttaat

SEQ ID NO: 14710 - DNA, 26 bp, Homo sapiens
gccaaagatgcactcctcctttaatc

SEQ ID NO: 14711 - DNA, 26 bp, Homo sapiens
ccaaagatgcactcctcctttaatca

SEQ ID NO: 14712 - DNA, 26 bp, Homo sapiens
caaagatgcactcctcctttaatcaa

SEQ ID NO: 14713 - DNA, 26 bp, Homo sapiens
aaagatgcactcctcctttaatcaat

SEQ ID NO: 14714 - DNA, 26 bp, Homo sapiens
aagatgcactcctcctttaatcaatt

SEQ ID NO: 14715 - DNA, 26 bp, Homo sapiens
agatgcactcctcctttaatcaattt

SEQ ID NO: 14716 - DNA, 26 bp, Homo sapiens
gatgcactcctcctttaatcaattta

SEQ ID NO: 14717 - DNA, 26 bp, Homo sapiens
atgcactcctcctttaatcaatttaa

SEQ ID NO: 14718 - DNA, 26 bp, Homo sapiens
tgcactcctcctttaatcaatttaaa

SEQ ID NO: 14719 - DNA, 26 bp, Homo sapiens
gcactcctcctttaatcaatttaaat

SEQ ID NO: 14720 - DNA, 26 bp, Homo sapiens
cactcctcctttaatcaatttaaatg

SEQ ID NO: 14721 - DNA, 26 bp, Homo sapiens
actcctcctttaatcaatttaaatga

SEQ ID NO: 14722 - DNA, 26 bp, Homo sapiens
ctcctcctttaatcaatttaaatgag

SEQ ID NO: 14723 - DNA, 26 bp, Homo sapiens
tcctcctttaatcaatttaaatgagg

SEQ ID NO: 14724 - DNA, 26 bp, Homo sapiens
cctcctttaatcaatttaaatgaggc

SEQ ID NO: 14725 - DNA, 26 bp, Homo sapiens
ctcctttaatcaatttaaatgaggct

SEQ ID NO: 14726 - DNA, 26 bp, Homo sapiens
tcctttaatcaatttaaatgaggcta

SEQ ID NO: 14727 - DNA, 26 bp, Homo sapiens
cctttaatcaatttaaatgaggctag

SEQ ID NO: 14728 - DNA, 26 bp, Homo sapiens
ctttaatcaatttaaatgaggctagc

SEQ ID NO: 14729 - DNA, 26 bp, Homo sapiens
tttaatcaatttaaatgaggctagcg

SEQ ID NO: 14730 - DNA, 26 bp, Homo sapiens
ttaatcaatttaaatgaggctagcga

SEQ ID NO: 14731 - DNA, 26 bp, Homo sapiens
taatcaatttaaatgaggctagcgag

SEQ ID NO: 14732 - DNA, 26 bp, Homo sapiens
aatcaatttaaatgaggctagcgagt

SEQ ID NO: 14733 - DNA, 26 bp, Homo sapiens
atcaatttaaatgaggctagcgagta

SEQ ID NO: 14734 - DNA, 26 bp, Homo sapiens
tcaatttaaatgaggctagcgagtat

SEQ ID NO: 14735 - DNA, 26 bp, Homo sapiens
caatttaaatgaggctagcgagtatc

SEQ ID NO: 14736 - DNA, 26 bp, Homo sapiens
aatttaaatgaggctagcgagtatct

SEQ ID NO: 14737 - DNA, 26 bp, Homo sapiens
atttaaatgaggctagcgagtatctg

SEQ ID NO: 14738 - DNA, 26 bp, Homo sapiens
tttaaatgaggctagcgagtatctgt

SEQ ID NO: 14739 - DNA, 26 bp, Homo sapiens
ttaaatgaggctagcgagtatctgtt

SEQ ID NO: 14740 - DNA, 26 bp, Homo sapiens
taaatgaggctagcgagtatctgttt

SEQ ID NO: 14741 - DNA, 26 bp, Homo sapiens
aaatgaggctagcgagtatctgtttg

SEQ ID NO: 14742 - DNA, 26 bp, Homo sapiens
aatgaggctagcgagtatctgtttga

SEQ ID NO: 14743 - DNA, 26 bp, Homo sapiens
atgaggctagcgagtatctgtttgat

SEQ ID NO: 14744 - DNA, 26 bp, Homo sapiens
tgaggctagcgagtatctgtttgatg

SEQ ID NO: 14745 - DNA, 26 bp, Homo sapiens
gaggctagcgagtatctgtttgatgt

SEQ ID NO: 14746 - DNA, 26 bp, Homo sapiens
aggctagcgagtatctgtttgatgtt

SEQ ID NO: 14747 - DNA, 26 bp, Homo sapiens
ggctagcgagtatctgtttgatgttt

SEQ ID NO: 14748 - DNA, 26 bp, Homo sapiens
gctagcgagtatctgtttgatgtttg

SEQ ID NO: 14749 - DNA, 26 bp, Homo sapiens
ctagcgagtatctgtttgatgtttgc

SEQ ID NO: 14750 - DNA, 26 bp, Homo sapiens
tagcgagtatctgtttgatgtttgca

SEQ ID NO: 14751 - DNA, 26 bp, Homo sapiens
agcgagtatctgtttgatgtttgcat

SEQ ID NO: 14752 - DNA, 26 bp, Homo sapiens
gcgagtatctgtttgatgtttgcatt

SEQ ID NO: 14753 - DNA, 26 bp, Homo sapiens
cgagtatctgtttgatgtttgcattc

SEQ ID NO: 14754 - DNA, 26 bp, Homo sapiens
gagtatctgtttgatgtttgcattct

SEQ ID NO: 14755 - DNA, 26 bp, Homo sapiens
agtatctgtttgatgtttgcattctt

SEQ ID NO: 14756 - DNA, 26 bp, Homo sapiens
gtatctgtttgatgtttgcattcttg

SEQ ID NO: 14757 - DNA, 26 bp, Homo sapiens
tatctgtttgatgtttgcattcttgt

SEQ ID NO: 14758 - DNA, 26 bp, Homo sapiens
atctgtttgatgtttgcattcttgtg

SEQ ID NO: 14759 - DNA, 26 bp, Homo sapiens
tctgtttgatgtttgcattcttgtgg

SEQ ID NO: 14760 - DNA, 26 bp, Homo sapiens
ctgtttgatgtttgcattcttgtggg

SEQ ID NO: 14761 - DNA, 26 bp, Homo sapiens
tgtttgatgtttgcattcttgtgggc

SEQ ID NO: 14762 - DNA, 26 bp, Homo sapiens
gtttgatgtttgcattcttgtgggct

SEQ ID NO: 14763 - DNA, 26 bp, Homo sapiens
tttgatgtttgcattcttgtgggcta

SEQ ID NO: 14764 - DNA, 26 bp, Homo sapiens
ttgatgtttgcattcttgtgggctag

SEQ ID NO: 14765 - DNA, 26 bp, Homo sapiens
tgatgtttgcattcttgtgggctagg

SEQ ID NO: 14766 - DNA, 26 bp, Homo sapiens
gatgtttgcattcttgtgggctagga

SEQ ID NO: 14767 - DNA, 26 bp, Homo sapiens
atgtttgcattcttgtgggctaggaa

SEQ ID NO: 14768 - DNA, 26 bp, Homo sapiens
tgtttgcattcttgtgggctaggaaa

SEQ ID NO: 14769 - DNA, 26 bp, Homo sapiens
gtttgcattcttgtgggctaggaaac

SEQ ID NO: 14770 - DNA, 26 bp, Homo sapiens
tttgcattcttgtgggctaggaaaca

SEQ ID NO: 14771 - DNA, 26 bp, Homo sapiens
ttgcattcttgtgggctaggaaacaa

SEQ ID NO: 14772 - DNA, 26 bp, Homo sapiens
tgcattcttgtgggctaggaaacaag

SEQ ID NO: 14773 - DNA, 26 bp, Homo sapiens
gcattcttgtgggctaggaaacaagg

SEQ ID NO: 14774 - DNA, 26 bp, Homo sapiens
cattcttgtgggctaggaaacaaggc

SEQ ID NO: 14775 - DNA, 26 bp, Homo sapiens
attcttgtgggctaggaaacaaggca

SEQ ID NO: 14776 - DNA, 26 bp, Homo sapiens
ttcttgtgggctaggaaacaaggcac

SEQ ID NO: 14777 - DNA, 26 bp, Homo sapiens
tcttgtgggctaggaaacaaggcacg

SEQ ID NO: 14778 - DNA, 26 bp, Homo sapiens
cttgtgggctaggaaacaaggcacgg

SEQ ID NO: 14779 - DNA, 26 bp, Homo sapiens
ttgtgggctaggaaacaaggcacggg

SEQ ID NO: 14780 - DNA, 26 bp, Homo sapiens
tgtgggctaggaaacaaggcacgggt

SEQ ID NO: 14781 - DNA, 26 bp, Homo sapiens
gtgggctaggaaacaaggcacgggtc

SEQ ID NO: 14782 - DNA, 26 bp, Homo sapiens
tgggctaggaaacaaggcacgggtcc

SEQ ID NO: 14783 - DNA, 26 bp, Homo sapiens
gggctaggaaacaaggcacgggtccc

SEQ ID NO: 14784 - DNA, 26 bp, Homo sapiens
ggctaggaaacaaggcacgggtccct

SEQ ID NO: 14785 - DNA, 26 bp, Homo sapiens
gctaggaaacaaggcacgggtcccta

SEQ ID NO: 14786 - DNA, 26 bp, Homo sapiens
ctaggaaacaaggcacgggtccctaa

SEQ ID NO: 14787 - DNA, 26 bp, Homo sapiens
taggaaacaaggcacgggtccctaaa

SEQ ID NO: 14788 - DNA, 26 bp, Homo sapiens
aggaaacaaggcacgggtccctaaaa

SEQ ID NO: 14789 - DNA, 26 bp, Homo sapiens
ggaaacaaggcacgggtccctaaaat

SEQ ID NO: 14790 - DNA, 26 bp, Homo sapiens
gaaacaaggcacgggtccctaaaatt

SEQ ID NO: 14791 - DNA, 26 bp, Homo sapiens
aaacaaggcacgggtccctaaaatta

SEQ ID NO: 14792 - DNA, 26 bp, Homo sapiens
aacaaggcacgggtccctaaaattaa

SEQ ID NO: 14793 - DNA, 26 bp, Homo sapiens
acaaggcacgggtccctaaaattaac

SEQ ID NO: 14794 - DNA, 26 bp, Homo sapiens
caaggcacgggtccctaaaattaaca

SEQ ID NO: 14795 - DNA, 26 bp, Homo sapiens
aaggcacgggtccctaaaattaacat

SEQ ID NO: 14796 - DNA, 26 bp, Homo sapiens
aggcacgggtccctaaaattaacatc

SEQ ID NO: 14797 - DNA, 26 bp, Homo sapiens
ggcacgggtccctaaaattaacatct

SEQ ID NO: 14798 - DNA, 26 bp, Homo sapiens
gcacgggtccctaaaattaacatctc

SEQ ID NO: 14799 - DNA, 26 bp, Homo sapiens
cacgggtccctaaaattaacatctcg

SEQ ID NO: 14800 - DNA, 26 bp, Homo sapiens
acgggtccctaaaattaacatctcgg

SEQ ID NO: 14801 - DNA, 26 bp, Homo sapiens
cgggtccctaaaattaacatctcggt

SEQ ID NO: 14802 - DNA, 26 bp, Homo sapiens
gggtccctaaaattaacatctcggtg

SEQ ID NO: 14803 - DNA, 26 bp, Homo sapiens
ggtccctaaaattaacatctcggtgt

SEQ ID NO: 14804 - DNA, 26 bp, Homo sapiens
gtccctaaaattaacatctcggtgtc

SEQ ID NO: 14805 - DNA, 26 bp, Homo sapiens
tccctaaaattaacatctcggtgtca

SEQ ID NO: 14806 - DNA, 26 bp, Homo sapiens
ccctaaaattaacatctcggtgtcac

SEQ ID NO: 14807 - DNA, 26 bp, Homo sapiens
cctaaaattaacatctcggtgtcact

SEQ ID NO: 14808 - DNA, 26 bp, Homo sapiens
ctaaaattaacatctcggtgtcactt

SEQ ID NO: 14809 - DNA, 26 bp, Homo sapiens
taaaattaacatctcggtgtcacttc

SEQ ID NO: 14810 - DNA, 26 bp, Homo sapiens
aaaattaacatctcggtgtcacttct

SEQ ID NO: 14811 - DNA, 26 bp, Homo sapiens
aaattaacatctcggtgtcacttctt

SEQ ID NO: 14812 - DNA, 26 bp, Homo sapiens
aattaacatctcggtgtcacttcttg

SEQ ID NO: 14813 - DNA, 26 bp, Homo sapiens
attaacatctcggtgtcacttcttgg

SEQ ID NO: 14814 - DNA, 26 bp, Homo sapiens
ttaacatctcggtgtcacttcttgga

SEQ ID NO: 14815 - DNA, 26 bp, Homo sapiens
taacatctcggtgtcacttcttggac

SEQ ID NO: 14816 - DNA, 26 bp, Homo sapiens
aacatctcggtgtcacttcttggact

SEQ ID NO: 14817 - DNA, 26 bp, Homo sapiens
acatctcggtgtcacttcttggactg

SEQ ID NO: 14818 - DNA, 26 bp, Homo sapiens
catctcggtgtcacttcttggactga

SEQ ID NO: 14819 - DNA, 26 bp, Homo sapiens
atctcggtgtcacttcttggactgac

SEQ ID NO: 14820 - DNA, 26 bp, Homo sapiens
tctcggtgtcacttcttggactgaca

SEQ ID NO: 14821 - DNA, 26 bp, Homo sapiens
ctcggtgtcacttcttggactgacaa

SEQ ID NO: 14822 - DNA, 26 bp, Homo sapiens
tcggtgtcacttcttggactgacaag

SEQ ID NO: 14823 - DNA, 26 bp, Homo sapiens
cggtgtcacttcttggactgacaaga

SEQ ID NO: 14824 - DNA, 26 bp, Homo sapiens
ggtgtcacttcttggactgacaagac

SEQ ID NO: 14825 - DNA, 26 bp, Homo sapiens
gtgtcacttcttggactgacaagaca

SEQ ID NO: 14826 - DNA, 26 bp, Homo sapiens
tgtcacttcttggactgacaagacac

SEQ ID NO: 14827 - DNA, 26 bp, Homo sapiens
gtcacttcttggactgacaagacaca

SEQ ID NO: 14828 - DNA, 26 bp, Homo sapiens
tcacttcttggactgacaagacacag

SEQ ID NO: 14829 - DNA, 26 bp, Homo sapiens
cacttcttggactgacaagacacaga

SEQ ID NO: 14830 - DNA, 26 bp, Homo sapiens
acttcttggactgacaagacacagac

SEQ ID NO: 14831 - DNA, 26 bp, Homo sapiens
cttcttggactgacaagacacagact

SEQ ID NO: 14832 - DNA, 26 bp, Homo sapiens
ttcttggactgacaagacacagactt

SEQ ID NO: 14833 - DNA, 26 bp, Homo sapiens
tcttggactgacaagacacagacttg

SEQ ID NO: 14834 - DNA, 26 bp, Homo sapiens
cttggactgacaagacacagacttgc

SEQ ID NO: 14835 - DNA, 26 bp, Homo sapiens
ttggactgacaagacacagacttgca

SEQ ID NO: 14836 - DNA, 26 bp, Homo sapiens
tggactgacaagacacagacttgcac

SEQ ID NO: 14837 - DNA, 26 bp, Homo sapiens
ggactgacaagacacagacttgcaca

SEQ ID NO: 14838 - DNA, 26 bp, Homo sapiens
gactgacaagacacagacttgcacat

SEQ ID NO: 14839 - DNA, 26 bp, Homo sapiens
actgacaagacacagacttgcacatg

SEQ ID NO: 14840 - DNA, 26 bp, Homo sapiens
ctgacaagacacagacttgcacatgg

SEQ ID NO: 14841 - DNA, 26 bp, Homo sapiens
tgacaagacacagacttgcacatggt

SEQ ID NO: 14842 - DNA, 26 bp, Homo sapiens
gacaagacacagacttgcacatggtt

SEQ ID NO: 14843 - DNA, 26 bp, Homo sapiens
acaagacacagacttgcacatggttt

SEQ ID NO: 14844 - DNA, 26 bp, Homo sapiens
caagacacagacttgcacatggtttc

SEQ ID NO: 14845 - DNA, 26 bp, Homo sapiens
aagacacagacttgcacatggtttca

SEQ ID NO: 14846 - DNA, 26 bp, Homo sapiens
agacacagacttgcacatggtttcag

SEQ ID NO: 14847 - DNA, 26 bp, Homo sapiens
gacacagacttgcacatggtttcagc

SEQ ID NO: 14848 - DNA, 26 bp, Homo sapiens
acacagacttgcacatggtttcagcc

SEQ ID NO: 14849 - DNA, 26 bp, Homo sapiens
cacagacttgcacatggtttcagccc

SEQ ID NO: 14850 - DNA, 26 bp, Homo sapiens
acagacttgcacatggtttcagcccc

SEQ ID NO: 14851 - DNA, 26 bp, Homo sapiens
cagacttgcacatggtttcagcccca

SEQ ID NO: 14852 - DNA, 26 bp, Homo sapiens
agacttgcacatggtttcagccccat

SEQ ID NO: 14853 - DNA, 26 bp, Homo sapiens
gacttgcacatggtttcagccccatt

SEQ ID NO: 14854 - DNA, 26 bp, Homo sapiens
acttgcacatggtttcagccccattc

SEQ ID NO: 14855 - DNA, 26 bp, Homo sapiens
cttgcacatggtttcagccccattcc

SEQ ID NO: 14856 - DNA, 26 bp, Homo sapiens
ttgcacatggtttcagccccattcca

SEQ ID NO: 14857 - DNA, 26 bp, Homo sapiens
tgcacatggtttcagccccattccac

SEQ ID NO: 14858 - DNA, 26 bp, Homo sapiens
gcacatggtttcagccccattccacc

SEQ ID NO: 14859 - DNA, 26 bp, Homo sapiens
cacatggtttcagccccattccaccc

SEQ ID NO: 14860 - DNA, 26 bp, Homo sapiens
acatggtttcagccccattccaccca

SEQ ID NO: 14861 - DNA, 26 bp, Homo sapiens
catggtttcagccccattccacccag

SEQ ID NO: 14862 - DNA, 26 bp, Homo sapiens
atggtttcagccccattccacccaga

SEQ ID NO: 14863 - DNA, 26 bp, Homo sapiens
tggtttcagccccattccacccagac

SEQ ID NO: 14864 - DNA, 26 bp, Homo sapiens
ggtttcagccccattccacccagact

SEQ ID NO: 14865 - DNA, 26 bp, Homo sapiens
gtttcagccccattccacccagactg

SEQ ID NO: 14866 - DNA, 26 bp, Homo sapiens
tttcagccccattccacccagactgt

SEQ ID NO: 14867 - DNA, 26 bp, Homo sapiens
ttcagccccattccacccagactgtt

SEQ ID NO: 14868 - DNA, 26 bp, Homo sapiens
tcagccccattccacccagactgttc

SEQ ID NO: 14869 - DNA, 26 bp, Homo sapiens
cagccccattccacccagactgttcc

SEQ ID NO: 14870 - DNA, 26 bp, Homo sapiens
agccccattccacccagactgttcca

SEQ ID NO: 14871 - DNA, 26 bp, Homo sapiens
gccccattccacccagactgttccac

SEQ ID NO: 14872 - DNA, 26 bp, Homo sapiens
ccccattccacccagactgttccacg

SEQ ID NO: 14873 - DNA, 26 bp, Homo sapiens
cccattccacccagactgttccacgt

SEQ ID NO: 14874 - DNA, 26 bp, Homo sapiens
ccattccacccagactgttccacgta

SEQ ID NO: 14875 - DNA, 26 bp, Homo sapiens
cattccacccagactgttccacgtac

SEQ ID NO: 14876 - DNA, 26 bp, Homo sapiens
attccacccagactgttccacgtaca

SEQ ID NO: 14877 - DNA, 26 bp, Homo sapiens
ttccacccagactgttccacgtacat

SEQ ID NO: 14878 - DNA, 26 bp, Homo sapiens
tccacccagactgttccacgtacatt

SEQ ID NO: 14879 - DNA, 26 bp, Homo sapiens
ccacccagactgttccacgtacatta

SEQ ID NO: 14880 - DNA, 26 bp, Homo sapiens
cacccagactgttccacgtacattat

SEQ ID NO: 14881 - DNA, 26 bp, Homo sapiens
acccagactgttccacgtacattatc

SEQ ID NO: 14882 - DNA, 26 bp, Homo sapiens
cccagactgttccacgtacattatct

SEQ ID NO: 14883 - DNA, 26 bp, Homo sapiens
ccagactgttccacgtacattatctc

SEQ ID NO: 14884 - DNA, 26 bp, Homo sapiens
cagactgttccacgtacattatctca

SEQ ID NO: 14885 - DNA, 26 bp, Homo sapiens
agactgttccacgtacattatctcag

SEQ ID NO: 14886 - DNA, 26 bp, Homo sapiens
gactgttccacgtacattatctcaga

SEQ ID NO: 14887 - DNA, 26 bp, Homo sapiens
actgttccacgtacattatctcagaa

SEQ ID NO: 14888 - DNA, 26 bp, Homo sapiens
ctgttccacgtacattatctcagaaa

SEQ ID NO: 14889 - DNA, 26 bp, Homo sapiens
tgttccacgtacattatctcagaaac

SEQ ID NO: 14890 - DNA, 26 bp, Homo sapiens
gttccacgtacattatctcagaaact

SEQ ID NO: 14891 - DNA, 26 bp, Homo sapiens
ttccacgtacattatctcagaaactc

SEQ ID NO: 14892 - DNA, 26 bp, Homo sapiens
tccacgtacattatctcagaaactct

SEQ ID NO: 14893 - DNA, 26 bp, Homo sapiens
ccacgtacattatctcagaaactctg

SEQ ID NO: 14894 - DNA, 26 bp, Homo sapiens
cacgtacattatctcagaaactctga

SEQ ID NO: 14895 - DNA, 26 bp, Homo sapiens
acgtacattatctcagaaactctgaa

SEQ ID NO: 14896 - DNA, 26 bp, Homo sapiens
cgtacattatctcagaaactctgaaa

SEQ ID NO: 14897 - DNA, 26 bp, Homo sapiens
gtacattatctcagaaactctgaaag

SEQ ID NO: 14898 - DNA, 26 bp, Homo sapiens
tacattatctcagaaactctgaaagg

SEQ ID NO: 14899 - DNA, 26 bp, Homo sapiens
acattatctcagaaactctgaaagga

SEQ ID NO: 14900 - DNA, 26 bp, Homo sapiens
cattatctcagaaactctgaaaggaa

SEQ ID NO: 14901 - DNA, 26 bp, Homo sapiens
attatctcagaaactctgaaaggaag

SEQ ID NO: 14902 - DNA, 26 bp, Homo sapiens
ttatctcagaaactctgaaaggaagt

SEQ ID NO: 14903 - DNA, 26 bp, Homo sapiens
tatctcagaaactctgaaaggaagtg

SEQ ID NO: 14904 - DNA, 26 bp, Homo sapiens
atctcagaaactctgaaaggaagtgc

SEQ ID NO: 14905 - DNA, 26 bp, Homo sapiens
tctcagaaactctgaaaggaagtgct

SEQ ID NO: 14906 - DNA, 26 bp, Homo sapiens
ctcagaaactctgaaaggaagtgctc

SEQ ID NO: 14907 - DNA, 26 bp, Homo sapiens
tcagaaactctgaaaggaagtgctcg

SEQ ID NO: 14908 - DNA, 26 bp, Homo sapiens
cagaaactctgaaaggaagtgctcgt

SEQ ID NO: 14909 - DNA, 26 bp, Homo sapiens
agaaactctgaaaggaagtgctcgtt

SEQ ID NO: 14910 - DNA, 26 bp, Homo sapiens
gaaactctgaaaggaagtgctcgttc

SEQ ID NO: 14911 - DNA, 26 bp, Homo sapiens
aaactctgaaaggaagtgctcgttct

SEQ ID NO: 14912 - DNA, 26 bp, Homo sapiens
aactctgaaaggaagtgctcgttctt

SEQ ID NO: 14913 - DNA, 26 bp, Homo sapiens
actctgaaaggaagtgctcgttcttt

SEQ ID NO: 14914 - DNA, 26 bp, Homo sapiens
ctctgaaaggaagtgctcgttctttg

SEQ ID NO: 14915 - DNA, 26 bp, Homo sapiens
tctgaaaggaagtgctcgttctttgt

SEQ ID NO: 14916 - DNA, 26 bp, Homo sapiens
ctgaaaggaagtgctcgttctttgtt

SEQ ID NO: 14917 - DNA, 26 bp, Homo sapiens
tgaaaggaagtgctcgttctttgtta

SEQ ID NO: 14918 - DNA, 26 bp, Homo sapiens
gaaaggaagtgctcgttctttgttag

SEQ ID NO: 14919 - DNA, 26 bp, Homo sapiens
aaaggaagtgctcgttctttgttagt

SEQ ID NO: 14920 - DNA, 26 bp, Homo sapiens
aaggaagtgctcgttctttgttagtg

SEQ ID NO: 14921 - DNA, 26 bp, Homo sapiens
aggaagtgctcgttctttgttagtgc

SEQ ID NO: 14922 - DNA, 26 bp, Homo sapiens
ggaagtgctcgttctttgttagtgcc

SEQ ID NO: 14923 - DNA, 26 bp, Homo sapiens
gaagtgctcgttctttgttagtgcca

SEQ ID NO: 14924 - DNA, 26 bp, Homo sapiens
aagtgctcgttctttgttagtgccaa

SEQ ID NO: 14925 - DNA, 26 bp, Homo sapiens
agtgctcgttctttgttagtgccaac

SEQ ID NO: 14926 - DNA, 26 bp, Homo sapiens
gtgctcgttctttgttagtgccaacc

SEQ ID NO: 14927 - DNA, 26 bp, Homo sapiens
tgctcgttctttgttagtgccaacca

SEQ ID NO: 14928 - DNA, 26 bp, Homo sapiens
gctcgttctttgttagtgccaaccat

SEQ ID NO: 14929 - DNA, 26 bp, Homo sapiens
ctcgttctttgttagtgccaaccatt

SEQ ID NO: 14930 - DNA, 26 bp, Homo sapiens
tcgttctttgttagtgccaaccattt

SEQ ID NO: 14931 - DNA, 26 bp, Homo sapiens
cgttctttgttagtgccaaccatttt

SEQ ID NO: 14932 - DNA, 26 bp, Homo sapiens
gttctttgttagtgccaaccattttt

SEQ ID NO: 14933 - DNA, 26 bp, Homo sapiens
ttctttgttagtgccaaccatttttg

SEQ ID NO: 14934 - DNA, 26 bp, Homo sapiens
tctttgttagtgccaaccatttttgt

SEQ ID NO: 14935 - DNA, 26 bp, Homo sapiens
ctttgttagtgccaaccatttttgtc

SEQ ID NO: 14936 - DNA, 26 bp, Homo sapiens
tttgttagtgccaaccatttttgtca

SEQ ID NO: 14937 - DNA, 26 bp, Homo sapiens
ttgttagtgccaaccatttttgtcat

SEQ ID NO: 14938 - DNA, 26 bp, Homo sapiens
tgttagtgccaaccatttttgtcata

SEQ ID NO: 14939 - DNA, 26 bp, Homo sapiens
gttagtgccaaccatttttgtcataa

SEQ ID NO: 14940 - DNA, 26 bp, Homo sapiens
ttagtgccaaccatttttgtcataaa

SEQ ID NO: 14941 - DNA, 26 bp, Homo sapiens
tagtgccaaccatttttgtcataaat

SEQ ID NO: 14942 - DNA, 26 bp, Homo sapiens
agtgccaaccatttttgtcataaatg

SEQ ID NO: 14943 - DNA, 26 bp, Homo sapiens
gtgccaaccatttttgtcataaatgg

SEQ ID NO: 14944 - DNA, 26 bp, Homo sapiens
tgccaaccatttttgtcataaatggc

SEQ ID NO: 14945 - DNA, 26 bp, Homo sapiens
gccaaccatttttgtcataaatggca

SEQ ID NO: 14946 - DNA, 26 bp, Homo sapiens
ccaaccatttttgtcataaatggcaa

SEQ ID NO: 14947 - DNA, 26 bp, Homo sapiens
caaccatttttgtcataaatggcaaa

SEQ ID NO: 14948 - DNA, 26 bp, Homo sapiens
aaccatttttgtcataaatggcaaat

SEQ ID NO: 14949 - DNA, 26 bp, Homo sapiens
accatttttgtcataaatggcaaatg

SEQ ID NO: 14950 - DNA, 26 bp, Homo sapiens
ccatttttgtcataaatggcaaatga

SEQ ID NO: 14951 - DNA, 26 bp, Homo sapiens
catttttgtcataaatggcaaatgat

SEQ ID NO: 14952 - DNA, 26 bp, Homo sapiens
atttttgtcataaatggcaaatgatt

SEQ ID NO: 14953 - DNA, 26 bp, Homo sapiens
tttttgtcataaatggcaaatgattg

SEQ ID NO: 14954 - DNA, 26 bp, Homo sapiens
ttttgtcataaatggcaaatgattgg

SEQ ID NO: 14955 - DNA, 26 bp, Homo sapiens
tttgtcataaatggcaaatgattgga

SEQ ID NO: 14956 - DNA, 26 bp, Homo sapiens
ttgtcataaatggcaaatgattggaa

SEQ ID NO: 14957 - DNA, 26 bp, Homo sapiens
tgtcataaatggcaaatgattggaat

SEQ ID NO: 14958 - DNA, 26 bp, Homo sapiens
gtcataaatggcaaatgattggaata

SEQ ID NO: 14959 - DNA, 26 bp, Homo sapiens
tcataaatggcaaatgattggaatat

SEQ ID NO: 14960 - DNA, 26 bp, Homo sapiens
cataaatggcaaatgattggaatatt

SEQ ID NO: 14961 - DNA, 26 bp, Homo sapiens
ataaatggcaaatgattggaatatta

SEQ ID NO: 14962 - DNA, 26 bp, Homo sapiens
taaatggcaaatgattggaatattat

SEQ ID NO: 14963 - DNA, 26 bp, Homo sapiens
aaatggcaaatgattggaatattatc

SEQ ID NO: 14964 - DNA, 26 bp, Homo sapiens
aatggcaaatgattggaatattatca

SEQ ID NO: 14965 - DNA, 26 bp, Homo sapiens
atggcaaatgattggaatattatcag

SEQ ID NO: 14966 - DNA, 26 bp, Homo sapiens
tggcaaatgattggaatattatcagt

SEQ ID NO: 14967 - DNA, 26 bp, Homo sapiens
ggcaaatgattggaatattatcagtt

SEQ ID NO: 14968 - DNA, 26 bp, Homo sapiens
gcaaatgattggaatattatcagtta

SEQ ID NO: 14969 - DNA, 26 bp, Homo sapiens
caaatgattggaatattatcagttaa

SEQ ID NO: 14970 - DNA, 26 bp, Homo sapiens
aaatgattggaatattatcagttaat

SEQ ID NO: 14971 - DNA, 26 bp, Homo sapiens
aatgattggaatattatcagttaatt

SEQ ID NO: 14972 - DNA, 26 bp, Homo sapiens
atgattggaatattatcagttaattc

SEQ ID NO: 14973 - DNA, 26 bp, Homo sapiens
tgattggaatattatcagttaattca

SEQ ID NO: 14974 - DNA, 26 bp, Homo sapiens
gattggaatattatcagttaattcat

SEQ ID NO: 14975 - DNA, 26 bp, Homo sapiens
attggaatattatcagttaattcatg

SEQ ID NO: 14976 - DNA, 26 bp, Homo sapiens
ttggaatattatcagttaattcatgt

SEQ ID NO: 14977 - DNA, 26 bp, Homo sapiens
tggaatattatcagttaattcatgtt

SEQ ID NO: 14978 - DNA, 26 bp, Homo sapiens
ggaatattatcagttaattcatgttt

SEQ ID NO: 14979 - DNA, 26 bp, Homo sapiens
gaatattatcagttaattcatgtttc

SEQ ID NO: 14980 - DNA, 26 bp, Homo sapiens
aatattatcagttaattcatgtttca

SEQ ID NO: 14981 - DNA, 26 bp, Homo sapiens
atattatcagttaattcatgtttcaa

SEQ ID NO: 14982 - DNA, 26 bp, Homo sapiens
tattatcagttaattcatgtttcaat

SEQ ID NO: 14983 - DNA, 26 bp, Homo sapiens
attatcagttaattcatgtttcaatt

SEQ ID NO: 14984 - DNA, 26 bp, Homo sapiens
ttatcagttaattcatgtttcaattt

SEQ ID NO: 14985 - DNA, 26 bp, Homo sapiens
tatcagttaattcatgtttcaatttt

SEQ ID NO: 14986 - DNA, 26 bp, Homo sapiens
atcagttaattcatgtttcaattttc

SEQ ID NO: 14987 - DNA, 26 bp, Homo sapiens
tcagttaattcatgtttcaattttca

SEQ ID NO: 14988 - DNA, 26 bp, Homo sapiens
cagttaattcatgtttcaattttcag

SEQ ID NO: 14989 - DNA, 26 bp, Homo sapiens
agttaattcatgtttcaattttcagt

SEQ ID NO: 14990 - DNA, 26 bp, Homo sapiens
gttaattcatgtttcaattttcagtg

SEQ ID NO: 14991 - DNA, 26 bp, Homo sapiens
ttaattcatgtttcaattttcagtgc

SEQ ID NO: 14992 - DNA, 26 bp, Homo sapiens
taattcatgtttcaattttcagtgct

SEQ ID NO: 14993 - DNA, 26 bp, Homo sapiens
aattcatgtttcaattttcagtgcta

SEQ ID NO: 14994 - DNA, 26 bp, Homo sapiens
attcatgtttcaattttcagtgctat

SEQ ID NO: 14995 - DNA, 26 bp, Homo sapiens
ttcatgtttcaattttcagtgctatt

SEQ ID NO: 14996 - DNA, 26 bp, Homo sapiens
tcatgtttcaattttcagtgctattt

SEQ ID NO: 14997 - DNA, 26 bp, Homo sapiens
catgtttcaattttcagtgctatttt

SEQ ID NO: 14998 - DNA, 26 bp, Homo sapiens
atgtttcaattttcagtgctatttta

SEQ ID NO: 14999 - DNA, 26 bp, Homo sapiens
tgtttcaattttcagtgctattttaa

SEQ ID NO: 15000 - DNA, 26 bp, Homo sapiens
gtttcaattttcagtgctattttaat

SEQ ID NO: 15001 - DNA, 26 bp, Homo sapiens
tttcaattttcagtgctattttaatg

SEQ ID NO: 15002 - DNA, 26 bp, Homo sapiens
ttcaattttcagtgctattttaatga

SEQ ID NO: 15003 - DNA, 26 bp, Homo sapiens
tcaattttcagtgctattttaatgaa

SEQ ID NO: 15004 - DNA, 26 bp, Homo sapiens
caattttcagtgctattttaatgaac

SEQ ID NO: 15005 - DNA, 26 bp, Homo sapiens
aattttcagtgctattttaatgaaca

SEQ ID NO: 15006 - DNA, 26 bp, Homo sapiens
attttcagtgctattttaatgaacaa

SEQ ID NO: 15007 - DNA, 26 bp, Homo sapiens
ttttcagtgctattttaatgaacaag

SEQ ID NO: 15008 - DNA, 26 bp, Homo sapiens
tttcagtgctattttaatgaacaagc

SEQ ID NO: 15009 - DNA, 26 bp, Homo sapiens
ttcagtgctattttaatgaacaagca

SEQ ID NO: 15010 - DNA, 26 bp, Homo sapiens
tcagtgctattttaatgaacaagcac

SEQ ID NO: 15011 - DNA, 26 bp, Homo sapiens
cagtgctattttaatgaacaagcact

SEQ ID NO: 15012 - DNA, 26 bp, Homo sapiens
agtgctattttaatgaacaagcactt

SEQ ID NO: 15013 - DNA, 26 bp, Homo sapiens
gtgctattttaatgaacaagcacttt

SEQ ID NO: 15014 - DNA, 26 bp, Homo sapiens
tgctattttaatgaacaagcactttg

SEQ ID NO: 15015 - DNA, 26 bp, Homo sapiens
gctattttaatgaacaagcactttgt

SEQ ID NO: 15016 - DNA, 26 bp, Homo sapiens
ctattttaatgaacaagcactttgta

SEQ ID NO: 15017 - DNA, 26 bp, Homo sapiens
tattttaatgaacaagcactttgtaa

SEQ ID NO: 15018 - DNA, 26 bp, Homo sapiens
attttaatgaacaagcactttgtaac

SEQ ID NO: 15019 - DNA, 26 bp, Homo sapiens
ttttaatgaacaagcactttgtaact

SEQ ID NO: 15020 - DNA, 26 bp, Homo sapiens
tttaatgaacaagcactttgtaacta

SEQ ID NO: 15021 - DNA, 26 bp, Homo sapiens
ttaatgaacaagcactttgtaactag

SEQ ID NO: 15022 - DNA, 26 bp, Homo sapiens
taatgaacaagcactttgtaactagc

SEQ ID NO: 15023 - DNA, 26 bp, Homo sapiens
aatgaacaagcactttgtaactagct

SEQ ID NO: 15024 - DNA, 26 bp, Homo sapiens
atgaacaagcactttgtaactagctc

SEQ ID NO: 15025 - DNA, 26 bp, Homo sapiens
tgaacaagcactttgtaactagctca

SEQ ID NO: 15026 - DNA, 26 bp, Homo sapiens
gaacaagcactttgtaactagctcat

SEQ ID NO: 15027 - DNA, 26 bp, Homo sapiens
aacaagcactttgtaactagctcatt

SEQ ID NO: 15028 - DNA, 26 bp, Homo sapiens
acaagcactttgtaactagctcatta

SEQ ID NO: 15029 - DNA, 26 bp, Homo sapiens
caagcactttgtaactagctcattat

SEQ ID NO: 15030 - DNA, 26 bp, Homo sapiens
aagcactttgtaactagctcattatt

SEQ ID NO: 15031 - DNA, 26 bp, Homo sapiens
agcactttgtaactagctcattatta

SEQ ID NO: 15032 - DNA, 26 bp, Homo sapiens
gcactttgtaactagctcattattac

SEQ ID NO: 15033 - DNA, 26 bp, Homo sapiens
cactttgtaactagctcattattaca

SEQ ID NO: 15034 - DNA, 26 bp, Homo sapiens
actttgtaactagctcattattacaa

SEQ ID NO: 15035 - DNA, 26 bp, Homo sapiens
ctttgtaactagctcattattacaag

SEQ ID NO: 15036 - DNA, 26 bp, Homo sapiens
tttgtaactagctcattattacaagt

SEQ ID NO: 15037 - DNA, 26 bp, Homo sapiens
ttgtaactagctcattattacaagtc

SEQ ID NO: 15038 - DNA, 26 bp, Homo sapiens
tgtaactagctcattattacaagtct

SEQ ID NO: 15039 - DNA, 26 bp, Homo sapiens
gtaactagctcattattacaagtctc

SEQ ID NO: 15040 - DNA, 26 bp, Homo sapiens
taactagctcattattacaagtctcc

SEQ ID NO: 15041 - DNA, 26 bp, Homo sapiens
aactagctcattattacaagtctcca

SEQ ID NO: 15042 - DNA, 26 bp, Homo sapiens
actagctcattattacaagtctccat

SEQ ID NO: 15043 - DNA, 26 bp, Homo sapiens
ctagctcattattacaagtctccatt

SEQ ID NO: 15044 - DNA, 26 bp, Homo sapiens
tagctcattattacaagtctccattt

SEQ ID NO: 15045 - DNA, 26 bp, Homo sapiens
agctcattattacaagtctccatttt

SEQ ID NO: 15046 - DNA, 26 bp, Homo sapiens
gctcattattacaagtctccattttt

SEQ ID NO: 15047 - DNA, 26 bp, Homo sapiens
ctcattattacaagtctccatttttc

SEQ ID NO: 15048 - DNA, 26 bp, Homo sapiens
tcattattacaagtctccatttttct

SEQ ID NO: 15049 - DNA, 26 bp, Homo sapiens
cattattacaagtctccatttttctt

SEQ ID NO: 15050 - DNA, 26 bp, Homo sapiens
attattacaagtctccatttttcttt

SEQ ID NO: 15051 - DNA, 26 bp, Homo sapiens
ttattacaagtctccatttttctttc

SEQ ID NO: 15052 - DNA, 26 bp, Homo sapiens
tattacaagtctccatttttctttct

SEQ ID NO: 15053 - DNA, 26 bp, Homo sapiens
attacaagtctccatttttctttcta

SEQ ID NO: 15054 - DNA, 26 bp, Homo sapiens
ttacaagtctccatttttctttctac

SEQ ID NO: 15055 - DNA, 26 bp, Homo sapiens
tacaagtctccatttttctttctaca

SEQ ID NO: 15056 - DNA, 26 bp, Homo sapiens
acaagtctccatttttctttctacat

SEQ ID NO: 15057 - DNA, 26 bp, Homo sapiens
caagtctccatttttctttctacatt

SEQ ID NO: 15058 - DNA, 26 bp, Homo sapiens
aagtctccatttttctttctacatta

SEQ ID NO: 15059 - DNA, 26 bp, Homo sapiens
agtctccatttttctttctacattaa

SEQ ID NO: 15060 - DNA, 26 bp, Homo sapiens
gtctccatttttctttctacattaag

SEQ ID NO: 15061 - DNA, 26 bp, Homo sapiens
tctccatttttctttctacattaaga

SEQ ID NO: 15062 - DNA, 26 bp, Homo sapiens
ctccatttttctttctacattaagac

SEQ ID NO: 15063 - DNA, 26 bp, Homo sapiens
tccatttttctttctacattaagact

SEQ ID NO: 15064 - DNA, 26 bp, Homo sapiens
ccatttttctttctacattaagactc

SEQ ID NO: 15065 - DNA, 26 bp, Homo sapiens
catttttctttctacattaagactcc

SEQ ID NO: 15066 - DNA, 26 bp, Homo sapiens
atttttctttctacattaagactcca

SEQ ID NO: 15067 - DNA, 26 bp, Homo sapiens
tttttctttctacattaagactccag

SEQ ID NO: 15068 - DNA, 26 bp, Homo sapiens
ttttctttctacattaagactccaga

SEQ ID NO: 15069 - DNA, 26 bp, Homo sapiens
tttctttctacattaagactccagat

SEQ ID NO: 15070 - DNA, 26 bp, Homo sapiens
ttctttctacattaagactccagatg

SEQ ID NO: 15071 - DNA, 26 bp, Homo sapiens
tctttctacattaagactccagatgg

SEQ ID NO: 15072 - DNA, 26 bp, Homo sapiens
ctttctacattaagactccagatgga

SEQ ID NO: 15073 - DNA, 26 bp, Homo sapiens
tttctacattaagactccagatggaa

SEQ ID NO: 15074 - DNA, 26 bp, Homo sapiens
ttctacattaagactccagatggaac

SEQ ID NO: 15075 - DNA, 26 bp, Homo sapiens
tctacattaagactccagatggaacc

SEQ ID NO: 15076 - DNA, 26 bp, Homo sapiens
ctacattaagactccagatggaacca

SEQ ID NO: 15077 - DNA, 26 bp, Homo sapiens
tacattaagactccagatggaaccat

SEQ ID NO: 15078 - DNA, 26 bp, Homo sapiens
acattaagactccagatggaaccatt

SEQ ID NO: 15079 - DNA, 26 bp, Homo sapiens
cattaagactccagatggaaccattc

SEQ ID NO: 15080 - DNA, 26 bp, Homo sapiens
attaagactccagatggaaccattct

SEQ ID NO: 15081 - DNA, 26 bp, Homo sapiens
ttaagactccagatggaaccattctt

SEQ ID NO: 15082 - DNA, 26 bp, Homo sapiens
taagactccagatggaaccattcttt

SEQ ID NO: 15083 - DNA, 26 bp, Homo sapiens
aagactccagatggaaccattctttg

SEQ ID NO: 15084 - DNA, 26 bp, Homo sapiens
agactccagatggaaccattctttga

SEQ ID NO: 15085 - DNA, 26 bp, Homo sapiens
gactccagatggaaccattctttgac

SEQ ID NO: 15086 - DNA, 26 bp, Homo sapiens
actccagatggaaccattctttgact

SEQ ID NO: 15087 - DNA, 26 bp, Homo sapiens
ctccagatggaaccattctttgactg

SEQ ID NO: 15088 - DNA, 26 bp, Homo sapiens
tccagatggaaccattctttgactga

SEQ ID NO: 15089 - DNA, 26 bp, Homo sapiens
ccagatggaaccattctttgactgat

SEQ ID NO: 15090 - DNA, 26 bp, Homo sapiens
cagatggaaccattctttgactgatg

SEQ ID NO: 15091 - DNA, 26 bp, Homo sapiens
agatggaaccattctttgactgatgg

SEQ ID NO: 15092 - DNA, 26 bp, Homo sapiens
gatggaaccattctttgactgatgga

SEQ ID NO: 15093 - DNA, 26 bp, Homo sapiens
atggaaccattctttgactgatggat

SEQ ID NO: 15094 - DNA, 26 bp, Homo sapiens
tggaaccattctttgactgatggatg

SEQ ID NO: 15095 - DNA, 26 bp, Homo sapiens
ggaaccattctttgactgatggatgg

SEQ ID NO: 15096 - DNA, 26 bp, Homo sapiens
gaaccattctttgactgatggatgga

SEQ ID NO: 15097 - DNA, 26 bp, Homo sapiens
aaccattctttgactgatggatggac

SEQ ID NO: 15098 - DNA, 26 bp, Homo sapiens
accattctttgactgatggatggact

SEQ ID NO: 15099 - DNA, 26 bp, Homo sapiens
ccattctttgactgatggatggactc

SEQ ID NO: 15100 - DNA, 26 bp, Homo sapiens
cattctttgactgatggatggactca

SEQ ID NO: 15101 - DNA, 26 bp, Homo sapiens
attctttgactgatggatggactcat

SEQ ID NO: 15102 - DNA, 26 bp, Homo sapiens
ttctttgactgatggatggactcatg

SEQ ID NO: 15103 - DNA, 26 bp, Homo sapiens
tctttgactgatggatggactcatgt

SEQ ID NO: 15104 - DNA, 26 bp, Homo sapiens
ctttgactgatggatggactcatgta

SEQ ID NO: 15105 - DNA, 26 bp, Homo sapiens
tttgactgatggatggactcatgtat

SEQ ID NO: 15106 - DNA, 26 bp, Homo sapiens
ttgactgatggatggactcatgtatg

SEQ ID NO: 15107 - DNA, 26 bp, Homo sapiens
tgactgatggatggactcatgtatgc

SEQ ID NO: 15108 - DNA, 26 bp, Homo sapiens
gactgatggatggactcatgtatgct

SEQ ID NO: 15109 - DNA, 26 bp, Homo sapiens
actgatggatggactcatgtatgcta

SEQ ID NO: 15110 - DNA, 26 bp, Homo sapiens
ctgatggatggactcatgtatgctac

SEQ ID NO: 15111 - DNA, 26 bp, Homo sapiens
tgatggatggactcatgtatgctaca

SEQ ID NO: 15112 - DNA, 26 bp, Homo sapiens
gatggatggactcatgtatgctacaa

SEQ ID NO: 15113 - DNA, 26 bp, Homo sapiens
atggatggactcatgtatgctacaaa

SEQ ID NO: 15114 - DNA, 26 bp, Homo sapiens
tggatggactcatgtatgctacaaac

SEQ ID NO: 15115 - DNA, 26 bp, Homo sapiens
ggatggactcatgtatgctacaaacc

SEQ ID NO: 15116 - DNA, 26 bp, Homo sapiens
gatggactcatgtatgctacaaacct

SEQ ID NO: 15117 - DNA, 26 bp, Homo sapiens
atggactcatgtatgctacaaacctg

SEQ ID NO: 15118 - DNA, 26 bp, Homo sapiens
tggactcatgtatgctacaaacctga

SEQ ID NO: 15119 - DNA, 26 bp, Homo sapiens
ggactcatgtatgctacaaacctgag

SEQ ID NO: 15120 - DNA, 26 bp, Homo sapiens
gactcatgtatgctacaaacctgagt

SEQ ID NO: 15121 - DNA, 26 bp, Homo sapiens
actcatgtatgctacaaacctgagtt

SEQ ID NO: 15122 - DNA, 26 bp, Homo sapiens
ctcatgtatgctacaaacctgagttt

SEQ ID NO: 15123 - DNA, 26 bp, Homo sapiens
tcatgtatgctacaaacctgagtttg

SEQ ID NO: 15124 - DNA, 26 bp, Homo sapiens
catgtatgctacaaacctgagtttga

SEQ ID NO: 15125 - DNA, 26 bp, Homo sapiens
atgtatgctacaaacctgagtttgaa

SEQ ID NO: 15126 - DNA, 26 bp, Homo sapiens
tgtatgctacaaacctgagtttgaag

SEQ ID NO: 15127 - DNA, 26 bp, Homo sapiens
gtatgctacaaacctgagtttgaagg

SEQ ID NO: 15128 - DNA, 26 bp, Homo sapiens
tatgctacaaacctgagtttgaagga

SEQ ID NO: 15129 - DNA, 26 bp, Homo sapiens
atgctacaaacctgagtttgaaggag

SEQ ID NO: 15130 - DNA, 26 bp, Homo sapiens
tgctacaaacctgagtttgaaggagc

SEQ ID NO: 15131 - DNA, 26 bp, Homo sapiens
gctacaaacctgagtttgaaggagct

SEQ ID NO: 15132 - DNA, 26 bp, Homo sapiens
ctacaaacctgagtttgaaggagctg

SEQ ID NO: 15133 - DNA, 26 bp, Homo sapiens
tacaaacctgagtttgaaggagctga

SEQ ID NO: 15134 - DNA, 26 bp, Homo sapiens
acaaacctgagtttgaaggagctgag

SEQ ID NO: 15135 - DNA, 26 bp, Homo sapiens
caaacctgagtttgaaggagctgagt

SEQ ID NO: 15136 - DNA, 26 bp, Homo sapiens
aaacctgagtttgaaggagctgagta

SEQ ID NO: 15137 - DNA, 26 bp, Homo sapiens
aacctgagtttgaaggagctgagtaa

SEQ ID NO: 15138 - DNA, 26 bp, Homo sapiens
acctgagtttgaaggagctgagtaac

SEQ ID NO: 15139 - DNA, 26 bp, Homo sapiens
cctgagtttgaaggagctgagtaaca

SEQ ID NO: 15140 - DNA, 26 bp, Homo sapiens
ctgagtttgaaggagctgagtaacaa

SEQ ID NO: 15141 - DNA, 26 bp, Homo sapiens
tgagtttgaaggagctgagtaacaat

SEQ ID NO: 15142 - DNA, 26 bp, Homo sapiens
gagtttgaaggagctgagtaacaatt

SEQ ID NO: 15143 - DNA, 26 bp, Homo sapiens
agtttgaaggagctgagtaacaattc

SEQ ID NO: 15144 - DNA, 26 bp, Homo sapiens
gtttgaaggagctgagtaacaattct

SEQ ID NO: 15145 - DNA, 26 bp, Homo sapiens
tttgaaggagctgagtaacaattcta

SEQ ID NO: 15146 - DNA, 26 bp, Homo sapiens
ttgaaggagctgagtaacaattctaa

SEQ ID NO: 15147 - DNA, 26 bp, Homo sapiens
tgaaggagctgagtaacaattctaat

SEQ ID NO: 15148 - DNA, 26 bp, Homo sapiens
gaaggagctgagtaacaattctaatg

SEQ ID NO: 15149 - DNA, 26 bp, Homo sapiens
aaggagctgagtaacaattctaatgg

SEQ ID NO: 15150 - DNA, 26 bp, Homo sapiens
aggagctgagtaacaattctaatggt

SEQ ID NO: 15151 - DNA, 26 bp, Homo sapiens
ggagctgagtaacaattctaatggtt

SEQ ID NO: 15152 - DNA, 26 bp, Homo sapiens
gagctgagtaacaattctaatggttt

SEQ ID NO: 15153 - DNA, 26 bp, Homo sapiens
agctgagtaacaattctaatggtttt

SEQ ID NO: 15154 - DNA, 26 bp, Homo sapiens
gctgagtaacaattctaatggttttg

SEQ ID NO: 15155 - DNA, 26 bp, Homo sapiens
ctgagtaacaattctaatggttttgc

SEQ ID NO: 15156 - DNA, 26 bp, Homo sapiens
tgagtaacaattctaatggttttgct

SEQ ID NO: 15157 - DNA, 26 bp, Homo sapiens
gagtaacaattctaatggttttgctt

SEQ ID NO: 15158 - DNA, 26 bp, Homo sapiens
agtaacaattctaatggttttgcttt

SEQ ID NO: 15159 - DNA, 26 bp, Homo sapiens
gtaacaattctaatggttttgctttt

SEQ ID NO: 15160 - DNA, 26 bp, Homo sapiens
taacaattctaatggttttgcttttc

SEQ ID NO: 15161 - DNA, 26 bp, Homo sapiens
aacaattctaatggttttgcttttct

SEQ ID NO: 15162 - DNA, 26 bp, Homo sapiens
acaattctaatggttttgcttttctc

SEQ ID NO: 15163 - DNA, 26 bp, Homo sapiens
caattctaatggttttgcttttctct

SEQ ID NO: 15164 - DNA, 26 bp, Homo sapiens
aattctaatggttttgcttttctctt

SEQ ID NO: 15165 - DNA, 26 bp, Homo sapiens
attctaatggttttgcttttctcttg

SEQ ID NO: 15166 - DNA, 26 bp, Homo sapiens
ttctaatggttttgcttttctcttga

SEQ ID NO: 15167 - DNA, 26 bp, Homo sapiens
tctaatggttttgcttttctcttgaa

SEQ ID NO: 15168 - DNA, 26 bp, Homo sapiens
ctaatggttttgcttttctcttgaaa

SEQ ID NO: 15169 - DNA, 26 bp, Homo sapiens
taatggttttgcttttctcttgaaaa

SEQ ID NO: 15170 - DNA, 26 bp, Homo sapiens
aatggttttgcttttctcttgaaaag

SEQ ID NO: 15171 - DNA, 26 bp, Homo sapiens
atggttttgcttttctcttgaaaagg

SEQ ID NO: 15172 - DNA, 26 bp, Homo sapiens
tggttttgcttttctcttgaaaagga

SEQ ID NO: 15173 - DNA, 26 bp, Homo sapiens
ggttttgcttttctcttgaaaaggag

SEQ ID NO: 15174 - DNA, 26 bp, Homo sapiens
gttttgcttttctcttgaaaaggagt

SEQ ID NO: 15175 - DNA, 26 bp, Homo sapiens
ttttgcttttctcttgaaaaggagta

SEQ ID NO: 15176 - DNA, 26 bp, Homo sapiens
tttgcttttctcttgaaaaggagtat

SEQ ID NO: 15177 - DNA, 26 bp, Homo sapiens
ttgcttttctcttgaaaaggagtatt

SEQ ID NO: 15178 - DNA, 26 bp, Homo sapiens
tgcttttctcttgaaaaggagtattt

SEQ ID NO: 15179 - DNA, 26 bp, Homo sapiens
gcttttctcttgaaaaggagtattta

SEQ ID NO: 15180 - DNA, 26 bp, Homo sapiens
cttttctcttgaaaaggagtatttat

SEQ ID NO: 15181 - DNA, 26 bp, Homo sapiens
ttttctcttgaaaaggagtatttatt

SEQ ID NO: 15182 - DNA, 26 bp, Homo sapiens
tttctcttgaaaaggagtatttatta

SEQ ID NO: 15183 - DNA, 26 bp, Homo sapiens
ttctcttgaaaaggagtatttattat

SEQ ID NO: 15184 - DNA, 26 bp, Homo sapiens
tctcttgaaaaggagtatttattatg

SEQ ID NO: 15185 - DNA, 26 bp, Homo sapiens
ctcttgaaaaggagtatttattatgg

SEQ ID NO: 15186 - DNA, 26 bp, Homo sapiens
tcttgaaaaggagtatttattatggt

SEQ ID NO: 15187 - DNA, 26 bp, Homo sapiens
cttgaaaaggagtatttattatggtc

SEQ ID NO: 15188 - DNA, 26 bp, Homo sapiens
ttgaaaaggagtatttattatggtct

SEQ ID NO: 15189 - DNA, 26 bp, Homo sapiens
tgaaaaggagtatttattatggtctc

SEQ ID NO: 15190 - DNA, 26 bp, Homo sapiens
gaaaaggagtatttattatggtctct

SEQ ID NO: 15191 - DNA, 26 bp, Homo sapiens
aaaaggagtatttattatggtctctt

SEQ ID NO: 15192 - DNA, 26 bp, Homo sapiens
aaaggagtatttattatggtctctta

SEQ ID NO: 15193 - DNA, 26 bp, Homo sapiens
aaggagtatttattatggtctcttaa

SEQ ID NO: 15194 - DNA, 26 bp, Homo sapiens
aggagtatttattatggtctcttaat

SEQ ID NO: 15195 - DNA, 26 bp, Homo sapiens
ggagtatttattatggtctcttaatg

SEQ ID NO: 15196 - DNA, 26 bp, Homo sapiens
gagtatttattatggtctcttaatga

SEQ ID NO: 15197 - DNA, 26 bp, Homo sapiens
agtatttattatggtctcttaatgat

SEQ ID NO: 15198 - DNA, 26 bp, Homo sapiens
gtatttattatggtctcttaatgatt

SEQ ID NO: 15199 - DNA, 26 bp, Homo sapiens
tatttattatggtctcttaatgatta

SEQ ID NO: 15200 - DNA, 26 bp, Homo sapiens
atttattatggtctcttaatgattaa

SEQ ID NO: 15201 - DNA, 26 bp, Homo sapiens
tttattatggtctcttaatgattaag

SEQ ID NO: 15202 - DNA, 26 bp, Homo sapiens
ttattatggtctcttaatgattaaga

SEQ ID NO: 15203 - DNA, 26 bp, Homo sapiens
tattatggtctcttaatgattaagaa

SEQ ID NO: 15204 - DNA, 26 bp, Homo sapiens
attatggtctcttaatgattaagaat

SEQ ID NO: 15205 - DNA, 26 bp, Homo sapiens
ttatggtctcttaatgattaagaatt

SEQ ID NO: 15206 - DNA, 26 bp, Homo sapiens
tatggtctcttaatgattaagaatta

SEQ ID NO: 15207 - DNA, 26 bp, Homo sapiens
atggtctcttaatgattaagaattaa

SEQ ID NO: 15208 - DNA, 26 bp, Homo sapiens
tggtctcttaatgattaagaattaat

SEQ ID NO: 15209 - DNA, 26 bp, Homo sapiens
ggtctcttaatgattaagaattaatt

SEQ ID NO: 15210 - DNA, 26 bp, Homo sapiens
gtctcttaatgattaagaattaatta

SEQ ID NO: 15211 - DNA, 26 bp, Homo sapiens
tctcttaatgattaagaattaattat

SEQ ID NO: 15212 - DNA, 26 bp, Homo sapiens
ctcttaatgattaagaattaattatt

SEQ ID NO: 15213 - DNA, 26 bp, Homo sapiens
tcttaatgattaagaattaattattg

SEQ ID NO: 15214 - DNA, 26 bp, Homo sapiens
cttaatgattaagaattaattattga

SEQ ID NO: 15215 - DNA, 26 bp, Homo sapiens
ttaatgattaagaattaattattgaa

SEQ ID NO: 15216 - DNA, 26 bp, Homo sapiens
taatgattaagaattaattattgaaa

SEQ ID NO: 15217 - DNA, 26 bp, Homo sapiens
aatgattaagaattaattattgaaat

SEQ ID NO: 15218 - DNA, 26 bp, Homo sapiens
atgattaagaattaattattgaaatc

SEQ ID NO: 15219 - DNA, 26 bp, Homo sapiens
tgattaagaattaattattgaaatca

SEQ ID NO: 15220 - DNA, 26 bp, Homo sapiens
gattaagaattaattattgaaatcaa

SEQ ID NO: 15221 - DNA, 26 bp, Homo sapiens
attaagaattaattattgaaatcaag

SEQ ID NO: 15222 - DNA, 26 bp, Homo sapiens
ttaagaattaattattgaaatcaaga

SEQ ID NO: 15223 - DNA, 26 bp, Homo sapiens
taagaattaattattgaaatcaagac

SEQ ID NO: 15224 - DNA, 26 bp, Homo sapiens
aagaattaattattgaaatcaagaca

SEQ ID NO: 15225 - DNA, 26 bp, Homo sapiens
agaattaattattgaaatcaagacat

SEQ ID NO: 15226 - DNA, 26 bp, Homo sapiens
gaattaattattgaaatcaagacatg

SEQ ID NO: 15227 - DNA, 26 bp, Homo sapiens
aattaattattgaaatcaagacatga

SEQ ID NO: 15228 - DNA, 26 bp, Homo sapiens
attaattattgaaatcaagacatgaa

SEQ ID NO: 15229 - DNA, 26 bp, Homo sapiens
ttaattattgaaatcaagacatgaac

SEQ ID NO: 15230 - DNA, 26 bp, Homo sapiens
taattattgaaatcaagacatgaaca

SEQ ID NO: 15231 - DNA, 26 bp, Homo sapiens
aattattgaaatcaagacatgaacag

SEQ ID NO: 15232 - DNA, 26 bp, Homo sapiens
attattgaaatcaagacatgaacagc

SEQ ID NO: 15233 - DNA, 26 bp, Homo sapiens
ttattgaaatcaagacatgaacagct

SEQ ID NO: 15234 - DNA, 26 bp, Homo sapiens
tattgaaatcaagacatgaacagcta

SEQ ID NO: 15235 - DNA, 26 bp, Homo sapiens
attgaaatcaagacatgaacagctaa

SEQ ID NO: 15236 - DNA, 26 bp, Homo sapiens
ttgaaatcaagacatgaacagctaag

SEQ ID NO: 15237 - DNA, 26 bp, Homo sapiens
tgaaatcaagacatgaacagctaagg

SEQ ID NO: 15238 - DNA, 26 bp, Homo sapiens
gaaatcaagacatgaacagctaaggt

SEQ ID NO: 15239 - DNA, 26 bp, Homo sapiens
aaatcaagacatgaacagctaaggtt

SEQ ID NO: 15240 - DNA, 26 bp, Homo sapiens
aatcaagacatgaacagctaaggttt

SEQ ID NO: 15241 - DNA, 26 bp, Homo sapiens
atcaagacatgaacagctaaggtttt

SEQ ID NO: 15242 - DNA, 26 bp, Homo sapiens
tcaagacatgaacagctaaggtttta

SEQ ID NO: 15243 - DNA, 26 bp, Homo sapiens
caagacatgaacagctaaggttttat

SEQ ID NO: 15244 - DNA, 26 bp, Homo sapiens
aagacatgaacagctaaggttttatt

SEQ ID NO: 15245 - DNA, 26 bp, Homo sapiens
agacatgaacagctaaggttttattt

SEQ ID NO: 15246 - DNA, 26 bp, Homo sapiens
gacatgaacagctaaggttttatttg

SEQ ID NO: 15247 - DNA, 26 bp, Homo sapiens
acatgaacagctaaggttttatttgt

SEQ ID NO: 15248 - DNA, 26 bp, Homo sapiens
catgaacagctaaggttttatttgtt

SEQ ID NO: 15249 - DNA, 26 bp, Homo sapiens
atgaacagctaaggttttatttgtta

SEQ ID NO: 15250 - DNA, 26 bp, Homo sapiens
tgaacagctaaggttttatttgttat

SEQ ID NO: 15251 - DNA, 26 bp, Homo sapiens
gaacagctaaggttttatttgttatc

SEQ ID NO: 15252 - DNA, 26 bp, Homo sapiens
aacagctaaggttttatttgttatca

SEQ ID NO: 15253 - DNA, 26 bp, Homo sapiens
acagctaaggttttatttgttatcac

SEQ ID NO: 15254 - DNA, 26 bp, Homo sapiens
cagctaaggttttatttgttatcact

SEQ ID NO: 15255 - DNA, 26 bp, Homo sapiens
agctaaggttttatttgttatcacta

SEQ ID NO: 15256 - DNA, 26 bp, Homo sapiens
gctaaggttttatttgttatcactat

SEQ ID NO: 15257 - DNA, 26 bp, Homo sapiens
ctaaggttttatttgttatcactatt

SEQ ID NO: 15258 - DNA, 26 bp, Homo sapiens
taaggttttatttgttatcactattt

SEQ ID NO: 15259 - DNA, 26 bp, Homo sapiens
aaggttttatttgttatcactatttg

SEQ ID NO: 15260 - DNA, 26 bp, Homo sapiens
aggttttatttgttatcactatttgc

SEQ ID NO: 15261 - DNA, 26 bp, Homo sapiens
ggttttatttgttatcactatttgct

SEQ ID NO: 15262 - DNA, 26 bp, Homo sapiens
gttttatttgttatcactatttgctg

SEQ ID NO: 15263 - DNA, 26 bp, Homo sapiens
ttttatttgttatcactatttgctgg

SEQ ID NO: 15264 - DNA, 26 bp, Homo sapiens
tttatttgttatcactatttgctggg

SEQ ID NO: 15265 - DNA, 26 bp, Homo sapiens
ttatttgttatcactatttgctgggc

SEQ ID NO: 15266 - DNA, 26 bp, Homo sapiens
tatttgttatcactatttgctgggct

SEQ ID NO: 15267 - DNA, 26 bp, Homo sapiens
atttgttatcactatttgctgggcta

SEQ ID NO: 15268 - DNA, 26 bp, Homo sapiens
tttgttatcactatttgctgggctat

SEQ ID NO: 15269 - DNA, 26 bp, Homo sapiens
ttgttatcactatttgctgggctatt

SEQ ID NO: 15270 - DNA, 26 bp, Homo sapiens
tgttatcactatttgctgggctatta

SEQ ID NO: 15271 - DNA, 26 bp, Homo sapiens
gttatcactatttgctgggctattat

SEQ ID NO: 15272 - DNA, 26 bp, Homo sapiens
ttatcactatttgctgggctattatc

SEQ ID NO: 15273 - DNA, 26 bp, Homo sapiens
tatcactatttgctgggctattatct

SEQ ID NO: 15274 - DNA, 26 bp, Homo sapiens
atcactatttgctgggctattatctg

SEQ ID NO: 15275 - DNA, 26 bp, Homo sapiens
tcactatttgctgggctattatctga

SEQ ID NO: 15276 - DNA, 26 bp, Homo sapiens
cactatttgctgggctattatctgat

SEQ ID NO: 15277 - DNA, 26 bp, Homo sapiens
actatttgctgggctattatctgatt

SEQ ID NO: 15278 - DNA, 26 bp, Homo sapiens
ctatttgctgggctattatctgattt

SEQ ID NO: 15279 - DNA, 26 bp, Homo sapiens
tatttgctgggctattatctgatttg

SEQ ID NO: 15280 - DNA, 26 bp, Homo sapiens
atttgctgggctattatctgatttgg

SEQ ID NO: 15281 - DNA, 26 bp, Homo sapiens
tttgctgggctattatctgatttgga

SEQ ID NO: 15282 - DNA, 26 bp, Homo sapiens
ttgctgggctattatctgatttggaa

SEQ ID NO: 15283 - DNA, 26 bp, Homo sapiens
tgctgggctattatctgatttggaaa

SEQ ID NO: 15284 - DNA, 26 bp, Homo sapiens
gctgggctattatctgatttggaaaa

SEQ ID NO: 15285 - DNA, 26 bp, Homo sapiens
ctgggctattatctgatttggaaaaa

SEQ ID NO: 15286 - DNA, 26 bp, Homo sapiens
tgggctattatctgatttggaaaaaa

SEQ ID NO: 15287 - DNA, 26 bp, Homo sapiens
gggctattatctgatttggaaaaaaa

SEQ ID NO: 15288 - DNA, 26 bp, Homo sapiens
ggctattatctgatttggaaaaaaaa

SEQ ID NO: 15289 - DNA, 26 bp, Homo sapiens
gctattatctgatttggaaaaaaaaa

SEQ ID NO: 15290 - DNA, 26 bp, Homo sapiens
ctattatctgatttggaaaaaaaaaa

SEQ ID NO: 15291 - DNA, 26 bp, Homo sapiens
tattatctgatttggaaaaaaaaaaa

SEQ ID NO: 15292 - DNA, 26 bp, Homo sapiens
attatctgatttggaaaaaaaaaaaa

SEQ ID NO: 15293 - DNA, 26 bp, Homo sapiens
ttatctgatttggaaaaaaaaaaaaa

SEQ ID NO: 15294 - DNA, 26 bp, Homo sapiens
tatctgatttggaaaaaaaaaaaaaa

SEQ ID NO: 15295 - DNA, 26 bp, Homo sapiens
atctgatttggaaaaaaaaaaaaaaa

SEQ ID NO: 15296 - DNA, 26 bp, Homo sapiens
tctgatttggaaaaaaaaaaaaaaaa

SEQ ID NO: 15297 - DNA, 26 bp, Homo sapiens
ctgatttggaaaaaaaaaaaaaaaag

SEQ ID NO: 15298 - DNA, 26 bp, Homo sapiens
tgatttggaaaaaaaaaaaaaaaagt

SEQ ID NO: 15299 - DNA, 26 bp, Homo sapiens
gatttggaaaaaaaaaaaaaaaagta

SEQ ID NO: 15300 - DNA, 26 bp, Homo sapiens
atttggaaaaaaaaaaaaaaaagtag

SEQ ID NO: 15301 - DNA, 26 bp, Homo sapiens
tttggaaaaaaaaaaaaaaaagtaga

SEQ ID NO: 15302 - DNA, 26 bp, Homo sapiens
ttggaaaaaaaaaaaaaaaagtagag

SEQ ID NO: 15303 - DNA, 26 bp, Homo sapiens
tggaaaaaaaaaaaaaaaagtagaga

SEQ ID NO: 15304 - DNA, 26 bp, Homo sapiens
ggaaaaaaaaaaaaaaaagtagagaa

SEQ ID NO: 15305 - DNA, 26 bp, Homo sapiens
gaaaaaaaaaaaaaaaagtagagaat

SEQ ID NO: 15306 - DNA, 26 bp, Homo sapiens
aaaaaaaaaaaaaaaagtagagaatt

SEQ ID NO: 15307 - DNA, 26 bp, Homo sapiens
aaaaaaaaaaaaaaagtagagaattg

SEQ ID NO: 15308 - DNA, 26 bp, Homo sapiens
aaaaaaaaaaaaaagtagagaattga

SEQ ID NO: 15309 - DNA, 26 bp, Homo sapiens
aaaaaaaaaaaaagtagagaattgac

SEQ ID NO: 15310 - DNA, 26 bp, Homo sapiens
aaaaaaaaaaaagtagagaattgact

SEQ ID NO: 15311 - DNA, 26 bp, Homo sapiens
aaaaaaaaaaagtagagaattgactg

SEQ ID NO: 15312 - DNA, 26 bp, Homo sapiens
aaaaaaaaaagtagagaattgactga

SEQ ID NO: 15313 - DNA, 26 bp, Homo sapiens
aaaaaaaaagtagagaattgactgag

SEQ ID NO: 15314 - DNA, 26 bp, Homo sapiens
aaaaaaaagtagagaattgactgagg

SEQ ID NO: 15315 - DNA, 26 bp, Homo sapiens
aaaaaaagtagagaattgactgaggt

SEQ ID NO: 15316 - DNA, 26 bp, Homo sapiens
aaaaaagtagagaattgactgaggtc

SEQ ID NO: 15317 - DNA, 26 bp, Homo sapiens
aaaaagtagagaattgactgaggtct

SEQ ID NO: 15318 - DNA, 26 bp, Homo sapiens
aaaagtagagaattgactgaggtctt

SEQ ID NO: 15319 - DNA, 26 bp, Homo sapiens
aaagtagagaattgactgaggtcttc

SEQ ID NO: 15320 - DNA, 26 bp, Homo sapiens
aagtagagaattgactgaggtcttct

SEQ ID NO: 15321 - DNA, 26 bp, Homo sapiens
agtagagaattgactgaggtcttctt

SEQ ID NO: 15322 - DNA, 26 bp, Homo sapiens
gtagagaattgactgaggtcttcttt

SEQ ID NO: 15323 - DNA, 26 bp, Homo sapiens
tagagaattgactgaggtcttctttt

SEQ ID NO: 15324 - DNA, 26 bp, Homo sapiens
agagaattgactgaggtcttcttttt

SEQ ID NO: 15325 - DNA, 26 bp, Homo sapiens
gagaattgactgaggtcttctttttt

SEQ ID NO: 15326 - DNA, 26 bp, Homo sapiens
agaattgactgaggtcttcttttttc

SEQ ID NO: 15327 - DNA, 26 bp, Homo sapiens
gaattgactgaggtcttcttttttct

SEQ ID NO: 15328 - DNA, 26 bp, Homo sapiens
aattgactgaggtcttcttttttctg

SEQ ID NO: 15329 - DNA, 26 bp, Homo sapiens
attgactgaggtcttcttttttctga

SEQ ID NO: 15330 - DNA, 26 bp, Homo sapiens
ttgactgaggtcttcttttttctgag

SEQ ID NO: 15331 - DNA, 26 bp, Homo sapiens
tgactgaggtcttcttttttctgagt

SEQ ID NO: 15332 - DNA, 26 bp, Homo sapiens
gactgaggtcttcttttttctgagtt

SEQ ID NO: 15333 - DNA, 26 bp, Homo sapiens
actgaggtcttcttttttctgagttt

SEQ ID NO: 15334 - DNA, 26 bp, Homo sapiens
ctgaggtcttcttttttctgagttta

SEQ ID NO: 15335 - DNA, 26 bp, Homo sapiens
tgaggtcttcttttttctgagtttaa

SEQ ID NO: 15336 - DNA, 26 bp, Homo sapiens
gaggtcttcttttttctgagtttaac

SEQ ID NO: 15337 - DNA, 26 bp, Homo sapiens
aggtcttcttttttctgagtttaacc

SEQ ID NO: 15338 - DNA, 26 bp, Homo sapiens
ggtcttcttttttctgagtttaacct

SEQ ID NO: 15339 - DNA, 26 bp, Homo sapiens
gtcttcttttttctgagtttaacctc

SEQ ID NO: 15340 - DNA, 26 bp, Homo sapiens
tcttcttttttctgagtttaacctcc

SEQ ID NO: 15341 - DNA, 26 bp, Homo sapiens
cttcttttttctgagtttaacctcct

SEQ ID NO: 15342 - DNA, 26 bp, Homo sapiens
ttcttttttctgagtttaacctcctt

SEQ ID NO: 15343 - DNA, 26 bp, Homo sapiens
tcttttttctgagtttaacctccttc

SEQ ID NO: 15344 - DNA, 26 bp, Homo sapiens
cttttttctgagtttaacctccttcc

SEQ ID NO: 15345 - DNA, 26 bp, Homo sapiens
ttttttctgagtttaacctccttcca

SEQ ID NO: 15346 - DNA, 26 bp, Homo sapiens
tttttctgagtttaacctccttccag

SEQ ID NO: 15347 - DNA, 26 bp, Homo sapiens
ttttctgagtttaacctccttccagt

SEQ ID NO: 15348 - DNA, 26 bp, Homo sapiens
tttctgagtttaacctccttccagtt

SEQ ID NO: 15349 - DNA, 26 bp, Homo sapiens
ttctgagtttaacctccttccagtta

SEQ ID NO: 15350 - DNA, 26 bp, Homo sapiens
tctgagtttaacctccttccagttac

SEQ ID NO: 15351 - DNA, 26 bp, Homo sapiens
ctgagtttaacctccttccagttacc

SEQ ID NO: 15352 - DNA, 26 bp, Homo sapiens
tgagtttaacctccttccagttacct

SEQ ID NO: 15353 - DNA, 26 bp, Homo sapiens
gagtttaacctccttccagttacctg

SEQ ID NO: 15354 - DNA, 26 bp, Homo sapiens
agtttaacctccttccagttacctga

SEQ ID NO: 15355 - DNA, 26 bp, Homo sapiens
gtttaacctccttccagttacctgat

SEQ ID NO: 15356 - DNA, 26 bp, Homo sapiens
tttaacctccttccagttacctgatt

SEQ ID NO: 15357 - DNA, 26 bp, Homo sapiens
ttaacctccttccagttacctgattt

SEQ ID NO: 15358 - DNA, 26 bp, Homo sapiens
taacctccttccagttacctgattta

SEQ ID NO: 15359 - DNA, 26 bp, Homo sapiens
aacctccttccagttacctgatttat

SEQ ID NO: 15360 - DNA, 26 bp, Homo sapiens
acctccttccagttacctgatttata

SEQ ID NO: 15361 - DNA, 26 bp, Homo sapiens
cctccttccagttacctgatttataa

SEQ ID NO: 15362 - DNA, 26 bp, Homo sapiens
ctccttccagttacctgatttataaa

SEQ ID NO: 15363 - DNA, 26 bp, Homo sapiens
tccttccagttacctgatttataaaa

SEQ ID NO: 15364 - DNA, 26 bp, Homo sapiens
ccttccagttacctgatttataaaat

SEQ ID NO: 15365 - DNA, 26 bp, Homo sapiens
cttccagttacctgatttataaaatt

SEQ ID NO: 15366 - DNA, 26 bp, Homo sapiens
ttccagttacctgatttataaaattg

SEQ ID NO: 15367 - DNA, 26 bp, Homo sapiens
tccagttacctgatttataaaattgc

SEQ ID NO: 15368 - DNA, 26 bp, Homo sapiens
ccagttacctgatttataaaattgcc

SEQ ID NO: 15369 - DNA, 26 bp, Homo sapiens
cagttacctgatttataaaattgcca

SEQ ID NO: 15370 - DNA, 26 bp, Homo sapiens
agttacctgatttataaaattgccag

SEQ ID NO: 15371 - DNA, 26 bp, Homo sapiens
gttacctgatttataaaattgccagc

SEQ ID NO: 15372 - DNA, 26 bp, Homo sapiens
ttacctgatttataaaattgccagct

SEQ ID NO: 15373 - DNA, 26 bp, Homo sapiens
tacctgatttataaaattgccagctg

SEQ ID NO: 15374 - DNA, 26 bp, Homo sapiens
acctgatttataaaattgccagctgt

SEQ ID NO: 15375 - DNA, 26 bp, Homo sapiens
cctgatttataaaattgccagctgtc

SEQ ID NO: 15376 - DNA, 26 bp, Homo sapiens
ctgatttataaaattgccagctgtca

SEQ ID NO: 15377 - DNA, 26 bp, Homo sapiens
tgatttataaaattgccagctgtcac

SEQ ID NO: 15378 - DNA, 26 bp, Homo sapiens
gatttataaaattgccagctgtcaca

SEQ ID NO: 15379 - DNA, 26 bp, Homo sapiens
atttataaaattgccagctgtcacag

SEQ ID NO: 15380 - DNA, 26 bp, Homo sapiens
tttataaaattgccagctgtcacagg

SEQ ID NO: 15381 - DNA, 26 bp, Homo sapiens
ttataaaattgccagctgtcacaggt

SEQ ID NO: 15382 - DNA, 26 bp, Homo sapiens
tataaaattgccagctgtcacaggtg

SEQ ID NO: 15383 - DNA, 26 bp, Homo sapiens
ataaaattgccagctgtcacaggtgg

SEQ ID NO: 15384 - DNA, 26 bp, Homo sapiens
taaaattgccagctgtcacaggtggt

SEQ ID NO: 15385 - DNA, 26 bp, Homo sapiens
aaaattgccagctgtcacaggtggtt

SEQ ID NO: 15386 - DNA, 26 bp, Homo sapiens
aaattgccagctgtcacaggtggttt

SEQ ID NO: 15387 - DNA, 26 bp, Homo sapiens
aattgccagctgtcacaggtggtttg

SEQ ID NO: 15388 - DNA, 26 bp, Homo sapiens
attgccagctgtcacaggtggtttgc

SEQ ID NO: 15389 - DNA, 26 bp, Homo sapiens
ttgccagctgtcacaggtggtttgcg

SEQ ID NO: 15390 - DNA, 26 bp, Homo sapiens
tgccagctgtcacaggtggtttgcgt

SEQ ID NO: 15391 - DNA, 26 bp, Homo sapiens
gccagctgtcacaggtggtttgcgta

SEQ ID NO: 15392 - DNA, 26 bp, Homo sapiens
ccagctgtcacaggtggtttgcgtat

SEQ ID NO: 15393 - DNA, 26 bp, Homo sapiens
cagctgtcacaggtggtttgcgtatg

SEQ ID NO: 15394 - DNA, 26 bp, Homo sapiens
agctgtcacaggtggtttgcgtatgt

SEQ ID NO: 15395 - DNA, 26 bp, Homo sapiens
gctgtcacaggtggtttgcgtatgtg

SEQ ID NO: 15396 - DNA, 26 bp, Homo sapiens
ctgtcacaggtggtttgcgtatgtgt

SEQ ID NO: 15397 - DNA, 26 bp, Homo sapiens
tgtcacaggtggtttgcgtatgtgta

SEQ ID NO: 15398 - DNA, 26 bp, Homo sapiens
gtcacaggtggtttgcgtatgtgtaa

SEQ ID NO: 15399 - DNA, 26 bp, Homo sapiens
tcacaggtggtttgcgtatgtgtaaa

SEQ ID NO: 15400 - DNA, 26 bp, Homo sapiens
cacaggtggtttgcgtatgtgtaaag

SEQ ID NO: 15401 - DNA, 26 bp, Homo sapiens
acaggtggtttgcgtatgtgtaaaga

SEQ ID NO: 15402 - DNA, 26 bp, Homo sapiens
caggtggtttgcgtatgtgtaaagaa

SEQ ID NO: 15403 - DNA, 26 bp, Homo sapiens
aggtggtttgcgtatgtgtaaagaag

SEQ ID NO: 15404 - DNA, 26 bp, Homo sapiens
ggtggtttgcgtatgtgtaaagaaga

SEQ ID NO: 15405 - DNA, 26 bp, Homo sapiens
gtggtttgcgtatgtgtaaagaagag

SEQ ID NO: 15406 - DNA, 26 bp, Homo sapiens
tggtttgcgtatgtgtaaagaagagg

SEQ ID NO: 15407 - DNA, 26 bp, Homo sapiens
ggtttgcgtatgtgtaaagaagagga

SEQ ID NO: 15408 - DNA, 26 bp, Homo sapiens
gtttgcgtatgtgtaaagaagaggaa

SEQ ID NO: 15409 - DNA, 26 bp, Homo sapiens
tttgcgtatgtgtaaagaagaggaac

SEQ ID NO: 15410 - DNA, 26 bp, Homo sapiens
ttgcgtatgtgtaaagaagaggaaca

SEQ ID NO: 15411 - DNA, 26 bp, Homo sapiens
tgcgtatgtgtaaagaagaggaacaa

SEQ ID NO: 15412 - DNA, 26 bp, Homo sapiens
gcgtatgtgtaaagaagaggaacaac

SEQ ID NO: 15413 - DNA, 26 bp, Homo sapiens
cgtatgtgtaaagaagaggaacaaca

SEQ ID NO: 15414 - DNA, 26 bp, Homo sapiens
gtatgtgtaaagaagaggaacaacaa

SEQ ID NO: 15415 - DNA, 26 bp, Homo sapiens
tatgtgtaaagaagaggaacaacaaa

SEQ ID NO: 15416 - DNA, 26 bp, Homo sapiens
atgtgtaaagaagaggaacaacaaag

SEQ ID NO: 15417 - DNA, 26 bp, Homo sapiens
tgtgtaaagaagaggaacaacaaaga

SEQ ID NO: 15418 - DNA, 26 bp, Homo sapiens
gtgtaaagaagaggaacaacaaagat

SEQ ID NO: 15419 - DNA, 26 bp, Homo sapiens
tgtaaagaagaggaacaacaaagatt

SEQ ID NO: 15420 - DNA, 26 bp, Homo sapiens
gtaaagaagaggaacaacaaagattt

SEQ ID NO: 15421 - DNA, 26 bp, Homo sapiens
taaagaagaggaacaacaaagatttg

SEQ ID NO: 15422 - DNA, 26 bp, Homo sapiens
aaagaagaggaacaacaaagatttgt

SEQ ID NO: 15423 - DNA, 26 bp, Homo sapiens
aagaagaggaacaacaaagatttgtc

SEQ ID NO: 15424 - DNA, 26 bp, Homo sapiens
agaagaggaacaacaaagatttgtcc

SEQ ID NO: 15425 - DNA, 26 bp, Homo sapiens
gaagaggaacaacaaagatttgtcct

SEQ ID NO: 15426 - DNA, 26 bp, Homo sapiens
aagaggaacaacaaagatttgtcctc

SEQ ID NO: 15427 - DNA, 26 bp, Homo sapiens
agaggaacaacaaagatttgtcctct

SEQ ID NO: 15428 - DNA, 26 bp, Homo sapiens
gaggaacaacaaagatttgtcctctc

SEQ ID NO: 15429 - DNA, 26 bp, Homo sapiens
aggaacaacaaagatttgtcctctct

SEQ ID NO: 15430 - DNA, 26 bp, Homo sapiens
ggaacaacaaagatttgtcctctctt

SEQ ID NO: 15431 - DNA, 26 bp, Homo sapiens
gaacaacaaagatttgtcctctcttc

SEQ ID NO: 15432 - DNA, 26 bp, Homo sapiens
aacaacaaagatttgtcctctcttct

SEQ ID NO: 15433 - DNA, 26 bp, Homo sapiens
acaacaaagatttgtcctctcttctg

SEQ ID NO: 15434 - DNA, 26 bp, Homo sapiens
caacaaagatttgtcctctcttctgg

SEQ ID NO: 15435 - DNA, 26 bp, Homo sapiens
aacaaagatttgtcctctcttctggc

SEQ ID NO: 15436 - DNA, 26 bp, Homo sapiens
acaaagatttgtcctctcttctggct

SEQ ID NO: 15437 - DNA, 26 bp, Homo sapiens
caaagatttgtcctctcttctggctc

SEQ ID NO: 15438 - DNA, 26 bp, Homo sapiens
aaagatttgtcctctcttctggctct

SEQ ID NO: 15439 - DNA, 26 bp, Homo sapiens
aagatttgtcctctcttctggctcta

SEQ ID NO: 15440 - DNA, 26 bp, Homo sapiens
agatttgtcctctcttctggctctag

SEQ ID NO: 15441 - DNA, 26 bp, Homo sapiens
gatttgtcctctcttctggctctagc

SEQ ID NO: 15442 - DNA, 26 bp, Homo sapiens
atttgtcctctcttctggctctagcc

SEQ ID NO: 15443 - DNA, 26 bp, Homo sapiens
tttgtcctctcttctggctctagcct

SEQ ID NO: 15444 - DNA, 26 bp, Homo sapiens
ttgtcctctcttctggctctagcctg

SEQ ID NO: 15445 - DNA, 26 bp, Homo sapiens
tgtcctctcttctggctctagcctgc

SEQ ID NO: 15446 - DNA, 26 bp, Homo sapiens
gtcctctcttctggctctagcctgct

SEQ ID NO: 15447 - DNA, 26 bp, Homo sapiens
tcctctcttctggctctagcctgctt

SEQ ID NO: 15448 - DNA, 26 bp, Homo sapiens
cctctcttctggctctagcctgcttt

SEQ ID NO: 15449 - DNA, 26 bp, Homo sapiens
ctctcttctggctctagcctgctttt

SEQ ID NO: 15450 - DNA, 26 bp, Homo sapiens
tctcttctggctctagcctgcttttg

SEQ ID NO: 15451 - DNA, 26 bp, Homo sapiens
ctcttctggctctagcctgcttttgt

SEQ ID NO: 15452 - DNA, 26 bp, Homo sapiens
tcttctggctctagcctgcttttgtt

SEQ ID NO: 15453 - DNA, 26 bp, Homo sapiens
cttctggctctagcctgcttttgttt

SEQ ID NO: 15454 - DNA, 26 bp, Homo sapiens
ttctggctctagcctgcttttgtttg

SEQ ID NO: 15455 - DNA, 26 bp, Homo sapiens
tctggctctagcctgcttttgtttgg

SEQ ID NO: 15456 - DNA, 26 bp, Homo sapiens
ctggctctagcctgcttttgtttgga

SEQ ID NO: 15457 - DNA, 26 bp, Homo sapiens
tggctctagcctgcttttgtttggat

SEQ ID NO: 15458 - DNA, 26 bp, Homo sapiens
ggctctagcctgcttttgtttggatt

SEQ ID NO: 15459 - DNA, 26 bp, Homo sapiens
gctctagcctgcttttgtttggattt

SEQ ID NO: 15460 - DNA, 26 bp, Homo sapiens
ctctagcctgcttttgtttggattta

SEQ ID NO: 15461 - DNA, 26 bp, Homo sapiens
tctagcctgcttttgtttggatttag

SEQ ID NO: 15462 - DNA, 26 bp, Homo sapiens
ctagcctgcttttgtttggatttaga

SEQ ID NO: 15463 - DNA, 26 bp, Homo sapiens
tagcctgcttttgtttggatttagat

SEQ ID NO: 15464 - DNA, 26 bp, Homo sapiens
agcctgcttttgtttggatttagatc

SEQ ID NO: 15465 - DNA, 26 bp, Homo sapiens
gcctgcttttgtttggatttagatct

SEQ ID NO: 15466 - DNA, 26 bp, Homo sapiens
cctgcttttgtttggatttagatctt

SEQ ID NO: 15467 - DNA, 26 bp, Homo sapiens
ctgcttttgtttggatttagatcttg

SEQ ID NO: 15468 - DNA, 26 bp, Homo sapiens
tgcttttgtttggatttagatcttgg

SEQ ID NO: 15469 - DNA, 26 bp, Homo sapiens
gcttttgtttggatttagatcttggt

SEQ ID NO: 15470 - DNA, 26 bp, Homo sapiens
cttttgtttggatttagatcttggtg

SEQ ID NO: 15471 - DNA, 26 bp, Homo sapiens
ttttgtttggatttagatcttggtgg

SEQ ID NO: 15472 - DNA, 26 bp, Homo sapiens
tttgtttggatttagatcttggtgga

SEQ ID NO: 15473 - DNA, 26 bp, Homo sapiens
ttgtttggatttagatcttggtggag

SEQ ID NO: 15474 - DNA, 26 bp, Homo sapiens
tgtttggatttagatcttggtggaga

SEQ ID NO: 15475 - DNA, 26 bp, Homo sapiens
gtttggatttagatcttggtggagag

SEQ ID NO: 15476 - DNA, 26 bp, Homo sapiens
tttggatttagatcttggtggagagg

SEQ ID NO: 15477 - DNA, 26 bp, Homo sapiens
ttggatttagatcttggtggagagga

SEQ ID NO: 15478 - DNA, 26 bp, Homo sapiens
tggatttagatcttggtggagaggac

SEQ ID NO: 15479 - DNA, 26 bp, Homo sapiens
ggatttagatcttggtggagaggact

SEQ ID NO: 15480 - DNA, 26 bp, Homo sapiens
gatttagatcttggtggagaggactg

SEQ ID NO: 15481 - DNA, 26 bp, Homo sapiens
atttagatcttggtggagaggactgt

SEQ ID NO: 15482 - DNA, 26 bp, Homo sapiens
tttagatcttggtggagaggactgtc

SEQ ID NO: 15483 - DNA, 26 bp, Homo sapiens
ttagatcttggtggagaggactgtcc

SEQ ID NO: 15484 - DNA, 26 bp, Homo sapiens
tagatcttggtggagaggactgtccc

SEQ ID NO: 15485 - DNA, 26 bp, Homo sapiens
agatcttggtggagaggactgtccca

SEQ ID NO: 15486 - DNA, 26 bp, Homo sapiens
gatcttggtggagaggactgtcccac

SEQ ID NO: 15487 - DNA, 26 bp, Homo sapiens
atcttggtggagaggactgtcccact

SEQ ID NO: 15488 - DNA, 26 bp, Homo sapiens
tcttggtggagaggactgtcccactc

SEQ ID NO: 15489 - DNA, 26 bp, Homo sapiens
cttggtggagaggactgtcccactcc

SEQ ID NO: 15490 - DNA, 26 bp, Homo sapiens
ttggtggagaggactgtcccactcct

SEQ ID NO: 15491 - DNA, 26 bp, Homo sapiens
tggtggagaggactgtcccactcctc

SEQ ID NO: 15492 - DNA, 26 bp, Homo sapiens
ggtggagaggactgtcccactcctct

SEQ ID NO: 15493 - DNA, 26 bp, Homo sapiens
gtggagaggactgtcccactcctctc

SEQ ID NO: 15494 - DNA, 26 bp, Homo sapiens
tggagaggactgtcccactcctctct

SEQ ID NO: 15495 - DNA, 26 bp, Homo sapiens
ggagaggactgtcccactcctctctt

SEQ ID NO: 15496 - DNA, 26 bp, Homo sapiens
gagaggactgtcccactcctctcttc

SEQ ID NO: 15497 - DNA, 26 bp, Homo sapiens
agaggactgtcccactcctctcttct

SEQ ID NO: 15498 - DNA, 26 bp, Homo sapiens
gaggactgtcccactcctctcttctg

SEQ ID NO: 15499 - DNA, 26 bp, Homo sapiens
aggactgtcccactcctctcttctgg

SEQ ID NO: 15500 - DNA, 26 bp, Homo sapiens
ggactgtcccactcctctcttctggc

SEQ ID NO: 15501 - DNA, 26 bp, Homo sapiens
gactgtcccactcctctcttctggct

SEQ ID NO: 15502 - DNA, 26 bp, Homo sapiens
actgtcccactcctctcttctggcta

SEQ ID NO: 15503 - DNA, 26 bp, Homo sapiens
ctgtcccactcctctcttctggctag

SEQ ID NO: 15504 - DNA, 26 bp, Homo sapiens
tgtcccactcctctcttctggctagt

SEQ ID NO: 15505 - DNA, 26 bp, Homo sapiens
gtcccactcctctcttctggctagtg

SEQ ID NO: 15506 - DNA, 26 bp, Homo sapiens
tcccactcctctcttctggctagtga

SEQ ID NO: 15507 - DNA, 26 bp, Homo sapiens
cccactcctctcttctggctagtgag

SEQ ID NO: 15508 - DNA, 26 bp, Homo sapiens
ccactcctctcttctggctagtgagt

SEQ ID NO: 15509 - DNA, 26 bp, Homo sapiens
cactcctctcttctggctagtgagtc

SEQ ID NO: 15510 - DNA, 26 bp, Homo sapiens
actcctctcttctggctagtgagtct

SEQ ID NO: 15511 - DNA, 26 bp, Homo sapiens
ctcctctcttctggctagtgagtctt

SEQ ID NO: 15512 - DNA, 26 bp, Homo sapiens
tcctctcttctggctagtgagtcttc

SEQ ID NO: 15513 - DNA, 26 bp, Homo sapiens
cctctcttctggctagtgagtcttcc

SEQ ID NO: 15514 - DNA, 26 bp, Homo sapiens
ctctcttctggctagtgagtcttcca

SEQ ID NO: 15515 - DNA, 26 bp, Homo sapiens
tctcttctggctagtgagtcttccac

SEQ ID NO: 15516 - DNA, 26 bp, Homo sapiens
ctcttctggctagtgagtcttccaca

SEQ ID NO: 15517 - DNA, 26 bp, Homo sapiens
tcttctggctagtgagtcttccacaa

SEQ ID NO: 15518 - DNA, 26 bp, Homo sapiens
cttctggctagtgagtcttccacaaa

SEQ ID NO: 15519 - DNA, 26 bp, Homo sapiens
ttctggctagtgagtcttccacaaaa

SEQ ID NO: 15520 - DNA, 26 bp, Homo sapiens
tctggctagtgagtcttccacaaaag

SEQ ID NO: 15521 - DNA, 26 bp, Homo sapiens
ctggctagtgagtcttccacaaaagc

SEQ ID NO: 15522 - DNA, 26 bp, Homo sapiens
tggctagtgagtcttccacaaaagcc

SEQ ID NO: 15523 - DNA, 26 bp, Homo sapiens
ggctagtgagtcttccacaaaagccg

SEQ ID NO: 15524 - DNA, 26 bp, Homo sapiens
gctagtgagtcttccacaaaagccgc

SEQ ID NO: 15525 - DNA, 26 bp, Homo sapiens
ctagtgagtcttccacaaaagccgct

SEQ ID NO: 15526 - DNA, 26 bp, Homo sapiens
tagtgagtcttccacaaaagccgctg

SEQ ID NO: 15527 - DNA, 26 bp, Homo sapiens
agtgagtcttccacaaaagccgctgc

SEQ ID NO: 15528 - DNA, 26 bp, Homo sapiens
gtgagtcttccacaaaagccgctgcc

SEQ ID NO: 15529 - DNA, 26 bp, Homo sapiens
tgagtcttccacaaaagccgctgcca

SEQ ID NO: 15530 - DNA, 26 bp, Homo sapiens
gagtcttccacaaaagccgctgccag

SEQ ID NO: 15531 - DNA, 26 bp, Homo sapiens
agtcttccacaaaagccgctgccagg

SEQ ID NO: 15532 - DNA, 26 bp, Homo sapiens
gtcttccacaaaagccgctgccagga

SEQ ID NO: 15533 - DNA, 26 bp, Homo sapiens
tcttccacaaaagccgctgccaggag

SEQ ID NO: 15534 - DNA, 26 bp, Homo sapiens
cttccacaaaagccgctgccaggagc

SEQ ID NO: 15535 - DNA, 26 bp, Homo sapiens
ttccacaaaagccgctgccaggagcc

SEQ ID NO: 15536 - DNA, 26 bp, Homo sapiens
tccacaaaagccgctgccaggagcca

SEQ ID NO: 15537 - DNA, 26 bp, Homo sapiens
ccacaaaagccgctgccaggagccag

SEQ ID NO: 15538 - DNA, 26 bp, Homo sapiens
cacaaaagccgctgccaggagccagt

SEQ ID NO: 15539 - DNA, 26 bp, Homo sapiens
acaaaagccgctgccaggagccagta

SEQ ID NO: 15540 - DNA, 26 bp, Homo sapiens
caaaagccgctgccaggagccagtag

SEQ ID NO: 15541 - DNA, 26 bp, Homo sapiens
aaaagccgctgccaggagccagtagg

SEQ ID NO: 15542 - DNA, 26 bp, Homo sapiens
aaagccgctgccaggagccagtaggc

SEQ ID NO: 15543 - DNA, 26 bp, Homo sapiens
aagccgctgccaggagccagtaggct

SEQ ID NO: 15544 - DNA, 26 bp, Homo sapiens
agccgctgccaggagccagtaggctc

SEQ ID NO: 15545 - DNA, 26 bp, Homo sapiens
gccgctgccaggagccagtaggctca

SEQ ID NO: 15546 - DNA, 26 bp, Homo sapiens
ccgctgccaggagccagtaggctcac

SEQ ID NO: 15547 - DNA, 26 bp, Homo sapiens
cgctgccaggagccagtaggctcact

SEQ ID NO: 15548 - DNA, 26 bp, Homo sapiens
gctgccaggagccagtaggctcacta

SEQ ID NO: 15549 - DNA, 26 bp, Homo sapiens
ctgccaggagccagtaggctcactag

SEQ ID NO: 15550 - DNA, 26 bp, Homo sapiens
tgccaggagccagtaggctcactagg

SEQ ID NO: 15551 - DNA, 26 bp, Homo sapiens
gccaggagccagtaggctcactaggg

SEQ ID NO: 15552 - DNA, 26 bp, Homo sapiens
ccaggagccagtaggctcactaggga

SEQ ID NO: 15553 - DNA, 26 bp, Homo sapiens
caggagccagtaggctcactagggaa

SEQ ID NO: 15554 - DNA, 26 bp, Homo sapiens
aggagccagtaggctcactagggaat

SEQ ID NO: 15555 - DNA, 26 bp, Homo sapiens
ggagccagtaggctcactagggaatg

SEQ ID NO: 15556 - DNA, 26 bp, Homo sapiens
gagccagtaggctcactagggaatgt

SEQ ID NO: 15557 - DNA, 26 bp, Homo sapiens
agccagtaggctcactagggaatgtg

SEQ ID NO: 15558 - DNA, 26 bp, Homo sapiens
gccagtaggctcactagggaatgtgc

SEQ ID NO: 15559 - DNA, 26 bp, Homo sapiens
ccagtaggctcactagggaatgtgct

SEQ ID NO: 15560 - DNA, 26 bp, Homo sapiens
cagtaggctcactagggaatgtgctg

SEQ ID NO: 15561 - DNA, 26 bp, Homo sapiens
agtaggctcactagggaatgtgctga

SEQ ID NO: 15562 - DNA, 26 bp, Homo sapiens
gtaggctcactagggaatgtgctgat

SEQ ID NO: 15563 - DNA, 26 bp, Homo sapiens
taggctcactagggaatgtgctgatg

SEQ ID NO: 15564 - DNA, 26 bp, Homo sapiens
aggctcactagggaatgtgctgatga

SEQ ID NO: 15565 - DNA, 26 bp, Homo sapiens
ggctcactagggaatgtgctgatgac

SEQ ID NO: 15566 - DNA, 26 bp, Homo sapiens
gctcactagggaatgtgctgatgacg

SEQ ID NO: 15567 - DNA, 26 bp, Homo sapiens
ctcactagggaatgtgctgatgacgg

SEQ ID NO: 15568 - DNA, 26 bp, Homo sapiens
tcactagggaatgtgctgatgacggt

SEQ ID NO: 15569 - DNA, 26 bp, Homo sapiens
cactagggaatgtgctgatgacggtc

SEQ ID NO: 15570 - DNA, 26 bp, Homo sapiens
actagggaatgtgctgatgacggtcc

SEQ ID NO: 15571 - DNA, 26 bp, Homo sapiens
ctagggaatgtgctgatgacggtccc

SEQ ID NO: 15572 - DNA, 26 bp, Homo sapiens
tagggaatgtgctgatgacggtccca

SEQ ID NO: 15573 - DNA, 26 bp, Homo sapiens
agggaatgtgctgatgacggtcccat

SEQ ID NO: 15574 - DNA, 26 bp, Homo sapiens
gggaatgtgctgatgacggtcccatc

SEQ ID NO: 15575 - DNA, 26 bp, Homo sapiens
ggaatgtgctgatgacggtcccatct

SEQ ID NO: 15576 - DNA, 26 bp, Homo sapiens
gaatgtgctgatgacggtcccatctc

SEQ ID NO: 15577 - DNA, 26 bp, Homo sapiens
aatgtgctgatgacggtcccatctct

SEQ ID NO: 15578 - DNA, 26 bp, Homo sapiens
atgtgctgatgacggtcccatctctt

SEQ ID NO: 15579 - DNA, 26 bp, Homo sapiens
tgtgctgatgacggtcccatctcttc

SEQ ID NO: 15580 - DNA, 26 bp, Homo sapiens
gtgctgatgacggtcccatctcttca

SEQ ID NO: 15581 - DNA, 26 bp, Homo sapiens
tgctgatgacggtcccatctcttcat

SEQ ID NO: 15582 - DNA, 26 bp, Homo sapiens
gctgatgacggtcccatctcttcata

SEQ ID NO: 15583 - DNA, 26 bp, Homo sapiens
ctgatgacggtcccatctcttcatac

SEQ ID NO: 15584 - DNA, 26 bp, Homo sapiens
tgatgacggtcccatctcttcataca

SEQ ID NO: 15585 - DNA, 26 bp, Homo sapiens
gatgacggtcccatctcttcatacag

SEQ ID NO: 15586 - DNA, 26 bp, Homo sapiens
atgacggtcccatctcttcatacaga

SEQ ID NO: 15587 - DNA, 26 bp, Homo sapiens
tgacggtcccatctcttcatacagag

SEQ ID NO: 15588 - DNA, 26 bp, Homo sapiens
gacggtcccatctcttcatacagaga

SEQ ID NO: 15589 - DNA, 26 bp, Homo sapiens
acggtcccatctcttcatacagagag

SEQ ID NO: 15590 - DNA, 26 bp, Homo sapiens
cggtcccatctcttcatacagagagc

SEQ ID NO: 15591 - DNA, 26 bp, Homo sapiens
ggtcccatctcttcatacagagagcc

SEQ ID NO: 15592 - DNA, 26 bp, Homo sapiens
gtcccatctcttcatacagagagcct

SEQ ID NO: 15593 - DNA, 26 bp, Homo sapiens
tcccatctcttcatacagagagcctt

SEQ ID NO: 15594 - DNA, 26 bp, Homo sapiens
cccatctcttcatacagagagccttt

SEQ ID NO: 15595 - DNA, 26 bp, Homo sapiens
ccatctcttcatacagagagccttta

SEQ ID NO: 15596 - DNA, 26 bp, Homo sapiens
catctcttcatacagagagcctttaa

SEQ ID NO: 15597 - DNA, 26 bp, Homo sapiens
atctcttcatacagagagcctttaaa

SEQ ID NO: 15598 - DNA, 26 bp, Homo sapiens
tctcttcatacagagagcctttaaac

SEQ ID NO: 15599 - DNA, 26 bp, Homo sapiens
ctcttcatacagagagcctttaaaca

SEQ ID NO: 15600 - DNA, 26 bp, Homo sapiens
tcttcatacagagagcctttaaacaa

SEQ ID NO: 15601 - DNA, 26 bp, Homo sapiens
cttcatacagagagcctttaaacaag

SEQ ID NO: 15602 - DNA, 26 bp, Homo sapiens
ttcatacagagagcctttaaacaagg

SEQ ID NO: 15603 - DNA, 26 bp, Homo sapiens
tcatacagagagcctttaaacaagga

SEQ ID NO: 15604 - DNA, 26 bp, Homo sapiens
catacagagagcctttaaacaaggat

SEQ ID NO: 15605 - DNA, 26 bp, Homo sapiens
atacagagagcctttaaacaaggatg

SEQ ID NO: 15606 - DNA, 26 bp, Homo sapiens
tacagagagcctttaaacaaggatgt

SEQ ID NO: 15607 - DNA, 26 bp, Homo sapiens
acagagagcctttaaacaaggatgtg

SEQ ID NO: 15608 - DNA, 26 bp, Homo sapiens
cagagagcctttaaacaaggatgtgg

SEQ ID NO: 15609 - DNA, 26 bp, Homo sapiens
agagagcctttaaacaaggatgtggc

SEQ ID NO: 15610 - DNA, 26 bp, Homo sapiens
gagagcctttaaacaaggatgtggca

SEQ ID NO: 15611 - DNA, 26 bp, Homo sapiens
agagcctttaaacaaggatgtggcac

SEQ ID NO: 15612 - DNA, 26 bp, Homo sapiens
gagcctttaaacaaggatgtggcaca

SEQ ID NO: 15613 - DNA, 26 bp, Homo sapiens
agcctttaaacaaggatgtggcacat

SEQ ID NO: 15614 - DNA, 26 bp, Homo sapiens
gcctttaaacaaggatgtggcacata

SEQ ID NO: 15615 - DNA, 26 bp, Homo sapiens
cctttaaacaaggatgtggcacataa

SEQ ID NO: 15616 - DNA, 26 bp, Homo sapiens
ctttaaacaaggatgtggcacataag

SEQ ID NO: 15617 - DNA, 26 bp, Homo sapiens
tttaaacaaggatgtggcacataaga

SEQ ID NO: 15618 - DNA, 26 bp, Homo sapiens
ttaaacaaggatgtggcacataagaa

SEQ ID NO: 15619 - DNA, 26 bp, Homo sapiens
taaacaaggatgtggcacataagaac

SEQ ID NO: 15620 - DNA, 26 bp, Homo sapiens
aaacaaggatgtggcacataagaaca

SEQ ID NO: 15621 - DNA, 26 bp, Homo sapiens
aacaaggatgtggcacataagaacag

SEQ ID NO: 15622 - DNA, 26 bp, Homo sapiens
acaaggatgtggcacataagaacaga

SEQ ID NO: 15623 - DNA, 26 bp, Homo sapiens
caaggatgtggcacataagaacagag

SEQ ID NO: 15624 - DNA, 26 bp, Homo sapiens
aaggatgtggcacataagaacagagg

SEQ ID NO: 15625 - DNA, 26 bp, Homo sapiens
aggatgtggcacataagaacagaggc

SEQ ID NO: 15626 - DNA, 26 bp, Homo sapiens
ggatgtggcacataagaacagaggca

SEQ ID NO: 15627 - DNA, 26 bp, Homo sapiens
gatgtggcacataagaacagaggcat

SEQ ID NO: 15628 - DNA, 26 bp, Homo sapiens
atgtggcacataagaacagaggcata

SEQ ID NO: 15629 - DNA, 26 bp, Homo sapiens
tgtggcacataagaacagaggcatac

SEQ ID NO: 15630 - DNA, 26 bp, Homo sapiens
gtggcacataagaacagaggcataca

SEQ ID NO: 15631 - DNA, 26 bp, Homo sapiens
tggcacataagaacagaggcatacat

SEQ ID NO: 15632 - DNA, 26 bp, Homo sapiens
ggcacataagaacagaggcatacatt

SEQ ID NO: 15633 - DNA, 26 bp, Homo sapiens
gcacataagaacagaggcatacattc

SEQ ID NO: 15634 - DNA, 26 bp, Homo sapiens
cacataagaacagaggcatacattct

SEQ ID NO: 15635 - DNA, 26 bp, Homo sapiens
acataagaacagaggcatacattctt

SEQ ID NO: 15636 - DNA, 26 bp, Homo sapiens
cataagaacagaggcatacattcttc

SEQ ID NO: 15637 - DNA, 26 bp, Homo sapiens
ataagaacagaggcatacattcttcg

SEQ ID NO: 15638 - DNA, 26 bp, Homo sapiens
taagaacagaggcatacattcttcgg

SEQ ID NO: 15639 - DNA, 26 bp, Homo sapiens
aagaacagaggcatacattcttcggt

SEQ ID NO: 15640 - DNA, 26 bp, Homo sapiens
agaacagaggcatacattcttcggtt

SEQ ID NO: 15641 - DNA, 26 bp, Homo sapiens
gaacagaggcatacattcttcggtta

SEQ ID NO: 15642 - DNA, 26 bp, Homo sapiens
aacagaggcatacattcttcggttac

SEQ ID NO: 15643 - DNA, 26 bp, Homo sapiens
acagaggcatacattcttcggttact

SEQ ID NO: 15644 - DNA, 26 bp, Homo sapiens
cagaggcatacattcttcggttactt

SEQ ID NO: 15645 - DNA, 26 bp, Homo sapiens
agaggcatacattcttcggttactta

SEQ ID NO: 15646 - DNA, 26 bp, Homo sapiens
gaggcatacattcttcggttacttag

SEQ ID NO: 15647 - DNA, 26 bp, Homo sapiens
aggcatacattcttcggttacttaga

SEQ ID NO: 15648 - DNA, 26 bp, Homo sapiens
ggcatacattcttcggttacttagag

SEQ ID NO: 15649 - DNA, 26 bp, Homo sapiens
gcatacattcttcggttacttagagc

SEQ ID NO: 15650 - DNA, 26 bp, Homo sapiens
catacattcttcggttacttagagct

SEQ ID NO: 15651 - DNA, 26 bp, Homo sapiens
atacattcttcggttacttagagctc

SEQ ID NO: 15652 - DNA, 26 bp, Homo sapiens
tacattcttcggttacttagagctca

SEQ ID NO: 15653 - DNA, 26 bp, Homo sapiens
acattcttcggttacttagagctcag

SEQ ID NO: 15654 - DNA, 26 bp, Homo sapiens
cattcttcggttacttagagctcagg

SEQ ID NO: 15655 - DNA, 26 bp, Homo sapiens
attcttcggttacttagagctcaggt

SEQ ID NO: 15656 - DNA, 26 bp, Homo sapiens
ttcttcggttacttagagctcaggtt

SEQ ID NO: 15657 - DNA, 26 bp, Homo sapiens
tcttcggttacttagagctcaggttc

SEQ ID NO: 15658 - DNA, 26 bp, Homo sapiens
cttcggttacttagagctcaggttct

SEQ ID NO: 15659 - DNA, 26 bp, Homo sapiens
ttcggttacttagagctcaggttcta

SEQ ID NO: 15660 - DNA, 26 bp, Homo sapiens
tcggttacttagagctcaggttctac

SEQ ID NO: 15661 - DNA, 26 bp, Homo sapiens
cggttacttagagctcaggttctaca

SEQ ID NO: 15662 - DNA, 26 bp, Homo sapiens
ggttacttagagctcaggttctacag

SEQ ID NO: 15663 - DNA, 26 bp, Homo sapiens
gttacttagagctcaggttctacagt

SEQ ID NO: 15664 - DNA, 26 bp, Homo sapiens
ttacttagagctcaggttctacagtt

SEQ ID NO: 15665 - DNA, 26 bp, Homo sapiens
tacttagagctcaggttctacagtta

SEQ ID NO: 15666 - DNA, 26 bp, Homo sapiens
acttagagctcaggttctacagttaa

SEQ ID NO: 15667 - DNA, 26 bp, Homo sapiens
cttagagctcaggttctacagttaaa

SEQ ID NO: 15668 - DNA, 26 bp, Homo sapiens
ttagagctcaggttctacagttaaat

SEQ ID NO: 15669 - DNA, 26 bp, Homo sapiens
tagagctcaggttctacagttaaatt

SEQ ID NO: 15670 - DNA, 26 bp, Homo sapiens
agagctcaggttctacagttaaatta

SEQ ID NO: 15671 - DNA, 26 bp, Homo sapiens
gagctcaggttctacagttaaattac

SEQ ID NO: 15672 - DNA, 26 bp, Homo sapiens
agctcaggttctacagttaaattaca

SEQ ID NO: 15673 - DNA, 26 bp, Homo sapiens
gctcaggttctacagttaaattacat

SEQ ID NO: 15674 - DNA, 26 bp, Homo sapiens
ctcaggttctacagttaaattacatg

SEQ ID NO: 15675 - DNA, 26 bp, Homo sapiens
tcaggttctacagttaaattacatgg

SEQ ID NO: 15676 - DNA, 26 bp, Homo sapiens
caggttctacagttaaattacatgga

SEQ ID NO: 15677 - DNA, 26 bp, Homo sapiens
aggttctacagttaaattacatggat

SEQ ID NO: 15678 - DNA, 26 bp, Homo sapiens
ggttctacagttaaattacatggata

SEQ ID NO: 15679 - DNA, 26 bp, Homo sapiens
gttctacagttaaattacatggataa

SEQ ID NO: 15680 - DNA, 26 bp, Homo sapiens
ttctacagttaaattacatggataaa

SEQ ID NO: 15681 - DNA, 26 bp, Homo sapiens
tctacagttaaattacatggataaaa

SEQ ID NO: 15682 - DNA, 26 bp, Homo sapiens
ctacagttaaattacatggataaaag

SEQ ID NO: 15683 - DNA, 26 bp, Homo sapiens
tacagttaaattacatggataaaagg

SEQ ID NO: 15684 - DNA, 26 bp, Homo sapiens
acagttaaattacatggataaaagga

SEQ ID NO: 15685 - DNA, 26 bp, Homo sapiens
cagttaaattacatggataaaaggaa

SEQ ID NO: 15686 - DNA, 26 bp, Homo sapiens
agttaaattacatggataaaaggaag

SEQ ID NO: 15687 - DNA, 26 bp, Homo sapiens
gttaaattacatggataaaaggaagc

SEQ ID NO: 15688 - DNA, 26 bp, Homo sapiens
ttaaattacatggataaaaggaagca

SEQ ID NO: 15689 - DNA, 26 bp, Homo sapiens
taaattacatggataaaaggaagcat

SEQ ID NO: 15690 - DNA, 26 bp, Homo sapiens
aaattacatggataaaaggaagcata

SEQ ID NO: 15691 - DNA, 26 bp, Homo sapiens
aattacatggataaaaggaagcatac

SEQ ID NO: 15692 - DNA, 26 bp, Homo sapiens
attacatggataaaaggaagcatact

SEQ ID NO: 15693 - DNA, 26 bp, Homo sapiens
ttacatggataaaaggaagcatactc

SEQ ID NO: 15694 - DNA, 26 bp, Homo sapiens
tacatggataaaaggaagcatactct

SEQ ID NO: 15695 - DNA, 26 bp, Homo sapiens
acatggataaaaggaagcatactctt

SEQ ID NO: 15696 - DNA, 26 bp, Homo sapiens
catggataaaaggaagcatactcttc

SEQ ID NO: 15697 - DNA, 26 bp, Homo sapiens
atggataaaaggaagcatactcttct

SEQ ID NO: 15698 - DNA, 26 bp, Homo sapiens
tggataaaaggaagcatactcttctc

SEQ ID NO: 15699 - DNA, 26 bp, Homo sapiens
ggataaaaggaagcatactcttctcc

SEQ ID NO: 15700 - DNA, 26 bp, Homo sapiens
gataaaaggaagcatactcttctccc

SEQ ID NO: 15701 - DNA, 26 bp, Homo sapiens
ataaaaggaagcatactcttctcccc

SEQ ID NO: 15702 - DNA, 26 bp, Homo sapiens
taaaaggaagcatactcttctcccca

SEQ ID NO: 15703 - DNA, 26 bp, Homo sapiens
aaaaggaagcatactcttctccccaa

SEQ ID NO: 15704 - DNA, 26 bp, Homo sapiens
aaaggaagcatactcttctccccaag

SEQ ID NO: 15705 - DNA, 26 bp, Homo sapiens
aaggaagcatactcttctccccaaga

SEQ ID NO: 15706 - DNA, 26 bp, Homo sapiens
aggaagcatactcttctccccaagaa

SEQ ID NO: 15707 - DNA, 26 bp, Homo sapiens
ggaagcatactcttctccccaagaag

SEQ ID NO: 15708 - DNA, 26 bp, Homo sapiens
gaagcatactcttctccccaagaagc

SEQ ID NO: 15709 - DNA, 26 bp, Homo sapiens
aagcatactcttctccccaagaagca

SEQ ID NO: 15710 - DNA, 26 bp, Homo sapiens
agcatactcttctccccaagaagcag

SEQ ID NO: 15711 - DNA, 26 bp, Homo sapiens
gcatactcttctccccaagaagcagc

SEQ ID NO: 15712 - DNA, 26 bp, Homo sapiens
catactcttctccccaagaagcagca

SEQ ID NO: 15713 - DNA, 26 bp, Homo sapiens
atactcttctccccaagaagcagcaa

SEQ ID NO: 15714 - DNA, 26 bp, Homo sapiens
tactcttctccccaagaagcagcaat

SEQ ID NO: 15715 - DNA, 26 bp, Homo sapiens
actcttctccccaagaagcagcaatc

SEQ ID NO: 15716 - DNA, 26 bp, Homo sapiens
ctcttctccccaagaagcagcaatcc

SEQ ID NO: 15717 - DNA, 26 bp, Homo sapiens
tcttctccccaagaagcagcaatcca

SEQ ID NO: 15718 - DNA, 26 bp, Homo sapiens
cttctccccaagaagcagcaatccac

SEQ ID NO: 15719 - DNA, 26 bp, Homo sapiens
ttctccccaagaagcagcaatccact

SEQ ID NO: 15720 - DNA, 26 bp, Homo sapiens
tctccccaagaagcagcaatccactg

SEQ ID NO: 15721 - DNA, 26 bp, Homo sapiens
ctccccaagaagcagcaatccactgt

SEQ ID NO: 15722 - DNA, 26 bp, Homo sapiens
tccccaagaagcagcaatccactgtt

SEQ ID NO: 15723 - DNA, 26 bp, Homo sapiens
ccccaagaagcagcaatccactgttg

SEQ ID NO: 15724 - DNA, 26 bp, Homo sapiens
cccaagaagcagcaatccactgttgc

SEQ ID NO: 15725 - DNA, 26 bp, Homo sapiens
ccaagaagcagcaatccactgttgcc

SEQ ID NO: 15726 - DNA, 26 bp, Homo sapiens
caagaagcagcaatccactgttgcct

SEQ ID NO: 15727 - DNA, 26 bp, Homo sapiens
aagaagcagcaatccactgttgcctc

SEQ ID NO: 15728 - DNA, 26 bp, Homo sapiens
agaagcagcaatccactgttgcctct

SEQ ID NO: 15729 - DNA, 26 bp, Homo sapiens
gaagcagcaatccactgttgcctctc

SEQ ID NO: 15730 - DNA, 26 bp, Homo sapiens
aagcagcaatccactgttgcctctcc

SEQ ID NO: 15731 - DNA, 26 bp, Homo sapiens
agcagcaatccactgttgcctctcca

SEQ ID NO: 15732 - DNA, 26 bp, Homo sapiens
gcagcaatccactgttgcctctccag

SEQ ID NO: 15733 - DNA, 26 bp, Homo sapiens
cagcaatccactgttgcctctccagc

SEQ ID NO: 15734 - DNA, 26 bp, Homo sapiens
agcaatccactgttgcctctccagct

SEQ ID NO: 15735 - DNA, 26 bp, Homo sapiens
gcaatccactgttgcctctccagctt

SEQ ID NO: 15736 - DNA, 26 bp, Homo sapiens
caatccactgttgcctctccagcttc

SEQ ID NO: 15737 - DNA, 26 bp, Homo sapiens
aatccactgttgcctctccagcttct

SEQ ID NO: 15738 - DNA, 26 bp, Homo sapiens
atccactgttgcctctccagcttctg

SEQ ID NO: 15739 - DNA, 26 bp, Homo sapiens
tccactgttgcctctccagcttctga

SEQ ID NO: 15740 - DNA, 26 bp, Homo sapiens
ccactgttgcctctccagcttctgac

SEQ ID NO: 15741 - DNA, 26 bp, Homo sapiens
cactgttgcctctccagcttctgact

SEQ ID NO: 15742 - DNA, 26 bp, Homo sapiens
actgttgcctctccagcttctgactg

SEQ ID NO: 15743 - DNA, 26 bp, Homo sapiens
ctgttgcctctccagcttctgactgg

SEQ ID NO: 15744 - DNA, 26 bp, Homo sapiens
tgttgcctctccagcttctgactggc

SEQ ID NO: 15745 - DNA, 26 bp, Homo sapiens
gttgcctctccagcttctgactggct

SEQ ID NO: 15746 - DNA, 26 bp, Homo sapiens
ttgcctctccagcttctgactggctg

SEQ ID NO: 15747 - DNA, 26 bp, Homo sapiens
tgcctctccagcttctgactggctgc

SEQ ID NO: 15748 - DNA, 26 bp, Homo sapiens
gcctctccagcttctgactggctgca

SEQ ID NO: 15749 - DNA, 26 bp, Homo sapiens
cctctccagcttctgactggctgcag

SEQ ID NO: 15750 - DNA, 26 bp, Homo sapiens
ctctccagcttctgactggctgcaga

SEQ ID NO: 15751 - DNA, 26 bp, Homo sapiens
tctccagcttctgactggctgcagaa

SEQ ID NO: 15752 - DNA, 26 bp, Homo sapiens
ctccagcttctgactggctgcagaag

SEQ ID NO: 15753 - DNA, 26 bp, Homo sapiens
tccagcttctgactggctgcagaagg

SEQ ID NO: 15754 - DNA, 26 bp, Homo sapiens
ccagcttctgactggctgcagaaggt

SEQ ID NO: 15755 - DNA, 26 bp, Homo sapiens
cagcttctgactggctgcagaaggtg

SEQ ID NO: 15756 - DNA, 26 bp, Homo sapiens
agcttctgactggctgcagaaggtgc

SEQ ID NO: 15757 - DNA, 26 bp, Homo sapiens
gcttctgactggctgcagaaggtgca

SEQ ID NO: 15758 - DNA, 26 bp, Homo sapiens
cttctgactggctgcagaaggtgcag

SEQ ID NO: 15759 - DNA, 26 bp, Homo sapiens
ttctgactggctgcagaaggtgcaga

SEQ ID NO: 15760 - DNA, 26 bp, Homo sapiens
tctgactggctgcagaaggtgcagac

SEQ ID NO: 15761 - DNA, 26 bp, Homo sapiens
ctgactggctgcagaaggtgcagaca

SEQ ID NO: 15762 - DNA, 26 bp, Homo sapiens
tgactggctgcagaaggtgcagacat

SEQ ID NO: 15763 - DNA, 26 bp, Homo sapiens
gactggctgcagaaggtgcagacatc

SEQ ID NO: 15764 - DNA, 26 bp, Homo sapiens
actggctgcagaaggtgcagacatcc

SEQ ID NO: 15765 - DNA, 26 bp, Homo sapiens
ctggctgcagaaggtgcagacatcct

SEQ ID NO: 15766 - DNA, 26 bp, Homo sapiens
tggctgcagaaggtgcagacatccta

SEQ ID NO: 15767 - DNA, 26 bp, Homo sapiens
ggctgcagaaggtgcagacatcctaa

SEQ ID NO: 15768 - DNA, 26 bp, Homo sapiens
gctgcagaaggtgcagacatcctaaa

SEQ ID NO: 15769 - DNA, 26 bp, Homo sapiens
ctgcagaaggtgcagacatcctaaat

SEQ ID NO: 15770 - DNA, 26 bp, Homo sapiens
tgcagaaggtgcagacatcctaaata

SEQ ID NO: 15771 - DNA, 26 bp, Homo sapiens
gcagaaggtgcagacatcctaaatac

SEQ ID NO: 15772 - DNA, 26 bp, Homo sapiens
cagaaggtgcagacatcctaaataca

SEQ ID NO: 15773 - DNA, 26 bp, Homo sapiens
agaaggtgcagacatcctaaatacat

SEQ ID NO: 15774 - DNA, 26 bp, Homo sapiens
gaaggtgcagacatcctaaatacata

SEQ ID NO: 15775 - DNA, 26 bp, Homo sapiens
aaggtgcagacatcctaaatacatag

SEQ ID NO: 15776 - DNA, 26 bp, Homo sapiens
aggtgcagacatcctaaatacataga

SEQ ID NO: 15777 - DNA, 26 bp, Homo sapiens
ggtgcagacatcctaaatacatagac

SEQ ID NO: 15778 - DNA, 26 bp, Homo sapiens
gtgcagacatcctaaatacatagacc

SEQ ID NO: 15779 - DNA, 26 bp, Homo sapiens
tgcagacatcctaaatacatagaccc

SEQ ID NO: 15780 - DNA, 26 bp, Homo sapiens
gcagacatcctaaatacatagaccct

SEQ ID NO: 15781 - DNA, 26 bp, Homo sapiens
cagacatcctaaatacatagacccta

SEQ ID NO: 15782 - DNA, 26 bp, Homo sapiens
agacatcctaaatacatagaccctaa

SEQ ID NO: 15783 - DNA, 26 bp, Homo sapiens
gacatcctaaatacatagaccctaac

SEQ ID NO: 15784 - DNA, 26 bp, Homo sapiens
acatcctaaatacatagaccctaact

SEQ ID NO: 15785 - DNA, 26 bp, Homo sapiens
catcctaaatacatagaccctaactt

SEQ ID NO: 15786 - DNA, 26 bp, Homo sapiens
atcctaaatacatagaccctaacttg

SEQ ID NO: 15787 - DNA, 26 bp, Homo sapiens
tcctaaatacatagaccctaacttgc

SEQ ID NO: 15788 - DNA, 26 bp, Homo sapiens
cctaaatacatagaccctaacttgca

SEQ ID NO: 15789 - DNA, 26 bp, Homo sapiens
ctaaatacatagaccctaacttgcat

SEQ ID NO: 15790 - DNA, 26 bp, Homo sapiens
taaatacatagaccctaacttgcata

SEQ ID NO: 15791 - DNA, 26 bp, Homo sapiens
aaatacatagaccctaacttgcataa

SEQ ID NO: 15792 - DNA, 26 bp, Homo sapiens
aatacatagaccctaacttgcataaa

SEQ ID NO: 15793 - DNA, 26 bp, Homo sapiens
atacatagaccctaacttgcataaat

SEQ ID NO: 15794 - DNA, 26 bp, Homo sapiens
tacatagaccctaacttgcataaata

SEQ ID NO: 15795 - DNA, 26 bp, Homo sapiens
acatagaccctaacttgcataaatag

SEQ ID NO: 15796 - DNA, 26 bp, Homo sapiens
catagaccctaacttgcataaatagc

SEQ ID NO: 15797 - DNA, 26 bp, Homo sapiens
atagaccctaacttgcataaatagca

SEQ ID NO: 15798 - DNA, 26 bp, Homo sapiens
tagaccctaacttgcataaatagcat

SEQ ID NO: 15799 - DNA, 26 bp, Homo sapiens
agaccctaacttgcataaatagcatc

SEQ ID NO: 15800 - DNA, 26 bp, Homo sapiens
gaccctaacttgcataaatagcatca

SEQ ID NO: 15801 - DNA, 26 bp, Homo sapiens
accctaacttgcataaatagcatcaa

SEQ ID NO: 15802 - DNA, 26 bp, Homo sapiens
ccctaacttgcataaatagcatcaaa

SEQ ID NO: 15803 - DNA, 26 bp, Homo sapiens
cctaacttgcataaatagcatcaaac

SEQ ID NO: 15804 - DNA, 26 bp, Homo sapiens
ctaacttgcataaatagcatcaaaca

SEQ ID NO: 15805 - DNA, 26 bp, Homo sapiens
taacttgcataaatagcatcaaacag

SEQ ID NO: 15806 - DNA, 26 bp, Homo sapiens
aacttgcataaatagcatcaaacaga

SEQ ID NO: 15807 - DNA, 26 bp, Homo sapiens
acttgcataaatagcatcaaacagag

SEQ ID NO: 15808 - DNA, 26 bp, Homo sapiens
cttgcataaatagcatcaaacagagc

SEQ ID NO: 15809 - DNA, 26 bp, Homo sapiens
ttgcataaatagcatcaaacagagcc

SEQ ID NO: 15810 - DNA, 26 bp, Homo sapiens
tgcataaatagcatcaaacagagcca

SEQ ID NO: 15811 - DNA, 26 bp, Homo sapiens
gcataaatagcatcaaacagagccag

SEQ ID NO: 15812 - DNA, 26 bp, Homo sapiens
cataaatagcatcaaacagagccagc

SEQ ID NO: 15813 - DNA, 26 bp, Homo sapiens
ataaatagcatcaaacagagccagct

SEQ ID NO: 15814 - DNA, 26 bp, Homo sapiens
taaatagcatcaaacagagccagctt

SEQ ID NO: 15815 - DNA, 26 bp, Homo sapiens
aaatagcatcaaacagagccagctta

SEQ ID NO: 15816 - DNA, 26 bp, Homo sapiens
aatagcatcaaacagagccagcttag

SEQ ID NO: 15817 - DNA, 26 bp, Homo sapiens
atagcatcaaacagagccagcttagc

SEQ ID NO: 15818 - DNA, 26 bp, Homo sapiens
tagcatcaaacagagccagcttagcg

SEQ ID NO: 15819 - DNA, 26 bp, Homo sapiens
agcatcaaacagagccagcttagcga

SEQ ID NO: 15820 - DNA, 26 bp, Homo sapiens
gcatcaaacagagccagcttagcgat

SEQ ID NO: 15821 - DNA, 26 bp, Homo sapiens
catcaaacagagccagcttagcgatc

SEQ ID NO: 15822 - DNA, 26 bp, Homo sapiens
atcaaacagagccagcttagcgatcc

SEQ ID NO: 15823 - DNA, 26 bp, Homo sapiens
tcaaacagagccagcttagcgatcca

SEQ ID NO: 15824 - DNA, 26 bp, Homo sapiens
caaacagagccagcttagcgatccaa

SEQ ID NO: 15825 - DNA, 26 bp, Homo sapiens
aaacagagccagcttagcgatccaag

SEQ ID NO: 15826 - DNA, 26 bp, Homo sapiens
aacagagccagcttagcgatccaagg

SEQ ID NO: 15827 - DNA, 26 bp, Homo sapiens
acagagccagcttagcgatccaaggc

SEQ ID NO: 15828 - DNA, 26 bp, Homo sapiens
cagagccagcttagcgatccaaggcc

SEQ ID NO: 15829 - DNA, 26 bp, Homo sapiens
agagccagcttagcgatccaaggccc

SEQ ID NO: 15830 - DNA, 26 bp, Homo sapiens
gagccagcttagcgatccaaggccca

SEQ ID NO: 15831 - DNA, 26 bp, Homo sapiens
agccagcttagcgatccaaggcccac

SEQ ID NO: 15832 - DNA, 26 bp, Homo sapiens
gccagcttagcgatccaaggcccact

SEQ ID NO: 15833 - DNA, 26 bp, Homo sapiens
ccagcttagcgatccaaggcccactt

SEQ ID NO: 15834 - DNA, 26 bp, Homo sapiens
cagcttagcgatccaaggcccacttg

SEQ ID NO: 15835 - DNA, 26 bp, Homo sapiens
agcttagcgatccaaggcccacttga

SEQ ID NO: 15836 - DNA, 26 bp, Homo sapiens
gcttagcgatccaaggcccacttgat

SEQ ID NO: 15837 - DNA, 26 bp, Homo sapiens
cttagcgatccaaggcccacttgatc

SEQ ID NO: 15838 - DNA, 26 bp, Homo sapiens
ttagcgatccaaggcccacttgatct

SEQ ID NO: 15839 - DNA, 26 bp, Homo sapiens
tagcgatccaaggcccacttgatctt

SEQ ID NO: 15840 - DNA, 26 bp, Homo sapiens
agcgatccaaggcccacttgatcttt

SEQ ID NO: 15841 - DNA, 26 bp, Homo sapiens
gcgatccaaggcccacttgatcttta

SEQ ID NO: 15842 - DNA, 26 bp, Homo sapiens
cgatccaaggcccacttgatctttag

SEQ ID NO: 15843 - DNA, 26 bp, Homo sapiens
gatccaaggcccacttgatctttaga

SEQ ID NO: 15844 - DNA, 26 bp, Homo sapiens
atccaaggcccacttgatctttagac

SEQ ID NO: 15845 - DNA, 26 bp, Homo sapiens
tccaaggcccacttgatctttagacc

SEQ ID NO: 15846 - DNA, 26 bp, Homo sapiens
ccaaggcccacttgatctttagaccc

SEQ ID NO: 15847 - DNA, 26 bp, Homo sapiens
caaggcccacttgatctttagaccct

SEQ ID NO: 15848 - DNA, 26 bp, Homo sapiens
aaggcccacttgatctttagaccctg

SEQ ID NO: 15849 - DNA, 26 bp, Homo sapiens
aggcccacttgatctttagaccctga

SEQ ID NO: 15850 - DNA, 26 bp, Homo sapiens
ggcccacttgatctttagaccctgaa

SEQ ID NO: 15851 - DNA, 26 bp, Homo sapiens
gcccacttgatctttagaccctgaag

SEQ ID NO: 15852 - DNA, 26 bp, Homo sapiens
cccacttgatctttagaccctgaaga

SEQ ID NO: 15853 - DNA, 26 bp, Homo sapiens
ccacttgatctttagaccctgaagag

SEQ ID NO: 15854 - DNA, 26 bp, Homo sapiens
cacttgatctttagaccctgaagagt

SEQ ID NO: 15855 - DNA, 26 bp, Homo sapiens
acttgatctttagaccctgaagagta

SEQ ID NO: 15856 - DNA, 26 bp, Homo sapiens
cttgatctttagaccctgaagagtag

SEQ ID NO: 15857 - DNA, 26 bp, Homo sapiens
ttgatctttagaccctgaagagtagg

SEQ ID NO: 15858 - DNA, 26 bp, Homo sapiens
tgatctttagaccctgaagagtaggc

SEQ ID NO: 15859 - DNA, 26 bp, Homo sapiens
gatctttagaccctgaagagtaggcg

SEQ ID NO: 15860 - DNA, 26 bp, Homo sapiens
atctttagaccctgaagagtaggcgc

SEQ ID NO: 15861 - DNA, 26 bp, Homo sapiens
tctttagaccctgaagagtaggcgca

SEQ ID NO: 15862 - DNA, 26 bp, Homo sapiens
ctttagaccctgaagagtaggcgcat

SEQ ID NO: 15863 - DNA, 26 bp, Homo sapiens
tttagaccctgaagagtaggcgcatc

SEQ ID NO: 15864 - DNA, 26 bp, Homo sapiens
ttagaccctgaagagtaggcgcatcc

SEQ ID NO: 15865 - DNA, 26 bp, Homo sapiens
tagaccctgaagagtaggcgcatcct

SEQ ID NO: 15866 - DNA, 26 bp, Homo sapiens
agaccctgaagagtaggcgcatccta

SEQ ID NO: 15867 - DNA, 26 bp, Homo sapiens
gaccctgaagagtaggcgcatcctaa

SEQ ID NO: 15868 - DNA, 26 bp, Homo sapiens
accctgaagagtaggcgcatcctaaa

SEQ ID NO: 15869 - DNA, 26 bp, Homo sapiens
ccctgaagagtaggcgcatcctaaat

SEQ ID NO: 15870 - DNA, 26 bp, Homo sapiens
cctgaagagtaggcgcatcctaaata

SEQ ID NO: 15871 - DNA, 26 bp, Homo sapiens
ctgaagagtaggcgcatcctaaatac

SEQ ID NO: 15872 - DNA, 26 bp, Homo sapiens
tgaagagtaggcgcatcctaaataca

SEQ ID NO: 15873 - DNA, 26 bp, Homo sapiens
gaagagtaggcgcatcctaaatacat

SEQ ID NO: 15874 - DNA, 26 bp, Homo sapiens
aagagtaggcgcatcctaaatacata

SEQ ID NO: 15875 - DNA, 26 bp, Homo sapiens
agagtaggcgcatcctaaatacatag

SEQ ID NO: 15876 - DNA, 26 bp, Homo sapiens
gagtaggcgcatcctaaatacataga

SEQ ID NO: 15877 - DNA, 26 bp, Homo sapiens
agtaggcgcatcctaaatacatagac

SEQ ID NO: 15878 - DNA, 26 bp, Homo sapiens
gtaggcgcatcctaaatacatagacc

SEQ ID NO: 15879 - DNA, 26 bp, Homo sapiens
taggcgcatcctaaatacatagaccc

SEQ ID NO: 15880 - DNA, 26 bp, Homo sapiens
aggcgcatcctaaatacatagaccct

SEQ ID NO: 15881 - DNA, 26 bp, Homo sapiens
ggcgcatcctaaatacatagacccta

SEQ ID NO: 15882 - DNA, 26 bp, Homo sapiens
gcgcatcctaaatacatagaccctaa

SEQ ID NO: 15883 - DNA, 26 bp, Homo sapiens
cgcatcctaaatacatagaccctaac

SEQ ID NO: 15884 - DNA, 26 bp, Homo sapiens
gcatcctaaatacatagaccctaact

SEQ ID NO: 15885 - DNA, 26 bp, Homo sapiens
catcctaaatacatagaccctaactt

SEQ ID NO: 15886 - DNA, 26 bp, Homo sapiens
atcctaaatacatagaccctaacttg

SEQ ID NO: 15887 - DNA, 26 bp, Homo sapiens
tcctaaatacatagaccctaacttgc

SEQ ID NO: 15888 - DNA, 26 bp, Homo sapiens
cctaaatacatagaccctaacttgca

SEQ ID NO: 15889 - DNA, 26 bp, Homo sapiens
ctaaatacatagaccctaacttgcat

SEQ ID NO: 15890 - DNA, 26 bp, Homo sapiens
taaatacatagaccctaacttgcata

SEQ ID NO: 15891 - DNA, 26 bp, Homo sapiens
aaatacatagaccctaacttgcataa

SEQ ID NO: 15892 - DNA, 26 bp, Homo sapiens
aatacatagaccctaacttgcataaa

SEQ ID NO: 15893 - DNA, 26 bp, Homo sapiens
atacatagaccctaacttgcataaat

SEQ ID NO: 15894 - DNA, 26 bp, Homo sapiens
tacatagaccctaacttgcataaata

SEQ ID NO: 15895 - DNA, 26 bp, Homo sapiens
acatagaccctaacttgcataaatag

SEQ ID NO: 15896 - DNA, 26 bp, Homo sapiens
catagaccctaacttgcataaatagc

SEQ ID NO: 15897 - DNA, 26 bp, Homo sapiens
atagaccctaacttgcataaatagca

SEQ ID NO: 15898 - DNA, 26 bp, Homo sapiens
tagaccctaacttgcataaatagcat

SEQ ID NO: 15899 - DNA, 26 bp, Homo sapiens
agaccctaacttgcataaatagcatc

SEQ ID NO: 15900 - DNA, 26 bp, Homo sapiens
gaccctaacttgcataaatagcatca

SEQ ID NO: 15901 - DNA, 26 bp, Homo sapiens
accctaacttgcataaatagcatcaa

SEQ ID NO: 15902 - DNA, 26 bp, Homo sapiens
ccctaacttgcataaatagcatcaaa

SEQ ID NO: 15903 - DNA, 26 bp, Homo sapiens
cctaacttgcataaatagcatcaaac

SEQ ID NO: 15904 - DNA, 26 bp, Homo sapiens
ctaacttgcataaatagcatcaaaca

SEQ ID NO: 15905 - DNA, 26 bp, Homo sapiens
taacttgcataaatagcatcaaacag

SEQ ID NO: 15906 - DNA, 26 bp, Homo sapiens
aacttgcataaatagcatcaaacaga

SEQ ID NO: 15907 - DNA, 26 bp, Homo sapiens
acttgcataaatagcatcaaacagag

SEQ ID NO: 15908 - DNA, 26 bp, Homo sapiens
cttgcataaatagcatcaaacagagc

SEQ ID NO: 15909 - DNA, 26 bp, Homo sapiens
ttgcataaatagcatcaaacagagcc

SEQ ID NO: 15910 - DNA, 26 bp, Homo sapiens
tgcataaatagcatcaaacagagcca

SEQ ID NO: 15911 - DNA, 26 bp, Homo sapiens
gcataaatagcatcaaacagagccag

SEQ ID NO: 15912 - DNA, 26 bp, Homo sapiens
cataaatagcatcaaacagagccagc

SEQ ID NO: 15913 - DNA, 26 bp, Homo sapiens
ataaatagcatcaaacagagccagct

SEQ ID NO: 15914 - DNA, 26 bp, Homo sapiens
taaatagcatcaaacagagccagctt

SEQ ID NO: 15915 - DNA, 26 bp, Homo sapiens
aaatagcatcaaacagagccagctta

SEQ ID NO: 15916 - DNA, 26 bp, Homo sapiens
aatagcatcaaacagagccagcttag

SEQ ID NO: 15917 - DNA, 26 bp, Homo sapiens
atagcatcaaacagagccagcttagc

SEQ ID NO: 15918 - DNA, 26 bp, Homo sapiens
tagcatcaaacagagccagcttagcg

SEQ ID NO: 15919 - DNA, 26 bp, Homo sapiens
agcatcaaacagagccagcttagcga

SEQ ID NO: 15920 - DNA, 26 bp, Homo sapiens
gcatcaaacagagccagcttagcgat

SEQ ID NO: 15921 - DNA, 26 bp, Homo sapiens
catcaaacagagccagcttagcgatc

SEQ ID NO: 15922 - DNA, 26 bp, Homo sapiens
atcaaacagagccagcttagcgatcc

SEQ ID NO: 15923 - DNA, 26 bp, Homo sapiens
tcaaacagagccagcttagcgatcca

SEQ ID NO: 15924 - DNA, 26 bp, Homo sapiens
caaacagagccagcttagcgatccaa

SEQ ID NO: 15925 - DNA, 26 bp, Homo sapiens
aaacagagccagcttagcgatccaag

SEQ ID NO: 15926 - DNA, 26 bp, Homo sapiens
aacagagccagcttagcgatccaagg

SEQ ID NO: 15927 - DNA, 26 bp, Homo sapiens
acagagccagcttagcgatccaaggc

SEQ ID NO: 15928 - DNA, 26 bp, Homo sapiens
cagagccagcttagcgatccaaggcc

SEQ ID NO: 15929 - DNA, 26 bp, Homo sapiens
agagccagcttagcgatccaaggccc

SEQ ID NO: 15930 - DNA, 26 bp, Homo sapiens
gagccagcttagcgatccaaggccca

SEQ ID NO: 15931 - DNA, 26 bp, Homo sapiens
agccagcttagcgatccaaggcccac

SEQ ID NO: 15932 - DNA, 26 bp, Homo sapiens
gccagcttagcgatccaaggcccact

SEQ ID NO: 15933 - DNA, 26 bp, Homo sapiens
ccagcttagcgatccaaggcccactt

SEQ ID NO: 15934 - DNA, 26 bp, Homo sapiens
cagcttagcgatccaaggcccacttg

SEQ ID NO: 15935 - DNA, 26 bp, Homo sapiens
agcttagcgatccaaggcccacttga

SEQ ID NO: 15936 - DNA, 26 bp, Homo sapiens
gcttagcgatccaaggcccacttgat

SEQ ID NO: 15937 - DNA, 26 bp, Homo sapiens
cttagcgatccaaggcccacttgatc

SEQ ID NO: 15938 - DNA, 26 bp, Homo sapiens
ttagcgatccaaggcccacttgatct

SEQ ID NO: 15939 - DNA, 26 bp, Homo sapiens
tagcgatccaaggcccacttgatctt

SEQ ID NO: 15940 - DNA, 26 bp, Homo sapiens
agcgatccaaggcccacttgatcttt

SEQ ID NO: 15941 - DNA, 26 bp, Homo sapiens
gcgatccaaggcccacttgatcttta

SEQ ID NO: 15942 - DNA, 26 bp, Homo sapiens
cgatccaaggcccacttgatctttag

SEQ ID NO: 15943 - DNA, 26 bp, Homo sapiens
gatccaaggcccacttgatctttaga

SEQ ID NO: 15944 - DNA, 26 bp, Homo sapiens
atccaaggcccacttgatctttagac

SEQ ID NO: 15945 - DNA, 26 bp, Homo sapiens
tccaaggcccacttgatctttagacc

SEQ ID NO: 15946 - DNA, 26 bp, Homo sapiens
ccaaggcccacttgatctttagaccc

SEQ ID NO: 15947 - DNA, 26 bp, Homo sapiens
caaggcccacttgatctttagaccct

SEQ ID NO: 15948 - DNA, 26 bp, Homo sapiens
aaggcccacttgatctttagaccctg

SEQ ID NO: 15949 - DNA, 26 bp, Homo sapiens
aggcccacttgatctttagaccctga

SEQ ID NO: 15950 - DNA, 26 bp, Homo sapiens
ggcccacttgatctttagaccctgaa

SEQ ID NO: 15951 - DNA, 26 bp, Homo sapiens
gcccacttgatctttagaccctgaag

SEQ ID NO: 15952 - DNA, 26 bp, Homo sapiens
cccacttgatctttagaccctgaaga

SEQ ID NO: 15953 - DNA, 26 bp, Homo sapiens
ccacttgatctttagaccctgaagag

SEQ ID NO: 15954 - DNA, 26 bp, Homo sapiens
cacttgatctttagaccctgaagagt

SEQ ID NO: 15955 - DNA, 26 bp, Homo sapiens
acttgatctttagaccctgaagagta

SEQ ID NO: 15956 - DNA, 26 bp, Homo sapiens
cttgatctttagaccctgaagagtag

SEQ ID NO: 15957 - DNA, 26 bp, Homo sapiens
ttgatctttagaccctgaagagtagg

SEQ ID NO: 15958 - DNA, 26 bp, Homo sapiens
tgatctttagaccctgaagagtaggc

SEQ ID NO: 15959 - DNA, 26 bp, Homo sapiens
gatctttagaccctgaagagtaggcg

SEQ ID NO: 15960 - DNA, 26 bp, Homo sapiens
atctttagaccctgaagagtaggcgc

SEQ ID NO: 15961 - DNA, 26 bp, Homo sapiens
tctttagaccctgaagagtaggcgcc

SEQ ID NO: 15962 - DNA, 26 bp, Homo sapiens
ctttagaccctgaagagtaggcgccc

SEQ ID NO: 15963 - DNA, 26 bp, Homo sapiens
tttagaccctgaagagtaggcgccct

SEQ ID NO: 15964 - DNA, 26 bp, Homo sapiens
ttagaccctgaagagtaggcgccctt

SEQ ID NO: 15965 - DNA, 26 bp, Homo sapiens
tagaccctgaagagtaggcgcccttt

SEQ ID NO: 15966 - DNA, 26 bp, Homo sapiens
agaccctgaagagtaggcgccctttc

SEQ ID NO: 15967 - DNA, 26 bp, Homo sapiens
gaccctgaagagtaggcgccctttcc

SEQ ID NO: 15968 - DNA, 26 bp, Homo sapiens
accctgaagagtaggcgccctttcct

SEQ ID NO: 15969 - DNA, 26 bp, Homo sapiens
ccctgaagagtaggcgccctttccta

SEQ ID NO: 15970 - DNA, 26 bp, Homo sapiens
cctgaagagtaggcgccctttcctac

SEQ ID NO: 15971 - DNA, 26 bp, Homo sapiens
ctgaagagtaggcgccctttcctacc

SEQ ID NO: 15972 - DNA, 26 bp, Homo sapiens
tgaagagtaggcgccctttcctaccc

SEQ ID NO: 15973 - DNA, 26 bp, Homo sapiens
gaagagtaggcgccctttcctaccct

SEQ ID NO: 15974 - DNA, 26 bp, Homo sapiens
aagagtaggcgccctttcctaccctg

SEQ ID NO: 15975 - DNA, 26 bp, Homo sapiens
agagtaggcgccctttcctaccctgt

SEQ ID NO: 15976 - DNA, 26 bp, Homo sapiens
gagtaggcgccctttcctaccctgtc

SEQ ID NO: 15977 - DNA, 26 bp, Homo sapiens
agtaggcgccctttcctaccctgtct

SEQ ID NO: 15978 - DNA, 26 bp, Homo sapiens
gtaggcgccctttcctaccctgtctc

SEQ ID NO: 15979 - DNA, 26 bp, Homo sapiens
taggcgccctttcctaccctgtctcc

SEQ ID NO: 15980 - DNA, 26 bp, Homo sapiens
aggcgccctttcctaccctgtctccc

SEQ ID NO: 15981 - DNA, 26 bp, Homo sapiens
ggcgccctttcctaccctgtctccct

SEQ ID NO: 15982 - DNA, 26 bp, Homo sapiens
gcgccctttcctaccctgtctcccta

SEQ ID NO: 15983 - DNA, 26 bp, Homo sapiens
cgccctttcctaccctgtctccctat

SEQ ID NO: 15984 - DNA, 26 bp, Homo sapiens
gccctttcctaccctgtctccctatt

SEQ ID NO: 15985 - DNA, 26 bp, Homo sapiens
ccctttcctaccctgtctccctattc

SEQ ID NO: 15986 - DNA, 26 bp, Homo sapiens
cctttcctaccctgtctccctattcc

SEQ ID NO: 15987 - DNA, 26 bp, Homo sapiens
ctttcctaccctgtctccctattccc

SEQ ID NO: 15988 - DNA, 26 bp, Homo sapiens
tttcctaccctgtctccctattccca

SEQ ID NO: 15989 - DNA, 26 bp, Homo sapiens
ttcctaccctgtctccctattcccat

SEQ ID NO: 15990 - DNA, 26 bp, Homo sapiens
tcctaccctgtctccctattcccatc

SEQ ID NO: 15991 - DNA, 26 bp, Homo sapiens
cctaccctgtctccctattcccatca

SEQ ID NO: 15992 - DNA, 26 bp, Homo sapiens
ctaccctgtctccctattcccatcat

SEQ ID NO: 15993 - DNA, 26 bp, Homo sapiens
taccctgtctccctattcccatcatg

SEQ ID NO: 15994 - DNA, 26 bp, Homo sapiens
accctgtctccctattcccatcatgc

SEQ ID NO: 15995 - DNA, 26 bp, Homo sapiens
ccctgtctccctattcccatcatgct

SEQ ID NO: 15996 - DNA, 26 bp, Homo sapiens
cctgtctccctattcccatcatgctc

SEQ ID NO: 15997 - DNA, 26 bp, Homo sapiens
ctgtctccctattcccatcatgctca

SEQ ID NO: 15998 - DNA, 26 bp, Homo sapiens
tgtctccctattcccatcatgctcag

SEQ ID NO: 15999 - DNA, 26 bp, Homo sapiens
gtctccctattcccatcatgctcaga

SEQ ID NO: 16000 - DNA, 26 bp, Homo sapiens
tctccctattcccatcatgctcagac

SEQ ID NO: 16001 - DNA, 26 bp, Homo sapiens
ctccctattcccatcatgctcagacc

SEQ ID NO: 16002 - DNA, 26 bp, Homo sapiens
tccctattcccatcatgctcagaccc

SEQ ID NO: 16003 - DNA, 26 bp, Homo sapiens
ccctattcccatcatgctcagacccc

SEQ ID NO: 16004 - DNA, 26 bp, Homo sapiens
cctattcccatcatgctcagacccca

SEQ ID NO: 16005 - DNA, 26 bp, Homo sapiens
ctattcccatcatgctcagaccccag

SEQ ID NO: 16006 - DNA, 26 bp, Homo sapiens
tattcccatcatgctcagaccccagg

SEQ ID NO: 16007 - DNA, 26 bp, Homo sapiens
attcccatcatgctcagaccccaggc

SEQ ID NO: 16008 - DNA, 26 bp, Homo sapiens
ttcccatcatgctcagaccccaggca

SEQ ID NO: 16009 - DNA, 26 bp, Homo sapiens
tcccatcatgctcagaccccaggcaa

SEQ ID NO: 16010 - DNA, 26 bp, Homo sapiens
cccatcatgctcagaccccaggcaag

SEQ ID NO: 16011 - DNA, 26 bp, Homo sapiens
ccatcatgctcagaccccaggcaagt

SEQ ID NO: 16012 - DNA, 26 bp, Homo sapiens
catcatgctcagaccccaggcaagtt

SEQ ID NO: 16013 - DNA, 26 bp, Homo sapiens
atcatgctcagaccccaggcaagttt

SEQ ID NO: 16014 - DNA, 26 bp, Homo sapiens
tcatgctcagaccccaggcaagtttc

SEQ ID NO: 16015 - DNA, 26 bp, Homo sapiens
catgctcagaccccaggcaagtttca

SEQ ID NO: 16016 - DNA, 26 bp, Homo sapiens
atgctcagaccccaggcaagtttcaa

SEQ ID NO: 16017 - DNA, 26 bp, Homo sapiens
tgctcagaccccaggcaagtttcaaa

SEQ ID NO: 16018 - DNA, 26 bp, Homo sapiens
gctcagaccccaggcaagtttcaaag

SEQ ID NO: 16019 - DNA, 26 bp, Homo sapiens
ctcagaccccaggcaagtttcaaagc

SEQ ID NO: 16020 - DNA, 26 bp, Homo sapiens
tcagaccccaggcaagtttcaaagca

SEQ ID NO: 16021 - DNA, 26 bp, Homo sapiens
cagaccccaggcaagtttcaaagcag

SEQ ID NO: 16022 - DNA, 26 bp, Homo sapiens
agaccccaggcaagtttcaaagcagt

SEQ ID NO: 16023 - DNA, 26 bp, Homo sapiens
gaccccaggcaagtttcaaagcagtt

SEQ ID NO: 16024 - DNA, 26 bp, Homo sapiens
accccaggcaagtttcaaagcagttg

SEQ ID NO: 16025 - DNA, 26 bp, Homo sapiens
ccccaggcaagtttcaaagcagttga

SEQ ID NO: 16026 - DNA, 26 bp, Homo sapiens
cccaggcaagtttcaaagcagttgaa

SEQ ID NO: 16027 - DNA, 26 bp, Homo sapiens
ccaggcaagtttcaaagcagttgaaa

SEQ ID NO: 16028 - DNA, 26 bp, Homo sapiens
caggcaagtttcaaagcagttgaaaa

SEQ ID NO: 16029 - DNA, 26 bp, Homo sapiens
aggcaagtttcaaagcagttgaaaat

SEQ ID NO: 16030 - DNA, 26 bp, Homo sapiens
ggcaagtttcaaagcagttgaaaatg

SEQ ID NO: 16031 - DNA, 26 bp, Homo sapiens
gcaagtttcaaagcagttgaaaatgg

SEQ ID NO: 16032 - DNA, 26 bp, Homo sapiens
caagtttcaaagcagttgaaaatggg

SEQ ID NO: 16033 - DNA, 26 bp, Homo sapiens
aagtttcaaagcagttgaaaatgggc

SEQ ID NO: 16034 - DNA, 26 bp, Homo sapiens
agtttcaaagcagttgaaaatgggct

SEQ ID NO: 16035 - DNA, 26 bp, Homo sapiens
gtttcaaagcagttgaaaatgggctt

SEQ ID NO: 16036 - DNA, 26 bp, Homo sapiens
tttcaaagcagttgaaaatgggcttt

SEQ ID NO: 16037 - DNA, 26 bp, Homo sapiens
ttcaaagcagttgaaaatgggctttt

SEQ ID NO: 16038 - DNA, 26 bp, Homo sapiens
tcaaagcagttgaaaatgggcttttc

SEQ ID NO: 16039 - DNA, 26 bp, Homo sapiens
caaagcagttgaaaatgggcttttct

SEQ ID NO: 16040 - DNA, 26 bp, Homo sapiens
aaagcagttgaaaatgggcttttctt

SEQ ID NO: 16041 - DNA, 26 bp, Homo sapiens
aagcagttgaaaatgggcttttcttc

SEQ ID NO: 16042 - DNA, 26 bp, Homo sapiens
agcagttgaaaatgggcttttcttct

SEQ ID NO: 16043 - DNA, 26 bp, Homo sapiens
gcagttgaaaatgggcttttcttcta

SEQ ID NO: 16044 - DNA, 26 bp, Homo sapiens
cagttgaaaatgggcttttcttctag

SEQ ID NO: 16045 - DNA, 26 bp, Homo sapiens
agttgaaaatgggcttttcttctagt

SEQ ID NO: 16046 - DNA, 26 bp, Homo sapiens
gttgaaaatgggcttttcttctagtg

SEQ ID NO: 16047 - DNA, 26 bp, Homo sapiens
ttgaaaatgggcttttcttctagtga

SEQ ID NO: 16048 - DNA, 26 bp, Homo sapiens
tgaaaatgggcttttcttctagtgat

SEQ ID NO: 16049 - DNA, 26 bp, Homo sapiens
gaaaatgggcttttcttctagtgatg

SEQ ID NO: 16050 - DNA, 26 bp, Homo sapiens
aaaatgggcttttcttctagtgatgg

SEQ ID NO: 16051 - DNA, 26 bp, Homo sapiens
aaatgggcttttcttctagtgatggc

SEQ ID NO: 16052 - DNA, 26 bp, Homo sapiens
aatgggcttttcttctagtgatggct

SEQ ID NO: 16053 - DNA, 26 bp, Homo sapiens
atgggcttttcttctagtgatggctc

SEQ ID NO: 16054 - DNA, 26 bp, Homo sapiens
tgggcttttcttctagtgatggctca

SEQ ID NO: 16055 - DNA, 26 bp, Homo sapiens
gggcttttcttctagtgatggctcat

SEQ ID NO: 16056 - DNA, 26 bp, Homo sapiens
ggcttttcttctagtgatggctcatt

SEQ ID NO: 16057 - DNA, 26 bp, Homo sapiens
gcttttcttctagtgatggctcatta

SEQ ID NO: 16058 - DNA, 26 bp, Homo sapiens
cttttcttctagtgatggctcattaa

SEQ ID NO: 16059 - DNA, 26 bp, Homo sapiens
ttttcttctagtgatggctcattaac

SEQ ID NO: 16060 - DNA, 26 bp, Homo sapiens
tttcttctagtgatggctcattaact

SEQ ID NO: 16061 - DNA, 26 bp, Homo sapiens
ttcttctagtgatggctcattaacta

SEQ ID NO: 16062 - DNA, 26 bp, Homo sapiens
tcttctagtgatggctcattaactaa

SEQ ID NO: 16063 - DNA, 26 bp, Homo sapiens
cttctagtgatggctcattaactaat

SEQ ID NO: 16064 - DNA, 26 bp, Homo sapiens
ttctagtgatggctcattaactaata

SEQ ID NO: 16065 - DNA, 26 bp, Homo sapiens
tctagtgatggctcattaactaatat

SEQ ID NO: 16066 - DNA, 26 bp, Homo sapiens
ctagtgatggctcattaactaatatc

SEQ ID NO: 16067 - DNA, 26 bp, Homo sapiens
tagtgatggctcattaactaatatcc

SEQ ID NO: 16068 - DNA, 26 bp, Homo sapiens
agtgatggctcattaactaatatcct

SEQ ID NO: 16069 - DNA, 26 bp, Homo sapiens
gtgatggctcattaactaatatcctg

SEQ ID NO: 16070 - DNA, 26 bp, Homo sapiens
tgatggctcattaactaatatcctga

SEQ ID NO: 16071 - DNA, 26 bp, Homo sapiens
gatggctcattaactaatatcctgag

SEQ ID NO: 16072 - DNA, 26 bp, Homo sapiens
atggctcattaactaatatcctgagt

SEQ ID NO: 16073 - DNA, 26 bp, Homo sapiens
tggctcattaactaatatcctgagtc

SEQ ID NO: 16074 - DNA, 26 bp, Homo sapiens
ggctcattaactaatatcctgagtcc

SEQ ID NO: 16075 - DNA, 26 bp, Homo sapiens
gctcattaactaatatcctgagtccc

SEQ ID NO: 16076 - DNA, 26 bp, Homo sapiens
ctcattaactaatatcctgagtccca

SEQ ID NO: 16077 - DNA, 26 bp, Homo sapiens
tcattaactaatatcctgagtcccaa

SEQ ID NO: 16078 - DNA, 26 bp, Homo sapiens
cattaactaatatcctgagtcccaac

SEQ ID NO: 16079 - DNA, 26 bp, Homo sapiens
attaactaatatcctgagtcccaact

SEQ ID NO: 16080 - DNA, 26 bp, Homo sapiens
ttaactaatatcctgagtcccaactg

SEQ ID NO: 16081 - DNA, 26 bp, Homo sapiens
taactaatatcctgagtcccaactgg

SEQ ID NO: 16082 - DNA, 26 bp, Homo sapiens
aactaatatcctgagtcccaactgga

SEQ ID NO: 16083 - DNA, 26 bp, Homo sapiens
actaatatcctgagtcccaactggag

SEQ ID NO: 16084 - DNA, 26 bp, Homo sapiens
ctaatatcctgagtcccaactggaga

SEQ ID NO: 16085 - DNA, 26 bp, Homo sapiens
taatatcctgagtcccaactggagaa

SEQ ID NO: 16086 - DNA, 26 bp, Homo sapiens
aatatcctgagtcccaactggagaaa

SEQ ID NO: 16087 - DNA, 26 bp, Homo sapiens
atatcctgagtcccaactggagaaat

SEQ ID NO: 16088 - DNA, 26 bp, Homo sapiens
tatcctgagtcccaactggagaaata

SEQ ID NO: 16089 - DNA, 26 bp, Homo sapiens
atcctgagtcccaactggagaaatac

SEQ ID NO: 16090 - DNA, 26 bp, Homo sapiens
tcctgagtcccaactggagaaatacc

SEQ ID NO: 16091 - DNA, 26 bp, Homo sapiens
cctgagtcccaactggagaaatacct

SEQ ID NO: 16092 - DNA, 26 bp, Homo sapiens
ctgagtcccaactggagaaatacctt

SEQ ID NO: 16093 - DNA, 26 bp, Homo sapiens
tgagtcccaactggagaaataccttg

SEQ ID NO: 16094 - DNA, 26 bp, Homo sapiens
gagtcccaactggagaaataccttgc

SEQ ID NO: 16095 - DNA, 26 bp, Homo sapiens
agtcccaactggagaaataccttgca

SEQ ID NO: 16096 - DNA, 26 bp, Homo sapiens
gtcccaactggagaaataccttgcat

SEQ ID NO: 16097 - DNA, 26 bp, Homo sapiens
tcccaactggagaaataccttgcata

SEQ ID NO: 16098 - DNA, 26 bp, Homo sapiens
cccaactggagaaataccttgcataa

SEQ ID NO: 16099 - DNA, 26 bp, Homo sapiens
ccaactggagaaataccttgcataaa

SEQ ID NO: 16100 - DNA, 26 bp, Homo sapiens
caactggagaaataccttgcataaat

SEQ ID NO: 16101 - DNA, 26 bp, Homo sapiens
aactggagaaataccttgcataaatt

SEQ ID NO: 16102 - DNA, 26 bp, Homo sapiens
actggagaaataccttgcataaatta

SEQ ID NO: 16103 - DNA, 26 bp, Homo sapiens
ctggagaaataccttgcataaattac

SEQ ID NO: 16104 - DNA, 26 bp, Homo sapiens
tggagaaataccttgcataaattaca

SEQ ID NO: 16105 - DNA, 26 bp, Homo sapiens
ggagaaataccttgcataaattacat

SEQ ID NO: 16106 - DNA, 26 bp, Homo sapiens
gagaaataccttgcataaattacata

SEQ ID NO: 16107 - DNA, 26 bp, Homo sapiens
agaaataccttgcataaattacatac

SEQ ID NO: 16108 - DNA, 26 bp, Homo sapiens
gaaataccttgcataaattacatacc

SEQ ID NO: 16109 - DNA, 26 bp, Homo sapiens
aaataccttgcataaattacatacca

SEQ ID NO: 16110 - DNA, 26 bp, Homo sapiens
aataccttgcataaattacataccac

SEQ ID NO: 16111 - DNA, 26 bp, Homo sapiens
ataccttgcataaattacataccacc

SEQ ID NO: 16112 - DNA, 26 bp, Homo sapiens
taccttgcataaattacataccacct

SEQ ID NO: 16113 - DNA, 26 bp, Homo sapiens
accttgcataaattacataccacctt

SEQ ID NO: 16114 - DNA, 26 bp, Homo sapiens
ccttgcataaattacataccaccttt

SEQ ID NO: 16115 - DNA, 26 bp, Homo sapiens
cttgcataaattacataccacctttt

SEQ ID NO: 16116 - DNA, 26 bp, Homo sapiens
ttgcataaattacataccaccttttt

SEQ ID NO: 16117 - DNA, 26 bp, Homo sapiens
tgcataaattacataccaccttttta

SEQ ID NO: 16118 - DNA, 26 bp, Homo sapiens
gcataaattacataccacctttttac

SEQ ID NO: 16119 - DNA, 26 bp, Homo sapiens
cataaattacataccacctttttact

SEQ ID NO: 16120 - DNA, 26 bp, Homo sapiens
ataaattacataccacctttttactc

SEQ ID NO: 16121 - DNA, 26 bp, Homo sapiens
taaattacataccacctttttactca

SEQ ID NO: 16122 - DNA, 26 bp, Homo sapiens
aaattacataccacctttttactcaa

SEQ ID NO: 16123 - DNA, 26 bp, Homo sapiens
aattacataccacctttttactcaag

SEQ ID NO: 16124 - DNA, 26 bp, Homo sapiens
attacataccacctttttactcaagg

SEQ ID NO: 16125 - DNA, 26 bp, Homo sapiens
ttacataccacctttttactcaagga

SEQ ID NO: 16126 - DNA, 26 bp, Homo sapiens
tacataccacctttttactcaaggag

SEQ ID NO: 16127 - DNA, 26 bp, Homo sapiens
acataccacctttttactcaaggagc

SEQ ID NO: 16128 - DNA, 26 bp, Homo sapiens
cataccacctttttactcaaggagct

SEQ ID NO: 16129 - DNA, 26 bp, Homo sapiens
ataccacctttttactcaaggagctt

SEQ ID NO: 16130 - DNA, 26 bp, Homo sapiens
taccacctttttactcaaggagctta

SEQ ID NO: 16131 - DNA, 26 bp, Homo sapiens
accacctttttactcaaggagcttaa

SEQ ID NO: 16132 - DNA, 26 bp, Homo sapiens
ccacctttttactcaaggagcttaaa

SEQ ID NO: 16133 - DNA, 26 bp, Homo sapiens
cacctttttactcaaggagcttaaag

SEQ ID NO: 16134 - DNA, 26 bp, Homo sapiens
acctttttactcaaggagcttaaagt

SEQ ID NO: 16135 - DNA, 26 bp, Homo sapiens
cctttttactcaaggagcttaaagtg

SEQ ID NO: 16136 - DNA, 26 bp, Homo sapiens
ctttttactcaaggagcttaaagtgc

SEQ ID NO: 16137 - DNA, 26 bp, Homo sapiens
tttttactcaaggagcttaaagtgct

SEQ ID NO: 16138 - DNA, 26 bp, Homo sapiens
ttttactcaaggagcttaaagtgctt

SEQ ID NO: 16139 - DNA, 26 bp, Homo sapiens
tttactcaaggagcttaaagtgctta

SEQ ID NO: 16140 - DNA, 26 bp, Homo sapiens
ttactcaaggagcttaaagtgcttaa

SEQ ID NO: 16141 - DNA, 26 bp, Homo sapiens
tactcaaggagcttaaagtgcttaat

SEQ ID NO: 16142 - DNA, 26 bp, Homo sapiens
actcaaggagcttaaagtgcttaata

SEQ ID NO: 16143 - DNA, 26 bp, Homo sapiens
ctcaaggagcttaaagtgcttaatat

SEQ ID NO: 16144 - DNA, 26 bp, Homo sapiens
tcaaggagcttaaagtgcttaatatg

SEQ ID NO: 16145 - DNA, 26 bp, Homo sapiens
caaggagcttaaagtgcttaatatgc

SEQ ID NO: 16146 - DNA, 26 bp, Homo sapiens
aaggagcttaaagtgcttaatatgcg

SEQ ID NO: 16147 - DNA, 26 bp, Homo sapiens
aggagcttaaagtgcttaatatgcgc

SEQ ID NO: 16148 - DNA, 26 bp, Homo sapiens
ggagcttaaagtgcttaatatgcgcc

SEQ ID NO: 16149 - DNA, 26 bp, Homo sapiens
gagcttaaagtgcttaatatgcgcca

SEQ ID NO: 16150 - DNA, 26 bp, Homo sapiens
agcttaaagtgcttaatatgcgccag

SEQ ID NO: 16151 - DNA, 26 bp, Homo sapiens
gcttaaagtgcttaatatgcgccagc

SEQ ID NO: 16152 - DNA, 26 bp, Homo sapiens
cttaaagtgcttaatatgcgccagct

SEQ ID NO: 16153 - DNA, 26 bp, Homo sapiens
ttaaagtgcttaatatgcgccagcta

SEQ ID NO: 16154 - DNA, 26 bp, Homo sapiens
taaagtgcttaatatgcgccagctaa

SEQ ID NO: 16155 - DNA, 26 bp, Homo sapiens
aaagtgcttaatatgcgccagctaat

SEQ ID NO: 16156 - DNA, 26 bp, Homo sapiens
aagtgcttaatatgcgccagctaatg

SEQ ID NO: 16157 - DNA, 26 bp, Homo sapiens
agtgcttaatatgcgccagctaatgc

SEQ ID NO: 16158 - DNA, 26 bp, Homo sapiens
gtgcttaatatgcgccagctaatgct

SEQ ID NO: 16159 - DNA, 26 bp, Homo sapiens
tgcttaatatgcgccagctaatgctc

SEQ ID NO: 16160 - DNA, 26 bp, Homo sapiens
gcttaatatgcgccagctaatgctct

SEQ ID NO: 16161 - DNA, 26 bp, Homo sapiens
cttaatatgcgccagctaatgctctt

SEQ ID NO: 16162 - DNA, 26 bp, Homo sapiens
ttaatatgcgccagctaatgctcttc

SEQ ID NO: 16163 - DNA, 26 bp, Homo sapiens
taatatgcgccagctaatgctcttcc

SEQ ID NO: 16164 - DNA, 26 bp, Homo sapiens
aatatgcgccagctaatgctcttcca

SEQ ID NO: 16165 - DNA, 26 bp, Homo sapiens
atatgcgccagctaatgctcttccac

SEQ ID NO: 16166 - DNA, 26 bp, Homo sapiens
tatgcgccagctaatgctcttccaca

SEQ ID NO: 16167 - DNA, 26 bp, Homo sapiens
atgcgccagctaatgctcttccacat

SEQ ID NO: 16168 - DNA, 26 bp, Homo sapiens
tgcgccagctaatgctcttccacatc

SEQ ID NO: 16169 - DNA, 26 bp, Homo sapiens
gcgccagctaatgctcttccacatcc

SEQ ID NO: 16170 - DNA, 26 bp, Homo sapiens
cgccagctaatgctcttccacatcct

SEQ ID NO: 16171 - DNA, 26 bp, Homo sapiens
gccagctaatgctcttccacatcctt

SEQ ID NO: 16172 - DNA, 26 bp, Homo sapiens
ccagctaatgctcttccacatccttt

SEQ ID NO: 16173 - DNA, 26 bp, Homo sapiens
cagctaatgctcttccacatcctttc

SEQ ID NO: 16174 - DNA, 26 bp, Homo sapiens
agctaatgctcttccacatcctttca

SEQ ID NO: 16175 - DNA, 26 bp, Homo sapiens
gctaatgctcttccacatcctttcag

SEQ ID NO: 16176 - DNA, 26 bp, Homo sapiens
ctaatgctcttccacatcctttcaga

SEQ ID NO: 16177 - DNA, 26 bp, Homo sapiens
taatgctcttccacatcctttcagat

SEQ ID NO: 16178 - DNA, 26 bp, Homo sapiens
aatgctcttccacatcctttcagatt

SEQ ID NO: 16179 - DNA, 26 bp, Homo sapiens
atgctcttccacatcctttcagatta

SEQ ID NO: 16180 - DNA, 26 bp, Homo sapiens
tgctcttccacatcctttcagattag

SEQ ID NO: 16181 - DNA, 26 bp, Homo sapiens
gctcttccacatcctttcagattagt

SEQ ID NO: 16182 - DNA, 26 bp, Homo sapiens
ctcttccacatcctttcagattagtg

SEQ ID NO: 16183 - DNA, 26 bp, Homo sapiens
tcttccacatcctttcagattagtgt

SEQ ID NO: 16184 - DNA, 26 bp, Homo sapiens
cttccacatcctttcagattagtgtg

SEQ ID NO: 16185 - DNA, 26 bp, Homo sapiens
ttccacatcctttcagattagtgtga

SEQ ID NO: 16186 - DNA, 26 bp, Homo sapiens
tccacatcctttcagattagtgtgag

SEQ ID NO: 16187 - DNA, 26 bp, Homo sapiens
ccacatcctttcagattagtgtgaga

SEQ ID NO: 16188 - DNA, 26 bp, Homo sapiens
cacatcctttcagattagtgtgagat

SEQ ID NO: 16189 - DNA, 26 bp, Homo sapiens
acatcctttcagattagtgtgagata

SEQ ID NO: 16190 - DNA, 26 bp, Homo sapiens
catcctttcagattagtgtgagatag

SEQ ID NO: 16191 - DNA, 26 bp, Homo sapiens
atcctttcagattagtgtgagatagt

SEQ ID NO: 16192 - DNA, 26 bp, Homo sapiens
tcctttcagattagtgtgagatagtg

SEQ ID NO: 16193 - DNA, 26 bp, Homo sapiens
cctttcagattagtgtgagatagtgg

SEQ ID NO: 16194 - DNA, 26 bp, Homo sapiens
ctttcagattagtgtgagatagtgga

SEQ ID NO: 16195 - DNA, 26 bp, Homo sapiens
tttcagattagtgtgagatagtggaa

SEQ ID NO: 16196 - DNA, 26 bp, Homo sapiens
ttcagattagtgtgagatagtggaat

SEQ ID NO: 16197 - DNA, 26 bp, Homo sapiens
tcagattagtgtgagatagtggaatc

SEQ ID NO: 16198 - DNA, 26 bp, Homo sapiens
cagattagtgtgagatagtggaatcc

SEQ ID NO: 16199 - DNA, 26 bp, Homo sapiens
agattagtgtgagatagtggaatccc

SEQ ID NO: 16200 - DNA, 26 bp, Homo sapiens
gattagtgtgagatagtggaatcccc

SEQ ID NO: 16201 - DNA, 26 bp, Homo sapiens
attagtgtgagatagtggaatcccca

SEQ ID NO: 16202 - DNA, 26 bp, Homo sapiens
ttagtgtgagatagtggaatccccat

SEQ ID NO: 16203 - DNA, 26 bp, Homo sapiens
tagtgtgagatagtggaatccccatt

SEQ ID NO: 16204 - DNA, 26 bp, Homo sapiens
agtgtgagatagtggaatccccatta

SEQ ID NO: 16205 - DNA, 26 bp, Homo sapiens
gtgtgagatagtggaatccccattaa

SEQ ID NO: 16206 - DNA, 26 bp, Homo sapiens
tgtgagatagtggaatccccattaaa

SEQ ID NO: 16207 - DNA, 26 bp, Homo sapiens
gtgagatagtggaatccccattaaat

SEQ ID NO: 16208 - DNA, 26 bp, Homo sapiens
tgagatagtggaatccccattaaatg

SEQ ID NO: 16209 - DNA, 26 bp, Homo sapiens
gagatagtggaatccccattaaatga

SEQ ID NO: 16210 - DNA, 26 bp, Homo sapiens
agatagtggaatccccattaaatgaa

SEQ ID NO: 16211 - DNA, 26 bp, Homo sapiens
gatagtggaatccccattaaatgaaa

SEQ ID NO: 16212 - DNA, 26 bp, Homo sapiens
atagtggaatccccattaaatgaaaa

SEQ ID NO: 16213 - DNA, 26 bp, Homo sapiens
tagtggaatccccattaaatgaaaag

SEQ ID NO: 16214 - DNA, 26 bp, Homo sapiens
agtggaatccccattaaatgaaaagg

SEQ ID NO: 16215 - DNA, 26 bp, Homo sapiens
gtggaatccccattaaatgaaaagga

SEQ ID NO: 16216 - DNA, 26 bp, Homo sapiens
tggaatccccattaaatgaaaaggaa

SEQ ID NO: 16217 - DNA, 26 bp, Homo sapiens
ggaatccccattaaatgaaaaggaaa

SEQ ID NO: 16218 - DNA, 26 bp, Homo sapiens
gaatccccattaaatgaaaaggaaac

SEQ ID NO: 16219 - DNA, 26 bp, Homo sapiens
aatccccattaaatgaaaaggaaacg

SEQ ID NO: 16220 - DNA, 26 bp, Homo sapiens
atccccattaaatgaaaaggaaacgt

SEQ ID NO: 16221 - DNA, 26 bp, Homo sapiens
tccccattaaatgaaaaggaaacgtg

SEQ ID NO: 16222 - DNA, 26 bp, Homo sapiens
ccccattaaatgaaaaggaaacgtga

SEQ ID NO: 16223 - DNA, 26 bp, Homo sapiens
cccattaaatgaaaaggaaacgtgac

SEQ ID NO: 16224 - DNA, 26 bp, Homo sapiens
ccattaaatgaaaaggaaacgtgact

SEQ ID NO: 16225 - DNA, 26 bp, Homo sapiens
cattaaatgaaaaggaaacgtgactg

SEQ ID NO: 16226 - DNA, 26 bp, Homo sapiens
attaaatgaaaaggaaacgtgactga

SEQ ID NO: 16227 - DNA, 26 bp, Homo sapiens
ttaaatgaaaaggaaacgtgactgac

SEQ ID NO: 16228 - DNA, 26 bp, Homo sapiens
taaatgaaaaggaaacgtgactgact

SEQ ID NO: 16229 - DNA, 26 bp, Homo sapiens
aaatgaaaaggaaacgtgactgactt

SEQ ID NO: 16230 - DNA, 26 bp, Homo sapiens
aatgaaaaggaaacgtgactgacttc

SEQ ID NO: 16231 - DNA, 26 bp, Homo sapiens
atgaaaaggaaacgtgactgacttcc

SEQ ID NO: 16232 - DNA, 26 bp, Homo sapiens
tgaaaaggaaacgtgactgacttcct

SEQ ID NO: 16233 - DNA, 26 bp, Homo sapiens
gaaaaggaaacgtgactgacttcctg

SEQ ID NO: 16234 - DNA, 26 bp, Homo sapiens
aaaaggaaacgtgactgacttcctgt

SEQ ID NO: 16235 - DNA, 26 bp, Homo sapiens
aaaggaaacgtgactgacttcctgtg

SEQ ID NO: 16236 - DNA, 26 bp, Homo sapiens
aaggaaacgtgactgacttcctgtgt

SEQ ID NO: 16237 - DNA, 26 bp, Homo sapiens
aggaaacgtgactgacttcctgtgtt

SEQ ID NO: 16238 - DNA, 26 bp, Homo sapiens
ggaaacgtgactgacttcctgtgttt

SEQ ID NO: 16239 - DNA, 26 bp, Homo sapiens
gaaacgtgactgacttcctgtgtttt

SEQ ID NO: 16240 - DNA, 26 bp, Homo sapiens
aaacgtgactgacttcctgtgttttg

SEQ ID NO: 16241 - DNA, 26 bp, Homo sapiens
aacgtgactgacttcctgtgttttgg

SEQ ID NO: 16242 - DNA, 26 bp, Homo sapiens
acgtgactgacttcctgtgttttggg

SEQ ID NO: 16243 - DNA, 26 bp, Homo sapiens
cgtgactgacttcctgtgttttgggt

SEQ ID NO: 16244 - DNA, 26 bp, Homo sapiens
gtgactgacttcctgtgttttgggtc

SEQ ID NO: 16245 - DNA, 26 bp, Homo sapiens
tgactgacttcctgtgttttgggtcc

SEQ ID NO: 16246 - DNA, 26 bp, Homo sapiens
gactgacttcctgtgttttgggtccc

SEQ ID NO: 16247 - DNA, 26 bp, Homo sapiens
actgacttcctgtgttttgggtccca

SEQ ID NO: 16248 - DNA, 26 bp, Homo sapiens
ctgacttcctgtgttttgggtcccaa

SEQ ID NO: 16249 - DNA, 26 bp, Homo sapiens
tgacttcctgtgttttgggtcccaac

SEQ ID NO: 16250 - DNA, 26 bp, Homo sapiens
gacttcctgtgttttgggtcccaact

SEQ ID NO: 16251 - DNA, 26 bp, Homo sapiens
acttcctgtgttttgggtcccaactg

SEQ ID NO: 16252 - DNA, 26 bp, Homo sapiens
cttcctgtgttttgggtcccaactgt

SEQ ID NO: 16253 - DNA, 26 bp, Homo sapiens
ttcctgtgttttgggtcccaactgtg

SEQ ID NO: 16254 - DNA, 26 bp, Homo sapiens
tcctgtgttttgggtcccaactgtgt

SEQ ID NO: 16255 - DNA, 26 bp, Homo sapiens
cctgtgttttgggtcccaactgtgtt

SEQ ID NO: 16256 - DNA, 26 bp, Homo sapiens
ctgtgttttgggtcccaactgtgttg

SEQ ID NO: 16257 - DNA, 26 bp, Homo sapiens
tgtgttttgggtcccaactgtgttgg

SEQ ID NO: 16258 - DNA, 26 bp, Homo sapiens
gtgttttgggtcccaactgtgttggt

SEQ ID NO: 16259 - DNA, 26 bp, Homo sapiens
tgttttgggtcccaactgtgttggtg

SEQ ID NO: 16260 - DNA, 26 bp, Homo sapiens
gttttgggtcccaactgtgttggtga

SEQ ID NO: 16261 - DNA, 26 bp, Homo sapiens
ttttgggtcccaactgtgttggtgaa

SEQ ID NO: 16262 - DNA, 26 bp, Homo sapiens
tttgggtcccaactgtgttggtgaat

SEQ ID NO: 16263 - DNA, 26 bp, Homo sapiens
ttgggtcccaactgtgttggtgaatt

SEQ ID NO: 16264 - DNA, 26 bp, Homo sapiens
tgggtcccaactgtgttggtgaattg

SEQ ID NO: 16265 - DNA, 26 bp, Homo sapiens
gggtcccaactgtgttggtgaattgg

SEQ ID NO: 16266 - DNA, 26 bp, Homo sapiens
ggtcccaactgtgttggtgaattggt

SEQ ID NO: 16267 - DNA, 26 bp, Homo sapiens
gtcccaactgtgttggtgaattggtt

SEQ ID NO: 16268 - DNA, 26 bp, Homo sapiens
tcccaactgtgttggtgaattggttt

SEQ ID NO: 16269 - DNA, 26 bp, Homo sapiens
cccaactgtgttggtgaattggtttg

SEQ ID NO: 16270 - DNA, 26 bp, Homo sapiens
ccaactgtgttggtgaattggtttgg

SEQ ID NO: 16271 - DNA, 26 bp, Homo sapiens
caactgtgttggtgaattggtttggt

SEQ ID NO: 16272 - DNA, 26 bp, Homo sapiens
aactgtgttggtgaattggtttggtt

SEQ ID NO: 16273 - DNA, 26 bp, Homo sapiens
actgtgttggtgaattggtttggttg

SEQ ID NO: 16274 - DNA, 26 bp, Homo sapiens
ctgtgttggtgaattggtttggttgg

SEQ ID NO: 16275 - DNA, 26 bp, Homo sapiens
tgtgttggtgaattggtttggttggt

SEQ ID NO: 16276 - DNA, 26 bp, Homo sapiens
gtgttggtgaattggtttggttggta

SEQ ID NO: 16277 - DNA, 26 bp, Homo sapiens
tgttggtgaattggtttggttggtat

SEQ ID NO: 16278 - DNA, 26 bp, Homo sapiens
gttggtgaattggtttggttggtata

SEQ ID NO: 16279 - DNA, 26 bp, Homo sapiens
ttggtgaattggtttggttggtatag

SEQ ID NO: 16280 - DNA, 26 bp, Homo sapiens
tggtgaattggtttggttggtataga

SEQ ID NO: 16281 - DNA, 26 bp, Homo sapiens
ggtgaattggtttggttggtatagag

SEQ ID NO: 16282 - DNA, 26 bp, Homo sapiens
gtgaattggtttggttggtatagaga

SEQ ID NO: 16283 - DNA, 26 bp, Homo sapiens
tgaattggtttggttggtatagagac

SEQ ID NO: 16284 - DNA, 26 bp, Homo sapiens
gaattggtttggttggtatagagacg

SEQ ID NO: 16285 - DNA, 26 bp, Homo sapiens
aattggtttggttggtatagagacgg

SEQ ID NO: 16286 - DNA, 26 bp, Homo sapiens
attggtttggttggtatagagacggg

SEQ ID NO: 16287 - DNA, 26 bp, Homo sapiens
ttggtttggttggtatagagacgggg

SEQ ID NO: 16288 - DNA, 26 bp, Homo sapiens
tggtttggttggtatagagacggggt

SEQ ID NO: 16289 - DNA, 26 bp, Homo sapiens
ggtttggttggtatagagacggggtc

SEQ ID NO: 16290 - DNA, 26 bp, Homo sapiens
gtttggttggtatagagacggggtct

SEQ ID NO: 16291 - DNA, 26 bp, Homo sapiens
tttggttggtatagagacggggtctt

SEQ ID NO: 16292 - DNA, 26 bp, Homo sapiens
ttggttggtatagagacggggtcttc

SEQ ID NO: 16293 - DNA, 26 bp, Homo sapiens
tggttggtatagagacggggtcttcc

SEQ ID NO: 16294 - DNA, 26 bp, Homo sapiens
ggttggtatagagacggggtcttccc

SEQ ID NO: 16295 - DNA, 26 bp, Homo sapiens
gttggtatagagacggggtcttccct

SEQ ID NO: 16296 - DNA, 26 bp, Homo sapiens
ttggtatagagacggggtcttccctt

SEQ ID NO: 16297 - DNA, 26 bp, Homo sapiens
tggtatagagacggggtcttcccttg

SEQ ID NO: 16298 - DNA, 26 bp, Homo sapiens
ggtatagagacggggtcttcccttga

SEQ ID NO: 16299 - DNA, 26 bp, Homo sapiens
gtatagagacggggtcttcccttgac

SEQ ID NO: 16300 - DNA, 26 bp, Homo sapiens
tatagagacggggtcttcccttgacc

SEQ ID NO: 16301 - DNA, 26 bp, Homo sapiens
atagagacggggtcttcccttgacct

SEQ ID NO: 16302 - DNA, 26 bp, Homo sapiens
tagagacggggtcttcccttgacctt

SEQ ID NO: 16303 - DNA, 26 bp, Homo sapiens
agagacggggtcttcccttgacctta

SEQ ID NO: 16304 - DNA, 26 bp, Homo sapiens
gagacggggtcttcccttgaccttat

SEQ ID NO: 16305 - DNA, 26 bp, Homo sapiens
agacggggtcttcccttgaccttatt

SEQ ID NO: 16306 - DNA, 26 bp, Homo sapiens
gacggggtcttcccttgaccttattg

SEQ ID NO: 16307 - DNA, 26 bp, Homo sapiens
acggggtcttcccttgaccttattga

SEQ ID NO: 16308 - DNA, 26 bp, Homo sapiens
cggggtcttcccttgaccttattgac

SEQ ID NO: 16309 - DNA, 26 bp, Homo sapiens
ggggtcttcccttgaccttattgacc

SEQ ID NO: 16310 - DNA, 26 bp, Homo sapiens
gggtcttcccttgaccttattgacct

SEQ ID NO: 16311 - DNA, 26 bp, Homo sapiens
ggtcttcccttgaccttattgacctt

SEQ ID NO: 16312 - DNA, 26 bp, Homo sapiens
gtcttcccttgaccttattgaccttt

SEQ ID NO: 16313 - DNA, 26 bp, Homo sapiens
tcttcccttgaccttattgacctttt

SEQ ID NO: 16314 - DNA, 26 bp, Homo sapiens
cttcccttgaccttattgaccttttt

SEQ ID NO: 16315 - DNA, 26 bp, Homo sapiens
ttcccttgaccttattgacctttttc

SEQ ID NO: 16316 - DNA, 26 bp, Homo sapiens
tcccttgaccttattgacctttttcc

SEQ ID NO: 16317 - DNA, 26 bp, Homo sapiens
cccttgaccttattgacctttttcct

SEQ ID NO: 16318 - DNA, 26 bp, Homo sapiens
ccttgaccttattgacctttttcctc

SEQ ID NO: 16319 - DNA, 26 bp, Homo sapiens
cttgaccttattgacctttttcctcc

SEQ ID NO: 16320 - DNA, 26 bp, Homo sapiens
ttgaccttattgacctttttcctcca

SEQ ID NO: 16321 - DNA, 26 bp, Homo sapiens
tgaccttattgacctttttcctccat

SEQ ID NO: 16322 - DNA, 26 bp, Homo sapiens
gaccttattgacctttttcctccatc

SEQ ID NO: 16323 - DNA, 26 bp, Homo sapiens
accttattgacctttttcctccatca

SEQ ID NO: 16324 - DNA, 26 bp, Homo sapiens
ccttattgacctttttcctccatcag

SEQ ID NO: 16325 - DNA, 26 bp, Homo sapiens
cttattgacctttttcctccatcagc

SEQ ID NO: 16326 - DNA, 26 bp, Homo sapiens
ttattgacctttttcctccatcagcc

SEQ ID NO: 16327 - DNA, 26 bp, Homo sapiens
tattgacctttttcctccatcagccc

SEQ ID NO: 16328 - DNA, 26 bp, Homo sapiens
attgacctttttcctccatcagccct

SEQ ID NO: 16329 - DNA, 26 bp, Homo sapiens
ttgacctttttcctccatcagccctc

SEQ ID NO: 16330 - DNA, 26 bp, Homo sapiens
tgacctttttcctccatcagccctcg

SEQ ID NO: 16331 - DNA, 26 bp, Homo sapiens
gacctttttcctccatcagccctcgt

SEQ ID NO: 16332 - DNA, 26 bp, Homo sapiens
acctttttcctccatcagccctcgtt

SEQ ID NO: 16333 - DNA, 26 bp, Homo sapiens
cctttttcctccatcagccctcgttt

SEQ ID NO: 16334 - DNA, 26 bp, Homo sapiens
ctttttcctccatcagccctcgtttt

SEQ ID NO: 16335 - DNA, 26 bp, Homo sapiens
tttttcctccatcagccctcgttttg

SEQ ID NO: 16336 - DNA, 26 bp, Homo sapiens
ttttcctccatcagccctcgttttga

SEQ ID NO: 16337 - DNA, 26 bp, Homo sapiens
tttcctccatcagccctcgttttgat

SEQ ID NO: 16338 - DNA, 26 bp, Homo sapiens
ttcctccatcagccctcgttttgata

SEQ ID NO: 16339 - DNA, 26 bp, Homo sapiens
tcctccatcagccctcgttttgatat

SEQ ID NO: 16340 - DNA, 26 bp, Homo sapiens
cctccatcagccctcgttttgatatg

SEQ ID NO: 16341 - DNA, 26 bp, Homo sapiens
ctccatcagccctcgttttgatatgg

SEQ ID NO: 16342 - DNA, 26 bp, Homo sapiens
tccatcagccctcgttttgatatgga

SEQ ID NO: 16343 - DNA, 26 bp, Homo sapiens
ccatcagccctcgttttgatatggag

SEQ ID NO: 16344 - DNA, 26 bp, Homo sapiens
catcagccctcgttttgatatggaga

SEQ ID NO: 16345 - DNA, 26 bp, Homo sapiens
atcagccctcgttttgatatggagaa

SEQ ID NO: 16346 - DNA, 26 bp, Homo sapiens
tcagccctcgttttgatatggagaaa

SEQ ID NO: 16347 - DNA, 26 bp, Homo sapiens
cagccctcgttttgatatggagaaaa

SEQ ID NO: 16348 - DNA, 26 bp, Homo sapiens
agccctcgttttgatatggagaaaac

SEQ ID NO: 16349 - DNA, 26 bp, Homo sapiens
gccctcgttttgatatggagaaaact

SEQ ID NO: 16350 - DNA, 26 bp, Homo sapiens
ccctcgttttgatatggagaaaactc

SEQ ID NO: 16351 - DNA, 26 bp, Homo sapiens
cctcgttttgatatggagaaaactct

SEQ ID NO: 16352 - DNA, 26 bp, Homo sapiens
ctcgttttgatatggagaaaactctc

SEQ ID NO: 16353 - DNA, 26 bp, Homo sapiens
tcgttttgatatggagaaaactctcc

SEQ ID NO: 16354 - DNA, 26 bp, Homo sapiens
cgttttgatatggagaaaactctcct

SEQ ID NO: 16355 - DNA, 26 bp, Homo sapiens
gttttgatatggagaaaactctcctc

SEQ ID NO: 16356 - DNA, 26 bp, Homo sapiens
ttttgatatggagaaaactctcctca

SEQ ID NO: 16357 - DNA, 26 bp, Homo sapiens
tttgatatggagaaaactctcctcag

SEQ ID NO: 16358 - DNA, 26 bp, Homo sapiens
ttgatatggagaaaactctcctcagg

SEQ ID NO: 16359 - DNA, 26 bp, Homo sapiens
tgatatggagaaaactctcctcagga

SEQ ID NO: 16360 - DNA, 26 bp, Homo sapiens
gatatggagaaaactctcctcaggac

SEQ ID NO: 16361 - DNA, 26 bp, Homo sapiens
atatggagaaaactctcctcaggact

SEQ ID NO: 16362 - DNA, 26 bp, Homo sapiens
tatggagaaaactctcctcaggactg

SEQ ID NO: 16363 - DNA, 26 bp, Homo sapiens
atggagaaaactctcctcaggactgc

SEQ ID NO: 16364 - DNA, 26 bp, Homo sapiens
tggagaaaactctcctcaggactgca

SEQ ID NO: 16365 - DNA, 26 bp, Homo sapiens
ggagaaaactctcctcaggactgcat

SEQ ID NO: 16366 - DNA, 26 bp, Homo sapiens
gagaaaactctcctcaggactgcatt

SEQ ID NO: 16367 - DNA, 26 bp, Homo sapiens
agaaaactctcctcaggactgcattt

SEQ ID NO: 16368 - DNA, 26 bp, Homo sapiens
gaaaactctcctcaggactgcatttt

SEQ ID NO: 16369 - DNA, 26 bp, Homo sapiens
aaaactctcctcaggactgcattttc

SEQ ID NO: 16370 - DNA, 26 bp, Homo sapiens
aaactctcctcaggactgcattttca

SEQ ID NO: 16371 - DNA, 26 bp, Homo sapiens
aactctcctcaggactgcattttcat

SEQ ID NO: 16372 - DNA, 26 bp, Homo sapiens
actctcctcaggactgcattttcatt

SEQ ID NO: 16373 - DNA, 26 bp, Homo sapiens
ctctcctcaggactgcattttcattc

SEQ ID NO: 16374 - DNA, 26 bp, Homo sapiens
tctcctcaggactgcattttcattct

SEQ ID NO: 16375 - DNA, 26 bp, Homo sapiens
ctcctcaggactgcattttcattctt

SEQ ID NO: 16376 - DNA, 26 bp, Homo sapiens
tcctcaggactgcattttcattcttc

SEQ ID NO: 16377 - DNA, 26 bp, Homo sapiens
cctcaggactgcattttcattcttct

SEQ ID NO: 16378 - DNA, 26 bp, Homo sapiens
ctcaggactgcattttcattcttctc

SEQ ID NO: 16379 - DNA, 26 bp, Homo sapiens
tcaggactgcattttcattcttctca

SEQ ID NO: 16380 - DNA, 26 bp, Homo sapiens
caggactgcattttcattcttctcag

SEQ ID NO: 16381 - DNA, 26 bp, Homo sapiens
aggactgcattttcattcttctcagc

SEQ ID NO: 16382 - DNA, 26 bp, Homo sapiens
ggactgcattttcattcttctcagct

SEQ ID NO: 16383 - DNA, 26 bp, Homo sapiens
gactgcattttcattcttctcagctt

SEQ ID NO: 16384 - DNA, 26 bp, Homo sapiens
actgcattttcattcttctcagcttt

SEQ ID NO: 16385 - DNA, 26 bp, Homo sapiens
ctgcattttcattcttctcagctttc

SEQ ID NO: 16386 - DNA, 26 bp, Homo sapiens
tgcattttcattcttctcagctttct

SEQ ID NO: 16387 - DNA, 26 bp, Homo sapiens
gcattttcattcttctcagctttctt

SEQ ID NO: 16388 - DNA, 26 bp, Homo sapiens
cattttcattcttctcagctttcttt

SEQ ID NO: 16389 - DNA, 26 bp, Homo sapiens
attttcattcttctcagctttctttc

SEQ ID NO: 16390 - DNA, 26 bp, Homo sapiens
ttttcattcttctcagctttctttca

SEQ ID NO: 16391 - DNA, 26 bp, Homo sapiens
tttcattcttctcagctttctttcac

SEQ ID NO: 16392 - DNA, 26 bp, Homo sapiens
ttcattcttctcagctttctttcaca

SEQ ID NO: 16393 - DNA, 26 bp, Homo sapiens
tcattcttctcagctttctttcacaa

SEQ ID NO: 16394 - DNA, 26 bp, Homo sapiens
cattcttctcagctttctttcacaac

SEQ ID NO: 16395 - DNA, 26 bp, Homo sapiens
attcttctcagctttctttcacaact

SEQ ID NO: 16396 - DNA, 26 bp, Homo sapiens
ttcttctcagctttctttcacaacta

SEQ ID NO: 16397 - DNA, 26 bp, Homo sapiens
tcttctcagctttctttcacaactaa

SEQ ID NO: 16398 - DNA, 26 bp, Homo sapiens
cttctcagctttctttcacaactaac

SEQ ID NO: 16399 - DNA, 26 bp, Homo sapiens
ttctcagctttctttcacaactaact

SEQ ID NO: 16400 - DNA, 26 bp, Homo sapiens
tctcagctttctttcacaactaactg

SEQ ID NO: 16401 - DNA, 26 bp, Homo sapiens
ctcagctttctttcacaactaactgt

SEQ ID NO: 16402 - DNA, 26 bp, Homo sapiens
tcagctttctttcacaactaactgtg

SEQ ID NO: 16403 - DNA, 26 bp, Homo sapiens
cagctttctttcacaactaactgtgc

SEQ ID NO: 16404 - DNA, 26 bp, Homo sapiens
agctttctttcacaactaactgtgca

SEQ ID NO: 16405 - DNA, 26 bp, Homo sapiens
gctttctttcacaactaactgtgcaa

SEQ ID NO: 16406 - DNA, 26 bp, Homo sapiens
ctttctttcacaactaactgtgcaaa

SEQ ID NO: 16407 - DNA, 26 bp, Homo sapiens
tttctttcacaactaactgtgcaaaa

SEQ ID NO: 16408 - DNA, 26 bp, Homo sapiens
ttctttcacaactaactgtgcaaaac

SEQ ID NO: 16409 - DNA, 26 bp, Homo sapiens
tctttcacaactaactgtgcaaaaca

SEQ ID NO: 16410 - DNA, 26 bp, Homo sapiens
ctttcacaactaactgtgcaaaacag

SEQ ID NO: 16411 - DNA, 26 bp, Homo sapiens
tttcacaactaactgtgcaaaacaga

SEQ ID NO: 16412 - DNA, 26 bp, Homo sapiens
ttcacaactaactgtgcaaaacagaa

SEQ ID NO: 16413 - DNA, 26 bp, Homo sapiens
tcacaactaactgtgcaaaacagaat

SEQ ID NO: 16414 - DNA, 26 bp, Homo sapiens
cacaactaactgtgcaaaacagaata

SEQ ID NO: 16415 - DNA, 26 bp, Homo sapiens
acaactaactgtgcaaaacagaataa

SEQ ID NO: 16416 - DNA, 26 bp, Homo sapiens
caactaactgtgcaaaacagaataat

SEQ ID NO: 16417 - DNA, 26 bp, Homo sapiens
aactaactgtgcaaaacagaataata

SEQ ID NO: 16418 - DNA, 26 bp, Homo sapiens
actaactgtgcaaaacagaataatac

SEQ ID NO: 16419 - DNA, 26 bp, Homo sapiens
ctaactgtgcaaaacagaataatacc

SEQ ID NO: 16420 - DNA, 26 bp, Homo sapiens
taactgtgcaaaacagaataatacca

SEQ ID NO: 16421 - DNA, 26 bp, Homo sapiens
aactgtgcaaaacagaataataccaa

SEQ ID NO: 16422 - DNA, 26 bp, Homo sapiens
actgtgcaaaacagaataataccaag

SEQ ID NO: 16423 - DNA, 26 bp, Homo sapiens
ctgtgcaaaacagaataataccaaga

SEQ ID NO: 16424 - DNA, 26 bp, Homo sapiens
tgtgcaaaacagaataataccaagaa

SEQ ID NO: 16425 - DNA, 26 bp, Homo sapiens
gtgcaaaacagaataataccaagaaa

SEQ ID NO: 16426 - DNA, 26 bp, Homo sapiens
tgcaaaacagaataataccaagaaat

SEQ ID NO: 16427 - DNA, 26 bp, Homo sapiens
gcaaaacagaataataccaagaaatt

SEQ ID NO: 16428 - DNA, 26 bp, Homo sapiens
caaaacagaataataccaagaaattg

SEQ ID NO: 16429 - DNA, 26 bp, Homo sapiens
aaaacagaataataccaagaaattga

SEQ ID NO: 16430 - DNA, 26 bp, Homo sapiens
aaacagaataataccaagaaattgag

SEQ ID NO: 16431 - DNA, 26 bp, Homo sapiens
aacagaataataccaagaaattgagt

SEQ ID NO: 16432 - DNA, 26 bp, Homo sapiens
acagaataataccaagaaattgagtt

SEQ ID NO: 16433 - DNA, 26 bp, Homo sapiens
cagaataataccaagaaattgagtta

SEQ ID NO: 16434 - DNA, 26 bp, Homo sapiens
agaataataccaagaaattgagttaa

SEQ ID NO: 16435 - DNA, 26 bp, Homo sapiens
gaataataccaagaaattgagttaag

SEQ ID NO: 16436 - DNA, 26 bp, Homo sapiens
aataataccaagaaattgagttaagt

SEQ ID NO: 16437 - DNA, 26 bp, Homo sapiens
ataataccaagaaattgagttaagtg

SEQ ID NO: 16438 - DNA, 26 bp, Homo sapiens
taataccaagaaattgagttaagtgt

SEQ ID NO: 16439 - DNA, 26 bp, Homo sapiens
aataccaagaaattgagttaagtgtc

SEQ ID NO: 16440 - DNA, 26 bp, Homo sapiens
ataccaagaaattgagttaagtgtct

SEQ ID NO: 16441 - DNA, 26 bp, Homo sapiens
taccaagaaattgagttaagtgtctg

SEQ ID NO: 16442 - DNA, 26 bp, Homo sapiens
accaagaaattgagttaagtgtctgg

SEQ ID NO: 16443 - DNA, 26 bp, Homo sapiens
ccaagaaattgagttaagtgtctgga

SEQ ID NO: 16444 - DNA, 26 bp, Homo sapiens
caagaaattgagttaagtgtctggac

SEQ ID NO: 16445 - DNA, 26 bp, Homo sapiens
aagaaattgagttaagtgtctggact

SEQ ID NO: 16446 - DNA, 26 bp, Homo sapiens
agaaattgagttaagtgtctggacta

SEQ ID NO: 16447 - DNA, 26 bp, Homo sapiens
gaaattgagttaagtgtctggactat

SEQ ID NO: 16448 - DNA, 26 bp, Homo sapiens
aaattgagttaagtgtctggactata

SEQ ID NO: 16449 - DNA, 26 bp, Homo sapiens
aattgagttaagtgtctggactatat

SEQ ID NO: 16450 - DNA, 26 bp, Homo sapiens
attgagttaagtgtctggactatata

SEQ ID NO: 16451 - DNA, 26 bp, Homo sapiens
ttgagttaagtgtctggactatatat

SEQ ID NO: 16452 - DNA, 26 bp, Homo sapiens
tgagttaagtgtctggactatatatt

SEQ ID NO: 16453 - DNA, 26 bp, Homo sapiens
gagttaagtgtctggactatatatta

SEQ ID NO: 16454 - DNA, 26 bp, Homo sapiens
agttaagtgtctggactatatattaa

SEQ ID NO: 16455 - DNA, 26 bp, Homo sapiens
gttaagtgtctggactatatattaat

SEQ ID NO: 16456 - DNA, 26 bp, Homo sapiens
ttaagtgtctggactatatattaata

SEQ ID NO: 16457 - DNA, 26 bp, Homo sapiens
taagtgtctggactatatattaatac

SEQ ID NO: 16458 - DNA, 26 bp, Homo sapiens
aagtgtctggactatatattaatacc

SEQ ID NO: 16459 - DNA, 26 bp, Homo sapiens
agtgtctggactatatattaataccc

SEQ ID NO: 16460 - DNA, 26 bp, Homo sapiens
gtgtctggactatatattaataccca

SEQ ID NO: 16461 - DNA, 26 bp, Homo sapiens
tgtctggactatatattaatacccaa

SEQ ID NO: 16462 - DNA, 26 bp, Homo sapiens
gtctggactatatattaatacccaaa

SEQ ID NO: 16463 - DNA, 26 bp, Homo sapiens
tctggactatatattaatacccaaaa

SEQ ID NO: 16464 - DNA, 26 bp, Homo sapiens
ctggactatatattaatacccaaaat

SEQ ID NO: 16465 - DNA, 26 bp, Homo sapiens
tggactatatattaatacccaaaata

SEQ ID NO: 16466 - DNA, 26 bp, Homo sapiens
ggactatatattaatacccaaaatag

SEQ ID NO: 16467 - DNA, 26 bp, Homo sapiens
gactatatattaatacccaaaataga

SEQ ID NO: 16468 - DNA, 26 bp, Homo sapiens
actatatattaatacccaaaatagaa

SEQ ID NO: 16469 - DNA, 26 bp, Homo sapiens
ctatatattaatacccaaaatagaat

SEQ ID NO: 16470 - DNA, 26 bp, Homo sapiens
tatatattaatacccaaaatagaatg

SEQ ID NO: 16471 - DNA, 26 bp, Homo sapiens
atatattaatacccaaaatagaatgt

SEQ ID NO: 16472 - DNA, 26 bp, Homo sapiens
tatattaatacccaaaatagaatgtg

SEQ ID NO: 16473 - DNA, 26 bp, Homo sapiens
atattaatacccaaaatagaatgtga

SEQ ID NO: 16474 - DNA, 26 bp, Homo sapiens
tattaatacccaaaatagaatgtgac

SEQ ID NO: 16475 - DNA, 26 bp, Homo sapiens
attaatacccaaaatagaatgtgaca

SEQ ID NO: 16476 - DNA, 26 bp, Homo sapiens
ttaatacccaaaatagaatgtgacat

SEQ ID NO: 16477 - DNA, 26 bp, Homo sapiens
taatacccaaaatagaatgtgacatt

SEQ ID NO: 16478 - DNA, 26 bp, Homo sapiens
aatacccaaaatagaatgtgacattt

SEQ ID NO: 16479 - DNA, 26 bp, Homo sapiens
atacccaaaatagaatgtgacatttt

SEQ ID NO: 16480 - DNA, 26 bp, Homo sapiens
tacccaaaatagaatgtgacattttc

SEQ ID NO: 16481 - DNA, 26 bp, Homo sapiens
acccaaaatagaatgtgacattttca

SEQ ID NO: 16482 - DNA, 26 bp, Homo sapiens
cccaaaatagaatgtgacattttcag

SEQ ID NO: 16483 - DNA, 26 bp, Homo sapiens
ccaaaatagaatgtgacattttcagt

SEQ ID NO: 16484 - DNA, 26 bp, Homo sapiens
caaaatagaatgtgacattttcagtg

SEQ ID NO: 16485 - DNA, 26 bp, Homo sapiens
aaaatagaatgtgacattttcagtgt

SEQ ID NO: 16486 - DNA, 26 bp, Homo sapiens
aaatagaatgtgacattttcagtgta

SEQ ID NO: 16487 - DNA, 26 bp, Homo sapiens
aatagaatgtgacattttcagtgtaa

SEQ ID NO: 16488 - DNA, 26 bp, Homo sapiens
atagaatgtgacattttcagtgtaag

SEQ ID NO: 16489 - DNA, 26 bp, Homo sapiens
tagaatgtgacattttcagtgtaagg

SEQ ID NO: 16490 - DNA, 26 bp, Homo sapiens
agaatgtgacattttcagtgtaaggc

SEQ ID NO: 16491 - DNA, 26 bp, Homo sapiens
gaatgtgacattttcagtgtaaggcc

SEQ ID NO: 16492 - DNA, 26 bp, Homo sapiens
aatgtgacattttcagtgtaaggcca

SEQ ID NO: 16493 - DNA, 26 bp, Homo sapiens
atgtgacattttcagtgtaaggccat

SEQ ID NO: 16494 - DNA, 26 bp, Homo sapiens
tgtgacattttcagtgtaaggccatc

SEQ ID NO: 16495 - DNA, 26 bp, Homo sapiens
gtgacattttcagtgtaaggccatca

SEQ ID NO: 16496 - DNA, 26 bp, Homo sapiens
tgacattttcagtgtaaggccatcat

SEQ ID NO: 16497 - DNA, 26 bp, Homo sapiens
gacattttcagtgtaaggccatcatg

SEQ ID NO: 16498 - DNA, 26 bp, Homo sapiens
acattttcagtgtaaggccatcatgg

SEQ ID NO: 16499 - DNA, 26 bp, Homo sapiens
cattttcagtgtaaggccatcatggc

SEQ ID NO: 16500 - DNA, 26 bp, Homo sapiens
attttcagtgtaaggccatcatggcc

SEQ ID NO: 16501 - DNA, 26 bp, Homo sapiens
ttttcagtgtaaggccatcatggcct

SEQ ID NO: 16502 - DNA, 26 bp, Homo sapiens
tttcagtgtaaggccatcatggcctg

SEQ ID NO: 16503 - DNA, 26 bp, Homo sapiens
ttcagtgtaaggccatcatggcctgg

SEQ ID NO: 16504 - DNA, 26 bp, Homo sapiens
tcagtgtaaggccatcatggcctgga

SEQ ID NO: 16505 - DNA, 26 bp, Homo sapiens
cagtgtaaggccatcatggcctggag

SEQ ID NO: 16506 - DNA, 26 bp, Homo sapiens
agtgtaaggccatcatggcctggaga

SEQ ID NO: 16507 - DNA, 26 bp, Homo sapiens
gtgtaaggccatcatggcctggagac

SEQ ID NO: 16508 - DNA, 26 bp, Homo sapiens
tgtaaggccatcatggcctggagaca

SEQ ID NO: 16509 - DNA, 26 bp, Homo sapiens
gtaaggccatcatggcctggagacaa

SEQ ID NO: 16510 - DNA, 26 bp, Homo sapiens
taaggccatcatggcctggagacaac

SEQ ID NO: 16511 - DNA, 26 bp, Homo sapiens
aaggccatcatggcctggagacaacc

SEQ ID NO: 16512 - DNA, 26 bp, Homo sapiens
aggccatcatggcctggagacaacct

SEQ ID NO: 16513 - DNA, 26 bp, Homo sapiens
ggccatcatggcctggagacaaccta

SEQ ID NO: 16514 - DNA, 26 bp, Homo sapiens
gccatcatggcctggagacaacctaa

SEQ ID NO: 16515 - DNA, 26 bp, Homo sapiens
ccatcatggcctggagacaacctaac

SEQ ID NO: 16516 - DNA, 26 bp, Homo sapiens
catcatggcctggagacaacctaact

SEQ ID NO: 16517 - DNA, 26 bp, Homo sapiens
atcatggcctggagacaacctaactc

SEQ ID NO: 16518 - DNA, 26 bp, Homo sapiens
tcatggcctggagacaacctaactct

SEQ ID NO: 16519 - DNA, 26 bp, Homo sapiens
catggcctggagacaacctaactctg

SEQ ID NO: 16520 - DNA, 26 bp, Homo sapiens
atggcctggagacaacctaactctgg

SEQ ID NO: 16521 - DNA, 26 bp, Homo sapiens
tggcctggagacaacctaactctggc

SEQ ID NO: 16522 - DNA, 26 bp, Homo sapiens
ggcctggagacaacctaactctggct

SEQ ID NO: 16523 - DNA, 26 bp, Homo sapiens
gcctggagacaacctaactctggcta

SEQ ID NO: 16524 - DNA, 26 bp, Homo sapiens
cctggagacaacctaactctggctaa

SEQ ID NO: 16525 - DNA, 26 bp, Homo sapiens
ctggagacaacctaactctggctaag

SEQ ID NO: 16526 - DNA, 26 bp, Homo sapiens
tggagacaacctaactctggctaagt

SEQ ID NO: 16527 - DNA, 26 bp, Homo sapiens
ggagacaacctaactctggctaagtt

SEQ ID NO: 16528 - DNA, 26 bp, Homo sapiens
gagacaacctaactctggctaagttt

SEQ ID NO: 16529 - DNA, 26 bp, Homo sapiens
agacaacctaactctggctaagtttt

SEQ ID NO: 16530 - DNA, 26 bp, Homo sapiens
gacaacctaactctggctaagttttc

SEQ ID NO: 16531 - DNA, 26 bp, Homo sapiens
acaacctaactctggctaagttttca

SEQ ID NO: 16532 - DNA, 26 bp, Homo sapiens
caacctaactctggctaagttttcag

SEQ ID NO: 16533 - DNA, 26 bp, Homo sapiens
aacctaactctggctaagttttcagt

SEQ ID NO: 16534 - DNA, 26 bp, Homo sapiens
acctaactctggctaagttttcagtg

SEQ ID NO: 16535 - DNA, 26 bp, Homo sapiens
cctaactctggctaagttttcagtgc

SEQ ID NO: 16536 - DNA, 26 bp, Homo sapiens
ctaactctggctaagttttcagtgca

SEQ ID NO: 16537 - DNA, 26 bp, Homo sapiens
taactctggctaagttttcagtgcat

SEQ ID NO: 16538 - DNA, 26 bp, Homo sapiens
aactctggctaagttttcagtgcatc

SEQ ID NO: 16539 - DNA, 26 bp, Homo sapiens
actctggctaagttttcagtgcatct

SEQ ID NO: 16540 - DNA, 26 bp, Homo sapiens
ctctggctaagttttcagtgcatctt

SEQ ID NO: 16541 - DNA, 26 bp, Homo sapiens
tctggctaagttttcagtgcatctta

SEQ ID NO: 16542 - DNA, 26 bp, Homo sapiens
ctggctaagttttcagtgcatcttac

SEQ ID NO: 16543 - DNA, 26 bp, Homo sapiens
tggctaagttttcagtgcatcttact

SEQ ID NO: 16544 - DNA, 26 bp, Homo sapiens
ggctaagttttcagtgcatcttacta

SEQ ID NO: 16545 - DNA, 26 bp, Homo sapiens
gctaagttttcagtgcatcttactag

SEQ ID NO: 16546 - DNA, 26 bp, Homo sapiens
ctaagttttcagtgcatcttactaga

SEQ ID NO: 16547 - DNA, 26 bp, Homo sapiens
taagttttcagtgcatcttactagag

SEQ ID NO: 16548 - DNA, 26 bp, Homo sapiens
aagttttcagtgcatcttactagagg

SEQ ID NO: 16549 - DNA, 26 bp, Homo sapiens
agttttcagtgcatcttactagagga

SEQ ID NO: 16550 - DNA, 26 bp, Homo sapiens
gttttcagtgcatcttactagaggag

SEQ ID NO: 16551 - DNA, 26 bp, Homo sapiens
ttttcagtgcatcttactagaggagc

SEQ ID NO: 16552 - DNA, 26 bp, Homo sapiens
tttcagtgcatcttactagaggagcc

SEQ ID NO: 16553 - DNA, 26 bp, Homo sapiens
ttcagtgcatcttactagaggagcca

SEQ ID NO: 16554 - DNA, 26 bp, Homo sapiens
tcagtgcatcttactagaggagccaa

SEQ ID NO: 16555 - DNA, 26 bp, Homo sapiens
cagtgcatcttactagaggagccaaa

SEQ ID NO: 16556 - DNA, 26 bp, Homo sapiens
agtgcatcttactagaggagccaaaa

SEQ ID NO: 16557 - DNA, 26 bp, Homo sapiens
gtgcatcttactagaggagccaaaag

SEQ ID NO: 16558 - DNA, 26 bp, Homo sapiens
tgcatcttactagaggagccaaaagt

SEQ ID NO: 16559 - DNA, 26 bp, Homo sapiens
gcatcttactagaggagccaaaagta

SEQ ID NO: 16560 - DNA, 26 bp, Homo sapiens
catcttactagaggagccaaaagtat

SEQ ID NO: 16561 - DNA, 26 bp, Homo sapiens
atcttactagaggagccaaaagtatg

SEQ ID NO: 16562 - DNA, 26 bp, Homo sapiens
tcttactagaggagccaaaagtatgg

SEQ ID NO: 16563 - DNA, 26 bp, Homo sapiens
cttactagaggagccaaaagtatggg

SEQ ID NO: 16564 - DNA, 26 bp, Homo sapiens
ttactagaggagccaaaagtatgggc

SEQ ID NO: 16565 - DNA, 26 bp, Homo sapiens
tactagaggagccaaaagtatgggct

SEQ ID NO: 16566 - DNA, 26 bp, Homo sapiens
actagaggagccaaaagtatgggctc

SEQ ID NO: 16567 - DNA, 26 bp, Homo sapiens
ctagaggagccaaaagtatgggctca

SEQ ID NO: 16568 - DNA, 26 bp, Homo sapiens
tagaggagccaaaagtatgggctcag

SEQ ID NO: 16569 - DNA, 26 bp, Homo sapiens
agaggagccaaaagtatgggctcaga

SEQ ID NO: 16570 - DNA, 26 bp, Homo sapiens
gaggagccaaaagtatgggctcagag

SEQ ID NO: 16571 - DNA, 26 bp, Homo sapiens
aggagccaaaagtatgggctcagagt

SEQ ID NO: 16572 - DNA, 26 bp, Homo sapiens
ggagccaaaagtatgggctcagagtt

SEQ ID NO: 16573 - DNA, 26 bp, Homo sapiens
gagccaaaagtatgggctcagagttg

SEQ ID NO: 16574 - DNA, 26 bp, Homo sapiens
agccaaaagtatgggctcagagttga

SEQ ID NO: 16575 - DNA, 26 bp, Homo sapiens
gccaaaagtatgggctcagagttgag

SEQ ID NO: 16576 - DNA, 26 bp, Homo sapiens
ccaaaagtatgggctcagagttgagt

SEQ ID NO: 16577 - DNA, 26 bp, Homo sapiens
caaaagtatgggctcagagttgagtg

SEQ ID NO: 16578 - DNA, 26 bp, Homo sapiens
aaaagtatgggctcagagttgagtgc

SEQ ID NO: 16579 - DNA, 26 bp, Homo sapiens
aaagtatgggctcagagttgagtgcc

SEQ ID NO: 16580 - DNA, 26 bp, Homo sapiens
aagtatgggctcagagttgagtgcca

SEQ ID NO: 16581 - DNA, 26 bp, Homo sapiens
agtatgggctcagagttgagtgccac

SEQ ID NO: 16582 - DNA, 26 bp, Homo sapiens
gtatgggctcagagttgagtgccacc

SEQ ID NO: 16583 - DNA, 26 bp, Homo sapiens
tatgggctcagagttgagtgccaccc

SEQ ID NO: 16584 - DNA, 26 bp, Homo sapiens
atgggctcagagttgagtgccaccct

SEQ ID NO: 16585 - DNA, 26 bp, Homo sapiens
tgggctcagagttgagtgccaccctc

SEQ ID NO: 16586 - DNA, 26 bp, Homo sapiens
gggctcagagttgagtgccaccctca

SEQ ID NO: 16587 - DNA, 26 bp, Homo sapiens
ggctcagagttgagtgccaccctcag

SEQ ID NO: 16588 - DNA, 26 bp, Homo sapiens
gctcagagttgagtgccaccctcagt

SEQ ID NO: 16589 - DNA, 26 bp, Homo sapiens
ctcagagttgagtgccaccctcagtg

SEQ ID NO: 16590 - DNA, 26 bp, Homo sapiens
tcagagttgagtgccaccctcagtgc

SEQ ID NO: 16591 - DNA, 26 bp, Homo sapiens
cagagttgagtgccaccctcagtgct

SEQ ID NO: 16592 - DNA, 26 bp, Homo sapiens
agagttgagtgccaccctcagtgcta

SEQ ID NO: 16593 - DNA, 26 bp, Homo sapiens
gagttgagtgccaccctcagtgctac

SEQ ID NO: 16594 - DNA, 26 bp, Homo sapiens
agttgagtgccaccctcagtgctaca

SEQ ID NO: 16595 - DNA, 26 bp, Homo sapiens
gttgagtgccaccctcagtgctacaa

SEQ ID NO: 16596 - DNA, 26 bp, Homo sapiens
ttgagtgccaccctcagtgctacaaa

SEQ ID NO: 16597 - DNA, 26 bp, Homo sapiens
tgagtgccaccctcagtgctacaaat

SEQ ID NO: 16598 - DNA, 26 bp, Homo sapiens
gagtgccaccctcagtgctacaaatc

SEQ ID NO: 16599 - DNA, 26 bp, Homo sapiens
agtgccaccctcagtgctacaaatca

SEQ ID NO: 16600 - DNA, 26 bp, Homo sapiens
gtgccaccctcagtgctacaaatcaa

SEQ ID NO: 16601 - DNA, 26 bp, Homo sapiens
tgccaccctcagtgctacaaatcaaa

SEQ ID NO: 16602 - DNA, 26 bp, Homo sapiens
gccaccctcagtgctacaaatcaaaa

SEQ ID NO: 16603 - DNA, 26 bp, Homo sapiens
ccaccctcagtgctacaaatcaaaac

SEQ ID NO: 16604 - DNA, 26 bp, Homo sapiens
caccctcagtgctacaaatcaaaaca

SEQ ID NO: 16605 - DNA, 26 bp, Homo sapiens
accctcagtgctacaaatcaaaacat

SEQ ID NO: 16606 - DNA, 26 bp, Homo sapiens
ccctcagtgctacaaatcaaaacatg

SEQ ID NO: 16607 - DNA, 26 bp, Homo sapiens
cctcagtgctacaaatcaaaacatgc

SEQ ID NO: 16608 - DNA, 26 bp, Homo sapiens
ctcagtgctacaaatcaaaacatgcc

SEQ ID NO: 16609 - DNA, 26 bp, Homo sapiens
tcagtgctacaaatcaaaacatgcca

SEQ ID NO: 16610 - DNA, 26 bp, Homo sapiens
cagtgctacaaatcaaaacatgccac

SEQ ID NO: 16611 - DNA, 26 bp, Homo sapiens
agtgctacaaatcaaaacatgccacg

SEQ ID NO: 16612 - DNA, 26 bp, Homo sapiens
gtgctacaaatcaaaacatgccacga

SEQ ID NO: 16613 - DNA, 26 bp, Homo sapiens
tgctacaaatcaaaacatgccacgaa

SEQ ID NO: 16614 - DNA, 26 bp, Homo sapiens
gctacaaatcaaaacatgccacgaat

SEQ ID NO: 16615 - DNA, 26 bp, Homo sapiens
ctacaaatcaaaacatgccacgaatg

SEQ ID NO: 16616 - DNA, 26 bp, Homo sapiens
tacaaatcaaaacatgccacgaatga

SEQ ID NO: 16617 - DNA, 26 bp, Homo sapiens
acaaatcaaaacatgccacgaatgag

SEQ ID NO: 16618 - DNA, 26 bp, Homo sapiens
caaatcaaaacatgccacgaatgaga

SEQ ID NO: 16619 - DNA, 26 bp, Homo sapiens
aaatcaaaacatgccacgaatgagaa

SEQ ID NO: 16620 - DNA, 26 bp, Homo sapiens
aatcaaaacatgccacgaatgagaat

SEQ ID NO: 16621 - DNA, 26 bp, Homo sapiens
atcaaaacatgccacgaatgagaatg

SEQ ID NO: 16622 - DNA, 26 bp, Homo sapiens
tcaaaacatgccacgaatgagaatgg

SEQ ID NO: 16623 - DNA, 26 bp, Homo sapiens
caaaacatgccacgaatgagaatgga

SEQ ID NO: 16624 - DNA, 26 bp, Homo sapiens
aaaacatgccacgaatgagaatggac

SEQ ID NO: 16625 - DNA, 26 bp, Homo sapiens
aaacatgccacgaatgagaatggaca

SEQ ID NO: 16626 - DNA, 26 bp, Homo sapiens
aacatgccacgaatgagaatggacat

SEQ ID NO: 16627 - DNA, 26 bp, Homo sapiens
acatgccacgaatgagaatggacata

SEQ ID NO: 16628 - DNA, 26 bp, Homo sapiens
catgccacgaatgagaatggacatag

SEQ ID NO: 16629 - DNA, 26 bp, Homo sapiens
atgccacgaatgagaatggacataga

SEQ ID NO: 16630 - DNA, 26 bp, Homo sapiens
tgccacgaatgagaatggacatagaa

SEQ ID NO: 16631 - DNA, 26 bp, Homo sapiens
gccacgaatgagaatggacatagaac

SEQ ID NO: 16632 - DNA, 26 bp, Homo sapiens
ccacgaatgagaatggacatagaacc

SEQ ID NO: 16633 - DNA, 26 bp, Homo sapiens
cacgaatgagaatggacatagaacca

SEQ ID NO: 16634 - DNA, 26 bp, Homo sapiens
acgaatgagaatggacatagaaccac

SEQ ID NO: 16635 - DNA, 26 bp, Homo sapiens
cgaatgagaatggacatagaaccact

SEQ ID NO: 16636 - DNA, 26 bp, Homo sapiens
gaatgagaatggacatagaaccactt

SEQ ID NO: 16637 - DNA, 26 bp, Homo sapiens
aatgagaatggacatagaaccacttc

SEQ ID NO: 16638 - DNA, 26 bp, Homo sapiens
atgagaatggacatagaaccacttcc

SEQ ID NO: 16639 - DNA, 26 bp, Homo sapiens
tgagaatggacatagaaccacttcca

SEQ ID NO: 16640 - DNA, 26 bp, Homo sapiens
gagaatggacatagaaccacttccat

SEQ ID NO: 16641 - DNA, 26 bp, Homo sapiens
agaatggacatagaaccacttccata

SEQ ID NO: 16642 - DNA, 26 bp, Homo sapiens
gaatggacatagaaccacttccatag

SEQ ID NO: 16643 - DNA, 26 bp, Homo sapiens
aatggacatagaaccacttccatagg

SEQ ID NO: 16644 - DNA, 26 bp, Homo sapiens
atggacatagaaccacttccataggt

SEQ ID NO: 16645 - DNA, 26 bp, Homo sapiens
tggacatagaaccacttccataggta

SEQ ID NO: 16646 - DNA, 26 bp, Homo sapiens
ggacatagaaccacttccataggtaa

SEQ ID NO: 16647 - DNA, 26 bp, Homo sapiens
gacatagaaccacttccataggtaaa

SEQ ID NO: 16648 - DNA, 26 bp, Homo sapiens
acatagaaccacttccataggtaaag

SEQ ID NO: 16649 - DNA, 26 bp, Homo sapiens
catagaaccacttccataggtaaagg

SEQ ID NO: 16650 - DNA, 26 bp, Homo sapiens
atagaaccacttccataggtaaaggt

SEQ ID NO: 16651 - DNA, 26 bp, Homo sapiens
tagaaccacttccataggtaaaggtc

SEQ ID NO: 16652 - DNA, 26 bp, Homo sapiens
agaaccacttccataggtaaaggtct

SEQ ID NO: 16653 - DNA, 26 bp, Homo sapiens
gaaccacttccataggtaaaggtcta

SEQ ID NO: 16654 - DNA, 26 bp, Homo sapiens
aaccacttccataggtaaaggtctaa

SEQ ID NO: 16655 - DNA, 26 bp, Homo sapiens
accacttccataggtaaaggtctaaa

SEQ ID NO: 16656 - DNA, 26 bp, Homo sapiens
ccacttccataggtaaaggtctaaaa

SEQ ID NO: 16657 - DNA, 26 bp, Homo sapiens
cacttccataggtaaaggtctaaaat

SEQ ID NO: 16658 - DNA, 26 bp, Homo sapiens
acttccataggtaaaggtctaaaatt

SEQ ID NO: 16659 - DNA, 26 bp, Homo sapiens
cttccataggtaaaggtctaaaattt

SEQ ID NO: 16660 - DNA, 26 bp, Homo sapiens
ttccataggtaaaggtctaaaatttg

SEQ ID NO: 16661 - DNA, 26 bp, Homo sapiens
tccataggtaaaggtctaaaatttgc

SEQ ID NO: 16662 - DNA, 26 bp, Homo sapiens
ccataggtaaaggtctaaaatttgct

SEQ ID NO: 16663 - DNA, 26 bp, Homo sapiens
cataggtaaaggtctaaaatttgctt

SEQ ID NO: 16664 - DNA, 26 bp, Homo sapiens
ataggtaaaggtctaaaatttgcttt

SEQ ID NO: 16665 - DNA, 26 bp, Homo sapiens
taggtaaaggtctaaaatttgcttta

SEQ ID NO: 16666 - DNA, 26 bp, Homo sapiens
aggtaaaggtctaaaatttgctttag

SEQ ID NO: 16667 - DNA, 26 bp, Homo sapiens
ggtaaaggtctaaaatttgctttagt

SEQ ID NO: 16668 - DNA, 26 bp, Homo sapiens
gtaaaggtctaaaatttgctttagtt

SEQ ID NO: 16669 - DNA, 26 bp, Homo sapiens
taaaggtctaaaatttgctttagttc

SEQ ID NO: 16670 - DNA, 26 bp, Homo sapiens
aaaggtctaaaatttgctttagttcc

SEQ ID NO: 16671 - DNA, 26 bp, Homo sapiens
aaggtctaaaatttgctttagttcca

SEQ ID NO: 16672 - DNA, 26 bp, Homo sapiens
aggtctaaaatttgctttagttccaa

SEQ ID NO: 16673 - DNA, 26 bp, Homo sapiens
ggtctaaaatttgctttagttccaaa

SEQ ID NO: 16674 - DNA, 26 bp, Homo sapiens
gtctaaaatttgctttagttccaaaa

SEQ ID NO: 16675 - DNA, 26 bp, Homo sapiens
tctaaaatttgctttagttccaaaaa

SEQ ID NO: 16676 - DNA, 26 bp, Homo sapiens
ctaaaatttgctttagttccaaaaaa

SEQ ID NO: 16677 - DNA, 26 bp, Homo sapiens
taaaatttgctttagttccaaaaaag

SEQ ID NO: 16678 - DNA, 26 bp, Homo sapiens
aaaatttgctttagttccaaaaaaga

SEQ ID NO: 16679 - DNA, 26 bp, Homo sapiens
aaatttgctttagttccaaaaaagat

SEQ ID NO: 16680 - DNA, 26 bp, Homo sapiens
aatttgctttagttccaaaaaagata

SEQ ID NO: 16681 - DNA, 26 bp, Homo sapiens
atttgctttagttccaaaaaagatat

SEQ ID NO: 16682 - DNA, 26 bp, Homo sapiens
tttgctttagttccaaaaaagatatt

SEQ ID NO: 16683 - DNA, 26 bp, Homo sapiens
ttgctttagttccaaaaaagatattt

SEQ ID NO: 16684 - DNA, 26 bp, Homo sapiens
tgctttagttccaaaaaagatatttg

SEQ ID NO: 16685 - DNA, 26 bp, Homo sapiens
gctttagttccaaaaaagatatttgt

SEQ ID NO: 16686 - DNA, 26 bp, Homo sapiens
ctttagttccaaaaaagatatttgtc

SEQ ID NO: 16687 - DNA, 26 bp, Homo sapiens
tttagttccaaaaaagatatttgtcc

SEQ ID NO: 16688 - DNA, 26 bp, Homo sapiens
ttagttccaaaaaagatatttgtcct

SEQ ID NO: 16689 - DNA, 26 bp, Homo sapiens
tagttccaaaaaagatatttgtcctt

SEQ ID NO: 16690 - DNA, 26 bp, Homo sapiens
agttccaaaaaagatatttgtccttt

SEQ ID NO: 16691 - DNA, 26 bp, Homo sapiens
gttccaaaaaagatatttgtcctttt

SEQ ID NO: 16692 - DNA, 26 bp, Homo sapiens
ttccaaaaaagatatttgtccttttc

SEQ ID NO: 16693 - DNA, 26 bp, Homo sapiens
tccaaaaaagatatttgtccttttct

SEQ ID NO: 16694 - DNA, 26 bp, Homo sapiens
ccaaaaaagatatttgtccttttctt

SEQ ID NO: 16695 - DNA, 26 bp, Homo sapiens
caaaaaagatatttgtccttttcttg

SEQ ID NO: 16696 - DNA, 26 bp, Homo sapiens
aaaaaagatatttgtccttttcttgc

SEQ ID NO: 16697 - DNA, 26 bp, Homo sapiens
aaaaagatatttgtccttttcttgcc

SEQ ID NO: 16698 - DNA, 26 bp, Homo sapiens
aaaagatatttgtccttttcttgcct

SEQ ID NO: 16699 - DNA, 26 bp, Homo sapiens
aaagatatttgtccttttcttgcctc

SEQ ID NO: 16700 - DNA, 26 bp, Homo sapiens
aagatatttgtccttttcttgcctcc

SEQ ID NO: 16701 - DNA, 26 bp, Homo sapiens
agatatttgtccttttcttgcctccc

SEQ ID NO: 16702 - DNA, 26 bp, Homo sapiens
gatatttgtccttttcttgcctccca

SEQ ID NO: 16703 - DNA, 26 bp, Homo sapiens
atatttgtccttttcttgcctcccag

SEQ ID NO: 16704 - DNA, 26 bp, Homo sapiens
tatttgtccttttcttgcctcccaga

SEQ ID NO: 16705 - DNA, 26 bp, Homo sapiens
atttgtccttttcttgcctcccagaa

SEQ ID NO: 16706 - DNA, 26 bp, Homo sapiens
tttgtccttttcttgcctcccagaat

SEQ ID NO: 16707 - DNA, 26 bp, Homo sapiens
ttgtccttttcttgcctcccagaatc

SEQ ID NO: 16708 - DNA, 26 bp, Homo sapiens
tgtccttttcttgcctcccagaatcc

SEQ ID NO: 16709 - DNA, 26 bp, Homo sapiens
gtccttttcttgcctcccagaatcca

SEQ ID NO: 16710 - DNA, 26 bp, Homo sapiens
tccttttcttgcctcccagaatccag

SEQ ID NO: 16711 - DNA, 26 bp, Homo sapiens
ccttttcttgcctcccagaatccaga

SEQ ID NO: 16712 - DNA, 26 bp, Homo sapiens
cttttcttgcctcccagaatccagaa

SEQ ID NO: 16713 - DNA, 26 bp, Homo sapiens
ttttcttgcctcccagaatccagaaa

SEQ ID NO: 16714 - DNA, 26 bp, Homo sapiens
tttcttgcctcccagaatccagaaaa

SEQ ID NO: 16715 - DNA, 26 bp, Homo sapiens
ttcttgcctcccagaatccagaaaat

SEQ ID NO: 16716 - DNA, 26 bp, Homo sapiens
tcttgcctcccagaatccagaaaatg

SEQ ID NO: 16717 - DNA, 26 bp, Homo sapiens
cttgcctcccagaatccagaaaatgt

SEQ ID NO: 16718 - DNA, 26 bp, Homo sapiens
ttgcctcccagaatccagaaaatgtc

SEQ ID NO: 16719 - DNA, 26 bp, Homo sapiens
tgcctcccagaatccagaaaatgtcc

SEQ ID NO: 16720 - DNA, 26 bp, Homo sapiens
gcctcccagaatccagaaaatgtccc

SEQ ID NO: 16721 - DNA, 26 bp, Homo sapiens
cctcccagaatccagaaaatgtcccc

SEQ ID NO: 16722 - DNA, 26 bp, Homo sapiens
ctcccagaatccagaaaatgtcccct

SEQ ID NO: 16723 - DNA, 26 bp, Homo sapiens
tcccagaatccagaaaatgtcccctc

SEQ ID NO: 16724 - DNA, 26 bp, Homo sapiens
cccagaatccagaaaatgtcccctca

SEQ ID NO: 16725 - DNA, 26 bp, Homo sapiens
ccagaatccagaaaatgtcccctcat

SEQ ID NO: 16726 - DNA, 26 bp, Homo sapiens
cagaatccagaaaatgtcccctcatc

SEQ ID NO: 16727 - DNA, 26 bp, Homo sapiens
agaatccagaaaatgtcccctcatcg

SEQ ID NO: 16728 - DNA, 26 bp, Homo sapiens
gaatccagaaaatgtcccctcatcgc

SEQ ID NO: 16729 - DNA, 26 bp, Homo sapiens
aatccagaaaatgtcccctcatcgct

SEQ ID NO: 16730 - DNA, 26 bp, Homo sapiens
atccagaaaatgtcccctcatcgctg

SEQ ID NO: 16731 - DNA, 26 bp, Homo sapiens
tccagaaaatgtcccctcatcgctgt

SEQ ID NO: 16732 - DNA, 26 bp, Homo sapiens
ccagaaaatgtcccctcatcgctgtc

SEQ ID NO: 16733 - DNA, 26 bp, Homo sapiens
cagaaaatgtcccctcatcgctgtcc

SEQ ID NO: 16734 - DNA, 26 bp, Homo sapiens
agaaaatgtcccctcatcgctgtcca

SEQ ID NO: 16735 - DNA, 26 bp, Homo sapiens
gaaaatgtcccctcatcgctgtccat

SEQ ID NO: 16736 - DNA, 26 bp, Homo sapiens
aaaatgtcccctcatcgctgtccatc

SEQ ID NO: 16737 - DNA, 26 bp, Homo sapiens
aaatgtcccctcatcgctgtccatct

SEQ ID NO: 16738 - DNA, 26 bp, Homo sapiens
aatgtcccctcatcgctgtccatctg

SEQ ID NO: 16739 - DNA, 26 bp, Homo sapiens
atgtcccctcatcgctgtccatctgc

SEQ ID NO: 16740 - DNA, 26 bp, Homo sapiens
tgtcccctcatcgctgtccatctgct

SEQ ID NO: 16741 - DNA, 26 bp, Homo sapiens
gtcccctcatcgctgtccatctgctc

SEQ ID NO: 16742 - DNA, 26 bp, Homo sapiens
tcccctcatcgctgtccatctgctcc

SEQ ID NO: 16743 - DNA, 26 bp, Homo sapiens
cccctcatcgctgtccatctgctcct

SEQ ID NO: 16744 - DNA, 26 bp, Homo sapiens
ccctcatcgctgtccatctgctcctg

SEQ ID NO: 16745 - DNA, 26 bp, Homo sapiens
cctcatcgctgtccatctgctcctgg

SEQ ID NO: 16746 - DNA, 26 bp, Homo sapiens
ctcatcgctgtccatctgctcctggc

SEQ ID NO: 16747 - DNA, 26 bp, Homo sapiens
tcatcgctgtccatctgctcctggct

SEQ ID NO: 16748 - DNA, 26 bp, Homo sapiens
catcgctgtccatctgctcctggctg

SEQ ID NO: 16749 - DNA, 26 bp, Homo sapiens
atcgctgtccatctgctcctggctgg

SEQ ID NO: 16750 - DNA, 26 bp, Homo sapiens
tcgctgtccatctgctcctggctggg

SEQ ID NO: 16751 - DNA, 26 bp, Homo sapiens
cgctgtccatctgctcctggctgggc

SEQ ID NO: 16752 - DNA, 26 bp, Homo sapiens
gctgtccatctgctcctggctgggcc

SEQ ID NO: 16753 - DNA, 26 bp, Homo sapiens
ctgtccatctgctcctggctgggccc

SEQ ID NO: 16754 - DNA, 26 bp, Homo sapiens
tgtccatctgctcctggctgggccct

SEQ ID NO: 16755 - DNA, 26 bp, Homo sapiens
gtccatctgctcctggctgggccctc

SEQ ID NO: 16756 - DNA, 26 bp, Homo sapiens
tccatctgctcctggctgggccctca

SEQ ID NO: 16757 - DNA, 26 bp, Homo sapiens
ccatctgctcctggctgggccctcaa

SEQ ID NO: 16758 - DNA, 26 bp, Homo sapiens
catctgctcctggctgggccctcaaa

SEQ ID NO: 16759 - DNA, 26 bp, Homo sapiens
atctgctcctggctgggccctcaaat

SEQ ID NO: 16760 - DNA, 26 bp, Homo sapiens
tctgctcctggctgggccctcaaatg

SEQ ID NO: 16761 - DNA, 26 bp, Homo sapiens
ctgctcctggctgggccctcaaatgt

SEQ ID NO: 16762 - DNA, 26 bp, Homo sapiens
tgctcctggctgggccctcaaatgta

SEQ ID NO: 16763 - DNA, 26 bp, Homo sapiens
gctcctggctgggccctcaaatgtag

SEQ ID NO: 16764 - DNA, 26 bp, Homo sapiens
ctcctggctgggccctcaaatgtaga

SEQ ID NO: 16765 - DNA, 26 bp, Homo sapiens
tcctggctgggccctcaaatgtagaa

SEQ ID NO: 16766 - DNA, 26 bp, Homo sapiens
cctggctgggccctcaaatgtagaag

SEQ ID NO: 16767 - DNA, 26 bp, Homo sapiens
ctggctgggccctcaaatgtagaagg

SEQ ID NO: 16768 - DNA, 26 bp, Homo sapiens
tggctgggccctcaaatgtagaaggg

SEQ ID NO: 16769 - DNA, 26 bp, Homo sapiens
ggctgggccctcaaatgtagaagggt

SEQ ID NO: 16770 - DNA, 26 bp, Homo sapiens
gctgggccctcaaatgtagaagggtc

SEQ ID NO: 16771 - DNA, 26 bp, Homo sapiens
ctgggccctcaaatgtagaagggtca

SEQ ID NO: 16772 - DNA, 26 bp, Homo sapiens
tgggccctcaaatgtagaagggtcag

SEQ ID NO: 16773 - DNA, 26 bp, Homo sapiens
gggccctcaaatgtagaagggtcaga

SEQ ID NO: 16774 - DNA, 26 bp, Homo sapiens
ggccctcaaatgtagaagggtcagag

SEQ ID NO: 16775 - DNA, 26 bp, Homo sapiens
gccctcaaatgtagaagggtcagagc

SEQ ID NO: 16776 - DNA, 26 bp, Homo sapiens
ccctcaaatgtagaagggtcagagct

SEQ ID NO: 16777 - DNA, 26 bp, Homo sapiens
cctcaaatgtagaagggtcagagctg

SEQ ID NO: 16778 - DNA, 26 bp, Homo sapiens
ctcaaatgtagaagggtcagagctgg

SEQ ID NO: 16779 - DNA, 26 bp, Homo sapiens
tcaaatgtagaagggtcagagctggg

SEQ ID NO: 16780 - DNA, 26 bp, Homo sapiens
caaatgtagaagggtcagagctggga

SEQ ID NO: 16781 - DNA, 26 bp, Homo sapiens
aaatgtagaagggtcagagctgggaa

SEQ ID NO: 16782 - DNA, 26 bp, Homo sapiens
aatgtagaagggtcagagctgggaag

SEQ ID NO: 16783 - DNA, 26 bp, Homo sapiens
atgtagaagggtcagagctgggaagc

SEQ ID NO: 16784 - DNA, 26 bp, Homo sapiens
tgtagaagggtcagagctgggaagcc

SEQ ID NO: 16785 - DNA, 26 bp, Homo sapiens
gtagaagggtcagagctgggaagcca

SEQ ID NO: 16786 - DNA, 26 bp, Homo sapiens
tagaagggtcagagctgggaagccac

SEQ ID NO: 16787 - DNA, 26 bp, Homo sapiens
agaagggtcagagctgggaagccact

SEQ ID NO: 16788 - DNA, 26 bp, Homo sapiens
gaagggtcagagctgggaagccactg

SEQ ID NO: 16789 - DNA, 26 bp, Homo sapiens
aagggtcagagctgggaagccactga

SEQ ID NO: 16790 - DNA, 26 bp, Homo sapiens
agggtcagagctgggaagccactgaa

SEQ ID NO: 16791 - DNA, 26 bp, Homo sapiens
gggtcagagctgggaagccactgaaa

SEQ ID NO: 16792 - DNA, 26 bp, Homo sapiens
ggtcagagctgggaagccactgaaat

SEQ ID NO: 16793 - DNA, 26 bp, Homo sapiens
gtcagagctgggaagccactgaaatg

SEQ ID NO: 16794 - DNA, 26 bp, Homo sapiens
tcagagctgggaagccactgaaatgg

SEQ ID NO: 16795 - DNA, 26 bp, Homo sapiens
cagagctgggaagccactgaaatggc

SEQ ID NO: 16796 - DNA, 26 bp, Homo sapiens
agagctgggaagccactgaaatggca

SEQ ID NO: 16797 - DNA, 26 bp, Homo sapiens
gagctgggaagccactgaaatggcat

SEQ ID NO: 16798 - DNA, 26 bp, Homo sapiens
agctgggaagccactgaaatggcatt

SEQ ID NO: 16799 - DNA, 26 bp, Homo sapiens
gctgggaagccactgaaatggcattg

SEQ ID NO: 16800 - DNA, 26 bp, Homo sapiens
ctgggaagccactgaaatggcattgc

SEQ ID NO: 16801 - DNA, 26 bp, Homo sapiens
tgggaagccactgaaatggcattgct

SEQ ID NO: 16802 - DNA, 26 bp, Homo sapiens
gggaagccactgaaatggcattgctg

SEQ ID NO: 16803 - DNA, 26 bp, Homo sapiens
ggaagccactgaaatggcattgctga

SEQ ID NO: 16804 - DNA, 26 bp, Homo sapiens
gaagccactgaaatggcattgctgag

SEQ ID NO: 16805 - DNA, 26 bp, Homo sapiens
aagccactgaaatggcattgctgagc

SEQ ID NO: 16806 - DNA, 26 bp, Homo sapiens
agccactgaaatggcattgctgagcc

SEQ ID NO: 16807 - DNA, 26 bp, Homo sapiens
gccactgaaatggcattgctgagccc

SEQ ID NO: 16808 - DNA, 26 bp, Homo sapiens
ccactgaaatggcattgctgagcccc

SEQ ID NO: 16809 - DNA, 26 bp, Homo sapiens
cactgaaatggcattgctgagccccg

SEQ ID NO: 16810 - DNA, 26 bp, Homo sapiens
actgaaatggcattgctgagccccgt

SEQ ID NO: 16811 - DNA, 26 bp, Homo sapiens
ctgaaatggcattgctgagccccgtc

SEQ ID NO: 16812 - DNA, 26 bp, Homo sapiens
tgaaatggcattgctgagccccgtcc

SEQ ID NO: 16813 - DNA, 26 bp, Homo sapiens
gaaatggcattgctgagccccgtccc

SEQ ID NO: 16814 - DNA, 26 bp, Homo sapiens
aaatggcattgctgagccccgtcccc

SEQ ID NO: 16815 - DNA, 26 bp, Homo sapiens
aatggcattgctgagccccgtccccc

SEQ ID NO: 16816 - DNA, 26 bp, Homo sapiens
atggcattgctgagccccgtccccct

SEQ ID NO: 16817 - DNA, 26 bp, Homo sapiens
tggcattgctgagccccgtccccctc

SEQ ID NO: 16818 - DNA, 26 bp, Homo sapiens
ggcattgctgagccccgtccccctcc

SEQ ID NO: 16819 - DNA, 26 bp, Homo sapiens
gcattgctgagccccgtccccctccg

SEQ ID NO: 16820 - DNA, 26 bp, Homo sapiens
cattgctgagccccgtccccctccgt

SEQ ID NO: 16821 - DNA, 26 bp, Homo sapiens
attgctgagccccgtccccctccgtg

SEQ ID NO: 16822 - DNA, 26 bp, Homo sapiens
ttgctgagccccgtccccctccgtgc

SEQ ID NO: 16823 - DNA, 26 bp, Homo sapiens
tgctgagccccgtccccctccgtgcc

SEQ ID NO: 16824 - DNA, 26 bp, Homo sapiens
gctgagccccgtccccctccgtgccc

SEQ ID NO: 16825 - DNA, 26 bp, Homo sapiens
ctgagccccgtccccctccgtgccca

SEQ ID NO: 16826 - DNA, 26 bp, Homo sapiens
tgagccccgtccccctccgtgcccac

SEQ ID NO: 16827 - DNA, 26 bp, Homo sapiens
gagccccgtccccctccgtgcccaca

SEQ ID NO: 16828 - DNA, 26 bp, Homo sapiens
agccccgtccccctccgtgcccacat

SEQ ID NO: 16829 - DNA, 26 bp, Homo sapiens
gccccgtccccctccgtgcccacatg

SEQ ID NO: 16830 - DNA, 26 bp, Homo sapiens
ccccgtccccctccgtgcccacatgg

SEQ ID NO: 16831 - DNA, 26 bp, Homo sapiens
cccgtccccctccgtgcccacatggt

SEQ ID NO: 16832 - DNA, 26 bp, Homo sapiens
ccgtccccctccgtgcccacatggtg

SEQ ID NO: 16833 - DNA, 26 bp, Homo sapiens
cgtccccctccgtgcccacatggtgc

SEQ ID NO: 16834 - DNA, 26 bp, Homo sapiens
gtccccctccgtgcccacatggtgcg

SEQ ID NO: 16835 - DNA, 26 bp, Homo sapiens
tccccctccgtgcccacatggtgcgt

SEQ ID NO: 16836 - DNA, 26 bp, Homo sapiens
ccccctccgtgcccacatggtgcgtc

SEQ ID NO: 16837 - DNA, 26 bp, Homo sapiens
cccctccgtgcccacatggtgcgtct

SEQ ID NO: 16838 - DNA, 26 bp, Homo sapiens
ccctccgtgcccacatggtgcgtctc

SEQ ID NO: 16839 - DNA, 26 bp, Homo sapiens
cctccgtgcccacatggtgcgtctca

SEQ ID NO: 16840 - DNA, 26 bp, Homo sapiens
ctccgtgcccacatggtgcgtctcaa

SEQ ID NO: 16841 - DNA, 26 bp, Homo sapiens
tccgtgcccacatggtgcgtctcaaa

SEQ ID NO: 16842 - DNA, 26 bp, Homo sapiens
ccgtgcccacatggtgcgtctcaaat

SEQ ID NO: 16843 - DNA, 26 bp, Homo sapiens
cgtgcccacatggtgcgtctcaaatt

SEQ ID NO: 16844 - DNA, 26 bp, Homo sapiens
gtgcccacatggtgcgtctcaaattc

SEQ ID NO: 16845 - DNA, 26 bp, Homo sapiens
tgcccacatggtgcgtctcaaattct

SEQ ID NO: 16846 - DNA, 26 bp, Homo sapiens
gcccacatggtgcgtctcaaattctt

SEQ ID NO: 16847 - DNA, 26 bp, Homo sapiens
cccacatggtgcgtctcaaattcttt

SEQ ID NO: 16848 - DNA, 26 bp, Homo sapiens
ccacatggtgcgtctcaaattctttc

SEQ ID NO: 16849 - DNA, 26 bp, Homo sapiens
cacatggtgcgtctcaaattctttct

SEQ ID NO: 16850 - DNA, 26 bp, Homo sapiens
acatggtgcgtctcaaattctttctc

SEQ ID NO: 16851 - DNA, 26 bp, Homo sapiens
catggtgcgtctcaaattctttctca

SEQ ID NO: 16852 - DNA, 26 bp, Homo sapiens
atggtgcgtctcaaattctttctcat

SEQ ID NO: 16853 - DNA, 26 bp, Homo sapiens
tggtgcgtctcaaattctttctcatg

SEQ ID NO: 16854 - DNA, 26 bp, Homo sapiens
ggtgcgtctcaaattctttctcatgc

SEQ ID NO: 16855 - DNA, 26 bp, Homo sapiens
gtgcgtctcaaattctttctcatgcc

SEQ ID NO: 16856 - DNA, 26 bp, Homo sapiens
tgcgtctcaaattctttctcatgcct

SEQ ID NO: 16857 - DNA, 26 bp, Homo sapiens
gcgtctcaaattctttctcatgcctt

SEQ ID NO: 16858 - DNA, 26 bp, Homo sapiens
cgtctcaaattctttctcatgccttc

SEQ ID NO: 16859 - DNA, 26 bp, Homo sapiens
gtctcaaattctttctcatgccttct

SEQ ID NO: 16860 - DNA, 26 bp, Homo sapiens
tctcaaattctttctcatgccttctc

SEQ ID NO: 16861 - DNA, 26 bp, Homo sapiens
ctcaaattctttctcatgccttctcc

SEQ ID NO: 16862 - DNA, 26 bp, Homo sapiens
tcaaattctttctcatgccttctccc

SEQ ID NO: 16863 - DNA, 26 bp, Homo sapiens
caaattctttctcatgccttctcccg

SEQ ID NO: 16864 - DNA, 26 bp, Homo sapiens
aaattctttctcatgccttctcccgg

SEQ ID NO: 16865 - DNA, 26 bp, Homo sapiens
aattctttctcatgccttctcccggt

SEQ ID NO: 16866 - DNA, 26 bp, Homo sapiens
attctttctcatgccttctcccggtt

SEQ ID NO: 16867 - DNA, 26 bp, Homo sapiens
ttctttctcatgccttctcccggttt

SEQ ID NO: 16868 - DNA, 26 bp, Homo sapiens
tctttctcatgccttctcccggtttc

SEQ ID NO: 16869 - DNA, 26 bp, Homo sapiens
ctttctcatgccttctcccggtttct

SEQ ID NO: 16870 - DNA, 26 bp, Homo sapiens
tttctcatgccttctcccggtttctc

SEQ ID NO: 16871 - DNA, 26 bp, Homo sapiens
ttctcatgccttctcccggtttctct

SEQ ID NO: 16872 - DNA, 26 bp, Homo sapiens
tctcatgccttctcccggtttctctt

SEQ ID NO: 16873 - DNA, 26 bp, Homo sapiens
ctcatgccttctcccggtttctcttt

SEQ ID NO: 16874 - DNA, 26 bp, Homo sapiens
tcatgccttctcccggtttctctttt

SEQ ID NO: 16875 - DNA, 26 bp, Homo sapiens
catgccttctcccggtttctcttttc

SEQ ID NO: 16876 - DNA, 26 bp, Homo sapiens
atgccttctcccggtttctcttttct

SEQ ID NO: 16877 - DNA, 26 bp, Homo sapiens
tgccttctcccggtttctcttttctc

SEQ ID NO: 16878 - DNA, 26 bp, Homo sapiens
gccttctcccggtttctcttttctcc

SEQ ID NO: 16879 - DNA, 26 bp, Homo sapiens
ccttctcccggtttctcttttctccc

SEQ ID NO: 16880 - DNA, 26 bp, Homo sapiens
cttctcccggtttctcttttctccct

SEQ ID NO: 16881 - DNA, 26 bp, Homo sapiens
ttctcccggtttctcttttctccctt

SEQ ID NO: 16882 - DNA, 26 bp, Homo sapiens
tctcccggtttctcttttctcccttg

SEQ ID NO: 16883 - DNA, 26 bp, Homo sapiens
ctcccggtttctcttttctcccttgc

SEQ ID NO: 16884 - DNA, 26 bp, Homo sapiens
tcccggtttctcttttctcccttgct

SEQ ID NO: 16885 - DNA, 26 bp, Homo sapiens
cccggtttctcttttctcccttgctt

SEQ ID NO: 16886 - DNA, 26 bp, Homo sapiens
ccggtttctcttttctcccttgcttt

SEQ ID NO: 16887 - DNA, 26 bp, Homo sapiens
cggtttctcttttctcccttgctttt

SEQ ID NO: 16888 - DNA, 26 bp, Homo sapiens
ggtttctcttttctcccttgcttttt

SEQ ID NO: 16889 - DNA, 26 bp, Homo sapiens
gtttctcttttctcccttgctttttg

SEQ ID NO: 16890 - DNA, 26 bp, Homo sapiens
tttctcttttctcccttgctttttgc

SEQ ID NO: 16891 - DNA, 26 bp, Homo sapiens
ttctcttttctcccttgctttttgct

SEQ ID NO: 16892 - DNA, 26 bp, Homo sapiens
tctcttttctcccttgctttttgctt

SEQ ID NO: 16893 - DNA, 26 bp, Homo sapiens
ctcttttctcccttgctttttgcttt

SEQ ID NO: 16894 - DNA, 26 bp, Homo sapiens
tcttttctcccttgctttttgctttt

SEQ ID NO: 16895 - DNA, 26 bp, Homo sapiens
cttttctcccttgctttttgcttttt

SEQ ID NO: 16896 - DNA, 26 bp, Homo sapiens
ttttctcccttgctttttgctttttt

SEQ ID NO: 16897 - DNA, 26 bp, Homo sapiens
tttctcccttgctttttgcttttttt

SEQ ID NO: 16898 - DNA, 26 bp, Homo sapiens
ttctcccttgctttttgctttttttc

SEQ ID NO: 16899 - DNA, 26 bp, Homo sapiens
tctcccttgctttttgctttttttcc

SEQ ID NO: 16900 - DNA, 26 bp, Homo sapiens
ctcccttgctttttgctttttttcct

SEQ ID NO: 16901 - DNA, 26 bp, Homo sapiens
tcccttgctttttgctttttttcctt

SEQ ID NO: 16902 - DNA, 26 bp, Homo sapiens
cccttgctttttgctttttttccttt

SEQ ID NO: 16903 - DNA, 26 bp, Homo sapiens
ccttgctttttgctttttttcctttt

SEQ ID NO: 16904 - DNA, 26 bp, Homo sapiens
cttgctttttgctttttttccttttc

SEQ ID NO: 16905 - DNA, 26 bp, Homo sapiens
ttgctttttgctttttttccttttcc

SEQ ID NO: 16906 - DNA, 26 bp, Homo sapiens
tgctttttgctttttttccttttcct

SEQ ID NO: 16907 - DNA, 26 bp, Homo sapiens
gctttttgctttttttccttttcctc

SEQ ID NO: 16908 - DNA, 26 bp, Homo sapiens
ctttttgctttttttccttttcctcc

SEQ ID NO: 16909 - DNA, 26 bp, Homo sapiens
tttttgctttttttccttttcctcct

SEQ ID NO: 16910 - DNA, 26 bp, Homo sapiens
ttttgctttttttccttttcctcctc

SEQ ID NO: 16911 - DNA, 26 bp, Homo sapiens
tttgctttttttccttttcctcctca

SEQ ID NO: 16912 - DNA, 26 bp, Homo sapiens
ttgctttttttccttttcctcctcac

SEQ ID NO: 16913 - DNA, 26 bp, Homo sapiens
tgctttttttccttttcctcctcaca

SEQ ID NO: 16914 - DNA, 26 bp, Homo sapiens
gctttttttccttttcctcctcacat

SEQ ID NO: 16915 - DNA, 26 bp, Homo sapiens
ctttttttccttttcctcctcacatg

SEQ ID NO: 16916 - DNA, 26 bp, Homo sapiens
tttttttccttttcctcctcacatgt

SEQ ID NO: 16917 - DNA, 26 bp, Homo sapiens
ttttttccttttcctcctcacatgtc

SEQ ID NO: 16918 - DNA, 26 bp, Homo sapiens
tttttccttttcctcctcacatgtct

SEQ ID NO: 16919 - DNA, 26 bp, Homo sapiens
ttttccttttcctcctcacatgtctt

SEQ ID NO: 16920 - DNA, 26 bp, Homo sapiens
tttccttttcctcctcacatgtctta

SEQ ID NO: 16921 - DNA, 26 bp, Homo sapiens
ttccttttcctcctcacatgtcttag

SEQ ID NO: 16922 - DNA, 26 bp, Homo sapiens
tccttttcctcctcacatgtcttagg

SEQ ID NO: 16923 - DNA, 26 bp, Homo sapiens
ccttttcctcctcacatgtcttaggc

SEQ ID NO: 16924 - DNA, 26 bp, Homo sapiens
cttttcctcctcacatgtcttaggcc

SEQ ID NO: 16925 - DNA, 26 bp, Homo sapiens
ttttcctcctcacatgtcttaggcct

SEQ ID NO: 16926 - DNA, 26 bp, Homo sapiens
tttcctcctcacatgtcttaggcctg

SEQ ID NO: 16927 - DNA, 26 bp, Homo sapiens
ttcctcctcacatgtcttaggcctgc

SEQ ID NO: 16928 - DNA, 26 bp, Homo sapiens
tcctcctcacatgtcttaggcctgct

SEQ ID NO: 16929 - DNA, 26 bp, Homo sapiens
cctcctcacatgtcttaggcctgcta

SEQ ID NO: 16930 - DNA, 26 bp, Homo sapiens
ctcctcacatgtcttaggcctgctag

SEQ ID NO: 16931 - DNA, 26 bp, Homo sapiens
tcctcacatgtcttaggcctgctaga

SEQ ID NO: 16932 - DNA, 26 bp, Homo sapiens
cctcacatgtcttaggcctgctagag

SEQ ID NO: 16933 - DNA, 26 bp, Homo sapiens
ctcacatgtcttaggcctgctagagg

SEQ ID NO: 16934 - DNA, 26 bp, Homo sapiens
tcacatgtcttaggcctgctagagga

SEQ ID NO: 16935 - DNA, 26 bp, Homo sapiens
cacatgtcttaggcctgctagaggac

SEQ ID NO: 16936 - DNA, 26 bp, Homo sapiens
acatgtcttaggcctgctagaggact

SEQ ID NO: 16937 - DNA, 26 bp, Homo sapiens
catgtcttaggcctgctagaggactc

SEQ ID NO: 16938 - DNA, 26 bp, Homo sapiens
atgtcttaggcctgctagaggactcc

SEQ ID NO: 16939 - DNA, 26 bp, Homo sapiens
tgtcttaggcctgctagaggactccc

SEQ ID NO: 16940 - DNA, 26 bp, Homo sapiens
gtcttaggcctgctagaggactcccg

SEQ ID NO: 16941 - DNA, 26 bp, Homo sapiens
tcttaggcctgctagaggactcccga

SEQ ID NO: 16942 - DNA, 26 bp, Homo sapiens
cttaggcctgctagaggactcccgag

SEQ ID NO: 16943 - DNA, 26 bp, Homo sapiens
ttaggcctgctagaggactcccgaga

SEQ ID NO: 16944 - DNA, 26 bp, Homo sapiens
taggcctgctagaggactcccgagat

SEQ ID NO: 16945 - DNA, 26 bp, Homo sapiens
aggcctgctagaggactcccgagatg

SEQ ID NO: 16946 - DNA, 26 bp, Homo sapiens
ggcctgctagaggactcccgagatgt

SEQ ID NO: 16947 - DNA, 26 bp, Homo sapiens
gcctgctagaggactcccgagatgtt

SEQ ID NO: 16948 - DNA, 26 bp, Homo sapiens
cctgctagaggactcccgagatgttg

SEQ ID NO: 16949 - DNA, 26 bp, Homo sapiens
ctgctagaggactcccgagatgttgc

SEQ ID NO: 16950 - DNA, 26 bp, Homo sapiens
tgctagaggactcccgagatgttgct

SEQ ID NO: 16951 - DNA, 26 bp, Homo sapiens
gctagaggactcccgagatgttgctc

SEQ ID NO: 16952 - DNA, 26 bp, Homo sapiens
ctagaggactcccgagatgttgctca

SEQ ID NO: 16953 - DNA, 26 bp, Homo sapiens
tagaggactcccgagatgttgctcag

SEQ ID NO: 16954 - DNA, 26 bp, Homo sapiens
agaggactcccgagatgttgctcagg

SEQ ID NO: 16955 - DNA, 26 bp, Homo sapiens
gaggactcccgagatgttgctcaggc

SEQ ID NO: 16956 - DNA, 26 bp, Homo sapiens
aggactcccgagatgttgctcaggcc

SEQ ID NO: 16957 - DNA, 26 bp, Homo sapiens
ggactcccgagatgttgctcaggcca

SEQ ID NO: 16958 - DNA, 26 bp, Homo sapiens
gactcccgagatgttgctcaggccag

SEQ ID NO: 16959 - DNA, 26 bp, Homo sapiens
actcccgagatgttgctcaggccagc

SEQ ID NO: 16960 - DNA, 26 bp, Homo sapiens
ctcccgagatgttgctcaggccagcc

SEQ ID NO: 16961 - DNA, 26 bp, Homo sapiens
tcccgagatgttgctcaggccagcca

SEQ ID NO: 16962 - DNA, 26 bp, Homo sapiens
cccgagatgttgctcaggccagccag

SEQ ID NO: 16963 - DNA, 26 bp, Homo sapiens
ccgagatgttgctcaggccagccagt

SEQ ID NO: 16964 - DNA, 26 bp, Homo sapiens
cgagatgttgctcaggccagccagtg

SEQ ID NO: 16965 - DNA, 26 bp, Homo sapiens
gagatgttgctcaggccagccagtga

SEQ ID NO: 16966 - DNA, 26 bp, Homo sapiens
agatgttgctcaggccagccagtgat

SEQ ID NO: 16967 - DNA, 26 bp, Homo sapiens
gatgttgctcaggccagccagtgatc

SEQ ID NO: 16968 - DNA, 26 bp, Homo sapiens
atgttgctcaggccagccagtgatcc

SEQ ID NO: 16969 - DNA, 26 bp, Homo sapiens
tgttgctcaggccagccagtgatccc

SEQ ID NO: 16970 - DNA, 26 bp, Homo sapiens
gttgctcaggccagccagtgatcccc

SEQ ID NO: 16971 - DNA, 26 bp, Homo sapiens
ttgctcaggccagccagtgatcccct

SEQ ID NO: 16972 - DNA, 26 bp, Homo sapiens
tgctcaggccagccagtgatcccctg

SEQ ID NO: 16973 - DNA, 26 bp, Homo sapiens
gctcaggccagccagtgatcccctgg

SEQ ID NO: 16974 - DNA, 26 bp, Homo sapiens
ctcaggccagccagtgatcccctggg

SEQ ID NO: 16975 - DNA, 26 bp, Homo sapiens
tcaggccagccagtgatcccctgggg

SEQ ID NO: 16976 - DNA, 26 bp, Homo sapiens
caggccagccagtgatcccctggggc

SEQ ID NO: 16977 - DNA, 26 bp, Homo sapiens
aggccagccagtgatcccctggggct

SEQ ID NO: 16978 - DNA, 26 bp, Homo sapiens
ggccagccagtgatcccctggggcta

SEQ ID NO: 16979 - DNA, 26 bp, Homo sapiens
gccagccagtgatcccctggggctaa

SEQ ID NO: 16980 - DNA, 26 bp, Homo sapiens
ccagccagtgatcccctggggctaac

SEQ ID NO: 16981 - DNA, 26 bp, Homo sapiens
cagccagtgatcccctggggctaacg

SEQ ID NO: 16982 - DNA, 26 bp, Homo sapiens
agccagtgatcccctggggctaacgg

SEQ ID NO: 16983 - DNA, 26 bp, Homo sapiens
gccagtgatcccctggggctaacggg

SEQ ID NO: 16984 - DNA, 26 bp, Homo sapiens
ccagtgatcccctggggctaacgggc

SEQ ID NO: 16985 - DNA, 26 bp, Homo sapiens
cagtgatcccctggggctaacgggct

SEQ ID NO: 16986 - DNA, 26 bp, Homo sapiens
agtgatcccctggggctaacgggctt

SEQ ID NO: 16987 - DNA, 26 bp, Homo sapiens
gtgatcccctggggctaacgggcttg

SEQ ID NO: 16988 - DNA, 26 bp, Homo sapiens
tgatcccctggggctaacgggcttgt

SEQ ID NO: 16989 - DNA, 26 bp, Homo sapiens
gatcccctggggctaacgggcttgtt

SEQ ID NO: 16990 - DNA, 26 bp, Homo sapiens
atcccctggggctaacgggcttgttg

SEQ ID NO: 16991 - DNA, 26 bp, Homo sapiens
tcccctggggctaacgggcttgttgc

SEQ ID NO: 16992 - DNA, 26 bp, Homo sapiens
cccctggggctaacgggcttgttgcc

SEQ ID NO: 16993 - DNA, 26 bp, Homo sapiens
ccctggggctaacgggcttgttgccc

SEQ ID NO: 16994 - DNA, 26 bp, Homo sapiens
cctggggctaacgggcttgttgccct

SEQ ID NO: 16995 - DNA, 26 bp, Homo sapiens
ctggggctaacgggcttgttgccctg

SEQ ID NO: 16996 - DNA, 26 bp, Homo sapiens
tggggctaacgggcttgttgccctgg

SEQ ID NO: 16997 - DNA, 26 bp, Homo sapiens
ggggctaacgggcttgttgccctggg

SEQ ID NO: 16998 - DNA, 26 bp, Homo sapiens
gggctaacgggcttgttgccctgggt

SEQ ID NO: 16999 - DNA, 26 bp, Homo sapiens
ggctaacgggcttgttgccctgggtt

SEQ ID NO: 17000 - DNA, 26 bp, Homo sapiens
gctaacgggcttgttgccctgggttt

SEQ ID NO: 17001 - DNA, 26 bp, Homo sapiens
ctaacgggcttgttgccctgggtttt

SEQ ID NO: 17002 - DNA, 26 bp, Homo sapiens
taacgggcttgttgccctgggttttg

SEQ ID NO: 17003 - DNA, 26 bp, Homo sapiens
aacgggcttgttgccctgggttttgg

SEQ ID NO: 17004 - DNA, 26 bp, Homo sapiens
acgggcttgttgccctgggttttggg

SEQ ID NO: 17005 - DNA, 26 bp, Homo sapiens
cgggcttgttgccctgggttttgggc

SEQ ID NO: 17006 - DNA, 26 bp, Homo sapiens
gggcttgttgccctgggttttgggct

SEQ ID NO: 17007 - DNA, 26 bp, Homo sapiens
ggcttgttgccctgggttttgggctg

SEQ ID NO: 17008 - DNA, 26 bp, Homo sapiens
gcttgttgccctgggttttgggctgc

SEQ ID NO: 17009 - DNA, 26 bp, Homo sapiens
cttgttgccctgggttttgggctgca

SEQ ID NO: 17010 - DNA, 26 bp, Homo sapiens
ttgttgccctgggttttgggctgcag

SEQ ID NO: 17011 - DNA, 26 bp, Homo sapiens
tgttgccctgggttttgggctgcagg

SEQ ID NO: 17012 - DNA, 26 bp, Homo sapiens
gttgccctgggttttgggctgcaggg

SEQ ID NO: 17013 - DNA, 26 bp, Homo sapiens
ttgccctgggttttgggctgcagggc

SEQ ID NO: 17014 - DNA, 26 bp, Homo sapiens
tgccctgggttttgggctgcagggct

SEQ ID NO: 17015 - DNA, 26 bp, Homo sapiens
gccctgggttttgggctgcagggctg

SEQ ID NO: 17016 - DNA, 26 bp, Homo sapiens
ccctgggttttgggctgcagggctgg

SEQ ID NO: 17017 - DNA, 26 bp, Homo sapiens
cctgggttttgggctgcagggctggc

SEQ ID NO: 17018 - DNA, 26 bp, Homo sapiens
ctgggttttgggctgcagggctggcc

SEQ ID NO: 17019 - DNA, 26 bp, Homo sapiens
tgggttttgggctgcagggctggccc

SEQ ID NO: 17020 - DNA, 26 bp, Homo sapiens
gggttttgggctgcagggctggccca

SEQ ID NO: 17021 - DNA, 26 bp, Homo sapiens
ggttttgggctgcagggctggcccag

SEQ ID NO: 17022 - DNA, 26 bp, Homo sapiens
gttttgggctgcagggctggcccagt

SEQ ID NO: 17023 - DNA, 26 bp, Homo sapiens
ttttgggctgcagggctggcccagtg

SEQ ID NO: 17024 - DNA, 26 bp, Homo sapiens
tttgggctgcagggctggcccagtgg

SEQ ID NO: 17025 - DNA, 26 bp, Homo sapiens
ttgggctgcagggctggcccagtggg

SEQ ID NO: 17026 - DNA, 26 bp, Homo sapiens
tgggctgcagggctggcccagtgggg

SEQ ID NO: 17027 - DNA, 26 bp, Homo sapiens
gggctgcagggctggcccagtggggt

SEQ ID NO: 17028 - DNA, 26 bp, Homo sapiens
ggctgcagggctggcccagtggggta

SEQ ID NO: 17029 - DNA, 26 bp, Homo sapiens
gctgcagggctggcccagtggggtac

SEQ ID NO: 17030 - DNA, 26 bp, Homo sapiens
ctgcagggctggcccagtggggtacg

SEQ ID NO: 17031 - DNA, 26 bp, Homo sapiens
tgcagggctggcccagtggggtacgt

SEQ ID NO: 17032 - DNA, 26 bp, Homo sapiens
gcagggctggcccagtggggtacgtg

SEQ ID NO: 17033 - DNA, 26 bp, Homo sapiens
cagggctggcccagtggggtacgtga

SEQ ID NO: 17034 - DNA, 26 bp, Homo sapiens
agggctggcccagtggggtacgtgat

SEQ ID NO: 17035 - DNA, 26 bp, Homo sapiens
gggctggcccagtggggtacgtgatg

SEQ ID NO: 17036 - DNA, 26 bp, Homo sapiens
ggctggcccagtggggtacgtgatgc

SEQ ID NO: 17037 - DNA, 26 bp, Homo sapiens
gctggcccagtggggtacgtgatgca

SEQ ID NO: 17038 - DNA, 26 bp, Homo sapiens
ctggcccagtggggtacgtgatgcat

SEQ ID NO: 17039 - DNA, 26 bp, Homo sapiens
tggcccagtggggtacgtgatgcatt

SEQ ID NO: 17040 - DNA, 26 bp, Homo sapiens
ggcccagtggggtacgtgatgcattg

SEQ ID NO: 17041 - DNA, 26 bp, Homo sapiens
gcccagtggggtacgtgatgcattgg

SEQ ID NO: 17042 - DNA, 26 bp, Homo sapiens
cccagtggggtacgtgatgcattggg

SEQ ID NO: 17043 - DNA, 26 bp, Homo sapiens
ccagtggggtacgtgatgcattgggt

SEQ ID NO: 17044 - DNA, 26 bp, Homo sapiens
cagtggggtacgtgatgcattgggtg

SEQ ID NO: 17045 - DNA, 26 bp, Homo sapiens
agtggggtacgtgatgcattgggtga

SEQ ID NO: 17046 - DNA, 26 bp, Homo sapiens
gtggggtacgtgatgcattgggtgat

SEQ ID NO: 17047 - DNA, 26 bp, Homo sapiens
tggggtacgtgatgcattgggtgatc

SEQ ID NO: 17048 - DNA, 26 bp, Homo sapiens
ggggtacgtgatgcattgggtgatca

SEQ ID NO: 17049 - DNA, 26 bp, Homo sapiens
gggtacgtgatgcattgggtgatcag

SEQ ID NO: 17050 - DNA, 26 bp, Homo sapiens
ggtacgtgatgcattgggtgatcagt

SEQ ID NO: 17051 - DNA, 26 bp, Homo sapiens
gtacgtgatgcattgggtgatcagtg

SEQ ID NO: 17052 - DNA, 26 bp, Homo sapiens
tacgtgatgcattgggtgatcagtgc

SEQ ID NO: 17053 - DNA, 26 bp, Homo sapiens
acgtgatgcattgggtgatcagtgca

SEQ ID NO: 17054 - DNA, 26 bp, Homo sapiens
cgtgatgcattgggtgatcagtgcag

SEQ ID NO: 17055 - DNA, 26 bp, Homo sapiens
gtgatgcattgggtgatcagtgcagc

SEQ ID NO: 17056 - DNA, 26 bp, Homo sapiens
tgatgcattgggtgatcagtgcagct

SEQ ID NO: 17057 - DNA, 26 bp, Homo sapiens
gatgcattgggtgatcagtgcagctc

SEQ ID NO: 17058 - DNA, 26 bp, Homo sapiens
atgcattgggtgatcagtgcagctcc

SEQ ID NO: 17059 - DNA, 26 bp, Homo sapiens
tgcattgggtgatcagtgcagctcct

SEQ ID NO: 17060 - DNA, 26 bp, Homo sapiens
gcattgggtgatcagtgcagctcctc

SEQ ID NO: 17061 - DNA, 26 bp, Homo sapiens
cattgggtgatcagtgcagctcctca

SEQ ID NO: 17062 - DNA, 26 bp, Homo sapiens
attgggtgatcagtgcagctcctcaa

SEQ ID NO: 17063 - DNA, 26 bp, Homo sapiens
ttgggtgatcagtgcagctcctcaat

SEQ ID NO: 17064 - DNA, 26 bp, Homo sapiens
tgggtgatcagtgcagctcctcaatc

SEQ ID NO: 17065 - DNA, 26 bp, Homo sapiens
gggtgatcagtgcagctcctcaatca

SEQ ID NO: 17066 - DNA, 26 bp, Homo sapiens
ggtgatcagtgcagctcctcaatcaa

SEQ ID NO: 17067 - DNA, 26 bp, Homo sapiens
gtgatcagtgcagctcctcaatcaaa

SEQ ID NO: 17068 - DNA, 26 bp, Homo sapiens
tgatcagtgcagctcctcaatcaaac

SEQ ID NO: 17069 - DNA, 26 bp, Homo sapiens
gatcagtgcagctcctcaatcaaact

SEQ ID NO: 17070 - DNA, 26 bp, Homo sapiens
atcagtgcagctcctcaatcaaactg

SEQ ID NO: 17071 - DNA, 26 bp, Homo sapiens
tcagtgcagctcctcaatcaaactgg

SEQ ID NO: 17072 - DNA, 26 bp, Homo sapiens
cagtgcagctcctcaatcaaactggt

SEQ ID NO: 17073 - DNA, 26 bp, Homo sapiens
agtgcagctcctcaatcaaactggtc

SEQ ID NO: 17074 - DNA, 26 bp, Homo sapiens
gtgcagctcctcaatcaaactggtcc

SEQ ID NO: 17075 - DNA, 26 bp, Homo sapiens
tgcagctcctcaatcaaactggtcct

SEQ ID NO: 17076 - DNA, 26 bp, Homo sapiens
gcagctcctcaatcaaactggtcctg

SEQ ID NO: 17077 - DNA, 26 bp, Homo sapiens
cagctcctcaatcaaactggtcctgc

SEQ ID NO: 17078 - DNA, 26 bp, Homo sapiens
agctcctcaatcaaactggtcctgcg

SEQ ID NO: 17079 - DNA, 26 bp, Homo sapiens
gctcctcaatcaaactggtcctgcgt

SEQ ID NO: 17080 - DNA, 26 bp, Homo sapiens
ctcctcaatcaaactggtcctgcgtg

SEQ ID NO: 17081 - DNA, 26 bp, Homo sapiens
tcctcaatcaaactggtcctgcgtgc

SEQ ID NO: 17082 - DNA, 26 bp, Homo sapiens
cctcaatcaaactggtcctgcgtgcc

SEQ ID NO: 17083 - DNA, 26 bp, Homo sapiens
ctcaatcaaactggtcctgcgtgccc

SEQ ID NO: 17084 - DNA, 26 bp, Homo sapiens
tcaatcaaactggtcctgcgtgccct

SEQ ID NO: 17085 - DNA, 26 bp, Homo sapiens
caatcaaactggtcctgcgtgccctg

SEQ ID NO: 17086 - DNA, 26 bp, Homo sapiens
aatcaaactggtcctgcgtgccctga

SEQ ID NO: 17087 - DNA, 26 bp, Homo sapiens
atcaaactggtcctgcgtgccctgag

SEQ ID NO: 17088 - DNA, 26 bp, Homo sapiens
tcaaactggtcctgcgtgccctgagg

SEQ ID NO: 17089 - DNA, 26 bp, Homo sapiens
caaactggtcctgcgtgccctgaggt

SEQ ID NO: 17090 - DNA, 26 bp, Homo sapiens
aaactggtcctgcgtgccctgaggtg

SEQ ID NO: 17091 - DNA, 26 bp, Homo sapiens
aactggtcctgcgtgccctgaggtgg

SEQ ID NO: 17092 - DNA, 26 bp, Homo sapiens
actggtcctgcgtgccctgaggtggc

SEQ ID NO: 17093 - DNA, 26 bp, Homo sapiens
ctggtcctgcgtgccctgaggtggcg

SEQ ID NO: 17094 - DNA, 26 bp, Homo sapiens
tggtcctgcgtgccctgaggtggcgg

SEQ ID NO: 17095 - DNA, 26 bp, Homo sapiens
ggtcctgcgtgccctgaggtggcggg

SEQ ID NO: 17096 - DNA, 26 bp, Homo sapiens
gtcctgcgtgccctgaggtggcgggg

SEQ ID NO: 17097 - DNA, 26 bp, Homo sapiens
tcctgcgtgccctgaggtggcggggg

SEQ ID NO: 17098 - DNA, 26 bp, Homo sapiens
cctgcgtgccctgaggtggcgggggt

SEQ ID NO: 17099 - DNA, 26 bp, Homo sapiens
ctgcgtgccctgaggtggcgggggtt

SEQ ID NO: 17100 - DNA, 26 bp, Homo sapiens
tgcgtgccctgaggtggcgggggttg

SEQ ID NO: 17101 - DNA, 26 bp, Homo sapiens
gcgtgccctgaggtggcgggggttgg

SEQ ID NO: 17102 - DNA, 26 bp, Homo sapiens
cgtgccctgaggtggcgggggttgga

SEQ ID NO: 17103 - DNA, 26 bp, Homo sapiens
gtgccctgaggtggcgggggttggag

SEQ ID NO: 17104 - DNA, 26 bp, Homo sapiens
tgccctgaggtggcgggggttggagc

SEQ ID NO: 17105 - DNA, 26 bp, Homo sapiens
gccctgaggtggcgggggttggagca

SEQ ID NO: 17106 - DNA, 26 bp, Homo sapiens
ccctgaggtggcgggggttggagcag

SEQ ID NO: 17107 - DNA, 26 bp, Homo sapiens
cctgaggtggcgggggttggagcagg

SEQ ID NO: 17108 - DNA, 26 bp, Homo sapiens
ctgaggtggcgggggttggagcaggg

SEQ ID NO: 17109 - DNA, 26 bp, Homo sapiens
tgaggtggcgggggttggagcaggga

SEQ ID NO: 17110 - DNA, 26 bp, Homo sapiens
gaggtggcgggggttggagcagggaa

SEQ ID NO: 17111 - DNA, 26 bp, Homo sapiens
aggtggcgggggttggagcagggaag

SEQ ID NO: 17112 - DNA, 26 bp, Homo sapiens
ggtggcgggggttggagcagggaagt

SEQ ID NO: 17113 - DNA, 26 bp, Homo sapiens
gtggcgggggttggagcagggaagtc

SEQ ID NO: 17114 - DNA, 26 bp, Homo sapiens
tggcgggggttggagcagggaagtca

SEQ ID NO: 17115 - DNA, 26 bp, Homo sapiens
ggcgggggttggagcagggaagtcat

SEQ ID NO: 17116 - DNA, 26 bp, Homo sapiens
gcgggggttggagcagggaagtcatt

SEQ ID NO: 17117 - DNA, 26 bp, Homo sapiens
cgggggttggagcagggaagtcattg

SEQ ID NO: 17118 - DNA, 26 bp, Homo sapiens
gggggttggagcagggaagtcattgg

SEQ ID NO: 17119 - DNA, 26 bp, Homo sapiens
ggggttggagcagggaagtcattggg

SEQ ID NO: 17120 - DNA, 26 bp, Homo sapiens
gggttggagcagggaagtcattgggt

SEQ ID NO: 17121 - DNA, 26 bp, Homo sapiens
ggttggagcagggaagtcattgggtt

SEQ ID NO: 17122 - DNA, 26 bp, Homo sapiens
gttggagcagggaagtcattgggttt

SEQ ID NO: 17123 - DNA, 26 bp, Homo sapiens
ttggagcagggaagtcattgggttta

SEQ ID NO: 17124 - DNA, 26 bp, Homo sapiens
tggagcagggaagtcattgggtttag

SEQ ID NO: 17125 - DNA, 26 bp, Homo sapiens
ggagcagggaagtcattgggtttagg

SEQ ID NO: 17126 - DNA, 26 bp, Homo sapiens
gagcagggaagtcattgggtttagga

SEQ ID NO: 17127 - DNA, 26 bp, Homo sapiens
agcagggaagtcattgggtttaggaa

SEQ ID NO: 17128 - DNA, 26 bp, Homo sapiens
gcagggaagtcattgggtttaggaag

SEQ ID NO: 17129 - DNA, 26 bp, Homo sapiens
cagggaagtcattgggtttaggaagg

SEQ ID NO: 17130 - DNA, 26 bp, Homo sapiens
agggaagtcattgggtttaggaagga

SEQ ID NO: 17131 - DNA, 26 bp, Homo sapiens
gggaagtcattgggtttaggaaggat

SEQ ID NO: 17132 - DNA, 26 bp, Homo sapiens
ggaagtcattgggtttaggaaggatt

SEQ ID NO: 17133 - DNA, 26 bp, Homo sapiens
gaagtcattgggtttaggaaggattt

SEQ ID NO: 17134 - DNA, 26 bp, Homo sapiens
aagtcattgggtttaggaaggatttc

SEQ ID NO: 17135 - DNA, 26 bp, Homo sapiens
agtcattgggtttaggaaggatttct

SEQ ID NO: 17136 - DNA, 26 bp, Homo sapiens
gtcattgggtttaggaaggatttctc

SEQ ID NO: 17137 - DNA, 26 bp, Homo sapiens
tcattgggtttaggaaggatttctct

SEQ ID NO: 17138 - DNA, 26 bp, Homo sapiens
cattgggtttaggaaggatttctcta

SEQ ID NO: 17139 - DNA, 26 bp, Homo sapiens
attgggtttaggaaggatttctctaa

SEQ ID NO: 17140 - DNA, 26 bp, Homo sapiens
ttgggtttaggaaggatttctctaac

SEQ ID NO: 17141 - DNA, 26 bp, Homo sapiens
tgggtttaggaaggatttctctaaca

SEQ ID NO: 17142 - DNA, 26 bp, Homo sapiens
gggtttaggaaggatttctctaacac

SEQ ID NO: 17143 - DNA, 26 bp, Homo sapiens
ggtttaggaaggatttctctaacact

SEQ ID NO: 17144 - DNA, 26 bp, Homo sapiens
gtttaggaaggatttctctaacactg

SEQ ID NO: 17145 - DNA, 26 bp, Homo sapiens
tttaggaaggatttctctaacactga

SEQ ID NO: 17146 - DNA, 26 bp, Homo sapiens
ttaggaaggatttctctaacactgag

SEQ ID NO: 17147 - DNA, 26 bp, Homo sapiens
taggaaggatttctctaacactgagt

SEQ ID NO: 17148 - DNA, 26 bp, Homo sapiens
aggaaggatttctctaacactgagta

SEQ ID NO: 17149 - DNA, 26 bp, Homo sapiens
ggaaggatttctctaacactgagtaa

SEQ ID NO: 17150 - DNA, 26 bp, Homo sapiens
gaaggatttctctaacactgagtaac

SEQ ID NO: 17151 - DNA, 26 bp, Homo sapiens
aaggatttctctaacactgagtaaca

SEQ ID NO: 17152 - DNA, 26 bp, Homo sapiens
aggatttctctaacactgagtaacat

SEQ ID NO: 17153 - DNA, 26 bp, Homo sapiens
ggatttctctaacactgagtaacatg

SEQ ID NO: 17154 - DNA, 26 bp, Homo sapiens
gatttctctaacactgagtaacatga

SEQ ID NO: 17155 - DNA, 26 bp, Homo sapiens
atttctctaacactgagtaacatgag

SEQ ID NO: 17156 - DNA, 26 bp, Homo sapiens
tttctctaacactgagtaacatgagg

SEQ ID NO: 17157 - DNA, 26 bp, Homo sapiens
ttctctaacactgagtaacatgagga

SEQ ID NO: 17158 - DNA, 26 bp, Homo sapiens
tctctaacactgagtaacatgaggat

SEQ ID NO: 17159 - DNA, 26 bp, Homo sapiens
ctctaacactgagtaacatgaggatt

SEQ ID NO: 17160 - DNA, 26 bp, Homo sapiens
tctaacactgagtaacatgaggattt

SEQ ID NO: 17161 - DNA, 26 bp, Homo sapiens
ctaacactgagtaacatgaggattta

SEQ ID NO: 17162 - DNA, 26 bp, Homo sapiens
taacactgagtaacatgaggatttag

SEQ ID NO: 17163 - DNA, 26 bp, Homo sapiens
aacactgagtaacatgaggatttagc

SEQ ID NO: 17164 - DNA, 26 bp, Homo sapiens
acactgagtaacatgaggatttagca

SEQ ID NO: 17165 - DNA, 26 bp, Homo sapiens
cactgagtaacatgaggatttagcag

SEQ ID NO: 17166 - DNA, 26 bp, Homo sapiens
actgagtaacatgaggatttagcagt

SEQ ID NO: 17167 - DNA, 26 bp, Homo sapiens
ctgagtaacatgaggatttagcagta

SEQ ID NO: 17168 - DNA, 26 bp, Homo sapiens
tgagtaacatgaggatttagcagtag

SEQ ID NO: 17169 - DNA, 26 bp, Homo sapiens
gagtaacatgaggatttagcagtagt

SEQ ID NO: 17170 - DNA, 26 bp, Homo sapiens
agtaacatgaggatttagcagtagtg

SEQ ID NO: 17171 - DNA, 26 bp, Homo sapiens
gtaacatgaggatttagcagtagtgt

SEQ ID NO: 17172 - DNA, 26 bp, Homo sapiens
taacatgaggatttagcagtagtgtt

SEQ ID NO: 17173 - DNA, 26 bp, Homo sapiens
aacatgaggatttagcagtagtgttc

SEQ ID NO: 17174 - DNA, 26 bp, Homo sapiens
acatgaggatttagcagtagtgttct

SEQ ID NO: 17175 - DNA, 26 bp, Homo sapiens
catgaggatttagcagtagtgttctt

SEQ ID NO: 17176 - DNA, 26 bp, Homo sapiens
atgaggatttagcagtagtgttcttc

SEQ ID NO: 17177 - DNA, 26 bp, Homo sapiens
tgaggatttagcagtagtgttcttca

SEQ ID NO: 17178 - DNA, 26 bp, Homo sapiens
gaggatttagcagtagtgttcttcac

SEQ ID NO: 17179 - DNA, 26 bp, Homo sapiens
aggatttagcagtagtgttcttcact

SEQ ID NO: 17180 - DNA, 26 bp, Homo sapiens
ggatttagcagtagtgttcttcactt

SEQ ID NO: 17181 - DNA, 26 bp, Homo sapiens
gatttagcagtagtgttcttcacttg

SEQ ID NO: 17182 - DNA, 26 bp, Homo sapiens
atttagcagtagtgttcttcacttgt

SEQ ID NO: 17183 - DNA, 26 bp, Homo sapiens
tttagcagtagtgttcttcacttgtc

SEQ ID NO: 17184 - DNA, 26 bp, Homo sapiens
ttagcagtagtgttcttcacttgtca

SEQ ID NO: 17185 - DNA, 26 bp, Homo sapiens
tagcagtagtgttcttcacttgtcac

SEQ ID NO: 17186 - DNA, 26 bp, Homo sapiens
agcagtagtgttcttcacttgtcact

SEQ ID NO: 17187 - DNA, 26 bp, Homo sapiens
gcagtagtgttcttcacttgtcacta

SEQ ID NO: 17188 - DNA, 26 bp, Homo sapiens
cagtagtgttcttcacttgtcactat

SEQ ID NO: 17189 - DNA, 26 bp, Homo sapiens
agtagtgttcttcacttgtcactatt

SEQ ID NO: 17190 - DNA, 26 bp, Homo sapiens
gtagtgttcttcacttgtcactattt

SEQ ID NO: 17191 - DNA, 26 bp, Homo sapiens
tagtgttcttcacttgtcactatttc

SEQ ID NO: 17192 - DNA, 26 bp, Homo sapiens
agtgttcttcacttgtcactatttct

SEQ ID NO: 17193 - DNA, 26 bp, Homo sapiens
gtgttcttcacttgtcactatttctc

SEQ ID NO: 17194 - DNA, 26 bp, Homo sapiens
tgttcttcacttgtcactatttctct

SEQ ID NO: 17195 - DNA, 26 bp, Homo sapiens
gttcttcacttgtcactatttctcta

SEQ ID NO: 17196 - DNA, 26 bp, Homo sapiens
ttcttcacttgtcactatttctctat

SEQ ID NO: 17197 - DNA, 26 bp, Homo sapiens
tcttcacttgtcactatttctctatc

SEQ ID NO: 17198 - DNA, 26 bp, Homo sapiens
cttcacttgtcactatttctctatct

SEQ ID NO: 17199 - DNA, 26 bp, Homo sapiens
ttcacttgtcactatttctctatctg

SEQ ID NO: 17200 - DNA, 26 bp, Homo sapiens
tcacttgtcactatttctctatctgg

SEQ ID NO: 17201 - DNA, 26 bp, Homo sapiens
cacttgtcactatttctctatctgga

SEQ ID NO: 17202 - DNA, 26 bp, Homo sapiens
acttgtcactatttctctatctggag

SEQ ID NO: 17203 - DNA, 26 bp, Homo sapiens
cttgtcactatttctctatctggagt

SEQ ID NO: 17204 - DNA, 26 bp, Homo sapiens
ttgtcactatttctctatctggagtt

SEQ ID NO: 17205 - DNA, 26 bp, Homo sapiens
tgtcactatttctctatctggagtta

SEQ ID NO: 17206 - DNA, 26 bp, Homo sapiens
gtcactatttctctatctggagttac

SEQ ID NO: 17207 - DNA, 26 bp, Homo sapiens
tcactatttctctatctggagttaca

SEQ ID NO: 17208 - DNA, 26 bp, Homo sapiens
cactatttctctatctggagttacat

SEQ ID NO: 17209 - DNA, 26 bp, Homo sapiens
actatttctctatctggagttacatt

SEQ ID NO: 17210 - DNA, 26 bp, Homo sapiens
ctatttctctatctggagttacattc

SEQ ID NO: 17211 - DNA, 26 bp, Homo sapiens
tatttctctatctggagttacattct

SEQ ID NO: 17212 - DNA, 26 bp, Homo sapiens
atttctctatctggagttacattctt

SEQ ID NO: 17213 - DNA, 26 bp, Homo sapiens
tttctctatctggagttacattcttg

SEQ ID NO: 17214 - DNA, 26 bp, Homo sapiens
ttctctatctggagttacattcttgt

SEQ ID NO: 17215 - DNA, 26 bp, Homo sapiens
tctctatctggagttacattcttgtt

SEQ ID NO: 17216 - DNA, 26 bp, Homo sapiens
ctctatctggagttacattcttgtta

SEQ ID NO: 17217 - DNA, 26 bp, Homo sapiens
tctatctggagttacattcttgttag

SEQ ID NO: 17218 - DNA, 26 bp, Homo sapiens
ctatctggagttacattcttgttagt

SEQ ID NO: 17219 - DNA, 26 bp, Homo sapiens
tatctggagttacattcttgttagtc

SEQ ID NO: 17220 - DNA, 26 bp, Homo sapiens
atctggagttacattcttgttagtca

SEQ ID NO: 17221 - DNA, 26 bp, Homo sapiens
tctggagttacattcttgttagtcaa

SEQ ID NO: 17222 - DNA, 26 bp, Homo sapiens
ctggagttacattcttgttagtcaaa

SEQ ID NO: 17223 - DNA, 26 bp, Homo sapiens
tggagttacattcttgttagtcaaaa

SEQ ID NO: 17224 - DNA, 26 bp, Homo sapiens
ggagttacattcttgttagtcaaaaa

SEQ ID NO: 17225 - DNA, 26 bp, Homo sapiens
gagttacattcttgttagtcaaaaaa

SEQ ID NO: 17226 - DNA, 26 bp, Homo sapiens
agttacattcttgttagtcaaaaaaa

SEQ ID NO: 17227 - DNA, 26 bp, Homo sapiens
gttacattcttgttagtcaaaaaaaa

SEQ ID NO: 17228 - DNA, 26 bp, Homo sapiens
ttacattcttgttagtcaaaaaaaaa

SEQ ID NO: 17229 - DNA, 26 bp, Homo sapiens
tacattcttgttagtcaaaaaaaaaa

SEQ ID NO: 17230 - DNA, 26 bp, Homo sapiens
acattcttgttagtcaaaaaaaaaaa

SEQ ID NO: 17231 - DNA, 26 bp, Homo sapiens
cattcttgttagtcaaaaaaaaaaag

SEQ ID NO: 17232 - DNA, 26 bp, Homo sapiens
attcttgttagtcaaaaaaaaaaagc

SEQ ID NO: 17233 - DNA, 26 bp, Homo sapiens
ttcttgttagtcaaaaaaaaaaagca

SEQ ID NO: 17234 - DNA, 26 bp, Homo sapiens
tcttgttagtcaaaaaaaaaaagcac

SEQ ID NO: 17235 - DNA, 26 bp, Homo sapiens
cttgttagtcaaaaaaaaaaagcact

SEQ ID NO: 17236 - DNA, 26 bp, Homo sapiens
ttgttagtcaaaaaaaaaaagcacta

SEQ ID NO: 17237 - DNA, 26 bp, Homo sapiens
tgttagtcaaaaaaaaaaagcactat

SEQ ID NO: 17238 - DNA, 26 bp, Homo sapiens
gttagtcaaaaaaaaaaagcactatt

SEQ ID NO: 17239 - DNA, 26 bp, Homo sapiens
ttagtcaaaaaaaaaaagcactatta

SEQ ID NO: 17240 - DNA, 26 bp, Homo sapiens
tagtcaaaaaaaaaaagcactattaa

SEQ ID NO: 17241 - DNA, 26 bp, Homo sapiens
agtcaaaaaaaaaaagcactattaaa

SEQ ID NO: 17242 - DNA, 26 bp, Homo sapiens
gtcaaaaaaaaaaagcactattaaaa

SEQ ID NO: 17243 - DNA, 26 bp, Homo sapiens
tcaaaaaaaaaaagcactattaaaaa

SEQ ID NO: 17244 - DNA, 26 bp, Homo sapiens
caaaaaaaaaaagcactattaaaaaa

SEQ ID NO: 17245 - DNA, 26 bp, Homo sapiens
aaaaaaaaaaagcactattaaaaaaa

SEQ ID NO: 17246 - DNA, 26 bp, Homo sapiens
aaaaaaaaaagcactattaaaaaaat

SEQ ID NO: 17247 - DNA, 26 bp, Homo sapiens
aaaaaaaaagcactattaaaaaaatc

SEQ ID NO: 17248 - DNA, 26 bp, Homo sapiens
aaaaaaaagcactattaaaaaaatca

SEQ ID NO: 17249 - DNA, 26 bp, Homo sapiens
aaaaaaagcactattaaaaaaatcac

SEQ ID NO: 17250 - DNA, 26 bp, Homo sapiens
aaaaaagcactattaaaaaaatcaca

SEQ ID NO: 17251 - DNA, 26 bp, Homo sapiens
aaaaagcactattaaaaaaatcacaa

SEQ ID NO: 17252 - DNA, 26 bp, Homo sapiens
aaaagcactattaaaaaaatcacaaa

SEQ ID NO: 17253 - DNA, 26 bp, Homo sapiens
aaagcactattaaaaaaatcacaaaa

SEQ ID NO: 17254 - DNA, 26 bp, Homo sapiens
aagcactattaaaaaaatcacaaaaa

SEQ ID NO: 17255 - DNA, 26 bp, Homo sapiens
agcactattaaaaaaatcacaaaaag

SEQ ID NO: 17256 - DNA, 26 bp, Homo sapiens
gcactattaaaaaaatcacaaaaagc

SEQ ID NO: 17257 - DNA, 26 bp, Homo sapiens
cactattaaaaaaatcacaaaaagca

SEQ ID NO: 17258 - DNA, 26 bp, Homo sapiens
actattaaaaaaatcacaaaaagcag

SEQ ID NO: 17259 - DNA, 26 bp, Homo sapiens
ctattaaaaaaatcacaaaaagcagc

SEQ ID NO: 17260 - DNA, 26 bp, Homo sapiens
tattaaaaaaatcacaaaaagcagct

SEQ ID NO: 17261 - DNA, 26 bp, Homo sapiens
attaaaaaaatcacaaaaagcagctg

SEQ ID NO: 17262 - DNA, 26 bp, Homo sapiens
ttaaaaaaatcacaaaaagcagctgg

SEQ ID NO: 17263 - DNA, 26 bp, Homo sapiens
taaaaaaatcacaaaaagcagctggc

SEQ ID NO: 17264 - DNA, 26 bp, Homo sapiens
aaaaaaatcacaaaaagcagctggct

SEQ ID NO: 17265 - DNA, 26 bp, Homo sapiens
aaaaaatcacaaaaagcagctggctc

SEQ ID NO: 17266 - DNA, 26 bp, Homo sapiens
aaaaatcacaaaaagcagctggctcc

SEQ ID NO: 17267 - DNA, 26 bp, Homo sapiens
aaaatcacaaaaagcagctggctccc

SEQ ID NO: 17268 - DNA, 26 bp, Homo sapiens
aaatcacaaaaagcagctggctccca

SEQ ID NO: 17269 - DNA, 26 bp, Homo sapiens
aatcacaaaaagcagctggctcccat

SEQ ID NO: 17270 - DNA, 26 bp, Homo sapiens
atcacaaaaagcagctggctcccatg

SEQ ID NO: 17271 - DNA, 26 bp, Homo sapiens
tcacaaaaagcagctggctcccatgg

SEQ ID NO: 17272 - DNA, 26 bp, Homo sapiens
cacaaaaagcagctggctcccatgga

SEQ ID NO: 17273 - DNA, 26 bp, Homo sapiens
acaaaaagcagctggctcccatggaa

SEQ ID NO: 17274 - DNA, 26 bp, Homo sapiens
caaaaagcagctggctcccatggaaa

SEQ ID NO: 17275 - DNA, 26 bp, Homo sapiens
aaaaagcagctggctcccatggaaag

SEQ ID NO: 17276 - DNA, 26 bp, Homo sapiens
aaaagcagctggctcccatggaaaga

SEQ ID NO: 17277 - DNA, 26 bp, Homo sapiens
aaagcagctggctcccatggaaagat

SEQ ID NO: 17278 - DNA, 26 bp, Homo sapiens
aagcagctggctcccatggaaagata

SEQ ID NO: 17279 - DNA, 26 bp, Homo sapiens
agcagctggctcccatggaaagataa

SEQ ID NO: 17280 - DNA, 26 bp, Homo sapiens
gcagctggctcccatggaaagataaa

SEQ ID NO: 17281 - DNA, 26 bp, Homo sapiens
cagctggctcccatggaaagataaag

SEQ ID NO: 17282 - DNA, 26 bp, Homo sapiens
agctggctcccatggaaagataaagg

SEQ ID NO: 17283 - DNA, 26 bp, Homo sapiens
gctggctcccatggaaagataaaggt

SEQ ID NO: 17284 - DNA, 26 bp, Homo sapiens
ctggctcccatggaaagataaaggtg

SEQ ID NO: 17285 - DNA, 26 bp, Homo sapiens
tggctcccatggaaagataaaggtgt

SEQ ID NO: 17286 - DNA, 26 bp, Homo sapiens
ggctcccatggaaagataaaggtgta

SEQ ID NO: 17287 - DNA, 26 bp, Homo sapiens
gctcccatggaaagataaaggtgtaa

SEQ ID NO: 17288 - DNA, 26 bp, Homo sapiens
ctcccatggaaagataaaggtgtaaa

SEQ ID NO: 17289 - DNA, 26 bp, Homo sapiens
tcccatggaaagataaaggtgtaaac

SEQ ID NO: 17290 - DNA, 26 bp, Homo sapiens
cccatggaaagataaaggtgtaaact

SEQ ID NO: 17291 - DNA, 26 bp, Homo sapiens
ccatggaaagataaaggtgtaaactt

SEQ ID NO: 17292 - DNA, 26 bp, Homo sapiens
catggaaagataaaggtgtaaactta

SEQ ID NO: 17293 - DNA, 26 bp, Homo sapiens
atggaaagataaaggtgtaaacttat

SEQ ID NO: 17294 - DNA, 26 bp, Homo sapiens
tggaaagataaaggtgtaaacttata

SEQ ID NO: 17295 - DNA, 26 bp, Homo sapiens
ggaaagataaaggtgtaaacttatat

SEQ ID NO: 17296 - DNA, 26 bp, Homo sapiens
gaaagataaaggtgtaaacttatata

SEQ ID NO: 17297 - DNA, 26 bp, Homo sapiens
aaagataaaggtgtaaacttatatat

SEQ ID NO: 17298 - DNA, 26 bp, Homo sapiens
aagataaaggtgtaaacttatatatg

SEQ ID NO: 17299 - DNA, 26 bp, Homo sapiens
agataaaggtgtaaacttatatatgc

SEQ ID NO: 17300 - DNA, 26 bp, Homo sapiens
gataaaggtgtaaacttatatatgca

SEQ ID NO: 17301 - DNA, 26 bp, Homo sapiens
ataaaggtgtaaacttatatatgcat

SEQ ID NO: 17302 - DNA, 26 bp, Homo sapiens
taaaggtgtaaacttatatatgcata

SEQ ID NO: 17303 - DNA, 26 bp, Homo sapiens
aaaggtgtaaacttatatatgcataa

SEQ ID NO: 17304 - DNA, 26 bp, Homo sapiens
aaggtgtaaacttatatatgcataat

SEQ ID NO: 17305 - DNA, 26 bp, Homo sapiens
aggtgtaaacttatatatgcataata

SEQ ID NO: 17306 - DNA, 26 bp, Homo sapiens
ggtgtaaacttatatatgcataatac

SEQ ID NO: 17307 - DNA, 26 bp, Homo sapiens
gtgtaaacttatatatgcataatact

SEQ ID NO: 17308 - DNA, 26 bp, Homo sapiens
tgtaaacttatatatgcataatactg

SEQ ID NO: 17309 - DNA, 26 bp, Homo sapiens
gtaaacttatatatgcataatactgg

SEQ ID NO: 17310 - DNA, 26 bp, Homo sapiens
taaacttatatatgcataatactggc

SEQ ID NO: 17311 - DNA, 26 bp, Homo sapiens
aaacttatatatgcataatactggca

SEQ ID NO: 17312 - DNA, 26 bp, Homo sapiens
aacttatatatgcataatactggcaa

SEQ ID NO: 17313 - DNA, 26 bp, Homo sapiens
acttatatatgcataatactggcaaa

SEQ ID NO: 17314 - DNA, 26 bp, Homo sapiens
cttatatatgcataatactggcaaaa

SEQ ID NO: 17315 - DNA, 26 bp, Homo sapiens
ttatatatgcataatactggcaaaag

SEQ ID NO: 17316 - DNA, 26 bp, Homo sapiens
tatatatgcataatactggcaaaagc

SEQ ID NO: 17317 - DNA, 26 bp, Homo sapiens
atatatgcataatactggcaaaagct

SEQ ID NO: 17318 - DNA, 26 bp, Homo sapiens
tatatgcataatactggcaaaagcta

SEQ ID NO: 17319 - DNA, 26 bp, Homo sapiens
atatgcataatactggcaaaagctag

SEQ ID NO: 17320 - DNA, 26 bp, Homo sapiens
tatgcataatactggcaaaagctagt

SEQ ID NO: 17321 - DNA, 26 bp, Homo sapiens
atgcataatactggcaaaagctagtt

SEQ ID NO: 17322 - DNA, 26 bp, Homo sapiens
tgcataatactggcaaaagctagttt

SEQ ID NO: 17323 - DNA, 26 bp, Homo sapiens
gcataatactggcaaaagctagtttc

SEQ ID NO: 17324 - DNA, 26 bp, Homo sapiens
cataatactggcaaaagctagtttcc

SEQ ID NO: 17325 - DNA, 26 bp, Homo sapiens
ataatactggcaaaagctagtttcct

SEQ ID NO: 17326 - DNA, 26 bp, Homo sapiens
taatactggcaaaagctagtttcctg

SEQ ID NO: 17327 - DNA, 26 bp, Homo sapiens
aatactggcaaaagctagtttcctgg

SEQ ID NO: 17328 - DNA, 26 bp, Homo sapiens
atactggcaaaagctagtttcctggg

SEQ ID NO: 17329 - DNA, 26 bp, Homo sapiens
tactggcaaaagctagtttcctgggg

SEQ ID NO: 17330 - DNA, 26 bp, Homo sapiens
actggcaaaagctagtttcctggggg

SEQ ID NO: 17331 - DNA, 26 bp, Homo sapiens
ctggcaaaagctagtttcctgggggt

SEQ ID NO: 17332 - DNA, 26 bp, Homo sapiens
tggcaaaagctagtttcctgggggta

SEQ ID NO: 17333 - DNA, 26 bp, Homo sapiens
ggcaaaagctagtttcctgggggtat

SEQ ID NO: 17334 - DNA, 26 bp, Homo sapiens
gcaaaagctagtttcctgggggtata

SEQ ID NO: 17335 - DNA, 26 bp, Homo sapiens
caaaagctagtttcctgggggtataa

SEQ ID NO: 17336 - DNA, 26 bp, Homo sapiens
aaaagctagtttcctgggggtataaa

SEQ ID NO: 17337 - DNA, 26 bp, Homo sapiens
aaagctagtttcctgggggtataaat

SEQ ID NO: 17338 - DNA, 26 bp, Homo sapiens
aagctagtttcctgggggtataaata

SEQ ID NO: 17339 - DNA, 26 bp, Homo sapiens
agctagtttcctgggggtataaatac

SEQ ID NO: 17340 - DNA, 26 bp, Homo sapiens
gctagtttcctgggggtataaataca

SEQ ID NO: 17341 - DNA, 26 bp, Homo sapiens
ctagtttcctgggggtataaatacac

SEQ ID NO: 17342 - DNA, 26 bp, Homo sapiens
tagtttcctgggggtataaatacaca

SEQ ID NO: 17343 - DNA, 26 bp, Homo sapiens
agtttcctgggggtataaatacacat

SEQ ID NO: 17344 - DNA, 26 bp, Homo sapiens
gtttcctgggggtataaatacacatg

SEQ ID NO: 17345 - DNA, 26 bp, Homo sapiens
tttcctgggggtataaatacacatgt

SEQ ID NO: 17346 - DNA, 26 bp, Homo sapiens
ttcctgggggtataaatacacatgtg

SEQ ID NO: 17347 - DNA, 26 bp, Homo sapiens
tcctgggggtataaatacacatgtgc

SEQ ID NO: 17348 - DNA, 26 bp, Homo sapiens
cctgggggtataaatacacatgtgct

SEQ ID NO: 17349 - DNA, 26 bp, Homo sapiens
ctgggggtataaatacacatgtgctt

SEQ ID NO: 17350 - DNA, 26 bp, Homo sapiens
tgggggtataaatacacatgtgcttc

SEQ ID NO: 17351 - DNA, 26 bp, Homo sapiens
gggggtataaatacacatgtgcttct

SEQ ID NO: 17352 - DNA, 26 bp, Homo sapiens
ggggtataaatacacatgtgcttcta

SEQ ID NO: 17353 - DNA, 26 bp, Homo sapiens
gggtataaatacacatgtgcttctag

SEQ ID NO: 17354 - DNA, 26 bp, Homo sapiens
ggtataaatacacatgtgcttctaga

SEQ ID NO: 17355 - DNA, 26 bp, Homo sapiens
gtataaatacacatgtgcttctagaa

SEQ ID NO: 17356 - DNA, 26 bp, Homo sapiens
tataaatacacatgtgcttctagaaa

SEQ ID NO: 17357 - DNA, 26 bp, Homo sapiens
ataaatacacatgtgcttctagaaat

SEQ ID NO: 17358 - DNA, 26 bp, Homo sapiens
taaatacacatgtgcttctagaaata

SEQ ID NO: 17359 - DNA, 26 bp, Homo sapiens
aaatacacatgtgcttctagaaataa

SEQ ID NO: 17360 - DNA, 26 bp, Homo sapiens
aatacacatgtgcttctagaaataag

SEQ ID NO: 17361 - DNA, 26 bp, Homo sapiens
atacacatgtgcttctagaaataagg

SEQ ID NO: 17362 - DNA, 26 bp, Homo sapiens
tacacatgtgcttctagaaataaggc

SEQ ID NO: 17363 - DNA, 26 bp, Homo sapiens
acacatgtgcttctagaaataaggct

SEQ ID NO: 17364 - DNA, 26 bp, Homo sapiens
cacatgtgcttctagaaataaggctt

SEQ ID NO: 17365 - DNA, 26 bp, Homo sapiens
acatgtgcttctagaaataaggcttc

SEQ ID NO: 17366 - DNA, 26 bp, Homo sapiens
catgtgcttctagaaataaggcttcg

SEQ ID NO: 17367 - DNA, 26 bp, Homo sapiens
atgtgcttctagaaataaggcttcgt

SEQ ID NO: 17368 - DNA, 26 bp, Homo sapiens
tgtgcttctagaaataaggcttcgtg

SEQ ID NO: 17369 - DNA, 26 bp, Homo sapiens
gtgcttctagaaataaggcttcgtgt

SEQ ID NO: 17370 - DNA, 26 bp, Homo sapiens
tgcttctagaaataaggcttcgtgtc

SEQ ID NO: 17371 - DNA, 26 bp, Homo sapiens
gcttctagaaataaggcttcgtgtca

SEQ ID NO: 17372 - DNA, 26 bp, Homo sapiens
cttctagaaataaggcttcgtgtcaa

SEQ ID NO: 17373 - DNA, 26 bp, Homo sapiens
ttctagaaataaggcttcgtgtcaaa

SEQ ID NO: 17374 - DNA, 26 bp, Homo sapiens
tctagaaataaggcttcgtgtcaaac

SEQ ID NO: 17375 - DNA, 26 bp, Homo sapiens
ctagaaataaggcttcgtgtcaaact

SEQ ID NO: 17376 - DNA, 26 bp, Homo sapiens
tagaaataaggcttcgtgtcaaactc

SEQ ID NO: 17377 - DNA, 26 bp, Homo sapiens
agaaataaggcttcgtgtcaaactct

SEQ ID NO: 17378 - DNA, 26 bp, Homo sapiens
gaaataaggcttcgtgtcaaactcta

SEQ ID NO: 17379 - DNA, 26 bp, Homo sapiens
aaataaggcttcgtgtcaaactctag

SEQ ID NO: 17380 - DNA, 26 bp, Homo sapiens
aataaggcttcgtgtcaaactctaga

SEQ ID NO: 17381 - DNA, 26 bp, Homo sapiens
ataaggcttcgtgtcaaactctagat

SEQ ID NO: 17382 - DNA, 26 bp, Homo sapiens
taaggcttcgtgtcaaactctagatg

SEQ ID NO: 17383 - DNA, 26 bp, Homo sapiens
aaggcttcgtgtcaaactctagatgg

SEQ ID NO: 17384 - DNA, 26 bp, Homo sapiens
aggcttcgtgtcaaactctagatggg

SEQ ID NO: 17385 - DNA, 26 bp, Homo sapiens
ggcttcgtgtcaaactctagatgggt

SEQ ID NO: 17386 - DNA, 26 bp, Homo sapiens
gcttcgtgtcaaactctagatgggtg

SEQ ID NO: 17387 - DNA, 26 bp, Homo sapiens
cttcgtgtcaaactctagatgggtgg

SEQ ID NO: 17388 - DNA, 26 bp, Homo sapiens
ttcgtgtcaaactctagatgggtggg

SEQ ID NO: 17389 - DNA, 26 bp, Homo sapiens
tcgtgtcaaactctagatgggtgggg

SEQ ID NO: 17390 - DNA, 26 bp, Homo sapiens
cgtgtcaaactctagatgggtggggt

SEQ ID NO: 17391 - DNA, 26 bp, Homo sapiens
gtgtcaaactctagatgggtggggtg

SEQ ID NO: 17392 - DNA, 26 bp, Homo sapiens
tgtcaaactctagatgggtggggtgg

SEQ ID NO: 17393 - DNA, 26 bp, Homo sapiens
gtcaaactctagatgggtggggtgga

SEQ ID NO: 17394 - DNA, 26 bp, Homo sapiens
tcaaactctagatgggtggggtggag

SEQ ID NO: 17395 - DNA, 26 bp, Homo sapiens
caaactctagatgggtggggtggagt

SEQ ID NO: 17396 - DNA, 26 bp, Homo sapiens
aaactctagatgggtggggtggagta

SEQ ID NO: 17397 - DNA, 26 bp, Homo sapiens
aactctagatgggtggggtggagtac

SEQ ID NO: 17398 - DNA, 26 bp, Homo sapiens
actctagatgggtggggtggagtaca

SEQ ID NO: 17399 - DNA, 26 bp, Homo sapiens
ctctagatgggtggggtggagtacag

SEQ ID NO: 17400 - DNA, 26 bp, Homo sapiens
tctagatgggtggggtggagtacagg

SEQ ID NO: 17401 - DNA, 26 bp, Homo sapiens
ctagatgggtggggtggagtacagga

SEQ ID NO: 17402 - DNA, 26 bp, Homo sapiens
tagatgggtggggtggagtacaggac

SEQ ID NO: 17403 - DNA, 26 bp, Homo sapiens
agatgggtggggtggagtacaggacc

SEQ ID NO: 17404 - DNA, 26 bp, Homo sapiens
gatgggtggggtggagtacaggacca

SEQ ID NO: 17405 - DNA, 26 bp, Homo sapiens
atgggtggggtggagtacaggaccac

SEQ ID NO: 17406 - DNA, 26 bp, Homo sapiens
tgggtggggtggagtacaggaccacc

SEQ ID NO: 17407 - DNA, 26 bp, Homo sapiens
gggtggggtggagtacaggaccaccg

SEQ ID NO: 17408 - DNA, 26 bp, Homo sapiens
ggtggggtggagtacaggaccaccga

SEQ ID NO: 17409 - DNA, 26 bp, Homo sapiens
gtggggtggagtacaggaccaccgag

SEQ ID NO: 17410 - DNA, 26 bp, Homo sapiens
tggggtggagtacaggaccaccgagt

SEQ ID NO: 17411 - DNA, 26 bp, Homo sapiens
ggggtggagtacaggaccaccgagtt

SEQ ID NO: 17412 - DNA, 26 bp, Homo sapiens
gggtggagtacaggaccaccgagttg

SEQ ID NO: 17413 - DNA, 26 bp, Homo sapiens
ggtggagtacaggaccaccgagttgt

SEQ ID NO: 17414 - DNA, 26 bp, Homo sapiens
gtggagtacaggaccaccgagttgta

SEQ ID NO: 17415 - DNA, 26 bp, Homo sapiens
tggagtacaggaccaccgagttgtag

SEQ ID NO: 17416 - DNA, 26 bp, Homo sapiens
ggagtacaggaccaccgagttgtagt

SEQ ID NO: 17417 - DNA, 26 bp, Homo sapiens
gagtacaggaccaccgagttgtagtc

SEQ ID NO: 17418 - DNA, 26 bp, Homo sapiens
agtacaggaccaccgagttgtagtct

SEQ ID NO: 17419 - DNA, 26 bp, Homo sapiens
gtacaggaccaccgagttgtagtctg

SEQ ID NO: 17420 - DNA, 26 bp, Homo sapiens
tacaggaccaccgagttgtagtctgg

SEQ ID NO: 17421 - DNA, 26 bp, Homo sapiens
acaggaccaccgagttgtagtctggg

SEQ ID NO: 17422 - DNA, 26 bp, Homo sapiens
caggaccaccgagttgtagtctgggg

SEQ ID NO: 17423 - DNA, 26 bp, Homo sapiens
aggaccaccgagttgtagtctggggg

SEQ ID NO: 17424 - DNA, 26 bp, Homo sapiens
ggaccaccgagttgtagtctgggggc

SEQ ID NO: 17425 - DNA, 26 bp, Homo sapiens
gaccaccgagttgtagtctgggggcg

SEQ ID NO: 17426 - DNA, 26 bp, Homo sapiens
accaccgagttgtagtctgggggcgg

SEQ ID NO: 17427 - DNA, 26 bp, Homo sapiens
ccaccgagttgtagtctgggggcggg

SEQ ID NO: 17428 - DNA, 26 bp, Homo sapiens
caccgagttgtagtctgggggcgggg

SEQ ID NO: 17429 - DNA, 26 bp, Homo sapiens
accgagttgtagtctgggggcgggga

SEQ ID NO: 17430 - DNA, 26 bp, Homo sapiens
ccgagttgtagtctgggggcggggag

SEQ ID NO: 17431 - DNA, 26 bp, Homo sapiens
cgagttgtagtctgggggcggggagc

SEQ ID NO: 17432 - DNA, 26 bp, Homo sapiens
gagttgtagtctgggggcggggagca

SEQ ID NO: 17433 - DNA, 26 bp, Homo sapiens
agttgtagtctgggggcggggagcag

SEQ ID NO: 17434 - DNA, 26 bp, Homo sapiens
gttgtagtctgggggcggggagcagc

SEQ ID NO: 17435 - DNA, 26 bp, Homo sapiens
ttgtagtctgggggcggggagcagca

SEQ ID NO: 17436 - DNA, 26 bp, Homo sapiens
tgtagtctgggggcggggagcagcac

SEQ ID NO: 17437 - DNA, 26 bp, Homo sapiens
gtagtctgggggcggggagcagcacg

SEQ ID NO: 17438 - DNA, 26 bp, Homo sapiens
tagtctgggggcggggagcagcacgc

SEQ ID NO: 17439 - DNA, 26 bp, Homo sapiens
agtctgggggcggggagcagcacgcg

SEQ ID NO: 17440 - DNA, 26 bp, Homo sapiens
gtctgggggcggggagcagcacgcga

SEQ ID NO: 17441 - DNA, 26 bp, Homo sapiens
tctgggggcggggagcagcacgcgat

SEQ ID NO: 17442 - DNA, 26 bp, Homo sapiens
ctgggggcggggagcagcacgcgatt

SEQ ID NO: 17443 - DNA, 26 bp, Homo sapiens
tgggggcggggagcagcacgcgattt

SEQ ID NO: 17444 - DNA, 26 bp, Homo sapiens
gggggcggggagcagcacgcgatttt

SEQ ID NO: 17445 - DNA, 26 bp, Homo sapiens
ggggcggggagcagcacgcgattttc

SEQ ID NO: 17446 - DNA, 26 bp, Homo sapiens
gggcggggagcagcacgcgattttcc

SEQ ID NO: 17447 - DNA, 26 bp, Homo sapiens
ggcggggagcagcacgcgattttcct

SEQ ID NO: 17448 - DNA, 26 bp, Homo sapiens
gcggggagcagcacgcgattttcctt

SEQ ID NO: 17449 - DNA, 26 bp, Homo sapiens
cggggagcagcacgcgattttccttt

SEQ ID NO: 17450 - DNA, 26 bp, Homo sapiens
ggggagcagcacgcgattttcctttc

SEQ ID NO: 17451 - DNA, 26 bp, Homo sapiens
gggagcagcacgcgattttcctttcc

SEQ ID NO: 17452 - DNA, 26 bp, Homo sapiens
ggagcagcacgcgattttcctttcca

SEQ ID NO: 17453 - DNA, 26 bp, Homo sapiens
gagcagcacgcgattttcctttccag

SEQ ID NO: 17454 - DNA, 26 bp, Homo sapiens
agcagcacgcgattttcctttccagc

SEQ ID NO: 17455 - DNA, 26 bp, Homo sapiens
gcagcacgcgattttcctttccagct

SEQ ID NO: 17456 - DNA, 26 bp, Homo sapiens
cagcacgcgattttcctttccagctc

SEQ ID NO: 17457 - DNA, 26 bp, Homo sapiens
agcacgcgattttcctttccagctca

SEQ ID NO: 17458 - DNA, 26 bp, Homo sapiens
gcacgcgattttcctttccagctcag

SEQ ID NO: 17459 - DNA, 26 bp, Homo sapiens
cacgcgattttcctttccagctcagc

SEQ ID NO: 17460 - DNA, 26 bp, Homo sapiens
acgcgattttcctttccagctcagcg

SEQ ID NO: 17461 - DNA, 26 bp, Homo sapiens
cgcgattttcctttccagctcagcgt

SEQ ID NO: 17462 - DNA, 26 bp, Homo sapiens
gcgattttcctttccagctcagcgtg

SEQ ID NO: 17463 - DNA, 26 bp, Homo sapiens
cgattttcctttccagctcagcgtgg

SEQ ID NO: 17464 - DNA, 26 bp, Homo sapiens
gattttcctttccagctcagcgtggt

SEQ ID NO: 17465 - DNA, 26 bp, Homo sapiens
attttcctttccagctcagcgtggtc

SEQ ID NO: 17466 - DNA, 26 bp, Homo sapiens
ttttcctttccagctcagcgtggtcg

SEQ ID NO: 17467 - DNA, 26 bp, Homo sapiens
tttcctttccagctcagcgtggtcgt

SEQ ID NO: 17468 - DNA, 26 bp, Homo sapiens
ttcctttccagctcagcgtggtcgta

SEQ ID NO: 17469 - DNA, 26 bp, Homo sapiens
tcctttccagctcagcgtggtcgtag

SEQ ID NO: 17470 - DNA, 26 bp, Homo sapiens
cctttccagctcagcgtggtcgtagg

SEQ ID NO: 17471 - DNA, 26 bp, Homo sapiens
ctttccagctcagcgtggtcgtaggt

SEQ ID NO: 17472 - DNA, 26 bp, Homo sapiens
tttccagctcagcgtggtcgtaggtg

SEQ ID NO: 17473 - DNA, 26 bp, Homo sapiens
ttccagctcagcgtggtcgtaggtga

SEQ ID NO: 17474 - DNA, 26 bp, Homo sapiens
tccagctcagcgtggtcgtaggtgaa

SEQ ID NO: 17475 - DNA, 26 bp, Homo sapiens
ccagctcagcgtggtcgtaggtgaac

SEQ ID NO: 17476 - DNA, 26 bp, Homo sapiens
cagctcagcgtggtcgtaggtgaacc

SEQ ID NO: 17477 - DNA, 26 bp, Homo sapiens
agctcagcgtggtcgtaggtgaacct

SEQ ID NO: 17478 - DNA, 26 bp, Homo sapiens
gctcagcgtggtcgtaggtgaacctg

SEQ ID NO: 17479 - DNA, 26 bp, Homo sapiens
ctcagcgtggtcgtaggtgaacctgc

SEQ ID NO: 17480 - DNA, 26 bp, Homo sapiens
tcagcgtggtcgtaggtgaacctgcg

SEQ ID NO: 17481 - DNA, 26 bp, Homo sapiens
cagcgtggtcgtaggtgaacctgcgc

SEQ ID NO: 17482 - DNA, 26 bp, Homo sapiens
agcgtggtcgtaggtgaacctgcgct

SEQ ID NO: 17483 - DNA, 26 bp, Homo sapiens
gcgtggtcgtaggtgaacctgcgctt

SEQ ID NO: 17484 - DNA, 26 bp, Homo sapiens
cgtggtcgtaggtgaacctgcgcttg

SEQ ID NO: 17485 - DNA, 26 bp, Homo sapiens
gtggtcgtaggtgaacctgcgcttgc

SEQ ID NO: 17486 - DNA, 26 bp, Homo sapiens
tggtcgtaggtgaacctgcgcttgcc

SEQ ID NO: 17487 - DNA, 26 bp, Homo sapiens
ggtcgtaggtgaacctgcgcttgcct

SEQ ID NO: 17488 - DNA, 26 bp, Homo sapiens
gtcgtaggtgaacctgcgcttgcctt

SEQ ID NO: 17489 - DNA, 26 bp, Homo sapiens
tcgtaggtgaacctgcgcttgccttc

SEQ ID NO: 17490 - DNA, 26 bp, Homo sapiens
cgtaggtgaacctgcgcttgccttcg

SEQ ID NO: 17491 - DNA, 26 bp, Homo sapiens
gtaggtgaacctgcgcttgccttcgc

SEQ ID NO: 17492 - DNA, 26 bp, Homo sapiens
taggtgaacctgcgcttgccttcgct

SEQ ID NO: 17493 - DNA, 26 bp, Homo sapiens
aggtgaacctgcgcttgccttcgctg

SEQ ID NO: 17494 - DNA, 26 bp, Homo sapiens
ggtgaacctgcgcttgccttcgctga

SEQ ID NO: 17495 - DNA, 26 bp, Homo sapiens
gtgaacctgcgcttgccttcgctgac

SEQ ID NO: 17496 - DNA, 26 bp, Homo sapiens
tgaacctgcgcttgccttcgctgacg

SEQ ID NO: 17497 - DNA, 26 bp, Homo sapiens
gaacctgcgcttgccttcgctgacgt

SEQ ID NO: 17498 - DNA, 26 bp, Homo sapiens
aacctgcgcttgccttcgctgacgtg

SEQ ID NO: 17499 - DNA, 26 bp, Homo sapiens
acctgcgcttgccttcgctgacgtgc

SEQ ID NO: 17500 - DNA, 26 bp, Homo sapiens
cctgcgcttgccttcgctgacgtgcc

SEQ ID NO: 17501 - DNA, 26 bp, Homo sapiens
ctgcgcttgccttcgctgacgtgccc

SEQ ID NO: 17502 - DNA, 26 bp, Homo sapiens
tgcgcttgccttcgctgacgtgccca

SEQ ID NO: 17503 - DNA, 26 bp, Homo sapiens
gcgcttgccttcgctgacgtgcccac

SEQ ID NO: 17504 - DNA, 26 bp, Homo sapiens
cgcttgccttcgctgacgtgcccaca

SEQ ID NO: 17505 - DNA, 26 bp, Homo sapiens
gcttgccttcgctgacgtgcccacag

SEQ ID NO: 17506 - DNA, 26 bp, Homo sapiens
cttgccttcgctgacgtgcccacagc

SEQ ID NO: 17507 - DNA, 26 bp, Homo sapiens
ttgccttcgctgacgtgcccacagct

SEQ ID NO: 17508 - DNA, 26 bp, Homo sapiens
tgccttcgctgacgtgcccacagctg

SEQ ID NO: 17509 - DNA, 26 bp, Homo sapiens
gccttcgctgacgtgcccacagctgg

SEQ ID NO: 17510 - DNA, 26 bp, Homo sapiens
ccttcgctgacgtgcccacagctgga

SEQ ID NO: 17511 - DNA, 26 bp, Homo sapiens
cttcgctgacgtgcccacagctggaa

SEQ ID NO: 17512 - DNA, 26 bp, Homo sapiens
ttcgctgacgtgcccacagctggaat

SEQ ID NO: 17513 - DNA, 26 bp, Homo sapiens
tcgctgacgtgcccacagctggaatg

SEQ ID NO: 17514 - DNA, 26 bp, Homo sapiens
cgctgacgtgcccacagctggaatgg

SEQ ID NO: 17515 - DNA, 26 bp, Homo sapiens
gctgacgtgcccacagctggaatggc

SEQ ID NO: 17516 - DNA, 26 bp, Homo sapiens
ctgacgtgcccacagctggaatggca

SEQ ID NO: 17517 - DNA, 26 bp, Homo sapiens
tgacgtgcccacagctggaatggcag

SEQ ID NO: 17518 - DNA, 26 bp, Homo sapiens
gacgtgcccacagctggaatggcaga

SEQ ID NO: 17519 - DNA, 26 bp, Homo sapiens
acgtgcccacagctggaatggcagaa

SEQ ID NO: 17520 - DNA, 26 bp, Homo sapiens
cgtgcccacagctggaatggcagaaa

SEQ ID NO: 17521 - DNA, 26 bp, Homo sapiens
gtgcccacagctggaatggcagaaac

SEQ ID NO: 17522 - DNA, 26 bp, Homo sapiens
tgcccacagctggaatggcagaaact

SEQ ID NO: 17523 - DNA, 26 bp, Homo sapiens
gcccacagctggaatggcagaaactg

SEQ ID NO: 17524 - DNA, 26 bp, Homo sapiens
cccacagctggaatggcagaaactgg

SEQ ID NO: 17525 - DNA, 26 bp, Homo sapiens
ccacagctggaatggcagaaactggg

SEQ ID NO: 17526 - DNA, 26 bp, Homo sapiens
cacagctggaatggcagaaactgggc

SEQ ID NO: 17527 - DNA, 26 bp, Homo sapiens
acagctggaatggcagaaactgggcc

SEQ ID NO: 17528 - DNA, 26 bp, Homo sapiens
cagctggaatggcagaaactgggcct

SEQ ID NO: 17529 - DNA, 26 bp, Homo sapiens
agctggaatggcagaaactgggcctg

SEQ ID NO: 17530 - DNA, 26 bp, Homo sapiens
gctggaatggcagaaactgggcctgc

SEQ ID NO: 17531 - DNA, 26 bp, Homo sapiens
ctggaatggcagaaactgggcctgct

SEQ ID NO: 17532 - DNA, 26 bp, Homo sapiens
tggaatggcagaaactgggcctgctg

SEQ ID NO: 17533 - DNA, 26 bp, Homo sapiens
ggaatggcagaaactgggcctgctga

SEQ ID NO: 17534 - DNA, 26 bp, Homo sapiens
gaatggcagaaactgggcctgctgac

SEQ ID NO: 17535 - DNA, 26 bp, Homo sapiens
aatggcagaaactgggcctgctgaca

SEQ ID NO: 17536 - DNA, 26 bp, Homo sapiens
atggcagaaactgggcctgctgacat

SEQ ID NO: 17537 - DNA, 26 bp, Homo sapiens
tggcagaaactgggcctgctgacatc

SEQ ID NO: 17538 - DNA, 26 bp, Homo sapiens
ggcagaaactgggcctgctgacatca

SEQ ID NO: 17539 - DNA, 26 bp, Homo sapiens
gcagaaactgggcctgctgacatcag

SEQ ID NO: 17540 - DNA, 26 bp, Homo sapiens
cagaaactgggcctgctgacatcaga

SEQ ID NO: 17541 - DNA, 26 bp, Homo sapiens
agaaactgggcctgctgacatcagac

SEQ ID NO: 17542 - DNA, 26 bp, Homo sapiens
gaaactgggcctgctgacatcagaca

SEQ ID NO: 17543 - DNA, 26 bp, Homo sapiens
aaactgggcctgctgacatcagacag

SEQ ID NO: 17544 - DNA, 26 bp, Homo sapiens
aactgggcctgctgacatcagacagc

SEQ ID NO: 17545 - DNA, 26 bp, Homo sapiens
actgggcctgctgacatcagacagcc

SEQ ID NO: 17546 - DNA, 26 bp, Homo sapiens
ctgggcctgctgacatcagacagccc

SEQ ID NO: 17547 - DNA, 26 bp, Homo sapiens
tgggcctgctgacatcagacagcccc

SEQ ID NO: 17548 - DNA, 26 bp, Homo sapiens
gggcctgctgacatcagacagccccg

SEQ ID NO: 17549 - DNA, 26 bp, Homo sapiens
ggcctgctgacatcagacagccccga

SEQ ID NO: 17550 - DNA, 26 bp, Homo sapiens
gcctgctgacatcagacagccccgac

SEQ ID NO: 17551 - DNA, 26 bp, Homo sapiens
cctgctgacatcagacagccccgact

SEQ ID NO: 17552 - DNA, 26 bp, Homo sapiens
ctgctgacatcagacagccccgactc

SEQ ID NO: 17553 - DNA, 26 bp, Homo sapiens
tgctgacatcagacagccccgactcc

SEQ ID NO: 17554 - DNA, 26 bp, Homo sapiens
gctgacatcagacagccccgactcct

SEQ ID NO: 17555 - DNA, 26 bp, Homo sapiens
ctgacatcagacagccccgactcctt

SEQ ID NO: 17556 - DNA, 26 bp, Homo sapiens
tgacatcagacagccccgactcctta

SEQ ID NO: 17557 - DNA, 26 bp, Homo sapiens
gacatcagacagccccgactccttac

SEQ ID NO: 17558 - DNA, 26 bp, Homo sapiens
acatcagacagccccgactccttact

SEQ ID NO: 17559 - DNA, 26 bp, Homo sapiens
catcagacagccccgactccttactt

SEQ ID NO: 17560 - DNA, 26 bp, Homo sapiens
atcagacagccccgactccttacttt

SEQ ID NO: 17561 - DNA, 26 bp, Homo sapiens
tcagacagccccgactccttactttt

SEQ ID NO: 17562 - DNA, 26 bp, Homo sapiens
cagacagccccgactccttactttta

SEQ ID NO: 17563 - DNA, 26 bp, Homo sapiens
agacagccccgactccttacttttac

SEQ ID NO: 17564 - DNA, 26 bp, Homo sapiens
gacagccccgactccttacttttact

SEQ ID NO: 17565 - DNA, 26 bp, Homo sapiens
acagccccgactccttacttttactg

SEQ ID NO: 17566 - DNA, 26 bp, Homo sapiens
cagccccgactccttacttttactgg

SEQ ID NO: 17567 - DNA, 26 bp, Homo sapiens
agccccgactccttacttttactggt

SEQ ID NO: 17568 - DNA, 26 bp, Homo sapiens
gccccgactccttacttttactggtt

SEQ ID NO: 17569 - DNA, 26 bp, Homo sapiens
ccccgactccttacttttactggtta

SEQ ID NO: 17570 - DNA, 26 bp, Homo sapiens
cccgactccttacttttactggttac

SEQ ID NO: 17571 - DNA, 26 bp, Homo sapiens
ccgactccttacttttactggttact

SEQ ID NO: 17572 - DNA, 26 bp, Homo sapiens
cgactccttacttttactggttactc

SEQ ID NO: 17573 - DNA, 26 bp, Homo sapiens
gactccttacttttactggttactct

SEQ ID NO: 17574 - DNA, 26 bp, Homo sapiens
actccttacttttactggttactctc

SEQ ID NO: 17575 - DNA, 26 bp, Homo sapiens
ctccttacttttactggttactctca

SEQ ID NO: 17576 - DNA, 26 bp, Homo sapiens
tccttacttttactggttactctcaa

SEQ ID NO: 17577 - DNA, 26 bp, Homo sapiens
ccttacttttactggttactctcaag

SEQ ID NO: 17578 - DNA, 26 bp, Homo sapiens
cttacttttactggttactctcaagt

SEQ ID NO: 17579 - DNA, 26 bp, Homo sapiens
ttacttttactggttactctcaagtc

SEQ ID NO: 17580 - DNA, 26 bp, Homo sapiens
tacttttactggttactctcaagtca

SEQ ID NO: 17581 - DNA, 26 bp, Homo sapiens
acttttactggttactctcaagtcaa

SEQ ID NO: 17582 - DNA, 26 bp, Homo sapiens
cttttactggttactctcaagtcaat

SEQ ID NO: 17583 - DNA, 26 bp, Homo sapiens
ttttactggttactctcaagtcaatc

SEQ ID NO: 17584 - DNA, 26 bp, Homo sapiens
tttactggttactctcaagtcaatct

SEQ ID NO: 17585 - DNA, 26 bp, Homo sapiens
ttactggttactctcaagtcaatctt

SEQ ID NO: 17586 - DNA, 26 bp, Homo sapiens
tactggttactctcaagtcaatcttg

SEQ ID NO: 17587 - DNA, 26 bp, Homo sapiens
actggttactctcaagtcaatcttga

SEQ ID NO: 17588 - DNA, 26 bp, Homo sapiens
ctggttactctcaagtcaatcttgag

SEQ ID NO: 17589 - DNA, 26 bp, Homo sapiens
tggttactctcaagtcaatcttgagc

SEQ ID NO: 17590 - DNA, 26 bp, Homo sapiens
ggttactctcaagtcaatcttgagcg

SEQ ID NO: 17591 - DNA, 26 bp, Homo sapiens
gttactctcaagtcaatcttgagcga

SEQ ID NO: 17592 - DNA, 26 bp, Homo sapiens
ttactctcaagtcaatcttgagcgag

SEQ ID NO: 17593 - DNA, 26 bp, Homo sapiens
tactctcaagtcaatcttgagcgagg

SEQ ID NO: 17594 - DNA, 26 bp, Homo sapiens
actctcaagtcaatcttgagcgaggc

SEQ ID NO: 17595 - DNA, 26 bp, Homo sapiens
ctctcaagtcaatcttgagcgaggcc

SEQ ID NO: 17596 - DNA, 26 bp, Homo sapiens
tctcaagtcaatcttgagcgaggcct

SEQ ID NO: 17597 - DNA, 26 bp, Homo sapiens
ctcaagtcaatcttgagcgaggcctt

SEQ ID NO: 17598 - DNA, 26 bp, Homo sapiens
tcaagtcaatcttgagcgaggccttg

SEQ ID NO: 17599 - DNA, 26 bp, Homo sapiens
caagtcaatcttgagcgaggccttgg

SEQ ID NO: 17600 - DNA, 26 bp, Homo sapiens
aagtcaatcttgagcgaggccttggg

SEQ ID NO: 17601 - DNA, 26 bp, Homo sapiens
agtcaatcttgagcgaggccttgggt

SEQ ID NO: 17602 - DNA, 26 bp, Homo sapiens
gtcaatcttgagcgaggccttgggtt

SEQ ID NO: 17603 - DNA, 26 bp, Homo sapiens
tcaatcttgagcgaggccttgggttt

SEQ ID NO: 17604 - DNA, 26 bp, Homo sapiens
caatcttgagcgaggccttgggtttg

SEQ ID NO: 17605 - DNA, 26 bp, Homo sapiens
aatcttgagcgaggccttgggtttgc

SEQ ID NO: 17606 - DNA, 26 bp, Homo sapiens
atcttgagcgaggccttgggtttgct

SEQ ID NO: 17607 - DNA, 26 bp, Homo sapiens
tcttgagcgaggccttgggtttgctg

SEQ ID NO: 17608 - DNA, 26 bp, Homo sapiens
cttgagcgaggccttgggtttgctgt

SEQ ID NO: 17609 - DNA, 26 bp, Homo sapiens
ttgagcgaggccttgggtttgctgtc

SEQ ID NO: 17610 - DNA, 26 bp, Homo sapiens
tgagcgaggccttgggtttgctgtca

SEQ ID NO: 17611 - DNA, 26 bp, Homo sapiens
gagcgaggccttgggtttgctgtcag

SEQ ID NO: 17612 - DNA, 26 bp, Homo sapiens
agcgaggccttgggtttgctgtcagt

SEQ ID NO: 17613 - DNA, 26 bp, Homo sapiens
gcgaggccttgggtttgctgtcagtc

SEQ ID NO: 17614 - DNA, 26 bp, Homo sapiens
cgaggccttgggtttgctgtcagtcc

SEQ ID NO: 17615 - DNA, 26 bp, Homo sapiens
gaggccttgggtttgctgtcagtcca

SEQ ID NO: 17616 - DNA, 26 bp, Homo sapiens
aggccttgggtttgctgtcagtccag

SEQ ID NO: 17617 - DNA, 26 bp, Homo sapiens
ggccttgggtttgctgtcagtccagg

SEQ ID NO: 17618 - DNA, 26 bp, Homo sapiens
gccttgggtttgctgtcagtccaggt

SEQ ID NO: 17619 - DNA, 26 bp, Homo sapiens
ccttgggtttgctgtcagtccaggtg

SEQ ID NO: 17620 - DNA, 26 bp, Homo sapiens
cttgggtttgctgtcagtccaggtga

SEQ ID NO: 17621 - DNA, 26 bp, Homo sapiens
ttgggtttgctgtcagtccaggtgaa

SEQ ID NO: 17622 - DNA, 26 bp, Homo sapiens
tgggtttgctgtcagtccaggtgaag

SEQ ID NO: 17623 - DNA, 26 bp, Homo sapiens
gggtttgctgtcagtccaggtgaagc

SEQ ID NO: 17624 - DNA, 26 bp, Homo sapiens
ggtttgctgtcagtccaggtgaagcg

SEQ ID NO: 17625 - DNA, 26 bp, Homo sapiens
gtttgctgtcagtccaggtgaagcgc

SEQ ID NO: 17626 - DNA, 26 bp, Homo sapiens
tttgctgtcagtccaggtgaagcgct

SEQ ID NO: 17627 - DNA, 26 bp, Homo sapiens
ttgctgtcagtccaggtgaagcgctt

SEQ ID NO: 17628 - DNA, 26 bp, Homo sapiens
tgctgtcagtccaggtgaagcgcttc

SEQ ID NO: 17629 - DNA, 26 bp, Homo sapiens
gctgtcagtccaggtgaagcgcttca

SEQ ID NO: 17630 - DNA, 26 bp, Homo sapiens
ctgtcagtccaggtgaagcgcttcag

SEQ ID NO: 17631 - DNA, 26 bp, Homo sapiens
tgtcagtccaggtgaagcgcttcagc

SEQ ID NO: 17632 - DNA, 26 bp, Homo sapiens
gtcagtccaggtgaagcgcttcagca

SEQ ID NO: 17633 - DNA, 26 bp, Homo sapiens
tcagtccaggtgaagcgcttcagcat

SEQ ID NO: 17634 - DNA, 26 bp, Homo sapiens
cagtccaggtgaagcgcttcagcatg

SEQ ID NO: 17635 - DNA, 26 bp, Homo sapiens
agtccaggtgaagcgcttcagcatgg

SEQ ID NO: 17636 - DNA, 26 bp, Homo sapiens
gtccaggtgaagcgcttcagcatggg

SEQ ID NO: 17637 - DNA, 26 bp, Homo sapiens
tccaggtgaagcgcttcagcatggga

SEQ ID NO: 17638 - DNA, 26 bp, Homo sapiens
ccaggtgaagcgcttcagcatgggag

SEQ ID NO: 17639 - DNA, 26 bp, Homo sapiens
caggtgaagcgcttcagcatgggaga

SEQ ID NO: 17640 - DNA, 26 bp, Homo sapiens
aggtgaagcgcttcagcatgggagag

SEQ ID NO: 17641 - DNA, 26 bp, Homo sapiens
ggtgaagcgcttcagcatgggagagg

SEQ ID NO: 17642 - DNA, 26 bp, Homo sapiens
gtgaagcgcttcagcatgggagaggc

SEQ ID NO: 17643 - DNA, 26 bp, Homo sapiens
tgaagcgcttcagcatgggagaggcc

SEQ ID NO: 17644 - DNA, 26 bp, Homo sapiens
gaagcgcttcagcatgggagaggcca

SEQ ID NO: 17645 - DNA, 26 bp, Homo sapiens
aagcgcttcagcatgggagaggccaa

SEQ ID NO: 17646 - DNA, 26 bp, Homo sapiens
agcgcttcagcatgggagaggccaac

SEQ ID NO: 17647 - DNA, 26 bp, Homo sapiens
gcgcttcagcatgggagaggccaaca

SEQ ID NO: 17648 - DNA, 26 bp, Homo sapiens
cgcttcagcatgggagaggccaacag

SEQ ID NO: 17649 - DNA, 26 bp, Homo sapiens
gcttcagcatgggagaggccaacaga

SEQ ID NO: 17650 - DNA, 26 bp, Homo sapiens
cttcagcatgggagaggccaacagag

SEQ ID NO: 17651 - DNA, 26 bp, Homo sapiens
ttcagcatgggagaggccaacagagt

SEQ ID NO: 17652 - DNA, 26 bp, Homo sapiens
tcagcatgggagaggccaacagagtg

SEQ ID NO: 17653 - DNA, 26 bp, Homo sapiens
cagcatgggagaggccaacagagtgc

SEQ ID NO: 17654 - DNA, 26 bp, Homo sapiens
agcatgggagaggccaacagagtgct

SEQ ID NO: 17655 - DNA, 26 bp, Homo sapiens
gcatgggagaggccaacagagtgctg

SEQ ID NO: 17656 - DNA, 26 bp, Homo sapiens
catgggagaggccaacagagtgctgc

SEQ ID NO: 17657 - DNA, 26 bp, Homo sapiens
atgggagaggccaacagagtgctgct

SEQ ID NO: 17658 - DNA, 26 bp, Homo sapiens
tgggagaggccaacagagtgctgctg

SEQ ID NO: 17659 - DNA, 26 bp, Homo sapiens
gggagaggccaacagagtgctgctgt

SEQ ID NO: 17660 - DNA, 26 bp, Homo sapiens
ggagaggccaacagagtgctgctgtc

SEQ ID NO: 17661 - DNA, 26 bp, Homo sapiens
gagaggccaacagagtgctgctgtcg

SEQ ID NO: 17662 - DNA, 26 bp, Homo sapiens
agaggccaacagagtgctgctgtcgc

SEQ ID NO: 17663 - DNA, 26 bp, Homo sapiens
gaggccaacagagtgctgctgtcgcc

SEQ ID NO: 17664 - DNA, 26 bp, Homo sapiens
aggccaacagagtgctgctgtcgccc

SEQ ID NO: 17665 - DNA, 26 bp, Homo sapiens
ggccaacagagtgctgctgtcgccct

SEQ ID NO: 17666 - DNA, 26 bp, Homo sapiens
gccaacagagtgctgctgtcgccctg

SEQ ID NO: 17667 - DNA, 26 bp, Homo sapiens
ccaacagagtgctgctgtcgccctgg

SEQ ID NO: 17668 - DNA, 26 bp, Homo sapiens
caacagagtgctgctgtcgccctggt

SEQ ID NO: 17669 - DNA, 26 bp, Homo sapiens
aacagagtgctgctgtcgccctggta

SEQ ID NO: 17670 - DNA, 26 bp, Homo sapiens
acagagtgctgctgtcgccctggtag

SEQ ID NO: 17671 - DNA, 26 bp, Homo sapiens
cagagtgctgctgtcgccctggtagt

SEQ ID NO: 17672 - DNA, 26 bp, Homo sapiens
agagtgctgctgtcgccctggtagtc

SEQ ID NO: 17673 - DNA, 26 bp, Homo sapiens
gagtgctgctgtcgccctggtagtca

SEQ ID NO: 17674 - DNA, 26 bp, Homo sapiens
agtgctgctgtcgccctggtagtcat

SEQ ID NO: 17675 - DNA, 26 bp, Homo sapiens
gtgctgctgtcgccctggtagtcatc

SEQ ID NO: 17676 - DNA, 26 bp, Homo sapiens
tgctgctgtcgccctggtagtcatca

SEQ ID NO: 17677 - DNA, 26 bp, Homo sapiens
gctgctgtcgccctggtagtcatcaa

SEQ ID NO: 17678 - DNA, 26 bp, Homo sapiens
ctgctgtcgccctggtagtcatcaaa

SEQ ID NO: 17679 - DNA, 26 bp, Homo sapiens
tgctgtcgccctggtagtcatcaaac

SEQ ID NO: 17680 - DNA, 26 bp, Homo sapiens
gctgtcgccctggtagtcatcaaaca

SEQ ID NO: 17681 - DNA, 26 bp, Homo sapiens
ctgtcgccctggtagtcatcaaacat

SEQ ID NO: 17682 - DNA, 26 bp, Homo sapiens
tgtcgccctggtagtcatcaaacatg

SEQ ID NO: 17683 - DNA, 26 bp, Homo sapiens
gtcgccctggtagtcatcaaacatgg

SEQ ID NO: 17684 - DNA, 26 bp, Homo sapiens
tcgccctggtagtcatcaaacatgga

SEQ ID NO: 17685 - DNA, 26 bp, Homo sapiens
cgccctggtagtcatcaaacatggag

SEQ ID NO: 17686 - DNA, 26 bp, Homo sapiens
gccctggtagtcatcaaacatggagg

SEQ ID NO: 17687 - DNA, 26 bp, Homo sapiens
ccctggtagtcatcaaacatggaggt

SEQ ID NO: 17688 - DNA, 26 bp, Homo sapiens
cctggtagtcatcaaacatggaggtg

SEQ ID NO: 17689 - DNA, 26 bp, Homo sapiens
ctggtagtcatcaaacatggaggtgg

SEQ ID NO: 17690 - DNA, 26 bp, Homo sapiens
tggtagtcatcaaacatggaggtggc

SEQ ID NO: 17691 - DNA, 26 bp, Homo sapiens
ggtagtcatcaaacatggaggtggca

SEQ ID NO: 17692 - DNA, 26 bp, Homo sapiens
gtagtcatcaaacatggaggtggcat

SEQ ID NO: 17693 - DNA, 26 bp, Homo sapiens
tagtcatcaaacatggaggtggcatt

SEQ ID NO: 17694 - DNA, 26 bp, Homo sapiens
agtcatcaaacatggaggtggcattc

SEQ ID NO: 17695 - DNA, 26 bp, Homo sapiens
gtcatcaaacatggaggtggcattcg

SEQ ID NO: 17696 - DNA, 26 bp, Homo sapiens
tcatcaaacatggaggtggcattcgg

SEQ ID NO: 17697 - DNA, 26 bp, Homo sapiens
catcaaacatggaggtggcattcggt

SEQ ID NO: 17698 - DNA, 26 bp, Homo sapiens
atcaaacatggaggtggcattcggta

SEQ ID NO: 17699 - DNA, 26 bp, Homo sapiens
tcaaacatggaggtggcattcggtaa

SEQ ID NO: 17700 - DNA, 26 bp, Homo sapiens
caaacatggaggtggcattcggtaaa

SEQ ID NO: 17701 - DNA, 26 bp, Homo sapiens
aaacatggaggtggcattcggtaaaa

SEQ ID NO: 17702 - DNA, 26 bp, Homo sapiens
aacatggaggtggcattcggtaaaag

SEQ ID NO: 17703 - DNA, 26 bp, Homo sapiens
acatggaggtggcattcggtaaaagt

SEQ ID NO: 17704 - DNA, 26 bp, Homo sapiens
catggaggtggcattcggtaaaagtt

SEQ ID NO: 17705 - DNA, 26 bp, Homo sapiens
atggaggtggcattcggtaaaagttc

SEQ ID NO: 17706 - DNA, 26 bp, Homo sapiens
tggaggtggcattcggtaaaagttct

SEQ ID NO: 17707 - DNA, 26 bp, Homo sapiens
ggaggtggcattcggtaaaagttctt

SEQ ID NO: 17708 - DNA, 26 bp, Homo sapiens
gaggtggcattcggtaaaagttcttc

SEQ ID NO: 17709 - DNA, 26 bp, Homo sapiens
aggtggcattcggtaaaagttcttca

SEQ ID NO: 17710 - DNA, 26 bp, Homo sapiens
ggtggcattcggtaaaagttcttcaa

SEQ ID NO: 17711 - DNA, 26 bp, Homo sapiens
gtggcattcggtaaaagttcttcaaa

SEQ ID NO: 17712 - DNA, 26 bp, Homo sapiens
tggcattcggtaaaagttcttcaaag

SEQ ID NO: 17713 - DNA, 26 bp, Homo sapiens
ggcattcggtaaaagttcttcaaagg

SEQ ID NO: 17714 - DNA, 26 bp, Homo sapiens
gcattcggtaaaagttcttcaaaggt

SEQ ID NO: 17715 - DNA, 26 bp, Homo sapiens
cattcggtaaaagttcttcaaaggtt

SEQ ID NO: 17716 - DNA, 26 bp, Homo sapiens
attcggtaaaagttcttcaaaggttt

SEQ ID NO: 17717 - DNA, 26 bp, Homo sapiens
ttcggtaaaagttcttcaaaggtttt

SEQ ID NO: 17718 - DNA, 26 bp, Homo sapiens
tcggtaaaagttcttcaaaggttttg

SEQ ID NO: 17719 - DNA, 26 bp, Homo sapiens
cggtaaaagttcttcaaaggttttga

SEQ ID NO: 17720 - DNA, 26 bp, Homo sapiens
ggtaaaagttcttcaaaggttttgat

SEQ ID NO: 17721 - DNA, 26 bp, Homo sapiens
gtaaaagttcttcaaaggttttgatt

SEQ ID NO: 17722 - DNA, 26 bp, Homo sapiens
taaaagttcttcaaaggttttgattc

SEQ ID NO: 17723 - DNA, 26 bp, Homo sapiens
aaaagttcttcaaaggttttgattct

SEQ ID NO: 17724 - DNA, 26 bp, Homo sapiens
aaagttcttcaaaggttttgattctt

SEQ ID NO: 17725 - DNA, 26 bp, Homo sapiens
aagttcttcaaaggttttgattcttt

SEQ ID NO: 17726 - DNA, 26 bp, Homo sapiens
agttcttcaaaggttttgattctttc

SEQ ID NO: 17727 - DNA, 26 bp, Homo sapiens
gttcttcaaaggttttgattctttcc

SEQ ID NO: 17728 - DNA, 26 bp, Homo sapiens
ttcttcaaaggttttgattctttcca

SEQ ID NO: 17729 - DNA, 26 bp, Homo sapiens
tcttcaaaggttttgattctttccag

SEQ ID NO: 17730 - DNA, 26 bp, Homo sapiens
cttcaaaggttttgattctttccagg

SEQ ID NO: 17731 - DNA, 26 bp, Homo sapiens
ttcaaaggttttgattctttccaggc

SEQ ID NO: 17732 - DNA, 26 bp, Homo sapiens
tcaaaggttttgattctttccaggct

SEQ ID NO: 17733 - DNA, 26 bp, Homo sapiens
caaaggttttgattctttccaggctc

SEQ ID NO: 17734 - DNA, 26 bp, Homo sapiens
aaaggttttgattctttccaggctca

SEQ ID NO: 17735 - DNA, 26 bp, Homo sapiens
aaggttttgattctttccaggctcat

SEQ ID NO: 17736 - DNA, 26 bp, Homo sapiens
aggttttgattctttccaggctcatg

SEQ ID NO: 17737 - DNA, 26 bp, Homo sapiens
ggttttgattctttccaggctcatga

SEQ ID NO: 17738 - DNA, 26 bp, Homo sapiens
gttttgattctttccaggctcatgaa

SEQ ID NO: 17739 - DNA, 26 bp, Homo sapiens
ttttgattctttccaggctcatgaac

SEQ ID NO: 17740 - DNA, 26 bp, Homo sapiens
tttgattctttccaggctcatgaact

SEQ ID NO: 17741 - DNA, 26 bp, Homo sapiens
ttgattctttccaggctcatgaactt

SEQ ID NO: 17742 - DNA, 26 bp, Homo sapiens
tgattctttccaggctcatgaacttg

SEQ ID NO: 17743 - DNA, 26 bp, Homo sapiens
gattctttccaggctcatgaacttga

SEQ ID NO: 17744 - DNA, 26 bp, Homo sapiens
attctttccaggctcatgaacttgaa

SEQ ID NO: 17745 - DNA, 26 bp, Homo sapiens
ttctttccaggctcatgaacttgaaa

SEQ ID NO: 17746 - DNA, 26 bp, Homo sapiens
tctttccaggctcatgaacttgaaag

SEQ ID NO: 17747 - DNA, 26 bp, Homo sapiens
ctttccaggctcatgaacttgaaagc

SEQ ID NO: 17748 - DNA, 26 bp, Homo sapiens
tttccaggctcatgaacttgaaagca

SEQ ID NO: 17749 - DNA, 26 bp, Homo sapiens
ttccaggctcatgaacttgaaagcat

SEQ ID NO: 17750 - DNA, 26 bp, Homo sapiens
tccaggctcatgaacttgaaagcatt

SEQ ID NO: 17751 - DNA, 26 bp, Homo sapiens
ccaggctcatgaacttgaaagcattt

SEQ ID NO: 17752 - DNA, 26 bp, Homo sapiens
caggctcatgaacttgaaagcattta

SEQ ID NO: 17753 - DNA, 26 bp, Homo sapiens
aggctcatgaacttgaaagcatttac

SEQ ID NO: 17754 - DNA, 26 bp, Homo sapiens
ggctcatgaacttgaaagcatttaca

SEQ ID NO: 17755 - DNA, 26 bp, Homo sapiens
gctcatgaacttgaaagcatttacat

SEQ ID NO: 17756 - DNA, 26 bp, Homo sapiens
ctcatgaacttgaaagcatttacata

SEQ ID NO: 17757 - DNA, 26 bp, Homo sapiens
tcatgaacttgaaagcatttacatat

SEQ ID NO: 17758 - DNA, 26 bp, Homo sapiens
catgaacttgaaagcatttacatatc

SEQ ID NO: 17759 - DNA, 26 bp, Homo sapiens
atgaacttgaaagcatttacatatct

SEQ ID NO: 17760 - DNA, 26 bp, Homo sapiens
tgaacttgaaagcatttacatatctg

SEQ ID NO: 17761 - DNA, 26 bp, Homo sapiens
gaacttgaaagcatttacatatctga

SEQ ID NO: 17762 - DNA, 26 bp, Homo sapiens
aacttgaaagcatttacatatctgac

SEQ ID NO: 17763 - DNA, 26 bp, Homo sapiens
acttgaaagcatttacatatctgaca

SEQ ID NO: 17764 - DNA, 26 bp, Homo sapiens
cttgaaagcatttacatatctgacat

SEQ ID NO: 17765 - DNA, 26 bp, Homo sapiens
ttgaaagcatttacatatctgacatc

SEQ ID NO: 17766 - DNA, 26 bp, Homo sapiens
tgaaagcatttacatatctgacatca

SEQ ID NO: 17767 - DNA, 26 bp, Homo sapiens
gaaagcatttacatatctgacatcat

SEQ ID NO: 17768 - DNA, 26 bp, Homo sapiens
aaagcatttacatatctgacatcatc

SEQ ID NO: 17769 - DNA, 26 bp, Homo sapiens
aagcatttacatatctgacatcatca

SEQ ID NO: 17770 - DNA, 26 bp, Homo sapiens
agcatttacatatctgacatcatcag

SEQ ID NO: 17771 - DNA, 26 bp, Homo sapiens
gcatttacatatctgacatcatcaga

SEQ ID NO: 17772 - DNA, 26 bp, Homo sapiens
catttacatatctgacatcatcagag

SEQ ID NO: 17773 - DNA, 26 bp, Homo sapiens
atttacatatctgacatcatcagagc

SEQ ID NO: 17774 - DNA, 26 bp, Homo sapiens
tttacatatctgacatcatcagagct

SEQ ID NO: 17775 - DNA, 26 bp, Homo sapiens
ttacatatctgacatcatcagagctt

SEQ ID NO: 17776 - DNA, 26 bp, Homo sapiens
tacatatctgacatcatcagagcttc

SEQ ID NO: 17777 - DNA, 26 bp, Homo sapiens
acatatctgacatcatcagagcttcc

SEQ ID NO: 17778 - DNA, 26 bp, Homo sapiens
catatctgacatcatcagagcttcct

SEQ ID NO: 17779 - DNA, 26 bp, Homo sapiens
atatctgacatcatcagagcttcctg

SEQ ID NO: 17780 - DNA, 26 bp, Homo sapiens
tatctgacatcatcagagcttcctga

SEQ ID NO: 17781 - DNA, 26 bp, Homo sapiens
atctgacatcatcagagcttcctgaa

SEQ ID NO: 17782 - DNA, 26 bp, Homo sapiens
tctgacatcatcagagcttcctgaat

SEQ ID NO: 17783 - DNA, 26 bp, Homo sapiens
ctgacatcatcagagcttcctgaatt

SEQ ID NO: 17784 - DNA, 26 bp, Homo sapiens
tgacatcatcagagcttcctgaatta

SEQ ID NO: 17785 - DNA, 26 bp, Homo sapiens
gacatcatcagagcttcctgaattaa

SEQ ID NO: 17786 - DNA, 26 bp, Homo sapiens
acatcatcagagcttcctgaattaaa

SEQ ID NO: 17787 - DNA, 26 bp, Homo sapiens
catcatcagagcttcctgaattaaac

SEQ ID NO: 17788 - DNA, 26 bp, Homo sapiens
atcatcagagcttcctgaattaaact

SEQ ID NO: 17789 - DNA, 26 bp, Homo sapiens
tcatcagagcttcctgaattaaactt

SEQ ID NO: 17790 - DNA, 26 bp, Homo sapiens
catcagagcttcctgaattaaacttc

SEQ ID NO: 17791 - DNA, 26 bp, Homo sapiens
atcagagcttcctgaattaaacttcg

SEQ ID NO: 17792 - DNA, 26 bp, Homo sapiens
tcagagcttcctgaattaaacttcgg

SEQ ID NO: 17793 - DNA, 26 bp, Homo sapiens
cagagcttcctgaattaaacttcgga

SEQ ID NO: 17794 - DNA, 26 bp, Homo sapiens
agagcttcctgaattaaacttcggag

SEQ ID NO: 17795 - DNA, 26 bp, Homo sapiens
gagcttcctgaattaaacttcggagc

SEQ ID NO: 17796 - DNA, 26 bp, Homo sapiens
agcttcctgaattaaacttcggagct

SEQ ID NO: 17797 - DNA, 26 bp, Homo sapiens
gcttcctgaattaaacttcggagctg

SEQ ID NO: 17798 - DNA, 26 bp, Homo sapiens
cttcctgaattaaacttcggagctga

SEQ ID NO: 17799 - DNA, 26 bp, Homo sapiens
ttcctgaattaaacttcggagctgaa

SEQ ID NO: 17800 - DNA, 26 bp, Homo sapiens
tcctgaattaaacttcggagctgaaa

SEQ ID NO: 17801 - DNA, 26 bp, Homo sapiens
cctgaattaaacttcggagctgaaat

SEQ ID NO: 17802 - DNA, 26 bp, Homo sapiens
ctgaattaaacttcggagctgaaata

SEQ ID NO: 17803 - DNA, 26 bp, Homo sapiens
tgaattaaacttcggagctgaaatac

SEQ ID NO: 17804 - DNA, 26 bp, Homo sapiens
gaattaaacttcggagctgaaatact

SEQ ID NO: 17805 - DNA, 26 bp, Homo sapiens
aattaaacttcggagctgaaatactt

SEQ ID NO: 17806 - DNA, 26 bp, Homo sapiens
attaaacttcggagctgaaatacttt

SEQ ID NO: 17807 - DNA, 26 bp, Homo sapiens
ttaaacttcggagctgaaatactttc

SEQ ID NO: 17808 - DNA, 26 bp, Homo sapiens
taaacttcggagctgaaatactttcc

SEQ ID NO: 17809 - DNA, 26 bp, Homo sapiens
aaacttcggagctgaaatactttcct

SEQ ID NO: 17810 - DNA, 26 bp, Homo sapiens
aacttcggagctgaaatactttcctt

SEQ ID NO: 17811 - DNA, 26 bp, Homo sapiens
acttcggagctgaaatactttccttg

SEQ ID NO: 17812 - DNA, 26 bp, Homo sapiens
cttcggagctgaaatactttccttga

SEQ ID NO: 17813 - DNA, 26 bp, Homo sapiens
ttcggagctgaaatactttccttgaa

SEQ ID NO: 17814 - DNA, 26 bp, Homo sapiens
tcggagctgaaatactttccttgaag

SEQ ID NO: 17815 - DNA, 26 bp, Homo sapiens
cggagctgaaatactttccttgaaga

SEQ ID NO: 17816 - DNA, 26 bp, Homo sapiens
ggagctgaaatactttccttgaagaa

SEQ ID NO: 17817 - DNA, 26 bp, Homo sapiens
gagctgaaatactttccttgaagaag

SEQ ID NO: 17818 - DNA, 26 bp, Homo sapiens
agctgaaatactttccttgaagaagt

SEQ ID NO: 17819 - DNA, 26 bp, Homo sapiens
gctgaaatactttccttgaagaagtc

SEQ ID NO: 17820 - DNA, 26 bp, Homo sapiens
ctgaaatactttccttgaagaagtcc

SEQ ID NO: 17821 - DNA, 26 bp, Homo sapiens
tgaaatactttccttgaagaagtcct

SEQ ID NO: 17822 - DNA, 26 bp, Homo sapiens
gaaatactttccttgaagaagtcctc

SEQ ID NO: 17823 - DNA, 26 bp, Homo sapiens
aaatactttccttgaagaagtcctca

SEQ ID NO: 17824 - DNA, 26 bp, Homo sapiens
aatactttccttgaagaagtcctcag

SEQ ID NO: 17825 - DNA, 26 bp, Homo sapiens
atactttccttgaagaagtcctcaga

SEQ ID NO: 17826 - DNA, 26 bp, Homo sapiens
tactttccttgaagaagtcctcagag

SEQ ID NO: 17827 - DNA, 26 bp, Homo sapiens
actttccttgaagaagtcctcagaga

SEQ ID NO: 17828 - DNA, 26 bp, Homo sapiens
ctttccttgaagaagtcctcagagaa

SEQ ID NO: 17829 - DNA, 26 bp, Homo sapiens
tttccttgaagaagtcctcagagaag

SEQ ID NO: 17830 - DNA, 26 bp, Homo sapiens
ttccttgaagaagtcctcagagaagg

SEQ ID NO: 17831 - DNA, 26 bp, Homo sapiens
tccttgaagaagtcctcagagaaggc

SEQ ID NO: 17832 - DNA, 26 bp, Homo sapiens
ccttgaagaagtcctcagagaaggca

SEQ ID NO: 17833 - DNA, 26 bp, Homo sapiens
cttgaagaagtcctcagagaaggcag

SEQ ID NO: 17834 - DNA, 26 bp, Homo sapiens
ttgaagaagtcctcagagaaggcagg

SEQ ID NO: 17835 - DNA, 26 bp, Homo sapiens
tgaagaagtcctcagagaaggcagga

SEQ ID NO: 17836 - DNA, 26 bp, Homo sapiens
gaagaagtcctcagagaaggcaggag

SEQ ID NO: 17837 - DNA, 26 bp, Homo sapiens
aagaagtcctcagagaaggcaggagt

SEQ ID NO: 17838 - DNA, 26 bp, Homo sapiens
agaagtcctcagagaaggcaggagtt

SEQ ID NO: 17839 - DNA, 26 bp, Homo sapiens
gaagtcctcagagaaggcaggagttg

SEQ ID NO: 17840 - DNA, 26 bp, Homo sapiens
aagtcctcagagaaggcaggagttga

SEQ ID NO: 17841 - DNA, 26 bp, Homo sapiens
agtcctcagagaaggcaggagttgag

SEQ ID NO: 17842 - DNA, 26 bp, Homo sapiens
gtcctcagagaaggcaggagttgagt

SEQ ID NO: 17843 - DNA, 26 bp, Homo sapiens
tcctcagagaaggcaggagttgagta

SEQ ID NO: 17844 - DNA, 26 bp, Homo sapiens
cctcagagaaggcaggagttgagtat

SEQ ID NO: 17845 - DNA, 26 bp, Homo sapiens
ctcagagaaggcaggagttgagtatg

SEQ ID NO: 17846 - DNA, 26 bp, Homo sapiens
tcagagaaggcaggagttgagtatgt

SEQ ID NO: 17847 - DNA, 26 bp, Homo sapiens
cagagaaggcaggagttgagtatgta

SEQ ID NO: 17848 - DNA, 26 bp, Homo sapiens
agagaaggcaggagttgagtatgtaa

SEQ ID NO: 17849 - DNA, 26 bp, Homo sapiens
gagaaggcaggagttgagtatgtaaa

SEQ ID NO: 17850 - DNA, 26 bp, Homo sapiens
agaaggcaggagttgagtatgtaaac

SEQ ID NO: 17851 - DNA, 26 bp, Homo sapiens
gaaggcaggagttgagtatgtaaacc

SEQ ID NO: 17852 - DNA, 26 bp, Homo sapiens
aaggcaggagttgagtatgtaaaccc

SEQ ID NO: 17853 - DNA, 26 bp, Homo sapiens
aggcaggagttgagtatgtaaaccca

SEQ ID NO: 17854 - DNA, 26 bp, Homo sapiens
ggcaggagttgagtatgtaaacccac

SEQ ID NO: 17855 - DNA, 26 bp, Homo sapiens
gcaggagttgagtatgtaaacccact

SEQ ID NO: 17856 - DNA, 26 bp, Homo sapiens
caggagttgagtatgtaaacccacta

SEQ ID NO: 17857 - DNA, 26 bp, Homo sapiens
aggagttgagtatgtaaacccactat

SEQ ID NO: 17858 - DNA, 26 bp, Homo sapiens
ggagttgagtatgtaaacccactatt

SEQ ID NO: 17859 - DNA, 26 bp, Homo sapiens
gagttgagtatgtaaacccactattt

SEQ ID NO: 17860 - DNA, 26 bp, Homo sapiens
agttgagtatgtaaacccactatttc

SEQ ID NO: 17861 - DNA, 26 bp, Homo sapiens
gttgagtatgtaaacccactatttcc

SEQ ID NO: 17862 - DNA, 26 bp, Homo sapiens
ttgagtatgtaaacccactatttcct

SEQ ID NO: 17863 - DNA, 26 bp, Homo sapiens
tgagtatgtaaacccactatttcctg

SEQ ID NO: 17864 - DNA, 26 bp, Homo sapiens
gagtatgtaaacccactatttcctgt

SEQ ID NO: 17865 - DNA, 26 bp, Homo sapiens
agtatgtaaacccactatttcctgtc

SEQ ID NO: 17866 - DNA, 26 bp, Homo sapiens
gtatgtaaacccactatttcctgtca

SEQ ID NO: 17867 - DNA, 26 bp, Homo sapiens
tatgtaaacccactatttcctgtcag

SEQ ID NO: 17868 - DNA, 26 bp, Homo sapiens
atgtaaacccactatttcctgtcagt

SEQ ID NO: 17869 - DNA, 26 bp, Homo sapiens
tgtaaacccactatttcctgtcagta

SEQ ID NO: 17870 - DNA, 26 bp, Homo sapiens
gtaaacccactatttcctgtcagtat

SEQ ID NO: 17871 - DNA, 26 bp, Homo sapiens
taaacccactatttcctgtcagtatg

SEQ ID NO: 17872 - DNA, 26 bp, Homo sapiens
aaacccactatttcctgtcagtatgg

SEQ ID NO: 17873 - DNA, 26 bp, Homo sapiens
aacccactatttcctgtcagtatggc

SEQ ID NO: 17874 - DNA, 26 bp, Homo sapiens
acccactatttcctgtcagtatggca

SEQ ID NO: 17875 - DNA, 26 bp, Homo sapiens
cccactatttcctgtcagtatggcat

SEQ ID NO: 17876 - DNA, 26 bp, Homo sapiens
ccactatttcctgtcagtatggcatt

SEQ ID NO: 17877 - DNA, 26 bp, Homo sapiens
cactatttcctgtcagtatggcattg

SEQ ID NO: 17878 - DNA, 26 bp, Homo sapiens
actatttcctgtcagtatggcattga

SEQ ID NO: 17879 - DNA, 26 bp, Homo sapiens
ctatttcctgtcagtatggcattgat

SEQ ID NO: 17880 - DNA, 26 bp, Homo sapiens
tatttcctgtcagtatggcattgatt

SEQ ID NO: 17881 - DNA, 26 bp, Homo sapiens
atttcctgtcagtatggcattgattg

SEQ ID NO: 17882 - DNA, 26 bp, Homo sapiens
tttcctgtcagtatggcattgattgg

SEQ ID NO: 17883 - DNA, 26 bp, Homo sapiens
ttcctgtcagtatggcattgattggg

SEQ ID NO: 17884 - DNA, 26 bp, Homo sapiens
tcctgtcagtatggcattgattggga

SEQ ID NO: 17885 - DNA, 26 bp, Homo sapiens
cctgtcagtatggcattgattgggat

SEQ ID NO: 17886 - DNA, 26 bp, Homo sapiens
ctgtcagtatggcattgattgggatg

SEQ ID NO: 17887 - DNA, 26 bp, Homo sapiens
tgtcagtatggcattgattgggatgt

SEQ ID NO: 17888 - DNA, 26 bp, Homo sapiens
gtcagtatggcattgattgggatgta

SEQ ID NO: 17889 - DNA, 26 bp, Homo sapiens
tcagtatggcattgattgggatgtag

SEQ ID NO: 17890 - DNA, 26 bp, Homo sapiens
cagtatggcattgattgggatgtagt

SEQ ID NO: 17891 - DNA, 26 bp, Homo sapiens
agtatggcattgattgggatgtagtc

SEQ ID NO: 17892 - DNA, 26 bp, Homo sapiens
gtatggcattgattgggatgtagtct

SEQ ID NO: 17893 - DNA, 26 bp, Homo sapiens
tatggcattgattgggatgtagtctt

SEQ ID NO: 17894 - DNA, 26 bp, Homo sapiens
atggcattgattgggatgtagtcttt

SEQ ID NO: 17895 - DNA, 26 bp, Homo sapiens
tggcattgattgggatgtagtcttta

SEQ ID NO: 17896 - DNA, 26 bp, Homo sapiens
ggcattgattgggatgtagtctttac

SEQ ID NO: 17897 - DNA, 26 bp, Homo sapiens
gcattgattgggatgtagtctttacc

SEQ ID NO: 17898 - DNA, 26 bp, Homo sapiens
cattgattgggatgtagtctttacca

SEQ ID NO: 17899 - DNA, 26 bp, Homo sapiens
attgattgggatgtagtctttaccat

SEQ ID NO: 17900 - DNA, 26 bp, Homo sapiens
ttgattgggatgtagtctttaccatc

SEQ ID NO: 17901 - DNA, 26 bp, Homo sapiens
tgattgggatgtagtctttaccatcc

SEQ ID NO: 17902 - DNA, 26 bp, Homo sapiens
gattgggatgtagtctttaccatcct

SEQ ID NO: 17903 - DNA, 26 bp, Homo sapiens
attgggatgtagtctttaccatcctg

SEQ ID NO: 17904 - DNA, 26 bp, Homo sapiens
ttgggatgtagtctttaccatcctgt

SEQ ID NO: 17905 - DNA, 26 bp, Homo sapiens
tgggatgtagtctttaccatcctgtt

SEQ ID NO: 17906 - DNA, 26 bp, Homo sapiens
gggatgtagtctttaccatcctgttg

SEQ ID NO: 17907 - DNA, 26 bp, Homo sapiens
ggatgtagtctttaccatcctgttgt

SEQ ID NO: 17908 - DNA, 26 bp, Homo sapiens
gatgtagtctttaccatcctgttgta

SEQ ID NO: 17909 - DNA, 26 bp, Homo sapiens
atgtagtctttaccatcctgttgtac

SEQ ID NO: 17910 - DNA, 26 bp, Homo sapiens
tgtagtctttaccatcctgttgtaca

SEQ ID NO: 17911 - DNA, 26 bp, Homo sapiens
gtagtctttaccatcctgttgtacat

SEQ ID NO: 17912 - DNA, 26 bp, Homo sapiens
tagtctttaccatcctgttgtacatt

SEQ ID NO: 17913 - DNA, 26 bp, Homo sapiens
agtctttaccatcctgttgtacattt

SEQ ID NO: 17914 - DNA, 26 bp, Homo sapiens
gtctttaccatcctgttgtacatttg

SEQ ID NO: 17915 - DNA, 26 bp, Homo sapiens
tctttaccatcctgttgtacatttgc

SEQ ID NO: 17916 - DNA, 26 bp, Homo sapiens
ctttaccatcctgttgtacatttgct

SEQ ID NO: 17917 - DNA, 26 bp, Homo sapiens
tttaccatcctgttgtacatttgctt

SEQ ID NO: 17918 - DNA, 26 bp, Homo sapiens
ttaccatcctgttgtacatttgcttg

SEQ ID NO: 17919 - DNA, 26 bp, Homo sapiens
taccatcctgttgtacatttgcttga

SEQ ID NO: 17920 - DNA, 26 bp, Homo sapiens
accatcctgttgtacatttgcttgaa

SEQ ID NO: 17921 - DNA, 26 bp, Homo sapiens
ccatcctgttgtacatttgcttgaag

SEQ ID NO: 17922 - DNA, 26 bp, Homo sapiens
catcctgttgtacatttgcttgaagc

SEQ ID NO: 17923 - DNA, 26 bp, Homo sapiens
atcctgttgtacatttgcttgaagca

SEQ ID NO: 17924 - DNA, 26 bp, Homo sapiens
tcctgttgtacatttgcttgaagcaa

SEQ ID NO: 17925 - DNA, 26 bp, Homo sapiens
cctgttgtacatttgcttgaagcaaa

SEQ ID NO: 17926 - DNA, 26 bp, Homo sapiens
ctgttgtacatttgcttgaagcaaat

SEQ ID NO: 17927 - DNA, 26 bp, Homo sapiens
tgttgtacatttgcttgaagcaaatc

SEQ ID NO: 17928 - DNA, 26 bp, Homo sapiens
gttgtacatttgcttgaagcaaatca

SEQ ID NO: 17929 - DNA, 26 bp, Homo sapiens
ttgtacatttgcttgaagcaaatcac

SEQ ID NO: 17930 - DNA, 26 bp, Homo sapiens
tgtacatttgcttgaagcaaatcacc

SEQ ID NO: 17931 - DNA, 26 bp, Homo sapiens
gtacatttgcttgaagcaaatcacct

SEQ ID NO: 17932 - DNA, 26 bp, Homo sapiens
tacatttgcttgaagcaaatcaccta

SEQ ID NO: 17933 - DNA, 26 bp, Homo sapiens
acatttgcttgaagcaaatcacctag

SEQ ID NO: 17934 - DNA, 26 bp, Homo sapiens
catttgcttgaagcaaatcacctagt

SEQ ID NO: 17935 - DNA, 26 bp, Homo sapiens
atttgcttgaagcaaatcacctagtt

SEQ ID NO: 17936 - DNA, 26 bp, Homo sapiens
tttgcttgaagcaaatcacctagttt

SEQ ID NO: 17937 - DNA, 26 bp, Homo sapiens
ttgcttgaagcaaatcacctagtttt

SEQ ID NO: 17938 - DNA, 26 bp, Homo sapiens
tgcttgaagcaaatcacctagttttt

SEQ ID NO: 17939 - DNA, 26 bp, Homo sapiens
gcttgaagcaaatcacctagtttttc

SEQ ID NO: 17940 - DNA, 26 bp, Homo sapiens
cttgaagcaaatcacctagtttttcc

SEQ ID NO: 17941 - DNA, 26 bp, Homo sapiens
ttgaagcaaatcacctagtttttcca

SEQ ID NO: 17942 - DNA, 26 bp, Homo sapiens
tgaagcaaatcacctagtttttccac

SEQ ID NO: 17943 - DNA, 26 bp, Homo sapiens
gaagcaaatcacctagtttttccaca

SEQ ID NO: 17944 - DNA, 26 bp, Homo sapiens
aagcaaatcacctagtttttccacaa

SEQ ID NO: 17945 - DNA, 26 bp, Homo sapiens
agcaaatcacctagtttttccacaag

SEQ ID NO: 17946 - DNA, 26 bp, Homo sapiens
gcaaatcacctagtttttccacaagt

SEQ ID NO: 17947 - DNA, 26 bp, Homo sapiens
caaatcacctagtttttccacaagtt

SEQ ID NO: 17948 - DNA, 26 bp, Homo sapiens
aaatcacctagtttttccacaagttc

SEQ ID NO: 17949 - DNA, 26 bp, Homo sapiens
aatcacctagtttttccacaagttct

SEQ ID NO: 17950 - DNA, 26 bp, Homo sapiens
atcacctagtttttccacaagttctg

SEQ ID NO: 17951 - DNA, 26 bp, Homo sapiens
tcacctagtttttccacaagttctgc

SEQ ID NO: 17952 - DNA, 26 bp, Homo sapiens
cacctagtttttccacaagttctgca

SEQ ID NO: 17953 - DNA, 26 bp, Homo sapiens
acctagtttttccacaagttctgcaa

SEQ ID NO: 17954 - DNA, 26 bp, Homo sapiens
cctagtttttccacaagttctgcaaa

SEQ ID NO: 17955 - DNA, 26 bp, Homo sapiens
ctagtttttccacaagttctgcaaat

SEQ ID NO: 17956 - DNA, 26 bp, Homo sapiens
tagtttttccacaagttctgcaaatc

SEQ ID NO: 17957 - DNA, 26 bp, Homo sapiens
agtttttccacaagttctgcaaatct

SEQ ID NO: 17958 - DNA, 26 bp, Homo sapiens
gtttttccacaagttctgcaaatctt

SEQ ID NO: 17959 - DNA, 26 bp, Homo sapiens
tttttccacaagttctgcaaatcttg

SEQ ID NO: 17960 - DNA, 26 bp, Homo sapiens
ttttccacaagttctgcaaatcttgg

SEQ ID NO: 17961 - DNA, 26 bp, Homo sapiens
tttccacaagttctgcaaatcttggc

SEQ ID NO: 17962 - DNA, 26 bp, Homo sapiens
ttccacaagttctgcaaatcttggcc

SEQ ID NO: 17963 - DNA, 26 bp, Homo sapiens
tccacaagttctgcaaatcttggcct

SEQ ID NO: 17964 - DNA, 26 bp, Homo sapiens
ccacaagttctgcaaatcttggcctt

SEQ ID NO: 17965 - DNA, 26 bp, Homo sapiens
cacaagttctgcaaatcttggccttt

SEQ ID NO: 17966 - DNA, 26 bp, Homo sapiens
acaagttctgcaaatcttggcctttc

SEQ ID NO: 17967 - DNA, 26 bp, Homo sapiens
caagttctgcaaatcttggcctttct

SEQ ID NO: 17968 - DNA, 26 bp, Homo sapiens
aagttctgcaaatcttggcctttctt

SEQ ID NO: 17969 - DNA, 26 bp, Homo sapiens
agttctgcaaatcttggcctttcttt

SEQ ID NO: 17970 - DNA, 26 bp, Homo sapiens
gttctgcaaatcttggcctttctttt

SEQ ID NO: 17971 - DNA, 26 bp, Homo sapiens
ttctgcaaatcttggcctttcttttg

SEQ ID NO: 17972 - DNA, 26 bp, Homo sapiens
tctgcaaatcttggcctttcttttgg

SEQ ID NO: 17973 - DNA, 26 bp, Homo sapiens
ctgcaaatcttggcctttcttttggg

SEQ ID NO: 17974 - DNA, 26 bp, Homo sapiens
tgcaaatcttggcctttcttttgggt

SEQ ID NO: 17975 - DNA, 26 bp, Homo sapiens
gcaaatcttggcctttcttttgggtc

SEQ ID NO: 17976 - DNA, 26 bp, Homo sapiens
caaatcttggcctttcttttgggtct

SEQ ID NO: 17977 - DNA, 26 bp, Homo sapiens
aaatcttggcctttcttttgggtctc

SEQ ID NO: 17978 - DNA, 26 bp, Homo sapiens
aatcttggcctttcttttgggtctct

SEQ ID NO: 17979 - DNA, 26 bp, Homo sapiens
atcttggcctttcttttgggtctctg

SEQ ID NO: 17980 - DNA, 26 bp, Homo sapiens
tcttggcctttcttttgggtctctgt

SEQ ID NO: 17981 - DNA, 26 bp, Homo sapiens
cttggcctttcttttgggtctctgtg

SEQ ID NO: 17982 - DNA, 26 bp, Homo sapiens
ttggcctttcttttgggtctctgtgc

SEQ ID NO: 17983 - DNA, 26 bp, Homo sapiens
tggcctttcttttgggtctctgtgcc

SEQ ID NO: 17984 - DNA, 26 bp, Homo sapiens
ggcctttcttttgggtctctgtgcca

SEQ ID NO: 17985 - DNA, 26 bp, Homo sapiens
gcctttcttttgggtctctgtgccag

SEQ ID NO: 17986 - DNA, 26 bp, Homo sapiens
cctttcttttgggtctctgtgccagc

SEQ ID NO: 17987 - DNA, 26 bp, Homo sapiens
ctttcttttgggtctctgtgccagca

SEQ ID NO: 17988 - DNA, 26 bp, Homo sapiens
tttcttttgggtctctgtgccagcag

SEQ ID NO: 17989 - DNA, 26 bp, Homo sapiens
ttcttttgggtctctgtgccagcagt

SEQ ID NO: 17990 - DNA, 26 bp, Homo sapiens
tcttttgggtctctgtgccagcagtc

SEQ ID NO: 17991 - DNA, 26 bp, Homo sapiens
cttttgggtctctgtgccagcagtcc

SEQ ID NO: 17992 - DNA, 26 bp, Homo sapiens
ttttgggtctctgtgccagcagtcca

SEQ ID NO: 17993 - DNA, 26 bp, Homo sapiens
tttgggtctctgtgccagcagtccag

SEQ ID NO: 17994 - DNA, 26 bp, Homo sapiens
ttgggtctctgtgccagcagtccagc

SEQ ID NO: 17995 - DNA, 26 bp, Homo sapiens
tgggtctctgtgccagcagtccagca

SEQ ID NO: 17996 - DNA, 26 bp, Homo sapiens
gggtctctgtgccagcagtccagcat

SEQ ID NO: 17997 - DNA, 26 bp, Homo sapiens
ggtctctgtgccagcagtccagcatg

SEQ ID NO: 17998 - DNA, 26 bp, Homo sapiens
gtctctgtgccagcagtccagcatga

SEQ ID NO: 17999 - DNA, 26 bp, Homo sapiens
tctctgtgccagcagtccagcatgat

SEQ ID NO: 18000 - DNA, 26 bp, Homo sapiens
ctctgtgccagcagtccagcatgatc

SEQ ID NO: 18001 - DNA, 26 bp, Homo sapiens
tctgtgccagcagtccagcatgatct

SEQ ID NO: 18002 - DNA, 26 bp, Homo sapiens
ctgtgccagcagtccagcatgatctg

SEQ ID NO: 18003 - DNA, 26 bp, Homo sapiens
tgtgccagcagtccagcatgatctga

SEQ ID NO: 18004 - DNA, 26 bp, Homo sapiens
gtgccagcagtccagcatgatctgat

SEQ ID NO: 18005 - DNA, 26 bp, Homo sapiens
tgccagcagtccagcatgatctgata

SEQ ID NO: 18006 - DNA, 26 bp, Homo sapiens
gccagcagtccagcatgatctgatag

SEQ ID NO: 18007 - DNA, 26 bp, Homo sapiens
ccagcagtccagcatgatctgataga

SEQ ID NO: 18008 - DNA, 26 bp, Homo sapiens
cagcagtccagcatgatctgatagat

SEQ ID NO: 18009 - DNA, 26 bp, Homo sapiens
agcagtccagcatgatctgatagatt

SEQ ID NO: 18010 - DNA, 26 bp, Homo sapiens
gcagtccagcatgatctgatagattt

SEQ ID NO: 18011 - DNA, 26 bp, Homo sapiens
cagtccagcatgatctgatagatttc

SEQ ID NO: 18012 - DNA, 26 bp, Homo sapiens
agtccagcatgatctgatagatttca

SEQ ID NO: 18013 - DNA, 26 bp, Homo sapiens
gtccagcatgatctgatagatttcag

SEQ ID NO: 18014 - DNA, 26 bp, Homo sapiens
tccagcatgatctgatagatttcagg

SEQ ID NO: 18015 - DNA, 26 bp, Homo sapiens
ccagcatgatctgatagatttcagga

SEQ ID NO: 18016 - DNA, 26 bp, Homo sapiens
cagcatgatctgatagatttcaggag

SEQ ID NO: 18017 - DNA, 26 bp, Homo sapiens
agcatgatctgatagatttcaggagt

SEQ ID NO: 18018 - DNA, 26 bp, Homo sapiens
gcatgatctgatagatttcaggagta

SEQ ID NO: 18019 - DNA, 26 bp, Homo sapiens
catgatctgatagatttcaggagtag

SEQ ID NO: 18020 - DNA, 26 bp, Homo sapiens
atgatctgatagatttcaggagtaga

SEQ ID NO: 18021 - DNA, 26 bp, Homo sapiens
tgatctgatagatttcaggagtagag

SEQ ID NO: 18022 - DNA, 26 bp, Homo sapiens
gatctgatagatttcaggagtagagt

SEQ ID NO: 18023 - DNA, 26 bp, Homo sapiens
atctgatagatttcaggagtagagta

SEQ ID NO: 18024 - DNA, 26 bp, Homo sapiens
tctgatagatttcaggagtagagtac

SEQ ID NO: 18025 - DNA, 26 bp, Homo sapiens
ctgatagatttcaggagtagagtact

SEQ ID NO: 18026 - DNA, 26 bp, Homo sapiens
tgatagatttcaggagtagagtactc

SEQ ID NO: 18027 - DNA, 26 bp, Homo sapiens
gatagatttcaggagtagagtactca

SEQ ID NO: 18028 - DNA, 26 bp, Homo sapiens
atagatttcaggagtagagtactcag

SEQ ID NO: 18029 - DNA, 26 bp, Homo sapiens
tagatttcaggagtagagtactcagg

SEQ ID NO: 18030 - DNA, 26 bp, Homo sapiens
agatttcaggagtagagtactcagga

SEQ ID NO: 18031 - DNA, 26 bp, Homo sapiens
gatttcaggagtagagtactcaggag

SEQ ID NO: 18032 - DNA, 26 bp, Homo sapiens
atttcaggagtagagtactcaggagc

SEQ ID NO: 18033 - DNA, 26 bp, Homo sapiens
tttcaggagtagagtactcaggagct

SEQ ID NO: 18034 - DNA, 26 bp, Homo sapiens
ttcaggagtagagtactcaggagctc

SEQ ID NO: 18035 - DNA, 26 bp, Homo sapiens
tcaggagtagagtactcaggagctct

SEQ ID NO: 18036 - DNA, 26 bp, Homo sapiens
caggagtagagtactcaggagctctc

SEQ ID NO: 18037 - DNA, 26 bp, Homo sapiens
aggagtagagtactcaggagctctca

SEQ ID NO: 18038 - DNA, 26 bp, Homo sapiens
ggagtagagtactcaggagctctcat

SEQ ID NO: 18039 - DNA, 26 bp, Homo sapiens
gagtagagtactcaggagctctcatc

SEQ ID NO: 18040 - DNA, 26 bp, Homo sapiens
agtagagtactcaggagctctcatcc

SEQ ID NO: 18041 - DNA, 26 bp, Homo sapiens
gtagagtactcaggagctctcatcct

SEQ ID NO: 18042 - DNA, 26 bp, Homo sapiens
tagagtactcaggagctctcatcctc

SEQ ID NO: 18043 - DNA, 26 bp, Homo sapiens
agagtactcaggagctctcatcctca

SEQ ID NO: 18044 - DNA, 26 bp, Homo sapiens
gagtactcaggagctctcatcctcat

SEQ ID NO: 18045 - DNA, 26 bp, Homo sapiens
agtactcaggagctctcatcctcatg

SEQ ID NO: 18046 - DNA, 26 bp, Homo sapiens
gtactcaggagctctcatcctcatgc

SEQ ID NO: 18047 - DNA, 26 bp, Homo sapiens
tactcaggagctctcatcctcatgcc

SEQ ID NO: 18048 - DNA, 26 bp, Homo sapiens
actcaggagctctcatcctcatgcct

SEQ ID NO: 18049 - DNA, 26 bp, Homo sapiens
ctcaggagctctcatcctcatgcctt

SEQ ID NO: 18050 - DNA, 26 bp, Homo sapiens
tcaggagctctcatcctcatgccttc

SEQ ID NO: 18051 - DNA, 26 bp, Homo sapiens
caggagctctcatcctcatgccttcc

SEQ ID NO: 18052 - DNA, 26 bp, Homo sapiens
aggagctctcatcctcatgccttccc

SEQ ID NO: 18053 - DNA, 26 bp, Homo sapiens
ggagctctcatcctcatgccttccct

SEQ ID NO: 18054 - DNA, 26 bp, Homo sapiens
gagctctcatcctcatgccttccctc

SEQ ID NO: 18055 - DNA, 26 bp, Homo sapiens
agctctcatcctcatgccttccctca

SEQ ID NO: 18056 - DNA, 26 bp, Homo sapiens
gctctcatcctcatgccttccctcag

SEQ ID NO: 18057 - DNA, 26 bp, Homo sapiens
ctctcatcctcatgccttccctcagg

SEQ ID NO: 18058 - DNA, 26 bp, Homo sapiens
tctcatcctcatgccttccctcaggc

SEQ ID NO: 18059 - DNA, 26 bp, Homo sapiens
ctcatcctcatgccttccctcaggcg

SEQ ID NO: 18060 - DNA, 26 bp, Homo sapiens
tcatcctcatgccttccctcaggcga

SEQ ID NO: 18061 - DNA, 26 bp, Homo sapiens
catcctcatgccttccctcaggcgac

SEQ ID NO: 18062 - DNA, 26 bp, Homo sapiens
atcctcatgccttccctcaggcgact

SEQ ID NO: 18063 - DNA, 26 bp, Homo sapiens
tcctcatgccttccctcaggcgactg

SEQ ID NO: 18064 - DNA, 26 bp, Homo sapiens
cctcatgccttccctcaggcgactgc

SEQ ID NO: 18065 - DNA, 26 bp, Homo sapiens
ctcatgccttccctcaggcgactgca

SEQ ID NO: 18066 - DNA, 26 bp, Homo sapiens
tcatgccttccctcaggcgactgcaa

SEQ ID NO: 18067 - DNA, 26 bp, Homo sapiens
catgccttccctcaggcgactgcaaa

SEQ ID NO: 18068 - DNA, 26 bp, Homo sapiens
atgccttccctcaggcgactgcaaaa

SEQ ID NO: 18069 - DNA, 26 bp, Homo sapiens
tgccttccctcaggcgactgcaaaag

SEQ ID NO: 18070 - DNA, 26 bp, Homo sapiens
gccttccctcaggcgactgcaaaagt

SEQ ID NO: 18071 - DNA, 26 bp, Homo sapiens
ccttccctcaggcgactgcaaaagtc

SEQ ID NO: 18072 - DNA, 26 bp, Homo sapiens
cttccctcaggcgactgcaaaagtcc

SEQ ID NO: 18073 - DNA, 26 bp, Homo sapiens
ttccctcaggcgactgcaaaagtcct

SEQ ID NO: 18074 - DNA, 26 bp, Homo sapiens
tccctcaggcgactgcaaaagtcctc

SEQ ID NO: 18075 - DNA, 26 bp, Homo sapiens
ccctcaggcgactgcaaaagtcctca

SEQ ID NO: 18076 - DNA, 26 bp, Homo sapiens
cctcaggcgactgcaaaagtcctcat

SEQ ID NO: 18077 - DNA, 26 bp, Homo sapiens
ctcaggcgactgcaaaagtcctcatc

SEQ ID NO: 18078 - DNA, 26 bp, Homo sapiens
tcaggcgactgcaaaagtcctcatcc

SEQ ID NO: 18079 - DNA, 26 bp, Homo sapiens
caggcgactgcaaaagtcctcatcca

SEQ ID NO: 18080 - DNA, 26 bp, Homo sapiens
aggcgactgcaaaagtcctcatccat

SEQ ID NO: 18081 - DNA, 26 bp, Homo sapiens
ggcgactgcaaaagtcctcatccatt

SEQ ID NO: 18082 - DNA, 26 bp, Homo sapiens
gcgactgcaaaagtcctcatccattt

SEQ ID NO: 18083 - DNA, 26 bp, Homo sapiens
cgactgcaaaagtcctcatccatttg

SEQ ID NO: 18084 - DNA, 26 bp, Homo sapiens
gactgcaaaagtcctcatccatttgt

SEQ ID NO: 18085 - DNA, 26 bp, Homo sapiens
actgcaaaagtcctcatccatttgta

SEQ ID NO: 18086 - DNA, 26 bp, Homo sapiens
ctgcaaaagtcctcatccatttgtac

SEQ ID NO: 18087 - DNA, 26 bp, Homo sapiens
tgcaaaagtcctcatccatttgtact

SEQ ID NO: 18088 - DNA, 26 bp, Homo sapiens
gcaaaagtcctcatccatttgtactc

SEQ ID NO: 18089 - DNA, 26 bp, Homo sapiens
caaaagtcctcatccatttgtactcc

SEQ ID NO: 18090 - DNA, 26 bp, Homo sapiens
aaaagtcctcatccatttgtactcct

SEQ ID NO: 18091 - DNA, 26 bp, Homo sapiens
aaagtcctcatccatttgtactcctg

SEQ ID NO: 18092 - DNA, 26 bp, Homo sapiens
aagtcctcatccatttgtactcctgg

SEQ ID NO: 18093 - DNA, 26 bp, Homo sapiens
agtcctcatccatttgtactcctggg

SEQ ID NO: 18094 - DNA, 26 bp, Homo sapiens
gtcctcatccatttgtactcctgggt

SEQ ID NO: 18095 - DNA, 26 bp, Homo sapiens
tcctcatccatttgtactcctgggta

SEQ ID NO: 18096 - DNA, 26 bp, Homo sapiens
cctcatccatttgtactcctgggtat

SEQ ID NO: 18097 - DNA, 26 bp, Homo sapiens
ctcatccatttgtactcctgggtatg

SEQ ID NO: 18098 - DNA, 26 bp, Homo sapiens
tcatccatttgtactcctgggtatgg

SEQ ID NO: 18099 - DNA, 26 bp, Homo sapiens
catccatttgtactcctgggtatgga

SEQ ID NO: 18100 - DNA, 26 bp, Homo sapiens
atccatttgtactcctgggtatggag

SEQ ID NO: 18101 - DNA, 26 bp, Homo sapiens
tccatttgtactcctgggtatggaga

SEQ ID NO: 18102 - DNA, 26 bp, Homo sapiens
ccatttgtactcctgggtatggagac

SEQ ID NO: 18103 - DNA, 26 bp, Homo sapiens
catttgtactcctgggtatggagacc

SEQ ID NO: 18104 - DNA, 26 bp, Homo sapiens
atttgtactcctgggtatggagaccc

SEQ ID NO: 18105 - DNA, 26 bp, Homo sapiens
tttgtactcctgggtatggagaccca

SEQ ID NO: 18106 - DNA, 26 bp, Homo sapiens
ttgtactcctgggtatggagacccac

SEQ ID NO: 18107 - DNA, 26 bp, Homo sapiens
tgtactcctgggtatggagacccacc

SEQ ID NO: 18108 - DNA, 26 bp, Homo sapiens
gtactcctgggtatggagacccacct

SEQ ID NO: 18109 - DNA, 26 bp, Homo sapiens
tactcctgggtatggagacccaccta

SEQ ID NO: 18110 - DNA, 26 bp, Homo sapiens
actcctgggtatggagacccacctaa

SEQ ID NO: 18111 - DNA, 26 bp, Homo sapiens
ctcctgggtatggagacccacctaag

SEQ ID NO: 18112 - DNA, 26 bp, Homo sapiens
tcctgggtatggagacccacctaagg

SEQ ID NO: 18113 - DNA, 26 bp, Homo sapiens
cctgggtatggagacccacctaagga

SEQ ID NO: 18114 - DNA, 26 bp, Homo sapiens
ctgggtatggagacccacctaaggag

SEQ ID NO: 18115 - DNA, 26 bp, Homo sapiens
tgggtatggagacccacctaaggaga

SEQ ID NO: 18116 - DNA, 26 bp, Homo sapiens
gggtatggagacccacctaaggagaa

SEQ ID NO: 18117 - DNA, 26 bp, Homo sapiens
ggtatggagacccacctaaggagaag

SEQ ID NO: 18118 - DNA, 26 bp, Homo sapiens
gtatggagacccacctaaggagaaga

SEQ ID NO: 18119 - DNA, 26 bp, Homo sapiens
tatggagacccacctaaggagaagat

SEQ ID NO: 18120 - DNA, 26 bp, Homo sapiens
atggagacccacctaaggagaagatt

SEQ ID NO: 18121 - DNA, 26 bp, Homo sapiens
tggagacccacctaaggagaagattt

SEQ ID NO: 18122 - DNA, 26 bp, Homo sapiens
ggagacccacctaaggagaagatttc

SEQ ID NO: 18123 - DNA, 26 bp, Homo sapiens
gagacccacctaaggagaagatttcc

SEQ ID NO: 18124 - DNA, 26 bp, Homo sapiens
agacccacctaaggagaagatttccc

SEQ ID NO: 18125 - DNA, 26 bp, Homo sapiens
gacccacctaaggagaagatttccca

SEQ ID NO: 18126 - DNA, 26 bp, Homo sapiens
acccacctaaggagaagatttcccac

SEQ ID NO: 18127 - DNA, 26 bp, Homo sapiens
cccacctaaggagaagatttcccaca

SEQ ID NO: 18128 - DNA, 26 bp, Homo sapiens
ccacctaaggagaagatttcccacag

SEQ ID NO: 18129 - DNA, 26 bp, Homo sapiens
cacctaaggagaagatttcccacagc

SEQ ID NO: 18130 - DNA, 26 bp, Homo sapiens
acctaaggagaagatttcccacagca

SEQ ID NO: 18131 - DNA, 26 bp, Homo sapiens
cctaaggagaagatttcccacagcaa

SEQ ID NO: 18132 - DNA, 26 bp, Homo sapiens
ctaaggagaagatttcccacagcaat

SEQ ID NO: 18133 - DNA, 26 bp, Homo sapiens
taaggagaagatttcccacagcaata

SEQ ID NO: 18134 - DNA, 26 bp, Homo sapiens
aaggagaagatttcccacagcaatac

SEQ ID NO: 18135 - DNA, 26 bp, Homo sapiens
aggagaagatttcccacagcaatact

SEQ ID NO: 18136 - DNA, 26 bp, Homo sapiens
ggagaagatttcccacagcaatactc

SEQ ID NO: 18137 - DNA, 26 bp, Homo sapiens
gagaagatttcccacagcaatactcc

SEQ ID NO: 18138 - DNA, 26 bp, Homo sapiens
agaagatttcccacagcaatactccg

SEQ ID NO: 18139 - DNA, 26 bp, Homo sapiens
gaagatttcccacagcaatactccgt

SEQ ID NO: 18140 - DNA, 26 bp, Homo sapiens
aagatttcccacagcaatactccgta

SEQ ID NO: 18141 - DNA, 26 bp, Homo sapiens
agatttcccacagcaatactccgtaa

SEQ ID NO: 18142 - DNA, 26 bp, Homo sapiens
gatttcccacagcaatactccgtaag

SEQ ID NO: 18143 - DNA, 26 bp, Homo sapiens
atttcccacagcaatactccgtaaga

SEQ ID NO: 18144 - DNA, 26 bp, Homo sapiens
tttcccacagcaatactccgtaagac

SEQ ID NO: 18145 - DNA, 26 bp, Homo sapiens
ttcccacagcaatactccgtaagacc

SEQ ID NO: 18146 - DNA, 26 bp, Homo sapiens
tcccacagcaatactccgtaagacca

SEQ ID NO: 18147 - DNA, 26 bp, Homo sapiens
cccacagcaatactccgtaagaccac

SEQ ID NO: 18148 - DNA, 26 bp, Homo sapiens
ccacagcaatactccgtaagaccaca

SEQ ID NO: 18149 - DNA, 26 bp, Homo sapiens
cacagcaatactccgtaagaccacac

SEQ ID NO: 18150 - DNA, 26 bp, Homo sapiens
acagcaatactccgtaagaccacacg

SEQ ID NO: 18151 - DNA, 26 bp, Homo sapiens
cagcaatactccgtaagaccacacgt

SEQ ID NO: 18152 - DNA, 26 bp, Homo sapiens
agcaatactccgtaagaccacacgtc

SEQ ID NO: 18153 - DNA, 26 bp, Homo sapiens
gcaatactccgtaagaccacacgtcg

SEQ ID NO: 18154 - DNA, 26 bp, Homo sapiens
caatactccgtaagaccacacgtcgc

SEQ ID NO: 18155 - DNA, 26 bp, Homo sapiens
aatactccgtaagaccacacgtcgct

SEQ ID NO: 18156 - DNA, 26 bp, Homo sapiens
atactccgtaagaccacacgtcgctc

SEQ ID NO: 18157 - DNA, 26 bp, Homo sapiens
tactccgtaagaccacacgtcgctct

SEQ ID NO: 18158 - DNA, 26 bp, Homo sapiens
actccgtaagaccacacgtcgctctt

SEQ ID NO: 18159 - DNA, 26 bp, Homo sapiens
ctccgtaagaccacacgtcgctcttg

SEQ ID NO: 18160 - DNA, 26 bp, Homo sapiens
tccgtaagaccacacgtcgctcttgg

SEQ ID NO: 18161 - DNA, 26 bp, Homo sapiens
ccgtaagaccacacgtcgctcttggt

SEQ ID NO: 18162 - DNA, 26 bp, Homo sapiens
cgtaagaccacacgtcgctcttggtg

SEQ ID NO: 18163 - DNA, 26 bp, Homo sapiens
gtaagaccacacgtcgctcttggtgc

SEQ ID NO: 18164 - DNA, 26 bp, Homo sapiens
taagaccacacgtcgctcttggtgct

SEQ ID NO: 18165 - DNA, 26 bp, Homo sapiens
aagaccacacgtcgctcttggtgctg

SEQ ID NO: 18166 - DNA, 26 bp, Homo sapiens
agaccacacgtcgctcttggtgctgt

SEQ ID NO: 18167 - DNA, 26 bp, Homo sapiens
gaccacacgtcgctcttggtgctgta

SEQ ID NO: 18168 - DNA, 26 bp, Homo sapiens
accacacgtcgctcttggtgctgtag

SEQ ID NO: 18169 - DNA, 26 bp, Homo sapiens
ccacacgtcgctcttggtgctgtaga

SEQ ID NO: 18170 - DNA, 26 bp, Homo sapiens
cacacgtcgctcttggtgctgtagat

SEQ ID NO: 18171 - DNA, 26 bp, Homo sapiens
acacgtcgctcttggtgctgtagatt

SEQ ID NO: 18172 - DNA, 26 bp, Homo sapiens
cacgtcgctcttggtgctgtagattt

SEQ ID NO: 18173 - DNA, 26 bp, Homo sapiens
acgtcgctcttggtgctgtagatttt

SEQ ID NO: 18174 - DNA, 26 bp, Homo sapiens
cgtcgctcttggtgctgtagattttg

SEQ ID NO: 18175 - DNA, 26 bp, Homo sapiens
gtcgctcttggtgctgtagattttgt

SEQ ID NO: 18176 - DNA, 26 bp, Homo sapiens
tcgctcttggtgctgtagattttgtc

SEQ ID NO: 18177 - DNA, 26 bp, Homo sapiens
cgctcttggtgctgtagattttgtca

SEQ ID NO: 18178 - DNA, 26 bp, Homo sapiens
gctcttggtgctgtagattttgtcaa

SEQ ID NO: 18179 - DNA, 26 bp, Homo sapiens
ctcttggtgctgtagattttgtcaaa

SEQ ID NO: 18180 - DNA, 26 bp, Homo sapiens
tcttggtgctgtagattttgtcaaag

SEQ ID NO: 18181 - DNA, 26 bp, Homo sapiens
cttggtgctgtagattttgtcaaaga

SEQ ID NO: 18182 - DNA, 26 bp, Homo sapiens
ttggtgctgtagattttgtcaaagat

SEQ ID NO: 18183 - DNA, 26 bp, Homo sapiens
tggtgctgtagattttgtcaaagata

SEQ ID NO: 18184 - DNA, 26 bp, Homo sapiens
ggtgctgtagattttgtcaaagatag

SEQ ID NO: 18185 - DNA, 26 bp, Homo sapiens
gtgctgtagattttgtcaaagataga

SEQ ID NO: 18186 - DNA, 26 bp, Homo sapiens
tgctgtagattttgtcaaagatagat

SEQ ID NO: 18187 - DNA, 26 bp, Homo sapiens
gctgtagattttgtcaaagatagatt

SEQ ID NO: 18188 - DNA, 26 bp, Homo sapiens
ctgtagattttgtcaaagatagattc

SEQ ID NO: 18189 - DNA, 26 bp, Homo sapiens
tgtagattttgtcaaagatagattcg

SEQ ID NO: 18190 - DNA, 26 bp, Homo sapiens
gtagattttgtcaaagatagattcgg

SEQ ID NO: 18191 - DNA, 26 bp, Homo sapiens
tagattttgtcaaagatagattcggg

SEQ ID NO: 18192 - DNA, 26 bp, Homo sapiens
agattttgtcaaagatagattcggga

SEQ ID NO: 18193 - DNA, 26 bp, Homo sapiens
gattttgtcaaagatagattcgggag

SEQ ID NO: 18194 - DNA, 26 bp, Homo sapiens
attttgtcaaagatagattcgggagc

SEQ ID NO: 18195 - DNA, 26 bp, Homo sapiens
ttttgtcaaagatagattcgggagcc

SEQ ID NO: 18196 - DNA, 26 bp, Homo sapiens
tttgtcaaagatagattcgggagcca

SEQ ID NO: 18197 - DNA, 26 bp, Homo sapiens
ttgtcaaagatagattcgggagccat

SEQ ID NO: 18198 - DNA, 26 bp, Homo sapiens
tgtcaaagatagattcgggagccatc

SEQ ID NO: 18199 - DNA, 26 bp, Homo sapiens
gtcaaagatagattcgggagccatcc

SEQ ID NO: 18200 - DNA, 26 bp, Homo sapiens
tcaaagatagattcgggagccatcca

SEQ ID NO: 18201 - DNA, 26 bp, Homo sapiens
caaagatagattcgggagccatccat

SEQ ID NO: 18202 - DNA, 26 bp, Homo sapiens
aaagatagattcgggagccatccatt

SEQ ID NO: 18203 - DNA, 26 bp, Homo sapiens
aagatagattcgggagccatccattt

SEQ ID NO: 18204 - DNA, 26 bp, Homo sapiens
agatagattcgggagccatccatttc

SEQ ID NO: 18205 - DNA, 26 bp, Homo sapiens
gatagattcgggagccatccatttca

SEQ ID NO: 18206 - DNA, 26 bp, Homo sapiens
atagattcgggagccatccatttcag

SEQ ID NO: 18207 - DNA, 26 bp, Homo sapiens
tagattcgggagccatccatttcaga

SEQ ID NO: 18208 - DNA, 26 bp, Homo sapiens
agattcgggagccatccatttcagag

SEQ ID NO: 18209 - DNA, 26 bp, Homo sapiens
gattcgggagccatccatttcagagg

SEQ ID NO: 18210 - DNA, 26 bp, Homo sapiens
attcgggagccatccatttcagagga

SEQ ID NO: 18211 - DNA, 26 bp, Homo sapiens
ttcgggagccatccatttcagaggaa

SEQ ID NO: 18212 - DNA, 26 bp, Homo sapiens
tcgggagccatccatttcagaggaag

SEQ ID NO: 18213 - DNA, 26 bp, Homo sapiens
cgggagccatccatttcagaggaagt

SEQ ID NO: 18214 - DNA, 26 bp, Homo sapiens
gggagccatccatttcagaggaagtc

SEQ ID NO: 18215 - DNA, 26 bp, Homo sapiens
ggagccatccatttcagaggaagtcg

SEQ ID NO: 18216 - DNA, 26 bp, Homo sapiens
gagccatccatttcagaggaagtcga

SEQ ID NO: 18217 - DNA, 26 bp, Homo sapiens
agccatccatttcagaggaagtcgag

SEQ ID NO: 18218 - DNA, 26 bp, Homo sapiens
gccatccatttcagaggaagtcgagt

SEQ ID NO: 18219 - DNA, 26 bp, Homo sapiens
ccatccatttcagaggaagtcgagta

SEQ ID NO: 18220 - DNA, 26 bp, Homo sapiens
catccatttcagaggaagtcgagtat

SEQ ID NO: 18221 - DNA, 26 bp, Homo sapiens
atccatttcagaggaagtcgagtatc

SEQ ID NO: 18222 - DNA, 26 bp, Homo sapiens
tccatttcagaggaagtcgagtatct

SEQ ID NO: 18223 - DNA, 26 bp, Homo sapiens
ccatttcagaggaagtcgagtatctc

SEQ ID NO: 18224 - DNA, 26 bp, Homo sapiens
catttcagaggaagtcgagtatctcc

SEQ ID NO: 18225 - DNA, 26 bp, Homo sapiens
atttcagaggaagtcgagtatctcct

SEQ ID NO: 18226 - DNA, 26 bp, Homo sapiens
tttcagaggaagtcgagtatctcctt

SEQ ID NO: 18227 - DNA, 26 bp, Homo sapiens
ttcagaggaagtcgagtatctccttt

SEQ ID NO: 18228 - DNA, 26 bp, Homo sapiens
tcagaggaagtcgagtatctcctttt

SEQ ID NO: 18229 - DNA, 26 bp, Homo sapiens
cagaggaagtcgagtatctccttttc

SEQ ID NO: 18230 - DNA, 26 bp, Homo sapiens
agaggaagtcgagtatctccttttct

SEQ ID NO: 18231 - DNA, 26 bp, Homo sapiens
gaggaagtcgagtatctccttttctc

SEQ ID NO: 18232 - DNA, 26 bp, Homo sapiens
aggaagtcgagtatctccttttctca

SEQ ID NO: 18233 - DNA, 26 bp, Homo sapiens
ggaagtcgagtatctccttttctcac

SEQ ID NO: 18234 - DNA, 26 bp, Homo sapiens
gaagtcgagtatctccttttctcaca

SEQ ID NO: 18235 - DNA, 26 bp, Homo sapiens
aagtcgagtatctccttttctcacat

SEQ ID NO: 18236 - DNA, 26 bp, Homo sapiens
agtcgagtatctccttttctcacata

SEQ ID NO: 18237 - DNA, 26 bp, Homo sapiens
gtcgagtatctccttttctcacataa

SEQ ID NO: 18238 - DNA, 26 bp, Homo sapiens
tcgagtatctccttttctcacataat

SEQ ID NO: 18239 - DNA, 26 bp, Homo sapiens
cgagtatctccttttctcacataatc

SEQ ID NO: 18240 - DNA, 26 bp, Homo sapiens
gagtatctccttttctcacataatcg

SEQ ID NO: 18241 - DNA, 26 bp, Homo sapiens
agtatctccttttctcacataatcgg

SEQ ID NO: 18242 - DNA, 26 bp, Homo sapiens
gtatctccttttctcacataatcggg

SEQ ID NO: 18243 - DNA, 26 bp, Homo sapiens
tatctccttttctcacataatcgggg

SEQ ID NO: 18244 - DNA, 26 bp, Homo sapiens
atctccttttctcacataatcggggt

SEQ ID NO: 18245 - DNA, 26 bp, Homo sapiens
tctccttttctcacataatcggggtt

SEQ ID NO: 18246 - DNA, 26 bp, Homo sapiens
ctccttttctcacataatcggggttc

SEQ ID NO: 18247 - DNA, 26 bp, Homo sapiens
tccttttctcacataatcggggttct

SEQ ID NO: 18248 - DNA, 26 bp, Homo sapiens
ccttttctcacataatcggggttctt

SEQ ID NO: 18249 - DNA, 26 bp, Homo sapiens
cttttctcacataatcggggttctta

SEQ ID NO: 18250 - DNA, 26 bp, Homo sapiens
ttttctcacataatcggggttcttat

SEQ ID NO: 18251 - DNA, 26 bp, Homo sapiens
tttctcacataatcggggttcttata

SEQ ID NO: 18252 - DNA, 26 bp, Homo sapiens
ttctcacataatcggggttcttataa

SEQ ID NO: 18253 - DNA, 26 bp, Homo sapiens
tctcacataatcggggttcttataaa

SEQ ID NO: 18254 - DNA, 26 bp, Homo sapiens
ctcacataatcggggttcttataaat

SEQ ID NO: 18255 - DNA, 26 bp, Homo sapiens
tcacataatcggggttcttataaata

SEQ ID NO: 18256 - DNA, 26 bp, Homo sapiens
cacataatcggggttcttataaatat

SEQ ID NO: 18257 - DNA, 26 bp, Homo sapiens
acataatcggggttcttataaatatc

SEQ ID NO: 18258 - DNA, 26 bp, Homo sapiens
cataatcggggttcttataaatatcc

SEQ ID NO: 18259 - DNA, 26 bp, Homo sapiens
ataatcggggttcttataaatatccc

SEQ ID NO: 18260 - DNA, 26 bp, Homo sapiens
taatcggggttcttataaatatcccg

SEQ ID NO: 18261 - DNA, 26 bp, Homo sapiens
aatcggggttcttataaatatcccgg

SEQ ID NO: 18262 - DNA, 26 bp, Homo sapiens
atcggggttcttataaatatcccggg

SEQ ID NO: 18263 - DNA, 26 bp, Homo sapiens
tcggggttcttataaatatcccgggc

SEQ ID NO: 18264 - DNA, 26 bp, Homo sapiens
cggggttcttataaatatcccgggca

SEQ ID NO: 18265 - DNA, 26 bp, Homo sapiens
ggggttcttataaatatcccgggcaa

SEQ ID NO: 18266 - DNA, 26 bp, Homo sapiens
gggttcttataaatatcccgggcaag

SEQ ID NO: 18267 - DNA, 26 bp, Homo sapiens
ggttcttataaatatcccgggcaagg

SEQ ID NO: 18268 - DNA, 26 bp, Homo sapiens
gttcttataaatatcccgggcaaggc

SEQ ID NO: 18269 - DNA, 26 bp, Homo sapiens
ttcttataaatatcccgggcaaggcc

SEQ ID NO: 18270 - DNA, 26 bp, Homo sapiens
tcttataaatatcccgggcaaggcca

SEQ ID NO: 18271 - DNA, 26 bp, Homo sapiens
cttataaatatcccgggcaaggccaa

SEQ ID NO: 18272 - DNA, 26 bp, Homo sapiens
ttataaatatcccgggcaaggccaaa

SEQ ID NO: 18273 - DNA, 26 bp, Homo sapiens
tataaatatcccgggcaaggccaaaa

SEQ ID NO: 18274 - DNA, 26 bp, Homo sapiens
ataaatatcccgggcaaggccaaaat

SEQ ID NO: 18275 - DNA, 26 bp, Homo sapiens
taaatatcccgggcaaggccaaaatc

SEQ ID NO: 18276 - DNA, 26 bp, Homo sapiens
aaatatcccgggcaaggccaaaatca

SEQ ID NO: 18277 - DNA, 26 bp, Homo sapiens
aatatcccgggcaaggccaaaatcac

SEQ ID NO: 18278 - DNA, 26 bp, Homo sapiens
atatcccgggcaaggccaaaatcaca

SEQ ID NO: 18279 - DNA, 26 bp, Homo sapiens
tatcccgggcaaggccaaaatcacaa

SEQ ID NO: 18280 - DNA, 26 bp, Homo sapiens
atcccgggcaaggccaaaatcacaaa

SEQ ID NO: 18281 - DNA, 26 bp, Homo sapiens
tcccgggcaaggccaaaatcacaaat

SEQ ID NO: 18282 - DNA, 26 bp, Homo sapiens
cccgggcaaggccaaaatcacaaatc

SEQ ID NO: 18283 - DNA, 26 bp, Homo sapiens
ccgggcaaggccaaaatcacaaatct

SEQ ID NO: 18284 - DNA, 26 bp, Homo sapiens
cgggcaaggccaaaatcacaaatctt

SEQ ID NO: 18285 - DNA, 26 bp, Homo sapiens
gggcaaggccaaaatcacaaatcttc

SEQ ID NO: 18286 - DNA, 26 bp, Homo sapiens
ggcaaggccaaaatcacaaatcttca

SEQ ID NO: 18287 - DNA, 26 bp, Homo sapiens
gcaaggccaaaatcacaaatcttcac

SEQ ID NO: 18288 - DNA, 26 bp, Homo sapiens
caaggccaaaatcacaaatcttcacc

SEQ ID NO: 18289 - DNA, 26 bp, Homo sapiens
aaggccaaaatcacaaatcttcacca

SEQ ID NO: 18290 - DNA, 26 bp, Homo sapiens
aggccaaaatcacaaatcttcaccac

SEQ ID NO: 18291 - DNA, 26 bp, Homo sapiens
ggccaaaatcacaaatcttcaccacg

SEQ ID NO: 18292 - DNA, 26 bp, Homo sapiens
gccaaaatcacaaatcttcaccacgt

SEQ ID NO: 18293 - DNA, 26 bp, Homo sapiens
ccaaaatcacaaatcttcaccacgtt

SEQ ID NO: 18294 - DNA, 26 bp, Homo sapiens
caaaatcacaaatcttcaccacgttg

SEQ ID NO: 18295 - DNA, 26 bp, Homo sapiens
aaaatcacaaatcttcaccacgttgt

SEQ ID NO: 18296 - DNA, 26 bp, Homo sapiens
aaatcacaaatcttcaccacgttgtt

SEQ ID NO: 18297 - DNA, 26 bp, Homo sapiens
aatcacaaatcttcaccacgttgttc

SEQ ID NO: 18298 - DNA, 26 bp, Homo sapiens
atcacaaatcttcaccacgttgttct

SEQ ID NO: 18299 - DNA, 26 bp, Homo sapiens
tcacaaatcttcaccacgttgttctc

SEQ ID NO: 18300 - DNA, 26 bp, Homo sapiens
cacaaatcttcaccacgttgttctca

SEQ ID NO: 18301 - DNA, 26 bp, Homo sapiens
acaaatcttcaccacgttgttctcag

SEQ ID NO: 18302 - DNA, 26 bp, Homo sapiens
caaatcttcaccacgttgttctcaga

SEQ ID NO: 18303 - DNA, 26 bp, Homo sapiens
aaatcttcaccacgttgttctcagat

SEQ ID NO: 18304 - DNA, 26 bp, Homo sapiens
aatcttcaccacgttgttctcagata

SEQ ID NO: 18305 - DNA, 26 bp, Homo sapiens
atcttcaccacgttgttctcagataa

SEQ ID NO: 18306 - DNA, 26 bp, Homo sapiens
tcttcaccacgttgttctcagataaa

SEQ ID NO: 18307 - DNA, 26 bp, Homo sapiens
cttcaccacgttgttctcagataaaa

SEQ ID NO: 18308 - DNA, 26 bp, Homo sapiens
ttcaccacgttgttctcagataaaag

SEQ ID NO: 18309 - DNA, 26 bp, Homo sapiens
tcaccacgttgttctcagataaaaga

SEQ ID NO: 18310 - DNA, 26 bp, Homo sapiens
caccacgttgttctcagataaaagaa

SEQ ID NO: 18311 - DNA, 26 bp, Homo sapiens
accacgttgttctcagataaaagaat

SEQ ID NO: 18312 - DNA, 26 bp, Homo sapiens
ccacgttgttctcagataaaagaatg

SEQ ID NO: 18313 - DNA, 26 bp, Homo sapiens
cacgttgttctcagataaaagaatgt

SEQ ID NO: 18314 - DNA, 26 bp, Homo sapiens
acgttgttctcagataaaagaatgtt

SEQ ID NO: 18315 - DNA, 26 bp, Homo sapiens
cgttgttctcagataaaagaatgttt

SEQ ID NO: 18316 - DNA, 26 bp, Homo sapiens
gttgttctcagataaaagaatgtttc

SEQ ID NO: 18317 - DNA, 26 bp, Homo sapiens
ttgttctcagataaaagaatgtttct

SEQ ID NO: 18318 - DNA, 26 bp, Homo sapiens
tgttctcagataaaagaatgtttctc

SEQ ID NO: 18319 - DNA, 26 bp, Homo sapiens
gttctcagataaaagaatgtttctcg

SEQ ID NO: 18320 - DNA, 26 bp, Homo sapiens
ttctcagataaaagaatgtttctcgc

SEQ ID NO: 18321 - DNA, 26 bp, Homo sapiens
tctcagataaaagaatgtttctcgct

SEQ ID NO: 18322 - DNA, 26 bp, Homo sapiens
ctcagataaaagaatgtttctcgctg

SEQ ID NO: 18323 - DNA, 26 bp, Homo sapiens
tcagataaaagaatgtttctcgctgc

SEQ ID NO: 18324 - DNA, 26 bp, Homo sapiens
cagataaaagaatgtttctcgctgcc

SEQ ID NO: 18325 - DNA, 26 bp, Homo sapiens
agataaaagaatgtttctcgctgcca

SEQ ID NO: 18326 - DNA, 26 bp, Homo sapiens
gataaaagaatgtttctcgctgccag

SEQ ID NO: 18327 - DNA, 26 bp, Homo sapiens
ataaaagaatgtttctcgctgccagg

SEQ ID NO: 18328 - DNA, 26 bp, Homo sapiens
taaaagaatgtttctcgctgccaggt

SEQ ID NO: 18329 - DNA, 26 bp, Homo sapiens
aaaagaatgtttctcgctgccaggtc

SEQ ID NO: 18330 - DNA, 26 bp, Homo sapiens
aaagaatgtttctcgctgccaggtcc

SEQ ID NO: 18331 - DNA, 26 bp, Homo sapiens
aagaatgtttctcgctgccaggtccc

SEQ ID NO: 18332 - DNA, 26 bp, Homo sapiens
agaatgtttctcgctgccaggtcccg

SEQ ID NO: 18333 - DNA, 26 bp, Homo sapiens
gaatgtttctcgctgccaggtcccga

SEQ ID NO: 18334 - DNA, 26 bp, Homo sapiens
aatgtttctcgctgccaggtcccgat

SEQ ID NO: 18335 - DNA, 26 bp, Homo sapiens
atgtttctcgctgccaggtcccgatg

SEQ ID NO: 18336 - DNA, 26 bp, Homo sapiens
tgtttctcgctgccaggtcccgatga

SEQ ID NO: 18337 - DNA, 26 bp, Homo sapiens
gtttctcgctgccaggtcccgatgaa

SEQ ID NO: 18338 - DNA, 26 bp, Homo sapiens
tttctcgctgccaggtcccgatgaat

SEQ ID NO: 18339 - DNA, 26 bp, Homo sapiens
ttctcgctgccaggtcccgatgaatg

SEQ ID NO: 18340 - DNA, 26 bp, Homo sapiens
tctcgctgccaggtcccgatgaatgc

SEQ ID NO: 18341 - DNA, 26 bp, Homo sapiens
ctcgctgccaggtcccgatgaatgca

SEQ ID NO: 18342 - DNA, 26 bp, Homo sapiens
tcgctgccaggtcccgatgaatgcac

SEQ ID NO: 18343 - DNA, 26 bp, Homo sapiens
cgctgccaggtcccgatgaatgcact

SEQ ID NO: 18344 - DNA, 26 bp, Homo sapiens
gctgccaggtcccgatgaatgcactt

SEQ ID NO: 18345 - DNA, 26 bp, Homo sapiens
ctgccaggtcccgatgaatgcacttt

SEQ ID NO: 18346 - DNA, 26 bp, Homo sapiens
tgccaggtcccgatgaatgcactttc

SEQ ID NO: 18347 - DNA, 26 bp, Homo sapiens
gccaggtcccgatgaatgcactttct

SEQ ID NO: 18348 - DNA, 26 bp, Homo sapiens
ccaggtcccgatgaatgcactttctg

SEQ ID NO: 18349 - DNA, 26 bp, Homo sapiens
caggtcccgatgaatgcactttctgg

SEQ ID NO: 18350 - DNA, 26 bp, Homo sapiens
aggtcccgatgaatgcactttctgga

SEQ ID NO: 18351 - DNA, 26 bp, Homo sapiens
ggtcccgatgaatgcactttctggaa

SEQ ID NO: 18352 - DNA, 26 bp, Homo sapiens
gtcccgatgaatgcactttctggaag

SEQ ID NO: 18353 - DNA, 26 bp, Homo sapiens
tcccgatgaatgcactttctggaaga

SEQ ID NO: 18354 - DNA, 26 bp, Homo sapiens
cccgatgaatgcactttctggaagac

SEQ ID NO: 18355 - DNA, 26 bp, Homo sapiens
ccgatgaatgcactttctggaagaca

SEQ ID NO: 18356 - DNA, 26 bp, Homo sapiens
cgatgaatgcactttctggaagacag

SEQ ID NO: 18357 - DNA, 26 bp, Homo sapiens
gatgaatgcactttctggaagacagg

SEQ ID NO: 18358 - DNA, 26 bp, Homo sapiens
atgaatgcactttctggaagacagga

SEQ ID NO: 18359 - DNA, 26 bp, Homo sapiens
tgaatgcactttctggaagacaggaa

SEQ ID NO: 18360 - DNA, 26 bp, Homo sapiens
gaatgcactttctggaagacaggaac

SEQ ID NO: 18361 - DNA, 26 bp, Homo sapiens
aatgcactttctggaagacaggaact

SEQ ID NO: 18362 - DNA, 26 bp, Homo sapiens
atgcactttctggaagacaggaactc

SEQ ID NO: 18363 - DNA, 26 bp, Homo sapiens
tgcactttctggaagacaggaactcc

SEQ ID NO: 18364 - DNA, 26 bp, Homo sapiens
gcactttctggaagacaggaactcca

SEQ ID NO: 18365 - DNA, 26 bp, Homo sapiens
cactttctggaagacaggaactccat

SEQ ID NO: 18366 - DNA, 26 bp, Homo sapiens
actttctggaagacaggaactccatg

SEQ ID NO: 18367 - DNA, 26 bp, Homo sapiens
ctttctggaagacaggaactccatgc

SEQ ID NO: 18368 - DNA, 26 bp, Homo sapiens
tttctggaagacaggaactccatgcc

SEQ ID NO: 18369 - DNA, 26 bp, Homo sapiens
ttctggaagacaggaactccatgcct

SEQ ID NO: 18370 - DNA, 26 bp, Homo sapiens
tctggaagacaggaactccatgcctc

SEQ ID NO: 18371 - DNA, 26 bp, Homo sapiens
ctggaagacaggaactccatgcctct

SEQ ID NO: 18372 - DNA, 26 bp, Homo sapiens
tggaagacaggaactccatgcctctg

SEQ ID NO: 18373 - DNA, 26 bp, Homo sapiens
ggaagacaggaactccatgcctctgg

SEQ ID NO: 18374 - DNA, 26 bp, Homo sapiens
gaagacaggaactccatgcctctggc

SEQ ID NO: 18375 - DNA, 26 bp, Homo sapiens
aagacaggaactccatgcctctggcc

SEQ ID NO: 18376 - DNA, 26 bp, Homo sapiens
agacaggaactccatgcctctggcca

SEQ ID NO: 18377 - DNA, 26 bp, Homo sapiens
gacaggaactccatgcctctggccac

SEQ ID NO: 18378 - DNA, 26 bp, Homo sapiens
acaggaactccatgcctctggccact

SEQ ID NO: 18379 - DNA, 26 bp, Homo sapiens
caggaactccatgcctctggccactt

SEQ ID NO: 18380 - DNA, 26 bp, Homo sapiens
aggaactccatgcctctggccacttg

SEQ ID NO: 18381 - DNA, 26 bp, Homo sapiens
ggaactccatgcctctggccacttga

SEQ ID NO: 18382 - DNA, 26 bp, Homo sapiens
gaactccatgcctctggccacttgaa

SEQ ID NO: 18383 - DNA, 26 bp, Homo sapiens
aactccatgcctctggccacttgaaa

SEQ ID NO: 18384 - DNA, 26 bp, Homo sapiens
actccatgcctctggccacttgaaaa

SEQ ID NO: 18385 - DNA, 26 bp, Homo sapiens
ctccatgcctctggccacttgaaaac

SEQ ID NO: 18386 - DNA, 26 bp, Homo sapiens
tccatgcctctggccacttgaaaact

SEQ ID NO: 18387 - DNA, 26 bp, Homo sapiens
ccatgcctctggccacttgaaaactg

SEQ ID NO: 18388 - DNA, 26 bp, Homo sapiens
catgcctctggccacttgaaaactgt

SEQ ID NO: 18389 - DNA, 26 bp, Homo sapiens
atgcctctggccacttgaaaactgta

SEQ ID NO: 18390 - DNA, 26 bp, Homo sapiens
tgcctctggccacttgaaaactgtaa

SEQ ID NO: 18391 - DNA, 26 bp, Homo sapiens
gcctctggccacttgaaaactgtaag

SEQ ID NO: 18392 - DNA, 26 bp, Homo sapiens
cctctggccacttgaaaactgtaaga

SEQ ID NO: 18393 - DNA, 26 bp, Homo sapiens
ctctggccacttgaaaactgtaagaa

SEQ ID NO: 18394 - DNA, 26 bp, Homo sapiens
tctggccacttgaaaactgtaagaaa

SEQ ID NO: 18395 - DNA, 26 bp, Homo sapiens
ctggccacttgaaaactgtaagaaat

SEQ ID NO: 18396 - DNA, 26 bp, Homo sapiens
tggccacttgaaaactgtaagaaatc

SEQ ID NO: 18397 - DNA, 26 bp, Homo sapiens
ggccacttgaaaactgtaagaaatca

SEQ ID NO: 18398 - DNA, 26 bp, Homo sapiens
gccacttgaaaactgtaagaaatcag

SEQ ID NO: 18399 - DNA, 26 bp, Homo sapiens
ccacttgaaaactgtaagaaatcaga

SEQ ID NO: 18400 - DNA, 26 bp, Homo sapiens
cacttgaaaactgtaagaaatcagat

SEQ ID NO: 18401 - DNA, 26 bp, Homo sapiens
acttgaaaactgtaagaaatcagatc

SEQ ID NO: 18402 - DNA, 26 bp, Homo sapiens
cttgaaaactgtaagaaatcagatct

SEQ ID NO: 18403 - DNA, 26 bp, Homo sapiens
ttgaaaactgtaagaaatcagatctt

SEQ ID NO: 18404 - DNA, 26 bp, Homo sapiens
tgaaaactgtaagaaatcagatcttc

SEQ ID NO: 18405 - DNA, 26 bp, Homo sapiens
gaaaactgtaagaaatcagatcttcc

SEQ ID NO: 18406 - DNA, 26 bp, Homo sapiens
aaaactgtaagaaatcagatcttcca

SEQ ID NO: 18407 - DNA, 26 bp, Homo sapiens
aaactgtaagaaatcagatcttccat

SEQ ID NO: 18408 - DNA, 26 bp, Homo sapiens
aactgtaagaaatcagatcttccata

SEQ ID NO: 18409 - DNA, 26 bp, Homo sapiens
actgtaagaaatcagatcttccatag

SEQ ID NO: 18410 - DNA, 26 bp, Homo sapiens
ctgtaagaaatcagatcttccatagt

SEQ ID NO: 18411 - DNA, 26 bp, Homo sapiens
tgtaagaaatcagatcttccatagtg

SEQ ID NO: 18412 - DNA, 26 bp, Homo sapiens
gtaagaaatcagatcttccatagtga

SEQ ID NO: 18413 - DNA, 26 bp, Homo sapiens
taagaaatcagatcttccatagtgat

SEQ ID NO: 18414 - DNA, 26 bp, Homo sapiens
aagaaatcagatcttccatagtgatg

SEQ ID NO: 18415 - DNA, 26 bp, Homo sapiens
agaaatcagatcttccatagtgatgg

SEQ ID NO: 18416 - DNA, 26 bp, Homo sapiens
gaaatcagatcttccatagtgatggg

SEQ ID NO: 18417 - DNA, 26 bp, Homo sapiens
aaatcagatcttccatagtgatgggc

SEQ ID NO: 18418 - DNA, 26 bp, Homo sapiens
aatcagatcttccatagtgatgggct

SEQ ID NO: 18419 - DNA, 26 bp, Homo sapiens
atcagatcttccatagtgatgggctc

SEQ ID NO: 18420 - DNA, 26 bp, Homo sapiens
tcagatcttccatagtgatgggctcc

SEQ ID NO: 18421 - DNA, 26 bp, Homo sapiens
cagatcttccatagtgatgggctcct

SEQ ID NO: 18422 - DNA, 26 bp, Homo sapiens
agatcttccatagtgatgggctcctt

SEQ ID NO: 18423 - DNA, 26 bp, Homo sapiens
gatcttccatagtgatgggctccttg

SEQ ID NO: 18424 - DNA, 26 bp, Homo sapiens
atcttccatagtgatgggctccttgt

SEQ ID NO: 18425 - DNA, 26 bp, Homo sapiens
tcttccatagtgatgggctccttgta

SEQ ID NO: 18426 - DNA, 26 bp, Homo sapiens
cttccatagtgatgggctccttgtag

SEQ ID NO: 18427 - DNA, 26 bp, Homo sapiens
ttccatagtgatgggctccttgtaga

SEQ ID NO: 18428 - DNA, 26 bp, Homo sapiens
tccatagtgatgggctccttgtagaa

SEQ ID NO: 18429 - DNA, 26 bp, Homo sapiens
ccatagtgatgggctccttgtagaaa

SEQ ID NO: 18430 - DNA, 26 bp, Homo sapiens
catagtgatgggctccttgtagaaac

SEQ ID NO: 18431 - DNA, 26 bp, Homo sapiens
atagtgatgggctccttgtagaaacc

SEQ ID NO: 18432 - DNA, 26 bp, Homo sapiens
tagtgatgggctccttgtagaaaccg

SEQ ID NO: 18433 - DNA, 26 bp, Homo sapiens
agtgatgggctccttgtagaaaccgt

SEQ ID NO: 18434 - DNA, 26 bp, Homo sapiens
gtgatgggctccttgtagaaaccgtc

SEQ ID NO: 18435 - DNA, 26 bp, Homo sapiens
tgatgggctccttgtagaaaccgtca

SEQ ID NO: 18436 - DNA, 26 bp, Homo sapiens
gatgggctccttgtagaaaccgtcag

SEQ ID NO: 18437 - DNA, 26 bp, Homo sapiens
atgggctccttgtagaaaccgtcaga

SEQ ID NO: 18438 - DNA, 26 bp, Homo sapiens
tgggctccttgtagaaaccgtcagaa

SEQ ID NO: 18439 - DNA, 26 bp, Homo sapiens
gggctccttgtagaaaccgtcagaat

SEQ ID NO: 18440 - DNA, 26 bp, Homo sapiens
ggctccttgtagaaaccgtcagaatc

SEQ ID NO: 18441 - DNA, 26 bp, Homo sapiens
gctccttgtagaaaccgtcagaatcc

SEQ ID NO: 18442 - DNA, 26 bp, Homo sapiens
ctccttgtagaaaccgtcagaatcct

SEQ ID NO: 18443 - DNA, 26 bp, Homo sapiens
tccttgtagaaaccgtcagaatcctc

SEQ ID NO: 18444 - DNA, 26 bp, Homo sapiens
ccttgtagaaaccgtcagaatcctcc

SEQ ID NO: 18445 - DNA, 26 bp, Homo sapiens
cttgtagaaaccgtcagaatcctcct

SEQ ID NO: 18446 - DNA, 26 bp, Homo sapiens
ttgtagaaaccgtcagaatcctcctc

SEQ ID NO: 18447 - DNA, 26 bp, Homo sapiens
tgtagaaaccgtcagaatcctcctct

SEQ ID NO: 18448 - DNA, 26 bp, Homo sapiens
gtagaaaccgtcagaatcctcctctt

SEQ ID NO: 18449 - DNA, 26 bp, Homo sapiens
tagaaaccgtcagaatcctcctcttc

SEQ ID NO: 18450 - DNA, 26 bp, Homo sapiens
agaaaccgtcagaatcctcctcttcc

SEQ ID NO: 18451 - DNA, 26 bp, Homo sapiens
gaaaccgtcagaatcctcctcttcct

SEQ ID NO: 18452 - DNA, 26 bp, Homo sapiens
aaaccgtcagaatcctcctcttcctc

SEQ ID NO: 18453 - DNA, 26 bp, Homo sapiens
aaccgtcagaatcctcctcttcctca

SEQ ID NO: 18454 - DNA, 26 bp, Homo sapiens
accgtcagaatcctcctcttcctcaa

SEQ ID NO: 18455 - DNA, 26 bp, Homo sapiens
ccgtcagaatcctcctcttcctcaac

SEQ ID NO: 18456 - DNA, 26 bp, Homo sapiens
cgtcagaatcctcctcttcctcaaca

SEQ ID NO: 18457 - DNA, 26 bp, Homo sapiens
gtcagaatcctcctcttcctcaacat

SEQ ID NO: 18458 - DNA, 26 bp, Homo sapiens
tcagaatcctcctcttcctcaacatc

SEQ ID NO: 18459 - DNA, 26 bp, Homo sapiens
cagaatcctcctcttcctcaacatca

SEQ ID NO: 18460 - DNA, 26 bp, Homo sapiens
agaatcctcctcttcctcaacatcac

SEQ ID NO: 18461 - DNA, 26 bp, Homo sapiens
gaatcctcctcttcctcaacatcact

SEQ ID NO: 18462 - DNA, 26 bp, Homo sapiens
aatcctcctcttcctcaacatcactc

SEQ ID NO: 18463 - DNA, 26 bp, Homo sapiens
atcctcctcttcctcaacatcactca

SEQ ID NO: 18464 - DNA, 26 bp, Homo sapiens
tcctcctcttcctcaacatcactcag

SEQ ID NO: 18465 - DNA, 26 bp, Homo sapiens
cctcctcttcctcaacatcactcaga

SEQ ID NO: 18466 - DNA, 26 bp, Homo sapiens
ctcctcttcctcaacatcactcagac

SEQ ID NO: 18467 - DNA, 26 bp, Homo sapiens
tcctcttcctcaacatcactcagact

SEQ ID NO: 18468 - DNA, 26 bp, Homo sapiens
cctcttcctcaacatcactcagactt

SEQ ID NO: 18469 - DNA, 26 bp, Homo sapiens
ctcttcctcaacatcactcagacttt

SEQ ID NO: 18470 - DNA, 26 bp, Homo sapiens
tcttcctcaacatcactcagactttt

SEQ ID NO: 18471 - DNA, 26 bp, Homo sapiens
cttcctcaacatcactcagactttta

SEQ ID NO: 18472 - DNA, 26 bp, Homo sapiens
ttcctcaacatcactcagacttttat

SEQ ID NO: 18473 - DNA, 26 bp, Homo sapiens
tcctcaacatcactcagacttttatc

SEQ ID NO: 18474 - DNA, 26 bp, Homo sapiens
cctcaacatcactcagacttttatct

SEQ ID NO: 18475 - DNA, 26 bp, Homo sapiens
ctcaacatcactcagacttttatctt

SEQ ID NO: 18476 - DNA, 26 bp, Homo sapiens
tcaacatcactcagacttttatcttc

SEQ ID NO: 18477 - DNA, 26 bp, Homo sapiens
caacatcactcagacttttatcttcc

SEQ ID NO: 18478 - DNA, 26 bp, Homo sapiens
aacatcactcagacttttatcttcct

SEQ ID NO: 18479 - DNA, 26 bp, Homo sapiens
acatcactcagacttttatcttcctg

SEQ ID NO: 18480 - DNA, 26 bp, Homo sapiens
catcactcagacttttatcttcctga

SEQ ID NO: 18481 - DNA, 26 bp, Homo sapiens
atcactcagacttttatcttcctgaa

SEQ ID NO: 18482 - DNA, 26 bp, Homo sapiens
tcactcagacttttatcttcctgaaa

SEQ ID NO: 18483 - DNA, 26 bp, Homo sapiens
cactcagacttttatcttcctgaaag

SEQ ID NO: 18484 - DNA, 26 bp, Homo sapiens
actcagacttttatcttcctgaaagc

SEQ ID NO: 18485 - DNA, 26 bp, Homo sapiens
ctcagacttttatcttcctgaaagcc

SEQ ID NO: 18486 - DNA, 26 bp, Homo sapiens
tcagacttttatcttcctgaaagccg

SEQ ID NO: 18487 - DNA, 26 bp, Homo sapiens
cagacttttatcttcctgaaagccgg

SEQ ID NO: 18488 - DNA, 26 bp, Homo sapiens
agacttttatcttcctgaaagccgga

SEQ ID NO: 18489 - DNA, 26 bp, Homo sapiens
gacttttatcttcctgaaagccggag

SEQ ID NO: 18490 - DNA, 26 bp, Homo sapiens
acttttatcttcctgaaagccggagc

SEQ ID NO: 18491 - DNA, 26 bp, Homo sapiens
cttttatcttcctgaaagccggagct

SEQ ID NO: 18492 - DNA, 26 bp, Homo sapiens
ttttatcttcctgaaagccggagctc

SEQ ID NO: 18493 - DNA, 26 bp, Homo sapiens
tttatcttcctgaaagccggagctcg

SEQ ID NO: 18494 - DNA, 26 bp, Homo sapiens
ttatcttcctgaaagccggagctcgc

SEQ ID NO: 18495 - DNA, 26 bp, Homo sapiens
tatcttcctgaaagccggagctcgca

SEQ ID NO: 18496 - DNA, 26 bp, Homo sapiens
atcttcctgaaagccggagctcgcaa

SEQ ID NO: 18497 - DNA, 26 bp, Homo sapiens
tcttcctgaaagccggagctcgcaaa

SEQ ID NO: 18498 - DNA, 26 bp, Homo sapiens
cttcctgaaagccggagctcgcaaag

SEQ ID NO: 18499 - DNA, 26 bp, Homo sapiens
ttcctgaaagccggagctcgcaaagc

SEQ ID NO: 18500 - DNA, 26 bp, Homo sapiens
tcctgaaagccggagctcgcaaagct

SEQ ID NO: 18501 - DNA, 26 bp, Homo sapiens
cctgaaagccggagctcgcaaagctt

SEQ ID NO: 18502 - DNA, 26 bp, Homo sapiens
ctgaaagccggagctcgcaaagcttt

SEQ ID NO: 18503 - DNA, 26 bp, Homo sapiens
tgaaagccggagctcgcaaagctttc

SEQ ID NO: 18504 - DNA, 26 bp, Homo sapiens
gaaagccggagctcgcaaagctttcg

SEQ ID NO: 18505 - DNA, 26 bp, Homo sapiens
aaagccggagctcgcaaagctttcgc

SEQ ID NO: 18506 - DNA, 26 bp, Homo sapiens
aagccggagctcgcaaagctttcgct

SEQ ID NO: 18507 - DNA, 26 bp, Homo sapiens
agccggagctcgcaaagctttcgctg

SEQ ID NO: 18508 - DNA, 26 bp, Homo sapiens
gccggagctcgcaaagctttcgctgc

SEQ ID NO: 18509 - DNA, 26 bp, Homo sapiens
ccggagctcgcaaagctttcgctgct

SEQ ID NO: 18510 - DNA, 26 bp, Homo sapiens
cggagctcgcaaagctttcgctgctg

SEQ ID NO: 18511 - DNA, 26 bp, Homo sapiens
ggagctcgcaaagctttcgctgctgg

SEQ ID NO: 18512 - DNA, 26 bp, Homo sapiens
gagctcgcaaagctttcgctgctggt

SEQ ID NO: 18513 - DNA, 26 bp, Homo sapiens
agctcgcaaagctttcgctgctggtg

SEQ ID NO: 18514 - DNA, 26 bp, Homo sapiens
gctcgcaaagctttcgctgctggtga

SEQ ID NO: 18515 - DNA, 26 bp, Homo sapiens
ctcgcaaagctttcgctgctggtgac

SEQ ID NO: 18516 - DNA, 26 bp, Homo sapiens
tcgcaaagctttcgctgctggtgacg

SEQ ID NO: 18517 - DNA, 26 bp, Homo sapiens
cgcaaagctttcgctgctggtgacgc

SEQ ID NO: 18518 - DNA, 26 bp, Homo sapiens
gcaaagctttcgctgctggtgacgct

SEQ ID NO: 18519 - DNA, 26 bp, Homo sapiens
caaagctttcgctgctggtgacgcta

SEQ ID NO: 18520 - DNA, 26 bp, Homo sapiens
aaagctttcgctgctggtgacgctat

SEQ ID NO: 18521 - DNA, 26 bp, Homo sapiens
aagctttcgctgctggtgacgctatc

SEQ ID NO: 18522 - DNA, 26 bp, Homo sapiens
agctttcgctgctggtgacgctatct

SEQ ID NO: 18523 - DNA, 26 bp, Homo sapiens
gctttcgctgctggtgacgctatcta

SEQ ID NO: 18524 - DNA, 26 bp, Homo sapiens
ctttcgctgctggtgacgctatctag

SEQ ID NO: 18525 - DNA, 26 bp, Homo sapiens
tttcgctgctggtgacgctatctagt

SEQ ID NO: 18526 - DNA, 26 bp, Homo sapiens
ttcgctgctggtgacgctatctagtc

SEQ ID NO: 18527 - DNA, 26 bp, Homo sapiens
tcgctgctggtgacgctatctagtct

SEQ ID NO: 18528 - DNA, 26 bp, Homo sapiens
cgctgctggtgacgctatctagtctt

SEQ ID NO: 18529 - DNA, 26 bp, Homo sapiens
gctgctggtgacgctatctagtcttg

SEQ ID NO: 18530 - DNA, 26 bp, Homo sapiens
ctgctggtgacgctatctagtcttgg

SEQ ID NO: 18531 - DNA, 26 bp, Homo sapiens
tgctggtgacgctatctagtcttggt

SEQ ID NO: 18532 - DNA, 26 bp, Homo sapiens
gctggtgacgctatctagtcttggtt

SEQ ID NO: 18533 - DNA, 26 bp, Homo sapiens
ctggtgacgctatctagtcttggttt

SEQ ID NO: 18534 - DNA, 26 bp, Homo sapiens
tggtgacgctatctagtcttggtttc

SEQ ID NO: 18535 - DNA, 26 bp, Homo sapiens
ggtgacgctatctagtcttggtttct

SEQ ID NO: 18536 - DNA, 26 bp, Homo sapiens
gtgacgctatctagtcttggtttctt

SEQ ID NO: 18537 - DNA, 26 bp, Homo sapiens
tgacgctatctagtcttggtttcttg

SEQ ID NO: 18538 - DNA, 26 bp, Homo sapiens
gacgctatctagtcttggtttcttgc

SEQ ID NO: 18539 - DNA, 26 bp, Homo sapiens
acgctatctagtcttggtttcttgcc

SEQ ID NO: 18540 - DNA, 26 bp, Homo sapiens
cgctatctagtcttggtttcttgcct

SEQ ID NO: 18541 - DNA, 26 bp, Homo sapiens
gctatctagtcttggtttcttgcctt

SEQ ID NO: 18542 - DNA, 26 bp, Homo sapiens
ctatctagtcttggtttcttgccttg

SEQ ID NO: 18543 - DNA, 26 bp, Homo sapiens
tatctagtcttggtttcttgccttgt

SEQ ID NO: 18544 - DNA, 26 bp, Homo sapiens
atctagtcttggtttcttgccttgtt

SEQ ID NO: 18545 - DNA, 26 bp, Homo sapiens
tctagtcttggtttcttgccttgttc

SEQ ID NO: 18546 - DNA, 26 bp, Homo sapiens
ctagtcttggtttcttgccttgttcc

SEQ ID NO: 18547 - DNA, 26 bp, Homo sapiens
tagtcttggtttcttgccttgttcca

SEQ ID NO: 18548 - DNA, 26 bp, Homo sapiens
agtcttggtttcttgccttgttccag

SEQ ID NO: 18549 - DNA, 26 bp, Homo sapiens
gtcttggtttcttgccttgttccagg

SEQ ID NO: 18550 - DNA, 26 bp, Homo sapiens
tcttggtttcttgccttgttccaggc

SEQ ID NO: 18551 - DNA, 26 bp, Homo sapiens
cttggtttcttgccttgttccaggcc

SEQ ID NO: 18552 - DNA, 26 bp, Homo sapiens
ttggtttcttgccttgttccaggcct

SEQ ID NO: 18553 - DNA, 26 bp, Homo sapiens
tggtttcttgccttgttccaggcctg

SEQ ID NO: 18554 - DNA, 26 bp, Homo sapiens
ggtttcttgccttgttccaggcctgg

SEQ ID NO: 18555 - DNA, 26 bp, Homo sapiens
gtttcttgccttgttccaggcctggc

SEQ ID NO: 18556 - DNA, 26 bp, Homo sapiens
tttcttgccttgttccaggcctggct

SEQ ID NO: 18557 - DNA, 26 bp, Homo sapiens
ttcttgccttgttccaggcctggctc

SEQ ID NO: 18558 - DNA, 26 bp, Homo sapiens
tcttgccttgttccaggcctggctcc

SEQ ID NO: 18559 - DNA, 26 bp, Homo sapiens
cttgccttgttccaggcctggctcca

SEQ ID NO: 18560 - DNA, 26 bp, Homo sapiens
ttgccttgttccaggcctggctccat

SEQ ID NO: 18561 - DNA, 26 bp, Homo sapiens
tgccttgttccaggcctggctccatt

SEQ ID NO: 18562 - DNA, 26 bp, Homo sapiens
gccttgttccaggcctggctccattt

SEQ ID NO: 18563 - DNA, 26 bp, Homo sapiens
ccttgttccaggcctggctccatttt

SEQ ID NO: 18564 - DNA, 26 bp, Homo sapiens
cttgttccaggcctggctccattttt

SEQ ID NO: 18565 - DNA, 26 bp, Homo sapiens
ttgttccaggcctggctccatttttt

SEQ ID NO: 18566 - DNA, 26 bp, Homo sapiens
tgttccaggcctggctccattttttc

SEQ ID NO: 18567 - DNA, 26 bp, Homo sapiens
gttccaggcctggctccattttttct

SEQ ID NO: 18568 - DNA, 26 bp, Homo sapiens
ttccaggcctggctccattttttctt

SEQ ID NO: 18569 - DNA, 26 bp, Homo sapiens
tccaggcctggctccattttttcttt

SEQ ID NO: 18570 - DNA, 26 bp, Homo sapiens
ccaggcctggctccattttttctttc

SEQ ID NO: 18571 - DNA, 26 bp, Homo sapiens
caggcctggctccattttttctttct

SEQ ID NO: 18572 - DNA, 26 bp, Homo sapiens
aggcctggctccattttttctttctt

SEQ ID NO: 18573 - DNA, 26 bp, Homo sapiens
ggcctggctccattttttctttctta

SEQ ID NO: 18574 - DNA, 26 bp, Homo sapiens
gcctggctccattttttctttcttag

SEQ ID NO: 18575 - DNA, 26 bp, Homo sapiens
cctggctccattttttctttcttagg

SEQ ID NO: 18576 - DNA, 26 bp, Homo sapiens
ctggctccattttttctttcttaggc

SEQ ID NO: 18577 - DNA, 26 bp, Homo sapiens
tggctccattttttctttcttaggct

SEQ ID NO: 18578 - DNA, 26 bp, Homo sapiens
ggctccattttttctttcttaggctc

SEQ ID NO: 18579 - DNA, 26 bp, Homo sapiens
gctccattttttctttcttaggctcc

SEQ ID NO: 18580 - DNA, 26 bp, Homo sapiens
ctccattttttctttcttaggctcca

SEQ ID NO: 18581 - DNA, 26 bp, Homo sapiens
tccattttttctttcttaggctccat

SEQ ID NO: 18582 - DNA, 26 bp, Homo sapiens
ccattttttctttcttaggctccatg

SEQ ID NO: 18583 - DNA, 26 bp, Homo sapiens
cattttttctttcttaggctccatgt

SEQ ID NO: 18584 - DNA, 26 bp, Homo sapiens
attttttctttcttaggctccatgtg

SEQ ID NO: 18585 - DNA, 26 bp, Homo sapiens
ttttttctttcttaggctccatgtgt

SEQ ID NO: 18586 - DNA, 26 bp, Homo sapiens
tttttctttcttaggctccatgtgta

SEQ ID NO: 18587 - DNA, 26 bp, Homo sapiens
ttttctttcttaggctccatgtgtag

SEQ ID NO: 18588 - DNA, 26 bp, Homo sapiens
tttctttcttaggctccatgtgtagt

SEQ ID NO: 18589 - DNA, 26 bp, Homo sapiens
ttctttcttaggctccatgtgtagtg

SEQ ID NO: 18590 - DNA, 26 bp, Homo sapiens
tctttcttaggctccatgtgtagtgc

SEQ ID NO: 18591 - DNA, 26 bp, Homo sapiens
ctttcttaggctccatgtgtagtgct

SEQ ID NO: 18592 - DNA, 26 bp, Homo sapiens
tttcttaggctccatgtgtagtgctg

SEQ ID NO: 18593 - DNA, 26 bp, Homo sapiens
ttcttaggctccatgtgtagtgctgc

SEQ ID NO: 18594 - DNA, 26 bp, Homo sapiens
tcttaggctccatgtgtagtgctgca

SEQ ID NO: 18595 - DNA, 26 bp, Homo sapiens
cttaggctccatgtgtagtgctgcat

SEQ ID NO: 18596 - DNA, 26 bp, Homo sapiens
ttaggctccatgtgtagtgctgcatc

SEQ ID NO: 18597 - DNA, 26 bp, Homo sapiens
taggctccatgtgtagtgctgcatcc

SEQ ID NO: 18598 - DNA, 26 bp, Homo sapiens
aggctccatgtgtagtgctgcatcct

SEQ ID NO: 18599 - DNA, 26 bp, Homo sapiens
ggctccatgtgtagtgctgcatcctt

SEQ ID NO: 18600 - DNA, 26 bp, Homo sapiens
gctccatgtgtagtgctgcatccttg

SEQ ID NO: 18601 - DNA, 26 bp, Homo sapiens
ctccatgtgtagtgctgcatccttgt

SEQ ID NO: 18602 - DNA, 26 bp, Homo sapiens
tccatgtgtagtgctgcatccttgtt

SEQ ID NO: 18603 - DNA, 26 bp, Homo sapiens
ccatgtgtagtgctgcatccttgttg

SEQ ID NO: 18604 - DNA, 26 bp, Homo sapiens
catgtgtagtgctgcatccttgttga

SEQ ID NO: 18605 - DNA, 26 bp, Homo sapiens
atgtgtagtgctgcatccttgttgag

SEQ ID NO: 18606 - DNA, 26 bp, Homo sapiens
tgtgtagtgctgcatccttgttgaga

SEQ ID NO: 18607 - DNA, 26 bp, Homo sapiens
gtgtagtgctgcatccttgttgagaa

SEQ ID NO: 18608 - DNA, 26 bp, Homo sapiens
tgtagtgctgcatccttgttgagaaa

SEQ ID NO: 18609 - DNA, 26 bp, Homo sapiens
gtagtgctgcatccttgttgagaaaa

SEQ ID NO: 18610 - DNA, 26 bp, Homo sapiens
tagtgctgcatccttgttgagaaaaa

SEQ ID NO: 18611 - DNA, 26 bp, Homo sapiens
agtgctgcatccttgttgagaaaaaa

SEQ ID NO: 18612 - DNA, 26 bp, Homo sapiens
gtgctgcatccttgttgagaaaaaat

SEQ ID NO: 18613 - DNA, 26 bp, Homo sapiens
tgctgcatccttgttgagaaaaaata

SEQ ID NO: 18614 - DNA, 26 bp, Homo sapiens
gctgcatccttgttgagaaaaaataa

SEQ ID NO: 18615 - DNA, 26 bp, Homo sapiens
ctgcatccttgttgagaaaaaataag

SEQ ID NO: 18616 - DNA, 26 bp, Homo sapiens
tgcatccttgttgagaaaaaataagt

SEQ ID NO: 18617 - DNA, 26 bp, Homo sapiens
gcatccttgttgagaaaaaataagtc

SEQ ID NO: 18618 - DNA, 26 bp, Homo sapiens
catccttgttgagaaaaaataagtca

SEQ ID NO: 18619 - DNA, 26 bp, Homo sapiens
atccttgttgagaaaaaataagtcac

SEQ ID NO: 18620 - DNA, 26 bp, Homo sapiens
tccttgttgagaaaaaataagtcacg

SEQ ID NO: 18621 - DNA, 26 bp, Homo sapiens
ccttgttgagaaaaaataagtcacgt

SEQ ID NO: 18622 - DNA, 26 bp, Homo sapiens
cttgttgagaaaaaataagtcacgtt

SEQ ID NO: 18623 - DNA, 26 bp, Homo sapiens
ttgttgagaaaaaataagtcacgttt

SEQ ID NO: 18624 - DNA, 26 bp, Homo sapiens
tgttgagaaaaaataagtcacgtttg

SEQ ID NO: 18625 - DNA, 26 bp, Homo sapiens
gttgagaaaaaataagtcacgtttgc

SEQ ID NO: 18626 - DNA, 26 bp, Homo sapiens
ttgagaaaaaataagtcacgtttgct

SEQ ID NO: 18627 - DNA, 26 bp, Homo sapiens
tgagaaaaaataagtcacgtttgctc

SEQ ID NO: 18628 - DNA, 26 bp, Homo sapiens
gagaaaaaataagtcacgtttgctct

SEQ ID NO: 18629 - DNA, 26 bp, Homo sapiens
agaaaaaataagtcacgtttgctctt

SEQ ID NO: 18630 - DNA, 26 bp, Homo sapiens
gaaaaaataagtcacgtttgctcttg

SEQ ID NO: 18631 - DNA, 26 bp, Homo sapiens
aaaaaataagtcacgtttgctcttga

SEQ ID NO: 18632 - DNA, 26 bp, Homo sapiens
aaaaataagtcacgtttgctcttgag

SEQ ID NO: 18633 - DNA, 26 bp, Homo sapiens
aaaataagtcacgtttgctcttgagg

SEQ ID NO: 18634 - DNA, 26 bp, Homo sapiens
aaataagtcacgtttgctcttgaggt

SEQ ID NO: 18635 - DNA, 26 bp, Homo sapiens
aataagtcacgtttgctcttgaggta

SEQ ID NO: 18636 - DNA, 26 bp, Homo sapiens
ataagtcacgtttgctcttgaggtag

SEQ ID NO: 18637 - DNA, 26 bp, Homo sapiens
taagtcacgtttgctcttgaggtagt

SEQ ID NO: 18638 - DNA, 26 bp, Homo sapiens
aagtcacgtttgctcttgaggtagtt

SEQ ID NO: 18639 - DNA, 26 bp, Homo sapiens
agtcacgtttgctcttgaggtagttg

SEQ ID NO: 18640 - DNA, 26 bp, Homo sapiens
gtcacgtttgctcttgaggtagttgg

SEQ ID NO: 18641 - DNA, 26 bp, Homo sapiens
tcacgtttgctcttgaggtagttgga

SEQ ID NO: 18642 - DNA, 26 bp, Homo sapiens
cacgtttgctcttgaggtagttggag

SEQ ID NO: 18643 - DNA, 26 bp, Homo sapiens
acgtttgctcttgaggtagttggaga

SEQ ID NO: 18644 - DNA, 26 bp, Homo sapiens
cgtttgctcttgaggtagttggagag

SEQ ID NO: 18645 - DNA, 26 bp, Homo sapiens
gtttgctcttgaggtagttggagaga

SEQ ID NO: 18646 - DNA, 26 bp, Homo sapiens
tttgctcttgaggtagttggagagat

SEQ ID NO: 18647 - DNA, 26 bp, Homo sapiens
ttgctcttgaggtagttggagagatt

SEQ ID NO: 18648 - DNA, 26 bp, Homo sapiens
tgctcttgaggtagttggagagattt

SEQ ID NO: 18649 - DNA, 26 bp, Homo sapiens
gctcttgaggtagttggagagatttc

SEQ ID NO: 18650 - DNA, 26 bp, Homo sapiens
ctcttgaggtagttggagagatttcc

SEQ ID NO: 18651 - DNA, 26 bp, Homo sapiens
tcttgaggtagttggagagatttcca

SEQ ID NO: 18652 - DNA, 26 bp, Homo sapiens
cttgaggtagttggagagatttccat

SEQ ID NO: 18653 - DNA, 26 bp, Homo sapiens
ttgaggtagttggagagatttccata

SEQ ID NO: 18654 - DNA, 26 bp, Homo sapiens
tgaggtagttggagagatttccatat

SEQ ID NO: 18655 - DNA, 26 bp, Homo sapiens
gaggtagttggagagatttccatatt

SEQ ID NO: 18656 - DNA, 26 bp, Homo sapiens
aggtagttggagagatttccatattt

SEQ ID NO: 18657 - DNA, 26 bp, Homo sapiens
ggtagttggagagatttccatatttg

SEQ ID NO: 18658 - DNA, 26 bp, Homo sapiens
gtagttggagagatttccatatttgc

SEQ ID NO: 18659 - DNA, 26 bp, Homo sapiens
tagttggagagatttccatatttgca

SEQ ID NO: 18660 - DNA, 26 bp, Homo sapiens
agttggagagatttccatatttgcag

SEQ ID NO: 18661 - DNA, 26 bp, Homo sapiens
gttggagagatttccatatttgcagt

SEQ ID NO: 18662 - DNA, 26 bp, Homo sapiens
ttggagagatttccatatttgcagta

SEQ ID NO: 18663 - DNA, 26 bp, Homo sapiens
tggagagatttccatatttgcagtat

SEQ ID NO: 18664 - DNA, 26 bp, Homo sapiens
ggagagatttccatatttgcagtatt

SEQ ID NO: 18665 - DNA, 26 bp, Homo sapiens
gagagatttccatatttgcagtattc

SEQ ID NO: 18666 - DNA, 26 bp, Homo sapiens
agagatttccatatttgcagtattca

SEQ ID NO: 18667 - DNA, 26 bp, Homo sapiens
gagatttccatatttgcagtattcaa

SEQ ID NO: 18668 - DNA, 26 bp, Homo sapiens
agatttccatatttgcagtattcaac

SEQ ID NO: 18669 - DNA, 26 bp, Homo sapiens
gatttccatatttgcagtattcaaca

SEQ ID NO: 18670 - DNA, 26 bp, Homo sapiens
atttccatatttgcagtattcaacaa

SEQ ID NO: 18671 - DNA, 26 bp, Homo sapiens
tttccatatttgcagtattcaacaat

SEQ ID NO: 18672 - DNA, 26 bp, Homo sapiens
ttccatatttgcagtattcaacaatc

SEQ ID NO: 18673 - DNA, 26 bp, Homo sapiens
tccatatttgcagtattcaacaatca

SEQ ID NO: 18674 - DNA, 26 bp, Homo sapiens
ccatatttgcagtattcaacaatcac

SEQ ID NO: 18675 - DNA, 26 bp, Homo sapiens
catatttgcagtattcaacaatcacc

SEQ ID NO: 18676 - DNA, 26 bp, Homo sapiens
atatttgcagtattcaacaatcacca

SEQ ID NO: 18677 - DNA, 26 bp, Homo sapiens
tatttgcagtattcaacaatcaccat

SEQ ID NO: 18678 - DNA, 26 bp, Homo sapiens
atttgcagtattcaacaatcaccatc

SEQ ID NO: 18679 - DNA, 26 bp, Homo sapiens
tttgcagtattcaacaatcaccatca

SEQ ID NO: 18680 - DNA, 26 bp, Homo sapiens
ttgcagtattcaacaatcaccatcag

SEQ ID NO: 18681 - DNA, 26 bp, Homo sapiens
tgcagtattcaacaatcaccatcaga

SEQ ID NO: 18682 - DNA, 26 bp, Homo sapiens
gcagtattcaacaatcaccatcagag

SEQ ID NO: 18683 - DNA, 26 bp, Homo sapiens
cagtattcaacaatcaccatcagagg

SEQ ID NO: 18684 - DNA, 26 bp, Homo sapiens
agtattcaacaatcaccatcagaggc

SEQ ID NO: 18685 - DNA, 26 bp, Homo sapiens
gtattcaacaatcaccatcagaggcc

SEQ ID NO: 18686 - DNA, 26 bp, Homo sapiens
tattcaacaatcaccatcagaggccc

SEQ ID NO: 18687 - DNA, 26 bp, Homo sapiens
attcaacaatcaccatcagaggccct

SEQ ID NO: 18688 - DNA, 26 bp, Homo sapiens
ttcaacaatcaccatcagaggccctc

SEQ ID NO: 18689 - DNA, 26 bp, Homo sapiens
tcaacaatcaccatcagaggccctcc

SEQ ID NO: 18690 - DNA, 26 bp, Homo sapiens
caacaatcaccatcagaggccctcct

SEQ ID NO: 18691 - DNA, 26 bp, Homo sapiens
aacaatcaccatcagaggccctcctt

SEQ ID NO: 18692 - DNA, 26 bp, Homo sapiens
acaatcaccatcagaggccctccttg

SEQ ID NO: 18693 - DNA, 26 bp, Homo sapiens
caatcaccatcagaggccctccttgc

SEQ ID NO: 18694 - DNA, 26 bp, Homo sapiens
aatcaccatcagaggccctccttgct

SEQ ID NO: 18695 - DNA, 26 bp, Homo sapiens
atcaccatcagaggccctccttgctt

SEQ ID NO: 18696 - DNA, 26 bp, Homo sapiens
tcaccatcagaggccctccttgcttg

SEQ ID NO: 18697 - DNA, 26 bp, Homo sapiens
caccatcagaggccctccttgcttgg

SEQ ID NO: 18698 - DNA, 26 bp, Homo sapiens
accatcagaggccctccttgcttggt

SEQ ID NO: 18699 - DNA, 26 bp, Homo sapiens
ccatcagaggccctccttgcttggtg

SEQ ID NO: 18700 - DNA, 26 bp, Homo sapiens
catcagaggccctccttgcttggtgc

SEQ ID NO: 18701 - DNA, 26 bp, Homo sapiens
atcagaggccctccttgcttggtgca

SEQ ID NO: 18702 - DNA, 26 bp, Homo sapiens
tcagaggccctccttgcttggtgcag

SEQ ID NO: 18703 - DNA, 26 bp, Homo sapiens
cagaggccctccttgcttggtgcagg

SEQ ID NO: 18704 - DNA, 26 bp, Homo sapiens
agaggccctccttgcttggtgcaggc

SEQ ID NO: 18705 - DNA, 26 bp, Homo sapiens
gaggccctccttgcttggtgcaggct

SEQ ID NO: 18706 - DNA, 26 bp, Homo sapiens
aggccctccttgcttggtgcaggctc

SEQ ID NO: 18707 - DNA, 26 bp, Homo sapiens
ggccctccttgcttggtgcaggctcc

SEQ ID NO: 18708 - DNA, 26 bp, Homo sapiens
gccctccttgcttggtgcaggctccc

SEQ ID NO: 18709 - DNA, 26 bp, Homo sapiens
ccctccttgcttggtgcaggctccca

SEQ ID NO: 18710 - DNA, 26 bp, Homo sapiens
cctccttgcttggtgcaggctcccag

SEQ ID NO: 18711 - DNA, 26 bp, Homo sapiens
ctccttgcttggtgcaggctcccagc

SEQ ID NO: 18712 - DNA, 26 bp, Homo sapiens
tccttgcttggtgcaggctcccagca

SEQ ID NO: 18713 - DNA, 26 bp, Homo sapiens
ccttgcttggtgcaggctcccagcag

SEQ ID NO: 18714 - DNA, 26 bp, Homo sapiens
cttgcttggtgcaggctcccagcagg

SEQ ID NO: 18715 - DNA, 26 bp, Homo sapiens
ttgcttggtgcaggctcccagcaggt

SEQ ID NO: 18716 - DNA, 26 bp, Homo sapiens
tgcttggtgcaggctcccagcaggtt

SEQ ID NO: 18717 - DNA, 26 bp, Homo sapiens
gcttggtgcaggctcccagcaggtta

SEQ ID NO: 18718 - DNA, 26 bp, Homo sapiens
cttggtgcaggctcccagcaggttaa

SEQ ID NO: 18719 - DNA, 26 bp, Homo sapiens
ttggtgcaggctcccagcaggttaac

SEQ ID NO: 18720 - DNA, 26 bp, Homo sapiens
tggtgcaggctcccagcaggttaacc

SEQ ID NO: 18721 - DNA, 26 bp, Homo sapiens
ggtgcaggctcccagcaggttaacca

SEQ ID NO: 18722 - DNA, 26 bp, Homo sapiens
gtgcaggctcccagcaggttaaccac

SEQ ID NO: 18723 - DNA, 26 bp, Homo sapiens
tgcaggctcccagcaggttaaccacg

SEQ ID NO: 18724 - DNA, 26 bp, Homo sapiens
gcaggctcccagcaggttaaccacgt

SEQ ID NO: 18725 - DNA, 26 bp, Homo sapiens
caggctcccagcaggttaaccacgtt

SEQ ID NO: 18726 - DNA, 26 bp, Homo sapiens
aggctcccagcaggttaaccacgttc

SEQ ID NO: 18727 - DNA, 26 bp, Homo sapiens
ggctcccagcaggttaaccacgttca

SEQ ID NO: 18728 - DNA, 26 bp, Homo sapiens
gctcccagcaggttaaccacgttcag

SEQ ID NO: 18729 - DNA, 26 bp, Homo sapiens
ctcccagcaggttaaccacgttcaga

SEQ ID NO: 18730 - DNA, 26 bp, Homo sapiens
tcccagcaggttaaccacgttcagat

SEQ ID NO: 18731 - DNA, 26 bp, Homo sapiens
cccagcaggttaaccacgttcagatg

SEQ ID NO: 18732 - DNA, 26 bp, Homo sapiens
ccagcaggttaaccacgttcagatgg

SEQ ID NO: 18733 - DNA, 26 bp, Homo sapiens
cagcaggttaaccacgttcagatggt

SEQ ID NO: 18734 - DNA, 26 bp, Homo sapiens
agcaggttaaccacgttcagatggtg

SEQ ID NO: 18735 - DNA, 26 bp, Homo sapiens
gcaggttaaccacgttcagatggtgg

SEQ ID NO: 18736 - DNA, 26 bp, Homo sapiens
caggttaaccacgttcagatggtggc

SEQ ID NO: 18737 - DNA, 26 bp, Homo sapiens
aggttaaccacgttcagatggtggcc

SEQ ID NO: 18738 - DNA, 26 bp, Homo sapiens
ggttaaccacgttcagatggtggcca

SEQ ID NO: 18739 - DNA, 26 bp, Homo sapiens
gttaaccacgttcagatggtggccaa

SEQ ID NO: 18740 - DNA, 26 bp, Homo sapiens
ttaaccacgttcagatggtggccaat

SEQ ID NO: 18741 - DNA, 26 bp, Homo sapiens
taaccacgttcagatggtggccaatg

SEQ ID NO: 18742 - DNA, 26 bp, Homo sapiens
aaccacgttcagatggtggccaatgt

SEQ ID NO: 18743 - DNA, 26 bp, Homo sapiens
accacgttcagatggtggccaatgtg

SEQ ID NO: 18744 - DNA, 26 bp, Homo sapiens
ccacgttcagatggtggccaatgtgg

SEQ ID NO: 18745 - DNA, 26 bp, Homo sapiens
cacgttcagatggtggccaatgtggg

SEQ ID NO: 18746 - DNA, 26 bp, Homo sapiens
acgttcagatggtggccaatgtgggt

SEQ ID NO: 18747 - DNA, 26 bp, Homo sapiens
cgttcagatggtggccaatgtgggtc

SEQ ID NO: 18748 - DNA, 26 bp, Homo sapiens
gttcagatggtggccaatgtgggtca

SEQ ID NO: 18749 - DNA, 26 bp, Homo sapiens
ttcagatggtggccaatgtgggtcaa

SEQ ID NO: 18750 - DNA, 26 bp, Homo sapiens
tcagatggtggccaatgtgggtcaag

SEQ ID NO: 18751 - DNA, 26 bp, Homo sapiens
cagatggtggccaatgtgggtcaaga

SEQ ID NO: 18752 - DNA, 26 bp, Homo sapiens
agatggtggccaatgtgggtcaagat

SEQ ID NO: 18753 - DNA, 26 bp, Homo sapiens
gatggtggccaatgtgggtcaagatt

SEQ ID NO: 18754 - DNA, 26 bp, Homo sapiens
atggtggccaatgtgggtcaagattt

SEQ ID NO: 18755 - DNA, 26 bp, Homo sapiens
tggtggccaatgtgggtcaagatttt

SEQ ID NO: 18756 - DNA, 26 bp, Homo sapiens
ggtggccaatgtgggtcaagattttt

SEQ ID NO: 18757 - DNA, 26 bp, Homo sapiens
gtggccaatgtgggtcaagattttta

SEQ ID NO: 18758 - DNA, 26 bp, Homo sapiens
tggccaatgtgggtcaagatttttag

SEQ ID NO: 18759 - DNA, 26 bp, Homo sapiens
ggccaatgtgggtcaagatttttagc

SEQ ID NO: 18760 - DNA, 26 bp, Homo sapiens
gccaatgtgggtcaagatttttagct

SEQ ID NO: 18761 - DNA, 26 bp, Homo sapiens
ccaatgtgggtcaagatttttagctc

SEQ ID NO: 18762 - DNA, 26 bp, Homo sapiens
caatgtgggtcaagatttttagctca

SEQ ID NO: 18763 - DNA, 26 bp, Homo sapiens
aatgtgggtcaagatttttagctcag

SEQ ID NO: 18764 - DNA, 26 bp, Homo sapiens
atgtgggtcaagatttttagctcagt

SEQ ID NO: 18765 - DNA, 26 bp, Homo sapiens
tgtgggtcaagatttttagctcagtc

SEQ ID NO: 18766 - DNA, 26 bp, Homo sapiens
gtgggtcaagatttttagctcagtca

SEQ ID NO: 18767 - DNA, 26 bp, Homo sapiens
tgggtcaagatttttagctcagtcat

SEQ ID NO: 18768 - DNA, 26 bp, Homo sapiens
gggtcaagatttttagctcagtcatc

SEQ ID NO: 18769 - DNA, 26 bp, Homo sapiens
ggtcaagatttttagctcagtcatca

SEQ ID NO: 18770 - DNA, 26 bp, Homo sapiens
gtcaagatttttagctcagtcatcag

SEQ ID NO: 18771 - DNA, 26 bp, Homo sapiens
tcaagatttttagctcagtcatcaga

SEQ ID NO: 18772 - DNA, 26 bp, Homo sapiens
caagatttttagctcagtcatcagag

SEQ ID NO: 18773 - DNA, 26 bp, Homo sapiens
aagatttttagctcagtcatcagagc

SEQ ID NO: 18774 - DNA, 26 bp, Homo sapiens
agatttttagctcagtcatcagagct

SEQ ID NO: 18775 - DNA, 26 bp, Homo sapiens
gatttttagctcagtcatcagagctt

SEQ ID NO: 18776 - DNA, 26 bp, Homo sapiens
atttttagctcagtcatcagagcttt

SEQ ID NO: 18777 - DNA, 26 bp, Homo sapiens
tttttagctcagtcatcagagctttg

SEQ ID NO: 18778 - DNA, 26 bp, Homo sapiens
ttttagctcagtcatcagagctttgt

SEQ ID NO: 18779 - DNA, 26 bp, Homo sapiens
tttagctcagtcatcagagctttgta

SEQ ID NO: 18780 - DNA, 26 bp, Homo sapiens
ttagctcagtcatcagagctttgtac

SEQ ID NO: 18781 - DNA, 26 bp, Homo sapiens
tagctcagtcatcagagctttgtact

SEQ ID NO: 18782 - DNA, 26 bp, Homo sapiens
agctcagtcatcagagctttgtactc

SEQ ID NO: 18783 - DNA, 26 bp, Homo sapiens
gctcagtcatcagagctttgtactcg

SEQ ID NO: 18784 - DNA, 26 bp, Homo sapiens
ctcagtcatcagagctttgtactcgc

SEQ ID NO: 18785 - DNA, 26 bp, Homo sapiens
tcagtcatcagagctttgtactcgct

SEQ ID NO: 18786 - DNA, 26 bp, Homo sapiens
cagtcatcagagctttgtactcgctg

SEQ ID NO: 18787 - DNA, 26 bp, Homo sapiens
agtcatcagagctttgtactcgctgg

SEQ ID NO: 18788 - DNA, 26 bp, Homo sapiens
gtcatcagagctttgtactcgctggc

SEQ ID NO: 18789 - DNA, 26 bp, Homo sapiens
tcatcagagctttgtactcgctggcc

SEQ ID NO: 18790 - DNA, 26 bp, Homo sapiens
catcagagctttgtactcgctggccg

SEQ ID NO: 18791 - DNA, 26 bp, Homo sapiens
atcagagctttgtactcgctggccgt

SEQ ID NO: 18792 - DNA, 26 bp, Homo sapiens
tcagagctttgtactcgctggccgtg

SEQ ID NO: 18793 - DNA, 26 bp, Homo sapiens
cagagctttgtactcgctggccgtgg

SEQ ID NO: 18794 - DNA, 26 bp, Homo sapiens
agagctttgtactcgctggccgtggc

SEQ ID NO: 18795 - DNA, 26 bp, Homo sapiens
gagctttgtactcgctggccgtggcc

SEQ ID NO: 18796 - DNA, 26 bp, Homo sapiens
agctttgtactcgctggccgtggccc

SEQ ID NO: 18797 - DNA, 26 bp, Homo sapiens
gctttgtactcgctggccgtggcccc

SEQ ID NO: 18798 - DNA, 26 bp, Homo sapiens
ctttgtactcgctggccgtggccccc

SEQ ID NO: 18799 - DNA, 26 bp, Homo sapiens
tttgtactcgctggccgtggccccct

SEQ ID NO: 18800 - DNA, 26 bp, Homo sapiens
ttgtactcgctggccgtggccccctc

SEQ ID NO: 18801 - DNA, 26 bp, Homo sapiens
tgtactcgctggccgtggccccctct

SEQ ID NO: 18802 - DNA, 26 bp, Homo sapiens
gtactcgctggccgtggccccctctt

SEQ ID NO: 18803 - DNA, 26 bp, Homo sapiens
tactcgctggccgtggccccctcttt

SEQ ID NO: 18804 - DNA, 26 bp, Homo sapiens
actcgctggccgtggccccctctttc

SEQ ID NO: 18805 - DNA, 26 bp, Homo sapiens
ctcgctggccgtggccccctctttca

SEQ ID NO: 18806 - DNA, 26 bp, Homo sapiens
tcgctggccgtggccccctctttcag

SEQ ID NO: 18807 - DNA, 26 bp, Homo sapiens
cgctggccgtggccccctctttcagc

SEQ ID NO: 18808 - DNA, 26 bp, Homo sapiens
gctggccgtggccccctctttcagca

SEQ ID NO: 18809 - DNA, 26 bp, Homo sapiens
ctggccgtggccccctctttcagcat

SEQ ID NO: 18810 - DNA, 26 bp, Homo sapiens
tggccgtggccccctctttcagcatt

SEQ ID NO: 18811 - DNA, 26 bp, Homo sapiens
ggccgtggccccctctttcagcattt

SEQ ID NO: 18812 - DNA, 26 bp, Homo sapiens
gccgtggccccctctttcagcatttt

SEQ ID NO: 18813 - DNA, 26 bp, Homo sapiens
ccgtggccccctctttcagcattttc

SEQ ID NO: 18814 - DNA, 26 bp, Homo sapiens
cgtggccccctctttcagcattttca

SEQ ID NO: 18815 - DNA, 26 bp, Homo sapiens
gtggccccctctttcagcattttcac

SEQ ID NO: 18816 - DNA, 26 bp, Homo sapiens
tggccccctctttcagcattttcaca

SEQ ID NO: 18817 - DNA, 26 bp, Homo sapiens
ggccccctctttcagcattttcacag

SEQ ID NO: 18818 - DNA, 26 bp, Homo sapiens
gccccctctttcagcattttcacagc

SEQ ID NO: 18819 - DNA, 26 bp, Homo sapiens
ccccctctttcagcattttcacagcc

SEQ ID NO: 18820 - DNA, 26 bp, Homo sapiens
cccctctttcagcattttcacagcca

SEQ ID NO: 18821 - DNA, 26 bp, Homo sapiens
ccctctttcagcattttcacagccac

SEQ ID NO: 18822 - DNA, 26 bp, Homo sapiens
cctctttcagcattttcacagccaca

SEQ ID NO: 18823 - DNA, 26 bp, Homo sapiens
ctctttcagcattttcacagccacag

SEQ ID NO: 18824 - DNA, 26 bp, Homo sapiens
tctttcagcattttcacagccacagt

SEQ ID NO: 18825 - DNA, 26 bp, Homo sapiens
ctttcagcattttcacagccacagtc

SEQ ID NO: 18826 - DNA, 26 bp, Homo sapiens
tttcagcattttcacagccacagtcc

SEQ ID NO: 18827 - DNA, 26 bp, Homo sapiens
ttcagcattttcacagccacagtccg

SEQ ID NO: 18828 - DNA, 26 bp, Homo sapiens
tcagcattttcacagccacagtccgg

SEQ ID NO: 18829 - DNA, 26 bp, Homo sapiens
cagcattttcacagccacagtccggc

SEQ ID NO: 18830 - DNA, 26 bp, Homo sapiens
agcattttcacagccacagtccggca

SEQ ID NO: 18831 - DNA, 26 bp, Homo sapiens
gcattttcacagccacagtccggcac

SEQ ID NO: 18832 - DNA, 26 bp, Homo sapiens
cattttcacagccacagtccggcacg

SEQ ID NO: 18833 - DNA, 26 bp, Homo sapiens
attttcacagccacagtccggcacgt

SEQ ID NO: 18834 - DNA, 26 bp, Homo sapiens
ttttcacagccacagtccggcacgta

SEQ ID NO: 18835 - DNA, 26 bp, Homo sapiens
tttcacagccacagtccggcacgtag

SEQ ID NO: 18836 - DNA, 26 bp, Homo sapiens
ttcacagccacagtccggcacgtagg

SEQ ID NO: 18837 - DNA, 26 bp, Homo sapiens
tcacagccacagtccggcacgtaggt

SEQ ID NO: 18838 - DNA, 26 bp, Homo sapiens
cacagccacagtccggcacgtaggtg

SEQ ID NO: 18839 - DNA, 26 bp, Homo sapiens
acagccacagtccggcacgtaggtga

SEQ ID NO: 18840 - DNA, 26 bp, Homo sapiens
cagccacagtccggcacgtaggtgat

SEQ ID NO: 18841 - DNA, 26 bp, Homo sapiens
agccacagtccggcacgtaggtgatt

SEQ ID NO: 18842 - DNA, 26 bp, Homo sapiens
gccacagtccggcacgtaggtgattt

SEQ ID NO: 18843 - DNA, 26 bp, Homo sapiens
ccacagtccggcacgtaggtgatttc

SEQ ID NO: 18844 - DNA, 26 bp, Homo sapiens
cacagtccggcacgtaggtgatttct

SEQ ID NO: 18845 - DNA, 26 bp, Homo sapiens
acagtccggcacgtaggtgatttctt

SEQ ID NO: 18846 - DNA, 26 bp, Homo sapiens
cagtccggcacgtaggtgatttctta

SEQ ID NO: 18847 - DNA, 26 bp, Homo sapiens
agtccggcacgtaggtgatttcttaa

SEQ ID NO: 18848 - DNA, 26 bp, Homo sapiens
gtccggcacgtaggtgatttcttaat

SEQ ID NO: 18849 - DNA, 26 bp, Homo sapiens
tccggcacgtaggtgatttcttaatg

SEQ ID NO: 18850 - DNA, 26 bp, Homo sapiens
ccggcacgtaggtgatttcttaatgc

SEQ ID NO: 18851 - DNA, 26 bp, Homo sapiens
cggcacgtaggtgatttcttaatgcc

SEQ ID NO: 18852 - DNA, 26 bp, Homo sapiens
ggcacgtaggtgatttcttaatgcca

SEQ ID NO: 18853 - DNA, 26 bp, Homo sapiens
gcacgtaggtgatttcttaatgccaa

SEQ ID NO: 18854 - DNA, 26 bp, Homo sapiens
cacgtaggtgatttcttaatgccaaa

SEQ ID NO: 18855 - DNA, 26 bp, Homo sapiens
acgtaggtgatttcttaatgccaaat

SEQ ID NO: 18856 - DNA, 26 bp, Homo sapiens
cgtaggtgatttcttaatgccaaatg

SEQ ID NO: 18857 - DNA, 26 bp, Homo sapiens
gtaggtgatttcttaatgccaaatgc

SEQ ID NO: 18858 - DNA, 26 bp, Homo sapiens
taggtgatttcttaatgccaaatgct

SEQ ID NO: 18859 - DNA, 26 bp, Homo sapiens
aggtgatttcttaatgccaaatgctg

SEQ ID NO: 18860 - DNA, 26 bp, Homo sapiens
ggtgatttcttaatgccaaatgctga

SEQ ID NO: 18861 - DNA, 26 bp, Homo sapiens
gtgatttcttaatgccaaatgctgat

SEQ ID NO: 18862 - DNA, 26 bp, Homo sapiens
tgatttcttaatgccaaatgctgatg

SEQ ID NO: 18863 - DNA, 26 bp, Homo sapiens
gatttcttaatgccaaatgctgatgc

SEQ ID NO: 18864 - DNA, 26 bp, Homo sapiens
atttcttaatgccaaatgctgatgct

SEQ ID NO: 18865 - DNA, 26 bp, Homo sapiens
tttcttaatgccaaatgctgatgctt

SEQ ID NO: 18866 - DNA, 26 bp, Homo sapiens
ttcttaatgccaaatgctgatgcttg

SEQ ID NO: 18867 - DNA, 26 bp, Homo sapiens
tcttaatgccaaatgctgatgcttga

SEQ ID NO: 18868 - DNA, 26 bp, Homo sapiens
cttaatgccaaatgctgatgcttgaa

SEQ ID NO: 18869 - DNA, 26 bp, Homo sapiens
ttaatgccaaatgctgatgcttgaac

SEQ ID NO: 18870 - DNA, 26 bp, Homo sapiens
taatgccaaatgctgatgcttgaacc

SEQ ID NO: 18871 - DNA, 26 bp, Homo sapiens
aatgccaaatgctgatgcttgaacca

SEQ ID NO: 18872 - DNA, 26 bp, Homo sapiens
atgccaaatgctgatgcttgaaccac

SEQ ID NO: 18873 - DNA, 26 bp, Homo sapiens
tgccaaatgctgatgcttgaaccact

SEQ ID NO: 18874 - DNA, 26 bp, Homo sapiens
gccaaatgctgatgcttgaaccactt

SEQ ID NO: 18875 - DNA, 26 bp, Homo sapiens
ccaaatgctgatgcttgaaccacttt

SEQ ID NO: 18876 - DNA, 26 bp, Homo sapiens
caaatgctgatgcttgaaccactttt

SEQ ID NO: 18877 - DNA, 26 bp, Homo sapiens
aaatgctgatgcttgaaccacttttc

SEQ ID NO: 18878 - DNA, 26 bp, Homo sapiens
aatgctgatgcttgaaccacttttcc

SEQ ID NO: 18879 - DNA, 26 bp, Homo sapiens
atgctgatgcttgaaccacttttcca

SEQ ID NO: 18880 - DNA, 26 bp, Homo sapiens
tgctgatgcttgaaccacttttccaa

SEQ ID NO: 18881 - DNA, 26 bp, Homo sapiens
gctgatgcttgaaccacttttccaaa

SEQ ID NO: 18882 - DNA, 26 bp, Homo sapiens
ctgatgcttgaaccacttttccaaaa

SEQ ID NO: 18883 - DNA, 26 bp, Homo sapiens
tgatgcttgaaccacttttccaaaag

SEQ ID NO: 18884 - DNA, 26 bp, Homo sapiens
gatgcttgaaccacttttccaaaagc

SEQ ID NO: 18885 - DNA, 26 bp, Homo sapiens
atgcttgaaccacttttccaaaagcc

SEQ ID NO: 18886 - DNA, 26 bp, Homo sapiens
tgcttgaaccacttttccaaaagccc

SEQ ID NO: 18887 - DNA, 26 bp, Homo sapiens
gcttgaaccacttttccaaaagcccc

SEQ ID NO: 18888 - DNA, 26 bp, Homo sapiens
cttgaaccacttttccaaaagcccct

SEQ ID NO: 18889 - DNA, 26 bp, Homo sapiens
ttgaaccacttttccaaaagcccctc

SEQ ID NO: 18890 - DNA, 26 bp, Homo sapiens
tgaaccacttttccaaaagcccctct

SEQ ID NO: 18891 - DNA, 26 bp, Homo sapiens
gaaccacttttccaaaagcccctctt

SEQ ID NO: 18892 - DNA, 26 bp, Homo sapiens
aaccacttttccaaaagcccctcttc

SEQ ID NO: 18893 - DNA, 26 bp, Homo sapiens
accacttttccaaaagcccctcttcc

SEQ ID NO: 18894 - DNA, 26 bp, Homo sapiens
ccacttttccaaaagcccctcttcca

SEQ ID NO: 18895 - DNA, 26 bp, Homo sapiens
cacttttccaaaagcccctcttccaa

SEQ ID NO: 18896 - DNA, 26 bp, Homo sapiens
acttttccaaaagcccctcttccaag

SEQ ID NO: 18897 - DNA, 26 bp, Homo sapiens
cttttccaaaagcccctcttccaagt

SEQ ID NO: 18898 - DNA, 26 bp, Homo sapiens
ttttccaaaagcccctcttccaagtg

SEQ ID NO: 18899 - DNA, 26 bp, Homo sapiens
tttccaaaagcccctcttccaagtga

SEQ ID NO: 18900 - DNA, 26 bp, Homo sapiens
ttccaaaagcccctcttccaagtgat

SEQ ID NO: 18901 - DNA, 26 bp, Homo sapiens
tccaaaagcccctcttccaagtgatt

SEQ ID NO: 18902 - DNA, 26 bp, Homo sapiens
ccaaaagcccctcttccaagtgattt

SEQ ID NO: 18903 - DNA, 26 bp, Homo sapiens
caaaagcccctcttccaagtgatttg

SEQ ID NO: 18904 - DNA, 26 bp, Homo sapiens
aaaagcccctcttccaagtgatttgc

SEQ ID NO: 18905 - DNA, 26 bp, Homo sapiens
aaagcccctcttccaagtgatttgcc

SEQ ID NO: 18906 - DNA, 26 bp, Homo sapiens
aagcccctcttccaagtgatttgccc

SEQ ID NO: 18907 - DNA, 26 bp, Homo sapiens
agcccctcttccaagtgatttgccca

SEQ ID NO: 18908 - DNA, 26 bp, Homo sapiens
gcccctcttccaagtgatttgcccag

SEQ ID NO: 18909 - DNA, 26 bp, Homo sapiens
cccctcttccaagtgatttgcccagt

SEQ ID NO: 18910 - DNA, 26 bp, Homo sapiens
ccctcttccaagtgatttgcccagtt

SEQ ID NO: 18911 - DNA, 26 bp, Homo sapiens
cctcttccaagtgatttgcccagttt

SEQ ID NO: 18912 - DNA, 26 bp, Homo sapiens
ctcttccaagtgatttgcccagttta

SEQ ID NO: 18913 - DNA, 26 bp, Homo sapiens
tcttccaagtgatttgcccagtttaa

SEQ ID NO: 18914 - DNA, 26 bp, Homo sapiens
cttccaagtgatttgcccagtttaag

SEQ ID NO: 18915 - DNA, 26 bp, Homo sapiens
ttccaagtgatttgcccagtttaagt

SEQ ID NO: 18916 - DNA, 26 bp, Homo sapiens
tccaagtgatttgcccagtttaagtc

SEQ ID NO: 18917 - DNA, 26 bp, Homo sapiens
ccaagtgatttgcccagtttaagtct

SEQ ID NO: 18918 - DNA, 26 bp, Homo sapiens
caagtgatttgcccagtttaagtctc

SEQ ID NO: 18919 - DNA, 26 bp, Homo sapiens
aagtgatttgcccagtttaagtctct

SEQ ID NO: 18920 - DNA, 26 bp, Homo sapiens
agtgatttgcccagtttaagtctctc

SEQ ID NO: 18921 - DNA, 26 bp, Homo sapiens
gtgatttgcccagtttaagtctctcc

SEQ ID NO: 18922 - DNA, 26 bp, Homo sapiens
tgatttgcccagtttaagtctctccc

SEQ ID NO: 18923 - DNA, 26 bp, Homo sapiens
gatttgcccagtttaagtctctcccg

SEQ ID NO: 18924 - DNA, 26 bp, Homo sapiens
atttgcccagtttaagtctctcccgg

SEQ ID NO: 18925 - DNA, 26 bp, Homo sapiens
tttgcccagtttaagtctctcccggg

SEQ ID NO: 18926 - DNA, 26 bp, Homo sapiens
ttgcccagtttaagtctctcccgggc

SEQ ID NO: 18927 - DNA, 26 bp, Homo sapiens
tgcccagtttaagtctctcccgggca

SEQ ID NO: 18928 - DNA, 26 bp, Homo sapiens
gcccagtttaagtctctcccgggcaa

SEQ ID NO: 18929 - DNA, 26 bp, Homo sapiens
cccagtttaagtctctcccgggcaaa

SEQ ID NO: 18930 - DNA, 26 bp, Homo sapiens
ccagtttaagtctctcccgggcaaac

SEQ ID NO: 18931 - DNA, 26 bp, Homo sapiens
cagtttaagtctctcccgggcaaact

SEQ ID NO: 18932 - DNA, 26 bp, Homo sapiens
agtttaagtctctcccgggcaaactc

SEQ ID NO: 18933 - DNA, 26 bp, Homo sapiens
gtttaagtctctcccgggcaaactcc

SEQ ID NO: 18934 - DNA, 26 bp, Homo sapiens
tttaagtctctcccgggcaaactccc

SEQ ID NO: 18935 - DNA, 26 bp, Homo sapiens
ttaagtctctcccgggcaaactccca

SEQ ID NO: 18936 - DNA, 26 bp, Homo sapiens
taagtctctcccgggcaaactcccac

SEQ ID NO: 18937 - DNA, 26 bp, Homo sapiens
aagtctctcccgggcaaactcccact

SEQ ID NO: 18938 - DNA, 26 bp, Homo sapiens
agtctctcccgggcaaactcccactt

SEQ ID NO: 18939 - DNA, 26 bp, Homo sapiens
gtctctcccgggcaaactcccacttg

SEQ ID NO: 18940 - DNA, 26 bp, Homo sapiens
tctctcccgggcaaactcccacttgc

SEQ ID NO: 18941 - DNA, 26 bp, Homo sapiens
ctctcccgggcaaactcccacttgct

SEQ ID NO: 18942 - DNA, 26 bp, Homo sapiens
tctcccgggcaaactcccacttgctg

SEQ ID NO: 18943 - DNA, 26 bp, Homo sapiens
ctcccgggcaaactcccacttgctgg

SEQ ID NO: 18944 - DNA, 26 bp, Homo sapiens
tcccgggcaaactcccacttgctggc

SEQ ID NO: 18945 - DNA, 26 bp, Homo sapiens
cccgggcaaactcccacttgctggca

SEQ ID NO: 18946 - DNA, 26 bp, Homo sapiens
ccgggcaaactcccacttgctggcat

SEQ ID NO: 18947 - DNA, 26 bp, Homo sapiens
cgggcaaactcccacttgctggcatc

SEQ ID NO: 18948 - DNA, 26 bp, Homo sapiens
gggcaaactcccacttgctggcatca

SEQ ID NO: 18949 - DNA, 26 bp, Homo sapiens
ggcaaactcccacttgctggcatcat

SEQ ID NO: 18950 - DNA, 26 bp, Homo sapiens
gcaaactcccacttgctggcatcata

SEQ ID NO: 18951 - DNA, 26 bp, Homo sapiens
caaactcccacttgctggcatcataa

SEQ ID NO: 18952 - DNA, 26 bp, Homo sapiens
aaactcccacttgctggcatcataag

SEQ ID NO: 18953 - DNA, 26 bp, Homo sapiens
aactcccacttgctggcatcataagg

SEQ ID NO: 18954 - DNA, 26 bp, Homo sapiens
actcccacttgctggcatcataaggg

SEQ ID NO: 18955 - DNA, 26 bp, Homo sapiens
ctcccacttgctggcatcataaggga

SEQ ID NO: 18956 - DNA, 26 bp, Homo sapiens
tcccacttgctggcatcataagggag

SEQ ID NO: 18957 - DNA, 26 bp, Homo sapiens
cccacttgctggcatcataagggagc

SEQ ID NO: 18958 - DNA, 26 bp, Homo sapiens
ccacttgctggcatcataagggagcc

SEQ ID NO: 18959 - DNA, 26 bp, Homo sapiens
cacttgctggcatcataagggagccg

SEQ ID NO: 18960 - DNA, 26 bp, Homo sapiens
acttgctggcatcataagggagccgc

SEQ ID NO: 18961 - DNA, 26 bp, Homo sapiens
cttgctggcatcataagggagccgct

SEQ ID NO: 18962 - DNA, 26 bp, Homo sapiens
ttgctggcatcataagggagccgctc

SEQ ID NO: 18963 - DNA, 26 bp, Homo sapiens
tgctggcatcataagggagccgctca

SEQ ID NO: 18964 - DNA, 26 bp, Homo sapiens
gctggcatcataagggagccgctcac

SEQ ID NO: 18965 - DNA, 26 bp, Homo sapiens
ctggcatcataagggagccgctcaca

SEQ ID NO: 18966 - DNA, 26 bp, Homo sapiens
tggcatcataagggagccgctcacac

SEQ ID NO: 18967 - DNA, 26 bp, Homo sapiens
ggcatcataagggagccgctcacact

SEQ ID NO: 18968 - DNA, 26 bp, Homo sapiens
gcatcataagggagccgctcacactg

SEQ ID NO: 18969 - DNA, 26 bp, Homo sapiens
catcataagggagccgctcacactgc

SEQ ID NO: 18970 - DNA, 26 bp, Homo sapiens
atcataagggagccgctcacactgct

SEQ ID NO: 18971 - DNA, 26 bp, Homo sapiens
tcataagggagccgctcacactgctc

SEQ ID NO: 18972 - DNA, 26 bp, Homo sapiens
cataagggagccgctcacactgctca

SEQ ID NO: 18973 - DNA, 26 bp, Homo sapiens
ataagggagccgctcacactgctcat

SEQ ID NO: 18974 - DNA, 26 bp, Homo sapiens
taagggagccgctcacactgctcatc

SEQ ID NO: 18975 - DNA, 26 bp, Homo sapiens
aagggagccgctcacactgctcatcc

SEQ ID NO: 18976 - DNA, 26 bp, Homo sapiens
agggagccgctcacactgctcatcca

SEQ ID NO: 18977 - DNA, 26 bp, Homo sapiens
gggagccgctcacactgctcatccaa

SEQ ID NO: 18978 - DNA, 26 bp, Homo sapiens
ggagccgctcacactgctcatccaaa

SEQ ID NO: 18979 - DNA, 26 bp, Homo sapiens
gagccgctcacactgctcatccaaag

SEQ ID NO: 18980 - DNA, 26 bp, Homo sapiens
agccgctcacactgctcatccaaagg

SEQ ID NO: 18981 - DNA, 26 bp, Homo sapiens
gccgctcacactgctcatccaaagga

SEQ ID NO: 18982 - DNA, 26 bp, Homo sapiens
ccgctcacactgctcatccaaaggaa

SEQ ID NO: 18983 - DNA, 26 bp, Homo sapiens
cgctcacactgctcatccaaaggaac

SEQ ID NO: 18984 - DNA, 26 bp, Homo sapiens
gctcacactgctcatccaaaggaact

SEQ ID NO: 18985 - DNA, 26 bp, Homo sapiens
ctcacactgctcatccaaaggaactt

SEQ ID NO: 18986 - DNA, 26 bp, Homo sapiens
tcacactgctcatccaaaggaacttc

SEQ ID NO: 18987 - DNA, 26 bp, Homo sapiens
cacactgctcatccaaaggaacttca

SEQ ID NO: 18988 - DNA, 26 bp, Homo sapiens
acactgctcatccaaaggaacttcat

SEQ ID NO: 18989 - DNA, 26 bp, Homo sapiens
cactgctcatccaaaggaacttcatc

SEQ ID NO: 18990 - DNA, 26 bp, Homo sapiens
actgctcatccaaaggaacttcatct

SEQ ID NO: 18991 - DNA, 26 bp, Homo sapiens
ctgctcatccaaaggaacttcatctg

SEQ ID NO: 18992 - DNA, 26 bp, Homo sapiens
tgctcatccaaaggaacttcatctgg

SEQ ID NO: 18993 - DNA, 26 bp, Homo sapiens
gctcatccaaaggaacttcatctggg

SEQ ID NO: 18994 - DNA, 26 bp, Homo sapiens
ctcatccaaaggaacttcatctgggt

SEQ ID NO: 18995 - DNA, 26 bp, Homo sapiens
tcatccaaaggaacttcatctgggtc

SEQ ID NO: 18996 - DNA, 26 bp, Homo sapiens
catccaaaggaacttcatctgggtcc

SEQ ID NO: 18997 - DNA, 26 bp, Homo sapiens
atccaaaggaacttcatctgggtcca

SEQ ID NO: 18998 - DNA, 26 bp, Homo sapiens
tccaaaggaacttcatctgggtccat

SEQ ID NO: 18999 - DNA, 26 bp, Homo sapiens
ccaaaggaacttcatctgggtccatt

SEQ ID NO: 19000 - DNA, 26 bp, Homo sapiens
caaaggaacttcatctgggtccatta

SEQ ID NO: 19001 - DNA, 26 bp, Homo sapiens
aaaggaacttcatctgggtccattat

SEQ ID NO: 19002 - DNA, 26 bp, Homo sapiens
aaggaacttcatctgggtccattata

SEQ ID NO: 19003 - DNA, 26 bp, Homo sapiens
aggaacttcatctgggtccattataa

SEQ ID NO: 19004 - DNA, 26 bp, Homo sapiens
ggaacttcatctgggtccattataat

SEQ ID NO: 19005 - DNA, 26 bp, Homo sapiens
gaacttcatctgggtccattataatt

SEQ ID NO: 19006 - DNA, 26 bp, Homo sapiens
aacttcatctgggtccattataattg

SEQ ID NO: 19007 - DNA, 26 bp, Homo sapiens
acttcatctgggtccattataattga

SEQ ID NO: 19008 - DNA, 26 bp, Homo sapiens
cttcatctgggtccattataattgat

SEQ ID NO: 19009 - DNA, 26 bp, Homo sapiens
ttcatctgggtccattataattgata

SEQ ID NO: 19010 - DNA, 26 bp, Homo sapiens
tcatctgggtccattataattgatag

SEQ ID NO: 19011 - DNA, 26 bp, Homo sapiens
catctgggtccattataattgatagg

SEQ ID NO: 19012 - DNA, 26 bp, Homo sapiens
atctgggtccattataattgataggt

SEQ ID NO: 19013 - DNA, 26 bp, Homo sapiens
tctgggtccattataattgataggta

SEQ ID NO: 19014 - DNA, 26 bp, Homo sapiens
ctgggtccattataattgataggtag

SEQ ID NO: 19015 - DNA, 26 bp, Homo sapiens
tgggtccattataattgataggtagt

SEQ ID NO: 19016 - DNA, 26 bp, Homo sapiens
gggtccattataattgataggtagtc

SEQ ID NO: 19017 - DNA, 26 bp, Homo sapiens
ggtccattataattgataggtagtca

SEQ ID NO: 19018 - DNA, 26 bp, Homo sapiens
gtccattataattgataggtagtcag

SEQ ID NO: 19019 - DNA, 26 bp, Homo sapiens
tccattataattgataggtagtcagt

SEQ ID NO: 19020 - DNA, 26 bp, Homo sapiens
ccattataattgataggtagtcagtc

SEQ ID NO: 19021 - DNA, 26 bp, Homo sapiens
cattataattgataggtagtcagtct

SEQ ID NO: 19022 - DNA, 26 bp, Homo sapiens
attataattgataggtagtcagtctt

SEQ ID NO: 19023 - DNA, 26 bp, Homo sapiens
ttataattgataggtagtcagtcttt

SEQ ID NO: 19024 - DNA, 26 bp, Homo sapiens
tataattgataggtagtcagtcttta

SEQ ID NO: 19025 - DNA, 26 bp, Homo sapiens
ataattgataggtagtcagtctttat

SEQ ID NO: 19026 - DNA, 26 bp, Homo sapiens
taattgataggtagtcagtctttatt

SEQ ID NO: 19027 - DNA, 26 bp, Homo sapiens
aattgataggtagtcagtctttattt

SEQ ID NO: 19028 - DNA, 26 bp, Homo sapiens
attgataggtagtcagtctttatttc

SEQ ID NO: 19029 - DNA, 26 bp, Homo sapiens
ttgataggtagtcagtctttatttca

SEQ ID NO: 19030 - DNA, 26 bp, Homo sapiens
tgataggtagtcagtctttatttcag

SEQ ID NO: 19031 - DNA, 26 bp, Homo sapiens
gataggtagtcagtctttatttcaga

SEQ ID NO: 19032 - DNA, 26 bp, Homo sapiens
ataggtagtcagtctttatttcagaa

SEQ ID NO: 19033 - DNA, 26 bp, Homo sapiens
taggtagtcagtctttatttcagaag

SEQ ID NO: 19034 - DNA, 26 bp, Homo sapiens
aggtagtcagtctttatttcagaaga

SEQ ID NO: 19035 - DNA, 26 bp, Homo sapiens
ggtagtcagtctttatttcagaagaa

SEQ ID NO: 19036 - DNA, 26 bp, Homo sapiens
gtagtcagtctttatttcagaagaag

SEQ ID NO: 19037 - DNA, 26 bp, Homo sapiens
tagtcagtctttatttcagaagaaga

SEQ ID NO: 19038 - DNA, 26 bp, Homo sapiens
agtcagtctttatttcagaagaagac

SEQ ID NO: 19039 - DNA, 26 bp, Homo sapiens
gtcagtctttatttcagaagaagacc

SEQ ID NO: 19040 - DNA, 26 bp, Homo sapiens
tcagtctttatttcagaagaagacct

SEQ ID NO: 19041 - DNA, 26 bp, Homo sapiens
cagtctttatttcagaagaagacctt

SEQ ID NO: 19042 - DNA, 26 bp, Homo sapiens
agtctttatttcagaagaagaccttt

SEQ ID NO: 19043 - DNA, 26 bp, Homo sapiens
gtctttatttcagaagaagacctttt

SEQ ID NO: 19044 - DNA, 26 bp, Homo sapiens
tctttatttcagaagaagaccttttc

SEQ ID NO: 19045 - DNA, 26 bp, Homo sapiens
ctttatttcagaagaagaccttttca

SEQ ID NO: 19046 - DNA, 26 bp, Homo sapiens
tttatttcagaagaagaccttttcat

SEQ ID NO: 19047 - DNA, 26 bp, Homo sapiens
ttatttcagaagaagaccttttcatt

SEQ ID NO: 19048 - DNA, 26 bp, Homo sapiens
tatttcagaagaagaccttttcattt

SEQ ID NO: 19049 - DNA, 26 bp, Homo sapiens
atttcagaagaagaccttttcatttt

SEQ ID NO: 19050 - DNA, 26 bp, Homo sapiens
tttcagaagaagaccttttcattttt

SEQ ID NO: 19051 - DNA, 26 bp, Homo sapiens
ttcagaagaagaccttttcatttttc

SEQ ID NO: 19052 - DNA, 26 bp, Homo sapiens
tcagaagaagaccttttcatttttcg

SEQ ID NO: 19053 - DNA, 26 bp, Homo sapiens
cagaagaagaccttttcatttttcgg

SEQ ID NO: 19054 - DNA, 26 bp, Homo sapiens
agaagaagaccttttcatttttcgga

SEQ ID NO: 19055 - DNA, 26 bp, Homo sapiens
gaagaagaccttttcatttttcggat

SEQ ID NO: 19056 - DNA, 26 bp, Homo sapiens
aagaagaccttttcatttttcggata

SEQ ID NO: 19057 - DNA, 26 bp, Homo sapiens
agaagaccttttcatttttcggataa

SEQ ID NO: 19058 - DNA, 26 bp, Homo sapiens
gaagaccttttcatttttcggataag

SEQ ID NO: 19059 - DNA, 26 bp, Homo sapiens
aagaccttttcatttttcggataagg

SEQ ID NO: 19060 - DNA, 26 bp, Homo sapiens
agaccttttcatttttcggataagga

SEQ ID NO: 19061 - DNA, 26 bp, Homo sapiens
gaccttttcatttttcggataaggag

SEQ ID NO: 19062 - DNA, 26 bp, Homo sapiens
accttttcatttttcggataaggagg

SEQ ID NO: 19063 - DNA, 26 bp, Homo sapiens
ccttttcatttttcggataaggaggg

SEQ ID NO: 19064 - DNA, 26 bp, Homo sapiens
cttttcatttttcggataaggagggt

SEQ ID NO: 19065 - DNA, 26 bp, Homo sapiens
ttttcatttttcggataaggagggtt

SEQ ID NO: 19066 - DNA, 26 bp, Homo sapiens
tttcatttttcggataaggagggtta

SEQ ID NO: 19067 - DNA, 26 bp, Homo sapiens
ttcatttttcggataaggagggttaa

SEQ ID NO: 19068 - DNA, 26 bp, Homo sapiens
tcatttttcggataaggagggttaat

SEQ ID NO: 19069 - DNA, 26 bp, Homo sapiens
catttttcggataaggagggttaata

SEQ ID NO: 19070 - DNA, 26 bp, Homo sapiens
atttttcggataaggagggttaatag

SEQ ID NO: 19071 - DNA, 26 bp, Homo sapiens
tttttcggataaggagggttaatagg

SEQ ID NO: 19072 - DNA, 26 bp, Homo sapiens
ttttcggataaggagggttaatagga

SEQ ID NO: 19073 - DNA, 26 bp, Homo sapiens
tttcggataaggagggttaataggag

SEQ ID NO: 19074 - DNA, 26 bp, Homo sapiens
ttcggataaggagggttaataggagc

SEQ ID NO: 19075 - DNA, 26 bp, Homo sapiens
tcggataaggagggttaataggagcc

SEQ ID NO: 19076 - DNA, 26 bp, Homo sapiens
cggataaggagggttaataggagcca

SEQ ID NO: 19077 - DNA, 26 bp, Homo sapiens
ggataaggagggttaataggagccag

SEQ ID NO: 19078 - DNA, 26 bp, Homo sapiens
gataaggagggttaataggagccaga

SEQ ID NO: 19079 - DNA, 26 bp, Homo sapiens
ataaggagggttaataggagccagaa

SEQ ID NO: 19080 - DNA, 26 bp, Homo sapiens
taaggagggttaataggagccagaag

SEQ ID NO: 19081 - DNA, 26 bp, Homo sapiens
aaggagggttaataggagccagaaga

SEQ ID NO: 19082 - DNA, 26 bp, Homo sapiens
aggagggttaataggagccagaagag

SEQ ID NO: 19083 - DNA, 26 bp, Homo sapiens
ggagggttaataggagccagaagaga

SEQ ID NO: 19084 - DNA, 26 bp, Homo sapiens
gagggttaataggagccagaagagag

SEQ ID NO: 19085 - DNA, 26 bp, Homo sapiens
agggttaataggagccagaagagagt

SEQ ID NO: 19086 - DNA, 26 bp, Homo sapiens
gggttaataggagccagaagagagtc

SEQ ID NO: 19087 - DNA, 26 bp, Homo sapiens
ggttaataggagccagaagagagtcg

SEQ ID NO: 19088 - DNA, 26 bp, Homo sapiens
gttaataggagccagaagagagtcgc

SEQ ID NO: 19089 - DNA, 26 bp, Homo sapiens
ttaataggagccagaagagagtcgca

SEQ ID NO: 19090 - DNA, 26 bp, Homo sapiens
taataggagccagaagagagtcgcag

SEQ ID NO: 19091 - DNA, 26 bp, Homo sapiens
aataggagccagaagagagtcgcagc

SEQ ID NO: 19092 - DNA, 26 bp, Homo sapiens
ataggagccagaagagagtcgcagcc

SEQ ID NO: 19093 - DNA, 26 bp, Homo sapiens
taggagccagaagagagtcgcagcca

SEQ ID NO: 19094 - DNA, 26 bp, Homo sapiens
aggagccagaagagagtcgcagccac

SEQ ID NO: 19095 - DNA, 26 bp, Homo sapiens
ggagccagaagagagtcgcagccaca

SEQ ID NO: 19096 - DNA, 26 bp, Homo sapiens
gagccagaagagagtcgcagccacac

SEQ ID NO: 19097 - DNA, 26 bp, Homo sapiens
agccagaagagagtcgcagccacaca

SEQ ID NO: 19098 - DNA, 26 bp, Homo sapiens
gccagaagagagtcgcagccacacag

SEQ ID NO: 19099 - DNA, 26 bp, Homo sapiens
ccagaagagagtcgcagccacacagg

SEQ ID NO: 19100 - DNA, 26 bp, Homo sapiens
cagaagagagtcgcagccacacaggt

SEQ ID NO: 19101 - DNA, 26 bp, Homo sapiens
agaagagagtcgcagccacacaggtg

SEQ ID NO: 19102 - DNA, 26 bp, Homo sapiens
gaagagagtcgcagccacacaggtgc

SEQ ID NO: 19103 - DNA, 26 bp, Homo sapiens
aagagagtcgcagccacacaggtgca

SEQ ID NO: 19104 - DNA, 26 bp, Homo sapiens
agagagtcgcagccacacaggtgcat

SEQ ID NO: 19105 - DNA, 26 bp, Homo sapiens
gagagtcgcagccacacaggtgcatg

SEQ ID NO: 19106 - DNA, 26 bp, Homo sapiens
agagtcgcagccacacaggtgcatgt

SEQ ID NO: 19107 - DNA, 26 bp, Homo sapiens
gagtcgcagccacacaggtgcatgtt

SEQ ID NO: 19108 - DNA, 26 bp, Homo sapiens
agtcgcagccacacaggtgcatgtta

SEQ ID NO: 19109 - DNA, 26 bp, Homo sapiens
gtcgcagccacacaggtgcatgttag

SEQ ID NO: 19110 - DNA, 26 bp, Homo sapiens
tcgcagccacacaggtgcatgttaga

SEQ ID NO: 19111 - DNA, 26 bp, Homo sapiens
cgcagccacacaggtgcatgttagag

SEQ ID NO: 19112 - DNA, 26 bp, Homo sapiens
gcagccacacaggtgcatgttagagt

SEQ ID NO: 19113 - DNA, 26 bp, Homo sapiens
cagccacacaggtgcatgttagagtg

SEQ ID NO: 19114 - DNA, 26 bp, Homo sapiens
agccacacaggtgcatgttagagtga

SEQ ID NO: 19115 - DNA, 26 bp, Homo sapiens
gccacacaggtgcatgttagagtgat

SEQ ID NO: 19116 - DNA, 26 bp, Homo sapiens
ccacacaggtgcatgttagagtgatc

SEQ ID NO: 19117 - DNA, 26 bp, Homo sapiens
cacacaggtgcatgttagagtgatca

SEQ ID NO: 19118 - DNA, 26 bp, Homo sapiens
acacaggtgcatgttagagtgatcag

SEQ ID NO: 19119 - DNA, 26 bp, Homo sapiens
cacaggtgcatgttagagtgatcagc

SEQ ID NO: 19120 - DNA, 26 bp, Homo sapiens
acaggtgcatgttagagtgatcagct

SEQ ID NO: 19121 - DNA, 26 bp, Homo sapiens
caggtgcatgttagagtgatcagctc

SEQ ID NO: 19122 - DNA, 26 bp, Homo sapiens
aggtgcatgttagagtgatcagctcc

SEQ ID NO: 19123 - DNA, 26 bp, Homo sapiens
ggtgcatgttagagtgatcagctcca

SEQ ID NO: 19124 - DNA, 26 bp, Homo sapiens
gtgcatgttagagtgatcagctccag

SEQ ID NO: 19125 - DNA, 26 bp, Homo sapiens
tgcatgttagagtgatcagctccaga

SEQ ID NO: 19126 - DNA, 26 bp, Homo sapiens
gcatgttagagtgatcagctccagat

SEQ ID NO: 19127 - DNA, 26 bp, Homo sapiens
catgttagagtgatcagctccagatt

SEQ ID NO: 19128 - DNA, 26 bp, Homo sapiens
atgttagagtgatcagctccagatta

SEQ ID NO: 19129 - DNA, 26 bp, Homo sapiens
tgttagagtgatcagctccagattag

SEQ ID NO: 19130 - DNA, 26 bp, Homo sapiens
gttagagtgatcagctccagattaga

SEQ ID NO: 19131 - DNA, 26 bp, Homo sapiens
ttagagtgatcagctccagattagac

SEQ ID NO: 19132 - DNA, 26 bp, Homo sapiens
tagagtgatcagctccagattagact

SEQ ID NO: 19133 - DNA, 26 bp, Homo sapiens
agagtgatcagctccagattagactt

SEQ ID NO: 19134 - DNA, 26 bp, Homo sapiens
gagtgatcagctccagattagacttg

SEQ ID NO: 19135 - DNA, 26 bp, Homo sapiens
agtgatcagctccagattagacttgt

SEQ ID NO: 19136 - DNA, 26 bp, Homo sapiens
gtgatcagctccagattagacttgtc

SEQ ID NO: 19137 - DNA, 26 bp, Homo sapiens
tgatcagctccagattagacttgtcc

SEQ ID NO: 19138 - DNA, 26 bp, Homo sapiens
gatcagctccagattagacttgtccg

SEQ ID NO: 19139 - DNA, 26 bp, Homo sapiens
atcagctccagattagacttgtccga

SEQ ID NO: 19140 - DNA, 26 bp, Homo sapiens
tcagctccagattagacttgtccgag

SEQ ID NO: 19141 - DNA, 26 bp, Homo sapiens
cagctccagattagacttgtccgagg

SEQ ID NO: 19142 - DNA, 26 bp, Homo sapiens
agctccagattagacttgtccgaggt

SEQ ID NO: 19143 - DNA, 26 bp, Homo sapiens
gctccagattagacttgtccgaggtt

SEQ ID NO: 19144 - DNA, 26 bp, Homo sapiens
ctccagattagacttgtccgaggttc

SEQ ID NO: 19145 - DNA, 26 bp, Homo sapiens
tccagattagacttgtccgaggttcc

SEQ ID NO: 19146 - DNA, 26 bp, Homo sapiens
ccagattagacttgtccgaggttcct

SEQ ID NO: 19147 - DNA, 26 bp, Homo sapiens
cagattagacttgtccgaggttcctt

SEQ ID NO: 19148 - DNA, 26 bp, Homo sapiens
agattagacttgtccgaggttccttg

SEQ ID NO: 19149 - DNA, 26 bp, Homo sapiens
gattagacttgtccgaggttccttga

SEQ ID NO: 19150 - DNA, 26 bp, Homo sapiens
attagacttgtccgaggttccttgaa

SEQ ID NO: 19151 - DNA, 26 bp, Homo sapiens
ttagacttgtccgaggttccttgaac

SEQ ID NO: 19152 - DNA, 26 bp, Homo sapiens
tagacttgtccgaggttccttgaaca

SEQ ID NO: 19153 - DNA, 26 bp, Homo sapiens
agacttgtccgaggttccttgaacag

SEQ ID NO: 19154 - DNA, 26 bp, Homo sapiens
gacttgtccgaggttccttgaacagt

SEQ ID NO: 19155 - DNA, 26 bp, Homo sapiens
acttgtccgaggttccttgaacagtg

SEQ ID NO: 19156 - DNA, 26 bp, Homo sapiens
cttgtccgaggttccttgaacagtga

SEQ ID NO: 19157 - DNA, 26 bp, Homo sapiens
ttgtccgaggttccttgaacagtgag

SEQ ID NO: 19158 - DNA, 26 bp, Homo sapiens
tgtccgaggttccttgaacagtgagg

SEQ ID NO: 19159 - DNA, 26 bp, Homo sapiens
gtccgaggttccttgaacagtgaggt

SEQ ID NO: 19160 - DNA, 26 bp, Homo sapiens
tccgaggttccttgaacagtgaggta

SEQ ID NO: 19161 - DNA, 26 bp, Homo sapiens
ccgaggttccttgaacagtgaggtat

SEQ ID NO: 19162 - DNA, 26 bp, Homo sapiens
cgaggttccttgaacagtgaggtatg

SEQ ID NO: 19163 - DNA, 26 bp, Homo sapiens
gaggttccttgaacagtgaggtatgc

SEQ ID NO: 19164 - DNA, 26 bp, Homo sapiens
aggttccttgaacagtgaggtatgct

SEQ ID NO: 19165 - DNA, 26 bp, Homo sapiens
ggttccttgaacagtgaggtatgctg

SEQ ID NO: 19166 - DNA, 26 bp, Homo sapiens
gttccttgaacagtgaggtatgctga

SEQ ID NO: 19167 - DNA, 26 bp, Homo sapiens
ttccttgaacagtgaggtatgctgaa

SEQ ID NO: 19168 - DNA, 26 bp, Homo sapiens
tccttgaacagtgaggtatgctgaac

SEQ ID NO: 19169 - DNA, 26 bp, Homo sapiens
ccttgaacagtgaggtatgctgaact

SEQ ID NO: 19170 - DNA, 26 bp, Homo sapiens
cttgaacagtgaggtatgctgaactt

SEQ ID NO: 19171 - DNA, 26 bp, Homo sapiens
ttgaacagtgaggtatgctgaacttt

SEQ ID NO: 19172 - DNA, 26 bp, Homo sapiens
tgaacagtgaggtatgctgaactttc

SEQ ID NO: 19173 - DNA, 26 bp, Homo sapiens
gaacagtgaggtatgctgaactttcc

SEQ ID NO: 19174 - DNA, 26 bp, Homo sapiens
aacagtgaggtatgctgaactttcca

SEQ ID NO: 19175 - DNA, 26 bp, Homo sapiens
acagtgaggtatgctgaactttccac

SEQ ID NO: 19176 - DNA, 26 bp, Homo sapiens
cagtgaggtatgctgaactttccaca

SEQ ID NO: 19177 - DNA, 26 bp, Homo sapiens
agtgaggtatgctgaactttccacag

SEQ ID NO: 19178 - DNA, 26 bp, Homo sapiens
gtgaggtatgctgaactttccacaga

SEQ ID NO: 19179 - DNA, 26 bp, Homo sapiens
tgaggtatgctgaactttccacagag

SEQ ID NO: 19180 - DNA, 26 bp, Homo sapiens
gaggtatgctgaactttccacagagc

SEQ ID NO: 19181 - DNA, 26 bp, Homo sapiens
aggtatgctgaactttccacagagcc

SEQ ID NO: 19182 - DNA, 26 bp, Homo sapiens
ggtatgctgaactttccacagagccc

SEQ ID NO: 19183 - DNA, 26 bp, Homo sapiens
gtatgctgaactttccacagagccct

SEQ ID NO: 19184 - DNA, 26 bp, Homo sapiens
tatgctgaactttccacagagccctt

SEQ ID NO: 19185 - DNA, 26 bp, Homo sapiens
atgctgaactttccacagagcccttc

SEQ ID NO: 19186 - DNA, 26 bp, Homo sapiens
tgctgaactttccacagagcccttct

SEQ ID NO: 19187 - DNA, 26 bp, Homo sapiens
gctgaactttccacagagcccttctg

SEQ ID NO: 19188 - DNA, 26 bp, Homo sapiens
ctgaactttccacagagcccttctgg

SEQ ID NO: 19189 - DNA, 26 bp, Homo sapiens
tgaactttccacagagcccttctggt

SEQ ID NO: 19190 - DNA, 26 bp, Homo sapiens
gaactttccacagagcccttctggtt

SEQ ID NO: 19191 - DNA, 26 bp, Homo sapiens
aactttccacagagcccttctggttg

SEQ ID NO: 19192 - DNA, 26 bp, Homo sapiens
actttccacagagcccttctggttgg

SEQ ID NO: 19193 - DNA, 26 bp, Homo sapiens
ctttccacagagcccttctggttggt

SEQ ID NO: 19194 - DNA, 26 bp, Homo sapiens
tttccacagagcccttctggttggtg

SEQ ID NO: 19195 - DNA, 26 bp, Homo sapiens
ttccacagagcccttctggttggtgg

SEQ ID NO: 19196 - DNA, 26 bp, Homo sapiens
tccacagagcccttctggttggtggc

SEQ ID NO: 19197 - DNA, 26 bp, Homo sapiens
ccacagagcccttctggttggtggct

SEQ ID NO: 19198 - DNA, 26 bp, Homo sapiens
cacagagcccttctggttggtggctt

SEQ ID NO: 19199 - DNA, 26 bp, Homo sapiens
acagagcccttctggttggtggcttt

SEQ ID NO: 19200 - DNA, 26 bp, Homo sapiens
cagagcccttctggttggtggctttg

SEQ ID NO: 19201 - DNA, 26 bp, Homo sapiens
agagcccttctggttggtggctttgc

SEQ ID NO: 19202 - DNA, 26 bp, Homo sapiens
gagcccttctggttggtggctttgca

SEQ ID NO: 19203 - DNA, 26 bp, Homo sapiens
agcccttctggttggtggctttgcag

SEQ ID NO: 19204 - DNA, 26 bp, Homo sapiens
gcccttctggttggtggctttgcagt

SEQ ID NO: 19205 - DNA, 26 bp, Homo sapiens
cccttctggttggtggctttgcagtg

SEQ ID NO: 19206 - DNA, 26 bp, Homo sapiens
ccttctggttggtggctttgcagtga

SEQ ID NO: 19207 - DNA, 26 bp, Homo sapiens
cttctggttggtggctttgcagtgat

SEQ ID NO: 19208 - DNA, 26 bp, Homo sapiens
ttctggttggtggctttgcagtgata

SEQ ID NO: 19209 - DNA, 26 bp, Homo sapiens
tctggttggtggctttgcagtgatag

SEQ ID NO: 19210 - DNA, 26 bp, Homo sapiens
ctggttggtggctttgcagtgataga

SEQ ID NO: 19211 - DNA, 26 bp, Homo sapiens
tggttggtggctttgcagtgatagac

SEQ ID NO: 19212 - DNA, 26 bp, Homo sapiens
ggttggtggctttgcagtgatagaca

SEQ ID NO: 19213 - DNA, 26 bp, Homo sapiens
gttggtggctttgcagtgatagacac

SEQ ID NO: 19214 - DNA, 26 bp, Homo sapiens
ttggtggctttgcagtgatagacacc

SEQ ID NO: 19215 - DNA, 26 bp, Homo sapiens
tggtggctttgcagtgatagacacct

SEQ ID NO: 19216 - DNA, 26 bp, Homo sapiens
ggtggctttgcagtgatagacacctt

SEQ ID NO: 19217 - DNA, 26 bp, Homo sapiens
gtggctttgcagtgatagacaccttc

SEQ ID NO: 19218 - DNA, 26 bp, Homo sapiens
tggctttgcagtgatagacaccttca

SEQ ID NO: 19219 - DNA, 26 bp, Homo sapiens
ggctttgcagtgatagacaccttcat

SEQ ID NO: 19220 - DNA, 26 bp, Homo sapiens
gctttgcagtgatagacaccttcatc

SEQ ID NO: 19221 - DNA, 26 bp, Homo sapiens
ctttgcagtgatagacaccttcatcc

SEQ ID NO: 19222 - DNA, 26 bp, Homo sapiens
tttgcagtgatagacaccttcatcct

SEQ ID NO: 19223 - DNA, 26 bp, Homo sapiens
ttgcagtgatagacaccttcatcctc

SEQ ID NO: 19224 - DNA, 26 bp, Homo sapiens
tgcagtgatagacaccttcatcctct

SEQ ID NO: 19225 - DNA, 26 bp, Homo sapiens
gcagtgatagacaccttcatcctctt

SEQ ID NO: 19226 - DNA, 26 bp, Homo sapiens
cagtgatagacaccttcatcctcttc

SEQ ID NO: 19227 - DNA, 26 bp, Homo sapiens
agtgatagacaccttcatcctcttct

SEQ ID NO: 19228 - DNA, 26 bp, Homo sapiens
gtgatagacaccttcatcctcttctg

SEQ ID NO: 19229 - DNA, 26 bp, Homo sapiens
tgatagacaccttcatcctcttctgt

SEQ ID NO: 19230 - DNA, 26 bp, Homo sapiens
gatagacaccttcatcctcttctgtg

SEQ ID NO: 19231 - DNA, 26 bp, Homo sapiens
atagacaccttcatcctcttctgtga

SEQ ID NO: 19232 - DNA, 26 bp, Homo sapiens
tagacaccttcatcctcttctgtgac

SEQ ID NO: 19233 - DNA, 26 bp, Homo sapiens
agacaccttcatcctcttctgtgact

SEQ ID NO: 19234 - DNA, 26 bp, Homo sapiens
gacaccttcatcctcttctgtgactc

SEQ ID NO: 19235 - DNA, 26 bp, Homo sapiens
acaccttcatcctcttctgtgactct

SEQ ID NO: 19236 - DNA, 26 bp, Homo sapiens
caccttcatcctcttctgtgactctt

SEQ ID NO: 19237 - DNA, 26 bp, Homo sapiens
accttcatcctcttctgtgactcttt

SEQ ID NO: 19238 - DNA, 26 bp, Homo sapiens
ccttcatcctcttctgtgactctttc

SEQ ID NO: 19239 - DNA, 26 bp, Homo sapiens
cttcatcctcttctgtgactctttca

SEQ ID NO: 19240 - DNA, 26 bp, Homo sapiens
ttcatcctcttctgtgactctttcaa

SEQ ID NO: 19241 - DNA, 26 bp, Homo sapiens
tcatcctcttctgtgactctttcaat

SEQ ID NO: 19242 - DNA, 26 bp, Homo sapiens
catcctcttctgtgactctttcaata

SEQ ID NO: 19243 - DNA, 26 bp, Homo sapiens
atcctcttctgtgactctttcaataa

SEQ ID NO: 19244 - DNA, 26 bp, Homo sapiens
tcctcttctgtgactctttcaataaa

SEQ ID NO: 19245 - DNA, 26 bp, Homo sapiens
cctcttctgtgactctttcaataaac

SEQ ID NO: 19246 - DNA, 26 bp, Homo sapiens
ctcttctgtgactctttcaataaaca

SEQ ID NO: 19247 - DNA, 26 bp, Homo sapiens
tcttctgtgactctttcaataaacag

SEQ ID NO: 19248 - DNA, 26 bp, Homo sapiens
cttctgtgactctttcaataaacagc

SEQ ID NO: 19249 - DNA, 26 bp, Homo sapiens
ttctgtgactctttcaataaacagcg

SEQ ID NO: 19250 - DNA, 26 bp, Homo sapiens
tctgtgactctttcaataaacagcgt

SEQ ID NO: 19251 - DNA, 26 bp, Homo sapiens
ctgtgactctttcaataaacagcgtg

SEQ ID NO: 19252 - DNA, 26 bp, Homo sapiens
tgtgactctttcaataaacagcgtgc

SEQ ID NO: 19253 - DNA, 26 bp, Homo sapiens
gtgactctttcaataaacagcgtgct

SEQ ID NO: 19254 - DNA, 26 bp, Homo sapiens
tgactctttcaataaacagcgtgctg

SEQ ID NO: 19255 - DNA, 26 bp, Homo sapiens
gactctttcaataaacagcgtgctgc

SEQ ID NO: 19256 - DNA, 26 bp, Homo sapiens
actctttcaataaacagcgtgctgct

SEQ ID NO: 19257 - DNA, 26 bp, Homo sapiens
ctctttcaataaacagcgtgctgctt

SEQ ID NO: 19258 - DNA, 26 bp, Homo sapiens
tctttcaataaacagcgtgctgcttc

SEQ ID NO: 19259 - DNA, 26 bp, Homo sapiens
ctttcaataaacagcgtgctgcttcc

SEQ ID NO: 19260 - DNA, 26 bp, Homo sapiens
tttcaataaacagcgtgctgcttcct

SEQ ID NO: 19261 - DNA, 26 bp, Homo sapiens
ttcaataaacagcgtgctgcttcctg

SEQ ID NO: 19262 - DNA, 26 bp, Homo sapiens
tcaataaacagcgtgctgcttcctgg

SEQ ID NO: 19263 - DNA, 26 bp, Homo sapiens
caataaacagcgtgctgcttcctggt

SEQ ID NO: 19264 - DNA, 26 bp, Homo sapiens
aataaacagcgtgctgcttcctggtc

SEQ ID NO: 19265 - DNA, 26 bp, Homo sapiens
ataaacagcgtgctgcttcctggtcc

SEQ ID NO: 19266 - DNA, 26 bp, Homo sapiens
taaacagcgtgctgcttcctggtcct

SEQ ID NO: 19267 - DNA, 26 bp, Homo sapiens
aaacagcgtgctgcttcctggtccta

SEQ ID NO: 19268 - DNA, 26 bp, Homo sapiens
aacagcgtgctgcttcctggtcctaa

SEQ ID NO: 19269 - DNA, 26 bp, Homo sapiens
acagcgtgctgcttcctggtcctaaa

SEQ ID NO: 19270 - DNA, 26 bp, Homo sapiens
cagcgtgctgcttcctggtcctaaaa

SEQ ID NO: 19271 - DNA, 26 bp, Homo sapiens
agcgtgctgcttcctggtcctaaaat

SEQ ID NO: 19272 - DNA, 26 bp, Homo sapiens
gcgtgctgcttcctggtcctaaaata

SEQ ID NO: 19273 - DNA, 26 bp, Homo sapiens
cgtgctgcttcctggtcctaaaataa

SEQ ID NO: 19274 - DNA, 26 bp, Homo sapiens
gtgctgcttcctggtcctaaaataat

SEQ ID NO: 19275 - DNA, 26 bp, Homo sapiens
tgctgcttcctggtcctaaaataatt

SEQ ID NO: 19276 - DNA, 26 bp, Homo sapiens
gctgcttcctggtcctaaaataattc

SEQ ID NO: 19277 - DNA, 26 bp, Homo sapiens
ctgcttcctggtcctaaaataattcc

SEQ ID NO: 19278 - DNA, 26 bp, Homo sapiens
tgcttcctggtcctaaaataattcca

SEQ ID NO: 19279 - DNA, 26 bp, Homo sapiens
gcttcctggtcctaaaataattccag

SEQ ID NO: 19280 - DNA, 26 bp, Homo sapiens
cttcctggtcctaaaataattccagg

SEQ ID NO: 19281 - DNA, 26 bp, Homo sapiens
ttcctggtcctaaaataattccaggc

SEQ ID NO: 19282 - DNA, 26 bp, Homo sapiens
tcctggtcctaaaataattccaggct

SEQ ID NO: 19283 - DNA, 26 bp, Homo sapiens
cctggtcctaaaataattccaggctc

SEQ ID NO: 19284 - DNA, 26 bp, Homo sapiens
ctggtcctaaaataattccaggctct

SEQ ID NO: 19285 - DNA, 26 bp, Homo sapiens
tggtcctaaaataattccaggctctt

SEQ ID NO: 19286 - DNA, 26 bp, Homo sapiens
ggtcctaaaataattccaggctcttg

SEQ ID NO: 19287 - DNA, 26 bp, Homo sapiens
gtcctaaaataattccaggctcttgt

SEQ ID NO: 19288 - DNA, 26 bp, Homo sapiens
tcctaaaataattccaggctcttgtt

SEQ ID NO: 19289 - DNA, 26 bp, Homo sapiens
cctaaaataattccaggctcttgttg

SEQ ID NO: 19290 - DNA, 26 bp, Homo sapiens
ctaaaataattccaggctcttgttgt

SEQ ID NO: 19291 - DNA, 26 bp, Homo sapiens
taaaataattccaggctcttgttgta

SEQ ID NO: 19292 - DNA, 26 bp, Homo sapiens
aaaataattccaggctcttgttgtat

SEQ ID NO: 19293 - DNA, 26 bp, Homo sapiens
aaataattccaggctcttgttgtatt

SEQ ID NO: 19294 - DNA, 26 bp, Homo sapiens
aataattccaggctcttgttgtattt

SEQ ID NO: 19295 - DNA, 26 bp, Homo sapiens
ataattccaggctcttgttgtatttt

SEQ ID NO: 19296 - DNA, 26 bp, Homo sapiens
taattccaggctcttgttgtattttg

SEQ ID NO: 19297 - DNA, 26 bp, Homo sapiens
aattccaggctcttgttgtattttgt

SEQ ID NO: 19298 - DNA, 26 bp, Homo sapiens
attccaggctcttgttgtattttgtg

SEQ ID NO: 19299 - DNA, 26 bp, Homo sapiens
ttccaggctcttgttgtattttgtgg

SEQ ID NO: 19300 - DNA, 26 bp, Homo sapiens
tccaggctcttgttgtattttgtggt

SEQ ID NO: 19301 - DNA, 26 bp, Homo sapiens
ccaggctcttgttgtattttgtggtt

SEQ ID NO: 19302 - DNA, 26 bp, Homo sapiens
caggctcttgttgtattttgtggttg

SEQ ID NO: 19303 - DNA, 26 bp, Homo sapiens
aggctcttgttgtattttgtggttgt

SEQ ID NO: 19304 - DNA, 26 bp, Homo sapiens
ggctcttgttgtattttgtggttgtt

SEQ ID NO: 19305 - DNA, 26 bp, Homo sapiens
gctcttgttgtattttgtggttgttt

SEQ ID NO: 19306 - DNA, 26 bp, Homo sapiens
ctcttgttgtattttgtggttgtttt

SEQ ID NO: 19307 - DNA, 26 bp, Homo sapiens
tcttgttgtattttgtggttgttttt

SEQ ID NO: 19308 - DNA, 26 bp, Homo sapiens
cttgttgtattttgtggttgttttta

SEQ ID NO: 19309 - DNA, 26 bp, Homo sapiens
ttgttgtattttgtggttgtttttaa

SEQ ID NO: 19310 - DNA, 26 bp, Homo sapiens
tgttgtattttgtggttgtttttaaa

SEQ ID NO: 19311 - DNA, 26 bp, Homo sapiens
gttgtattttgtggttgtttttaaac

SEQ ID NO: 19312 - DNA, 26 bp, Homo sapiens
ttgtattttgtggttgtttttaaacc

SEQ ID NO: 19313 - DNA, 26 bp, Homo sapiens
tgtattttgtggttgtttttaaacca

SEQ ID NO: 19314 - DNA, 26 bp, Homo sapiens
gtattttgtggttgtttttaaaccaa

SEQ ID NO: 19315 - DNA, 26 bp, Homo sapiens
tattttgtggttgtttttaaaccaag

SEQ ID NO: 19316 - DNA, 26 bp, Homo sapiens
attttgtggttgtttttaaaccaagt

SEQ ID NO: 19317 - DNA, 26 bp, Homo sapiens
ttttgtggttgtttttaaaccaagtg

SEQ ID NO: 19318 - DNA, 26 bp, Homo sapiens
tttgtggttgtttttaaaccaagtga

SEQ ID NO: 19319 - DNA, 26 bp, Homo sapiens
ttgtggttgtttttaaaccaagtgat

SEQ ID NO: 19320 - DNA, 26 bp, Homo sapiens
tgtggttgtttttaaaccaagtgatc

SEQ ID NO: 19321 - DNA, 26 bp, Homo sapiens
gtggttgtttttaaaccaagtgatct

SEQ ID NO: 19322 - DNA, 26 bp, Homo sapiens
tggttgtttttaaaccaagtgatctg

SEQ ID NO: 19323 - DNA, 26 bp, Homo sapiens
ggttgtttttaaaccaagtgatctga

SEQ ID NO: 19324 - DNA, 26 bp, Homo sapiens
gttgtttttaaaccaagtgatctgag

SEQ ID NO: 19325 - DNA, 26 bp, Homo sapiens
ttgtttttaaaccaagtgatctgagg

SEQ ID NO: 19326 - DNA, 26 bp, Homo sapiens
tgtttttaaaccaagtgatctgaggc

SEQ ID NO: 19327 - DNA, 26 bp, Homo sapiens
gtttttaaaccaagtgatctgaggct

SEQ ID NO: 19328 - DNA, 26 bp, Homo sapiens
tttttaaaccaagtgatctgaggctc

SEQ ID NO: 19329 - DNA, 26 bp, Homo sapiens
ttttaaaccaagtgatctgaggctcg

SEQ ID NO: 19330 - DNA, 26 bp, Homo sapiens
tttaaaccaagtgatctgaggctcgg

SEQ ID NO: 19331 - DNA, 26 bp, Homo sapiens
ttaaaccaagtgatctgaggctcggg

SEQ ID NO: 19332 - DNA, 26 bp, Homo sapiens
taaaccaagtgatctgaggctcgggg

SEQ ID NO: 19333 - DNA, 26 bp, Homo sapiens
aaaccaagtgatctgaggctcgggga

SEQ ID NO: 19334 - DNA, 26 bp, Homo sapiens
aaccaagtgatctgaggctcggggac

SEQ ID NO: 19335 - DNA, 26 bp, Homo sapiens
accaagtgatctgaggctcggggaca

SEQ ID NO: 19336 - DNA, 26 bp, Homo sapiens
ccaagtgatctgaggctcggggacac

SEQ ID NO: 19337 - DNA, 26 bp, Homo sapiens
caagtgatctgaggctcggggacacc

SEQ ID NO: 19338 - DNA, 26 bp, Homo sapiens
aagtgatctgaggctcggggacacca

SEQ ID NO: 19339 - DNA, 26 bp, Homo sapiens
agtgatctgaggctcggggacaccat

SEQ ID NO: 19340 - DNA, 26 bp, Homo sapiens
gtgatctgaggctcggggacaccatt

SEQ ID NO: 19341 - DNA, 26 bp, Homo sapiens
tgatctgaggctcggggacaccatta

SEQ ID NO: 19342 - DNA, 26 bp, Homo sapiens
gatctgaggctcggggacaccattag

SEQ ID NO: 19343 - DNA, 26 bp, Homo sapiens
atctgaggctcggggacaccattagc

SEQ ID NO: 19344 - DNA, 26 bp, Homo sapiens
tctgaggctcggggacaccattagca

SEQ ID NO: 19345 - DNA, 26 bp, Homo sapiens
ctgaggctcggggacaccattagcat

SEQ ID NO: 19346 - DNA, 26 bp, Homo sapiens
tgaggctcggggacaccattagcatg

SEQ ID NO: 19347 - DNA, 26 bp, Homo sapiens
gaggctcggggacaccattagcatga

SEQ ID NO: 19348 - DNA, 26 bp, Homo sapiens
aggctcggggacaccattagcatgac

SEQ ID NO: 19349 - DNA, 26 bp, Homo sapiens
ggctcggggacaccattagcatgaca

SEQ ID NO: 19350 - DNA, 26 bp, Homo sapiens
gctcggggacaccattagcatgacag

SEQ ID NO: 19351 - DNA, 26 bp, Homo sapiens
ctcggggacaccattagcatgacagt

SEQ ID NO: 19352 - DNA, 26 bp, Homo sapiens
tcggggacaccattagcatgacagtc

SEQ ID NO: 19353 - DNA, 26 bp, Homo sapiens
cggggacaccattagcatgacagtct

SEQ ID NO: 19354 - DNA, 26 bp, Homo sapiens
ggggacaccattagcatgacagtcta

SEQ ID NO: 19355 - DNA, 26 bp, Homo sapiens
gggacaccattagcatgacagtctaa

SEQ ID NO: 19356 - DNA, 26 bp, Homo sapiens
ggacaccattagcatgacagtctaaa

SEQ ID NO: 19357 - DNA, 26 bp, Homo sapiens
gacaccattagcatgacagtctaaag

SEQ ID NO: 19358 - DNA, 26 bp, Homo sapiens
acaccattagcatgacagtctaaagt

SEQ ID NO: 19359 - DNA, 26 bp, Homo sapiens
caccattagcatgacagtctaaagtg

SEQ ID NO: 19360 - DNA, 26 bp, Homo sapiens
accattagcatgacagtctaaagtgg

SEQ ID NO: 19361 - DNA, 26 bp, Homo sapiens
ccattagcatgacagtctaaagtggt

SEQ ID NO: 19362 - DNA, 26 bp, Homo sapiens
cattagcatgacagtctaaagtggtg

SEQ ID NO: 19363 - DNA, 26 bp, Homo sapiens
attagcatgacagtctaaagtggtgg

SEQ ID NO: 19364 - DNA, 26 bp, Homo sapiens
ttagcatgacagtctaaagtggtgga

SEQ ID NO: 19365 - DNA, 26 bp, Homo sapiens
tagcatgacagtctaaagtggtggaa

SEQ ID NO: 19366 - DNA, 26 bp, Homo sapiens
agcatgacagtctaaagtggtggaac

SEQ ID NO: 19367 - DNA, 26 bp, Homo sapiens
gcatgacagtctaaagtggtggaact

SEQ ID NO: 19368 - DNA, 26 bp, Homo sapiens
catgacagtctaaagtggtggaactg

SEQ ID NO: 19369 - DNA, 26 bp, Homo sapiens
atgacagtctaaagtggtggaactgc

SEQ ID NO: 19370 - DNA, 26 bp, Homo sapiens
tgacagtctaaagtggtggaactgct

SEQ ID NO: 19371 - DNA, 26 bp, Homo sapiens
gacagtctaaagtggtggaactgctg

SEQ ID NO: 19372 - DNA, 26 bp, Homo sapiens
acagtctaaagtggtggaactgctga

SEQ ID NO: 19373 - DNA, 26 bp, Homo sapiens
cagtctaaagtggtggaactgctgat

SEQ ID NO: 19374 - DNA, 26 bp, Homo sapiens
agtctaaagtggtggaactgctgatg

SEQ ID NO: 19375 - DNA, 26 bp, Homo sapiens
gtctaaagtggtggaactgctgatgg

SEQ ID NO: 19376 - DNA, 26 bp, Homo sapiens
tctaaagtggtggaactgctgatggc

SEQ ID NO: 19377 - DNA, 26 bp, Homo sapiens
ctaaagtggtggaactgctgatggcc

SEQ ID NO: 19378 - DNA, 26 bp, Homo sapiens
taaagtggtggaactgctgatggcca

SEQ ID NO: 19379 - DNA, 26 bp, Homo sapiens
aaagtggtggaactgctgatggccac

SEQ ID NO: 19380 - DNA, 26 bp, Homo sapiens
aagtggtggaactgctgatggccact

SEQ ID NO: 19381 - DNA, 26 bp, Homo sapiens
agtggtggaactgctgatggccactg

SEQ ID NO: 19382 - DNA, 26 bp, Homo sapiens
gtggtggaactgctgatggccactgt

SEQ ID NO: 19383 - DNA, 26 bp, Homo sapiens
tggtggaactgctgatggccactgtg

SEQ ID NO: 19384 - DNA, 26 bp, Homo sapiens
ggtggaactgctgatggccactgtgt

SEQ ID NO: 19385 - DNA, 26 bp, Homo sapiens
gtggaactgctgatggccactgtgtg

SEQ ID NO: 19386 - DNA, 26 bp, Homo sapiens
tggaactgctgatggccactgtgtga

SEQ ID NO: 19387 - DNA, 26 bp, Homo sapiens
ggaactgctgatggccactgtgtgat

SEQ ID NO: 19388 - DNA, 26 bp, Homo sapiens
gaactgctgatggccactgtgtgatc

SEQ ID NO: 19389 - DNA, 26 bp, Homo sapiens
aactgctgatggccactgtgtgatca

SEQ ID NO: 19390 - DNA, 26 bp, Homo sapiens
actgctgatggccactgtgtgatcac

SEQ ID NO: 19391 - DNA, 26 bp, Homo sapiens
ctgctgatggccactgtgtgatcact

SEQ ID NO: 19392 - DNA, 26 bp, Homo sapiens
tgctgatggccactgtgtgatcactg

SEQ ID NO: 19393 - DNA, 26 bp, Homo sapiens
gctgatggccactgtgtgatcactga

SEQ ID NO: 19394 - DNA, 26 bp, Homo sapiens
ctgatggccactgtgtgatcactgag

SEQ ID NO: 19395 - DNA, 26 bp, Homo sapiens
tgatggccactgtgtgatcactgagg

SEQ ID NO: 19396 - DNA, 26 bp, Homo sapiens
gatggccactgtgtgatcactgaggt

SEQ ID NO: 19397 - DNA, 26 bp, Homo sapiens
atggccactgtgtgatcactgaggtt

SEQ ID NO: 19398 - DNA, 26 bp, Homo sapiens
tggccactgtgtgatcactgaggttt

SEQ ID NO: 19399 - DNA, 26 bp, Homo sapiens
ggccactgtgtgatcactgaggtttc

SEQ ID NO: 19400 - DNA, 26 bp, Homo sapiens
gccactgtgtgatcactgaggtttcg

SEQ ID NO: 19401 - DNA, 26 bp, Homo sapiens
ccactgtgtgatcactgaggtttcgc

SEQ ID NO: 19402 - DNA, 26 bp, Homo sapiens
cactgtgtgatcactgaggtttcgca

SEQ ID NO: 19403 - DNA, 26 bp, Homo sapiens
actgtgtgatcactgaggtttcgcag

SEQ ID NO: 19404 - DNA, 26 bp, Homo sapiens
ctgtgtgatcactgaggtttcgcagg

SEQ ID NO: 19405 - DNA, 26 bp, Homo sapiens
tgtgtgatcactgaggtttcgcagga

SEQ ID NO: 19406 - DNA, 26 bp, Homo sapiens
gtgtgatcactgaggtttcgcaggag

SEQ ID NO: 19407 - DNA, 26 bp, Homo sapiens
tgtgatcactgaggtttcgcaggagg

SEQ ID NO: 19408 - DNA, 26 bp, Homo sapiens
gtgatcactgaggtttcgcaggaggt

SEQ ID NO: 19409 - DNA, 26 bp, Homo sapiens
tgatcactgaggtttcgcaggaggta

SEQ ID NO: 19410 - DNA, 26 bp, Homo sapiens
gatcactgaggtttcgcaggaggtat

SEQ ID NO: 19411 - DNA, 26 bp, Homo sapiens
atcactgaggtttcgcaggaggtatg

SEQ ID NO: 19412 - DNA, 26 bp, Homo sapiens
tcactgaggtttcgcaggaggtatgg

SEQ ID NO: 19413 - DNA, 26 bp, Homo sapiens
cactgaggtttcgcaggaggtatggt

SEQ ID NO: 19414 - DNA, 26 bp, Homo sapiens
actgaggtttcgcaggaggtatggtg

SEQ ID NO: 19415 - DNA, 26 bp, Homo sapiens
ctgaggtttcgcaggaggtatggtgc

SEQ ID NO: 19416 - DNA, 26 bp, Homo sapiens
tgaggtttcgcaggaggtatggtgct

SEQ ID NO: 19417 - DNA, 26 bp, Homo sapiens
gaggtttcgcaggaggtatggtgctt

SEQ ID NO: 19418 - DNA, 26 bp, Homo sapiens
aggtttcgcaggaggtatggtgcttc

SEQ ID NO: 19419 - DNA, 26 bp, Homo sapiens
ggtttcgcaggaggtatggtgcttcc

SEQ ID NO: 19420 - DNA, 26 bp, Homo sapiens
gtttcgcaggaggtatggtgcttcct

SEQ ID NO: 19421 - DNA, 26 bp, Homo sapiens
tttcgcaggaggtatggtgcttcctg

SEQ ID NO: 19422 - DNA, 26 bp, Homo sapiens
ttcgcaggaggtatggtgcttcctga

SEQ ID NO: 19423 - DNA, 26 bp, Homo sapiens
tcgcaggaggtatggtgcttcctgat

SEQ ID NO: 19424 - DNA, 26 bp, Homo sapiens
cgcaggaggtatggtgcttcctgatc

SEQ ID NO: 19425 - DNA, 26 bp, Homo sapiens
gcaggaggtatggtgcttcctgatct

SEQ ID NO: 19426 - DNA, 26 bp, Homo sapiens
caggaggtatggtgcttcctgatctc

SEQ ID NO: 19427 - DNA, 26 bp, Homo sapiens
aggaggtatggtgcttcctgatctct

SEQ ID NO: 19428 - DNA, 26 bp, Homo sapiens
ggaggtatggtgcttcctgatctctg

SEQ ID NO: 19429 - DNA, 26 bp, Homo sapiens
gaggtatggtgcttcctgatctctga

SEQ ID NO: 19430 - DNA, 26 bp, Homo sapiens
aggtatggtgcttcctgatctctgat

SEQ ID NO: 19431 - DNA, 26 bp, Homo sapiens
ggtatggtgcttcctgatctctgatt

SEQ ID NO: 19432 - DNA, 26 bp, Homo sapiens
gtatggtgcttcctgatctctgattg

SEQ ID NO: 19433 - DNA, 26 bp, Homo sapiens
tatggtgcttcctgatctctgattgt

SEQ ID NO: 19434 - DNA, 26 bp, Homo sapiens
atggtgcttcctgatctctgattgta

SEQ ID NO: 19435 - DNA, 26 bp, Homo sapiens
tggtgcttcctgatctctgattgtaa

SEQ ID NO: 19436 - DNA, 26 bp, Homo sapiens
ggtgcttcctgatctctgattgtaat

SEQ ID NO: 19437 - DNA, 26 bp, Homo sapiens
gtgcttcctgatctctgattgtaatt

SEQ ID NO: 19438 - DNA, 26 bp, Homo sapiens
tgcttcctgatctctgattgtaattt

SEQ ID NO: 19439 - DNA, 26 bp, Homo sapiens
gcttcctgatctctgattgtaatttc

SEQ ID NO: 19440 - DNA, 26 bp, Homo sapiens
cttcctgatctctgattgtaatttct

SEQ ID NO: 19441 - DNA, 26 bp, Homo sapiens
ttcctgatctctgattgtaatttctt

SEQ ID NO: 19442 - DNA, 26 bp, Homo sapiens
tcctgatctctgattgtaatttcttt

SEQ ID NO: 19443 - DNA, 26 bp, Homo sapiens
cctgatctctgattgtaatttctttc

SEQ ID NO: 19444 - DNA, 26 bp, Homo sapiens
ctgatctctgattgtaatttctttct

SEQ ID NO: 19445 - DNA, 26 bp, Homo sapiens
tgatctctgattgtaatttctttctt

SEQ ID NO: 19446 - DNA, 26 bp, Homo sapiens
gatctctgattgtaatttctttcttc

SEQ ID NO: 19447 - DNA, 26 bp, Homo sapiens
atctctgattgtaatttctttcttct

SEQ ID NO: 19448 - DNA, 26 bp, Homo sapiens
tctctgattgtaatttctttcttctg

SEQ ID NO: 19449 - DNA, 26 bp, Homo sapiens
ctctgattgtaatttctttcttctgg

SEQ ID NO: 19450 - DNA, 26 bp, Homo sapiens
tctgattgtaatttctttcttctgga

SEQ ID NO: 19451 - DNA, 26 bp, Homo sapiens
ctgattgtaatttctttcttctggag

SEQ ID NO: 19452 - DNA, 26 bp, Homo sapiens
tgattgtaatttctttcttctggagg

SEQ ID NO: 19453 - DNA, 26 bp, Homo sapiens
gattgtaatttctttcttctggagga

SEQ ID NO: 19454 - DNA, 26 bp, Homo sapiens
attgtaatttctttcttctggaggat

SEQ ID NO: 19455 - DNA, 26 bp, Homo sapiens
ttgtaatttctttcttctggaggatt

SEQ ID NO: 19456 - DNA, 26 bp, Homo sapiens
tgtaatttctttcttctggaggattt

SEQ ID NO: 19457 - DNA, 26 bp, Homo sapiens
gtaatttctttcttctggaggatttc

SEQ ID NO: 19458 - DNA, 26 bp, Homo sapiens
taatttctttcttctggaggatttct

SEQ ID NO: 19459 - DNA, 26 bp, Homo sapiens
aatttctttcttctggaggatttctt

SEQ ID NO: 19460 - DNA, 26 bp, Homo sapiens
atttctttcttctggaggatttcttc

SEQ ID NO: 19461 - DNA, 26 bp, Homo sapiens
tttctttcttctggaggatttcttcc

SEQ ID NO: 19462 - DNA, 26 bp, Homo sapiens
ttctttcttctggaggatttcttccc

SEQ ID NO: 19463 - DNA, 26 bp, Homo sapiens
tctttcttctggaggatttcttcccc

SEQ ID NO: 19464 - DNA, 26 bp, Homo sapiens
ctttcttctggaggatttcttcccct

SEQ ID NO: 19465 - DNA, 26 bp, Homo sapiens
tttcttctggaggatttcttcccctg

SEQ ID NO: 19466 - DNA, 26 bp, Homo sapiens
ttcttctggaggatttcttcccctgt

SEQ ID NO: 19467 - DNA, 26 bp, Homo sapiens
tcttctggaggatttcttcccctgtg

SEQ ID NO: 19468 - DNA, 26 bp, Homo sapiens
cttctggaggatttcttcccctgtgt

SEQ ID NO: 19469 - DNA, 26 bp, Homo sapiens
ttctggaggatttcttcccctgtgta

SEQ ID NO: 19470 - DNA, 26 bp, Homo sapiens
tctggaggatttcttcccctgtgtat

SEQ ID NO: 19471 - DNA, 26 bp, Homo sapiens
ctggaggatttcttcccctgtgtata

SEQ ID NO: 19472 - DNA, 26 bp, Homo sapiens
tggaggatttcttcccctgtgtatac

SEQ ID NO: 19473 - DNA, 26 bp, Homo sapiens
ggaggatttcttcccctgtgtataca

SEQ ID NO: 19474 - DNA, 26 bp, Homo sapiens
gaggatttcttcccctgtgtatacat

SEQ ID NO: 19475 - DNA, 26 bp, Homo sapiens
aggatttcttcccctgtgtatacatt

SEQ ID NO: 19476 - DNA, 26 bp, Homo sapiens
ggatttcttcccctgtgtatacattc

SEQ ID NO: 19477 - DNA, 26 bp, Homo sapiens
gatttcttcccctgtgtatacattcc

SEQ ID NO: 19478 - DNA, 26 bp, Homo sapiens
atttcttcccctgtgtatacattcct

SEQ ID NO: 19479 - DNA, 26 bp, Homo sapiens
tttcttcccctgtgtatacattcctg

SEQ ID NO: 19480 - DNA, 26 bp, Homo sapiens
ttcttcccctgtgtatacattcctgg

SEQ ID NO: 19481 - DNA, 26 bp, Homo sapiens
tcttcccctgtgtatacattcctggc

SEQ ID NO: 19482 - DNA, 26 bp, Homo sapiens
cttcccctgtgtatacattcctggct

SEQ ID NO: 19483 - DNA, 26 bp, Homo sapiens
ttcccctgtgtatacattcctggctc

SEQ ID NO: 19484 - DNA, 26 bp, Homo sapiens
tcccctgtgtatacattcctggctct

SEQ ID NO: 19485 - DNA, 26 bp, Homo sapiens
cccctgtgtatacattcctggctctg

SEQ ID NO: 19486 - DNA, 26 bp, Homo sapiens
ccctgtgtatacattcctggctctgc

SEQ ID NO: 19487 - DNA, 26 bp, Homo sapiens
cctgtgtatacattcctggctctgca

SEQ ID NO: 19488 - DNA, 26 bp, Homo sapiens
ctgtgtatacattcctggctctgcag

SEQ ID NO: 19489 - DNA, 26 bp, Homo sapiens
tgtgtatacattcctggctctgcagg

SEQ ID NO: 19490 - DNA, 26 bp, Homo sapiens
gtgtatacattcctggctctgcaggc

SEQ ID NO: 19491 - DNA, 26 bp, Homo sapiens
tgtatacattcctggctctgcaggca

SEQ ID NO: 19492 - DNA, 26 bp, Homo sapiens
gtatacattcctggctctgcaggcat

SEQ ID NO: 19493 - DNA, 26 bp, Homo sapiens
tatacattcctggctctgcaggcata

SEQ ID NO: 19494 - DNA, 26 bp, Homo sapiens
atacattcctggctctgcaggcatag

SEQ ID NO: 19495 - DNA, 26 bp, Homo sapiens
tacattcctggctctgcaggcatagg

SEQ ID NO: 19496 - DNA, 26 bp, Homo sapiens
acattcctggctctgcaggcataggt

SEQ ID NO: 19497 - DNA, 26 bp, Homo sapiens
cattcctggctctgcaggcataggtg

SEQ ID NO: 19498 - DNA, 26 bp, Homo sapiens
attcctggctctgcaggcataggtgc

SEQ ID NO: 19499 - DNA, 26 bp, Homo sapiens
ttcctggctctgcaggcataggtgcc

SEQ ID NO: 19500 - DNA, 26 bp, Homo sapiens
tcctggctctgcaggcataggtgcct

SEQ ID NO: 19501 - DNA, 26 bp, Homo sapiens
cctggctctgcaggcataggtgcctg

SEQ ID NO: 19502 - DNA, 26 bp, Homo sapiens
ctggctctgcaggcataggtgcctga

SEQ ID NO: 19503 - DNA, 26 bp, Homo sapiens
tggctctgcaggcataggtgcctgaa

SEQ ID NO: 19504 - DNA, 26 bp, Homo sapiens
ggctctgcaggcataggtgcctgaat

SEQ ID NO: 19505 - DNA, 26 bp, Homo sapiens
gctctgcaggcataggtgcctgaatc

SEQ ID NO: 19506 - DNA, 26 bp, Homo sapiens
ctctgcaggcataggtgcctgaatct

SEQ ID NO: 19507 - DNA, 26 bp, Homo sapiens
tctgcaggcataggtgcctgaatctt

SEQ ID NO: 19508 - DNA, 26 bp, Homo sapiens
ctgcaggcataggtgcctgaatcttg

SEQ ID NO: 19509 - DNA, 26 bp, Homo sapiens
tgcaggcataggtgcctgaatcttgc

SEQ ID NO: 19510 - DNA, 26 bp, Homo sapiens
gcaggcataggtgcctgaatcttgca

SEQ ID NO: 19511 - DNA, 26 bp, Homo sapiens
caggcataggtgcctgaatcttgcag

SEQ ID NO: 19512 - DNA, 26 bp, Homo sapiens
aggcataggtgcctgaatcttgcagg

SEQ ID NO: 19513 - DNA, 26 bp, Homo sapiens
ggcataggtgcctgaatcttgcaggg

SEQ ID NO: 19514 - DNA, 26 bp, Homo sapiens
gcataggtgcctgaatcttgcaggga

SEQ ID NO: 19515 - DNA, 26 bp, Homo sapiens
cataggtgcctgaatcttgcagggaa

SEQ ID NO: 19516 - DNA, 26 bp, Homo sapiens
ataggtgcctgaatcttgcagggaaa

SEQ ID NO: 19517 - DNA, 26 bp, Homo sapiens
taggtgcctgaatcttgcagggaaac

SEQ ID NO: 19518 - DNA, 26 bp, Homo sapiens
aggtgcctgaatcttgcagggaaaca

SEQ ID NO: 19519 - DNA, 26 bp, Homo sapiens
ggtgcctgaatcttgcagggaaacat

SEQ ID NO: 19520 - DNA, 26 bp, Homo sapiens
gtgcctgaatcttgcagggaaacatt

SEQ ID NO: 19521 - DNA, 26 bp, Homo sapiens
tgcctgaatcttgcagggaaacattc

SEQ ID NO: 19522 - DNA, 26 bp, Homo sapiens
gcctgaatcttgcagggaaacattca

SEQ ID NO: 19523 - DNA, 26 bp, Homo sapiens
cctgaatcttgcagggaaacattcat

SEQ ID NO: 19524 - DNA, 26 bp, Homo sapiens
ctgaatcttgcagggaaacattcatg

SEQ ID NO: 19525 - DNA, 26 bp, Homo sapiens
tgaatcttgcagggaaacattcatga

SEQ ID NO: 19526 - DNA, 26 bp, Homo sapiens
gaatcttgcagggaaacattcatgat

SEQ ID NO: 19527 - DNA, 26 bp, Homo sapiens
aatcttgcagggaaacattcatgatg

SEQ ID NO: 19528 - DNA, 26 bp, Homo sapiens
atcttgcagggaaacattcatgatgg

SEQ ID NO: 19529 - DNA, 26 bp, Homo sapiens
tcttgcagggaaacattcatgatggt

SEQ ID NO: 19530 - DNA, 26 bp, Homo sapiens
cttgcagggaaacattcatgatggta

SEQ ID NO: 19531 - DNA, 26 bp, Homo sapiens
ttgcagggaaacattcatgatggtaa

SEQ ID NO: 19532 - DNA, 26 bp, Homo sapiens
tgcagggaaacattcatgatggtaag

SEQ ID NO: 19533 - DNA, 26 bp, Homo sapiens
gcagggaaacattcatgatggtaaga

SEQ ID NO: 19534 - DNA, 26 bp, Homo sapiens
cagggaaacattcatgatggtaagat

SEQ ID NO: 19535 - DNA, 26 bp, Homo sapiens
agggaaacattcatgatggtaagatt

SEQ ID NO: 19536 - DNA, 26 bp, Homo sapiens
gggaaacattcatgatggtaagatta

SEQ ID NO: 19537 - DNA, 26 bp, Homo sapiens
ggaaacattcatgatggtaagattaa

SEQ ID NO: 19538 - DNA, 26 bp, Homo sapiens
gaaacattcatgatggtaagattaag

SEQ ID NO: 19539 - DNA, 26 bp, Homo sapiens
aaacattcatgatggtaagattaaga

SEQ ID NO: 19540 - DNA, 26 bp, Homo sapiens
aacattcatgatggtaagattaagag

SEQ ID NO: 19541 - DNA, 26 bp, Homo sapiens
acattcatgatggtaagattaagagt

SEQ ID NO: 19542 - DNA, 26 bp, Homo sapiens
cattcatgatggtaagattaagagtg

SEQ ID NO: 19543 - DNA, 26 bp, Homo sapiens
attcatgatggtaagattaagagtga

SEQ ID NO: 19544 - DNA, 26 bp, Homo sapiens
ttcatgatggtaagattaagagtgat

SEQ ID NO: 19545 - DNA, 26 bp, Homo sapiens
tcatgatggtaagattaagagtgatg

SEQ ID NO: 19546 - DNA, 26 bp, Homo sapiens
catgatggtaagattaagagtgatgg

SEQ ID NO: 19547 - DNA, 26 bp, Homo sapiens
atgatggtaagattaagagtgatgga

SEQ ID NO: 19548 - DNA, 26 bp, Homo sapiens
tgatggtaagattaagagtgatggag

SEQ ID NO: 19549 - DNA, 26 bp, Homo sapiens
gatggtaagattaagagtgatggagt

SEQ ID NO: 19550 - DNA, 26 bp, Homo sapiens
atggtaagattaagagtgatggagtg

SEQ ID NO: 19551 - DNA, 26 bp, Homo sapiens
tggtaagattaagagtgatggagtgc

SEQ ID NO: 19552 - DNA, 26 bp, Homo sapiens
ggtaagattaagagtgatggagtgct

SEQ ID NO: 19553 - DNA, 26 bp, Homo sapiens
gtaagattaagagtgatggagtgctc

SEQ ID NO: 19554 - DNA, 26 bp, Homo sapiens
taagattaagagtgatggagtgctcc

SEQ ID NO: 19555 - DNA, 26 bp, Homo sapiens
aagattaagagtgatggagtgctcct

SEQ ID NO: 19556 - DNA, 26 bp, Homo sapiens
agattaagagtgatggagtgctcctt

SEQ ID NO: 19557 - DNA, 26 bp, Homo sapiens
gattaagagtgatggagtgctcctta

SEQ ID NO: 19558 - DNA, 26 bp, Homo sapiens
attaagagtgatggagtgctccttag

SEQ ID NO: 19559 - DNA, 26 bp, Homo sapiens
ttaagagtgatggagtgctccttagt

SEQ ID NO: 19560 - DNA, 26 bp, Homo sapiens
taagagtgatggagtgctccttagtg

SEQ ID NO: 19561 - DNA, 26 bp, Homo sapiens
aagagtgatggagtgctccttagtga

SEQ ID NO: 19562 - DNA, 26 bp, Homo sapiens
agagtgatggagtgctccttagtgat

SEQ ID NO: 19563 - DNA, 26 bp, Homo sapiens
gagtgatggagtgctccttagtgatg

SEQ ID NO: 19564 - DNA, 26 bp, Homo sapiens
agtgatggagtgctccttagtgatgg

SEQ ID NO: 19565 - DNA, 26 bp, Homo sapiens
gtgatggagtgctccttagtgatggc

SEQ ID NO: 19566 - DNA, 26 bp, Homo sapiens
tgatggagtgctccttagtgatggcc

SEQ ID NO: 19567 - DNA, 26 bp, Homo sapiens
gatggagtgctccttagtgatggcca

SEQ ID NO: 19568 - DNA, 26 bp, Homo sapiens
atggagtgctccttagtgatggccat

SEQ ID NO: 19569 - DNA, 26 bp, Homo sapiens
tggagtgctccttagtgatggccatt

SEQ ID NO: 19570 - DNA, 26 bp, Homo sapiens
ggagtgctccttagtgatggccattt

SEQ ID NO: 19571 - DNA, 26 bp, Homo sapiens
gagtgctccttagtgatggccatttt

SEQ ID NO: 19572 - DNA, 26 bp, Homo sapiens
agtgctccttagtgatggccattttt

SEQ ID NO: 19573 - DNA, 26 bp, Homo sapiens
gtgctccttagtgatggccatttttt

SEQ ID NO: 19574 - DNA, 26 bp, Homo sapiens
tgctccttagtgatggccattttttg

SEQ ID NO: 19575 - DNA, 26 bp, Homo sapiens
gctccttagtgatggccattttttgc

SEQ ID NO: 19576 - DNA, 26 bp, Homo sapiens
ctccttagtgatggccattttttgct

SEQ ID NO: 19577 - DNA, 26 bp, Homo sapiens
tccttagtgatggccattttttgctt

SEQ ID NO: 19578 - DNA, 26 bp, Homo sapiens
ccttagtgatggccattttttgcttg

SEQ ID NO: 19579 - DNA, 26 bp, Homo sapiens
cttagtgatggccattttttgcttgc

SEQ ID NO: 19580 - DNA, 26 bp, Homo sapiens
ttagtgatggccattttttgcttgct

SEQ ID NO: 19581 - DNA, 26 bp, Homo sapiens
tagtgatggccattttttgcttgcta

SEQ ID NO: 19582 - DNA, 26 bp, Homo sapiens
agtgatggccattttttgcttgctaa

SEQ ID NO: 19583 - DNA, 26 bp, Homo sapiens
gtgatggccattttttgcttgctaat

SEQ ID NO: 19584 - DNA, 26 bp, Homo sapiens
tgatggccattttttgcttgctaata

SEQ ID NO: 19585 - DNA, 26 bp, Homo sapiens
gatggccattttttgcttgctaatac

SEQ ID NO: 19586 - DNA, 26 bp, Homo sapiens
atggccattttttgcttgctaatact

SEQ ID NO: 19587 - DNA, 26 bp, Homo sapiens
tggccattttttgcttgctaatactg

SEQ ID NO: 19588 - DNA, 26 bp, Homo sapiens
ggccattttttgcttgctaatactgt

SEQ ID NO: 19589 - DNA, 26 bp, Homo sapiens
gccattttttgcttgctaatactgta

SEQ ID NO: 19590 - DNA, 26 bp, Homo sapiens
ccattttttgcttgctaatactgtag

SEQ ID NO: 19591 - DNA, 26 bp, Homo sapiens
cattttttgcttgctaatactgtagt

SEQ ID NO: 19592 - DNA, 26 bp, Homo sapiens
attttttgcttgctaatactgtagtg

SEQ ID NO: 19593 - DNA, 26 bp, Homo sapiens
ttttttgcttgctaatactgtagtgc

SEQ ID NO: 19594 - DNA, 26 bp, Homo sapiens
tttttgcttgctaatactgtagtgca

SEQ ID NO: 19595 - DNA, 26 bp, Homo sapiens
ttttgcttgctaatactgtagtgcat

SEQ ID NO: 19596 - DNA, 26 bp, Homo sapiens
tttgcttgctaatactgtagtgcatt

SEQ ID NO: 19597 - DNA, 26 bp, Homo sapiens
ttgcttgctaatactgtagtgcattg

SEQ ID NO: 19598 - DNA, 26 bp, Homo sapiens
tgcttgctaatactgtagtgcattgt

SEQ ID NO: 19599 - DNA, 26 bp, Homo sapiens
gcttgctaatactgtagtgcattgtt

SEQ ID NO: 19600 - DNA, 26 bp, Homo sapiens
cttgctaatactgtagtgcattgttc

SEQ ID NO: 19601 - DNA, 26 bp, Homo sapiens
ttgctaatactgtagtgcattgttct

SEQ ID NO: 19602 - DNA, 26 bp, Homo sapiens
tgctaatactgtagtgcattgttctg

SEQ ID NO: 19603 - DNA, 26 bp, Homo sapiens
gctaatactgtagtgcattgttctgt

SEQ ID NO: 19604 - DNA, 26 bp, Homo sapiens
ctaatactgtagtgcattgttctgtt

SEQ ID NO: 19605 - DNA, 26 bp, Homo sapiens
taatactgtagtgcattgttctgtta

SEQ ID NO: 19606 - DNA, 26 bp, Homo sapiens
aatactgtagtgcattgttctgttat

SEQ ID NO: 19607 - DNA, 26 bp, Homo sapiens
atactgtagtgcattgttctgttatt

SEQ ID NO: 19608 - DNA, 26 bp, Homo sapiens
tactgtagtgcattgttctgttatta

SEQ ID NO: 19609 - DNA, 26 bp, Homo sapiens
actgtagtgcattgttctgttattaa

SEQ ID NO: 19610 - DNA, 26 bp, Homo sapiens
ctgtagtgcattgttctgttattaac

SEQ ID NO: 19611 - DNA, 26 bp, Homo sapiens
tgtagtgcattgttctgttattaact

SEQ ID NO: 19612 - DNA, 26 bp, Homo sapiens
gtagtgcattgttctgttattaactg

SEQ ID NO: 19613 - DNA, 26 bp, Homo sapiens
tagtgcattgttctgttattaactgt

SEQ ID NO: 19614 - DNA, 26 bp, Homo sapiens
agtgcattgttctgttattaactgtc

SEQ ID NO: 19615 - DNA, 26 bp, Homo sapiens
gtgcattgttctgttattaactgtcc

SEQ ID NO: 19616 - DNA, 26 bp, Homo sapiens
tgcattgttctgttattaactgtccg

SEQ ID NO: 19617 - DNA, 26 bp, Homo sapiens
gcattgttctgttattaactgtccgc

SEQ ID NO: 19618 - DNA, 26 bp, Homo sapiens
cattgttctgttattaactgtccgca

SEQ ID NO: 19619 - DNA, 26 bp, Homo sapiens
attgttctgttattaactgtccgcag

SEQ ID NO: 19620 - DNA, 26 bp, Homo sapiens
ttgttctgttattaactgtccgcagt

SEQ ID NO: 19621 - DNA, 26 bp, Homo sapiens
tgttctgttattaactgtccgcagta

SEQ ID NO: 19622 - DNA, 26 bp, Homo sapiens
gttctgttattaactgtccgcagtaa

SEQ ID NO: 19623 - DNA, 26 bp, Homo sapiens
ttctgttattaactgtccgcagtaaa

SEQ ID NO: 19624 - DNA, 26 bp, Homo sapiens
tctgttattaactgtccgcagtaaaa

SEQ ID NO: 19625 - DNA, 26 bp, Homo sapiens
ctgttattaactgtccgcagtaaaat

SEQ ID NO: 19626 - DNA, 26 bp, Homo sapiens
tgttattaactgtccgcagtaaaatc

SEQ ID NO: 19627 - DNA, 26 bp, Homo sapiens
gttattaactgtccgcagtaaaatcc

SEQ ID NO: 19628 - DNA, 26 bp, Homo sapiens
ttattaactgtccgcagtaaaatcca

SEQ ID NO: 19629 - DNA, 26 bp, Homo sapiens
tattaactgtccgcagtaaaatccaa

SEQ ID NO: 19630 - DNA, 26 bp, Homo sapiens
attaactgtccgcagtaaaatccaag

SEQ ID NO: 19631 - DNA, 26 bp, Homo sapiens
ttaactgtccgcagtaaaatccaagt

SEQ ID NO: 19632 - DNA, 26 bp, Homo sapiens
taactgtccgcagtaaaatccaagta

SEQ ID NO: 19633 - DNA, 26 bp, Homo sapiens
aactgtccgcagtaaaatccaagtaa

SEQ ID NO: 19634 - DNA, 26 bp, Homo sapiens
actgtccgcagtaaaatccaagtaac

SEQ ID NO: 19635 - DNA, 26 bp, Homo sapiens
ctgtccgcagtaaaatccaagtaacg

SEQ ID NO: 19636 - DNA, 26 bp, Homo sapiens
tgtccgcagtaaaatccaagtaacgt

SEQ ID NO: 19637 - DNA, 26 bp, Homo sapiens
gtccgcagtaaaatccaagtaacgtc

SEQ ID NO: 19638 - DNA, 26 bp, Homo sapiens
tccgcagtaaaatccaagtaacgtct

SEQ ID NO: 19639 - DNA, 26 bp, Homo sapiens
ccgcagtaaaatccaagtaacgtctc

SEQ ID NO: 19640 - DNA, 26 bp, Homo sapiens
cgcagtaaaatccaagtaacgtctct

SEQ ID NO: 19641 - DNA, 26 bp, Homo sapiens
gcagtaaaatccaagtaacgtctctg

SEQ ID NO: 19642 - DNA, 26 bp, Homo sapiens
cagtaaaatccaagtaacgtctctgt

SEQ ID NO: 19643 - DNA, 26 bp, Homo sapiens
agtaaaatccaagtaacgtctctgta

SEQ ID NO: 19644 - DNA, 26 bp, Homo sapiens
gtaaaatccaagtaacgtctctgtat

SEQ ID NO: 19645 - DNA, 26 bp, Homo sapiens
taaaatccaagtaacgtctctgtata

SEQ ID NO: 19646 - DNA, 26 bp, Homo sapiens
aaaatccaagtaacgtctctgtataa

SEQ ID NO: 19647 - DNA, 26 bp, Homo sapiens
aaatccaagtaacgtctctgtataag

SEQ ID NO: 19648 - DNA, 26 bp, Homo sapiens
aatccaagtaacgtctctgtataaga

SEQ ID NO: 19649 - DNA, 26 bp, Homo sapiens
atccaagtaacgtctctgtataagaa

SEQ ID NO: 19650 - DNA, 26 bp, Homo sapiens
tccaagtaacgtctctgtataagaac

SEQ ID NO: 19651 - DNA, 26 bp, Homo sapiens
ccaagtaacgtctctgtataagaact

SEQ ID NO: 19652 - DNA, 26 bp, Homo sapiens
caagtaacgtctctgtataagaactt

SEQ ID NO: 19653 - DNA, 26 bp, Homo sapiens
aagtaacgtctctgtataagaacttg

SEQ ID NO: 19654 - DNA, 26 bp, Homo sapiens
agtaacgtctctgtataagaacttgt

SEQ ID NO: 19655 - DNA, 26 bp, Homo sapiens
gtaacgtctctgtataagaacttgtt

SEQ ID NO: 19656 - DNA, 26 bp, Homo sapiens
taacgtctctgtataagaacttgtta

SEQ ID NO: 19657 - DNA, 26 bp, Homo sapiens
aacgtctctgtataagaacttgttaa

SEQ ID NO: 19658 - DNA, 26 bp, Homo sapiens
acgtctctgtataagaacttgttaac

SEQ ID NO: 19659 - DNA, 26 bp, Homo sapiens
cgtctctgtataagaacttgttaact

SEQ ID NO: 19660 - DNA, 26 bp, Homo sapiens
gtctctgtataagaacttgttaactg

SEQ ID NO: 19661 - DNA, 26 bp, Homo sapiens
tctctgtataagaacttgttaactgt

SEQ ID NO: 19662 - DNA, 26 bp, Homo sapiens
ctctgtataagaacttgttaactgtg

SEQ ID NO: 19663 - DNA, 26 bp, Homo sapiens
tctgtataagaacttgttaactgtgc

SEQ ID NO: 19664 - DNA, 26 bp, Homo sapiens
ctgtataagaacttgttaactgtgca

SEQ ID NO: 19665 - DNA, 26 bp, Homo sapiens
tgtataagaacttgttaactgtgcaa

SEQ ID NO: 19666 - DNA, 26 bp, Homo sapiens
gtataagaacttgttaactgtgcaag

SEQ ID NO: 19667 - DNA, 26 bp, Homo sapiens
tataagaacttgttaactgtgcaaga

SEQ ID NO: 19668 - DNA, 26 bp, Homo sapiens
ataagaacttgttaactgtgcaagac

SEQ ID NO: 19669 - DNA, 26 bp, Homo sapiens
taagaacttgttaactgtgcaagaca

SEQ ID NO: 19670 - DNA, 26 bp, Homo sapiens
aagaacttgttaactgtgcaagacag

SEQ ID NO: 19671 - DNA, 26 bp, Homo sapiens
agaacttgttaactgtgcaagacagt

SEQ ID NO: 19672 - DNA, 26 bp, Homo sapiens
gaacttgttaactgtgcaagacagtt

SEQ ID NO: 19673 - DNA, 26 bp, Homo sapiens
aacttgttaactgtgcaagacagttt

SEQ ID NO: 19674 - DNA, 26 bp, Homo sapiens
acttgttaactgtgcaagacagtttc

SEQ ID NO: 19675 - DNA, 26 bp, Homo sapiens
cttgttaactgtgcaagacagtttca

SEQ ID NO: 19676 - DNA, 26 bp, Homo sapiens
ttgttaactgtgcaagacagtttcag

SEQ ID NO: 19677 - DNA, 26 bp, Homo sapiens
tgttaactgtgcaagacagtttcagg

SEQ ID NO: 19678 - DNA, 26 bp, Homo sapiens
gttaactgtgcaagacagtttcaggt

SEQ ID NO: 19679 - DNA, 26 bp, Homo sapiens
ttaactgtgcaagacagtttcaggtc

SEQ ID NO: 19680 - DNA, 26 bp, Homo sapiens
taactgtgcaagacagtttcaggtcc

SEQ ID NO: 19681 - DNA, 26 bp, Homo sapiens
aactgtgcaagacagtttcaggtcct

SEQ ID NO: 19682 - DNA, 26 bp, Homo sapiens
actgtgcaagacagtttcaggtcctc

SEQ ID NO: 19683 - DNA, 26 bp, Homo sapiens
ctgtgcaagacagtttcaggtcctct

SEQ ID NO: 19684 - DNA, 26 bp, Homo sapiens
tgtgcaagacagtttcaggtcctctc

SEQ ID NO: 19685 - DNA, 26 bp, Homo sapiens
gtgcaagacagtttcaggtcctctcc

SEQ ID NO: 19686 - DNA, 26 bp, Homo sapiens
tgcaagacagtttcaggtcctctcct

SEQ ID NO: 19687 - DNA, 26 bp, Homo sapiens
gcaagacagtttcaggtcctctcctt

SEQ ID NO: 19688 - DNA, 26 bp, Homo sapiens
caagacagtttcaggtcctctccttc

SEQ ID NO: 19689 - DNA, 26 bp, Homo sapiens
aagacagtttcaggtcctctccttcc

SEQ ID NO: 19690 - DNA, 26 bp, Homo sapiens
agacagtttcaggtcctctccttccg

SEQ ID NO: 19691 - DNA, 26 bp, Homo sapiens
gacagtttcaggtcctctccttccgt

SEQ ID NO: 19692 - DNA, 26 bp, Homo sapiens
acagtttcaggtcctctccttccgtc

SEQ ID NO: 19693 - DNA, 26 bp, Homo sapiens
cagtttcaggtcctctccttccgtcg

SEQ ID NO: 19694 - DNA, 26 bp, Homo sapiens
agtttcaggtcctctccttccgtcgg

SEQ ID NO: 19695 - DNA, 26 bp, Homo sapiens
gtttcaggtcctctccttccgtcggc

SEQ ID NO: 19696 - DNA, 26 bp, Homo sapiens
tttcaggtcctctccttccgtcggca

SEQ ID NO: 19697 - DNA, 26 bp, Homo sapiens
ttcaggtcctctccttccgtcggcat

SEQ ID NO: 19698 - DNA, 26 bp, Homo sapiens
tcaggtcctctccttccgtcggcatt

SEQ ID NO: 19699 - DNA, 26 bp, Homo sapiens
caggtcctctccttccgtcggcattt

SEQ ID NO: 19700 - DNA, 26 bp, Homo sapiens
aggtcctctccttccgtcggcatttt

SEQ ID NO: 19701 - DNA, 26 bp, Homo sapiens
ggtcctctccttccgtcggcattttt

SEQ ID NO: 19702 - DNA, 26 bp, Homo sapiens
gtcctctccttccgtcggcatttttt

SEQ ID NO: 19703 - DNA, 26 bp, Homo sapiens
tcctctccttccgtcggcattttttc

SEQ ID NO: 19704 - DNA, 26 bp, Homo sapiens
cctctccttccgtcggcattttttcc

SEQ ID NO: 19705 - DNA, 26 bp, Homo sapiens
ctctccttccgtcggcattttttcca

SEQ ID NO: 19706 - DNA, 26 bp, Homo sapiens
tctccttccgtcggcattttttccaa

SEQ ID NO: 19707 - DNA, 26 bp, Homo sapiens
ctccttccgtcggcattttttccaag

SEQ ID NO: 19708 - DNA, 26 bp, Homo sapiens
tccttccgtcggcattttttccaagt

SEQ ID NO: 19709 - DNA, 26 bp, Homo sapiens
ccttccgtcggcattttttccaagtt

SEQ ID NO: 19710 - DNA, 26 bp, Homo sapiens
cttccgtcggcattttttccaagtta

SEQ ID NO: 19711 - DNA, 26 bp, Homo sapiens
ttccgtcggcattttttccaagttaa

SEQ ID NO: 19712 - DNA, 26 bp, Homo sapiens
tccgtcggcattttttccaagttaac

SEQ ID NO: 19713 - DNA, 26 bp, Homo sapiens
ccgtcggcattttttccaagttaaca

SEQ ID NO: 19714 - DNA, 26 bp, Homo sapiens
cgtcggcattttttccaagttaacat

SEQ ID NO: 19715 - DNA, 26 bp, Homo sapiens
gtcggcattttttccaagttaacatg

SEQ ID NO: 19716 - DNA, 26 bp, Homo sapiens
tcggcattttttccaagttaacatga

SEQ ID NO: 19717 - DNA, 26 bp, Homo sapiens
cggcattttttccaagttaacatgaa

SEQ ID NO: 19718 - DNA, 26 bp, Homo sapiens
ggcattttttccaagttaacatgaaa

SEQ ID NO: 19719 - DNA, 26 bp, Homo sapiens
gcattttttccaagttaacatgaaac

SEQ ID NO: 19720 - DNA, 26 bp, Homo sapiens
cattttttccaagttaacatgaaacc

SEQ ID NO: 19721 - DNA, 26 bp, Homo sapiens
attttttccaagttaacatgaaaccc

SEQ ID NO: 19722 - DNA, 26 bp, Homo sapiens
ttttttccaagttaacatgaaaccca

SEQ ID NO: 19723 - DNA, 26 bp, Homo sapiens
tttttccaagttaacatgaaacccat

SEQ ID NO: 19724 - DNA, 26 bp, Homo sapiens
ttttccaagttaacatgaaacccatt

SEQ ID NO: 19725 - DNA, 26 bp, Homo sapiens
tttccaagttaacatgaaacccattt

SEQ ID NO: 19726 - DNA, 26 bp, Homo sapiens
ttccaagttaacatgaaacccatttg

SEQ ID NO: 19727 - DNA, 26 bp, Homo sapiens
tccaagttaacatgaaacccatttgg

SEQ ID NO: 19728 - DNA, 26 bp, Homo sapiens
ccaagttaacatgaaacccatttggc

SEQ ID NO: 19729 - DNA, 26 bp, Homo sapiens
caagttaacatgaaacccatttggca

SEQ ID NO: 19730 - DNA, 26 bp, Homo sapiens
aagttaacatgaaacccatttggcac

SEQ ID NO: 19731 - DNA, 26 bp, Homo sapiens
agttaacatgaaacccatttggcaca

SEQ ID NO: 19732 - DNA, 26 bp, Homo sapiens
gttaacatgaaacccatttggcacat

SEQ ID NO: 19733 - DNA, 26 bp, Homo sapiens
ttaacatgaaacccatttggcacatc

SEQ ID NO: 19734 - DNA, 26 bp, Homo sapiens
taacatgaaacccatttggcacatct

SEQ ID NO: 19735 - DNA, 26 bp, Homo sapiens
aacatgaaacccatttggcacatctg

SEQ ID NO: 19736 - DNA, 26 bp, Homo sapiens
acatgaaacccatttggcacatctgt

SEQ ID NO: 19737 - DNA, 26 bp, Homo sapiens
catgaaacccatttggcacatctgtg

SEQ ID NO: 19738 - DNA, 26 bp, Homo sapiens
atgaaacccatttggcacatctgtga

SEQ ID NO: 19739 - DNA, 26 bp, Homo sapiens
tgaaacccatttggcacatctgtgat

SEQ ID NO: 19740 - DNA, 26 bp, Homo sapiens
gaaacccatttggcacatctgtgata

SEQ ID NO: 19741 - DNA, 26 bp, Homo sapiens
aaacccatttggcacatctgtgatat

SEQ ID NO: 19742 - DNA, 26 bp, Homo sapiens
aacccatttggcacatctgtgatata

SEQ ID NO: 19743 - DNA, 26 bp, Homo sapiens
acccatttggcacatctgtgatataa

SEQ ID NO: 19744 - DNA, 26 bp, Homo sapiens
cccatttggcacatctgtgatataaa

SEQ ID NO: 19745 - DNA, 26 bp, Homo sapiens
ccatttggcacatctgtgatataaaa

SEQ ID NO: 19746 - DNA, 26 bp, Homo sapiens
catttggcacatctgtgatataaaag

SEQ ID NO: 19747 - DNA, 26 bp, Homo sapiens
atttggcacatctgtgatataaaagc

SEQ ID NO: 19748 - DNA, 26 bp, Homo sapiens
tttggcacatctgtgatataaaagct

SEQ ID NO: 19749 - DNA, 26 bp, Homo sapiens
ttggcacatctgtgatataaaagctt

SEQ ID NO: 19750 - DNA, 26 bp, Homo sapiens
tggcacatctgtgatataaaagctta

SEQ ID NO: 19751 - DNA, 26 bp, Homo sapiens
ggcacatctgtgatataaaagcttat

SEQ ID NO: 19752 - DNA, 26 bp, Homo sapiens
gcacatctgtgatataaaagcttatg

SEQ ID NO: 19753 - DNA, 26 bp, Homo sapiens
cacatctgtgatataaaagcttatgt

SEQ ID NO: 19754 - DNA, 26 bp, Homo sapiens
acatctgtgatataaaagcttatgtt

SEQ ID NO: 19755 - DNA, 26 bp, Homo sapiens
catctgtgatataaaagcttatgttt

SEQ ID NO: 19756 - DNA, 26 bp, Homo sapiens
atctgtgatataaaagcttatgtttc

SEQ ID NO: 19757 - DNA, 26 bp, Homo sapiens
tctgtgatataaaagcttatgtttct

SEQ ID NO: 19758 - DNA, 26 bp, Homo sapiens
ctgtgatataaaagcttatgtttctt

SEQ ID NO: 19759 - DNA, 26 bp, Homo sapiens
tgtgatataaaagcttatgtttcttc

SEQ ID NO: 19760 - DNA, 26 bp, Homo sapiens
gtgatataaaagcttatgtttcttcc

SEQ ID NO: 19761 - DNA, 26 bp, Homo sapiens
tgatataaaagcttatgtttcttccc

SEQ ID NO: 19762 - DNA, 26 bp, Homo sapiens
gatataaaagcttatgtttcttccca

SEQ ID NO: 19763 - DNA, 26 bp, Homo sapiens
atataaaagcttatgtttcttcccac

SEQ ID NO: 19764 - DNA, 26 bp, Homo sapiens
tataaaagcttatgtttcttcccaca

SEQ ID NO: 19765 - DNA, 26 bp, Homo sapiens
ataaaagcttatgtttcttcccacag

SEQ ID NO: 19766 - DNA, 26 bp, Homo sapiens
taaaagcttatgtttcttcccacagt

SEQ ID NO: 19767 - DNA, 26 bp, Homo sapiens
aaaagcttatgtttcttcccacagtc

SEQ ID NO: 19768 - DNA, 26 bp, Homo sapiens
aaagcttatgtttcttcccacagtcc

SEQ ID NO: 19769 - DNA, 26 bp, Homo sapiens
aagcttatgtttcttcccacagtccc

SEQ ID NO: 19770 - DNA, 26 bp, Homo sapiens
agcttatgtttcttcccacagtccca

SEQ ID NO: 19771 - DNA, 26 bp, Homo sapiens
gcttatgtttcttcccacagtcccaa

SEQ ID NO: 19772 - DNA, 26 bp, Homo sapiens
cttatgtttcttcccacagtcccaac

SEQ ID NO: 19773 - DNA, 26 bp, Homo sapiens
ttatgtttcttcccacagtcccaact

SEQ ID NO: 19774 - DNA, 26 bp, Homo sapiens
tatgtttcttcccacagtcccaactt

SEQ ID NO: 19775 - DNA, 26 bp, Homo sapiens
atgtttcttcccacagtcccaacttt

SEQ ID NO: 19776 - DNA, 26 bp, Homo sapiens
tgtttcttcccacagtcccaacttta

SEQ ID NO: 19777 - DNA, 26 bp, Homo sapiens
gtttcttcccacagtcccaactttat

SEQ ID NO: 19778 - DNA, 26 bp, Homo sapiens
tttcttcccacagtcccaactttatt

SEQ ID NO: 19779 - DNA, 26 bp, Homo sapiens
ttcttcccacagtcccaactttattg

SEQ ID NO: 19780 - DNA, 26 bp, Homo sapiens
tcttcccacagtcccaactttattgg

SEQ ID NO: 19781 - DNA, 26 bp, Homo sapiens
cttcccacagtcccaactttattgga

SEQ ID NO: 19782 - DNA, 26 bp, Homo sapiens
ttcccacagtcccaactttattggaa

SEQ ID NO: 19783 - DNA, 26 bp, Homo sapiens
tcccacagtcccaactttattggaag

SEQ ID NO: 19784 - DNA, 26 bp, Homo sapiens
cccacagtcccaactttattggaagc

SEQ ID NO: 19785 - DNA, 26 bp, Homo sapiens
ccacagtcccaactttattggaagct

SEQ ID NO: 19786 - DNA, 26 bp, Homo sapiens
cacagtcccaactttattggaagcta

SEQ ID NO: 19787 - DNA, 26 bp, Homo sapiens
acagtcccaactttattggaagctat

SEQ ID NO: 19788 - DNA, 26 bp, Homo sapiens
cagtcccaactttattggaagctatg

SEQ ID NO: 19789 - DNA, 26 bp, Homo sapiens
agtcccaactttattggaagctatgc

SEQ ID NO: 19790 - DNA, 26 bp, Homo sapiens
gtcccaactttattggaagctatgca

SEQ ID NO: 19791 - DNA, 26 bp, Homo sapiens
tcccaactttattggaagctatgcaa

SEQ ID NO: 19792 - DNA, 26 bp, Homo sapiens
cccaactttattggaagctatgcaaa

SEQ ID NO: 19793 - DNA, 26 bp, Homo sapiens
ccaactttattggaagctatgcaaat

SEQ ID NO: 19794 - DNA, 26 bp, Homo sapiens
caactttattggaagctatgcaaatg

SEQ ID NO: 19795 - DNA, 26 bp, Homo sapiens
aactttattggaagctatgcaaatgt

SEQ ID NO: 19796 - DNA, 26 bp, Homo sapiens
actttattggaagctatgcaaatgta

SEQ ID NO: 19797 - DNA, 26 bp, Homo sapiens
ctttattggaagctatgcaaatgtag

SEQ ID NO: 19798 - DNA, 26 bp, Homo sapiens
tttattggaagctatgcaaatgtaga

SEQ ID NO: 19799 - DNA, 26 bp, Homo sapiens
ttattggaagctatgcaaatgtagat

SEQ ID NO: 19800 - DNA, 26 bp, Homo sapiens
tattggaagctatgcaaatgtagatt

SEQ ID NO: 19801 - DNA, 26 bp, Homo sapiens
attggaagctatgcaaatgtagattc

SEQ ID NO: 19802 - DNA, 26 bp, Homo sapiens
ttggaagctatgcaaatgtagattcc

SEQ ID NO: 19803 - DNA, 26 bp, Homo sapiens
tggaagctatgcaaatgtagattcca

SEQ ID NO: 19804 - DNA, 26 bp, Homo sapiens
ggaagctatgcaaatgtagattccag

SEQ ID NO: 19805 - DNA, 26 bp, Homo sapiens
gaagctatgcaaatgtagattccaga

SEQ ID NO: 19806 - DNA, 26 bp, Homo sapiens
aagctatgcaaatgtagattccagaa

SEQ ID NO: 19807 - DNA, 26 bp, Homo sapiens
agctatgcaaatgtagattccagaaa

SEQ ID NO: 19808 - DNA, 26 bp, Homo sapiens
gctatgcaaatgtagattccagaaat

SEQ ID NO: 19809 - DNA, 26 bp, Homo sapiens
ctatgcaaatgtagattccagaaatt

SEQ ID NO: 19810 - DNA, 26 bp, Homo sapiens
tatgcaaatgtagattccagaaattc

SEQ ID NO: 19811 - DNA, 26 bp, Homo sapiens
atgcaaatgtagattccagaaattct

SEQ ID NO: 19812 - DNA, 26 bp, Homo sapiens
tgcaaatgtagattccagaaattcta

SEQ ID NO: 19813 - DNA, 26 bp, Homo sapiens
gcaaatgtagattccagaaattctag

SEQ ID NO: 19814 - DNA, 26 bp, Homo sapiens
caaatgtagattccagaaattctaga

SEQ ID NO: 19815 - DNA, 26 bp, Homo sapiens
aaatgtagattccagaaattctagag

SEQ ID NO: 19816 - DNA, 26 bp, Homo sapiens
aatgtagattccagaaattctagagt

SEQ ID NO: 19817 - DNA, 26 bp, Homo sapiens
atgtagattccagaaattctagagtc

SEQ ID NO: 19818 - DNA, 26 bp, Homo sapiens
tgtagattccagaaattctagagtca

SEQ ID NO: 19819 - DNA, 26 bp, Homo sapiens
gtagattccagaaattctagagtcag

SEQ ID NO: 19820 - DNA, 26 bp, Homo sapiens
tagattccagaaattctagagtcagc

SEQ ID NO: 19821 - DNA, 26 bp, Homo sapiens
agattccagaaattctagagtcagcc

SEQ ID NO: 19822 - DNA, 26 bp, Homo sapiens
gattccagaaattctagagtcagcca

SEQ ID NO: 19823 - DNA, 26 bp, Homo sapiens
attccagaaattctagagtcagccac

SEQ ID NO: 19824 - DNA, 26 bp, Homo sapiens
ttccagaaattctagagtcagccaca

SEQ ID NO: 19825 - DNA, 26 bp, Homo sapiens
tccagaaattctagagtcagccacaa

SEQ ID NO: 19826 - DNA, 26 bp, Homo sapiens
ccagaaattctagagtcagccacaac

SEQ ID NO: 19827 - DNA, 26 bp, Homo sapiens
cagaaattctagagtcagccacaacc

SEQ ID NO: 19828 - DNA, 26 bp, Homo sapiens
agaaattctagagtcagccacaacca

SEQ ID NO: 19829 - DNA, 26 bp, Homo sapiens
gaaattctagagtcagccacaaccaa

SEQ ID NO: 19830 - DNA, 26 bp, Homo sapiens
aaattctagagtcagccacaaccaag

SEQ ID NO: 19831 - DNA, 26 bp, Homo sapiens
aattctagagtcagccacaaccaagg

SEQ ID NO: 19832 - DNA, 26 bp, Homo sapiens
attctagagtcagccacaaccaaggt

SEQ ID NO: 19833 - DNA, 26 bp, Homo sapiens
ttctagagtcagccacaaccaaggtg

SEQ ID NO: 19834 - DNA, 26 bp, Homo sapiens
tctagagtcagccacaaccaaggtgc

SEQ ID NO: 19835 - DNA, 26 bp, Homo sapiens
ctagagtcagccacaaccaaggtgct

SEQ ID NO: 19836 - DNA, 26 bp, Homo sapiens
tagagtcagccacaaccaaggtgcta

SEQ ID NO: 19837 - DNA, 26 bp, Homo sapiens
agagtcagccacaaccaaggtgctag

SEQ ID NO: 19838 - DNA, 26 bp, Homo sapiens
gagtcagccacaaccaaggtgctagc

SEQ ID NO: 19839 - DNA, 26 bp, Homo sapiens
agtcagccacaaccaaggtgctagcc

SEQ ID NO: 19840 - DNA, 26 bp, Homo sapiens
gtcagccacaaccaaggtgctagcca

SEQ ID NO: 19841 - DNA, 26 bp, Homo sapiens
tcagccacaaccaaggtgctagccat

SEQ ID NO: 19842 - DNA, 26 bp, Homo sapiens
cagccacaaccaaggtgctagccatc

SEQ ID NO: 19843 - DNA, 26 bp, Homo sapiens
agccacaaccaaggtgctagccatct

SEQ ID NO: 19844 - DNA, 26 bp, Homo sapiens
gccacaaccaaggtgctagccatctt

SEQ ID NO: 19845 - DNA, 26 bp, Homo sapiens
ccacaaccaaggtgctagccatctta

SEQ ID NO: 19846 - DNA, 26 bp, Homo sapiens
cacaaccaaggtgctagccatcttat

SEQ ID NO: 19847 - DNA, 26 bp, Homo sapiens
acaaccaaggtgctagccatcttatt

SEQ ID NO: 19848 - DNA, 26 bp, Homo sapiens
caaccaaggtgctagccatcttattc

SEQ ID NO: 19849 - DNA, 26 bp, Homo sapiens
aaccaaggtgctagccatcttattct

SEQ ID NO: 19850 - DNA, 26 bp, Homo sapiens
accaaggtgctagccatcttattctt

SEQ ID NO: 19851 - DNA, 26 bp, Homo sapiens
ccaaggtgctagccatcttattcttt

SEQ ID NO: 19852 - DNA, 26 bp, Homo sapiens
caaggtgctagccatcttattctttc

SEQ ID NO: 19853 - DNA, 26 bp, Homo sapiens
aaggtgctagccatcttattctttcc

SEQ ID NO: 19854 - DNA, 26 bp, Homo sapiens
aggtgctagccatcttattctttcct

SEQ ID NO: 19855 - DNA, 26 bp, Homo sapiens
ggtgctagccatcttattctttcctt

SEQ ID NO: 19856 - DNA, 26 bp, Homo sapiens
gtgctagccatcttattctttccttc

SEQ ID NO: 19857 - DNA, 26 bp, Homo sapiens
tgctagccatcttattctttccttct

SEQ ID NO: 19858 - DNA, 26 bp, Homo sapiens
gctagccatcttattctttccttcta

SEQ ID NO: 19859 - DNA, 26 bp, Homo sapiens
ctagccatcttattctttccttctat

SEQ ID NO: 19860 - DNA, 26 bp, Homo sapiens
tagccatcttattctttccttctatt

SEQ ID NO: 19861 - DNA, 26 bp, Homo sapiens
agccatcttattctttccttctatta

SEQ ID NO: 19862 - DNA, 26 bp, Homo sapiens
gccatcttattctttccttctattat

SEQ ID NO: 19863 - DNA, 26 bp, Homo sapiens
ccatcttattctttccttctattatt

SEQ ID NO: 19864 - DNA, 26 bp, Homo sapiens
catcttattctttccttctattattg

SEQ ID NO: 19865 - DNA, 26 bp, Homo sapiens
atcttattctttccttctattattgc

SEQ ID NO: 19866 - DNA, 26 bp, Homo sapiens
tcttattctttccttctattattgcc

SEQ ID NO: 19867 - DNA, 26 bp, Homo sapiens
cttattctttccttctattattgcca

SEQ ID NO: 19868 - DNA, 26 bp, Homo sapiens
ttattctttccttctattattgccat

SEQ ID NO: 19869 - DNA, 26 bp, Homo sapiens
tattctttccttctattattgccatg

SEQ ID NO: 19870 - DNA, 26 bp, Homo sapiens
attctttccttctattattgccatgc

SEQ ID NO: 19871 - DNA, 26 bp, Homo sapiens
ttctttccttctattattgccatgcg

SEQ ID NO: 19872 - DNA, 26 bp, Homo sapiens
tctttccttctattattgccatgcgc

SEQ ID NO: 19873 - DNA, 26 bp, Homo sapiens
ctttccttctattattgccatgcgct

SEQ ID NO: 19874 - DNA, 26 bp, Homo sapiens
tttccttctattattgccatgcgctg

SEQ ID NO: 19875 - DNA, 26 bp, Homo sapiens
ttccttctattattgccatgcgctga

SEQ ID NO: 19876 - DNA, 26 bp, Homo sapiens
tccttctattattgccatgcgctgag

SEQ ID NO: 19877 - DNA, 26 bp, Homo sapiens
ccttctattattgccatgcgctgagt

SEQ ID NO: 19878 - DNA, 26 bp, Homo sapiens
cttctattattgccatgcgctgagtg

SEQ ID NO: 19879 - DNA, 26 bp, Homo sapiens
ttctattattgccatgcgctgagtga

SEQ ID NO: 19880 - DNA, 26 bp, Homo sapiens
tctattattgccatgcgctgagtgat

SEQ ID NO: 19881 - DNA, 26 bp, Homo sapiens
ctattattgccatgcgctgagtgatg

SEQ ID NO: 19882 - DNA, 26 bp, Homo sapiens
tattattgccatgcgctgagtgatgc

SEQ ID NO: 19883 - DNA, 26 bp, Homo sapiens
attattgccatgcgctgagtgatgct

SEQ ID NO: 19884 - DNA, 26 bp, Homo sapiens
ttattgccatgcgctgagtgatgctc

SEQ ID NO: 19885 - DNA, 26 bp, Homo sapiens
tattgccatgcgctgagtgatgctct

SEQ ID NO: 19886 - DNA, 26 bp, Homo sapiens
attgccatgcgctgagtgatgctctc

SEQ ID NO: 19887 - DNA, 26 bp, Homo sapiens
ttgccatgcgctgagtgatgctctca

SEQ ID NO: 19888 - DNA, 26 bp, Homo sapiens
tgccatgcgctgagtgatgctctcaa

SEQ ID NO: 19889 - DNA, 26 bp, Homo sapiens
gccatgcgctgagtgatgctctcaat

SEQ ID NO: 19890 - DNA, 26 bp, Homo sapiens
ccatgcgctgagtgatgctctcaatt

SEQ ID NO: 19891 - DNA, 26 bp, Homo sapiens
catgcgctgagtgatgctctcaattc

SEQ ID NO: 19892 - DNA, 26 bp, Homo sapiens
atgcgctgagtgatgctctcaattct

SEQ ID NO: 19893 - DNA, 26 bp, Homo sapiens
tgcgctgagtgatgctctcaattctg

SEQ ID NO: 19894 - DNA, 26 bp, Homo sapiens
gcgctgagtgatgctctcaattctgt

SEQ ID NO: 19895 - DNA, 26 bp, Homo sapiens
cgctgagtgatgctctcaattctgtt

SEQ ID NO: 19896 - DNA, 26 bp, Homo sapiens
gctgagtgatgctctcaattctgttt

SEQ ID NO: 19897 - DNA, 26 bp, Homo sapiens
ctgagtgatgctctcaattctgtttc

SEQ ID NO: 19898 - DNA, 26 bp, Homo sapiens
tgagtgatgctctcaattctgtttcc

SEQ ID NO: 19899 - DNA, 26 bp, Homo sapiens
gagtgatgctctcaattctgtttccc

SEQ ID NO: 19900 - DNA, 26 bp, Homo sapiens
agtgatgctctcaattctgtttccca

SEQ ID NO: 19901 - DNA, 26 bp, Homo sapiens
gtgatgctctcaattctgtttcccat

SEQ ID NO: 19902 - DNA, 26 bp, Homo sapiens
tgatgctctcaattctgtttcccatg

SEQ ID NO: 19903 - DNA, 26 bp, Homo sapiens
gatgctctcaattctgtttcccatgt

SEQ ID NO: 19904 - DNA, 26 bp, Homo sapiens
atgctctcaattctgtttcccatgtt

SEQ ID NO: 19905 - DNA, 26 bp, Homo sapiens
tgctctcaattctgtttcccatgttg

SEQ ID NO: 19906 - DNA, 26 bp, Homo sapiens
gctctcaattctgtttcccatgttgc

SEQ ID NO: 19907 - DNA, 26 bp, Homo sapiens
ctctcaattctgtttcccatgttgct

SEQ ID NO: 19908 - DNA, 26 bp, Homo sapiens
tctcaattctgtttcccatgttgctg

SEQ ID NO: 19909 - DNA, 26 bp, Homo sapiens
ctcaattctgtttcccatgttgctgt

SEQ ID NO: 19910 - DNA, 26 bp, Homo sapiens
tcaattctgtttcccatgttgctgtc

SEQ ID NO: 19911 - DNA, 26 bp, Homo sapiens
caattctgtttcccatgttgctgtca

SEQ ID NO: 19912 - DNA, 26 bp, Homo sapiens
aattctgtttcccatgttgctgtcag

SEQ ID NO: 19913 - DNA, 26 bp, Homo sapiens
attctgtttcccatgttgctgtcagc

SEQ ID NO: 19914 - DNA, 26 bp, Homo sapiens
ttctgtttcccatgttgctgtcagca

SEQ ID NO: 19915 - DNA, 26 bp, Homo sapiens
tctgtttcccatgttgctgtcagcat

SEQ ID NO: 19916 - DNA, 26 bp, Homo sapiens
ctgtttcccatgttgctgtcagcatc

SEQ ID NO: 19917 - DNA, 26 bp, Homo sapiens
tgtttcccatgttgctgtcagcatcc

SEQ ID NO: 19918 - DNA, 26 bp, Homo sapiens
gtttcccatgttgctgtcagcatcca

SEQ ID NO: 19919 - DNA, 26 bp, Homo sapiens
tttcccatgttgctgtcagcatccag

SEQ ID NO: 19920 - DNA, 26 bp, Homo sapiens
ttcccatgttgctgtcagcatccagg

SEQ ID NO: 19921 - DNA, 26 bp, Homo sapiens
tcccatgttgctgtcagcatccagga

SEQ ID NO: 19922 - DNA, 26 bp, Homo sapiens
cccatgttgctgtcagcatccaggat

SEQ ID NO: 19923 - DNA, 26 bp, Homo sapiens
ccatgttgctgtcagcatccaggata

SEQ ID NO: 19924 - DNA, 26 bp, Homo sapiens
catgttgctgtcagcatccaggataa

SEQ ID NO: 19925 - DNA, 26 bp, Homo sapiens
atgttgctgtcagcatccaggataaa

SEQ ID NO: 19926 - DNA, 26 bp, Homo sapiens
tgttgctgtcagcatccaggataaag

SEQ ID NO: 19927 - DNA, 26 bp, Homo sapiens
gttgctgtcagcatccaggataaagg

SEQ ID NO: 19928 - DNA, 26 bp, Homo sapiens
ttgctgtcagcatccaggataaagga

SEQ ID NO: 19929 - DNA, 26 bp, Homo sapiens
tgctgtcagcatccaggataaaggac

SEQ ID NO: 19930 - DNA, 26 bp, Homo sapiens
gctgtcagcatccaggataaaggact

SEQ ID NO: 19931 - DNA, 26 bp, Homo sapiens
ctgtcagcatccaggataaaggactc

SEQ ID NO: 19932 - DNA, 26 bp, Homo sapiens
tgtcagcatccaggataaaggactct

SEQ ID NO: 19933 - DNA, 26 bp, Homo sapiens
gtcagcatccaggataaaggactctt

SEQ ID NO: 19934 - DNA, 26 bp, Homo sapiens
tcagcatccaggataaaggactcttc

SEQ ID NO: 19935 - DNA, 26 bp, Homo sapiens
cagcatccaggataaaggactcttca

SEQ ID NO: 19936 - DNA, 26 bp, Homo sapiens
agcatccaggataaaggactcttcat

SEQ ID NO: 19937 - DNA, 26 bp, Homo sapiens
gcatccaggataaaggactcttcatt

SEQ ID NO: 19938 - DNA, 26 bp, Homo sapiens
catccaggataaaggactcttcatta

SEQ ID NO: 19939 - DNA, 26 bp, Homo sapiens
atccaggataaaggactcttcattat

SEQ ID NO: 19940 - DNA, 26 bp, Homo sapiens
tccaggataaaggactcttcattatt

SEQ ID NO: 19941 - DNA, 26 bp, Homo sapiens
ccaggataaaggactcttcattattg

SEQ ID NO: 19942 - DNA, 26 bp, Homo sapiens
caggataaaggactcttcattattgg

SEQ ID NO: 19943 - DNA, 26 bp, Homo sapiens
aggataaaggactcttcattattgga

SEQ ID NO: 19944 - DNA, 26 bp, Homo sapiens
ggataaaggactcttcattattggaa

SEQ ID NO: 19945 - DNA, 26 bp, Homo sapiens
gataaaggactcttcattattggaac

SEQ ID NO: 19946 - DNA, 26 bp, Homo sapiens
ataaaggactcttcattattggaaca

SEQ ID NO: 19947 - DNA, 26 bp, Homo sapiens
taaaggactcttcattattggaacaa

SEQ ID NO: 19948 - DNA, 26 bp, Homo sapiens
aaaggactcttcattattggaacaaa

SEQ ID NO: 19949 - DNA, 26 bp, Homo sapiens
aaggactcttcattattggaacaaaa

SEQ ID NO: 19950 - DNA, 26 bp, Homo sapiens
aggactcttcattattggaacaaaag

SEQ ID NO: 19951 - DNA, 26 bp, Homo sapiens
ggactcttcattattggaacaaaagt

SEQ ID NO: 19952 - DNA, 26 bp, Homo sapiens
gactcttcattattggaacaaaagtc

SEQ ID NO: 19953 - DNA, 26 bp, Homo sapiens
actcttcattattggaacaaaagtca

SEQ ID NO: 19954 - DNA, 26 bp, Homo sapiens
ctcttcattattggaacaaaagtcac

SEQ ID NO: 19955 - DNA, 26 bp, Homo sapiens
tcttcattattggaacaaaagtcaca

SEQ ID NO: 19956 - DNA, 26 bp, Homo sapiens
cttcattattggaacaaaagtcacac

SEQ ID NO: 19957 - DNA, 26 bp, Homo sapiens
ttcattattggaacaaaagtcacacc

SEQ ID NO: 19958 - DNA, 26 bp, Homo sapiens
tcattattggaacaaaagtcacacct

SEQ ID NO: 19959 - DNA, 26 bp, Homo sapiens
cattattggaacaaaagtcacacctt

SEQ ID NO: 19960 - DNA, 26 bp, Homo sapiens
attattggaacaaaagtcacaccttg

SEQ ID NO: 19961 - DNA, 26 bp, Homo sapiens
ttattggaacaaaagtcacaccttgc

SEQ ID NO: 19962 - DNA, 26 bp, Homo sapiens
tattggaacaaaagtcacaccttgct

SEQ ID NO: 19963 - DNA, 26 bp, Homo sapiens
attggaacaaaagtcacaccttgctt

SEQ ID NO: 19964 - DNA, 26 bp, Homo sapiens
ttggaacaaaagtcacaccttgcttc

SEQ ID NO: 19965 - DNA, 26 bp, Homo sapiens
tggaacaaaagtcacaccttgcttcg

SEQ ID NO: 19966 - DNA, 26 bp, Homo sapiens
ggaacaaaagtcacaccttgcttcgg

SEQ ID NO: 19967 - DNA, 26 bp, Homo sapiens
gaacaaaagtcacaccttgcttcgga

SEQ ID NO: 19968 - DNA, 26 bp, Homo sapiens
aacaaaagtcacaccttgcttcggaa

SEQ ID NO: 19969 - DNA, 26 bp, Homo sapiens
acaaaagtcacaccttgcttcggaat

SEQ ID NO: 19970 - DNA, 26 bp, Homo sapiens
caaaagtcacaccttgcttcggaatg

SEQ ID NO: 19971 - DNA, 26 bp, Homo sapiens
aaaagtcacaccttgcttcggaatga

SEQ ID NO: 19972 - DNA, 26 bp, Homo sapiens
aaagtcacaccttgcttcggaatgat

SEQ ID NO: 19973 - DNA, 26 bp, Homo sapiens
aagtcacaccttgcttcggaatgatt

SEQ ID NO: 19974 - DNA, 26 bp, Homo sapiens
agtcacaccttgcttcggaatgatta

SEQ ID NO: 19975 - DNA, 26 bp, Homo sapiens
gtcacaccttgcttcggaatgattat

SEQ ID NO: 19976 - DNA, 26 bp, Homo sapiens
tcacaccttgcttcggaatgattatg

SEQ ID NO: 19977 - DNA, 26 bp, Homo sapiens
cacaccttgcttcggaatgattatgg

SEQ ID NO: 19978 - DNA, 26 bp, Homo sapiens
acaccttgcttcggaatgattatggt

SEQ ID NO: 19979 - DNA, 26 bp, Homo sapiens
caccttgcttcggaatgattatggtt

SEQ ID NO: 19980 - DNA, 26 bp, Homo sapiens
accttgcttcggaatgattatggtta

SEQ ID NO: 19981 - DNA, 26 bp, Homo sapiens
ccttgcttcggaatgattatggttac

SEQ ID NO: 19982 - DNA, 26 bp, Homo sapiens
cttgcttcggaatgattatggttaca

SEQ ID NO: 19983 - DNA, 26 bp, Homo sapiens
ttgcttcggaatgattatggttacag

SEQ ID NO: 19984 - DNA, 26 bp, Homo sapiens
tgcttcggaatgattatggttacagg

SEQ ID NO: 19985 - DNA, 26 bp, Homo sapiens
gcttcggaatgattatggttacaggg

SEQ ID NO: 19986 - DNA, 26 bp, Homo sapiens
cttcggaatgattatggttacagggg

SEQ ID NO: 19987 - DNA, 26 bp, Homo sapiens
ttcggaatgattatggttacaggggt

SEQ ID NO: 19988 - DNA, 26 bp, Homo sapiens
tcggaatgattatggttacaggggtg

SEQ ID NO: 19989 - DNA, 26 bp, Homo sapiens
cggaatgattatggttacaggggtgc

SEQ ID NO: 19990 - DNA, 26 bp, Homo sapiens
ggaatgattatggttacaggggtgcc

SEQ ID NO: 19991 - DNA, 26 bp, Homo sapiens
gaatgattatggttacaggggtgcca

SEQ ID NO: 19992 - DNA, 26 bp, Homo sapiens
aatgattatggttacaggggtgccag

SEQ ID NO: 19993 - DNA, 26 bp, Homo sapiens
atgattatggttacaggggtgccaga

SEQ ID NO: 19994 - DNA, 26 bp, Homo sapiens
tgattatggttacaggggtgccagaa

SEQ ID NO: 19995 - DNA, 26 bp, Homo sapiens
gattatggttacaggggtgccagaac

SEQ ID NO: 19996 - DNA, 26 bp, Homo sapiens
attatggttacaggggtgccagaacc

SEQ ID NO: 19997 - DNA, 26 bp, Homo sapiens
ttatggttacaggggtgccagaacca

SEQ ID NO: 19998 - DNA, 26 bp, Homo sapiens
tatggttacaggggtgccagaaccac

SEQ ID NO: 19999 - DNA, 26 bp, Homo sapiens
atggttacaggggtgccagaaccact

SEQ ID NO: 20000 - DNA, 26 bp, Homo sapiens
tggttacaggggtgccagaaccactt

SEQ ID NO: 20001 - DNA, 26 bp, Homo sapiens
ggttacaggggtgccagaaccacttg

SEQ ID NO: 20002 - DNA, 26 bp, Homo sapiens
gttacaggggtgccagaaccacttga

SEQ ID NO: 20003 - DNA, 26 bp, Homo sapiens
ttacaggggtgccagaaccacttgat

SEQ ID NO: 20004 - DNA, 26 bp, Homo sapiens
tacaggggtgccagaaccacttgatt

SEQ ID NO: 20005 - DNA, 26 bp, Homo sapiens
acaggggtgccagaaccacttgattg

SEQ ID NO: 20006 - DNA, 26 bp, Homo sapiens
caggggtgccagaaccacttgattgt

SEQ ID NO: 20007 - DNA, 26 bp, Homo sapiens
aggggtgccagaaccacttgattgta

SEQ ID NO: 20008 - DNA, 26 bp, Homo sapiens
ggggtgccagaaccacttgattgtag

SEQ ID NO: 20009 - DNA, 26 bp, Homo sapiens
gggtgccagaaccacttgattgtagg

SEQ ID NO: 20010 - DNA, 26 bp, Homo sapiens
ggtgccagaaccacttgattgtaggt

SEQ ID NO: 20011 - DNA, 26 bp, Homo sapiens
gtgccagaaccacttgattgtaggtt

SEQ ID NO: 20012 - DNA, 26 bp, Homo sapiens
tgccagaaccacttgattgtaggttg

SEQ ID NO: 20013 - DNA, 26 bp, Homo sapiens
gccagaaccacttgattgtaggttga

SEQ ID NO: 20014 - DNA, 26 bp, Homo sapiens
ccagaaccacttgattgtaggttgag

SEQ ID NO: 20015 - DNA, 26 bp, Homo sapiens
cagaaccacttgattgtaggttgagg

SEQ ID NO: 20016 - DNA, 26 bp, Homo sapiens
agaaccacttgattgtaggttgaggg

SEQ ID NO: 20017 - DNA, 26 bp, Homo sapiens
gaaccacttgattgtaggttgaggga

SEQ ID NO: 20018 - DNA, 26 bp, Homo sapiens
aaccacttgattgtaggttgagggat

SEQ ID NO: 20019 - DNA, 26 bp, Homo sapiens
accacttgattgtaggttgagggata

SEQ ID NO: 20020 - DNA, 26 bp, Homo sapiens
ccacttgattgtaggttgagggatac

SEQ ID NO: 20021 - DNA, 26 bp, Homo sapiens
cacttgattgtaggttgagggatacc

SEQ ID NO: 20022 - DNA, 26 bp, Homo sapiens
acttgattgtaggttgagggatacca

SEQ ID NO: 20023 - DNA, 26 bp, Homo sapiens
cttgattgtaggttgagggataccat

SEQ ID NO: 20024 - DNA, 26 bp, Homo sapiens
ttgattgtaggttgagggataccata

SEQ ID NO: 20025 - DNA, 26 bp, Homo sapiens
tgattgtaggttgagggataccatat

SEQ ID NO: 20026 - DNA, 26 bp, Homo sapiens
gattgtaggttgagggataccatatg

SEQ ID NO: 20027 - DNA, 26 bp, Homo sapiens
attgtaggttgagggataccatatgc

SEQ ID NO: 20028 - DNA, 26 bp, Homo sapiens
ttgtaggttgagggataccatatgcg

SEQ ID NO: 20029 - DNA, 26 bp, Homo sapiens
tgtaggttgagggataccatatgcgg

SEQ ID NO: 20030 - DNA, 26 bp, Homo sapiens
gtaggttgagggataccatatgcggt

SEQ ID NO: 20031 - DNA, 26 bp, Homo sapiens
taggttgagggataccatatgcggta

SEQ ID NO: 20032 - DNA, 26 bp, Homo sapiens
aggttgagggataccatatgcggtac

SEQ ID NO: 20033 - DNA, 26 bp, Homo sapiens
ggttgagggataccatatgcggtaca

SEQ ID NO: 20034 - DNA, 26 bp, Homo sapiens
gttgagggataccatatgcggtacaa

SEQ ID NO: 20035 - DNA, 26 bp, Homo sapiens
ttgagggataccatatgcggtacaag

SEQ ID NO: 20036 - DNA, 26 bp, Homo sapiens
tgagggataccatatgcggtacaagt

SEQ ID NO: 20037 - DNA, 26 bp, Homo sapiens
gagggataccatatgcggtacaagtc

SEQ ID NO: 20038 - DNA, 26 bp, Homo sapiens
agggataccatatgcggtacaagtca

SEQ ID NO: 20039 - DNA, 26 bp, Homo sapiens
gggataccatatgcggtacaagtcag

SEQ ID NO: 20040 - DNA, 26 bp, Homo sapiens
ggataccatatgcggtacaagtcagg

SEQ ID NO: 20041 - DNA, 26 bp, Homo sapiens
gataccatatgcggtacaagtcagga

SEQ ID NO: 20042 - DNA, 26 bp, Homo sapiens
ataccatatgcggtacaagtcaggat

SEQ ID NO: 20043 - DNA, 26 bp, Homo sapiens
taccatatgcggtacaagtcaggatt

SEQ ID NO: 20044 - DNA, 26 bp, Homo sapiens
accatatgcggtacaagtcaggattt

SEQ ID NO: 20045 - DNA, 26 bp, Homo sapiens
ccatatgcggtacaagtcaggatttg

SEQ ID NO: 20046 - DNA, 26 bp, Homo sapiens
catatgcggtacaagtcaggatttgt

SEQ ID NO: 20047 - DNA, 26 bp, Homo sapiens
atatgcggtacaagtcaggatttgtc

SEQ ID NO: 20048 - DNA, 26 bp, Homo sapiens
tatgcggtacaagtcaggatttgtct

SEQ ID NO: 20049 - DNA, 26 bp, Homo sapiens
atgcggtacaagtcaggatttgtctg

SEQ ID NO: 20050 - DNA, 26 bp, Homo sapiens
tgcggtacaagtcaggatttgtctgc

SEQ ID NO: 20051 - DNA, 26 bp, Homo sapiens
gcggtacaagtcaggatttgtctgct

SEQ ID NO: 20052 - DNA, 26 bp, Homo sapiens
cggtacaagtcaggatttgtctgctg

SEQ ID NO: 20053 - DNA, 26 bp, Homo sapiens
ggtacaagtcaggatttgtctgctgc

SEQ ID NO: 20054 - DNA, 26 bp, Homo sapiens
gtacaagtcaggatttgtctgctgcc

SEQ ID NO: 20055 - DNA, 26 bp, Homo sapiens
tacaagtcaggatttgtctgctgccc

SEQ ID NO: 20056 - DNA, 26 bp, Homo sapiens
acaagtcaggatttgtctgctgccca

SEQ ID NO: 20057 - DNA, 26 bp, Homo sapiens
caagtcaggatttgtctgctgcccag

SEQ ID NO: 20058 - DNA, 26 bp, Homo sapiens
aagtcaggatttgtctgctgcccagt

SEQ ID NO: 20059 - DNA, 26 bp, Homo sapiens
agtcaggatttgtctgctgcccagtg

SEQ ID NO: 20060 - DNA, 26 bp, Homo sapiens
gtcaggatttgtctgctgcccagtgg

SEQ ID NO: 20061 - DNA, 26 bp, Homo sapiens
tcaggatttgtctgctgcccagtggg

SEQ ID NO: 20062 - DNA, 26 bp, Homo sapiens
caggatttgtctgctgcccagtgggt

SEQ ID NO: 20063 - DNA, 26 bp, Homo sapiens
aggatttgtctgctgcccagtgggta

SEQ ID NO: 20064 - DNA, 26 bp, Homo sapiens
ggatttgtctgctgcccagtgggtag

SEQ ID NO: 20065 - DNA, 26 bp, Homo sapiens
gatttgtctgctgcccagtgggtaga

SEQ ID NO: 20066 - DNA, 26 bp, Homo sapiens
atttgtctgctgcccagtgggtagag

SEQ ID NO: 20067 - DNA, 26 bp, Homo sapiens
tttgtctgctgcccagtgggtagaga

SEQ ID NO: 20068 - DNA, 26 bp, Homo sapiens
ttgtctgctgcccagtgggtagagag

SEQ ID NO: 20069 - DNA, 26 bp, Homo sapiens
tgtctgctgcccagtgggtagagagc

SEQ ID NO: 20070 - DNA, 26 bp, Homo sapiens
gtctgctgcccagtgggtagagagcc

SEQ ID NO: 20071 - DNA, 26 bp, Homo sapiens
tctgctgcccagtgggtagagagccg

SEQ ID NO: 20072 - DNA, 26 bp, Homo sapiens
ctgctgcccagtgggtagagagccgg

SEQ ID NO: 20073 - DNA, 26 bp, Homo sapiens
tgctgcccagtgggtagagagccggg

SEQ ID NO: 20074 - DNA, 26 bp, Homo sapiens
gctgcccagtgggtagagagccgggt

SEQ ID NO: 20075 - DNA, 26 bp, Homo sapiens
ctgcccagtgggtagagagccgggtc

SEQ ID NO: 20076 - DNA, 26 bp, Homo sapiens
tgcccagtgggtagagagccgggtct

SEQ ID NO: 20077 - DNA, 26 bp, Homo sapiens
gcccagtgggtagagagccgggtctg

SEQ ID NO: 20078 - DNA, 26 bp, Homo sapiens
cccagtgggtagagagccgggtctgg

SEQ ID NO: 20079 - DNA, 26 bp, Homo sapiens
ccagtgggtagagagccgggtctgga

SEQ ID NO: 20080 - DNA, 26 bp, Homo sapiens
cagtgggtagagagccgggtctggaa

SEQ ID NO: 20081 - DNA, 26 bp, Homo sapiens
agtgggtagagagccgggtctggaaa

SEQ ID NO: 20082 - DNA, 26 bp, Homo sapiens
gtgggtagagagccgggtctggaaac

SEQ ID NO: 20083 - DNA, 26 bp, Homo sapiens
tgggtagagagccgggtctggaaacg

SEQ ID NO: 20084 - DNA, 26 bp, Homo sapiens
gggtagagagccgggtctggaaacga

SEQ ID NO: 20085 - DNA, 26 bp, Homo sapiens
ggtagagagccgggtctggaaacgat

SEQ ID NO: 20086 - DNA, 26 bp, Homo sapiens
gtagagagccgggtctggaaacgatg

SEQ ID NO: 20087 - DNA, 26 bp, Homo sapiens
tagagagccgggtctggaaacgatga

SEQ ID NO: 20088 - DNA, 26 bp, Homo sapiens
agagagccgggtctggaaacgatgac

SEQ ID NO: 20089 - DNA, 26 bp, Homo sapiens
gagagccgggtctggaaacgatgaca

SEQ ID NO: 20090 - DNA, 26 bp, Homo sapiens
agagccgggtctggaaacgatgacac

SEQ ID NO: 20091 - DNA, 26 bp, Homo sapiens
gagccgggtctggaaacgatgacacg

SEQ ID NO: 20092 - DNA, 26 bp, Homo sapiens
agccgggtctggaaacgatgacacgg

SEQ ID NO: 20093 - DNA, 26 bp, Homo sapiens
gccgggtctggaaacgatgacacggc

SEQ ID NO: 20094 - DNA, 26 bp, Homo sapiens
ccgggtctggaaacgatgacacggcc

SEQ ID NO: 20095 - DNA, 26 bp, Homo sapiens
cgggtctggaaacgatgacacggcct

SEQ ID NO: 20096 - DNA, 26 bp, Homo sapiens
gggtctggaaacgatgacacggcctt

SEQ ID NO: 20097 - DNA, 26 bp, Homo sapiens
ggtctggaaacgatgacacggccttt

SEQ ID NO: 20098 - DNA, 26 bp, Homo sapiens
gtctggaaacgatgacacggcctttt

SEQ ID NO: 20099 - DNA, 26 bp, Homo sapiens
tctggaaacgatgacacggccttttc

SEQ ID NO: 20100 - DNA, 26 bp, Homo sapiens
ctggaaacgatgacacggccttttcg

SEQ ID NO: 20101 - DNA, 26 bp, Homo sapiens
tggaaacgatgacacggccttttcgt

SEQ ID NO: 20102 - DNA, 26 bp, Homo sapiens
ggaaacgatgacacggccttttcgta

SEQ ID NO: 20103 - DNA, 26 bp, Homo sapiens
gaaacgatgacacggccttttcgtaa

SEQ ID NO: 20104 - DNA, 26 bp, Homo sapiens
aaacgatgacacggccttttcgtaaa

SEQ ID NO: 20105 - DNA, 26 bp, Homo sapiens
aacgatgacacggccttttcgtaaat

SEQ ID NO: 20106 - DNA, 26 bp, Homo sapiens
acgatgacacggccttttcgtaaatc

SEQ ID NO: 20107 - DNA, 26 bp, Homo sapiens
cgatgacacggccttttcgtaaatct

SEQ ID NO: 20108 - DNA, 26 bp, Homo sapiens
gatgacacggccttttcgtaaatctg

SEQ ID NO: 20109 - DNA, 26 bp, Homo sapiens
atgacacggccttttcgtaaatctgg

SEQ ID NO: 20110 - DNA, 26 bp, Homo sapiens
tgacacggccttttcgtaaatctggg

SEQ ID NO: 20111 - DNA, 26 bp, Homo sapiens
gacacggccttttcgtaaatctgggg

SEQ ID NO: 20112 - DNA, 26 bp, Homo sapiens
acacggccttttcgtaaatctggggt

SEQ ID NO: 20113 - DNA, 26 bp, Homo sapiens
cacggccttttcgtaaatctggggtt

SEQ ID NO: 20114 - DNA, 26 bp, Homo sapiens
acggccttttcgtaaatctggggttt

SEQ ID NO: 20115 - DNA, 26 bp, Homo sapiens
cggccttttcgtaaatctggggtttc

SEQ ID NO: 20116 - DNA, 26 bp, Homo sapiens
ggccttttcgtaaatctggggtttca

SEQ ID NO: 20117 - DNA, 26 bp, Homo sapiens
gccttttcgtaaatctggggtttcac

SEQ ID NO: 20118 - DNA, 26 bp, Homo sapiens
ccttttcgtaaatctggggtttcaca

SEQ ID NO: 20119 - DNA, 26 bp, Homo sapiens
cttttcgtaaatctggggtttcacat

SEQ ID NO: 20120 - DNA, 26 bp, Homo sapiens
ttttcgtaaatctggggtttcacatt

SEQ ID NO: 20121 - DNA, 26 bp, Homo sapiens
tttcgtaaatctggggtttcacattg

SEQ ID NO: 20122 - DNA, 26 bp, Homo sapiens
ttcgtaaatctggggtttcacattga

SEQ ID NO: 20123 - DNA, 26 bp, Homo sapiens
tcgtaaatctggggtttcacattgac

SEQ ID NO: 20124 - DNA, 26 bp, Homo sapiens
cgtaaatctggggtttcacattgaca

SEQ ID NO: 20125 - DNA, 26 bp, Homo sapiens
gtaaatctggggtttcacattgacaa

SEQ ID NO: 20126 - DNA, 26 bp, Homo sapiens
taaatctggggtttcacattgacaat

SEQ ID NO: 20127 - DNA, 26 bp, Homo sapiens
aaatctggggtttcacattgacaatt

SEQ ID NO: 20128 - DNA, 26 bp, Homo sapiens
aatctggggtttcacattgacaatta

SEQ ID NO: 20129 - DNA, 26 bp, Homo sapiens
atctggggtttcacattgacaattag

SEQ ID NO: 20130 - DNA, 26 bp, Homo sapiens
tctggggtttcacattgacaattaga

SEQ ID NO: 20131 - DNA, 26 bp, Homo sapiens
ctggggtttcacattgacaattagag

SEQ ID NO: 20132 - DNA, 26 bp, Homo sapiens
tggggtttcacattgacaattagagt

SEQ ID NO: 20133 - DNA, 26 bp, Homo sapiens
ggggtttcacattgacaattagagtg

SEQ ID NO: 20134 - DNA, 26 bp, Homo sapiens
gggtttcacattgacaattagagtgg

SEQ ID NO: 20135 - DNA, 26 bp, Homo sapiens
ggtttcacattgacaattagagtggc

SEQ ID NO: 20136 - DNA, 26 bp, Homo sapiens
gtttcacattgacaattagagtggca

SEQ ID NO: 20137 - DNA, 26 bp, Homo sapiens
tttcacattgacaattagagtggcag

SEQ ID NO: 20138 - DNA, 26 bp, Homo sapiens
ttcacattgacaattagagtggcagt

SEQ ID NO: 20139 - DNA, 26 bp, Homo sapiens
tcacattgacaattagagtggcagtg

SEQ ID NO: 20140 - DNA, 26 bp, Homo sapiens
cacattgacaattagagtggcagtga

SEQ ID NO: 20141 - DNA, 26 bp, Homo sapiens
acattgacaattagagtggcagtgag

SEQ ID NO: 20142 - DNA, 26 bp, Homo sapiens
cattgacaattagagtggcagtgagg

SEQ ID NO: 20143 - DNA, 26 bp, Homo sapiens
attgacaattagagtggcagtgaggt

SEQ ID NO: 20144 - DNA, 26 bp, Homo sapiens
ttgacaattagagtggcagtgaggtt

SEQ ID NO: 20145 - DNA, 26 bp, Homo sapiens
tgacaattagagtggcagtgaggttt

SEQ ID NO: 20146 - DNA, 26 bp, Homo sapiens
gacaattagagtggcagtgaggtttt

SEQ ID NO: 20147 - DNA, 26 bp, Homo sapiens
acaattagagtggcagtgaggttttt

SEQ ID NO: 20148 - DNA, 26 bp, Homo sapiens
caattagagtggcagtgaggttttta

SEQ ID NO: 20149 - DNA, 26 bp, Homo sapiens
aattagagtggcagtgaggtttttaa

SEQ ID NO: 20150 - DNA, 26 bp, Homo sapiens
attagagtggcagtgaggtttttaaa

SEQ ID NO: 20151 - DNA, 26 bp, Homo sapiens
ttagagtggcagtgaggtttttaaac

SEQ ID NO: 20152 - DNA, 26 bp, Homo sapiens
tagagtggcagtgaggtttttaaaca

SEQ ID NO: 20153 - DNA, 26 bp, Homo sapiens
agagtggcagtgaggtttttaaacac

SEQ ID NO: 20154 - DNA, 26 bp, Homo sapiens
gagtggcagtgaggtttttaaacaca

SEQ ID NO: 20155 - DNA, 26 bp, Homo sapiens
agtggcagtgaggtttttaaacacat

SEQ ID NO: 20156 - DNA, 26 bp, Homo sapiens
gtggcagtgaggtttttaaacacatt

SEQ ID NO: 20157 - DNA, 26 bp, Homo sapiens
tggcagtgaggtttttaaacacattt

SEQ ID NO: 20158 - DNA, 26 bp, Homo sapiens
ggcagtgaggtttttaaacacatttg

SEQ ID NO: 20159 - DNA, 26 bp, Homo sapiens
gcagtgaggtttttaaacacatttga

SEQ ID NO: 20160 - DNA, 26 bp, Homo sapiens
cagtgaggtttttaaacacatttgac

SEQ ID NO: 20161 - DNA, 26 bp, Homo sapiens
agtgaggtttttaaacacatttgact

SEQ ID NO: 20162 - DNA, 26 bp, Homo sapiens
gtgaggtttttaaacacatttgactg

SEQ ID NO: 20163 - DNA, 26 bp, Homo sapiens
tgaggtttttaaacacatttgactgt

SEQ ID NO: 20164 - DNA, 26 bp, Homo sapiens
gaggtttttaaacacatttgactgtt

SEQ ID NO: 20165 - DNA, 26 bp, Homo sapiens
aggtttttaaacacatttgactgttt

SEQ ID NO: 20166 - DNA, 26 bp, Homo sapiens
ggtttttaaacacatttgactgtttt

SEQ ID NO: 20167 - DNA, 26 bp, Homo sapiens
gtttttaaacacatttgactgtttta

SEQ ID NO: 20168 - DNA, 26 bp, Homo sapiens
tttttaaacacatttgactgttttat

SEQ ID NO: 20169 - DNA, 26 bp, Homo sapiens
ttttaaacacatttgactgttttatg

SEQ ID NO: 20170 - DNA, 26 bp, Homo sapiens
tttaaacacatttgactgttttatgc

SEQ ID NO: 20171 - DNA, 26 bp, Homo sapiens
ttaaacacatttgactgttttatgct

SEQ ID NO: 20172 - DNA, 26 bp, Homo sapiens
taaacacatttgactgttttatgctc

SEQ ID NO: 20173 - DNA, 26 bp, Homo sapiens
aaacacatttgactgttttatgctca

SEQ ID NO: 20174 - DNA, 26 bp, Homo sapiens
aacacatttgactgttttatgctcag

SEQ ID NO: 20175 - DNA, 26 bp, Homo sapiens
acacatttgactgttttatgctcagc

SEQ ID NO: 20176 - DNA, 26 bp, Homo sapiens
cacatttgactgttttatgctcagca

SEQ ID NO: 20177 - DNA, 26 bp, Homo sapiens
acatttgactgttttatgctcagcaa

SEQ ID NO: 20178 - DNA, 26 bp, Homo sapiens
catttgactgttttatgctcagcaag

SEQ ID NO: 20179 - DNA, 26 bp, Homo sapiens
atttgactgttttatgctcagcaaga

SEQ ID NO: 20180 - DNA, 26 bp, Homo sapiens
tttgactgttttatgctcagcaagat

SEQ ID NO: 20181 - DNA, 26 bp, Homo sapiens
ttgactgttttatgctcagcaagatt

SEQ ID NO: 20182 - DNA, 26 bp, Homo sapiens
tgactgttttatgctcagcaagattg

SEQ ID NO: 20183 - DNA, 26 bp, Homo sapiens
gactgttttatgctcagcaagattgt

SEQ ID NO: 20184 - DNA, 26 bp, Homo sapiens
actgttttatgctcagcaagattgta

SEQ ID NO: 20185 - DNA, 26 bp, Homo sapiens
ctgttttatgctcagcaagattgtat

SEQ ID NO: 20186 - DNA, 26 bp, Homo sapiens
tgttttatgctcagcaagattgtata

SEQ ID NO: 20187 - DNA, 26 bp, Homo sapiens
gttttatgctcagcaagattgtataa

SEQ ID NO: 20188 - DNA, 26 bp, Homo sapiens
ttttatgctcagcaagattgtataat

SEQ ID NO: 20189 - DNA, 26 bp, Homo sapiens
tttatgctcagcaagattgtataatt

SEQ ID NO: 20190 - DNA, 26 bp, Homo sapiens
ttatgctcagcaagattgtataattc

SEQ ID NO: 20191 - DNA, 26 bp, Homo sapiens
tatgctcagcaagattgtataattcc

SEQ ID NO: 20192 - DNA, 26 bp, Homo sapiens
atgctcagcaagattgtataattccc

SEQ ID NO: 20193 - DNA, 26 bp, Homo sapiens
tgctcagcaagattgtataattccct

SEQ ID NO: 20194 - DNA, 26 bp, Homo sapiens
gctcagcaagattgtataattccctg

SEQ ID NO: 20195 - DNA, 26 bp, Homo sapiens
ctcagcaagattgtataattccctgc

SEQ ID NO: 20196 - DNA, 26 bp, Homo sapiens
tcagcaagattgtataattccctgca

SEQ ID NO: 20197 - DNA, 26 bp, Homo sapiens
cagcaagattgtataattccctgcat

SEQ ID NO: 20198 - DNA, 26 bp, Homo sapiens
agcaagattgtataattccctgcatc

SEQ ID NO: 20199 - DNA, 26 bp, Homo sapiens
gcaagattgtataattccctgcatcc

SEQ ID NO: 20200 - DNA, 26 bp, Homo sapiens
caagattgtataattccctgcatcct

SEQ ID NO: 20201 - DNA, 26 bp, Homo sapiens
aagattgtataattccctgcatcctc

SEQ ID NO: 20202 - DNA, 26 bp, Homo sapiens
agattgtataattccctgcatcctct

SEQ ID NO: 20203 - DNA, 26 bp, Homo sapiens
gattgtataattccctgcatcctctt

SEQ ID NO: 20204 - DNA, 26 bp, Homo sapiens
attgtataattccctgcatcctcttc

SEQ ID NO: 20205 - DNA, 26 bp, Homo sapiens
ttgtataattccctgcatcctcttca

SEQ ID NO: 20206 - DNA, 26 bp, Homo sapiens
tgtataattccctgcatcctcttcag

SEQ ID NO: 20207 - DNA, 26 bp, Homo sapiens
gtataattccctgcatcctcttcagt

SEQ ID NO: 20208 - DNA, 26 bp, Homo sapiens
tataattccctgcatcctcttcagtt

SEQ ID NO: 20209 - DNA, 26 bp, Homo sapiens
ataattccctgcatcctcttcagtta

SEQ ID NO: 20210 - DNA, 26 bp, Homo sapiens
taattccctgcatcctcttcagttac

SEQ ID NO: 20211 - DNA, 26 bp, Homo sapiens
aattccctgcatcctcttcagttacg

SEQ ID NO: 20212 - DNA, 26 bp, Homo sapiens
attccctgcatcctcttcagttacgt

SEQ ID NO: 20213 - DNA, 26 bp, Homo sapiens
ttccctgcatcctcttcagttacgtc

SEQ ID NO: 20214 - DNA, 26 bp, Homo sapiens
tccctgcatcctcttcagttacgtcc

SEQ ID NO: 20215 - DNA, 26 bp, Homo sapiens
ccctgcatcctcttcagttacgtcct

SEQ ID NO: 20216 - DNA, 26 bp, Homo sapiens
cctgcatcctcttcagttacgtcctt

SEQ ID NO: 20217 - DNA, 26 bp, Homo sapiens
ctgcatcctcttcagttacgtccttg

SEQ ID NO: 20218 - DNA, 26 bp, Homo sapiens
tgcatcctcttcagttacgtccttga

SEQ ID NO: 20219 - DNA, 26 bp, Homo sapiens
gcatcctcttcagttacgtccttgat

SEQ ID NO: 20220 - DNA, 26 bp, Homo sapiens
catcctcttcagttacgtccttgata

SEQ ID NO: 20221 - DNA, 26 bp, Homo sapiens
atcctcttcagttacgtccttgataa

SEQ ID NO: 20222 - DNA, 26 bp, Homo sapiens
tcctcttcagttacgtccttgataat

SEQ ID NO: 20223 - DNA, 26 bp, Homo sapiens
cctcttcagttacgtccttgataatt

SEQ ID NO: 20224 - DNA, 26 bp, Homo sapiens
ctcttcagttacgtccttgataatta

SEQ ID NO: 20225 - DNA, 26 bp, Homo sapiens
tcttcagttacgtccttgataattaa

SEQ ID NO: 20226 - DNA, 26 bp, Homo sapiens
cttcagttacgtccttgataattaac

SEQ ID NO: 20227 - DNA, 26 bp, Homo sapiens
ttcagttacgtccttgataattaacg

SEQ ID NO: 20228 - DNA, 26 bp, Homo sapiens
tcagttacgtccttgataattaacga

SEQ ID NO: 20229 - DNA, 26 bp, Homo sapiens
cagttacgtccttgataattaacgag

SEQ ID NO: 20230 - DNA, 26 bp, Homo sapiens
agttacgtccttgataattaacgagt

SEQ ID NO: 20231 - DNA, 26 bp, Homo sapiens
gttacgtccttgataattaacgagta

SEQ ID NO: 20232 - DNA, 26 bp, Homo sapiens
ttacgtccttgataattaacgagtag

SEQ ID NO: 20233 - DNA, 26 bp, Homo sapiens
tacgtccttgataattaacgagtagc

SEQ ID NO: 20234 - DNA, 26 bp, Homo sapiens
acgtccttgataattaacgagtagcc

SEQ ID NO: 20235 - DNA, 26 bp, Homo sapiens
cgtccttgataattaacgagtagcca

SEQ ID NO: 20236 - DNA, 26 bp, Homo sapiens
gtccttgataattaacgagtagccac

SEQ ID NO: 20237 - DNA, 26 bp, Homo sapiens
tccttgataattaacgagtagccacg

SEQ ID NO: 20238 - DNA, 26 bp, Homo sapiens
ccttgataattaacgagtagccacga

SEQ ID NO: 20239 - DNA, 26 bp, Homo sapiens
cttgataattaacgagtagccacgag

SEQ ID NO: 20240 - DNA, 26 bp, Homo sapiens
ttgataattaacgagtagccacgagt

SEQ ID NO: 20241 - DNA, 26 bp, Homo sapiens
tgataattaacgagtagccacgagtc

SEQ ID NO: 20242 - DNA, 26 bp, Homo sapiens
gataattaacgagtagccacgagtca

SEQ ID NO: 20243 - DNA, 26 bp, Homo sapiens
ataattaacgagtagccacgagtcaa

SEQ ID NO: 20244 - DNA, 26 bp, Homo sapiens
taattaacgagtagccacgagtcaaa

SEQ ID NO: 20245 - DNA, 26 bp, Homo sapiens
aattaacgagtagccacgagtcaaat

SEQ ID NO: 20246 - DNA, 26 bp, Homo sapiens
attaacgagtagccacgagtcaaata

SEQ ID NO: 20247 - DNA, 26 bp, Homo sapiens
ttaacgagtagccacgagtcaaatag

SEQ ID NO: 20248 - DNA, 26 bp, Homo sapiens
taacgagtagccacgagtcaaatagc

SEQ ID NO: 20249 - DNA, 26 bp, Homo sapiens
aacgagtagccacgagtcaaatagcg

SEQ ID NO: 20250 - DNA, 26 bp, Homo sapiens
acgagtagccacgagtcaaatagcga

SEQ ID NO: 20251 - DNA, 26 bp, Homo sapiens
cgagtagccacgagtcaaatagcgag

SEQ ID NO: 20252 - DNA, 26 bp, Homo sapiens
gagtagccacgagtcaaatagcgagc

SEQ ID NO: 20253 - DNA, 26 bp, Homo sapiens
agtagccacgagtcaaatagcgagca

SEQ ID NO: 20254 - DNA, 26 bp, Homo sapiens
gtagccacgagtcaaatagcgagcag

SEQ ID NO: 20255 - DNA, 26 bp, Homo sapiens
tagccacgagtcaaatagcgagcaga

SEQ ID NO: 20256 - DNA, 26 bp, Homo sapiens
agccacgagtcaaatagcgagcagat

SEQ ID NO: 20257 - DNA, 26 bp, Homo sapiens
gccacgagtcaaatagcgagcagatt

SEQ ID NO: 20258 - DNA, 26 bp, Homo sapiens
ccacgagtcaaatagcgagcagattt

SEQ ID NO: 20259 - DNA, 26 bp, Homo sapiens
cacgagtcaaatagcgagcagatttc

SEQ ID NO: 20260 - DNA, 26 bp, Homo sapiens
acgagtcaaatagcgagcagatttct

SEQ ID NO: 20261 - DNA, 26 bp, Homo sapiens
cgagtcaaatagcgagcagatttctc

SEQ ID NO: 20262 - DNA, 26 bp, Homo sapiens
gagtcaaatagcgagcagatttctca

SEQ ID NO: 20263 - DNA, 26 bp, Homo sapiens
agtcaaatagcgagcagatttctcag

SEQ ID NO: 20264 - DNA, 26 bp, Homo sapiens
gtcaaatagcgagcagatttctcagt

SEQ ID NO: 20265 - DNA, 26 bp, Homo sapiens
tcaaatagcgagcagatttctcagtc

SEQ ID NO: 20266 - DNA, 26 bp, Homo sapiens
caaatagcgagcagatttctcagtcg

SEQ ID NO: 20267 - DNA, 26 bp, Homo sapiens
aaatagcgagcagatttctcagtcgc

SEQ ID NO: 20268 - DNA, 26 bp, Homo sapiens
aatagcgagcagatttctcagtcgca

SEQ ID NO: 20269 - DNA, 26 bp, Homo sapiens
atagcgagcagatttctcagtcgcag

SEQ ID NO: 20270 - DNA, 26 bp, Homo sapiens
tagcgagcagatttctcagtcgcagg

SEQ ID NO: 20271 - DNA, 26 bp, Homo sapiens
agcgagcagatttctcagtcgcaggt

SEQ ID NO: 20272 - DNA, 26 bp, Homo sapiens
gcgagcagatttctcagtcgcaggta

SEQ ID NO: 20273 - DNA, 26 bp, Homo sapiens
cgagcagatttctcagtcgcaggtaa

SEQ ID NO: 20274 - DNA, 26 bp, Homo sapiens
gagcagatttctcagtcgcaggtaac

SEQ ID NO: 20275 - DNA, 26 bp, Homo sapiens
agcagatttctcagtcgcaggtaacc

SEQ ID NO: 20276 - DNA, 26 bp, Homo sapiens
gcagatttctcagtcgcaggtaaccc

SEQ ID NO: 20277 - DNA, 26 bp, Homo sapiens
cagatttctcagtcgcaggtaaccca

SEQ ID NO: 20278 - DNA, 26 bp, Homo sapiens
agatttctcagtcgcaggtaacccat

SEQ ID NO: 20279 - DNA, 26 bp, Homo sapiens
gatttctcagtcgcaggtaacccatc

SEQ ID NO: 20280 - DNA, 26 bp, Homo sapiens
atttctcagtcgcaggtaacccatct

SEQ ID NO: 20281 - DNA, 26 bp, Homo sapiens
tttctcagtcgcaggtaacccatctt

SEQ ID NO: 20282 - DNA, 26 bp, Homo sapiens
ttctcagtcgcaggtaacccatcttt

SEQ ID NO: 20283 - DNA, 26 bp, Homo sapiens
tctcagtcgcaggtaacccatctttt

SEQ ID NO: 20284 - DNA, 26 bp, Homo sapiens
ctcagtcgcaggtaacccatctttta

SEQ ID NO: 20285 - DNA, 26 bp, Homo sapiens
tcagtcgcaggtaacccatcttttaa

SEQ ID NO: 20286 - DNA, 26 bp, Homo sapiens
cagtcgcaggtaacccatcttttaac

SEQ ID NO: 20287 - DNA, 26 bp, Homo sapiens
agtcgcaggtaacccatcttttaacc

SEQ ID NO: 20288 - DNA, 26 bp, Homo sapiens
gtcgcaggtaacccatcttttaacca

SEQ ID NO: 20289 - DNA, 26 bp, Homo sapiens
tcgcaggtaacccatcttttaaccat

SEQ ID NO: 20290 - DNA, 26 bp, Homo sapiens
cgcaggtaacccatcttttaaccata

SEQ ID NO: 20291 - DNA, 26 bp, Homo sapiens
gcaggtaacccatcttttaaccatac

SEQ ID NO: 20292 - DNA, 26 bp, Homo sapiens
caggtaacccatcttttaaccataca

SEQ ID NO: 20293 - DNA, 26 bp, Homo sapiens
aggtaacccatcttttaaccatacaa

SEQ ID NO: 20294 - DNA, 26 bp, Homo sapiens
ggtaacccatcttttaaccatacaac

SEQ ID NO: 20295 - DNA, 26 bp, Homo sapiens
gtaacccatcttttaaccatacaact

SEQ ID NO: 20296 - DNA, 26 bp, Homo sapiens
taacccatcttttaaccatacaactt

SEQ ID NO: 20297 - DNA, 26 bp, Homo sapiens
aacccatcttttaaccatacaacttc

SEQ ID NO: 20298 - DNA, 26 bp, Homo sapiens
acccatcttttaaccatacaacttcc

SEQ ID NO: 20299 - DNA, 26 bp, Homo sapiens
cccatcttttaaccatacaacttccg

SEQ ID NO: 20300 - DNA, 26 bp, Homo sapiens
ccatcttttaaccatacaacttccgg

SEQ ID NO: 20301 - DNA, 26 bp, Homo sapiens
catcttttaaccatacaacttccggc

SEQ ID NO: 20302 - DNA, 26 bp, Homo sapiens
atcttttaaccatacaacttccggcg

SEQ ID NO: 20303 - DNA, 26 bp, Homo sapiens
tcttttaaccatacaacttccggcga

SEQ ID NO: 20304 - DNA, 26 bp, Homo sapiens
cttttaaccatacaacttccggcgag

SEQ ID NO: 20305 - DNA, 26 bp, Homo sapiens
ttttaaccatacaacttccggcgagg

SEQ ID NO: 20306 - DNA, 26 bp, Homo sapiens
tttaaccatacaacttccggcgaggg

SEQ ID NO: 20307 - DNA, 26 bp, Homo sapiens
ttaaccatacaacttccggcgaggga

SEQ ID NO: 20308 - DNA, 26 bp, Homo sapiens
taaccatacaacttccggcgagggaa

SEQ ID NO: 20309 - DNA, 26 bp, Homo sapiens
aaccatacaacttccggcgagggaaa

SEQ ID NO: 20310 - DNA, 26 bp, Homo sapiens
accatacaacttccggcgagggaaat

SEQ ID NO: 20311 - DNA, 26 bp, Homo sapiens
ccatacaacttccggcgagggaaatg

SEQ ID NO: 20312 - DNA, 26 bp, Homo sapiens
catacaacttccggcgagggaaatgc

SEQ ID NO: 20313 - DNA, 26 bp, Homo sapiens
atacaacttccggcgagggaaatgcc

SEQ ID NO: 20314 - DNA, 26 bp, Homo sapiens
tacaacttccggcgagggaaatgcct

SEQ ID NO: 20315 - DNA, 26 bp, Homo sapiens
acaacttccggcgagggaaatgcctt

SEQ ID NO: 20316 - DNA, 26 bp, Homo sapiens
caacttccggcgagggaaatgccttc

SEQ ID NO: 20317 - DNA, 26 bp, Homo sapiens
aacttccggcgagggaaatgccttca

SEQ ID NO: 20318 - DNA, 26 bp, Homo sapiens
acttccggcgagggaaatgccttcac

SEQ ID NO: 20319 - DNA, 26 bp, Homo sapiens
cttccggcgagggaaatgccttcact

SEQ ID NO: 20320 - DNA, 26 bp, Homo sapiens
ttccggcgagggaaatgccttcactt

SEQ ID NO: 20321 - DNA, 26 bp, Homo sapiens
tccggcgagggaaatgccttcacttt

SEQ ID NO: 20322 - DNA, 26 bp, Homo sapiens
ccggcgagggaaatgccttcactttc

SEQ ID NO: 20323 - DNA, 26 bp, Homo sapiens
cggcgagggaaatgccttcactttca

SEQ ID NO: 20324 - DNA, 26 bp, Homo sapiens
ggcgagggaaatgccttcactttcat

SEQ ID NO: 20325 - DNA, 26 bp, Homo sapiens
gcgagggaaatgccttcactttcata

SEQ ID NO: 20326 - DNA, 26 bp, Homo sapiens
cgagggaaatgccttcactttcatag

SEQ ID NO: 20327 - DNA, 26 bp, Homo sapiens
gagggaaatgccttcactttcataga

SEQ ID NO: 20328 - DNA, 26 bp, Homo sapiens
agggaaatgccttcactttcatagag

SEQ ID NO: 20329 - DNA, 26 bp, Homo sapiens
gggaaatgccttcactttcatagaga

SEQ ID NO: 20330 - DNA, 26 bp, Homo sapiens
ggaaatgccttcactttcatagagag

SEQ ID NO: 20331 - DNA, 26 bp, Homo sapiens
gaaatgccttcactttcatagagagc

SEQ ID NO: 20332 - DNA, 26 bp, Homo sapiens
aaatgccttcactttcatagagagcc

SEQ ID NO: 20333 - DNA, 26 bp, Homo sapiens
aatgccttcactttcatagagagccg

SEQ ID NO: 20334 - DNA, 26 bp, Homo sapiens
atgccttcactttcatagagagccgg

SEQ ID NO: 20335 - DNA, 26 bp, Homo sapiens
tgccttcactttcatagagagccggt

SEQ ID NO: 20336 - DNA, 26 bp, Homo sapiens
gccttcactttcatagagagccggta

SEQ ID NO: 20337 - DNA, 26 bp, Homo sapiens
ccttcactttcatagagagccggtaa

SEQ ID NO: 20338 - DNA, 26 bp, Homo sapiens
cttcactttcatagagagccggtaag

SEQ ID NO: 20339 - DNA, 26 bp, Homo sapiens
ttcactttcatagagagccggtaaga

SEQ ID NO: 20340 - DNA, 26 bp, Homo sapiens
tcactttcatagagagccggtaagac

SEQ ID NO: 20341 - DNA, 26 bp, Homo sapiens
cactttcatagagagccggtaagacc

SEQ ID NO: 20342 - DNA, 26 bp, Homo sapiens
actttcatagagagccggtaagaccg

SEQ ID NO: 20343 - DNA, 26 bp, Homo sapiens
ctttcatagagagccggtaagaccgc

SEQ ID NO: 20344 - DNA, 26 bp, Homo sapiens
tttcatagagagccggtaagaccgct

SEQ ID NO: 20345 - DNA, 26 bp, Homo sapiens
ttcatagagagccggtaagaccgctt

SEQ ID NO: 20346 - DNA, 26 bp, Homo sapiens
tcatagagagccggtaagaccgcttg

SEQ ID NO: 20347 - DNA, 26 bp, Homo sapiens
catagagagccggtaagaccgcttgc

SEQ ID NO: 20348 - DNA, 26 bp, Homo sapiens
atagagagccggtaagaccgcttgcc

SEQ ID NO: 20349 - DNA, 26 bp, Homo sapiens
tagagagccggtaagaccgcttgcca

SEQ ID NO: 20350 - DNA, 26 bp, Homo sapiens
agagagccggtaagaccgcttgccag

SEQ ID NO: 20351 - DNA, 26 bp, Homo sapiens
gagagccggtaagaccgcttgccagc

SEQ ID NO: 20352 - DNA, 26 bp, Homo sapiens
agagccggtaagaccgcttgccagct

SEQ ID NO: 20353 - DNA, 26 bp, Homo sapiens
gagccggtaagaccgcttgccagcta

SEQ ID NO: 20354 - DNA, 26 bp, Homo sapiens
agccggtaagaccgcttgccagctac

SEQ ID NO: 20355 - DNA, 26 bp, Homo sapiens
gccggtaagaccgcttgccagctacg

SEQ ID NO: 20356 - DNA, 26 bp, Homo sapiens
ccggtaagaccgcttgccagctacgg

SEQ ID NO: 20357 - DNA, 26 bp, Homo sapiens
cggtaagaccgcttgccagctacggt

SEQ ID NO: 20358 - DNA, 26 bp, Homo sapiens
ggtaagaccgcttgccagctacggtt

SEQ ID NO: 20359 - DNA, 26 bp, Homo sapiens
gtaagaccgcttgccagctacggttt

SEQ ID NO: 20360 - DNA, 26 bp, Homo sapiens
taagaccgcttgccagctacggtttc

SEQ ID NO: 20361 - DNA, 26 bp, Homo sapiens
aagaccgcttgccagctacggtttca

SEQ ID NO: 20362 - DNA, 26 bp, Homo sapiens
agaccgcttgccagctacggtttcaa

SEQ ID NO: 20363 - DNA, 26 bp, Homo sapiens
gaccgcttgccagctacggtttcaag

SEQ ID NO: 20364 - DNA, 26 bp, Homo sapiens
accgcttgccagctacggtttcaagc

SEQ ID NO: 20365 - DNA, 26 bp, Homo sapiens
ccgcttgccagctacggtttcaagca

SEQ ID NO: 20366 - DNA, 26 bp, Homo sapiens
cgcttgccagctacggtttcaagcac

SEQ ID NO: 20367 - DNA, 26 bp, Homo sapiens
gcttgccagctacggtttcaagcacc

SEQ ID NO: 20368 - DNA, 26 bp, Homo sapiens
cttgccagctacggtttcaagcacct

SEQ ID NO: 20369 - DNA, 26 bp, Homo sapiens
ttgccagctacggtttcaagcacctg

SEQ ID NO: 20370 - DNA, 26 bp, Homo sapiens
tgccagctacggtttcaagcacctgc

SEQ ID NO: 20371 - DNA, 26 bp, Homo sapiens
gccagctacggtttcaagcacctgct

SEQ ID NO: 20372 - DNA, 26 bp, Homo sapiens
ccagctacggtttcaagcacctgctg

SEQ ID NO: 20373 - DNA, 26 bp, Homo sapiens
cagctacggtttcaagcacctgctgt

SEQ ID NO: 20374 - DNA, 26 bp, Homo sapiens
agctacggtttcaagcacctgctgtt

SEQ ID NO: 20375 - DNA, 26 bp, Homo sapiens
gctacggtttcaagcacctgctgttt

SEQ ID NO: 20376 - DNA, 26 bp, Homo sapiens
ctacggtttcaagcacctgctgtttt

SEQ ID NO: 20377 - DNA, 26 bp, Homo sapiens
tacggtttcaagcacctgctgttttc

SEQ ID NO: 20378 - DNA, 26 bp, Homo sapiens
acggtttcaagcacctgctgttttcg

SEQ ID NO: 20379 - DNA, 26 bp, Homo sapiens
cggtttcaagcacctgctgttttcga

SEQ ID NO: 20380 - DNA, 26 bp, Homo sapiens
ggtttcaagcacctgctgttttcgat

SEQ ID NO: 20381 - DNA, 26 bp, Homo sapiens
gtttcaagcacctgctgttttcgatg

SEQ ID NO: 20382 - DNA, 26 bp, Homo sapiens
tttcaagcacctgctgttttcgatgt

SEQ ID NO: 20383 - DNA, 26 bp, Homo sapiens
ttcaagcacctgctgttttcgatgtt

SEQ ID NO: 20384 - DNA, 26 bp, Homo sapiens
tcaagcacctgctgttttcgatgttt

SEQ ID NO: 20385 - DNA, 26 bp, Homo sapiens
caagcacctgctgttttcgatgtttc

SEQ ID NO: 20386 - DNA, 26 bp, Homo sapiens
aagcacctgctgttttcgatgtttca

SEQ ID NO: 20387 - DNA, 26 bp, Homo sapiens
agcacctgctgttttcgatgtttcac

SEQ ID NO: 20388 - DNA, 26 bp, Homo sapiens
gcacctgctgttttcgatgtttcaca

SEQ ID NO: 20389 - DNA, 26 bp, Homo sapiens
cacctgctgttttcgatgtttcacag

SEQ ID NO: 20390 - DNA, 26 bp, Homo sapiens
acctgctgttttcgatgtttcacagt

SEQ ID NO: 20391 - DNA, 26 bp, Homo sapiens
cctgctgttttcgatgtttcacagtg

SEQ ID NO: 20392 - DNA, 26 bp, Homo sapiens
ctgctgttttcgatgtttcacagtga

SEQ ID NO: 20393 - DNA, 26 bp, Homo sapiens
tgctgttttcgatgtttcacagtgat

SEQ ID NO: 20394 - DNA, 26 bp, Homo sapiens
gctgttttcgatgtttcacagtgatg

SEQ ID NO: 20395 - DNA, 26 bp, Homo sapiens
ctgttttcgatgtttcacagtgatga

SEQ ID NO: 20396 - DNA, 26 bp, Homo sapiens
tgttttcgatgtttcacagtgatgaa

SEQ ID NO: 20397 - DNA, 26 bp, Homo sapiens
gttttcgatgtttcacagtgatgaat

SEQ ID NO: 20398 - DNA, 26 bp, Homo sapiens
ttttcgatgtttcacagtgatgaatg

SEQ ID NO: 20399 - DNA, 26 bp, Homo sapiens
tttcgatgtttcacagtgatgaatgc

SEQ ID NO: 20400 - DNA, 26 bp, Homo sapiens
ttcgatgtttcacagtgatgaatgct

SEQ ID NO: 20401 - DNA, 26 bp, Homo sapiens
tcgatgtttcacagtgatgaatgctt

SEQ ID NO: 20402 - DNA, 26 bp, Homo sapiens
cgatgtttcacagtgatgaatgcttt

SEQ ID NO: 20403 - DNA, 26 bp, Homo sapiens
gatgtttcacagtgatgaatgcttta

SEQ ID NO: 20404 - DNA, 26 bp, Homo sapiens
atgtttcacagtgatgaatgctttat

SEQ ID NO: 20405 - DNA, 26 bp, Homo sapiens
tgtttcacagtgatgaatgctttatc

SEQ ID NO: 20406 - DNA, 26 bp, Homo sapiens
gtttcacagtgatgaatgctttatca

SEQ ID NO: 20407 - DNA, 26 bp, Homo sapiens
tttcacagtgatgaatgctttatcat

SEQ ID NO: 20408 - DNA, 26 bp, Homo sapiens
ttcacagtgatgaatgctttatcata

SEQ ID NO: 20409 - DNA, 26 bp, Homo sapiens
tcacagtgatgaatgctttatcatat

SEQ ID NO: 20410 - DNA, 26 bp, Homo sapiens
cacagtgatgaatgctttatcatata

SEQ ID NO: 20411 - DNA, 26 bp, Homo sapiens
acagtgatgaatgctttatcatatat

SEQ ID NO: 20412 - DNA, 26 bp, Homo sapiens
cagtgatgaatgctttatcatatata

SEQ ID NO: 20413 - DNA, 26 bp, Homo sapiens
agtgatgaatgctttatcatatatat

SEQ ID NO: 20414 - DNA, 26 bp, Homo sapiens
gtgatgaatgctttatcatatatatg

SEQ ID NO: 20415 - DNA, 26 bp, Homo sapiens
tgatgaatgctttatcatatatatgc

SEQ ID NO: 20416 - DNA, 26 bp, Homo sapiens
gatgaatgctttatcatatatatgca

SEQ ID NO: 20417 - DNA, 26 bp, Homo sapiens
atgaatgctttatcatatatatgcac

SEQ ID NO: 20418 - DNA, 26 bp, Homo sapiens
tgaatgctttatcatatatatgcact

SEQ ID NO: 20419 - DNA, 26 bp, Homo sapiens
gaatgctttatcatatatatgcactg

SEQ ID NO: 20420 - DNA, 26 bp, Homo sapiens
aatgctttatcatatatatgcactga

SEQ ID NO: 20421 - DNA, 26 bp, Homo sapiens
atgctttatcatatatatgcactgag

SEQ ID NO: 20422 - DNA, 26 bp, Homo sapiens
tgctttatcatatatatgcactgagg

SEQ ID NO: 20423 - DNA, 26 bp, Homo sapiens
gctttatcatatatatgcactgaggt

SEQ ID NO: 20424 - DNA, 26 bp, Homo sapiens
ctttatcatatatatgcactgaggtg

SEQ ID NO: 20425 - DNA, 26 bp, Homo sapiens
tttatcatatatatgcactgaggtgt

SEQ ID NO: 20426 - DNA, 26 bp, Homo sapiens
ttatcatatatatgcactgaggtgtt

SEQ ID NO: 20427 - DNA, 26 bp, Homo sapiens
tatcatatatatgcactgaggtgtta

SEQ ID NO: 20428 - DNA, 26 bp, Homo sapiens
atcatatatatgcactgaggtgttaa

SEQ ID NO: 20429 - DNA, 26 bp, Homo sapiens
tcatatatatgcactgaggtgttaac

SEQ ID NO: 20430 - DNA, 26 bp, Homo sapiens
catatatatgcactgaggtgttaaca

SEQ ID NO: 20431 - DNA, 26 bp, Homo sapiens
atatatatgcactgaggtgttaacag

SEQ ID NO: 20432 - DNA, 26 bp, Homo sapiens
tatatatgcactgaggtgttaacaga

SEQ ID NO: 20433 - DNA, 26 bp, Homo sapiens
atatatgcactgaggtgttaacagat

SEQ ID NO: 20434 - DNA, 26 bp, Homo sapiens
tatatgcactgaggtgttaacagatt

SEQ ID NO: 20435 - DNA, 26 bp, Homo sapiens
atatgcactgaggtgttaacagattt

SEQ ID NO: 20436 - DNA, 26 bp, Homo sapiens
tatgcactgaggtgttaacagatttg

SEQ ID NO: 20437 - DNA, 26 bp, Homo sapiens
atgcactgaggtgttaacagatttga

SEQ ID NO: 20438 - DNA, 26 bp, Homo sapiens
tgcactgaggtgttaacagatttgaa

SEQ ID NO: 20439 - DNA, 26 bp, Homo sapiens
gcactgaggtgttaacagatttgaat

SEQ ID NO: 20440 - DNA, 26 bp, Homo sapiens
cactgaggtgttaacagatttgaatg

SEQ ID NO: 20441 - DNA, 26 bp, Homo sapiens
actgaggtgttaacagatttgaatga

SEQ ID NO: 20442 - DNA, 26 bp, Homo sapiens
ctgaggtgttaacagatttgaatgat

SEQ ID NO: 20443 - DNA, 26 bp, Homo sapiens
tgaggtgttaacagatttgaatgatg

SEQ ID NO: 20444 - DNA, 26 bp, Homo sapiens
gaggtgttaacagatttgaatgatgg

SEQ ID NO: 20445 - DNA, 26 bp, Homo sapiens
aggtgttaacagatttgaatgatggt

SEQ ID NO: 20446 - DNA, 26 bp, Homo sapiens
ggtgttaacagatttgaatgatggtc

SEQ ID NO: 20447 - DNA, 26 bp, Homo sapiens
gtgttaacagatttgaatgatggtcc

SEQ ID NO: 20448 - DNA, 26 bp, Homo sapiens
tgttaacagatttgaatgatggtcca

SEQ ID NO: 20449 - DNA, 26 bp, Homo sapiens
gttaacagatttgaatgatggtccac

SEQ ID NO: 20450 - DNA, 26 bp, Homo sapiens
ttaacagatttgaatgatggtccact

SEQ ID NO: 20451 - DNA, 26 bp, Homo sapiens
taacagatttgaatgatggtccactc

SEQ ID NO: 20452 - DNA, 26 bp, Homo sapiens
aacagatttgaatgatggtccactcc

SEQ ID NO: 20453 - DNA, 26 bp, Homo sapiens
acagatttgaatgatggtccactcct

SEQ ID NO: 20454 - DNA, 26 bp, Homo sapiens
cagatttgaatgatggtccactcctt

SEQ ID NO: 20455 - DNA, 26 bp, Homo sapiens
agatttgaatgatggtccactcctta

SEQ ID NO: 20456 - DNA, 26 bp, Homo sapiens
gatttgaatgatggtccactccttac

SEQ ID NO: 20457 - DNA, 26 bp, Homo sapiens
atttgaatgatggtccactccttaca

SEQ ID NO: 20458 - DNA, 26 bp, Homo sapiens
tttgaatgatggtccactccttacac

SEQ ID NO: 20459 - DNA, 26 bp, Homo sapiens
ttgaatgatggtccactccttacacg

SEQ ID NO: 20460 - DNA, 26 bp, Homo sapiens
tgaatgatggtccactccttacacga

SEQ ID NO: 20461 - DNA, 26 bp, Homo sapiens
gaatgatggtccactccttacacgac

SEQ ID NO: 20462 - DNA, 26 bp, Homo sapiens
aatgatggtccactccttacacgaca

SEQ ID NO: 20463 - DNA, 26 bp, Homo sapiens
atgatggtccactccttacacgacaa

SEQ ID NO: 20464 - DNA, 26 bp, Homo sapiens
tgatggtccactccttacacgacaag

SEQ ID NO: 20465 - DNA, 26 bp, Homo sapiens
gatggtccactccttacacgacaagt

SEQ ID NO: 20466 - DNA, 26 bp, Homo sapiens
atggtccactccttacacgacaagta

SEQ ID NO: 20467 - DNA, 26 bp, Homo sapiens
tggtccactccttacacgacaagtat

SEQ ID NO: 20468 - DNA, 26 bp, Homo sapiens
ggtccactccttacacgacaagtata

SEQ ID NO: 20469 - DNA, 26 bp, Homo sapiens
gtccactccttacacgacaagtataa

SEQ ID NO: 20470 - DNA, 26 bp, Homo sapiens
tccactccttacacgacaagtataaa

SEQ ID NO: 20471 - DNA, 26 bp, Homo sapiens
ccactccttacacgacaagtataaag

SEQ ID NO: 20472 - DNA, 26 bp, Homo sapiens
cactccttacacgacaagtataaagt

SEQ ID NO: 20473 - DNA, 26 bp, Homo sapiens
actccttacacgacaagtataaagtc

SEQ ID NO: 20474 - DNA, 26 bp, Homo sapiens
ctccttacacgacaagtataaagtcc

SEQ ID NO: 20475 - DNA, 26 bp, Homo sapiens
tccttacacgacaagtataaagtcct

SEQ ID NO: 20476 - DNA, 26 bp, Homo sapiens
ccttacacgacaagtataaagtcctt

SEQ ID NO: 20477 - DNA, 26 bp, Homo sapiens
cttacacgacaagtataaagtccttt

SEQ ID NO: 20478 - DNA, 26 bp, Homo sapiens
ttacacgacaagtataaagtcctttg

SEQ ID NO: 20479 - DNA, 26 bp, Homo sapiens
tacacgacaagtataaagtcctttgt

SEQ ID NO: 20480 - DNA, 26 bp, Homo sapiens
acacgacaagtataaagtcctttgtc

SEQ ID NO: 20481 - DNA, 26 bp, Homo sapiens
cacgacaagtataaagtcctttgtct

SEQ ID NO: 20482 - DNA, 26 bp, Homo sapiens
acgacaagtataaagtcctttgtctt

SEQ ID NO: 20483 - DNA, 26 bp, Homo sapiens
cgacaagtataaagtcctttgtcttt

SEQ ID NO: 20484 - DNA, 26 bp, Homo sapiens
gacaagtataaagtcctttgtctttg

SEQ ID NO: 20485 - DNA, 26 bp, Homo sapiens
acaagtataaagtcctttgtctttgt

SEQ ID NO: 20486 - DNA, 26 bp, Homo sapiens
caagtataaagtcctttgtctttgtt

SEQ ID NO: 20487 - DNA, 26 bp, Homo sapiens
aagtataaagtcctttgtctttgttc

SEQ ID NO: 20488 - DNA, 26 bp, Homo sapiens
agtataaagtcctttgtctttgttct

SEQ ID NO: 20489 - DNA, 26 bp, Homo sapiens
gtataaagtcctttgtctttgttctg

SEQ ID NO: 20490 - DNA, 26 bp, Homo sapiens
tataaagtcctttgtctttgttctgc

SEQ ID NO: 20491 - DNA, 26 bp, Homo sapiens
ataaagtcctttgtctttgttctgca

SEQ ID NO: 20492 - DNA, 26 bp, Homo sapiens
taaagtcctttgtctttgttctgcat

SEQ ID NO: 20493 - DNA, 26 bp, Homo sapiens
aaagtcctttgtctttgttctgcatt

SEQ ID NO: 20494 - DNA, 26 bp, Homo sapiens
aagtcctttgtctttgttctgcattt

SEQ ID NO: 20495 - DNA, 26 bp, Homo sapiens
agtcctttgtctttgttctgcatttt

SEQ ID NO: 20496 - DNA, 26 bp, Homo sapiens
gtcctttgtctttgttctgcattttg

SEQ ID NO: 20497 - DNA, 26 bp, Homo sapiens
tcctttgtctttgttctgcattttgt

SEQ ID NO: 20498 - DNA, 26 bp, Homo sapiens
cctttgtctttgttctgcattttgtc

SEQ ID NO: 20499 - DNA, 26 bp, Homo sapiens
ctttgtctttgttctgcattttgtca

SEQ ID NO: 20500 - DNA, 26 bp, Homo sapiens
tttgtctttgttctgcattttgtcaa

SEQ ID NO: 20501 - DNA, 26 bp, Homo sapiens
ttgtctttgttctgcattttgtcaat

SEQ ID NO: 20502 - DNA, 26 bp, Homo sapiens
tgtctttgttctgcattttgtcaata

SEQ ID NO: 20503 - DNA, 26 bp, Homo sapiens
gtctttgttctgcattttgtcaatag

SEQ ID NO: 20504 - DNA, 26 bp, Homo sapiens
tctttgttctgcattttgtcaatagt

SEQ ID NO: 20505 - DNA, 26 bp, Homo sapiens
ctttgttctgcattttgtcaatagta

SEQ ID NO: 20506 - DNA, 26 bp, Homo sapiens
tttgttctgcattttgtcaatagtaa

SEQ ID NO: 20507 - DNA, 26 bp, Homo sapiens
ttgttctgcattttgtcaatagtaag

SEQ ID NO: 20508 - DNA, 26 bp, Homo sapiens
tgttctgcattttgtcaatagtaaga

SEQ ID NO: 20509 - DNA, 26 bp, Homo sapiens
gttctgcattttgtcaatagtaagaa

SEQ ID NO: 20510 - DNA, 26 bp, Homo sapiens
ttctgcattttgtcaatagtaagaac

SEQ ID NO: 20511 - DNA, 26 bp, Homo sapiens
tctgcattttgtcaatagtaagaaca

SEQ ID NO: 20512 - DNA, 26 bp, Homo sapiens
ctgcattttgtcaatagtaagaacac

SEQ ID NO: 20513 - DNA, 26 bp, Homo sapiens
tgcattttgtcaatagtaagaacact

SEQ ID NO: 20514 - DNA, 26 bp, Homo sapiens
gcattttgtcaatagtaagaacactg

SEQ ID NO: 20515 - DNA, 26 bp, Homo sapiens
cattttgtcaatagtaagaacactgt

SEQ ID NO: 20516 - DNA, 26 bp, Homo sapiens
attttgtcaatagtaagaacactgta

SEQ ID NO: 20517 - DNA, 26 bp, Homo sapiens
ttttgtcaatagtaagaacactgtag

SEQ ID NO: 20518 - DNA, 26 bp, Homo sapiens
tttgtcaatagtaagaacactgtaga

SEQ ID NO: 20519 - DNA, 26 bp, Homo sapiens
ttgtcaatagtaagaacactgtagaa

SEQ ID NO: 20520 - DNA, 26 bp, Homo sapiens
tgtcaatagtaagaacactgtagaat

SEQ ID NO: 20521 - DNA, 26 bp, Homo sapiens
gtcaatagtaagaacactgtagaata

SEQ ID NO: 20522 - DNA, 26 bp, Homo sapiens
tcaatagtaagaacactgtagaatat

SEQ ID NO: 20523 - DNA, 26 bp, Homo sapiens
caatagtaagaacactgtagaatatg

SEQ ID NO: 20524 - DNA, 26 bp, Homo sapiens
aatagtaagaacactgtagaatatgt

SEQ ID NO: 20525 - DNA, 26 bp, Homo sapiens
atagtaagaacactgtagaatatgtt

SEQ ID NO: 20526 - DNA, 26 bp, Homo sapiens
tagtaagaacactgtagaatatgttg

SEQ ID NO: 20527 - DNA, 26 bp, Homo sapiens
agtaagaacactgtagaatatgttgg

SEQ ID NO: 20528 - DNA, 26 bp, Homo sapiens
gtaagaacactgtagaatatgttggc

SEQ ID NO: 20529 - DNA, 26 bp, Homo sapiens
taagaacactgtagaatatgttggca

SEQ ID NO: 20530 - DNA, 26 bp, Homo sapiens
aagaacactgtagaatatgttggcat

SEQ ID NO: 20531 - DNA, 26 bp, Homo sapiens
agaacactgtagaatatgttggcatg

SEQ ID NO: 20532 - DNA, 26 bp, Homo sapiens
gaacactgtagaatatgttggcatgg

SEQ ID NO: 20533 - DNA, 26 bp, Homo sapiens
aacactgtagaatatgttggcatggg

SEQ ID NO: 20534 - DNA, 26 bp, Homo sapiens
acactgtagaatatgttggcatggga

SEQ ID NO: 20535 - DNA, 26 bp, Homo sapiens
cactgtagaatatgttggcatgggaa

SEQ ID NO: 20536 - DNA, 26 bp, Homo sapiens
actgtagaatatgttggcatgggaat

SEQ ID NO: 20537 - DNA, 26 bp, Homo sapiens
ctgtagaatatgttggcatgggaatt

SEQ ID NO: 20538 - DNA, 26 bp, Homo sapiens
tgtagaatatgttggcatgggaattg

SEQ ID NO: 20539 - DNA, 26 bp, Homo sapiens
gtagaatatgttggcatgggaattgc

SEQ ID NO: 20540 - DNA, 26 bp, Homo sapiens
tagaatatgttggcatgggaattgct

SEQ ID NO: 20541 - DNA, 26 bp, Homo sapiens
agaatatgttggcatgggaattgctt

SEQ ID NO: 20542 - DNA, 26 bp, Homo sapiens
gaatatgttggcatgggaattgcttt

SEQ ID NO: 20543 - DNA, 26 bp, Homo sapiens
aatatgttggcatgggaattgctttg

SEQ ID NO: 20544 - DNA, 26 bp, Homo sapiens
atatgttggcatgggaattgctttgg

SEQ ID NO: 20545 - DNA, 26 bp, Homo sapiens
tatgttggcatgggaattgctttggt

SEQ ID NO: 20546 - DNA, 26 bp, Homo sapiens
atgttggcatgggaattgctttggtc

SEQ ID NO: 20547 - DNA, 26 bp, Homo sapiens
tgttggcatgggaattgctttggtca

SEQ ID NO: 20548 - DNA, 26 bp, Homo sapiens
gttggcatgggaattgctttggtcaa

SEQ ID NO: 20549 - DNA, 26 bp, Homo sapiens
ttggcatgggaattgctttggtcaat

SEQ ID NO: 20550 - DNA, 26 bp, Homo sapiens
tggcatgggaattgctttggtcaatt

SEQ ID NO: 20551 - DNA, 26 bp, Homo sapiens
ggcatgggaattgctttggtcaattc

SEQ ID NO: 20552 - DNA, 26 bp, Homo sapiens
gcatgggaattgctttggtcaattcg

SEQ ID NO: 20553 - DNA, 26 bp, Homo sapiens
catgggaattgctttggtcaattcgt

SEQ ID NO: 20554 - DNA, 26 bp, Homo sapiens
atgggaattgctttggtcaattcgtc

SEQ ID NO: 20555 - DNA, 26 bp, Homo sapiens
tgggaattgctttggtcaattcgtcg

SEQ ID NO: 20556 - DNA, 26 bp, Homo sapiens
gggaattgctttggtcaattcgtcgc

SEQ ID NO: 20557 - DNA, 26 bp, Homo sapiens
ggaattgctttggtcaattcgtcgcc

SEQ ID NO: 20558 - DNA, 26 bp, Homo sapiens
gaattgctttggtcaattcgtcgcct

SEQ ID NO: 20559 - DNA, 26 bp, Homo sapiens
aattgctttggtcaattcgtcgcctt

SEQ ID NO: 20560 - DNA, 26 bp, Homo sapiens
attgctttggtcaattcgtcgcctta

SEQ ID NO: 20561 - DNA, 26 bp, Homo sapiens
ttgctttggtcaattcgtcgccttac

SEQ ID NO: 20562 - DNA, 26 bp, Homo sapiens
tgctttggtcaattcgtcgccttacg

SEQ ID NO: 20563 - DNA, 26 bp, Homo sapiens
gctttggtcaattcgtcgccttacgg

SEQ ID NO: 20564 - DNA, 26 bp, Homo sapiens
ctttggtcaattcgtcgccttacgga

SEQ ID NO: 20565 - DNA, 26 bp, Homo sapiens
tttggtcaattcgtcgccttacggaa

SEQ ID NO: 20566 - DNA, 26 bp, Homo sapiens
ttggtcaattcgtcgccttacggaag

SEQ ID NO: 20567 - DNA, 26 bp, Homo sapiens
tggtcaattcgtcgccttacggaagc

SEQ ID NO: 20568 - DNA, 26 bp, Homo sapiens
ggtcaattcgtcgccttacggaagct

SEQ ID NO: 20569 - DNA, 26 bp, Homo sapiens
gtcaattcgtcgccttacggaagctc

SEQ ID NO: 20570 - DNA, 26 bp, Homo sapiens
tcaattcgtcgccttacggaagctct

SEQ ID NO: 20571 - DNA, 26 bp, Homo sapiens
caattcgtcgccttacggaagctctc

SEQ ID NO: 20572 - DNA, 26 bp, Homo sapiens
aattcgtcgccttacggaagctctct

SEQ ID NO: 20573 - DNA, 26 bp, Homo sapiens
attcgtcgccttacggaagctctctt

SEQ ID NO: 20574 - DNA, 26 bp, Homo sapiens
ttcgtcgccttacggaagctctctta

SEQ ID NO: 20575 - DNA, 26 bp, Homo sapiens
tcgtcgccttacggaagctctcttat

SEQ ID NO: 20576 - DNA, 26 bp, Homo sapiens
cgtcgccttacggaagctctcttatt

SEQ ID NO: 20577 - DNA, 26 bp, Homo sapiens
gtcgccttacggaagctctcttattt

SEQ ID NO: 20578 - DNA, 26 bp, Homo sapiens
tcgccttacggaagctctcttatttt

SEQ ID NO: 20579 - DNA, 26 bp, Homo sapiens
cgccttacggaagctctcttattttt

SEQ ID NO: 20580 - DNA, 26 bp, Homo sapiens
gccttacggaagctctcttatttttt

SEQ ID NO: 20581 - DNA, 26 bp, Homo sapiens
ccttacggaagctctcttattttttt

SEQ ID NO: 20582 - DNA, 26 bp, Homo sapiens
cttacggaagctctcttatttttttc

SEQ ID NO: 20583 - DNA, 26 bp, Homo sapiens
ttacggaagctctcttatttttttca

SEQ ID NO: 20584 - DNA, 26 bp, Homo sapiens
tacggaagctctcttatttttttcat

SEQ ID NO: 20585 - DNA, 26 bp, Homo sapiens
acggaagctctcttatttttttcatc

SEQ ID NO: 20586 - DNA, 26 bp, Homo sapiens
cggaagctctcttatttttttcatca

SEQ ID NO: 20587 - DNA, 26 bp, Homo sapiens
ggaagctctcttatttttttcatcag

SEQ ID NO: 20588 - DNA, 26 bp, Homo sapiens
gaagctctcttatttttttcatcagg

SEQ ID NO: 20589 - DNA, 26 bp, Homo sapiens
aagctctcttatttttttcatcaggg

SEQ ID NO: 20590 - DNA, 26 bp, Homo sapiens
agctctcttatttttttcatcagggt

SEQ ID NO: 20591 - DNA, 26 bp, Homo sapiens
gctctcttatttttttcatcagggta

SEQ ID NO: 20592 - DNA, 26 bp, Homo sapiens
ctctcttatttttttcatcagggtaa

SEQ ID NO: 20593 - DNA, 26 bp, Homo sapiens
tctcttatttttttcatcagggtaac

SEQ ID NO: 20594 - DNA, 26 bp, Homo sapiens
ctcttatttttttcatcagggtaact

SEQ ID NO: 20595 - DNA, 26 bp, Homo sapiens
tcttatttttttcatcagggtaactc

SEQ ID NO: 20596 - DNA, 26 bp, Homo sapiens
cttatttttttcatcagggtaactcc

SEQ ID NO: 20597 - DNA, 26 bp, Homo sapiens
ttatttttttcatcagggtaactcca

SEQ ID NO: 20598 - DNA, 26 bp, Homo sapiens
tatttttttcatcagggtaactccag

SEQ ID NO: 20599 - DNA, 26 bp, Homo sapiens
atttttttcatcagggtaactccagg

SEQ ID NO: 20600 - DNA, 26 bp, Homo sapiens
tttttttcatcagggtaactccaggt

SEQ ID NO: 20601 - DNA, 26 bp, Homo sapiens
ttttttcatcagggtaactccaggtc

SEQ ID NO: 20602 - DNA, 26 bp, Homo sapiens
tttttcatcagggtaactccaggtca

SEQ ID NO: 20603 - DNA, 26 bp, Homo sapiens
ttttcatcagggtaactccaggtcat

SEQ ID NO: 20604 - DNA, 26 bp, Homo sapiens
tttcatcagggtaactccaggtcatt

SEQ ID NO: 20605 - DNA, 26 bp, Homo sapiens
ttcatcagggtaactccaggtcattt

SEQ ID NO: 20606 - DNA, 26 bp, Homo sapiens
tcatcagggtaactccaggtcatttg

SEQ ID NO: 20607 - DNA, 26 bp, Homo sapiens
catcagggtaactccaggtcatttga

SEQ ID NO: 20608 - DNA, 26 bp, Homo sapiens
atcagggtaactccaggtcatttgaa

SEQ ID NO: 20609 - DNA, 26 bp, Homo sapiens
tcagggtaactccaggtcatttgaac

SEQ ID NO: 20610 - DNA, 26 bp, Homo sapiens
cagggtaactccaggtcatttgaact

SEQ ID NO: 20611 - DNA, 26 bp, Homo sapiens
agggtaactccaggtcatttgaactc

SEQ ID NO: 20612 - DNA, 26 bp, Homo sapiens
gggtaactccaggtcatttgaactct

SEQ ID NO: 20613 - DNA, 26 bp, Homo sapiens
ggtaactccaggtcatttgaactctc

SEQ ID NO: 20614 - DNA, 26 bp, Homo sapiens
gtaactccaggtcatttgaactctcg

SEQ ID NO: 20615 - DNA, 26 bp, Homo sapiens
taactccaggtcatttgaactctcgt

SEQ ID NO: 20616 - DNA, 26 bp, Homo sapiens
aactccaggtcatttgaactctcgtg

SEQ ID NO: 20617 - DNA, 26 bp, Homo sapiens
actccaggtcatttgaactctcgtgt

SEQ ID NO: 20618 - DNA, 26 bp, Homo sapiens
ctccaggtcatttgaactctcgtgtt

SEQ ID NO: 20619 - DNA, 26 bp, Homo sapiens
tccaggtcatttgaactctcgtgttc

SEQ ID NO: 20620 - DNA, 26 bp, Homo sapiens
ccaggtcatttgaactctcgtgttca

SEQ ID NO: 20621 - DNA, 26 bp, Homo sapiens
caggtcatttgaactctcgtgttcaa

SEQ ID NO: 20622 - DNA, 26 bp, Homo sapiens
aggtcatttgaactctcgtgttcaag

SEQ ID NO: 20623 - DNA, 26 bp, Homo sapiens
ggtcatttgaactctcgtgttcaagg

SEQ ID NO: 20624 - DNA, 26 bp, Homo sapiens
gtcatttgaactctcgtgttcaaggg

SEQ ID NO: 20625 - DNA, 26 bp, Homo sapiens
tcatttgaactctcgtgttcaaggga

SEQ ID NO: 20626 - DNA, 26 bp, Homo sapiens
catttgaactctcgtgttcaagggag

SEQ ID NO: 20627 - DNA, 26 bp, Homo sapiens
atttgaactctcgtgttcaagggagt

SEQ ID NO: 20628 - DNA, 26 bp, Homo sapiens
tttgaactctcgtgttcaagggagtg

SEQ ID NO: 20629 - DNA, 26 bp, Homo sapiens
ttgaactctcgtgttcaagggagtgg

SEQ ID NO: 20630 - DNA, 26 bp, Homo sapiens
tgaactctcgtgttcaagggagtggt

SEQ ID NO: 20631 - DNA, 26 bp, Homo sapiens
gaactctcgtgttcaagggagtggta

SEQ ID NO: 20632 - DNA, 26 bp, Homo sapiens
aactctcgtgttcaagggagtggtag

SEQ ID NO: 20633 - DNA, 26 bp, Homo sapiens
actctcgtgttcaagggagtggtagc

SEQ ID NO: 20634 - DNA, 26 bp, Homo sapiens
ctctcgtgttcaagggagtggtagca

SEQ ID NO: 20635 - DNA, 26 bp, Homo sapiens
tctcgtgttcaagggagtggtagcag

SEQ ID NO: 20636 - DNA, 26 bp, Homo sapiens
ctcgtgttcaagggagtggtagcagt

SEQ ID NO: 20637 - DNA, 26 bp, Homo sapiens
tcgtgttcaagggagtggtagcagta

SEQ ID NO: 20638 - DNA, 26 bp, Homo sapiens
cgtgttcaagggagtggtagcagtac

SEQ ID NO: 20639 - DNA, 26 bp, Homo sapiens
gtgttcaagggagtggtagcagtaca

SEQ ID NO: 20640 - DNA, 26 bp, Homo sapiens
tgttcaagggagtggtagcagtacaa

SEQ ID NO: 20641 - DNA, 26 bp, Homo sapiens
gttcaagggagtggtagcagtacaat

SEQ ID NO: 20642 - DNA, 26 bp, Homo sapiens
ttcaagggagtggtagcagtacaatt

SEQ ID NO: 20643 - DNA, 26 bp, Homo sapiens
tcaagggagtggtagcagtacaattg

SEQ ID NO: 20644 - DNA, 26 bp, Homo sapiens
caagggagtggtagcagtacaattga

SEQ ID NO: 20645 - DNA, 26 bp, Homo sapiens
aagggagtggtagcagtacaattgag

SEQ ID NO: 20646 - DNA, 26 bp, Homo sapiens
agggagtggtagcagtacaattgagg

SEQ ID NO: 20647 - DNA, 26 bp, Homo sapiens
gggagtggtagcagtacaattgagga

SEQ ID NO: 20648 - DNA, 26 bp, Homo sapiens
ggagtggtagcagtacaattgaggac

SEQ ID NO: 20649 - DNA, 26 bp, Homo sapiens
gagtggtagcagtacaattgaggaca

SEQ ID NO: 20650 - DNA, 26 bp, Homo sapiens
agtggtagcagtacaattgaggacaa

SEQ ID NO: 20651 - DNA, 26 bp, Homo sapiens
gtggtagcagtacaattgaggacaag

SEQ ID NO: 20652 - DNA, 26 bp, Homo sapiens
tggtagcagtacaattgaggacaaga

SEQ ID NO: 20653 - DNA, 26 bp, Homo sapiens
ggtagcagtacaattgaggacaagag

SEQ ID NO: 20654 - DNA, 26 bp, Homo sapiens
gtagcagtacaattgaggacaagagt

SEQ ID NO: 20655 - DNA, 26 bp, Homo sapiens
tagcagtacaattgaggacaagagta

SEQ ID NO: 20656 - DNA, 26 bp, Homo sapiens
agcagtacaattgaggacaagagtat

SEQ ID NO: 20657 - DNA, 26 bp, Homo sapiens
gcagtacaattgaggacaagagtatg

SEQ ID NO: 20658 - DNA, 26 bp, Homo sapiens
cagtacaattgaggacaagagtatgg

SEQ ID NO: 20659 - DNA, 26 bp, Homo sapiens
agtacaattgaggacaagagtatggc

SEQ ID NO: 20660 - DNA, 26 bp, Homo sapiens
gtacaattgaggacaagagtatggcc

SEQ ID NO: 20661 - DNA, 26 bp, Homo sapiens
tacaattgaggacaagagtatggcct

SEQ ID NO: 20662 - DNA, 26 bp, Homo sapiens
acaattgaggacaagagtatggcctc

SEQ ID NO: 20663 - DNA, 26 bp, Homo sapiens
caattgaggacaagagtatggcctct

SEQ ID NO: 20664 - DNA, 26 bp, Homo sapiens
aattgaggacaagagtatggcctcta

SEQ ID NO: 20665 - DNA, 26 bp, Homo sapiens
attgaggacaagagtatggcctctaa

SEQ ID NO: 20666 - DNA, 26 bp, Homo sapiens
ttgaggacaagagtatggcctctaag

SEQ ID NO: 20667 - DNA, 26 bp, Homo sapiens
tgaggacaagagtatggcctctaagt

SEQ ID NO: 20668 - DNA, 26 bp, Homo sapiens
gaggacaagagtatggcctctaagta

SEQ ID NO: 20669 - DNA, 26 bp, Homo sapiens
aggacaagagtatggcctctaagtaa

SEQ ID NO: 20670 - DNA, 26 bp, Homo sapiens
ggacaagagtatggcctctaagtaat

SEQ ID NO: 20671 - DNA, 26 bp, Homo sapiens
gacaagagtatggcctctaagtaatt

SEQ ID NO: 20672 - DNA, 26 bp, Homo sapiens
acaagagtatggcctctaagtaattt

SEQ ID NO: 20673 - DNA, 26 bp, Homo sapiens
caagagtatggcctctaagtaatttg

SEQ ID NO: 20674 - DNA, 26 bp, Homo sapiens
aagagtatggcctctaagtaatttga

SEQ ID NO: 20675 - DNA, 26 bp, Homo sapiens
agagtatggcctctaagtaatttgac

SEQ ID NO: 20676 - DNA, 26 bp, Homo sapiens
gagtatggcctctaagtaatttgact

SEQ ID NO: 20677 - DNA, 26 bp, Homo sapiens
agtatggcctctaagtaatttgactg

SEQ ID NO: 20678 - DNA, 26 bp, Homo sapiens
gtatggcctctaagtaatttgactgg

SEQ ID NO: 20679 - DNA, 26 bp, Homo sapiens
tatggcctctaagtaatttgactggg

SEQ ID NO: 20680 - DNA, 26 bp, Homo sapiens
atggcctctaagtaatttgactgggc

SEQ ID NO: 20681 - DNA, 26 bp, Homo sapiens
tggcctctaagtaatttgactgggcg

SEQ ID NO: 20682 - DNA, 26 bp, Homo sapiens
ggcctctaagtaatttgactgggcgt

SEQ ID NO: 20683 - DNA, 26 bp, Homo sapiens
gcctctaagtaatttgactgggcgtg

SEQ ID NO: 20684 - DNA, 26 bp, Homo sapiens
cctctaagtaatttgactgggcgtgg

SEQ ID NO: 20685 - DNA, 26 bp, Homo sapiens
ctctaagtaatttgactgggcgtggt

SEQ ID NO: 20686 - DNA, 26 bp, Homo sapiens
tctaagtaatttgactgggcgtggtg

SEQ ID NO: 20687 - DNA, 26 bp, Homo sapiens
ctaagtaatttgactgggcgtggtgt

SEQ ID NO: 20688 - DNA, 26 bp, Homo sapiens
taagtaatttgactgggcgtggtgtg

SEQ ID NO: 20689 - DNA, 26 bp, Homo sapiens
aagtaatttgactgggcgtggtgtgc

SEQ ID NO: 20690 - DNA, 26 bp, Homo sapiens
agtaatttgactgggcgtggtgtgct

SEQ ID NO: 20691 - DNA, 26 bp, Homo sapiens
gtaatttgactgggcgtggtgtgctt

SEQ ID NO: 20692 - DNA, 26 bp, Homo sapiens
taatttgactgggcgtggtgtgctta

SEQ ID NO: 20693 - DNA, 26 bp, Homo sapiens
aatttgactgggcgtggtgtgcttat

SEQ ID NO: 20694 - DNA, 26 bp, Homo sapiens
atttgactgggcgtggtgtgcttatt

SEQ ID NO: 20695 - DNA, 26 bp, Homo sapiens
tttgactgggcgtggtgtgcttattt

SEQ ID NO: 20696 - DNA, 26 bp, Homo sapiens
ttgactgggcgtggtgtgcttatttg

SEQ ID NO: 20697 - DNA, 26 bp, Homo sapiens
tgactgggcgtggtgtgcttatttgg

SEQ ID NO: 20698 - DNA, 26 bp, Homo sapiens
gactgggcgtggtgtgcttatttgga

SEQ ID NO: 20699 - DNA, 26 bp, Homo sapiens
actgggcgtggtgtgcttatttggac

SEQ ID NO: 20700 - DNA, 26 bp, Homo sapiens
ctgggcgtggtgtgcttatttggaca

SEQ ID NO: 20701 - DNA, 26 bp, Homo sapiens
tgggcgtggtgtgcttatttggacat

SEQ ID NO: 20702 - DNA, 26 bp, Homo sapiens
gggcgtggtgtgcttatttggacatc

SEQ ID NO: 20703 - DNA, 26 bp, Homo sapiens
ggcgtggtgtgcttatttggacatct

SEQ ID NO: 20704 - DNA, 26 bp, Homo sapiens
gcgtggtgtgcttatttggacatcta

SEQ ID NO: 20705 - DNA, 26 bp, Homo sapiens
cgtggtgtgcttatttggacatctat

SEQ ID NO: 20706 - DNA, 26 bp, Homo sapiens
gtggtgtgcttatttggacatctatg

SEQ ID NO: 20707 - DNA, 26 bp, Homo sapiens
tggtgtgcttatttggacatctatga

SEQ ID NO: 20708 - DNA, 26 bp, Homo sapiens
ggtgtgcttatttggacatctatgat

SEQ ID NO: 20709 - DNA, 26 bp, Homo sapiens
gtgtgcttatttggacatctatgatt

SEQ ID NO: 20710 - DNA, 26 bp, Homo sapiens
tgtgcttatttggacatctatgattg

SEQ ID NO: 20711 - DNA, 26 bp, Homo sapiens
gtgcttatttggacatctatgattgt

SEQ ID NO: 20712 - DNA, 26 bp, Homo sapiens
tgcttatttggacatctatgattgta

SEQ ID NO: 20713 - DNA, 26 bp, Homo sapiens
gcttatttggacatctatgattgtat

SEQ ID NO: 20714 - DNA, 26 bp, Homo sapiens
cttatttggacatctatgattgtatt

SEQ ID NO: 20715 - DNA, 26 bp, Homo sapiens
ttatttggacatctatgattgtattg

SEQ ID NO: 20716 - DNA, 26 bp, Homo sapiens
tatttggacatctatgattgtattgg

SEQ ID NO: 20717 - DNA, 26 bp, Homo sapiens
atttggacatctatgattgtattggt

SEQ ID NO: 20718 - DNA, 26 bp, Homo sapiens
tttggacatctatgattgtattggtt

SEQ ID NO: 20719 - DNA, 26 bp, Homo sapiens
ttggacatctatgattgtattggttt

SEQ ID NO: 20720 - DNA, 26 bp, Homo sapiens
tggacatctatgattgtattggtttg

SEQ ID NO: 20721 - DNA, 26 bp, Homo sapiens
ggacatctatgattgtattggtttgt

SEQ ID NO: 20722 - DNA, 26 bp, Homo sapiens
gacatctatgattgtattggtttgtc

SEQ ID NO: 20723 - DNA, 26 bp, Homo sapiens
acatctatgattgtattggtttgtcg

SEQ ID NO: 20724 - DNA, 26 bp, Homo sapiens
catctatgattgtattggtttgtcga

SEQ ID NO: 20725 - DNA, 26 bp, Homo sapiens
atctatgattgtattggtttgtcgat

SEQ ID NO: 20726 - DNA, 26 bp, Homo sapiens
tctatgattgtattggtttgtcgatg

SEQ ID NO: 20727 - DNA, 26 bp, Homo sapiens
ctatgattgtattggtttgtcgatgt

SEQ ID NO: 20728 - DNA, 26 bp, Homo sapiens
tatgattgtattggtttgtcgatgtg

SEQ ID NO: 20729 - DNA, 26 bp, Homo sapiens
atgattgtattggtttgtcgatgtgt

SEQ ID NO: 20730 - DNA, 26 bp, Homo sapiens
tgattgtattggtttgtcgatgtgtg

SEQ ID NO: 20731 - DNA, 26 bp, Homo sapiens
gattgtattggtttgtcgatgtgtga

SEQ ID NO: 20732 - DNA, 26 bp, Homo sapiens
attgtattggtttgtcgatgtgtgag

SEQ ID NO: 20733 - DNA, 26 bp, Homo sapiens
ttgtattggtttgtcgatgtgtgaga

SEQ ID NO: 20734 - DNA, 26 bp, Homo sapiens
tgtattggtttgtcgatgtgtgagat

SEQ ID NO: 20735 - DNA, 26 bp, Homo sapiens
gtattggtttgtcgatgtgtgagata

SEQ ID NO: 20736 - DNA, 26 bp, Homo sapiens
tattggtttgtcgatgtgtgagatag

SEQ ID NO: 20737 - DNA, 26 bp, Homo sapiens
attggtttgtcgatgtgtgagatagt

SEQ ID NO: 20738 - DNA, 26 bp, Homo sapiens
ttggtttgtcgatgtgtgagatagtt

SEQ ID NO: 20739 - DNA, 26 bp, Homo sapiens
tggtttgtcgatgtgtgagatagttt

SEQ ID NO: 20740 - DNA, 26 bp, Homo sapiens
ggtttgtcgatgtgtgagatagtttg

SEQ ID NO: 20741 - DNA, 26 bp, Homo sapiens
gtttgtcgatgtgtgagatagtttgt

SEQ ID NO: 20742 - DNA, 26 bp, Homo sapiens
tttgtcgatgtgtgagatagtttgtc

SEQ ID NO: 20743 - DNA, 26 bp, Homo sapiens
ttgtcgatgtgtgagatagtttgtct

SEQ ID NO: 20744 - DNA, 26 bp, Homo sapiens
tgtcgatgtgtgagatagtttgtctt

SEQ ID NO: 20745 - DNA, 26 bp, Homo sapiens
gtcgatgtgtgagatagtttgtctta

SEQ ID NO: 20746 - DNA, 26 bp, Homo sapiens
tcgatgtgtgagatagtttgtcttat

SEQ ID NO: 20747 - DNA, 26 bp, Homo sapiens
cgatgtgtgagatagtttgtcttata

SEQ ID NO: 20748 - DNA, 26 bp, Homo sapiens
gatgtgtgagatagtttgtcttatac

SEQ ID NO: 20749 - DNA, 26 bp, Homo sapiens
atgtgtgagatagtttgtcttataca

SEQ ID NO: 20750 - DNA, 26 bp, Homo sapiens
tgtgtgagatagtttgtcttatacaa

SEQ ID NO: 20751 - DNA, 26 bp, Homo sapiens
gtgtgagatagtttgtcttatacaaa

SEQ ID NO: 20752 - DNA, 26 bp, Homo sapiens
tgtgagatagtttgtcttatacaaat

SEQ ID NO: 20753 - DNA, 26 bp, Homo sapiens
gtgagatagtttgtcttatacaaatg

SEQ ID NO: 20754 - DNA, 26 bp, Homo sapiens
tgagatagtttgtcttatacaaatgc

SEQ ID NO: 20755 - DNA, 26 bp, Homo sapiens
gagatagtttgtcttatacaaatgcc

SEQ ID NO: 20756 - DNA, 26 bp, Homo sapiens
agatagtttgtcttatacaaatgccc

SEQ ID NO: 20757 - DNA, 26 bp, Homo sapiens
gatagtttgtcttatacaaatgccca

SEQ ID NO: 20758 - DNA, 26 bp, Homo sapiens
atagtttgtcttatacaaatgcccat

SEQ ID NO: 20759 - DNA, 26 bp, Homo sapiens
tagtttgtcttatacaaatgcccatt

SEQ ID NO: 20760 - DNA, 26 bp, Homo sapiens
agtttgtcttatacaaatgcccattg

SEQ ID NO: 20761 - DNA, 26 bp, Homo sapiens
gtttgtcttatacaaatgcccattga

SEQ ID NO: 20762 - DNA, 26 bp, Homo sapiens
tttgtcttatacaaatgcccattgac

SEQ ID NO: 20763 - DNA, 26 bp, Homo sapiens
ttgtcttatacaaatgcccattgact

SEQ ID NO: 20764 - DNA, 26 bp, Homo sapiens
tgtcttatacaaatgcccattgactg

SEQ ID NO: 20765 - DNA, 26 bp, Homo sapiens
gtcttatacaaatgcccattgactgt

SEQ ID NO: 20766 - DNA, 26 bp, Homo sapiens
tcttatacaaatgcccattgactgtt

SEQ ID NO: 20767 - DNA, 26 bp, Homo sapiens
cttatacaaatgcccattgactgttg

SEQ ID NO: 20768 - DNA, 26 bp, Homo sapiens
ttatacaaatgcccattgactgttgc

SEQ ID NO: 20769 - DNA, 26 bp, Homo sapiens
tatacaaatgcccattgactgttgct

SEQ ID NO: 20770 - DNA, 26 bp, Homo sapiens
atacaaatgcccattgactgttgctt

SEQ ID NO: 20771 - DNA, 26 bp, Homo sapiens
tacaaatgcccattgactgttgcttc

SEQ ID NO: 20772 - DNA, 26 bp, Homo sapiens
acaaatgcccattgactgttgcttca

SEQ ID NO: 20773 - DNA, 26 bp, Homo sapiens
caaatgcccattgactgttgcttcac

SEQ ID NO: 20774 - DNA, 26 bp, Homo sapiens
aaatgcccattgactgttgcttcaca

SEQ ID NO: 20775 - DNA, 26 bp, Homo sapiens
aatgcccattgactgttgcttcacag

SEQ ID NO: 20776 - DNA, 26 bp, Homo sapiens
atgcccattgactgttgcttcacagg

SEQ ID NO: 20777 - DNA, 26 bp, Homo sapiens
tgcccattgactgttgcttcacaggt

SEQ ID NO: 20778 - DNA, 26 bp, Homo sapiens
gcccattgactgttgcttcacaggtc

SEQ ID NO: 20779 - DNA, 26 bp, Homo sapiens
cccattgactgttgcttcacaggtca

SEQ ID NO: 20780 - DNA, 26 bp, Homo sapiens
ccattgactgttgcttcacaggtcag

SEQ ID NO: 20781 - DNA, 26 bp, Homo sapiens
cattgactgttgcttcacaggtcaga

SEQ ID NO: 20782 - DNA, 26 bp, Homo sapiens
attgactgttgcttcacaggtcagaa

SEQ ID NO: 20783 - DNA, 26 bp, Homo sapiens
ttgactgttgcttcacaggtcagaag

SEQ ID NO: 20784 - DNA, 26 bp, Homo sapiens
tgactgttgcttcacaggtcagaagc

SEQ ID NO: 20785 - DNA, 26 bp, Homo sapiens
gactgttgcttcacaggtcagaagcc

SEQ ID NO: 20786 - DNA, 26 bp, Homo sapiens
actgttgcttcacaggtcagaagccc

SEQ ID NO: 20787 - DNA, 26 bp, Homo sapiens
ctgttgcttcacaggtcagaagccct

SEQ ID NO: 20788 - DNA, 26 bp, Homo sapiens
tgttgcttcacaggtcagaagcccta

SEQ ID NO: 20789 - DNA, 26 bp, Homo sapiens
gttgcttcacaggtcagaagccctat

SEQ ID NO: 20790 - DNA, 26 bp, Homo sapiens
ttgcttcacaggtcagaagccctatt

SEQ ID NO: 20791 - DNA, 26 bp, Homo sapiens
tgcttcacaggtcagaagccctattt

SEQ ID NO: 20792 - DNA, 26 bp, Homo sapiens
gcttcacaggtcagaagccctatttc

SEQ ID NO: 20793 - DNA, 26 bp, Homo sapiens
cttcacaggtcagaagccctatttct

SEQ ID NO: 20794 - DNA, 26 bp, Homo sapiens
ttcacaggtcagaagccctatttctt

SEQ ID NO: 20795 - DNA, 26 bp, Homo sapiens
tcacaggtcagaagccctatttcttt

SEQ ID NO: 20796 - DNA, 26 bp, Homo sapiens
cacaggtcagaagccctatttctttg

SEQ ID NO: 20797 - DNA, 26 bp, Homo sapiens
acaggtcagaagccctatttctttgt

SEQ ID NO: 20798 - DNA, 26 bp, Homo sapiens
caggtcagaagccctatttctttgta

SEQ ID NO: 20799 - DNA, 26 bp, Homo sapiens
aggtcagaagccctatttctttgtac

SEQ ID NO: 20800 - DNA, 26 bp, Homo sapiens
ggtcagaagccctatttctttgtacg

SEQ ID NO: 20801 - DNA, 26 bp, Homo sapiens
gtcagaagccctatttctttgtacgt

SEQ ID NO: 20802 - DNA, 26 bp, Homo sapiens
tcagaagccctatttctttgtacgtt

SEQ ID NO: 20803 - DNA, 26 bp, Homo sapiens
cagaagccctatttctttgtacgttg

SEQ ID NO: 20804 - DNA, 26 bp, Homo sapiens
agaagccctatttctttgtacgttgc

SEQ ID NO: 20805 - DNA, 26 bp, Homo sapiens
gaagccctatttctttgtacgttgca

SEQ ID NO: 20806 - DNA, 26 bp, Homo sapiens
aagccctatttctttgtacgttgcat

SEQ ID NO: 20807 - DNA, 26 bp, Homo sapiens
agccctatttctttgtacgttgcatt

SEQ ID NO: 20808 - DNA, 26 bp, Homo sapiens
gccctatttctttgtacgttgcattt

SEQ ID NO: 20809 - DNA, 26 bp, Homo sapiens
ccctatttctttgtacgttgcatttg

SEQ ID NO: 20810 - DNA, 26 bp, Homo sapiens
cctatttctttgtacgttgcatttga

SEQ ID NO: 20811 - DNA, 26 bp, Homo sapiens
ctatttctttgtacgttgcatttgat

SEQ ID NO: 20812 - DNA, 26 bp, Homo sapiens
tatttctttgtacgttgcatttgata

SEQ ID NO: 20813 - DNA, 26 bp, Homo sapiens
atttctttgtacgttgcatttgatat

SEQ ID NO: 20814 - DNA, 26 bp, Homo sapiens
tttctttgtacgttgcatttgatatg

SEQ ID NO: 20815 - DNA, 26 bp, Homo sapiens
ttctttgtacgttgcatttgatatga

SEQ ID NO: 20816 - DNA, 26 bp, Homo sapiens
tctttgtacgttgcatttgatatgat

SEQ ID NO: 20817 - DNA, 26 bp, Homo sapiens
ctttgtacgttgcatttgatatgatg

SEQ ID NO: 20818 - DNA, 26 bp, Homo sapiens
tttgtacgttgcatttgatatgatga

SEQ ID NO: 20819 - DNA, 26 bp, Homo sapiens
ttgtacgttgcatttgatatgatgaa

SEQ ID NO: 20820 - DNA, 26 bp, Homo sapiens
tgtacgttgcatttgatatgatgaag

SEQ ID NO: 20821 - DNA, 26 bp, Homo sapiens
gtacgttgcatttgatatgatgaagc

SEQ ID NO: 20822 - DNA, 26 bp, Homo sapiens
tacgttgcatttgatatgatgaagcc

SEQ ID NO: 20823 - DNA, 26 bp, Homo sapiens
acgttgcatttgatatgatgaagccc

SEQ ID NO: 20824 - DNA, 26 bp, Homo sapiens
cgttgcatttgatatgatgaagccct

SEQ ID NO: 20825 - DNA, 26 bp, Homo sapiens
gttgcatttgatatgatgaagccctt

SEQ ID NO: 20826 - DNA, 26 bp, Homo sapiens
ttgcatttgatatgatgaagcccttt

SEQ ID NO: 20827 - DNA, 26 bp, Homo sapiens
tgcatttgatatgatgaagccctttc

SEQ ID NO: 20828 - DNA, 26 bp, Homo sapiens
gcatttgatatgatgaagccctttct

SEQ ID NO: 20829 - DNA, 26 bp, Homo sapiens
catttgatatgatgaagccctttcta

SEQ ID NO: 20830 - DNA, 26 bp, Homo sapiens
atttgatatgatgaagccctttctac

SEQ ID NO: 20831 - DNA, 26 bp, Homo sapiens
tttgatatgatgaagccctttctact

SEQ ID NO: 20832 - DNA, 26 bp, Homo sapiens
ttgatatgatgaagccctttctactg

SEQ ID NO: 20833 - DNA, 26 bp, Homo sapiens
tgatatgatgaagccctttctactgt

SEQ ID NO: 20834 - DNA, 26 bp, Homo sapiens
gatatgatgaagccctttctactgtc

SEQ ID NO: 20835 - DNA, 26 bp, Homo sapiens
atatgatgaagccctttctactgtcc

SEQ ID NO: 20836 - DNA, 26 bp, Homo sapiens
tatgatgaagccctttctactgtccc

SEQ ID NO: 20837 - DNA, 26 bp, Homo sapiens
atgatgaagccctttctactgtccca

SEQ ID NO: 20838 - DNA, 26 bp, Homo sapiens
tgatgaagccctttctactgtcccag

SEQ ID NO: 20839 - DNA, 26 bp, Homo sapiens
gatgaagccctttctactgtcccaga

SEQ ID NO: 20840 - DNA, 26 bp, Homo sapiens
atgaagccctttctactgtcccagat

SEQ ID NO: 20841 - DNA, 26 bp, Homo sapiens
tgaagccctttctactgtcccagatt

SEQ ID NO: 20842 - DNA, 26 bp, Homo sapiens
gaagccctttctactgtcccagatta

SEQ ID NO: 20843 - DNA, 26 bp, Homo sapiens
aagccctttctactgtcccagattat

SEQ ID NO: 20844 - DNA, 26 bp, Homo sapiens
agccctttctactgtcccagattatg

SEQ ID NO: 20845 - DNA, 26 bp, Homo sapiens
gccctttctactgtcccagattatgc

SEQ ID NO: 20846 - DNA, 26 bp, Homo sapiens
ccctttctactgtcccagattatgcg

SEQ ID NO: 20847 - DNA, 26 bp, Homo sapiens
cctttctactgtcccagattatgcgt

SEQ ID NO: 20848 - DNA, 26 bp, Homo sapiens
ctttctactgtcccagattatgcgtt

SEQ ID NO: 20849 - DNA, 26 bp, Homo sapiens
tttctactgtcccagattatgcgttt

SEQ ID NO: 20850 - DNA, 26 bp, Homo sapiens
ttctactgtcccagattatgcgtttt

SEQ ID NO: 20851 - DNA, 26 bp, Homo sapiens
tctactgtcccagattatgcgttttc

SEQ ID NO: 20852 - DNA, 26 bp, Homo sapiens
ctactgtcccagattatgcgttttcc

SEQ ID NO: 20853 - DNA, 26 bp, Homo sapiens
tactgtcccagattatgcgttttcca

SEQ ID NO: 20854 - DNA, 26 bp, Homo sapiens
actgtcccagattatgcgttttccat

SEQ ID NO: 20855 - DNA, 26 bp, Homo sapiens
ctgtcccagattatgcgttttccatc

SEQ ID NO: 20856 - DNA, 26 bp, Homo sapiens
tgtcccagattatgcgttttccatca

SEQ ID NO: 20857 - DNA, 26 bp, Homo sapiens
gtcccagattatgcgttttccatcag

SEQ ID NO: 20858 - DNA, 26 bp, Homo sapiens
tcccagattatgcgttttccatcagg

SEQ ID NO: 20859 - DNA, 26 bp, Homo sapiens
cccagattatgcgttttccatcaggg

SEQ ID NO: 20860 - DNA, 26 bp, Homo sapiens
ccagattatgcgttttccatcaggga

SEQ ID NO: 20861 - DNA, 26 bp, Homo sapiens
cagattatgcgttttccatcagggat

SEQ ID NO: 20862 - DNA, 26 bp, Homo sapiens
agattatgcgttttccatcagggatc

SEQ ID NO: 20863 - DNA, 26 bp, Homo sapiens
gattatgcgttttccatcagggatca

SEQ ID NO: 20864 - DNA, 26 bp, Homo sapiens
attatgcgttttccatcagggatcaa

SEQ ID NO: 20865 - DNA, 26 bp, Homo sapiens
ttatgcgttttccatcagggatcaaa

SEQ ID NO: 20866 - DNA, 26 bp, Homo sapiens
tatgcgttttccatcagggatcaaag

SEQ ID NO: 20867 - DNA, 26 bp, Homo sapiens
atgcgttttccatcagggatcaaagt

SEQ ID NO: 20868 - DNA, 26 bp, Homo sapiens
tgcgttttccatcagggatcaaagtg

SEQ ID NO: 20869 - DNA, 26 bp, Homo sapiens
gcgttttccatcagggatcaaagtgt

SEQ ID NO: 20870 - DNA, 26 bp, Homo sapiens
cgttttccatcagggatcaaagtgtc

SEQ ID NO: 20871 - DNA, 26 bp, Homo sapiens
gttttccatcagggatcaaagtgtca

SEQ ID NO: 20872 - DNA, 26 bp, Homo sapiens
ttttccatcagggatcaaagtgtcaa

SEQ ID NO: 20873 - DNA, 26 bp, Homo sapiens
tttccatcagggatcaaagtgtcaag

SEQ ID NO: 20874 - DNA, 26 bp, Homo sapiens
ttccatcagggatcaaagtgtcaagt

SEQ ID NO: 20875 - DNA, 26 bp, Homo sapiens
tccatcagggatcaaagtgtcaagtg

SEQ ID NO: 20876 - DNA, 26 bp, Homo sapiens
ccatcagggatcaaagtgtcaagtgg

SEQ ID NO: 20877 - DNA, 26 bp, Homo sapiens
catcagggatcaaagtgtcaagtgga

SEQ ID NO: 20878 - DNA, 26 bp, Homo sapiens
atcagggatcaaagtgtcaagtggaa

SEQ ID NO: 20879 - DNA, 26 bp, Homo sapiens
tcagggatcaaagtgtcaagtggaaa

SEQ ID NO: 20880 - DNA, 26 bp, Homo sapiens
cagggatcaaagtgtcaagtggaaac

SEQ ID NO: 20881 - DNA, 26 bp, Homo sapiens
agggatcaaagtgtcaagtggaaact

SEQ ID NO: 20882 - DNA, 26 bp, Homo sapiens
gggatcaaagtgtcaagtggaaactt

SEQ ID NO: 20883 - DNA, 26 bp, Homo sapiens
ggatcaaagtgtcaagtggaaacttt

SEQ ID NO: 20884 - DNA, 26 bp, Homo sapiens
gatcaaagtgtcaagtggaaactttt

SEQ ID NO: 20885 - DNA, 26 bp, Homo sapiens
atcaaagtgtcaagtggaaacttttt

SEQ ID NO: 20886 - DNA, 26 bp, Homo sapiens
tcaaagtgtcaagtggaaactttttt

SEQ ID NO: 20887 - DNA, 26 bp, Homo sapiens
caaagtgtcaagtggaaactttttta

SEQ ID NO: 20888 - DNA, 26 bp, Homo sapiens
aaagtgtcaagtggaaacttttttaa

SEQ ID NO: 20889 - DNA, 26 bp, Homo sapiens
aagtgtcaagtggaaacttttttaaa

SEQ ID NO: 20890 - DNA, 26 bp, Homo sapiens
agtgtcaagtggaaacttttttaaag

SEQ ID NO: 20891 - DNA, 26 bp, Homo sapiens
gtgtcaagtggaaacttttttaaagt

SEQ ID NO: 20892 - DNA, 26 bp, Homo sapiens
tgtcaagtggaaacttttttaaagta

SEQ ID NO: 20893 - DNA, 26 bp, Homo sapiens
gtcaagtggaaacttttttaaagtaa

SEQ ID NO: 20894 - DNA, 26 bp, Homo sapiens
tcaagtggaaacttttttaaagtaac

SEQ ID NO: 20895 - DNA, 26 bp, Homo sapiens
caagtggaaacttttttaaagtaaca

SEQ ID NO: 20896 - DNA, 26 bp, Homo sapiens
aagtggaaacttttttaaagtaacag

SEQ ID NO: 20897 - DNA, 26 bp, Homo sapiens
agtggaaacttttttaaagtaacagt

SEQ ID NO: 20898 - DNA, 26 bp, Homo sapiens
gtggaaacttttttaaagtaacagtg

SEQ ID NO: 20899 - DNA, 26 bp, Homo sapiens
tggaaacttttttaaagtaacagtga

SEQ ID NO: 20900 - DNA, 26 bp, Homo sapiens
ggaaacttttttaaagtaacagtgat

SEQ ID NO: 20901 - DNA, 26 bp, Homo sapiens
gaaacttttttaaagtaacagtgatg

SEQ ID NO: 20902 - DNA, 26 bp, Homo sapiens
aaacttttttaaagtaacagtgatgt

SEQ ID NO: 20903 - DNA, 26 bp, Homo sapiens
aacttttttaaagtaacagtgatgtt

SEQ ID NO: 20904 - DNA, 26 bp, Homo sapiens
acttttttaaagtaacagtgatgtta

SEQ ID NO: 20905 - DNA, 26 bp, Homo sapiens
cttttttaaagtaacagtgatgttag

SEQ ID NO: 20906 - DNA, 26 bp, Homo sapiens
ttttttaaagtaacagtgatgttagg

SEQ ID NO: 20907 - DNA, 26 bp, Homo sapiens
tttttaaagtaacagtgatgttaggt

SEQ ID NO: 20908 - DNA, 26 bp, Homo sapiens
ttttaaagtaacagtgatgttaggtg

SEQ ID NO: 20909 - DNA, 26 bp, Homo sapiens
tttaaagtaacagtgatgttaggtga

SEQ ID NO: 20910 - DNA, 26 bp, Homo sapiens
ttaaagtaacagtgatgttaggtgac

SEQ ID NO: 20911 - DNA, 26 bp, Homo sapiens
taaagtaacagtgatgttaggtgacg

SEQ ID NO: 20912 - DNA, 26 bp, Homo sapiens
aaagtaacagtgatgttaggtgacgt

SEQ ID NO: 20913 - DNA, 26 bp, Homo sapiens
aagtaacagtgatgttaggtgacgta

SEQ ID NO: 20914 - DNA, 26 bp, Homo sapiens
agtaacagtgatgttaggtgacgtaa

SEQ ID NO: 20915 - DNA, 26 bp, Homo sapiens
gtaacagtgatgttaggtgacgtaac

SEQ ID NO: 20916 - DNA, 26 bp, Homo sapiens
taacagtgatgttaggtgacgtaacc

SEQ ID NO: 20917 - DNA, 26 bp, Homo sapiens
aacagtgatgttaggtgacgtaaccc

SEQ ID NO: 20918 - DNA, 26 bp, Homo sapiens
acagtgatgttaggtgacgtaacccg

SEQ ID NO: 20919 - DNA, 26 bp, Homo sapiens
cagtgatgttaggtgacgtaacccgg

SEQ ID NO: 20920 - DNA, 26 bp, Homo sapiens
agtgatgttaggtgacgtaacccggc

SEQ ID NO: 20921 - DNA, 26 bp, Homo sapiens
gtgatgttaggtgacgtaacccggca

SEQ ID NO: 20922 - DNA, 26 bp, Homo sapiens
tgatgttaggtgacgtaacccggcag

SEQ ID NO: 20923 - DNA, 26 bp, Homo sapiens
gatgttaggtgacgtaacccggcagg

SEQ ID NO: 20924 - DNA, 26 bp, Homo sapiens
atgttaggtgacgtaacccggcaggg

SEQ ID NO: 20925 - DNA, 26 bp, Homo sapiens
tgttaggtgacgtaacccggcaggga

SEQ ID NO: 20926 - DNA, 26 bp, Homo sapiens
gttaggtgacgtaacccggcagggaa

SEQ ID NO: 20927 - DNA, 26 bp, Homo sapiens
ttaggtgacgtaacccggcagggaat

SEQ ID NO: 20928 - DNA, 26 bp, Homo sapiens
taggtgacgtaacccggcagggaatg

SEQ ID NO: 20929 - DNA, 26 bp, Homo sapiens
aggtgacgtaacccggcagggaatga

SEQ ID NO: 20930 - DNA, 26 bp, Homo sapiens
ggtgacgtaacccggcagggaatgac

SEQ ID NO: 20931 - DNA, 26 bp, Homo sapiens
gtgacgtaacccggcagggaatgacg

SEQ ID NO: 20932 - DNA, 26 bp, Homo sapiens
tgacgtaacccggcagggaatgacga

SEQ ID NO: 20933 - DNA, 26 bp, Homo sapiens
gacgtaacccggcagggaatgacgag

SEQ ID NO: 20934 - DNA, 26 bp, Homo sapiens
acgtaacccggcagggaatgacgagc

SEQ ID NO: 20935 - DNA, 26 bp, Homo sapiens
cgtaacccggcagggaatgacgagct

SEQ ID NO: 20936 - DNA, 26 bp, Homo sapiens
gtaacccggcagggaatgacgagctc

SEQ ID NO: 20937 - DNA, 26 bp, Homo sapiens
taacccggcagggaatgacgagctcc

SEQ ID NO: 20938 - DNA, 26 bp, Homo sapiens
aacccggcagggaatgacgagctccc

SEQ ID NO: 20939 - DNA, 26 bp, Homo sapiens
acccggcagggaatgacgagctccct

SEQ ID NO: 20940 - DNA, 26 bp, Homo sapiens
cccggcagggaatgacgagctccctt

SEQ ID NO: 20941 - DNA, 26 bp, Homo sapiens
ccggcagggaatgacgagctcccttc

SEQ ID NO: 20942 - DNA, 26 bp, Homo sapiens
cggcagggaatgacgagctcccttcc

SEQ ID NO: 20943 - DNA, 26 bp, Homo sapiens
ggcagggaatgacgagctcccttcct

SEQ ID NO: 20944 - DNA, 26 bp, Homo sapiens
gcagggaatgacgagctcccttcctt

SEQ ID NO: 20945 - DNA, 26 bp, Homo sapiens
cagggaatgacgagctcccttccttc

SEQ ID NO: 20946 - DNA, 26 bp, Homo sapiens
agggaatgacgagctcccttccttca

SEQ ID NO: 20947 - DNA, 26 bp, Homo sapiens
gggaatgacgagctcccttccttcag

SEQ ID NO: 20948 - DNA, 26 bp, Homo sapiens
ggaatgacgagctcccttccttcagt

SEQ ID NO: 20949 - DNA, 26 bp, Homo sapiens
gaatgacgagctcccttccttcagtc

SEQ ID NO: 20950 - DNA, 26 bp, Homo sapiens
aatgacgagctcccttccttcagtca

SEQ ID NO: 20951 - DNA, 26 bp, Homo sapiens
atgacgagctcccttccttcagtcat

SEQ ID NO: 20952 - DNA, 26 bp, Homo sapiens
tgacgagctcccttccttcagtcatg

SEQ ID NO: 20953 - DNA, 26 bp, Homo sapiens
gacgagctcccttccttcagtcatgt

SEQ ID NO: 20954 - DNA, 26 bp, Homo sapiens
acgagctcccttccttcagtcatgtg

SEQ ID NO: 20955 - DNA, 26 bp, Homo sapiens
cgagctcccttccttcagtcatgtgt

SEQ ID NO: 20956 - DNA, 26 bp, Homo sapiens
gagctcccttccttcagtcatgtgta

SEQ ID NO: 20957 - DNA, 26 bp, Homo sapiens
agctcccttccttcagtcatgtgtat

SEQ ID NO: 20958 - DNA, 26 bp, Homo sapiens
gctcccttccttcagtcatgtgtata

SEQ ID NO: 20959 - DNA, 26 bp, Homo sapiens
ctcccttccttcagtcatgtgtataa

SEQ ID NO: 20960 - DNA, 26 bp, Homo sapiens
tcccttccttcagtcatgtgtataat

SEQ ID NO: 20961 - DNA, 26 bp, Homo sapiens
cccttccttcagtcatgtgtataatt

SEQ ID NO: 20962 - DNA, 26 bp, Homo sapiens
ccttccttcagtcatgtgtataattt

SEQ ID NO: 20963 - DNA, 26 bp, Homo sapiens
cttccttcagtcatgtgtataatttc

SEQ ID NO: 20964 - DNA, 26 bp, Homo sapiens
ttccttcagtcatgtgtataatttcg

SEQ ID NO: 20965 - DNA, 26 bp, Homo sapiens
tccttcagtcatgtgtataatttcgg

SEQ ID NO: 20966 - DNA, 26 bp, Homo sapiens
ccttcagtcatgtgtataatttcggg

SEQ ID NO: 20967 - DNA, 26 bp, Homo sapiens
cttcagtcatgtgtataatttcgggg

SEQ ID NO: 20968 - DNA, 26 bp, Homo sapiens
ttcagtcatgtgtataatttcgggga

SEQ ID NO: 20969 - DNA, 26 bp, Homo sapiens
tcagtcatgtgtataatttcggggat

SEQ ID NO: 20970 - DNA, 26 bp, Homo sapiens
cagtcatgtgtataatttcggggatt

SEQ ID NO: 20971 - DNA, 26 bp, Homo sapiens
agtcatgtgtataatttcggggattt

SEQ ID NO: 20972 - DNA, 26 bp, Homo sapiens
gtcatgtgtataatttcggggatttc

SEQ ID NO: 20973 - DNA, 26 bp, Homo sapiens
tcatgtgtataatttcggggatttca

SEQ ID NO: 20974 - DNA, 26 bp, Homo sapiens
catgtgtataatttcggggatttcac

SEQ ID NO: 20975 - DNA, 26 bp, Homo sapiens
atgtgtataatttcggggatttcact

SEQ ID NO: 20976 - DNA, 26 bp, Homo sapiens
tgtgtataatttcggggatttcactg

SEQ ID NO: 20977 - DNA, 26 bp, Homo sapiens
gtgtataatttcggggatttcactgt

SEQ ID NO: 20978 - DNA, 26 bp, Homo sapiens
tgtataatttcggggatttcactgta

SEQ ID NO: 20979 - DNA, 26 bp, Homo sapiens
gtataatttcggggatttcactgtac

SEQ ID NO: 20980 - DNA, 26 bp, Homo sapiens
tataatttcggggatttcactgtaca

SEQ ID NO: 20981 - DNA, 26 bp, Homo sapiens
ataatttcggggatttcactgtacat

SEQ ID NO: 20982 - DNA, 26 bp, Homo sapiens
taatttcggggatttcactgtacatc

SEQ ID NO: 20983 - DNA, 26 bp, Homo sapiens
aatttcggggatttcactgtacatct

SEQ ID NO: 20984 - DNA, 26 bp, Homo sapiens
atttcggggatttcactgtacatctc

SEQ ID NO: 20985 - DNA, 26 bp, Homo sapiens
tttcggggatttcactgtacatctct

SEQ ID NO: 20986 - DNA, 26 bp, Homo sapiens
ttcggggatttcactgtacatctcta

SEQ ID NO: 20987 - DNA, 26 bp, Homo sapiens
tcggggatttcactgtacatctctac

SEQ ID NO: 20988 - DNA, 26 bp, Homo sapiens
cggggatttcactgtacatctctacg

SEQ ID NO: 20989 - DNA, 26 bp, Homo sapiens
ggggatttcactgtacatctctacga

SEQ ID NO: 20990 - DNA, 26 bp, Homo sapiens
gggatttcactgtacatctctacgaa

SEQ ID NO: 20991 - DNA, 26 bp, Homo sapiens
ggatttcactgtacatctctacgaaa

SEQ ID NO: 20992 - DNA, 26 bp, Homo sapiens
gatttcactgtacatctctacgaaag

SEQ ID NO: 20993 - DNA, 26 bp, Homo sapiens
atttcactgtacatctctacgaaagg

SEQ ID NO: 20994 - DNA, 26 bp, Homo sapiens
tttcactgtacatctctacgaaaggt

SEQ ID NO: 20995 - DNA, 26 bp, Homo sapiens
ttcactgtacatctctacgaaaggtc

SEQ ID NO: 20996 - DNA, 26 bp, Homo sapiens
tcactgtacatctctacgaaaggtct

SEQ ID NO: 20997 - DNA, 26 bp, Homo sapiens
cactgtacatctctacgaaaggtcta

SEQ ID NO: 20998 - DNA, 26 bp, Homo sapiens
actgtacatctctacgaaaggtctac

SEQ ID NO: 20999 - DNA, 26 bp, Homo sapiens
ctgtacatctctacgaaaggtctacc

SEQ ID NO: 21000 - DNA, 26 bp, Homo sapiens
tgtacatctctacgaaaggtctacct

SEQ ID NO: 21001 - DNA, 26 bp, Homo sapiens
gtacatctctacgaaaggtctacctg

SEQ ID NO: 21002 - DNA, 26 bp, Homo sapiens
tacatctctacgaaaggtctacctgt

SEQ ID NO: 21003 - DNA, 26 bp, Homo sapiens
acatctctacgaaaggtctacctgta

SEQ ID NO: 21004 - DNA, 26 bp, Homo sapiens
catctctacgaaaggtctacctgtat

SEQ ID NO: 21005 - DNA, 26 bp, Homo sapiens
atctctacgaaaggtctacctgtatc

SEQ ID NO: 21006 - DNA, 26 bp, Homo sapiens
tctctacgaaaggtctacctgtatca

SEQ ID NO: 21007 - DNA, 26 bp, Homo sapiens
ctctacgaaaggtctacctgtatcac

SEQ ID NO: 21008 - DNA, 26 bp, Homo sapiens
tctacgaaaggtctacctgtatcact

SEQ ID NO: 21009 - DNA, 26 bp, Homo sapiens
ctacgaaaggtctacctgtatcacta

SEQ ID NO: 21010 - DNA, 26 bp, Homo sapiens
tacgaaaggtctacctgtatcactaa

SEQ ID NO: 21011 - DNA, 26 bp, Homo sapiens
acgaaaggtctacctgtatcactaat

SEQ ID NO: 21012 - DNA, 26 bp, Homo sapiens
cgaaaggtctacctgtatcactaata

SEQ ID NO: 21013 - DNA, 26 bp, Homo sapiens
gaaaggtctacctgtatcactaataa

SEQ ID NO: 21014 - DNA, 26 bp, Homo sapiens
aaaggtctacctgtatcactaataaa

SEQ ID NO: 21015 - DNA, 26 bp, Homo sapiens
aaggtctacctgtatcactaataaat

SEQ ID NO: 21016 - DNA, 26 bp, Homo sapiens
aggtctacctgtatcactaataaata

SEQ ID NO: 21017 - DNA, 26 bp, Homo sapiens
ggtctacctgtatcactaataaatat

SEQ ID NO: 21018 - DNA, 26 bp, Homo sapiens
gtctacctgtatcactaataaatata

SEQ ID NO: 21019 - DNA, 26 bp, Homo sapiens
tctacctgtatcactaataaatatat

SEQ ID NO: 21020 - DNA, 26 bp, Homo sapiens
ctacctgtatcactaataaatatata

SEQ ID NO: 21021 - DNA, 26 bp, Homo sapiens
tacctgtatcactaataaatatatag

SEQ ID NO: 21022 - DNA, 26 bp, Homo sapiens
acctgtatcactaataaatatataga

SEQ ID NO: 21023 - DNA, 26 bp, Homo sapiens
cctgtatcactaataaatatatagat

SEQ ID NO: 21024 - DNA, 26 bp, Homo sapiens
ctgtatcactaataaatatatagatt

SEQ ID NO: 21025 - DNA, 26 bp, Homo sapiens
tgtatcactaataaatatatagattg

SEQ ID NO: 21026 - DNA, 26 bp, Homo sapiens
gtatcactaataaatatatagattgc

SEQ ID NO: 21027 - DNA, 26 bp, Homo sapiens
tatcactaataaatatatagattgca

SEQ ID NO: 21028 - DNA, 26 bp, Homo sapiens
atcactaataaatatatagattgcag

SEQ ID NO: 21029 - DNA, 26 bp, Homo sapiens
tcactaataaatatatagattgcaga

SEQ ID NO: 21030 - DNA, 26 bp, Homo sapiens
cactaataaatatatagattgcagat

SEQ ID NO: 21031 - DNA, 26 bp, Homo sapiens
actaataaatatatagattgcagatt

SEQ ID NO: 21032 - DNA, 26 bp, Homo sapiens
ctaataaatatatagattgcagattc

SEQ ID NO: 21033 - DNA, 26 bp, Homo sapiens
taataaatatatagattgcagattct

SEQ ID NO: 21034 - DNA, 26 bp, Homo sapiens
aataaatatatagattgcagattctg

SEQ ID NO: 21035 - DNA, 26 bp, Homo sapiens
ataaatatatagattgcagattctgt

SEQ ID NO: 21036 - DNA, 26 bp, Homo sapiens
taaatatatagattgcagattctgtt

SEQ ID NO: 21037 - DNA, 26 bp, Homo sapiens
aaatatatagattgcagattctgttt

SEQ ID NO: 21038 - DNA, 26 bp, Homo sapiens
aatatatagattgcagattctgtttc

SEQ ID NO: 21039 - DNA, 26 bp, Homo sapiens
atatatagattgcagattctgtttcc

SEQ ID NO: 21040 - DNA, 26 bp, Homo sapiens
tatatagattgcagattctgtttcct

SEQ ID NO: 21041 - DNA, 26 bp, Homo sapiens
atatagattgcagattctgtttcctt

SEQ ID NO: 21042 - DNA, 26 bp, Homo sapiens
tatagattgcagattctgtttccttc

SEQ ID NO: 21043 - DNA, 26 bp, Homo sapiens
atagattgcagattctgtttccttct

SEQ ID NO: 21044 - DNA, 26 bp, Homo sapiens
tagattgcagattctgtttccttctt

SEQ ID NO: 21045 - DNA, 26 bp, Homo sapiens
agattgcagattctgtttccttcttc

SEQ ID NO: 21046 - DNA, 26 bp, Homo sapiens
gattgcagattctgtttccttcttct

SEQ ID NO: 21047 - DNA, 26 bp, Homo sapiens
attgcagattctgtttccttcttctt

SEQ ID NO: 21048 - DNA, 26 bp, Homo sapiens
ttgcagattctgtttccttcttcttt

SEQ ID NO: 21049 - DNA, 26 bp, Homo sapiens
tgcagattctgtttccttcttctttg

SEQ ID NO: 21050 - DNA, 26 bp, Homo sapiens
gcagattctgtttccttcttctttga

SEQ ID NO: 21051 - DNA, 26 bp, Homo sapiens
cagattctgtttccttcttctttgaa

SEQ ID NO: 21052 - DNA, 26 bp, Homo sapiens
agattctgtttccttcttctttgaag

SEQ ID NO: 21053 - DNA, 26 bp, Homo sapiens
gattctgtttccttcttctttgaagt

SEQ ID NO: 21054 - DNA, 26 bp, Homo sapiens
attctgtttccttcttctttgaagta

SEQ ID NO: 21055 - DNA, 26 bp, Homo sapiens
ttctgtttccttcttctttgaagtag

SEQ ID NO: 21056 - DNA, 26 bp, Homo sapiens
tctgtttccttcttctttgaagtagg

SEQ ID NO: 21057 - DNA, 26 bp, Homo sapiens
ctgtttccttcttctttgaagtaggt

SEQ ID NO: 21058 - DNA, 26 bp, Homo sapiens
tgtttccttcttctttgaagtaggta

SEQ ID NO: 21059 - DNA, 26 bp, Homo sapiens
gtttccttcttctttgaagtaggtac

SEQ ID NO: 21060 - DNA, 26 bp, Homo sapiens
tttccttcttctttgaagtaggtaca

SEQ ID NO: 21061 - DNA, 26 bp, Homo sapiens
ttccttcttctttgaagtaggtacag

SEQ ID NO: 21062 - DNA, 26 bp, Homo sapiens
tccttcttctttgaagtaggtacagc

SEQ ID NO: 21063 - DNA, 26 bp, Homo sapiens
ccttcttctttgaagtaggtacagct

SEQ ID NO: 21064 - DNA, 26 bp, Homo sapiens
cttcttctttgaagtaggtacagcta

SEQ ID NO: 21065 - DNA, 26 bp, Homo sapiens
ttcttctttgaagtaggtacagctag

SEQ ID NO: 21066 - DNA, 26 bp, Homo sapiens
tcttctttgaagtaggtacagctaga

SEQ ID NO: 21067 - DNA, 26 bp, Homo sapiens
cttctttgaagtaggtacagctagat

SEQ ID NO: 21068 - DNA, 26 bp, Homo sapiens
ttctttgaagtaggtacagctagata

SEQ ID NO: 21069 - DNA, 26 bp, Homo sapiens
tctttgaagtaggtacagctagatat

SEQ ID NO: 21070 - DNA, 26 bp, Homo sapiens
ctttgaagtaggtacagctagatatt

SEQ ID NO: 21071 - DNA, 26 bp, Homo sapiens
tttgaagtaggtacagctagatattt

SEQ ID NO: 21072 - DNA, 26 bp, Homo sapiens
ttgaagtaggtacagctagatatttg

SEQ ID NO: 21073 - DNA, 26 bp, Homo sapiens
tgaagtaggtacagctagatatttgc

SEQ ID NO: 21074 - DNA, 26 bp, Homo sapiens
gaagtaggtacagctagatatttgca

SEQ ID NO: 21075 - DNA, 26 bp, Homo sapiens
aagtaggtacagctagatatttgcag

SEQ ID NO: 21076 - DNA, 26 bp, Homo sapiens
agtaggtacagctagatatttgcagc

SEQ ID NO: 21077 - DNA, 26 bp, Homo sapiens
gtaggtacagctagatatttgcagct

SEQ ID NO: 21078 - DNA, 26 bp, Homo sapiens
taggtacagctagatatttgcagctg

SEQ ID NO: 21079 - DNA, 26 bp, Homo sapiens
aggtacagctagatatttgcagctgt

SEQ ID NO: 21080 - DNA, 26 bp, Homo sapiens
ggtacagctagatatttgcagctgta

SEQ ID NO: 21081 - DNA, 26 bp, Homo sapiens
gtacagctagatatttgcagctgtag

SEQ ID NO: 21082 - DNA, 26 bp, Homo sapiens
tacagctagatatttgcagctgtaga

SEQ ID NO: 21083 - DNA, 26 bp, Homo sapiens
acagctagatatttgcagctgtagaa

SEQ ID NO: 21084 - DNA, 26 bp, Homo sapiens
cagctagatatttgcagctgtagaag

SEQ ID NO: 21085 - DNA, 26 bp, Homo sapiens
agctagatatttgcagctgtagaagc

SEQ ID NO: 21086 - DNA, 26 bp, Homo sapiens
gctagatatttgcagctgtagaagcc

SEQ ID NO: 21087 - DNA, 26 bp, Homo sapiens
ctagatatttgcagctgtagaagcca

SEQ ID NO: 21088 - DNA, 26 bp, Homo sapiens
tagatatttgcagctgtagaagccag

SEQ ID NO: 21089 - DNA, 26 bp, Homo sapiens
agatatttgcagctgtagaagccagt

SEQ ID NO: 21090 - DNA, 26 bp, Homo sapiens
gatatttgcagctgtagaagccagtg

SEQ ID NO: 21091 - DNA, 26 bp, Homo sapiens
atatttgcagctgtagaagccagtgt

SEQ ID NO: 21092 - DNA, 26 bp, Homo sapiens
tatttgcagctgtagaagccagtgtg

SEQ ID NO: 21093 - DNA, 26 bp, Homo sapiens
atttgcagctgtagaagccagtgtgg

SEQ ID NO: 21094 - DNA, 26 bp, Homo sapiens
tttgcagctgtagaagccagtgtggt

SEQ ID NO: 21095 - DNA, 26 bp, Homo sapiens
ttgcagctgtagaagccagtgtggtt

SEQ ID NO: 21096 - DNA, 26 bp, Homo sapiens
tgcagctgtagaagccagtgtggttt

SEQ ID NO: 21097 - DNA, 26 bp, Homo sapiens
gcagctgtagaagccagtgtggtttg

SEQ ID NO: 21098 - DNA, 26 bp, Homo sapiens
cagctgtagaagccagtgtggtttgc

SEQ ID NO: 21099 - DNA, 26 bp, Homo sapiens
agctgtagaagccagtgtggtttgct

SEQ ID NO: 21100 - DNA, 26 bp, Homo sapiens
gctgtagaagccagtgtggtttgctt

SEQ ID NO: 21101 - DNA, 26 bp, Homo sapiens
ctgtagaagccagtgtggtttgcttg

SEQ ID NO: 21102 - DNA, 26 bp, Homo sapiens
tgtagaagccagtgtggtttgcttga

SEQ ID NO: 21103 - DNA, 26 bp, Homo sapiens
gtagaagccagtgtggtttgcttgag

SEQ ID NO: 21104 - DNA, 26 bp, Homo sapiens
tagaagccagtgtggtttgcttgagc

SEQ ID NO: 21105 - DNA, 26 bp, Homo sapiens
agaagccagtgtggtttgcttgagct

SEQ ID NO: 21106 - DNA, 26 bp, Homo sapiens
gaagccagtgtggtttgcttgagctg

SEQ ID NO: 21107 - DNA, 26 bp, Homo sapiens
aagccagtgtggtttgcttgagctgt

SEQ ID NO: 21108 - DNA, 26 bp, Homo sapiens
agccagtgtggtttgcttgagctgtg

SEQ ID NO: 21109 - DNA, 26 bp, Homo sapiens
gccagtgtggtttgcttgagctgtgt

SEQ ID NO: 21110 - DNA, 26 bp, Homo sapiens
ccagtgtggtttgcttgagctgtgtt

SEQ ID NO: 21111 - DNA, 26 bp, Homo sapiens
cagtgtggtttgcttgagctgtgttc

SEQ ID NO: 21112 - DNA, 26 bp, Homo sapiens
agtgtggtttgcttgagctgtgttca

SEQ ID NO: 21113 - DNA, 26 bp, Homo sapiens
gtgtggtttgcttgagctgtgttcaa

SEQ ID NO: 21114 - DNA, 26 bp, Homo sapiens
tgtggtttgcttgagctgtgttcaag

SEQ ID NO: 21115 - DNA, 26 bp, Homo sapiens
gtggtttgcttgagctgtgttcaagg

SEQ ID NO: 21116 - DNA, 26 bp, Homo sapiens
tggtttgcttgagctgtgttcaaggt

SEQ ID NO: 21117 - DNA, 26 bp, Homo sapiens
ggtttgcttgagctgtgttcaaggtt

SEQ ID NO: 21118 - DNA, 26 bp, Homo sapiens
gtttgcttgagctgtgttcaaggtta

SEQ ID NO: 21119 - DNA, 26 bp, Homo sapiens
tttgcttgagctgtgttcaaggttaa

SEQ ID NO: 21120 - DNA, 26 bp, Homo sapiens
ttgcttgagctgtgttcaaggttaaa

SEQ ID NO: 21121 - DNA, 26 bp, Homo sapiens
tgcttgagctgtgttcaaggttaaag

SEQ ID NO: 21122 - DNA, 26 bp, Homo sapiens
gcttgagctgtgttcaaggttaaagt

SEQ ID NO: 21123 - DNA, 26 bp, Homo sapiens
cttgagctgtgttcaaggttaaagta

SEQ ID NO: 21124 - DNA, 26 bp, Homo sapiens
ttgagctgtgttcaaggttaaagtac

SEQ ID NO: 21125 - DNA, 26 bp, Homo sapiens
tgagctgtgttcaaggttaaagtact

SEQ ID NO: 21126 - DNA, 26 bp, Homo sapiens
gagctgtgttcaaggttaaagtactg

SEQ ID NO: 21127 - DNA, 26 bp, Homo sapiens
agctgtgttcaaggttaaagtactgc

SEQ ID NO: 21128 - DNA, 26 bp, Homo sapiens
gctgtgttcaaggttaaagtactgca

SEQ ID NO: 21129 - DNA, 26 bp, Homo sapiens
ctgtgttcaaggttaaagtactgcag

SEQ ID NO: 21130 - DNA, 26 bp, Homo sapiens
tgtgttcaaggttaaagtactgcaga

SEQ ID NO: 21131 - DNA, 26 bp, Homo sapiens
gtgttcaaggttaaagtactgcagaa

SEQ ID NO: 21132 - DNA, 26 bp, Homo sapiens
tgttcaaggttaaagtactgcagaat

SEQ ID NO: 21133 - DNA, 26 bp, Homo sapiens
gttcaaggttaaagtactgcagaatt

SEQ ID NO: 21134 - DNA, 26 bp, Homo sapiens
ttcaaggttaaagtactgcagaattg

SEQ ID NO: 21135 - DNA, 26 bp, Homo sapiens
tcaaggttaaagtactgcagaattgt

SEQ ID NO: 21136 - DNA, 26 bp, Homo sapiens
caaggttaaagtactgcagaattgtt

SEQ ID NO: 21137 - DNA, 26 bp, Homo sapiens
aaggttaaagtactgcagaattgttt

SEQ ID NO: 21138 - DNA, 26 bp, Homo sapiens
aggttaaagtactgcagaattgtttg

SEQ ID NO: 21139 - DNA, 26 bp, Homo sapiens
ggttaaagtactgcagaattgtttgc

SEQ ID NO: 21140 - DNA, 26 bp, Homo sapiens
gttaaagtactgcagaattgtttgcc

SEQ ID NO: 21141 - DNA, 26 bp, Homo sapiens
ttaaagtactgcagaattgtttgcca

SEQ ID NO: 21142 - DNA, 26 bp, Homo sapiens
taaagtactgcagaattgtttgccat

SEQ ID NO: 21143 - DNA, 26 bp, Homo sapiens
aaagtactgcagaattgtttgccatt

SEQ ID NO: 21144 - DNA, 26 bp, Homo sapiens
aagtactgcagaattgtttgccattt

SEQ ID NO: 21145 - DNA, 26 bp, Homo sapiens
agtactgcagaattgtttgccatttc

SEQ ID NO: 21146 - DNA, 26 bp, Homo sapiens
gtactgcagaattgtttgccatttct

SEQ ID NO: 21147 - DNA, 26 bp, Homo sapiens
tactgcagaattgtttgccatttctt

SEQ ID NO: 21148 - DNA, 26 bp, Homo sapiens
actgcagaattgtttgccatttcttc

SEQ ID NO: 21149 - DNA, 26 bp, Homo sapiens
ctgcagaattgtttgccatttcttcc

SEQ ID NO: 21150 - DNA, 26 bp, Homo sapiens
tgcagaattgtttgccatttcttcca

SEQ ID NO: 21151 - DNA, 26 bp, Homo sapiens
gcagaattgtttgccatttcttccac

SEQ ID NO: 21152 - DNA, 26 bp, Homo sapiens
cagaattgtttgccatttcttccaca

SEQ ID NO: 21153 - DNA, 26 bp, Homo sapiens
agaattgtttgccatttcttccacag

SEQ ID NO: 21154 - DNA, 26 bp, Homo sapiens
gaattgtttgccatttcttccacagg

SEQ ID NO: 21155 - DNA, 26 bp, Homo sapiens
aattgtttgccatttcttccacaggc

SEQ ID NO: 21156 - DNA, 26 bp, Homo sapiens
attgtttgccatttcttccacaggca

SEQ ID NO: 21157 - DNA, 26 bp, Homo sapiens
ttgtttgccatttcttccacaggcag

SEQ ID NO: 21158 - DNA, 26 bp, Homo sapiens
tgtttgccatttcttccacaggcaga

SEQ ID NO: 21159 - DNA, 26 bp, Homo sapiens
gtttgccatttcttccacaggcagat

SEQ ID NO: 21160 - DNA, 26 bp, Homo sapiens
tttgccatttcttccacaggcagatt

SEQ ID NO: 21161 - DNA, 26 bp, Homo sapiens
ttgccatttcttccacaggcagattt

SEQ ID NO: 21162 - DNA, 26 bp, Homo sapiens
tgccatttcttccacaggcagattta

SEQ ID NO: 21163 - DNA, 26 bp, Homo sapiens
gccatttcttccacaggcagatttag

SEQ ID NO: 21164 - DNA, 26 bp, Homo sapiens
ccatttcttccacaggcagatttagt

SEQ ID NO: 21165 - DNA, 26 bp, Homo sapiens
catttcttccacaggcagatttagtt

SEQ ID NO: 21166 - DNA, 26 bp, Homo sapiens
atttcttccacaggcagatttagtta

SEQ ID NO: 21167 - DNA, 26 bp, Homo sapiens
tttcttccacaggcagatttagttat

SEQ ID NO: 21168 - DNA, 26 bp, Homo sapiens
ttcttccacaggcagatttagttatg

SEQ ID NO: 21169 - DNA, 26 bp, Homo sapiens
tcttccacaggcagatttagttatgc

SEQ ID NO: 21170 - DNA, 26 bp, Homo sapiens
cttccacaggcagatttagttatgct

SEQ ID NO: 21171 - DNA, 26 bp, Homo sapiens
ttccacaggcagatttagttatgctc

SEQ ID NO: 21172 - DNA, 26 bp, Homo sapiens
tccacaggcagatttagttatgctca

SEQ ID NO: 21173 - DNA, 26 bp, Homo sapiens
ccacaggcagatttagttatgctcag

SEQ ID NO: 21174 - DNA, 26 bp, Homo sapiens
cacaggcagatttagttatgctcagc

SEQ ID NO: 21175 - DNA, 26 bp, Homo sapiens
acaggcagatttagttatgctcagcc

SEQ ID NO: 21176 - DNA, 26 bp, Homo sapiens
caggcagatttagttatgctcagcct

SEQ ID NO: 21177 - DNA, 26 bp, Homo sapiens
aggcagatttagttatgctcagcctt

SEQ ID NO: 21178 - DNA, 26 bp, Homo sapiens
ggcagatttagttatgctcagccttt

SEQ ID NO: 21179 - DNA, 26 bp, Homo sapiens
gcagatttagttatgctcagcctttc

SEQ ID NO: 21180 - DNA, 26 bp, Homo sapiens
cagatttagttatgctcagcctttcg

SEQ ID NO: 21181 - DNA, 26 bp, Homo sapiens
agatttagttatgctcagcctttcgc

SEQ ID NO: 21182 - DNA, 26 bp, Homo sapiens
gatttagttatgctcagcctttcgct

SEQ ID NO: 21183 - DNA, 26 bp, Homo sapiens
atttagttatgctcagcctttcgctt

SEQ ID NO: 21184 - DNA, 26 bp, Homo sapiens
tttagttatgctcagcctttcgcttt

SEQ ID NO: 21185 - DNA, 26 bp, Homo sapiens
ttagttatgctcagcctttcgctttc

SEQ ID NO: 21186 - DNA, 26 bp, Homo sapiens
tagttatgctcagcctttcgctttcc

SEQ ID NO: 21187 - DNA, 26 bp, Homo sapiens
agttatgctcagcctttcgctttcct

SEQ ID NO: 21188 - DNA, 26 bp, Homo sapiens
gttatgctcagcctttcgctttcctt

SEQ ID NO: 21189 - DNA, 26 bp, Homo sapiens
ttatgctcagcctttcgctttcctta

SEQ ID NO: 21190 - DNA, 26 bp, Homo sapiens
tatgctcagcctttcgctttccttac

SEQ ID NO: 21191 - DNA, 26 bp, Homo sapiens
atgctcagcctttcgctttccttact

SEQ ID NO: 21192 - DNA, 26 bp, Homo sapiens
tgctcagcctttcgctttccttactc

SEQ ID NO: 21193 - DNA, 26 bp, Homo sapiens
gctcagcctttcgctttccttactca

SEQ ID NO: 21194 - DNA, 26 bp, Homo sapiens
ctcagcctttcgctttccttactcac

SEQ ID NO: 21195 - DNA, 26 bp, Homo sapiens
tcagcctttcgctttccttactcacc

SEQ ID NO: 21196 - DNA, 26 bp, Homo sapiens
cagcctttcgctttccttactcacca

SEQ ID NO: 21197 - DNA, 26 bp, Homo sapiens
agcctttcgctttccttactcaccat

SEQ ID NO: 21198 - DNA, 26 bp, Homo sapiens
gcctttcgctttccttactcaccatt

SEQ ID NO: 21199 - DNA, 26 bp, Homo sapiens
cctttcgctttccttactcaccattt

SEQ ID NO: 21200 - DNA, 26 bp, Homo sapiens
ctttcgctttccttactcaccatttc

SEQ ID NO: 21201 - DNA, 26 bp, Homo sapiens
tttcgctttccttactcaccatttca

SEQ ID NO: 21202 - DNA, 26 bp, Homo sapiens
ttcgctttccttactcaccatttcag

SEQ ID NO: 21203 - DNA, 26 bp, Homo sapiens
tcgctttccttactcaccatttcagg

SEQ ID NO: 21204 - DNA, 26 bp, Homo sapiens
cgctttccttactcaccatttcaggc

SEQ ID NO: 21205 - DNA, 26 bp, Homo sapiens
gctttccttactcaccatttcaggca

SEQ ID NO: 21206 - DNA, 26 bp, Homo sapiens
ctttccttactcaccatttcaggcaa

SEQ ID NO: 21207 - DNA, 26 bp, Homo sapiens
tttccttactcaccatttcaggcaaa

SEQ ID NO: 21208 - DNA, 26 bp, Homo sapiens
ttccttactcaccatttcaggcaaag

SEQ ID NO: 21209 - DNA, 26 bp, Homo sapiens
tccttactcaccatttcaggcaaaga

SEQ ID NO: 21210 - DNA, 26 bp, Homo sapiens
ccttactcaccatttcaggcaaagac

SEQ ID NO: 21211 - DNA, 26 bp, Homo sapiens
cttactcaccatttcaggcaaagacc

SEQ ID NO: 21212 - DNA, 26 bp, Homo sapiens
ttactcaccatttcaggcaaagacca

SEQ ID NO: 21213 - DNA, 26 bp, Homo sapiens
tactcaccatttcaggcaaagaccat

SEQ ID NO: 21214 - DNA, 26 bp, Homo sapiens
actcaccatttcaggcaaagaccatt

SEQ ID NO: 21215 - DNA, 26 bp, Homo sapiens
ctcaccatttcaggcaaagaccattt

SEQ ID NO: 21216 - DNA, 26 bp, Homo sapiens
tcaccatttcaggcaaagaccattta

SEQ ID NO: 21217 - DNA, 26 bp, Homo sapiens
caccatttcaggcaaagaccatttat

SEQ ID NO: 21218 - DNA, 26 bp, Homo sapiens
accatttcaggcaaagaccatttatg

SEQ ID NO: 21219 - DNA, 26 bp, Homo sapiens
ccatttcaggcaaagaccatttatgg

SEQ ID NO: 21220 - DNA, 26 bp, Homo sapiens
catttcaggcaaagaccatttatggg

SEQ ID NO: 21221 - DNA, 26 bp, Homo sapiens
atttcaggcaaagaccatttatgggc

SEQ ID NO: 21222 - DNA, 26 bp, Homo sapiens
tttcaggcaaagaccatttatgggct

SEQ ID NO: 21223 - DNA, 26 bp, Homo sapiens
ttcaggcaaagaccatttatgggctg

SEQ ID NO: 21224 - DNA, 26 bp, Homo sapiens
tcaggcaaagaccatttatgggctgc

SEQ ID NO: 21225 - DNA, 26 bp, Homo sapiens
caggcaaagaccatttatgggctgct

SEQ ID NO: 21226 - DNA, 26 bp, Homo sapiens
aggcaaagaccatttatgggctgctt

SEQ ID NO: 21227 - DNA, 26 bp, Homo sapiens
ggcaaagaccatttatgggctgcttc

SEQ ID NO: 21228 - DNA, 26 bp, Homo sapiens
gcaaagaccatttatgggctgcttcc

SEQ ID NO: 21229 - DNA, 26 bp, Homo sapiens
caaagaccatttatgggctgcttccc

SEQ ID NO: 21230 - DNA, 26 bp, Homo sapiens
aaagaccatttatgggctgcttcccc

SEQ ID NO: 21231 - DNA, 26 bp, Homo sapiens
aagaccatttatgggctgcttccccc

SEQ ID NO: 21232 - DNA, 26 bp, Homo sapiens
agaccatttatgggctgcttcccccc

SEQ ID NO: 21233 - DNA, 26 bp, Homo sapiens
gaccatttatgggctgcttcccccct

SEQ ID NO: 21234 - DNA, 26 bp, Homo sapiens
accatttatgggctgcttcccccctg

SEQ ID NO: 21235 - DNA, 26 bp, Homo sapiens
ccatttatgggctgcttcccccctgc

SEQ ID NO: 21236 - DNA, 26 bp, Homo sapiens
catttatgggctgcttcccccctgca

SEQ ID NO: 21237 - DNA, 26 bp, Homo sapiens
atttatgggctgcttcccccctgcat

SEQ ID NO: 21238 - DNA, 26 bp, Homo sapiens
tttatgggctgcttcccccctgcatt

SEQ ID NO: 21239 - DNA, 26 bp, Homo sapiens
ttatgggctgcttcccccctgcattg

SEQ ID NO: 21240 - DNA, 26 bp, Homo sapiens
tatgggctgcttcccccctgcattgg

SEQ ID NO: 21241 - DNA, 26 bp, Homo sapiens
atgggctgcttcccccctgcattgga

SEQ ID NO: 21242 - DNA, 26 bp, Homo sapiens
tgggctgcttcccccctgcattggag

SEQ ID NO: 21243 - DNA, 26 bp, Homo sapiens
gggctgcttcccccctgcattggaga

SEQ ID NO: 21244 - DNA, 26 bp, Homo sapiens
ggctgcttcccccctgcattggagat

SEQ ID NO: 21245 - DNA, 26 bp, Homo sapiens
gctgcttcccccctgcattggagatg

SEQ ID NO: 21246 - DNA, 26 bp, Homo sapiens
ctgcttcccccctgcattggagatgc

SEQ ID NO: 21247 - DNA, 26 bp, Homo sapiens
tgcttcccccctgcattggagatgca

SEQ ID NO: 21248 - DNA, 26 bp, Homo sapiens
gcttcccccctgcattggagatgcag

SEQ ID NO: 21249 - DNA, 26 bp, Homo sapiens
cttcccccctgcattggagatgcagt

SEQ ID NO: 21250 - DNA, 26 bp, Homo sapiens
ttcccccctgcattggagatgcagtg

SEQ ID NO: 21251 - DNA, 26 bp, Homo sapiens
tcccccctgcattggagatgcagtgt

SEQ ID NO: 21252 - DNA, 26 bp, Homo sapiens
cccccctgcattggagatgcagtgtc

SEQ ID NO: 21253 - DNA, 26 bp, Homo sapiens
ccccctgcattggagatgcagtgtct

SEQ ID NO: 21254 - DNA, 26 bp, Homo sapiens
cccctgcattggagatgcagtgtctg

SEQ ID NO: 21255 - DNA, 26 bp, Homo sapiens
ccctgcattggagatgcagtgtctgg

SEQ ID NO: 21256 - DNA, 26 bp, Homo sapiens
cctgcattggagatgcagtgtctggc

SEQ ID NO: 21257 - DNA, 26 bp, Homo sapiens
ctgcattggagatgcagtgtctggcc

SEQ ID NO: 21258 - DNA, 26 bp, Homo sapiens
tgcattggagatgcagtgtctggcct

SEQ ID NO: 21259 - DNA, 26 bp, Homo sapiens
gcattggagatgcagtgtctggcctg

SEQ ID NO: 21260 - DNA, 26 bp, Homo sapiens
cattggagatgcagtgtctggcctgc

SEQ ID NO: 21261 - DNA, 26 bp, Homo sapiens
attggagatgcagtgtctggcctgct

SEQ ID NO: 21262 - DNA, 26 bp, Homo sapiens
ttggagatgcagtgtctggcctgctt

SEQ ID NO: 21263 - DNA, 26 bp, Homo sapiens
tggagatgcagtgtctggcctgcttg

SEQ ID NO: 21264 - DNA, 26 bp, Homo sapiens
ggagatgcagtgtctggcctgcttgc

SEQ ID NO: 21265 - DNA, 26 bp, Homo sapiens
gagatgcagtgtctggcctgcttgca

SEQ ID NO: 21266 - DNA, 26 bp, Homo sapiens
agatgcagtgtctggcctgcttgcat

SEQ ID NO: 21267 - DNA, 26 bp, Homo sapiens
gatgcagtgtctggcctgcttgcatg

SEQ ID NO: 21268 - DNA, 26 bp, Homo sapiens
atgcagtgtctggcctgcttgcatga

SEQ ID NO: 21269 - DNA, 26 bp, Homo sapiens
tgcagtgtctggcctgcttgcatgat

SEQ ID NO: 21270 - DNA, 26 bp, Homo sapiens
gcagtgtctggcctgcttgcatgatg

SEQ ID NO: 21271 - DNA, 26 bp, Homo sapiens
cagtgtctggcctgcttgcatgatgt

SEQ ID NO: 21272 - DNA, 26 bp, Homo sapiens
agtgtctggcctgcttgcatgatgtg

SEQ ID NO: 21273 - DNA, 26 bp, Homo sapiens
gtgtctggcctgcttgcatgatgtgc

SEQ ID NO: 21274 - DNA, 26 bp, Homo sapiens
tgtctggcctgcttgcatgatgtgct

SEQ ID NO: 21275 - DNA, 26 bp, Homo sapiens
gtctggcctgcttgcatgatgtgctg

SEQ ID NO: 21276 - DNA, 26 bp, Homo sapiens
tctggcctgcttgcatgatgtgctgg

SEQ ID NO: 21277 - DNA, 26 bp, Homo sapiens
ctggcctgcttgcatgatgtgctggg

SEQ ID NO: 21278 - DNA, 26 bp, Homo sapiens
tggcctgcttgcatgatgtgctgggt

SEQ ID NO: 21279 - DNA, 26 bp, Homo sapiens
ggcctgcttgcatgatgtgctgggtg

SEQ ID NO: 21280 - DNA, 26 bp, Homo sapiens
gcctgcttgcatgatgtgctgggtgc

SEQ ID NO: 21281 - DNA, 26 bp, Homo sapiens
cctgcttgcatgatgtgctgggtgcc

SEQ ID NO: 21282 - DNA, 26 bp, Homo sapiens
ctgcttgcatgatgtgctgggtgcct

SEQ ID NO: 21283 - DNA, 26 bp, Homo sapiens
tgcttgcatgatgtgctgggtgcctt

SEQ ID NO: 21284 - DNA, 26 bp, Homo sapiens
gcttgcatgatgtgctgggtgccttt

SEQ ID NO: 21285 - DNA, 26 bp, Homo sapiens
cttgcatgatgtgctgggtgcctttt

SEQ ID NO: 21286 - DNA, 26 bp, Homo sapiens
ttgcatgatgtgctgggtgcctttta

SEQ ID NO: 21287 - DNA, 26 bp, Homo sapiens
tgcatgatgtgctgggtgccttttaa

SEQ ID NO: 21288 - DNA, 26 bp, Homo sapiens
gcatgatgtgctgggtgccttttaaa

SEQ ID NO: 21289 - DNA, 26 bp, Homo sapiens
catgatgtgctgggtgccttttaaac

SEQ ID NO: 21290 - DNA, 26 bp, Homo sapiens
atgatgtgctgggtgccttttaaact

SEQ ID NO: 21291 - DNA, 26 bp, Homo sapiens
tgatgtgctgggtgccttttaaactc

SEQ ID NO: 21292 - DNA, 26 bp, Homo sapiens
gatgtgctgggtgccttttaaactca

SEQ ID NO: 21293 - DNA, 26 bp, Homo sapiens
atgtgctgggtgccttttaaactcag

SEQ ID NO: 21294 - DNA, 26 bp, Homo sapiens
tgtgctgggtgccttttaaactcagt

SEQ ID NO: 21295 - DNA, 26 bp, Homo sapiens
gtgctgggtgccttttaaactcagtt

SEQ ID NO: 21296 - DNA, 26 bp, Homo sapiens
tgctgggtgccttttaaactcagttc

SEQ ID NO: 21297 - DNA, 26 bp, Homo sapiens
gctgggtgccttttaaactcagttca

SEQ ID NO: 21298 - DNA, 26 bp, Homo sapiens
ctgggtgccttttaaactcagttcag

SEQ ID NO: 21299 - DNA, 26 bp, Homo sapiens
tgggtgccttttaaactcagttcagg

SEQ ID NO: 21300 - DNA, 26 bp, Homo sapiens
gggtgccttttaaactcagttcagga

SEQ ID NO: 21301 - DNA, 26 bp, Homo sapiens
ggtgccttttaaactcagttcaggat

SEQ ID NO: 21302 - DNA, 26 bp, Homo sapiens
gtgccttttaaactcagttcaggatc

SEQ ID NO: 21303 - DNA, 26 bp, Homo sapiens
tgccttttaaactcagttcaggatct

SEQ ID NO: 21304 - DNA, 26 bp, Homo sapiens
gccttttaaactcagttcaggatctt

SEQ ID NO: 21305 - DNA, 26 bp, Homo sapiens
ccttttaaactcagttcaggatcttt

SEQ ID NO: 21306 - DNA, 26 bp, Homo sapiens
cttttaaactcagttcaggatctttt

SEQ ID NO: 21307 - DNA, 26 bp, Homo sapiens
ttttaaactcagttcaggatctttta

SEQ ID NO: 21308 - DNA, 26 bp, Homo sapiens
tttaaactcagttcaggatcttttaa

SEQ ID NO: 21309 - DNA, 26 bp, Homo sapiens
ttaaactcagttcaggatcttttaat

SEQ ID NO: 21310 - DNA, 26 bp, Homo sapiens
taaactcagttcaggatcttttaatt

SEQ ID NO: 21311 - DNA, 26 bp, Homo sapiens
aaactcagttcaggatcttttaattt

SEQ ID NO: 21312 - DNA, 26 bp, Homo sapiens
aactcagttcaggatcttttaatttt

SEQ ID NO: 21313 - DNA, 26 bp, Homo sapiens
actcagttcaggatcttttaattttg

SEQ ID NO: 21314 - DNA, 26 bp, Homo sapiens
ctcagttcaggatcttttaattttga

SEQ ID NO: 21315 - DNA, 26 bp, Homo sapiens
tcagttcaggatcttttaattttgaa

SEQ ID NO: 21316 - DNA, 26 bp, Homo sapiens
cagttcaggatcttttaattttgaac

SEQ ID NO: 21317 - DNA, 26 bp, Homo sapiens
agttcaggatcttttaattttgaacc

SEQ ID NO: 21318 - DNA, 26 bp, Homo sapiens
gttcaggatcttttaattttgaacct

SEQ ID NO: 21319 - DNA, 26 bp, Homo sapiens
ttcaggatcttttaattttgaacctg

SEQ ID NO: 21320 - DNA, 26 bp, Homo sapiens
tcaggatcttttaattttgaacctga

SEQ ID NO: 21321 - DNA, 26 bp, Homo sapiens
caggatcttttaattttgaacctgaa

SEQ ID NO: 21322 - DNA, 26 bp, Homo sapiens
aggatcttttaattttgaacctgaac

SEQ ID NO: 21323 - DNA, 26 bp, Homo sapiens
ggatcttttaattttgaacctgaact

SEQ ID NO: 21324 - DNA, 26 bp, Homo sapiens
gatcttttaattttgaacctgaacta

SEQ ID NO: 21325 - DNA, 26 bp, Homo sapiens
atcttttaattttgaacctgaactag

SEQ ID NO: 21326 - DNA, 26 bp, Homo sapiens
tcttttaattttgaacctgaactaga

SEQ ID NO: 21327 - DNA, 26 bp, Homo sapiens
cttttaattttgaacctgaactagat

SEQ ID NO: 21328 - DNA, 26 bp, Homo sapiens
ttttaattttgaacctgaactagatc

SEQ ID NO: 21329 - DNA, 26 bp, Homo sapiens
tttaattttgaacctgaactagatcc

SEQ ID NO: 21330 - DNA, 26 bp, Homo sapiens
ttaattttgaacctgaactagatcct

SEQ ID NO: 21331 - DNA, 26 bp, Homo sapiens
taattttgaacctgaactagatcctg

SEQ ID NO: 21332 - DNA, 26 bp, Homo sapiens
aattttgaacctgaactagatcctgt

SEQ ID NO: 21333 - DNA, 26 bp, Homo sapiens
attttgaacctgaactagatcctgtg

SEQ ID NO: 21334 - DNA, 26 bp, Homo sapiens
ttttgaacctgaactagatcctgtga

SEQ ID NO: 21335 - DNA, 26 bp, Homo sapiens
tttgaacctgaactagatcctgtgag

SEQ ID NO: 21336 - DNA, 26 bp, Homo sapiens
ttgaacctgaactagatcctgtgaga

SEQ ID NO: 21337 - DNA, 26 bp, Homo sapiens
tgaacctgaactagatcctgtgagaa

SEQ ID NO: 21338 - DNA, 26 bp, Homo sapiens
gaacctgaactagatcctgtgagaag

SEQ ID NO: 21339 - DNA, 26 bp, Homo sapiens
aacctgaactagatcctgtgagaagc

SEQ ID NO: 21340 - DNA, 26 bp, Homo sapiens
acctgaactagatcctgtgagaagca

SEQ ID NO: 21341 - DNA, 26 bp, Homo sapiens
cctgaactagatcctgtgagaagcag

SEQ ID NO: 21342 - DNA, 26 bp, Homo sapiens
ctgaactagatcctgtgagaagcaga

SEQ ID NO: 21343 - DNA, 26 bp, Homo sapiens
tgaactagatcctgtgagaagcagac

SEQ ID NO: 21344 - DNA, 26 bp, Homo sapiens
gaactagatcctgtgagaagcagaca

SEQ ID NO: 21345 - DNA, 26 bp, Homo sapiens
aactagatcctgtgagaagcagacag

SEQ ID NO: 21346 - DNA, 26 bp, Homo sapiens
actagatcctgtgagaagcagacagc

SEQ ID NO: 21347 - DNA, 26 bp, Homo sapiens
ctagatcctgtgagaagcagacagct

SEQ ID NO: 21348 - DNA, 26 bp, Homo sapiens
tagatcctgtgagaagcagacagctg

SEQ ID NO: 21349 - DNA, 26 bp, Homo sapiens
agatcctgtgagaagcagacagctga

SEQ ID NO: 21350 - DNA, 26 bp, Homo sapiens
gatcctgtgagaagcagacagctgag

SEQ ID NO: 21351 - DNA, 26 bp, Homo sapiens
atcctgtgagaagcagacagctgagc

SEQ ID NO: 21352 - DNA, 26 bp, Homo sapiens
tcctgtgagaagcagacagctgagca

SEQ ID NO: 21353 - DNA, 26 bp, Homo sapiens
cctgtgagaagcagacagctgagcag

SEQ ID NO: 21354 - DNA, 26 bp, Homo sapiens
ctgtgagaagcagacagctgagcagc

SEQ ID NO: 21355 - DNA, 26 bp, Homo sapiens
tgtgagaagcagacagctgagcagcg

SEQ ID NO: 21356 - DNA, 26 bp, Homo sapiens
gtgagaagcagacagctgagcagcgc

SEQ ID NO: 21357 - DNA, 26 bp, Homo sapiens
tgagaagcagacagctgagcagcgcg

SEQ ID NO: 21358 - DNA, 26 bp, Homo sapiens
gagaagcagacagctgagcagcgcgc

SEQ ID NO: 21359 - DNA, 26 bp, Homo sapiens
agaagcagacagctgagcagcgcgca

SEQ ID NO: 21360 - DNA, 26 bp, Homo sapiens
gaagcagacagctgagcagcgcgcac

SEQ ID NO: 21361 - DNA, 26 bp, Homo sapiens
aagcagacagctgagcagcgcgcaca

SEQ ID NO: 21362 - DNA, 26 bp, Homo sapiens
agcagacagctgagcagcgcgcacag

SEQ ID NO: 21363 - DNA, 26 bp, Homo sapiens
gcagacagctgagcagcgcgcacagc

SEQ ID NO: 21364 - DNA, 26 bp, Homo sapiens
cagacagctgagcagcgcgcacagca

SEQ ID NO: 21365 - DNA, 26 bp, Homo sapiens
agacagctgagcagcgcgcacagcag

SEQ ID NO: 21366 - DNA, 26 bp, Homo sapiens
gacagctgagcagcgcgcacagcagg

SEQ ID NO: 21367 - DNA, 26 bp, Homo sapiens
acagctgagcagcgcgcacagcagga

SEQ ID NO: 21368 - DNA, 26 bp, Homo sapiens
cagctgagcagcgcgcacagcaggac

SEQ ID NO: 21369 - DNA, 26 bp, Homo sapiens
agctgagcagcgcgcacagcaggacc

SEQ ID NO: 21370 - DNA, 26 bp, Homo sapiens
gctgagcagcgcgcacagcaggaccc

SEQ ID NO: 21371 - DNA, 26 bp, Homo sapiens
ctgagcagcgcgcacagcaggacccc

SEQ ID NO: 21372 - DNA, 26 bp, Homo sapiens
tgagcagcgcgcacagcaggaccccg

SEQ ID NO: 21373 - DNA, 26 bp, Homo sapiens
gagcagcgcgcacagcaggaccccgg

SEQ ID NO: 21374 - DNA, 26 bp, Homo sapiens
agcagcgcgcacagcaggaccccggt

SEQ ID NO: 21375 - DNA, 26 bp, Homo sapiens
gcagcgcgcacagcaggaccccggtg

SEQ ID NO: 21376 - DNA, 26 bp, Homo sapiens
cagcgcgcacagcaggaccccggtgt

SEQ ID NO: 21377 - DNA, 26 bp, Homo sapiens
agcgcgcacagcaggaccccggtgtc

SEQ ID NO: 21378 - DNA, 26 bp, Homo sapiens
gcgcgcacagcaggaccccggtgtcc

SEQ ID NO: 21379 - DNA, 26 bp, Homo sapiens
cgcgcacagcaggaccccggtgtccc

SEQ ID NO: 21380 - DNA, 26 bp, Homo sapiens
gcgcacagcaggaccccggtgtccca

SEQ ID NO: 21381 - DNA, 26 bp, Homo sapiens
cgcacagcaggaccccggtgtcccag

SEQ ID NO: 21382 - DNA, 26 bp, Homo sapiens
gcacagcaggaccccggtgtcccagt

SEQ ID NO: 21383 - DNA, 26 bp, Homo sapiens
cacagcaggaccccggtgtcccagta

SEQ ID NO: 21384 - DNA, 26 bp, Homo sapiens
acagcaggaccccggtgtcccagtag

SEQ ID NO: 21385 - DNA, 26 bp, Homo sapiens
cagcaggaccccggtgtcccagtagc

SEQ ID NO: 21386 - DNA, 26 bp, Homo sapiens
agcaggaccccggtgtcccagtagct

SEQ ID NO: 21387 - DNA, 26 bp, Homo sapiens
gcaggaccccggtgtcccagtagctg

SEQ ID NO: 21388 - DNA, 26 bp, Homo sapiens
caggaccccggtgtcccagtagctga

SEQ ID NO: 21389 - DNA, 26 bp, Homo sapiens
aggaccccggtgtcccagtagctgac

SEQ ID NO: 21390 - DNA, 26 bp, Homo sapiens
ggaccccggtgtcccagtagctgacc

SEQ ID NO: 21391 - DNA, 26 bp, Homo sapiens
gaccccggtgtcccagtagctgacca

SEQ ID NO: 21392 - DNA, 26 bp, Homo sapiens
accccggtgtcccagtagctgaccat

SEQ ID NO: 21393 - DNA, 26 bp, Homo sapiens
ccccggtgtcccagtagctgaccatg

SEQ ID NO: 21394 - DNA, 26 bp, Homo sapiens
cccggtgtcccagtagctgaccatgg

SEQ ID NO: 21395 - DNA, 26 bp, Homo sapiens
ccggtgtcccagtagctgaccatggt

SEQ ID NO: 21396 - DNA, 26 bp, Homo sapiens
cggtgtcccagtagctgaccatggtg

SEQ ID NO: 21397 - DNA, 26 bp, Homo sapiens
ggtgtcccagtagctgaccatggtga

SEQ ID NO: 21398 - DNA, 26 bp, Homo sapiens
gtgtcccagtagctgaccatggtgag

SEQ ID NO: 21399 - DNA, 26 bp, Homo sapiens
tgtcccagtagctgaccatggtgagc

SEQ ID NO: 21400 - DNA, 26 bp, Homo sapiens
gtcccagtagctgaccatggtgagcg

SEQ ID NO: 21401 - DNA, 26 bp, Homo sapiens
tcccagtagctgaccatggtgagcgc

SEQ ID NO: 21402 - DNA, 26 bp, Homo sapiens
cccagtagctgaccatggtgagcgcg

SEQ ID NO: 21403 - DNA, 26 bp, Homo sapiens
ccagtagctgaccatggtgagcgcga

SEQ ID NO: 21404 - DNA, 26 bp, Homo sapiens
cagtagctgaccatggtgagcgcgac

SEQ ID NO: 21405 - DNA, 26 bp, Homo sapiens
agtagctgaccatggtgagcgcgacg

SEQ ID NO: 21406 - DNA, 26 bp, Homo sapiens
gtagctgaccatggtgagcgcgacgc

SEQ ID NO: 21407 - DNA, 26 bp, Homo sapiens
tagctgaccatggtgagcgcgacgcg

SEQ ID NO: 21408 - DNA, 26 bp, Homo sapiens
agctgaccatggtgagcgcgacgcgg

SEQ ID NO: 21409 - DNA, 26 bp, Homo sapiens
gctgaccatggtgagcgcgacgcggc

SEQ ID NO: 21410 - DNA, 26 bp, Homo sapiens
ctgaccatggtgagcgcgacgcggcc

SEQ ID NO: 21411 - DNA, 26 bp, Homo sapiens
tgaccatggtgagcgcgacgcggcct

SEQ ID NO: 21412 - DNA, 26 bp, Homo sapiens
gaccatggtgagcgcgacgcggcctg

SEQ ID NO: 21413 - DNA, 26 bp, Homo sapiens
accatggtgagcgcgacgcggcctgc

SEQ ID NO: 21414 - DNA, 26 bp, Homo sapiens
ccatggtgagcgcgacgcggcctgct

SEQ ID NO: 21415 - DNA, 26 bp, Homo sapiens
catggtgagcgcgacgcggcctgctc

SEQ ID NO: 21416 - DNA, 26 bp, Homo sapiens
atggtgagcgcgacgcggcctgctcg

SEQ ID NO: 21417 - DNA, 26 bp, Homo sapiens
tggtgagcgcgacgcggcctgctcgc

SEQ ID NO: 21418 - DNA, 26 bp, Homo sapiens
ggtgagcgcgacgcggcctgctcgcc

SEQ ID NO: 21419 - DNA, 26 bp, Homo sapiens
gtgagcgcgacgcggcctgctcgccc

SEQ ID NO: 21420 - DNA, 26 bp, Homo sapiens
tgagcgcgacgcggcctgctcgcccg

SEQ ID NO: 21421 - DNA, 26 bp, Homo sapiens
gagcgcgacgcggcctgctcgcccgg

SEQ ID NO: 21422 - DNA, 26 bp, Homo sapiens
agcgcgacgcggcctgctcgcccggt

SEQ ID NO: 21423 - DNA, 26 bp, Homo sapiens
gcgcgacgcggcctgctcgcccggtg

SEQ ID NO: 21424 - DNA, 26 bp, Homo sapiens
cgcgacgcggcctgctcgcccggtgc

SEQ ID NO: 21425 - DNA, 26 bp, Homo sapiens
gcgacgcggcctgctcgcccggtgcc

SEQ ID NO: 21426 - DNA, 26 bp, Homo sapiens
cgacgcggcctgctcgcccggtgccc

SEQ ID NO: 21427 - DNA, 26 bp, Homo sapiens
gacgcggcctgctcgcccggtgcccg

SEQ ID NO: 21428 - DNA, 26 bp, Homo sapiens
acgcggcctgctcgcccggtgcccgc

SEQ ID NO: 21429 - DNA, 26 bp, Homo sapiens
cgcggcctgctcgcccggtgcccgcg

SEQ ID NO: 21430 - DNA, 26 bp, Homo sapiens
gcggcctgctcgcccggtgcccgcgc

SEQ ID NO: 21431 - DNA, 26 bp, Homo sapiens
cggcctgctcgcccggtgcccgcgct

SEQ ID NO: 21432 - DNA, 26 bp, Homo sapiens
ggcctgctcgcccggtgcccgcgctc

SEQ ID NO: 21433 - DNA, 26 bp, Homo sapiens
gcctgctcgcccggtgcccgcgctcc

SEQ ID NO: 21434 - DNA, 26 bp, Homo sapiens
cctgctcgcccggtgcccgcgctccc

SEQ ID NO: 21435 - DNA, 26 bp, Homo sapiens
ctgctcgcccggtgcccgcgctcccc

SEQ ID NO: 21436 - DNA, 26 bp, Homo sapiens
tgctcgcccggtgcccgcgctccccc

SEQ ID NO: 21437 - DNA, 26 bp, Homo sapiens
gctcgcccggtgcccgcgctcccccg

SEQ ID NO: 21438 - DNA, 26 bp, Homo sapiens
ctcgcccggtgcccgcgctcccccgg

SEQ ID NO: 21439 - DNA, 26 bp, Homo sapiens
tcgcccggtgcccgcgctcccccggc

SEQ ID NO: 21440 - DNA, 26 bp, Homo sapiens
cgcccggtgcccgcgctcccccggcc

SEQ ID NO: 21441 - DNA, 26 bp, Homo sapiens
gcccggtgcccgcgctcccccggcca

SEQ ID NO: 21442 - DNA, 26 bp, Homo sapiens
cccggtgcccgcgctcccccggccaa

SEQ ID NO: 21443 - DNA, 26 bp, Homo sapiens
ccggtgcccgcgctcccccggccaac

SEQ ID NO: 21444 - DNA, 26 bp, Homo sapiens
cggtgcccgcgctcccccggccaacg

SEQ ID NO: 21445 - DNA, 26 bp, Homo sapiens
ggtgcccgcgctcccccggccaacga

SEQ ID NO: 21446 - DNA, 26 bp, Homo sapiens
gtgcccgcgctcccccggccaacgac

SEQ ID NO: 21447 - DNA, 26 bp, Homo sapiens
tgcccgcgctcccccggccaacgacc

SEQ ID NO: 21448 - DNA, 26 bp, Homo sapiens
gcccgcgctcccccggccaacgaccc

SEQ ID NO: 21449 - DNA, 26 bp, Homo sapiens
cccgcgctcccccggccaacgacccg

SEQ ID NO: 21450 - DNA, 26 bp, Homo sapiens
ccgcgctcccccggccaacgacccgg

SEQ ID NO: 21451 - DNA, 26 bp, Homo sapiens
cgcgctcccccggccaacgacccggc

SEQ ID NO: 21452 - DNA, 26 bp, Homo sapiens
gcgctcccccggccaacgacccggcc

SEQ ID NO: 21453 - DNA, 26 bp, Homo sapiens
cgctcccccggccaacgacccggccg

SEQ ID NO: 21454 - DNA, 26 bp, Homo sapiens
gctcccccggccaacgacccggccgc

SEQ ID NO: 21455 - DNA, 26 bp, Homo sapiens
ctcccccggccaacgacccggccgcc

SEQ ID NO: 21456 - DNA, 26 bp, Homo sapiens
tcccccggccaacgacccggccgcca

SEQ ID NO: 21457 - DNA, 26 bp, Homo sapiens
cccccggccaacgacccggccgccag

SEQ ID NO: 21458 - DNA, 26 bp, Homo sapiens
ccccggccaacgacccggccgccaga

SEQ ID NO: 21459 - DNA, 26 bp, Homo sapiens
cccggccaacgacccggccgccagag

SEQ ID NO: 21460 - DNA, 26 bp, Homo sapiens
ccggccaacgacccggccgccagagt

SEQ ID NO: 21461 - DNA, 26 bp, Homo sapiens
cggccaacgacccggccgccagagtc

SEQ ID NO: 21462 - DNA, 26 bp, Homo sapiens
ggccaacgacccggccgccagagtcc

SEQ ID NO: 21463 - DNA, 26 bp, Homo sapiens
gccaacgacccggccgccagagtccg

SEQ ID NO: 21464 - DNA, 26 bp, Homo sapiens
ccaacgacccggccgccagagtccgt

SEQ ID NO: 21465 - DNA, 26 bp, Homo sapiens
caacgacccggccgccagagtccgtc

SEQ ID NO: 21466 - DNA, 26 bp, Homo sapiens
aacgacccggccgccagagtccgtcc

SEQ ID NO: 21467 - DNA, 26 bp, Homo sapiens
acgacccggccgccagagtccgtcct

SEQ ID NO: 21468 - DNA, 26 bp, Homo sapiens
cgacccggccgccagagtccgtcctc

SEQ ID NO: 21469 - DNA, 26 bp, Homo sapiens
gacccggccgccagagtccgtcctct

SEQ ID NO: 21470 - DNA, 26 bp, Homo sapiens
acccggccgccagagtccgtcctctc

SEQ ID NO: 21471 - DNA, 26 bp, Homo sapiens
cccggccgccagagtccgtcctctcg

SEQ ID NO: 21472 - DNA, 26 bp, Homo sapiens
ccggccgccagagtccgtcctctcgt

SEQ ID NO: 21473 - DNA, 26 bp, Homo sapiens
cggccgccagagtccgtcctctcgtt

SEQ ID NO: 21474 - DNA, 26 bp, Homo sapiens
ggccgccagagtccgtcctctcgttc

SEQ ID NO: 21475 - DNA, 26 bp, Homo sapiens
gccgccagagtccgtcctctcgttcg

SEQ ID NO: 21476 - DNA, 26 bp, Homo sapiens
ccgccagagtccgtcctctcgttcgc

SEQ ID NO: 21477 - DNA, 26 bp, Homo sapiens
cgccagagtccgtcctctcgttcgcc

SEQ ID NO: 21478 - DNA, 26 bp, Homo sapiens
gccagagtccgtcctctcgttcgccg

SEQ ID NO: 21479 - DNA, 26 bp, Homo sapiens
ccagagtccgtcctctcgttcgccgc

SEQ ID NO: 21480 - DNA, 26 bp, Homo sapiens
cagagtccgtcctctcgttcgccgcc

SEQ ID NO: 21481 - DNA, 26 bp, Homo sapiens
agagtccgtcctctcgttcgccgccg

SEQ ID NO: 21482 - DNA, 26 bp, Homo sapiens
gagtccgtcctctcgttcgccgccgc

SEQ ID NO: 21483 - DNA, 26 bp, Homo sapiens
agtccgtcctctcgttcgccgccgcc

SEQ ID NO: 21484 - DNA, 26 bp, Homo sapiens
gtccgtcctctcgttcgccgccgccg

SEQ ID NO: 21485 - DNA, 26 bp, Homo sapiens
tccgtcctctcgttcgccgccgccgg

SEQ ID NO: 21486 - DNA, 26 bp, Homo sapiens
ccgtcctctcgttcgccgccgccggc

SEQ ID NO: 21487 - DNA, 26 bp, Homo sapiens
cgtcctctcgttcgccgccgccggcc

SEQ ID NO: 21488 - DNA, 26 bp, Homo sapiens
gtcctctcgttcgccgccgccggccc

SEQ ID NO: 21489 - DNA, 26 bp, Homo sapiens
tcctctcgttcgccgccgccggcccc

SEQ ID NO: 21490 - DNA, 26 bp, Homo sapiens
cctctcgttcgccgccgccggccccg

SEQ ID NO: 21491 - DNA, 26 bp, Homo sapiens
ctctcgttcgccgccgccggccccgc

SEQ ID NO: 21492 - DNA, 26 bp, Homo sapiens
tctcgttcgccgccgccggccccgcg

SEQ ID NO: 21493 - DNA, 26 bp, Homo sapiens
ctcgttcgccgccgccggccccgcgc

SEQ ID NO: 21494 - DNA, 26 bp, Homo sapiens
tcgttcgccgccgccggccccgcgcc

SEQ ID NO: 21495 - DNA, 26 bp, Homo sapiens
cgttcgccgccgccggccccgcgccc

SEQ ID NO: 21496 - DNA, 26 bp, Homo sapiens
gttcgccgccgccggccccgcgccct

SEQ ID NO: 21497 - DNA, 26 bp, Homo sapiens
ttcgccgccgccggccccgcgccctg

SEQ ID NO: 21498 - DNA, 26 bp, Homo sapiens
tcgccgccgccggccccgcgccctga

SEQ ID NO: 21499 - DNA, 26 bp, Homo sapiens
cgccgccgccggccccgcgccctgag

SEQ ID NO: 21500 - DNA, 26 bp, Homo sapiens
gccgccgccggccccgcgccctgagc

SEQ ID NO: 21501 - DNA, 26 bp, Homo sapiens
ccgccgccggccccgcgccctgagcg

SEQ ID NO: 21502 - DNA, 26 bp, Homo sapiens
cgccgccggccccgcgccctgagcgc

SEQ ID NO: 21503 - DNA, 26 bp, Homo sapiens
gccgccggccccgcgccctgagcgcc

SEQ ID NO: 21504 - DNA, 26 bp, Homo sapiens
ccgccggccccgcgccctgagcgccc

SEQ ID NO: 21505 - DNA, 26 bp, Homo sapiens
cgccggccccgcgccctgagcgcccg

SEQ ID NO: 21506 - DNA, 26 bp, Homo sapiens
gccggccccgcgccctgagcgcccgt

SEQ ID NO: 21507 - DNA, 26 bp, Homo sapiens
ccggccccgcgccctgagcgcccgtc

SEQ ID NO: 21508 - DNA, 26 bp, Homo sapiens
cggccccgcgccctgagcgcccgtct

SEQ ID NO: 21509 - DNA, 26 bp, Homo sapiens
ggccccgcgccctgagcgcccgtctc

SEQ ID NO: 21510 - DNA, 26 bp, Homo sapiens
gccccgcgccctgagcgcccgtctcg

SEQ ID NO: 21511 - DNA, 26 bp, Homo sapiens
ccccgcgccctgagcgcccgtctcgc

SEQ ID NO: 21512 - DNA, 26 bp, Homo sapiens
cccgcgccctgagcgcccgtctcgcg

SEQ ID NO: 21513 - DNA, 26 bp, Homo sapiens
ccgcgccctgagcgcccgtctcgcgg

SEQ ID NO: 21514 - DNA, 26 bp, Homo sapiens
cgcgccctgagcgcccgtctcgcggc

SEQ ID NO: 21515 - DNA, 26 bp, Homo sapiens
gcgccctgagcgcccgtctcgcggct

SEQ ID NO: 21516 - DNA, 26 bp, Homo sapiens
cgccctgagcgcccgtctcgcggctc

SEQ ID NO: 21517 - DNA, 26 bp, Homo sapiens
gccctgagcgcccgtctcgcggctcc

SEQ ID NO: 21518 - DNA, 26 bp, Homo sapiens
ccctgagcgcccgtctcgcggctcca

SEQ ID NO: 21519 - DNA, 26 bp, Homo sapiens
cctgagcgcccgtctcgcggctccag

SEQ ID NO: 21520 - DNA, 26 bp, Homo sapiens
ctgagcgcccgtctcgcggctccagc

SEQ ID NO: 21521 - DNA, 26 bp, Homo sapiens
tgagcgcccgtctcgcggctccagcc

SEQ ID NO: 21522 - DNA, 26 bp, Homo sapiens
gagcgcccgtctcgcggctccagcca

SEQ ID NO: 21523 - DNA, 26 bp, Homo sapiens
agcgcccgtctcgcggctccagccag

SEQ ID NO: 21524 - DNA, 26 bp, Homo sapiens
gcgcccgtctcgcggctccagccagg

SEQ ID NO: 21525 - DNA, 26 bp, Homo sapiens
cgcccgtctcgcggctccagccagga

SEQ ID NO: 21526 - DNA, 26 bp, Homo sapiens
gcccgtctcgcggctccagccaggag

SEQ ID NO: 21527 - DNA, 26 bp, Homo sapiens
cccgtctcgcggctccagccaggaga

SEQ ID NO: 21528 - DNA, 26 bp, Homo sapiens
ccgtctcgcggctccagccaggagac

SEQ ID NO: 21529 - DNA, 26 bp, Homo sapiens
cgtctcgcggctccagccaggagaca

SEQ ID NO: 21530 - DNA, 26 bp, Homo sapiens
gtctcgcggctccagccaggagacaa

SEQ ID NO: 21531 - DNA, 26 bp, Homo sapiens
tctcgcggctccagccaggagacaac

SEQ ID NO: 21532 - DNA, 26 bp, Homo sapiens
ctcgcggctccagccaggagacaacc

SEQ ID NO: 21533 - DNA, 26 bp, Homo sapiens
tcgcggctccagccaggagacaacca

SEQ ID NO: 21534 - DNA, 26 bp, Homo sapiens
cgcggctccagccaggagacaaccac

SEQ ID NO: 21535 - DNA, 26 bp, Homo sapiens
gcggctccagccaggagacaaccact

SEQ ID NO: 21536 - DNA, 26 bp, Homo sapiens
cggctccagccaggagacaaccactt

SEQ ID NO: 21537 - DNA, 26 bp, Homo sapiens
ggctccagccaggagacaaccacttc

SEQ ID NO: 21538 - DNA, 26 bp, Homo sapiens
gctccagccaggagacaaccacttcc

SEQ ID NO: 21539 - DNA, 26 bp, Homo sapiens
ctccagccaggagacaaccacttccc

SEQ ID NO: 21540 - DNA, 26 bp, Homo sapiens
tccagccaggagacaaccacttcccc

SEQ ID NO: 21541 - DNA, 26 bp, Homo sapiens
ccagccaggagacaaccacttccccg

SEQ ID NO: 21542 - DNA, 26 bp, Homo sapiens
cagccaggagacaaccacttccccgg

SEQ ID NO: 21543 - DNA, 26 bp, Homo sapiens
agccaggagacaaccacttccccggg

SEQ ID NO: 21544 - DNA, 26 bp, Homo sapiens
gccaggagacaaccacttccccgggt

SEQ ID NO: 21545 - DNA, 26 bp, Homo sapiens
ccaggagacaaccacttccccgggta

SEQ ID NO: 21546 - DNA, 26 bp, Homo sapiens
caggagacaaccacttccccgggtaa

SEQ ID NO: 21547 - DNA, 26 bp, Homo sapiens
aggagacaaccacttccccgggtaat

SEQ ID NO: 21548 - DNA, 26 bp, Homo sapiens
ggagacaaccacttccccgggtaatc

SEQ ID NO: 21549 - DNA, 26 bp, Homo sapiens
gagacaaccacttccccgggtaatcc

SEQ ID NO: 21550 - DNA, 26 bp, Homo sapiens
agacaaccacttccccgggtaatcct

SEQ ID NO: 21551 - DNA, 26 bp, Homo sapiens
gacaaccacttccccgggtaatcctc

SEQ ID NO: 21552 - DNA, 26 bp, Homo sapiens
acaaccacttccccgggtaatcctcg

SEQ ID NO: 21553 - DNA, 26 bp, Homo sapiens
caaccacttccccgggtaatcctcgc

SEQ ID NO: 21554 - DNA, 26 bp, Homo sapiens
aaccacttccccgggtaatcctcgcc

SEQ ID NO: 21555 - DNA, 26 bp, Homo sapiens
accacttccccgggtaatcctcgccg

SEQ ID NO: 21556 - DNA, 26 bp, Homo sapiens
ccacttccccgggtaatcctcgccgc

SEQ ID NO: 21557 - DNA, 26 bp, Homo sapiens
cacttccccgggtaatcctcgccgcc

SEQ ID NO: 21558 - DNA, 26 bp, Homo sapiens
acttccccgggtaatcctcgccgcca

SEQ ID NO: 21559 - DNA, 26 bp, Homo sapiens
cttccccgggtaatcctcgccgccag

SEQ ID NO: 21560 - DNA, 26 bp, Homo sapiens
ttccccgggtaatcctcgccgccagg

SEQ ID NO: 21561 - DNA, 26 bp, Homo sapiens
tccccgggtaatcctcgccgccaggc

SEQ ID NO: 21562 - DNA, 26 bp, Homo sapiens
ccccgggtaatcctcgccgccaggcc

SEQ ID NO: 21563 - DNA, 26 bp, Homo sapiens
cccgggtaatcctcgccgccaggccc

SEQ ID NO: 21564 - DNA, 26 bp, Homo sapiens
ccgggtaatcctcgccgccaggcccg

SEQ ID NO: 21565 - DNA, 26 bp, Homo sapiens
cgggtaatcctcgccgccaggcccgc

SEQ ID NO: 21566 - DNA, 26 bp, Homo sapiens
gggtaatcctcgccgccaggcccgct

SEQ ID NO: 21567 - DNA, 26 bp, Homo sapiens
ggtaatcctcgccgccaggcccgctg

SEQ ID NO: 21568 - DNA, 26 bp, Homo sapiens
gtaatcctcgccgccaggcccgctgg

SEQ ID NO: 21569 - DNA, 26 bp, Homo sapiens
taatcctcgccgccaggcccgctggc

SEQ ID NO: 21570 - DNA, 26 bp, Homo sapiens
aatcctcgccgccaggcccgctggcc

SEQ ID NO: 21571 - DNA, 26 bp, Homo sapiens
atcctcgccgccaggcccgctggccg

SEQ ID NO: 21572 - DNA, 26 bp, Homo sapiens
tcctcgccgccaggcccgctggccgc

SEQ ID NO: 21573 - DNA, 26 bp, Homo sapiens
cctcgccgccaggcccgctggccgct

SEQ ID NO: 21574 - DNA, 26 bp, Homo sapiens
ctcgccgccaggcccgctggccgctg

SEQ ID NO: 21575 - DNA, 26 bp, Homo sapiens
tcgccgccaggcccgctggccgctgc

SEQ ID NO: 21576 - DNA, 26 bp, Homo sapiens
cgccgccaggcccgctggccgctgca

SEQ ID NO: 21577 - DNA, 26 bp, Homo sapiens
gccgccaggcccgctggccgctgcac

SEQ ID NO: 21578 - DNA, 26 bp, Homo sapiens
ccgccaggcccgctggccgctgcacc

SEQ ID NO: 21579 - DNA, 26 bp, Homo sapiens
cgccaggcccgctggccgctgcaccc

SEQ ID NO: 21580 - DNA, 26 bp, Homo sapiens
gccaggcccgctggccgctgcacccg

SEQ ID NO: 21581 - DNA, 26 bp, Homo sapiens
ccaggcccgctggccgctgcacccga

SEQ ID NO: 21582 - DNA, 26 bp, Homo sapiens
caggcccgctggccgctgcacccgag

SEQ ID NO: 21583 - DNA, 26 bp, Homo sapiens
aggcccgctggccgctgcacccgagc

SEQ ID NO: 21584 - DNA, 26 bp, Homo sapiens
ggcccgctggccgctgcacccgagcc

SEQ ID NO: 21585 - DNA, 26 bp, Homo sapiens
gcccgctggccgctgcacccgagccc

SEQ ID NO: 21586 - DNA, 26 bp, Homo sapiens
cccgctggccgctgcacccgagcccc

SEQ ID NO: 21587 - DNA, 26 bp, Homo sapiens
ccgctggccgctgcacccgagccccg

SEQ ID NO: 21588 - DNA, 26 bp, Homo sapiens
cgctggccgctgcacccgagccccgg

SEQ ID NO: 21589 - DNA, 26 bp, Homo sapiens
gctggccgctgcacccgagccccgga

SEQ ID NO: 21590 - DNA, 26 bp, Homo sapiens
ctggccgctgcacccgagccccggag

SEQ ID NO: 21591 - DNA, 26 bp, Homo sapiens
tggccgctgcacccgagccccggagc

SEQ ID NO: 21592 - DNA, 26 bp, Homo sapiens
ggccgctgcacccgagccccggagcc

SEQ ID NO: 21593 - DNA, 26 bp, Homo sapiens
gccgctgcacccgagccccggagccc

SEQ ID NO: 21594 - DNA, 26 bp, Homo sapiens
ccgctgcacccgagccccggagcccg

SEQ ID NO: 21595 - DNA, 26 bp, Homo sapiens
cgctgcacccgagccccggagcccgc

SEQ ID NO: 21596 - DNA, 26 bp, Homo sapiens
gctgcacccgagccccggagcccgct

SEQ ID NO: 21597 - DNA, 26 bp, Homo sapiens
ctgcacccgagccccggagcccgctc

SEQ ID NO: 21598 - DNA, 26 bp, Homo sapiens
tgcacccgagccccggagcccgctcc

SEQ ID NO: 21599 - DNA, 26 bp, Homo sapiens
gcacccgagccccggagcccgctccg

SEQ ID NO: 21600 - DNA, 26 bp, Homo sapiens
cacccgagccccggagcccgctccga

SEQ ID NO: 21601 - DNA, 26 bp, Homo sapiens
acccgagccccggagcccgctccgag

SEQ ID NO: 21602 - DNA, 26 bp, Homo sapiens
cccgagccccggagcccgctccgagc

SEQ ID NO: 21603 - DNA, 26 bp, Homo sapiens
ccgagccccggagcccgctccgagcc

SEQ ID NO: 21604 - DNA, 26 bp, Homo sapiens
cgagccccggagcccgctccgagccg

SEQ ID NO: 21605 - DNA, 26 bp, Homo sapiens
gagccccggagcccgctccgagccgc

SEQ ID NO: 21606 - DNA, 26 bp, Homo sapiens
agccccggagcccgctccgagccgcc

SEQ ID NO: 21607 - DNA, 26 bp, Homo sapiens
gccccggagcccgctccgagccgccg

SEQ ID NO: 21608 - DNA, 26 bp, Homo sapiens
ccccggagcccgctccgagccgccgc

SEQ ID NO: 21609 - DNA, 26 bp, Homo sapiens
cccggagcccgctccgagccgccgcc

SEQ ID NO: 21610 - DNA, 26 bp, Homo sapiens
ccggagcccgctccgagccgccgccg

SEQ ID NO: 21611 - DNA, 26 bp, Homo sapiens
cggagcccgctccgagccgccgccgc

SEQ ID NO: 21612 - DNA, 26 bp, Homo sapiens
ggagcccgctccgagccgccgccgct

SEQ ID NO: 21613 - DNA, 26 bp, Homo sapiens
gagcccgctccgagccgccgccgctg

SEQ ID NO: 21614 - DNA, 26 bp, Homo sapiens
agcccgctccgagccgccgccgctgc

SEQ ID NO: 21615 - DNA, 26 bp, Homo sapiens
gcccgctccgagccgccgccgctgcc

SEQ ID NO: 21616 - DNA, 26 bp, Homo sapiens
cccgctccgagccgccgccgctgccg

SEQ ID NO: 21617 - DNA, 26 bp, Homo sapiens
ccgctccgagccgccgccgctgccgg

SEQ ID NO: 21618 - DNA, 26 bp, Homo sapiens
cgctccgagccgccgccgctgccggg

SEQ ID NO: 21619 - DNA, 26 bp, Homo sapiens
gctccgagccgccgccgctgccgggg

SEQ ID NO: 21620 - DNA, 26 bp, Homo sapiens
ctccgagccgccgccgctgccgggga

SEQ ID NO: 21621 - DNA, 26 bp, Homo sapiens
tccgagccgccgccgctgccggggag

SEQ ID NO: 21622 - DNA, 26 bp, Homo sapiens
ccgagccgccgccgctgccggggagg

SEQ ID NO: 21623 - DNA, 26 bp, Homo sapiens
cgagccgccgccgctgccggggagga

SEQ ID NO: 21624 - DNA, 26 bp, Homo sapiens
gagccgccgccgctgccggggaggag

SEQ ID NO: 21625 - DNA, 26 bp, Homo sapiens
agccgccgccgctgccggggaggagc

SEQ ID NO: 21626 - DNA, 26 bp, Homo sapiens
gccgccgccgctgccggggaggagcc

SEQ ID NO: 21627 - DNA, 26 bp, Homo sapiens
ccgccgccgctgccggggaggagccg

SEQ ID NO: 21628 - DNA, 26 bp, Homo sapiens
cgccgccgctgccggggaggagccga

SEQ ID NO: 21629 - DNA, 26 bp, Homo sapiens
gccgccgctgccggggaggagccgag

SEQ ID NO: 21630 - DNA, 26 bp, Homo sapiens
ccgccgctgccggggaggagccgaga

SEQ ID NO: 21631 - DNA, 26 bp, Homo sapiens
cgccgctgccggggaggagccgagag

SEQ ID NO: 21632 - DNA, 26 bp, Homo sapiens
gccgctgccggggaggagccgagagg

SEQ ID NO: 21633 - DNA, 26 bp, Homo sapiens
ccgctgccggggaggagccgagagga

SEQ ID NO: 21634 - DNA, 26 bp, Homo sapiens
cgctgccggggaggagccgagaggag

SEQ ID NO: 21635 - DNA, 26 bp, Homo sapiens
gctgccggggaggagccgagaggagt

SEQ ID NO: 21636 - DNA, 26 bp, Homo sapiens
ctgccggggaggagccgagaggagtg

SEQ ID NO: 21637 - DNA, 26 bp, Homo sapiens
tgccggggaggagccgagaggagtgt

SEQ ID NO: 21638 - DNA, 26 bp, Homo sapiens
gccggggaggagccgagaggagtgtc

SEQ ID NO: 21639 - DNA, 26 bp, Homo sapiens
ccggggaggagccgagaggagtgtcc

SEQ ID NO: 21640 - DNA, 26 bp, Homo sapiens
cggggaggagccgagaggagtgtccg

SEQ ID NO: 21641 - DNA, 26 bp, Homo sapiens
ggggaggagccgagaggagtgtccgc

SEQ ID NO: 21642 - DNA, 26 bp, Homo sapiens
tcaatccatcaaatgtcattacagat

SEQ ID NO: 21643 - DNA, 26 bp, Homo sapiens
caatccatcaaatgtcattacagatt

SEQ ID NO: 21644 - DNA, 26 bp, Homo sapiens
aatccatcaaatgtcattacagattt

SEQ ID NO: 21645 - DNA, 26 bp, Homo sapiens
atccatcaaatgtcattacagattta

SEQ ID NO: 21646 - DNA, 26 bp, Homo sapiens
tccatcaaatgtcattacagatttat

SEQ ID NO: 21647 - DNA, 26 bp, Homo sapiens
ccatcaaatgtcattacagatttatt

SEQ ID NO: 21648 - DNA, 26 bp, Homo sapiens
catcaaatgtcattacagatttatta

SEQ ID NO: 21649 - DNA, 26 bp, Homo sapiens
atcaaatgtcattacagatttattaa

SEQ ID NO: 21650 - DNA, 26 bp, Homo sapiens
tcaaatgtcattacagatttattaag

SEQ ID NO: 21651 - DNA, 26 bp, Homo sapiens
caaatgtcattacagatttattaagc

SEQ ID NO: 21652 - DNA, 26 bp, Homo sapiens
aaatgtcattacagatttattaagcc

SEQ ID NO: 21653 - DNA, 26 bp, Homo sapiens
aatgtcattacagatttattaagcct

SEQ ID NO: 21654 - DNA, 26 bp, Homo sapiens
atgtcattacagatttattaagcctg

SEQ ID NO: 21655 - DNA, 26 bp, Homo sapiens
tgtcattacagatttattaagcctga

SEQ ID NO: 21656 - DNA, 26 bp, Homo sapiens
gtcattacagatttattaagcctgat

SEQ ID NO: 21657 - DNA, 26 bp, Homo sapiens
tcattacagatttattaagcctgatg

SEQ ID NO: 21658 - DNA, 26 bp, Homo sapiens
cattacagatttattaagcctgatgt

SEQ ID NO: 21659 - DNA, 26 bp, Homo sapiens
attacagatttattaagcctgatgta

SEQ ID NO: 21660 - DNA, 26 bp, Homo sapiens
ttacagatttattaagcctgatgtag

SEQ ID NO: 21661 - DNA, 26 bp, Homo sapiens
tacagatttattaagcctgatgtaga

SEQ ID NO: 21662 - DNA, 26 bp, Homo sapiens
acagatttattaagcctgatgtagaa

SEQ ID NO: 21663 - DNA, 26 bp, Homo sapiens
cagatttattaagcctgatgtagaaa

SEQ ID NO: 21664 - DNA, 26 bp, Homo sapiens
agatttattaagcctgatgtagaaag

SEQ ID NO: 21665 - DNA, 26 bp, Homo sapiens
gatttattaagcctgatgtagaaaga

SEQ ID NO: 21666 - DNA, 26 bp, Homo sapiens
atttattaagcctgatgtagaaagac

SEQ ID NO: 21667 - DNA, 26 bp, Homo sapiens
tttattaagcctgatgtagaaagaca

SEQ ID NO: 21668 - DNA, 26 bp, Homo sapiens
ttattaagcctgatgtagaaagacat

SEQ ID NO: 21669 - DNA, 26 bp, Homo sapiens
tattaagcctgatgtagaaagacatt

SEQ ID NO: 21670 - DNA, 26 bp, Homo sapiens
attaagcctgatgtagaaagacattt

SEQ ID NO: 21671 - DNA, 26 bp, Homo sapiens
ttaagcctgatgtagaaagacattta

SEQ ID NO: 21672 - DNA, 26 bp, Homo sapiens
taagcctgatgtagaaagacatttaa

SEQ ID NO: 21673 - DNA, 26 bp, Homo sapiens
aagcctgatgtagaaagacatttaac

SEQ ID NO: 21674 - DNA, 26 bp, Homo sapiens
agcctgatgtagaaagacatttaaca

SEQ ID NO: 21675 - DNA, 26 bp, Homo sapiens
gcctgatgtagaaagacatttaacag

SEQ ID NO: 21676 - DNA, 26 bp, Homo sapiens
cctgatgtagaaagacatttaacagt

SEQ ID NO: 21677 - DNA, 26 bp, Homo sapiens
ctgatgtagaaagacatttaacagta

SEQ ID NO: 21678 - DNA, 26 bp, Homo sapiens
tgatgtagaaagacatttaacagtaa

SEQ ID NO: 21679 - DNA, 26 bp, Homo sapiens
gatgtagaaagacatttaacagtaac

SEQ ID NO: 21680 - DNA, 26 bp, Homo sapiens
atgtagaaagacatttaacagtaaca

SEQ ID NO: 21681 - DNA, 26 bp, Homo sapiens
tgtagaaagacatttaacagtaacat

SEQ ID NO: 21682 - DNA, 26 bp, Homo sapiens
gtagaaagacatttaacagtaacatc

SEQ ID NO: 21683 - DNA, 26 bp, Homo sapiens
tagaaagacatttaacagtaacatct

SEQ ID NO: 21684 - DNA, 26 bp, Homo sapiens
agaaagacatttaacagtaacatctc

SEQ ID NO: 21685 - DNA, 26 bp, Homo sapiens
gaaagacatttaacagtaacatctcc

SEQ ID NO: 21686 - DNA, 26 bp, Homo sapiens
aaagacatttaacagtaacatctcca

SEQ ID NO: 21687 - DNA, 26 bp, Homo sapiens
aagacatttaacagtaacatctccag

SEQ ID NO: 21688 - DNA, 26 bp, Homo sapiens
agacatttaacagtaacatctccaga

SEQ ID NO: 21689 - DNA, 26 bp, Homo sapiens
gacatttaacagtaacatctccagaa

SEQ ID NO: 21690 - DNA, 26 bp, Homo sapiens
acatttaacagtaacatctccagaaa

SEQ ID NO: 21691 - DNA, 26 bp, Homo sapiens
catttaacagtaacatctccagaaag

SEQ ID NO: 21692 - DNA, 26 bp, Homo sapiens
atttaacagtaacatctccagaaagc

SEQ ID NO: 21693 - DNA, 26 bp, Homo sapiens
tttaacagtaacatctccagaaagca

SEQ ID NO: 21694 - DNA, 26 bp, Homo sapiens
ttaacagtaacatctccagaaagcat

SEQ ID NO: 21695 - DNA, 26 bp, Homo sapiens
taacagtaacatctccagaaagcata

SEQ ID NO: 21696 - DNA, 26 bp, Homo sapiens
aacagtaacatctccagaaagcataa

SEQ ID NO: 21697 - DNA, 26 bp, Homo sapiens
acagtaacatctccagaaagcataaa

SEQ ID NO: 21698 - DNA, 26 bp, Homo sapiens
cagtaacatctccagaaagcataaaa

SEQ ID NO: 21699 - DNA, 26 bp, Homo sapiens
agtaacatctccagaaagcataaaaa

SEQ ID NO: 21700 - DNA, 26 bp, Homo sapiens
gtaacatctccagaaagcataaaaag

SEQ ID NO: 21701 - DNA, 26 bp, Homo sapiens
taacatctccagaaagcataaaaaga

SEQ ID NO: 21702 - DNA, 26 bp, Homo sapiens
aacatctccagaaagcataaaaagag

SEQ ID NO: 21703 - DNA, 26 bp, Homo sapiens
acatctccagaaagcataaaaagagc

SEQ ID NO: 21704 - DNA, 26 bp, Homo sapiens
catctccagaaagcataaaaagagca

SEQ ID NO: 21705 - DNA, 26 bp, Homo sapiens
atctccagaaagcataaaaagagcac

SEQ ID NO: 21706 - DNA, 26 bp, Homo sapiens
tctccagaaagcataaaaagagcact

SEQ ID NO: 21707 - DNA, 26 bp, Homo sapiens
ctccagaaagcataaaaagagcactt

SEQ ID NO: 21708 - DNA, 26 bp, Homo sapiens
tccagaaagcataaaaagagcacttc

SEQ ID NO: 21709 - DNA, 26 bp, Homo sapiens
ccagaaagcataaaaagagcacttct

SEQ ID NO: 21710 - DNA, 26 bp, Homo sapiens
cagaaagcataaaaagagcacttcta

SEQ ID NO: 21711 - DNA, 26 bp, Homo sapiens
agaaagcataaaaagagcacttctat

SEQ ID NO: 21712 - DNA, 26 bp, Homo sapiens
gaaagcataaaaagagcacttctatt

SEQ ID NO: 21713 - DNA, 26 bp, Homo sapiens
aaagcataaaaagagcacttctattc

SEQ ID NO: 21714 - DNA, 26 bp, Homo sapiens
aagcataaaaagagcacttctattca

SEQ ID NO: 21715 - DNA, 26 bp, Homo sapiens
agcataaaaagagcacttctattcag

SEQ ID NO: 21716 - DNA, 26 bp, Homo sapiens
gcataaaaagagcacttctattcagt

SEQ ID NO: 21717 - DNA, 26 bp, Homo sapiens
cataaaaagagcacttctattcagtc

SEQ ID NO: 21718 - DNA, 26 bp, Homo sapiens
ataaaaagagcacttctattcagtct

SEQ ID NO: 21719 - DNA, 26 bp, Homo sapiens
taaaaagagcacttctattcagtctt

SEQ ID NO: 21720 - DNA, 26 bp, Homo sapiens
aaaaagagcacttctattcagtcttg

SEQ ID NO: 21721 - DNA, 26 bp, Homo sapiens
aaaagagcacttctattcagtcttgt

SEQ ID NO: 21722 - DNA, 26 bp, Homo sapiens
aaagagcacttctattcagtcttgtg

SEQ ID NO: 21723 - DNA, 26 bp, Homo sapiens
aagagcacttctattcagtcttgtgc

SEQ ID NO: 21724 - DNA, 26 bp, Homo sapiens
agagcacttctattcagtcttgtgct

SEQ ID NO: 21725 - DNA, 26 bp, Homo sapiens
gagcacttctattcagtcttgtgctt

SEQ ID NO: 21726 - DNA, 26 bp, Homo sapiens
agcacttctattcagtcttgtgcttt

SEQ ID NO: 21727 - DNA, 26 bp, Homo sapiens
gcacttctattcagtcttgtgctttg

SEQ ID NO: 21728 - DNA, 26 bp, Homo sapiens
cacttctattcagtcttgtgctttga

SEQ ID NO: 21729 - DNA, 26 bp, Homo sapiens
acttctattcagtcttgtgctttgaa

SEQ ID NO: 21730 - DNA, 26 bp, Homo sapiens
cttctattcagtcttgtgctttgaaa

SEQ ID NO: 21731 - DNA, 26 bp, Homo sapiens
ttctattcagtcttgtgctttgaaaa

SEQ ID NO: 21732 - DNA, 26 bp, Homo sapiens
tctattcagtcttgtgctttgaaaag

SEQ ID NO: 21733 - DNA, 26 bp, Homo sapiens
ctattcagtcttgtgctttgaaaagc

SEQ ID NO: 21734 - DNA, 26 bp, Homo sapiens
tattcagtcttgtgctttgaaaagct

SEQ ID NO: 21735 - DNA, 26 bp, Homo sapiens
attcagtcttgtgctttgaaaagcta

SEQ ID NO: 21736 - DNA, 26 bp, Homo sapiens
ttcagtcttgtgctttgaaaagctaa

SEQ ID NO: 21737 - DNA, 26 bp, Homo sapiens
tcagtcttgtgctttgaaaagctaaa

SEQ ID NO: 21738 - DNA, 26 bp, Homo sapiens
cagtcttgtgctttgaaaagctaaat

SEQ ID NO: 21739 - DNA, 26 bp, Homo sapiens
agtcttgtgctttgaaaagctaaata

SEQ ID NO: 21740 - DNA, 26 bp, Homo sapiens
gtcttgtgctttgaaaagctaaatat

SEQ ID NO: 21741 - DNA, 26 bp, Homo sapiens
tcttgtgctttgaaaagctaaatata

SEQ ID NO: 21742 - DNA, 26 bp, Homo sapiens
cttgtgctttgaaaagctaaatatat

SEQ ID NO: 21743 - DNA, 26 bp, Homo sapiens
ttgtgctttgaaaagctaaatatatt

SEQ ID NO: 21744 - DNA, 26 bp, Homo sapiens
tgtgctttgaaaagctaaatatattt

SEQ ID NO: 21745 - DNA, 26 bp, Homo sapiens
gtgctttgaaaagctaaatatatttt

SEQ ID NO: 21746 - DNA, 26 bp, Homo sapiens
tgctttgaaaagctaaatatattttt

SEQ ID NO: 21747 - DNA, 26 bp, Homo sapiens
gctttgaaaagctaaatatattttta

SEQ ID NO: 21748 - DNA, 26 bp, Homo sapiens
ctttgaaaagctaaatatatttttat

SEQ ID NO: 21749 - DNA, 26 bp, Homo sapiens
tttgaaaagctaaatatatttttatc

SEQ ID NO: 21750 - DNA, 26 bp, Homo sapiens
ttgaaaagctaaatatatttttatca

SEQ ID NO: 21751 - DNA, 26 bp, Homo sapiens
tgaaaagctaaatatatttttatcat

SEQ ID NO: 21752 - DNA, 26 bp, Homo sapiens
gaaaagctaaatatatttttatcata

SEQ ID NO: 21753 - DNA, 26 bp, Homo sapiens
aaaagctaaatatatttttatcatat

SEQ ID NO: 21754 - DNA, 26 bp, Homo sapiens
aaagctaaatatatttttatcatata

SEQ ID NO: 21755 - DNA, 26 bp, Homo sapiens
aagctaaatatatttttatcatataa

SEQ ID NO: 21756 - DNA, 26 bp, Homo sapiens
agctaaatatatttttatcatataaa

SEQ ID NO: 21757 - DNA, 26 bp, Homo sapiens
gctaaatatatttttatcatataaat

SEQ ID NO: 21758 - DNA, 26 bp, Homo sapiens
ctaaatatatttttatcatataaata

SEQ ID NO: 21759 - DNA, 26 bp, Homo sapiens
taaatatatttttatcatataaataa

SEQ ID NO: 21760 - DNA, 26 bp, Homo sapiens
aaatatatttttatcatataaataat

SEQ ID NO: 21761 - DNA, 26 bp, Homo sapiens
aatatatttttatcatataaataatt

SEQ ID NO: 21762 - DNA, 26 bp, Homo sapiens
atatatttttatcatataaataattc

SEQ ID NO: 21763 - DNA, 26 bp, Homo sapiens
tatatttttatcatataaataattct

SEQ ID NO: 21764 - DNA, 26 bp, Homo sapiens
atatttttatcatataaataattctt

SEQ ID NO: 21765 - DNA, 26 bp, Homo sapiens
tatttttatcatataaataattcttt

SEQ ID NO: 21766 - DNA, 26 bp, Homo sapiens
atttttatcatataaataattctttt

SEQ ID NO: 21767 - DNA, 26 bp, Homo sapiens
tttttatcatataaataattcttttc

SEQ ID NO: 21768 - DNA, 26 bp, Homo sapiens
ttttatcatataaataattcttttca

SEQ ID NO: 21769 - DNA, 26 bp, Homo sapiens
tttatcatataaataattcttttcat

SEQ ID NO: 21770 - DNA, 26 bp, Homo sapiens
ttatcatataaataattcttttcatg

SEQ ID NO: 21771 - DNA, 26 bp, Homo sapiens
tatcatataaataattcttttcatgt

SEQ ID NO: 21772 - DNA, 26 bp, Homo sapiens
atcatataaataattcttttcatgtt

SEQ ID NO: 21773 - DNA, 26 bp, Homo sapiens
tcatataaataattcttttcatgttt

SEQ ID NO: 21774 - DNA, 26 bp, Homo sapiens
catataaataattcttttcatgtttt

SEQ ID NO: 21775 - DNA, 26 bp, Homo sapiens
atataaataattcttttcatgtttta

SEQ ID NO: 21776 - DNA, 26 bp, Homo sapiens
tataaataattcttttcatgttttaa

SEQ ID NO: 21777 - DNA, 26 bp, Homo sapiens
ataaataattcttttcatgttttaag

SEQ ID NO: 21778 - DNA, 26 bp, Homo sapiens
taaataattcttttcatgttttaagt

SEQ ID NO: 21779 - DNA, 26 bp, Homo sapiens
aaataattcttttcatgttttaagtg

SEQ ID NO: 21780 - DNA, 26 bp, Homo sapiens
aataattcttttcatgttttaagtgc

SEQ ID NO: 21781 - DNA, 26 bp, Homo sapiens
ataattcttttcatgttttaagtgca

SEQ ID NO: 21782 - DNA, 26 bp, Homo sapiens
taattcttttcatgttttaagtgcat

SEQ ID NO: 21783 - DNA, 26 bp, Homo sapiens
aattcttttcatgttttaagtgcatc

SEQ ID NO: 21784 - DNA, 26 bp, Homo sapiens
attcttttcatgttttaagtgcatct

SEQ ID NO: 21785 - DNA, 26 bp, Homo sapiens
ttcttttcatgttttaagtgcatctg

SEQ ID NO: 21786 - DNA, 26 bp, Homo sapiens
tcttttcatgttttaagtgcatctgt

SEQ ID NO: 21787 - DNA, 26 bp, Homo sapiens
cttttcatgttttaagtgcatctgtg

SEQ ID NO: 21788 - DNA, 26 bp, Homo sapiens
ttttcatgttttaagtgcatctgtgt

SEQ ID NO: 21789 - DNA, 26 bp, Homo sapiens
tttcatgttttaagtgcatctgtgtt

SEQ ID NO: 21790 - DNA, 26 bp, Homo sapiens
ttcatgttttaagtgcatctgtgttt

SEQ ID NO: 21791 - DNA, 26 bp, Homo sapiens
tcatgttttaagtgcatctgtgtttt

SEQ ID NO: 21792 - DNA, 26 bp, Homo sapiens
catgttttaagtgcatctgtgttttt

SEQ ID NO: 21793 - DNA, 26 bp, Homo sapiens
atgttttaagtgcatctgtgtttttt

SEQ ID NO: 21794 - DNA, 26 bp, Homo sapiens
tgttttaagtgcatctgtgttttttt

SEQ ID NO: 21795 - DNA, 26 bp, Homo sapiens
gttttaagtgcatctgtgtttttttt

SEQ ID NO: 21796 - DNA, 26 bp, Homo sapiens
ttttaagtgcatctgtgttttttttc

SEQ ID NO: 21797 - DNA, 26 bp, Homo sapiens
tttaagtgcatctgtgttttttttct

SEQ ID NO: 21798 - DNA, 26 bp, Homo sapiens
ttaagtgcatctgtgttttttttctt

SEQ ID NO: 21799 - DNA, 26 bp, Homo sapiens
taagtgcatctgtgttttttttcttc

SEQ ID NO: 21800 - DNA, 26 bp, Homo sapiens
aagtgcatctgtgttttttttcttct

SEQ ID NO: 21801 - DNA, 26 bp, Homo sapiens
agtgcatctgtgttttttttcttctc

SEQ ID NO: 21802 - DNA, 26 bp, Homo sapiens
gtgcatctgtgttttttttcttctct

SEQ ID NO: 21803 - DNA, 26 bp, Homo sapiens
tgcatctgtgttttttttcttctctc

SEQ ID NO: 21804 - DNA, 26 bp, Homo sapiens
gcatctgtgttttttttcttctctcc

SEQ ID NO: 21805 - DNA, 26 bp, Homo sapiens
catctgtgttttttttcttctctcct

SEQ ID NO: 21806 - DNA, 26 bp, Homo sapiens
atctgtgttttttttcttctctcctt

SEQ ID NO: 21807 - DNA, 26 bp, Homo sapiens
tctgtgttttttttcttctctccttt

SEQ ID NO: 21808 - DNA, 26 bp, Homo sapiens
ctgtgttttttttcttctctccttta

SEQ ID NO: 21809 - DNA, 26 bp, Homo sapiens
tgtgttttttttcttctctcctttaa

SEQ ID NO: 21810 - DNA, 26 bp, Homo sapiens
gtgttttttttcttctctcctttaat

SEQ ID NO: 21811 - DNA, 26 bp, Homo sapiens
tgttttttttcttctctcctttaatt

SEQ ID NO: 21812 - DNA, 26 bp, Homo sapiens
gttttttttcttctctcctttaattt

SEQ ID NO: 21813 - DNA, 26 bp, Homo sapiens
ttttttttcttctctcctttaatttt

SEQ ID NO: 21814 - DNA, 26 bp, Homo sapiens
tttttttcttctctcctttaattttc

SEQ ID NO: 21815 - DNA, 26 bp, Homo sapiens
ttttttcttctctcctttaattttca

SEQ ID NO: 21816 - DNA, 26 bp, Homo sapiens
tttttcttctctcctttaattttcat

SEQ ID NO: 21817 - DNA, 26 bp, Homo sapiens
ttttcttctctcctttaattttcatt

SEQ ID NO: 21818 - DNA, 26 bp, Homo sapiens
tttcttctctcctttaattttcattt

SEQ ID NO: 21819 - DNA, 26 bp, Homo sapiens
ttcttctctcctttaattttcatttt

SEQ ID NO: 21820 - DNA, 26 bp, Homo sapiens
tcttctctcctttaattttcattttt

SEQ ID NO: 21821 - DNA, 26 bp, Homo sapiens
cttctctcctttaattttcatttttc

SEQ ID NO: 21822 - DNA, 26 bp, Homo sapiens
ttctctcctttaattttcatttttca

SEQ ID NO: 21823 - DNA, 26 bp, Homo sapiens
tctctcctttaattttcatttttcaa

SEQ ID NO: 21824 - DNA, 26 bp, Homo sapiens
ctctcctttaattttcatttttcaat

SEQ ID NO: 21825 - DNA, 26 bp, Homo sapiens
tctcctttaattttcatttttcaatt

SEQ ID NO: 21826 - DNA, 26 bp, Homo sapiens
ctcctttaattttcatttttcaattg

SEQ ID NO: 21827 - DNA, 26 bp, Homo sapiens
tcctttaattttcatttttcaattgg

SEQ ID NO: 21828 - DNA, 26 bp, Homo sapiens
cctttaattttcatttttcaattggc

SEQ ID NO: 21829 - DNA, 26 bp, Homo sapiens
ctttaattttcatttttcaattggcc

SEQ ID NO: 21830 - DNA, 26 bp, Homo sapiens
tttaattttcatttttcaattggcca

SEQ ID NO: 21831 - DNA, 26 bp, Homo sapiens
ttaattttcatttttcaattggccaa

SEQ ID NO: 21832 - DNA, 26 bp, Homo sapiens
taattttcatttttcaattggccaaa

SEQ ID NO: 21833 - DNA, 26 bp, Homo sapiens
aattttcatttttcaattggccaaag

SEQ ID NO: 21834 - DNA, 26 bp, Homo sapiens
attttcatttttcaattggccaaagc

SEQ ID NO: 21835 - DNA, 26 bp, Homo sapiens
ttttcatttttcaattggccaaagca

SEQ ID NO: 21836 - DNA, 26 bp, Homo sapiens
tttcatttttcaattggccaaagcag

SEQ ID NO: 21837 - DNA, 26 bp, Homo sapiens
ttcatttttcaattggccaaagcaga

SEQ ID NO: 21838 - DNA, 26 bp, Homo sapiens
tcatttttcaattggccaaagcagaa

SEQ ID NO: 21839 - DNA, 26 bp, Homo sapiens
catttttcaattggccaaagcagaag

SEQ ID NO: 21840 - DNA, 26 bp, Homo sapiens
atttttcaattggccaaagcagaagt

SEQ ID NO: 21841 - DNA, 26 bp, Homo sapiens
tttttcaattggccaaagcagaagtc

SEQ ID NO: 21842 - DNA, 26 bp, Homo sapiens
ttttcaattggccaaagcagaagtcg

SEQ ID NO: 21843 - DNA, 26 bp, Homo sapiens
tttcaattggccaaagcagaagtcga

SEQ ID NO: 21844 - DNA, 26 bp, Homo sapiens
ttcaattggccaaagcagaagtcgac

SEQ ID NO: 21845 - DNA, 26 bp, Homo sapiens
tcaattggccaaagcagaagtcgacg

SEQ ID NO: 21846 - DNA, 26 bp, Homo sapiens
caattggccaaagcagaagtcgacgt

SEQ ID NO: 21847 - DNA, 26 bp, Homo sapiens
aattggccaaagcagaagtcgacgtt

SEQ ID NO: 21848 - DNA, 26 bp, Homo sapiens
attggccaaagcagaagtcgacgttg

SEQ ID NO: 21849 - DNA, 26 bp, Homo sapiens
ttggccaaagcagaagtcgacgttga

SEQ ID NO: 21850 - DNA, 26 bp, Homo sapiens
tggccaaagcagaagtcgacgttgac

SEQ ID NO: 21851 - DNA, 26 bp, Homo sapiens
ggccaaagcagaagtcgacgttgact

SEQ ID NO: 21852 - DNA, 26 bp, Homo sapiens
gccaaagcagaagtcgacgttgactg

SEQ ID NO: 21853 - DNA, 26 bp, Homo sapiens
ccaaagcagaagtcgacgttgactga

SEQ ID NO: 21854 - DNA, 26 bp, Homo sapiens
caaagcagaagtcgacgttgactgaa

SEQ ID NO: 21855 - DNA, 26 bp, Homo sapiens
aaagcagaagtcgacgttgactgaaa

SEQ ID NO: 21856 - DNA, 26 bp, Homo sapiens
aagcagaagtcgacgttgactgaaat

SEQ ID NO: 21857 - DNA, 26 bp, Homo sapiens
agcagaagtcgacgttgactgaaatg

SEQ ID NO: 21858 - DNA, 26 bp, Homo sapiens
gcagaagtcgacgttgactgaaatga

SEQ ID NO: 21859 - DNA, 26 bp, Homo sapiens
cagaagtcgacgttgactgaaatgaa

SEQ ID NO: 21860 - DNA, 26 bp, Homo sapiens
agaagtcgacgttgactgaaatgaag

SEQ ID NO: 21861 - DNA, 26 bp, Homo sapiens
gaagtcgacgttgactgaaatgaagc

SEQ ID NO: 21862 - DNA, 26 bp, Homo sapiens
aagtcgacgttgactgaaatgaagcc

SEQ ID NO: 21863 - DNA, 26 bp, Homo sapiens
agtcgacgttgactgaaatgaagcca

SEQ ID NO: 21864 - DNA, 26 bp, Homo sapiens
gtcgacgttgactgaaatgaagccat

SEQ ID NO: 21865 - DNA, 26 bp, Homo sapiens
tcgacgttgactgaaatgaagccatt

SEQ ID NO: 21866 - DNA, 26 bp, Homo sapiens
cgacgttgactgaaatgaagccattt

SEQ ID NO: 21867 - DNA, 26 bp, Homo sapiens
gacgttgactgaaatgaagccatttg

SEQ ID NO: 21868 - DNA, 26 bp, Homo sapiens
acgttgactgaaatgaagccatttgc

SEQ ID NO: 21869 - DNA, 26 bp, Homo sapiens
cgttgactgaaatgaagccatttgca

SEQ ID NO: 21870 - DNA, 26 bp, Homo sapiens
gttgactgaaatgaagccatttgcaa

SEQ ID NO: 21871 - DNA, 26 bp, Homo sapiens
ttgactgaaatgaagccatttgcaaa

SEQ ID NO: 21872 - DNA, 26 bp, Homo sapiens
tgactgaaatgaagccatttgcaaag

SEQ ID NO: 21873 - DNA, 26 bp, Homo sapiens
gactgaaatgaagccatttgcaaagc

SEQ ID NO: 21874 - DNA, 26 bp, Homo sapiens
actgaaatgaagccatttgcaaagct

SEQ ID NO: 21875 - DNA, 26 bp, Homo sapiens
ctgaaatgaagccatttgcaaagcta

SEQ ID NO: 21876 - DNA, 26 bp, Homo sapiens
tgaaatgaagccatttgcaaagctaa

SEQ ID NO: 21877 - DNA, 26 bp, Homo sapiens
gaaatgaagccatttgcaaagctaat

SEQ ID NO: 21878 - DNA, 26 bp, Homo sapiens
aaatgaagccatttgcaaagctaatg

SEQ ID NO: 21879 - DNA, 26 bp, Homo sapiens
aatgaagccatttgcaaagctaatgg

SEQ ID NO: 21880 - DNA, 26 bp, Homo sapiens
atgaagccatttgcaaagctaatggt

SEQ ID NO: 21881 - DNA, 26 bp, Homo sapiens
tgaagccatttgcaaagctaatggtg

SEQ ID NO: 21882 - DNA, 26 bp, Homo sapiens
gaagccatttgcaaagctaatggtgt

SEQ ID NO: 21883 - DNA, 26 bp, Homo sapiens
aagccatttgcaaagctaatggtgtt

SEQ ID NO: 21884 - DNA, 26 bp, Homo sapiens
agccatttgcaaagctaatggtgttg

SEQ ID NO: 21885 - DNA, 26 bp, Homo sapiens
gccatttgcaaagctaatggtgttga

SEQ ID NO: 21886 - DNA, 26 bp, Homo sapiens
ccatttgcaaagctaatggtgttgag

SEQ ID NO: 21887 - DNA, 26 bp, Homo sapiens
catttgcaaagctaatggtgttgaga

SEQ ID NO: 21888 - DNA, 26 bp, Homo sapiens
atttgcaaagctaatggtgttgagag

SEQ ID NO: 21889 - DNA, 26 bp, Homo sapiens
tttgcaaagctaatggtgttgagagg

SEQ ID NO: 21890 - DNA, 26 bp, Homo sapiens
ttgcaaagctaatggtgttgagaggc

SEQ ID NO: 21891 - DNA, 26 bp, Homo sapiens
tgcaaagctaatggtgttgagaggca

SEQ ID NO: 21892 - DNA, 26 bp, Homo sapiens
gcaaagctaatggtgttgagaggcat

SEQ ID NO: 21893 - DNA, 26 bp, Homo sapiens
caaagctaatggtgttgagaggcatg

SEQ ID NO: 21894 - DNA, 26 bp, Homo sapiens
aaagctaatggtgttgagaggcatgt

SEQ ID NO: 21895 - DNA, 26 bp, Homo sapiens
aagctaatggtgttgagaggcatgtc

SEQ ID NO: 21896 - DNA, 26 bp, Homo sapiens
agctaatggtgttgagaggcatgtct

SEQ ID NO: 21897 - DNA, 26 bp, Homo sapiens
gctaatggtgttgagaggcatgtctc

SEQ ID NO: 21898 - DNA, 26 bp, Homo sapiens
ctaatggtgttgagaggcatgtctct

SEQ ID NO: 21899 - DNA, 26 bp, Homo sapiens
taatggtgttgagaggcatgtctctg

SEQ ID NO: 21900 - DNA, 26 bp, Homo sapiens
aatggtgttgagaggcatgtctctgc

SEQ ID NO: 21901 - DNA, 26 bp, Homo sapiens
atggtgttgagaggcatgtctctgct

SEQ ID NO: 21902 - DNA, 26 bp, Homo sapiens
tggtgttgagaggcatgtctctgcta

SEQ ID NO: 21903 - DNA, 26 bp, Homo sapiens
ggtgttgagaggcatgtctctgctat

SEQ ID NO: 21904 - DNA, 26 bp, Homo sapiens
gtgttgagaggcatgtctctgctatt

SEQ ID NO: 21905 - DNA, 26 bp, Homo sapiens
tgttgagaggcatgtctctgctattc

SEQ ID NO: 21906 - DNA, 26 bp, Homo sapiens
gttgagaggcatgtctctgctattcc

SEQ ID NO: 21907 - DNA, 26 bp, Homo sapiens
ttgagaggcatgtctctgctattccg

SEQ ID NO: 21908 - DNA, 26 bp, Homo sapiens
tgagaggcatgtctctgctattccgt

SEQ ID NO: 21909 - DNA, 26 bp, Homo sapiens
gagaggcatgtctctgctattccgta

SEQ ID NO: 21910 - DNA, 26 bp, Homo sapiens
agaggcatgtctctgctattccgtat

SEQ ID NO: 21911 - DNA, 26 bp, Homo sapiens
gaggcatgtctctgctattccgtatc

SEQ ID NO: 21912 - DNA, 26 bp, Homo sapiens
aggcatgtctctgctattccgtatca

SEQ ID NO: 21913 - DNA, 26 bp, Homo sapiens
ggcatgtctctgctattccgtatcag

SEQ ID NO: 21914 - DNA, 26 bp, Homo sapiens
gcatgtctctgctattccgtatcagc

SEQ ID NO: 21915 - DNA, 26 bp, Homo sapiens
catgtctctgctattccgtatcagct

SEQ ID NO: 21916 - DNA, 26 bp, Homo sapiens
atgtctctgctattccgtatcagcta

SEQ ID NO: 21917 - DNA, 26 bp, Homo sapiens
tgtctctgctattccgtatcagctag

SEQ ID NO: 21918 - DNA, 26 bp, Homo sapiens
gtctctgctattccgtatcagctagg

SEQ ID NO: 21919 - DNA, 26 bp, Homo sapiens
tctctgctattccgtatcagctaggt

SEQ ID NO: 21920 - DNA, 26 bp, Homo sapiens
ctctgctattccgtatcagctaggtt

SEQ ID NO: 21921 - DNA, 26 bp, Homo sapiens
tctgctattccgtatcagctaggttt

SEQ ID NO: 21922 - DNA, 26 bp, Homo sapiens
ctgctattccgtatcagctaggtttc

SEQ ID NO: 21923 - DNA, 26 bp, Homo sapiens
tgctattccgtatcagctaggtttca

SEQ ID NO: 21924 - DNA, 26 bp, Homo sapiens
gctattccgtatcagctaggtttcag

SEQ ID NO: 21925 - DNA, 26 bp, Homo sapiens
ctattccgtatcagctaggtttcagg

SEQ ID NO: 21926 - DNA, 26 bp, Homo sapiens
tattccgtatcagctaggtttcagga

SEQ ID NO: 21927 - DNA, 26 bp, Homo sapiens
attccgtatcagctaggtttcaggaa

SEQ ID NO: 21928 - DNA, 26 bp, Homo sapiens
ttccgtatcagctaggtttcaggaag

SEQ ID NO: 21929 - DNA, 26 bp, Homo sapiens
tccgtatcagctaggtttcaggaagg

SEQ ID NO: 21930 - DNA, 26 bp, Homo sapiens
ccgtatcagctaggtttcaggaaggt

SEQ ID NO: 21931 - DNA, 26 bp, Homo sapiens
cgtatcagctaggtttcaggaaggtg

SEQ ID NO: 21932 - DNA, 26 bp, Homo sapiens
gtatcagctaggtttcaggaaggtgg

SEQ ID NO: 21933 - DNA, 26 bp, Homo sapiens
tatcagctaggtttcaggaaggtggt

SEQ ID NO: 21934 - DNA, 26 bp, Homo sapiens
atcagctaggtttcaggaaggtggtt

SEQ ID NO: 21935 - DNA, 26 bp, Homo sapiens
tcagctaggtttcaggaaggtggttc

SEQ ID NO: 21936 - DNA, 26 bp, Homo sapiens
cagctaggtttcaggaaggtggttca

SEQ ID NO: 21937 - DNA, 26 bp, Homo sapiens
agctaggtttcaggaaggtggttcaa

SEQ ID NO: 21938 - DNA, 26 bp, Homo sapiens
gctaggtttcaggaaggtggttcaat

SEQ ID NO: 21939 - DNA, 26 bp, Homo sapiens
ctaggtttcaggaaggtggttcaata

SEQ ID NO: 21940 - DNA, 26 bp, Homo sapiens
taggtttcaggaaggtggttcaatag

SEQ ID NO: 21941 - DNA, 26 bp, Homo sapiens
aggtttcaggaaggtggttcaatagc

SEQ ID NO: 21942 - DNA, 26 bp, Homo sapiens
ggtttcaggaaggtggttcaatagct

SEQ ID NO: 21943 - DNA, 26 bp, Homo sapiens
gtttcaggaaggtggttcaatagctg

SEQ ID NO: 21944 - DNA, 26 bp, Homo sapiens
tttcaggaaggtggttcaatagctgc

SEQ ID NO: 21945 - DNA, 26 bp, Homo sapiens
ttcaggaaggtggttcaatagctgca

SEQ ID NO: 21946 - DNA, 26 bp, Homo sapiens
tcaggaaggtggttcaatagctgcag

SEQ ID NO: 21947 - DNA, 26 bp, Homo sapiens
caggaaggtggttcaatagctgcagc

SEQ ID NO: 21948 - DNA, 26 bp, Homo sapiens
aggaaggtggttcaatagctgcagca

SEQ ID NO: 21949 - DNA, 26 bp, Homo sapiens
ggaaggtggttcaatagctgcagcat

SEQ ID NO: 21950 - DNA, 26 bp, Homo sapiens
gaaggtggttcaatagctgcagcatt

SEQ ID NO: 21951 - DNA, 26 bp, Homo sapiens
aaggtggttcaatagctgcagcatta

SEQ ID NO: 21952 - DNA, 26 bp, Homo sapiens
aggtggttcaatagctgcagcattaa

SEQ ID NO: 21953 - DNA, 26 bp, Homo sapiens
ggtggttcaatagctgcagcattaaa

SEQ ID NO: 21954 - DNA, 26 bp, Homo sapiens
gtggttcaatagctgcagcattaaaa

SEQ ID NO: 21955 - DNA, 26 bp, Homo sapiens
tggttcaatagctgcagcattaaaat

SEQ ID NO: 21956 - DNA, 26 bp, Homo sapiens
ggttcaatagctgcagcattaaaatg

SEQ ID NO: 21957 - DNA, 26 bp, Homo sapiens
gttcaatagctgcagcattaaaatga

SEQ ID NO: 21958 - DNA, 26 bp, Homo sapiens
ttcaatagctgcagcattaaaatgag

SEQ ID NO: 21959 - DNA, 26 bp, Homo sapiens
tcaatagctgcagcattaaaatgagg

SEQ ID NO: 21960 - DNA, 26 bp, Homo sapiens
caatagctgcagcattaaaatgaggg

SEQ ID NO: 21961 - DNA, 26 bp, Homo sapiens
aatagctgcagcattaaaatgaggga

SEQ ID NO: 21962 - DNA, 26 bp, Homo sapiens
atagctgcagcattaaaatgagggac

SEQ ID NO: 21963 - DNA, 26 bp, Homo sapiens
tagctgcagcattaaaatgagggaca

SEQ ID NO: 21964 - DNA, 26 bp, Homo sapiens
agctgcagcattaaaatgagggacag

SEQ ID NO: 21965 - DNA, 26 bp, Homo sapiens
gctgcagcattaaaatgagggacagc

SEQ ID NO: 21966 - DNA, 26 bp, Homo sapiens
ctgcagcattaaaatgagggacagcc

SEQ ID NO: 21967 - DNA, 26 bp, Homo sapiens
tgcagcattaaaatgagggacagcct

SEQ ID NO: 21968 - DNA, 26 bp, Homo sapiens
gcagcattaaaatgagggacagcctc

SEQ ID NO: 21969 - DNA, 26 bp, Homo sapiens
cagcattaaaatgagggacagcctcc

SEQ ID NO: 21970 - DNA, 26 bp, Homo sapiens
agcattaaaatgagggacagcctcca

SEQ ID NO: 21971 - DNA, 26 bp, Homo sapiens
gcattaaaatgagggacagcctccag

SEQ ID NO: 21972 - DNA, 26 bp, Homo sapiens
cattaaaatgagggacagcctccagc

SEQ ID NO: 21973 - DNA, 26 bp, Homo sapiens
attaaaatgagggacagcctccagca

SEQ ID NO: 21974 - DNA, 26 bp, Homo sapiens
ttaaaatgagggacagcctccagcaa

SEQ ID NO: 21975 - DNA, 26 bp, Homo sapiens
taaaatgagggacagcctccagcaaa

SEQ ID NO: 21976 - DNA, 26 bp, Homo sapiens
aaaatgagggacagcctccagcaaaa

SEQ ID NO: 21977 - DNA, 26 bp, Homo sapiens
aaatgagggacagcctccagcaaaat

SEQ ID NO: 21978 - DNA, 26 bp, Homo sapiens
aatgagggacagcctccagcaaaatc

SEQ ID NO: 21979 - DNA, 26 bp, Homo sapiens
atgagggacagcctccagcaaaatca

SEQ ID NO: 21980 - DNA, 26 bp, Homo sapiens
tgagggacagcctccagcaaaatcat

SEQ ID NO: 21981 - DNA, 26 bp, Homo sapiens
gagggacagcctccagcaaaatcata

SEQ ID NO: 21982 - DNA, 26 bp, Homo sapiens
agggacagcctccagcaaaatcataa

SEQ ID NO: 21983 - DNA, 26 bp, Homo sapiens
gggacagcctccagcaaaatcataat

SEQ ID NO: 21984 - DNA, 26 bp, Homo sapiens
ggacagcctccagcaaaatcataatt

SEQ ID NO: 21985 - DNA, 26 bp, Homo sapiens
gacagcctccagcaaaatcataattg

SEQ ID NO: 21986 - DNA, 26 bp, Homo sapiens
acagcctccagcaaaatcataattga

SEQ ID NO: 21987 - DNA, 26 bp, Homo sapiens
cagcctccagcaaaatcataattgaa

SEQ ID NO: 21988 - DNA, 26 bp, Homo sapiens
agcctccagcaaaatcataattgaac

SEQ ID NO: 21989 - DNA, 26 bp, Homo sapiens
gcctccagcaaaatcataattgaaca

SEQ ID NO: 21990 - DNA, 26 bp, Homo sapiens
cctccagcaaaatcataattgaacac

SEQ ID NO: 21991 - DNA, 26 bp, Homo sapiens
ctccagcaaaatcataattgaacaca

SEQ ID NO: 21992 - DNA, 26 bp, Homo sapiens
tccagcaaaatcataattgaacacac

SEQ ID NO: 21993 - DNA, 26 bp, Homo sapiens
ccagcaaaatcataattgaacacacc

SEQ ID NO: 21994 - DNA, 26 bp, Homo sapiens
cagcaaaatcataattgaacacaccc

SEQ ID NO: 21995 - DNA, 26 bp, Homo sapiens
agcaaaatcataattgaacacaccca

SEQ ID NO: 21996 - DNA, 26 bp, Homo sapiens
gcaaaatcataattgaacacacccag

SEQ ID NO: 21997 - DNA, 26 bp, Homo sapiens
caaaatcataattgaacacacccagg

SEQ ID NO: 21998 - DNA, 26 bp, Homo sapiens
aaaatcataattgaacacacccaggt

SEQ ID NO: 21999 - DNA, 26 bp, Homo sapiens
aaatcataattgaacacacccaggtc

SEQ ID NO: 22000 - DNA, 26 bp, Homo sapiens
aatcataattgaacacacccaggtcc

SEQ ID NO: 22001 - DNA, 26 bp, Homo sapiens
atcataattgaacacacccaggtcct

SEQ ID NO: 22002 - DNA, 26 bp, Homo sapiens
tcataattgaacacacccaggtcctc

SEQ ID NO: 22003 - DNA, 26 bp, Homo sapiens
cataattgaacacacccaggtcctca

SEQ ID NO: 22004 - DNA, 26 bp, Homo sapiens
ataattgaacacacccaggtcctcaa

SEQ ID NO: 22005 - DNA, 26 bp, Homo sapiens
taattgaacacacccaggtcctcaat

SEQ ID NO: 22006 - DNA, 26 bp, Homo sapiens
aattgaacacacccaggtcctcaatg

SEQ ID NO: 22007 - DNA, 26 bp, Homo sapiens
attgaacacacccaggtcctcaatgt

SEQ ID NO: 22008 - DNA, 26 bp, Homo sapiens
ttgaacacacccaggtcctcaatgtc

SEQ ID NO: 22009 - DNA, 26 bp, Homo sapiens
tgaacacacccaggtcctcaatgtca

SEQ ID NO: 22010 - DNA, 26 bp, Homo sapiens
gaacacacccaggtcctcaatgtcag

SEQ ID NO: 22011 - DNA, 26 bp, Homo sapiens
aacacacccaggtcctcaatgtcagc

SEQ ID NO: 22012 - DNA, 26 bp, Homo sapiens
acacacccaggtcctcaatgtcagca

SEQ ID NO: 22013 - DNA, 26 bp, Homo sapiens
cacacccaggtcctcaatgtcagcag

SEQ ID NO: 22014 - DNA, 26 bp, Homo sapiens
acacccaggtcctcaatgtcagcagt

SEQ ID NO: 22015 - DNA, 26 bp, Homo sapiens
cacccaggtcctcaatgtcagcagtt

SEQ ID NO: 22016 - DNA, 26 bp, Homo sapiens
acccaggtcctcaatgtcagcagttg

SEQ ID NO: 22017 - DNA, 26 bp, Homo sapiens
cccaggtcctcaatgtcagcagttgg

SEQ ID NO: 22018 - DNA, 26 bp, Homo sapiens
ccaggtcctcaatgtcagcagttggg

SEQ ID NO: 22019 - DNA, 26 bp, Homo sapiens
caggtcctcaatgtcagcagttgggt

SEQ ID NO: 22020 - DNA, 26 bp, Homo sapiens
aggtcctcaatgtcagcagttgggtt

SEQ ID NO: 22021 - DNA, 26 bp, Homo sapiens
ggtcctcaatgtcagcagttgggttt

SEQ ID NO: 22022 - DNA, 26 bp, Homo sapiens
gtcctcaatgtcagcagttgggtttc

SEQ ID NO: 22023 - DNA, 26 bp, Homo sapiens
tcctcaatgtcagcagttgggtttcc

SEQ ID NO: 22024 - DNA, 26 bp, Homo sapiens
cctcaatgtcagcagttgggtttcct

SEQ ID NO: 22025 - DNA, 26 bp, Homo sapiens
ctcaatgtcagcagttgggtttcctg

SEQ ID NO: 22026 - DNA, 26 bp, Homo sapiens
tcaatgtcagcagttgggtttcctga

SEQ ID NO: 22027 - DNA, 26 bp, Homo sapiens
caatgtcagcagttgggtttcctgat

SEQ ID NO: 22028 - DNA, 26 bp, Homo sapiens
aatgtcagcagttgggtttcctgatg

SEQ ID NO: 22029 - DNA, 26 bp, Homo sapiens
atgtcagcagttgggtttcctgatgc

SEQ ID NO: 22030 - DNA, 26 bp, Homo sapiens
tgtcagcagttgggtttcctgatgca

SEQ ID NO: 22031 - DNA, 26 bp, Homo sapiens
gtcagcagttgggtttcctgatgcaa

SEQ ID NO: 22032 - DNA, 26 bp, Homo sapiens
tcagcagttgggtttcctgatgcaaa

SEQ ID NO: 22033 - DNA, 26 bp, Homo sapiens
cagcagttgggtttcctgatgcaaat

SEQ ID NO: 22034 - DNA, 26 bp, Homo sapiens
agcagttgggtttcctgatgcaaatt

SEQ ID NO: 22035 - DNA, 26 bp, Homo sapiens
gcagttgggtttcctgatgcaaatta

SEQ ID NO: 22036 - DNA, 26 bp, Homo sapiens
cagttgggtttcctgatgcaaattac

SEQ ID NO: 22037 - DNA, 26 bp, Homo sapiens
agttgggtttcctgatgcaaattacg

SEQ ID NO: 22038 - DNA, 26 bp, Homo sapiens
gttgggtttcctgatgcaaattacga

SEQ ID NO: 22039 - DNA, 26 bp, Homo sapiens
ttgggtttcctgatgcaaattacgat

SEQ ID NO: 22040 - DNA, 26 bp, Homo sapiens
tgggtttcctgatgcaaattacgata

SEQ ID NO: 22041 - DNA, 26 bp, Homo sapiens
gggtttcctgatgcaaattacgatac

SEQ ID NO: 22042 - DNA, 26 bp, Homo sapiens
ggtttcctgatgcaaattacgatacg

SEQ ID NO: 22043 - DNA, 26 bp, Homo sapiens
gtttcctgatgcaaattacgatacgg

SEQ ID NO: 22044 - DNA, 26 bp, Homo sapiens
tttcctgatgcaaattacgatacggt

SEQ ID NO: 22045 - DNA, 26 bp, Homo sapiens
ttcctgatgcaaattacgatacggtt

SEQ ID NO: 22046 - DNA, 26 bp, Homo sapiens
tcctgatgcaaattacgatacggttt

SEQ ID NO: 22047 - DNA, 26 bp, Homo sapiens
cctgatgcaaattacgatacggtttc

SEQ ID NO: 22048 - DNA, 26 bp, Homo sapiens
ctgatgcaaattacgatacggtttca

SEQ ID NO: 22049 - DNA, 26 bp, Homo sapiens
tgatgcaaattacgatacggtttcag

SEQ ID NO: 22050 - DNA, 26 bp, Homo sapiens
gatgcaaattacgatacggtttcaga

SEQ ID NO: 22051 - DNA, 26 bp, Homo sapiens
atgcaaattacgatacggtttcagat

SEQ ID NO: 22052 - DNA, 26 bp, Homo sapiens
tgcaaattacgatacggtttcagatg

SEQ ID NO: 22053 - DNA, 26 bp, Homo sapiens
gcaaattacgatacggtttcagatgg

SEQ ID NO: 22054 - DNA, 26 bp, Homo sapiens
caaattacgatacggtttcagatggg

SEQ ID NO: 22055 - DNA, 26 bp, Homo sapiens
aaattacgatacggtttcagatggga

SEQ ID NO: 22056 - DNA, 26 bp, Homo sapiens
aattacgatacggtttcagatgggaa

SEQ ID NO: 22057 - DNA, 26 bp, Homo sapiens
attacgatacggtttcagatgggaac

SEQ ID NO: 22058 - DNA, 26 bp, Homo sapiens
ttacgatacggtttcagatgggaaca

SEQ ID NO: 22059 - DNA, 26 bp, Homo sapiens
tacgatacggtttcagatgggaacag

SEQ ID NO: 22060 - DNA, 26 bp, Homo sapiens
acgatacggtttcagatgggaacagt

SEQ ID NO: 22061 - DNA, 26 bp, Homo sapiens
cgatacggtttcagatgggaacagtc

SEQ ID NO: 22062 - DNA, 26 bp, Homo sapiens
gatacggtttcagatgggaacagtct

SEQ ID NO: 22063 - DNA, 26 bp, Homo sapiens
atacggtttcagatgggaacagtcta

SEQ ID NO: 22064 - DNA, 26 bp, Homo sapiens
tacggtttcagatgggaacagtctat

SEQ ID NO: 22065 - DNA, 26 bp, Homo sapiens
acggtttcagatgggaacagtctatt

SEQ ID NO: 22066 - DNA, 26 bp, Homo sapiens
cggtttcagatgggaacagtctattt

SEQ ID NO: 22067 - DNA, 26 bp, Homo sapiens
ggtttcagatgggaacagtctatttc

SEQ ID NO: 22068 - DNA, 26 bp, Homo sapiens
gtttcagatgggaacagtctatttcc

SEQ ID NO: 22069 - DNA, 26 bp, Homo sapiens
tttcagatgggaacagtctatttcca

SEQ ID NO: 22070 - DNA, 26 bp, Homo sapiens
ttcagatgggaacagtctatttccaa

SEQ ID NO: 22071 - DNA, 26 bp, Homo sapiens
tcagatgggaacagtctatttccaat

SEQ ID NO: 22072 - DNA, 26 bp, Homo sapiens
cagatgggaacagtctatttccaata

SEQ ID NO: 22073 - DNA, 26 bp, Homo sapiens
agatgggaacagtctatttccaataa

SEQ ID NO: 22074 - DNA, 26 bp, Homo sapiens
gatgggaacagtctatttccaataac

SEQ ID NO: 22075 - DNA, 26 bp, Homo sapiens
atgggaacagtctatttccaataact

SEQ ID NO: 22076 - DNA, 26 bp, Homo sapiens
tgggaacagtctatttccaataactg

SEQ ID NO: 22077 - DNA, 26 bp, Homo sapiens
gggaacagtctatttccaataactgc

SEQ ID NO: 22078 - DNA, 26 bp, Homo sapiens
ggaacagtctatttccaataactgct

SEQ ID NO: 22079 - DNA, 26 bp, Homo sapiens
gaacagtctatttccaataactgctg

SEQ ID NO: 22080 - DNA, 26 bp, Homo sapiens
aacagtctatttccaataactgctga

SEQ ID NO: 22081 - DNA, 26 bp, Homo sapiens
acagtctatttccaataactgctgag

SEQ ID NO: 22082 - DNA, 26 bp, Homo sapiens
cagtctatttccaataactgctgagt

SEQ ID NO: 22083 - DNA, 26 bp, Homo sapiens
agtctatttccaataactgctgagtg

SEQ ID NO: 22084 - DNA, 26 bp, Homo sapiens
gtctatttccaataactgctgagtgg

SEQ ID NO: 22085 - DNA, 26 bp, Homo sapiens
tctatttccaataactgctgagtggg

SEQ ID NO: 22086 - DNA, 26 bp, Homo sapiens
ctatttccaataactgctgagtgggg

SEQ ID NO: 22087 - DNA, 26 bp, Homo sapiens
tatttccaataactgctgagtggggg

SEQ ID NO: 22088 - DNA, 26 bp, Homo sapiens
atttccaataactgctgagtggggga

SEQ ID NO: 22089 - DNA, 26 bp, Homo sapiens
tttccaataactgctgagtgggggaa

SEQ ID NO: 22090 - DNA, 26 bp, Homo sapiens
ttccaataactgctgagtgggggaaa

SEQ ID NO: 22091 - DNA, 26 bp, Homo sapiens
tccaataactgctgagtgggggaaaa

SEQ ID NO: 22092 - DNA, 26 bp, Homo sapiens
ccaataactgctgagtgggggaaaaa

SEQ ID NO: 22093 - DNA, 26 bp, Homo sapiens
caataactgctgagtgggggaaaaaa

SEQ ID NO: 22094 - DNA, 26 bp, Homo sapiens
aataactgctgagtgggggaaaaaaa

SEQ ID NO: 22095 - DNA, 26 bp, Homo sapiens
ataactgctgagtgggggaaaaaaaa

SEQ ID NO: 22096 - DNA, 26 bp, Homo sapiens
taactgctgagtgggggaaaaaaaag

SEQ ID NO: 22097 - DNA, 26 bp, Homo sapiens
aactgctgagtgggggaaaaaaaaga

SEQ ID NO: 22098 - DNA, 26 bp, Homo sapiens
actgctgagtgggggaaaaaaaagag

SEQ ID NO: 22099 - DNA, 26 bp, Homo sapiens
ctgctgagtgggggaaaaaaaagaga

SEQ ID NO: 22100 - DNA, 26 bp, Homo sapiens
tgctgagtgggggaaaaaaaagagac

SEQ ID NO: 22101 - DNA, 26 bp, Homo sapiens
gctgagtgggggaaaaaaaagagact

SEQ ID NO: 22102 - DNA, 26 bp, Homo sapiens
ctgagtgggggaaaaaaaagagactt

SEQ ID NO: 22103 - DNA, 26 bp, Homo sapiens
tgagtgggggaaaaaaaagagacttt

SEQ ID NO: 22104 - DNA, 26 bp, Homo sapiens
gagtgggggaaaaaaaagagactttt

SEQ ID NO: 22105 - DNA, 26 bp, Homo sapiens
agtgggggaaaaaaaagagacttttt

SEQ ID NO: 22106 - DNA, 26 bp, Homo sapiens
gtgggggaaaaaaaagagactttttt

SEQ ID NO: 22107 - DNA, 26 bp, Homo sapiens
tgggggaaaaaaaagagacttttttt

SEQ ID NO: 22108 - DNA, 26 bp, Homo sapiens
gggggaaaaaaaagagactttttttt

SEQ ID NO: 22109 - DNA, 26 bp, Homo sapiens
ggggaaaaaaaagagacttttttttt

SEQ ID NO: 22110 - DNA, 26 bp, Homo sapiens
gggaaaaaaaagagactttttttttt

SEQ ID NO: 22111 - DNA, 26 bp, Homo sapiens
ggaaaaaaaagagacttttttttttt

SEQ ID NO: 22112 - DNA, 26 bp, Homo sapiens
gaaaaaaaagagactttttttttttc

SEQ ID NO: 22113 - DNA, 26 bp, Homo sapiens
aaaaaaaagagactttttttttttca

SEQ ID NO: 22114 - DNA, 26 bp, Homo sapiens
aaaaaaagagactttttttttttcaa

SEQ ID NO: 22115 - DNA, 26 bp, Homo sapiens
aaaaaagagactttttttttttcaac

SEQ ID NO: 22116 - DNA, 26 bp, Homo sapiens
aaaaagagactttttttttttcaaca

SEQ ID NO: 22117 - DNA, 26 bp, Homo sapiens
aaaagagactttttttttttcaacac

SEQ ID NO: 22118 - DNA, 26 bp, Homo sapiens
aaagagactttttttttttcaacaca

SEQ ID NO: 22119 - DNA, 26 bp, Homo sapiens
aagagactttttttttttcaacacaa

SEQ ID NO: 22120 - DNA, 26 bp, Homo sapiens
agagactttttttttttcaacacaaa

SEQ ID NO: 22121 - DNA, 26 bp, Homo sapiens
gagactttttttttttcaacacaaag

SEQ ID NO: 22122 - DNA, 26 bp, Homo sapiens
agactttttttttttcaacacaaagg

SEQ ID NO: 22123 - DNA, 26 bp, Homo sapiens
gactttttttttttcaacacaaaggc

SEQ ID NO: 22124 - DNA, 26 bp, Homo sapiens
actttttttttttcaacacaaaggca

SEQ ID NO: 22125 - DNA, 26 bp, Homo sapiens
ctttttttttttcaacacaaaggcaa

SEQ ID NO: 22126 - DNA, 26 bp, Homo sapiens
tttttttttttcaacacaaaggcaag

SEQ ID NO: 22127 - DNA, 26 bp, Homo sapiens
ttttttttttcaacacaaaggcaaga

SEQ ID NO: 22128 - DNA, 26 bp, Homo sapiens
tttttttttcaacacaaaggcaagag

SEQ ID NO: 22129 - DNA, 26 bp, Homo sapiens
ttttttttcaacacaaaggcaagagt

SEQ ID NO: 22130 - DNA, 26 bp, Homo sapiens
tttttttcaacacaaaggcaagagtt

SEQ ID NO: 22131 - DNA, 26 bp, Homo sapiens
ttttttcaacacaaaggcaagagtta

SEQ ID NO: 22132 - DNA, 26 bp, Homo sapiens
tttttcaacacaaaggcaagagttat

SEQ ID NO: 22133 - DNA, 26 bp, Homo sapiens
ttttcaacacaaaggcaagagttatc

SEQ ID NO: 22134 - DNA, 26 bp, Homo sapiens
tttcaacacaaaggcaagagttatca

SEQ ID NO: 22135 - DNA, 26 bp, Homo sapiens
ttcaacacaaaggcaagagttatcat

SEQ ID NO: 22136 - DNA, 26 bp, Homo sapiens
tcaacacaaaggcaagagttatcatg

SEQ ID NO: 22137 - DNA, 26 bp, Homo sapiens
caacacaaaggcaagagttatcatgt

SEQ ID NO: 22138 - DNA, 26 bp, Homo sapiens
aacacaaaggcaagagttatcatgta

SEQ ID NO: 22139 - DNA, 26 bp, Homo sapiens
acacaaaggcaagagttatcatgtat

SEQ ID NO: 22140 - DNA, 26 bp, Homo sapiens
cacaaaggcaagagttatcatgtata

SEQ ID NO: 22141 - DNA, 26 bp, Homo sapiens
acaaaggcaagagttatcatgtataa

SEQ ID NO: 22142 - DNA, 26 bp, Homo sapiens
caaaggcaagagttatcatgtataaa

SEQ ID NO: 22143 - DNA, 26 bp, Homo sapiens
aaaggcaagagttatcatgtataaaa

SEQ ID NO: 22144 - DNA, 26 bp, Homo sapiens
aaggcaagagttatcatgtataaaaa

SEQ ID NO: 22145 - DNA, 26 bp, Homo sapiens
aggcaagagttatcatgtataaaaat

SEQ ID NO: 22146 - DNA, 26 bp, Homo sapiens
ggcaagagttatcatgtataaaaatg

SEQ ID NO: 22147 - DNA, 26 bp, Homo sapiens
gcaagagttatcatgtataaaaatgt

SEQ ID NO: 22148 - DNA, 26 bp, Homo sapiens
caagagttatcatgtataaaaatgta

SEQ ID NO: 22149 - DNA, 26 bp, Homo sapiens
aagagttatcatgtataaaaatgtaa

SEQ ID NO: 22150 - DNA, 26 bp, Homo sapiens
agagttatcatgtataaaaatgtaaa

SEQ ID NO: 22151 - DNA, 26 bp, Homo sapiens
gagttatcatgtataaaaatgtaaat

SEQ ID NO: 22152 - DNA, 26 bp, Homo sapiens
agttatcatgtataaaaatgtaaata

SEQ ID NO: 22153 - DNA, 26 bp, Homo sapiens
gttatcatgtataaaaatgtaaataa

SEQ ID NO: 22154 - DNA, 26 bp, Homo sapiens
ttatcatgtataaaaatgtaaataat

SEQ ID NO: 22155 - DNA, 26 bp, Homo sapiens
tatcatgtataaaaatgtaaataata

SEQ ID NO: 22156 - DNA, 26 bp, Homo sapiens
atcatgtataaaaatgtaaataatat

SEQ ID NO: 22157 - DNA, 26 bp, Homo sapiens
tcatgtataaaaatgtaaataatata

SEQ ID NO: 22158 - DNA, 26 bp, Homo sapiens
catgtataaaaatgtaaataatatac

SEQ ID NO: 22159 - DNA, 26 bp, Homo sapiens
atgtataaaaatgtaaataatatact

SEQ ID NO: 22160 - DNA, 26 bp, Homo sapiens
tgtataaaaatgtaaataatatactt

SEQ ID NO: 22161 - DNA, 26 bp, Homo sapiens
gtataaaaatgtaaataatatactta

SEQ ID NO: 22162 - DNA, 26 bp, Homo sapiens
tataaaaatgtaaataatatacttat

SEQ ID NO: 22163 - DNA, 26 bp, Homo sapiens
ataaaaatgtaaataatatacttata

SEQ ID NO: 22164 - DNA, 26 bp, Homo sapiens
taaaaatgtaaataatatacttatag

SEQ ID NO: 22165 - DNA, 26 bp, Homo sapiens
aaaaatgtaaataatatacttataga

SEQ ID NO: 22166 - DNA, 26 bp, Homo sapiens
aaaatgtaaataatatacttatagaa

SEQ ID NO: 22167 - DNA, 26 bp, Homo sapiens
aaatgtaaataatatacttatagaaa

SEQ ID NO: 22168 - DNA, 26 bp, Homo sapiens
aatgtaaataatatacttatagaaac

SEQ ID NO: 22169 - DNA, 26 bp, Homo sapiens
atgtaaataatatacttatagaaacc

SEQ ID NO: 22170 - DNA, 26 bp, Homo sapiens
tgtaaataatatacttatagaaacct

SEQ ID NO: 22171 - DNA, 26 bp, Homo sapiens
gtaaataatatacttatagaaacctt

SEQ ID NO: 22172 - DNA, 26 bp, Homo sapiens
taaataatatacttatagaaaccttt

SEQ ID NO: 22173 - DNA, 26 bp, Homo sapiens
aaataatatacttatagaaacctttt

SEQ ID NO: 22174 - DNA, 26 bp, Homo sapiens
aataatatacttatagaaaccttttt

SEQ ID NO: 22175 - DNA, 26 bp, Homo sapiens
ataatatacttatagaaacctttttg

SEQ ID NO: 22176 - DNA, 26 bp, Homo sapiens
taatatacttatagaaacctttttga

SEQ ID NO: 22177 - DNA, 26 bp, Homo sapiens
aatatacttatagaaacctttttgat

SEQ ID NO: 22178 - DNA, 26 bp, Homo sapiens
atatacttatagaaacctttttgatg

SEQ ID NO: 22179 - DNA, 26 bp, Homo sapiens
tatacttatagaaacctttttgatgg

SEQ ID NO: 22180 - DNA, 26 bp, Homo sapiens
atacttatagaaacctttttgatgga

SEQ ID NO: 22181 - DNA, 26 bp, Homo sapiens
tacttatagaaacctttttgatggaa

SEQ ID NO: 22182 - DNA, 26 bp, Homo sapiens
acttatagaaacctttttgatggaaa

SEQ ID NO: 22183 - DNA, 26 bp, Homo sapiens
cttatagaaacctttttgatggaaat

SEQ ID NO: 22184 - DNA, 26 bp, Homo sapiens
ttatagaaacctttttgatggaaatc

SEQ ID NO: 22185 - DNA, 26 bp, Homo sapiens
tatagaaacctttttgatggaaatca

SEQ ID NO: 22186 - DNA, 26 bp, Homo sapiens
atagaaacctttttgatggaaatcag

SEQ ID NO: 22187 - DNA, 26 bp, Homo sapiens
tagaaacctttttgatggaaatcagg

SEQ ID NO: 22188 - DNA, 26 bp, Homo sapiens
agaaacctttttgatggaaatcaggg

SEQ ID NO: 22189 - DNA, 26 bp, Homo sapiens
gaaacctttttgatggaaatcagggg

SEQ ID NO: 22190 - DNA, 26 bp, Homo sapiens
aaacctttttgatggaaatcaggggc

SEQ ID NO: 22191 - DNA, 26 bp, Homo sapiens
aacctttttgatggaaatcaggggct

SEQ ID NO: 22192 - DNA, 26 bp, Homo sapiens
acctttttgatggaaatcaggggctc

SEQ ID NO: 22193 - DNA, 26 bp, Homo sapiens
cctttttgatggaaatcaggggctcc

SEQ ID NO: 22194 - DNA, 26 bp, Homo sapiens
ctttttgatggaaatcaggggctcca

SEQ ID NO: 22195 - DNA, 26 bp, Homo sapiens
tttttgatggaaatcaggggctccat

SEQ ID NO: 22196 - DNA, 26 bp, Homo sapiens
ttttgatggaaatcaggggctccata

SEQ ID NO: 22197 - DNA, 26 bp, Homo sapiens
tttgatggaaatcaggggctccatat

SEQ ID NO: 22198 - DNA, 26 bp, Homo sapiens
ttgatggaaatcaggggctccatata

SEQ ID NO: 22199 - DNA, 26 bp, Homo sapiens
tgatggaaatcaggggctccatataa

SEQ ID NO: 22200 - DNA, 26 bp, Homo sapiens
gatggaaatcaggggctccatataac

SEQ ID NO: 22201 - DNA, 26 bp, Homo sapiens
atggaaatcaggggctccatataacc

SEQ ID NO: 22202 - DNA, 26 bp, Homo sapiens
tggaaatcaggggctccatataacct

SEQ ID NO: 22203 - DNA, 26 bp, Homo sapiens
ggaaatcaggggctccatataacctt

SEQ ID NO: 22204 - DNA, 26 bp, Homo sapiens
gaaatcaggggctccatataaccttg

SEQ ID NO: 22205 - DNA, 26 bp, Homo sapiens
aaatcaggggctccatataaccttgg

SEQ ID NO: 22206 - DNA, 26 bp, Homo sapiens
aatcaggggctccatataaccttggc

SEQ ID NO: 22207 - DNA, 26 bp, Homo sapiens
atcaggggctccatataaccttggcg

SEQ ID NO: 22208 - DNA, 26 bp, Homo sapiens
tcaggggctccatataaccttggcga

SEQ ID NO: 22209 - DNA, 26 bp, Homo sapiens
caggggctccatataaccttggcgaa

SEQ ID NO: 22210 - DNA, 26 bp, Homo sapiens
aggggctccatataaccttggcgaat

SEQ ID NO: 22211 - DNA, 26 bp, Homo sapiens
ggggctccatataaccttggcgaatg

SEQ ID NO: 22212 - DNA, 26 bp, Homo sapiens
gggctccatataaccttggcgaatgt

SEQ ID NO: 22213 - DNA, 26 bp, Homo sapiens
ggctccatataaccttggcgaatgtg

SEQ ID NO: 22214 - DNA, 26 bp, Homo sapiens
gctccatataaccttggcgaatgtgt

SEQ ID NO: 22215 - DNA, 26 bp, Homo sapiens
ctccatataaccttggcgaatgtgtt

SEQ ID NO: 22216 - DNA, 26 bp, Homo sapiens
tccatataaccttggcgaatgtgttg

SEQ ID NO: 22217 - DNA, 26 bp, Homo sapiens
ccatataaccttggcgaatgtgttgt

SEQ ID NO: 22218 - DNA, 26 bp, Homo sapiens
catataaccttggcgaatgtgttgtt

SEQ ID NO: 22219 - DNA, 26 bp, Homo sapiens
atataaccttggcgaatgtgttgttt

SEQ ID NO: 22220 - DNA, 26 bp, Homo sapiens
tataaccttggcgaatgtgttgtttt

SEQ ID NO: 22221 - DNA, 26 bp, Homo sapiens
ataaccttggcgaatgtgttgttttt

SEQ ID NO: 22222 - DNA, 26 bp, Homo sapiens
taaccttggcgaatgtgttgtttttt

SEQ ID NO: 22223 - DNA, 26 bp, Homo sapiens
aaccttggcgaatgtgttgttttttt

SEQ ID NO: 22224 - DNA, 26 bp, Homo sapiens
accttggcgaatgtgttgtttttttt

SEQ ID NO: 22225 - DNA, 26 bp, Homo sapiens
ccttggcgaatgtgttgttttttttt

SEQ ID NO: 22226 - DNA, 26 bp, Homo sapiens
cttggcgaatgtgttgtttttttttc

SEQ ID NO: 22227 - DNA, 26 bp, Homo sapiens
ttggcgaatgtgttgtttttttttca

SEQ ID NO: 22228 - DNA, 26 bp, Homo sapiens
tggcgaatgtgttgtttttttttcac

SEQ ID NO: 22229 - DNA, 26 bp, Homo sapiens
ggcgaatgtgttgtttttttttcaca

SEQ ID NO: 22230 - DNA, 26 bp, Homo sapiens
gcgaatgtgttgtttttttttcacaa

SEQ ID NO: 22231 - DNA, 26 bp, Homo sapiens
cgaatgtgttgtttttttttcacaat

SEQ ID NO: 22232 - DNA, 26 bp, Homo sapiens
gaatgtgttgtttttttttcacaata

SEQ ID NO: 22233 - DNA, 26 bp, Homo sapiens
aatgtgttgtttttttttcacaatag

SEQ ID NO: 22234 - DNA, 26 bp, Homo sapiens
atgtgttgtttttttttcacaatagc

SEQ ID NO: 22235 - DNA, 26 bp, Homo sapiens
tgtgttgtttttttttcacaatagct

SEQ ID NO: 22236 - DNA, 26 bp, Homo sapiens
gtgttgtttttttttcacaatagctc

SEQ ID NO: 22237 - DNA, 26 bp, Homo sapiens
tgttgtttttttttcacaatagctca

SEQ ID NO: 22238 - DNA, 26 bp, Homo sapiens
gttgtttttttttcacaatagctcaa

SEQ ID NO: 22239 - DNA, 26 bp, Homo sapiens
ttgtttttttttcacaatagctcaac

SEQ ID NO: 22240 - DNA, 26 bp, Homo sapiens
tgtttttttttcacaatagctcaaca

SEQ ID NO: 22241 - DNA, 26 bp, Homo sapiens
gtttttttttcacaatagctcaacaa

SEQ ID NO: 22242 - DNA, 26 bp, Homo sapiens
tttttttttcacaatagctcaacaaa

SEQ ID NO: 22243 - DNA, 26 bp, Homo sapiens
ttttttttcacaatagctcaacaaag

SEQ ID NO: 22244 - DNA, 26 bp, Homo sapiens
tttttttcacaatagctcaacaaagt

SEQ ID NO: 22245 - DNA, 26 bp, Homo sapiens
ttttttcacaatagctcaacaaagta

SEQ ID NO: 22246 - DNA, 26 bp, Homo sapiens
tttttcacaatagctcaacaaagtag

SEQ ID NO: 22247 - DNA, 26 bp, Homo sapiens
ttttcacaatagctcaacaaagtagt

SEQ ID NO: 22248 - DNA, 26 bp, Homo sapiens
tttcacaatagctcaacaaagtagtg

SEQ ID NO: 22249 - DNA, 26 bp, Homo sapiens
ttcacaatagctcaacaaagtagtgt

SEQ ID NO: 22250 - DNA, 26 bp, Homo sapiens
tcacaatagctcaacaaagtagtgtc

SEQ ID NO: 22251 - DNA, 26 bp, Homo sapiens
cacaatagctcaacaaagtagtgtct

SEQ ID NO: 22252 - DNA, 26 bp, Homo sapiens
acaatagctcaacaaagtagtgtctg

SEQ ID NO: 22253 - DNA, 26 bp, Homo sapiens
caatagctcaacaaagtagtgtctgt

SEQ ID NO: 22254 - DNA, 26 bp, Homo sapiens
aatagctcaacaaagtagtgtctgtt

SEQ ID NO: 22255 - DNA, 26 bp, Homo sapiens
atagctcaacaaagtagtgtctgtta

SEQ ID NO: 22256 - DNA, 26 bp, Homo sapiens
tagctcaacaaagtagtgtctgttat

SEQ ID NO: 22257 - DNA, 26 bp, Homo sapiens
agctcaacaaagtagtgtctgttatt

SEQ ID NO: 22258 - DNA, 26 bp, Homo sapiens
gctcaacaaagtagtgtctgttattt

SEQ ID NO: 22259 - DNA, 26 bp, Homo sapiens
ctcaacaaagtagtgtctgttattta

SEQ ID NO: 22260 - DNA, 26 bp, Homo sapiens
tcaacaaagtagtgtctgttatttag

SEQ ID NO: 22261 - DNA, 26 bp, Homo sapiens
caacaaagtagtgtctgttatttagg

SEQ ID NO: 22262 - DNA, 26 bp, Homo sapiens
aacaaagtagtgtctgttatttaggg

SEQ ID NO: 22263 - DNA, 26 bp, Homo sapiens
acaaagtagtgtctgttatttagggc

SEQ ID NO: 22264 - DNA, 26 bp, Homo sapiens
caaagtagtgtctgttatttagggct

SEQ ID NO: 22265 - DNA, 26 bp, Homo sapiens
aaagtagtgtctgttatttagggctt

SEQ ID NO: 22266 - DNA, 26 bp, Homo sapiens
aagtagtgtctgttatttagggcttt

SEQ ID NO: 22267 - DNA, 26 bp, Homo sapiens
agtagtgtctgttatttagggcttta

SEQ ID NO: 22268 - DNA, 26 bp, Homo sapiens
gtagtgtctgttatttagggctttaa

SEQ ID NO: 22269 - DNA, 26 bp, Homo sapiens
tagtgtctgttatttagggctttaat

SEQ ID NO: 22270 - DNA, 26 bp, Homo sapiens
agtgtctgttatttagggctttaatt

SEQ ID NO: 22271 - DNA, 26 bp, Homo sapiens
gtgtctgttatttagggctttaatta

SEQ ID NO: 22272 - DNA, 26 bp, Homo sapiens
tgtctgttatttagggctttaattac

SEQ ID NO: 22273 - DNA, 26 bp, Homo sapiens
gtctgttatttagggctttaattaca

SEQ ID NO: 22274 - DNA, 26 bp, Homo sapiens
tctgttatttagggctttaattacag

SEQ ID NO: 22275 - DNA, 26 bp, Homo sapiens
ctgttatttagggctttaattacagt

SEQ ID NO: 22276 - DNA, 26 bp, Homo sapiens
tgttatttagggctttaattacagtt

SEQ ID NO: 22277 - DNA, 26 bp, Homo sapiens
gttatttagggctttaattacagttc

SEQ ID NO: 22278 - DNA, 26 bp, Homo sapiens
ttatttagggctttaattacagttct

SEQ ID NO: 22279 - DNA, 26 bp, Homo sapiens
tatttagggctttaattacagttctc

SEQ ID NO: 22280 - DNA, 26 bp, Homo sapiens
atttagggctttaattacagttctca

SEQ ID NO: 22281 - DNA, 26 bp, Homo sapiens
tttagggctttaattacagttctcaa

SEQ ID NO: 22282 - DNA, 26 bp, Homo sapiens
ttagggctttaattacagttctcaaa

SEQ ID NO: 22283 - DNA, 26 bp, Homo sapiens
tagggctttaattacagttctcaaag

SEQ ID NO: 22284 - DNA, 26 bp, Homo sapiens
agggctttaattacagttctcaaagt

SEQ ID NO: 22285 - DNA, 26 bp, Homo sapiens
gggctttaattacagttctcaaagta

SEQ ID NO: 22286 - DNA, 26 bp, Homo sapiens
ggctttaattacagttctcaaagtag

SEQ ID NO: 22287 - DNA, 26 bp, Homo sapiens
gctttaattacagttctcaaagtaga

SEQ ID NO: 22288 - DNA, 26 bp, Homo sapiens
ctttaattacagttctcaaagtagaa

SEQ ID NO: 22289 - DNA, 26 bp, Homo sapiens
tttaattacagttctcaaagtagaat

SEQ ID NO: 22290 - DNA, 26 bp, Homo sapiens
ttaattacagttctcaaagtagaatg

SEQ ID NO: 22291 - DNA, 26 bp, Homo sapiens
taattacagttctcaaagtagaatga

SEQ ID NO: 22292 - DNA, 26 bp, Homo sapiens
aattacagttctcaaagtagaatgat

SEQ ID NO: 22293 - DNA, 26 bp, Homo sapiens
attacagttctcaaagtagaatgatt

SEQ ID NO: 22294 - DNA, 26 bp, Homo sapiens
ttacagttctcaaagtagaatgattt

SEQ ID NO: 22295 - DNA, 26 bp, Homo sapiens
tacagttctcaaagtagaatgatttt

SEQ ID NO: 22296 - DNA, 26 bp, Homo sapiens
acagttctcaaagtagaatgattttc

SEQ ID NO: 22297 - DNA, 26 bp, Homo sapiens
cagttctcaaagtagaatgattttcc

SEQ ID NO: 22298 - DNA, 26 bp, Homo sapiens
agttctcaaagtagaatgattttcct

SEQ ID NO: 22299 - DNA, 26 bp, Homo sapiens
gttctcaaagtagaatgattttcctt

SEQ ID NO: 22300 - DNA, 26 bp, Homo sapiens
ttctcaaagtagaatgattttcctta

SEQ ID NO: 22301 - DNA, 26 bp, Homo sapiens
tctcaaagtagaatgattttccttaa

SEQ ID NO: 22302 - DNA, 26 bp, Homo sapiens
ctcaaagtagaatgattttccttaaa

SEQ ID NO: 22303 - DNA, 26 bp, Homo sapiens
tcaaagtagaatgattttccttaaaa

SEQ ID NO: 22304 - DNA, 26 bp, Homo sapiens
caaagtagaatgattttccttaaaaa

SEQ ID NO: 22305 - DNA, 26 bp, Homo sapiens
aaagtagaatgattttccttaaaaaa

SEQ ID NO: 22306 - DNA, 26 bp, Homo sapiens
aagtagaatgattttccttaaaaaaa

SEQ ID NO: 22307 - DNA, 26 bp, Homo sapiens
agtagaatgattttccttaaaaaaaa

SEQ ID NO: 22308 - DNA, 26 bp, Homo sapiens
gtagaatgattttccttaaaaaaaaa

SEQ ID NO: 22309 - DNA, 26 bp, Homo sapiens
tagaatgattttccttaaaaaaaaaa

SEQ ID NO: 22310 - DNA, 26 bp, Homo sapiens
agaatgattttccttaaaaaaaaaaa

SEQ ID NO: 22311 - DNA, 26 bp, Homo sapiens
gaatgattttccttaaaaaaaaaaac

SEQ ID NO: 22312 - DNA, 26 bp, Homo sapiens
aatgattttccttaaaaaaaaaaact

SEQ ID NO: 22313 - DNA, 26 bp, Homo sapiens
atgattttccttaaaaaaaaaaactc

SEQ ID NO: 22314 - DNA, 26 bp, Homo sapiens
tgattttccttaaaaaaaaaaactct

SEQ ID NO: 22315 - DNA, 26 bp, Homo sapiens
gattttccttaaaaaaaaaaactctt

SEQ ID NO: 22316 - DNA, 26 bp, Homo sapiens
attttccttaaaaaaaaaaactcttt

SEQ ID NO: 22317 - DNA, 26 bp, Homo sapiens
ttttccttaaaaaaaaaaactctttg

SEQ ID NO: 22318 - DNA, 26 bp, Homo sapiens
tttccttaaaaaaaaaaactctttgg

SEQ ID NO: 22319 - DNA, 26 bp, Homo sapiens
ttccttaaaaaaaaaaactctttgga

SEQ ID NO: 22320 - DNA, 26 bp, Homo sapiens
tccttaaaaaaaaaaactctttggat

SEQ ID NO: 22321 - DNA, 26 bp, Homo sapiens
ccttaaaaaaaaaaactctttggatg

SEQ ID NO: 22322 - DNA, 26 bp, Homo sapiens
cttaaaaaaaaaaactctttggatgc

SEQ ID NO: 22323 - DNA, 26 bp, Homo sapiens
ttaaaaaaaaaaactctttggatgca

SEQ ID NO: 22324 - DNA, 26 bp, Homo sapiens
taaaaaaaaaaactctttggatgcaa

SEQ ID NO: 22325 - DNA, 26 bp, Homo sapiens
aaaaaaaaaaactctttggatgcaaa

SEQ ID NO: 22326 - DNA, 26 bp, Homo sapiens
aaaaaaaaaactctttggatgcaaaa

SEQ ID NO: 22327 - DNA, 26 bp, Homo sapiens
aaaaaaaaactctttggatgcaaaaa

SEQ ID NO: 22328 - DNA, 26 bp, Homo sapiens
aaaaaaaactctttggatgcaaaaaa

SEQ ID NO: 22329 - DNA, 26 bp, Homo sapiens
aaaaaaactctttggatgcaaaaaat

SEQ ID NO: 22330 - DNA, 26 bp, Homo sapiens
aaaaaactctttggatgcaaaaaata

SEQ ID NO: 22331 - DNA, 26 bp, Homo sapiens
aaaaactctttggatgcaaaaaataa

SEQ ID NO: 22332 - DNA, 26 bp, Homo sapiens
aaaactctttggatgcaaaaaataat

SEQ ID NO: 22333 - DNA, 26 bp, Homo sapiens
aaactctttggatgcaaaaaataatg

SEQ ID NO: 22334 - DNA, 26 bp, Homo sapiens
aactctttggatgcaaaaaataatgg

SEQ ID NO: 22335 - DNA, 26 bp, Homo sapiens
actctttggatgcaaaaaataatggc

SEQ ID NO: 22336 - DNA, 26 bp, Homo sapiens
ctctttggatgcaaaaaataatggct

SEQ ID NO: 22337 - DNA, 26 bp, Homo sapiens
tctttggatgcaaaaaataatggctt

SEQ ID NO: 22338 - DNA, 26 bp, Homo sapiens
ctttggatgcaaaaaataatggcttt

SEQ ID NO: 22339 - DNA, 26 bp, Homo sapiens
tttggatgcaaaaaataatggctttt

SEQ ID NO: 22340 - DNA, 26 bp, Homo sapiens
ttggatgcaaaaaataatggcttttg

SEQ ID NO: 22341 - DNA, 26 bp, Homo sapiens
tggatgcaaaaaataatggcttttgt

SEQ ID NO: 22342 - DNA, 26 bp, Homo sapiens
ggatgcaaaaaataatggcttttgtg

SEQ ID NO: 22343 - DNA, 26 bp, Homo sapiens
gatgcaaaaaataatggcttttgtga

SEQ ID NO: 22344 - DNA, 26 bp, Homo sapiens
atgcaaaaaataatggcttttgtgat

SEQ ID NO: 22345 - DNA, 26 bp, Homo sapiens
tgcaaaaaataatggcttttgtgata

SEQ ID NO: 22346 - DNA, 26 bp, Homo sapiens
gcaaaaaataatggcttttgtgatat

SEQ ID NO: 22347 - DNA, 26 bp, Homo sapiens
caaaaaataatggcttttgtgatata

SEQ ID NO: 22348 - DNA, 26 bp, Homo sapiens
aaaaaataatggcttttgtgatataa

SEQ ID NO: 22349 - DNA, 26 bp, Homo sapiens
aaaaataatggcttttgtgatataat

SEQ ID NO: 22350 - DNA, 26 bp, Homo sapiens
aaaataatggcttttgtgatataatt

SEQ ID NO: 22351 - DNA, 26 bp, Homo sapiens
aaataatggcttttgtgatataattt

SEQ ID NO: 22352 - DNA, 26 bp, Homo sapiens
aataatggcttttgtgatataattta

SEQ ID NO: 22353 - DNA, 26 bp, Homo sapiens
ataatggcttttgtgatataatttaa

SEQ ID NO: 22354 - DNA, 26 bp, Homo sapiens
taatggcttttgtgatataatttaag

SEQ ID NO: 22355 - DNA, 26 bp, Homo sapiens
aatggcttttgtgatataatttaagg

SEQ ID NO: 22356 - DNA, 26 bp, Homo sapiens
atggcttttgtgatataatttaaggg

SEQ ID NO: 22357 - DNA, 26 bp, Homo sapiens
tggcttttgtgatataatttaagggt

SEQ ID NO: 22358 - DNA, 26 bp, Homo sapiens
ggcttttgtgatataatttaagggtt

SEQ ID NO: 22359 - DNA, 26 bp, Homo sapiens
gcttttgtgatataatttaagggttt

SEQ ID NO: 22360 - DNA, 26 bp, Homo sapiens
cttttgtgatataatttaagggtttt

SEQ ID NO: 22361 - DNA, 26 bp, Homo sapiens
ttttgtgatataatttaagggttttc

SEQ ID NO: 22362 - DNA, 26 bp, Homo sapiens
tttgtgatataatttaagggttttct

SEQ ID NO: 22363 - DNA, 26 bp, Homo sapiens
ttgtgatataatttaagggttttctt

SEQ ID NO: 22364 - DNA, 26 bp, Homo sapiens
tgtgatataatttaagggttttcttc

SEQ ID NO: 22365 - DNA, 26 bp, Homo sapiens
gtgatataatttaagggttttcttcg

SEQ ID NO: 22366 - DNA, 26 bp, Homo sapiens
tgatataatttaagggttttcttcgt

SEQ ID NO: 22367 - DNA, 26 bp, Homo sapiens
gatataatttaagggttttcttcgtt

SEQ ID NO: 22368 - DNA, 26 bp, Homo sapiens
atataatttaagggttttcttcgttt

SEQ ID NO: 22369 - DNA, 26 bp, Homo sapiens
tataatttaagggttttcttcgtttc

SEQ ID NO: 22370 - DNA, 26 bp, Homo sapiens
ataatttaagggttttcttcgtttcc

SEQ ID NO: 22371 - DNA, 26 bp, Homo sapiens
taatttaagggttttcttcgtttcca

SEQ ID NO: 22372 - DNA, 26 bp, Homo sapiens
aatttaagggttttcttcgtttccac

SEQ ID NO: 22373 - DNA, 26 bp, Homo sapiens
atttaagggttttcttcgtttccacc

SEQ ID NO: 22374 - DNA, 26 bp, Homo sapiens
tttaagggttttcttcgtttccacca

SEQ ID NO: 22375 - DNA, 26 bp, Homo sapiens
ttaagggttttcttcgtttccaccat

SEQ ID NO: 22376 - DNA, 26 bp, Homo sapiens
taagggttttcttcgtttccaccatc

SEQ ID NO: 22377 - DNA, 26 bp, Homo sapiens
aagggttttcttcgtttccaccatcg

SEQ ID NO: 22378 - DNA, 26 bp, Homo sapiens
agggttttcttcgtttccaccatcgg

SEQ ID NO: 22379 - DNA, 26 bp, Homo sapiens
gggttttcttcgtttccaccatcgga

SEQ ID NO: 22380 - DNA, 26 bp, Homo sapiens
ggttttcttcgtttccaccatcggaa

SEQ ID NO: 22381 - DNA, 26 bp, Homo sapiens
gttttcttcgtttccaccatcggaat

SEQ ID NO: 22382 - DNA, 26 bp, Homo sapiens
ttttcttcgtttccaccatcggaatt

SEQ ID NO: 22383 - DNA, 26 bp, Homo sapiens
tttcttcgtttccaccatcggaattt

SEQ ID NO: 22384 - DNA, 26 bp, Homo sapiens
ttcttcgtttccaccatcggaattta

SEQ ID NO: 22385 - DNA, 26 bp, Homo sapiens
tcttcgtttccaccatcggaatttat

SEQ ID NO: 22386 - DNA, 26 bp, Homo sapiens
cttcgtttccaccatcggaatttatt

SEQ ID NO: 22387 - DNA, 26 bp, Homo sapiens
ttcgtttccaccatcggaatttattt

SEQ ID NO: 22388 - DNA, 26 bp, Homo sapiens
tcgtttccaccatcggaatttatttc

SEQ ID NO: 22389 - DNA, 26 bp, Homo sapiens
cgtttccaccatcggaatttatttct

SEQ ID NO: 22390 - DNA, 26 bp, Homo sapiens
gtttccaccatcggaatttatttcta

SEQ ID NO: 22391 - DNA, 26 bp, Homo sapiens
tttccaccatcggaatttatttctag

SEQ ID NO: 22392 - DNA, 26 bp, Homo sapiens
ttccaccatcggaatttatttctagt

SEQ ID NO: 22393 - DNA, 26 bp, Homo sapiens
tccaccatcggaatttatttctagtg

SEQ ID NO: 22394 - DNA, 26 bp, Homo sapiens
ccaccatcggaatttatttctagtga

SEQ ID NO: 22395 - DNA, 26 bp, Homo sapiens
caccatcggaatttatttctagtgat

SEQ ID NO: 22396 - DNA, 26 bp, Homo sapiens
accatcggaatttatttctagtgata

SEQ ID NO: 22397 - DNA, 26 bp, Homo sapiens
ccatcggaatttatttctagtgataa

SEQ ID NO: 22398 - DNA, 26 bp, Homo sapiens
catcggaatttatttctagtgataaa

SEQ ID NO: 22399 - DNA, 26 bp, Homo sapiens
atcggaatttatttctagtgataaaa

SEQ ID NO: 22400 - DNA, 26 bp, Homo sapiens
tcggaatttatttctagtgataaaat

SEQ ID NO: 22401 - DNA, 26 bp, Homo sapiens
cggaatttatttctagtgataaaatt

SEQ ID NO: 22402 - DNA, 26 bp, Homo sapiens
ggaatttatttctagtgataaaattg

SEQ ID NO: 22403 - DNA, 26 bp, Homo sapiens
gaatttatttctagtgataaaattgt

SEQ ID NO: 22404 - DNA, 26 bp, Homo sapiens
aatttatttctagtgataaaattgta

SEQ ID NO: 22405 - DNA, 26 bp, Homo sapiens
atttatttctagtgataaaattgtat

SEQ ID NO: 22406 - DNA, 26 bp, Homo sapiens
tttatttctagtgataaaattgtatt

SEQ ID NO: 22407 - DNA, 26 bp, Homo sapiens
ttatttctagtgataaaattgtattt

SEQ ID NO: 22408 - DNA, 26 bp, Homo sapiens
tatttctagtgataaaattgtatttt

SEQ ID NO: 22409 - DNA, 26 bp, Homo sapiens
atttctagtgataaaattgtattttt

SEQ ID NO: 22410 - DNA, 26 bp, Homo sapiens
tttctagtgataaaattgtattttta

SEQ ID NO: 22411 - DNA, 26 bp, Homo sapiens
ttctagtgataaaattgtatttttaa

SEQ ID NO: 22412 - DNA, 26 bp, Homo sapiens
tctagtgataaaattgtatttttaaa

SEQ ID NO: 22413 - DNA, 26 bp, Homo sapiens
ctagtgataaaattgtatttttaaaa

SEQ ID NO: 22414 - DNA, 26 bp, Homo sapiens
tagtgataaaattgtatttttaaaaa

SEQ ID NO: 22415 - DNA, 26 bp, Homo sapiens
agtgataaaattgtatttttaaaaaa

SEQ ID NO: 22416 - DNA, 26 bp, Homo sapiens
gtgataaaattgtatttttaaaaaaa

SEQ ID NO: 22417 - DNA, 26 bp, Homo sapiens
tgataaaattgtatttttaaaaaaaa

SEQ ID NO: 22418 - DNA, 26 bp, Homo sapiens
gataaaattgtatttttaaaaaaaat

SEQ ID NO: 22419 - DNA, 26 bp, Homo sapiens
ataaaattgtatttttaaaaaaaatt

SEQ ID NO: 22420 - DNA, 26 bp, Homo sapiens
taaaattgtatttttaaaaaaaattc

SEQ ID NO: 22421 - DNA, 26 bp, Homo sapiens
aaaattgtatttttaaaaaaaattcc

SEQ ID NO: 22422 - DNA, 26 bp, Homo sapiens
aaattgtatttttaaaaaaaattccc

SEQ ID NO: 22423 - DNA, 26 bp, Homo sapiens
aattgtatttttaaaaaaaattcccc

SEQ ID NO: 22424 - DNA, 26 bp, Homo sapiens
attgtatttttaaaaaaaattcccct

SEQ ID NO: 22425 - DNA, 26 bp, Homo sapiens
ttgtatttttaaaaaaaattcccctt

SEQ ID NO: 22426 - DNA, 26 bp, Homo sapiens
tgtatttttaaaaaaaattccccttc

SEQ ID NO: 22427 - DNA, 26 bp, Homo sapiens
gtatttttaaaaaaaattccccttct

SEQ ID NO: 22428 - DNA, 26 bp, Homo sapiens
tatttttaaaaaaaattccccttcta

SEQ ID NO: 22429 - DNA, 26 bp, Homo sapiens
atttttaaaaaaaattccccttctac

SEQ ID NO: 22430 - DNA, 26 bp, Homo sapiens
tttttaaaaaaaattccccttctaca

SEQ ID NO: 22431 - DNA, 26 bp, Homo sapiens
ttttaaaaaaaattccccttctacag

SEQ ID NO: 22432 - DNA, 26 bp, Homo sapiens
tttaaaaaaaattccccttctacaga

SEQ ID NO: 22433 - DNA, 26 bp, Homo sapiens
ttaaaaaaaattccccttctacagat

SEQ ID NO: 22434 - DNA, 26 bp, Homo sapiens
taaaaaaaattccccttctacagata

SEQ ID NO: 22435 - DNA, 26 bp, Homo sapiens
aaaaaaaattccccttctacagataa

SEQ ID NO: 22436 - DNA, 26 bp, Homo sapiens
aaaaaaattccccttctacagataat

SEQ ID NO: 22437 - DNA, 26 bp, Homo sapiens
aaaaaattccccttctacagataatt

SEQ ID NO: 22438 - DNA, 26 bp, Homo sapiens
aaaaattccccttctacagataattt

SEQ ID NO: 22439 - DNA, 26 bp, Homo sapiens
aaaattccccttctacagataatttc

SEQ ID NO: 22440 - DNA, 26 bp, Homo sapiens
aaattccccttctacagataatttca

SEQ ID NO: 22441 - DNA, 26 bp, Homo sapiens
aattccccttctacagataatttcaa

SEQ ID NO: 22442 - DNA, 26 bp, Homo sapiens
attccccttctacagataatttcaat

SEQ ID NO: 22443 - DNA, 26 bp, Homo sapiens
ttccccttctacagataatttcaatg

SEQ ID NO: 22444 - DNA, 26 bp, Homo sapiens
tccccttctacagataatttcaatgc

SEQ ID NO: 22445 - DNA, 26 bp, Homo sapiens
ccccttctacagataatttcaatgct

SEQ ID NO: 22446 - DNA, 26 bp, Homo sapiens
cccttctacagataatttcaatgctg

SEQ ID NO: 22447 - DNA, 26 bp, Homo sapiens
ccttctacagataatttcaatgctgc

SEQ ID NO: 22448 - DNA, 26 bp, Homo sapiens
cttctacagataatttcaatgctgcg

SEQ ID NO: 22449 - DNA, 26 bp, Homo sapiens
ttctacagataatttcaatgctgcgg

SEQ ID NO: 22450 - DNA, 26 bp, Homo sapiens
tctacagataatttcaatgctgcggc

SEQ ID NO: 22451 - DNA, 26 bp, Homo sapiens
ctacagataatttcaatgctgcggca

SEQ ID NO: 22452 - DNA, 26 bp, Homo sapiens
tacagataatttcaatgctgcggcac

SEQ ID NO: 22453 - DNA, 26 bp, Homo sapiens
acagataatttcaatgctgcggcacc

SEQ ID NO: 22454 - DNA, 26 bp, Homo sapiens
cagataatttcaatgctgcggcacca

SEQ ID NO: 22455 - DNA, 26 bp, Homo sapiens
agataatttcaatgctgcggcaccac

SEQ ID NO: 22456 - DNA, 26 bp, Homo sapiens
gataatttcaatgctgcggcaccaca

SEQ ID NO: 22457 - DNA, 26 bp, Homo sapiens
ataatttcaatgctgcggcaccacac

SEQ ID NO: 22458 - DNA, 26 bp, Homo sapiens
taatttcaatgctgcggcaccacaca

SEQ ID NO: 22459 - DNA, 26 bp, Homo sapiens
aatttcaatgctgcggcaccacacac

SEQ ID NO: 22460 - DNA, 26 bp, Homo sapiens
atttcaatgctgcggcaccacacaca

SEQ ID NO: 22461 - DNA, 26 bp, Homo sapiens
tttcaatgctgcggcaccacacacag

SEQ ID NO: 22462 - DNA, 26 bp, Homo sapiens
ttcaatgctgcggcaccacacacagg

SEQ ID NO: 22463 - DNA, 26 bp, Homo sapiens
tcaatgctgcggcaccacacacaggc

SEQ ID NO: 22464 - DNA, 26 bp, Homo sapiens
caatgctgcggcaccacacacaggca

SEQ ID NO: 22465 - DNA, 26 bp, Homo sapiens
aatgctgcggcaccacacacaggcat

SEQ ID NO: 22466 - DNA, 26 bp, Homo sapiens
atgctgcggcaccacacacaggcata

SEQ ID NO: 22467 - DNA, 26 bp, Homo sapiens
tgctgcggcaccacacacaggcatac

SEQ ID NO: 22468 - DNA, 26 bp, Homo sapiens
gctgcggcaccacacacaggcataca

SEQ ID NO: 22469 - DNA, 26 bp, Homo sapiens
ctgcggcaccacacacaggcatacat

SEQ ID NO: 22470 - DNA, 26 bp, Homo sapiens
tgcggcaccacacacaggcatacatc

SEQ ID NO: 22471 - DNA, 26 bp, Homo sapiens
gcggcaccacacacaggcatacatct

SEQ ID NO: 22472 - DNA, 26 bp, Homo sapiens
cggcaccacacacaggcatacatctt

SEQ ID NO: 22473 - DNA, 26 bp, Homo sapiens
ggcaccacacacaggcatacatctta

SEQ ID NO: 22474 - DNA, 26 bp, Homo sapiens
gcaccacacacaggcatacatcttaa

SEQ ID NO: 22475 - DNA, 26 bp, Homo sapiens
caccacacacaggcatacatcttaag

SEQ ID NO: 22476 - DNA, 26 bp, Homo sapiens
accacacacaggcatacatcttaagt

SEQ ID NO: 22477 - DNA, 26 bp, Homo sapiens
ccacacacaggcatacatcttaagtg

SEQ ID NO: 22478 - DNA, 26 bp, Homo sapiens
cacacacaggcatacatcttaagtgc

SEQ ID NO: 22479 - DNA, 26 bp, Homo sapiens
acacacaggcatacatcttaagtgcc

SEQ ID NO: 22480 - DNA, 26 bp, Homo sapiens
cacacaggcatacatcttaagtgcct

SEQ ID NO: 22481 - DNA, 26 bp, Homo sapiens
acacaggcatacatcttaagtgcctc

SEQ ID NO: 22482 - DNA, 26 bp, Homo sapiens
cacaggcatacatcttaagtgcctcc

SEQ ID NO: 22483 - DNA, 26 bp, Homo sapiens
acaggcatacatcttaagtgcctcca

SEQ ID NO: 22484 - DNA, 26 bp, Homo sapiens
caggcatacatcttaagtgcctccaa

SEQ ID NO: 22485 - DNA, 26 bp, Homo sapiens
aggcatacatcttaagtgcctccaaa

SEQ ID NO: 22486 - DNA, 26 bp, Homo sapiens
ggcatacatcttaagtgcctccaaac

SEQ ID NO: 22487 - DNA, 26 bp, Homo sapiens
gcatacatcttaagtgcctccaaaca

SEQ ID NO: 22488 - DNA, 26 bp, Homo sapiens
catacatcttaagtgcctccaaacaa

SEQ ID NO: 22489 - DNA, 26 bp, Homo sapiens
atacatcttaagtgcctccaaacaaa

SEQ ID NO: 22490 - DNA, 26 bp, Homo sapiens
tacatcttaagtgcctccaaacaaag

SEQ ID NO: 22491 - DNA, 26 bp, Homo sapiens
acatcttaagtgcctccaaacaaagt

SEQ ID NO: 22492 - DNA, 26 bp, Homo sapiens
catcttaagtgcctccaaacaaagtc

SEQ ID NO: 22493 - DNA, 26 bp, Homo sapiens
atcttaagtgcctccaaacaaagtca

SEQ ID NO: 22494 - DNA, 26 bp, Homo sapiens
tcttaagtgcctccaaacaaagtcat

SEQ ID NO: 22495 - DNA, 26 bp, Homo sapiens
cttaagtgcctccaaacaaagtcatt

SEQ ID NO: 22496 - DNA, 26 bp, Homo sapiens
ttaagtgcctccaaacaaagtcattt

SEQ ID NO: 22497 - DNA, 26 bp, Homo sapiens
taagtgcctccaaacaaagtcatttt

SEQ ID NO: 22498 - DNA, 26 bp, Homo sapiens
aagtgcctccaaacaaagtcattttt

SEQ ID NO: 22499 - DNA, 26 bp, Homo sapiens
agtgcctccaaacaaagtcattttta

SEQ ID NO: 22500 - DNA, 26 bp, Homo sapiens
gtgcctccaaacaaagtcatttttat

SEQ ID NO: 22501 - DNA, 26 bp, Homo sapiens
tgcctccaaacaaagtcatttttatt

SEQ ID NO: 22502 - DNA, 26 bp, Homo sapiens
gcctccaaacaaagtcatttttattc

SEQ ID NO: 22503 - DNA, 26 bp, Homo sapiens
cctccaaacaaagtcatttttattca

SEQ ID NO: 22504 - DNA, 26 bp, Homo sapiens
ctccaaacaaagtcatttttattcag

SEQ ID NO: 22505 - DNA, 26 bp, Homo sapiens
tccaaacaaagtcatttttattcagc

SEQ ID NO: 22506 - DNA, 26 bp, Homo sapiens
ccaaacaaagtcatttttattcagca

SEQ ID NO: 22507 - DNA, 26 bp, Homo sapiens
caaacaaagtcatttttattcagcaa

SEQ ID NO: 22508 - DNA, 26 bp, Homo sapiens
aaacaaagtcatttttattcagcaag

SEQ ID NO: 22509 - DNA, 26 bp, Homo sapiens
aacaaagtcatttttattcagcaagg

SEQ ID NO: 22510 - DNA, 26 bp, Homo sapiens
acaaagtcatttttattcagcaaggg

SEQ ID NO: 22511 - DNA, 26 bp, Homo sapiens
caaagtcatttttattcagcaagggg

SEQ ID NO: 22512 - DNA, 26 bp, Homo sapiens
aaagtcatttttattcagcaagggga

SEQ ID NO: 22513 - DNA, 26 bp, Homo sapiens
aagtcatttttattcagcaaggggac

SEQ ID NO: 22514 - DNA, 26 bp, Homo sapiens
agtcatttttattcagcaaggggacg

SEQ ID NO: 22515 - DNA, 26 bp, Homo sapiens
gtcatttttattcagcaaggggacgc

SEQ ID NO: 22516 - DNA, 26 bp, Homo sapiens
tcatttttattcagcaaggggacgct

SEQ ID NO: 22517 - DNA, 26 bp, Homo sapiens
catttttattcagcaaggggacgctg

SEQ ID NO: 22518 - DNA, 26 bp, Homo sapiens
atttttattcagcaaggggacgctgt

SEQ ID NO: 22519 - DNA, 26 bp, Homo sapiens
tttttattcagcaaggggacgctgtg

SEQ ID NO: 22520 - DNA, 26 bp, Homo sapiens
ttttattcagcaaggggacgctgtga

SEQ ID NO: 22521 - DNA, 26 bp, Homo sapiens
tttattcagcaaggggacgctgtgaa

SEQ ID NO: 22522 - DNA, 26 bp, Homo sapiens
ttattcagcaaggggacgctgtgaat

SEQ ID NO: 22523 - DNA, 26 bp, Homo sapiens
tattcagcaaggggacgctgtgaatg

SEQ ID NO: 22524 - DNA, 26 bp, Homo sapiens
attcagcaaggggacgctgtgaatgt

SEQ ID NO: 22525 - DNA, 26 bp, Homo sapiens
ttcagcaaggggacgctgtgaatgtt

SEQ ID NO: 22526 - DNA, 26 bp, Homo sapiens
tcagcaaggggacgctgtgaatgttt

SEQ ID NO: 22527 - DNA, 26 bp, Homo sapiens
cagcaaggggacgctgtgaatgtttc

SEQ ID NO: 22528 - DNA, 26 bp, Homo sapiens
agcaaggggacgctgtgaatgtttct

SEQ ID NO: 22529 - DNA, 26 bp, Homo sapiens
gcaaggggacgctgtgaatgtttctt

SEQ ID NO: 22530 - DNA, 26 bp, Homo sapiens
caaggggacgctgtgaatgtttcttt

SEQ ID NO: 22531 - DNA, 26 bp, Homo sapiens
aaggggacgctgtgaatgtttctttt

SEQ ID NO: 22532 - DNA, 26 bp, Homo sapiens
aggggacgctgtgaatgtttcttttt

SEQ ID NO: 22533 - DNA, 26 bp, Homo sapiens
ggggacgctgtgaatgtttctttttg

SEQ ID NO: 22534 - DNA, 26 bp, Homo sapiens
gggacgctgtgaatgtttctttttgc

SEQ ID NO: 22535 - DNA, 26 bp, Homo sapiens
ggacgctgtgaatgtttctttttgcc

SEQ ID NO: 22536 - DNA, 26 bp, Homo sapiens
gacgctgtgaatgtttctttttgcct

SEQ ID NO: 22537 - DNA, 26 bp, Homo sapiens
acgctgtgaatgtttctttttgcctg

SEQ ID NO: 22538 - DNA, 26 bp, Homo sapiens
cgctgtgaatgtttctttttgcctga

SEQ ID NO: 22539 - DNA, 26 bp, Homo sapiens
gctgtgaatgtttctttttgcctgat

SEQ ID NO: 22540 - DNA, 26 bp, Homo sapiens
ctgtgaatgtttctttttgcctgatt

SEQ ID NO: 22541 - DNA, 26 bp, Homo sapiens
tgtgaatgtttctttttgcctgattt

SEQ ID NO: 22542 - DNA, 26 bp, Homo sapiens
gtgaatgtttctttttgcctgattta

SEQ ID NO: 22543 - DNA, 26 bp, Homo sapiens
tgaatgtttctttttgcctgatttaa

SEQ ID NO: 22544 - DNA, 26 bp, Homo sapiens
gaatgtttctttttgcctgatttaag

SEQ ID NO: 22545 - DNA, 26 bp, Homo sapiens
aatgtttctttttgcctgatttaagt

SEQ ID NO: 22546 - DNA, 26 bp, Homo sapiens
atgtttctttttgcctgatttaagtt

SEQ ID NO: 22547 - DNA, 26 bp, Homo sapiens
tgtttctttttgcctgatttaagtta

SEQ ID NO: 22548 - DNA, 26 bp, Homo sapiens
gtttctttttgcctgatttaagttat

SEQ ID NO: 22549 - DNA, 26 bp, Homo sapiens
tttctttttgcctgatttaagttatg

SEQ ID NO: 22550 - DNA, 26 bp, Homo sapiens
ttctttttgcctgatttaagttatgt

SEQ ID NO: 22551 - DNA, 26 bp, Homo sapiens
tctttttgcctgatttaagttatgtg

SEQ ID NO: 22552 - DNA, 26 bp, Homo sapiens
ctttttgcctgatttaagttatgtgg

SEQ ID NO: 22553 - DNA, 26 bp, Homo sapiens
tttttgcctgatttaagttatgtggg

SEQ ID NO: 22554 - DNA, 26 bp, Homo sapiens
ttttgcctgatttaagttatgtggga

SEQ ID NO: 22555 - DNA, 26 bp, Homo sapiens
tttgcctgatttaagttatgtgggag

SEQ ID NO: 22556 - DNA, 26 bp, Homo sapiens
ttgcctgatttaagttatgtgggagt

SEQ ID NO: 22557 - DNA, 26 bp, Homo sapiens
tgcctgatttaagttatgtgggagtt

SEQ ID NO: 22558 - DNA, 26 bp, Homo sapiens
gcctgatttaagttatgtgggagttc

SEQ ID NO: 22559 - DNA, 26 bp, Homo sapiens
cctgatttaagttatgtgggagttca

SEQ ID NO: 22560 - DNA, 26 bp, Homo sapiens
ctgatttaagttatgtgggagttcaa

SEQ ID NO: 22561 - DNA, 26 bp, Homo sapiens
tgatttaagttatgtgggagttcaag

SEQ ID NO: 22562 - DNA, 26 bp, Homo sapiens
gatttaagttatgtgggagttcaaga

SEQ ID NO: 22563 - DNA, 26 bp, Homo sapiens
atttaagttatgtgggagttcaagat

SEQ ID NO: 22564 - DNA, 26 bp, Homo sapiens
tttaagttatgtgggagttcaagatc

SEQ ID NO: 22565 - DNA, 26 bp, Homo sapiens
ttaagttatgtgggagttcaagatca

SEQ ID NO: 22566 - DNA, 26 bp, Homo sapiens
taagttatgtgggagttcaagatcag

SEQ ID NO: 22567 - DNA, 26 bp, Homo sapiens
aagttatgtgggagttcaagatcaga

SEQ ID NO: 22568 - DNA, 26 bp, Homo sapiens
agttatgtgggagttcaagatcagat

SEQ ID NO: 22569 - DNA, 26 bp, Homo sapiens
gttatgtgggagttcaagatcagatt

SEQ ID NO: 22570 - DNA, 26 bp, Homo sapiens
ttatgtgggagttcaagatcagattg

SEQ ID NO: 22571 - DNA, 26 bp, Homo sapiens
tatgtgggagttcaagatcagattgt

SEQ ID NO: 22572 - DNA, 26 bp, Homo sapiens
atgtgggagttcaagatcagattgtt

SEQ ID NO: 22573 - DNA, 26 bp, Homo sapiens
tgtgggagttcaagatcagattgttc

SEQ ID NO: 22574 - DNA, 26 bp, Homo sapiens
gtgggagttcaagatcagattgttca

SEQ ID NO: 22575 - DNA, 26 bp, Homo sapiens
tgggagttcaagatcagattgttcat

SEQ ID NO: 22576 - DNA, 26 bp, Homo sapiens
gggagttcaagatcagattgttcatg

SEQ ID NO: 22577 - DNA, 26 bp, Homo sapiens
ggagttcaagatcagattgttcatga

SEQ ID NO: 22578 - DNA, 26 bp, Homo sapiens
gagttcaagatcagattgttcatgat

SEQ ID NO: 22579 - DNA, 26 bp, Homo sapiens
agttcaagatcagattgttcatgatt

SEQ ID NO: 22580 - DNA, 26 bp, Homo sapiens
gttcaagatcagattgttcatgatta

SEQ ID NO: 22581 - DNA, 26 bp, Homo sapiens
ttcaagatcagattgttcatgattac

SEQ ID NO: 22582 - DNA, 26 bp, Homo sapiens
tcaagatcagattgttcatgattacg

SEQ ID NO: 22583 - DNA, 26 bp, Homo sapiens
caagatcagattgttcatgattacga

SEQ ID NO: 22584 - DNA, 26 bp, Homo sapiens
aagatcagattgttcatgattacgaa

SEQ ID NO: 22585 - DNA, 26 bp, Homo sapiens
agatcagattgttcatgattacgaag

SEQ ID NO: 22586 - DNA, 26 bp, Homo sapiens
gatcagattgttcatgattacgaagg

SEQ ID NO: 22587 - DNA, 26 bp, Homo sapiens
atcagattgttcatgattacgaagga

SEQ ID NO: 22588 - DNA, 26 bp, Homo sapiens
tcagattgttcatgattacgaaggag

SEQ ID NO: 22589 - DNA, 26 bp, Homo sapiens
cagattgttcatgattacgaaggagg

SEQ ID NO: 22590 - DNA, 26 bp, Homo sapiens
agattgttcatgattacgaaggagga

SEQ ID NO: 22591 - DNA, 26 bp, Homo sapiens
gattgttcatgattacgaaggaggac

SEQ ID NO: 22592 - DNA, 26 bp, Homo sapiens
attgttcatgattacgaaggaggaca

SEQ ID NO: 22593 - DNA, 26 bp, Homo sapiens
ttgttcatgattacgaaggaggacag

SEQ ID NO: 22594 - DNA, 26 bp, Homo sapiens
tgttcatgattacgaaggaggacagg

SEQ ID NO: 22595 - DNA, 26 bp, Homo sapiens
gttcatgattacgaaggaggacagga

SEQ ID NO: 22596 - DNA, 26 bp, Homo sapiens
ttcatgattacgaaggaggacaggat

SEQ ID NO: 22597 - DNA, 26 bp, Homo sapiens
tcatgattacgaaggaggacaggatg

SEQ ID NO: 22598 - DNA, 26 bp, Homo sapiens
catgattacgaaggaggacaggatgg

SEQ ID NO: 22599 - DNA, 26 bp, Homo sapiens
atgattacgaaggaggacaggatggt

SEQ ID NO: 22600 - DNA, 26 bp, Homo sapiens
tgattacgaaggaggacaggatggtg

SEQ ID NO: 22601 - DNA, 26 bp, Homo sapiens
gattacgaaggaggacaggatggtgg

SEQ ID NO: 22602 - DNA, 26 bp, Homo sapiens
attacgaaggaggacaggatggtggc

SEQ ID NO: 22603 - DNA, 26 bp, Homo sapiens
ttacgaaggaggacaggatggtggca

SEQ ID NO: 22604 - DNA, 26 bp, Homo sapiens
tacgaaggaggacaggatggtggcac

SEQ ID NO: 22605 - DNA, 26 bp, Homo sapiens
acgaaggaggacaggatggtggcacc

SEQ ID NO: 22606 - DNA, 26 bp, Homo sapiens
cgaaggaggacaggatggtggcacca

SEQ ID NO: 22607 - DNA, 26 bp, Homo sapiens
gaaggaggacaggatggtggcaccac

SEQ ID NO: 22608 - DNA, 26 bp, Homo sapiens
aaggaggacaggatggtggcaccaca

SEQ ID NO: 22609 - DNA, 26 bp, Homo sapiens
aggaggacaggatggtggcaccacag

SEQ ID NO: 22610 - DNA, 26 bp, Homo sapiens
ggaggacaggatggtggcaccacagg

SEQ ID NO: 22611 - DNA, 26 bp, Homo sapiens
gaggacaggatggtggcaccacagga

SEQ ID NO: 22612 - DNA, 26 bp, Homo sapiens
aggacaggatggtggcaccacaggac

SEQ ID NO: 22613 - DNA, 26 bp, Homo sapiens
ggacaggatggtggcaccacaggaca

SEQ ID NO: 22614 - DNA, 26 bp, Homo sapiens
gacaggatggtggcaccacaggacag

SEQ ID NO: 22615 - DNA, 26 bp, Homo sapiens
acaggatggtggcaccacaggacagg

SEQ ID NO: 22616 - DNA, 26 bp, Homo sapiens
caggatggtggcaccacaggacagga

SEQ ID NO: 22617 - DNA, 26 bp, Homo sapiens
aggatggtggcaccacaggacaggaa

SEQ ID NO: 22618 - DNA, 26 bp, Homo sapiens
ggatggtggcaccacaggacaggaaa

SEQ ID NO: 22619 - DNA, 26 bp, Homo sapiens
gatggtggcaccacaggacaggaaag

SEQ ID NO: 22620 - DNA, 26 bp, Homo sapiens
atggtggcaccacaggacaggaaagg

SEQ ID NO: 22621 - DNA, 26 bp, Homo sapiens
tggtggcaccacaggacaggaaaggg

SEQ ID NO: 22622 - DNA, 26 bp, Homo sapiens
ggtggcaccacaggacaggaaaggga

SEQ ID NO: 22623 - DNA, 26 bp, Homo sapiens
gtggcaccacaggacaggaaagggag

SEQ ID NO: 22624 - DNA, 26 bp, Homo sapiens
tggcaccacaggacaggaaagggagc

SEQ ID NO: 22625 - DNA, 26 bp, Homo sapiens
ggcaccacaggacaggaaagggagca

SEQ ID NO: 22626 - DNA, 26 bp, Homo sapiens
gcaccacaggacaggaaagggagcac

SEQ ID NO: 22627 - DNA, 26 bp, Homo sapiens
caccacaggacaggaaagggagcact

SEQ ID NO: 22628 - DNA, 26 bp, Homo sapiens
accacaggacaggaaagggagcactt

SEQ ID NO: 22629 - DNA, 26 bp, Homo sapiens
ccacaggacaggaaagggagcacttt

SEQ ID NO: 22630 - DNA, 26 bp, Homo sapiens
cacaggacaggaaagggagcactttt

SEQ ID NO: 22631 - DNA, 26 bp, Homo sapiens
acaggacaggaaagggagcacttttt

SEQ ID NO: 22632 - DNA, 26 bp, Homo sapiens
caggacaggaaagggagcactttttc

SEQ ID NO: 22633 - DNA, 26 bp, Homo sapiens
aggacaggaaagggagcactttttct

SEQ ID NO: 22634 - DNA, 26 bp, Homo sapiens
ggacaggaaagggagcactttttctg

SEQ ID NO: 22635 - DNA, 26 bp, Homo sapiens
gacaggaaagggagcactttttctga

SEQ ID NO: 22636 - DNA, 26 bp, Homo sapiens
acaggaaagggagcactttttctgaa

SEQ ID NO: 22637 - DNA, 26 bp, Homo sapiens
caggaaagggagcactttttctgaaa

SEQ ID NO: 22638 - DNA, 26 bp, Homo sapiens
aggaaagggagcactttttctgaaaa

SEQ ID NO: 22639 - DNA, 26 bp, Homo sapiens
ggaaagggagcactttttctgaaaat

SEQ ID NO: 22640 - DNA, 26 bp, Homo sapiens
gaaagggagcactttttctgaaaatc

SEQ ID NO: 22641 - DNA, 26 bp, Homo sapiens
aaagggagcactttttctgaaaatcc

SEQ ID NO: 22642 - DNA, 26 bp, Homo sapiens
aagggagcactttttctgaaaatcca

SEQ ID NO: 22643 - DNA, 26 bp, Homo sapiens
agggagcactttttctgaaaatccat

SEQ ID NO: 22644 - DNA, 26 bp, Homo sapiens
gggagcactttttctgaaaatccatt

SEQ ID NO: 22645 - DNA, 26 bp, Homo sapiens
ggagcactttttctgaaaatccattc

SEQ ID NO: 22646 - DNA, 26 bp, Homo sapiens
gagcactttttctgaaaatccattct

SEQ ID NO: 22647 - DNA, 26 bp, Homo sapiens
agcactttttctgaaaatccattctt

SEQ ID NO: 22648 - DNA, 26 bp, Homo sapiens
gcactttttctgaaaatccattcttt

SEQ ID NO: 22649 - DNA, 26 bp, Homo sapiens
cactttttctgaaaatccattctttt

SEQ ID NO: 22650 - DNA, 26 bp, Homo sapiens
actttttctgaaaatccattcttttt

SEQ ID NO: 22651 - DNA, 26 bp, Homo sapiens
ctttttctgaaaatccattctttttt

SEQ ID NO: 22652 - DNA, 26 bp, Homo sapiens
tttttctgaaaatccattcttttttt

SEQ ID NO: 22653 - DNA, 26 bp, Homo sapiens
ttttctgaaaatccattctttttttt

SEQ ID NO: 22654 - DNA, 26 bp, Homo sapiens
tttctgaaaatccattcttttttttt

SEQ ID NO: 22655 - DNA, 26 bp, Homo sapiens
ttctgaaaatccattctttttttttt

SEQ ID NO: 22656 - DNA, 26 bp, Homo sapiens
tctgaaaatccattcttttttttttt

SEQ ID NO: 22657 - DNA, 26 bp, Homo sapiens
ctgaaaatccattctttttttttttt

SEQ ID NO: 22658 - DNA, 26 bp, Homo sapiens
tgaaaatccattcttttttttttttt

SEQ ID NO: 22659 - DNA, 26 bp, Homo sapiens
gaaaatccattctttttttttttttt

SEQ ID NO: 22660 - DNA, 26 bp, Homo sapiens
aaaatccattcttttttttttttttg

SEQ ID NO: 22661 - DNA, 26 bp, Homo sapiens
aaatccattcttttttttttttttga

SEQ ID NO: 22662 - DNA, 26 bp, Homo sapiens
aatccattcttttttttttttttgag

SEQ ID NO: 22663 - DNA, 26 bp, Homo sapiens
atccattcttttttttttttttgaga

SEQ ID NO: 22664 - DNA, 26 bp, Homo sapiens
tccattcttttttttttttttgagac

SEQ ID NO: 22665 - DNA, 26 bp, Homo sapiens
ccattcttttttttttttttgagaca

SEQ ID NO: 22666 - DNA, 26 bp, Homo sapiens
cattcttttttttttttttgagacac

SEQ ID NO: 22667 - DNA, 26 bp, Homo sapiens
attcttttttttttttttgagacaca

SEQ ID NO: 22668 - DNA, 26 bp, Homo sapiens
ttcttttttttttttttgagacacag

SEQ ID NO: 22669 - DNA, 26 bp, Homo sapiens
tcttttttttttttttgagacacagt

SEQ ID NO: 22670 - DNA, 26 bp, Homo sapiens
cttttttttttttttgagacacagtc

SEQ ID NO: 22671 - DNA, 26 bp, Homo sapiens
ttttttttttttttgagacacagtct

SEQ ID NO: 22672 - DNA, 26 bp, Homo sapiens
tttttttttttttgagacacagtctt

SEQ ID NO: 22673 - DNA, 26 bp, Homo sapiens
ttttttttttttgagacacagtcttg

SEQ ID NO: 22674 - DNA, 26 bp, Homo sapiens
tttttttttttgagacacagtcttgc

SEQ ID NO: 22675 - DNA, 26 bp, Homo sapiens
ttttttttttgagacacagtcttgct

SEQ ID NO: 22676 - DNA, 26 bp, Homo sapiens
tttttttttgagacacagtcttgctc

SEQ ID NO: 22677 - DNA, 26 bp, Homo sapiens
ttttttttgagacacagtcttgctct

SEQ ID NO: 22678 - DNA, 26 bp, Homo sapiens
tttttttgagacacagtcttgctctg

SEQ ID NO: 22679 - DNA, 26 bp, Homo sapiens
ttttttgagacacagtcttgctctgt

SEQ ID NO: 22680 - DNA, 26 bp, Homo sapiens
tttttgagacacagtcttgctctgtt

SEQ ID NO: 22681 - DNA, 26 bp, Homo sapiens
ttttgagacacagtcttgctctgttg

SEQ ID NO: 22682 - DNA, 26 bp, Homo sapiens
tttgagacacagtcttgctctgttgc

SEQ ID NO: 22683 - DNA, 26 bp, Homo sapiens
ttgagacacagtcttgctctgttgcc

SEQ ID NO: 22684 - DNA, 26 bp, Homo sapiens
tgagacacagtcttgctctgttgccc

SEQ ID NO: 22685 - DNA, 26 bp, Homo sapiens
gagacacagtcttgctctgttgccca

SEQ ID NO: 22686 - DNA, 26 bp, Homo sapiens
agacacagtcttgctctgttgcccag

SEQ ID NO: 22687 - DNA, 26 bp, Homo sapiens
gacacagtcttgctctgttgcccagg

SEQ ID NO: 22688 - DNA, 26 bp, Homo sapiens
acacagtcttgctctgttgcccaggc

SEQ ID NO: 22689 - DNA, 26 bp, Homo sapiens
cacagtcttgctctgttgcccaggct

SEQ ID NO: 22690 - DNA, 26 bp, Homo sapiens
acagtcttgctctgttgcccaggctg

SEQ ID NO: 22691 - DNA, 26 bp, Homo sapiens
cagtcttgctctgttgcccaggctgg

SEQ ID NO: 22692 - DNA, 26 bp, Homo sapiens
agtcttgctctgttgcccaggctgga

SEQ ID NO: 22693 - DNA, 26 bp, Homo sapiens
gtcttgctctgttgcccaggctggag

SEQ ID NO: 22694 - DNA, 26 bp, Homo sapiens
tcttgctctgttgcccaggctggagt

SEQ ID NO: 22695 - DNA, 26 bp, Homo sapiens
cttgctctgttgcccaggctggagtg

SEQ ID NO: 22696 - DNA, 26 bp, Homo sapiens
ttgctctgttgcccaggctggagtgc

SEQ ID NO: 22697 - DNA, 26 bp, Homo sapiens
tgctctgttgcccaggctggagtgca

SEQ ID NO: 22698 - DNA, 26 bp, Homo sapiens
gctctgttgcccaggctggagtgcag

SEQ ID NO: 22699 - DNA, 26 bp, Homo sapiens
ctctgttgcccaggctggagtgcagt

SEQ ID NO: 22700 - DNA, 26 bp, Homo sapiens
tctgttgcccaggctggagtgcagtg

SEQ ID NO: 22701 - DNA, 26 bp, Homo sapiens
ctgttgcccaggctggagtgcagtgg

SEQ ID NO: 22702 - DNA, 26 bp, Homo sapiens
tgttgcccaggctggagtgcagtggc

SEQ ID NO: 22703 - DNA, 26 bp, Homo sapiens
gttgcccaggctggagtgcagtggca

SEQ ID NO: 22704 - DNA, 26 bp, Homo sapiens
ttgcccaggctggagtgcagtggcac

SEQ ID NO: 22705 - DNA, 26 bp, Homo sapiens
tgcccaggctggagtgcagtggcacc

SEQ ID NO: 22706 - DNA, 26 bp, Homo sapiens
gcccaggctggagtgcagtggcacca

SEQ ID NO: 22707 - DNA, 26 bp, Homo sapiens
cccaggctggagtgcagtggcaccat

SEQ ID NO: 22708 - DNA, 26 bp, Homo sapiens
ccaggctggagtgcagtggcaccatc

SEQ ID NO: 22709 - DNA, 26 bp, Homo sapiens
caggctggagtgcagtggcaccatct

SEQ ID NO: 22710 - DNA, 26 bp, Homo sapiens
aggctggagtgcagtggcaccatctc

SEQ ID NO: 22711 - DNA, 26 bp, Homo sapiens
ggctggagtgcagtggcaccatctca

SEQ ID NO: 22712 - DNA, 26 bp, Homo sapiens
gctggagtgcagtggcaccatctcag

SEQ ID NO: 22713 - DNA, 26 bp, Homo sapiens
ctggagtgcagtggcaccatctcagc

SEQ ID NO: 22714 - DNA, 26 bp, Homo sapiens
tggagtgcagtggcaccatctcagct

SEQ ID NO: 22715 - DNA, 26 bp, Homo sapiens
ggagtgcagtggcaccatctcagctc

SEQ ID NO: 22716 - DNA, 26 bp, Homo sapiens
gagtgcagtggcaccatctcagctca

SEQ ID NO: 22717 - DNA, 26 bp, Homo sapiens
agtgcagtggcaccatctcagctcac

SEQ ID NO: 22718 - DNA, 26 bp, Homo sapiens
gtgcagtggcaccatctcagctcact

SEQ ID NO: 22719 - DNA, 26 bp, Homo sapiens
tgcagtggcaccatctcagctcactg

SEQ ID NO: 22720 - DNA, 26 bp, Homo sapiens
gcagtggcaccatctcagctcactgc

SEQ ID NO: 22721 - DNA, 26 bp, Homo sapiens
cagtggcaccatctcagctcactgca

SEQ ID NO: 22722 - DNA, 26 bp, Homo sapiens
agtggcaccatctcagctcactgcaa

SEQ ID NO: 22723 - DNA, 26 bp, Homo sapiens
gtggcaccatctcagctcactgcaac

SEQ ID NO: 22724 - DNA, 26 bp, Homo sapiens
tggcaccatctcagctcactgcaacc

SEQ ID NO: 22725 - DNA, 26 bp, Homo sapiens
ggcaccatctcagctcactgcaacct

SEQ ID NO: 22726 - DNA, 26 bp, Homo sapiens
gcaccatctcagctcactgcaacctt

SEQ ID NO: 22727 - DNA, 26 bp, Homo sapiens
caccatctcagctcactgcaaccttc

SEQ ID NO: 22728 - DNA, 26 bp, Homo sapiens
accatctcagctcactgcaaccttcg

SEQ ID NO: 22729 - DNA, 26 bp, Homo sapiens
ccatctcagctcactgcaaccttcgc

SEQ ID NO: 22730 - DNA, 26 bp, Homo sapiens
catctcagctcactgcaaccttcgcc

SEQ ID NO: 22731 - DNA, 26 bp, Homo sapiens
atctcagctcactgcaaccttcgcct

SEQ ID NO: 22732 - DNA, 26 bp, Homo sapiens
tctcagctcactgcaaccttcgcctc

SEQ ID NO: 22733 - DNA, 26 bp, Homo sapiens
ctcagctcactgcaaccttcgcctcc

SEQ ID NO: 22734 - DNA, 26 bp, Homo sapiens
tcagctcactgcaaccttcgcctccc

SEQ ID NO: 22735 - DNA, 26 bp, Homo sapiens
cagctcactgcaaccttcgcctcccg

SEQ ID NO: 22736 - DNA, 26 bp, Homo sapiens
agctcactgcaaccttcgcctcccgg

SEQ ID NO: 22737 - DNA, 26 bp, Homo sapiens
gctcactgcaaccttcgcctcccggg

SEQ ID NO: 22738 - DNA, 26 bp, Homo sapiens
ctcactgcaaccttcgcctcccgggc

SEQ ID NO: 22739 - DNA, 26 bp, Homo sapiens
tcactgcaaccttcgcctcccgggct

SEQ ID NO: 22740 - DNA, 26 bp, Homo sapiens
cactgcaaccttcgcctcccgggctc

SEQ ID NO: 22741 - DNA, 26 bp, Homo sapiens
actgcaaccttcgcctcccgggctca

SEQ ID NO: 22742 - DNA, 26 bp, Homo sapiens
ctgcaaccttcgcctcccgggctcaa

SEQ ID NO: 22743 - DNA, 26 bp, Homo sapiens
tgcaaccttcgcctcccgggctcaag

SEQ ID NO: 22744 - DNA, 26 bp, Homo sapiens
gcaaccttcgcctcccgggctcaagc

SEQ ID NO: 22745 - DNA, 26 bp, Homo sapiens
caaccttcgcctcccgggctcaagca

SEQ ID NO: 22746 - DNA, 26 bp, Homo sapiens
aaccttcgcctcccgggctcaagcaa

SEQ ID NO: 22747 - DNA, 26 bp, Homo sapiens
accttcgcctcccgggctcaagcaat

SEQ ID NO: 22748 - DNA, 26 bp, Homo sapiens
ccttcgcctcccgggctcaagcaatt

SEQ ID NO: 22749 - DNA, 26 bp, Homo sapiens
cttcgcctcccgggctcaagcaattc

SEQ ID NO: 22750 - DNA, 26 bp, Homo sapiens
ttcgcctcccgggctcaagcaattct

SEQ ID NO: 22751 - DNA, 26 bp, Homo sapiens
tcgcctcccgggctcaagcaattctc

SEQ ID NO: 22752 - DNA, 26 bp, Homo sapiens
cgcctcccgggctcaagcaattctct

SEQ ID NO: 22753 - DNA, 26 bp, Homo sapiens
gcctcccgggctcaagcaattctctt

SEQ ID NO: 22754 - DNA, 26 bp, Homo sapiens
cctcccgggctcaagcaattctcttg

SEQ ID NO: 22755 - DNA, 26 bp, Homo sapiens
ctcccgggctcaagcaattctcttgc

SEQ ID NO: 22756 - DNA, 26 bp, Homo sapiens
tcccgggctcaagcaattctcttgcc

SEQ ID NO: 22757 - DNA, 26 bp, Homo sapiens
cccgggctcaagcaattctcttgcct

SEQ ID NO: 22758 - DNA, 26 bp, Homo sapiens
ccgggctcaagcaattctcttgcctc

SEQ ID NO: 22759 - DNA, 26 bp, Homo sapiens
cgggctcaagcaattctcttgcctca

SEQ ID NO: 22760 - DNA, 26 bp, Homo sapiens
gggctcaagcaattctcttgcctcag

SEQ ID NO: 22761 - DNA, 26 bp, Homo sapiens
ggctcaagcaattctcttgcctcagc

SEQ ID NO: 22762 - DNA, 26 bp, Homo sapiens
gctcaagcaattctcttgcctcagcc

SEQ ID NO: 22763 - DNA, 26 bp, Homo sapiens
ctcaagcaattctcttgcctcagcct

SEQ ID NO: 22764 - DNA, 26 bp, Homo sapiens
tcaagcaattctcttgcctcagcctc

SEQ ID NO: 22765 - DNA, 26 bp, Homo sapiens
caagcaattctcttgcctcagcctcc

SEQ ID NO: 22766 - DNA, 26 bp, Homo sapiens
aagcaattctcttgcctcagcctccc

SEQ ID NO: 22767 - DNA, 26 bp, Homo sapiens
agcaattctcttgcctcagcctccca

SEQ ID NO: 22768 - DNA, 26 bp, Homo sapiens
gcaattctcttgcctcagcctcccaa

SEQ ID NO: 22769 - DNA, 26 bp, Homo sapiens
caattctcttgcctcagcctcccaag

SEQ ID NO: 22770 - DNA, 26 bp, Homo sapiens
aattctcttgcctcagcctcccaagt

SEQ ID NO: 22771 - DNA, 26 bp, Homo sapiens
attctcttgcctcagcctcccaagta

SEQ ID NO: 22772 - DNA, 26 bp, Homo sapiens
ttctcttgcctcagcctcccaagtag

SEQ ID NO: 22773 - DNA, 26 bp, Homo sapiens
tctcttgcctcagcctcccaagtagc

SEQ ID NO: 22774 - DNA, 26 bp, Homo sapiens
ctcttgcctcagcctcccaagtagct

SEQ ID NO: 22775 - DNA, 26 bp, Homo sapiens
tcttgcctcagcctcccaagtagctg

SEQ ID NO: 22776 - DNA, 26 bp, Homo sapiens
cttgcctcagcctcccaagtagctgg

SEQ ID NO: 22777 - DNA, 26 bp, Homo sapiens
ttgcctcagcctcccaagtagctggg

SEQ ID NO: 22778 - DNA, 26 bp, Homo sapiens
tgcctcagcctcccaagtagctggga

SEQ ID NO: 22779 - DNA, 26 bp, Homo sapiens
gcctcagcctcccaagtagctgggac

SEQ ID NO: 22780 - DNA, 26 bp, Homo sapiens
cctcagcctcccaagtagctgggact

SEQ ID NO: 22781 - DNA, 26 bp, Homo sapiens
ctcagcctcccaagtagctgggacta

SEQ ID NO: 22782 - DNA, 26 bp, Homo sapiens
tcagcctcccaagtagctgggactac

SEQ ID NO: 22783 - DNA, 26 bp, Homo sapiens
cagcctcccaagtagctgggactaca

SEQ ID NO: 22784 - DNA, 26 bp, Homo sapiens
agcctcccaagtagctgggactacag

SEQ ID NO: 22785 - DNA, 26 bp, Homo sapiens
gcctcccaagtagctgggactacagg

SEQ ID NO: 22786 - DNA, 26 bp, Homo sapiens
cctcccaagtagctgggactacaggc

SEQ ID NO: 22787 - DNA, 26 bp, Homo sapiens
ctcccaagtagctgggactacaggca

SEQ ID NO: 22788 - DNA, 26 bp, Homo sapiens
tcccaagtagctgggactacaggcac

SEQ ID NO: 22789 - DNA, 26 bp, Homo sapiens
cccaagtagctgggactacaggcacg

SEQ ID NO: 22790 - DNA, 26 bp, Homo sapiens
ccaagtagctgggactacaggcacgc

SEQ ID NO: 22791 - DNA, 26 bp, Homo sapiens
caagtagctgggactacaggcacgca

SEQ ID NO: 22792 - DNA, 26 bp, Homo sapiens
aagtagctgggactacaggcacgcac

SEQ ID NO: 22793 - DNA, 26 bp, Homo sapiens
agtagctgggactacaggcacgcacc

SEQ ID NO: 22794 - DNA, 26 bp, Homo sapiens
gtagctgggactacaggcacgcacca

SEQ ID NO: 22795 - DNA, 26 bp, Homo sapiens
tagctgggactacaggcacgcaccac

SEQ ID NO: 22796 - DNA, 26 bp, Homo sapiens
agctgggactacaggcacgcaccacc

SEQ ID NO: 22797 - DNA, 26 bp, Homo sapiens
gctgggactacaggcacgcaccacca

SEQ ID NO: 22798 - DNA, 26 bp, Homo sapiens
ctgggactacaggcacgcaccaccat

SEQ ID NO: 22799 - DNA, 26 bp, Homo sapiens
tgggactacaggcacgcaccaccatg

SEQ ID NO: 22800 - DNA, 26 bp, Homo sapiens
gggactacaggcacgcaccaccatgc

SEQ ID NO: 22801 - DNA, 26 bp, Homo sapiens
ggactacaggcacgcaccaccatgcc

SEQ ID NO: 22802 - DNA, 26 bp, Homo sapiens
gactacaggcacgcaccaccatgccc

SEQ ID NO: 22803 - DNA, 26 bp, Homo sapiens
actacaggcacgcaccaccatgccct

SEQ ID NO: 22804 - DNA, 26 bp, Homo sapiens
ctacaggcacgcaccaccatgccctg

SEQ ID NO: 22805 - DNA, 26 bp, Homo sapiens
tacaggcacgcaccaccatgccctgc

SEQ ID NO: 22806 - DNA, 26 bp, Homo sapiens
acaggcacgcaccaccatgccctgct

SEQ ID NO: 22807 - DNA, 26 bp, Homo sapiens
caggcacgcaccaccatgccctgcta

SEQ ID NO: 22808 - DNA, 26 bp, Homo sapiens
aggcacgcaccaccatgccctgctaa

SEQ ID NO: 22809 - DNA, 26 bp, Homo sapiens
ggcacgcaccaccatgccctgctaat

SEQ ID NO: 22810 - DNA, 26 bp, Homo sapiens
gcacgcaccaccatgccctgctaatg

SEQ ID NO: 22811 - DNA, 26 bp, Homo sapiens
cacgcaccaccatgccctgctaatgt

SEQ ID NO: 22812 - DNA, 26 bp, Homo sapiens
acgcaccaccatgccctgctaatgtt

SEQ ID NO: 22813 - DNA, 26 bp, Homo sapiens
cgcaccaccatgccctgctaatgttt

SEQ ID NO: 22814 - DNA, 26 bp, Homo sapiens
gcaccaccatgccctgctaatgtttt

SEQ ID NO: 22815 - DNA, 26 bp, Homo sapiens
caccaccatgccctgctaatgttttt

SEQ ID NO: 22816 - DNA, 26 bp, Homo sapiens
accaccatgccctgctaatgtttttt

SEQ ID NO: 22817 - DNA, 26 bp, Homo sapiens
ccaccatgccctgctaatgttttttg

SEQ ID NO: 22818 - DNA, 26 bp, Homo sapiens
caccatgccctgctaatgttttttgt

SEQ ID NO: 22819 - DNA, 26 bp, Homo sapiens
accatgccctgctaatgttttttgta

SEQ ID NO: 22820 - DNA, 26 bp, Homo sapiens
ccatgccctgctaatgttttttgtat

SEQ ID NO: 22821 - DNA, 26 bp, Homo sapiens
catgccctgctaatgttttttgtatt

SEQ ID NO: 22822 - DNA, 26 bp, Homo sapiens
atgccctgctaatgttttttgtattt

SEQ ID NO: 22823 - DNA, 26 bp, Homo sapiens
tgccctgctaatgttttttgtatttt

SEQ ID NO: 22824 - DNA, 26 bp, Homo sapiens
gccctgctaatgttttttgtattttt

SEQ ID NO: 22825 - DNA, 26 bp, Homo sapiens
ccctgctaatgttttttgtattttta

SEQ ID NO: 22826 - DNA, 26 bp, Homo sapiens
cctgctaatgttttttgtatttttag

SEQ ID NO: 22827 - DNA, 26 bp, Homo sapiens
ctgctaatgttttttgtatttttagt

SEQ ID NO: 22828 - DNA, 26 bp, Homo sapiens
tgctaatgttttttgtatttttagta

SEQ ID NO: 22829 - DNA, 26 bp, Homo sapiens
gctaatgttttttgtatttttagtag

SEQ ID NO: 22830 - DNA, 26 bp, Homo sapiens
ctaatgttttttgtatttttagtaga

SEQ ID NO: 22831 - DNA, 26 bp, Homo sapiens
taatgttttttgtatttttagtagag

SEQ ID NO: 22832 - DNA, 26 bp, Homo sapiens
aatgttttttgtatttttagtagaga

SEQ ID NO: 22833 - DNA, 26 bp, Homo sapiens
atgttttttgtatttttagtagagac

SEQ ID NO: 22834 - DNA, 26 bp, Homo sapiens
tgttttttgtatttttagtagagacg

SEQ ID NO: 22835 - DNA, 26 bp, Homo sapiens
gttttttgtatttttagtagagacga

SEQ ID NO: 22836 - DNA, 26 bp, Homo sapiens
ttttttgtatttttagtagagacgag

SEQ ID NO: 22837 - DNA, 26 bp, Homo sapiens
tttttgtatttttagtagagacgagg

SEQ ID NO: 22838 - DNA, 26 bp, Homo sapiens
ttttgtatttttagtagagacgaggt

SEQ ID NO: 22839 - DNA, 26 bp, Homo sapiens
tttgtatttttagtagagacgaggtt

SEQ ID NO: 22840 - DNA, 26 bp, Homo sapiens
ttgtatttttagtagagacgaggttt

SEQ ID NO: 22841 - DNA, 26 bp, Homo sapiens
tgtatttttagtagagacgaggtttt

SEQ ID NO: 22842 - DNA, 26 bp, Homo sapiens
gtatttttagtagagacgaggttttg

SEQ ID NO: 22843 - DNA, 26 bp, Homo sapiens
tatttttagtagagacgaggttttgc

SEQ ID NO: 22844 - DNA, 26 bp, Homo sapiens
atttttagtagagacgaggttttgcc

SEQ ID NO: 22845 - DNA, 26 bp, Homo sapiens
tttttagtagagacgaggttttgcca

SEQ ID NO: 22846 - DNA, 26 bp, Homo sapiens
ttttagtagagacgaggttttgccat

SEQ ID NO: 22847 - DNA, 26 bp, Homo sapiens
tttagtagagacgaggttttgccatg

SEQ ID NO: 22848 - DNA, 26 bp, Homo sapiens
ttagtagagacgaggttttgccatgt

SEQ ID NO: 22849 - DNA, 26 bp, Homo sapiens
tagtagagacgaggttttgccatgtt

SEQ ID NO: 22850 - DNA, 26 bp, Homo sapiens
agtagagacgaggttttgccatgttg

SEQ ID NO: 22851 - DNA, 26 bp, Homo sapiens
gtagagacgaggttttgccatgttgg

SEQ ID NO: 22852 - DNA, 26 bp, Homo sapiens
tagagacgaggttttgccatgttggc

SEQ ID NO: 22853 - DNA, 26 bp, Homo sapiens
agagacgaggttttgccatgttggcc

SEQ ID NO: 22854 - DNA, 26 bp, Homo sapiens
gagacgaggttttgccatgttggcca

SEQ ID NO: 22855 - DNA, 26 bp, Homo sapiens
agacgaggttttgccatgttggccag

SEQ ID NO: 22856 - DNA, 26 bp, Homo sapiens
gacgaggttttgccatgttggccagg

SEQ ID NO: 22857 - DNA, 26 bp, Homo sapiens
acgaggttttgccatgttggccaggt

SEQ ID NO: 22858 - DNA, 26 bp, Homo sapiens
cgaggttttgccatgttggccaggtt

SEQ ID NO: 22859 - DNA, 26 bp, Homo sapiens
gaggttttgccatgttggccaggttg

SEQ ID NO: 22860 - DNA, 26 bp, Homo sapiens
aggttttgccatgttggccaggttgg

SEQ ID NO: 22861 - DNA, 26 bp, Homo sapiens
ggttttgccatgttggccaggttggt

SEQ ID NO: 22862 - DNA, 26 bp, Homo sapiens
gttttgccatgttggccaggttggtc

SEQ ID NO: 22863 - DNA, 26 bp, Homo sapiens
ttttgccatgttggccaggttggtct

SEQ ID NO: 22864 - DNA, 26 bp, Homo sapiens
tttgccatgttggccaggttggtctg

SEQ ID NO: 22865 - DNA, 26 bp, Homo sapiens
ttgccatgttggccaggttggtctga

SEQ ID NO: 22866 - DNA, 26 bp, Homo sapiens
tgccatgttggccaggttggtctgaa

SEQ ID NO: 22867 - DNA, 26 bp, Homo sapiens
gccatgttggccaggttggtctgaaa

SEQ ID NO: 22868 - DNA, 26 bp, Homo sapiens
ccatgttggccaggttggtctgaaac

SEQ ID NO: 22869 - DNA, 26 bp, Homo sapiens
catgttggccaggttggtctgaaact

SEQ ID NO: 22870 - DNA, 26 bp, Homo sapiens
atgttggccaggttggtctgaaactc

SEQ ID NO: 22871 - DNA, 26 bp, Homo sapiens
tgttggccaggttggtctgaaactcc

SEQ ID NO: 22872 - DNA, 26 bp, Homo sapiens
gttggccaggttggtctgaaactcct

SEQ ID NO: 22873 - DNA, 26 bp, Homo sapiens
ttggccaggttggtctgaaactcctg

SEQ ID NO: 22874 - DNA, 26 bp, Homo sapiens
tggccaggttggtctgaaactcctga

SEQ ID NO: 22875 - DNA, 26 bp, Homo sapiens
ggccaggttggtctgaaactcctgac

SEQ ID NO: 22876 - DNA, 26 bp, Homo sapiens
gccaggttggtctgaaactcctgacc

SEQ ID NO: 22877 - DNA, 26 bp, Homo sapiens
ccaggttggtctgaaactcctgacct

SEQ ID NO: 22878 - DNA, 26 bp, Homo sapiens
caggttggtctgaaactcctgacctc

SEQ ID NO: 22879 - DNA, 26 bp, Homo sapiens
aggttggtctgaaactcctgacctca

SEQ ID NO: 22880 - DNA, 26 bp, Homo sapiens
ggttggtctgaaactcctgacctcaa

SEQ ID NO: 22881 - DNA, 26 bp, Homo sapiens
gttggtctgaaactcctgacctcaag

SEQ ID NO: 22882 - DNA, 26 bp, Homo sapiens
ttggtctgaaactcctgacctcaagt

SEQ ID NO: 22883 - DNA, 26 bp, Homo sapiens
tggtctgaaactcctgacctcaagtg

SEQ ID NO: 22884 - DNA, 26 bp, Homo sapiens
ggtctgaaactcctgacctcaagtga

SEQ ID NO: 22885 - DNA, 26 bp, Homo sapiens
gtctgaaactcctgacctcaagtgat

SEQ ID NO: 22886 - DNA, 26 bp, Homo sapiens
tctgaaactcctgacctcaagtgatc

SEQ ID NO: 22887 - DNA, 26 bp, Homo sapiens
ctgaaactcctgacctcaagtgatcc

SEQ ID NO: 22888 - DNA, 26 bp, Homo sapiens
tgaaactcctgacctcaagtgatccg

SEQ ID NO: 22889 - DNA, 26 bp, Homo sapiens
gaaactcctgacctcaagtgatccgc

SEQ ID NO: 22890 - DNA, 26 bp, Homo sapiens
aaactcctgacctcaagtgatccgcc

SEQ ID NO: 22891 - DNA, 26 bp, Homo sapiens
aactcctgacctcaagtgatccgcct

SEQ ID NO: 22892 - DNA, 26 bp, Homo sapiens
actcctgacctcaagtgatccgcctg

SEQ ID NO: 22893 - DNA, 26 bp, Homo sapiens
ctcctgacctcaagtgatccgcctgc

SEQ ID NO: 22894 - DNA, 26 bp, Homo sapiens
tcctgacctcaagtgatccgcctgcc

SEQ ID NO: 22895 - DNA, 26 bp, Homo sapiens
cctgacctcaagtgatccgcctgcct

SEQ ID NO: 22896 - DNA, 26 bp, Homo sapiens
ctgacctcaagtgatccgcctgcctc

SEQ ID NO: 22897 - DNA, 26 bp, Homo sapiens
tgacctcaagtgatccgcctgcctca

SEQ ID NO: 22898 - DNA, 26 bp, Homo sapiens
gacctcaagtgatccgcctgcctcag

SEQ ID NO: 22899 - DNA, 26 bp, Homo sapiens
acctcaagtgatccgcctgcctcagc

SEQ ID NO: 22900 - DNA, 26 bp, Homo sapiens
cctcaagtgatccgcctgcctcagcc

SEQ ID NO: 22901 - DNA, 26 bp, Homo sapiens
ctcaagtgatccgcctgcctcagcct

SEQ ID NO: 22902 - DNA, 26 bp, Homo sapiens
tcaagtgatccgcctgcctcagcctt

SEQ ID NO: 22903 - DNA, 26 bp, Homo sapiens
caagtgatccgcctgcctcagccttc

SEQ ID NO: 22904 - DNA, 26 bp, Homo sapiens
aagtgatccgcctgcctcagccttcc

SEQ ID NO: 22905 - DNA, 26 bp, Homo sapiens
agtgatccgcctgcctcagccttcca

SEQ ID NO: 22906 - DNA, 26 bp, Homo sapiens
gtgatccgcctgcctcagccttccaa

SEQ ID NO: 22907 - DNA, 26 bp, Homo sapiens
tgatccgcctgcctcagccttccaaa

SEQ ID NO: 22908 - DNA, 26 bp, Homo sapiens
gatccgcctgcctcagccttccaaag

SEQ ID NO: 22909 - DNA, 26 bp, Homo sapiens
atccgcctgcctcagccttccaaagt

SEQ ID NO: 22910 - DNA, 26 bp, Homo sapiens
tccgcctgcctcagccttccaaagtg

SEQ ID NO: 22911 - DNA, 26 bp, Homo sapiens
ccgcctgcctcagccttccaaagtgc

SEQ ID NO: 22912 - DNA, 26 bp, Homo sapiens
cgcctgcctcagccttccaaagtgca

SEQ ID NO: 22913 - DNA, 26 bp, Homo sapiens
gcctgcctcagccttccaaagtgcag

SEQ ID NO: 22914 - DNA, 26 bp, Homo sapiens
cctgcctcagccttccaaagtgcagg

SEQ ID NO: 22915 - DNA, 26 bp, Homo sapiens
ctgcctcagccttccaaagtgcaggg

SEQ ID NO: 22916 - DNA, 26 bp, Homo sapiens
tgcctcagccttccaaagtgcagggg

SEQ ID NO: 22917 - DNA, 26 bp, Homo sapiens
gcctcagccttccaaagtgcaggggt

SEQ ID NO: 22918 - DNA, 26 bp, Homo sapiens
cctcagccttccaaagtgcaggggtt

SEQ ID NO: 22919 - DNA, 26 bp, Homo sapiens
ctcagccttccaaagtgcaggggtta

SEQ ID NO: 22920 - DNA, 26 bp, Homo sapiens
tcagccttccaaagtgcaggggttac

SEQ ID NO: 22921 - DNA, 26 bp, Homo sapiens
cagccttccaaagtgcaggggttaca

SEQ ID NO: 22922 - DNA, 26 bp, Homo sapiens
agccttccaaagtgcaggggttacag

SEQ ID NO: 22923 - DNA, 26 bp, Homo sapiens
gccttccaaagtgcaggggttacagg

SEQ ID NO: 22924 - DNA, 26 bp, Homo sapiens
ccttccaaagtgcaggggttacaggc

SEQ ID NO: 22925 - DNA, 26 bp, Homo sapiens
cttccaaagtgcaggggttacaggct

SEQ ID NO: 22926 - DNA, 26 bp, Homo sapiens
ttccaaagtgcaggggttacaggctt

SEQ ID NO: 22927 - DNA, 26 bp, Homo sapiens
tccaaagtgcaggggttacaggcttg

SEQ ID NO: 22928 - DNA, 26 bp, Homo sapiens
ccaaagtgcaggggttacaggcttga

SEQ ID NO: 22929 - DNA, 26 bp, Homo sapiens
caaagtgcaggggttacaggcttgag

SEQ ID NO: 22930 - DNA, 26 bp, Homo sapiens
aaagtgcaggggttacaggcttgagc

SEQ ID NO: 22931 - DNA, 26 bp, Homo sapiens
aagtgcaggggttacaggcttgagcc

SEQ ID NO: 22932 - DNA, 26 bp, Homo sapiens
agtgcaggggttacaggcttgagcca

SEQ ID NO: 22933 - DNA, 26 bp, Homo sapiens
gtgcaggggttacaggcttgagccac

SEQ ID NO: 22934 - DNA, 26 bp, Homo sapiens
tgcaggggttacaggcttgagccact

SEQ ID NO: 22935 - DNA, 26 bp, Homo sapiens
gcaggggttacaggcttgagccactg

SEQ ID NO: 22936 - DNA, 26 bp, Homo sapiens
caggggttacaggcttgagccactgc

SEQ ID NO: 22937 - DNA, 26 bp, Homo sapiens
aggggttacaggcttgagccactgca

SEQ ID NO: 22938 - DNA, 26 bp, Homo sapiens
ggggttacaggcttgagccactgcac

SEQ ID NO: 22939 - DNA, 26 bp, Homo sapiens
gggttacaggcttgagccactgcacc

SEQ ID NO: 22940 - DNA, 26 bp, Homo sapiens
ggttacaggcttgagccactgcacct

SEQ ID NO: 22941 - DNA, 26 bp, Homo sapiens
gttacaggcttgagccactgcacctg

SEQ ID NO: 22942 - DNA, 26 bp, Homo sapiens
ttacaggcttgagccactgcacctgg

SEQ ID NO: 22943 - DNA, 26 bp, Homo sapiens
tacaggcttgagccactgcacctggc

SEQ ID NO: 22944 - DNA, 26 bp, Homo sapiens
acaggcttgagccactgcacctggcc

SEQ ID NO: 22945 - DNA, 26 bp, Homo sapiens
caggcttgagccactgcacctggccc

SEQ ID NO: 22946 - DNA, 26 bp, Homo sapiens
aggcttgagccactgcacctggcccc

SEQ ID NO: 22947 - DNA, 26 bp, Homo sapiens
ggcttgagccactgcacctggccccc

SEQ ID NO: 22948 - DNA, 26 bp, Homo sapiens
gcttgagccactgcacctggccccct

SEQ ID NO: 22949 - DNA, 26 bp, Homo sapiens
cttgagccactgcacctggccccctt

SEQ ID NO: 22950 - DNA, 26 bp, Homo sapiens
ttgagccactgcacctggcccccttc

SEQ ID NO: 22951 - DNA, 26 bp, Homo sapiens
tgagccactgcacctggcccccttcg

SEQ ID NO: 22952 - DNA, 26 bp, Homo sapiens
gagccactgcacctggcccccttcgt

SEQ ID NO: 22953 - DNA, 26 bp, Homo sapiens
agccactgcacctggcccccttcgtt

SEQ ID NO: 22954 - DNA, 26 bp, Homo sapiens
gccactgcacctggcccccttcgttt

SEQ ID NO: 22955 - DNA, 26 bp, Homo sapiens
ccactgcacctggcccccttcgtttc

SEQ ID NO: 22956 - DNA, 26 bp, Homo sapiens
cactgcacctggcccccttcgtttca

SEQ ID NO: 22957 - DNA, 26 bp, Homo sapiens
actgcacctggcccccttcgtttcaa

SEQ ID NO: 22958 - DNA, 26 bp, Homo sapiens
ctgcacctggcccccttcgtttcaag

SEQ ID NO: 22959 - DNA, 26 bp, Homo sapiens
tgcacctggcccccttcgtttcaagc

SEQ ID NO: 22960 - DNA, 26 bp, Homo sapiens
gcacctggcccccttcgtttcaagca

SEQ ID NO: 22961 - DNA, 26 bp, Homo sapiens
cacctggcccccttcgtttcaagcag

SEQ ID NO: 22962 - DNA, 26 bp, Homo sapiens
acctggcccccttcgtttcaagcagg

SEQ ID NO: 22963 - DNA, 26 bp, Homo sapiens
cctggcccccttcgtttcaagcagga

SEQ ID NO: 22964 - DNA, 26 bp, Homo sapiens
ctggcccccttcgtttcaagcaggaa

SEQ ID NO: 22965 - DNA, 26 bp, Homo sapiens
tggcccccttcgtttcaagcaggaaa

SEQ ID NO: 22966 - DNA, 26 bp, Homo sapiens
ggcccccttcgtttcaagcaggaaag

SEQ ID NO: 22967 - DNA, 26 bp, Homo sapiens
gcccccttcgtttcaagcaggaaagc

SEQ ID NO: 22968 - DNA, 26 bp, Homo sapiens
cccccttcgtttcaagcaggaaagcc

SEQ ID NO: 22969 - DNA, 26 bp, Homo sapiens
ccccttcgtttcaagcaggaaagcca

SEQ ID NO: 22970 - DNA, 26 bp, Homo sapiens
cccttcgtttcaagcaggaaagccat

SEQ ID NO: 22971 - DNA, 26 bp, Homo sapiens
ccttcgtttcaagcaggaaagccatc

SEQ ID NO: 22972 - DNA, 26 bp, Homo sapiens
cttcgtttcaagcaggaaagccatca

SEQ ID NO: 22973 - DNA, 26 bp, Homo sapiens
ttcgtttcaagcaggaaagccatcat

SEQ ID NO: 22974 - DNA, 26 bp, Homo sapiens
tcgtttcaagcaggaaagccatcatt

SEQ ID NO: 22975 - DNA, 26 bp, Homo sapiens
cgtttcaagcaggaaagccatcattt

SEQ ID NO: 22976 - DNA, 26 bp, Homo sapiens
gtttcaagcaggaaagccatcatttc

SEQ ID NO: 22977 - DNA, 26 bp, Homo sapiens
tttcaagcaggaaagccatcatttcc

SEQ ID NO: 22978 - DNA, 26 bp, Homo sapiens
ttcaagcaggaaagccatcatttcca

SEQ ID NO: 22979 - DNA, 26 bp, Homo sapiens
tcaagcaggaaagccatcatttccag

SEQ ID NO: 22980 - DNA, 26 bp, Homo sapiens
caagcaggaaagccatcatttccagt

SEQ ID NO: 22981 - DNA, 26 bp, Homo sapiens
aagcaggaaagccatcatttccagtg

SEQ ID NO: 22982 - DNA, 26 bp, Homo sapiens
agcaggaaagccatcatttccagtgg

SEQ ID NO: 22983 - DNA, 26 bp, Homo sapiens
gcaggaaagccatcatttccagtggt

SEQ ID NO: 22984 - DNA, 26 bp, Homo sapiens
caggaaagccatcatttccagtggtt

SEQ ID NO: 22985 - DNA, 26 bp, Homo sapiens
aggaaagccatcatttccagtggttg

SEQ ID NO: 22986 - DNA, 26 bp, Homo sapiens
ggaaagccatcatttccagtggttgt

SEQ ID NO: 22987 - DNA, 26 bp, Homo sapiens
gaaagccatcatttccagtggttgtt

SEQ ID NO: 22988 - DNA, 26 bp, Homo sapiens
aaagccatcatttccagtggttgttt

SEQ ID NO: 22989 - DNA, 26 bp, Homo sapiens
aagccatcatttccagtggttgtttg

SEQ ID NO: 22990 - DNA, 26 bp, Homo sapiens
agccatcatttccagtggttgtttgt

SEQ ID NO: 22991 - DNA, 26 bp, Homo sapiens
gccatcatttccagtggttgtttgtc

SEQ ID NO: 22992 - DNA, 26 bp, Homo sapiens
ccatcatttccagtggttgtttgtct

SEQ ID NO: 22993 - DNA, 26 bp, Homo sapiens
catcatttccagtggttgtttgtctt

SEQ ID NO: 22994 - DNA, 26 bp, Homo sapiens
atcatttccagtggttgtttgtcttt

SEQ ID NO: 22995 - DNA, 26 bp, Homo sapiens
tcatttccagtggttgtttgtctttg

SEQ ID NO: 22996 - DNA, 26 bp, Homo sapiens
catttccagtggttgtttgtctttgg

SEQ ID NO: 22997 - DNA, 26 bp, Homo sapiens
atttccagtggttgtttgtctttggg

SEQ ID NO: 22998 - DNA, 26 bp, Homo sapiens
tttccagtggttgtttgtctttgggc

SEQ ID NO: 22999 - DNA, 26 bp, Homo sapiens
ttccagtggttgtttgtctttgggca

SEQ ID NO: 23000 - DNA, 26 bp, Homo sapiens
tccagtggttgtttgtctttgggcag

SEQ ID NO: 23001 - DNA, 26 bp, Homo sapiens
ccagtggttgtttgtctttgggcagt

SEQ ID NO: 23002 - DNA, 26 bp, Homo sapiens
cagtggttgtttgtctttgggcagtg

SEQ ID NO: 23003 - DNA, 26 bp, Homo sapiens
agtggttgtttgtctttgggcagtga

SEQ ID NO: 23004 - DNA, 26 bp, Homo sapiens
gtggttgtttgtctttgggcagtgac

SEQ ID NO: 23005 - DNA, 26 bp, Homo sapiens
tggttgtttgtctttgggcagtgaca

SEQ ID NO: 23006 - DNA, 26 bp, Homo sapiens
ggttgtttgtctttgggcagtgacaa

SEQ ID NO: 23007 - DNA, 26 bp, Homo sapiens
gttgtttgtctttgggcagtgacaat

SEQ ID NO: 23008 - DNA, 26 bp, Homo sapiens
ttgtttgtctttgggcagtgacaatg

SEQ ID NO: 23009 - DNA, 26 bp, Homo sapiens
tgtttgtctttgggcagtgacaatgc

SEQ ID NO: 23010 - DNA, 26 bp, Homo sapiens
gtttgtctttgggcagtgacaatgcg

SEQ ID NO: 23011 - DNA, 26 bp, Homo sapiens
tttgtctttgggcagtgacaatgcgg

SEQ ID NO: 23012 - DNA, 26 bp, Homo sapiens
ttgtctttgggcagtgacaatgcggc

SEQ ID NO: 23013 - DNA, 26 bp, Homo sapiens
tgtctttgggcagtgacaatgcggca

SEQ ID NO: 23014 - DNA, 26 bp, Homo sapiens
gtctttgggcagtgacaatgcggcaa

SEQ ID NO: 23015 - DNA, 26 bp, Homo sapiens
tctttgggcagtgacaatgcggcaaa

SEQ ID NO: 23016 - DNA, 26 bp, Homo sapiens
ctttgggcagtgacaatgcggcaaag

SEQ ID NO: 23017 - DNA, 26 bp, Homo sapiens
tttgggcagtgacaatgcggcaaagc

SEQ ID NO: 23018 - DNA, 26 bp, Homo sapiens
ttgggcagtgacaatgcggcaaagcc

SEQ ID NO: 23019 - DNA, 26 bp, Homo sapiens
tgggcagtgacaatgcggcaaagcct

SEQ ID NO: 23020 - DNA, 26 bp, Homo sapiens
gggcagtgacaatgcggcaaagcctt

SEQ ID NO: 23021 - DNA, 26 bp, Homo sapiens
ggcagtgacaatgcggcaaagccttt

SEQ ID NO: 23022 - DNA, 26 bp, Homo sapiens
gcagtgacaatgcggcaaagcctttg

SEQ ID NO: 23023 - DNA, 26 bp, Homo sapiens
cagtgacaatgcggcaaagcctttgg

SEQ ID NO: 23024 - DNA, 26 bp, Homo sapiens
agtgacaatgcggcaaagcctttgga

SEQ ID NO: 23025 - DNA, 26 bp, Homo sapiens
gtgacaatgcggcaaagcctttggaa

SEQ ID NO: 23026 - DNA, 26 bp, Homo sapiens
tgacaatgcggcaaagcctttggaaa

SEQ ID NO: 23027 - DNA, 26 bp, Homo sapiens
gacaatgcggcaaagcctttggaaat

SEQ ID NO: 23028 - DNA, 26 bp, Homo sapiens
acaatgcggcaaagcctttggaaatg

SEQ ID NO: 23029 - DNA, 26 bp, Homo sapiens
caatgcggcaaagcctttggaaatgt

SEQ ID NO: 23030 - DNA, 26 bp, Homo sapiens
aatgcggcaaagcctttggaaatgtc

SEQ ID NO: 23031 - DNA, 26 bp, Homo sapiens
atgcggcaaagcctttggaaatgtca

SEQ ID NO: 23032 - DNA, 26 bp, Homo sapiens
tgcggcaaagcctttggaaatgtcaa

SEQ ID NO: 23033 - DNA, 26 bp, Homo sapiens
gcggcaaagcctttggaaatgtcaaa

SEQ ID NO: 23034 - DNA, 26 bp, Homo sapiens
cggcaaagcctttggaaatgtcaaat

SEQ ID NO: 23035 - DNA, 26 bp, Homo sapiens
ggcaaagcctttggaaatgtcaaata

SEQ ID NO: 23036 - DNA, 26 bp, Homo sapiens
gcaaagcctttggaaatgtcaaatag

SEQ ID NO: 23037 - DNA, 26 bp, Homo sapiens
caaagcctttggaaatgtcaaatagt

SEQ ID NO: 23038 - DNA, 26 bp, Homo sapiens
aaagcctttggaaatgtcaaatagtg

SEQ ID NO: 23039 - DNA, 26 bp, Homo sapiens
aagcctttggaaatgtcaaatagtga

SEQ ID NO: 23040 - DNA, 26 bp, Homo sapiens
agcctttggaaatgtcaaatagtgac

SEQ ID NO: 23041 - DNA, 26 bp, Homo sapiens
gcctttggaaatgtcaaatagtgact

SEQ ID NO: 23042 - DNA, 26 bp, Homo sapiens
cctttggaaatgtcaaatagtgactg

SEQ ID NO: 23043 - DNA, 26 bp, Homo sapiens
ctttggaaatgtcaaatagtgactgc

SEQ ID NO: 23044 - DNA, 26 bp, Homo sapiens
tttggaaatgtcaaatagtgactgca

SEQ ID NO: 23045 - DNA, 26 bp, Homo sapiens
ttggaaatgtcaaatagtgactgcat

SEQ ID NO: 23046 - DNA, 26 bp, Homo sapiens
tggaaatgtcaaatagtgactgcatt

SEQ ID NO: 23047 - DNA, 26 bp, Homo sapiens
ggaaatgtcaaatagtgactgcattg

SEQ ID NO: 23048 - DNA, 26 bp, Homo sapiens
gaaatgtcaaatagtgactgcattga

SEQ ID NO: 23049 - DNA, 26 bp, Homo sapiens
aaatgtcaaatagtgactgcattgaa

SEQ ID NO: 23050 - DNA, 26 bp, Homo sapiens
aatgtcaaatagtgactgcattgaaa

SEQ ID NO: 23051 - DNA, 26 bp, Homo sapiens
atgtcaaatagtgactgcattgaaag

SEQ ID NO: 23052 - DNA, 26 bp, Homo sapiens
tgtcaaatagtgactgcattgaaagc

SEQ ID NO: 23053 - DNA, 26 bp, Homo sapiens
gtcaaatagtgactgcattgaaagct

SEQ ID NO: 23054 - DNA, 26 bp, Homo sapiens
tcaaatagtgactgcattgaaagcta

SEQ ID NO: 23055 - DNA, 26 bp, Homo sapiens
caaatagtgactgcattgaaagctaa

SEQ ID NO: 23056 - DNA, 26 bp, Homo sapiens
aaatagtgactgcattgaaagctaat

SEQ ID NO: 23057 - DNA, 26 bp, Homo sapiens
aatagtgactgcattgaaagctaata

SEQ ID NO: 23058 - DNA, 26 bp, Homo sapiens
atagtgactgcattgaaagctaatat

SEQ ID NO: 23059 - DNA, 26 bp, Homo sapiens
tagtgactgcattgaaagctaatatt

SEQ ID NO: 23060 - DNA, 26 bp, Homo sapiens
agtgactgcattgaaagctaatattc

SEQ ID NO: 23061 - DNA, 26 bp, Homo sapiens
gtgactgcattgaaagctaatattca

SEQ ID NO: 23062 - DNA, 26 bp, Homo sapiens
tgactgcattgaaagctaatattcag

SEQ ID NO: 23063 - DNA, 26 bp, Homo sapiens
gactgcattgaaagctaatattcagg

SEQ ID NO: 23064 - DNA, 26 bp, Homo sapiens
actgcattgaaagctaatattcagga

SEQ ID NO: 23065 - DNA, 26 bp, Homo sapiens
ctgcattgaaagctaatattcaggat

SEQ ID NO: 23066 - DNA, 26 bp, Homo sapiens
tgcattgaaagctaatattcaggata

SEQ ID NO: 23067 - DNA, 26 bp, Homo sapiens
gcattgaaagctaatattcaggataa

SEQ ID NO: 23068 - DNA, 26 bp, Homo sapiens
cattgaaagctaatattcaggataat

SEQ ID NO: 23069 - DNA, 26 bp, Homo sapiens
attgaaagctaatattcaggataatg

SEQ ID NO: 23070 - DNA, 26 bp, Homo sapiens
ttgaaagctaatattcaggataatgg

SEQ ID NO: 23071 - DNA, 26 bp, Homo sapiens
tgaaagctaatattcaggataatggg

SEQ ID NO: 23072 - DNA, 26 bp, Homo sapiens
gaaagctaatattcaggataatgggg

SEQ ID NO: 23073 - DNA, 26 bp, Homo sapiens
aaagctaatattcaggataatgggga

SEQ ID NO: 23074 - DNA, 26 bp, Homo sapiens
aagctaatattcaggataatggggag

SEQ ID NO: 23075 - DNA, 26 bp, Homo sapiens
agctaatattcaggataatggggagt

SEQ ID NO: 23076 - DNA, 26 bp, Homo sapiens
gctaatattcaggataatggggagta

SEQ ID NO: 23077 - DNA, 26 bp, Homo sapiens
ctaatattcaggataatggggagtaa

SEQ ID NO: 23078 - DNA, 26 bp, Homo sapiens
taatattcaggataatggggagtaaa

SEQ ID NO: 23079 - DNA, 26 bp, Homo sapiens
aatattcaggataatggggagtaaaa

SEQ ID NO: 23080 - DNA, 26 bp, Homo sapiens
atattcaggataatggggagtaaaag

SEQ ID NO: 23081 - DNA, 26 bp, Homo sapiens
tattcaggataatggggagtaaaaga

SEQ ID NO: 23082 - DNA, 26 bp, Homo sapiens
attcaggataatggggagtaaaagaa

SEQ ID NO: 23083 - DNA, 26 bp, Homo sapiens
ttcaggataatggggagtaaaagaaa

SEQ ID NO: 23084 - DNA, 26 bp, Homo sapiens
tcaggataatggggagtaaaagaaat

SEQ ID NO: 23085 - DNA, 26 bp, Homo sapiens
caggataatggggagtaaaagaaatt

SEQ ID NO: 23086 - DNA, 26 bp, Homo sapiens
aggataatggggagtaaaagaaattg

SEQ ID NO: 23087 - DNA, 26 bp, Homo sapiens
ggataatggggagtaaaagaaattgg

SEQ ID NO: 23088 - DNA, 26 bp, Homo sapiens
gataatggggagtaaaagaaattggg

SEQ ID NO: 23089 - DNA, 26 bp, Homo sapiens
ataatggggagtaaaagaaattgggg

SEQ ID NO: 23090 - DNA, 26 bp, Homo sapiens
taatggggagtaaaagaaattggggt

SEQ ID NO: 23091 - DNA, 26 bp, Homo sapiens
aatggggagtaaaagaaattggggtc

SEQ ID NO: 23092 - DNA, 26 bp, Homo sapiens
atggggagtaaaagaaattggggtca

SEQ ID NO: 23093 - DNA, 26 bp, Homo sapiens
tggggagtaaaagaaattggggtcag

SEQ ID NO: 23094 - DNA, 26 bp, Homo sapiens
ggggagtaaaagaaattggggtcagc

SEQ ID NO: 23095 - DNA, 26 bp, Homo sapiens
gggagtaaaagaaattggggtcagcc

SEQ ID NO: 23096 - DNA, 26 bp, Homo sapiens
ggagtaaaagaaattggggtcagcca

SEQ ID NO: 23097 - DNA, 26 bp, Homo sapiens
gagtaaaagaaattggggtcagccaa

SEQ ID NO: 23098 - DNA, 26 bp, Homo sapiens
agtaaaagaaattggggtcagccaag

SEQ ID NO: 23099 - DNA, 26 bp, Homo sapiens
gtaaaagaaattggggtcagccaagg

SEQ ID NO: 23100 - DNA, 26 bp, Homo sapiens
taaaagaaattggggtcagccaaggg

SEQ ID NO: 23101 - DNA, 26 bp, Homo sapiens
aaaagaaattggggtcagccaaggga

SEQ ID NO: 23102 - DNA, 26 bp, Homo sapiens
aaagaaattggggtcagccaagggaa

SEQ ID NO: 23103 - DNA, 26 bp, Homo sapiens
aagaaattggggtcagccaagggaag

SEQ ID NO: 23104 - DNA, 26 bp, Homo sapiens
agaaattggggtcagccaagggaaga

SEQ ID NO: 23105 - DNA, 26 bp, Homo sapiens
gaaattggggtcagccaagggaagaa

SEQ ID NO: 23106 - DNA, 26 bp, Homo sapiens
aaattggggtcagccaagggaagaat

SEQ ID NO: 23107 - DNA, 26 bp, Homo sapiens
aattggggtcagccaagggaagaatt

SEQ ID NO: 23108 - DNA, 26 bp, Homo sapiens
attggggtcagccaagggaagaattt

SEQ ID NO: 23109 - DNA, 26 bp, Homo sapiens
ttggggtcagccaagggaagaatttt

SEQ ID NO: 23110 - DNA, 26 bp, Homo sapiens
tggggtcagccaagggaagaattttc

SEQ ID NO: 23111 - DNA, 26 bp, Homo sapiens
ggggtcagccaagggaagaattttcc

SEQ ID NO: 23112 - DNA, 26 bp, Homo sapiens
gggtcagccaagggaagaattttcca

SEQ ID NO: 23113 - DNA, 26 bp, Homo sapiens
ggtcagccaagggaagaattttccag

SEQ ID NO: 23114 - DNA, 26 bp, Homo sapiens
gtcagccaagggaagaattttccaga

SEQ ID NO: 23115 - DNA, 26 bp, Homo sapiens
tcagccaagggaagaattttccagat

SEQ ID NO: 23116 - DNA, 26 bp, Homo sapiens
cagccaagggaagaattttccagatc

SEQ ID NO: 23117 - DNA, 26 bp, Homo sapiens
agccaagggaagaattttccagatcc

SEQ ID NO: 23118 - DNA, 26 bp, Homo sapiens
gccaagggaagaattttccagatccc

SEQ ID NO: 23119 - DNA, 26 bp, Homo sapiens
ccaagggaagaattttccagatccca

SEQ ID NO: 23120 - DNA, 26 bp, Homo sapiens
caagggaagaattttccagatcccag

SEQ ID NO: 23121 - DNA, 26 bp, Homo sapiens
aagggaagaattttccagatcccaga

SEQ ID NO: 23122 - DNA, 26 bp, Homo sapiens
agggaagaattttccagatcccagag

SEQ ID NO: 23123 - DNA, 26 bp, Homo sapiens
gggaagaattttccagatcccagaga

SEQ ID NO: 23124 - DNA, 26 bp, Homo sapiens
ggaagaattttccagatcccagagaa

SEQ ID NO: 23125 - DNA, 26 bp, Homo sapiens
gaagaattttccagatcccagagaaa

SEQ ID NO: 23126 - DNA, 26 bp, Homo sapiens
aagaattttccagatcccagagaaat

SEQ ID NO: 23127 - DNA, 26 bp, Homo sapiens
agaattttccagatcccagagaaatg

SEQ ID NO: 23128 - DNA, 26 bp, Homo sapiens
gaattttccagatcccagagaaatgg

SEQ ID NO: 23129 - DNA, 26 bp, Homo sapiens
aattttccagatcccagagaaatggg

SEQ ID NO: 23130 - DNA, 26 bp, Homo sapiens
attttccagatcccagagaaatgggc

SEQ ID NO: 23131 - DNA, 26 bp, Homo sapiens
ttttccagatcccagagaaatgggca

SEQ ID NO: 23132 - DNA, 26 bp, Homo sapiens
tttccagatcccagagaaatgggcat

SEQ ID NO: 23133 - DNA, 26 bp, Homo sapiens
ttccagatcccagagaaatgggcata

SEQ ID NO: 23134 - DNA, 26 bp, Homo sapiens
tccagatcccagagaaatgggcatag

SEQ ID NO: 23135 - DNA, 26 bp, Homo sapiens
ccagatcccagagaaatgggcataga

SEQ ID NO: 23136 - DNA, 26 bp, Homo sapiens
cagatcccagagaaatgggcatagat

SEQ ID NO: 23137 - DNA, 26 bp, Homo sapiens
agatcccagagaaatgggcatagatg

SEQ ID NO: 23138 - DNA, 26 bp, Homo sapiens
gatcccagagaaatgggcatagatgc

SEQ ID NO: 23139 - DNA, 26 bp, Homo sapiens
atcccagagaaatgggcatagatgcc

SEQ ID NO: 23140 - DNA, 26 bp, Homo sapiens
tcccagagaaatgggcatagatgcct

SEQ ID NO: 23141 - DNA, 26 bp, Homo sapiens
cccagagaaatgggcatagatgccta

SEQ ID NO: 23142 - DNA, 26 bp, Homo sapiens
ccagagaaatgggcatagatgcctat

SEQ ID NO: 23143 - DNA, 26 bp, Homo sapiens
cagagaaatgggcatagatgcctatc

SEQ ID NO: 23144 - DNA, 26 bp, Homo sapiens
agagaaatgggcatagatgcctatct

SEQ ID NO: 23145 - DNA, 26 bp, Homo sapiens
gagaaatgggcatagatgcctatctg

SEQ ID NO: 23146 - DNA, 26 bp, Homo sapiens
agaaatgggcatagatgcctatctgt

SEQ ID NO: 23147 - DNA, 26 bp, Homo sapiens
gaaatgggcatagatgcctatctgtg

SEQ ID NO: 23148 - DNA, 26 bp, Homo sapiens
aaatgggcatagatgcctatctgtga

SEQ ID NO: 23149 - DNA, 26 bp, Homo sapiens
aatgggcatagatgcctatctgtgat

SEQ ID NO: 23150 - DNA, 26 bp, Homo sapiens
atgggcatagatgcctatctgtgatg

SEQ ID NO: 23151 - DNA, 26 bp, Homo sapiens
tgggcatagatgcctatctgtgatga

SEQ ID NO: 23152 - DNA, 26 bp, Homo sapiens
gggcatagatgcctatctgtgatgaa

SEQ ID NO: 23153 - DNA, 26 bp, Homo sapiens
ggcatagatgcctatctgtgatgaat

SEQ ID NO: 23154 - DNA, 26 bp, Homo sapiens
gcatagatgcctatctgtgatgaatc

SEQ ID NO: 23155 - DNA, 26 bp, Homo sapiens
catagatgcctatctgtgatgaatct

SEQ ID NO: 23156 - DNA, 26 bp, Homo sapiens
atagatgcctatctgtgatgaatctg

SEQ ID NO: 23157 - DNA, 26 bp, Homo sapiens
tagatgcctatctgtgatgaatctgt

SEQ ID NO: 23158 - DNA, 26 bp, Homo sapiens
agatgcctatctgtgatgaatctgtt

SEQ ID NO: 23159 - DNA, 26 bp, Homo sapiens
gatgcctatctgtgatgaatctgttt

SEQ ID NO: 23160 - DNA, 26 bp, Homo sapiens
atgcctatctgtgatgaatctgtttg

SEQ ID NO: 23161 - DNA, 26 bp, Homo sapiens
tgcctatctgtgatgaatctgtttgg

SEQ ID NO: 23162 - DNA, 26 bp, Homo sapiens
gcctatctgtgatgaatctgtttggc

SEQ ID NO: 23163 - DNA, 26 bp, Homo sapiens
cctatctgtgatgaatctgtttggcc

SEQ ID NO: 23164 - DNA, 26 bp, Homo sapiens
ctatctgtgatgaatctgtttggcca

SEQ ID NO: 23165 - DNA, 26 bp, Homo sapiens
tatctgtgatgaatctgtttggccac

SEQ ID NO: 23166 - DNA, 26 bp, Homo sapiens
atctgtgatgaatctgtttggccaca

SEQ ID NO: 23167 - DNA, 26 bp, Homo sapiens
tctgtgatgaatctgtttggccacag

SEQ ID NO: 23168 - DNA, 26 bp, Homo sapiens
ctgtgatgaatctgtttggccacagg

SEQ ID NO: 23169 - DNA, 26 bp, Homo sapiens
tgtgatgaatctgtttggccacaggg

SEQ ID NO: 23170 - DNA, 26 bp, Homo sapiens
gtgatgaatctgtttggccacagggt

SEQ ID NO: 23171 - DNA, 26 bp, Homo sapiens
tgatgaatctgtttggccacagggtg

SEQ ID NO: 23172 - DNA, 26 bp, Homo sapiens
gatgaatctgtttggccacagggtgg

SEQ ID NO: 23173 - DNA, 26 bp, Homo sapiens
atgaatctgtttggccacagggtggt

SEQ ID NO: 23174 - DNA, 26 bp, Homo sapiens
tgaatctgtttggccacagggtggta

SEQ ID NO: 23175 - DNA, 26 bp, Homo sapiens
gaatctgtttggccacagggtggtat

SEQ ID NO: 23176 - DNA, 26 bp, Homo sapiens
aatctgtttggccacagggtggtata

SEQ ID NO: 23177 - DNA, 26 bp, Homo sapiens
atctgtttggccacagggtggtataa

SEQ ID NO: 23178 - DNA, 26 bp, Homo sapiens
tctgtttggccacagggtggtataat

SEQ ID NO: 23179 - DNA, 26 bp, Homo sapiens
ctgtttggccacagggtggtataatc

SEQ ID NO: 23180 - DNA, 26 bp, Homo sapiens
tgtttggccacagggtggtataatct

SEQ ID NO: 23181 - DNA, 26 bp, Homo sapiens
gtttggccacagggtggtataatctt

SEQ ID NO: 23182 - DNA, 26 bp, Homo sapiens
tttggccacagggtggtataatcttc

SEQ ID NO: 23183 - DNA, 26 bp, Homo sapiens
ttggccacagggtggtataatcttcc

SEQ ID NO: 23184 - DNA, 26 bp, Homo sapiens
tggccacagggtggtataatcttcct

SEQ ID NO: 23185 - DNA, 26 bp, Homo sapiens
ggccacagggtggtataatcttccta

SEQ ID NO: 23186 - DNA, 26 bp, Homo sapiens
gccacagggtggtataatcttcctag

SEQ ID NO: 23187 - DNA, 26 bp, Homo sapiens
ccacagggtggtataatcttcctagc

SEQ ID NO: 23188 - DNA, 26 bp, Homo sapiens
cacagggtggtataatcttcctagca

SEQ ID NO: 23189 - DNA, 26 bp, Homo sapiens
acagggtggtataatcttcctagcag

SEQ ID NO: 23190 - DNA, 26 bp, Homo sapiens
cagggtggtataatcttcctagcaga

SEQ ID NO: 23191 - DNA, 26 bp, Homo sapiens
agggtggtataatcttcctagcagaa

SEQ ID NO: 23192 - DNA, 26 bp, Homo sapiens
gggtggtataatcttcctagcagaaa

SEQ ID NO: 23193 - DNA, 26 bp, Homo sapiens
ggtggtataatcttcctagcagaaaa

SEQ ID NO: 23194 - DNA, 26 bp, Homo sapiens
gtggtataatcttcctagcagaaaag

SEQ ID NO: 23195 - DNA, 26 bp, Homo sapiens
tggtataatcttcctagcagaaaagt

SEQ ID NO: 23196 - DNA, 26 bp, Homo sapiens
ggtataatcttcctagcagaaaagtt

SEQ ID NO: 23197 - DNA, 26 bp, Homo sapiens
gtataatcttcctagcagaaaagttc

SEQ ID NO: 23198 - DNA, 26 bp, Homo sapiens
tataatcttcctagcagaaaagttct

SEQ ID NO: 23199 - DNA, 26 bp, Homo sapiens
ataatcttcctagcagaaaagttctt

SEQ ID NO: 23200 - DNA, 26 bp, Homo sapiens
taatcttcctagcagaaaagttcttt

SEQ ID NO: 23201 - DNA, 26 bp, Homo sapiens
aatcttcctagcagaaaagttctttt

SEQ ID NO: 23202 - DNA, 26 bp, Homo sapiens
atcttcctagcagaaaagttcttttt

SEQ ID NO: 23203 - DNA, 26 bp, Homo sapiens
tcttcctagcagaaaagttctttttt

SEQ ID NO: 23204 - DNA, 26 bp, Homo sapiens
cttcctagcagaaaagttcttttttt

SEQ ID NO: 23205 - DNA, 26 bp, Homo sapiens
ttcctagcagaaaagttctttttttt

SEQ ID NO: 23206 - DNA, 26 bp, Homo sapiens
tcctagcagaaaagttcttttttttt

SEQ ID NO: 23207 - DNA, 26 bp, Homo sapiens
cctagcagaaaagttctttttttttt

SEQ ID NO: 23208 - DNA, 26 bp, Homo sapiens
ctagcagaaaagttcttttttttttt

SEQ ID NO: 23209 - DNA, 26 bp, Homo sapiens
tagcagaaaagttctttttttttttt

SEQ ID NO: 23210 - DNA, 26 bp, Homo sapiens
agcagaaaagttcttttttttttttc

SEQ ID NO: 23211 - DNA, 26 bp, Homo sapiens
gcagaaaagttcttttttttttttca

SEQ ID NO: 23212 - DNA, 26 bp, Homo sapiens
cagaaaagttcttttttttttttcat

SEQ ID NO: 23213 - DNA, 26 bp, Homo sapiens
agaaaagttcttttttttttttcatt

SEQ ID NO: 23214 - DNA, 26 bp, Homo sapiens
gaaaagttcttttttttttttcattg

SEQ ID NO: 23215 - DNA, 26 bp, Homo sapiens
aaaagttcttttttttttttcattgc

SEQ ID NO: 23216 - DNA, 26 bp, Homo sapiens
aaagttcttttttttttttcattgca

SEQ ID NO: 23217 - DNA, 26 bp, Homo sapiens
aagttcttttttttttttcattgcaa

SEQ ID NO: 23218 - DNA, 26 bp, Homo sapiens
agttcttttttttttttcattgcaag

SEQ ID NO: 23219 - DNA, 26 bp, Homo sapiens
gttcttttttttttttcattgcaagg

SEQ ID NO: 23220 - DNA, 26 bp, Homo sapiens
ttcttttttttttttcattgcaagga

SEQ ID NO: 23221 - DNA, 26 bp, Homo sapiens
tcttttttttttttcattgcaaggac

SEQ ID NO: 23222 - DNA, 26 bp, Homo sapiens
cttttttttttttcattgcaaggaca

SEQ ID NO: 23223 - DNA, 26 bp, Homo sapiens
ttttttttttttcattgcaaggacaa

SEQ ID NO: 23224 - DNA, 26 bp, Homo sapiens
tttttttttttcattgcaaggacaat

SEQ ID NO: 23225 - DNA, 26 bp, Homo sapiens
ttttttttttcattgcaaggacaatt

SEQ ID NO: 23226 - DNA, 26 bp, Homo sapiens
tttttttttcattgcaaggacaattt

SEQ ID NO: 23227 - DNA, 26 bp, Homo sapiens
ttttttttcattgcaaggacaattta

SEQ ID NO: 23228 - DNA, 26 bp, Homo sapiens
tttttttcattgcaaggacaatttat

SEQ ID NO: 23229 - DNA, 26 bp, Homo sapiens
ttttttcattgcaaggacaatttata

SEQ ID NO: 23230 - DNA, 26 bp, Homo sapiens
tttttcattgcaaggacaatttataa

SEQ ID NO: 23231 - DNA, 26 bp, Homo sapiens
ttttcattgcaaggacaatttataat

SEQ ID NO: 23232 - DNA, 26 bp, Homo sapiens
tttcattgcaaggacaatttataatc

SEQ ID NO: 23233 - DNA, 26 bp, Homo sapiens
ttcattgcaaggacaatttataatca

SEQ ID NO: 23234 - DNA, 26 bp, Homo sapiens
tcattgcaaggacaatttataatcat

SEQ ID NO: 23235 - DNA, 26 bp, Homo sapiens
cattgcaaggacaatttataatcatc

SEQ ID NO: 23236 - DNA, 26 bp, Homo sapiens
attgcaaggacaatttataatcatca

SEQ ID NO: 23237 - DNA, 26 bp, Homo sapiens
ttgcaaggacaatttataatcatcaa

SEQ ID NO: 23238 - DNA, 26 bp, Homo sapiens
tgcaaggacaatttataatcatcaaa

SEQ ID NO: 23239 - DNA, 26 bp, Homo sapiens
gcaaggacaatttataatcatcaaaa

SEQ ID NO: 23240 - DNA, 26 bp, Homo sapiens
caaggacaatttataatcatcaaaaa

SEQ ID NO: 23241 - DNA, 26 bp, Homo sapiens
aaggacaatttataatcatcaaaaag

SEQ ID NO: 23242 - DNA, 26 bp, Homo sapiens
aggacaatttataatcatcaaaaaga

SEQ ID NO: 23243 - DNA, 26 bp, Homo sapiens
ggacaatttataatcatcaaaaagaa

SEQ ID NO: 23244 - DNA, 26 bp, Homo sapiens
gacaatttataatcatcaaaaagaag

SEQ ID NO: 23245 - DNA, 26 bp, Homo sapiens
acaatttataatcatcaaaaagaagt

SEQ ID NO: 23246 - DNA, 26 bp, Homo sapiens
caatttataatcatcaaaaagaagtg

SEQ ID NO: 23247 - DNA, 26 bp, Homo sapiens
aatttataatcatcaaaaagaagtga

SEQ ID NO: 23248 - DNA, 26 bp, Homo sapiens
atttataatcatcaaaaagaagtgaa

SEQ ID NO: 23249 - DNA, 26 bp, Homo sapiens
tttataatcatcaaaaagaagtgaaa

SEQ ID NO: 23250 - DNA, 26 bp, Homo sapiens
ttataatcatcaaaaagaagtgaaac

SEQ ID NO: 23251 - DNA, 26 bp, Homo sapiens
tataatcatcaaaaagaagtgaaaca

SEQ ID NO: 23252 - DNA, 26 bp, Homo sapiens
ataatcatcaaaaagaagtgaaacat

SEQ ID NO: 23253 - DNA, 26 bp, Homo sapiens
taatcatcaaaaagaagtgaaacatg

SEQ ID NO: 23254 - DNA, 26 bp, Homo sapiens
aatcatcaaaaagaagtgaaacatgg

SEQ ID NO: 23255 - DNA, 26 bp, Homo sapiens
atcatcaaaaagaagtgaaacatggt

SEQ ID NO: 23256 - DNA, 26 bp, Homo sapiens
tcatcaaaaagaagtgaaacatggtt

SEQ ID NO: 23257 - DNA, 26 bp, Homo sapiens
catcaaaaagaagtgaaacatggttt

SEQ ID NO: 23258 - DNA, 26 bp, Homo sapiens
atcaaaaagaagtgaaacatggtttt

SEQ ID NO: 23259 - DNA, 26 bp, Homo sapiens
tcaaaaagaagtgaaacatggttttg

SEQ ID NO: 23260 - DNA, 26 bp, Homo sapiens
caaaaagaagtgaaacatggttttga

SEQ ID NO: 23261 - DNA, 26 bp, Homo sapiens
aaaaagaagtgaaacatggttttgat

SEQ ID NO: 23262 - DNA, 26 bp, Homo sapiens
aaaagaagtgaaacatggttttgatt

SEQ ID NO: 23263 - DNA, 26 bp, Homo sapiens
aaagaagtgaaacatggttttgatta

SEQ ID NO: 23264 - DNA, 26 bp, Homo sapiens
aagaagtgaaacatggttttgattaa

SEQ ID NO: 23265 - DNA, 26 bp, Homo sapiens
agaagtgaaacatggttttgattaaa

SEQ ID NO: 23266 - DNA, 26 bp, Homo sapiens
gaagtgaaacatggttttgattaaaa

SEQ ID NO: 23267 - DNA, 26 bp, Homo sapiens
aagtgaaacatggttttgattaaaac

SEQ ID NO: 23268 - DNA, 26 bp, Homo sapiens
agtgaaacatggttttgattaaaaca

SEQ ID NO: 23269 - DNA, 26 bp, Homo sapiens
gtgaaacatggttttgattaaaacag

SEQ ID NO: 23270 - DNA, 26 bp, Homo sapiens
tgaaacatggttttgattaaaacagc

SEQ ID NO: 23271 - DNA, 26 bp, Homo sapiens
gaaacatggttttgattaaaacagcc

SEQ ID NO: 23272 - DNA, 26 bp, Homo sapiens
aaacatggttttgattaaaacagcct

SEQ ID NO: 23273 - DNA, 26 bp, Homo sapiens
aacatggttttgattaaaacagcctg

SEQ ID NO: 23274 - DNA, 26 bp, Homo sapiens
acatggttttgattaaaacagcctgt

SEQ ID NO: 23275 - DNA, 26 bp, Homo sapiens
catggttttgattaaaacagcctgtt

SEQ ID NO: 23276 - DNA, 26 bp, Homo sapiens
atggttttgattaaaacagcctgttg

SEQ ID NO: 23277 - DNA, 26 bp, Homo sapiens
tggttttgattaaaacagcctgttgg

SEQ ID NO: 23278 - DNA, 26 bp, Homo sapiens
ggttttgattaaaacagcctgttggc

SEQ ID NO: 23279 - DNA, 26 bp, Homo sapiens
gttttgattaaaacagcctgttggct

SEQ ID NO: 23280 - DNA, 26 bp, Homo sapiens
ttttgattaaaacagcctgttggctc

SEQ ID NO: 23281 - DNA, 26 bp, Homo sapiens
tttgattaaaacagcctgttggctca

SEQ ID NO: 23282 - DNA, 26 bp, Homo sapiens
ttgattaaaacagcctgttggctcaa

SEQ ID NO: 23283 - DNA, 26 bp, Homo sapiens
tgattaaaacagcctgttggctcaat

SEQ ID NO: 23284 - DNA, 26 bp, Homo sapiens
gattaaaacagcctgttggctcaata

SEQ ID NO: 23285 - DNA, 26 bp, Homo sapiens
attaaaacagcctgttggctcaataa

SEQ ID NO: 23286 - DNA, 26 bp, Homo sapiens
ttaaaacagcctgttggctcaataat

SEQ ID NO: 23287 - DNA, 26 bp, Homo sapiens
taaaacagcctgttggctcaataatc

SEQ ID NO: 23288 - DNA, 26 bp, Homo sapiens
aaaacagcctgttggctcaataatct

SEQ ID NO: 23289 - DNA, 26 bp, Homo sapiens
aaacagcctgttggctcaataatctc

SEQ ID NO: 23290 - DNA, 26 bp, Homo sapiens
aacagcctgttggctcaataatctct

SEQ ID NO: 23291 - DNA, 26 bp, Homo sapiens
acagcctgttggctcaataatctctg

SEQ ID NO: 23292 - DNA, 26 bp, Homo sapiens
cagcctgttggctcaataatctctgt

SEQ ID NO: 23293 - DNA, 26 bp, Homo sapiens
agcctgttggctcaataatctctgta

SEQ ID NO: 23294 - DNA, 26 bp, Homo sapiens
gcctgttggctcaataatctctgtaa

SEQ ID NO: 23295 - DNA, 26 bp, Homo sapiens
cctgttggctcaataatctctgtaat

SEQ ID NO: 23296 - DNA, 26 bp, Homo sapiens
ctgttggctcaataatctctgtaatt

SEQ ID NO: 23297 - DNA, 26 bp, Homo sapiens
tgttggctcaataatctctgtaattt

SEQ ID NO: 23298 - DNA, 26 bp, Homo sapiens
gttggctcaataatctctgtaatttc

SEQ ID NO: 23299 - DNA, 26 bp, Homo sapiens
ttggctcaataatctctgtaatttca

SEQ ID NO: 23300 - DNA, 26 bp, Homo sapiens
tggctcaataatctctgtaatttcaa

SEQ ID NO: 23301 - DNA, 26 bp, Homo sapiens
ggctcaataatctctgtaatttcaaa

SEQ ID NO: 23302 - DNA, 26 bp, Homo sapiens
gctcaataatctctgtaatttcaaaa

SEQ ID NO: 23303 - DNA, 26 bp, Homo sapiens
ctcaataatctctgtaatttcaaaaa

SEQ ID NO: 23304 - DNA, 26 bp, Homo sapiens
tcaataatctctgtaatttcaaaaac

SEQ ID NO: 23305 - DNA, 26 bp, Homo sapiens
caataatctctgtaatttcaaaaaca

SEQ ID NO: 23306 - DNA, 26 bp, Homo sapiens
aataatctctgtaatttcaaaaacat

SEQ ID NO: 23307 - DNA, 26 bp, Homo sapiens
ataatctctgtaatttcaaaaacatc

SEQ ID NO: 23308 - DNA, 26 bp, Homo sapiens
taatctctgtaatttcaaaaacatcc

SEQ ID NO: 23309 - DNA, 26 bp, Homo sapiens
aatctctgtaatttcaaaaacatcct

SEQ ID NO: 23310 - DNA, 26 bp, Homo sapiens
atctctgtaatttcaaaaacatcctt

SEQ ID NO: 23311 - DNA, 26 bp, Homo sapiens
tctctgtaatttcaaaaacatcctta

SEQ ID NO: 23312 - DNA, 26 bp, Homo sapiens
ctctgtaatttcaaaaacatccttaa

SEQ ID NO: 23313 - DNA, 26 bp, Homo sapiens
tctgtaatttcaaaaacatccttaat

SEQ ID NO: 23314 - DNA, 26 bp, Homo sapiens
ctgtaatttcaaaaacatccttaatg

SEQ ID NO: 23315 - DNA, 26 bp, Homo sapiens
tgtaatttcaaaaacatccttaatgc

SEQ ID NO: 23316 - DNA, 26 bp, Homo sapiens
gtaatttcaaaaacatccttaatgca

SEQ ID NO: 23317 - DNA, 26 bp, Homo sapiens
taatttcaaaaacatccttaatgcag

SEQ ID NO: 23318 - DNA, 26 bp, Homo sapiens
aatttcaaaaacatccttaatgcaga

SEQ ID NO: 23319 - DNA, 26 bp, Homo sapiens
atttcaaaaacatccttaatgcagaa

SEQ ID NO: 23320 - DNA, 26 bp, Homo sapiens
tttcaaaaacatccttaatgcagaag

SEQ ID NO: 23321 - DNA, 26 bp, Homo sapiens
ttcaaaaacatccttaatgcagaaga

SEQ ID NO: 23322 - DNA, 26 bp, Homo sapiens
tcaaaaacatccttaatgcagaagaa

SEQ ID NO: 23323 - DNA, 26 bp, Homo sapiens
caaaaacatccttaatgcagaagaag

SEQ ID NO: 23324 - DNA, 26 bp, Homo sapiens
aaaaacatccttaatgcagaagaaga

SEQ ID NO: 23325 - DNA, 26 bp, Homo sapiens
aaaacatccttaatgcagaagaagaa

SEQ ID NO: 23326 - DNA, 26 bp, Homo sapiens
aaacatccttaatgcagaagaagaac

SEQ ID NO: 23327 - DNA, 26 bp, Homo sapiens
aacatccttaatgcagaagaagaaca

SEQ ID NO: 23328 - DNA, 26 bp, Homo sapiens
acatccttaatgcagaagaagaacac

SEQ ID NO: 23329 - DNA, 26 bp, Homo sapiens
catccttaatgcagaagaagaacacg

SEQ ID NO: 23330 - DNA, 26 bp, Homo sapiens
atccttaatgcagaagaagaacacgc

SEQ ID NO: 23331 - DNA, 26 bp, Homo sapiens
tccttaatgcagaagaagaacacgcc

SEQ ID NO: 23332 - DNA, 26 bp, Homo sapiens
ccttaatgcagaagaagaacacgccg

SEQ ID NO: 23333 - DNA, 26 bp, Homo sapiens
cttaatgcagaagaagaacacgccga

SEQ ID NO: 23334 - DNA, 26 bp, Homo sapiens
ttaatgcagaagaagaacacgccgat

SEQ ID NO: 23335 - DNA, 26 bp, Homo sapiens
taatgcagaagaagaacacgccgatg

SEQ ID NO: 23336 - DNA, 26 bp, Homo sapiens
aatgcagaagaagaacacgccgatgt

SEQ ID NO: 23337 - DNA, 26 bp, Homo sapiens
atgcagaagaagaacacgccgatgtc

SEQ ID NO: 23338 - DNA, 26 bp, Homo sapiens
tgcagaagaagaacacgccgatgtca

SEQ ID NO: 23339 - DNA, 26 bp, Homo sapiens
gcagaagaagaacacgccgatgtcag

SEQ ID NO: 23340 - DNA, 26 bp, Homo sapiens
cagaagaagaacacgccgatgtcagg

SEQ ID NO: 23341 - DNA, 26 bp, Homo sapiens
agaagaagaacacgccgatgtcagga

SEQ ID NO: 23342 - DNA, 26 bp, Homo sapiens
gaagaagaacacgccgatgtcaggaa

SEQ ID NO: 23343 - DNA, 26 bp, Homo sapiens
aagaagaacacgccgatgtcaggaat

SEQ ID NO: 23344 - DNA, 26 bp, Homo sapiens
agaagaacacgccgatgtcaggaatg

SEQ ID NO: 23345 - DNA, 26 bp, Homo sapiens
gaagaacacgccgatgtcaggaatgg

SEQ ID NO: 23346 - DNA, 26 bp, Homo sapiens
aagaacacgccgatgtcaggaatggc

SEQ ID NO: 23347 - DNA, 26 bp, Homo sapiens
agaacacgccgatgtcaggaatggcc

SEQ ID NO: 23348 - DNA, 26 bp, Homo sapiens
gaacacgccgatgtcaggaatggcct

SEQ ID NO: 23349 - DNA, 26 bp, Homo sapiens
aacacgccgatgtcaggaatggcctg

SEQ ID NO: 23350 - DNA, 26 bp, Homo sapiens
acacgccgatgtcaggaatggcctgg

SEQ ID NO: 23351 - DNA, 26 bp, Homo sapiens
cacgccgatgtcaggaatggcctggg

SEQ ID NO: 23352 - DNA, 26 bp, Homo sapiens
acgccgatgtcaggaatggcctgggg

SEQ ID NO: 23353 - DNA, 26 bp, Homo sapiens
cgccgatgtcaggaatggcctggggc

SEQ ID NO: 23354 - DNA, 26 bp, Homo sapiens
gccgatgtcaggaatggcctggggcc

SEQ ID NO: 23355 - DNA, 26 bp, Homo sapiens
ccgatgtcaggaatggcctggggccc

SEQ ID NO: 23356 - DNA, 26 bp, Homo sapiens
cgatgtcaggaatggcctggggcccc

SEQ ID NO: 23357 - DNA, 26 bp, Homo sapiens
gatgtcaggaatggcctggggcccca

SEQ ID NO: 23358 - DNA, 26 bp, Homo sapiens
atgtcaggaatggcctggggccccat

SEQ ID NO: 23359 - DNA, 26 bp, Homo sapiens
tgtcaggaatggcctggggccccatt

SEQ ID NO: 23360 - DNA, 26 bp, Homo sapiens
gtcaggaatggcctggggccccatta

SEQ ID NO: 23361 - DNA, 26 bp, Homo sapiens
tcaggaatggcctggggccccattac

SEQ ID NO: 23362 - DNA, 26 bp, Homo sapiens
caggaatggcctggggccccattaca

SEQ ID NO: 23363 - DNA, 26 bp, Homo sapiens
aggaatggcctggggccccattacaa

SEQ ID NO: 23364 - DNA, 26 bp, Homo sapiens
ggaatggcctggggccccattacaac

SEQ ID NO: 23365 - DNA, 26 bp, Homo sapiens
gaatggcctggggccccattacaaca

SEQ ID NO: 23366 - DNA, 26 bp, Homo sapiens
aatggcctggggccccattacaacag

SEQ ID NO: 23367 - DNA, 26 bp, Homo sapiens
atggcctggggccccattacaacagc

SEQ ID NO: 23368 - DNA, 26 bp, Homo sapiens
tggcctggggccccattacaacagca

SEQ ID NO: 23369 - DNA, 26 bp, Homo sapiens
ggcctggggccccattacaacagcaa

SEQ ID NO: 23370 - DNA, 26 bp, Homo sapiens
gcctggggccccattacaacagcaac

SEQ ID NO: 23371 - DNA, 26 bp, Homo sapiens
cctggggccccattacaacagcaacc

SEQ ID NO: 23372 - DNA, 26 bp, Homo sapiens
ctggggccccattacaacagcaaccg

SEQ ID NO: 23373 - DNA, 26 bp, Homo sapiens
tggggccccattacaacagcaaccga

SEQ ID NO: 23374 - DNA, 26 bp, Homo sapiens
ggggccccattacaacagcaaccgaa

SEQ ID NO: 23375 - DNA, 26 bp, Homo sapiens
gggccccattacaacagcaaccgaat

SEQ ID NO: 23376 - DNA, 26 bp, Homo sapiens
ggccccattacaacagcaaccgaata

SEQ ID NO: 23377 - DNA, 26 bp, Homo sapiens
gccccattacaacagcaaccgaataa

SEQ ID NO: 23378 - DNA, 26 bp, Homo sapiens
ccccattacaacagcaaccgaataaa

SEQ ID NO: 23379 - DNA, 26 bp, Homo sapiens
cccattacaacagcaaccgaataaat

SEQ ID NO: 23380 - DNA, 26 bp, Homo sapiens
ccattacaacagcaaccgaataaata

SEQ ID NO: 23381 - DNA, 26 bp, Homo sapiens
cattacaacagcaaccgaataaataa

SEQ ID NO: 23382 - DNA, 26 bp, Homo sapiens
attacaacagcaaccgaataaataag

SEQ ID NO: 23383 - DNA, 26 bp, Homo sapiens
ttacaacagcaaccgaataaataagg

SEQ ID NO: 23384 - DNA, 26 bp, Homo sapiens
tacaacagcaaccgaataaataagga

SEQ ID NO: 23385 - DNA, 26 bp, Homo sapiens
acaacagcaaccgaataaataaggag

SEQ ID NO: 23386 - DNA, 26 bp, Homo sapiens
caacagcaaccgaataaataaggaga

SEQ ID NO: 23387 - DNA, 26 bp, Homo sapiens
aacagcaaccgaataaataaggagaa

SEQ ID NO: 23388 - DNA, 26 bp, Homo sapiens
acagcaaccgaataaataaggagaag

SEQ ID NO: 23389 - DNA, 26 bp, Homo sapiens
cagcaaccgaataaataaggagaaga

SEQ ID NO: 23390 - DNA, 26 bp, Homo sapiens
agcaaccgaataaataaggagaagaa

SEQ ID NO: 23391 - DNA, 26 bp, Homo sapiens
gcaaccgaataaataaggagaagaat

SEQ ID NO: 23392 - DNA, 26 bp, Homo sapiens
caaccgaataaataaggagaagaatc

SEQ ID NO: 23393 - DNA, 26 bp, Homo sapiens
aaccgaataaataaggagaagaatct

SEQ ID NO: 23394 - DNA, 26 bp, Homo sapiens
accgaataaataaggagaagaatctt

SEQ ID NO: 23395 - DNA, 26 bp, Homo sapiens
ccgaataaataaggagaagaatcttg

SEQ ID NO: 23396 - DNA, 26 bp, Homo sapiens
cgaataaataaggagaagaatcttga

SEQ ID NO: 23397 - DNA, 26 bp, Homo sapiens
gaataaataaggagaagaatcttgag

SEQ ID NO: 23398 - DNA, 26 bp, Homo sapiens
aataaataaggagaagaatcttgagg

SEQ ID NO: 23399 - DNA, 26 bp, Homo sapiens
ataaataaggagaagaatcttgaggt

SEQ ID NO: 23400 - DNA, 26 bp, Homo sapiens
taaataaggagaagaatcttgaggtc

SEQ ID NO: 23401 - DNA, 26 bp, Homo sapiens
aaataaggagaagaatcttgaggtca

SEQ ID NO: 23402 - DNA, 26 bp, Homo sapiens
aataaggagaagaatcttgaggtcat

SEQ ID NO: 23403 - DNA, 26 bp, Homo sapiens
ataaggagaagaatcttgaggtcata

SEQ ID NO: 23404 - DNA, 26 bp, Homo sapiens
taaggagaagaatcttgaggtcataa

SEQ ID NO: 23405 - DNA, 26 bp, Homo sapiens
aaggagaagaatcttgaggtcataaa

SEQ ID NO: 23406 - DNA, 26 bp, Homo sapiens
aggagaagaatcttgaggtcataaaa

SEQ ID NO: 23407 - DNA, 26 bp, Homo sapiens
ggagaagaatcttgaggtcataaaaa

SEQ ID NO: 23408 - DNA, 26 bp, Homo sapiens
gagaagaatcttgaggtcataaaaac

SEQ ID NO: 23409 - DNA, 26 bp, Homo sapiens
agaagaatcttgaggtcataaaaaca

SEQ ID NO: 23410 - DNA, 26 bp, Homo sapiens
gaagaatcttgaggtcataaaaacaa

SEQ ID NO: 23411 - DNA, 26 bp, Homo sapiens
aagaatcttgaggtcataaaaacaaa

SEQ ID NO: 23412 - DNA, 26 bp, Homo sapiens
agaatcttgaggtcataaaaacaaaa

SEQ ID NO: 23413 - DNA, 26 bp, Homo sapiens
gaatcttgaggtcataaaaacaaaat

SEQ ID NO: 23414 - DNA, 26 bp, Homo sapiens
aatcttgaggtcataaaaacaaaatt

SEQ ID NO: 23415 - DNA, 26 bp, Homo sapiens
atcttgaggtcataaaaacaaaatta

SEQ ID NO: 23416 - DNA, 26 bp, Homo sapiens
tcttgaggtcataaaaacaaaattaa

SEQ ID NO: 23417 - DNA, 26 bp, Homo sapiens
cttgaggtcataaaaacaaaattaag

SEQ ID NO: 23418 - DNA, 26 bp, Homo sapiens
ttgaggtcataaaaacaaaattaagc

SEQ ID NO: 23419 - DNA, 26 bp, Homo sapiens
tgaggtcataaaaacaaaattaagct

SEQ ID NO: 23420 - DNA, 26 bp, Homo sapiens
gaggtcataaaaacaaaattaagcta

SEQ ID NO: 23421 - DNA, 26 bp, Homo sapiens
aggtcataaaaacaaaattaagctaa

SEQ ID NO: 23422 - DNA, 26 bp, Homo sapiens
ggtcataaaaacaaaattaagctaat

SEQ ID NO: 23423 - DNA, 26 bp, Homo sapiens
gtcataaaaacaaaattaagctaatg

SEQ ID NO: 23424 - DNA, 26 bp, Homo sapiens
tcataaaaacaaaattaagctaatgt

SEQ ID NO: 23425 - DNA, 26 bp, Homo sapiens
cataaaaacaaaattaagctaatgtt

SEQ ID NO: 23426 - DNA, 26 bp, Homo sapiens
ataaaaacaaaattaagctaatgttt

SEQ ID NO: 23427 - DNA, 26 bp, Homo sapiens
taaaaacaaaattaagctaatgtttc

SEQ ID NO: 23428 - DNA, 26 bp, Homo sapiens
aaaaacaaaattaagctaatgtttca

SEQ ID NO: 23429 - DNA, 26 bp, Homo sapiens
aaaacaaaattaagctaatgtttcaa

SEQ ID NO: 23430 - DNA, 26 bp, Homo sapiens
aaacaaaattaagctaatgtttcaaa

SEQ ID NO: 23431 - DNA, 26 bp, Homo sapiens
aacaaaattaagctaatgtttcaaat

SEQ ID NO: 23432 - DNA, 26 bp, Homo sapiens
acaaaattaagctaatgtttcaaatt

SEQ ID NO: 23433 - DNA, 26 bp, Homo sapiens
caaaattaagctaatgtttcaaattt

SEQ ID NO: 23434 - DNA, 26 bp, Homo sapiens
aaaattaagctaatgtttcaaatttt

SEQ ID NO: 23435 - DNA, 26 bp, Homo sapiens
aaattaagctaatgtttcaaattttg

SEQ ID NO: 23436 - DNA, 26 bp, Homo sapiens
aattaagctaatgtttcaaattttga

SEQ ID NO: 23437 - DNA, 26 bp, Homo sapiens
attaagctaatgtttcaaattttgac

SEQ ID NO: 23438 - DNA, 26 bp, Homo sapiens
ttaagctaatgtttcaaattttgaca

SEQ ID NO: 23439 - DNA, 26 bp, Homo sapiens
taagctaatgtttcaaattttgacaa

SEQ ID NO: 23440 - DNA, 26 bp, Homo sapiens
aagctaatgtttcaaattttgacaat

SEQ ID NO: 23441 - DNA, 26 bp, Homo sapiens
agctaatgtttcaaattttgacaatt

SEQ ID NO: 23442 - DNA, 26 bp, Homo sapiens
gctaatgtttcaaattttgacaatta

SEQ ID NO: 23443 - DNA, 26 bp, Homo sapiens
ctaatgtttcaaattttgacaattat

SEQ ID NO: 23444 - DNA, 26 bp, Homo sapiens
taatgtttcaaattttgacaattatg

SEQ ID NO: 23445 - DNA, 26 bp, Homo sapiens
aatgtttcaaattttgacaattatga

SEQ ID NO: 23446 - DNA, 26 bp, Homo sapiens
atgtttcaaattttgacaattatgaa

SEQ ID NO: 23447 - DNA, 26 bp, Homo sapiens
tgtttcaaattttgacaattatgaat

SEQ ID NO: 23448 - DNA, 26 bp, Homo sapiens
gtttcaaattttgacaattatgaatt

SEQ ID NO: 23449 - DNA, 26 bp, Homo sapiens
tttcaaattttgacaattatgaattc

SEQ ID NO: 23450 - DNA, 26 bp, Homo sapiens
ttcaaattttgacaattatgaattct

SEQ ID NO: 23451 - DNA, 26 bp, Homo sapiens
tcaaattttgacaattatgaattctt

SEQ ID NO: 23452 - DNA, 26 bp, Homo sapiens
caaattttgacaattatgaattcttc

SEQ ID NO: 23453 - DNA, 26 bp, Homo sapiens
aaattttgacaattatgaattcttct

SEQ ID NO: 23454 - DNA, 26 bp, Homo sapiens
aattttgacaattatgaattcttctt

SEQ ID NO: 23455 - DNA, 26 bp, Homo sapiens
attttgacaattatgaattcttcttc

SEQ ID NO: 23456 - DNA, 26 bp, Homo sapiens
ttttgacaattatgaattcttcttct

SEQ ID NO: 23457 - DNA, 26 bp, Homo sapiens
tttgacaattatgaattcttcttcta

SEQ ID NO: 23458 - DNA, 26 bp, Homo sapiens
ttgacaattatgaattcttcttctaa

SEQ ID NO: 23459 - DNA, 26 bp, Homo sapiens
tgacaattatgaattcttcttctaag

SEQ ID NO: 23460 - DNA, 26 bp, Homo sapiens
gacaattatgaattcttcttctaaga

SEQ ID NO: 23461 - DNA, 26 bp, Homo sapiens
acaattatgaattcttcttctaagaa

SEQ ID NO: 23462 - DNA, 26 bp, Homo sapiens
caattatgaattcttcttctaagaag

SEQ ID NO: 23463 - DNA, 26 bp, Homo sapiens
aattatgaattcttcttctaagaaga

SEQ ID NO: 23464 - DNA, 26 bp, Homo sapiens
attatgaattcttcttctaagaagac

SEQ ID NO: 23465 - DNA, 26 bp, Homo sapiens
ttatgaattcttcttctaagaagaca

SEQ ID NO: 23466 - DNA, 26 bp, Homo sapiens
tatgaattcttcttctaagaagacat

SEQ ID NO: 23467 - DNA, 26 bp, Homo sapiens
atgaattcttcttctaagaagacatt

SEQ ID NO: 23468 - DNA, 26 bp, Homo sapiens
tgaattcttcttctaagaagacatta

SEQ ID NO: 23469 - DNA, 26 bp, Homo sapiens
gaattcttcttctaagaagacattaa

SEQ ID NO: 23470 - DNA, 26 bp, Homo sapiens
aattcttcttctaagaagacattaaa

SEQ ID NO: 23471 - DNA, 26 bp, Homo sapiens
attcttcttctaagaagacattaaaa

SEQ ID NO: 23472 - DNA, 26 bp, Homo sapiens
ttcttcttctaagaagacattaaaaa

SEQ ID NO: 23473 - DNA, 26 bp, Homo sapiens
tcttcttctaagaagacattaaaaaa

SEQ ID NO: 23474 - DNA, 26 bp, Homo sapiens
cttcttctaagaagacattaaaaaaa

SEQ ID NO: 23475 - DNA, 26 bp, Homo sapiens
ttcttctaagaagacattaaaaaaat

SEQ ID NO: 23476 - DNA, 26 bp, Homo sapiens
tcttctaagaagacattaaaaaaatt

SEQ ID NO: 23477 - DNA, 26 bp, Homo sapiens
cttctaagaagacattaaaaaaattt

SEQ ID NO: 23478 - DNA, 26 bp, Homo sapiens
ttctaagaagacattaaaaaaatttt

SEQ ID NO: 23479 - DNA, 26 bp, Homo sapiens
tctaagaagacattaaaaaaattttc

SEQ ID NO: 23480 - DNA, 26 bp, Homo sapiens
ctaagaagacattaaaaaaattttca

SEQ ID NO: 23481 - DNA, 26 bp, Homo sapiens
taagaagacattaaaaaaattttcag

SEQ ID NO: 23482 - DNA, 26 bp, Homo sapiens
aagaagacattaaaaaaattttcagg

SEQ ID NO: 23483 - DNA, 26 bp, Homo sapiens
agaagacattaaaaaaattttcaggc

SEQ ID NO: 23484 - DNA, 26 bp, Homo sapiens
gaagacattaaaaaaattttcaggca

SEQ ID NO: 23485 - DNA, 26 bp, Homo sapiens
aagacattaaaaaaattttcaggcac

SEQ ID NO: 23486 - DNA, 26 bp, Homo sapiens
agacattaaaaaaattttcaggcact

SEQ ID NO: 23487 - DNA, 26 bp, Homo sapiens
gacattaaaaaaattttcaggcacta

SEQ ID NO: 23488 - DNA, 26 bp, Homo sapiens
acattaaaaaaattttcaggcactat

SEQ ID NO: 23489 - DNA, 26 bp, Homo sapiens
cattaaaaaaattttcaggcactatt

SEQ ID NO: 23490 - DNA, 26 bp, Homo sapiens
attaaaaaaattttcaggcactatta

SEQ ID NO: 23491 - DNA, 26 bp, Homo sapiens
ttaaaaaaattttcaggcactattag

SEQ ID NO: 23492 - DNA, 26 bp, Homo sapiens
taaaaaaattttcaggcactattaga

SEQ ID NO: 23493 - DNA, 26 bp, Homo sapiens
aaaaaaattttcaggcactattagat

SEQ ID NO: 23494 - DNA, 26 bp, Homo sapiens
aaaaaattttcaggcactattagata

SEQ ID NO: 23495 - DNA, 26 bp, Homo sapiens
aaaaattttcaggcactattagataa

SEQ ID NO: 23496 - DNA, 26 bp, Homo sapiens
aaaattttcaggcactattagataaa

SEQ ID NO: 23497 - DNA, 26 bp, Homo sapiens
aaattttcaggcactattagataaaa

SEQ ID NO: 23498 - DNA, 26 bp, Homo sapiens
aattttcaggcactattagataaaat

SEQ ID NO: 23499 - DNA, 26 bp, Homo sapiens
attttcaggcactattagataaaata

SEQ ID NO: 23500 - DNA, 26 bp, Homo sapiens
ttttcaggcactattagataaaatac

SEQ ID NO: 23501 - DNA, 26 bp, Homo sapiens
tttcaggcactattagataaaataca

SEQ ID NO: 23502 - DNA, 26 bp, Homo sapiens
ttcaggcactattagataaaatacaa

SEQ ID NO: 23503 - DNA, 26 bp, Homo sapiens
tcaggcactattagataaaatacaaa

SEQ ID NO: 23504 - DNA, 26 bp, Homo sapiens
caggcactattagataaaatacaaag

SEQ ID NO: 23505 - DNA, 26 bp, Homo sapiens
aggcactattagataaaatacaaaga

SEQ ID NO: 23506 - DNA, 26 bp, Homo sapiens
ggcactattagataaaatacaaagag

SEQ ID NO: 23507 - DNA, 26 bp, Homo sapiens
gcactattagataaaatacaaagaga

SEQ ID NO: 23508 - DNA, 26 bp, Homo sapiens
cactattagataaaatacaaagagaa

SEQ ID NO: 23509 - DNA, 26 bp, Homo sapiens
actattagataaaatacaaagagaat

SEQ ID NO: 23510 - DNA, 26 bp, Homo sapiens
ctattagataaaatacaaagagaata

SEQ ID NO: 23511 - DNA, 26 bp, Homo sapiens
tattagataaaatacaaagagaataa

SEQ ID NO: 23512 - DNA, 26 bp, Homo sapiens
attagataaaatacaaagagaataat

SEQ ID NO: 23513 - DNA, 26 bp, Homo sapiens
ttagataaaatacaaagagaataatt

SEQ ID NO: 23514 - DNA, 26 bp, Homo sapiens
tagataaaatacaaagagaataattc

SEQ ID NO: 23515 - DNA, 26 bp, Homo sapiens
agataaaatacaaagagaataattct

SEQ ID NO: 23516 - DNA, 26 bp, Homo sapiens
gataaaatacaaagagaataattcta

SEQ ID NO: 23517 - DNA, 26 bp, Homo sapiens
ataaaatacaaagagaataattctac

SEQ ID NO: 23518 - DNA, 26 bp, Homo sapiens
taaaatacaaagagaataattctaca

SEQ ID NO: 23519 - DNA, 26 bp, Homo sapiens
aaaatacaaagagaataattctacat

SEQ ID NO: 23520 - DNA, 26 bp, Homo sapiens
aaatacaaagagaataattctacatg

SEQ ID NO: 23521 - DNA, 26 bp, Homo sapiens
aatacaaagagaataattctacatgg

SEQ ID NO: 23522 - DNA, 26 bp, Homo sapiens
atacaaagagaataattctacatgga

SEQ ID NO: 23523 - DNA, 26 bp, Homo sapiens
tacaaagagaataattctacatggat

SEQ ID NO: 23524 - DNA, 26 bp, Homo sapiens
acaaagagaataattctacatggatg

SEQ ID NO: 23525 - DNA, 26 bp, Homo sapiens
caaagagaataattctacatggatga

SEQ ID NO: 23526 - DNA, 26 bp, Homo sapiens
aaagagaataattctacatggatgag

SEQ ID NO: 23527 - DNA, 26 bp, Homo sapiens
aagagaataattctacatggatgagt

SEQ ID NO: 23528 - DNA, 26 bp, Homo sapiens
agagaataattctacatggatgagtg

SEQ ID NO: 23529 - DNA, 26 bp, Homo sapiens
gagaataattctacatggatgagtgt

SEQ ID NO: 23530 - DNA, 26 bp, Homo sapiens
agaataattctacatggatgagtgtg

SEQ ID NO: 23531 - DNA, 26 bp, Homo sapiens
gaataattctacatggatgagtgtgc

SEQ ID NO: 23532 - DNA, 26 bp, Homo sapiens
aataattctacatggatgagtgtgca

SEQ ID NO: 23533 - DNA, 26 bp, Homo sapiens
ataattctacatggatgagtgtgcag

SEQ ID NO: 23534 - DNA, 26 bp, Homo sapiens
taattctacatggatgagtgtgcagt

SEQ ID NO: 23535 - DNA, 26 bp, Homo sapiens
aattctacatggatgagtgtgcagtt

SEQ ID NO: 23536 - DNA, 26 bp, Homo sapiens
attctacatggatgagtgtgcagttt

SEQ ID NO: 23537 - DNA, 26 bp, Homo sapiens
ttctacatggatgagtgtgcagtttt

SEQ ID NO: 23538 - DNA, 26 bp, Homo sapiens
tctacatggatgagtgtgcagttttc

SEQ ID NO: 23539 - DNA, 26 bp, Homo sapiens
ctacatggatgagtgtgcagttttcc

SEQ ID NO: 23540 - DNA, 26 bp, Homo sapiens
tacatggatgagtgtgcagttttccc

SEQ ID NO: 23541 - DNA, 26 bp, Homo sapiens
acatggatgagtgtgcagttttccca

SEQ ID NO: 23542 - DNA, 26 bp, Homo sapiens
catggatgagtgtgcagttttcccat

SEQ ID NO: 23543 - DNA, 26 bp, Homo sapiens
atggatgagtgtgcagttttcccatg

SEQ ID NO: 23544 - DNA, 26 bp, Homo sapiens
tggatgagtgtgcagttttcccatgg

SEQ ID NO: 23545 - DNA, 26 bp, Homo sapiens
ggatgagtgtgcagttttcccatggg

SEQ ID NO: 23546 - DNA, 26 bp, Homo sapiens
gatgagtgtgcagttttcccatgggg

SEQ ID NO: 23547 - DNA, 26 bp, Homo sapiens
atgagtgtgcagttttcccatggggg

SEQ ID NO: 23548 - DNA, 26 bp, Homo sapiens
tgagtgtgcagttttcccatgggggt

SEQ ID NO: 23549 - DNA, 26 bp, Homo sapiens
gagtgtgcagttttcccatgggggta

SEQ ID NO: 23550 - DNA, 26 bp, Homo sapiens
agtgtgcagttttcccatgggggtaa

SEQ ID NO: 23551 - DNA, 26 bp, Homo sapiens
gtgtgcagttttcccatgggggtaaa

SEQ ID NO: 23552 - DNA, 26 bp, Homo sapiens
tgtgcagttttcccatgggggtaaag

SEQ ID NO: 23553 - DNA, 26 bp, Homo sapiens
gtgcagttttcccatgggggtaaagc

SEQ ID NO: 23554 - DNA, 26 bp, Homo sapiens
tgcagttttcccatgggggtaaagca

SEQ ID NO: 23555 - DNA, 26 bp, Homo sapiens
gcagttttcccatgggggtaaagcat

SEQ ID NO: 23556 - DNA, 26 bp, Homo sapiens
cagttttcccatgggggtaaagcatg

SEQ ID NO: 23557 - DNA, 26 bp, Homo sapiens
agttttcccatgggggtaaagcatgc

SEQ ID NO: 23558 - DNA, 26 bp, Homo sapiens
gttttcccatgggggtaaagcatgcc

SEQ ID NO: 23559 - DNA, 26 bp, Homo sapiens
ttttcccatgggggtaaagcatgcct

SEQ ID NO: 23560 - DNA, 26 bp, Homo sapiens
tttcccatgggggtaaagcatgcctt

SEQ ID NO: 23561 - DNA, 26 bp, Homo sapiens
ttcccatgggggtaaagcatgccttt

SEQ ID NO: 23562 - DNA, 26 bp, Homo sapiens
tcccatgggggtaaagcatgccttta

SEQ ID NO: 23563 - DNA, 26 bp, Homo sapiens
cccatgggggtaaagcatgcctttaa

SEQ ID NO: 23564 - DNA, 26 bp, Homo sapiens
ccatgggggtaaagcatgcctttaaa

SEQ ID NO: 23565 - DNA, 26 bp, Homo sapiens
catgggggtaaagcatgcctttaaaa

SEQ ID NO: 23566 - DNA, 26 bp, Homo sapiens
atgggggtaaagcatgcctttaaaag

SEQ ID NO: 23567 - DNA, 26 bp, Homo sapiens
tgggggtaaagcatgcctttaaaagg

SEQ ID NO: 23568 - DNA, 26 bp, Homo sapiens
gggggtaaagcatgcctttaaaagga

SEQ ID NO: 23569 - DNA, 26 bp, Homo sapiens
ggggtaaagcatgcctttaaaaggaa

SEQ ID NO: 23570 - DNA, 26 bp, Homo sapiens
gggtaaagcatgcctttaaaaggaaa

SEQ ID NO: 23571 - DNA, 26 bp, Homo sapiens
ggtaaagcatgcctttaaaaggaaaa

SEQ ID NO: 23572 - DNA, 26 bp, Homo sapiens
gtaaagcatgcctttaaaaggaaaac

SEQ ID NO: 23573 - DNA, 26 bp, Homo sapiens
taaagcatgcctttaaaaggaaaact

SEQ ID NO: 23574 - DNA, 26 bp, Homo sapiens
aaagcatgcctttaaaaggaaaactc

SEQ ID NO: 23575 - DNA, 26 bp, Homo sapiens
aagcatgcctttaaaaggaaaactct

SEQ ID NO: 23576 - DNA, 26 bp, Homo sapiens
agcatgcctttaaaaggaaaactctg

SEQ ID NO: 23577 - DNA, 26 bp, Homo sapiens
gcatgcctttaaaaggaaaactctga

SEQ ID NO: 23578 - DNA, 26 bp, Homo sapiens
catgcctttaaaaggaaaactctgaa

SEQ ID NO: 23579 - DNA, 26 bp, Homo sapiens
atgcctttaaaaggaaaactctgaat

SEQ ID NO: 23580 - DNA, 26 bp, Homo sapiens
tgcctttaaaaggaaaactctgaatt

SEQ ID NO: 23581 - DNA, 26 bp, Homo sapiens
gcctttaaaaggaaaactctgaatta

SEQ ID NO: 23582 - DNA, 26 bp, Homo sapiens
cctttaaaaggaaaactctgaattag

SEQ ID NO: 23583 - DNA, 26 bp, Homo sapiens
ctttaaaaggaaaactctgaattagg

SEQ ID NO: 23584 - DNA, 26 bp, Homo sapiens
tttaaaaggaaaactctgaattagga

SEQ ID NO: 23585 - DNA, 26 bp, Homo sapiens
ttaaaaggaaaactctgaattaggaa

SEQ ID NO: 23586 - DNA, 26 bp, Homo sapiens
taaaaggaaaactctgaattaggaag

SEQ ID NO: 23587 - DNA, 26 bp, Homo sapiens
aaaaggaaaactctgaattaggaagt

SEQ ID NO: 23588 - DNA, 26 bp, Homo sapiens
aaaggaaaactctgaattaggaagtt

SEQ ID NO: 23589 - DNA, 26 bp, Homo sapiens
aaggaaaactctgaattaggaagttg

SEQ ID NO: 23590 - DNA, 26 bp, Homo sapiens
aggaaaactctgaattaggaagttgg

SEQ ID NO: 23591 - DNA, 26 bp, Homo sapiens
ggaaaactctgaattaggaagttggt

SEQ ID NO: 23592 - DNA, 26 bp, Homo sapiens
gaaaactctgaattaggaagttggtt

SEQ ID NO: 23593 - DNA, 26 bp, Homo sapiens
aaaactctgaattaggaagttggttc

SEQ ID NO: 23594 - DNA, 26 bp, Homo sapiens
aaactctgaattaggaagttggttcc

SEQ ID NO: 23595 - DNA, 26 bp, Homo sapiens
aactctgaattaggaagttggttcct

SEQ ID NO: 23596 - DNA, 26 bp, Homo sapiens
actctgaattaggaagttggttcctc

SEQ ID NO: 23597 - DNA, 26 bp, Homo sapiens
ctctgaattaggaagttggttcctcc

SEQ ID NO: 23598 - DNA, 26 bp, Homo sapiens
tctgaattaggaagttggttcctccc

SEQ ID NO: 23599 - DNA, 26 bp, Homo sapiens
ctgaattaggaagttggttcctccct

SEQ ID NO: 23600 - DNA, 26 bp, Homo sapiens
tgaattaggaagttggttcctcccta

SEQ ID NO: 23601 - DNA, 26 bp, Homo sapiens
gaattaggaagttggttcctccctag

SEQ ID NO: 23602 - DNA, 26 bp, Homo sapiens
aattaggaagttggttcctccctaga

SEQ ID NO: 23603 - DNA, 26 bp, Homo sapiens
attaggaagttggttcctccctagat

SEQ ID NO: 23604 - DNA, 26 bp, Homo sapiens
ttaggaagttggttcctccctagatc

SEQ ID NO: 23605 - DNA, 26 bp, Homo sapiens
taggaagttggttcctccctagatcc

SEQ ID NO: 23606 - DNA, 26 bp, Homo sapiens
aggaagttggttcctccctagatcca

SEQ ID NO: 23607 - DNA, 26 bp, Homo sapiens
ggaagttggttcctccctagatccag

SEQ ID NO: 23608 - DNA, 26 bp, Homo sapiens
gaagttggttcctccctagatccagc

SEQ ID NO: 23609 - DNA, 26 bp, Homo sapiens
aagttggttcctccctagatccagca

SEQ ID NO: 23610 - DNA, 26 bp, Homo sapiens
agttggttcctccctagatccagcaa

SEQ ID NO: 23611 - DNA, 26 bp, Homo sapiens
gttggttcctccctagatccagcaat

SEQ ID NO: 23612 - DNA, 26 bp, Homo sapiens
ttggttcctccctagatccagcaatt

SEQ ID NO: 23613 - DNA, 26 bp, Homo sapiens
tggttcctccctagatccagcaattg

SEQ ID NO: 23614 - DNA, 26 bp, Homo sapiens
ggttcctccctagatccagcaattgg

SEQ ID NO: 23615 - DNA, 26 bp, Homo sapiens
gttcctccctagatccagcaattgga

SEQ ID NO: 23616 - DNA, 26 bp, Homo sapiens
ttcctccctagatccagcaattggac

SEQ ID NO: 23617 - DNA, 26 bp, Homo sapiens
tcctccctagatccagcaattggacg

SEQ ID NO: 23618 - DNA, 26 bp, Homo sapiens
cctccctagatccagcaattggacgg

SEQ ID NO: 23619 - DNA, 26 bp, Homo sapiens
ctccctagatccagcaattggacggg

SEQ ID NO: 23620 - DNA, 26 bp, Homo sapiens
tccctagatccagcaattggacggga

SEQ ID NO: 23621 - DNA, 26 bp, Homo sapiens
ccctagatccagcaattggacgggac

SEQ ID NO: 23622 - DNA, 26 bp, Homo sapiens
cctagatccagcaattggacgggact

SEQ ID NO: 23623 - DNA, 26 bp, Homo sapiens
ctagatccagcaattggacgggactc

SEQ ID NO: 23624 - DNA, 26 bp, Homo sapiens
tagatccagcaattggacgggactca

SEQ ID NO: 23625 - DNA, 26 bp, Homo sapiens
agatccagcaattggacgggactcat

SEQ ID NO: 23626 - DNA, 26 bp, Homo sapiens
gatccagcaattggacgggactcatg

SEQ ID NO: 23627 - DNA, 26 bp, Homo sapiens
atccagcaattggacgggactcatgc

SEQ ID NO: 23628 - DNA, 26 bp, Homo sapiens
tccagcaattggacgggactcatgca

SEQ ID NO: 23629 - DNA, 26 bp, Homo sapiens
ccagcaattggacgggactcatgcag

SEQ ID NO: 23630 - DNA, 26 bp, Homo sapiens
cagcaattggacgggactcatgcaga

SEQ ID NO: 23631 - DNA, 26 bp, Homo sapiens
agcaattggacgggactcatgcagac

SEQ ID NO: 23632 - DNA, 26 bp, Homo sapiens
gcaattggacgggactcatgcagaca

SEQ ID NO: 23633 - DNA, 26 bp, Homo sapiens
caattggacgggactcatgcagacag

SEQ ID NO: 23634 - DNA, 26 bp, Homo sapiens
aattggacgggactcatgcagacaga

SEQ ID NO: 23635 - DNA, 26 bp, Homo sapiens
attggacgggactcatgcagacagac

SEQ ID NO: 23636 - DNA, 26 bp, Homo sapiens
ttggacgggactcatgcagacagaca

SEQ ID NO: 23637 - DNA, 26 bp, Homo sapiens
tggacgggactcatgcagacagacaa

SEQ ID NO: 23638 - DNA, 26 bp, Homo sapiens
ggacgggactcatgcagacagacaaa

SEQ ID NO: 23639 - DNA, 26 bp, Homo sapiens
gacgggactcatgcagacagacaaac

SEQ ID NO: 23640 - DNA, 26 bp, Homo sapiens
acgggactcatgcagacagacaaact

SEQ ID NO: 23641 - DNA, 26 bp, Homo sapiens
cgggactcatgcagacagacaaactt

SEQ ID NO: 23642 - DNA, 26 bp, Homo sapiens
gggactcatgcagacagacaaacttg

SEQ ID NO: 23643 - DNA, 26 bp, Homo sapiens
ggactcatgcagacagacaaacttgg

SEQ ID NO: 23644 - DNA, 26 bp, Homo sapiens
gactcatgcagacagacaaacttggt

SEQ ID NO: 23645 - DNA, 26 bp, Homo sapiens
actcatgcagacagacaaacttggtt

SEQ ID NO: 23646 - DNA, 26 bp, Homo sapiens
ctcatgcagacagacaaacttggttc

SEQ ID NO: 23647 - DNA, 26 bp, Homo sapiens
tcatgcagacagacaaacttggttct

SEQ ID NO: 23648 - DNA, 26 bp, Homo sapiens
catgcagacagacaaacttggttctt

SEQ ID NO: 23649 - DNA, 26 bp, Homo sapiens
atgcagacagacaaacttggttctta

SEQ ID NO: 23650 - DNA, 26 bp, Homo sapiens
tgcagacagacaaacttggttcttat

SEQ ID NO: 23651 - DNA, 26 bp, Homo sapiens
gcagacagacaaacttggttcttata

SEQ ID NO: 23652 - DNA, 26 bp, Homo sapiens
cagacagacaaacttggttcttatag

SEQ ID NO: 23653 - DNA, 26 bp, Homo sapiens
agacagacaaacttggttcttatagt

SEQ ID NO: 23654 - DNA, 26 bp, Homo sapiens
gacagacaaacttggttcttatagtt

SEQ ID NO: 23655 - DNA, 26 bp, Homo sapiens
acagacaaacttggttcttatagttt

SEQ ID NO: 23656 - DNA, 26 bp, Homo sapiens
cagacaaacttggttcttatagtttc

SEQ ID NO: 23657 - DNA, 26 bp, Homo sapiens
agacaaacttggttcttatagtttct

SEQ ID NO: 23658 - DNA, 26 bp, Homo sapiens
gacaaacttggttcttatagtttctt

SEQ ID NO: 23659 - DNA, 26 bp, Homo sapiens
acaaacttggttcttatagtttcttt

SEQ ID NO: 23660 - DNA, 26 bp, Homo sapiens
caaacttggttcttatagtttctttg

SEQ ID NO: 23661 - DNA, 26 bp, Homo sapiens
aaacttggttcttatagtttctttgt

SEQ ID NO: 23662 - DNA, 26 bp, Homo sapiens
aacttggttcttatagtttctttgta

SEQ ID NO: 23663 - DNA, 26 bp, Homo sapiens
acttggttcttatagtttctttgtaa

SEQ ID NO: 23664 - DNA, 26 bp, Homo sapiens
cttggttcttatagtttctttgtaaa

SEQ ID NO: 23665 - DNA, 26 bp, Homo sapiens
ttggttcttatagtttctttgtaaac

SEQ ID NO: 23666 - DNA, 26 bp, Homo sapiens
tggttcttatagtttctttgtaaact

SEQ ID NO: 23667 - DNA, 26 bp, Homo sapiens
ggttcttatagtttctttgtaaactc

SEQ ID NO: 23668 - DNA, 26 bp, Homo sapiens
gttcttatagtttctttgtaaactca

SEQ ID NO: 23669 - DNA, 26 bp, Homo sapiens
ttcttatagtttctttgtaaactcag

SEQ ID NO: 23670 - DNA, 26 bp, Homo sapiens
tcttatagtttctttgtaaactcaga

SEQ ID NO: 23671 - DNA, 26 bp, Homo sapiens
cttatagtttctttgtaaactcagat

SEQ ID NO: 23672 - DNA, 26 bp, Homo sapiens
ttatagtttctttgtaaactcagatc

SEQ ID NO: 23673 - DNA, 26 bp, Homo sapiens
tatagtttctttgtaaactcagatct

SEQ ID NO: 23674 - DNA, 26 bp, Homo sapiens
atagtttctttgtaaactcagatcta

SEQ ID NO: 23675 - DNA, 26 bp, Homo sapiens
tagtttctttgtaaactcagatctaa

SEQ ID NO: 23676 - DNA, 26 bp, Homo sapiens
agtttctttgtaaactcagatctaat

SEQ ID NO: 23677 - DNA, 26 bp, Homo sapiens
gtttctttgtaaactcagatctaatt

SEQ ID NO: 23678 - DNA, 26 bp, Homo sapiens
tttctttgtaaactcagatctaattc

SEQ ID NO: 23679 - DNA, 26 bp, Homo sapiens
ttctttgtaaactcagatctaattct

SEQ ID NO: 23680 - DNA, 26 bp, Homo sapiens
tctttgtaaactcagatctaattctt

SEQ ID NO: 23681 - DNA, 26 bp, Homo sapiens
ctttgtaaactcagatctaattcttt

SEQ ID NO: 23682 - DNA, 26 bp, Homo sapiens
tttgtaaactcagatctaattctttc

SEQ ID NO: 23683 - DNA, 26 bp, Homo sapiens
ttgtaaactcagatctaattctttca

SEQ ID NO: 23684 - DNA, 26 bp, Homo sapiens
tgtaaactcagatctaattctttcat

SEQ ID NO: 23685 - DNA, 26 bp, Homo sapiens
gtaaactcagatctaattctttcata

SEQ ID NO: 23686 - DNA, 26 bp, Homo sapiens
taaactcagatctaattctttcataa

SEQ ID NO: 23687 - DNA, 26 bp, Homo sapiens
aaactcagatctaattctttcataag

SEQ ID NO: 23688 - DNA, 26 bp, Homo sapiens
aactcagatctaattctttcataagc

SEQ ID NO: 23689 - DNA, 26 bp, Homo sapiens
actcagatctaattctttcataagct

SEQ ID NO: 23690 - DNA, 26 bp, Homo sapiens
ctcagatctaattctttcataagcta

SEQ ID NO: 23691 - DNA, 26 bp, Homo sapiens
tcagatctaattctttcataagctat

SEQ ID NO: 23692 - DNA, 26 bp, Homo sapiens
cagatctaattctttcataagctatt

SEQ ID NO: 23693 - DNA, 26 bp, Homo sapiens
agatctaattctttcataagctattg

SEQ ID NO: 23694 - DNA, 26 bp, Homo sapiens
gatctaattctttcataagctattga

SEQ ID NO: 23695 - DNA, 26 bp, Homo sapiens
atctaattctttcataagctattgaa

SEQ ID NO: 23696 - DNA, 26 bp, Homo sapiens
tctaattctttcataagctattgaaa

SEQ ID NO: 23697 - DNA, 26 bp, Homo sapiens
ctaattctttcataagctattgaaag

SEQ ID NO: 23698 - DNA, 26 bp, Homo sapiens
taattctttcataagctattgaaaga

SEQ ID NO: 23699 - DNA, 26 bp, Homo sapiens
aattctttcataagctattgaaagag

SEQ ID NO: 23700 - DNA, 26 bp, Homo sapiens
attctttcataagctattgaaagaga

SEQ ID NO: 23701 - DNA, 26 bp, Homo sapiens
ttctttcataagctattgaaagagaa

SEQ ID NO: 23702 - DNA, 26 bp, Homo sapiens
tctttcataagctattgaaagagaat

SEQ ID NO: 23703 - DNA, 26 bp, Homo sapiens
ctttcataagctattgaaagagaatg

SEQ ID NO: 23704 - DNA, 26 bp, Homo sapiens
tttcataagctattgaaagagaatga

SEQ ID NO: 23705 - DNA, 26 bp, Homo sapiens
ttcataagctattgaaagagaatgac

SEQ ID NO: 23706 - DNA, 26 bp, Homo sapiens
tcataagctattgaaagagaatgacc

SEQ ID NO: 23707 - DNA, 26 bp, Homo sapiens
cataagctattgaaagagaatgacca

SEQ ID NO: 23708 - DNA, 26 bp, Homo sapiens
ataagctattgaaagagaatgaccag

SEQ ID NO: 23709 - DNA, 26 bp, Homo sapiens
taagctattgaaagagaatgaccagg

SEQ ID NO: 23710 - DNA, 26 bp, Homo sapiens
aagctattgaaagagaatgaccagga

SEQ ID NO: 23711 - DNA, 26 bp, Homo sapiens
agctattgaaagagaatgaccaggaa

SEQ ID NO: 23712 - DNA, 26 bp, Homo sapiens
gctattgaaagagaatgaccaggaaa

SEQ ID NO: 23713 - DNA, 26 bp, Homo sapiens
ctattgaaagagaatgaccaggaaaa

SEQ ID NO: 23714 - DNA, 26 bp, Homo sapiens
tattgaaagagaatgaccaggaaaaa

SEQ ID NO: 23715 - DNA, 26 bp, Homo sapiens
attgaaagagaatgaccaggaaaaaa

SEQ ID NO: 23716 - DNA, 26 bp, Homo sapiens
ttgaaagagaatgaccaggaaaaaat

SEQ ID NO: 23717 - DNA, 26 bp, Homo sapiens
tgaaagagaatgaccaggaaaaaatt

SEQ ID NO: 23718 - DNA, 26 bp, Homo sapiens
gaaagagaatgaccaggaaaaaatta

SEQ ID NO: 23719 - DNA, 26 bp, Homo sapiens
aaagagaatgaccaggaaaaaattac

SEQ ID NO: 23720 - DNA, 26 bp, Homo sapiens
aagagaatgaccaggaaaaaattaca

SEQ ID NO: 23721 - DNA, 26 bp, Homo sapiens
agagaatgaccaggaaaaaattacaa

SEQ ID NO: 23722 - DNA, 26 bp, Homo sapiens
gagaatgaccaggaaaaaattacaag

SEQ ID NO: 23723 - DNA, 26 bp, Homo sapiens
agaatgaccaggaaaaaattacaagc

SEQ ID NO: 23724 - DNA, 26 bp, Homo sapiens
gaatgaccaggaaaaaattacaagca

SEQ ID NO: 23725 - DNA, 26 bp, Homo sapiens
aatgaccaggaaaaaattacaagcat

SEQ ID NO: 23726 - DNA, 26 bp, Homo sapiens
atgaccaggaaaaaattacaagcata

SEQ ID NO: 23727 - DNA, 26 bp, Homo sapiens
tgaccaggaaaaaattacaagcatat

SEQ ID NO: 23728 - DNA, 26 bp, Homo sapiens
gaccaggaaaaaattacaagcatatt

SEQ ID NO: 23729 - DNA, 26 bp, Homo sapiens
accaggaaaaaattacaagcatattt

SEQ ID NO: 23730 - DNA, 26 bp, Homo sapiens
ccaggaaaaaattacaagcatatttt

SEQ ID NO: 23731 - DNA, 26 bp, Homo sapiens
caggaaaaaattacaagcatattttt

SEQ ID NO: 23732 - DNA, 26 bp, Homo sapiens
aggaaaaaattacaagcatatttttt

SEQ ID NO: 23733 - DNA, 26 bp, Homo sapiens
ggaaaaaattacaagcatattttttc

SEQ ID NO: 23734 - DNA, 26 bp, Homo sapiens
gaaaaaattacaagcatattttttct

SEQ ID NO: 23735 - DNA, 26 bp, Homo sapiens
aaaaaattacaagcatattttttcta

SEQ ID NO: 23736 - DNA, 26 bp, Homo sapiens
aaaaattacaagcatattttttctat

SEQ ID NO: 23737 - DNA, 26 bp, Homo sapiens
aaaattacaagcatattttttctata

SEQ ID NO: 23738 - DNA, 26 bp, Homo sapiens
aaattacaagcatattttttctatac

SEQ ID NO: 23739 - DNA, 26 bp, Homo sapiens
aattacaagcatattttttctataca

SEQ ID NO: 23740 - DNA, 26 bp, Homo sapiens
attacaagcatattttttctatacaa

SEQ ID NO: 23741 - DNA, 26 bp, Homo sapiens
ttacaagcatattttttctatacaaa

SEQ ID NO: 23742 - DNA, 26 bp, Homo sapiens
tacaagcatattttttctatacaaaa

SEQ ID NO: 23743 - DNA, 26 bp, Homo sapiens
acaagcatattttttctatacaaaag

SEQ ID NO: 23744 - DNA, 26 bp, Homo sapiens
caagcatattttttctatacaaaaga

SEQ ID NO: 23745 - DNA, 26 bp, Homo sapiens
aagcatattttttctatacaaaagaa

SEQ ID NO: 23746 - DNA, 26 bp, Homo sapiens
agcatattttttctatacaaaagaat

SEQ ID NO: 23747 - DNA, 26 bp, Homo sapiens
gcatattttttctatacaaaagaatc

SEQ ID NO: 23748 - DNA, 26 bp, Homo sapiens
catattttttctatacaaaagaatcc

SEQ ID NO: 23749 - DNA, 26 bp, Homo sapiens
atattttttctatacaaaagaatccc

SEQ ID NO: 23750 - DNA, 26 bp, Homo sapiens
tattttttctatacaaaagaatcccc

SEQ ID NO: 23751 - DNA, 26 bp, Homo sapiens
attttttctatacaaaagaatcccca

SEQ ID NO: 23752 - DNA, 26 bp, Homo sapiens
ttttttctatacaaaagaatccccat

SEQ ID NO: 23753 - DNA, 26 bp, Homo sapiens
tttttctatacaaaagaatccccatt

SEQ ID NO: 23754 - DNA, 26 bp, Homo sapiens
ttttctatacaaaagaatccccattg

SEQ ID NO: 23755 - DNA, 26 bp, Homo sapiens
tttctatacaaaagaatccccattgt

SEQ ID NO: 23756 - DNA, 26 bp, Homo sapiens
ttctatacaaaagaatccccattgtg

SEQ ID NO: 23757 - DNA, 26 bp, Homo sapiens
tctatacaaaagaatccccattgtgg

SEQ ID NO: 23758 - DNA, 26 bp, Homo sapiens
ctatacaaaagaatccccattgtggg

SEQ ID NO: 23759 - DNA, 26 bp, Homo sapiens
tatacaaaagaatccccattgtgggc

SEQ ID NO: 23760 - DNA, 26 bp, Homo sapiens
atacaaaagaatccccattgtgggcc

SEQ ID NO: 23761 - DNA, 26 bp, Homo sapiens
tacaaaagaatccccattgtgggcca

SEQ ID NO: 23762 - DNA, 26 bp, Homo sapiens
acaaaagaatccccattgtgggccag

SEQ ID NO: 23763 - DNA, 26 bp, Homo sapiens
caaaagaatccccattgtgggccagt

SEQ ID NO: 23764 - DNA, 26 bp, Homo sapiens
aaaagaatccccattgtgggccagtt

SEQ ID NO: 23765 - DNA, 26 bp, Homo sapiens
aaagaatccccattgtgggccagttt

SEQ ID NO: 23766 - DNA, 26 bp, Homo sapiens
aagaatccccattgtgggccagtttg

SEQ ID NO: 23767 - DNA, 26 bp, Homo sapiens
agaatccccattgtgggccagtttgg

SEQ ID NO: 23768 - DNA, 26 bp, Homo sapiens
gaatccccattgtgggccagtttggt

SEQ ID NO: 23769 - DNA, 26 bp, Homo sapiens
aatccccattgtgggccagtttggta

SEQ ID NO: 23770 - DNA, 26 bp, Homo sapiens
atccccattgtgggccagtttggtag

SEQ ID NO: 23771 - DNA, 26 bp, Homo sapiens
tccccattgtgggccagtttggtagg

SEQ ID NO: 23772 - DNA, 26 bp, Homo sapiens
ccccattgtgggccagtttggtagga

SEQ ID NO: 23773 - DNA, 26 bp, Homo sapiens
cccattgtgggccagtttggtaggaa

SEQ ID NO: 23774 - DNA, 26 bp, Homo sapiens
ccattgtgggccagtttggtaggaaa

SEQ ID NO: 23775 - DNA, 26 bp, Homo sapiens
cattgtgggccagtttggtaggaaac

SEQ ID NO: 23776 - DNA, 26 bp, Homo sapiens
attgtgggccagtttggtaggaaaca

SEQ ID NO: 23777 - DNA, 26 bp, Homo sapiens
ttgtgggccagtttggtaggaaacag

SEQ ID NO: 23778 - DNA, 26 bp, Homo sapiens
tgtgggccagtttggtaggaaacaga

SEQ ID NO: 23779 - DNA, 26 bp, Homo sapiens
gtgggccagtttggtaggaaacagaa

SEQ ID NO: 23780 - DNA, 26 bp, Homo sapiens
tgggccagtttggtaggaaacagaaa

SEQ ID NO: 23781 - DNA, 26 bp, Homo sapiens
gggccagtttggtaggaaacagaaac

SEQ ID NO: 23782 - DNA, 26 bp, Homo sapiens
ggccagtttggtaggaaacagaaaca

SEQ ID NO: 23783 - DNA, 26 bp, Homo sapiens
gccagtttggtaggaaacagaaacaa

SEQ ID NO: 23784 - DNA, 26 bp, Homo sapiens
ccagtttggtaggaaacagaaacaag

SEQ ID NO: 23785 - DNA, 26 bp, Homo sapiens
cagtttggtaggaaacagaaacaagc

SEQ ID NO: 23786 - DNA, 26 bp, Homo sapiens
agtttggtaggaaacagaaacaagca

SEQ ID NO: 23787 - DNA, 26 bp, Homo sapiens
gtttggtaggaaacagaaacaagcaa

SEQ ID NO: 23788 - DNA, 26 bp, Homo sapiens
tttggtaggaaacagaaacaagcaaa

SEQ ID NO: 23789 - DNA, 26 bp, Homo sapiens
ttggtaggaaacagaaacaagcaaat

SEQ ID NO: 23790 - DNA, 26 bp, Homo sapiens
tggtaggaaacagaaacaagcaaata

SEQ ID NO: 23791 - DNA, 26 bp, Homo sapiens
ggtaggaaacagaaacaagcaaatat

SEQ ID NO: 23792 - DNA, 26 bp, Homo sapiens
gtaggaaacagaaacaagcaaatata

SEQ ID NO: 23793 - DNA, 26 bp, Homo sapiens
taggaaacagaaacaagcaaatataa

SEQ ID NO: 23794 - DNA, 26 bp, Homo sapiens
aggaaacagaaacaagcaaatataac

SEQ ID NO: 23795 - DNA, 26 bp, Homo sapiens
ggaaacagaaacaagcaaatataaca

SEQ ID NO: 23796 - DNA, 26 bp, Homo sapiens
gaaacagaaacaagcaaatataacaa

SEQ ID NO: 23797 - DNA, 26 bp, Homo sapiens
aaacagaaacaagcaaatataacaaa

SEQ ID NO: 23798 - DNA, 26 bp, Homo sapiens
aacagaaacaagcaaatataacaaaa

SEQ ID NO: 23799 - DNA, 26 bp, Homo sapiens
acagaaacaagcaaatataacaaaat

SEQ ID NO: 23800 - DNA, 26 bp, Homo sapiens
cagaaacaagcaaatataacaaaatc

SEQ ID NO: 23801 - DNA, 26 bp, Homo sapiens
agaaacaagcaaatataacaaaatct

SEQ ID NO: 23802 - DNA, 26 bp, Homo sapiens
gaaacaagcaaatataacaaaatctg

SEQ ID NO: 23803 - DNA, 26 bp, Homo sapiens
aaacaagcaaatataacaaaatctgt

SEQ ID NO: 23804 - DNA, 26 bp, Homo sapiens
aacaagcaaatataacaaaatctgtg

SEQ ID NO: 23805 - DNA, 26 bp, Homo sapiens
acaagcaaatataacaaaatctgtgt

SEQ ID NO: 23806 - DNA, 26 bp, Homo sapiens
caagcaaatataacaaaatctgtgtt

SEQ ID NO: 23807 - DNA, 26 bp, Homo sapiens
aagcaaatataacaaaatctgtgttc

SEQ ID NO: 23808 - DNA, 26 bp, Homo sapiens
agcaaatataacaaaatctgtgttca

SEQ ID NO: 23809 - DNA, 26 bp, Homo sapiens
gcaaatataacaaaatctgtgttcat

SEQ ID NO: 23810 - DNA, 26 bp, Homo sapiens
caaatataacaaaatctgtgttcata

SEQ ID NO: 23811 - DNA, 26 bp, Homo sapiens
aaatataacaaaatctgtgttcatac

SEQ ID NO: 23812 - DNA, 26 bp, Homo sapiens
aatataacaaaatctgtgttcataca

SEQ ID NO: 23813 - DNA, 26 bp, Homo sapiens
atataacaaaatctgtgttcatacat

SEQ ID NO: 23814 - DNA, 26 bp, Homo sapiens
tataacaaaatctgtgttcatacatg

SEQ ID NO: 23815 - DNA, 26 bp, Homo sapiens
ataacaaaatctgtgttcatacatgg

SEQ ID NO: 23816 - DNA, 26 bp, Homo sapiens
taacaaaatctgtgttcatacatggc

SEQ ID NO: 23817 - DNA, 26 bp, Homo sapiens
aacaaaatctgtgttcatacatggcg

SEQ ID NO: 23818 - DNA, 26 bp, Homo sapiens
acaaaatctgtgttcatacatggcga

SEQ ID NO: 23819 - DNA, 26 bp, Homo sapiens
caaaatctgtgttcatacatggcgat

SEQ ID NO: 23820 - DNA, 26 bp, Homo sapiens
aaaatctgtgttcatacatggcgata

SEQ ID NO: 23821 - DNA, 26 bp, Homo sapiens
aaatctgtgttcatacatggcgatat

SEQ ID NO: 23822 - DNA, 26 bp, Homo sapiens
aatctgtgttcatacatggcgatata

SEQ ID NO: 23823 - DNA, 26 bp, Homo sapiens
atctgtgttcatacatggcgatatag

SEQ ID NO: 23824 - DNA, 26 bp, Homo sapiens
tctgtgttcatacatggcgatatagt

SEQ ID NO: 23825 - DNA, 26 bp, Homo sapiens
ctgtgttcatacatggcgatatagtt

SEQ ID NO: 23826 - DNA, 26 bp, Homo sapiens
tgtgttcatacatggcgatatagtta

SEQ ID NO: 23827 - DNA, 26 bp, Homo sapiens
gtgttcatacatggcgatatagttag

SEQ ID NO: 23828 - DNA, 26 bp, Homo sapiens
tgttcatacatggcgatatagttagt

SEQ ID NO: 23829 - DNA, 26 bp, Homo sapiens
gttcatacatggcgatatagttagta

SEQ ID NO: 23830 - DNA, 26 bp, Homo sapiens
ttcatacatggcgatatagttagtat

SEQ ID NO: 23831 - DNA, 26 bp, Homo sapiens
tcatacatggcgatatagttagtata

SEQ ID NO: 23832 - DNA, 26 bp, Homo sapiens
catacatggcgatatagttagtatat

SEQ ID NO: 23833 - DNA, 26 bp, Homo sapiens
atacatggcgatatagttagtatata

SEQ ID NO: 23834 - DNA, 26 bp, Homo sapiens
tacatggcgatatagttagtatatac

SEQ ID NO: 23835 - DNA, 26 bp, Homo sapiens
acatggcgatatagttagtatataca

SEQ ID NO: 23836 - DNA, 26 bp, Homo sapiens
catggcgatatagttagtatatacaa

SEQ ID NO: 23837 - DNA, 26 bp, Homo sapiens
atggcgatatagttagtatatacaaa

SEQ ID NO: 23838 - DNA, 26 bp, Homo sapiens
tggcgatatagttagtatatacaaat

SEQ ID NO: 23839 - DNA, 26 bp, Homo sapiens
ggcgatatagttagtatatacaaata

SEQ ID NO: 23840 - DNA, 26 bp, Homo sapiens
gcgatatagttagtatatacaaatat

SEQ ID NO: 23841 - DNA, 26 bp, Homo sapiens
cgatatagttagtatatacaaatatg

SEQ ID NO: 23842 - DNA, 26 bp, Homo sapiens
gatatagttagtatatacaaatatgt

SEQ ID NO: 23843 - DNA, 26 bp, Homo sapiens
atatagttagtatatacaaatatgta

SEQ ID NO: 23844 - DNA, 26 bp, Homo sapiens
tatagttagtatatacaaatatgtac

SEQ ID NO: 23845 - DNA, 26 bp, Homo sapiens
atagttagtatatacaaatatgtaca

SEQ ID NO: 23846 - DNA, 26 bp, Homo sapiens
tagttagtatatacaaatatgtacac

SEQ ID NO: 23847 - DNA, 26 bp, Homo sapiens
agttagtatatacaaatatgtacact

SEQ ID NO: 23848 - DNA, 26 bp, Homo sapiens
gttagtatatacaaatatgtacacta

SEQ ID NO: 23849 - DNA, 26 bp, Homo sapiens
ttagtatatacaaatatgtacactat

SEQ ID NO: 23850 - DNA, 26 bp, Homo sapiens
tagtatatacaaatatgtacactata

SEQ ID NO: 23851 - DNA, 26 bp, Homo sapiens
agtatatacaaatatgtacactataa

SEQ ID NO: 23852 - DNA, 26 bp, Homo sapiens
gtatatacaaatatgtacactataaa

SEQ ID NO: 23853 - DNA, 26 bp, Homo sapiens
tatatacaaatatgtacactataaaa

SEQ ID NO: 23854 - DNA, 26 bp, Homo sapiens
atatacaaatatgtacactataaaaa

SEQ ID NO: 23855 - DNA, 26 bp, Homo sapiens
tatacaaatatgtacactataaaaat

SEQ ID NO: 23856 - DNA, 26 bp, Homo sapiens
atacaaatatgtacactataaaaatg

SEQ ID NO: 23857 - DNA, 26 bp, Homo sapiens
tacaaatatgtacactataaaaatgc

SEQ ID NO: 23858 - DNA, 26 bp, Homo sapiens
acaaatatgtacactataaaaatgca

SEQ ID NO: 23859 - DNA, 26 bp, Homo sapiens
caaatatgtacactataaaaatgcac

SEQ ID NO: 23860 - DNA, 26 bp, Homo sapiens
aaatatgtacactataaaaatgcacg

SEQ ID NO: 23861 - DNA, 26 bp, Homo sapiens
aatatgtacactataaaaatgcacgg

SEQ ID NO: 23862 - DNA, 26 bp, Homo sapiens
atatgtacactataaaaatgcacgga

SEQ ID NO: 23863 - DNA, 26 bp, Homo sapiens
tatgtacactataaaaatgcacggaa

SEQ ID NO: 23864 - DNA, 26 bp, Homo sapiens
atgtacactataaaaatgcacggaag

SEQ ID NO: 23865 - DNA, 26 bp, Homo sapiens
tgtacactataaaaatgcacggaagg

SEQ ID NO: 23866 - DNA, 26 bp, Homo sapiens
gtacactataaaaatgcacggaaggc

SEQ ID NO: 23867 - DNA, 26 bp, Homo sapiens
tacactataaaaatgcacggaaggct

SEQ ID NO: 23868 - DNA, 26 bp, Homo sapiens
acactataaaaatgcacggaaggctt

SEQ ID NO: 23869 - DNA, 26 bp, Homo sapiens
cactataaaaatgcacggaaggctta

SEQ ID NO: 23870 - DNA, 26 bp, Homo sapiens
actataaaaatgcacggaaggcttac

SEQ ID NO: 23871 - DNA, 26 bp, Homo sapiens
ctataaaaatgcacggaaggcttacg

SEQ ID NO: 23872 - DNA, 26 bp, Homo sapiens
tataaaaatgcacggaaggcttacgc

SEQ ID NO: 23873 - DNA, 26 bp, Homo sapiens
ataaaaatgcacggaaggcttacgct

SEQ ID NO: 23874 - DNA, 26 bp, Homo sapiens
taaaaatgcacggaaggcttacgctc

SEQ ID NO: 23875 - DNA, 26 bp, Homo sapiens
aaaaatgcacggaaggcttacgctcc

SEQ ID NO: 23876 - DNA, 26 bp, Homo sapiens
aaaatgcacggaaggcttacgctccc

SEQ ID NO: 23877 - DNA, 26 bp, Homo sapiens
aaatgcacggaaggcttacgctccca

SEQ ID NO: 23878 - DNA, 26 bp, Homo sapiens
aatgcacggaaggcttacgctcccag

SEQ ID NO: 23879 - DNA, 26 bp, Homo sapiens
atgcacggaaggcttacgctcccagc

SEQ ID NO: 23880 - DNA, 26 bp, Homo sapiens
tgcacggaaggcttacgctcccagcc

SEQ ID NO: 23881 - DNA, 26 bp, Homo sapiens
gcacggaaggcttacgctcccagcca

SEQ ID NO: 23882 - DNA, 26 bp, Homo sapiens
cacggaaggcttacgctcccagccat

SEQ ID NO: 23883 - DNA, 26 bp, Homo sapiens
acggaaggcttacgctcccagccatc

SEQ ID NO: 23884 - DNA, 26 bp, Homo sapiens
cggaaggcttacgctcccagccatcc

SEQ ID NO: 23885 - DNA, 26 bp, Homo sapiens
ggaaggcttacgctcccagccatcca

SEQ ID NO: 23886 - DNA, 26 bp, Homo sapiens
gaaggcttacgctcccagccatccaa

SEQ ID NO: 23887 - DNA, 26 bp, Homo sapiens
aaggcttacgctcccagccatccaag

SEQ ID NO: 23888 - DNA, 26 bp, Homo sapiens
aggcttacgctcccagccatccaagc

SEQ ID NO: 23889 - DNA, 26 bp, Homo sapiens
ggcttacgctcccagccatccaagct

SEQ ID NO: 23890 - DNA, 26 bp, Homo sapiens
gcttacgctcccagccatccaagctg

SEQ ID NO: 23891 - DNA, 26 bp, Homo sapiens
cttacgctcccagccatccaagctgc

SEQ ID NO: 23892 - DNA, 26 bp, Homo sapiens
ttacgctcccagccatccaagctgca

SEQ ID NO: 23893 - DNA, 26 bp, Homo sapiens
tacgctcccagccatccaagctgcat

SEQ ID NO: 23894 - DNA, 26 bp, Homo sapiens
acgctcccagccatccaagctgcatt

SEQ ID NO: 23895 - DNA, 26 bp, Homo sapiens
cgctcccagccatccaagctgcattg

SEQ ID NO: 23896 - DNA, 26 bp, Homo sapiens
gctcccagccatccaagctgcattgt

SEQ ID NO: 23897 - DNA, 26 bp, Homo sapiens
ctcccagccatccaagctgcattgta

SEQ ID NO: 23898 - DNA, 26 bp, Homo sapiens
tcccagccatccaagctgcattgtac

SEQ ID NO: 23899 - DNA, 26 bp, Homo sapiens
cccagccatccaagctgcattgtact

SEQ ID NO: 23900 - DNA, 26 bp, Homo sapiens
ccagccatccaagctgcattgtactc

SEQ ID NO: 23901 - DNA, 26 bp, Homo sapiens
cagccatccaagctgcattgtactca

SEQ ID NO: 23902 - DNA, 26 bp, Homo sapiens
agccatccaagctgcattgtactcag

SEQ ID NO: 23903 - DNA, 26 bp, Homo sapiens
gccatccaagctgcattgtactcagg

SEQ ID NO: 23904 - DNA, 26 bp, Homo sapiens
ccatccaagctgcattgtactcaggg

SEQ ID NO: 23905 - DNA, 26 bp, Homo sapiens
catccaagctgcattgtactcaggga

SEQ ID NO: 23906 - DNA, 26 bp, Homo sapiens
atccaagctgcattgtactcagggaa

SEQ ID NO: 23907 - DNA, 26 bp, Homo sapiens
tccaagctgcattgtactcagggaaa

SEQ ID NO: 23908 - DNA, 26 bp, Homo sapiens
ccaagctgcattgtactcagggaaaa

SEQ ID NO: 23909 - DNA, 26 bp, Homo sapiens
caagctgcattgtactcagggaaaac

SEQ ID NO: 23910 - DNA, 26 bp, Homo sapiens
aagctgcattgtactcagggaaaaca

SEQ ID NO: 23911 - DNA, 26 bp, Homo sapiens
agctgcattgtactcagggaaaacag

SEQ ID NO: 23912 - DNA, 26 bp, Homo sapiens
gctgcattgtactcagggaaaacagc

SEQ ID NO: 23913 - DNA, 26 bp, Homo sapiens
ctgcattgtactcagggaaaacagcc

SEQ ID NO: 23914 - DNA, 26 bp, Homo sapiens
tgcattgtactcagggaaaacagcct

SEQ ID NO: 23915 - DNA, 26 bp, Homo sapiens
gcattgtactcagggaaaacagcctg

SEQ ID NO: 23916 - DNA, 26 bp, Homo sapiens
cattgtactcagggaaaacagcctgg

SEQ ID NO: 23917 - DNA, 26 bp, Homo sapiens
attgtactcagggaaaacagcctggt

SEQ ID NO: 23918 - DNA, 26 bp, Homo sapiens
ttgtactcagggaaaacagcctggtt

SEQ ID NO: 23919 - DNA, 26 bp, Homo sapiens
tgtactcagggaaaacagcctggttt

SEQ ID NO: 23920 - DNA, 26 bp, Homo sapiens
gtactcagggaaaacagcctggtttt

SEQ ID NO: 23921 - DNA, 26 bp, Homo sapiens
tactcagggaaaacagcctggttttt

SEQ ID NO: 23922 - DNA, 26 bp, Homo sapiens
actcagggaaaacagcctggtttttc

SEQ ID NO: 23923 - DNA, 26 bp, Homo sapiens
ctcagggaaaacagcctggtttttct

SEQ ID NO: 23924 - DNA, 26 bp, Homo sapiens
tcagggaaaacagcctggtttttctt

SEQ ID NO: 23925 - DNA, 26 bp, Homo sapiens
cagggaaaacagcctggtttttcttc

SEQ ID NO: 23926 - DNA, 26 bp, Homo sapiens
agggaaaacagcctggtttttcttcc

SEQ ID NO: 23927 - DNA, 26 bp, Homo sapiens
gggaaaacagcctggtttttcttcct

SEQ ID NO: 23928 - DNA, 26 bp, Homo sapiens
ggaaaacagcctggtttttcttccta

SEQ ID NO: 23929 - DNA, 26 bp, Homo sapiens
gaaaacagcctggtttttcttcctag

SEQ ID NO: 23930 - DNA, 26 bp, Homo sapiens
aaaacagcctggtttttcttcctagt

SEQ ID NO: 23931 - DNA, 26 bp, Homo sapiens
aaacagcctggtttttcttcctagta

SEQ ID NO: 23932 - DNA, 26 bp, Homo sapiens
aacagcctggtttttcttcctagtat

SEQ ID NO: 23933 - DNA, 26 bp, Homo sapiens
acagcctggtttttcttcctagtata

SEQ ID NO: 23934 - DNA, 26 bp, Homo sapiens
cagcctggtttttcttcctagtatac

SEQ ID NO: 23935 - DNA, 26 bp, Homo sapiens
agcctggtttttcttcctagtataca

SEQ ID NO: 23936 - DNA, 26 bp, Homo sapiens
gcctggtttttcttcctagtatacag

SEQ ID NO: 23937 - DNA, 26 bp, Homo sapiens
cctggtttttcttcctagtatacagg

SEQ ID NO: 23938 - DNA, 26 bp, Homo sapiens
ctggtttttcttcctagtatacaggc

SEQ ID NO: 23939 - DNA, 26 bp, Homo sapiens
tggtttttcttcctagtatacaggca

SEQ ID NO: 23940 - DNA, 26 bp, Homo sapiens
ggtttttcttcctagtatacaggcaa

SEQ ID NO: 23941 - DNA, 26 bp, Homo sapiens
gtttttcttcctagtatacaggcaaa

SEQ ID NO: 23942 - DNA, 26 bp, Homo sapiens
tttttcttcctagtatacaggcaaat

SEQ ID NO: 23943 - DNA, 26 bp, Homo sapiens
ttttcttcctagtatacaggcaaatg

SEQ ID NO: 23944 - DNA, 26 bp, Homo sapiens
tttcttcctagtatacaggcaaatgt

SEQ ID NO: 23945 - DNA, 26 bp, Homo sapiens
ttcttcctagtatacaggcaaatgta

SEQ ID NO: 23946 - DNA, 26 bp, Homo sapiens
tcttcctagtatacaggcaaatgtat

SEQ ID NO: 23947 - DNA, 26 bp, Homo sapiens
cttcctagtatacaggcaaatgtatt

SEQ ID NO: 23948 - DNA, 26 bp, Homo sapiens
ttcctagtatacaggcaaatgtatta

SEQ ID NO: 23949 - DNA, 26 bp, Homo sapiens
tcctagtatacaggcaaatgtattat

SEQ ID NO: 23950 - DNA, 26 bp, Homo sapiens
cctagtatacaggcaaatgtattata

SEQ ID NO: 23951 - DNA, 26 bp, Homo sapiens
ctagtatacaggcaaatgtattatat

SEQ ID NO: 23952 - DNA, 26 bp, Homo sapiens
tagtatacaggcaaatgtattatata

SEQ ID NO: 23953 - DNA, 26 bp, Homo sapiens
agtatacaggcaaatgtattatatac

SEQ ID NO: 23954 - DNA, 26 bp, Homo sapiens
gtatacaggcaaatgtattatataca

SEQ ID NO: 23955 - DNA, 26 bp, Homo sapiens
tatacaggcaaatgtattatatacag

SEQ ID NO: 23956 - DNA, 26 bp, Homo sapiens
atacaggcaaatgtattatatacagc

SEQ ID NO: 23957 - DNA, 26 bp, Homo sapiens
tacaggcaaatgtattatatacagca

SEQ ID NO: 23958 - DNA, 26 bp, Homo sapiens
acaggcaaatgtattatatacagcat

SEQ ID NO: 23959 - DNA, 26 bp, Homo sapiens
caggcaaatgtattatatacagcatg

SEQ ID NO: 23960 - DNA, 26 bp, Homo sapiens
aggcaaatgtattatatacagcatgc

SEQ ID NO: 23961 - DNA, 26 bp, Homo sapiens
ggcaaatgtattatatacagcatgca

SEQ ID NO: 23962 - DNA, 26 bp, Homo sapiens
gcaaatgtattatatacagcatgcag

SEQ ID NO: 23963 - DNA, 26 bp, Homo sapiens
caaatgtattatatacagcatgcagg

SEQ ID NO: 23964 - DNA, 26 bp, Homo sapiens
aaatgtattatatacagcatgcaggt

SEQ ID NO: 23965 - DNA, 26 bp, Homo sapiens
aatgtattatatacagcatgcaggtg

SEQ ID NO: 23966 - DNA, 26 bp, Homo sapiens
atgtattatatacagcatgcaggtga

SEQ ID NO: 23967 - DNA, 26 bp, Homo sapiens
tgtattatatacagcatgcaggtgat

SEQ ID NO: 23968 - DNA, 26 bp, Homo sapiens
gtattatatacagcatgcaggtgata

SEQ ID NO: 23969 - DNA, 26 bp, Homo sapiens
tattatatacagcatgcaggtgatag

SEQ ID NO: 23970 - DNA, 26 bp, Homo sapiens
attatatacagcatgcaggtgataga

SEQ ID NO: 23971 - DNA, 26 bp, Homo sapiens
ttatatacagcatgcaggtgatagaa

SEQ ID NO: 23972 - DNA, 26 bp, Homo sapiens
tatatacagcatgcaggtgatagaaa

SEQ ID NO: 23973 - DNA, 26 bp, Homo sapiens
atatacagcatgcaggtgatagaaaa

SEQ ID NO: 23974 - DNA, 26 bp, Homo sapiens
tatacagcatgcaggtgatagaaaat

SEQ ID NO: 23975 - DNA, 26 bp, Homo sapiens
atacagcatgcaggtgatagaaaatt

SEQ ID NO: 23976 - DNA, 26 bp, Homo sapiens
tacagcatgcaggtgatagaaaatta

SEQ ID NO: 23977 - DNA, 26 bp, Homo sapiens
acagcatgcaggtgatagaaaattag

SEQ ID NO: 23978 - DNA, 26 bp, Homo sapiens
cagcatgcaggtgatagaaaattagt

SEQ ID NO: 23979 - DNA, 26 bp, Homo sapiens
agcatgcaggtgatagaaaattagtg

SEQ ID NO: 23980 - DNA, 26 bp, Homo sapiens
gcatgcaggtgatagaaaattagtgc

SEQ ID NO: 23981 - DNA, 26 bp, Homo sapiens
catgcaggtgatagaaaattagtgcg

SEQ ID NO: 23982 - DNA, 26 bp, Homo sapiens
atgcaggtgatagaaaattagtgcgc

SEQ ID NO: 23983 - DNA, 26 bp, Homo sapiens
tgcaggtgatagaaaattagtgcgct

SEQ ID NO: 23984 - DNA, 26 bp, Homo sapiens
gcaggtgatagaaaattagtgcgctt

SEQ ID NO: 23985 - DNA, 26 bp, Homo sapiens
caggtgatagaaaattagtgcgcttg

SEQ ID NO: 23986 - DNA, 26 bp, Homo sapiens
aggtgatagaaaattagtgcgcttgc

SEQ ID NO: 23987 - DNA, 26 bp, Homo sapiens
ggtgatagaaaattagtgcgcttgca

SEQ ID NO: 23988 - DNA, 26 bp, Homo sapiens
gtgatagaaaattagtgcgcttgcac

SEQ ID NO: 23989 - DNA, 26 bp, Homo sapiens
tgatagaaaattagtgcgcttgcaca

SEQ ID NO: 23990 - DNA, 26 bp, Homo sapiens
gatagaaaattagtgcgcttgcacag

SEQ ID NO: 23991 - DNA, 26 bp, Homo sapiens
atagaaaattagtgcgcttgcacaga

SEQ ID NO: 23992 - DNA, 26 bp, Homo sapiens
tagaaaattagtgcgcttgcacagaa

SEQ ID NO: 23993 - DNA, 26 bp, Homo sapiens
agaaaattagtgcgcttgcacagaaa

SEQ ID NO: 23994 - DNA, 26 bp, Homo sapiens
gaaaattagtgcgcttgcacagaaac

SEQ ID NO: 23995 - DNA, 26 bp, Homo sapiens
aaaattagtgcgcttgcacagaaaca

SEQ ID NO: 23996 - DNA, 26 bp, Homo sapiens
aaattagtgcgcttgcacagaaacat

SEQ ID NO: 23997 - DNA, 26 bp, Homo sapiens
aattagtgcgcttgcacagaaacatt

SEQ ID NO: 23998 - DNA, 26 bp, Homo sapiens
attagtgcgcttgcacagaaacattc

SEQ ID NO: 23999 - DNA, 26 bp, Homo sapiens
ttagtgcgcttgcacagaaacattct

SEQ ID NO: 24000 - DNA, 26 bp, Homo sapiens
tagtgcgcttgcacagaaacattcta

SEQ ID NO: 24001 - DNA, 26 bp, Homo sapiens
agtgcgcttgcacagaaacattctac

SEQ ID NO: 24002 - DNA, 26 bp, Homo sapiens
gtgcgcttgcacagaaacattctaca

SEQ ID NO: 24003 - DNA, 26 bp, Homo sapiens
tgcgcttgcacagaaacattctacag

SEQ ID NO: 24004 - DNA, 26 bp, Homo sapiens
gcgcttgcacagaaacattctacagg

SEQ ID NO: 24005 - DNA, 26 bp, Homo sapiens
cgcttgcacagaaacattctacaggc

SEQ ID NO: 24006 - DNA, 26 bp, Homo sapiens
gcttgcacagaaacattctacaggca

SEQ ID NO: 24007 - DNA, 26 bp, Homo sapiens
cttgcacagaaacattctacaggcat

SEQ ID NO: 24008 - DNA, 26 bp, Homo sapiens
ttgcacagaaacattctacaggcatg

SEQ ID NO: 24009 - DNA, 26 bp, Homo sapiens
tgcacagaaacattctacaggcatgg

SEQ ID NO: 24010 - DNA, 26 bp, Homo sapiens
gcacagaaacattctacaggcatggt

SEQ ID NO: 24011 - DNA, 26 bp, Homo sapiens
cacagaaacattctacaggcatggtt

SEQ ID NO: 24012 - DNA, 26 bp, Homo sapiens
acagaaacattctacaggcatggttg

SEQ ID NO: 24013 - DNA, 26 bp, Homo sapiens
cagaaacattctacaggcatggttgc

SEQ ID NO: 24014 - DNA, 26 bp, Homo sapiens
agaaacattctacaggcatggttgca

SEQ ID NO: 24015 - DNA, 26 bp, Homo sapiens
gaaacattctacaggcatggttgcag

SEQ ID NO: 24016 - DNA, 26 bp, Homo sapiens
aaacattctacaggcatggttgcagt

SEQ ID NO: 24017 - DNA, 26 bp, Homo sapiens
aacattctacaggcatggttgcagtc

SEQ ID NO: 24018 - DNA, 26 bp, Homo sapiens
acattctacaggcatggttgcagtca

SEQ ID NO: 24019 - DNA, 26 bp, Homo sapiens
cattctacaggcatggttgcagtcat

SEQ ID NO: 24020 - DNA, 26 bp, Homo sapiens
attctacaggcatggttgcagtcatt

SEQ ID NO: 24021 - DNA, 26 bp, Homo sapiens
ttctacaggcatggttgcagtcattt

SEQ ID NO: 24022 - DNA, 26 bp, Homo sapiens
tctacaggcatggttgcagtcatttt

SEQ ID NO: 24023 - DNA, 26 bp, Homo sapiens
ctacaggcatggttgcagtcattttt

SEQ ID NO: 24024 - DNA, 26 bp, Homo sapiens
tacaggcatggttgcagtcatttttc

SEQ ID NO: 24025 - DNA, 26 bp, Homo sapiens
acaggcatggttgcagtcatttttct

SEQ ID NO: 24026 - DNA, 26 bp, Homo sapiens
caggcatggttgcagtcatttttctt

SEQ ID NO: 24027 - DNA, 26 bp, Homo sapiens
aggcatggttgcagtcatttttcttt

SEQ ID NO: 24028 - DNA, 26 bp, Homo sapiens
ggcatggttgcagtcatttttctttg

SEQ ID NO: 24029 - DNA, 26 bp, Homo sapiens
gcatggttgcagtcatttttctttga

SEQ ID NO: 24030 - DNA, 26 bp, Homo sapiens
catggttgcagtcatttttctttgaa

SEQ ID NO: 24031 - DNA, 26 bp, Homo sapiens
atggttgcagtcatttttctttgaaa

SEQ ID NO: 24032 - DNA, 26 bp, Homo sapiens
tggttgcagtcatttttctttgaaaa

SEQ ID NO: 24033 - DNA, 26 bp, Homo sapiens
ggttgcagtcatttttctttgaaaat

SEQ ID NO: 24034 - DNA, 26 bp, Homo sapiens
gttgcagtcatttttctttgaaaatg

SEQ ID NO: 24035 - DNA, 26 bp, Homo sapiens
ttgcagtcatttttctttgaaaatga

SEQ ID NO: 24036 - DNA, 26 bp, Homo sapiens
tgcagtcatttttctttgaaaatgac

SEQ ID NO: 24037 - DNA, 26 bp, Homo sapiens
gcagtcatttttctttgaaaatgacc

SEQ ID NO: 24038 - DNA, 26 bp, Homo sapiens
cagtcatttttctttgaaaatgaccg

SEQ ID NO: 24039 - DNA, 26 bp, Homo sapiens
agtcatttttctttgaaaatgaccgg

SEQ ID NO: 24040 - DNA, 26 bp, Homo sapiens
gtcatttttctttgaaaatgaccggt

SEQ ID NO: 24041 - DNA, 26 bp, Homo sapiens
tcatttttctttgaaaatgaccggtc

SEQ ID NO: 24042 - DNA, 26 bp, Homo sapiens
catttttctttgaaaatgaccggtct

SEQ ID NO: 24043 - DNA, 26 bp, Homo sapiens
atttttctttgaaaatgaccggtctg

SEQ ID NO: 24044 - DNA, 26 bp, Homo sapiens
tttttctttgaaaatgaccggtctgc

SEQ ID NO: 24045 - DNA, 26 bp, Homo sapiens
ttttctttgaaaatgaccggtctgct

SEQ ID NO: 24046 - DNA, 26 bp, Homo sapiens
tttctttgaaaatgaccggtctgctt

SEQ ID NO: 24047 - DNA, 26 bp, Homo sapiens
ttctttgaaaatgaccggtctgcttt

SEQ ID NO: 24048 - DNA, 26 bp, Homo sapiens
tctttgaaaatgaccggtctgctttc

SEQ ID NO: 24049 - DNA, 26 bp, Homo sapiens
ctttgaaaatgaccggtctgctttct

SEQ ID NO: 24050 - DNA, 26 bp, Homo sapiens
tttgaaaatgaccggtctgctttctg

SEQ ID NO: 24051 - DNA, 26 bp, Homo sapiens
ttgaaaatgaccggtctgctttctga

SEQ ID NO: 24052 - DNA, 26 bp, Homo sapiens
tgaaaatgaccggtctgctttctgaa

SEQ ID NO: 24053 - DNA, 26 bp, Homo sapiens
gaaaatgaccggtctgctttctgaat

SEQ ID NO: 24054 - DNA, 26 bp, Homo sapiens
aaaatgaccggtctgctttctgaata

SEQ ID NO: 24055 - DNA, 26 bp, Homo sapiens
aaatgaccggtctgctttctgaatat

SEQ ID NO: 24056 - DNA, 26 bp, Homo sapiens
aatgaccggtctgctttctgaatata

SEQ ID NO: 24057 - DNA, 26 bp, Homo sapiens
atgaccggtctgctttctgaatataa

SEQ ID NO: 24058 - DNA, 26 bp, Homo sapiens
tgaccggtctgctttctgaatataaa

SEQ ID NO: 24059 - DNA, 26 bp, Homo sapiens
gaccggtctgctttctgaatataaaa

SEQ ID NO: 24060 - DNA, 26 bp, Homo sapiens
accggtctgctttctgaatataaaaa

SEQ ID NO: 24061 - DNA, 26 bp, Homo sapiens
ccggtctgctttctgaatataaaaat

SEQ ID NO: 24062 - DNA, 26 bp, Homo sapiens
cggtctgctttctgaatataaaaatg

SEQ ID NO: 24063 - DNA, 26 bp, Homo sapiens
ggtctgctttctgaatataaaaatgt

SEQ ID NO: 24064 - DNA, 26 bp, Homo sapiens
gtctgctttctgaatataaaaatgtg

SEQ ID NO: 24065 - DNA, 26 bp, Homo sapiens
tctgctttctgaatataaaaatgtgt

SEQ ID NO: 24066 - DNA, 26 bp, Homo sapiens
ctgctttctgaatataaaaatgtgtt

SEQ ID NO: 24067 - DNA, 26 bp, Homo sapiens
tgctttctgaatataaaaatgtgttt

SEQ ID NO: 24068 - DNA, 26 bp, Homo sapiens
gctttctgaatataaaaatgtgtttg

SEQ ID NO: 24069 - DNA, 26 bp, Homo sapiens
ctttctgaatataaaaatgtgtttgc

SEQ ID NO: 24070 - DNA, 26 bp, Homo sapiens
tttctgaatataaaaatgtgtttgcc

SEQ ID NO: 24071 - DNA, 26 bp, Homo sapiens
ttctgaatataaaaatgtgtttgcct

SEQ ID NO: 24072 - DNA, 26 bp, Homo sapiens
tctgaatataaaaatgtgtttgcctt

SEQ ID NO: 24073 - DNA, 26 bp, Homo sapiens
ctgaatataaaaatgtgtttgccttt

SEQ ID NO: 24074 - DNA, 26 bp, Homo sapiens
tgaatataaaaatgtgtttgcctttc

SEQ ID NO: 24075 - DNA, 26 bp, Homo sapiens
gaatataaaaatgtgtttgcctttct

SEQ ID NO: 24076 - DNA, 26 bp, Homo sapiens
aatataaaaatgtgtttgcctttctt

SEQ ID NO: 24077 - DNA, 26 bp, Homo sapiens
atataaaaatgtgtttgcctttcttt

SEQ ID NO: 24078 - DNA, 26 bp, Homo sapiens
tataaaaatgtgtttgcctttctttg

SEQ ID NO: 24079 - DNA, 26 bp, Homo sapiens
ataaaaatgtgtttgcctttctttgc

SEQ ID NO: 24080 - DNA, 26 bp, Homo sapiens
taaaaatgtgtttgcctttctttgct

SEQ ID NO: 24081 - DNA, 26 bp, Homo sapiens
aaaaatgtgtttgcctttctttgctg

SEQ ID NO: 24082 - DNA, 26 bp, Homo sapiens
aaaatgtgtttgcctttctttgctgg

SEQ ID NO: 24083 - DNA, 26 bp, Homo sapiens
aaatgtgtttgcctttctttgctggc

SEQ ID NO: 24084 - DNA, 26 bp, Homo sapiens
aatgtgtttgcctttctttgctggca

SEQ ID NO: 24085 - DNA, 26 bp, Homo sapiens
atgtgtttgcctttctttgctggcaa

SEQ ID NO: 24086 - DNA, 26 bp, Homo sapiens
tgtgtttgcctttctttgctggcaag

SEQ ID NO: 24087 - DNA, 26 bp, Homo sapiens
gtgtttgcctttctttgctggcaagt

SEQ ID NO: 24088 - DNA, 26 bp, Homo sapiens
tgtttgcctttctttgctggcaagta

SEQ ID NO: 24089 - DNA, 26 bp, Homo sapiens
gtttgcctttctttgctggcaagtaa

SEQ ID NO: 24090 - DNA, 26 bp, Homo sapiens
tttgcctttctttgctggcaagtaaa

SEQ ID NO: 24091 - DNA, 26 bp, Homo sapiens
ttgcctttctttgctggcaagtaaac

SEQ ID NO: 24092 - DNA, 26 bp, Homo sapiens
tgcctttctttgctggcaagtaaaca

SEQ ID NO: 24093 - DNA, 26 bp, Homo sapiens
gcctttctttgctggcaagtaaacac

SEQ ID NO: 24094 - DNA, 26 bp, Homo sapiens
cctttctttgctggcaagtaaacact

SEQ ID NO: 24095 - DNA, 26 bp, Homo sapiens
ctttctttgctggcaagtaaacactt

SEQ ID NO: 24096 - DNA, 26 bp, Homo sapiens
tttctttgctggcaagtaaacacttt

SEQ ID NO: 24097 - DNA, 26 bp, Homo sapiens
ttctttgctggcaagtaaacacttta

SEQ ID NO: 24098 - DNA, 26 bp, Homo sapiens
tctttgctggcaagtaaacactttag

SEQ ID NO: 24099 - DNA, 26 bp, Homo sapiens
ctttgctggcaagtaaacactttaga

SEQ ID NO: 24100 - DNA, 26 bp, Homo sapiens
tttgctggcaagtaaacactttagag

SEQ ID NO: 24101 - DNA, 26 bp, Homo sapiens
ttgctggcaagtaaacactttagagc

SEQ ID NO: 24102 - DNA, 26 bp, Homo sapiens
tgctggcaagtaaacactttagagca

SEQ ID NO: 24103 - DNA, 26 bp, Homo sapiens
gctggcaagtaaacactttagagcaa

SEQ ID NO: 24104 - DNA, 26 bp, Homo sapiens
ctggcaagtaaacactttagagcaag

SEQ ID NO: 24105 - DNA, 26 bp, Homo sapiens
tggcaagtaaacactttagagcaagg

SEQ ID NO: 24106 - DNA, 26 bp, Homo sapiens
ggcaagtaaacactttagagcaagga

SEQ ID NO: 24107 - DNA, 26 bp, Homo sapiens
gcaagtaaacactttagagcaaggat

SEQ ID NO: 24108 - DNA, 26 bp, Homo sapiens
caagtaaacactttagagcaaggatg

SEQ ID NO: 24109 - DNA, 26 bp, Homo sapiens
aagtaaacactttagagcaaggatga

SEQ ID NO: 24110 - DNA, 26 bp, Homo sapiens
agtaaacactttagagcaaggatgaa

SEQ ID NO: 24111 - DNA, 26 bp, Homo sapiens
gtaaacactttagagcaaggatgaat

SEQ ID NO: 24112 - DNA, 26 bp, Homo sapiens
taaacactttagagcaaggatgaatg

SEQ ID NO: 24113 - DNA, 26 bp, Homo sapiens
aaacactttagagcaaggatgaatgt

SEQ ID NO: 24114 - DNA, 26 bp, Homo sapiens
aacactttagagcaaggatgaatgtg

SEQ ID NO: 24115 - DNA, 26 bp, Homo sapiens
acactttagagcaaggatgaatgtga

SEQ ID NO: 24116 - DNA, 26 bp, Homo sapiens
cactttagagcaaggatgaatgtgat

SEQ ID NO: 24117 - DNA, 26 bp, Homo sapiens
actttagagcaaggatgaatgtgatt

SEQ ID NO: 24118 - DNA, 26 bp, Homo sapiens
ctttagagcaaggatgaatgtgattc

SEQ ID NO: 24119 - DNA, 26 bp, Homo sapiens
tttagagcaaggatgaatgtgattct

SEQ ID NO: 24120 - DNA, 26 bp, Homo sapiens
ttagagcaaggatgaatgtgattctt

SEQ ID NO: 24121 - DNA, 26 bp, Homo sapiens
tagagcaaggatgaatgtgattcttg

SEQ ID NO: 24122 - DNA, 26 bp, Homo sapiens
agagcaaggatgaatgtgattcttga

SEQ ID NO: 24123 - DNA, 26 bp, Homo sapiens
gagcaaggatgaatgtgattcttgaa

SEQ ID NO: 24124 - DNA, 26 bp, Homo sapiens
agcaaggatgaatgtgattcttgaac

SEQ ID NO: 24125 - DNA, 26 bp, Homo sapiens
gcaaggatgaatgtgattcttgaacc

SEQ ID NO: 24126 - DNA, 26 bp, Homo sapiens
caaggatgaatgtgattcttgaacct

SEQ ID NO: 24127 - DNA, 26 bp, Homo sapiens
aaggatgaatgtgattcttgaacctt

SEQ ID NO: 24128 - DNA, 26 bp, Homo sapiens
aggatgaatgtgattcttgaaccttg

SEQ ID NO: 24129 - DNA, 26 bp, Homo sapiens
ggatgaatgtgattcttgaaccttgc

SEQ ID NO: 24130 - DNA, 26 bp, Homo sapiens
gatgaatgtgattcttgaaccttgct

SEQ ID NO: 24131 - DNA, 26 bp, Homo sapiens
atgaatgtgattcttgaaccttgctc

SEQ ID NO: 24132 - DNA, 26 bp, Homo sapiens
tgaatgtgattcttgaaccttgctct

SEQ ID NO: 24133 - DNA, 26 bp, Homo sapiens
gaatgtgattcttgaaccttgctctg

SEQ ID NO: 24134 - DNA, 26 bp, Homo sapiens
aatgtgattcttgaaccttgctctga

SEQ ID NO: 24135 - DNA, 26 bp, Homo sapiens
atgtgattcttgaaccttgctctgac

SEQ ID NO: 24136 - DNA, 26 bp, Homo sapiens
tgtgattcttgaaccttgctctgacc

SEQ ID NO: 24137 - DNA, 26 bp, Homo sapiens
gtgattcttgaaccttgctctgaccc

SEQ ID NO: 24138 - DNA, 26 bp, Homo sapiens
tgattcttgaaccttgctctgaccca

SEQ ID NO: 24139 - DNA, 26 bp, Homo sapiens
gattcttgaaccttgctctgacccac

SEQ ID NO: 24140 - DNA, 26 bp, Homo sapiens
attcttgaaccttgctctgacccact

SEQ ID NO: 24141 - DNA, 26 bp, Homo sapiens
ttcttgaaccttgctctgacccactt

SEQ ID NO: 24142 - DNA, 26 bp, Homo sapiens
tcttgaaccttgctctgacccacttc

SEQ ID NO: 24143 - DNA, 26 bp, Homo sapiens
cttgaaccttgctctgacccacttcc

SEQ ID NO: 24144 - DNA, 26 bp, Homo sapiens
ttgaaccttgctctgacccacttccc

SEQ ID NO: 24145 - DNA, 26 bp, Homo sapiens
tgaaccttgctctgacccacttcccc

SEQ ID NO: 24146 - DNA, 26 bp, Homo sapiens
gaaccttgctctgacccacttccccc

SEQ ID NO: 24147 - DNA, 26 bp, Homo sapiens
aaccttgctctgacccacttcccccc

SEQ ID NO: 24148 - DNA, 26 bp, Homo sapiens
accttgctctgacccacttcccccct

SEQ ID NO: 24149 - DNA, 26 bp, Homo sapiens
ccttgctctgacccacttcccccctg

SEQ ID NO: 24150 - DNA, 26 bp, Homo sapiens
cttgctctgacccacttcccccctgc

SEQ ID NO: 24151 - DNA, 26 bp, Homo sapiens
ttgctctgacccacttcccccctgcc

SEQ ID NO: 24152 - DNA, 26 bp, Homo sapiens
tgctctgacccacttcccccctgccc

SEQ ID NO: 24153 - DNA, 26 bp, Homo sapiens
gctctgacccacttcccccctgccct

SEQ ID NO: 24154 - DNA, 26 bp, Homo sapiens
ctctgacccacttcccccctgccctt

SEQ ID NO: 24155 - DNA, 26 bp, Homo sapiens
tctgacccacttcccccctgcccttt

SEQ ID NO: 24156 - DNA, 26 bp, Homo sapiens
ctgacccacttcccccctgccctttc

SEQ ID NO: 24157 - DNA, 26 bp, Homo sapiens
tgacccacttcccccctgccctttct

SEQ ID NO: 24158 - DNA, 26 bp, Homo sapiens
gacccacttcccccctgccctttcta

SEQ ID NO: 24159 - DNA, 26 bp, Homo sapiens
acccacttcccccctgccctttctaa

SEQ ID NO: 24160 - DNA, 26 bp, Homo sapiens
cccacttcccccctgccctttctaaa

SEQ ID NO: 24161 - DNA, 26 bp, Homo sapiens
ccacttcccccctgccctttctaaaa

SEQ ID NO: 24162 - DNA, 26 bp, Homo sapiens
cacttcccccctgccctttctaaaag

SEQ ID NO: 24163 - DNA, 26 bp, Homo sapiens
acttcccccctgccctttctaaaaga

SEQ ID NO: 24164 - DNA, 26 bp, Homo sapiens
cttcccccctgccctttctaaaagaa

SEQ ID NO: 24165 - DNA, 26 bp, Homo sapiens
ttcccccctgccctttctaaaagaaa

SEQ ID NO: 24166 - DNA, 26 bp, Homo sapiens
tcccccctgccctttctaaaagaaat

SEQ ID NO: 24167 - DNA, 26 bp, Homo sapiens
cccccctgccctttctaaaagaaatt

SEQ ID NO: 24168 - DNA, 26 bp, Homo sapiens
ccccctgccctttctaaaagaaatta

SEQ ID NO: 24169 - DNA, 26 bp, Homo sapiens
cccctgccctttctaaaagaaattaa

SEQ ID NO: 24170 - DNA, 26 bp, Homo sapiens
ccctgccctttctaaaagaaattaaa

SEQ ID NO: 24171 - DNA, 26 bp, Homo sapiens
cctgccctttctaaaagaaattaaaa

SEQ ID NO: 24172 - DNA, 26 bp, Homo sapiens
ctgccctttctaaaagaaattaaaaa

SEQ ID NO: 24173 - DNA, 26 bp, Homo sapiens
tgccctttctaaaagaaattaaaaaa

SEQ ID NO: 24174 - DNA, 26 bp, Homo sapiens
gccctttctaaaagaaattaaaaaaa

SEQ ID NO: 24175 - DNA, 26 bp, Homo sapiens
ccctttctaaaagaaattaaaaaaaa

SEQ ID NO: 24176 - DNA, 26 bp, Homo sapiens
cctttctaaaagaaattaaaaaaaaa

SEQ ID NO: 24177 - DNA, 26 bp, Homo sapiens
ctttctaaaagaaattaaaaaaaaat

SEQ ID NO: 24178 - DNA, 26 bp, Homo sapiens
tttctaaaagaaattaaaaaaaaatc

SEQ ID NO: 24179 - DNA, 26 bp, Homo sapiens
ttctaaaagaaattaaaaaaaaatct

SEQ ID NO: 24180 - DNA, 26 bp, Homo sapiens
tctaaaagaaattaaaaaaaaatcta

SEQ ID NO: 24181 - DNA, 26 bp, Homo sapiens
ctaaaagaaattaaaaaaaaatctag

SEQ ID NO: 24182 - DNA, 26 bp, Homo sapiens
taaaagaaattaaaaaaaaatctaga

SEQ ID NO: 24183 - DNA, 26 bp, Homo sapiens
aaaagaaattaaaaaaaaatctagaa

SEQ ID NO: 24184 - DNA, 26 bp, Homo sapiens
aaagaaattaaaaaaaaatctagaat

SEQ ID NO: 24185 - DNA, 26 bp, Homo sapiens
aagaaattaaaaaaaaatctagaatt

SEQ ID NO: 24186 - DNA, 26 bp, Homo sapiens
agaaattaaaaaaaaatctagaatta

SEQ ID NO: 24187 - DNA, 26 bp, Homo sapiens
gaaattaaaaaaaaatctagaattaa

SEQ ID NO: 24188 - DNA, 26 bp, Homo sapiens
aaattaaaaaaaaatctagaattaat

SEQ ID NO: 24189 - DNA, 26 bp, Homo sapiens
aattaaaaaaaaatctagaattaatg

SEQ ID NO: 24190 - DNA, 26 bp, Homo sapiens
attaaaaaaaaatctagaattaatgc

SEQ ID NO: 24191 - DNA, 26 bp, Homo sapiens
ttaaaaaaaaatctagaattaatgca

SEQ ID NO: 24192 - DNA, 26 bp, Homo sapiens
taaaaaaaaatctagaattaatgcaa

SEQ ID NO: 24193 - DNA, 26 bp, Homo sapiens
aaaaaaaaatctagaattaatgcaag

SEQ ID NO: 24194 - DNA, 26 bp, Homo sapiens
aaaaaaaatctagaattaatgcaagg

SEQ ID NO: 24195 - DNA, 26 bp, Homo sapiens
aaaaaaatctagaattaatgcaaggg

SEQ ID NO: 24196 - DNA, 26 bp, Homo sapiens
aaaaaatctagaattaatgcaaggga

SEQ ID NO: 24197 - DNA, 26 bp, Homo sapiens
aaaaatctagaattaatgcaagggag

SEQ ID NO: 24198 - DNA, 26 bp, Homo sapiens
aaaatctagaattaatgcaagggagc

SEQ ID NO: 24199 - DNA, 26 bp, Homo sapiens
aaatctagaattaatgcaagggagca

SEQ ID NO: 24200 - DNA, 26 bp, Homo sapiens
aatctagaattaatgcaagggagcaa

SEQ ID NO: 24201 - DNA, 26 bp, Homo sapiens
atctagaattaatgcaagggagcaaa

SEQ ID NO: 24202 - DNA, 26 bp, Homo sapiens
tctagaattaatgcaagggagcaaat

SEQ ID NO: 24203 - DNA, 26 bp, Homo sapiens
ctagaattaatgcaagggagcaaata

SEQ ID NO: 24204 - DNA, 26 bp, Homo sapiens
tagaattaatgcaagggagcaaatat

SEQ ID NO: 24205 - DNA, 26 bp, Homo sapiens
agaattaatgcaagggagcaaatata

SEQ ID NO: 24206 - DNA, 26 bp, Homo sapiens
gaattaatgcaagggagcaaatatat

SEQ ID NO: 24207 - DNA, 26 bp, Homo sapiens
aattaatgcaagggagcaaatatata

SEQ ID NO: 24208 - DNA, 26 bp, Homo sapiens
attaatgcaagggagcaaatatataa

SEQ ID NO: 24209 - DNA, 26 bp, Homo sapiens
ttaatgcaagggagcaaatatataac

SEQ ID NO: 24210 - DNA, 26 bp, Homo sapiens
taatgcaagggagcaaatatataaca

SEQ ID NO: 24211 - DNA, 26 bp, Homo sapiens
aatgcaagggagcaaatatataacat

SEQ ID NO: 24212 - DNA, 26 bp, Homo sapiens
atgcaagggagcaaatatataacata

SEQ ID NO: 24213 - DNA, 26 bp, Homo sapiens
tgcaagggagcaaatatataacataa

SEQ ID NO: 24214 - DNA, 26 bp, Homo sapiens
gcaagggagcaaatatataacataaa

SEQ ID NO: 24215 - DNA, 26 bp, Homo sapiens
caagggagcaaatatataacataaat

SEQ ID NO: 24216 - DNA, 26 bp, Homo sapiens
aagggagcaaatatataacataaatg

SEQ ID NO: 24217 - DNA, 26 bp, Homo sapiens
agggagcaaatatataacataaatgt

SEQ ID NO: 24218 - DNA, 26 bp, Homo sapiens
gggagcaaatatataacataaatgtg

SEQ ID NO: 24219 - DNA, 26 bp, Homo sapiens
ggagcaaatatataacataaatgtgt

SEQ ID NO: 24220 - DNA, 26 bp, Homo sapiens
gagcaaatatataacataaatgtgtt

SEQ ID NO: 24221 - DNA, 26 bp, Homo sapiens
agcaaatatataacataaatgtgttt

SEQ ID NO: 24222 - DNA, 26 bp, Homo sapiens
gcaaatatataacataaatgtgtttg

SEQ ID NO: 24223 - DNA, 26 bp, Homo sapiens
caaatatataacataaatgtgtttga

SEQ ID NO: 24224 - DNA, 26 bp, Homo sapiens
aaatatataacataaatgtgtttgat

SEQ ID NO: 24225 - DNA, 26 bp, Homo sapiens
aatatataacataaatgtgtttgata

SEQ ID NO: 24226 - DNA, 26 bp, Homo sapiens
atatataacataaatgtgtttgatat

SEQ ID NO: 24227 - DNA, 26 bp, Homo sapiens
tatataacataaatgtgtttgatatc

SEQ ID NO: 24228 - DNA, 26 bp, Homo sapiens
atataacataaatgtgtttgatatca

SEQ ID NO: 24229 - DNA, 26 bp, Homo sapiens
tataacataaatgtgtttgatatcag

SEQ ID NO: 24230 - DNA, 26 bp, Homo sapiens
ataacataaatgtgtttgatatcagg

SEQ ID NO: 24231 - DNA, 26 bp, Homo sapiens
taacataaatgtgtttgatatcaggt

SEQ ID NO: 24232 - DNA, 26 bp, Homo sapiens
aacataaatgtgtttgatatcaggtt

SEQ ID NO: 24233 - DNA, 26 bp, Homo sapiens
acataaatgtgtttgatatcaggttt

SEQ ID NO: 24234 - DNA, 26 bp, Homo sapiens
cataaatgtgtttgatatcaggtttc

SEQ ID NO: 24235 - DNA, 26 bp, Homo sapiens
ataaatgtgtttgatatcaggtttcc

SEQ ID NO: 24236 - DNA, 26 bp, Homo sapiens
taaatgtgtttgatatcaggtttccc

SEQ ID NO: 24237 - DNA, 26 bp, Homo sapiens
aaatgtgtttgatatcaggtttccca

SEQ ID NO: 24238 - DNA, 26 bp, Homo sapiens
aatgtgtttgatatcaggtttcccaa

SEQ ID NO: 24239 - DNA, 26 bp, Homo sapiens
atgtgtttgatatcaggtttcccaaa

SEQ ID NO: 24240 - DNA, 26 bp, Homo sapiens
tgtgtttgatatcaggtttcccaaaa

SEQ ID NO: 24241 - DNA, 26 bp, Homo sapiens
gtgtttgatatcaggtttcccaaaaa

SEQ ID NO: 24242 - DNA, 26 bp, Homo sapiens
tgtttgatatcaggtttcccaaaaag

SEQ ID NO: 24243 - DNA, 26 bp, Homo sapiens
gtttgatatcaggtttcccaaaaagg

SEQ ID NO: 24244 - DNA, 26 bp, Homo sapiens
tttgatatcaggtttcccaaaaaggt

SEQ ID NO: 24245 - DNA, 26 bp, Homo sapiens
ttgatatcaggtttcccaaaaaggtg

SEQ ID NO: 24246 - DNA, 26 bp, Homo sapiens
tgatatcaggtttcccaaaaaggtgt

SEQ ID NO: 24247 - DNA, 26 bp, Homo sapiens
gatatcaggtttcccaaaaaggtgta

SEQ ID NO: 24248 - DNA, 26 bp, Homo sapiens
atatcaggtttcccaaaaaggtgtaa

SEQ ID NO: 24249 - DNA, 26 bp, Homo sapiens
tatcaggtttcccaaaaaggtgtaaa

SEQ ID NO: 24250 - DNA, 26 bp, Homo sapiens
atcaggtttcccaaaaaggtgtaaaa

SEQ ID NO: 24251 - DNA, 26 bp, Homo sapiens
tcaggtttcccaaaaaggtgtaaaag

SEQ ID NO: 24252 - DNA, 26 bp, Homo sapiens
caggtttcccaaaaaggtgtaaaagc

SEQ ID NO: 24253 - DNA, 26 bp, Homo sapiens
aggtttcccaaaaaggtgtaaaagct

SEQ ID NO: 24254 - DNA, 26 bp, Homo sapiens
ggtttcccaaaaaggtgtaaaagctc

SEQ ID NO: 24255 - DNA, 26 bp, Homo sapiens
gtttcccaaaaaggtgtaaaagctct

SEQ ID NO: 24256 - DNA, 26 bp, Homo sapiens
tttcccaaaaaggtgtaaaagctctg

SEQ ID NO: 24257 - DNA, 26 bp, Homo sapiens
ttcccaaaaaggtgtaaaagctctgt

SEQ ID NO: 24258 - DNA, 26 bp, Homo sapiens
tcccaaaaaggtgtaaaagctctgta

SEQ ID NO: 24259 - DNA, 26 bp, Homo sapiens
cccaaaaaggtgtaaaagctctgtag

SEQ ID NO: 24260 - DNA, 26 bp, Homo sapiens
ccaaaaaggtgtaaaagctctgtaga

SEQ ID NO: 24261 - DNA, 26 bp, Homo sapiens
caaaaaggtgtaaaagctctgtagag

SEQ ID NO: 24262 - DNA, 26 bp, Homo sapiens
aaaaaggtgtaaaagctctgtagagc

SEQ ID NO: 24263 - DNA, 26 bp, Homo sapiens
aaaaggtgtaaaagctctgtagagca

SEQ ID NO: 24264 - DNA, 26 bp, Homo sapiens
aaaggtgtaaaagctctgtagagcaa

SEQ ID NO: 24265 - DNA, 26 bp, Homo sapiens
aaggtgtaaaagctctgtagagcaag

SEQ ID NO: 24266 - DNA, 26 bp, Homo sapiens
aggtgtaaaagctctgtagagcaaga

SEQ ID NO: 24267 - DNA, 26 bp, Homo sapiens
ggtgtaaaagctctgtagagcaagaa

SEQ ID NO: 24268 - DNA, 26 bp, Homo sapiens
gtgtaaaagctctgtagagcaagaac

SEQ ID NO: 24269 - DNA, 26 bp, Homo sapiens
tgtaaaagctctgtagagcaagaact

SEQ ID NO: 24270 - DNA, 26 bp, Homo sapiens
gtaaaagctctgtagagcaagaactg

SEQ ID NO: 24271 - DNA, 26 bp, Homo sapiens
taaaagctctgtagagcaagaactgg

SEQ ID NO: 24272 - DNA, 26 bp, Homo sapiens
aaaagctctgtagagcaagaactggt

SEQ ID NO: 24273 - DNA, 26 bp, Homo sapiens
aaagctctgtagagcaagaactggtt

SEQ ID NO: 24274 - DNA, 26 bp, Homo sapiens
aagctctgtagagcaagaactggttg

SEQ ID NO: 24275 - DNA, 26 bp, Homo sapiens
agctctgtagagcaagaactggttgg

SEQ ID NO: 24276 - DNA, 26 bp, Homo sapiens
gctctgtagagcaagaactggttggc

SEQ ID NO: 24277 - DNA, 26 bp, Homo sapiens
ctctgtagagcaagaactggttggcc

SEQ ID NO: 24278 - DNA, 26 bp, Homo sapiens
tctgtagagcaagaactggttggcca

SEQ ID NO: 24279 - DNA, 26 bp, Homo sapiens
ctgtagagcaagaactggttggccat

SEQ ID NO: 24280 - DNA, 26 bp, Homo sapiens
tgtagagcaagaactggttggccatt

SEQ ID NO: 24281 - DNA, 26 bp, Homo sapiens
gtagagcaagaactggttggccattg

SEQ ID NO: 24282 - DNA, 26 bp, Homo sapiens
tagagcaagaactggttggccattga

SEQ ID NO: 24283 - DNA, 26 bp, Homo sapiens
agagcaagaactggttggccattgaa

SEQ ID NO: 24284 - DNA, 26 bp, Homo sapiens
gagcaagaactggttggccattgaaa

SEQ ID NO: 24285 - DNA, 26 bp, Homo sapiens
agcaagaactggttggccattgaaat

SEQ ID NO: 24286 - DNA, 26 bp, Homo sapiens
gcaagaactggttggccattgaaatg

SEQ ID NO: 24287 - DNA, 26 bp, Homo sapiens
caagaactggttggccattgaaatga

SEQ ID NO: 24288 - DNA, 26 bp, Homo sapiens
aagaactggttggccattgaaatgac

SEQ ID NO: 24289 - DNA, 26 bp, Homo sapiens
agaactggttggccattgaaatgact

SEQ ID NO: 24290 - DNA, 26 bp, Homo sapiens
gaactggttggccattgaaatgactg

SEQ ID NO: 24291 - DNA, 26 bp, Homo sapiens
aactggttggccattgaaatgactgt

SEQ ID NO: 24292 - DNA, 26 bp, Homo sapiens
actggttggccattgaaatgactgta

SEQ ID NO: 24293 - DNA, 26 bp, Homo sapiens
ctggttggccattgaaatgactgtat

SEQ ID NO: 24294 - DNA, 26 bp, Homo sapiens
tggttggccattgaaatgactgtatg

SEQ ID NO: 24295 - DNA, 26 bp, Homo sapiens
ggttggccattgaaatgactgtatga

SEQ ID NO: 24296 - DNA, 26 bp, Homo sapiens
gttggccattgaaatgactgtatgat

SEQ ID NO: 24297 - DNA, 26 bp, Homo sapiens
ttggccattgaaatgactgtatgatc

SEQ ID NO: 24298 - DNA, 26 bp, Homo sapiens
tggccattgaaatgactgtatgatca

SEQ ID NO: 24299 - DNA, 26 bp, Homo sapiens
ggccattgaaatgactgtatgatcac

SEQ ID NO: 24300 - DNA, 26 bp, Homo sapiens
gccattgaaatgactgtatgatcacc

SEQ ID NO: 24301 - DNA, 26 bp, Homo sapiens
ccattgaaatgactgtatgatcacct

SEQ ID NO: 24302 - DNA, 26 bp, Homo sapiens
cattgaaatgactgtatgatcaccta

SEQ ID NO: 24303 - DNA, 26 bp, Homo sapiens
attgaaatgactgtatgatcacctag

SEQ ID NO: 24304 - DNA, 26 bp, Homo sapiens
ttgaaatgactgtatgatcacctagc

SEQ ID NO: 24305 - DNA, 26 bp, Homo sapiens
tgaaatgactgtatgatcacctagct

SEQ ID NO: 24306 - DNA, 26 bp, Homo sapiens
gaaatgactgtatgatcacctagctt

SEQ ID NO: 24307 - DNA, 26 bp, Homo sapiens
aaatgactgtatgatcacctagcttc

SEQ ID NO: 24308 - DNA, 26 bp, Homo sapiens
aatgactgtatgatcacctagcttct

SEQ ID NO: 24309 - DNA, 26 bp, Homo sapiens
atgactgtatgatcacctagcttctt

SEQ ID NO: 24310 - DNA, 26 bp, Homo sapiens
tgactgtatgatcacctagcttcttg

SEQ ID NO: 24311 - DNA, 26 bp, Homo sapiens
gactgtatgatcacctagcttcttga

SEQ ID NO: 24312 - DNA, 26 bp, Homo sapiens
actgtatgatcacctagcttcttgat

SEQ ID NO: 24313 - DNA, 26 bp, Homo sapiens
ctgtatgatcacctagcttcttgatt

SEQ ID NO: 24314 - DNA, 26 bp, Homo sapiens
tgtatgatcacctagcttcttgattt

SEQ ID NO: 24315 - DNA, 26 bp, Homo sapiens
gtatgatcacctagcttcttgatttt

SEQ ID NO: 24316 - DNA, 26 bp, Homo sapiens
tatgatcacctagcttcttgatttta

SEQ ID NO: 24317 - DNA, 26 bp, Homo sapiens
atgatcacctagcttcttgattttaa

SEQ ID NO: 24318 - DNA, 26 bp, Homo sapiens
tgatcacctagcttcttgattttaaa

SEQ ID NO: 24319 - DNA, 26 bp, Homo sapiens
gatcacctagcttcttgattttaaag

SEQ ID NO: 24320 - DNA, 26 bp, Homo sapiens
atcacctagcttcttgattttaaagg

SEQ ID NO: 24321 - DNA, 26 bp, Homo sapiens
tcacctagcttcttgattttaaaggg

SEQ ID NO: 24322 - DNA, 26 bp, Homo sapiens
cacctagcttcttgattttaaagggg

SEQ ID NO: 24323 - DNA, 26 bp, Homo sapiens
acctagcttcttgattttaaaggggt

SEQ ID NO: 24324 - DNA, 26 bp, Homo sapiens
cctagcttcttgattttaaaggggtt

SEQ ID NO: 24325 - DNA, 26 bp, Homo sapiens
ctagcttcttgattttaaaggggttt

SEQ ID NO: 24326 - DNA, 26 bp, Homo sapiens
tagcttcttgattttaaaggggtttg

SEQ ID NO: 24327 - DNA, 26 bp, Homo sapiens
agcttcttgattttaaaggggtttgg

SEQ ID NO: 24328 - DNA, 26 bp, Homo sapiens
gcttcttgattttaaaggggtttgga

SEQ ID NO: 24329 - DNA, 26 bp, Homo sapiens
cttcttgattttaaaggggtttggaa

SEQ ID NO: 24330 - DNA, 26 bp, Homo sapiens
ttcttgattttaaaggggtttggaag

SEQ ID NO: 24331 - DNA, 26 bp, Homo sapiens
tcttgattttaaaggggtttggaagt

SEQ ID NO: 24332 - DNA, 26 bp, Homo sapiens
cttgattttaaaggggtttggaagtt

SEQ ID NO: 24333 - DNA, 26 bp, Homo sapiens
ttgattttaaaggggtttggaagtta

SEQ ID NO: 24334 - DNA, 26 bp, Homo sapiens
tgattttaaaggggtttggaagttaa

SEQ ID NO: 24335 - DNA, 26 bp, Homo sapiens
gattttaaaggggtttggaagttaat

SEQ ID NO: 24336 - DNA, 26 bp, Homo sapiens
attttaaaggggtttggaagttaatg

SEQ ID NO: 24337 - DNA, 26 bp, Homo sapiens
ttttaaaggggtttggaagttaatga

SEQ ID NO: 24338 - DNA, 26 bp, Homo sapiens
tttaaaggggtttggaagttaatgat

SEQ ID NO: 24339 - DNA, 26 bp, Homo sapiens
ttaaaggggtttggaagttaatgatt

SEQ ID NO: 24340 - DNA, 26 bp, Homo sapiens
taaaggggtttggaagttaatgattc

SEQ ID NO: 24341 - DNA, 26 bp, Homo sapiens
aaaggggtttggaagttaatgattca

SEQ ID NO: 24342 - DNA, 26 bp, Homo sapiens
aaggggtttggaagttaatgattcat

SEQ ID NO: 24343 - DNA, 26 bp, Homo sapiens
aggggtttggaagttaatgattcatg

SEQ ID NO: 24344 - DNA, 26 bp, Homo sapiens
ggggtttggaagttaatgattcatgt

SEQ ID NO: 24345 - DNA, 26 bp, Homo sapiens
gggtttggaagttaatgattcatgtc

SEQ ID NO: 24346 - DNA, 26 bp, Homo sapiens
ggtttggaagttaatgattcatgtca

SEQ ID NO: 24347 - DNA, 26 bp, Homo sapiens
gtttggaagttaatgattcatgtcaa

SEQ ID NO: 24348 - DNA, 26 bp, Homo sapiens
tttggaagttaatgattcatgtcaac

SEQ ID NO: 24349 - DNA, 26 bp, Homo sapiens
ttggaagttaatgattcatgtcaaca

SEQ ID NO: 24350 - DNA, 26 bp, Homo sapiens
tggaagttaatgattcatgtcaacag

SEQ ID NO: 24351 - DNA, 26 bp, Homo sapiens
ggaagttaatgattcatgtcaacagt

SEQ ID NO: 24352 - DNA, 26 bp, Homo sapiens
gaagttaatgattcatgtcaacagtg

SEQ ID NO: 24353 - DNA, 26 bp, Homo sapiens
aagttaatgattcatgtcaacagtgc

SEQ ID NO: 24354 - DNA, 26 bp, Homo sapiens
agttaatgattcatgtcaacagtgcc

SEQ ID NO: 24355 - DNA, 26 bp, Homo sapiens
gttaatgattcatgtcaacagtgcct

SEQ ID NO: 24356 - DNA, 26 bp, Homo sapiens
ttaatgattcatgtcaacagtgcctg

SEQ ID NO: 24357 - DNA, 26 bp, Homo sapiens
taatgattcatgtcaacagtgcctgg

SEQ ID NO: 24358 - DNA, 26 bp, Homo sapiens
aatgattcatgtcaacagtgcctggc

SEQ ID NO: 24359 - DNA, 26 bp, Homo sapiens
atgattcatgtcaacagtgcctggct

SEQ ID NO: 24360 - DNA, 26 bp, Homo sapiens
tgattcatgtcaacagtgcctggctg

SEQ ID NO: 24361 - DNA, 26 bp, Homo sapiens
gattcatgtcaacagtgcctggctgt

SEQ ID NO: 24362 - DNA, 26 bp, Homo sapiens
attcatgtcaacagtgcctggctgtt

SEQ ID NO: 24363 - DNA, 26 bp, Homo sapiens
ttcatgtcaacagtgcctggctgtta

SEQ ID NO: 24364 - DNA, 26 bp, Homo sapiens
tcatgtcaacagtgcctggctgttag

SEQ ID NO: 24365 - DNA, 26 bp, Homo sapiens
catgtcaacagtgcctggctgttagg

SEQ ID NO: 24366 - DNA, 26 bp, Homo sapiens
atgtcaacagtgcctggctgttagga

SEQ ID NO: 24367 - DNA, 26 bp, Homo sapiens
tgtcaacagtgcctggctgttaggaa

SEQ ID NO: 24368 - DNA, 26 bp, Homo sapiens
gtcaacagtgcctggctgttaggaat

SEQ ID NO: 24369 - DNA, 26 bp, Homo sapiens
tcaacagtgcctggctgttaggaatc

SEQ ID NO: 24370 - DNA, 26 bp, Homo sapiens
caacagtgcctggctgttaggaatca

SEQ ID NO: 24371 - DNA, 26 bp, Homo sapiens
aacagtgcctggctgttaggaatcaa

SEQ ID NO: 24372 - DNA, 26 bp, Homo sapiens
acagtgcctggctgttaggaatcaaa

SEQ ID NO: 24373 - DNA, 26 bp, Homo sapiens
cagtgcctggctgttaggaatcaaag

SEQ ID NO: 24374 - DNA, 26 bp, Homo sapiens
agtgcctggctgttaggaatcaaagt

SEQ ID NO: 24375 - DNA, 26 bp, Homo sapiens
gtgcctggctgttaggaatcaaagtc

SEQ ID NO: 24376 - DNA, 26 bp, Homo sapiens
tgcctggctgttaggaatcaaagtca

SEQ ID NO: 24377 - DNA, 26 bp, Homo sapiens
gcctggctgttaggaatcaaagtcag

SEQ ID NO: 24378 - DNA, 26 bp, Homo sapiens
cctggctgttaggaatcaaagtcaga

SEQ ID NO: 24379 - DNA, 26 bp, Homo sapiens
ctggctgttaggaatcaaagtcagaa

SEQ ID NO: 24380 - DNA, 26 bp, Homo sapiens
tggctgttaggaatcaaagtcagaag

SEQ ID NO: 24381 - DNA, 26 bp, Homo sapiens
ggctgttaggaatcaaagtcagaagg

SEQ ID NO: 24382 - DNA, 26 bp, Homo sapiens
gctgttaggaatcaaagtcagaaggg

SEQ ID NO: 24383 - DNA, 26 bp, Homo sapiens
ctgttaggaatcaaagtcagaaggga

SEQ ID NO: 24384 - DNA, 26 bp, Homo sapiens
tgttaggaatcaaagtcagaagggat

SEQ ID NO: 24385 - DNA, 26 bp, Homo sapiens
gttaggaatcaaagtcagaagggatt

SEQ ID NO: 24386 - DNA, 26 bp, Homo sapiens
ttaggaatcaaagtcagaagggatta

SEQ ID NO: 24387 - DNA, 26 bp, Homo sapiens
taggaatcaaagtcagaagggattag

SEQ ID NO: 24388 - DNA, 26 bp, Homo sapiens
aggaatcaaagtcagaagggattaga

SEQ ID NO: 24389 - DNA, 26 bp, Homo sapiens
ggaatcaaagtcagaagggattagaa

SEQ ID NO: 24390 - DNA, 26 bp, Homo sapiens
gaatcaaagtcagaagggattagaag

SEQ ID NO: 24391 - DNA, 26 bp, Homo sapiens
aatcaaagtcagaagggattagaagg

SEQ ID NO: 24392 - DNA, 26 bp, Homo sapiens
atcaaagtcagaagggattagaagga

SEQ ID NO: 24393 - DNA, 26 bp, Homo sapiens
tcaaagtcagaagggattagaaggac

SEQ ID NO: 24394 - DNA, 26 bp, Homo sapiens
caaagtcagaagggattagaaggaca

SEQ ID NO: 24395 - DNA, 26 bp, Homo sapiens
aaagtcagaagggattagaaggacat

SEQ ID NO: 24396 - DNA, 26 bp, Homo sapiens
aagtcagaagggattagaaggacatc

SEQ ID NO: 24397 - DNA, 26 bp, Homo sapiens
agtcagaagggattagaaggacatca

SEQ ID NO: 24398 - DNA, 26 bp, Homo sapiens
gtcagaagggattagaaggacatcat

SEQ ID NO: 24399 - DNA, 26 bp, Homo sapiens
tcagaagggattagaaggacatcatc

SEQ ID NO: 24400 - DNA, 26 bp, Homo sapiens
cagaagggattagaaggacatcatca

SEQ ID NO: 24401 - DNA, 26 bp, Homo sapiens
agaagggattagaaggacatcatcag

SEQ ID NO: 24402 - DNA, 26 bp, Homo sapiens
gaagggattagaaggacatcatcagg

SEQ ID NO: 24403 - DNA, 26 bp, Homo sapiens
aagggattagaaggacatcatcagga

SEQ ID NO: 24404 - DNA, 26 bp, Homo sapiens
agggattagaaggacatcatcaggaa

SEQ ID NO: 24405 - DNA, 26 bp, Homo sapiens
gggattagaaggacatcatcaggaaa

SEQ ID NO: 24406 - DNA, 26 bp, Homo sapiens
ggattagaaggacatcatcaggaaat

SEQ ID NO: 24407 - DNA, 26 bp, Homo sapiens
gattagaaggacatcatcaggaaatc

SEQ ID NO: 24408 - DNA, 26 bp, Homo sapiens
attagaaggacatcatcaggaaatca

SEQ ID NO: 24409 - DNA, 26 bp, Homo sapiens
ttagaaggacatcatcaggaaatcaa

SEQ ID NO: 24410 - DNA, 26 bp, Homo sapiens
tagaaggacatcatcaggaaatcaaa

SEQ ID NO: 24411 - DNA, 26 bp, Homo sapiens
agaaggacatcatcaggaaatcaaaa

SEQ ID NO: 24412 - DNA, 26 bp, Homo sapiens
gaaggacatcatcaggaaatcaaaaa

SEQ ID NO: 24413 - DNA, 26 bp, Homo sapiens
aaggacatcatcaggaaatcaaaaag

SEQ ID NO: 24414 - DNA, 26 bp, Homo sapiens
aggacatcatcaggaaatcaaaaagt

SEQ ID NO: 24415 - DNA, 26 bp, Homo sapiens
ggacatcatcaggaaatcaaaaagta

SEQ ID NO: 24416 - DNA, 26 bp, Homo sapiens
gacatcatcaggaaatcaaaaagtat

SEQ ID NO: 24417 - DNA, 26 bp, Homo sapiens
acatcatcaggaaatcaaaaagtata

SEQ ID NO: 24418 - DNA, 26 bp, Homo sapiens
catcatcaggaaatcaaaaagtatat

SEQ ID NO: 24419 - DNA, 26 bp, Homo sapiens
atcatcaggaaatcaaaaagtatatt

SEQ ID NO: 24420 - DNA, 26 bp, Homo sapiens
tcatcaggaaatcaaaaagtatattt

SEQ ID NO: 24421 - DNA, 26 bp, Homo sapiens
catcaggaaatcaaaaagtatatttt

SEQ ID NO: 24422 - DNA, 26 bp, Homo sapiens
atcaggaaatcaaaaagtatatttta

SEQ ID NO: 24423 - DNA, 26 bp, Homo sapiens
tcaggaaatcaaaaagtatattttac

SEQ ID NO: 24424 - DNA, 26 bp, Homo sapiens
caggaaatcaaaaagtatattttacc

SEQ ID NO: 24425 - DNA, 26 bp, Homo sapiens
aggaaatcaaaaagtatattttaccc

SEQ ID NO: 24426 - DNA, 26 bp, Homo sapiens
ggaaatcaaaaagtatattttaccca

SEQ ID NO: 24427 - DNA, 26 bp, Homo sapiens
gaaatcaaaaagtatattttacccaa

SEQ ID NO: 24428 - DNA, 26 bp, Homo sapiens
aaatcaaaaagtatattttacccaag

SEQ ID NO: 24429 - DNA, 26 bp, Homo sapiens
aatcaaaaagtatattttacccaaga

SEQ ID NO: 24430 - DNA, 26 bp, Homo sapiens
atcaaaaagtatattttacccaagat

SEQ ID NO: 24431 - DNA, 26 bp, Homo sapiens
tcaaaaagtatattttacccaagata

SEQ ID NO: 24432 - DNA, 26 bp, Homo sapiens
caaaaagtatattttacccaagatat

SEQ ID NO: 24433 - DNA, 26 bp, Homo sapiens
aaaaagtatattttacccaagatatt

SEQ ID NO: 24434 - DNA, 26 bp, Homo sapiens
aaaagtatattttacccaagatattg

SEQ ID NO: 24435 - DNA, 26 bp, Homo sapiens
aaagtatattttacccaagatattgt

SEQ ID NO: 24436 - DNA, 26 bp, Homo sapiens
aagtatattttacccaagatattgtg

SEQ ID NO: 24437 - DNA, 26 bp, Homo sapiens
agtatattttacccaagatattgtga

SEQ ID NO: 24438 - DNA, 26 bp, Homo sapiens
gtatattttacccaagatattgtgac

SEQ ID NO: 24439 - DNA, 26 bp, Homo sapiens
tatattttacccaagatattgtgaca

SEQ ID NO: 24440 - DNA, 26 bp, Homo sapiens
atattttacccaagatattgtgacat

SEQ ID NO: 24441 - DNA, 26 bp, Homo sapiens
tattttacccaagatattgtgacatt

SEQ ID NO: 24442 - DNA, 26 bp, Homo sapiens
attttacccaagatattgtgacattt

SEQ ID NO: 24443 - DNA, 26 bp, Homo sapiens
ttttacccaagatattgtgacattta

SEQ ID NO: 24444 - DNA, 26 bp, Homo sapiens
tttacccaagatattgtgacatttag

SEQ ID NO: 24445 - DNA, 26 bp, Homo sapiens
ttacccaagatattgtgacatttagg

SEQ ID NO: 24446 - DNA, 26 bp, Homo sapiens
tacccaagatattgtgacatttagga

SEQ ID NO: 24447 - DNA, 26 bp, Homo sapiens
acccaagatattgtgacatttaggaa

SEQ ID NO: 24448 - DNA, 26 bp, Homo sapiens
cccaagatattgtgacatttaggaac

SEQ ID NO: 24449 - DNA, 26 bp, Homo sapiens
ccaagatattgtgacatttaggaacc

SEQ ID NO: 24450 - DNA, 26 bp, Homo sapiens
caagatattgtgacatttaggaaccc

SEQ ID NO: 24451 - DNA, 26 bp, Homo sapiens
aagatattgtgacatttaggaaccct

SEQ ID NO: 24452 - DNA, 26 bp, Homo sapiens
agatattgtgacatttaggaaccctg

SEQ ID NO: 24453 - DNA, 26 bp, Homo sapiens
gatattgtgacatttaggaaccctga

SEQ ID NO: 24454 - DNA, 26 bp, Homo sapiens
atattgtgacatttaggaaccctgag

SEQ ID NO: 24455 - DNA, 26 bp, Homo sapiens
tattgtgacatttaggaaccctgagc

SEQ ID NO: 24456 - DNA, 26 bp, Homo sapiens
attgtgacatttaggaaccctgagcc

SEQ ID NO: 24457 - DNA, 26 bp, Homo sapiens
ttgtgacatttaggaaccctgagcca

SEQ ID NO: 24458 - DNA, 26 bp, Homo sapiens
tgtgacatttaggaaccctgagccaa

SEQ ID NO: 24459 - DNA, 26 bp, Homo sapiens
gtgacatttaggaaccctgagccaaa

SEQ ID NO: 24460 - DNA, 26 bp, Homo sapiens
tgacatttaggaaccctgagccaaat

SEQ ID NO: 24461 - DNA, 26 bp, Homo sapiens
gacatttaggaaccctgagccaaatg

SEQ ID NO: 24462 - DNA, 26 bp, Homo sapiens
acatttaggaaccctgagccaaatgg

SEQ ID NO: 24463 - DNA, 26 bp, Homo sapiens
catttaggaaccctgagccaaatggg

SEQ ID NO: 24464 - DNA, 26 bp, Homo sapiens
atttaggaaccctgagccaaatggga

SEQ ID NO: 24465 - DNA, 26 bp, Homo sapiens
tttaggaaccctgagccaaatgggaa

SEQ ID NO: 24466 - DNA, 26 bp, Homo sapiens
ttaggaaccctgagccaaatgggaat

SEQ ID NO: 24467 - DNA, 26 bp, Homo sapiens
taggaaccctgagccaaatgggaatt

SEQ ID NO: 24468 - DNA, 26 bp, Homo sapiens
aggaaccctgagccaaatgggaattg

SEQ ID NO: 24469 - DNA, 26 bp, Homo sapiens
ggaaccctgagccaaatgggaattgt

SEQ ID NO: 24470 - DNA, 26 bp, Homo sapiens
gaaccctgagccaaatgggaattgtt

SEQ ID NO: 24471 - DNA, 26 bp, Homo sapiens
aaccctgagccaaatgggaattgttt

SEQ ID NO: 24472 - DNA, 26 bp, Homo sapiens
accctgagccaaatgggaattgtttt

SEQ ID NO: 24473 - DNA, 26 bp, Homo sapiens
ccctgagccaaatgggaattgttttg

SEQ ID NO: 24474 - DNA, 26 bp, Homo sapiens
cctgagccaaatgggaattgttttgt

SEQ ID NO: 24475 - DNA, 26 bp, Homo sapiens
ctgagccaaatgggaattgttttgta

SEQ ID NO: 24476 - DNA, 26 bp, Homo sapiens
tgagccaaatgggaattgttttgtat

SEQ ID NO: 24477 - DNA, 26 bp, Homo sapiens
gagccaaatgggaattgttttgtatg

SEQ ID NO: 24478 - DNA, 26 bp, Homo sapiens
agccaaatgggaattgttttgtatgt

SEQ ID NO: 24479 - DNA, 26 bp, Homo sapiens
gccaaatgggaattgttttgtatgtc

SEQ ID NO: 24480 - DNA, 26 bp, Homo sapiens
ccaaatgggaattgttttgtatgtca

SEQ ID NO: 24481 - DNA, 26 bp, Homo sapiens
caaatgggaattgttttgtatgtcag

SEQ ID NO: 24482 - DNA, 26 bp, Homo sapiens
aaatgggaattgttttgtatgtcagc

SEQ ID NO: 24483 - DNA, 26 bp, Homo sapiens
aatgggaattgttttgtatgtcagct

SEQ ID NO: 24484 - DNA, 26 bp, Homo sapiens
atgggaattgttttgtatgtcagctt

SEQ ID NO: 24485 - DNA, 26 bp, Homo sapiens
tgggaattgttttgtatgtcagcttt

SEQ ID NO: 24486 - DNA, 26 bp, Homo sapiens
gggaattgttttgtatgtcagctttt

SEQ ID NO: 24487 - DNA, 26 bp, Homo sapiens
ggaattgttttgtatgtcagcttttt

SEQ ID NO: 24488 - DNA, 26 bp, Homo sapiens
gaattgttttgtatgtcagctttttt

SEQ ID NO: 24489 - DNA, 26 bp, Homo sapiens
aattgttttgtatgtcagcttttttg

SEQ ID NO: 24490 - DNA, 26 bp, Homo sapiens
attgttttgtatgtcagcttttttga

SEQ ID NO: 24491 - DNA, 26 bp, Homo sapiens
ttgttttgtatgtcagcttttttgac

SEQ ID NO: 24492 - DNA, 26 bp, Homo sapiens
tgttttgtatgtcagcttttttgact

SEQ ID NO: 24493 - DNA, 26 bp, Homo sapiens
gttttgtatgtcagcttttttgactc

SEQ ID NO: 24494 - DNA, 26 bp, Homo sapiens
ttttgtatgtcagcttttttgactcg

SEQ ID NO: 24495 - DNA, 26 bp, Homo sapiens
tttgtatgtcagcttttttgactcgc

SEQ ID NO: 24496 - DNA, 26 bp, Homo sapiens
ttgtatgtcagcttttttgactcgca

SEQ ID NO: 24497 - DNA, 26 bp, Homo sapiens
tgtatgtcagcttttttgactcgcat

SEQ ID NO: 24498 - DNA, 26 bp, Homo sapiens
gtatgtcagcttttttgactcgcatt

SEQ ID NO: 24499 - DNA, 26 bp, Homo sapiens
tatgtcagcttttttgactcgcatta

SEQ ID NO: 24500 - DNA, 26 bp, Homo sapiens
atgtcagcttttttgactcgcattac

SEQ ID NO: 24501 - DNA, 26 bp, Homo sapiens
tgtcagcttttttgactcgcattaca

SEQ ID NO: 24502 - DNA, 26 bp, Homo sapiens
gtcagcttttttgactcgcattacac

SEQ ID NO: 24503 - DNA, 26 bp, Homo sapiens
tcagcttttttgactcgcattacaca

SEQ ID NO: 24504 - DNA, 26 bp, Homo sapiens
cagcttttttgactcgcattacacat

SEQ ID NO: 24505 - DNA, 26 bp, Homo sapiens
agcttttttgactcgcattacacatt

SEQ ID NO: 24506 - DNA, 26 bp, Homo sapiens
gcttttttgactcgcattacacattc

SEQ ID NO: 24507 - DNA, 26 bp, Homo sapiens
cttttttgactcgcattacacattct

SEQ ID NO: 24508 - DNA, 26 bp, Homo sapiens
ttttttgactcgcattacacattcta

SEQ ID NO: 24509 - DNA, 26 bp, Homo sapiens
tttttgactcgcattacacattctag

SEQ ID NO: 24510 - DNA, 26 bp, Homo sapiens
ttttgactcgcattacacattctagt

SEQ ID NO: 24511 - DNA, 26 bp, Homo sapiens
tttgactcgcattacacattctagtg

SEQ ID NO: 24512 - DNA, 26 bp, Homo sapiens
ttgactcgcattacacattctagtgt

SEQ ID NO: 24513 - DNA, 26 bp, Homo sapiens
tgactcgcattacacattctagtgtc

SEQ ID NO: 24514 - DNA, 26 bp, Homo sapiens
gactcgcattacacattctagtgtct

SEQ ID NO: 24515 - DNA, 26 bp, Homo sapiens
actcgcattacacattctagtgtctg

SEQ ID NO: 24516 - DNA, 26 bp, Homo sapiens
ctcgcattacacattctagtgtctga

SEQ ID NO: 24517 - DNA, 26 bp, Homo sapiens
tcgcattacacattctagtgtctgag

SEQ ID NO: 24518 - DNA, 26 bp, Homo sapiens
cgcattacacattctagtgtctgagg

SEQ ID NO: 24519 - DNA, 26 bp, Homo sapiens
gcattacacattctagtgtctgaggt

SEQ ID NO: 24520 - DNA, 26 bp, Homo sapiens
cattacacattctagtgtctgaggtg

SEQ ID NO: 24521 - DNA, 26 bp, Homo sapiens
attacacattctagtgtctgaggtgt

SEQ ID NO: 24522 - DNA, 26 bp, Homo sapiens
ttacacattctagtgtctgaggtgtt

SEQ ID NO: 24523 - DNA, 26 bp, Homo sapiens
tacacattctagtgtctgaggtgttc

SEQ ID NO: 24524 - DNA, 26 bp, Homo sapiens
acacattctagtgtctgaggtgttcg

SEQ ID NO: 24525 - DNA, 26 bp, Homo sapiens
cacattctagtgtctgaggtgttcga

SEQ ID NO: 24526 - DNA, 26 bp, Homo sapiens
acattctagtgtctgaggtgttcgaa

SEQ ID NO: 24527 - DNA, 26 bp, Homo sapiens
cattctagtgtctgaggtgttcgaaa

SEQ ID NO: 24528 - DNA, 26 bp, Homo sapiens
attctagtgtctgaggtgttcgaaag

SEQ ID NO: 24529 - DNA, 26 bp, Homo sapiens
ttctagtgtctgaggtgttcgaaagc

SEQ ID NO: 24530 - DNA, 26 bp, Homo sapiens
tctagtgtctgaggtgttcgaaagct

SEQ ID NO: 24531 - DNA, 26 bp, Homo sapiens
ctagtgtctgaggtgttcgaaagctc

SEQ ID NO: 24532 - DNA, 26 bp, Homo sapiens
tagtgtctgaggtgttcgaaagctca

SEQ ID NO: 24533 - DNA, 26 bp, Homo sapiens
agtgtctgaggtgttcgaaagctcaa

SEQ ID NO: 24534 - DNA, 26 bp, Homo sapiens
gtgtctgaggtgttcgaaagctcaag

SEQ ID NO: 24535 - DNA, 26 bp, Homo sapiens
tgtctgaggtgttcgaaagctcaagt

SEQ ID NO: 24536 - DNA, 26 bp, Homo sapiens
gtctgaggtgttcgaaagctcaagta

SEQ ID NO: 24537 - DNA, 26 bp, Homo sapiens
tctgaggtgttcgaaagctcaagtat

SEQ ID NO: 24538 - DNA, 26 bp, Homo sapiens
ctgaggtgttcgaaagctcaagtatt

SEQ ID NO: 24539 - DNA, 26 bp, Homo sapiens
tgaggtgttcgaaagctcaagtattg

SEQ ID NO: 24540 - DNA, 26 bp, Homo sapiens
gaggtgttcgaaagctcaagtattgt

SEQ ID NO: 24541 - DNA, 26 bp, Homo sapiens
aggtgttcgaaagctcaagtattgta

SEQ ID NO: 24542 - DNA, 26 bp, Homo sapiens
ggtgttcgaaagctcaagtattgtat

SEQ ID NO: 24543 - DNA, 26 bp, Homo sapiens
gtgttcgaaagctcaagtattgtatt

SEQ ID NO: 24544 - DNA, 26 bp, Homo sapiens
tgttcgaaagctcaagtattgtattg

SEQ ID NO: 24545 - DNA, 26 bp, Homo sapiens
gttcgaaagctcaagtattgtattgc

SEQ ID NO: 24546 - DNA, 26 bp, Homo sapiens
ttcgaaagctcaagtattgtattgcg

SEQ ID NO: 24547 - DNA, 26 bp, Homo sapiens
tcgaaagctcaagtattgtattgcga

SEQ ID NO: 24548 - DNA, 26 bp, Homo sapiens
cgaaagctcaagtattgtattgcgaa

SEQ ID NO: 24549 - DNA, 26 bp, Homo sapiens
gaaagctcaagtattgtattgcgaaa

SEQ ID NO: 24550 - DNA, 26 bp, Homo sapiens
aaagctcaagtattgtattgcgaaac

SEQ ID NO: 24551 - DNA, 26 bp, Homo sapiens
aagctcaagtattgtattgcgaaact

SEQ ID NO: 24552 - DNA, 26 bp, Homo sapiens
agctcaagtattgtattgcgaaactg

SEQ ID NO: 24553 - DNA, 26 bp, Homo sapiens
gctcaagtattgtattgcgaaactgg

SEQ ID NO: 24554 - DNA, 26 bp, Homo sapiens
ctcaagtattgtattgcgaaactgga

SEQ ID NO: 24555 - DNA, 26 bp, Homo sapiens
tcaagtattgtattgcgaaactggaa

SEQ ID NO: 24556 - DNA, 26 bp, Homo sapiens
caagtattgtattgcgaaactggaat

SEQ ID NO: 24557 - DNA, 26 bp, Homo sapiens
aagtattgtattgcgaaactggaatg

SEQ ID NO: 24558 - DNA, 26 bp, Homo sapiens
agtattgtattgcgaaactggaatgt

SEQ ID NO: 24559 - DNA, 26 bp, Homo sapiens
gtattgtattgcgaaactggaatgtt

SEQ ID NO: 24560 - DNA, 26 bp, Homo sapiens
tattgtattgcgaaactggaatgttt

SEQ ID NO: 24561 - DNA, 26 bp, Homo sapiens
attgtattgcgaaactggaatgtttg

SEQ ID NO: 24562 - DNA, 26 bp, Homo sapiens
ttgtattgcgaaactggaatgtttgt

SEQ ID NO: 24563 - DNA, 26 bp, Homo sapiens
tgtattgcgaaactggaatgtttgta

SEQ ID NO: 24564 - DNA, 26 bp, Homo sapiens
gtattgcgaaactggaatgtttgtaa

SEQ ID NO: 24565 - DNA, 26 bp, Homo sapiens
tattgcgaaactggaatgtttgtaat

SEQ ID NO: 24566 - DNA, 26 bp, Homo sapiens
attgcgaaactggaatgtttgtaata

SEQ ID NO: 24567 - DNA, 26 bp, Homo sapiens
ttgcgaaactggaatgtttgtaatat

SEQ ID NO: 24568 - DNA, 26 bp, Homo sapiens
tgcgaaactggaatgtttgtaatatt

SEQ ID NO: 24569 - DNA, 26 bp, Homo sapiens
gcgaaactggaatgtttgtaatattt

SEQ ID NO: 24570 - DNA, 26 bp, Homo sapiens
cgaaactggaatgtttgtaatattta

SEQ ID NO: 24571 - DNA, 26 bp, Homo sapiens
gaaactggaatgtttgtaatatttac

SEQ ID NO: 24572 - DNA, 26 bp, Homo sapiens
aaactggaatgtttgtaatatttact

SEQ ID NO: 24573 - DNA, 26 bp, Homo sapiens
aactggaatgtttgtaatatttactt

SEQ ID NO: 24574 - DNA, 26 bp, Homo sapiens
actggaatgtttgtaatatttacttc

SEQ ID NO: 24575 - DNA, 26 bp, Homo sapiens
ctggaatgtttgtaatatttacttca

SEQ ID NO: 24576 - DNA, 26 bp, Homo sapiens
tggaatgtttgtaatatttacttcaa

SEQ ID NO: 24577 - DNA, 26 bp, Homo sapiens
ggaatgtttgtaatatttacttcaat

SEQ ID NO: 24578 - DNA, 26 bp, Homo sapiens
gaatgtttgtaatatttacttcaatg

SEQ ID NO: 24579 - DNA, 26 bp, Homo sapiens
aatgtttgtaatatttacttcaatgc

SEQ ID NO: 24580 - DNA, 26 bp, Homo sapiens
atgtttgtaatatttacttcaatgca

SEQ ID NO: 24581 - DNA, 26 bp, Homo sapiens
tgtttgtaatatttacttcaatgcac

SEQ ID NO: 24582 - DNA, 26 bp, Homo sapiens
gtttgtaatatttacttcaatgcaca

SEQ ID NO: 24583 - DNA, 26 bp, Homo sapiens
tttgtaatatttacttcaatgcacaa

SEQ ID NO: 24584 - DNA, 26 bp, Homo sapiens
ttgtaatatttacttcaatgcacaat

SEQ ID NO: 24585 - DNA, 26 bp, Homo sapiens
tgtaatatttacttcaatgcacaata

SEQ ID NO: 24586 - DNA, 26 bp, Homo sapiens
gtaatatttacttcaatgcacaatag

SEQ ID NO: 24587 - DNA, 26 bp, Homo sapiens
taatatttacttcaatgcacaataga

SEQ ID NO: 24588 - DNA, 26 bp, Homo sapiens
aatatttacttcaatgcacaatagac

SEQ ID NO: 24589 - DNA, 26 bp, Homo sapiens
atatttacttcaatgcacaatagaca

SEQ ID NO: 24590 - DNA, 26 bp, Homo sapiens
tatttacttcaatgcacaatagacat

SEQ ID NO: 24591 - DNA, 26 bp, Homo sapiens
atttacttcaatgcacaatagacatc

SEQ ID NO: 24592 - DNA, 26 bp, Homo sapiens
tttacttcaatgcacaatagacatca

SEQ ID NO: 24593 - DNA, 26 bp, Homo sapiens
ttacttcaatgcacaatagacatcac

SEQ ID NO: 24594 - DNA, 26 bp, Homo sapiens
tacttcaatgcacaatagacatcact

SEQ ID NO: 24595 - DNA, 26 bp, Homo sapiens
acttcaatgcacaatagacatcactt

SEQ ID NO: 24596 - DNA, 26 bp, Homo sapiens
cttcaatgcacaatagacatcacttt

SEQ ID NO: 24597 - DNA, 26 bp, Homo sapiens
ttcaatgcacaatagacatcactttt

SEQ ID NO: 24598 - DNA, 26 bp, Homo sapiens
tcaatgcacaatagacatcactttta

SEQ ID NO: 24599 - DNA, 26 bp, Homo sapiens
caatgcacaatagacatcacttttac

SEQ ID NO: 24600 - DNA, 26 bp, Homo sapiens
aatgcacaatagacatcacttttact

SEQ ID NO: 24601 - DNA, 26 bp, Homo sapiens
atgcacaatagacatcacttttactt

SEQ ID NO: 24602 - DNA, 26 bp, Homo sapiens
tgcacaatagacatcacttttacttc

SEQ ID NO: 24603 - DNA, 26 bp, Homo sapiens
gcacaatagacatcacttttacttct

SEQ ID NO: 24604 - DNA, 26 bp, Homo sapiens
cacaatagacatcacttttacttctc

SEQ ID NO: 24605 - DNA, 26 bp, Homo sapiens
acaatagacatcacttttacttctct

SEQ ID NO: 24606 - DNA, 26 bp, Homo sapiens
caatagacatcacttttacttctctg

SEQ ID NO: 24607 - DNA, 26 bp, Homo sapiens
aatagacatcacttttacttctctga

SEQ ID NO: 24608 - DNA, 26 bp, Homo sapiens
atagacatcacttttacttctctgaa

SEQ ID NO: 24609 - DNA, 26 bp, Homo sapiens
tagacatcacttttacttctctgaag

SEQ ID NO: 24610 - DNA, 26 bp, Homo sapiens
agacatcacttttacttctctgaaga

SEQ ID NO: 24611 - DNA, 26 bp, Homo sapiens
gacatcacttttacttctctgaagac

SEQ ID NO: 24612 - DNA, 26 bp, Homo sapiens
acatcacttttacttctctgaagact

SEQ ID NO: 24613 - DNA, 26 bp, Homo sapiens
catcacttttacttctctgaagactg

SEQ ID NO: 24614 - DNA, 26 bp, Homo sapiens
atcacttttacttctctgaagactgg

SEQ ID NO: 24615 - DNA, 26 bp, Homo sapiens
tcacttttacttctctgaagactggc

SEQ ID NO: 24616 - DNA, 26 bp, Homo sapiens
cacttttacttctctgaagactggct

SEQ ID NO: 24617 - DNA, 26 bp, Homo sapiens
acttttacttctctgaagactggctg

SEQ ID NO: 24618 - DNA, 26 bp, Homo sapiens
cttttacttctctgaagactggctga

SEQ ID NO: 24619 - DNA, 26 bp, Homo sapiens
ttttacttctctgaagactggctgaa

SEQ ID NO: 24620 - DNA, 26 bp, Homo sapiens
tttacttctctgaagactggctgaac

SEQ ID NO: 24621 - DNA, 26 bp, Homo sapiens
ttacttctctgaagactggctgaact

SEQ ID NO: 24622 - DNA, 26 bp, Homo sapiens
tacttctctgaagactggctgaactt

SEQ ID NO: 24623 - DNA, 26 bp, Homo sapiens
acttctctgaagactggctgaacttt

SEQ ID NO: 24624 - DNA, 26 bp, Homo sapiens
cttctctgaagactggctgaactttc

SEQ ID NO: 24625 - DNA, 26 bp, Homo sapiens
ttctctgaagactggctgaactttct

SEQ ID NO: 24626 - DNA, 26 bp, Homo sapiens
tctctgaagactggctgaactttctg

SEQ ID NO: 24627 - DNA, 26 bp, Homo sapiens
ctctgaagactggctgaactttctgt

SEQ ID NO: 24628 - DNA, 26 bp, Homo sapiens
tctgaagactggctgaactttctgta

SEQ ID NO: 24629 - DNA, 26 bp, Homo sapiens
ctgaagactggctgaactttctgtac

SEQ ID NO: 24630 - DNA, 26 bp, Homo sapiens
tgaagactggctgaactttctgtact

SEQ ID NO: 24631 - DNA, 26 bp, Homo sapiens
gaagactggctgaactttctgtactt

SEQ ID NO: 24632 - DNA, 26 bp, Homo sapiens
aagactggctgaactttctgtactta

SEQ ID NO: 24633 - DNA, 26 bp, Homo sapiens
agactggctgaactttctgtacttaa

SEQ ID NO: 24634 - DNA, 26 bp, Homo sapiens
gactggctgaactttctgtacttaaa

SEQ ID NO: 24635 - DNA, 26 bp, Homo sapiens
actggctgaactttctgtacttaaaa

SEQ ID NO: 24636 - DNA, 26 bp, Homo sapiens
ctggctgaactttctgtacttaaaaa

SEQ ID NO: 24637 - DNA, 26 bp, Homo sapiens
tggctgaactttctgtacttaaaaaa

SEQ ID NO: 24638 - DNA, 26 bp, Homo sapiens
ggctgaactttctgtacttaaaaaat

SEQ ID NO: 24639 - DNA, 26 bp, Homo sapiens
gctgaactttctgtacttaaaaaata

SEQ ID NO: 24640 - DNA, 26 bp, Homo sapiens
ctgaactttctgtacttaaaaaatat

SEQ ID NO: 24641 - DNA, 26 bp, Homo sapiens
tgaactttctgtacttaaaaaatata

SEQ ID NO: 24642 - DNA, 26 bp, Homo sapiens
gaactttctgtacttaaaaaatatac

SEQ ID NO: 24643 - DNA, 26 bp, Homo sapiens
aactttctgtacttaaaaaatataca

SEQ ID NO: 24644 - DNA, 26 bp, Homo sapiens
actttctgtacttaaaaaatatacat

SEQ ID NO: 24645 - DNA, 26 bp, Homo sapiens
ctttctgtacttaaaaaatatacata

SEQ ID NO: 24646 - DNA, 26 bp, Homo sapiens
tttctgtacttaaaaaatatacatac

SEQ ID NO: 24647 - DNA, 26 bp, Homo sapiens
ttctgtacttaaaaaatatacataca

SEQ ID NO: 24648 - DNA, 26 bp, Homo sapiens
tctgtacttaaaaaatatacatacac

SEQ ID NO: 24649 - DNA, 26 bp, Homo sapiens
ctgtacttaaaaaatatacatacaca

SEQ ID NO: 24650 - DNA, 26 bp, Homo sapiens
tgtacttaaaaaatatacatacacat

SEQ ID NO: 24651 - DNA, 26 bp, Homo sapiens
gtacttaaaaaatatacatacacatc

SEQ ID NO: 24652 - DNA, 26 bp, Homo sapiens
tacttaaaaaatatacatacacatct

SEQ ID NO: 24653 - DNA, 26 bp, Homo sapiens
acttaaaaaatatacatacacatcta

SEQ ID NO: 24654 - DNA, 26 bp, Homo sapiens
cttaaaaaatatacatacacatctat

SEQ ID NO: 24655 - DNA, 26 bp, Homo sapiens
ttaaaaaatatacatacacatctata

SEQ ID NO: 24656 - DNA, 26 bp, Homo sapiens
taaaaaatatacatacacatctataa

SEQ ID NO: 24657 - DNA, 26 bp, Homo sapiens
aaaaaatatacatacacatctataat

SEQ ID NO: 24658 - DNA, 26 bp, Homo sapiens
aaaaatatacatacacatctataatt

SEQ ID NO: 24659 - DNA, 26 bp, Homo sapiens
aaaatatacatacacatctataattc

SEQ ID NO: 24660 - DNA, 26 bp, Homo sapiens
aaatatacatacacatctataattcc

SEQ ID NO: 24661 - DNA, 26 bp, Homo sapiens
aatatacatacacatctataattcct

SEQ ID NO: 24662 - DNA, 26 bp, Homo sapiens
atatacatacacatctataattcctg

SEQ ID NO: 24663 - DNA, 26 bp, Homo sapiens
tatacatacacatctataattcctga

SEQ ID NO: 24664 - DNA, 26 bp, Homo sapiens
atacatacacatctataattcctgaa

SEQ ID NO: 24665 - DNA, 26 bp, Homo sapiens
tacatacacatctataattcctgaat

SEQ ID NO: 24666 - DNA, 26 bp, Homo sapiens
acatacacatctataattcctgaatg

SEQ ID NO: 24667 - DNA, 26 bp, Homo sapiens
catacacatctataattcctgaatgt

SEQ ID NO: 24668 - DNA, 26 bp, Homo sapiens
atacacatctataattcctgaatgtt

SEQ ID NO: 24669 - DNA, 26 bp, Homo sapiens
tacacatctataattcctgaatgtta

SEQ ID NO: 24670 - DNA, 26 bp, Homo sapiens
acacatctataattcctgaatgttat

SEQ ID NO: 24671 - DNA, 26 bp, Homo sapiens
cacatctataattcctgaatgttata

SEQ ID NO: 24672 - DNA, 26 bp, Homo sapiens
acatctataattcctgaatgttatat

SEQ ID NO: 24673 - DNA, 26 bp, Homo sapiens
catctataattcctgaatgttatatg

SEQ ID NO: 24674 - DNA, 26 bp, Homo sapiens
atctataattcctgaatgttatatgg

SEQ ID NO: 24675 - DNA, 26 bp, Homo sapiens
tctataattcctgaatgttatatggg

SEQ ID NO: 24676 - DNA, 26 bp, Homo sapiens
ctataattcctgaatgttatatgggt

SEQ ID NO: 24677 - DNA, 26 bp, Homo sapiens
tataattcctgaatgttatatgggtc

SEQ ID NO: 24678 - DNA, 26 bp, Homo sapiens
ataattcctgaatgttatatgggtca

SEQ ID NO: 24679 - DNA, 26 bp, Homo sapiens
taattcctgaatgttatatgggtcat

SEQ ID NO: 24680 - DNA, 26 bp, Homo sapiens
aattcctgaatgttatatgggtcatt

SEQ ID NO: 24681 - DNA, 26 bp, Homo sapiens
attcctgaatgttatatgggtcattt

SEQ ID NO: 24682 - DNA, 26 bp, Homo sapiens
ttcctgaatgttatatgggtcattta

SEQ ID NO: 24683 - DNA, 26 bp, Homo sapiens
tcctgaatgttatatgggtcatttag

SEQ ID NO: 24684 - DNA, 26 bp, Homo sapiens
cctgaatgttatatgggtcatttaga

SEQ ID NO: 24685 - DNA, 26 bp, Homo sapiens
ctgaatgttatatgggtcatttagaa

SEQ ID NO: 24686 - DNA, 26 bp, Homo sapiens
tgaatgttatatgggtcatttagaaa

SEQ ID NO: 24687 - DNA, 26 bp, Homo sapiens
gaatgttatatgggtcatttagaaag

SEQ ID NO: 24688 - DNA, 26 bp, Homo sapiens
aatgttatatgggtcatttagaaagt

SEQ ID NO: 24689 - DNA, 26 bp, Homo sapiens
atgttatatgggtcatttagaaagtg

SEQ ID NO: 24690 - DNA, 26 bp, Homo sapiens
tgttatatgggtcatttagaaagtga

SEQ ID NO: 24691 - DNA, 26 bp, Homo sapiens
gttatatgggtcatttagaaagtgaa

SEQ ID NO: 24692 - DNA, 26 bp, Homo sapiens
ttatatgggtcatttagaaagtgaaa

SEQ ID NO: 24693 - DNA, 26 bp, Homo sapiens
tatatgggtcatttagaaagtgaaaa

SEQ ID NO: 24694 - DNA, 26 bp, Homo sapiens
atatgggtcatttagaaagtgaaaat

SEQ ID NO: 24695 - DNA, 26 bp, Homo sapiens
tatgggtcatttagaaagtgaaaata

SEQ ID NO: 24696 - DNA, 26 bp, Homo sapiens
atgggtcatttagaaagtgaaaatat

SEQ ID NO: 24697 - DNA, 26 bp, Homo sapiens
tgggtcatttagaaagtgaaaatatt

SEQ ID NO: 24698 - DNA, 26 bp, Homo sapiens
gggtcatttagaaagtgaaaatatta

SEQ ID NO: 24699 - DNA, 26 bp, Homo sapiens
ggtcatttagaaagtgaaaatattac

SEQ ID NO: 24700 - DNA, 26 bp, Homo sapiens
gtcatttagaaagtgaaaatattact

SEQ ID NO: 24701 - DNA, 26 bp, Homo sapiens
tcatttagaaagtgaaaatattactg

SEQ ID NO: 24702 - DNA, 26 bp, Homo sapiens
catttagaaagtgaaaatattactgt

SEQ ID NO: 24703 - DNA, 26 bp, Homo sapiens
atttagaaagtgaaaatattactgta

SEQ ID NO: 24704 - DNA, 26 bp, Homo sapiens
tttagaaagtgaaaatattactgtac

SEQ ID NO: 24705 - DNA, 26 bp, Homo sapiens
ttagaaagtgaaaatattactgtaca

SEQ ID NO: 24706 - DNA, 26 bp, Homo sapiens
tagaaagtgaaaatattactgtacaa

SEQ ID NO: 24707 - DNA, 26 bp, Homo sapiens
agaaagtgaaaatattactgtacaaa

SEQ ID NO: 24708 - DNA, 26 bp, Homo sapiens
gaaagtgaaaatattactgtacaaag

SEQ ID NO: 24709 - DNA, 26 bp, Homo sapiens
aaagtgaaaatattactgtacaaagt

SEQ ID NO: 24710 - DNA, 26 bp, Homo sapiens
aagtgaaaatattactgtacaaagtc

SEQ ID NO: 24711 - DNA, 26 bp, Homo sapiens
agtgaaaatattactgtacaaagtct

SEQ ID NO: 24712 - DNA, 26 bp, Homo sapiens
gtgaaaatattactgtacaaagtctt

SEQ ID NO: 24713 - DNA, 26 bp, Homo sapiens
tgaaaatattactgtacaaagtcttc

SEQ ID NO: 24714 - DNA, 26 bp, Homo sapiens
gaaaatattactgtacaaagtcttca

SEQ ID NO: 24715 - DNA, 26 bp, Homo sapiens
aaaatattactgtacaaagtcttcac

SEQ ID NO: 24716 - DNA, 26 bp, Homo sapiens
aaatattactgtacaaagtcttcaca

SEQ ID NO: 24717 - DNA, 26 bp, Homo sapiens
aatattactgtacaaagtcttcacat

SEQ ID NO: 24718 - DNA, 26 bp, Homo sapiens
atattactgtacaaagtcttcacatt

SEQ ID NO: 24719 - DNA, 26 bp, Homo sapiens
tattactgtacaaagtcttcacattt

SEQ ID NO: 24720 - DNA, 26 bp, Homo sapiens
attactgtacaaagtcttcacatttg

SEQ ID NO: 24721 - DNA, 26 bp, Homo sapiens
ttactgtacaaagtcttcacatttga

SEQ ID NO: 24722 - DNA, 26 bp, Homo sapiens
tactgtacaaagtcttcacatttgag

SEQ ID NO: 24723 - DNA, 26 bp, Homo sapiens
actgtacaaagtcttcacatttgaga

SEQ ID NO: 24724 - DNA, 26 bp, Homo sapiens
ctgtacaaagtcttcacatttgagac

SEQ ID NO: 24725 - DNA, 26 bp, Homo sapiens
tgtacaaagtcttcacatttgagaca

SEQ ID NO: 24726 - DNA, 26 bp, Homo sapiens
gtacaaagtcttcacatttgagacat

SEQ ID NO: 24727 - DNA, 26 bp, Homo sapiens
tacaaagtcttcacatttgagacata

SEQ ID NO: 24728 - DNA, 26 bp, Homo sapiens
acaaagtcttcacatttgagacataa

SEQ ID NO: 24729 - DNA, 26 bp, Homo sapiens
caaagtcttcacatttgagacataat

SEQ ID NO: 24730 - DNA, 26 bp, Homo sapiens
aaagtcttcacatttgagacataatt

SEQ ID NO: 24731 - DNA, 26 bp, Homo sapiens
aagtcttcacatttgagacataattg

SEQ ID NO: 24732 - DNA, 26 bp, Homo sapiens
agtcttcacatttgagacataattgt

SEQ ID NO: 24733 - DNA, 26 bp, Homo sapiens
gtcttcacatttgagacataattgta

SEQ ID NO: 24734 - DNA, 26 bp, Homo sapiens
tcttcacatttgagacataattgtat

SEQ ID NO: 24735 - DNA, 26 bp, Homo sapiens
cttcacatttgagacataattgtatg

SEQ ID NO: 24736 - DNA, 26 bp, Homo sapiens
ttcacatttgagacataattgtatga

SEQ ID NO: 24737 - DNA, 26 bp, Homo sapiens
tcacatttgagacataattgtatgat

SEQ ID NO: 24738 - DNA, 26 bp, Homo sapiens
cacatttgagacataattgtatgatt

SEQ ID NO: 24739 - DNA, 26 bp, Homo sapiens
acatttgagacataattgtatgattg

SEQ ID NO: 24740 - DNA, 26 bp, Homo sapiens
catttgagacataattgtatgattgt

SEQ ID NO: 24741 - DNA, 26 bp, Homo sapiens
atttgagacataattgtatgattgtt

SEQ ID NO: 24742 - DNA, 26 bp, Homo sapiens
tttgagacataattgtatgattgttc

SEQ ID NO: 24743 - DNA, 26 bp, Homo sapiens
ttgagacataattgtatgattgttca

SEQ ID NO: 24744 - DNA, 26 bp, Homo sapiens
tgagacataattgtatgattgttcaa

SEQ ID NO: 24745 - DNA, 26 bp, Homo sapiens
gagacataattgtatgattgttcaaa

SEQ ID NO: 24746 - DNA, 26 bp, Homo sapiens
agacataattgtatgattgttcaaat

SEQ ID NO: 24747 - DNA, 26 bp, Homo sapiens
gacataattgtatgattgttcaaatt

SEQ ID NO: 24748 - DNA, 26 bp, Homo sapiens
acataattgtatgattgttcaaattc

SEQ ID NO: 24749 - DNA, 26 bp, Homo sapiens
cataattgtatgattgttcaaattct

SEQ ID NO: 24750 - DNA, 26 bp, Homo sapiens
ataattgtatgattgttcaaattctg

SEQ ID NO: 24751 - DNA, 26 bp, Homo sapiens
taattgtatgattgttcaaattctgt

SEQ ID NO: 24752 - DNA, 26 bp, Homo sapiens
aattgtatgattgttcaaattctgtt

SEQ ID NO: 24753 - DNA, 26 bp, Homo sapiens
attgtatgattgttcaaattctgtta

SEQ ID NO: 24754 - DNA, 26 bp, Homo sapiens
ttgtatgattgttcaaattctgttaa

SEQ ID NO: 24755 - DNA, 26 bp, Homo sapiens
tgtatgattgttcaaattctgttaat

SEQ ID NO: 24756 - DNA, 26 bp, Homo sapiens
gtatgattgttcaaattctgttaata

SEQ ID NO: 24757 - DNA, 26 bp, Homo sapiens
tatgattgttcaaattctgttaatat

SEQ ID NO: 24758 - DNA, 26 bp, Homo sapiens
atgattgttcaaattctgttaatatt

SEQ ID NO: 24759 - DNA, 26 bp, Homo sapiens
tgattgttcaaattctgttaatatta

SEQ ID NO: 24760 - DNA, 26 bp, Homo sapiens
gattgttcaaattctgttaatattag

SEQ ID NO: 24761 - DNA, 26 bp, Homo sapiens
attgttcaaattctgttaatattagc

SEQ ID NO: 24762 - DNA, 26 bp, Homo sapiens
ttgttcaaattctgttaatattagct

SEQ ID NO: 24763 - DNA, 26 bp, Homo sapiens
tgttcaaattctgttaatattagcta

SEQ ID NO: 24764 - DNA, 26 bp, Homo sapiens
gttcaaattctgttaatattagctat

SEQ ID NO: 24765 - DNA, 26 bp, Homo sapiens
ttcaaattctgttaatattagctatt

SEQ ID NO: 24766 - DNA, 26 bp, Homo sapiens
tcaaattctgttaatattagctattg

SEQ ID NO: 24767 - DNA, 26 bp, Homo sapiens
caaattctgttaatattagctattgg

SEQ ID NO: 24768 - DNA, 26 bp, Homo sapiens
aaattctgttaatattagctattggc

SEQ ID NO: 24769 - DNA, 26 bp, Homo sapiens
aattctgttaatattagctattggca

SEQ ID NO: 24770 - DNA, 26 bp, Homo sapiens
attctgttaatattagctattggcag

SEQ ID NO: 24771 - DNA, 26 bp, Homo sapiens
ttctgttaatattagctattggcagg

SEQ ID NO: 24772 - DNA, 26 bp, Homo sapiens
tctgttaatattagctattggcaggg

SEQ ID NO: 24773 - DNA, 26 bp, Homo sapiens
ctgttaatattagctattggcagggg

SEQ ID NO: 24774 - DNA, 26 bp, Homo sapiens
tgttaatattagctattggcagggga

SEQ ID NO: 24775 - DNA, 26 bp, Homo sapiens
gttaatattagctattggcaggggac

SEQ ID NO: 24776 - DNA, 26 bp, Homo sapiens
ttaatattagctattggcaggggact

SEQ ID NO: 24777 - DNA, 26 bp, Homo sapiens
taatattagctattggcaggggactg

SEQ ID NO: 24778 - DNA, 26 bp, Homo sapiens
aatattagctattggcaggggactga

SEQ ID NO: 24779 - DNA, 26 bp, Homo sapiens
atattagctattggcaggggactgat

SEQ ID NO: 24780 - DNA, 26 bp, Homo sapiens
tattagctattggcaggggactgata

SEQ ID NO: 24781 - DNA, 26 bp, Homo sapiens
attagctattggcaggggactgatat

SEQ ID NO: 24782 - DNA, 26 bp, Homo sapiens
ttagctattggcaggggactgatatc

SEQ ID NO: 24783 - DNA, 26 bp, Homo sapiens
tagctattggcaggggactgatatct

SEQ ID NO: 24784 - DNA, 26 bp, Homo sapiens
agctattggcaggggactgatatcta

SEQ ID NO: 24785 - DNA, 26 bp, Homo sapiens
gctattggcaggggactgatatctaa

SEQ ID NO: 24786 - DNA, 26 bp, Homo sapiens
ctattggcaggggactgatatctaaa

SEQ ID NO: 24787 - DNA, 26 bp, Homo sapiens
tattggcaggggactgatatctaaat

SEQ ID NO: 24788 - DNA, 26 bp, Homo sapiens
attggcaggggactgatatctaaatg

SEQ ID NO: 24789 - DNA, 26 bp, Homo sapiens
ttggcaggggactgatatctaaatgc

SEQ ID NO: 24790 - DNA, 26 bp, Homo sapiens
tggcaggggactgatatctaaatgca

SEQ ID NO: 24791 - DNA, 26 bp, Homo sapiens
ggcaggggactgatatctaaatgcag

SEQ ID NO: 24792 - DNA, 26 bp, Homo sapiens
gcaggggactgatatctaaatgcagg

SEQ ID NO: 24793 - DNA, 26 bp, Homo sapiens
caggggactgatatctaaatgcaggt

SEQ ID NO: 24794 - DNA, 26 bp, Homo sapiens
aggggactgatatctaaatgcaggtt

SEQ ID NO: 24795 - DNA, 26 bp, Homo sapiens
ggggactgatatctaaatgcaggttt

SEQ ID NO: 24796 - DNA, 26 bp, Homo sapiens
gggactgatatctaaatgcaggtttc

SEQ ID NO: 24797 - DNA, 26 bp, Homo sapiens
ggactgatatctaaatgcaggtttca

SEQ ID NO: 24798 - DNA, 26 bp, Homo sapiens
gactgatatctaaatgcaggtttcag

SEQ ID NO: 24799 - DNA, 26 bp, Homo sapiens
actgatatctaaatgcaggtttcagg

SEQ ID NO: 24800 - DNA, 26 bp, Homo sapiens
ctgatatctaaatgcaggtttcaggt

SEQ ID NO: 24801 - DNA, 26 bp, Homo sapiens
tgatatctaaatgcaggtttcaggtt

SEQ ID NO: 24802 - DNA, 26 bp, Homo sapiens
gatatctaaatgcaggtttcaggttc

SEQ ID NO: 24803 - DNA, 26 bp, Homo sapiens
atatctaaatgcaggtttcaggttca

SEQ ID NO: 24804 - DNA, 26 bp, Homo sapiens
tatctaaatgcaggtttcaggttcaa

SEQ ID NO: 24805 - DNA, 26 bp, Homo sapiens
atctaaatgcaggtttcaggttcaag

SEQ ID NO: 24806 - DNA, 26 bp, Homo sapiens
tctaaatgcaggtttcaggttcaaga

SEQ ID NO: 24807 - DNA, 26 bp, Homo sapiens
ctaaatgcaggtttcaggttcaagac

SEQ ID NO: 24808 - DNA, 26 bp, Homo sapiens
taaatgcaggtttcaggttcaagaca

SEQ ID NO: 24809 - DNA, 26 bp, Homo sapiens
aaatgcaggtttcaggttcaagacaa

SEQ ID NO: 24810 - DNA, 26 bp, Homo sapiens
aatgcaggtttcaggttcaagacaat

SEQ ID NO: 24811 - DNA, 26 bp, Homo sapiens
atgcaggtttcaggttcaagacaatt

SEQ ID NO: 24812 - DNA, 26 bp, Homo sapiens
tgcaggtttcaggttcaagacaattc

SEQ ID NO: 24813 - DNA, 26 bp, Homo sapiens
gcaggtttcaggttcaagacaattca

SEQ ID NO: 24814 - DNA, 26 bp, Homo sapiens
caggtttcaggttcaagacaattcat

SEQ ID NO: 24815 - DNA, 26 bp, Homo sapiens
aggtttcaggttcaagacaattcatt

SEQ ID NO: 24816 - DNA, 26 bp, Homo sapiens
ggtttcaggttcaagacaattcattg

SEQ ID NO: 24817 - DNA, 26 bp, Homo sapiens
gtttcaggttcaagacaattcattga

SEQ ID NO: 24818 - DNA, 26 bp, Homo sapiens
tttcaggttcaagacaattcattgaa

SEQ ID NO: 24819 - DNA, 26 bp, Homo sapiens
ttcaggttcaagacaattcattgaac

SEQ ID NO: 24820 - DNA, 26 bp, Homo sapiens
tcaggttcaagacaattcattgaaca

SEQ ID NO: 24821 - DNA, 26 bp, Homo sapiens
caggttcaagacaattcattgaacac

SEQ ID NO: 24822 - DNA, 26 bp, Homo sapiens
aggttcaagacaattcattgaacaca

SEQ ID NO: 24823 - DNA, 26 bp, Homo sapiens
ggttcaagacaattcattgaacacat

SEQ ID NO: 24824 - DNA, 26 bp, Homo sapiens
gttcaagacaattcattgaacacatt

SEQ ID NO: 24825 - DNA, 26 bp, Homo sapiens
ttcaagacaattcattgaacacattg

SEQ ID NO: 24826 - DNA, 26 bp, Homo sapiens
tcaagacaattcattgaacacattga

SEQ ID NO: 24827 - DNA, 26 bp, Homo sapiens
caagacaattcattgaacacattgaa

SEQ ID NO: 24828 - DNA, 26 bp, Homo sapiens
aagacaattcattgaacacattgaaa

SEQ ID NO: 24829 - DNA, 26 bp, Homo sapiens
agacaattcattgaacacattgaaat

SEQ ID NO: 24830 - DNA, 26 bp, Homo sapiens
gacaattcattgaacacattgaaatt

SEQ ID NO: 24831 - DNA, 26 bp, Homo sapiens
acaattcattgaacacattgaaattt

SEQ ID NO: 24832 - DNA, 26 bp, Homo sapiens
caattcattgaacacattgaaattta

SEQ ID NO: 24833 - DNA, 26 bp, Homo sapiens
aattcattgaacacattgaaatttat

SEQ ID NO: 24834 - DNA, 26 bp, Homo sapiens
attcattgaacacattgaaatttatt

SEQ ID NO: 24835 - DNA, 26 bp, Homo sapiens
ttcattgaacacattgaaatttattt

SEQ ID NO: 24836 - DNA, 26 bp, Homo sapiens
tcattgaacacattgaaatttatttt

SEQ ID NO: 24837 - DNA, 26 bp, Homo sapiens
cattgaacacattgaaatttattttc

SEQ ID NO: 24838 - DNA, 26 bp, Homo sapiens
attgaacacattgaaatttattttct

SEQ ID NO: 24839 - DNA, 26 bp, Homo sapiens
ttgaacacattgaaatttattttctg

SEQ ID NO: 24840 - DNA, 26 bp, Homo sapiens
tgaacacattgaaatttattttctga

SEQ ID NO: 24841 - DNA, 26 bp, Homo sapiens
gaacacattgaaatttattttctgag

SEQ ID NO: 24842 - DNA, 26 bp, Homo sapiens
aacacattgaaatttattttctgaga

SEQ ID NO: 24843 - DNA, 26 bp, Homo sapiens
acacattgaaatttattttctgagag

SEQ ID NO: 24844 - DNA, 26 bp, Homo sapiens
cacattgaaatttattttctgagaga

SEQ ID NO: 24845 - DNA, 26 bp, Homo sapiens
acattgaaatttattttctgagagag

SEQ ID NO: 24846 - DNA, 26 bp, Homo sapiens
cattgaaatttattttctgagagagt

SEQ ID NO: 24847 - DNA, 26 bp, Homo sapiens
attgaaatttattttctgagagagtt

SEQ ID NO: 24848 - DNA, 26 bp, Homo sapiens
ttgaaatttattttctgagagagttg

SEQ ID NO: 24849 - DNA, 26 bp, Homo sapiens
tgaaatttattttctgagagagttga

SEQ ID NO: 24850 - DNA, 26 bp, Homo sapiens
gaaatttattttctgagagagttgaa

SEQ ID NO: 24851 - DNA, 26 bp, Homo sapiens
aaatttattttctgagagagttgaat

SEQ ID NO: 24852 - DNA, 26 bp, Homo sapiens
aatttattttctgagagagttgaatg

SEQ ID NO: 24853 - DNA, 26 bp, Homo sapiens
atttattttctgagagagttgaatgg

SEQ ID NO: 24854 - DNA, 26 bp, Homo sapiens
tttattttctgagagagttgaatgga

SEQ ID NO: 24855 - DNA, 26 bp, Homo sapiens
ttattttctgagagagttgaatggag

SEQ ID NO: 24856 - DNA, 26 bp, Homo sapiens
tattttctgagagagttgaatggagt

SEQ ID NO: 24857 - DNA, 26 bp, Homo sapiens
attttctgagagagttgaatggagtg

SEQ ID NO: 24858 - DNA, 26 bp, Homo sapiens
ttttctgagagagttgaatggagtgg

SEQ ID NO: 24859 - DNA, 26 bp, Homo sapiens
tttctgagagagttgaatggagtggt

SEQ ID NO: 24860 - DNA, 26 bp, Homo sapiens
ttctgagagagttgaatggagtggtt

SEQ ID NO: 24861 - DNA, 26 bp, Homo sapiens
tctgagagagttgaatggagtggtta

SEQ ID NO: 24862 - DNA, 26 bp, Homo sapiens
ctgagagagttgaatggagtggttag

SEQ ID NO: 24863 - DNA, 26 bp, Homo sapiens
tgagagagttgaatggagtggttagt

SEQ ID NO: 24864 - DNA, 26 bp, Homo sapiens
gagagagttgaatggagtggttagtt

SEQ ID NO: 24865 - DNA, 26 bp, Homo sapiens
agagagttgaatggagtggttagttt

SEQ ID NO: 24866 - DNA, 26 bp, Homo sapiens
gagagttgaatggagtggttagtttt

SEQ ID NO: 24867 - DNA, 26 bp, Homo sapiens
agagttgaatggagtggttagttttt

SEQ ID NO: 24868 - DNA, 26 bp, Homo sapiens
gagttgaatggagtggttagtttttt

SEQ ID NO: 24869 - DNA, 26 bp, Homo sapiens
agttgaatggagtggttagttttttt

SEQ ID NO: 24870 - DNA, 26 bp, Homo sapiens
gttgaatggagtggttagtttttttt

SEQ ID NO: 24871 - DNA, 26 bp, Homo sapiens
ttgaatggagtggttagttttttttt

SEQ ID NO: 24872 - DNA, 26 bp, Homo sapiens
tgaatggagtggttagtttttttttt

SEQ ID NO: 24873 - DNA, 26 bp, Homo sapiens
gaatggagtggttagttttttttttt

SEQ ID NO: 24874 - DNA, 26 bp, Homo sapiens
aatggagtggttagtttttttttttt

SEQ ID NO: 24875 - DNA, 26 bp, Homo sapiens
atggagtggttagttttttttttttt

SEQ ID NO: 24876 - DNA, 26 bp, Homo sapiens
tggagtggttagtttttttttttttt

SEQ ID NO: 24877 - DNA, 26 bp, Homo sapiens
ggagtggttagttttttttttttttt

SEQ ID NO: 24878 - DNA, 26 bp, Homo sapiens
gagtggttagtttttttttttttttt

SEQ ID NO: 24879 - DNA, 26 bp, Homo sapiens
agtggttagttttttttttttttttg

SEQ ID NO: 24880 - DNA, 26 bp, Homo sapiens
gtggttagttttttttttttttttgt

SEQ ID NO: 24881 - DNA, 26 bp, Homo sapiens
tggttagttttttttttttttttgta

SEQ ID NO: 24882 - DNA, 26 bp, Homo sapiens
ggttagttttttttttttttttgtaa

SEQ ID NO: 24883 - DNA, 26 bp, Homo sapiens
gttagttttttttttttttttgtaat

SEQ ID NO: 24884 - DNA, 26 bp, Homo sapiens
ttagttttttttttttttttgtaatg

SEQ ID NO: 24885 - DNA, 26 bp, Homo sapiens
tagttttttttttttttttgtaatgc

SEQ ID NO: 24886 - DNA, 26 bp, Homo sapiens
agttttttttttttttttgtaatgcc

SEQ ID NO: 24887 - DNA, 26 bp, Homo sapiens
gttttttttttttttttgtaatgcct

SEQ ID NO: 24888 - DNA, 26 bp, Homo sapiens
ttttttttttttttttgtaatgcctt

SEQ ID NO: 24889 - DNA, 26 bp, Homo sapiens
tttttttttttttttgtaatgccttt

SEQ ID NO: 24890 - DNA, 26 bp, Homo sapiens
ttttttttttttttgtaatgcctttg

SEQ ID NO: 24891 - DNA, 26 bp, Homo sapiens
tttttttttttttgtaatgcctttgt

SEQ ID NO: 24892 - DNA, 26 bp, Homo sapiens
ttttttttttttgtaatgcctttgtt

SEQ ID NO: 24893 - DNA, 26 bp, Homo sapiens
tttttttttttgtaatgcctttgttc

SEQ ID NO: 24894 - DNA, 26 bp, Homo sapiens
ttttttttttgtaatgcctttgttca

SEQ ID NO: 24895 - DNA, 26 bp, Homo sapiens
tttttttttgtaatgcctttgttcaa

SEQ ID NO: 24896 - DNA, 26 bp, Homo sapiens
ttttttttgtaatgcctttgttcaaa

SEQ ID NO: 24897 - DNA, 26 bp, Homo sapiens
tttttttgtaatgcctttgttcaaat

SEQ ID NO: 24898 - DNA, 26 bp, Homo sapiens
ttttttgtaatgcctttgttcaaatt

SEQ ID NO: 24899 - DNA, 26 bp, Homo sapiens
tttttgtaatgcctttgttcaaattt

SEQ ID NO: 24900 - DNA, 26 bp, Homo sapiens
ttttgtaatgcctttgttcaaatttt

SEQ ID NO: 24901 - DNA, 26 bp, Homo sapiens
tttgtaatgcctttgttcaaattttt

SEQ ID NO: 24902 - DNA, 26 bp, Homo sapiens
ttgtaatgcctttgttcaaatttttt

SEQ ID NO: 24903 - DNA, 26 bp, Homo sapiens
tgtaatgcctttgttcaaattttttg

SEQ ID NO: 24904 - DNA, 26 bp, Homo sapiens
gtaatgcctttgttcaaattttttga

SEQ ID NO: 24905 - DNA, 26 bp, Homo sapiens
taatgcctttgttcaaattttttgag

SEQ ID NO: 24906 - DNA, 26 bp, Homo sapiens
aatgcctttgttcaaattttttgagg

SEQ ID NO: 24907 - DNA, 26 bp, Homo sapiens
atgcctttgttcaaattttttgaggt

SEQ ID NO: 24908 - DNA, 26 bp, Homo sapiens
tgcctttgttcaaattttttgaggtt

SEQ ID NO: 24909 - DNA, 26 bp, Homo sapiens
gcctttgttcaaattttttgaggttt

SEQ ID NO: 24910 - DNA, 26 bp, Homo sapiens
cctttgttcaaattttttgaggtttc

SEQ ID NO: 24911 - DNA, 26 bp, Homo sapiens
ctttgttcaaattttttgaggtttct

SEQ ID NO: 24912 - DNA, 26 bp, Homo sapiens
tttgttcaaattttttgaggtttctt

SEQ ID NO: 24913 - DNA, 26 bp, Homo sapiens
ttgttcaaattttttgaggtttctta

SEQ ID NO: 24914 - DNA, 26 bp, Homo sapiens
tgttcaaattttttgaggtttcttac

SEQ ID NO: 24915 - DNA, 26 bp, Homo sapiens
gttcaaattttttgaggtttcttacc

SEQ ID NO: 24916 - DNA, 26 bp, Homo sapiens
ttcaaattttttgaggtttcttacca

SEQ ID NO: 24917 - DNA, 26 bp, Homo sapiens
tcaaattttttgaggtttcttaccaa

SEQ ID NO: 24918 - DNA, 26 bp, Homo sapiens
caaattttttgaggtttcttaccaaa

SEQ ID NO: 24919 - DNA, 26 bp, Homo sapiens
aaattttttgaggtttcttaccaaaa

SEQ ID NO: 24920 - DNA, 26 bp, Homo sapiens
aattttttgaggtttcttaccaaaaa

SEQ ID NO: 24921 - DNA, 26 bp, Homo sapiens
attttttgaggtttcttaccaaaaag

SEQ ID NO: 24922 - DNA, 26 bp, Homo sapiens
ttttttgaggtttcttaccaaaaagt

SEQ ID NO: 24923 - DNA, 26 bp, Homo sapiens
tttttgaggtttcttaccaaaaagtt

SEQ ID NO: 24924 - DNA, 26 bp, Homo sapiens
ttttgaggtttcttaccaaaaagttt

SEQ ID NO: 24925 - DNA, 26 bp, Homo sapiens
tttgaggtttcttaccaaaaagtttc

SEQ ID NO: 24926 - DNA, 26 bp, Homo sapiens
ttgaggtttcttaccaaaaagtttct

SEQ ID NO: 24927 - DNA, 26 bp, Homo sapiens
tgaggtttcttaccaaaaagtttctc

SEQ ID NO: 24928 - DNA, 26 bp, Homo sapiens
gaggtttcttaccaaaaagtttctcc

SEQ ID NO: 24929 - DNA, 26 bp, Homo sapiens
aggtttcttaccaaaaagtttctcct

SEQ ID NO: 24930 - DNA, 26 bp, Homo sapiens
ggtttcttaccaaaaagtttctcctg

SEQ ID NO: 24931 - DNA, 26 bp, Homo sapiens
gtttcttaccaaaaagtttctcctgg

SEQ ID NO: 24932 - DNA, 26 bp, Homo sapiens
tttcttaccaaaaagtttctcctggg

SEQ ID NO: 24933 - DNA, 26 bp, Homo sapiens
ttcttaccaaaaagtttctcctgggg

SEQ ID NO: 24934 - DNA, 26 bp, Homo sapiens
tcttaccaaaaagtttctcctggggt

SEQ ID NO: 24935 - DNA, 26 bp, Homo sapiens
cttaccaaaaagtttctcctggggtt

SEQ ID NO: 24936 - DNA, 26 bp, Homo sapiens
ttaccaaaaagtttctcctggggttt

SEQ ID NO: 24937 - DNA, 26 bp, Homo sapiens
taccaaaaagtttctcctggggtttc

SEQ ID NO: 24938 - DNA, 26 bp, Homo sapiens
accaaaaagtttctcctggggtttct

SEQ ID NO: 24939 - DNA, 26 bp, Homo sapiens
ccaaaaagtttctcctggggtttctt

SEQ ID NO: 24940 - DNA, 26 bp, Homo sapiens
caaaaagtttctcctggggtttctta

SEQ ID NO: 24941 - DNA, 26 bp, Homo sapiens
aaaaagtttctcctggggtttcttat

SEQ ID NO: 24942 - DNA, 26 bp, Homo sapiens
aaaagtttctcctggggtttcttatc

SEQ ID NO: 24943 - DNA, 26 bp, Homo sapiens
aaagtttctcctggggtttcttatca

SEQ ID NO: 24944 - DNA, 26 bp, Homo sapiens
aagtttctcctggggtttcttatcaa

SEQ ID NO: 24945 - DNA, 26 bp, Homo sapiens
agtttctcctggggtttcttatcaaa

SEQ ID NO: 24946 - DNA, 26 bp, Homo sapiens
gtttctcctggggtttcttatcaaaa

SEQ ID NO: 24947 - DNA, 26 bp, Homo sapiens
tttctcctggggtttcttatcaaaaa

SEQ ID NO: 24948 - DNA, 26 bp, Homo sapiens
ttctcctggggtttcttatcaaaaag

SEQ ID NO: 24949 - DNA, 26 bp, Homo sapiens
tctcctggggtttcttatcaaaaagt

SEQ ID NO: 24950 - DNA, 26 bp, Homo sapiens
ctcctggggtttcttatcaaaaagtt

SEQ ID NO: 24951 - DNA, 26 bp, Homo sapiens
tcctggggtttcttatcaaaaagtta

SEQ ID NO: 24952 - DNA, 26 bp, Homo sapiens
cctggggtttcttatcaaaaagttat

SEQ ID NO: 24953 - DNA, 26 bp, Homo sapiens
ctggggtttcttatcaaaaagttatt

SEQ ID NO: 24954 - DNA, 26 bp, Homo sapiens
tggggtttcttatcaaaaagttatta

SEQ ID NO: 24955 - DNA, 26 bp, Homo sapiens
ggggtttcttatcaaaaagttattac

SEQ ID NO: 24956 - DNA, 26 bp, Homo sapiens
gggtttcttatcaaaaagttattact

SEQ ID NO: 24957 - DNA, 26 bp, Homo sapiens
ggtttcttatcaaaaagttattactt

SEQ ID NO: 24958 - DNA, 26 bp, Homo sapiens
gtttcttatcaaaaagttattacttg

SEQ ID NO: 24959 - DNA, 26 bp, Homo sapiens
tttcttatcaaaaagttattacttgt

SEQ ID NO: 24960 - DNA, 26 bp, Homo sapiens
ttcttatcaaaaagttattacttgta

SEQ ID NO: 24961 - DNA, 26 bp, Homo sapiens
tcttatcaaaaagttattacttgtac

SEQ ID NO: 24962 - DNA, 26 bp, Homo sapiens
cttatcaaaaagttattacttgtact

SEQ ID NO: 24963 - DNA, 26 bp, Homo sapiens
ttatcaaaaagttattacttgtactt

SEQ ID NO: 24964 - DNA, 26 bp, Homo sapiens
tatcaaaaagttattacttgtacttc

SEQ ID NO: 24965 - DNA, 26 bp, Homo sapiens
atcaaaaagttattacttgtacttct

SEQ ID NO: 24966 - DNA, 26 bp, Homo sapiens
tcaaaaagttattacttgtacttcta

SEQ ID NO: 24967 - DNA, 26 bp, Homo sapiens
caaaaagttattacttgtacttctaa

SEQ ID NO: 24968 - DNA, 26 bp, Homo sapiens
aaaaagttattacttgtacttctaaa

SEQ ID NO: 24969 - DNA, 26 bp, Homo sapiens
aaaagttattacttgtacttctaaaa

SEQ ID NO: 24970 - DNA, 26 bp, Homo sapiens
aaagttattacttgtacttctaaaag

SEQ ID NO: 24971 - DNA, 26 bp, Homo sapiens
aagttattacttgtacttctaaaagc

SEQ ID NO: 24972 - DNA, 26 bp, Homo sapiens
agttattacttgtacttctaaaagct

SEQ ID NO: 24973 - DNA, 26 bp, Homo sapiens
gttattacttgtacttctaaaagctg

SEQ ID NO: 24974 - DNA, 26 bp, Homo sapiens
ttattacttgtacttctaaaagctgt

SEQ ID NO: 24975 - DNA, 26 bp, Homo sapiens
tattacttgtacttctaaaagctgtt

SEQ ID NO: 24976 - DNA, 26 bp, Homo sapiens
attacttgtacttctaaaagctgttt

SEQ ID NO: 24977 - DNA, 26 bp, Homo sapiens
ttacttgtacttctaaaagctgtttt

SEQ ID NO: 24978 - DNA, 26 bp, Homo sapiens
tacttgtacttctaaaagctgtttta

SEQ ID NO: 24979 - DNA, 26 bp, Homo sapiens
acttgtacttctaaaagctgttttaa

SEQ ID NO: 24980 - DNA, 26 bp, Homo sapiens
cttgtacttctaaaagctgttttaag

SEQ ID NO: 24981 - DNA, 26 bp, Homo sapiens
ttgtacttctaaaagctgttttaagc

SEQ ID NO: 24982 - DNA, 26 bp, Homo sapiens
tgtacttctaaaagctgttttaagca

SEQ ID NO: 24983 - DNA, 26 bp, Homo sapiens
gtacttctaaaagctgttttaagcaa

SEQ ID NO: 24984 - DNA, 26 bp, Homo sapiens
tacttctaaaagctgttttaagcaaa

SEQ ID NO: 24985 - DNA, 26 bp, Homo sapiens
acttctaaaagctgttttaagcaaat

SEQ ID NO: 24986 - DNA, 26 bp, Homo sapiens
cttctaaaagctgttttaagcaaata

SEQ ID NO: 24987 - DNA, 26 bp, Homo sapiens
ttctaaaagctgttttaagcaaataa

SEQ ID NO: 24988 - DNA, 26 bp, Homo sapiens
tctaaaagctgttttaagcaaataac

SEQ ID NO: 24989 - DNA, 26 bp, Homo sapiens
ctaaaagctgttttaagcaaataacc

SEQ ID NO: 24990 - DNA, 26 bp, Homo sapiens
taaaagctgttttaagcaaataacca

SEQ ID NO: 24991 - DNA, 26 bp, Homo sapiens
aaaagctgttttaagcaaataaccat

SEQ ID NO: 24992 - DNA, 26 bp, Homo sapiens
aaagctgttttaagcaaataaccatg

SEQ ID NO: 24993 - DNA, 26 bp, Homo sapiens
aagctgttttaagcaaataaccatga

SEQ ID NO: 24994 - DNA, 26 bp, Homo sapiens
agctgttttaagcaaataaccatgat

SEQ ID NO: 24995 - DNA, 26 bp, Homo sapiens
gctgttttaagcaaataaccatgata

SEQ ID NO: 24996 - DNA, 26 bp, Homo sapiens
ctgttttaagcaaataaccatgatac

SEQ ID NO: 24997 - DNA, 26 bp, Homo sapiens
tgttttaagcaaataaccatgataca

SEQ ID NO: 24998 - DNA, 26 bp, Homo sapiens
gttttaagcaaataaccatgatacaa

SEQ ID NO: 24999 - DNA, 26 bp, Homo sapiens
ttttaagcaaataaccatgatacaaa

SEQ ID NO: 25000 - DNA, 26 bp, Homo sapiens
tttaagcaaataaccatgatacaaag

SEQ ID NO: 25001 - DNA, 26 bp, Homo sapiens
ttaagcaaataaccatgatacaaagg

SEQ ID NO: 25002 - DNA, 26 bp, Homo sapiens
taagcaaataaccatgatacaaaggc

SEQ ID NO: 25003 - DNA, 26 bp, Homo sapiens
aagcaaataaccatgatacaaaggct

SEQ ID NO: 25004 - DNA, 26 bp, Homo sapiens
agcaaataaccatgatacaaaggctg

SEQ ID NO: 25005 - DNA, 26 bp, Homo sapiens
gcaaataaccatgatacaaaggctgt

SEQ ID NO: 25006 - DNA, 26 bp, Homo sapiens
caaataaccatgatacaaaggctgtg

SEQ ID NO: 25007 - DNA, 26 bp, Homo sapiens
aaataaccatgatacaaaggctgtga

SEQ ID NO: 25008 - DNA, 26 bp, Homo sapiens
aataaccatgatacaaaggctgtgaa

SEQ ID NO: 25009 - DNA, 26 bp, Homo sapiens
ataaccatgatacaaaggctgtgaat

SEQ ID NO: 25010 - DNA, 26 bp, Homo sapiens
taaccatgatacaaaggctgtgaata

SEQ ID NO: 25011 - DNA, 26 bp, Homo sapiens
aaccatgatacaaaggctgtgaatat

SEQ ID NO: 25012 - DNA, 26 bp, Homo sapiens
accatgatacaaaggctgtgaatatt

SEQ ID NO: 25013 - DNA, 26 bp, Homo sapiens
ccatgatacaaaggctgtgaatattt

SEQ ID NO: 25014 - DNA, 26 bp, Homo sapiens
catgatacaaaggctgtgaatattta

SEQ ID NO: 25015 - DNA, 26 bp, Homo sapiens
atgatacaaaggctgtgaatatttaa

SEQ ID NO: 25016 - DNA, 26 bp, Homo sapiens
tgatacaaaggctgtgaatatttaat

SEQ ID NO: 25017 - DNA, 26 bp, Homo sapiens
gatacaaaggctgtgaatatttaatc

SEQ ID NO: 25018 - DNA, 26 bp, Homo sapiens
atacaaaggctgtgaatatttaatct

SEQ ID NO: 25019 - DNA, 26 bp, Homo sapiens
tacaaaggctgtgaatatttaatctg

SEQ ID NO: 25020 - DNA, 26 bp, Homo sapiens
acaaaggctgtgaatatttaatctgt

SEQ ID NO: 25021 - DNA, 26 bp, Homo sapiens
caaaggctgtgaatatttaatctgtc

SEQ ID NO: 25022 - DNA, 26 bp, Homo sapiens
aaaggctgtgaatatttaatctgtct

SEQ ID NO: 25023 - DNA, 26 bp, Homo sapiens
aaggctgtgaatatttaatctgtctt

SEQ ID NO: 25024 - DNA, 26 bp, Homo sapiens
aggctgtgaatatttaatctgtcttt

SEQ ID NO: 25025 - DNA, 26 bp, Homo sapiens
ggctgtgaatatttaatctgtctttt

SEQ ID NO: 25026 - DNA, 26 bp, Homo sapiens
gctgtgaatatttaatctgtcttttt

SEQ ID NO: 25027 - DNA, 26 bp, Homo sapiens
ctgtgaatatttaatctgtctttttt

SEQ ID NO: 25028 - DNA, 26 bp, Homo sapiens
tgtgaatatttaatctgtcttttttc

SEQ ID NO: 25029 - DNA, 26 bp, Homo sapiens
gtgaatatttaatctgtcttttttca

SEQ ID NO: 25030 - DNA, 26 bp, Homo sapiens
tgaatatttaatctgtcttttttcaa

SEQ ID NO: 25031 - DNA, 26 bp, Homo sapiens
gaatatttaatctgtcttttttcaaa

SEQ ID NO: 25032 - DNA, 26 bp, Homo sapiens
aatatttaatctgtcttttttcaaac

SEQ ID NO: 25033 - DNA, 26 bp, Homo sapiens
atatttaatctgtcttttttcaaaca

SEQ ID NO: 25034 - DNA, 26 bp, Homo sapiens
tatttaatctgtcttttttcaaacag

SEQ ID NO: 25035 - DNA, 26 bp, Homo sapiens
atttaatctgtcttttttcaaacagc

SEQ ID NO: 25036 - DNA, 26 bp, Homo sapiens
tttaatctgtcttttttcaaacagcc

SEQ ID NO: 25037 - DNA, 26 bp, Homo sapiens
ttaatctgtcttttttcaaacagcct

SEQ ID NO: 25038 - DNA, 26 bp, Homo sapiens
taatctgtcttttttcaaacagcctg

SEQ ID NO: 25039 - DNA, 26 bp, Homo sapiens
aatctgtcttttttcaaacagcctgt

SEQ ID NO: 25040 - DNA, 26 bp, Homo sapiens
atctgtcttttttcaaacagcctgta

SEQ ID NO: 25041 - DNA, 26 bp, Homo sapiens
tctgtcttttttcaaacagcctgtat

SEQ ID NO: 25042 - DNA, 26 bp, Homo sapiens
ctgtcttttttcaaacagcctgtatt

SEQ ID NO: 25043 - DNA, 26 bp, Homo sapiens
tgtcttttttcaaacagcctgtattt

SEQ ID NO: 25044 - DNA, 26 bp, Homo sapiens
gtcttttttcaaacagcctgtatttt

SEQ ID NO: 25045 - DNA, 26 bp, Homo sapiens
tcttttttcaaacagcctgtatttta

SEQ ID NO: 25046 - DNA, 26 bp, Homo sapiens
cttttttcaaacagcctgtattttaa

SEQ ID NO: 25047 - DNA, 26 bp, Homo sapiens
ttttttcaaacagcctgtattttaaa

SEQ ID NO: 25048 - DNA, 26 bp, Homo sapiens
tttttcaaacagcctgtattttaaaa

SEQ ID NO: 25049 - DNA, 26 bp, Homo sapiens
ttttcaaacagcctgtattttaaaag

SEQ ID NO: 25050 - DNA, 26 bp, Homo sapiens
tttcaaacagcctgtattttaaaagg

SEQ ID NO: 25051 - DNA, 26 bp, Homo sapiens
ttcaaacagcctgtattttaaaaggc

SEQ ID NO: 25052 - DNA, 26 bp, Homo sapiens
tcaaacagcctgtattttaaaaggcc

SEQ ID NO: 25053 - DNA, 26 bp, Homo sapiens
caaacagcctgtattttaaaaggcct

SEQ ID NO: 25054 - DNA, 26 bp, Homo sapiens
aaacagcctgtattttaaaaggcctt

SEQ ID NO: 25055 - DNA, 26 bp, Homo sapiens
aacagcctgtattttaaaaggcctta

SEQ ID NO: 25056 - DNA, 26 bp, Homo sapiens
acagcctgtattttaaaaggccttaa

SEQ ID NO: 25057 - DNA, 26 bp, Homo sapiens
cagcctgtattttaaaaggccttaat

SEQ ID NO: 25058 - DNA, 26 bp, Homo sapiens
agcctgtattttaaaaggccttaata

SEQ ID NO: 25059 - DNA, 26 bp, Homo sapiens
gcctgtattttaaaaggccttaataa

SEQ ID NO: 25060 - DNA, 26 bp, Homo sapiens
cctgtattttaaaaggccttaataat

SEQ ID NO: 25061 - DNA, 26 bp, Homo sapiens
ctgtattttaaaaggccttaataata

SEQ ID NO: 25062 - DNA, 26 bp, Homo sapiens
tgtattttaaaaggccttaataataa

SEQ ID NO: 25063 - DNA, 26 bp, Homo sapiens
gtattttaaaaggccttaataataat

SEQ ID NO: 25064 - DNA, 26 bp, Homo sapiens
tattttaaaaggccttaataataatc

SEQ ID NO: 25065 - DNA, 26 bp, Homo sapiens
attttaaaaggccttaataataatca

SEQ ID NO: 25066 - DNA, 26 bp, Homo sapiens
ttttaaaaggccttaataataatcat

SEQ ID NO: 25067 - DNA, 26 bp, Homo sapiens
tttaaaaggccttaataataatcatg

SEQ ID NO: 25068 - DNA, 26 bp, Homo sapiens
ttaaaaggccttaataataatcatgg

SEQ ID NO: 25069 - DNA, 26 bp, Homo sapiens
taaaaggccttaataataatcatggc

SEQ ID NO: 25070 - DNA, 26 bp, Homo sapiens
aaaaggccttaataataatcatggct

SEQ ID NO: 25071 - DNA, 26 bp, Homo sapiens
aaaggccttaataataatcatggcta

SEQ ID NO: 25072 - DNA, 26 bp, Homo sapiens
aaggccttaataataatcatggctat

SEQ ID NO: 25073 - DNA, 26 bp, Homo sapiens
aggccttaataataatcatggctatt

SEQ ID NO: 25074 - DNA, 26 bp, Homo sapiens
ggccttaataataatcatggctattg

SEQ ID NO: 25075 - DNA, 26 bp, Homo sapiens
gccttaataataatcatggctattgg

SEQ ID NO: 25076 - DNA, 26 bp, Homo sapiens
ccttaataataatcatggctattggt

SEQ ID NO: 25077 - DNA, 26 bp, Homo sapiens
cttaataataatcatggctattggta

SEQ ID NO: 25078 - DNA, 26 bp, Homo sapiens
ttaataataatcatggctattggtaa

SEQ ID NO: 25079 - DNA, 26 bp, Homo sapiens
taataataatcatggctattggtaaa

SEQ ID NO: 25080 - DNA, 26 bp, Homo sapiens
aataataatcatggctattggtaaaa

SEQ ID NO: 25081 - DNA, 26 bp, Homo sapiens
ataataatcatggctattggtaaaat

SEQ ID NO: 25082 - DNA, 26 bp, Homo sapiens
taataatcatggctattggtaaaatc

SEQ ID NO: 25083 - DNA, 26 bp, Homo sapiens
aataatcatggctattggtaaaatca

SEQ ID NO: 25084 - DNA, 26 bp, Homo sapiens
ataatcatggctattggtaaaatcat

SEQ ID NO: 25085 - DNA, 26 bp, Homo sapiens
taatcatggctattggtaaaatcatt

SEQ ID NO: 25086 - DNA, 26 bp, Homo sapiens
aatcatggctattggtaaaatcattt

SEQ ID NO: 25087 - DNA, 26 bp, Homo sapiens
atcatggctattggtaaaatcatttg

SEQ ID NO: 25088 - DNA, 26 bp, Homo sapiens
tcatggctattggtaaaatcatttgt

SEQ ID NO: 25089 - DNA, 26 bp, Homo sapiens
catggctattggtaaaatcatttgta

SEQ ID NO: 25090 - DNA, 26 bp, Homo sapiens
atggctattggtaaaatcatttgtat

SEQ ID NO: 25091 - DNA, 26 bp, Homo sapiens
tggctattggtaaaatcatttgtatg

SEQ ID NO: 25092 - DNA, 26 bp, Homo sapiens
ggctattggtaaaatcatttgtatgc

SEQ ID NO: 25093 - DNA, 26 bp, Homo sapiens
gctattggtaaaatcatttgtatgcc

SEQ ID NO: 25094 - DNA, 26 bp, Homo sapiens
ctattggtaaaatcatttgtatgccg

SEQ ID NO: 25095 - DNA, 26 bp, Homo sapiens
tattggtaaaatcatttgtatgccga

SEQ ID NO: 25096 - DNA, 26 bp, Homo sapiens
attggtaaaatcatttgtatgccgaa

SEQ ID NO: 25097 - DNA, 26 bp, Homo sapiens
ttggtaaaatcatttgtatgccgaag

SEQ ID NO: 25098 - DNA, 26 bp, Homo sapiens
tggtaaaatcatttgtatgccgaagg

SEQ ID NO: 25099 - DNA, 26 bp, Homo sapiens
ggtaaaatcatttgtatgccgaaggg

SEQ ID NO: 25100 - DNA, 26 bp, Homo sapiens
gtaaaatcatttgtatgccgaagggt

SEQ ID NO: 25101 - DNA, 26 bp, Homo sapiens
taaaatcatttgtatgccgaagggtg

SEQ ID NO: 25102 - DNA, 26 bp, Homo sapiens
aaaatcatttgtatgccgaagggtgt

SEQ ID NO: 25103 - DNA, 26 bp, Homo sapiens
aaatcatttgtatgccgaagggtgtc

SEQ ID NO: 25104 - DNA, 26 bp, Homo sapiens
aatcatttgtatgccgaagggtgtca

SEQ ID NO: 25105 - DNA, 26 bp, Homo sapiens
atcatttgtatgccgaagggtgtcaa

SEQ ID NO: 25106 - DNA, 26 bp, Homo sapiens
tcatttgtatgccgaagggtgtcaag

SEQ ID NO: 25107 - DNA, 26 bp, Homo sapiens
catttgtatgccgaagggtgtcaagt

SEQ ID NO: 25108 - DNA, 26 bp, Homo sapiens
atttgtatgccgaagggtgtcaagta

SEQ ID NO: 25109 - DNA, 26 bp, Homo sapiens
tttgtatgccgaagggtgtcaagtaa

SEQ ID NO: 25110 - DNA, 26 bp, Homo sapiens
ttgtatgccgaagggtgtcaagtaaa

SEQ ID NO: 25111 - DNA, 26 bp, Homo sapiens
tgtatgccgaagggtgtcaagtaaag

SEQ ID NO: 25112 - DNA, 26 bp, Homo sapiens
gtatgccgaagggtgtcaagtaaagg

SEQ ID NO: 25113 - DNA, 26 bp, Homo sapiens
tatgccgaagggtgtcaagtaaaggt

SEQ ID NO: 25114 - DNA, 26 bp, Homo sapiens
atgccgaagggtgtcaagtaaaggtg

SEQ ID NO: 25115 - DNA, 26 bp, Homo sapiens
tgccgaagggtgtcaagtaaaggtgt

SEQ ID NO: 25116 - DNA, 26 bp, Homo sapiens
gccgaagggtgtcaagtaaaggtgtc

SEQ ID NO: 25117 - DNA, 26 bp, Homo sapiens
ccgaagggtgtcaagtaaaggtgtca

SEQ ID NO: 25118 - DNA, 26 bp, Homo sapiens
cgaagggtgtcaagtaaaggtgtcat

SEQ ID NO: 25119 - DNA, 26 bp, Homo sapiens
gaagggtgtcaagtaaaggtgtcatt

SEQ ID NO: 25120 - DNA, 26 bp, Homo sapiens
aagggtgtcaagtaaaggtgtcattc

SEQ ID NO: 25121 - DNA, 26 bp, Homo sapiens
agggtgtcaagtaaaggtgtcattcc

SEQ ID NO: 25122 - DNA, 26 bp, Homo sapiens
gggtgtcaagtaaaggtgtcattcct

SEQ ID NO: 25123 - DNA, 26 bp, Homo sapiens
ggtgtcaagtaaaggtgtcattcctt

SEQ ID NO: 25124 - DNA, 26 bp, Homo sapiens
gtgtcaagtaaaggtgtcattccttg

SEQ ID NO: 25125 - DNA, 26 bp, Homo sapiens
tgtcaagtaaaggtgtcattccttgg

SEQ ID NO: 25126 - DNA, 26 bp, Homo sapiens
gtcaagtaaaggtgtcattccttgga

SEQ ID NO: 25127 - DNA, 26 bp, Homo sapiens
tcaagtaaaggtgtcattccttggaa

SEQ ID NO: 25128 - DNA, 26 bp, Homo sapiens
caagtaaaggtgtcattccttggaag

SEQ ID NO: 25129 - DNA, 26 bp, Homo sapiens
aagtaaaggtgtcattccttggaaga

SEQ ID NO: 25130 - DNA, 26 bp, Homo sapiens
agtaaaggtgtcattccttggaagag

SEQ ID NO: 25131 - DNA, 26 bp, Homo sapiens
gtaaaggtgtcattccttggaagagc

SEQ ID NO: 25132 - DNA, 26 bp, Homo sapiens
taaaggtgtcattccttggaagagcc

SEQ ID NO: 25133 - DNA, 26 bp, Homo sapiens
aaaggtgtcattccttggaagagcca

SEQ ID NO: 25134 - DNA, 26 bp, Homo sapiens
aaggtgtcattccttggaagagccat

SEQ ID NO: 25135 - DNA, 26 bp, Homo sapiens
aggtgtcattccttggaagagccatt

SEQ ID NO: 25136 - DNA, 26 bp, Homo sapiens
ggtgtcattccttggaagagccattt

SEQ ID NO: 25137 - DNA, 26 bp, Homo sapiens
gtgtcattccttggaagagccatttt

SEQ ID NO: 25138 - DNA, 26 bp, Homo sapiens
tgtcattccttggaagagccatttta

SEQ ID NO: 25139 - DNA, 26 bp, Homo sapiens
gtcattccttggaagagccattttac

SEQ ID NO: 25140 - DNA, 26 bp, Homo sapiens
tcattccttggaagagccattttact

SEQ ID NO: 25141 - DNA, 26 bp, Homo sapiens
cattccttggaagagccattttactt

SEQ ID NO: 25142 - DNA, 26 bp, Homo sapiens
attccttggaagagccattttacttg

SEQ ID NO: 25143 - DNA, 26 bp, Homo sapiens
ttccttggaagagccattttacttgg

SEQ ID NO: 25144 - DNA, 26 bp, Homo sapiens
tccttggaagagccattttacttgga

SEQ ID NO: 25145 - DNA, 26 bp, Homo sapiens
ccttggaagagccattttacttggaa

SEQ ID NO: 25146 - DNA, 26 bp, Homo sapiens
cttggaagagccattttacttggaat

SEQ ID NO: 25147 - DNA, 26 bp, Homo sapiens
ttggaagagccattttacttggaata

SEQ ID NO: 25148 - DNA, 26 bp, Homo sapiens
tggaagagccattttacttggaatat

SEQ ID NO: 25149 - DNA, 26 bp, Homo sapiens
ggaagagccattttacttggaatata

SEQ ID NO: 25150 - DNA, 26 bp, Homo sapiens
gaagagccattttacttggaatatat

SEQ ID NO: 25151 - DNA, 26 bp, Homo sapiens
aagagccattttacttggaatatatt

SEQ ID NO: 25152 - DNA, 26 bp, Homo sapiens
agagccattttacttggaatatattg

SEQ ID NO: 25153 - DNA, 26 bp, Homo sapiens
gagccattttacttggaatatattgt

SEQ ID NO: 25154 - DNA, 26 bp, Homo sapiens
agccattttacttggaatatattgtt

SEQ ID NO: 25155 - DNA, 26 bp, Homo sapiens
gccattttacttggaatatattgttc

SEQ ID NO: 25156 - DNA, 26 bp, Homo sapiens
ccattttacttggaatatattgttcc

SEQ ID NO: 25157 - DNA, 26 bp, Homo sapiens
cattttacttggaatatattgttcca

SEQ ID NO: 25158 - DNA, 26 bp, Homo sapiens
attttacttggaatatattgttccaa

SEQ ID NO: 25159 - DNA, 26 bp, Homo sapiens
ttttacttggaatatattgttccaaa

SEQ ID NO: 25160 - DNA, 26 bp, Homo sapiens
tttacttggaatatattgttccaaag

SEQ ID NO: 25161 - DNA, 26 bp, Homo sapiens
ttacttggaatatattgttccaaagg

SEQ ID NO: 25162 - DNA, 26 bp, Homo sapiens
tacttggaatatattgttccaaagga

SEQ ID NO: 25163 - DNA, 26 bp, Homo sapiens
acttggaatatattgttccaaaggaa

SEQ ID NO: 25164 - DNA, 26 bp, Homo sapiens
cttggaatatattgttccaaaggaaa

SEQ ID NO: 25165 - DNA, 26 bp, Homo sapiens
ttggaatatattgttccaaaggaaat

SEQ ID NO: 25166 - DNA, 26 bp, Homo sapiens
tggaatatattgttccaaaggaaatg

SEQ ID NO: 25167 - DNA, 26 bp, Homo sapiens
ggaatatattgttccaaaggaaatgg

SEQ ID NO: 25168 - DNA, 26 bp, Homo sapiens
gaatatattgttccaaaggaaatgga

SEQ ID NO: 25169 - DNA, 26 bp, Homo sapiens
aatatattgttccaaaggaaatggac

SEQ ID NO: 25170 - DNA, 26 bp, Homo sapiens
atatattgttccaaaggaaatggaca

SEQ ID NO: 25171 - DNA, 26 bp, Homo sapiens
tatattgttccaaaggaaatggacag

SEQ ID NO: 25172 - DNA, 26 bp, Homo sapiens
atattgttccaaaggaaatggacaga

SEQ ID NO: 25173 - DNA, 26 bp, Homo sapiens
tattgttccaaaggaaatggacagag

SEQ ID NO: 25174 - DNA, 26 bp, Homo sapiens
attgttccaaaggaaatggacagagt

SEQ ID NO: 25175 - DNA, 26 bp, Homo sapiens
ttgttccaaaggaaatggacagagtc

SEQ ID NO: 25176 - DNA, 26 bp, Homo sapiens
tgttccaaaggaaatggacagagtcc

SEQ ID NO: 25177 - DNA, 26 bp, Homo sapiens
gttccaaaggaaatggacagagtcct

SEQ ID NO: 25178 - DNA, 26 bp, Homo sapiens
ttccaaaggaaatggacagagtcctg

SEQ ID NO: 25179 - DNA, 26 bp, Homo sapiens
tccaaaggaaatggacagagtcctgt

SEQ ID NO: 25180 - DNA, 26 bp, Homo sapiens
ccaaaggaaatggacagagtcctgtt

SEQ ID NO: 25181 - DNA, 26 bp, Homo sapiens
caaaggaaatggacagagtcctgttg

SEQ ID NO: 25182 - DNA, 26 bp, Homo sapiens
aaaggaaatggacagagtcctgttgc

SEQ ID NO: 25183 - DNA, 26 bp, Homo sapiens
aaggaaatggacagagtcctgttgca

SEQ ID NO: 25184 - DNA, 26 bp, Homo sapiens
aggaaatggacagagtcctgttgcag

SEQ ID NO: 25185 - DNA, 26 bp, Homo sapiens
ggaaatggacagagtcctgttgcaga

SEQ ID NO: 25186 - DNA, 26 bp, Homo sapiens
gaaatggacagagtcctgttgcagaa

SEQ ID NO: 25187 - DNA, 26 bp, Homo sapiens
aaatggacagagtcctgttgcagaaa

SEQ ID NO: 25188 - DNA, 26 bp, Homo sapiens
aatggacagagtcctgttgcagaaat

SEQ ID NO: 25189 - DNA, 26 bp, Homo sapiens
atggacagagtcctgttgcagaaata

SEQ ID NO: 25190 - DNA, 26 bp, Homo sapiens
tggacagagtcctgttgcagaaatag

SEQ ID NO: 25191 - DNA, 26 bp, Homo sapiens
ggacagagtcctgttgcagaaatagc

SEQ ID NO: 25192 - DNA, 26 bp, Homo sapiens
gacagagtcctgttgcagaaatagcg

SEQ ID NO: 25193 - DNA, 26 bp, Homo sapiens
acagagtcctgttgcagaaatagcgt

SEQ ID NO: 25194 - DNA, 26 bp, Homo sapiens
cagagtcctgttgcagaaatagcgtt

SEQ ID NO: 25195 - DNA, 26 bp, Homo sapiens
agagtcctgttgcagaaatagcgttc

SEQ ID NO: 25196 - DNA, 26 bp, Homo sapiens
gagtcctgttgcagaaatagcgttcc

SEQ ID NO: 25197 - DNA, 26 bp, Homo sapiens
agtcctgttgcagaaatagcgttcca

SEQ ID NO: 25198 - DNA, 26 bp, Homo sapiens
gtcctgttgcagaaatagcgttccac

SEQ ID NO: 25199 - DNA, 26 bp, Homo sapiens
tcctgttgcagaaatagcgttccacc

SEQ ID NO: 25200 - DNA, 26 bp, Homo sapiens
cctgttgcagaaatagcgttccacct

SEQ ID NO: 25201 - DNA, 26 bp, Homo sapiens
ctgttgcagaaatagcgttccacctg

SEQ ID NO: 25202 - DNA, 26 bp, Homo sapiens
tgttgcagaaatagcgttccacctgg

SEQ ID NO: 25203 - DNA, 26 bp, Homo sapiens
gttgcagaaatagcgttccacctggt

SEQ ID NO: 25204 - DNA, 26 bp, Homo sapiens
ttgcagaaatagcgttccacctggta

SEQ ID NO: 25205 - DNA, 26 bp, Homo sapiens
tgcagaaatagcgttccacctggtac

SEQ ID NO: 25206 - DNA, 26 bp, Homo sapiens
gcagaaatagcgttccacctggtact

SEQ ID NO: 25207 - DNA, 26 bp, Homo sapiens
cagaaatagcgttccacctggtacta

SEQ ID NO: 25208 - DNA, 26 bp, Homo sapiens
agaaatagcgttccacctggtactag

SEQ ID NO: 25209 - DNA, 26 bp, Homo sapiens
gaaatagcgttccacctggtactagc

SEQ ID NO: 25210 - DNA, 26 bp, Homo sapiens
aaatagcgttccacctggtactagca

SEQ ID NO: 25211 - DNA, 26 bp, Homo sapiens
aatagcgttccacctggtactagcat

SEQ ID NO: 25212 - DNA, 26 bp, Homo sapiens
atagcgttccacctggtactagcatt

SEQ ID NO: 25213 - DNA, 26 bp, Homo sapiens
tagcgttccacctggtactagcattt

SEQ ID NO: 25214 - DNA, 26 bp, Homo sapiens
agcgttccacctggtactagcatttt

SEQ ID NO: 25215 - DNA, 26 bp, Homo sapiens
gcgttccacctggtactagcatttta

SEQ ID NO: 25216 - DNA, 26 bp, Homo sapiens
cgttccacctggtactagcattttaa

SEQ ID NO: 25217 - DNA, 26 bp, Homo sapiens
gttccacctggtactagcattttaaa

SEQ ID NO: 25218 - DNA, 26 bp, Homo sapiens
ttccacctggtactagcattttaaaa

SEQ ID NO: 25219 - DNA, 26 bp, Homo sapiens
tccacctggtactagcattttaaaac

SEQ ID NO: 25220 - DNA, 26 bp, Homo sapiens
ccacctggtactagcattttaaaaca

SEQ ID NO: 25221 - DNA, 26 bp, Homo sapiens
cacctggtactagcattttaaaacag

SEQ ID NO: 25222 - DNA, 26 bp, Homo sapiens
acctggtactagcattttaaaacagt

SEQ ID NO: 25223 - DNA, 26 bp, Homo sapiens
cctggtactagcattttaaaacagtc

SEQ ID NO: 25224 - DNA, 26 bp, Homo sapiens
ctggtactagcattttaaaacagtcc

SEQ ID NO: 25225 - DNA, 26 bp, Homo sapiens
tggtactagcattttaaaacagtcct

SEQ ID NO: 25226 - DNA, 26 bp, Homo sapiens
ggtactagcattttaaaacagtccta

SEQ ID NO: 25227 - DNA, 26 bp, Homo sapiens
gtactagcattttaaaacagtcctat

SEQ ID NO: 25228 - DNA, 26 bp, Homo sapiens
tactagcattttaaaacagtcctatt

SEQ ID NO: 25229 - DNA, 26 bp, Homo sapiens
actagcattttaaaacagtcctattc

SEQ ID NO: 25230 - DNA, 26 bp, Homo sapiens
ctagcattttaaaacagtcctattct

SEQ ID NO: 25231 - DNA, 26 bp, Homo sapiens
tagcattttaaaacagtcctattcta

SEQ ID NO: 25232 - DNA, 26 bp, Homo sapiens
agcattttaaaacagtcctattctaa

SEQ ID NO: 25233 - DNA, 26 bp, Homo sapiens
gcattttaaaacagtcctattctaat

SEQ ID NO: 25234 - DNA, 26 bp, Homo sapiens
cattttaaaacagtcctattctaatc

SEQ ID NO: 25235 - DNA, 26 bp, Homo sapiens
attttaaaacagtcctattctaatcc

SEQ ID NO: 25236 - DNA, 26 bp, Homo sapiens
ttttaaaacagtcctattctaatcca

SEQ ID NO: 25237 - DNA, 26 bp, Homo sapiens
tttaaaacagtcctattctaatccat

SEQ ID NO: 25238 - DNA, 26 bp, Homo sapiens
ttaaaacagtcctattctaatccata

SEQ ID NO: 25239 - DNA, 26 bp, Homo sapiens
taaaacagtcctattctaatccataa

SEQ ID NO: 25240 - DNA, 26 bp, Homo sapiens
aaaacagtcctattctaatccataac

SEQ ID NO: 25241 - DNA, 26 bp, Homo sapiens
aaacagtcctattctaatccataaca

SEQ ID NO: 25242 - DNA, 26 bp, Homo sapiens
aacagtcctattctaatccataacac

SEQ ID NO: 25243 - DNA, 26 bp, Homo sapiens
acagtcctattctaatccataacaca

SEQ ID NO: 25244 - DNA, 26 bp, Homo sapiens
cagtcctattctaatccataacacat

SEQ ID NO: 25245 - DNA, 26 bp, Homo sapiens
agtcctattctaatccataacacatt

SEQ ID NO: 25246 - DNA, 26 bp, Homo sapiens
gtcctattctaatccataacacattt

SEQ ID NO: 25247 - DNA, 26 bp, Homo sapiens
tcctattctaatccataacacatttc

SEQ ID NO: 25248 - DNA, 26 bp, Homo sapiens
cctattctaatccataacacatttct

SEQ ID NO: 25249 - DNA, 26 bp, Homo sapiens
ctattctaatccataacacatttcta

SEQ ID NO: 25250 - DNA, 26 bp, Homo sapiens
tattctaatccataacacatttctag

SEQ ID NO: 25251 - DNA, 26 bp, Homo sapiens
attctaatccataacacatttctagt

SEQ ID NO: 25252 - DNA, 26 bp, Homo sapiens
ttctaatccataacacatttctagtt

SEQ ID NO: 25253 - DNA, 26 bp, Homo sapiens
tctaatccataacacatttctagttt

SEQ ID NO: 25254 - DNA, 26 bp, Homo sapiens
ctaatccataacacatttctagtttt

SEQ ID NO: 25255 - DNA, 26 bp, Homo sapiens
taatccataacacatttctagttttc

SEQ ID NO: 25256 - DNA, 26 bp, Homo sapiens
aatccataacacatttctagttttcc

SEQ ID NO: 25257 - DNA, 26 bp, Homo sapiens
atccataacacatttctagttttccc

SEQ ID NO: 25258 - DNA, 26 bp, Homo sapiens
tccataacacatttctagttttccct

SEQ ID NO: 25259 - DNA, 26 bp, Homo sapiens
ccataacacatttctagttttccctg

SEQ ID NO: 25260 - DNA, 26 bp, Homo sapiens
cataacacatttctagttttccctga

SEQ ID NO: 25261 - DNA, 26 bp, Homo sapiens
ataacacatttctagttttccctgaa

SEQ ID NO: 25262 - DNA, 26 bp, Homo sapiens
taacacatttctagttttccctgaag

SEQ ID NO: 25263 - DNA, 26 bp, Homo sapiens
aacacatttctagttttccctgaagc

SEQ ID NO: 25264 - DNA, 26 bp, Homo sapiens
acacatttctagttttccctgaagct

SEQ ID NO: 25265 - DNA, 26 bp, Homo sapiens
cacatttctagttttccctgaagctt

SEQ ID NO: 25266 - DNA, 26 bp, Homo sapiens
acatttctagttttccctgaagcttt

SEQ ID NO: 25267 - DNA, 26 bp, Homo sapiens
catttctagttttccctgaagctttg

SEQ ID NO: 25268 - DNA, 26 bp, Homo sapiens
atttctagttttccctgaagctttgg

SEQ ID NO: 25269 - DNA, 26 bp, Homo sapiens
tttctagttttccctgaagctttggg

SEQ ID NO: 25270 - DNA, 26 bp, Homo sapiens
ttctagttttccctgaagctttgggc

SEQ ID NO: 25271 - DNA, 26 bp, Homo sapiens
tctagttttccctgaagctttgggct

SEQ ID NO: 25272 - DNA, 26 bp, Homo sapiens
ctagttttccctgaagctttgggctg

SEQ ID NO: 25273 - DNA, 26 bp, Homo sapiens
tagttttccctgaagctttgggctgc

SEQ ID NO: 25274 - DNA, 26 bp, Homo sapiens
agttttccctgaagctttgggctgcc

SEQ ID NO: 25275 - DNA, 26 bp, Homo sapiens
gttttccctgaagctttgggctgcct

SEQ ID NO: 25276 - DNA, 26 bp, Homo sapiens
ttttccctgaagctttgggctgcctt

SEQ ID NO: 25277 - DNA, 26 bp, Homo sapiens
tttccctgaagctttgggctgccttg

SEQ ID NO: 25278 - DNA, 26 bp, Homo sapiens
ttccctgaagctttgggctgccttgt

SEQ ID NO: 25279 - DNA, 26 bp, Homo sapiens
tccctgaagctttgggctgccttgtg

SEQ ID NO: 25280 - DNA, 26 bp, Homo sapiens
ccctgaagctttgggctgccttgtgc

SEQ ID NO: 25281 - DNA, 26 bp, Homo sapiens
cctgaagctttgggctgccttgtgca

SEQ ID NO: 25282 - DNA, 26 bp, Homo sapiens
ctgaagctttgggctgccttgtgcat

SEQ ID NO: 25283 - DNA, 26 bp, Homo sapiens
tgaagctttgggctgccttgtgcatg

SEQ ID NO: 25284 - DNA, 26 bp, Homo sapiens
gaagctttgggctgccttgtgcatga

SEQ ID NO: 25285 - DNA, 26 bp, Homo sapiens
aagctttgggctgccttgtgcatgaa

SEQ ID NO: 25286 - DNA, 26 bp, Homo sapiens
agctttgggctgccttgtgcatgaat

SEQ ID NO: 25287 - DNA, 26 bp, Homo sapiens
gctttgggctgccttgtgcatgaata

SEQ ID NO: 25288 - DNA, 26 bp, Homo sapiens
ctttgggctgccttgtgcatgaataa

SEQ ID NO: 25289 - DNA, 26 bp, Homo sapiens
tttgggctgccttgtgcatgaataat

SEQ ID NO: 25290 - DNA, 26 bp, Homo sapiens
ttgggctgccttgtgcatgaataatt

SEQ ID NO: 25291 - DNA, 26 bp, Homo sapiens
tgggctgccttgtgcatgaataattt

SEQ ID NO: 25292 - DNA, 26 bp, Homo sapiens
gggctgccttgtgcatgaataatttt

SEQ ID NO: 25293 - DNA, 26 bp, Homo sapiens
ggctgccttgtgcatgaataattttt

SEQ ID NO: 25294 - DNA, 26 bp, Homo sapiens
gctgccttgtgcatgaataatttttg

SEQ ID NO: 25295 - DNA, 26 bp, Homo sapiens
ctgccttgtgcatgaataatttttgg

SEQ ID NO: 25296 - DNA, 26 bp, Homo sapiens
tgccttgtgcatgaataatttttgga

SEQ ID NO: 25297 - DNA, 26 bp, Homo sapiens
gccttgtgcatgaataatttttggag

SEQ ID NO: 25298 - DNA, 26 bp, Homo sapiens
ccttgtgcatgaataatttttggaga

SEQ ID NO: 25299 - DNA, 26 bp, Homo sapiens
cttgtgcatgaataatttttggagaa

SEQ ID NO: 25300 - DNA, 26 bp, Homo sapiens
ttgtgcatgaataatttttggagaaa

SEQ ID NO: 25301 - DNA, 26 bp, Homo sapiens
tgtgcatgaataatttttggagaaac

SEQ ID NO: 25302 - DNA, 26 bp, Homo sapiens
gtgcatgaataatttttggagaaaca

SEQ ID NO: 25303 - DNA, 26 bp, Homo sapiens
tgcatgaataatttttggagaaacac

SEQ ID NO: 25304 - DNA, 26 bp, Homo sapiens
gcatgaataatttttggagaaacacc

SEQ ID NO: 25305 - DNA, 26 bp, Homo sapiens
catgaataatttttggagaaacaccc

SEQ ID NO: 25306 - DNA, 26 bp, Homo sapiens
atgaataatttttggagaaacaccca

SEQ ID NO: 25307 - DNA, 26 bp, Homo sapiens
tgaataatttttggagaaacacccac

SEQ ID NO: 25308 - DNA, 26 bp, Homo sapiens
gaataatttttggagaaacacccacg

SEQ ID NO: 25309 - DNA, 26 bp, Homo sapiens
aataatttttggagaaacacccacgc

SEQ ID NO: 25310 - DNA, 26 bp, Homo sapiens
ataatttttggagaaacacccacgcc

SEQ ID NO: 25311 - DNA, 26 bp, Homo sapiens
taatttttggagaaacacccacgcct

SEQ ID NO: 25312 - DNA, 26 bp, Homo sapiens
aatttttggagaaacacccacgcctg

SEQ ID NO: 25313 - DNA, 26 bp, Homo sapiens
atttttggagaaacacccacgcctgt

SEQ ID NO: 25314 - DNA, 26 bp, Homo sapiens
tttttggagaaacacccacgcctgtt

SEQ ID NO: 25315 - DNA, 26 bp, Homo sapiens
ttttggagaaacacccacgcctgtta

SEQ ID NO: 25316 - DNA, 26 bp, Homo sapiens
tttggagaaacacccacgcctgttag

SEQ ID NO: 25317 - DNA, 26 bp, Homo sapiens
ttggagaaacacccacgcctgttagc

SEQ ID NO: 25318 - DNA, 26 bp, Homo sapiens
tggagaaacacccacgcctgttagcc

SEQ ID NO: 25319 - DNA, 26 bp, Homo sapiens
ggagaaacacccacgcctgttagccc

SEQ ID NO: 25320 - DNA, 26 bp, Homo sapiens
gagaaacacccacgcctgttagccca

SEQ ID NO: 25321 - DNA, 26 bp, Homo sapiens
agaaacacccacgcctgttagcccat

SEQ ID NO: 25322 - DNA, 26 bp, Homo sapiens
gaaacacccacgcctgttagcccatt

SEQ ID NO: 25323 - DNA, 26 bp, Homo sapiens
aaacacccacgcctgttagcccattg

SEQ ID NO: 25324 - DNA, 26 bp, Homo sapiens
aacacccacgcctgttagcccattgt

SEQ ID NO: 25325 - DNA, 26 bp, Homo sapiens
acacccacgcctgttagcccattgtt

SEQ ID NO: 25326 - DNA, 26 bp, Homo sapiens
cacccacgcctgttagcccattgttc

SEQ ID NO: 25327 - DNA, 26 bp, Homo sapiens
acccacgcctgttagcccattgttcg

SEQ ID NO: 25328 - DNA, 26 bp, Homo sapiens
cccacgcctgttagcccattgttcgt

SEQ ID NO: 25329 - DNA, 26 bp, Homo sapiens
ccacgcctgttagcccattgttcgta

SEQ ID NO: 25330 - DNA, 26 bp, Homo sapiens
cacgcctgttagcccattgttcgtaa

SEQ ID NO: 25331 - DNA, 26 bp, Homo sapiens
acgcctgttagcccattgttcgtaac

SEQ ID NO: 25332 - DNA, 26 bp, Homo sapiens
cgcctgttagcccattgttcgtaact

SEQ ID NO: 25333 - DNA, 26 bp, Homo sapiens
gcctgttagcccattgttcgtaacta

SEQ ID NO: 25334 - DNA, 26 bp, Homo sapiens
cctgttagcccattgttcgtaactat

SEQ ID NO: 25335 - DNA, 26 bp, Homo sapiens
ctgttagcccattgttcgtaactatt

SEQ ID NO: 25336 - DNA, 26 bp, Homo sapiens
tgttagcccattgttcgtaactattg

SEQ ID NO: 25337 - DNA, 26 bp, Homo sapiens
gttagcccattgttcgtaactattgg

SEQ ID NO: 25338 - DNA, 26 bp, Homo sapiens
ttagcccattgttcgtaactattgga

SEQ ID NO: 25339 - DNA, 26 bp, Homo sapiens
tagcccattgttcgtaactattggaa

SEQ ID NO: 25340 - DNA, 26 bp, Homo sapiens
agcccattgttcgtaactattggaag

SEQ ID NO: 25341 - DNA, 26 bp, Homo sapiens
gcccattgttcgtaactattggaaga

SEQ ID NO: 25342 - DNA, 26 bp, Homo sapiens
cccattgttcgtaactattggaagaa

SEQ ID NO: 25343 - DNA, 26 bp, Homo sapiens
ccattgttcgtaactattggaagaag

SEQ ID NO: 25344 - DNA, 26 bp, Homo sapiens
cattgttcgtaactattggaagaaga

SEQ ID NO: 25345 - DNA, 26 bp, Homo sapiens
attgttcgtaactattggaagaagat

SEQ ID NO: 25346 - DNA, 26 bp, Homo sapiens
ttgttcgtaactattggaagaagatt

SEQ ID NO: 25347 - DNA, 26 bp, Homo sapiens
tgttcgtaactattggaagaagatta

SEQ ID NO: 25348 - DNA, 26 bp, Homo sapiens
gttcgtaactattggaagaagattaa

SEQ ID NO: 25349 - DNA, 26 bp, Homo sapiens
ttcgtaactattggaagaagattaac

SEQ ID NO: 25350 - DNA, 26 bp, Homo sapiens
tcgtaactattggaagaagattaact

SEQ ID NO: 25351 - DNA, 26 bp, Homo sapiens
cgtaactattggaagaagattaacta

SEQ ID NO: 25352 - DNA, 26 bp, Homo sapiens
gtaactattggaagaagattaactag

SEQ ID NO: 25353 - DNA, 26 bp, Homo sapiens
taactattggaagaagattaactaga

SEQ ID NO: 25354 - DNA, 26 bp, Homo sapiens
aactattggaagaagattaactagag

SEQ ID NO: 25355 - DNA, 26 bp, Homo sapiens
actattggaagaagattaactagagc

SEQ ID NO: 25356 - DNA, 26 bp, Homo sapiens
ctattggaagaagattaactagagcc

SEQ ID NO: 25357 - DNA, 26 bp, Homo sapiens
tattggaagaagattaactagagcct

SEQ ID NO: 25358 - DNA, 26 bp, Homo sapiens
attggaagaagattaactagagcctg

SEQ ID NO: 25359 - DNA, 26 bp, Homo sapiens
ttggaagaagattaactagagcctga

SEQ ID NO: 25360 - DNA, 26 bp, Homo sapiens
tggaagaagattaactagagcctgaa

SEQ ID NO: 25361 - DNA, 26 bp, Homo sapiens
ggaagaagattaactagagcctgaaa

SEQ ID NO: 25362 - DNA, 26 bp, Homo sapiens
gaagaagattaactagagcctgaaaa

SEQ ID NO: 25363 - DNA, 26 bp, Homo sapiens
aagaagattaactagagcctgaaaat

SEQ ID NO: 25364 - DNA, 26 bp, Homo sapiens
agaagattaactagagcctgaaaatt

SEQ ID NO: 25365 - DNA, 26 bp, Homo sapiens
gaagattaactagagcctgaaaattg

SEQ ID NO: 25366 - DNA, 26 bp, Homo sapiens
aagattaactagagcctgaaaattgt

SEQ ID NO: 25367 - DNA, 26 bp, Homo sapiens
agattaactagagcctgaaaattgta

SEQ ID NO: 25368 - DNA, 26 bp, Homo sapiens
gattaactagagcctgaaaattgtat

SEQ ID NO: 25369 - DNA, 26 bp, Homo sapiens
attaactagagcctgaaaattgtata

SEQ ID NO: 25370 - DNA, 26 bp, Homo sapiens
ttaactagagcctgaaaattgtatat

SEQ ID NO: 25371 - DNA, 26 bp, Homo sapiens
taactagagcctgaaaattgtatatc

SEQ ID NO: 25372 - DNA, 26 bp, Homo sapiens
aactagagcctgaaaattgtatatct

SEQ ID NO: 25373 - DNA, 26 bp, Homo sapiens
actagagcctgaaaattgtatatctg

SEQ ID NO: 25374 - DNA, 26 bp, Homo sapiens
ctagagcctgaaaattgtatatctgc

SEQ ID NO: 25375 - DNA, 26 bp, Homo sapiens
tagagcctgaaaattgtatatctgcg

SEQ ID NO: 25376 - DNA, 26 bp, Homo sapiens
agagcctgaaaattgtatatctgcgt

SEQ ID NO: 25377 - DNA, 26 bp, Homo sapiens
gagcctgaaaattgtatatctgcgta

SEQ ID NO: 25378 - DNA, 26 bp, Homo sapiens
agcctgaaaattgtatatctgcgtat

SEQ ID NO: 25379 - DNA, 26 bp, Homo sapiens
gcctgaaaattgtatatctgcgtatg

SEQ ID NO: 25380 - DNA, 26 bp, Homo sapiens
cctgaaaattgtatatctgcgtatgc

SEQ ID NO: 25381 - DNA, 26 bp, Homo sapiens
ctgaaaattgtatatctgcgtatgcc

SEQ ID NO: 25382 - DNA, 26 bp, Homo sapiens
tgaaaattgtatatctgcgtatgcct

SEQ ID NO: 25383 - DNA, 26 bp, Homo sapiens
gaaaattgtatatctgcgtatgcctc

SEQ ID NO: 25384 - DNA, 26 bp, Homo sapiens
aaaattgtatatctgcgtatgcctct

SEQ ID NO: 25385 - DNA, 26 bp, Homo sapiens
aaattgtatatctgcgtatgcctctg

SEQ ID NO: 25386 - DNA, 26 bp, Homo sapiens
aattgtatatctgcgtatgcctctga

SEQ ID NO: 25387 - DNA, 26 bp, Homo sapiens
attgtatatctgcgtatgcctctgaa

SEQ ID NO: 25388 - DNA, 26 bp, Homo sapiens
ttgtatatctgcgtatgcctctgaat

SEQ ID NO: 25389 - DNA, 26 bp, Homo sapiens
tgtatatctgcgtatgcctctgaatc

SEQ ID NO: 25390 - DNA, 26 bp, Homo sapiens
gtatatctgcgtatgcctctgaatct

SEQ ID NO: 25391 - DNA, 26 bp, Homo sapiens
tatatctgcgtatgcctctgaatctg

SEQ ID NO: 25392 - DNA, 26 bp, Homo sapiens
atatctgcgtatgcctctgaatctgt

SEQ ID NO: 25393 - DNA, 26 bp, Homo sapiens
tatctgcgtatgcctctgaatctgtc

SEQ ID NO: 25394 - DNA, 26 bp, Homo sapiens
atctgcgtatgcctctgaatctgtca

SEQ ID NO: 25395 - DNA, 26 bp, Homo sapiens
tctgcgtatgcctctgaatctgtcac

SEQ ID NO: 25396 - DNA, 26 bp, Homo sapiens
ctgcgtatgcctctgaatctgtcact

SEQ ID NO: 25397 - DNA, 26 bp, Homo sapiens
tgcgtatgcctctgaatctgtcactg

SEQ ID NO: 25398 - DNA, 26 bp, Homo sapiens
gcgtatgcctctgaatctgtcactgg

SEQ ID NO: 25399 - DNA, 26 bp, Homo sapiens
cgtatgcctctgaatctgtcactggg

SEQ ID NO: 25400 - DNA, 26 bp, Homo sapiens
gtatgcctctgaatctgtcactggga

SEQ ID NO: 25401 - DNA, 26 bp, Homo sapiens
tatgcctctgaatctgtcactgggaa

SEQ ID NO: 25402 - DNA, 26 bp, Homo sapiens
atgcctctgaatctgtcactgggaac

SEQ ID NO: 25403 - DNA, 26 bp, Homo sapiens
tgcctctgaatctgtcactgggaacc

SEQ ID NO: 25404 - DNA, 26 bp, Homo sapiens
gcctctgaatctgtcactgggaacca

SEQ ID NO: 25405 - DNA, 26 bp, Homo sapiens
cctctgaatctgtcactgggaaccaa

SEQ ID NO: 25406 - DNA, 26 bp, Homo sapiens
ctctgaatctgtcactgggaaccaaa

SEQ ID NO: 25407 - DNA, 26 bp, Homo sapiens
tctgaatctgtcactgggaaccaaag

SEQ ID NO: 25408 - DNA, 26 bp, Homo sapiens
ctgaatctgtcactgggaaccaaagg

SEQ ID NO: 25409 - DNA, 26 bp, Homo sapiens
tgaatctgtcactgggaaccaaagga

SEQ ID NO: 25410 - DNA, 26 bp, Homo sapiens
gaatctgtcactgggaaccaaaggag

SEQ ID NO: 25411 - DNA, 26 bp, Homo sapiens
aatctgtcactgggaaccaaaggaga

SEQ ID NO: 25412 - DNA, 26 bp, Homo sapiens
atctgtcactgggaaccaaaggagat

SEQ ID NO: 25413 - DNA, 26 bp, Homo sapiens
tctgtcactgggaaccaaaggagata

SEQ ID NO: 25414 - DNA, 26 bp, Homo sapiens
ctgtcactgggaaccaaaggagataa

SEQ ID NO: 25415 - DNA, 26 bp, Homo sapiens
tgtcactgggaaccaaaggagataag

SEQ ID NO: 25416 - DNA, 26 bp, Homo sapiens
gtcactgggaaccaaaggagataagt

SEQ ID NO: 25417 - DNA, 26 bp, Homo sapiens
tcactgggaaccaaaggagataagtg

SEQ ID NO: 25418 - DNA, 26 bp, Homo sapiens
cactgggaaccaaaggagataagtgg

SEQ ID NO: 25419 - DNA, 26 bp, Homo sapiens
actgggaaccaaaggagataagtggc

SEQ ID NO: 25420 - DNA, 26 bp, Homo sapiens
ctgggaaccaaaggagataagtggct

SEQ ID NO: 25421 - DNA, 26 bp, Homo sapiens
tgggaaccaaaggagataagtggctt

SEQ ID NO: 25422 - DNA, 26 bp, Homo sapiens
gggaaccaaaggagataagtggcttt

SEQ ID NO: 25423 - DNA, 26 bp, Homo sapiens
ggaaccaaaggagataagtggctttt

SEQ ID NO: 25424 - DNA, 26 bp, Homo sapiens
gaaccaaaggagataagtggctttta

SEQ ID NO: 25425 - DNA, 26 bp, Homo sapiens
aaccaaaggagataagtggcttttac

SEQ ID NO: 25426 - DNA, 26 bp, Homo sapiens
accaaaggagataagtggcttttact

SEQ ID NO: 25427 - DNA, 26 bp, Homo sapiens
ccaaaggagataagtggcttttactt

SEQ ID NO: 25428 - DNA, 26 bp, Homo sapiens
caaaggagataagtggcttttacttt

SEQ ID NO: 25429 - DNA, 26 bp, Homo sapiens
aaaggagataagtggcttttactttg

SEQ ID NO: 25430 - DNA, 26 bp, Homo sapiens
aaggagataagtggcttttactttgg

SEQ ID NO: 25431 - DNA, 26 bp, Homo sapiens
aggagataagtggcttttactttgga

SEQ ID NO: 25432 - DNA, 26 bp, Homo sapiens
ggagataagtggcttttactttggat

SEQ ID NO: 25433 - DNA, 26 bp, Homo sapiens
gagataagtggcttttactttggatg

SEQ ID NO: 25434 - DNA, 26 bp, Homo sapiens
agataagtggcttttactttggatga

SEQ ID NO: 25435 - DNA, 26 bp, Homo sapiens
gataagtggcttttactttggatgaa

SEQ ID NO: 25436 - DNA, 26 bp, Homo sapiens
ataagtggcttttactttggatgaag

SEQ ID NO: 25437 - DNA, 26 bp, Homo sapiens
taagtggcttttactttggatgaaga

SEQ ID NO: 25438 - DNA, 26 bp, Homo sapiens
aagtggcttttactttggatgaagaa

SEQ ID NO: 25439 - DNA, 26 bp, Homo sapiens
agtggcttttactttggatgaagaag

SEQ ID NO: 25440 - DNA, 26 bp, Homo sapiens
gtggcttttactttggatgaagaagt

SEQ ID NO: 25441 - DNA, 26 bp, Homo sapiens
tggcttttactttggatgaagaagta

SEQ ID NO: 25442 - DNA, 26 bp, Homo sapiens
ggcttttactttggatgaagaagtaa

SEQ ID NO: 25443 - DNA, 26 bp, Homo sapiens
gcttttactttggatgaagaagtaaa

SEQ ID NO: 25444 - DNA, 26 bp, Homo sapiens
cttttactttggatgaagaagtaaaa

SEQ ID NO: 25445 - DNA, 26 bp, Homo sapiens
ttttactttggatgaagaagtaaaat

SEQ ID NO: 25446 - DNA, 26 bp, Homo sapiens
tttactttggatgaagaagtaaaatt

SEQ ID NO: 25447 - DNA, 26 bp, Homo sapiens
ttactttggatgaagaagtaaaattc

SEQ ID NO: 25448 - DNA, 26 bp, Homo sapiens
tactttggatgaagaagtaaaattcc

SEQ ID NO: 25449 - DNA, 26 bp, Homo sapiens
actttggatgaagaagtaaaattccc

SEQ ID NO: 25450 - DNA, 26 bp, Homo sapiens
ctttggatgaagaagtaaaattcccc

SEQ ID NO: 25451 - DNA, 26 bp, Homo sapiens
tttggatgaagaagtaaaattcccca

SEQ ID NO: 25452 - DNA, 26 bp, Homo sapiens
ttggatgaagaagtaaaattccccag

SEQ ID NO: 25453 - DNA, 26 bp, Homo sapiens
tggatgaagaagtaaaattccccagt

SEQ ID NO: 25454 - DNA, 26 bp, Homo sapiens
ggatgaagaagtaaaattccccagta

SEQ ID NO: 25455 - DNA, 26 bp, Homo sapiens
gatgaagaagtaaaattccccagtag

SEQ ID NO: 25456 - DNA, 26 bp, Homo sapiens
atgaagaagtaaaattccccagtaga

SEQ ID NO: 25457 - DNA, 26 bp, Homo sapiens
tgaagaagtaaaattccccagtagaa

SEQ ID NO: 25458 - DNA, 26 bp, Homo sapiens
gaagaagtaaaattccccagtagaaa

SEQ ID NO: 25459 - DNA, 26 bp, Homo sapiens
aagaagtaaaattccccagtagaaat

SEQ ID NO: 25460 - DNA, 26 bp, Homo sapiens
agaagtaaaattccccagtagaaatt

SEQ ID NO: 25461 - DNA, 26 bp, Homo sapiens
gaagtaaaattccccagtagaaattc

SEQ ID NO: 25462 - DNA, 26 bp, Homo sapiens
aagtaaaattccccagtagaaattct

SEQ ID NO: 25463 - DNA, 26 bp, Homo sapiens
agtaaaattccccagtagaaattcta

SEQ ID NO: 25464 - DNA, 26 bp, Homo sapiens
gtaaaattccccagtagaaattctaa

SEQ ID NO: 25465 - DNA, 26 bp, Homo sapiens
taaaattccccagtagaaattctaaa

SEQ ID NO: 25466 - DNA, 26 bp, Homo sapiens
aaaattccccagtagaaattctaaag

SEQ ID NO: 25467 - DNA, 26 bp, Homo sapiens
aaattccccagtagaaattctaaaga

SEQ ID NO: 25468 - DNA, 26 bp, Homo sapiens
aattccccagtagaaattctaaagat

SEQ ID NO: 25469 - DNA, 26 bp, Homo sapiens
attccccagtagaaattctaaagatg

SEQ ID NO: 25470 - DNA, 26 bp, Homo sapiens
ttccccagtagaaattctaaagatga

SEQ ID NO: 25471 - DNA, 26 bp, Homo sapiens
tccccagtagaaattctaaagatgat

SEQ ID NO: 25472 - DNA, 26 bp, Homo sapiens
ccccagtagaaattctaaagatgatt

SEQ ID NO: 25473 - DNA, 26 bp, Homo sapiens
cccagtagaaattctaaagatgattc

SEQ ID NO: 25474 - DNA, 26 bp, Homo sapiens
ccagtagaaattctaaagatgattca

SEQ ID NO: 25475 - DNA, 26 bp, Homo sapiens
cagtagaaattctaaagatgattcac

SEQ ID NO: 25476 - DNA, 26 bp, Homo sapiens
agtagaaattctaaagatgattcaca

SEQ ID NO: 25477 - DNA, 26 bp, Homo sapiens
gtagaaattctaaagatgattcacaa

SEQ ID NO: 25478 - DNA, 26 bp, Homo sapiens
tagaaattctaaagatgattcacaag

SEQ ID NO: 25479 - DNA, 26 bp, Homo sapiens
agaaattctaaagatgattcacaagt

SEQ ID NO: 25480 - DNA, 26 bp, Homo sapiens
gaaattctaaagatgattcacaagtt

SEQ ID NO: 25481 - DNA, 26 bp, Homo sapiens
aaattctaaagatgattcacaagttt

SEQ ID NO: 25482 - DNA, 26 bp, Homo sapiens
aattctaaagatgattcacaagtttc

SEQ ID NO: 25483 - DNA, 26 bp, Homo sapiens
attctaaagatgattcacaagtttca

SEQ ID NO: 25484 - DNA, 26 bp, Homo sapiens
ttctaaagatgattcacaagtttcaa

SEQ ID NO: 25485 - DNA, 26 bp, Homo sapiens
tctaaagatgattcacaagtttcaaa

SEQ ID NO: 25486 - DNA, 26 bp, Homo sapiens
ctaaagatgattcacaagtttcaaaa

SEQ ID NO: 25487 - DNA, 26 bp, Homo sapiens
taaagatgattcacaagtttcaaaat

SEQ ID NO: 25488 - DNA, 26 bp, Homo sapiens
aaagatgattcacaagtttcaaaatg

SEQ ID NO: 25489 - DNA, 26 bp, Homo sapiens
aagatgattcacaagtttcaaaatgt

SEQ ID NO: 25490 - DNA, 26 bp, Homo sapiens
agatgattcacaagtttcaaaatgtt

SEQ ID NO: 25491 - DNA, 26 bp, Homo sapiens
gatgattcacaagtttcaaaatgttt

SEQ ID NO: 25492 - DNA, 26 bp, Homo sapiens
atgattcacaagtttcaaaatgttta

SEQ ID NO: 25493 - DNA, 26 bp, Homo sapiens
tgattcacaagtttcaaaatgtttaa

SEQ ID NO: 25494 - DNA, 26 bp, Homo sapiens
gattcacaagtttcaaaatgtttaat

SEQ ID NO: 25495 - DNA, 26 bp, Homo sapiens
attcacaagtttcaaaatgtttaatg

SEQ ID NO: 25496 - DNA, 26 bp, Homo sapiens
ttcacaagtttcaaaatgtttaatgc

SEQ ID NO: 25497 - DNA, 26 bp, Homo sapiens
tcacaagtttcaaaatgtttaatgcc

SEQ ID NO: 25498 - DNA, 26 bp, Homo sapiens
cacaagtttcaaaatgtttaatgcct

SEQ ID NO: 25499 - DNA, 26 bp, Homo sapiens
acaagtttcaaaatgtttaatgcctt

SEQ ID NO: 25500 - DNA, 26 bp, Homo sapiens
caagtttcaaaatgtttaatgccttc

SEQ ID NO: 25501 - DNA, 26 bp, Homo sapiens
aagtttcaaaatgtttaatgccttcc

SEQ ID NO: 25502 - DNA, 26 bp, Homo sapiens
agtttcaaaatgtttaatgccttcct

SEQ ID NO: 25503 - DNA, 26 bp, Homo sapiens
gtttcaaaatgtttaatgccttccta

SEQ ID NO: 25504 - DNA, 26 bp, Homo sapiens
tttcaaaatgtttaatgccttcctac

SEQ ID NO: 25505 - DNA, 26 bp, Homo sapiens
ttcaaaatgtttaatgccttcctaca

SEQ ID NO: 25506 - DNA, 26 bp, Homo sapiens
tcaaaatgtttaatgccttcctacaa

SEQ ID NO: 25507 - DNA, 26 bp, Homo sapiens
caaaatgtttaatgccttcctacaat

SEQ ID NO: 25508 - DNA, 26 bp, Homo sapiens
aaaatgtttaatgccttcctacaatg

SEQ ID NO: 25509 - DNA, 26 bp, Homo sapiens
aaatgtttaatgccttcctacaatgg

SEQ ID NO: 25510 - DNA, 26 bp, Homo sapiens
aatgtttaatgccttcctacaatgga

SEQ ID NO: 25511 - DNA, 26 bp, Homo sapiens
atgtttaatgccttcctacaatggaa

SEQ ID NO: 25512 - DNA, 26 bp, Homo sapiens
tgtttaatgccttcctacaatggaaa

SEQ ID NO: 25513 - DNA, 26 bp, Homo sapiens
gtttaatgccttcctacaatggaaat

SEQ ID NO: 25514 - DNA, 26 bp, Homo sapiens
tttaatgccttcctacaatggaaata

SEQ ID NO: 25515 - DNA, 26 bp, Homo sapiens
ttaatgccttcctacaatggaaatat

SEQ ID NO: 25516 - DNA, 26 bp, Homo sapiens
taatgccttcctacaatggaaatatg

SEQ ID NO: 25517 - DNA, 26 bp, Homo sapiens
aatgccttcctacaatggaaatatgt

SEQ ID NO: 25518 - DNA, 26 bp, Homo sapiens
atgccttcctacaatggaaatatgtc

SEQ ID NO: 25519 - DNA, 26 bp, Homo sapiens
tgccttcctacaatggaaatatgtct

SEQ ID NO: 25520 - DNA, 26 bp, Homo sapiens
gccttcctacaatggaaatatgtctc

SEQ ID NO: 25521 - DNA, 26 bp, Homo sapiens
ccttcctacaatggaaatatgtctct

SEQ ID NO: 25522 - DNA, 26 bp, Homo sapiens
cttcctacaatggaaatatgtctctc

SEQ ID NO: 25523 - DNA, 26 bp, Homo sapiens
ttcctacaatggaaatatgtctctct

SEQ ID NO: 25524 - DNA, 26 bp, Homo sapiens
tcctacaatggaaatatgtctctctg

SEQ ID NO: 25525 - DNA, 26 bp, Homo sapiens
cctacaatggaaatatgtctctctgt

SEQ ID NO: 25526 - DNA, 26 bp, Homo sapiens
ctacaatggaaatatgtctctctgtc

SEQ ID NO: 25527 - DNA, 26 bp, Homo sapiens
tacaatggaaatatgtctctctgtct

SEQ ID NO: 25528 - DNA, 26 bp, Homo sapiens
acaatggaaatatgtctctctgtctg

SEQ ID NO: 25529 - DNA, 26 bp, Homo sapiens
caatggaaatatgtctctctgtctgg

SEQ ID NO: 25530 - DNA, 26 bp, Homo sapiens
aatggaaatatgtctctctgtctggg

SEQ ID NO: 25531 - DNA, 26 bp, Homo sapiens
atggaaatatgtctctctgtctgggg

SEQ ID NO: 25532 - DNA, 26 bp, Homo sapiens
tggaaatatgtctctctgtctggggg

SEQ ID NO: 25533 - DNA, 26 bp, Homo sapiens
ggaaatatgtctctctgtctgggggg

SEQ ID NO: 25534 - DNA, 26 bp, Homo sapiens
gaaatatgtctctctgtctgggggga

SEQ ID NO: 25535 - DNA, 26 bp, Homo sapiens
aaatatgtctctctgtctggggggat

SEQ ID NO: 25536 - DNA, 26 bp, Homo sapiens
aatatgtctctctgtctggggggatg

SEQ ID NO: 25537 - DNA, 26 bp, Homo sapiens
atatgtctctctgtctggggggatgg

SEQ ID NO: 25538 - DNA, 26 bp, Homo sapiens
tatgtctctctgtctggggggatgga

SEQ ID NO: 25539 - DNA, 26 bp, Homo sapiens
atgtctctctgtctggggggatggaa

SEQ ID NO: 25540 - DNA, 26 bp, Homo sapiens
tgtctctctgtctggggggatggaaa

SEQ ID NO: 25541 - DNA, 26 bp, Homo sapiens
gtctctctgtctggggggatggaaat

SEQ ID NO: 25542 - DNA, 26 bp, Homo sapiens
tctctctgtctggggggatggaaatt

SEQ ID NO: 25543 - DNA, 26 bp, Homo sapiens
ctctctgtctggggggatggaaattt

SEQ ID NO: 25544 - DNA, 26 bp, Homo sapiens
tctctgtctggggggatggaaatttg

SEQ ID NO: 25545 - DNA, 26 bp, Homo sapiens
ctctgtctggggggatggaaatttgt

SEQ ID NO: 25546 - DNA, 26 bp, Homo sapiens
tctgtctggggggatggaaatttgta

SEQ ID NO: 25547 - DNA, 26 bp, Homo sapiens
ctgtctggggggatggaaatttgtat

SEQ ID NO: 25548 - DNA, 26 bp, Homo sapiens
tgtctggggggatggaaatttgtatc

SEQ ID NO: 25549 - DNA, 26 bp, Homo sapiens
gtctggggggatggaaatttgtatct

SEQ ID NO: 25550 - DNA, 26 bp, Homo sapiens
tctggggggatggaaatttgtatctc

SEQ ID NO: 25551 - DNA, 26 bp, Homo sapiens
ctggggggatggaaatttgtatctct

SEQ ID NO: 25552 - DNA, 26 bp, Homo sapiens
tggggggatggaaatttgtatctctt

SEQ ID NO: 25553 - DNA, 26 bp, Homo sapiens
ggggggatggaaatttgtatctcttt

SEQ ID NO: 25554 - DNA, 26 bp, Homo sapiens
gggggatggaaatttgtatctctttc

SEQ ID NO: 25555 - DNA, 26 bp, Homo sapiens
ggggatggaaatttgtatctctttct

SEQ ID NO: 25556 - DNA, 26 bp, Homo sapiens
gggatggaaatttgtatctctttctc

SEQ ID NO: 25557 - DNA, 26 bp, Homo sapiens
ggatggaaatttgtatctctttctcc

SEQ ID NO: 25558 - DNA, 26 bp, Homo sapiens
gatggaaatttgtatctctttctcca

SEQ ID NO: 25559 - DNA, 26 bp, Homo sapiens
atggaaatttgtatctctttctccag

SEQ ID NO: 25560 - DNA, 26 bp, Homo sapiens
tggaaatttgtatctctttctccagc

SEQ ID NO: 25561 - DNA, 26 bp, Homo sapiens
ggaaatttgtatctctttctccagct

SEQ ID NO: 25562 - DNA, 26 bp, Homo sapiens
gaaatttgtatctctttctccagctc

SEQ ID NO: 25563 - DNA, 26 bp, Homo sapiens
aaatttgtatctctttctccagctca

SEQ ID NO: 25564 - DNA, 26 bp, Homo sapiens
aatttgtatctctttctccagctcaa

SEQ ID NO: 25565 - DNA, 26 bp, Homo sapiens
atttgtatctctttctccagctcaat

SEQ ID NO: 25566 - DNA, 26 bp, Homo sapiens
tttgtatctctttctccagctcaatc

SEQ ID NO: 25567 - DNA, 26 bp, Homo sapiens
ttgtatctctttctccagctcaatct

SEQ ID NO: 25568 - DNA, 26 bp, Homo sapiens
tgtatctctttctccagctcaatctt

SEQ ID NO: 25569 - DNA, 26 bp, Homo sapiens
gtatctctttctccagctcaatcttt

SEQ ID NO: 25570 - DNA, 26 bp, Homo sapiens
tatctctttctccagctcaatctttg

SEQ ID NO: 25571 - DNA, 26 bp, Homo sapiens
atctctttctccagctcaatctttgt

SEQ ID NO: 25572 - DNA, 26 bp, Homo sapiens
tctctttctccagctcaatctttgtc

SEQ ID NO: 25573 - DNA, 26 bp, Homo sapiens
ctctttctccagctcaatctttgtct

SEQ ID NO: 25574 - DNA, 26 bp, Homo sapiens
tctttctccagctcaatctttgtcta

SEQ ID NO: 25575 - DNA, 26 bp, Homo sapiens
ctttctccagctcaatctttgtctaa

SEQ ID NO: 25576 - DNA, 26 bp, Homo sapiens
tttctccagctcaatctttgtctaaa

SEQ ID NO: 25577 - DNA, 26 bp, Homo sapiens
ttctccagctcaatctttgtctaaaa

SEQ ID NO: 25578 - DNA, 26 bp, Homo sapiens
tctccagctcaatctttgtctaaaag

SEQ ID NO: 25579 - DNA, 26 bp, Homo sapiens
ctccagctcaatctttgtctaaaagt

SEQ ID NO: 25580 - DNA, 26 bp, Homo sapiens
tccagctcaatctttgtctaaaagta

SEQ ID NO: 25581 - DNA, 26 bp, Homo sapiens
ccagctcaatctttgtctaaaagtat

SEQ ID NO: 25582 - DNA, 26 bp, Homo sapiens
cagctcaatctttgtctaaaagtatt

SEQ ID NO: 25583 - DNA, 26 bp, Homo sapiens
agctcaatctttgtctaaaagtattt

SEQ ID NO: 25584 - DNA, 26 bp, Homo sapiens
gctcaatctttgtctaaaagtatttc

SEQ ID NO: 25585 - DNA, 26 bp, Homo sapiens
ctcaatctttgtctaaaagtatttca

SEQ ID NO: 25586 - DNA, 26 bp, Homo sapiens
tcaatctttgtctaaaagtatttcat

SEQ ID NO: 25587 - DNA, 26 bp, Homo sapiens
caatctttgtctaaaagtatttcata

SEQ ID NO: 25588 - DNA, 26 bp, Homo sapiens
aatctttgtctaaaagtatttcatag

SEQ ID NO: 25589 - DNA, 26 bp, Homo sapiens
atctttgtctaaaagtatttcataga

SEQ ID NO: 25590 - DNA, 26 bp, Homo sapiens
tctttgtctaaaagtatttcatagat

SEQ ID NO: 25591 - DNA, 26 bp, Homo sapiens
ctttgtctaaaagtatttcatagata

SEQ ID NO: 25592 - DNA, 26 bp, Homo sapiens
tttgtctaaaagtatttcatagatat

SEQ ID NO: 25593 - DNA, 26 bp, Homo sapiens
ttgtctaaaagtatttcatagatatt

SEQ ID NO: 25594 - DNA, 26 bp, Homo sapiens
tgtctaaaagtatttcatagatattt

SEQ ID NO: 25595 - DNA, 26 bp, Homo sapiens
gtctaaaagtatttcatagatatttt

SEQ ID NO: 25596 - DNA, 26 bp, Homo sapiens
tctaaaagtatttcatagatattttg

SEQ ID NO: 25597 - DNA, 26 bp, Homo sapiens
ctaaaagtatttcatagatattttga

SEQ ID NO: 25598 - DNA, 26 bp, Homo sapiens
taaaagtatttcatagatattttgag

SEQ ID NO: 25599 - DNA, 26 bp, Homo sapiens
aaaagtatttcatagatattttgaga

SEQ ID NO: 25600 - DNA, 26 bp, Homo sapiens
aaagtatttcatagatattttgagaa

SEQ ID NO: 25601 - DNA, 26 bp, Homo sapiens
aagtatttcatagatattttgagaaa

SEQ ID NO: 25602 - DNA, 26 bp, Homo sapiens
agtatttcatagatattttgagaaag

SEQ ID NO: 25603 - DNA, 26 bp, Homo sapiens
gtatttcatagatattttgagaaagt

SEQ ID NO: 25604 - DNA, 26 bp, Homo sapiens
tatttcatagatattttgagaaagtg

SEQ ID NO: 25605 - DNA, 26 bp, Homo sapiens
atttcatagatattttgagaaagtgc

SEQ ID NO: 25606 - DNA, 26 bp, Homo sapiens
tttcatagatattttgagaaagtgcc

SEQ ID NO: 25607 - DNA, 26 bp, Homo sapiens
ttcatagatattttgagaaagtgcca

SEQ ID NO: 25608 - DNA, 26 bp, Homo sapiens
tcatagatattttgagaaagtgccac

SEQ ID NO: 25609 - DNA, 26 bp, Homo sapiens
catagatattttgagaaagtgccaca

SEQ ID NO: 25610 - DNA, 26 bp, Homo sapiens
atagatattttgagaaagtgccacat

SEQ ID NO: 25611 - DNA, 26 bp, Homo sapiens
tagatattttgagaaagtgccacata

SEQ ID NO: 25612 - DNA, 26 bp, Homo sapiens
agatattttgagaaagtgccacatag

SEQ ID NO: 25613 - DNA, 26 bp, Homo sapiens
gatattttgagaaagtgccacataga

SEQ ID NO: 25614 - DNA, 26 bp, Homo sapiens
atattttgagaaagtgccacatagag

SEQ ID NO: 25615 - DNA, 26 bp, Homo sapiens
tattttgagaaagtgccacatagagg

SEQ ID NO: 25616 - DNA, 26 bp, Homo sapiens
attttgagaaagtgccacatagagga

SEQ ID NO: 25617 - DNA, 26 bp, Homo sapiens
ttttgagaaagtgccacatagaggaa

SEQ ID NO: 25618 - DNA, 26 bp, Homo sapiens
tttgagaaagtgccacatagaggaaa

SEQ ID NO: 25619 - DNA, 26 bp, Homo sapiens
ttgagaaagtgccacatagaggaaag

SEQ ID NO: 25620 - DNA, 26 bp, Homo sapiens
tgagaaagtgccacatagaggaaagg

SEQ ID NO: 25621 - DNA, 26 bp, Homo sapiens
gagaaagtgccacatagaggaaagga

SEQ ID NO: 25622 - DNA, 26 bp, Homo sapiens
agaaagtgccacatagaggaaaggag

SEQ ID NO: 25623 - DNA, 26 bp, Homo sapiens
gaaagtgccacatagaggaaaggaga

SEQ ID NO: 25624 - DNA, 26 bp, Homo sapiens
aaagtgccacatagaggaaaggagaa

SEQ ID NO: 25625 - DNA, 26 bp, Homo sapiens
aagtgccacatagaggaaaggagaaa

SEQ ID NO: 25626 - DNA, 26 bp, Homo sapiens
agtgccacatagaggaaaggagaaaa

SEQ ID NO: 25627 - DNA, 26 bp, Homo sapiens
gtgccacatagaggaaaggagaaaat

SEQ ID NO: 25628 - DNA, 26 bp, Homo sapiens
tgccacatagaggaaaggagaaaatg

SEQ ID NO: 25629 - DNA, 26 bp, Homo sapiens
gccacatagaggaaaggagaaaatga

SEQ ID NO: 25630 - DNA, 26 bp, Homo sapiens
ccacatagaggaaaggagaaaatgaa

SEQ ID NO: 25631 - DNA, 26 bp, Homo sapiens
cacatagaggaaaggagaaaatgaag

SEQ ID NO: 25632 - DNA, 26 bp, Homo sapiens
acatagaggaaaggagaaaatgaagt

SEQ ID NO: 25633 - DNA, 26 bp, Homo sapiens
catagaggaaaggagaaaatgaagtt

SEQ ID NO: 25634 - DNA, 26 bp, Homo sapiens
atagaggaaaggagaaaatgaagtta

SEQ ID NO: 25635 - DNA, 26 bp, Homo sapiens
tagaggaaaggagaaaatgaagttag

SEQ ID NO: 25636 - DNA, 26 bp, Homo sapiens
agaggaaaggagaaaatgaagttagc

SEQ ID NO: 25637 - DNA, 26 bp, Homo sapiens
gaggaaaggagaaaatgaagttagca

SEQ ID NO: 25638 - DNA, 26 bp, Homo sapiens
aggaaaggagaaaatgaagttagcat

SEQ ID NO: 25639 - DNA, 26 bp, Homo sapiens
ggaaaggagaaaatgaagttagcatt

SEQ ID NO: 25640 - DNA, 26 bp, Homo sapiens
gaaaggagaaaatgaagttagcattt

SEQ ID NO: 25641 - DNA, 26 bp, Homo sapiens
aaaggagaaaatgaagttagcatttg

SEQ ID NO: 25642 - DNA, 26 bp, Homo sapiens
aaggagaaaatgaagttagcatttga

SEQ ID NO: 25643 - DNA, 26 bp, Homo sapiens
aggagaaaatgaagttagcatttgaa

SEQ ID NO: 25644 - DNA, 26 bp, Homo sapiens
ggagaaaatgaagttagcatttgaac

SEQ ID NO: 25645 - DNA, 26 bp, Homo sapiens
gagaaaatgaagttagcatttgaaca

SEQ ID NO: 25646 - DNA, 26 bp, Homo sapiens
agaaaatgaagttagcatttgaacat

SEQ ID NO: 25647 - DNA, 26 bp, Homo sapiens
gaaaatgaagttagcatttgaacatc

SEQ ID NO: 25648 - DNA, 26 bp, Homo sapiens
aaaatgaagttagcatttgaacatct

SEQ ID NO: 25649 - DNA, 26 bp, Homo sapiens
aaatgaagttagcatttgaacatctt

SEQ ID NO: 25650 - DNA, 26 bp, Homo sapiens
aatgaagttagcatttgaacatctta

SEQ ID NO: 25651 - DNA, 26 bp, Homo sapiens
atgaagttagcatttgaacatcttac

SEQ ID NO: 25652 - DNA, 26 bp, Homo sapiens
tgaagttagcatttgaacatcttaca

SEQ ID NO: 25653 - DNA, 26 bp, Homo sapiens
gaagttagcatttgaacatcttacaa

SEQ ID NO: 25654 - DNA, 26 bp, Homo sapiens
aagttagcatttgaacatcttacaag

SEQ ID NO: 25655 - DNA, 26 bp, Homo sapiens
agttagcatttgaacatcttacaagg

SEQ ID NO: 25656 - DNA, 26 bp, Homo sapiens
gttagcatttgaacatcttacaaggg

SEQ ID NO: 25657 - DNA, 26 bp, Homo sapiens
ttagcatttgaacatcttacaagggg

SEQ ID NO: 25658 - DNA, 26 bp, Homo sapiens
tagcatttgaacatcttacaagggga

SEQ ID NO: 25659 - DNA, 26 bp, Homo sapiens
agcatttgaacatcttacaaggggaa

SEQ ID NO: 25660 - DNA, 26 bp, Homo sapiens
gcatttgaacatcttacaaggggaaa

SEQ ID NO: 25661 - DNA, 26 bp, Homo sapiens
catttgaacatcttacaaggggaaaa

SEQ ID NO: 25662 - DNA, 26 bp, Homo sapiens
atttgaacatcttacaaggggaaaaa

SEQ ID NO: 25663 - DNA, 26 bp, Homo sapiens
tttgaacatcttacaaggggaaaaat

SEQ ID NO: 25664 - DNA, 26 bp, Homo sapiens
ttgaacatcttacaaggggaaaaata

SEQ ID NO: 25665 - DNA, 26 bp, Homo sapiens
tgaacatcttacaaggggaaaaatac

SEQ ID NO: 25666 - DNA, 26 bp, Homo sapiens
gaacatcttacaaggggaaaaataca

SEQ ID NO: 25667 - DNA, 26 bp, Homo sapiens
aacatcttacaaggggaaaaatacac

SEQ ID NO: 25668 - DNA, 26 bp, Homo sapiens
acatcttacaaggggaaaaatacacg

SEQ ID NO: 25669 - DNA, 26 bp, Homo sapiens
catcttacaaggggaaaaatacacga

SEQ ID NO: 25670 - DNA, 26 bp, Homo sapiens
atcttacaaggggaaaaatacacgaa

SEQ ID NO: 25671 - DNA, 26 bp, Homo sapiens
tcttacaaggggaaaaatacacgaaa

SEQ ID NO: 25672 - DNA, 26 bp, Homo sapiens
cttacaaggggaaaaatacacgaaaa

SEQ ID NO: 25673 - DNA, 26 bp, Homo sapiens
ttacaaggggaaaaatacacgaaaat

SEQ ID NO: 25674 - DNA, 26 bp, Homo sapiens
tacaaggggaaaaatacacgaaaatt

SEQ ID NO: 25675 - DNA, 26 bp, Homo sapiens
acaaggggaaaaatacacgaaaattt

SEQ ID NO: 25676 - DNA, 26 bp, Homo sapiens
caaggggaaaaatacacgaaaatttc

SEQ ID NO: 25677 - DNA, 26 bp, Homo sapiens
aaggggaaaaatacacgaaaatttca

SEQ ID NO: 25678 - DNA, 26 bp, Homo sapiens
aggggaaaaatacacgaaaatttcag

SEQ ID NO: 25679 - DNA, 26 bp, Homo sapiens
ggggaaaaatacacgaaaatttcagt

SEQ ID NO: 25680 - DNA, 26 bp, Homo sapiens
gggaaaaatacacgaaaatttcagtt

SEQ ID NO: 25681 - DNA, 26 bp, Homo sapiens
ggaaaaatacacgaaaatttcagttt

SEQ ID NO: 25682 - DNA, 26 bp, Homo sapiens
gaaaaatacacgaaaatttcagtttt

SEQ ID NO: 25683 - DNA, 26 bp, Homo sapiens
aaaaatacacgaaaatttcagttttg

SEQ ID NO: 25684 - DNA, 26 bp, Homo sapiens
aaaatacacgaaaatttcagttttga

SEQ ID NO: 25685 - DNA, 26 bp, Homo sapiens
aaatacacgaaaatttcagttttgat

SEQ ID NO: 25686 - DNA, 26 bp, Homo sapiens
aatacacgaaaatttcagttttgatt

SEQ ID NO: 25687 - DNA, 26 bp, Homo sapiens
atacacgaaaatttcagttttgattt

SEQ ID NO: 25688 - DNA, 26 bp, Homo sapiens
tacacgaaaatttcagttttgatttc

SEQ ID NO: 25689 - DNA, 26 bp, Homo sapiens
acacgaaaatttcagttttgatttct

SEQ ID NO: 25690 - DNA, 26 bp, Homo sapiens
cacgaaaatttcagttttgatttctt

SEQ ID NO: 25691 - DNA, 26 bp, Homo sapiens
acgaaaatttcagttttgatttcttt

SEQ ID NO: 25692 - DNA, 26 bp, Homo sapiens
cgaaaatttcagttttgatttctttt

SEQ ID NO: 25693 - DNA, 26 bp, Homo sapiens
gaaaatttcagttttgatttcttttt

SEQ ID NO: 25694 - DNA, 26 bp, Homo sapiens
aaaatttcagttttgatttctttttt

SEQ ID NO: 25695 - DNA, 26 bp, Homo sapiens
aaatttcagttttgatttcttttttg

SEQ ID NO: 25696 - DNA, 26 bp, Homo sapiens
aatttcagttttgatttcttttttgc

SEQ ID NO: 25697 - DNA, 26 bp, Homo sapiens
atttcagttttgatttcttttttgcc

SEQ ID NO: 25698 - DNA, 26 bp, Homo sapiens
tttcagttttgatttcttttttgcct

SEQ ID NO: 25699 - DNA, 26 bp, Homo sapiens
ttcagttttgatttcttttttgccta

SEQ ID NO: 25700 - DNA, 26 bp, Homo sapiens
tcagttttgatttcttttttgcctaa

SEQ ID NO: 25701 - DNA, 26 bp, Homo sapiens
cagttttgatttcttttttgcctaat

SEQ ID NO: 25702 - DNA, 26 bp, Homo sapiens
agttttgatttcttttttgcctaatg

SEQ ID NO: 25703 - DNA, 26 bp, Homo sapiens
gttttgatttcttttttgcctaatgc

SEQ ID NO: 25704 - DNA, 26 bp, Homo sapiens
ttttgatttcttttttgcctaatgca

SEQ ID NO: 25705 - DNA, 26 bp, Homo sapiens
tttgatttcttttttgcctaatgcat

SEQ ID NO: 25706 - DNA, 26 bp, Homo sapiens
ttgatttcttttttgcctaatgcatg

SEQ ID NO: 25707 - DNA, 26 bp, Homo sapiens
tgatttcttttttgcctaatgcatgt

SEQ ID NO: 25708 - DNA, 26 bp, Homo sapiens
gatttcttttttgcctaatgcatgtt

SEQ ID NO: 25709 - DNA, 26 bp, Homo sapiens
atttcttttttgcctaatgcatgttc

SEQ ID NO: 25710 - DNA, 26 bp, Homo sapiens
tttcttttttgcctaatgcatgttcg

SEQ ID NO: 25711 - DNA, 26 bp, Homo sapiens
ttcttttttgcctaatgcatgttcga

SEQ ID NO: 25712 - DNA, 26 bp, Homo sapiens
tcttttttgcctaatgcatgttcgaa

SEQ ID NO: 25713 - DNA, 26 bp, Homo sapiens
cttttttgcctaatgcatgttcgaaa

SEQ ID NO: 25714 - DNA, 26 bp, Homo sapiens
ttttttgcctaatgcatgttcgaaat

SEQ ID NO: 25715 - DNA, 26 bp, Homo sapiens
tttttgcctaatgcatgttcgaaata

SEQ ID NO: 25716 - DNA, 26 bp, Homo sapiens
ttttgcctaatgcatgttcgaaatag

SEQ ID NO: 25717 - DNA, 26 bp, Homo sapiens
tttgcctaatgcatgttcgaaataga

SEQ ID NO: 25718 - DNA, 26 bp, Homo sapiens
ttgcctaatgcatgttcgaaatagat

SEQ ID NO: 25719 - DNA, 26 bp, Homo sapiens
tgcctaatgcatgttcgaaatagata

SEQ ID NO: 25720 - DNA, 26 bp, Homo sapiens
gcctaatgcatgttcgaaatagatac

SEQ ID NO: 25721 - DNA, 26 bp, Homo sapiens
cctaatgcatgttcgaaatagatact

SEQ ID NO: 25722 - DNA, 26 bp, Homo sapiens
ctaatgcatgttcgaaatagatacta

SEQ ID NO: 25723 - DNA, 26 bp, Homo sapiens
taatgcatgttcgaaatagatactac

SEQ ID NO: 25724 - DNA, 26 bp, Homo sapiens
aatgcatgttcgaaatagatactacc

SEQ ID NO: 25725 - DNA, 26 bp, Homo sapiens
atgcatgttcgaaatagatactaccg

SEQ ID NO: 25726 - DNA, 26 bp, Homo sapiens
tgcatgttcgaaatagatactaccgt

SEQ ID NO: 25727 - DNA, 26 bp, Homo sapiens
gcatgttcgaaatagatactaccgtt

SEQ ID NO: 25728 - DNA, 26 bp, Homo sapiens
catgttcgaaatagatactaccgtta

SEQ ID NO: 25729 - DNA, 26 bp, Homo sapiens
atgttcgaaatagatactaccgttat

SEQ ID NO: 25730 - DNA, 26 bp, Homo sapiens
tgttcgaaatagatactaccgttatt

SEQ ID NO: 25731 - DNA, 26 bp, Homo sapiens
gttcgaaatagatactaccgttattg

SEQ ID NO: 25732 - DNA, 26 bp, Homo sapiens
ttcgaaatagatactaccgttattgc

SEQ ID NO: 25733 - DNA, 26 bp, Homo sapiens
tcgaaatagatactaccgttattgct

SEQ ID NO: 25734 - DNA, 26 bp, Homo sapiens
cgaaatagatactaccgttattgctc

SEQ ID NO: 25735 - DNA, 26 bp, Homo sapiens
gaaatagatactaccgttattgctct

SEQ ID NO: 25736 - DNA, 26 bp, Homo sapiens
aaatagatactaccgttattgctctt

SEQ ID NO: 25737 - DNA, 26 bp, Homo sapiens
aatagatactaccgttattgctcttt

SEQ ID NO: 25738 - DNA, 26 bp, Homo sapiens
atagatactaccgttattgctcttta

SEQ ID NO: 25739 - DNA, 26 bp, Homo sapiens
tagatactaccgttattgctctttag

SEQ ID NO: 25740 - DNA, 26 bp, Homo sapiens
agatactaccgttattgctctttaga

SEQ ID NO: 25741 - DNA, 26 bp, Homo sapiens
gatactaccgttattgctctttagaa

SEQ ID NO: 25742 - DNA, 26 bp, Homo sapiens
atactaccgttattgctctttagaac

SEQ ID NO: 25743 - DNA, 26 bp, Homo sapiens
tactaccgttattgctctttagaact

SEQ ID NO: 25744 - DNA, 26 bp, Homo sapiens
actaccgttattgctctttagaacta

SEQ ID NO: 25745 - DNA, 26 bp, Homo sapiens
ctaccgttattgctctttagaactac

SEQ ID NO: 25746 - DNA, 26 bp, Homo sapiens
taccgttattgctctttagaactaca

SEQ ID NO: 25747 - DNA, 26 bp, Homo sapiens
accgttattgctctttagaactacat

SEQ ID NO: 25748 - DNA, 26 bp, Homo sapiens
ccgttattgctctttagaactacata

SEQ ID NO: 25749 - DNA, 26 bp, Homo sapiens
cgttattgctctttagaactacatat

SEQ ID NO: 25750 - DNA, 26 bp, Homo sapiens
gttattgctctttagaactacatatg

SEQ ID NO: 25751 - DNA, 26 bp, Homo sapiens
ttattgctctttagaactacatatgt

SEQ ID NO: 25752 - DNA, 26 bp, Homo sapiens
tattgctctttagaactacatatgtg

SEQ ID NO: 25753 - DNA, 26 bp, Homo sapiens
attgctctttagaactacatatgtgc

SEQ ID NO: 25754 - DNA, 26 bp, Homo sapiens
ttgctctttagaactacatatgtgca

SEQ ID NO: 25755 - DNA, 26 bp, Homo sapiens
tgctctttagaactacatatgtgcat

SEQ ID NO: 25756 - DNA, 26 bp, Homo sapiens
gctctttagaactacatatgtgcata

SEQ ID NO: 25757 - DNA, 26 bp, Homo sapiens
ctctttagaactacatatgtgcatat

SEQ ID NO: 25758 - DNA, 26 bp, Homo sapiens
tctttagaactacatatgtgcatatt

SEQ ID NO: 25759 - DNA, 26 bp, Homo sapiens
ctttagaactacatatgtgcatattt

SEQ ID NO: 25760 - DNA, 26 bp, Homo sapiens
tttagaactacatatgtgcatatttt

SEQ ID NO: 25761 - DNA, 26 bp, Homo sapiens
ttagaactacatatgtgcatatttta

SEQ ID NO: 25762 - DNA, 26 bp, Homo sapiens
tagaactacatatgtgcatattttaa

SEQ ID NO: 25763 - DNA, 26 bp, Homo sapiens
agaactacatatgtgcatattttaaa

SEQ ID NO: 25764 - DNA, 26 bp, Homo sapiens
gaactacatatgtgcatattttaaag

SEQ ID NO: 25765 - DNA, 26 bp, Homo sapiens
aactacatatgtgcatattttaaagc

SEQ ID NO: 25766 - DNA, 26 bp, Homo sapiens
actacatatgtgcatattttaaagct

SEQ ID NO: 25767 - DNA, 26 bp, Homo sapiens
ctacatatgtgcatattttaaagctt

SEQ ID NO: 25768 - DNA, 26 bp, Homo sapiens
tacatatgtgcatattttaaagcttt

SEQ ID NO: 25769 - DNA, 26 bp, Homo sapiens
acatatgtgcatattttaaagcttta

SEQ ID NO: 25770 - DNA, 26 bp, Homo sapiens
catatgtgcatattttaaagctttaa

SEQ ID NO: 25771 - DNA, 26 bp, Homo sapiens
atatgtgcatattttaaagctttaat

SEQ ID NO: 25772 - DNA, 26 bp, Homo sapiens
tatgtgcatattttaaagctttaata

SEQ ID NO: 25773 - DNA, 26 bp, Homo sapiens
atgtgcatattttaaagctttaatat

SEQ ID NO: 25774 - DNA, 26 bp, Homo sapiens
tgtgcatattttaaagctttaatata

SEQ ID NO: 25775 - DNA, 26 bp, Homo sapiens
gtgcatattttaaagctttaatatat

SEQ ID NO: 25776 - DNA, 26 bp, Homo sapiens
tgcatattttaaagctttaatatatt

SEQ ID NO: 25777 - DNA, 26 bp, Homo sapiens
gcatattttaaagctttaatatattt

SEQ ID NO: 25778 - DNA, 26 bp, Homo sapiens
catattttaaagctttaatatatttc

SEQ ID NO: 25779 - DNA, 26 bp, Homo sapiens
atattttaaagctttaatatatttcc

SEQ ID NO: 25780 - DNA, 26 bp, Homo sapiens
tattttaaagctttaatatatttcct

SEQ ID NO: 25781 - DNA, 26 bp, Homo sapiens
attttaaagctttaatatatttcctt

SEQ ID NO: 25782 - DNA, 26 bp, Homo sapiens
ttttaaagctttaatatatttcctta

SEQ ID NO: 25783 - DNA, 26 bp, Homo sapiens
tttaaagctttaatatatttccttat

SEQ ID NO: 25784 - DNA, 26 bp, Homo sapiens
ttaaagctttaatatatttccttatt

SEQ ID NO: 25785 - DNA, 26 bp, Homo sapiens
taaagctttaatatatttccttattg

SEQ ID NO: 25786 - DNA, 26 bp, Homo sapiens
aaagctttaatatatttccttattgt

SEQ ID NO: 25787 - DNA, 26 bp, Homo sapiens
aagctttaatatatttccttattgtt

SEQ ID NO: 25788 - DNA, 26 bp, Homo sapiens
agctttaatatatttccttattgttg

SEQ ID NO: 25789 - DNA, 26 bp, Homo sapiens
gctttaatatatttccttattgttgt

SEQ ID NO: 25790 - DNA, 26 bp, Homo sapiens
ctttaatatatttccttattgttgtt

SEQ ID NO: 25791 - DNA, 26 bp, Homo sapiens
tttaatatatttccttattgttgtta

SEQ ID NO: 25792 - DNA, 26 bp, Homo sapiens
ttaatatatttccttattgttgttat

SEQ ID NO: 25793 - DNA, 26 bp, Homo sapiens
taatatatttccttattgttgttatt

SEQ ID NO: 25794 - DNA, 26 bp, Homo sapiens
aatatatttccttattgttgttatta

SEQ ID NO: 25795 - DNA, 26 bp, Homo sapiens
atatatttccttattgttgttattat

SEQ ID NO: 25796 - DNA, 26 bp, Homo sapiens
tatatttccttattgttgttattatt

SEQ ID NO: 25797 - DNA, 26 bp, Homo sapiens
atatttccttattgttgttattattt

SEQ ID NO: 25798 - DNA, 26 bp, Homo sapiens
tatttccttattgttgttattatttt

SEQ ID NO: 25799 - DNA, 26 bp, Homo sapiens
atttccttattgttgttattattttt

SEQ ID NO: 25800 - DNA, 26 bp, Homo sapiens
tttccttattgttgttattatttttg

SEQ ID NO: 25801 - DNA, 26 bp, Homo sapiens
ttccttattgttgttattatttttgc

SEQ ID NO: 25802 - DNA, 26 bp, Homo sapiens
tccttattgttgttattatttttgca

SEQ ID NO: 25803 - DNA, 26 bp, Homo sapiens
ccttattgttgttattatttttgcat

SEQ ID NO: 25804 - DNA, 26 bp, Homo sapiens
cttattgttgttattatttttgcatt

SEQ ID NO: 25805 - DNA, 26 bp, Homo sapiens
ttattgttgttattatttttgcattc

SEQ ID NO: 25806 - DNA, 26 bp, Homo sapiens
tattgttgttattatttttgcattca

SEQ ID NO: 25807 - DNA, 26 bp, Homo sapiens
attgttgttattatttttgcattcat

SEQ ID NO: 25808 - DNA, 26 bp, Homo sapiens
ttgttgttattatttttgcattcatc

SEQ ID NO: 25809 - DNA, 26 bp, Homo sapiens
tgttgttattatttttgcattcatct

SEQ ID NO: 25810 - DNA, 26 bp, Homo sapiens
gttgttattatttttgcattcatcta

SEQ ID NO: 25811 - DNA, 26 bp, Homo sapiens
ttgttattatttttgcattcatctac

SEQ ID NO: 25812 - DNA, 26 bp, Homo sapiens
tgttattatttttgcattcatctaca

SEQ ID NO: 25813 - DNA, 26 bp, Homo sapiens
gttattatttttgcattcatctacat

SEQ ID NO: 25814 - DNA, 26 bp, Homo sapiens
ttattatttttgcattcatctacatc

SEQ ID NO: 25815 - DNA, 26 bp, Homo sapiens
tattatttttgcattcatctacatct

SEQ ID NO: 25816 - DNA, 26 bp, Homo sapiens
attatttttgcattcatctacatctt

SEQ ID NO: 25817 - DNA, 26 bp, Homo sapiens
ttatttttgcattcatctacatctta

SEQ ID NO: 25818 - DNA, 26 bp, Homo sapiens
tatttttgcattcatctacatcttac

SEQ ID NO: 25819 - DNA, 26 bp, Homo sapiens
atttttgcattcatctacatcttact

SEQ ID NO: 25820 - DNA, 26 bp, Homo sapiens
tttttgcattcatctacatcttacta

SEQ ID NO: 25821 - DNA, 26 bp, Homo sapiens
ttttgcattcatctacatcttactat

SEQ ID NO: 25822 - DNA, 26 bp, Homo sapiens
tttgcattcatctacatcttactatc

SEQ ID NO: 25823 - DNA, 26 bp, Homo sapiens
ttgcattcatctacatcttactatcc

SEQ ID NO: 25824 - DNA, 26 bp, Homo sapiens
tgcattcatctacatcttactatcct

SEQ ID NO: 25825 - DNA, 26 bp, Homo sapiens
gcattcatctacatcttactatcctt

SEQ ID NO: 25826 - DNA, 26 bp, Homo sapiens
cattcatctacatcttactatccttg

SEQ ID NO: 25827 - DNA, 26 bp, Homo sapiens
attcatctacatcttactatccttgt

SEQ ID NO: 25828 - DNA, 26 bp, Homo sapiens
ttcatctacatcttactatccttgtt

SEQ ID NO: 25829 - DNA, 26 bp, Homo sapiens
tcatctacatcttactatccttgttg

SEQ ID NO: 25830 - DNA, 26 bp, Homo sapiens
catctacatcttactatccttgttgc

SEQ ID NO: 25831 - DNA, 26 bp, Homo sapiens
atctacatcttactatccttgttgca

SEQ ID NO: 25832 - DNA, 26 bp, Homo sapiens
tctacatcttactatccttgttgcag

SEQ ID NO: 25833 - DNA, 26 bp, Homo sapiens
ctacatcttactatccttgttgcaga

SEQ ID NO: 25834 - DNA, 26 bp, Homo sapiens
tacatcttactatccttgttgcagag

SEQ ID NO: 25835 - DNA, 26 bp, Homo sapiens
acatcttactatccttgttgcagaga

SEQ ID NO: 25836 - DNA, 26 bp, Homo sapiens
catcttactatccttgttgcagagaa

SEQ ID NO: 25837 - DNA, 26 bp, Homo sapiens
atcttactatccttgttgcagagaag

SEQ ID NO: 25838 - DNA, 26 bp, Homo sapiens
tcttactatccttgttgcagagaaga

SEQ ID NO: 25839 - DNA, 26 bp, Homo sapiens
cttactatccttgttgcagagaagag

SEQ ID NO: 25840 - DNA, 26 bp, Homo sapiens
ttactatccttgttgcagagaagaga

SEQ ID NO: 25841 - DNA, 26 bp, Homo sapiens
tactatccttgttgcagagaagagag

SEQ ID NO: 25842 - DNA, 26 bp, Homo sapiens
actatccttgttgcagagaagagagg

SEQ ID NO: 25843 - DNA, 26 bp, Homo sapiens
ctatccttgttgcagagaagagagga

SEQ ID NO: 25844 - DNA, 26 bp, Homo sapiens
tatccttgttgcagagaagagaggat

SEQ ID NO: 25845 - DNA, 26 bp, Homo sapiens
atccttgttgcagagaagagaggata

SEQ ID NO: 25846 - DNA, 26 bp, Homo sapiens
tccttgttgcagagaagagaggataa

SEQ ID NO: 25847 - DNA, 26 bp, Homo sapiens
ccttgttgcagagaagagaggataat

SEQ ID NO: 25848 - DNA, 26 bp, Homo sapiens
cttgttgcagagaagagaggataatg

SEQ ID NO: 25849 - DNA, 26 bp, Homo sapiens
ttgttgcagagaagagaggataatgt

SEQ ID NO: 25850 - DNA, 26 bp, Homo sapiens
tgttgcagagaagagaggataatgtg

SEQ ID NO: 25851 - DNA, 26 bp, Homo sapiens
gttgcagagaagagaggataatgtga

SEQ ID NO: 25852 - DNA, 26 bp, Homo sapiens
ttgcagagaagagaggataatgtgaa

SEQ ID NO: 25853 - DNA, 26 bp, Homo sapiens
tgcagagaagagaggataatgtgaaa

SEQ ID NO: 25854 - DNA, 26 bp, Homo sapiens
gcagagaagagaggataatgtgaaaa

SEQ ID NO: 25855 - DNA, 26 bp, Homo sapiens
cagagaagagaggataatgtgaaaaa

SEQ ID NO: 25856 - DNA, 26 bp, Homo sapiens
agagaagagaggataatgtgaaaaat

SEQ ID NO: 25857 - DNA, 26 bp, Homo sapiens
gagaagagaggataatgtgaaaaatg

SEQ ID NO: 25858 - DNA, 26 bp, Homo sapiens
agaagagaggataatgtgaaaaatga

SEQ ID NO: 25859 - DNA, 26 bp, Homo sapiens
gaagagaggataatgtgaaaaatgac

SEQ ID NO: 25860 - DNA, 26 bp, Homo sapiens
aagagaggataatgtgaaaaatgaca

SEQ ID NO: 25861 - DNA, 26 bp, Homo sapiens
agagaggataatgtgaaaaatgacat

SEQ ID NO: 25862 - DNA, 26 bp, Homo sapiens
gagaggataatgtgaaaaatgacatt

SEQ ID NO: 25863 - DNA, 26 bp, Homo sapiens
agaggataatgtgaaaaatgacattt

SEQ ID NO: 25864 - DNA, 26 bp, Homo sapiens
gaggataatgtgaaaaatgacatttg

SEQ ID NO: 25865 - DNA, 26 bp, Homo sapiens
aggataatgtgaaaaatgacatttgg

SEQ ID NO: 25866 - DNA, 26 bp, Homo sapiens
ggataatgtgaaaaatgacatttggg

SEQ ID NO: 25867 - DNA, 26 bp, Homo sapiens
gataatgtgaaaaatgacatttgggg

SEQ ID NO: 25868 - DNA, 26 bp, Homo sapiens
ataatgtgaaaaatgacatttggggt

SEQ ID NO: 25869 - DNA, 26 bp, Homo sapiens
taatgtgaaaaatgacatttggggtt

SEQ ID NO: 25870 - DNA, 26 bp, Homo sapiens
aatgtgaaaaatgacatttggggttt

SEQ ID NO: 25871 - DNA, 26 bp, Homo sapiens
atgtgaaaaatgacatttggggtttt

SEQ ID NO: 25872 - DNA, 26 bp, Homo sapiens
tgtgaaaaatgacatttggggttttt

SEQ ID NO: 25873 - DNA, 26 bp, Homo sapiens
gtgaaaaatgacatttggggtttttt

SEQ ID NO: 25874 - DNA, 26 bp, Homo sapiens
tgaaaaatgacatttggggttttttt

SEQ ID NO: 25875 - DNA, 26 bp, Homo sapiens
gaaaaatgacatttggggtttttttt

SEQ ID NO: 25876 - DNA, 26 bp, Homo sapiens
aaaaatgacatttggggttttttttt

SEQ ID NO: 25877 - DNA, 26 bp, Homo sapiens
aaaatgacatttggggtttttttttt

SEQ ID NO: 25878 - DNA, 26 bp, Homo sapiens
aaatgacatttggggttttttttttt

SEQ ID NO: 25879 - DNA, 26 bp, Homo sapiens
aatgacatttggggtttttttttttt

SEQ ID NO: 25880 - DNA, 26 bp, Homo sapiens
atgacatttggggttttttttttttt

SEQ ID NO: 25881 - DNA, 26 bp, Homo sapiens
tgacatttggggtttttttttttttt

SEQ ID NO: 25882 - DNA, 26 bp, Homo sapiens
gacatttggggttttttttttttttt

SEQ ID NO: 25883 - DNA, 26 bp, Homo sapiens
acatttggggtttttttttttttttt

SEQ ID NO: 25884 - DNA, 26 bp, Homo sapiens
catttggggtttttttttttttttta

SEQ ID NO: 25885 - DNA, 26 bp, Homo sapiens
atttggggttttttttttttttttaa

SEQ ID NO: 25886 - DNA, 26 bp, Homo sapiens
tttggggttttttttttttttttaaa

SEQ ID NO: 25887 - DNA, 26 bp, Homo sapiens
ttggggttttttttttttttttaaac

SEQ ID NO: 25888 - DNA, 26 bp, Homo sapiens
tggggttttttttttttttttaaaca

SEQ ID NO: 25889 - DNA, 26 bp, Homo sapiens
ggggttttttttttttttttaaacaa

SEQ ID NO: 25890 - DNA, 26 bp, Homo sapiens
gggttttttttttttttttaaacaaa

SEQ ID NO: 25891 - DNA, 26 bp, Homo sapiens
ggttttttttttttttttaaacaaaa

SEQ ID NO: 25892 - DNA, 26 bp, Homo sapiens
gttttttttttttttttaaacaaaag

SEQ ID NO: 25893 - DNA, 26 bp, Homo sapiens
ttttttttttttttttaaacaaaagc

SEQ ID NO: 25894 - DNA, 26 bp, Homo sapiens
tttttttttttttttaaacaaaagca

SEQ ID NO: 25895 - DNA, 26 bp, Homo sapiens
ttttttttttttttaaacaaaagcat

SEQ ID NO: 25896 - DNA, 26 bp, Homo sapiens
tttttttttttttaaacaaaagcatt

SEQ ID NO: 25897 - DNA, 26 bp, Homo sapiens
ttttttttttttaaacaaaagcattt

SEQ ID NO: 25898 - DNA, 26 bp, Homo sapiens
tttttttttttaaacaaaagcattta

SEQ ID NO: 25899 - DNA, 26 bp, Homo sapiens
ttttttttttaaacaaaagcatttaa

SEQ ID NO: 25900 - DNA, 26 bp, Homo sapiens
tttttttttaaacaaaagcatttaac

SEQ ID NO: 25901 - DNA, 26 bp, Homo sapiens
ttttttttaaacaaaagcatttaaca

SEQ ID NO: 25902 - DNA, 26 bp, Homo sapiens
tttttttaaacaaaagcatttaacaa

SEQ ID NO: 25903 - DNA, 26 bp, Homo sapiens
ttttttaaacaaaagcatttaacaag

SEQ ID NO: 25904 - DNA, 26 bp, Homo sapiens
tttttaaacaaaagcatttaacaagc

SEQ ID NO: 25905 - DNA, 26 bp, Homo sapiens
ttttaaacaaaagcatttaacaagct

SEQ ID NO: 25906 - DNA, 26 bp, Homo sapiens
tttaaacaaaagcatttaacaagctt

SEQ ID NO: 25907 - DNA, 26 bp, Homo sapiens
ttaaacaaaagcatttaacaagctta

SEQ ID NO: 25908 - DNA, 26 bp, Homo sapiens
taaacaaaagcatttaacaagcttaa

SEQ ID NO: 25909 - DNA, 26 bp, Homo sapiens
aaacaaaagcatttaacaagcttaaa

SEQ ID NO: 25910 - DNA, 26 bp, Homo sapiens
aacaaaagcatttaacaagcttaaaa

SEQ ID NO: 25911 - DNA, 26 bp, Homo sapiens
acaaaagcatttaacaagcttaaaaa

SEQ ID NO: 25912 - DNA, 26 bp, Homo sapiens
caaaagcatttaacaagcttaaaaaa

SEQ ID NO: 25913 - DNA, 26 bp, Homo sapiens
aaaagcatttaacaagcttaaaaaat

SEQ ID NO: 25914 - DNA, 26 bp, Homo sapiens
aaagcatttaacaagcttaaaaaatg

SEQ ID NO: 25915 - DNA, 26 bp, Homo sapiens
aagcatttaacaagcttaaaaaatga

SEQ ID NO: 25916 - DNA, 26 bp, Homo sapiens
agcatttaacaagcttaaaaaatgaa

SEQ ID NO: 25917 - DNA, 26 bp, Homo sapiens
gcatttaacaagcttaaaaaatgaaa

SEQ ID NO: 25918 - DNA, 26 bp, Homo sapiens
catttaacaagcttaaaaaatgaaac

SEQ ID NO: 25919 - DNA, 26 bp, Homo sapiens
atttaacaagcttaaaaaatgaaact

SEQ ID NO: 25920 - DNA, 26 bp, Homo sapiens
tttaacaagcttaaaaaatgaaactc

SEQ ID NO: 25921 - DNA, 26 bp, Homo sapiens
ttaacaagcttaaaaaatgaaactca

SEQ ID NO: 25922 - DNA, 26 bp, Homo sapiens
taacaagcttaaaaaatgaaactcaa

SEQ ID NO: 25923 - DNA, 26 bp, Homo sapiens
aacaagcttaaaaaatgaaactcaat

SEQ ID NO: 25924 - DNA, 26 bp, Homo sapiens
acaagcttaaaaaatgaaactcaatg

SEQ ID NO: 25925 - DNA, 26 bp, Homo sapiens
caagcttaaaaaatgaaactcaatga

SEQ ID NO: 25926 - DNA, 26 bp, Homo sapiens
aagcttaaaaaatgaaactcaatgaa

SEQ ID NO: 25927 - DNA, 26 bp, Homo sapiens
agcttaaaaaatgaaactcaatgaaa

SEQ ID NO: 25928 - DNA, 26 bp, Homo sapiens
gcttaaaaaatgaaactcaatgaaaa

SEQ ID NO: 25929 - DNA, 26 bp, Homo sapiens
cttaaaaaatgaaactcaatgaaaaa

SEQ ID NO: 25930 - DNA, 26 bp, Homo sapiens
ttaaaaaatgaaactcaatgaaaaag

SEQ ID NO: 25931 - DNA, 26 bp, Homo sapiens
taaaaaatgaaactcaatgaaaaaga

SEQ ID NO: 25932 - DNA, 26 bp, Homo sapiens
aaaaaatgaaactcaatgaaaaagaa

SEQ ID NO: 25933 - DNA, 26 bp, Homo sapiens
aaaaatgaaactcaatgaaaaagaaa

SEQ ID NO: 25934 - DNA, 26 bp, Homo sapiens
aaaatgaaactcaatgaaaaagaaaa

SEQ ID NO: 25935 - DNA, 26 bp, Homo sapiens
aaatgaaactcaatgaaaaagaaaag

SEQ ID NO: 25936 - DNA, 26 bp, Homo sapiens
aatgaaactcaatgaaaaagaaaaga

SEQ ID NO: 25937 - DNA, 26 bp, Homo sapiens
atgaaactcaatgaaaaagaaaagaa

SEQ ID NO: 25938 - DNA, 26 bp, Homo sapiens
tgaaactcaatgaaaaagaaaagaag

SEQ ID NO: 25939 - DNA, 26 bp, Homo sapiens
gaaactcaatgaaaaagaaaagaagg

SEQ ID NO: 25940 - DNA, 26 bp, Homo sapiens
aaactcaatgaaaaagaaaagaaggt

SEQ ID NO: 25941 - DNA, 26 bp, Homo sapiens
aactcaatgaaaaagaaaagaaggtt

SEQ ID NO: 25942 - DNA, 26 bp, Homo sapiens
actcaatgaaaaagaaaagaaggttt

SEQ ID NO: 25943 - DNA, 26 bp, Homo sapiens
ctcaatgaaaaagaaaagaaggtttg

SEQ ID NO: 25944 - DNA, 26 bp, Homo sapiens
tcaatgaaaaagaaaagaaggtttga

SEQ ID NO: 25945 - DNA, 26 bp, Homo sapiens
caatgaaaaagaaaagaaggtttgaa

SEQ ID NO: 25946 - DNA, 26 bp, Homo sapiens
aatgaaaaagaaaagaaggtttgaac

SEQ ID NO: 25947 - DNA, 26 bp, Homo sapiens
atgaaaaagaaaagaaggtttgaaca

SEQ ID NO: 25948 - DNA, 26 bp, Homo sapiens
tgaaaaagaaaagaaggtttgaacac

SEQ ID NO: 25949 - DNA, 26 bp, Homo sapiens
gaaaaagaaaagaaggtttgaacaca

SEQ ID NO: 25950 - DNA, 26 bp, Homo sapiens
aaaaagaaaagaaggtttgaacacag

SEQ ID NO: 25951 - DNA, 26 bp, Homo sapiens
aaaagaaaagaaggtttgaacacagt

SEQ ID NO: 25952 - DNA, 26 bp, Homo sapiens
aaagaaaagaaggtttgaacacagtc

SEQ ID NO: 25953 - DNA, 26 bp, Homo sapiens
aagaaaagaaggtttgaacacagtca

SEQ ID NO: 25954 - DNA, 26 bp, Homo sapiens
agaaaagaaggtttgaacacagtcaa

SEQ ID NO: 25955 - DNA, 26 bp, Homo sapiens
gaaaagaaggtttgaacacagtcaaa

SEQ ID NO: 25956 - DNA, 26 bp, Homo sapiens
aaaagaaggtttgaacacagtcaaat

SEQ ID NO: 25957 - DNA, 26 bp, Homo sapiens
aaagaaggtttgaacacagtcaaata

SEQ ID NO: 25958 - DNA, 26 bp, Homo sapiens
aagaaggtttgaacacagtcaaataa

SEQ ID NO: 25959 - DNA, 26 bp, Homo sapiens
agaaggtttgaacacagtcaaataac

SEQ ID NO: 25960 - DNA, 26 bp, Homo sapiens
gaaggtttgaacacagtcaaataacc

SEQ ID NO: 25961 - DNA, 26 bp, Homo sapiens
aaggtttgaacacagtcaaataacct

SEQ ID NO: 25962 - DNA, 26 bp, Homo sapiens
aggtttgaacacagtcaaataacctg

SEQ ID NO: 25963 - DNA, 26 bp, Homo sapiens
ggtttgaacacagtcaaataacctga

SEQ ID NO: 25964 - DNA, 26 bp, Homo sapiens
gtttgaacacagtcaaataacctgag

SEQ ID NO: 25965 - DNA, 26 bp, Homo sapiens
tttgaacacagtcaaataacctgaga

SEQ ID NO: 25966 - DNA, 26 bp, Homo sapiens
ttgaacacagtcaaataacctgagaa

SEQ ID NO: 25967 - DNA, 26 bp, Homo sapiens
tgaacacagtcaaataacctgagaag

SEQ ID NO: 25968 - DNA, 26 bp, Homo sapiens
gaacacagtcaaataacctgagaagt

SEQ ID NO: 25969 - DNA, 26 bp, Homo sapiens
aacacagtcaaataacctgagaagtg

SEQ ID NO: 25970 - DNA, 26 bp, Homo sapiens
acacagtcaaataacctgagaagtga

SEQ ID NO: 25971 - DNA, 26 bp, Homo sapiens
cacagtcaaataacctgagaagtgac

SEQ ID NO: 25972 - DNA, 26 bp, Homo sapiens
acagtcaaataacctgagaagtgaca

SEQ ID NO: 25973 - DNA, 26 bp, Homo sapiens
cagtcaaataacctgagaagtgacag

SEQ ID NO: 25974 - DNA, 26 bp, Homo sapiens
agtcaaataacctgagaagtgacaga

SEQ ID NO: 25975 - DNA, 26 bp, Homo sapiens
gtcaaataacctgagaagtgacagat

SEQ ID NO: 25976 - DNA, 26 bp, Homo sapiens
tcaaataacctgagaagtgacagatg

SEQ ID NO: 25977 - DNA, 26 bp, Homo sapiens
caaataacctgagaagtgacagatgg

SEQ ID NO: 25978 - DNA, 26 bp, Homo sapiens
aaataacctgagaagtgacagatgga

SEQ ID NO: 25979 - DNA, 26 bp, Homo sapiens
aataacctgagaagtgacagatggaa

SEQ ID NO: 25980 - DNA, 26 bp, Homo sapiens
ataacctgagaagtgacagatggaaa

SEQ ID NO: 25981 - DNA, 26 bp, Homo sapiens
taacctgagaagtgacagatggaaaa

SEQ ID NO: 25982 - DNA, 26 bp, Homo sapiens
aacctgagaagtgacagatggaaaag

SEQ ID NO: 25983 - DNA, 26 bp, Homo sapiens
acctgagaagtgacagatggaaaagc

SEQ ID NO: 25984 - DNA, 26 bp, Homo sapiens
cctgagaagtgacagatggaaaagca

SEQ ID NO: 25985 - DNA, 26 bp, Homo sapiens
ctgagaagtgacagatggaaaagcaa

SEQ ID NO: 25986 - DNA, 26 bp, Homo sapiens
tgagaagtgacagatggaaaagcaac

SEQ ID NO: 25987 - DNA, 26 bp, Homo sapiens
gagaagtgacagatggaaaagcaaca

SEQ ID NO: 25988 - DNA, 26 bp, Homo sapiens
agaagtgacagatggaaaagcaacag

SEQ ID NO: 25989 - DNA, 26 bp, Homo sapiens
gaagtgacagatggaaaagcaacaga

SEQ ID NO: 25990 - DNA, 26 bp, Homo sapiens
aagtgacagatggaaaagcaacagaa

SEQ ID NO: 25991 - DNA, 26 bp, Homo sapiens
agtgacagatggaaaagcaacagaat

SEQ ID NO: 25992 - DNA, 26 bp, Homo sapiens
gtgacagatggaaaagcaacagaatg

SEQ ID NO: 25993 - DNA, 26 bp, Homo sapiens
tgacagatggaaaagcaacagaatgc

SEQ ID NO: 25994 - DNA, 26 bp, Homo sapiens
gacagatggaaaagcaacagaatgca

SEQ ID NO: 25995 - DNA, 26 bp, Homo sapiens
acagatggaaaagcaacagaatgcaa

SEQ ID NO: 25996 - DNA, 26 bp, Homo sapiens
cagatggaaaagcaacagaatgcaag

SEQ ID NO: 25997 - DNA, 26 bp, Homo sapiens
agatggaaaagcaacagaatgcaagc

SEQ ID NO: 25998 - DNA, 26 bp, Homo sapiens
gatggaaaagcaacagaatgcaagca

SEQ ID NO: 25999 - DNA, 26 bp, Homo sapiens
atggaaaagcaacagaatgcaagcac

SEQ ID NO: 26000 - DNA, 26 bp, Homo sapiens
tggaaaagcaacagaatgcaagcacc

SEQ ID NO: 26001 - DNA, 26 bp, Homo sapiens
ggaaaagcaacagaatgcaagcacct

SEQ ID NO: 26002 - DNA, 26 bp, Homo sapiens
gaaaagcaacagaatgcaagcacctt

SEQ ID NO: 26003 - DNA, 26 bp, Homo sapiens
aaaagcaacagaatgcaagcaccttg

SEQ ID NO: 26004 - DNA, 26 bp, Homo sapiens
aaagcaacagaatgcaagcaccttgt

SEQ ID NO: 26005 - DNA, 26 bp, Homo sapiens
aagcaacagaatgcaagcaccttgta

SEQ ID NO: 26006 - DNA, 26 bp, Homo sapiens
agcaacagaatgcaagcaccttgtaa

SEQ ID NO: 26007 - DNA, 26 bp, Homo sapiens
gcaacagaatgcaagcaccttgtaag

SEQ ID NO: 26008 - DNA, 26 bp, Homo sapiens
caacagaatgcaagcaccttgtaagg

SEQ ID NO: 26009 - DNA, 26 bp, Homo sapiens
aacagaatgcaagcaccttgtaaggt

SEQ ID NO: 26010 - DNA, 26 bp, Homo sapiens
acagaatgcaagcaccttgtaaggtc

SEQ ID NO: 26011 - DNA, 26 bp, Homo sapiens
cagaatgcaagcaccttgtaaggtct

SEQ ID NO: 26012 - DNA, 26 bp, Homo sapiens
agaatgcaagcaccttgtaaggtctg

SEQ ID NO: 26013 - DNA, 26 bp, Homo sapiens
gaatgcaagcaccttgtaaggtctgt

SEQ ID NO: 26014 - DNA, 26 bp, Homo sapiens
aatgcaagcaccttgtaaggtctgta

SEQ ID NO: 26015 - DNA, 26 bp, Homo sapiens
atgcaagcaccttgtaaggtctgtaa

SEQ ID NO: 26016 - DNA, 26 bp, Homo sapiens
tgcaagcaccttgtaaggtctgtaat

SEQ ID NO: 26017 - DNA, 26 bp, Homo sapiens
gcaagcaccttgtaaggtctgtaatc

SEQ ID NO: 26018 - DNA, 26 bp, Homo sapiens
caagcaccttgtaaggtctgtaatct

SEQ ID NO: 26019 - DNA, 26 bp, Homo sapiens
aagcaccttgtaaggtctgtaatctt

SEQ ID NO: 26020 - DNA, 26 bp, Homo sapiens
agcaccttgtaaggtctgtaatcttt

SEQ ID NO: 26021 - DNA, 26 bp, Homo sapiens
gcaccttgtaaggtctgtaatctttg

SEQ ID NO: 26022 - DNA, 26 bp, Homo sapiens
caccttgtaaggtctgtaatctttgg

SEQ ID NO: 26023 - DNA, 26 bp, Homo sapiens
accttgtaaggtctgtaatctttgga

SEQ ID NO: 26024 - DNA, 26 bp, Homo sapiens
ccttgtaaggtctgtaatctttggat

SEQ ID NO: 26025 - DNA, 26 bp, Homo sapiens
cttgtaaggtctgtaatctttggatt

SEQ ID NO: 26026 - DNA, 26 bp, Homo sapiens
ttgtaaggtctgtaatctttggattt

SEQ ID NO: 26027 - DNA, 26 bp, Homo sapiens
tgtaaggtctgtaatctttggattta

SEQ ID NO: 26028 - DNA, 26 bp, Homo sapiens
gtaaggtctgtaatctttggatttac

SEQ ID NO: 26029 - DNA, 26 bp, Homo sapiens
taaggtctgtaatctttggatttact

SEQ ID NO: 26030 - DNA, 26 bp, Homo sapiens
aaggtctgtaatctttggatttactg

SEQ ID NO: 26031 - DNA, 26 bp, Homo sapiens
aggtctgtaatctttggatttactgt

SEQ ID NO: 26032 - DNA, 26 bp, Homo sapiens
ggtctgtaatctttggatttactgtg

SEQ ID NO: 26033 - DNA, 26 bp, Homo sapiens
gtctgtaatctttggatttactgtga

SEQ ID NO: 26034 - DNA, 26 bp, Homo sapiens
tctgtaatctttggatttactgtgaa

SEQ ID NO: 26035 - DNA, 26 bp, Homo sapiens
ctgtaatctttggatttactgtgaaa

SEQ ID NO: 26036 - DNA, 26 bp, Homo sapiens
tgtaatctttggatttactgtgaaaa

SEQ ID NO: 26037 - DNA, 26 bp, Homo sapiens
gtaatctttggatttactgtgaaaag

SEQ ID NO: 26038 - DNA, 26 bp, Homo sapiens
taatctttggatttactgtgaaaagt

SEQ ID NO: 26039 - DNA, 26 bp, Homo sapiens
aatctttggatttactgtgaaaagtt

SEQ ID NO: 26040 - DNA, 26 bp, Homo sapiens
atctttggatttactgtgaaaagttt

SEQ ID NO: 26041 - DNA, 26 bp, Homo sapiens
tctttggatttactgtgaaaagtttc

SEQ ID NO: 26042 - DNA, 26 bp, Homo sapiens
ctttggatttactgtgaaaagtttca

SEQ ID NO: 26043 - DNA, 26 bp, Homo sapiens
tttggatttactgtgaaaagtttcag

SEQ ID NO: 26044 - DNA, 26 bp, Homo sapiens
ttggatttactgtgaaaagtttcaga

SEQ ID NO: 26045 - DNA, 26 bp, Homo sapiens
tggatttactgtgaaaagtttcagaa

SEQ ID NO: 26046 - DNA, 26 bp, Homo sapiens
ggatttactgtgaaaagtttcagaac

SEQ ID NO: 26047 - DNA, 26 bp, Homo sapiens
gatttactgtgaaaagtttcagaaca

SEQ ID NO: 26048 - DNA, 26 bp, Homo sapiens
atttactgtgaaaagtttcagaacat

SEQ ID NO: 26049 - DNA, 26 bp, Homo sapiens
tttactgtgaaaagtttcagaacatc

SEQ ID NO: 26050 - DNA, 26 bp, Homo sapiens
ttactgtgaaaagtttcagaacatca

SEQ ID NO: 26051 - DNA, 26 bp, Homo sapiens
tactgtgaaaagtttcagaacatcat

SEQ ID NO: 26052 - DNA, 26 bp, Homo sapiens
actgtgaaaagtttcagaacatcata

SEQ ID NO: 26053 - DNA, 26 bp, Homo sapiens
ctgtgaaaagtttcagaacatcatag

SEQ ID NO: 26054 - DNA, 26 bp, Homo sapiens
tgtgaaaagtttcagaacatcataga

SEQ ID NO: 26055 - DNA, 26 bp, Homo sapiens
gtgaaaagtttcagaacatcatagac

SEQ ID NO: 26056 - DNA, 26 bp, Homo sapiens
tgaaaagtttcagaacatcatagact

SEQ ID NO: 26057 - DNA, 26 bp, Homo sapiens
gaaaagtttcagaacatcatagactc

SEQ ID NO: 26058 - DNA, 26 bp, Homo sapiens
aaaagtttcagaacatcatagactct

SEQ ID NO: 26059 - DNA, 26 bp, Homo sapiens
aaagtttcagaacatcatagactctt

SEQ ID NO: 26060 - DNA, 26 bp, Homo sapiens
aagtttcagaacatcatagactctta

SEQ ID NO: 26061 - DNA, 26 bp, Homo sapiens
agtttcagaacatcatagactcttac

SEQ ID NO: 26062 - DNA, 26 bp, Homo sapiens
gtttcagaacatcatagactcttact

SEQ ID NO: 26063 - DNA, 26 bp, Homo sapiens
tttcagaacatcatagactcttactg

SEQ ID NO: 26064 - DNA, 26 bp, Homo sapiens
ttcagaacatcatagactcttactgc

SEQ ID NO: 26065 - DNA, 26 bp, Homo sapiens
tcagaacatcatagactcttactgcc

SEQ ID NO: 26066 - DNA, 26 bp, Homo sapiens
cagaacatcatagactcttactgcca

SEQ ID NO: 26067 - DNA, 26 bp, Homo sapiens
agaacatcatagactcttactgccac

SEQ ID NO: 26068 - DNA, 26 bp, Homo sapiens
gaacatcatagactcttactgccaca

SEQ ID NO: 26069 - DNA, 26 bp, Homo sapiens
aacatcatagactcttactgccacat

SEQ ID NO: 26070 - DNA, 26 bp, Homo sapiens
acatcatagactcttactgccacatt

SEQ ID NO: 26071 - DNA, 26 bp, Homo sapiens
catcatagactcttactgccacattg

SEQ ID NO: 26072 - DNA, 26 bp, Homo sapiens
atcatagactcttactgccacattgt

SEQ ID NO: 26073 - DNA, 26 bp, Homo sapiens
tcatagactcttactgccacattgtc

SEQ ID NO: 26074 - DNA, 26 bp, Homo sapiens
catagactcttactgccacattgtcc

SEQ ID NO: 26075 - DNA, 26 bp, Homo sapiens
atagactcttactgccacattgtcca

SEQ ID NO: 26076 - DNA, 26 bp, Homo sapiens
tagactcttactgccacattgtccat

SEQ ID NO: 26077 - DNA, 26 bp, Homo sapiens
agactcttactgccacattgtccata

SEQ ID NO: 26078 - DNA, 26 bp, Homo sapiens
gactcttactgccacattgtccatag

SEQ ID NO: 26079 - DNA, 26 bp, Homo sapiens
actcttactgccacattgtccataga

SEQ ID NO: 26080 - DNA, 26 bp, Homo sapiens
ctcttactgccacattgtccatagac

SEQ ID NO: 26081 - DNA, 26 bp, Homo sapiens
tcttactgccacattgtccatagacc

SEQ ID NO: 26082 - DNA, 26 bp, Homo sapiens
cttactgccacattgtccatagaccc

SEQ ID NO: 26083 - DNA, 26 bp, Homo sapiens
ttactgccacattgtccatagaccct

SEQ ID NO: 26084 - DNA, 26 bp, Homo sapiens
tactgccacattgtccatagaccctg

SEQ ID NO: 26085 - DNA, 26 bp, Homo sapiens
actgccacattgtccatagaccctgg

SEQ ID NO: 26086 - DNA, 26 bp, Homo sapiens
ctgccacattgtccatagaccctgga

SEQ ID NO: 26087 - DNA, 26 bp, Homo sapiens
tgccacattgtccatagaccctggaa

SEQ ID NO: 26088 - DNA, 26 bp, Homo sapiens
gccacattgtccatagaccctggaaa

SEQ ID NO: 26089 - DNA, 26 bp, Homo sapiens
ccacattgtccatagaccctggaaaa

SEQ ID NO: 26090 - DNA, 26 bp, Homo sapiens
cacattgtccatagaccctggaaaat

SEQ ID NO: 26091 - DNA, 26 bp, Homo sapiens
acattgtccatagaccctggaaaata

SEQ ID NO: 26092 - DNA, 26 bp, Homo sapiens
cattgtccatagaccctggaaaataa

SEQ ID NO: 26093 - DNA, 26 bp, Homo sapiens
attgtccatagaccctggaaaataac

SEQ ID NO: 26094 - DNA, 26 bp, Homo sapiens
ttgtccatagaccctggaaaataaca

SEQ ID NO: 26095 - DNA, 26 bp, Homo sapiens
tgtccatagaccctggaaaataacag

SEQ ID NO: 26096 - DNA, 26 bp, Homo sapiens
gtccatagaccctggaaaataacagt

SEQ ID NO: 26097 - DNA, 26 bp, Homo sapiens
tccatagaccctggaaaataacagtg

SEQ ID NO: 26098 - DNA, 26 bp, Homo sapiens
ccatagaccctggaaaataacagtga

SEQ ID NO: 26099 - DNA, 26 bp, Homo sapiens
catagaccctggaaaataacagtgaa

SEQ ID NO: 26100 - DNA, 26 bp, Homo sapiens
atagaccctggaaaataacagtgaaa

SEQ ID NO: 26101 - DNA, 26 bp, Homo sapiens
tagaccctggaaaataacagtgaaat

SEQ ID NO: 26102 - DNA, 26 bp, Homo sapiens
agaccctggaaaataacagtgaaatt

SEQ ID NO: 26103 - DNA, 26 bp, Homo sapiens
gaccctggaaaataacagtgaaattc

SEQ ID NO: 26104 - DNA, 26 bp, Homo sapiens
accctggaaaataacagtgaaattca

SEQ ID NO: 26105 - DNA, 26 bp, Homo sapiens
ccctggaaaataacagtgaaattcat

SEQ ID NO: 26106 - DNA, 26 bp, Homo sapiens
cctggaaaataacagtgaaattcata

SEQ ID NO: 26107 - DNA, 26 bp, Homo sapiens
ctggaaaataacagtgaaattcatat

SEQ ID NO: 26108 - DNA, 26 bp, Homo sapiens
tggaaaataacagtgaaattcatatg

SEQ ID NO: 26109 - DNA, 26 bp, Homo sapiens
ggaaaataacagtgaaattcatatgt

SEQ ID NO: 26110 - DNA, 26 bp, Homo sapiens
gaaaataacagtgaaattcatatgta

SEQ ID NO: 26111 - DNA, 26 bp, Homo sapiens
aaaataacagtgaaattcatatgtat

SEQ ID NO: 26112 - DNA, 26 bp, Homo sapiens
aaataacagtgaaattcatatgtata

SEQ ID NO: 26113 - DNA, 26 bp, Homo sapiens
aataacagtgaaattcatatgtatac

SEQ ID NO: 26114 - DNA, 26 bp, Homo sapiens
ataacagtgaaattcatatgtataca

SEQ ID NO: 26115 - DNA, 26 bp, Homo sapiens
taacagtgaaattcatatgtatacac

SEQ ID NO: 26116 - DNA, 26 bp, Homo sapiens
aacagtgaaattcatatgtatacaca

SEQ ID NO: 26117 - DNA, 26 bp, Homo sapiens
acagtgaaattcatatgtatacacat

SEQ ID NO: 26118 - DNA, 26 bp, Homo sapiens
cagtgaaattcatatgtatacacata

SEQ ID NO: 26119 - DNA, 26 bp, Homo sapiens
agtgaaattcatatgtatacacatat

SEQ ID NO: 26120 - DNA, 26 bp, Homo sapiens
gtgaaattcatatgtatacacatata

SEQ ID NO: 26121 - DNA, 26 bp, Homo sapiens
tgaaattcatatgtatacacatatat

SEQ ID NO: 26122 - DNA, 26 bp, Homo sapiens
gaaattcatatgtatacacatatata

SEQ ID NO: 26123 - DNA, 26 bp, Homo sapiens
aaattcatatgtatacacatatatat

SEQ ID NO: 26124 - DNA, 26 bp, Homo sapiens
aattcatatgtatacacatatatatg

SEQ ID NO: 26125 - DNA, 26 bp, Homo sapiens
attcatatgtatacacatatatatga

SEQ ID NO: 26126 - DNA, 26 bp, Homo sapiens
ttcatatgtatacacatatatatgaa

SEQ ID NO: 26127 - DNA, 26 bp, Homo sapiens
tcatatgtatacacatatatatgaat

SEQ ID NO: 26128 - DNA, 26 bp, Homo sapiens
catatgtatacacatatatatgaata

SEQ ID NO: 26129 - DNA, 26 bp, Homo sapiens
atatgtatacacatatatatgaatac

SEQ ID NO: 26130 - DNA, 26 bp, Homo sapiens
tatgtatacacatatatatgaataca

SEQ ID NO: 26131 - DNA, 26 bp, Homo sapiens
atgtatacacatatatatgaatacac

SEQ ID NO: 26132 - DNA, 26 bp, Homo sapiens
tgtatacacatatatatgaatacaca

SEQ ID NO: 26133 - DNA, 26 bp, Homo sapiens
gtatacacatatatatgaatacacac

SEQ ID NO: 26134 - DNA, 26 bp, Homo sapiens
tatacacatatatatgaatacacact

SEQ ID NO: 26135 - DNA, 26 bp, Homo sapiens
atacacatatatatgaatacacactc

SEQ ID NO: 26136 - DNA, 26 bp, Homo sapiens
tacacatatatatgaatacacactca

SEQ ID NO: 26137 - DNA, 26 bp, Homo sapiens
acacatatatatgaatacacactcat

SEQ ID NO: 26138 - DNA, 26 bp, Homo sapiens
cacatatatatgaatacacactcatg

SEQ ID NO: 26139 - DNA, 26 bp, Homo sapiens
acatatatatgaatacacactcatgc

SEQ ID NO: 26140 - DNA, 26 bp, Homo sapiens
catatatatgaatacacactcatgca

SEQ ID NO: 26141 - DNA, 26 bp, Homo sapiens
atatatatgaatacacactcatgcat

SEQ ID NO: 26142 - DNA, 26 bp, Homo sapiens
tatatatgaatacacactcatgcatg

SEQ ID NO: 26143 - DNA, 26 bp, Homo sapiens
atatatgaatacacactcatgcatgc

SEQ ID NO: 26144 - DNA, 26 bp, Homo sapiens
tatatgaatacacactcatgcatgca

SEQ ID NO: 26145 - DNA, 26 bp, Homo sapiens
atatgaatacacactcatgcatgcac

SEQ ID NO: 26146 - DNA, 26 bp, Homo sapiens
tatgaatacacactcatgcatgcaca

SEQ ID NO: 26147 - DNA, 26 bp, Homo sapiens
atgaatacacactcatgcatgcacac

SEQ ID NO: 26148 - DNA, 26 bp, Homo sapiens
tgaatacacactcatgcatgcacact

SEQ ID NO: 26149 - DNA, 26 bp, Homo sapiens
gaatacacactcatgcatgcacactg

SEQ ID NO: 26150 - DNA, 26 bp, Homo sapiens
aatacacactcatgcatgcacactgt

SEQ ID NO: 26151 - DNA, 26 bp, Homo sapiens
atacacactcatgcatgcacactgtc

SEQ ID NO: 26152 - DNA, 26 bp, Homo sapiens
tacacactcatgcatgcacactgtct

SEQ ID NO: 26153 - DNA, 26 bp, Homo sapiens
acacactcatgcatgcacactgtctt

SEQ ID NO: 26154 - DNA, 26 bp, Homo sapiens
cacactcatgcatgcacactgtcttc

SEQ ID NO: 26155 - DNA, 26 bp, Homo sapiens
acactcatgcatgcacactgtcttca

SEQ ID NO: 26156 - DNA, 26 bp, Homo sapiens
cactcatgcatgcacactgtcttcac

SEQ ID NO: 26157 - DNA, 26 bp, Homo sapiens
actcatgcatgcacactgtcttcaca

SEQ ID NO: 26158 - DNA, 26 bp, Homo sapiens
ctcatgcatgcacactgtcttcacac

SEQ ID NO: 26159 - DNA, 26 bp, Homo sapiens
tcatgcatgcacactgtcttcacaca

SEQ ID NO: 26160 - DNA, 26 bp, Homo sapiens
catgcatgcacactgtcttcacacac

SEQ ID NO: 26161 - DNA, 26 bp, Homo sapiens
atgcatgcacactgtcttcacacacc

SEQ ID NO: 26162 - DNA, 26 bp, Homo sapiens
tgcatgcacactgtcttcacacaccc

SEQ ID NO: 26163 - DNA, 26 bp, Homo sapiens
gcatgcacactgtcttcacacacccc

SEQ ID NO: 26164 - DNA, 26 bp, Homo sapiens
catgcacactgtcttcacacacccct

SEQ ID NO: 26165 - DNA, 26 bp, Homo sapiens
atgcacactgtcttcacacacccctc

SEQ ID NO: 26166 - DNA, 26 bp, Homo sapiens
tgcacactgtcttcacacacccctcc

SEQ ID NO: 26167 - DNA, 26 bp, Homo sapiens
gcacactgtcttcacacacccctcct

SEQ ID NO: 26168 - DNA, 26 bp, Homo sapiens
cacactgtcttcacacacccctcctc

SEQ ID NO: 26169 - DNA, 26 bp, Homo sapiens
acactgtcttcacacacccctcctca

SEQ ID NO: 26170 - DNA, 26 bp, Homo sapiens
cactgtcttcacacacccctcctcac

SEQ ID NO: 26171 - DNA, 26 bp, Homo sapiens
actgtcttcacacacccctcctcacc

SEQ ID NO: 26172 - DNA, 26 bp, Homo sapiens
ctgtcttcacacacccctcctcacca

SEQ ID NO: 26173 - DNA, 26 bp, Homo sapiens
tgtcttcacacacccctcctcaccac

SEQ ID NO: 26174 - DNA, 26 bp, Homo sapiens
gtcttcacacacccctcctcaccact

SEQ ID NO: 26175 - DNA, 26 bp, Homo sapiens
tcttcacacacccctcctcaccactt

SEQ ID NO: 26176 - DNA, 26 bp, Homo sapiens
cttcacacacccctcctcaccactta

SEQ ID NO: 26177 - DNA, 26 bp, Homo sapiens
ttcacacacccctcctcaccacttaa

SEQ ID NO: 26178 - DNA, 26 bp, Homo sapiens
tcacacacccctcctcaccacttaac

SEQ ID NO: 26179 - DNA, 26 bp, Homo sapiens
cacacacccctcctcaccacttaacc

SEQ ID NO: 26180 - DNA, 26 bp, Homo sapiens
acacacccctcctcaccacttaaccg

SEQ ID NO: 26181 - DNA, 26 bp, Homo sapiens
cacacccctcctcaccacttaaccgg

SEQ ID NO: 26182 - DNA, 26 bp, Homo sapiens
acacccctcctcaccacttaaccgga

SEQ ID NO: 26183 - DNA, 26 bp, Homo sapiens
cacccctcctcaccacttaaccggag

SEQ ID NO: 26184 - DNA, 26 bp, Homo sapiens
acccctcctcaccacttaaccggagt

SEQ ID NO: 26185 - DNA, 26 bp, Homo sapiens
cccctcctcaccacttaaccggagtt

SEQ ID NO: 26186 - DNA, 26 bp, Homo sapiens
ccctcctcaccacttaaccggagtta

SEQ ID NO: 26187 - DNA, 26 bp, Homo sapiens
cctcctcaccacttaaccggagttac

SEQ ID NO: 26188 - DNA, 26 bp, Homo sapiens
ctcctcaccacttaaccggagttaca

SEQ ID NO: 26189 - DNA, 26 bp, Homo sapiens
tcctcaccacttaaccggagttacat

SEQ ID NO: 26190 - DNA, 26 bp, Homo sapiens
cctcaccacttaaccggagttacata

SEQ ID NO: 26191 - DNA, 26 bp, Homo sapiens
ctcaccacttaaccggagttacataa

SEQ ID NO: 26192 - DNA, 26 bp, Homo sapiens
tcaccacttaaccggagttacataaa

SEQ ID NO: 26193 - DNA, 26 bp, Homo sapiens
caccacttaaccggagttacataaat

SEQ ID NO: 26194 - DNA, 26 bp, Homo sapiens
accacttaaccggagttacataaatg

SEQ ID NO: 26195 - DNA, 26 bp, Homo sapiens
ccacttaaccggagttacataaatgc

SEQ ID NO: 26196 - DNA, 26 bp, Homo sapiens
cacttaaccggagttacataaatgct

SEQ ID NO: 26197 - DNA, 26 bp, Homo sapiens
acttaaccggagttacataaatgctt

SEQ ID NO: 26198 - DNA, 26 bp, Homo sapiens
cttaaccggagttacataaatgcttc

SEQ ID NO: 26199 - DNA, 26 bp, Homo sapiens
ttaaccggagttacataaatgcttct

SEQ ID NO: 26200 - DNA, 26 bp, Homo sapiens
taaccggagttacataaatgcttctc

SEQ ID NO: 26201 - DNA, 26 bp, Homo sapiens
aaccggagttacataaatgcttctca

SEQ ID NO: 26202 - DNA, 26 bp, Homo sapiens
accggagttacataaatgcttctcag

SEQ ID NO: 26203 - DNA, 26 bp, Homo sapiens
ccggagttacataaatgcttctcaga

SEQ ID NO: 26204 - DNA, 26 bp, Homo sapiens
cggagttacataaatgcttctcagat

SEQ ID NO: 26205 - DNA, 26 bp, Homo sapiens
ggagttacataaatgcttctcagata

SEQ ID NO: 26206 - DNA, 26 bp, Homo sapiens
gagttacataaatgcttctcagatat

SEQ ID NO: 26207 - DNA, 26 bp, Homo sapiens
agttacataaatgcttctcagatatg

SEQ ID NO: 26208 - DNA, 26 bp, Homo sapiens
gttacataaatgcttctcagatatgt

SEQ ID NO: 26209 - DNA, 26 bp, Homo sapiens
ttacataaatgcttctcagatatgtc

SEQ ID NO: 26210 - DNA, 26 bp, Homo sapiens
tacataaatgcttctcagatatgtca

SEQ ID NO: 26211 - DNA, 26 bp, Homo sapiens
acataaatgcttctcagatatgtcat

SEQ ID NO: 26212 - DNA, 26 bp, Homo sapiens
cataaatgcttctcagatatgtcatt

SEQ ID NO: 26213 - DNA, 26 bp, Homo sapiens
ataaatgcttctcagatatgtcattg

SEQ ID NO: 26214 - DNA, 26 bp, Homo sapiens
taaatgcttctcagatatgtcattgc

SEQ ID NO: 26215 - DNA, 26 bp, Homo sapiens
aaatgcttctcagatatgtcattgca

SEQ ID NO: 26216 - DNA, 26 bp, Homo sapiens
aatgcttctcagatatgtcattgcat

SEQ ID NO: 26217 - DNA, 26 bp, Homo sapiens
atgcttctcagatatgtcattgcatt

SEQ ID NO: 26218 - DNA, 26 bp, Homo sapiens
tgcttctcagatatgtcattgcattt

SEQ ID NO: 26219 - DNA, 26 bp, Homo sapiens
gcttctcagatatgtcattgcatttg

SEQ ID NO: 26220 - DNA, 26 bp, Homo sapiens
cttctcagatatgtcattgcatttgt

SEQ ID NO: 26221 - DNA, 26 bp, Homo sapiens
ttctcagatatgtcattgcatttgtt

SEQ ID NO: 26222 - DNA, 26 bp, Homo sapiens
tctcagatatgtcattgcatttgttt

SEQ ID NO: 26223 - DNA, 26 bp, Homo sapiens
ctcagatatgtcattgcatttgtttg

SEQ ID NO: 26224 - DNA, 26 bp, Homo sapiens
tcagatatgtcattgcatttgtttgt

SEQ ID NO: 26225 - DNA, 26 bp, Homo sapiens
cagatatgtcattgcatttgtttgtt

SEQ ID NO: 26226 - DNA, 26 bp, Homo sapiens
agatatgtcattgcatttgtttgttt

SEQ ID NO: 26227 - DNA, 26 bp, Homo sapiens
gatatgtcattgcatttgtttgtttt

SEQ ID NO: 26228 - DNA, 26 bp, Homo sapiens
atatgtcattgcatttgtttgttttc

SEQ ID NO: 26229 - DNA, 26 bp, Homo sapiens
tatgtcattgcatttgtttgttttct

SEQ ID NO: 26230 - DNA, 26 bp, Homo sapiens
atgtcattgcatttgtttgttttctg

SEQ ID NO: 26231 - DNA, 26 bp, Homo sapiens
tgtcattgcatttgtttgttttctgc

SEQ ID NO: 26232 - DNA, 26 bp, Homo sapiens
gtcattgcatttgtttgttttctgca

SEQ ID NO: 26233 - DNA, 26 bp, Homo sapiens
tcattgcatttgtttgttttctgcat

SEQ ID NO: 26234 - DNA, 26 bp, Homo sapiens
cattgcatttgtttgttttctgcatc

SEQ ID NO: 26235 - DNA, 26 bp, Homo sapiens
attgcatttgtttgttttctgcatct

SEQ ID NO: 26236 - DNA, 26 bp, Homo sapiens
ttgcatttgtttgttttctgcatctc

SEQ ID NO: 26237 - DNA, 26 bp, Homo sapiens
tgcatttgtttgttttctgcatctca

SEQ ID NO: 26238 - DNA, 26 bp, Homo sapiens
gcatttgtttgttttctgcatctcaa

SEQ ID NO: 26239 - DNA, 26 bp, Homo sapiens
catttgtttgttttctgcatctcaac

SEQ ID NO: 26240 - DNA, 26 bp, Homo sapiens
atttgtttgttttctgcatctcaact

SEQ ID NO: 26241 - DNA, 26 bp, Homo sapiens
tttgtttgttttctgcatctcaacta

SEQ ID NO: 26242 - DNA, 26 bp, Homo sapiens
ttgtttgttttctgcatctcaactaa

SEQ ID NO: 26243 - DNA, 26 bp, Homo sapiens
tgtttgttttctgcatctcaactaag

SEQ ID NO: 26244 - DNA, 26 bp, Homo sapiens
gtttgttttctgcatctcaactaagt

SEQ ID NO: 26245 - DNA, 26 bp, Homo sapiens
tttgttttctgcatctcaactaagtt

SEQ ID NO: 26246 - DNA, 26 bp, Homo sapiens
ttgttttctgcatctcaactaagttc

SEQ ID NO: 26247 - DNA, 26 bp, Homo sapiens
tgttttctgcatctcaactaagttca

SEQ ID NO: 26248 - DNA, 26 bp, Homo sapiens
gttttctgcatctcaactaagttcag

SEQ ID NO: 26249 - DNA, 26 bp, Homo sapiens
ttttctgcatctcaactaagttcagc

SEQ ID NO: 26250 - DNA, 26 bp, Homo sapiens
tttctgcatctcaactaagttcagcg

SEQ ID NO: 26251 - DNA, 26 bp, Homo sapiens
ttctgcatctcaactaagttcagcgg

SEQ ID NO: 26252 - DNA, 26 bp, Homo sapiens
tctgcatctcaactaagttcagcggc

SEQ ID NO: 26253 - DNA, 26 bp, Homo sapiens
ctgcatctcaactaagttcagcggct

SEQ ID NO: 26254 - DNA, 26 bp, Homo sapiens
tgcatctcaactaagttcagcggctt

SEQ ID NO: 26255 - DNA, 26 bp, Homo sapiens
gcatctcaactaagttcagcggcttg

SEQ ID NO: 26256 - DNA, 26 bp, Homo sapiens
catctcaactaagttcagcggcttgc

SEQ ID NO: 26257 - DNA, 26 bp, Homo sapiens
atctcaactaagttcagcggcttgcg

SEQ ID NO: 26258 - DNA, 26 bp, Homo sapiens
tctcaactaagttcagcggcttgcgc

SEQ ID NO: 26259 - DNA, 26 bp, Homo sapiens
ctcaactaagttcagcggcttgcgcc

SEQ ID NO: 26260 - DNA, 26 bp, Homo sapiens
tcaactaagttcagcggcttgcgcct

SEQ ID NO: 26261 - DNA, 26 bp, Homo sapiens
caactaagttcagcggcttgcgcctg

SEQ ID NO: 26262 - DNA, 26 bp, Homo sapiens
aactaagttcagcggcttgcgcctgt

SEQ ID NO: 26263 - DNA, 26 bp, Homo sapiens
actaagttcagcggcttgcgcctgtg

SEQ ID NO: 26264 - DNA, 26 bp, Homo sapiens
ctaagttcagcggcttgcgcctgtga

SEQ ID NO: 26265 - DNA, 26 bp, Homo sapiens
taagttcagcggcttgcgcctgtgac

SEQ ID NO: 26266 - DNA, 26 bp, Homo sapiens
aagttcagcggcttgcgcctgtgaca

SEQ ID NO: 26267 - DNA, 26 bp, Homo sapiens
agttcagcggcttgcgcctgtgacat

SEQ ID NO: 26268 - DNA, 26 bp, Homo sapiens
gttcagcggcttgcgcctgtgacatt

SEQ ID NO: 26269 - DNA, 26 bp, Homo sapiens
ttcagcggcttgcgcctgtgacatta

SEQ ID NO: 26270 - DNA, 26 bp, Homo sapiens
tcagcggcttgcgcctgtgacattaa

SEQ ID NO: 26271 - DNA, 26 bp, Homo sapiens
cagcggcttgcgcctgtgacattaat

SEQ ID NO: 26272 - DNA, 26 bp, Homo sapiens
agcggcttgcgcctgtgacattaatt

SEQ ID NO: 26273 - DNA, 26 bp, Homo sapiens
gcggcttgcgcctgtgacattaatta

SEQ ID NO: 26274 - DNA, 26 bp, Homo sapiens
cggcttgcgcctgtgacattaattat

SEQ ID NO: 26275 - DNA, 26 bp, Homo sapiens
ggcttgcgcctgtgacattaattatg

SEQ ID NO: 26276 - DNA, 26 bp, Homo sapiens
gcttgcgcctgtgacattaattatgc

SEQ ID NO: 26277 - DNA, 26 bp, Homo sapiens
cttgcgcctgtgacattaattatgca

SEQ ID NO: 26278 - DNA, 26 bp, Homo sapiens
ttgcgcctgtgacattaattatgcaa

SEQ ID NO: 26279 - DNA, 26 bp, Homo sapiens
tgcgcctgtgacattaattatgcaag

SEQ ID NO: 26280 - DNA, 26 bp, Homo sapiens
gcgcctgtgacattaattatgcaaga

SEQ ID NO: 26281 - DNA, 26 bp, Homo sapiens
cgcctgtgacattaattatgcaagat

SEQ ID NO: 26282 - DNA, 26 bp, Homo sapiens
gcctgtgacattaattatgcaagatt

SEQ ID NO: 26283 - DNA, 26 bp, Homo sapiens
cctgtgacattaattatgcaagattc

SEQ ID NO: 26284 - DNA, 26 bp, Homo sapiens
ctgtgacattaattatgcaagattca

SEQ ID NO: 26285 - DNA, 26 bp, Homo sapiens
tgtgacattaattatgcaagattcaa

SEQ ID NO: 26286 - DNA, 26 bp, Homo sapiens
gtgacattaattatgcaagattcaaa

SEQ ID NO: 26287 - DNA, 26 bp, Homo sapiens
tgacattaattatgcaagattcaaac

SEQ ID NO: 26288 - DNA, 26 bp, Homo sapiens
gacattaattatgcaagattcaaaca

SEQ ID NO: 26289 - DNA, 26 bp, Homo sapiens
acattaattatgcaagattcaaacaa

SEQ ID NO: 26290 - DNA, 26 bp, Homo sapiens
cattaattatgcaagattcaaacaac

SEQ ID NO: 26291 - DNA, 26 bp, Homo sapiens
attaattatgcaagattcaaacaacc

SEQ ID NO: 26292 - DNA, 26 bp, Homo sapiens
ttaattatgcaagattcaaacaacca

SEQ ID NO: 26293 - DNA, 26 bp, Homo sapiens
taattatgcaagattcaaacaaccaa

SEQ ID NO: 26294 - DNA, 26 bp, Homo sapiens
aattatgcaagattcaaacaaccaag

SEQ ID NO: 26295 - DNA, 26 bp, Homo sapiens
attatgcaagattcaaacaaccaagc

SEQ ID NO: 26296 - DNA, 26 bp, Homo sapiens
ttatgcaagattcaaacaaccaagca

SEQ ID NO: 26297 - DNA, 26 bp, Homo sapiens
tatgcaagattcaaacaaccaagcag

SEQ ID NO: 26298 - DNA, 26 bp, Homo sapiens
atgcaagattcaaacaaccaagcagg

SEQ ID NO: 26299 - DNA, 26 bp, Homo sapiens
tgcaagattcaaacaaccaagcaggc

SEQ ID NO: 26300 - DNA, 26 bp, Homo sapiens
gcaagattcaaacaaccaagcaggca

SEQ ID NO: 26301 - DNA, 26 bp, Homo sapiens
caagattcaaacaaccaagcaggcac

SEQ ID NO: 26302 - DNA, 26 bp, Homo sapiens
aagattcaaacaaccaagcaggcaca

SEQ ID NO: 26303 - DNA, 26 bp, Homo sapiens
agattcaaacaaccaagcaggcacat

SEQ ID NO: 26304 - DNA, 26 bp, Homo sapiens
gattcaaacaaccaagcaggcacatt

SEQ ID NO: 26305 - DNA, 26 bp, Homo sapiens
attcaaacaaccaagcaggcacattt

SEQ ID NO: 26306 - DNA, 26 bp, Homo sapiens
ttcaaacaaccaagcaggcacatttt

SEQ ID NO: 26307 - DNA, 26 bp, Homo sapiens
tcaaacaaccaagcaggcacattttg

SEQ ID NO: 26308 - DNA, 26 bp, Homo sapiens
caaacaaccaagcaggcacattttgg

SEQ ID NO: 26309 - DNA, 26 bp, Homo sapiens
aaacaaccaagcaggcacattttggg

SEQ ID NO: 26310 - DNA, 26 bp, Homo sapiens
aacaaccaagcaggcacattttgggg

SEQ ID NO: 26311 - DNA, 26 bp, Homo sapiens
acaaccaagcaggcacattttggggg

SEQ ID NO: 26312 - DNA, 26 bp, Homo sapiens
caaccaagcaggcacattttgggggt

SEQ ID NO: 26313 - DNA, 26 bp, Homo sapiens
aaccaagcaggcacattttgggggtg

SEQ ID NO: 26314 - DNA, 26 bp, Homo sapiens
accaagcaggcacattttgggggtga

SEQ ID NO: 26315 - DNA, 26 bp, Homo sapiens
ccaagcaggcacattttgggggtgag

SEQ ID NO: 26316 - DNA, 26 bp, Homo sapiens
caagcaggcacattttgggggtgagt

SEQ ID NO: 26317 - DNA, 26 bp, Homo sapiens
aagcaggcacattttgggggtgagtt

SEQ ID NO: 26318 - DNA, 26 bp, Homo sapiens
agcaggcacattttgggggtgagttt

SEQ ID NO: 26319 - DNA, 26 bp, Homo sapiens
gcaggcacattttgggggtgagtttt

SEQ ID NO: 26320 - DNA, 26 bp, Homo sapiens
caggcacattttgggggtgagtttta

SEQ ID NO: 26321 - DNA, 26 bp, Homo sapiens
aggcacattttgggggtgagttttaa

SEQ ID NO: 26322 - DNA, 26 bp, Homo sapiens
ggcacattttgggggtgagttttaag

SEQ ID NO: 26323 - DNA, 26 bp, Homo sapiens
gcacattttgggggtgagttttaaga

SEQ ID NO: 26324 - DNA, 26 bp, Homo sapiens
cacattttgggggtgagttttaagaa

SEQ ID NO: 26325 - DNA, 26 bp, Homo sapiens
acattttgggggtgagttttaagaaa

SEQ ID NO: 26326 - DNA, 26 bp, Homo sapiens
cattttgggggtgagttttaagaaat

SEQ ID NO: 26327 - DNA, 26 bp, Homo sapiens
attttgggggtgagttttaagaaatc

SEQ ID NO: 26328 - DNA, 26 bp, Homo sapiens
ttttgggggtgagttttaagaaatct

SEQ ID NO: 26329 - DNA, 26 bp, Homo sapiens
tttgggggtgagttttaagaaatctg

SEQ ID NO: 26330 - DNA, 26 bp, Homo sapiens
ttgggggtgagttttaagaaatctgt

SEQ ID NO: 26331 - DNA, 26 bp, Homo sapiens
tgggggtgagttttaagaaatctgtg

SEQ ID NO: 26332 - DNA, 26 bp, Homo sapiens
gggggtgagttttaagaaatctgtga

SEQ ID NO: 26333 - DNA, 26 bp, Homo sapiens
ggggtgagttttaagaaatctgtgac

SEQ ID NO: 26334 - DNA, 26 bp, Homo sapiens
gggtgagttttaagaaatctgtgacc

SEQ ID NO: 26335 - DNA, 26 bp, Homo sapiens
ggtgagttttaagaaatctgtgacct

SEQ ID NO: 26336 - DNA, 26 bp, Homo sapiens
gtgagttttaagaaatctgtgacctg

SEQ ID NO: 26337 - DNA, 26 bp, Homo sapiens
tgagttttaagaaatctgtgacctga

SEQ ID NO: 26338 - DNA, 26 bp, Homo sapiens
gagttttaagaaatctgtgacctgaa

SEQ ID NO: 26339 - DNA, 26 bp, Homo sapiens
agttttaagaaatctgtgacctgaaa

SEQ ID NO: 26340 - DNA, 26 bp, Homo sapiens
gttttaagaaatctgtgacctgaaag

SEQ ID NO: 26341 - DNA, 26 bp, Homo sapiens
ttttaagaaatctgtgacctgaaaga

SEQ ID NO: 26342 - DNA, 26 bp, Homo sapiens
tttaagaaatctgtgacctgaaagaa

SEQ ID NO: 26343 - DNA, 26 bp, Homo sapiens
ttaagaaatctgtgacctgaaagaaa

SEQ ID NO: 26344 - DNA, 26 bp, Homo sapiens
taagaaatctgtgacctgaaagaaat

SEQ ID NO: 26345 - DNA, 26 bp, Homo sapiens
aagaaatctgtgacctgaaagaaatt

SEQ ID NO: 26346 - DNA, 26 bp, Homo sapiens
agaaatctgtgacctgaaagaaattc

SEQ ID NO: 26347 - DNA, 26 bp, Homo sapiens
gaaatctgtgacctgaaagaaattct

SEQ ID NO: 26348 - DNA, 26 bp, Homo sapiens
aaatctgtgacctgaaagaaattctg

SEQ ID NO: 26349 - DNA, 26 bp, Homo sapiens
aatctgtgacctgaaagaaattctgt

SEQ ID NO: 26350 - DNA, 26 bp, Homo sapiens
atctgtgacctgaaagaaattctgtg

SEQ ID NO: 26351 - DNA, 26 bp, Homo sapiens
tctgtgacctgaaagaaattctgtgg

SEQ ID NO: 26352 - DNA, 26 bp, Homo sapiens
ctgtgacctgaaagaaattctgtggg

SEQ ID NO: 26353 - DNA, 26 bp, Homo sapiens
tgtgacctgaaagaaattctgtgggg

SEQ ID NO: 26354 - DNA, 26 bp, Homo sapiens
gtgacctgaaagaaattctgtgggga

SEQ ID NO: 26355 - DNA, 26 bp, Homo sapiens
tgacctgaaagaaattctgtggggac

SEQ ID NO: 26356 - DNA, 26 bp, Homo sapiens
gacctgaaagaaattctgtggggact

SEQ ID NO: 26357 - DNA, 26 bp, Homo sapiens
acctgaaagaaattctgtggggactg

SEQ ID NO: 26358 - DNA, 26 bp, Homo sapiens
cctgaaagaaattctgtggggactgt

SEQ ID NO: 26359 - DNA, 26 bp, Homo sapiens
ctgaaagaaattctgtggggactgtc

SEQ ID NO: 26360 - DNA, 26 bp, Homo sapiens
tgaaagaaattctgtggggactgtct

SEQ ID NO: 26361 - DNA, 26 bp, Homo sapiens
gaaagaaattctgtggggactgtctg

SEQ ID NO: 26362 - DNA, 26 bp, Homo sapiens
aaagaaattctgtggggactgtctgg

SEQ ID NO: 26363 - DNA, 26 bp, Homo sapiens
aagaaattctgtggggactgtctggg

SEQ ID NO: 26364 - DNA, 26 bp, Homo sapiens
agaaattctgtggggactgtctgggt

SEQ ID NO: 26365 - DNA, 26 bp, Homo sapiens
gaaattctgtggggactgtctgggtt

SEQ ID NO: 26366 - DNA, 26 bp, Homo sapiens
aaattctgtggggactgtctgggtta

SEQ ID NO: 26367 - DNA, 26 bp, Homo sapiens
aattctgtggggactgtctgggttat

SEQ ID NO: 26368 - DNA, 26 bp, Homo sapiens
attctgtggggactgtctgggttatc

SEQ ID NO: 26369 - DNA, 26 bp, Homo sapiens
ttctgtggggactgtctgggttatcc

SEQ ID NO: 26370 - DNA, 26 bp, Homo sapiens
tctgtggggactgtctgggttatcca

SEQ ID NO: 26371 - DNA, 26 bp, Homo sapiens
ctgtggggactgtctgggttatccag

SEQ ID NO: 26372 - DNA, 26 bp, Homo sapiens
tgtggggactgtctgggttatccagt

SEQ ID NO: 26373 - DNA, 26 bp, Homo sapiens
gtggggactgtctgggttatccagtt

SEQ ID NO: 26374 - DNA, 26 bp, Homo sapiens
tggggactgtctgggttatccagttt

SEQ ID NO: 26375 - DNA, 26 bp, Homo sapiens
ggggactgtctgggttatccagttta

SEQ ID NO: 26376 - DNA, 26 bp, Homo sapiens
gggactgtctgggttatccagtttat

SEQ ID NO: 26377 - DNA, 26 bp, Homo sapiens
ggactgtctgggttatccagtttatt

SEQ ID NO: 26378 - DNA, 26 bp, Homo sapiens
gactgtctgggttatccagtttattc

SEQ ID NO: 26379 - DNA, 26 bp, Homo sapiens
actgtctgggttatccagtttattcc

SEQ ID NO: 26380 - DNA, 26 bp, Homo sapiens
ctgtctgggttatccagtttattccg

SEQ ID NO: 26381 - DNA, 26 bp, Homo sapiens
tgtctgggttatccagtttattccgt

SEQ ID NO: 26382 - DNA, 26 bp, Homo sapiens
gtctgggttatccagtttattccgtg

SEQ ID NO: 26383 - DNA, 26 bp, Homo sapiens
tctgggttatccagtttattccgtga

SEQ ID NO: 26384 - DNA, 26 bp, Homo sapiens
ctgggttatccagtttattccgtgat

SEQ ID NO: 26385 - DNA, 26 bp, Homo sapiens
tgggttatccagtttattccgtgatt

SEQ ID NO: 26386 - DNA, 26 bp, Homo sapiens
gggttatccagtttattccgtgatta

SEQ ID NO: 26387 - DNA, 26 bp, Homo sapiens
ggttatccagtttattccgtgattat

SEQ ID NO: 26388 - DNA, 26 bp, Homo sapiens
gttatccagtttattccgtgattata

SEQ ID NO: 26389 - DNA, 26 bp, Homo sapiens
ttatccagtttattccgtgattatat

SEQ ID NO: 26390 - DNA, 26 bp, Homo sapiens
tatccagtttattccgtgattatatt

SEQ ID NO: 26391 - DNA, 26 bp, Homo sapiens
atccagtttattccgtgattatattc

SEQ ID NO: 26392 - DNA, 26 bp, Homo sapiens
tccagtttattccgtgattatattct

SEQ ID NO: 26393 - DNA, 26 bp, Homo sapiens
ccagtttattccgtgattatattctg

SEQ ID NO: 26394 - DNA, 26 bp, Homo sapiens
cagtttattccgtgattatattctgt

SEQ ID NO: 26395 - DNA, 26 bp, Homo sapiens
agtttattccgtgattatattctgtt

SEQ ID NO: 26396 - DNA, 26 bp, Homo sapiens
gtttattccgtgattatattctgttt

SEQ ID NO: 26397 - DNA, 26 bp, Homo sapiens
tttattccgtgattatattctgtttt

SEQ ID NO: 26398 - DNA, 26 bp, Homo sapiens
ttattccgtgattatattctgttttt

SEQ ID NO: 26399 - DNA, 26 bp, Homo sapiens
tattccgtgattatattctgttttta

SEQ ID NO: 26400 - DNA, 26 bp, Homo sapiens
attccgtgattatattctgtttttag

SEQ ID NO: 26401 - DNA, 26 bp, Homo sapiens
ttccgtgattatattctgtttttagg

SEQ ID NO: 26402 - DNA, 26 bp, Homo sapiens
tccgtgattatattctgtttttaggt

SEQ ID NO: 26403 - DNA, 26 bp, Homo sapiens
ccgtgattatattctgtttttaggtc

SEQ ID NO: 26404 - DNA, 26 bp, Homo sapiens
cgtgattatattctgtttttaggtct

SEQ ID NO: 26405 - DNA, 26 bp, Homo sapiens
gtgattatattctgtttttaggtctt

SEQ ID NO: 26406 - DNA, 26 bp, Homo sapiens
tgattatattctgtttttaggtcttg

SEQ ID NO: 26407 - DNA, 26 bp, Homo sapiens
gattatattctgtttttaggtcttga

SEQ ID NO: 26408 - DNA, 26 bp, Homo sapiens
attatattctgtttttaggtcttgac

SEQ ID NO: 26409 - DNA, 26 bp, Homo sapiens
ttatattctgtttttaggtcttgacc

SEQ ID NO: 26410 - DNA, 26 bp, Homo sapiens
tatattctgtttttaggtcttgacct

SEQ ID NO: 26411 - DNA, 26 bp, Homo sapiens
atattctgtttttaggtcttgaccta

SEQ ID NO: 26412 - DNA, 26 bp, Homo sapiens
tattctgtttttaggtcttgacctat

SEQ ID NO: 26413 - DNA, 26 bp, Homo sapiens
attctgtttttaggtcttgacctatt

SEQ ID NO: 26414 - DNA, 26 bp, Homo sapiens
ttctgtttttaggtcttgacctattt

SEQ ID NO: 26415 - DNA, 26 bp, Homo sapiens
tctgtttttaggtcttgacctatttt

SEQ ID NO: 26416 - DNA, 26 bp, Homo sapiens
ctgtttttaggtcttgacctattttt

SEQ ID NO: 26417 - DNA, 26 bp, Homo sapiens
tgtttttaggtcttgacctattttta

SEQ ID NO: 26418 - DNA, 26 bp, Homo sapiens
gtttttaggtcttgacctatttttaa

SEQ ID NO: 26419 - DNA, 26 bp, Homo sapiens
tttttaggtcttgacctatttttaag

SEQ ID NO: 26420 - DNA, 26 bp, Homo sapiens
ttttaggtcttgacctatttttaagc

SEQ ID NO: 26421 - DNA, 26 bp, Homo sapiens
tttaggtcttgacctatttttaagct

SEQ ID NO: 26422 - DNA, 26 bp, Homo sapiens
ttaggtcttgacctatttttaagctg

SEQ ID NO: 26423 - DNA, 26 bp, Homo sapiens
taggtcttgacctatttttaagctgt

SEQ ID NO: 26424 - DNA, 26 bp, Homo sapiens
aggtcttgacctatttttaagctgtt

SEQ ID NO: 26425 - DNA, 26 bp, Homo sapiens
ggtcttgacctatttttaagctgttt

SEQ ID NO: 26426 - DNA, 26 bp, Homo sapiens
gtcttgacctatttttaagctgtttc

SEQ ID NO: 26427 - DNA, 26 bp, Homo sapiens
tcttgacctatttttaagctgtttcc

SEQ ID NO: 26428 - DNA, 26 bp, Homo sapiens
cttgacctatttttaagctgtttcct

SEQ ID NO: 26429 - DNA, 26 bp, Homo sapiens
ttgacctatttttaagctgtttcctc

SEQ ID NO: 26430 - DNA, 26 bp, Homo sapiens
tgacctatttttaagctgtttcctct

SEQ ID NO: 26431 - DNA, 26 bp, Homo sapiens
gacctatttttaagctgtttcctctc

SEQ ID NO: 26432 - DNA, 26 bp, Homo sapiens
acctatttttaagctgtttcctctct

SEQ ID NO: 26433 - DNA, 26 bp, Homo sapiens
cctatttttaagctgtttcctctctg

SEQ ID NO: 26434 - DNA, 26 bp, Homo sapiens
ctatttttaagctgtttcctctctgt

SEQ ID NO: 26435 - DNA, 26 bp, Homo sapiens
tatttttaagctgtttcctctctgta

SEQ ID NO: 26436 - DNA, 26 bp, Homo sapiens
atttttaagctgtttcctctctgtat

SEQ ID NO: 26437 - DNA, 26 bp, Homo sapiens
tttttaagctgtttcctctctgtatg

SEQ ID NO: 26438 - DNA, 26 bp, Homo sapiens
ttttaagctgtttcctctctgtatgc

SEQ ID NO: 26439 - DNA, 26 bp, Homo sapiens
tttaagctgtttcctctctgtatgct

SEQ ID NO: 26440 - DNA, 26 bp, Homo sapiens
ttaagctgtttcctctctgtatgctt

SEQ ID NO: 26441 - DNA, 26 bp, Homo sapiens
taagctgtttcctctctgtatgcttt

SEQ ID NO: 26442 - DNA, 26 bp, Homo sapiens
aagctgtttcctctctgtatgctttt

SEQ ID NO: 26443 - DNA, 26 bp, Homo sapiens
agctgtttcctctctgtatgcttttc

SEQ ID NO: 26444 - DNA, 26 bp, Homo sapiens
gctgtttcctctctgtatgcttttca

SEQ ID NO: 26445 - DNA, 26 bp, Homo sapiens
ctgtttcctctctgtatgcttttcag

SEQ ID NO: 26446 - DNA, 26 bp, Homo sapiens
tgtttcctctctgtatgcttttcaga

SEQ ID NO: 26447 - DNA, 26 bp, Homo sapiens
gtttcctctctgtatgcttttcagaa

SEQ ID NO: 26448 - DNA, 26 bp, Homo sapiens
tttcctctctgtatgcttttcagaaa

SEQ ID NO: 26449 - DNA, 26 bp, Homo sapiens
ttcctctctgtatgcttttcagaaaa

SEQ ID NO: 26450 - DNA, 26 bp, Homo sapiens
tcctctctgtatgcttttcagaaaaa

SEQ ID NO: 26451 - DNA, 26 bp, Homo sapiens
cctctctgtatgcttttcagaaaaaa

SEQ ID NO: 26452 - DNA, 26 bp, Homo sapiens
ctctctgtatgcttttcagaaaaaaa

SEQ ID NO: 26453 - DNA, 26 bp, Homo sapiens
tctctgtatgcttttcagaaaaaaaa

SEQ ID NO: 26454 - DNA, 26 bp, Homo sapiens
ctctgtatgcttttcagaaaaaaaat

SEQ ID NO: 26455 - DNA, 26 bp, Homo sapiens
tctgtatgcttttcagaaaaaaaatc

SEQ ID NO: 26456 - DNA, 26 bp, Homo sapiens
ctgtatgcttttcagaaaaaaaatcc

SEQ ID NO: 26457 - DNA, 26 bp, Homo sapiens
tgtatgcttttcagaaaaaaaatcct

SEQ ID NO: 26458 - DNA, 26 bp, Homo sapiens
gtatgcttttcagaaaaaaaatcctt

SEQ ID NO: 26459 - DNA, 26 bp, Homo sapiens
tatgcttttcagaaaaaaaatcctta

SEQ ID NO: 26460 - DNA, 26 bp, Homo sapiens
atgcttttcagaaaaaaaatccttat

SEQ ID NO: 26461 - DNA, 26 bp, Homo sapiens
tgcttttcagaaaaaaaatccttatt

SEQ ID NO: 26462 - DNA, 26 bp, Homo sapiens
gcttttcagaaaaaaaatccttattc

SEQ ID NO: 26463 - DNA, 26 bp, Homo sapiens
cttttcagaaaaaaaatccttattct

SEQ ID NO: 26464 - DNA, 26 bp, Homo sapiens
ttttcagaaaaaaaatccttattctg

SEQ ID NO: 26465 - DNA, 26 bp, Homo sapiens
tttcagaaaaaaaatccttattctga

SEQ ID NO: 26466 - DNA, 26 bp, Homo sapiens
ttcagaaaaaaaatccttattctgaa

SEQ ID NO: 26467 - DNA, 26 bp, Homo sapiens
tcagaaaaaaaatccttattctgaaa

SEQ ID NO: 26468 - DNA, 26 bp, Homo sapiens
cagaaaaaaaatccttattctgaaat

SEQ ID NO: 26469 - DNA, 26 bp, Homo sapiens
agaaaaaaaatccttattctgaaata

SEQ ID NO: 26470 - DNA, 26 bp, Homo sapiens
gaaaaaaaatccttattctgaaatac

SEQ ID NO: 26471 - DNA, 26 bp, Homo sapiens
aaaaaaaatccttattctgaaatact

SEQ ID NO: 26472 - DNA, 26 bp, Homo sapiens
aaaaaaatccttattctgaaatacta

SEQ ID NO: 26473 - DNA, 26 bp, Homo sapiens
aaaaaatccttattctgaaatactaa

SEQ ID NO: 26474 - DNA, 26 bp, Homo sapiens
aaaaatccttattctgaaatactaat

SEQ ID NO: 26475 - DNA, 26 bp, Homo sapiens
aaaatccttattctgaaatactaata

SEQ ID NO: 26476 - DNA, 26 bp, Homo sapiens
aaatccttattctgaaatactaatat

SEQ ID NO: 26477 - DNA, 26 bp, Homo sapiens
aatccttattctgaaatactaatatt

SEQ ID NO: 26478 - DNA, 26 bp, Homo sapiens
atccttattctgaaatactaatattt

SEQ ID NO: 26479 - DNA, 26 bp, Homo sapiens
tccttattctgaaatactaatatttt

SEQ ID NO: 26480 - DNA, 26 bp, Homo sapiens
ccttattctgaaatactaatattttg

SEQ ID NO: 26481 - DNA, 26 bp, Homo sapiens
cttattctgaaatactaatattttga

SEQ ID NO: 26482 - DNA, 26 bp, Homo sapiens
ttattctgaaatactaatattttgat

SEQ ID NO: 26483 - DNA, 26 bp, Homo sapiens
tattctgaaatactaatattttgatt

SEQ ID NO: 26484 - DNA, 26 bp, Homo sapiens
attctgaaatactaatattttgattc

SEQ ID NO: 26485 - DNA, 26 bp, Homo sapiens
ttctgaaatactaatattttgattct

SEQ ID NO: 26486 - DNA, 26 bp, Homo sapiens
tctgaaatactaatattttgattcta

SEQ ID NO: 26487 - DNA, 26 bp, Homo sapiens
ctgaaatactaatattttgattctac

SEQ ID NO: 26488 - DNA, 26 bp, Homo sapiens
tgaaatactaatattttgattctaca

SEQ ID NO: 26489 - DNA, 26 bp, Homo sapiens
gaaatactaatattttgattctacat

SEQ ID NO: 26490 - DNA, 26 bp, Homo sapiens
aaatactaatattttgattctacatg

SEQ ID NO: 26491 - DNA, 26 bp, Homo sapiens
aatactaatattttgattctacatga

SEQ ID NO: 26492 - DNA, 26 bp, Homo sapiens
atactaatattttgattctacatgaa

SEQ ID NO: 26493 - DNA, 26 bp, Homo sapiens
tactaatattttgattctacatgaac

SEQ ID NO: 26494 - DNA, 26 bp, Homo sapiens
actaatattttgattctacatgaact

SEQ ID NO: 26495 - DNA, 26 bp, Homo sapiens
ctaatattttgattctacatgaactg

SEQ ID NO: 26496 - DNA, 26 bp, Homo sapiens
taatattttgattctacatgaactgt

SEQ ID NO: 26497 - DNA, 26 bp, Homo sapiens
aatattttgattctacatgaactgtg

SEQ ID NO: 26498 - DNA, 26 bp, Homo sapiens
atattttgattctacatgaactgtgt

SEQ ID NO: 26499 - DNA, 26 bp, Homo sapiens
tattttgattctacatgaactgtgtc

SEQ ID NO: 26500 - DNA, 26 bp, Homo sapiens
attttgattctacatgaactgtgtcc

SEQ ID NO: 26501 - DNA, 26 bp, Homo sapiens
ttttgattctacatgaactgtgtccc

SEQ ID NO: 26502 - DNA, 26 bp, Homo sapiens
tttgattctacatgaactgtgtccct

SEQ ID NO: 26503 - DNA, 26 bp, Homo sapiens
ttgattctacatgaactgtgtccctc

SEQ ID NO: 26504 - DNA, 26 bp, Homo sapiens
tgattctacatgaactgtgtccctca

SEQ ID NO: 26505 - DNA, 26 bp, Homo sapiens
gattctacatgaactgtgtccctcaa

SEQ ID NO: 26506 - DNA, 26 bp, Homo sapiens
attctacatgaactgtgtccctcaaa

SEQ ID NO: 26507 - DNA, 26 bp, Homo sapiens
ttctacatgaactgtgtccctcaaat

SEQ ID NO: 26508 - DNA, 26 bp, Homo sapiens
tctacatgaactgtgtccctcaaatg

SEQ ID NO: 26509 - DNA, 26 bp, Homo sapiens
ctacatgaactgtgtccctcaaatgt

SEQ ID NO: 26510 - DNA, 26 bp, Homo sapiens
tacatgaactgtgtccctcaaatgtc

SEQ ID NO: 26511 - DNA, 26 bp, Homo sapiens
acatgaactgtgtccctcaaatgtct

SEQ ID NO: 26512 - DNA, 26 bp, Homo sapiens
catgaactgtgtccctcaaatgtctt

SEQ ID NO: 26513 - DNA, 26 bp, Homo sapiens
atgaactgtgtccctcaaatgtcttg

SEQ ID NO: 26514 - DNA, 26 bp, Homo sapiens
tgaactgtgtccctcaaatgtcttga

SEQ ID NO: 26515 - DNA, 26 bp, Homo sapiens
gaactgtgtccctcaaatgtcttgat

SEQ ID NO: 26516 - DNA, 26 bp, Homo sapiens
aactgtgtccctcaaatgtcttgata

SEQ ID NO: 26517 - DNA, 26 bp, Homo sapiens
actgtgtccctcaaatgtcttgatat

SEQ ID NO: 26518 - DNA, 26 bp, Homo sapiens
ctgtgtccctcaaatgtcttgatatc

SEQ ID NO: 26519 - DNA, 26 bp, Homo sapiens
tgtgtccctcaaatgtcttgatatca

SEQ ID NO: 26520 - DNA, 26 bp, Homo sapiens
gtgtccctcaaatgtcttgatatcag

SEQ ID NO: 26521 - DNA, 26 bp, Homo sapiens
tgtccctcaaatgtcttgatatcagc

SEQ ID NO: 26522 - DNA, 26 bp, Homo sapiens
gtccctcaaatgtcttgatatcagct

SEQ ID NO: 26523 - DNA, 26 bp, Homo sapiens
tccctcaaatgtcttgatatcagcta

SEQ ID NO: 26524 - DNA, 26 bp, Homo sapiens
ccctcaaatgtcttgatatcagctat

SEQ ID NO: 26525 - DNA, 26 bp, Homo sapiens
cctcaaatgtcttgatatcagctatc

SEQ ID NO: 26526 - DNA, 26 bp, Homo sapiens
ctcaaatgtcttgatatcagctatct

SEQ ID NO: 26527 - DNA, 26 bp, Homo sapiens
tcaaatgtcttgatatcagctatctt

SEQ ID NO: 26528 - DNA, 26 bp, Homo sapiens
caaatgtcttgatatcagctatcttt

SEQ ID NO: 26529 - DNA, 26 bp, Homo sapiens
aaatgtcttgatatcagctatcttta

SEQ ID NO: 26530 - DNA, 26 bp, Homo sapiens
aatgtcttgatatcagctatctttag

SEQ ID NO: 26531 - DNA, 26 bp, Homo sapiens
atgtcttgatatcagctatctttagg

SEQ ID NO: 26532 - DNA, 26 bp, Homo sapiens
tgtcttgatatcagctatctttagga

SEQ ID NO: 26533 - DNA, 26 bp, Homo sapiens
gtcttgatatcagctatctttaggag

SEQ ID NO: 26534 - DNA, 26 bp, Homo sapiens
tcttgatatcagctatctttaggagc

SEQ ID NO: 26535 - DNA, 26 bp, Homo sapiens
cttgatatcagctatctttaggagct

SEQ ID NO: 26536 - DNA, 26 bp, Homo sapiens
ttgatatcagctatctttaggagctg

SEQ ID NO: 26537 - DNA, 26 bp, Homo sapiens
tgatatcagctatctttaggagctgt

SEQ ID NO: 26538 - DNA, 26 bp, Homo sapiens
gatatcagctatctttaggagctgtt

SEQ ID NO: 26539 - DNA, 26 bp, Homo sapiens
atatcagctatctttaggagctgttg

SEQ ID NO: 26540 - DNA, 26 bp, Homo sapiens
tatcagctatctttaggagctgttgt

SEQ ID NO: 26541 - DNA, 26 bp, Homo sapiens
atcagctatctttaggagctgttgta

SEQ ID NO: 26542 - DNA, 26 bp, Homo sapiens
tcagctatctttaggagctgttgtaa

SEQ ID NO: 26543 - DNA, 26 bp, Homo sapiens
cagctatctttaggagctgttgtaaa

SEQ ID NO: 26544 - DNA, 26 bp, Homo sapiens
agctatctttaggagctgttgtaaaa

SEQ ID NO: 26545 - DNA, 26 bp, Homo sapiens
gctatctttaggagctgttgtaaaac

SEQ ID NO: 26546 - DNA, 26 bp, Homo sapiens
ctatctttaggagctgttgtaaaaca

SEQ ID NO: 26547 - DNA, 26 bp, Homo sapiens
tatctttaggagctgttgtaaaacac

SEQ ID NO: 26548 - DNA, 26 bp, Homo sapiens
atctttaggagctgttgtaaaacaca

SEQ ID NO: 26549 - DNA, 26 bp, Homo sapiens
tctttaggagctgttgtaaaacacag

SEQ ID NO: 26550 - DNA, 26 bp, Homo sapiens
ctttaggagctgttgtaaaacacagg

SEQ ID NO: 26551 - DNA, 26 bp, Homo sapiens
tttaggagctgttgtaaaacacagga

SEQ ID NO: 26552 - DNA, 26 bp, Homo sapiens
ttaggagctgttgtaaaacacaggaa

SEQ ID NO: 26553 - DNA, 26 bp, Homo sapiens
taggagctgttgtaaaacacaggaag

SEQ ID NO: 26554 - DNA, 26 bp, Homo sapiens
aggagctgttgtaaaacacaggaagg

SEQ ID NO: 26555 - DNA, 26 bp, Homo sapiens
ggagctgttgtaaaacacaggaaggc

SEQ ID NO: 26556 - DNA, 26 bp, Homo sapiens
gagctgttgtaaaacacaggaaggcc

SEQ ID NO: 26557 - DNA, 26 bp, Homo sapiens
agctgttgtaaaacacaggaaggcca

SEQ ID NO: 26558 - DNA, 26 bp, Homo sapiens
gctgttgtaaaacacaggaaggccag

SEQ ID NO: 26559 - DNA, 26 bp, Homo sapiens
ctgttgtaaaacacaggaaggccagg

SEQ ID NO: 26560 - DNA, 26 bp, Homo sapiens
tgttgtaaaacacaggaaggccaggc

SEQ ID NO: 26561 - DNA, 26 bp, Homo sapiens
gttgtaaaacacaggaaggccaggct

SEQ ID NO: 26562 - DNA, 26 bp, Homo sapiens
ttgtaaaacacaggaaggccaggctg

SEQ ID NO: 26563 - DNA, 26 bp, Homo sapiens
tgtaaaacacaggaaggccaggctgt

SEQ ID NO: 26564 - DNA, 26 bp, Homo sapiens
gtaaaacacaggaaggccaggctgtt

SEQ ID NO: 26565 - DNA, 26 bp, Homo sapiens
taaaacacaggaaggccaggctgttg

SEQ ID NO: 26566 - DNA, 26 bp, Homo sapiens
aaaacacaggaaggccaggctgttgt

SEQ ID NO: 26567 - DNA, 26 bp, Homo sapiens
aaacacaggaaggccaggctgttgtg

SEQ ID NO: 26568 - DNA, 26 bp, Homo sapiens
aacacaggaaggccaggctgttgtgt

SEQ ID NO: 26569 - DNA, 26 bp, Homo sapiens
acacaggaaggccaggctgttgtgtg

SEQ ID NO: 26570 - DNA, 26 bp, Homo sapiens
cacaggaaggccaggctgttgtgtga

SEQ ID NO: 26571 - DNA, 26 bp, Homo sapiens
acaggaaggccaggctgttgtgtgaa

SEQ ID NO: 26572 - DNA, 26 bp, Homo sapiens
caggaaggccaggctgttgtgtgaag

SEQ ID NO: 26573 - DNA, 26 bp, Homo sapiens
aggaaggccaggctgttgtgtgaagt

SEQ ID NO: 26574 - DNA, 26 bp, Homo sapiens
ggaaggccaggctgttgtgtgaagtg

SEQ ID NO: 26575 - DNA, 26 bp, Homo sapiens
gaaggccaggctgttgtgtgaagtgt

SEQ ID NO: 26576 - DNA, 26 bp, Homo sapiens
aaggccaggctgttgtgtgaagtgtt

SEQ ID NO: 26577 - DNA, 26 bp, Homo sapiens
aggccaggctgttgtgtgaagtgttt

SEQ ID NO: 26578 - DNA, 26 bp, Homo sapiens
ggccaggctgttgtgtgaagtgtttg

SEQ ID NO: 26579 - DNA, 26 bp, Homo sapiens
gccaggctgttgtgtgaagtgtttgc

SEQ ID NO: 26580 - DNA, 26 bp, Homo sapiens
ccaggctgttgtgtgaagtgtttgct

SEQ ID NO: 26581 - DNA, 26 bp, Homo sapiens
caggctgttgtgtgaagtgtttgctg

SEQ ID NO: 26582 - DNA, 26 bp, Homo sapiens
aggctgttgtgtgaagtgtttgctgt

SEQ ID NO: 26583 - DNA, 26 bp, Homo sapiens
ggctgttgtgtgaagtgtttgctgtt

SEQ ID NO: 26584 - DNA, 26 bp, Homo sapiens
gctgttgtgtgaagtgtttgctgttg

SEQ ID NO: 26585 - DNA, 26 bp, Homo sapiens
ctgttgtgtgaagtgtttgctgttgt

SEQ ID NO: 26586 - DNA, 26 bp, Homo sapiens
tgttgtgtgaagtgtttgctgttgtt

SEQ ID NO: 26587 - DNA, 26 bp, Homo sapiens
gttgtgtgaagtgtttgctgttgtta

SEQ ID NO: 26588 - DNA, 26 bp, Homo sapiens
ttgtgtgaagtgtttgctgttgttat

SEQ ID NO: 26589 - DNA, 26 bp, Homo sapiens
tgtgtgaagtgtttgctgttgttatc

SEQ ID NO: 26590 - DNA, 26 bp, Homo sapiens
gtgtgaagtgtttgctgttgttatcc

SEQ ID NO: 26591 - DNA, 26 bp, Homo sapiens
tgtgaagtgtttgctgttgttatccc

SEQ ID NO: 26592 - DNA, 26 bp, Homo sapiens
gtgaagtgtttgctgttgttatccca

SEQ ID NO: 26593 - DNA, 26 bp, Homo sapiens
tgaagtgtttgctgttgttatcccac

SEQ ID NO: 26594 - DNA, 26 bp, Homo sapiens
gaagtgtttgctgttgttatcccaca

SEQ ID NO: 26595 - DNA, 26 bp, Homo sapiens
aagtgtttgctgttgttatcccacag

SEQ ID NO: 26596 - DNA, 26 bp, Homo sapiens
agtgtttgctgttgttatcccacagt

SEQ ID NO: 26597 - DNA, 26 bp, Homo sapiens
gtgtttgctgttgttatcccacagtg

SEQ ID NO: 26598 - DNA, 26 bp, Homo sapiens
tgtttgctgttgttatcccacagtgc

SEQ ID NO: 26599 - DNA, 26 bp, Homo sapiens
gtttgctgttgttatcccacagtgcc

SEQ ID NO: 26600 - DNA, 26 bp, Homo sapiens
tttgctgttgttatcccacagtgcct

SEQ ID NO: 26601 - DNA, 26 bp, Homo sapiens
ttgctgttgttatcccacagtgccta

SEQ ID NO: 26602 - DNA, 26 bp, Homo sapiens
tgctgttgttatcccacagtgcctag

SEQ ID NO: 26603 - DNA, 26 bp, Homo sapiens
gctgttgttatcccacagtgcctagg

SEQ ID NO: 26604 - DNA, 26 bp, Homo sapiens
ctgttgttatcccacagtgcctagga

SEQ ID NO: 26605 - DNA, 26 bp, Homo sapiens
tgttgttatcccacagtgcctaggac

SEQ ID NO: 26606 - DNA, 26 bp, Homo sapiens
gttgttatcccacagtgcctaggaca

SEQ ID NO: 26607 - DNA, 26 bp, Homo sapiens
ttgttatcccacagtgcctaggacag

SEQ ID NO: 26608 - DNA, 26 bp, Homo sapiens
tgttatcccacagtgcctaggacagt

SEQ ID NO: 26609 - DNA, 26 bp, Homo sapiens
gttatcccacagtgcctaggacagtg

SEQ ID NO: 26610 - DNA, 26 bp, Homo sapiens
ttatcccacagtgcctaggacagtgt

SEQ ID NO: 26611 - DNA, 26 bp, Homo sapiens
tatcccacagtgcctaggacagtgtc

SEQ ID NO: 26612 - DNA, 26 bp, Homo sapiens
atcccacagtgcctaggacagtgtct

SEQ ID NO: 26613 - DNA, 26 bp, Homo sapiens
tcccacagtgcctaggacagtgtctc

SEQ ID NO: 26614 - DNA, 26 bp, Homo sapiens
cccacagtgcctaggacagtgtctca

SEQ ID NO: 26615 - DNA, 26 bp, Homo sapiens
ccacagtgcctaggacagtgtctcac

SEQ ID NO: 26616 - DNA, 26 bp, Homo sapiens
cacagtgcctaggacagtgtctcaca

SEQ ID NO: 26617 - DNA, 26 bp, Homo sapiens
acagtgcctaggacagtgtctcacat

SEQ ID NO: 26618 - DNA, 26 bp, Homo sapiens
cagtgcctaggacagtgtctcacata

SEQ ID NO: 26619 - DNA, 26 bp, Homo sapiens
agtgcctaggacagtgtctcacataa

SEQ ID NO: 26620 - DNA, 26 bp, Homo sapiens
gtgcctaggacagtgtctcacataac

SEQ ID NO: 26621 - DNA, 26 bp, Homo sapiens
tgcctaggacagtgtctcacataaca

SEQ ID NO: 26622 - DNA, 26 bp, Homo sapiens
gcctaggacagtgtctcacataacag

SEQ ID NO: 26623 - DNA, 26 bp, Homo sapiens
cctaggacagtgtctcacataacagg

SEQ ID NO: 26624 - DNA, 26 bp, Homo sapiens
ctaggacagtgtctcacataacaggt

SEQ ID NO: 26625 - DNA, 26 bp, Homo sapiens
taggacagtgtctcacataacaggtg

SEQ ID NO: 26626 - DNA, 26 bp, Homo sapiens
aggacagtgtctcacataacaggtgc

SEQ ID NO: 26627 - DNA, 26 bp, Homo sapiens
ggacagtgtctcacataacaggtgcc

SEQ ID NO: 26628 - DNA, 26 bp, Homo sapiens
gacagtgtctcacataacaggtgccc

SEQ ID NO: 26629 - DNA, 26 bp, Homo sapiens
acagtgtctcacataacaggtgccca

SEQ ID NO: 26630 - DNA, 26 bp, Homo sapiens
cagtgtctcacataacaggtgcccaa

SEQ ID NO: 26631 - DNA, 26 bp, Homo sapiens
agtgtctcacataacaggtgcccaat

SEQ ID NO: 26632 - DNA, 26 bp, Homo sapiens
gtgtctcacataacaggtgcccaata

SEQ ID NO: 26633 - DNA, 26 bp, Homo sapiens
tgtctcacataacaggtgcccaataa

SEQ ID NO: 26634 - DNA, 26 bp, Homo sapiens
gtctcacataacaggtgcccaataat

SEQ ID NO: 26635 - DNA, 26 bp, Homo sapiens
tctcacataacaggtgcccaataata

SEQ ID NO: 26636 - DNA, 26 bp, Homo sapiens
ctcacataacaggtgcccaataatat

SEQ ID NO: 26637 - DNA, 26 bp, Homo sapiens
tcacataacaggtgcccaataatatt

SEQ ID NO: 26638 - DNA, 26 bp, Homo sapiens
cacataacaggtgcccaataatattt

SEQ ID NO: 26639 - DNA, 26 bp, Homo sapiens
acataacaggtgcccaataatatttg

SEQ ID NO: 26640 - DNA, 26 bp, Homo sapiens
cataacaggtgcccaataatatttgt

SEQ ID NO: 26641 - DNA, 26 bp, Homo sapiens
ataacaggtgcccaataatatttgtt

SEQ ID NO: 26642 - DNA, 26 bp, Homo sapiens
taacaggtgcccaataatatttgtta

SEQ ID NO: 26643 - DNA, 26 bp, Homo sapiens
aacaggtgcccaataatatttgttaa

SEQ ID NO: 26644 - DNA, 26 bp, Homo sapiens
acaggtgcccaataatatttgttaaa

SEQ ID NO: 26645 - DNA, 26 bp, Homo sapiens
caggtgcccaataatatttgttaaat

SEQ ID NO: 26646 - DNA, 26 bp, Homo sapiens
aggtgcccaataatatttgttaaatg

SEQ ID NO: 26647 - DNA, 26 bp, Homo sapiens
ggtgcccaataatatttgttaaatga

SEQ ID NO: 26648 - DNA, 26 bp, Homo sapiens
gtgcccaataatatttgttaaatgaa

SEQ ID NO: 26649 - DNA, 26 bp, Homo sapiens
tgcccaataatatttgttaaatgaat

SEQ ID NO: 26650 - DNA, 26 bp, Homo sapiens
gcccaataatatttgttaaatgaatt

SEQ ID NO: 26651 - DNA, 26 bp, Homo sapiens
cccaataatatttgttaaatgaattt

SEQ ID NO: 26652 - DNA, 26 bp, Homo sapiens
ccaataatatttgttaaatgaatttg

SEQ ID NO: 26653 - DNA, 26 bp, Homo sapiens
caataatatttgttaaatgaatttgc

SEQ ID NO: 26654 - DNA, 26 bp, Homo sapiens
aataatatttgttaaatgaatttgct

SEQ ID NO: 26655 - DNA, 26 bp, Homo sapiens
ataatatttgttaaatgaatttgcta

SEQ ID NO: 26656 - DNA, 26 bp, Homo sapiens
taatatttgttaaatgaatttgctaa

SEQ ID NO: 26657 - DNA, 26 bp, Homo sapiens
aatatttgttaaatgaatttgctaaa

SEQ ID NO: 26658 - DNA, 26 bp, Homo sapiens
atatttgttaaatgaatttgctaaat

SEQ ID NO: 26659 - DNA, 26 bp, Homo sapiens
tatttgttaaatgaatttgctaaata

SEQ ID NO: 26660 - DNA, 26 bp, Homo sapiens
atttgttaaatgaatttgctaaataa

SEQ ID NO: 26661 - DNA, 26 bp, Homo sapiens
tttgttaaatgaatttgctaaataaa

SEQ ID NO: 26662 - DNA, 26 bp, Homo sapiens
ttgttaaatgaatttgctaaataaat

SEQ ID NO: 26663 - DNA, 26 bp, Homo sapiens
tgttaaatgaatttgctaaataaata

SEQ ID NO: 26664 - DNA, 26 bp, Homo sapiens
gttaaatgaatttgctaaataaatat

SEQ ID NO: 26665 - DNA, 26 bp, Homo sapiens
ttaaatgaatttgctaaataaatatc

SEQ ID NO: 26666 - DNA, 26 bp, Homo sapiens
taaatgaatttgctaaataaatatca

SEQ ID NO: 26667 - DNA, 26 bp, Homo sapiens
aaatgaatttgctaaataaatatcat

SEQ ID NO: 26668 - DNA, 26 bp, Homo sapiens
aatgaatttgctaaataaatatcatt

SEQ ID NO: 26669 - DNA, 26 bp, Homo sapiens
atgaatttgctaaataaatatcattt

SEQ ID NO: 26670 - DNA, 26 bp, Homo sapiens
tgaatttgctaaataaatatcatttc

SEQ ID NO: 26671 - DNA, 26 bp, Homo sapiens
gaatttgctaaataaatatcatttcc

SEQ ID NO: 26672 - DNA, 26 bp, Homo sapiens
aatttgctaaataaatatcatttcct

SEQ ID NO: 26673 - DNA, 26 bp, Homo sapiens
atttgctaaataaatatcatttcctg

SEQ ID NO: 26674 - DNA, 26 bp, Homo sapiens
tttgctaaataaatatcatttcctgt

SEQ ID NO: 26675 - DNA, 26 bp, Homo sapiens
ttgctaaataaatatcatttcctgtt

SEQ ID NO: 26676 - DNA, 26 bp, Homo sapiens
tgctaaataaatatcatttcctgttg

SEQ ID NO: 26677 - DNA, 26 bp, Homo sapiens
gctaaataaatatcatttcctgttgt

SEQ ID NO: 26678 - DNA, 26 bp, Homo sapiens
ctaaataaatatcatttcctgttgtg

SEQ ID NO: 26679 - DNA, 26 bp, Homo sapiens
taaataaatatcatttcctgttgtgc

SEQ ID NO: 26680 - DNA, 26 bp, Homo sapiens
aaataaatatcatttcctgttgtgcc

SEQ ID NO: 26681 - DNA, 26 bp, Homo sapiens
aataaatatcatttcctgttgtgccc

SEQ ID NO: 26682 - DNA, 26 bp, Homo sapiens
ataaatatcatttcctgttgtgccct

SEQ ID NO: 26683 - DNA, 26 bp, Homo sapiens
taaatatcatttcctgttgtgccctg

SEQ ID NO: 26684 - DNA, 26 bp, Homo sapiens
aaatatcatttcctgttgtgccctgt

SEQ ID NO: 26685 - DNA, 26 bp, Homo sapiens
aatatcatttcctgttgtgccctgtg

SEQ ID NO: 26686 - DNA, 26 bp, Homo sapiens
atatcatttcctgttgtgccctgtgc

SEQ ID NO: 26687 - DNA, 26 bp, Homo sapiens
tatcatttcctgttgtgccctgtgcc

SEQ ID NO: 26688 - DNA, 26 bp, Homo sapiens
atcatttcctgttgtgccctgtgcca

SEQ ID NO: 26689 - DNA, 26 bp, Homo sapiens
tcatttcctgttgtgccctgtgccac

SEQ ID NO: 26690 - DNA, 26 bp, Homo sapiens
catttcctgttgtgccctgtgccacc

SEQ ID NO: 26691 - DNA, 26 bp, Homo sapiens
atttcctgttgtgccctgtgccacca

SEQ ID NO: 26692 - DNA, 26 bp, Homo sapiens
tttcctgttgtgccctgtgccaccag

SEQ ID NO: 26693 - DNA, 26 bp, Homo sapiens
ttcctgttgtgccctgtgccaccagt

SEQ ID NO: 26694 - DNA, 26 bp, Homo sapiens
tcctgttgtgccctgtgccaccagtg

SEQ ID NO: 26695 - DNA, 26 bp, Homo sapiens
cctgttgtgccctgtgccaccagtgc

SEQ ID NO: 26696 - DNA, 26 bp, Homo sapiens
ctgttgtgccctgtgccaccagtgcc

SEQ ID NO: 26697 - DNA, 26 bp, Homo sapiens
tgttgtgccctgtgccaccagtgcct

SEQ ID NO: 26698 - DNA, 26 bp, Homo sapiens
gttgtgccctgtgccaccagtgcctt

SEQ ID NO: 26699 - DNA, 26 bp, Homo sapiens
ttgtgccctgtgccaccagtgccttg

SEQ ID NO: 26700 - DNA, 26 bp, Homo sapiens
tgtgccctgtgccaccagtgccttgt

SEQ ID NO: 26701 - DNA, 26 bp, Homo sapiens
gtgccctgtgccaccagtgccttgta

SEQ ID NO: 26702 - DNA, 26 bp, Homo sapiens
tgccctgtgccaccagtgccttgtaa

SEQ ID NO: 26703 - DNA, 26 bp, Homo sapiens
gccctgtgccaccagtgccttgtaac

SEQ ID NO: 26704 - DNA, 26 bp, Homo sapiens
ccctgtgccaccagtgccttgtaaca

SEQ ID NO: 26705 - DNA, 26 bp, Homo sapiens
cctgtgccaccagtgccttgtaacat

SEQ ID NO: 26706 - DNA, 26 bp, Homo sapiens
ctgtgccaccagtgccttgtaacatg

SEQ ID NO: 26707 - DNA, 26 bp, Homo sapiens
tgtgccaccagtgccttgtaacatgc

SEQ ID NO: 26708 - DNA, 26 bp, Homo sapiens
gtgccaccagtgccttgtaacatgct

SEQ ID NO: 26709 - DNA, 26 bp, Homo sapiens
tgccaccagtgccttgtaacatgctg

SEQ ID NO: 26710 - DNA, 26 bp, Homo sapiens
gccaccagtgccttgtaacatgctgt

SEQ ID NO: 26711 - DNA, 26 bp, Homo sapiens
ccaccagtgccttgtaacatgctgtg

SEQ ID NO: 26712 - DNA, 26 bp, Homo sapiens
caccagtgccttgtaacatgctgtgt

SEQ ID NO: 26713 - DNA, 26 bp, Homo sapiens
accagtgccttgtaacatgctgtgta

SEQ ID NO: 26714 - DNA, 26 bp, Homo sapiens
ccagtgccttgtaacatgctgtgtat

SEQ ID NO: 26715 - DNA, 26 bp, Homo sapiens
cagtgccttgtaacatgctgtgtatt

SEQ ID NO: 26716 - DNA, 26 bp, Homo sapiens
agtgccttgtaacatgctgtgtattt

SEQ ID NO: 26717 - DNA, 26 bp, Homo sapiens
gtgccttgtaacatgctgtgtatttg

SEQ ID NO: 26718 - DNA, 26 bp, Homo sapiens
tgccttgtaacatgctgtgtatttgg

SEQ ID NO: 26719 - DNA, 26 bp, Homo sapiens
gccttgtaacatgctgtgtatttgga

SEQ ID NO: 26720 - DNA, 26 bp, Homo sapiens
ccttgtaacatgctgtgtatttggag

SEQ ID NO: 26721 - DNA, 26 bp, Homo sapiens
cttgtaacatgctgtgtatttggagg

SEQ ID NO: 26722 - DNA, 26 bp, Homo sapiens
ttgtaacatgctgtgtatttggagga

SEQ ID NO: 26723 - DNA, 26 bp, Homo sapiens
tgtaacatgctgtgtatttggaggat

SEQ ID NO: 26724 - DNA, 26 bp, Homo sapiens
gtaacatgctgtgtatttggaggatt

SEQ ID NO: 26725 - DNA, 26 bp, Homo sapiens
taacatgctgtgtatttggaggattt

SEQ ID NO: 26726 - DNA, 26 bp, Homo sapiens
aacatgctgtgtatttggaggatttg

SEQ ID NO: 26727 - DNA, 26 bp, Homo sapiens
acatgctgtgtatttggaggatttgc

SEQ ID NO: 26728 - DNA, 26 bp, Homo sapiens
catgctgtgtatttggaggatttgct

SEQ ID NO: 26729 - DNA, 26 bp, Homo sapiens
atgctgtgtatttggaggatttgctg

SEQ ID NO: 26730 - DNA, 26 bp, Homo sapiens
tgctgtgtatttggaggatttgctga

SEQ ID NO: 26731 - DNA, 26 bp, Homo sapiens
gctgtgtatttggaggatttgctgaa

SEQ ID NO: 26732 - DNA, 26 bp, Homo sapiens
ctgtgtatttggaggatttgctgaac

SEQ ID NO: 26733 - DNA, 26 bp, Homo sapiens
tgtgtatttggaggatttgctgaact

SEQ ID NO: 26734 - DNA, 26 bp, Homo sapiens
gtgtatttggaggatttgctgaacta

SEQ ID NO: 26735 - DNA, 26 bp, Homo sapiens
tgtatttggaggatttgctgaactac

SEQ ID NO: 26736 - DNA, 26 bp, Homo sapiens
gtatttggaggatttgctgaactaca

SEQ ID NO: 26737 - DNA, 26 bp, Homo sapiens
tatttggaggatttgctgaactacaa

SEQ ID NO: 26738 - DNA, 26 bp, Homo sapiens
atttggaggatttgctgaactacaaa

SEQ ID NO: 26739 - DNA, 26 bp, Homo sapiens
tttggaggatttgctgaactacaaaa

SEQ ID NO: 26740 - DNA, 26 bp, Homo sapiens
ttggaggatttgctgaactacaaaat

SEQ ID NO: 26741 - DNA, 26 bp, Homo sapiens
tggaggatttgctgaactacaaaata

SEQ ID NO: 26742 - DNA, 26 bp, Homo sapiens
ggaggatttgctgaactacaaaatag

SEQ ID NO: 26743 - DNA, 26 bp, Homo sapiens
gaggatttgctgaactacaaaatagg

SEQ ID NO: 26744 - DNA, 26 bp, Homo sapiens
aggatttgctgaactacaaaataggg

SEQ ID NO: 26745 - DNA, 26 bp, Homo sapiens
ggatttgctgaactacaaaatagggc

SEQ ID NO: 26746 - DNA, 26 bp, Homo sapiens
gatttgctgaactacaaaatagggcc

SEQ ID NO: 26747 - DNA, 26 bp, Homo sapiens
atttgctgaactacaaaatagggcca

SEQ ID NO: 26748 - DNA, 26 bp, Homo sapiens
tttgctgaactacaaaatagggccaa

SEQ ID NO: 26749 - DNA, 26 bp, Homo sapiens
ttgctgaactacaaaatagggccaaa

SEQ ID NO: 26750 - DNA, 26 bp, Homo sapiens
tgctgaactacaaaatagggccaaat

SEQ ID NO: 26751 - DNA, 26 bp, Homo sapiens
gctgaactacaaaatagggccaaata

SEQ ID NO: 26752 - DNA, 26 bp, Homo sapiens
ctgaactacaaaatagggccaaatat

SEQ ID NO: 26753 - DNA, 26 bp, Homo sapiens
tgaactacaaaatagggccaaatatg

SEQ ID NO: 26754 - DNA, 26 bp, Homo sapiens
gaactacaaaatagggccaaatatgt

SEQ ID NO: 26755 - DNA, 26 bp, Homo sapiens
aactacaaaatagggccaaatatgta

SEQ ID NO: 26756 - DNA, 26 bp, Homo sapiens
actacaaaatagggccaaatatgtaa

SEQ ID NO: 26757 - DNA, 26 bp, Homo sapiens
ctacaaaatagggccaaatatgtaac

SEQ ID NO: 26758 - DNA, 26 bp, Homo sapiens
tacaaaatagggccaaatatgtaaca

SEQ ID NO: 26759 - DNA, 26 bp, Homo sapiens
acaaaatagggccaaatatgtaacat

SEQ ID NO: 26760 - DNA, 26 bp, Homo sapiens
caaaatagggccaaatatgtaacatt

SEQ ID NO: 26761 - DNA, 26 bp, Homo sapiens
aaaatagggccaaatatgtaacattt

SEQ ID NO: 26762 - DNA, 26 bp, Homo sapiens
aaatagggccaaatatgtaacattta

SEQ ID NO: 26763 - DNA, 26 bp, Homo sapiens
aatagggccaaatatgtaacatttaa

SEQ ID NO: 26764 - DNA, 26 bp, Homo sapiens
atagggccaaatatgtaacatttaaa

SEQ ID NO: 26765 - DNA, 26 bp, Homo sapiens
tagggccaaatatgtaacatttaaat

SEQ ID NO: 26766 - DNA, 26 bp, Homo sapiens
agggccaaatatgtaacatttaaata

SEQ ID NO: 26767 - DNA, 26 bp, Homo sapiens
gggccaaatatgtaacatttaaatat

SEQ ID NO: 26768 - DNA, 26 bp, Homo sapiens
ggccaaatatgtaacatttaaatatt

SEQ ID NO: 26769 - DNA, 26 bp, Homo sapiens
gccaaatatgtaacatttaaatattg

SEQ ID NO: 26770 - DNA, 26 bp, Homo sapiens
ccaaatatgtaacatttaaatattga

SEQ ID NO: 26771 - DNA, 26 bp, Homo sapiens
caaatatgtaacatttaaatattgac

SEQ ID NO: 26772 - DNA, 26 bp, Homo sapiens
aaatatgtaacatttaaatattgaca

SEQ ID NO: 26773 - DNA, 26 bp, Homo sapiens
aatatgtaacatttaaatattgacat

SEQ ID NO: 26774 - DNA, 26 bp, Homo sapiens
atatgtaacatttaaatattgacata

SEQ ID NO: 26775 - DNA, 26 bp, Homo sapiens
tatgtaacatttaaatattgacatat

SEQ ID NO: 26776 - DNA, 26 bp, Homo sapiens
atgtaacatttaaatattgacatata

SEQ ID NO: 26777 - DNA, 26 bp, Homo sapiens
tgtaacatttaaatattgacatataa

SEQ ID NO: 26778 - DNA, 26 bp, Homo sapiens
gtaacatttaaatattgacatataaa

SEQ ID NO: 26779 - DNA, 26 bp, Homo sapiens
taacatttaaatattgacatataaat

SEQ ID NO: 26780 - DNA, 26 bp, Homo sapiens
aacatttaaatattgacatataaatt

SEQ ID NO: 26781 - DNA, 26 bp, Homo sapiens
acatttaaatattgacatataaattt

SEQ ID NO: 26782 - DNA, 26 bp, Homo sapiens
catttaaatattgacatataaatttt

SEQ ID NO: 26783 - DNA, 26 bp, Homo sapiens
atttaaatattgacatataaattttt

SEQ ID NO: 26784 - DNA, 26 bp, Homo sapiens
tttaaatattgacatataaattttta

SEQ ID NO: 26785 - DNA, 26 bp, Homo sapiens
ttaaatattgacatataaatttttaa

SEQ ID NO: 26786 - DNA, 26 bp, Homo sapiens
taaatattgacatataaatttttaaa

SEQ ID NO: 26787 - DNA, 26 bp, Homo sapiens
aaatattgacatataaatttttaaat

SEQ ID NO: 26788 - DNA, 26 bp, Homo sapiens
aatattgacatataaatttttaaatg

SEQ ID NO: 26789 - DNA, 26 bp, Homo sapiens
atattgacatataaatttttaaatgg

SEQ ID NO: 26790 - DNA, 26 bp, Homo sapiens
tattgacatataaatttttaaatgga

SEQ ID NO: 26791 - DNA, 26 bp, Homo sapiens
attgacatataaatttttaaatggac

SEQ ID NO: 26792 - DNA, 26 bp, Homo sapiens
ttgacatataaatttttaaatggaca

SEQ ID NO: 26793 - DNA, 26 bp, Homo sapiens
tgacatataaatttttaaatggacat

SEQ ID NO: 26794 - DNA, 26 bp, Homo sapiens
gacatataaatttttaaatggacatc

SEQ ID NO: 26795 - DNA, 26 bp, Homo sapiens
acatataaatttttaaatggacatct

SEQ ID NO: 26796 - DNA, 26 bp, Homo sapiens
catataaatttttaaatggacatctc

SEQ ID NO: 26797 - DNA, 26 bp, Homo sapiens
atataaatttttaaatggacatctca

SEQ ID NO: 26798 - DNA, 26 bp, Homo sapiens
tataaatttttaaatggacatctcaa

SEQ ID NO: 26799 - DNA, 26 bp, Homo sapiens
ataaatttttaaatggacatctcaat

SEQ ID NO: 26800 - DNA, 26 bp, Homo sapiens
taaatttttaaatggacatctcaatt

SEQ ID NO: 26801 - DNA, 26 bp, Homo sapiens
aaatttttaaatggacatctcaattt

SEQ ID NO: 26802 - DNA, 26 bp, Homo sapiens
aatttttaaatggacatctcaatttg

SEQ ID NO: 26803 - DNA, 26 bp, Homo sapiens
atttttaaatggacatctcaatttgc

SEQ ID NO: 26804 - DNA, 26 bp, Homo sapiens
tttttaaatggacatctcaatttgca

SEQ ID NO: 26805 - DNA, 26 bp, Homo sapiens
ttttaaatggacatctcaatttgcag

SEQ ID NO: 26806 - DNA, 26 bp, Homo sapiens
tttaaatggacatctcaatttgcagc

SEQ ID NO: 26807 - DNA, 26 bp, Homo sapiens
ttaaatggacatctcaatttgcagct

SEQ ID NO: 26808 - DNA, 26 bp, Homo sapiens
taaatggacatctcaatttgcagctg

SEQ ID NO: 26809 - DNA, 26 bp, Homo sapiens
aaatggacatctcaatttgcagctgg

SEQ ID NO: 26810 - DNA, 26 bp, Homo sapiens
aatggacatctcaatttgcagctggt

SEQ ID NO: 26811 - DNA, 26 bp, Homo sapiens
atggacatctcaatttgcagctggtt

SEQ ID NO: 26812 - DNA, 26 bp, Homo sapiens
tggacatctcaatttgcagctggttg

SEQ ID NO: 26813 - DNA, 26 bp, Homo sapiens
ggacatctcaatttgcagctggttgg

SEQ ID NO: 26814 - DNA, 26 bp, Homo sapiens
gacatctcaatttgcagctggttggt

SEQ ID NO: 26815 - DNA, 26 bp, Homo sapiens
acatctcaatttgcagctggttggtg

SEQ ID NO: 26816 - DNA, 26 bp, Homo sapiens
catctcaatttgcagctggttggtgg

SEQ ID NO: 26817 - DNA, 26 bp, Homo sapiens
atctcaatttgcagctggttggtggt

SEQ ID NO: 26818 - DNA, 26 bp, Homo sapiens
tctcaatttgcagctggttggtggtc

SEQ ID NO: 26819 - DNA, 26 bp, Homo sapiens
ctcaatttgcagctggttggtggtct

SEQ ID NO: 26820 - DNA, 26 bp, Homo sapiens
tcaatttgcagctggttggtggtctt

SEQ ID NO: 26821 - DNA, 26 bp, Homo sapiens
caatttgcagctggttggtggtctta

SEQ ID NO: 26822 - DNA, 26 bp, Homo sapiens
aatttgcagctggttggtggtcttag

SEQ ID NO: 26823 - DNA, 26 bp, Homo sapiens
atttgcagctggttggtggtcttagc

SEQ ID NO: 26824 - DNA, 26 bp, Homo sapiens
tttgcagctggttggtggtcttagct

SEQ ID NO: 26825 - DNA, 26 bp, Homo sapiens
ttgcagctggttggtggtcttagctg

SEQ ID NO: 26826 - DNA, 26 bp, Homo sapiens
tgcagctggttggtggtcttagctgg

SEQ ID NO: 26827 - DNA, 26 bp, Homo sapiens
gcagctggttggtggtcttagctgga

SEQ ID NO: 26828 - DNA, 26 bp, Homo sapiens
cagctggttggtggtcttagctggaa

SEQ ID NO: 26829 - DNA, 26 bp, Homo sapiens
agctggttggtggtcttagctggaag

SEQ ID NO: 26830 - DNA, 26 bp, Homo sapiens
gctggttggtggtcttagctggaagg

SEQ ID NO: 26831 - DNA, 26 bp, Homo sapiens
ctggttggtggtcttagctggaagga

SEQ ID NO: 26832 - DNA, 26 bp, Homo sapiens
tggttggtggtcttagctggaaggag

SEQ ID NO: 26833 - DNA, 26 bp, Homo sapiens
ggttggtggtcttagctggaaggagg

SEQ ID NO: 26834 - DNA, 26 bp, Homo sapiens
gttggtggtcttagctggaaggaggg

SEQ ID NO: 26835 - DNA, 26 bp, Homo sapiens
ttggtggtcttagctggaaggaggga

SEQ ID NO: 26836 - DNA, 26 bp, Homo sapiens
tggtggtcttagctggaaggagggat

SEQ ID NO: 26837 - DNA, 26 bp, Homo sapiens
ggtggtcttagctggaaggagggatg

SEQ ID NO: 26838 - DNA, 26 bp, Homo sapiens
gtggtcttagctggaaggagggatgg

SEQ ID NO: 26839 - DNA, 26 bp, Homo sapiens
tggtcttagctggaaggagggatggg

SEQ ID NO: 26840 - DNA, 26 bp, Homo sapiens
ggtcttagctggaaggagggatgggg

SEQ ID NO: 26841 - DNA, 26 bp, Homo sapiens
gtcttagctggaaggagggatgggga

SEQ ID NO: 26842 - DNA, 26 bp, Homo sapiens
tcttagctggaaggagggatggggaa

SEQ ID NO: 26843 - DNA, 26 bp, Homo sapiens
cttagctggaaggagggatggggaag

SEQ ID NO: 26844 - DNA, 26 bp, Homo sapiens
ttagctggaaggagggatggggaaga

SEQ ID NO: 26845 - DNA, 26 bp, Homo sapiens
tagctggaaggagggatggggaagaa

SEQ ID NO: 26846 - DNA, 26 bp, Homo sapiens
agctggaaggagggatggggaagaaa

SEQ ID NO: 26847 - DNA, 26 bp, Homo sapiens
gctggaaggagggatggggaagaaaa

SEQ ID NO: 26848 - DNA, 26 bp, Homo sapiens
ctggaaggagggatggggaagaaaag

SEQ ID NO: 26849 - DNA, 26 bp, Homo sapiens
tggaaggagggatggggaagaaaagg

SEQ ID NO: 26850 - DNA, 26 bp, Homo sapiens
ggaaggagggatggggaagaaaaggc

SEQ ID NO: 26851 - DNA, 26 bp, Homo sapiens
gaaggagggatggggaagaaaaggca

SEQ ID NO: 26852 - DNA, 26 bp, Homo sapiens
aaggagggatggggaagaaaaggcaa

SEQ ID NO: 26853 - DNA, 26 bp, Homo sapiens
aggagggatggggaagaaaaggcaat

SEQ ID NO: 26854 - DNA, 26 bp, Homo sapiens
ggagggatggggaagaaaaggcaatc

SEQ ID NO: 26855 - DNA, 26 bp, Homo sapiens
gagggatggggaagaaaaggcaatct

SEQ ID NO: 26856 - DNA, 26 bp, Homo sapiens
agggatggggaagaaaaggcaatctc

SEQ ID NO: 26857 - DNA, 26 bp, Homo sapiens
gggatggggaagaaaaggcaatctct

SEQ ID NO: 26858 - DNA, 26 bp, Homo sapiens
ggatggggaagaaaaggcaatctctc

SEQ ID NO: 26859 - DNA, 26 bp, Homo sapiens
gatggggaagaaaaggcaatctctcg

SEQ ID NO: 26860 - DNA, 26 bp, Homo sapiens
atggggaagaaaaggcaatctctcgc

SEQ ID NO: 26861 - DNA, 26 bp, Homo sapiens
tggggaagaaaaggcaatctctcgct

SEQ ID NO: 26862 - DNA, 26 bp, Homo sapiens
ggggaagaaaaggcaatctctcgctc

SEQ ID NO: 26863 - DNA, 26 bp, Homo sapiens
gggaagaaaaggcaatctctcgctct

SEQ ID NO: 26864 - DNA, 26 bp, Homo sapiens
ggaagaaaaggcaatctctcgctctc

SEQ ID NO: 26865 - DNA, 26 bp, Homo sapiens
gaagaaaaggcaatctctcgctctca

SEQ ID NO: 26866 - DNA, 26 bp, Homo sapiens
aagaaaaggcaatctctcgctctcac

SEQ ID NO: 26867 - DNA, 26 bp, Homo sapiens
agaaaaggcaatctctcgctctcact

SEQ ID NO: 26868 - DNA, 26 bp, Homo sapiens
gaaaaggcaatctctcgctctcactg

SEQ ID NO: 26869 - DNA, 26 bp, Homo sapiens
aaaaggcaatctctcgctctcactgg

SEQ ID NO: 26870 - DNA, 26 bp, Homo sapiens
aaaggcaatctctcgctctcactggt

SEQ ID NO: 26871 - DNA, 26 bp, Homo sapiens
aaggcaatctctcgctctcactggta

SEQ ID NO: 26872 - DNA, 26 bp, Homo sapiens
aggcaatctctcgctctcactggtac

SEQ ID NO: 26873 - DNA, 26 bp, Homo sapiens
ggcaatctctcgctctcactggtacc

SEQ ID NO: 26874 - DNA, 26 bp, Homo sapiens
gcaatctctcgctctcactggtacca

SEQ ID NO: 26875 - DNA, 26 bp, Homo sapiens
caatctctcgctctcactggtaccaa

SEQ ID NO: 26876 - DNA, 26 bp, Homo sapiens
aatctctcgctctcactggtaccaag

SEQ ID NO: 26877 - DNA, 26 bp, Homo sapiens
atctctcgctctcactggtaccaaga

SEQ ID NO: 26878 - DNA, 26 bp, Homo sapiens
tctctcgctctcactggtaccaagag

SEQ ID NO: 26879 - DNA, 26 bp, Homo sapiens
ctctcgctctcactggtaccaagagg

SEQ ID NO: 26880 - DNA, 26 bp, Homo sapiens
tctcgctctcactggtaccaagaggt

SEQ ID NO: 26881 - DNA, 26 bp, Homo sapiens
ctcgctctcactggtaccaagaggtg

SEQ ID NO: 26882 - DNA, 26 bp, Homo sapiens
tcgctctcactggtaccaagaggtgg

SEQ ID NO: 26883 - DNA, 26 bp, Homo sapiens
cgctctcactggtaccaagaggtggt

SEQ ID NO: 26884 - DNA, 26 bp, Homo sapiens
gctctcactggtaccaagaggtggtg

SEQ ID NO: 26885 - DNA, 26 bp, Homo sapiens
ctctcactggtaccaagaggtggtgg

SEQ ID NO: 26886 - DNA, 26 bp, Homo sapiens
tctcactggtaccaagaggtggtgga

SEQ ID NO: 26887 - DNA, 26 bp, Homo sapiens
ctcactggtaccaagaggtggtggaa

SEQ ID NO: 26888 - DNA, 26 bp, Homo sapiens
tcactggtaccaagaggtggtggaag

SEQ ID NO: 26889 - DNA, 26 bp, Homo sapiens
cactggtaccaagaggtggtggaaga

SEQ ID NO: 26890 - DNA, 26 bp, Homo sapiens
actggtaccaagaggtggtggaagaa

SEQ ID NO: 26891 - DNA, 26 bp, Homo sapiens
ctggtaccaagaggtggtggaagaat

SEQ ID NO: 26892 - DNA, 26 bp, Homo sapiens
tggtaccaagaggtggtggaagaatg

SEQ ID NO: 26893 - DNA, 26 bp, Homo sapiens
ggtaccaagaggtggtggaagaatgg

SEQ ID NO: 26894 - DNA, 26 bp, Homo sapiens
gtaccaagaggtggtggaagaatggc

SEQ ID NO: 26895 - DNA, 26 bp, Homo sapiens
taccaagaggtggtggaagaatggcg

SEQ ID NO: 26896 - DNA, 26 bp, Homo sapiens
accaagaggtggtggaagaatggcga

SEQ ID NO: 26897 - DNA, 26 bp, Homo sapiens
ccaagaggtggtggaagaatggcgat

SEQ ID NO: 26898 - DNA, 26 bp, Homo sapiens
caagaggtggtggaagaatggcgata

SEQ ID NO: 26899 - DNA, 26 bp, Homo sapiens
aagaggtggtggaagaatggcgatac

SEQ ID NO: 26900 - DNA, 26 bp, Homo sapiens
agaggtggtggaagaatggcgatact

SEQ ID NO: 26901 - DNA, 26 bp, Homo sapiens
gaggtggtggaagaatggcgatactt

SEQ ID NO: 26902 - DNA, 26 bp, Homo sapiens
aggtggtggaagaatggcgatacttg

SEQ ID NO: 26903 - DNA, 26 bp, Homo sapiens
ggtggtggaagaatggcgatacttga

SEQ ID NO: 26904 - DNA, 26 bp, Homo sapiens
gtggtggaagaatggcgatacttgag

SEQ ID NO: 26905 - DNA, 26 bp, Homo sapiens
tggtggaagaatggcgatacttgagg

SEQ ID NO: 26906 - DNA, 26 bp, Homo sapiens
ggtggaagaatggcgatacttgaggg

SEQ ID NO: 26907 - DNA, 26 bp, Homo sapiens
gtggaagaatggcgatacttgagggt

SEQ ID NO: 26908 - DNA, 26 bp, Homo sapiens
tggaagaatggcgatacttgagggta

SEQ ID NO: 26909 - DNA, 26 bp, Homo sapiens
ggaagaatggcgatacttgagggtaa

SEQ ID NO: 26910 - DNA, 26 bp, Homo sapiens
gaagaatggcgatacttgagggtaat

SEQ ID NO: 26911 - DNA, 26 bp, Homo sapiens
aagaatggcgatacttgagggtaatt

SEQ ID NO: 26912 - DNA, 26 bp, Homo sapiens
agaatggcgatacttgagggtaattt

SEQ ID NO: 26913 - DNA, 26 bp, Homo sapiens
gaatggcgatacttgagggtaatttg

SEQ ID NO: 26914 - DNA, 26 bp, Homo sapiens
aatggcgatacttgagggtaatttgc

SEQ ID NO: 26915 - DNA, 26 bp, Homo sapiens
atggcgatacttgagggtaatttgca

SEQ ID NO: 26916 - DNA, 26 bp, Homo sapiens
tggcgatacttgagggtaatttgcat

SEQ ID NO: 26917 - DNA, 26 bp, Homo sapiens
ggcgatacttgagggtaatttgcatt

SEQ ID NO: 26918 - DNA, 26 bp, Homo sapiens
gcgatacttgagggtaatttgcatta

SEQ ID NO: 26919 - DNA, 26 bp, Homo sapiens
cgatacttgagggtaatttgcattat

SEQ ID NO: 26920 - DNA, 26 bp, Homo sapiens
gatacttgagggtaatttgcattata

SEQ ID NO: 26921 - DNA, 26 bp, Homo sapiens
atacttgagggtaatttgcattatat

SEQ ID NO: 26922 - DNA, 26 bp, Homo sapiens
tacttgagggtaatttgcattatatt

SEQ ID NO: 26923 - DNA, 26 bp, Homo sapiens
acttgagggtaatttgcattatattt

SEQ ID NO: 26924 - DNA, 26 bp, Homo sapiens
cttgagggtaatttgcattatatttg

SEQ ID NO: 26925 - DNA, 26 bp, Homo sapiens
ttgagggtaatttgcattatatttgc

SEQ ID NO: 26926 - DNA, 26 bp, Homo sapiens
tgagggtaatttgcattatatttgca

SEQ ID NO: 26927 - DNA, 26 bp, Homo sapiens
gagggtaatttgcattatatttgcat

SEQ ID NO: 26928 - DNA, 26 bp, Homo sapiens
agggtaatttgcattatatttgcatg

SEQ ID NO: 26929 - DNA, 26 bp, Homo sapiens
gggtaatttgcattatatttgcatgt

SEQ ID NO: 26930 - DNA, 26 bp, Homo sapiens
ggtaatttgcattatatttgcatgtc

SEQ ID NO: 26931 - DNA, 26 bp, Homo sapiens
gtaatttgcattatatttgcatgtca

SEQ ID NO: 26932 - DNA, 26 bp, Homo sapiens
taatttgcattatatttgcatgtcag

SEQ ID NO: 26933 - DNA, 26 bp, Homo sapiens
aatttgcattatatttgcatgtcagc

SEQ ID NO: 26934 - DNA, 26 bp, Homo sapiens
atttgcattatatttgcatgtcagcc

SEQ ID NO: 26935 - DNA, 26 bp, Homo sapiens
tttgcattatatttgcatgtcagcct

SEQ ID NO: 26936 - DNA, 26 bp, Homo sapiens
ttgcattatatttgcatgtcagcctc

SEQ ID NO: 26937 - DNA, 26 bp, Homo sapiens
tgcattatatttgcatgtcagcctcc

SEQ ID NO: 26938 - DNA, 26 bp, Homo sapiens
gcattatatttgcatgtcagcctcct

SEQ ID NO: 26939 - DNA, 26 bp, Homo sapiens
cattatatttgcatgtcagcctcctt

SEQ ID NO: 26940 - DNA, 26 bp, Homo sapiens
attatatttgcatgtcagcctccttt

SEQ ID NO: 26941 - DNA, 26 bp, Homo sapiens
ttatatttgcatgtcagcctcctttc

SEQ ID NO: 26942 - DNA, 26 bp, Homo sapiens
tatatttgcatgtcagcctcctttcc

SEQ ID NO: 26943 - DNA, 26 bp, Homo sapiens
atatttgcatgtcagcctcctttcca

SEQ ID NO: 26944 - DNA, 26 bp, Homo sapiens
tatttgcatgtcagcctcctttccaa

SEQ ID NO: 26945 - DNA, 26 bp, Homo sapiens
atttgcatgtcagcctcctttccaat

SEQ ID NO: 26946 - DNA, 26 bp, Homo sapiens
tttgcatgtcagcctcctttccaatt

SEQ ID NO: 26947 - DNA, 26 bp, Homo sapiens
ttgcatgtcagcctcctttccaattc

SEQ ID NO: 26948 - DNA, 26 bp, Homo sapiens
tgcatgtcagcctcctttccaattct

SEQ ID NO: 26949 - DNA, 26 bp, Homo sapiens
gcatgtcagcctcctttccaattcta

SEQ ID NO: 26950 - DNA, 26 bp, Homo sapiens
catgtcagcctcctttccaattctaa

SEQ ID NO: 26951 - DNA, 26 bp, Homo sapiens
atgtcagcctcctttccaattctaaa

SEQ ID NO: 26952 - DNA, 26 bp, Homo sapiens
tgtcagcctcctttccaattctaaag

SEQ ID NO: 26953 - DNA, 26 bp, Homo sapiens
gtcagcctcctttccaattctaaagt

SEQ ID NO: 26954 - DNA, 26 bp, Homo sapiens
tcagcctcctttccaattctaaagtt

SEQ ID NO: 26955 - DNA, 26 bp, Homo sapiens
cagcctcctttccaattctaaagttc

SEQ ID NO: 26956 - DNA, 26 bp, Homo sapiens
agcctcctttccaattctaaagttct

SEQ ID NO: 26957 - DNA, 26 bp, Homo sapiens
gcctcctttccaattctaaagttctt

SEQ ID NO: 26958 - DNA, 26 bp, Homo sapiens
cctcctttccaattctaaagttctta

SEQ ID NO: 26959 - DNA, 26 bp, Homo sapiens
ctcctttccaattctaaagttcttac

SEQ ID NO: 26960 - DNA, 26 bp, Homo sapiens
tcctttccaattctaaagttcttact

SEQ ID NO: 26961 - DNA, 26 bp, Homo sapiens
cctttccaattctaaagttcttactt

SEQ ID NO: 26962 - DNA, 26 bp, Homo sapiens
ctttccaattctaaagttcttactta

SEQ ID NO: 26963 - DNA, 26 bp, Homo sapiens
tttccaattctaaagttcttacttat

SEQ ID NO: 26964 - DNA, 26 bp, Homo sapiens
ttccaattctaaagttcttacttatc

SEQ ID NO: 26965 - DNA, 26 bp, Homo sapiens
tccaattctaaagttcttacttatca

SEQ ID NO: 26966 - DNA, 26 bp, Homo sapiens
ccaattctaaagttcttacttatcag

SEQ ID NO: 26967 - DNA, 26 bp, Homo sapiens
caattctaaagttcttacttatcaga

SEQ ID NO: 26968 - DNA, 26 bp, Homo sapiens
aattctaaagttcttacttatcagaa

SEQ ID NO: 26969 - DNA, 26 bp, Homo sapiens
attctaaagttcttacttatcagaac

SEQ ID NO: 26970 - DNA, 26 bp, Homo sapiens
ttctaaagttcttacttatcagaact

SEQ ID NO: 26971 - DNA, 26 bp, Homo sapiens
tctaaagttcttacttatcagaactg

SEQ ID NO: 26972 - DNA, 26 bp, Homo sapiens
ctaaagttcttacttatcagaactgt

SEQ ID NO: 26973 - DNA, 26 bp, Homo sapiens
taaagttcttacttatcagaactgtg

SEQ ID NO: 26974 - DNA, 26 bp, Homo sapiens
aaagttcttacttatcagaactgtgt

SEQ ID NO: 26975 - DNA, 26 bp, Homo sapiens
aagttcttacttatcagaactgtgtt

SEQ ID NO: 26976 - DNA, 26 bp, Homo sapiens
agttcttacttatcagaactgtgttt

SEQ ID NO: 26977 - DNA, 26 bp, Homo sapiens
gttcttacttatcagaactgtgtttt

SEQ ID NO: 26978 - DNA, 26 bp, Homo sapiens
ttcttacttatcagaactgtgtttta

SEQ ID NO: 26979 - DNA, 26 bp, Homo sapiens
tcttacttatcagaactgtgttttat

SEQ ID NO: 26980 - DNA, 26 bp, Homo sapiens
cttacttatcagaactgtgttttatt

SEQ ID NO: 26981 - DNA, 26 bp, Homo sapiens
ttacttatcagaactgtgttttattc

SEQ ID NO: 26982 - DNA, 26 bp, Homo sapiens
tacttatcagaactgtgttttattca

SEQ ID NO: 26983 - DNA, 26 bp, Homo sapiens
acttatcagaactgtgttttattcag

SEQ ID NO: 26984 - DNA, 26 bp, Homo sapiens
cttatcagaactgtgttttattcagc

SEQ ID NO: 26985 - DNA, 26 bp, Homo sapiens
ttatcagaactgtgttttattcagca

SEQ ID NO: 26986 - DNA, 26 bp, Homo sapiens
tatcagaactgtgttttattcagcaa

SEQ ID NO: 26987 - DNA, 26 bp, Homo sapiens
atcagaactgtgttttattcagcaaa

SEQ ID NO: 26988 - DNA, 26 bp, Homo sapiens
tcagaactgtgttttattcagcaaaa

SEQ ID NO: 26989 - DNA, 26 bp, Homo sapiens
cagaactgtgttttattcagcaaaaa

SEQ ID NO: 26990 - DNA, 26 bp, Homo sapiens
agaactgtgttttattcagcaaaaag

SEQ ID NO: 26991 - DNA, 26 bp, Homo sapiens
gaactgtgttttattcagcaaaaaga

SEQ ID NO: 26992 - DNA, 26 bp, Homo sapiens
aactgtgttttattcagcaaaaagaa

SEQ ID NO: 26993 - DNA, 26 bp, Homo sapiens
actgtgttttattcagcaaaaagaaa

SEQ ID NO: 26994 - DNA, 26 bp, Homo sapiens
ctgtgttttattcagcaaaaagaaag

SEQ ID NO: 26995 - DNA, 26 bp, Homo sapiens
tgtgttttattcagcaaaaagaaagc

SEQ ID NO: 26996 - DNA, 26 bp, Homo sapiens
gtgttttattcagcaaaaagaaagca

SEQ ID NO: 26997 - DNA, 26 bp, Homo sapiens
tgttttattcagcaaaaagaaagcag

SEQ ID NO: 26998 - DNA, 26 bp, Homo sapiens
gttttattcagcaaaaagaaagcagt

SEQ ID NO: 26999 - DNA, 26 bp, Homo sapiens
ttttattcagcaaaaagaaagcagtg

SEQ ID NO: 27000 - DNA, 26 bp, Homo sapiens
tttattcagcaaaaagaaagcagtgg

SEQ ID NO: 27001 - DNA, 26 bp, Homo sapiens
ttattcagcaaaaagaaagcagtggt

SEQ ID NO: 27002 - DNA, 26 bp, Homo sapiens
tattcagcaaaaagaaagcagtggta

SEQ ID NO: 27003 - DNA, 26 bp, Homo sapiens
attcagcaaaaagaaagcagtggtat

SEQ ID NO: 27004 - DNA, 26 bp, Homo sapiens
ttcagcaaaaagaaagcagtggtatg

SEQ ID NO: 27005 - DNA, 26 bp, Homo sapiens
tcagcaaaaagaaagcagtggtatga

SEQ ID NO: 27006 - DNA, 26 bp, Homo sapiens
cagcaaaaagaaagcagtggtatgaa

SEQ ID NO: 27007 - DNA, 26 bp, Homo sapiens
agcaaaaagaaagcagtggtatgaag

SEQ ID NO: 27008 - DNA, 26 bp, Homo sapiens
gcaaaaagaaagcagtggtatgaagg

SEQ ID NO: 27009 - DNA, 26 bp, Homo sapiens
caaaaagaaagcagtggtatgaaggt

SEQ ID NO: 27010 - DNA, 26 bp, Homo sapiens
aaaaagaaagcagtggtatgaaggtg

SEQ ID NO: 27011 - DNA, 26 bp, Homo sapiens
aaaagaaagcagtggtatgaaggtgg

SEQ ID NO: 27012 - DNA, 26 bp, Homo sapiens
aaagaaagcagtggtatgaaggtggg

SEQ ID NO: 27013 - DNA, 26 bp, Homo sapiens
aagaaagcagtggtatgaaggtgggt

SEQ ID NO: 27014 - DNA, 26 bp, Homo sapiens
agaaagcagtggtatgaaggtgggta

SEQ ID NO: 27015 - DNA, 26 bp, Homo sapiens
gaaagcagtggtatgaaggtgggtaa

SEQ ID NO: 27016 - DNA, 26 bp, Homo sapiens
aaagcagtggtatgaaggtgggtaaa

SEQ ID NO: 27017 - DNA, 26 bp, Homo sapiens
aagcagtggtatgaaggtgggtaaag

SEQ ID NO: 27018 - DNA, 26 bp, Homo sapiens
agcagtggtatgaaggtgggtaaaga

SEQ ID NO: 27019 - DNA, 26 bp, Homo sapiens
gcagtggtatgaaggtgggtaaagac

SEQ ID NO: 27020 - DNA, 26 bp, Homo sapiens
cagtggtatgaaggtgggtaaagaca

SEQ ID NO: 27021 - DNA, 26 bp, Homo sapiens
agtggtatgaaggtgggtaaagacat

SEQ ID NO: 27022 - DNA, 26 bp, Homo sapiens
gtggtatgaaggtgggtaaagacatt

SEQ ID NO: 27023 - DNA, 26 bp, Homo sapiens
tggtatgaaggtgggtaaagacattc

SEQ ID NO: 27024 - DNA, 26 bp, Homo sapiens
ggtatgaaggtgggtaaagacattct

SEQ ID NO: 27025 - DNA, 26 bp, Homo sapiens
gtatgaaggtgggtaaagacattctc

SEQ ID NO: 27026 - DNA, 26 bp, Homo sapiens
tatgaaggtgggtaaagacattctcc

SEQ ID NO: 27027 - DNA, 26 bp, Homo sapiens
atgaaggtgggtaaagacattctcct

SEQ ID NO: 27028 - DNA, 26 bp, Homo sapiens
tgaaggtgggtaaagacattctcctg

SEQ ID NO: 27029 - DNA, 26 bp, Homo sapiens
gaaggtgggtaaagacattctcctga

SEQ ID NO: 27030 - DNA, 26 bp, Homo sapiens
aaggtgggtaaagacattctcctgag

SEQ ID NO: 27031 - DNA, 26 bp, Homo sapiens
aggtgggtaaagacattctcctgagt

SEQ ID NO: 27032 - DNA, 26 bp, Homo sapiens
ggtgggtaaagacattctcctgagtt

SEQ ID NO: 27033 - DNA, 26 bp, Homo sapiens
gtgggtaaagacattctcctgagttt

SEQ ID NO: 27034 - DNA, 26 bp, Homo sapiens
tgggtaaagacattctcctgagttta

SEQ ID NO: 27035 - DNA, 26 bp, Homo sapiens
gggtaaagacattctcctgagtttat

SEQ ID NO: 27036 - DNA, 26 bp, Homo sapiens
ggtaaagacattctcctgagtttatg

SEQ ID NO: 27037 - DNA, 26 bp, Homo sapiens
gtaaagacattctcctgagtttatgt

SEQ ID NO: 27038 - DNA, 26 bp, Homo sapiens
taaagacattctcctgagtttatgtt

SEQ ID NO: 27039 - DNA, 26 bp, Homo sapiens
aaagacattctcctgagtttatgtta

SEQ ID NO: 27040 - DNA, 26 bp, Homo sapiens
aagacattctcctgagtttatgttat

SEQ ID NO: 27041 - DNA, 26 bp, Homo sapiens
agacattctcctgagtttatgttatt

SEQ ID NO: 27042 - DNA, 26 bp, Homo sapiens
gacattctcctgagtttatgttattt

SEQ ID NO: 27043 - DNA, 26 bp, Homo sapiens
acattctcctgagtttatgttattta

SEQ ID NO: 27044 - DNA, 26 bp, Homo sapiens
cattctcctgagtttatgttatttag

SEQ ID NO: 27045 - DNA, 26 bp, Homo sapiens
attctcctgagtttatgttatttagt

SEQ ID NO: 27046 - DNA, 26 bp, Homo sapiens
ttctcctgagtttatgttatttagtt

SEQ ID NO: 27047 - DNA, 26 bp, Homo sapiens
tctcctgagtttatgttatttagttt

SEQ ID NO: 27048 - DNA, 26 bp, Homo sapiens
ctcctgagtttatgttatttagtttt

SEQ ID NO: 27049 - DNA, 26 bp, Homo sapiens
tcctgagtttatgttatttagttttt

SEQ ID NO: 27050 - DNA, 26 bp, Homo sapiens
cctgagtttatgttatttagtttttt

SEQ ID NO: 27051 - DNA, 26 bp, Homo sapiens
ctgagtttatgttatttagttttttt

SEQ ID NO: 27052 - DNA, 26 bp, Homo sapiens
tgagtttatgttatttagtttttttc

SEQ ID NO: 27053 - DNA, 26 bp, Homo sapiens
gagtttatgttatttagtttttttcc

SEQ ID NO: 27054 - DNA, 26 bp, Homo sapiens
agtttatgttatttagtttttttcct

SEQ ID NO: 27055 - DNA, 26 bp, Homo sapiens
gtttatgttatttagtttttttcctc

SEQ ID NO: 27056 - DNA, 26 bp, Homo sapiens
tttatgttatttagtttttttcctcc

SEQ ID NO: 27057 - DNA, 26 bp, Homo sapiens
ttatgttatttagtttttttcctcca

SEQ ID NO: 27058 - DNA, 26 bp, Homo sapiens
tatgttatttagtttttttcctccag

SEQ ID NO: 27059 - DNA, 26 bp, Homo sapiens
atgttatttagtttttttcctccaga

SEQ ID NO: 27060 - DNA, 26 bp, Homo sapiens
tgttatttagtttttttcctccagaa

SEQ ID NO: 27061 - DNA, 26 bp, Homo sapiens
gttatttagtttttttcctccagaaa

SEQ ID NO: 27062 - DNA, 26 bp, Homo sapiens
ttatttagtttttttcctccagaaag

SEQ ID NO: 27063 - DNA, 26 bp, Homo sapiens
tatttagtttttttcctccagaaaga

SEQ ID NO: 27064 - DNA, 26 bp, Homo sapiens
atttagtttttttcctccagaaagaa

SEQ ID NO: 27065 - DNA, 26 bp, Homo sapiens
tttagtttttttcctccagaaagaag

SEQ ID NO: 27066 - DNA, 26 bp, Homo sapiens
ttagtttttttcctccagaaagaagt

SEQ ID NO: 27067 - DNA, 26 bp, Homo sapiens
tagtttttttcctccagaaagaagtt

SEQ ID NO: 27068 - DNA, 26 bp, Homo sapiens
agtttttttcctccagaaagaagttt

SEQ ID NO: 27069 - DNA, 26 bp, Homo sapiens
gtttttttcctccagaaagaagtttc

SEQ ID NO: 27070 - DNA, 26 bp, Homo sapiens
tttttttcctccagaaagaagtttct

SEQ ID NO: 27071 - DNA, 26 bp, Homo sapiens
ttttttcctccagaaagaagtttcta

SEQ ID NO: 27072 - DNA, 26 bp, Homo sapiens
tttttcctccagaaagaagtttctag

SEQ ID NO: 27073 - DNA, 26 bp, Homo sapiens
ttttcctccagaaagaagtttctaga

SEQ ID NO: 27074 - DNA, 26 bp, Homo sapiens
tttcctccagaaagaagtttctagaa

SEQ ID NO: 27075 - DNA, 26 bp, Homo sapiens
ttcctccagaaagaagtttctagaag

SEQ ID NO: 27076 - DNA, 26 bp, Homo sapiens
tcctccagaaagaagtttctagaagc

SEQ ID NO: 27077 - DNA, 26 bp, Homo sapiens
cctccagaaagaagtttctagaagcc

SEQ ID NO: 27078 - DNA, 26 bp, Homo sapiens
ctccagaaagaagtttctagaagcct

SEQ ID NO: 27079 - DNA, 26 bp, Homo sapiens
tccagaaagaagtttctagaagcctc

SEQ ID NO: 27080 - DNA, 26 bp, Homo sapiens
ccagaaagaagtttctagaagcctca

SEQ ID NO: 27081 - DNA, 26 bp, Homo sapiens
cagaaagaagtttctagaagcctcag

SEQ ID NO: 27082 - DNA, 26 bp, Homo sapiens
agaaagaagtttctagaagcctcaga

SEQ ID NO: 27083 - DNA, 26 bp, Homo sapiens
gaaagaagtttctagaagcctcagag

SEQ ID NO: 27084 - DNA, 26 bp, Homo sapiens
aaagaagtttctagaagcctcagagg

SEQ ID NO: 27085 - DNA, 26 bp, Homo sapiens
aagaagtttctagaagcctcagaggg

SEQ ID NO: 27086 - DNA, 26 bp, Homo sapiens
agaagtttctagaagcctcagagggc

SEQ ID NO: 27087 - DNA, 26 bp, Homo sapiens
gaagtttctagaagcctcagagggct

SEQ ID NO: 27088 - DNA, 26 bp, Homo sapiens
aagtttctagaagcctcagagggctg

SEQ ID NO: 27089 - DNA, 26 bp, Homo sapiens
agtttctagaagcctcagagggctgg

SEQ ID NO: 27090 - DNA, 26 bp, Homo sapiens
gtttctagaagcctcagagggctggc

SEQ ID NO: 27091 - DNA, 26 bp, Homo sapiens
tttctagaagcctcagagggctggct

SEQ ID NO: 27092 - DNA, 26 bp, Homo sapiens
ttctagaagcctcagagggctggctg

SEQ ID NO: 27093 - DNA, 26 bp, Homo sapiens
tctagaagcctcagagggctggctga

SEQ ID NO: 27094 - DNA, 26 bp, Homo sapiens
ctagaagcctcagagggctggctgag

SEQ ID NO: 27095 - DNA, 26 bp, Homo sapiens
tagaagcctcagagggctggctgagt

SEQ ID NO: 27096 - DNA, 26 bp, Homo sapiens
agaagcctcagagggctggctgagtg

SEQ ID NO: 27097 - DNA, 26 bp, Homo sapiens
gaagcctcagagggctggctgagtga

SEQ ID NO: 27098 - DNA, 26 bp, Homo sapiens
aagcctcagagggctggctgagtgaa

SEQ ID NO: 27099 - DNA, 26 bp, Homo sapiens
agcctcagagggctggctgagtgaag

SEQ ID NO: 27100 - DNA, 26 bp, Homo sapiens
gcctcagagggctggctgagtgaaga

SEQ ID NO: 27101 - DNA, 26 bp, Homo sapiens
cctcagagggctggctgagtgaagac

SEQ ID NO: 27102 - DNA, 26 bp, Homo sapiens
ctcagagggctggctgagtgaagaca

SEQ ID NO: 27103 - DNA, 26 bp, Homo sapiens
tcagagggctggctgagtgaagacag

SEQ ID NO: 27104 - DNA, 26 bp, Homo sapiens
cagagggctggctgagtgaagacagg

SEQ ID NO: 27105 - DNA, 26 bp, Homo sapiens
agagggctggctgagtgaagacaggc

SEQ ID NO: 27106 - DNA, 26 bp, Homo sapiens
gagggctggctgagtgaagacaggcc

SEQ ID NO: 27107 - DNA, 26 bp, Homo sapiens
agggctggctgagtgaagacaggcct

SEQ ID NO: 27108 - DNA, 26 bp, Homo sapiens
gggctggctgagtgaagacaggcctg

SEQ ID NO: 27109 - DNA, 26 bp, Homo sapiens
ggctggctgagtgaagacaggcctgg

SEQ ID NO: 27110 - DNA, 26 bp, Homo sapiens
gctggctgagtgaagacaggcctggc

SEQ ID NO: 27111 - DNA, 26 bp, Homo sapiens
ctggctgagtgaagacaggcctggcc

SEQ ID NO: 27112 - DNA, 26 bp, Homo sapiens
tggctgagtgaagacaggcctggcct

SEQ ID NO: 27113 - DNA, 26 bp, Homo sapiens
ggctgagtgaagacaggcctggcctc

SEQ ID NO: 27114 - DNA, 26 bp, Homo sapiens
gctgagtgaagacaggcctggcctct

SEQ ID NO: 27115 - DNA, 26 bp, Homo sapiens
ctgagtgaagacaggcctggcctcta

SEQ ID NO: 27116 - DNA, 26 bp, Homo sapiens
tgagtgaagacaggcctggcctctag

SEQ ID NO: 27117 - DNA, 26 bp, Homo sapiens
gagtgaagacaggcctggcctctagg

SEQ ID NO: 27118 - DNA, 26 bp, Homo sapiens
agtgaagacaggcctggcctctagga

SEQ ID NO: 27119 - DNA, 26 bp, Homo sapiens
gtgaagacaggcctggcctctaggaa

SEQ ID NO: 27120 - DNA, 26 bp, Homo sapiens
tgaagacaggcctggcctctaggaat

SEQ ID NO: 27121 - DNA, 26 bp, Homo sapiens
gaagacaggcctggcctctaggaata

SEQ ID NO: 27122 - DNA, 26 bp, Homo sapiens
aagacaggcctggcctctaggaatat

SEQ ID NO: 27123 - DNA, 26 bp, Homo sapiens
agacaggcctggcctctaggaatatg

SEQ ID NO: 27124 - DNA, 26 bp, Homo sapiens
gacaggcctggcctctaggaatatgc

SEQ ID NO: 27125 - DNA, 26 bp, Homo sapiens
acaggcctggcctctaggaatatgct

SEQ ID NO: 27126 - DNA, 26 bp, Homo sapiens
caggcctggcctctaggaatatgctg

SEQ ID NO: 27127 - DNA, 26 bp, Homo sapiens
aggcctggcctctaggaatatgctga

SEQ ID NO: 27128 - DNA, 26 bp, Homo sapiens
ggcctggcctctaggaatatgctgag

SEQ ID NO: 27129 - DNA, 26 bp, Homo sapiens
gcctggcctctaggaatatgctgagt

SEQ ID NO: 27130 - DNA, 26 bp, Homo sapiens
cctggcctctaggaatatgctgagtg

SEQ ID NO: 27131 - DNA, 26 bp, Homo sapiens
ctggcctctaggaatatgctgagtgg

SEQ ID NO: 27132 - DNA, 26 bp, Homo sapiens
tggcctctaggaatatgctgagtggt

SEQ ID NO: 27133 - DNA, 26 bp, Homo sapiens
ggcctctaggaatatgctgagtggtg

SEQ ID NO: 27134 - DNA, 26 bp, Homo sapiens
gcctctaggaatatgctgagtggtga

SEQ ID NO: 27135 - DNA, 26 bp, Homo sapiens
cctctaggaatatgctgagtggtgat

SEQ ID NO: 27136 - DNA, 26 bp, Homo sapiens
ctctaggaatatgctgagtggtgatg

SEQ ID NO: 27137 - DNA, 26 bp, Homo sapiens
tctaggaatatgctgagtggtgatgt

SEQ ID NO: 27138 - DNA, 26 bp, Homo sapiens
ctaggaatatgctgagtggtgatgta

SEQ ID NO: 27139 - DNA, 26 bp, Homo sapiens
taggaatatgctgagtggtgatgtat

SEQ ID NO: 27140 - DNA, 26 bp, Homo sapiens
aggaatatgctgagtggtgatgtatg

SEQ ID NO: 27141 - DNA, 26 bp, Homo sapiens
ggaatatgctgagtggtgatgtatgc

SEQ ID NO: 27142 - DNA, 26 bp, Homo sapiens
gaatatgctgagtggtgatgtatgcc

SEQ ID NO: 27143 - DNA, 26 bp, Homo sapiens
aatatgctgagtggtgatgtatgccc

SEQ ID NO: 27144 - DNA, 26 bp, Homo sapiens
atatgctgagtggtgatgtatgcccc

SEQ ID NO: 27145 - DNA, 26 bp, Homo sapiens
tatgctgagtggtgatgtatgcccca

SEQ ID NO: 27146 - DNA, 26 bp, Homo sapiens
atgctgagtggtgatgtatgccccag

SEQ ID NO: 27147 - DNA, 26 bp, Homo sapiens
tgctgagtggtgatgtatgccccagt

SEQ ID NO: 27148 - DNA, 26 bp, Homo sapiens
gctgagtggtgatgtatgccccagtg

SEQ ID NO: 27149 - DNA, 26 bp, Homo sapiens
ctgagtggtgatgtatgccccagtgc

SEQ ID NO: 27150 - DNA, 26 bp, Homo sapiens
tgagtggtgatgtatgccccagtgcc

SEQ ID NO: 27151 - DNA, 26 bp, Homo sapiens
gagtggtgatgtatgccccagtgcca

SEQ ID NO: 27152 - DNA, 26 bp, Homo sapiens
agtggtgatgtatgccccagtgccag

SEQ ID NO: 27153 - DNA, 26 bp, Homo sapiens
gtggtgatgtatgccccagtgccagc

SEQ ID NO: 27154 - DNA, 26 bp, Homo sapiens
tggtgatgtatgccccagtgccagcc

SEQ ID NO: 27155 - DNA, 26 bp, Homo sapiens
ggtgatgtatgccccagtgccagccc

SEQ ID NO: 27156 - DNA, 26 bp, Homo sapiens
gtgatgtatgccccagtgccagccca

SEQ ID NO: 27157 - DNA, 26 bp, Homo sapiens
tgatgtatgccccagtgccagcccag

SEQ ID NO: 27158 - DNA, 26 bp, Homo sapiens
gatgtatgccccagtgccagcccaga

SEQ ID NO: 27159 - DNA, 26 bp, Homo sapiens
atgtatgccccagtgccagcccagat

SEQ ID NO: 27160 - DNA, 26 bp, Homo sapiens
tgtatgccccagtgccagcccagatc

SEQ ID NO: 27161 - DNA, 26 bp, Homo sapiens
gtatgccccagtgccagcccagatct

SEQ ID NO: 27162 - DNA, 26 bp, Homo sapiens
tatgccccagtgccagcccagatctt

SEQ ID NO: 27163 - DNA, 26 bp, Homo sapiens
atgccccagtgccagcccagatcttg

SEQ ID NO: 27164 - DNA, 26 bp, Homo sapiens
tgccccagtgccagcccagatcttgt

SEQ ID NO: 27165 - DNA, 26 bp, Homo sapiens
gccccagtgccagcccagatcttgtt

SEQ ID NO: 27166 - DNA, 26 bp, Homo sapiens
ccccagtgccagcccagatcttgttt

SEQ ID NO: 27167 - DNA, 26 bp, Homo sapiens
cccagtgccagcccagatcttgtttt

SEQ ID NO: 27168 - DNA, 26 bp, Homo sapiens
ccagtgccagcccagatcttgttttc

SEQ ID NO: 27169 - DNA, 26 bp, Homo sapiens
cagtgccagcccagatcttgttttct

SEQ ID NO: 27170 - DNA, 26 bp, Homo sapiens
agtgccagcccagatcttgttttcta

SEQ ID NO: 27171 - DNA, 26 bp, Homo sapiens
gtgccagcccagatcttgttttctaa

SEQ ID NO: 27172 - DNA, 26 bp, Homo sapiens
tgccagcccagatcttgttttctaag

SEQ ID NO: 27173 - DNA, 26 bp, Homo sapiens
gccagcccagatcttgttttctaagg

SEQ ID NO: 27174 - DNA, 26 bp, Homo sapiens
ccagcccagatcttgttttctaaggt

SEQ ID NO: 27175 - DNA, 26 bp, Homo sapiens
cagcccagatcttgttttctaaggtg

SEQ ID NO: 27176 - DNA, 26 bp, Homo sapiens
agcccagatcttgttttctaaggtga

SEQ ID NO: 27177 - DNA, 26 bp, Homo sapiens
gcccagatcttgttttctaaggtgaa

SEQ ID NO: 27178 - DNA, 26 bp, Homo sapiens
cccagatcttgttttctaaggtgaac

SEQ ID NO: 27179 - DNA, 26 bp, Homo sapiens
ccagatcttgttttctaaggtgaacc

SEQ ID NO: 27180 - DNA, 26 bp, Homo sapiens
cagatcttgttttctaaggtgaacct

SEQ ID NO: 27181 - DNA, 26 bp, Homo sapiens
agatcttgttttctaaggtgaacctt

SEQ ID NO: 27182 - DNA, 26 bp, Homo sapiens
gatcttgttttctaaggtgaacctta

SEQ ID NO: 27183 - DNA, 26 bp, Homo sapiens
atcttgttttctaaggtgaaccttag

SEQ ID NO: 27184 - DNA, 26 bp, Homo sapiens
tcttgttttctaaggtgaaccttagc

SEQ ID NO: 27185 - DNA, 26 bp, Homo sapiens
cttgttttctaaggtgaaccttagca

SEQ ID NO: 27186 - DNA, 26 bp, Homo sapiens
ttgttttctaaggtgaaccttagcag

SEQ ID NO: 27187 - DNA, 26 bp, Homo sapiens
tgttttctaaggtgaaccttagcagc

SEQ ID NO: 27188 - DNA, 26 bp, Homo sapiens
gttttctaaggtgaaccttagcagcc

SEQ ID NO: 27189 - DNA, 26 bp, Homo sapiens
ttttctaaggtgaaccttagcagcca

SEQ ID NO: 27190 - DNA, 26 bp, Homo sapiens
tttctaaggtgaaccttagcagccat

SEQ ID NO: 27191 - DNA, 26 bp, Homo sapiens
ttctaaggtgaaccttagcagccatc

SEQ ID NO: 27192 - DNA, 26 bp, Homo sapiens
tctaaggtgaaccttagcagccatcc

SEQ ID NO: 27193 - DNA, 26 bp, Homo sapiens
ctaaggtgaaccttagcagccatccc

SEQ ID NO: 27194 - DNA, 26 bp, Homo sapiens
taaggtgaaccttagcagccatccct

SEQ ID NO: 27195 - DNA, 26 bp, Homo sapiens
aaggtgaaccttagcagccatccctc

SEQ ID NO: 27196 - DNA, 26 bp, Homo sapiens
aggtgaaccttagcagccatccctcg

SEQ ID NO: 27197 - DNA, 26 bp, Homo sapiens
ggtgaaccttagcagccatccctcgg

SEQ ID NO: 27198 - DNA, 26 bp, Homo sapiens
gtgaaccttagcagccatccctcggc

SEQ ID NO: 27199 - DNA, 26 bp, Homo sapiens
tgaaccttagcagccatccctcggca

SEQ ID NO: 27200 - DNA, 26 bp, Homo sapiens
gaaccttagcagccatccctcggcag

SEQ ID NO: 27201 - DNA, 26 bp, Homo sapiens
aaccttagcagccatccctcggcagt

SEQ ID NO: 27202 - DNA, 26 bp, Homo sapiens
accttagcagccatccctcggcagtg

SEQ ID NO: 27203 - DNA, 26 bp, Homo sapiens
ccttagcagccatccctcggcagtga

SEQ ID NO: 27204 - DNA, 26 bp, Homo sapiens
cttagcagccatccctcggcagtgac

SEQ ID NO: 27205 - DNA, 26 bp, Homo sapiens
ttagcagccatccctcggcagtgaca

SEQ ID NO: 27206 - DNA, 26 bp, Homo sapiens
tagcagccatccctcggcagtgacat

SEQ ID NO: 27207 - DNA, 26 bp, Homo sapiens
agcagccatccctcggcagtgacatg

SEQ ID NO: 27208 - DNA, 26 bp, Homo sapiens
gcagccatccctcggcagtgacatgc

SEQ ID NO: 27209 - DNA, 26 bp, Homo sapiens
cagccatccctcggcagtgacatgca

SEQ ID NO: 27210 - DNA, 26 bp, Homo sapiens
agccatccctcggcagtgacatgcac

SEQ ID NO: 27211 - DNA, 26 bp, Homo sapiens
gccatccctcggcagtgacatgcacg

SEQ ID NO: 27212 - DNA, 26 bp, Homo sapiens
ccatccctcggcagtgacatgcacgg

SEQ ID NO: 27213 - DNA, 26 bp, Homo sapiens
catccctcggcagtgacatgcacggt

SEQ ID NO: 27214 - DNA, 26 bp, Homo sapiens
atccctcggcagtgacatgcacggtt

SEQ ID NO: 27215 - DNA, 26 bp, Homo sapiens
tccctcggcagtgacatgcacggttg

SEQ ID NO: 27216 - DNA, 26 bp, Homo sapiens
ccctcggcagtgacatgcacggttgc

SEQ ID NO: 27217 - DNA, 26 bp, Homo sapiens
cctcggcagtgacatgcacggttgcc

SEQ ID NO: 27218 - DNA, 26 bp, Homo sapiens
ctcggcagtgacatgcacggttgcca

SEQ ID NO: 27219 - DNA, 26 bp, Homo sapiens
tcggcagtgacatgcacggttgccag

SEQ ID NO: 27220 - DNA, 26 bp, Homo sapiens
cggcagtgacatgcacggttgccagg

SEQ ID NO: 27221 - DNA, 26 bp, Homo sapiens
ggcagtgacatgcacggttgccaggc

SEQ ID NO: 27222 - DNA, 26 bp, Homo sapiens
gcagtgacatgcacggttgccaggcg

SEQ ID NO: 27223 - DNA, 26 bp, Homo sapiens
cagtgacatgcacggttgccaggcgg

SEQ ID NO: 27224 - DNA, 26 bp, Homo sapiens
agtgacatgcacggttgccaggcggc

SEQ ID NO: 27225 - DNA, 26 bp, Homo sapiens
gtgacatgcacggttgccaggcggca

SEQ ID NO: 27226 - DNA, 26 bp, Homo sapiens
tgacatgcacggttgccaggcggcaa

SEQ ID NO: 27227 - DNA, 26 bp, Homo sapiens
gacatgcacggttgccaggcggcaat

SEQ ID NO: 27228 - DNA, 26 bp, Homo sapiens
acatgcacggttgccaggcggcaatt

SEQ ID NO: 27229 - DNA, 26 bp, Homo sapiens
catgcacggttgccaggcggcaattc

SEQ ID NO: 27230 - DNA, 26 bp, Homo sapiens
atgcacggttgccaggcggcaattca

SEQ ID NO: 27231 - DNA, 26 bp, Homo sapiens
tgcacggttgccaggcggcaattcac

SEQ ID NO: 27232 - DNA, 26 bp, Homo sapiens
gcacggttgccaggcggcaattcacc

SEQ ID NO: 27233 - DNA, 26 bp, Homo sapiens
cacggttgccaggcggcaattcacct

SEQ ID NO: 27234 - DNA, 26 bp, Homo sapiens
acggttgccaggcggcaattcacctg

SEQ ID NO: 27235 - DNA, 26 bp, Homo sapiens
cggttgccaggcggcaattcacctgt

SEQ ID NO: 27236 - DNA, 26 bp, Homo sapiens
ggttgccaggcggcaattcacctgtc

SEQ ID NO: 27237 - DNA, 26 bp, Homo sapiens
gttgccaggcggcaattcacctgtct

SEQ ID NO: 27238 - DNA, 26 bp, Homo sapiens
ttgccaggcggcaattcacctgtctt

SEQ ID NO: 27239 - DNA, 26 bp, Homo sapiens
tgccaggcggcaattcacctgtctta

SEQ ID NO: 27240 - DNA, 26 bp, Homo sapiens
gccaggcggcaattcacctgtcttac

SEQ ID NO: 27241 - DNA, 26 bp, Homo sapiens
ccaggcggcaattcacctgtcttacc

SEQ ID NO: 27242 - DNA, 26 bp, Homo sapiens
caggcggcaattcacctgtcttacca

SEQ ID NO: 27243 - DNA, 26 bp, Homo sapiens
aggcggcaattcacctgtcttaccaa

SEQ ID NO: 27244 - DNA, 26 bp, Homo sapiens
ggcggcaattcacctgtcttaccaaa

SEQ ID NO: 27245 - DNA, 26 bp, Homo sapiens
gcggcaattcacctgtcttaccaaat

SEQ ID NO: 27246 - DNA, 26 bp, Homo sapiens
cggcaattcacctgtcttaccaaatt

SEQ ID NO: 27247 - DNA, 26 bp, Homo sapiens
ggcaattcacctgtcttaccaaattt

SEQ ID NO: 27248 - DNA, 26 bp, Homo sapiens
gcaattcacctgtcttaccaaattta

SEQ ID NO: 27249 - DNA, 26 bp, Homo sapiens
caattcacctgtcttaccaaatttat

SEQ ID NO: 27250 - DNA, 26 bp, Homo sapiens
aattcacctgtcttaccaaatttatc

SEQ ID NO: 27251 - DNA, 26 bp, Homo sapiens
attcacctgtcttaccaaatttatca

SEQ ID NO: 27252 - DNA, 26 bp, Homo sapiens
ttcacctgtcttaccaaatttatcaa

SEQ ID NO: 27253 - DNA, 26 bp, Homo sapiens
tcacctgtcttaccaaatttatcaat

SEQ ID NO: 27254 - DNA, 26 bp, Homo sapiens
cacctgtcttaccaaatttatcaata

SEQ ID NO: 27255 - DNA, 26 bp, Homo sapiens
acctgtcttaccaaatttatcaatat

SEQ ID NO: 27256 - DNA, 26 bp, Homo sapiens
cctgtcttaccaaatttatcaatatt

SEQ ID NO: 27257 - DNA, 26 bp, Homo sapiens
ctgtcttaccaaatttatcaatattt

SEQ ID NO: 27258 - DNA, 26 bp, Homo sapiens
tgtcttaccaaatttatcaatatttt

SEQ ID NO: 27259 - DNA, 26 bp, Homo sapiens
gtcttaccaaatttatcaatattttt

SEQ ID NO: 27260 - DNA, 26 bp, Homo sapiens
tcttaccaaatttatcaatatttttt

SEQ ID NO: 27261 - DNA, 26 bp, Homo sapiens
cttaccaaatttatcaatattttttt

SEQ ID NO: 27262 - DNA, 26 bp, Homo sapiens
ttaccaaatttatcaatatttttttc

SEQ ID NO: 27263 - DNA, 26 bp, Homo sapiens
taccaaatttatcaatatttttttct

SEQ ID NO: 27264 - DNA, 26 bp, Homo sapiens
accaaatttatcaatatttttttctc

SEQ ID NO: 27265 - DNA, 26 bp, Homo sapiens
ccaaatttatcaatatttttttctct

SEQ ID NO: 27266 - DNA, 26 bp, Homo sapiens
caaatttatcaatatttttttctctc

SEQ ID NO: 27267 - DNA, 26 bp, Homo sapiens
aaatttatcaatatttttttctctca

SEQ ID NO: 27268 - DNA, 26 bp, Homo sapiens
aatttatcaatatttttttctctcac

SEQ ID NO: 27269 - DNA, 26 bp, Homo sapiens
atttatcaatatttttttctctcacc

SEQ ID NO: 27270 - DNA, 26 bp, Homo sapiens
tttatcaatatttttttctctcacct

SEQ ID NO: 27271 - DNA, 26 bp, Homo sapiens
ttatcaatatttttttctctcacctc

SEQ ID NO: 27272 - DNA, 26 bp, Homo sapiens
tatcaatatttttttctctcacctcc

SEQ ID NO: 27273 - DNA, 26 bp, Homo sapiens
atcaatatttttttctctcacctccc

SEQ ID NO: 27274 - DNA, 26 bp, Homo sapiens
tcaatatttttttctctcacctccca

SEQ ID NO: 27275 - DNA, 26 bp, Homo sapiens
caatatttttttctctcacctcccac

SEQ ID NO: 27276 - DNA, 26 bp, Homo sapiens
aatatttttttctctcacctcccacc

SEQ ID NO: 27277 - DNA, 26 bp, Homo sapiens
atatttttttctctcacctcccaccc

SEQ ID NO: 27278 - DNA, 26 bp, Homo sapiens
tatttttttctctcacctcccacccc

SEQ ID NO: 27279 - DNA, 26 bp, Homo sapiens
atttttttctctcacctcccacccca

SEQ ID NO: 27280 - DNA, 26 bp, Homo sapiens
tttttttctctcacctcccaccccac

SEQ ID NO: 27281 - DNA, 26 bp, Homo sapiens
ttttttctctcacctcccaccccacc

SEQ ID NO: 27282 - DNA, 26 bp, Homo sapiens
tttttctctcacctcccaccccaccc

SEQ ID NO: 27283 - DNA, 26 bp, Homo sapiens
ttttctctcacctcccaccccaccca

SEQ ID NO: 27284 - DNA, 26 bp, Homo sapiens
tttctctcacctcccaccccacccac

SEQ ID NO: 27285 - DNA, 26 bp, Homo sapiens
ttctctcacctcccaccccacccacc

SEQ ID NO: 27286 - DNA, 26 bp, Homo sapiens
tctctcacctcccaccccacccacca

SEQ ID NO: 27287 - DNA, 26 bp, Homo sapiens
ctctcacctcccaccccacccaccat

SEQ ID NO: 27288 - DNA, 26 bp, Homo sapiens
tctcacctcccaccccacccaccata

SEQ ID NO: 27289 - DNA, 26 bp, Homo sapiens
ctcacctcccaccccacccaccatag

SEQ ID NO: 27290 - DNA, 26 bp, Homo sapiens
tcacctcccaccccacccaccataga

SEQ ID NO: 27291 - DNA, 26 bp, Homo sapiens
cacctcccaccccacccaccatagaa

SEQ ID NO: 27292 - DNA, 26 bp, Homo sapiens
acctcccaccccacccaccatagaaa

SEQ ID NO: 27293 - DNA, 26 bp, Homo sapiens
cctcccaccccacccaccatagaaat

SEQ ID NO: 27294 - DNA, 26 bp, Homo sapiens
ctcccaccccacccaccatagaaatt

SEQ ID NO: 27295 - DNA, 26 bp, Homo sapiens
tcccaccccacccaccatagaaatta

SEQ ID NO: 27296 - DNA, 26 bp, Homo sapiens
cccaccccacccaccatagaaattac

SEQ ID NO: 27297 - DNA, 26 bp, Homo sapiens
ccaccccacccaccatagaaattacg

SEQ ID NO: 27298 - DNA, 26 bp, Homo sapiens
caccccacccaccatagaaattacgc

SEQ ID NO: 27299 - DNA, 26 bp, Homo sapiens
accccacccaccatagaaattacgct

SEQ ID NO: 27300 - DNA, 26 bp, Homo sapiens
ccccacccaccatagaaattacgcta

SEQ ID NO: 27301 - DNA, 26 bp, Homo sapiens
cccacccaccatagaaattacgctaa

SEQ ID NO: 27302 - DNA, 26 bp, Homo sapiens
ccacccaccatagaaattacgctaac

SEQ ID NO: 27303 - DNA, 26 bp, Homo sapiens
cacccaccatagaaattacgctaaca

SEQ ID NO: 27304 - DNA, 26 bp, Homo sapiens
acccaccatagaaattacgctaacaa

SEQ ID NO: 27305 - DNA, 26 bp, Homo sapiens
cccaccatagaaattacgctaacaaa

SEQ ID NO: 27306 - DNA, 26 bp, Homo sapiens
ccaccatagaaattacgctaacaaaa

SEQ ID NO: 27307 - DNA, 26 bp, Homo sapiens
caccatagaaattacgctaacaaaac

SEQ ID NO: 27308 - DNA, 26 bp, Homo sapiens
accatagaaattacgctaacaaaacc

SEQ ID NO: 27309 - DNA, 26 bp, Homo sapiens
ccatagaaattacgctaacaaaacca

SEQ ID NO: 27310 - DNA, 26 bp, Homo sapiens
catagaaattacgctaacaaaaccat

SEQ ID NO: 27311 - DNA, 26 bp, Homo sapiens
atagaaattacgctaacaaaaccata

SEQ ID NO: 27312 - DNA, 26 bp, Homo sapiens
tagaaattacgctaacaaaaccatat

SEQ ID NO: 27313 - DNA, 26 bp, Homo sapiens
agaaattacgctaacaaaaccatatc

SEQ ID NO: 27314 - DNA, 26 bp, Homo sapiens
gaaattacgctaacaaaaccatatcg

SEQ ID NO: 27315 - DNA, 26 bp, Homo sapiens
aaattacgctaacaaaaccatatcga

SEQ ID NO: 27316 - DNA, 26 bp, Homo sapiens
aattacgctaacaaaaccatatcgat

SEQ ID NO: 27317 - DNA, 26 bp, Homo sapiens
attacgctaacaaaaccatatcgatt

SEQ ID NO: 27318 - DNA, 26 bp, Homo sapiens
ttacgctaacaaaaccatatcgatta

SEQ ID NO: 27319 - DNA, 26 bp, Homo sapiens
tacgctaacaaaaccatatcgattat

SEQ ID NO: 27320 - DNA, 26 bp, Homo sapiens
acgctaacaaaaccatatcgattata

SEQ ID NO: 27321 - DNA, 26 bp, Homo sapiens
cgctaacaaaaccatatcgattatat

SEQ ID NO: 27322 - DNA, 26 bp, Homo sapiens
gctaacaaaaccatatcgattatatg

SEQ ID NO: 27323 - DNA, 26 bp, Homo sapiens
ctaacaaaaccatatcgattatatgt

SEQ ID NO: 27324 - DNA, 26 bp, Homo sapiens
taacaaaaccatatcgattatatgtt

SEQ ID NO: 27325 - DNA, 26 bp, Homo sapiens
aacaaaaccatatcgattatatgttg

SEQ ID NO: 27326 - DNA, 26 bp, Homo sapiens
acaaaaccatatcgattatatgttga

SEQ ID NO: 27327 - DNA, 26 bp, Homo sapiens
caaaaccatatcgattatatgttgaa

SEQ ID NO: 27328 - DNA, 26 bp, Homo sapiens
aaaaccatatcgattatatgttgaag

SEQ ID NO: 27329 - DNA, 26 bp, Homo sapiens
aaaccatatcgattatatgttgaagc

SEQ ID NO: 27330 - DNA, 26 bp, Homo sapiens
aaccatatcgattatatgttgaagca

SEQ ID NO: 27331 - DNA, 26 bp, Homo sapiens
accatatcgattatatgttgaagcag

SEQ ID NO: 27332 - DNA, 26 bp, Homo sapiens
ccatatcgattatatgttgaagcaga

SEQ ID NO: 27333 - DNA, 26 bp, Homo sapiens
catatcgattatatgttgaagcagat

SEQ ID NO: 27334 - DNA, 26 bp, Homo sapiens
atatcgattatatgttgaagcagatg

SEQ ID NO: 27335 - DNA, 26 bp, Homo sapiens
tatcgattatatgttgaagcagatga

SEQ ID NO: 27336 - DNA, 26 bp, Homo sapiens
atcgattatatgttgaagcagatgat

SEQ ID NO: 27337 - DNA, 26 bp, Homo sapiens
tcgattatatgttgaagcagatgatt

SEQ ID NO: 27338 - DNA, 26 bp, Homo sapiens
cgattatatgttgaagcagatgattt

SEQ ID NO: 27339 - DNA, 26 bp, Homo sapiens
gattatatgttgaagcagatgattta

SEQ ID NO: 27340 - DNA, 26 bp, Homo sapiens
attatatgttgaagcagatgatttat

SEQ ID NO: 27341 - DNA, 26 bp, Homo sapiens
ttatatgttgaagcagatgatttatt

SEQ ID NO: 27342 - DNA, 26 bp, Homo sapiens
tatatgttgaagcagatgatttattt

SEQ ID NO: 27343 - DNA, 26 bp, Homo sapiens
atatgttgaagcagatgatttatttt

SEQ ID NO: 27344 - DNA, 26 bp, Homo sapiens
tatgttgaagcagatgatttattttt

SEQ ID NO: 27345 - DNA, 26 bp, Homo sapiens
atgttgaagcagatgatttatttttt

SEQ ID NO: 27346 - DNA, 26 bp, Homo sapiens
tgttgaagcagatgatttattttttc

SEQ ID NO: 27347 - DNA, 26 bp, Homo sapiens
gttgaagcagatgatttattttttct

SEQ ID NO: 27348 - DNA, 26 bp, Homo sapiens
ttgaagcagatgatttattttttctt

SEQ ID NO: 27349 - DNA, 26 bp, Homo sapiens
tgaagcagatgatttattttttcttc

SEQ ID NO: 27350 - DNA, 26 bp, Homo sapiens
gaagcagatgatttattttttcttcc

SEQ ID NO: 27351 - DNA, 26 bp, Homo sapiens
aagcagatgatttattttttcttcct

SEQ ID NO: 27352 - DNA, 26 bp, Homo sapiens
agcagatgatttattttttcttcctt

SEQ ID NO: 27353 - DNA, 26 bp, Homo sapiens
gcagatgatttattttttcttcctta

SEQ ID NO: 27354 - DNA, 26 bp, Homo sapiens
cagatgatttattttttcttccttag

SEQ ID NO: 27355 - DNA, 26 bp, Homo sapiens
agatgatttattttttcttccttaga

SEQ ID NO: 27356 - DNA, 26 bp, Homo sapiens
gatgatttattttttcttccttagaa

SEQ ID NO: 27357 - DNA, 26 bp, Homo sapiens
atgatttattttttcttccttagaag

SEQ ID NO: 27358 - DNA, 26 bp, Homo sapiens
tgatttattttttcttccttagaagg

SEQ ID NO: 27359 - DNA, 26 bp, Homo sapiens
gatttattttttcttccttagaaggg

SEQ ID NO: 27360 - DNA, 26 bp, Homo sapiens
atttattttttcttccttagaaggga

SEQ ID NO: 27361 - DNA, 26 bp, Homo sapiens
tttattttttcttccttagaagggaa

SEQ ID NO: 27362 - DNA, 26 bp, Homo sapiens
ttattttttcttccttagaagggaaa

SEQ ID NO: 27363 - DNA, 26 bp, Homo sapiens
tattttttcttccttagaagggaaac

SEQ ID NO: 27364 - DNA, 26 bp, Homo sapiens
attttttcttccttagaagggaaaca

SEQ ID NO: 27365 - DNA, 26 bp, Homo sapiens
ttttttcttccttagaagggaaacaa

SEQ ID NO: 27366 - DNA, 26 bp, Homo sapiens
tttttcttccttagaagggaaacaat

SEQ ID NO: 27367 - DNA, 26 bp, Homo sapiens
ttttcttccttagaagggaaacaatt

SEQ ID NO: 27368 - DNA, 26 bp, Homo sapiens
tttcttccttagaagggaaacaattt

SEQ ID NO: 27369 - DNA, 26 bp, Homo sapiens
ttcttccttagaagggaaacaatttc

SEQ ID NO: 27370 - DNA, 26 bp, Homo sapiens
tcttccttagaagggaaacaatttcc

SEQ ID NO: 27371 - DNA, 26 bp, Homo sapiens
cttccttagaagggaaacaatttcca

SEQ ID NO: 27372 - DNA, 26 bp, Homo sapiens
ttccttagaagggaaacaatttccat

SEQ ID NO: 27373 - DNA, 26 bp, Homo sapiens
tccttagaagggaaacaatttccatg

SEQ ID NO: 27374 - DNA, 26 bp, Homo sapiens
ccttagaagggaaacaatttccatgg

SEQ ID NO: 27375 - DNA, 26 bp, Homo sapiens
cttagaagggaaacaatttccatgga

SEQ ID NO: 27376 - DNA, 26 bp, Homo sapiens
ttagaagggaaacaatttccatggaa

SEQ ID NO: 27377 - DNA, 26 bp, Homo sapiens
tagaagggaaacaatttccatggaat

SEQ ID NO: 27378 - DNA, 26 bp, Homo sapiens
agaagggaaacaatttccatggaatt

SEQ ID NO: 27379 - DNA, 26 bp, Homo sapiens
gaagggaaacaatttccatggaattg

SEQ ID NO: 27380 - DNA, 26 bp, Homo sapiens
aagggaaacaatttccatggaattgg

SEQ ID NO: 27381 - DNA, 26 bp, Homo sapiens
agggaaacaatttccatggaattggg

SEQ ID NO: 27382 - DNA, 26 bp, Homo sapiens
gggaaacaatttccatggaattggga

SEQ ID NO: 27383 - DNA, 26 bp, Homo sapiens
ggaaacaatttccatggaattgggaa

SEQ ID NO: 27384 - DNA, 26 bp, Homo sapiens
gaaacaatttccatggaattgggaat

SEQ ID NO: 27385 - DNA, 26 bp, Homo sapiens
aaacaatttccatggaattgggaatt

SEQ ID NO: 27386 - DNA, 26 bp, Homo sapiens
aacaatttccatggaattgggaattg

SEQ ID NO: 27387 - DNA, 26 bp, Homo sapiens
acaatttccatggaattgggaattgt

SEQ ID NO: 27388 - DNA, 26 bp, Homo sapiens
caatttccatggaattgggaattgta

SEQ ID NO: 27389 - DNA, 26 bp, Homo sapiens
aatttccatggaattgggaattgtat

SEQ ID NO: 27390 - DNA, 26 bp, Homo sapiens
atttccatggaattgggaattgtatt

SEQ ID NO: 27391 - DNA, 26 bp, Homo sapiens
tttccatggaattgggaattgtattg

SEQ ID NO: 27392 - DNA, 26 bp, Homo sapiens
ttccatggaattgggaattgtattga

SEQ ID NO: 27393 - DNA, 26 bp, Homo sapiens
tccatggaattgggaattgtattgat

SEQ ID NO: 27394 - DNA, 26 bp, Homo sapiens
ccatggaattgggaattgtattgatc

SEQ ID NO: 27395 - DNA, 26 bp, Homo sapiens
catggaattgggaattgtattgatct

SEQ ID NO: 27396 - DNA, 26 bp, Homo sapiens
atggaattgggaattgtattgatctc

SEQ ID NO: 27397 - DNA, 26 bp, Homo sapiens
tggaattgggaattgtattgatctcc

SEQ ID NO: 27398 - DNA, 26 bp, Homo sapiens
ggaattgggaattgtattgatctcct

SEQ ID NO: 27399 - DNA, 26 bp, Homo sapiens
gaattgggaattgtattgatctcctc

SEQ ID NO: 27400 - DNA, 26 bp, Homo sapiens
aattgggaattgtattgatctcctcc

SEQ ID NO: 27401 - DNA, 26 bp, Homo sapiens
attgggaattgtattgatctcctccc

SEQ ID NO: 27402 - DNA, 26 bp, Homo sapiens
ttgggaattgtattgatctcctcccc

SEQ ID NO: 27403 - DNA, 26 bp, Homo sapiens
tgggaattgtattgatctcctccccc

SEQ ID NO: 27404 - DNA, 26 bp, Homo sapiens
gggaattgtattgatctcctcccccc

SEQ ID NO: 27405 - DNA, 26 bp, Homo sapiens
ggaattgtattgatctcctcccccca

SEQ ID NO: 27406 - DNA, 26 bp, Homo sapiens
gaattgtattgatctcctccccccat

SEQ ID NO: 27407 - DNA, 26 bp, Homo sapiens
aattgtattgatctcctccccccatt

SEQ ID NO: 27408 - DNA, 26 bp, Homo sapiens
attgtattgatctcctccccccattg

SEQ ID NO: 27409 - DNA, 26 bp, Homo sapiens
ttgtattgatctcctccccccattgg

SEQ ID NO: 27410 - DNA, 26 bp, Homo sapiens
tgtattgatctcctccccccattgga

SEQ ID NO: 27411 - DNA, 26 bp, Homo sapiens
gtattgatctcctccccccattggag

SEQ ID NO: 27412 - DNA, 26 bp, Homo sapiens
tattgatctcctccccccattggagc

SEQ ID NO: 27413 - DNA, 26 bp, Homo sapiens
attgatctcctccccccattggagca

SEQ ID NO: 27414 - DNA, 26 bp, Homo sapiens
ttgatctcctccccccattggagcaa

SEQ ID NO: 27415 - DNA, 26 bp, Homo sapiens
tgatctcctccccccattggagcaag

SEQ ID NO: 27416 - DNA, 26 bp, Homo sapiens
gatctcctccccccattggagcaagg

SEQ ID NO: 27417 - DNA, 26 bp, Homo sapiens
atctcctccccccattggagcaaggg

SEQ ID NO: 27418 - DNA, 26 bp, Homo sapiens
tctcctccccccattggagcaagggc

SEQ ID NO: 27419 - DNA, 26 bp, Homo sapiens
ctcctccccccattggagcaagggct

SEQ ID NO: 27420 - DNA, 26 bp, Homo sapiens
tcctccccccattggagcaagggctc

SEQ ID NO: 27421 - DNA, 26 bp, Homo sapiens
cctccccccattggagcaagggctcg

SEQ ID NO: 27422 - DNA, 26 bp, Homo sapiens
ctccccccattggagcaagggctcga

SEQ ID NO: 27423 - DNA, 26 bp, Homo sapiens
tccccccattggagcaagggctcgag

SEQ ID NO: 27424 - DNA, 26 bp, Homo sapiens
ccccccattggagcaagggctcgaga

SEQ ID NO: 27425 - DNA, 26 bp, Homo sapiens
cccccattggagcaagggctcgagaa

SEQ ID NO: 27426 - DNA, 26 bp, Homo sapiens
ccccattggagcaagggctcgagaat

SEQ ID NO: 27427 - DNA, 26 bp, Homo sapiens
cccattggagcaagggctcgagaatc

SEQ ID NO: 27428 - DNA, 26 bp, Homo sapiens
ccattggagcaagggctcgagaatcc

SEQ ID NO: 27429 - DNA, 26 bp, Homo sapiens
cattggagcaagggctcgagaatcca

SEQ ID NO: 27430 - DNA, 26 bp, Homo sapiens
attggagcaagggctcgagaatccac

SEQ ID NO: 27431 - DNA, 26 bp, Homo sapiens
ttggagcaagggctcgagaatccact

SEQ ID NO: 27432 - DNA, 26 bp, Homo sapiens
tggagcaagggctcgagaatccactt

SEQ ID NO: 27433 - DNA, 26 bp, Homo sapiens
ggagcaagggctcgagaatccacttt

SEQ ID NO: 27434 - DNA, 26 bp, Homo sapiens
gagcaagggctcgagaatccactttt

SEQ ID NO: 27435 - DNA, 26 bp, Homo sapiens
agcaagggctcgagaatccacttttg

SEQ ID NO: 27436 - DNA, 26 bp, Homo sapiens
gcaagggctcgagaatccacttttgg

SEQ ID NO: 27437 - DNA, 26 bp, Homo sapiens
caagggctcgagaatccacttttgga

SEQ ID NO: 27438 - DNA, 26 bp, Homo sapiens
aagggctcgagaatccacttttggat

SEQ ID NO: 27439 - DNA, 26 bp, Homo sapiens
agggctcgagaatccacttttggatg

SEQ ID NO: 27440 - DNA, 26 bp, Homo sapiens
gggctcgagaatccacttttggatgg

SEQ ID NO: 27441 - DNA, 26 bp, Homo sapiens
ggctcgagaatccacttttggatggt

SEQ ID NO: 27442 - DNA, 26 bp, Homo sapiens
gctcgagaatccacttttggatggtt

SEQ ID NO: 27443 - DNA, 26 bp, Homo sapiens
ctcgagaatccacttttggatggttg

SEQ ID NO: 27444 - DNA, 26 bp, Homo sapiens
tcgagaatccacttttggatggttgc

SEQ ID NO: 27445 - DNA, 26 bp, Homo sapiens
cgagaatccacttttggatggttgca

SEQ ID NO: 27446 - DNA, 26 bp, Homo sapiens
gagaatccacttttggatggttgcag

SEQ ID NO: 27447 - DNA, 26 bp, Homo sapiens
agaatccacttttggatggttgcagt

SEQ ID NO: 27448 - DNA, 26 bp, Homo sapiens
gaatccacttttggatggttgcagtg

SEQ ID NO: 27449 - DNA, 26 bp, Homo sapiens
aatccacttttggatggttgcagtga

SEQ ID NO: 27450 - DNA, 26 bp, Homo sapiens
atccacttttggatggttgcagtgag

SEQ ID NO: 27451 - DNA, 26 bp, Homo sapiens
tccacttttggatggttgcagtgaga

SEQ ID NO: 27452 - DNA, 26 bp, Homo sapiens
ccacttttggatggttgcagtgagat

SEQ ID NO: 27453 - DNA, 26 bp, Homo sapiens
cacttttggatggttgcagtgagatc

SEQ ID NO: 27454 - DNA, 26 bp, Homo sapiens
acttttggatggttgcagtgagatct

SEQ ID NO: 27455 - DNA, 26 bp, Homo sapiens
cttttggatggttgcagtgagatctg

SEQ ID NO: 27456 - DNA, 26 bp, Homo sapiens
ttttggatggttgcagtgagatctga

SEQ ID NO: 27457 - DNA, 26 bp, Homo sapiens
tttggatggttgcagtgagatctgaa

SEQ ID NO: 27458 - DNA, 26 bp, Homo sapiens
ttggatggttgcagtgagatctgaat

SEQ ID NO: 27459 - DNA, 26 bp, Homo sapiens
tggatggttgcagtgagatctgaatt

SEQ ID NO: 27460 - DNA, 26 bp, Homo sapiens
ggatggttgcagtgagatctgaatta

SEQ ID NO: 27461 - DNA, 26 bp, Homo sapiens
gatggttgcagtgagatctgaattat

SEQ ID NO: 27462 - DNA, 26 bp, Homo sapiens
atggttgcagtgagatctgaattatg

SEQ ID NO: 27463 - DNA, 26 bp, Homo sapiens
tggttgcagtgagatctgaattatgt

SEQ ID NO: 27464 - DNA, 26 bp, Homo sapiens
ggttgcagtgagatctgaattatgta

SEQ ID NO: 27465 - DNA, 26 bp, Homo sapiens
gttgcagtgagatctgaattatgtaa

SEQ ID NO: 27466 - DNA, 26 bp, Homo sapiens
ttgcagtgagatctgaattatgtaac

SEQ ID NO: 27467 - DNA, 26 bp, Homo sapiens
tgcagtgagatctgaattatgtaact

SEQ ID NO: 27468 - DNA, 26 bp, Homo sapiens
gcagtgagatctgaattatgtaactt

SEQ ID NO: 27469 - DNA, 26 bp, Homo sapiens
cagtgagatctgaattatgtaacttt

SEQ ID NO: 27470 - DNA, 26 bp, Homo sapiens
agtgagatctgaattatgtaactttg

SEQ ID NO: 27471 - DNA, 26 bp, Homo sapiens
gtgagatctgaattatgtaactttgg

SEQ ID NO: 27472 - DNA, 26 bp, Homo sapiens
tgagatctgaattatgtaactttggc

SEQ ID NO: 27473 - DNA, 26 bp, Homo sapiens
gagatctgaattatgtaactttggcc

SEQ ID NO: 27474 - DNA, 26 bp, Homo sapiens
agatctgaattatgtaactttggcct

SEQ ID NO: 27475 - DNA, 26 bp, Homo sapiens
gatctgaattatgtaactttggccta

SEQ ID NO: 27476 - DNA, 26 bp, Homo sapiens
atctgaattatgtaactttggcctaa

SEQ ID NO: 27477 - DNA, 26 bp, Homo sapiens
tctgaattatgtaactttggcctaat

SEQ ID NO: 27478 - DNA, 26 bp, Homo sapiens
ctgaattatgtaactttggcctaata

SEQ ID NO: 27479 - DNA, 26 bp, Homo sapiens
tgaattatgtaactttggcctaataa

SEQ ID NO: 27480 - DNA, 26 bp, Homo sapiens
gaattatgtaactttggcctaataac

SEQ ID NO: 27481 - DNA, 26 bp, Homo sapiens
aattatgtaactttggcctaataacc

SEQ ID NO: 27482 - DNA, 26 bp, Homo sapiens
attatgtaactttggcctaataaccc

SEQ ID NO: 27483 - DNA, 26 bp, Homo sapiens
ttatgtaactttggcctaataaccct

SEQ ID NO: 27484 - DNA, 26 bp, Homo sapiens
tatgtaactttggcctaataaccctg

SEQ ID NO: 27485 - DNA, 26 bp, Homo sapiens
atgtaactttggcctaataaccctgg

SEQ ID NO: 27486 - DNA, 26 bp, Homo sapiens
tgtaactttggcctaataaccctgga

SEQ ID NO: 27487 - DNA, 26 bp, Homo sapiens
gtaactttggcctaataaccctggat

SEQ ID NO: 27488 - DNA, 26 bp, Homo sapiens
taactttggcctaataaccctggatt

SEQ ID NO: 27489 - DNA, 26 bp, Homo sapiens
aactttggcctaataaccctggattg

SEQ ID NO: 27490 - DNA, 26 bp, Homo sapiens
actttggcctaataaccctggattgg

SEQ ID NO: 27491 - DNA, 26 bp, Homo sapiens
ctttggcctaataaccctggattgga

SEQ ID NO: 27492 - DNA, 26 bp, Homo sapiens
tttggcctaataaccctggattggag

SEQ ID NO: 27493 - DNA, 26 bp, Homo sapiens
ttggcctaataaccctggattggagc

SEQ ID NO: 27494 - DNA, 26 bp, Homo sapiens
tggcctaataaccctggattggagca

SEQ ID NO: 27495 - DNA, 26 bp, Homo sapiens
ggcctaataaccctggattggagcag

SEQ ID NO: 27496 - DNA, 26 bp, Homo sapiens
gcctaataaccctggattggagcaga

SEQ ID NO: 27497 - DNA, 26 bp, Homo sapiens
cctaataaccctggattggagcagac

SEQ ID NO: 27498 - DNA, 26 bp, Homo sapiens
ctaataaccctggattggagcagaca

SEQ ID NO: 27499 - DNA, 26 bp, Homo sapiens
taataaccctggattggagcagacaa

SEQ ID NO: 27500 - DNA, 26 bp, Homo sapiens
aataaccctggattggagcagacaat

SEQ ID NO: 27501 - DNA, 26 bp, Homo sapiens
ataaccctggattggagcagacaatt

SEQ ID NO: 27502 - DNA, 26 bp, Homo sapiens
taaccctggattggagcagacaattt

SEQ ID NO: 27503 - DNA, 26 bp, Homo sapiens
aaccctggattggagcagacaatttt

SEQ ID NO: 27504 - DNA, 26 bp, Homo sapiens
accctggattggagcagacaattttt

SEQ ID NO: 27505 - DNA, 26 bp, Homo sapiens
ccctggattggagcagacaattttta

SEQ ID NO: 27506 - DNA, 26 bp, Homo sapiens
cctggattggagcagacaatttttaa

SEQ ID NO: 27507 - DNA, 26 bp, Homo sapiens
ctggattggagcagacaatttttaac

SEQ ID NO: 27508 - DNA, 26 bp, Homo sapiens
tggattggagcagacaatttttaaca

SEQ ID NO: 27509 - DNA, 26 bp, Homo sapiens
ggattggagcagacaatttttaacag

SEQ ID NO: 27510 - DNA, 26 bp, Homo sapiens
gattggagcagacaatttttaacagc

SEQ ID NO: 27511 - DNA, 26 bp, Homo sapiens
attggagcagacaatttttaacagct

SEQ ID NO: 27512 - DNA, 26 bp, Homo sapiens
ttggagcagacaatttttaacagcta

SEQ ID NO: 27513 - DNA, 26 bp, Homo sapiens
tggagcagacaatttttaacagctac

SEQ ID NO: 27514 - DNA, 26 bp, Homo sapiens
ggagcagacaatttttaacagctacg

SEQ ID NO: 27515 - DNA, 26 bp, Homo sapiens
gagcagacaatttttaacagctacga

SEQ ID NO: 27516 - DNA, 26 bp, Homo sapiens
agcagacaatttttaacagctacgag

SEQ ID NO: 27517 - DNA, 26 bp, Homo sapiens
gcagacaatttttaacagctacgaga

SEQ ID NO: 27518 - DNA, 26 bp, Homo sapiens
cagacaatttttaacagctacgagaa

SEQ ID NO: 27519 - DNA, 26 bp, Homo sapiens
agacaatttttaacagctacgagaac

SEQ ID NO: 27520 - DNA, 26 bp, Homo sapiens
gacaatttttaacagctacgagaacc

SEQ ID NO: 27521 - DNA, 26 bp, Homo sapiens
acaatttttaacagctacgagaaccc

SEQ ID NO: 27522 - DNA, 26 bp, Homo sapiens
caatttttaacagctacgagaacccc

SEQ ID NO: 27523 - DNA, 26 bp, Homo sapiens
aatttttaacagctacgagaacccca

SEQ ID NO: 27524 - DNA, 26 bp, Homo sapiens
atttttaacagctacgagaaccccaa

SEQ ID NO: 27525 - DNA, 26 bp, Homo sapiens
tttttaacagctacgagaaccccaat

SEQ ID NO: 27526 - DNA, 26 bp, Homo sapiens
ttttaacagctacgagaaccccaata

SEQ ID NO: 27527 - DNA, 26 bp, Homo sapiens
tttaacagctacgagaaccccaatac

SEQ ID NO: 27528 - DNA, 26 bp, Homo sapiens
ttaacagctacgagaaccccaatact

SEQ ID NO: 27529 - DNA, 26 bp, Homo sapiens
taacagctacgagaaccccaatacta

SEQ ID NO: 27530 - DNA, 26 bp, Homo sapiens
aacagctacgagaaccccaatactaa

SEQ ID NO: 27531 - DNA, 26 bp, Homo sapiens
acagctacgagaaccccaatactaat

SEQ ID NO: 27532 - DNA, 26 bp, Homo sapiens
cagctacgagaaccccaatactaatg

SEQ ID NO: 27533 - DNA, 26 bp, Homo sapiens
agctacgagaaccccaatactaatgc

SEQ ID NO: 27534 - DNA, 26 bp, Homo sapiens
gctacgagaaccccaatactaatgca

SEQ ID NO: 27535 - DNA, 26 bp, Homo sapiens
ctacgagaaccccaatactaatgcat

SEQ ID NO: 27536 - DNA, 26 bp, Homo sapiens
tacgagaaccccaatactaatgcatt

SEQ ID NO: 27537 - DNA, 26 bp, Homo sapiens
acgagaaccccaatactaatgcattg

SEQ ID NO: 27538 - DNA, 26 bp, Homo sapiens
cgagaaccccaatactaatgcattga

SEQ ID NO: 27539 - DNA, 26 bp, Homo sapiens
gagaaccccaatactaatgcattgat

SEQ ID NO: 27540 - DNA, 26 bp, Homo sapiens
agaaccccaatactaatgcattgatt

SEQ ID NO: 27541 - DNA, 26 bp, Homo sapiens
gaaccccaatactaatgcattgattt

SEQ ID NO: 27542 - DNA, 26 bp, Homo sapiens
aaccccaatactaatgcattgatttt

SEQ ID NO: 27543 - DNA, 26 bp, Homo sapiens
accccaatactaatgcattgattttc

SEQ ID NO: 27544 - DNA, 26 bp, Homo sapiens
ccccaatactaatgcattgattttcc

SEQ ID NO: 27545 - DNA, 26 bp, Homo sapiens
cccaatactaatgcattgattttcct

SEQ ID NO: 27546 - DNA, 26 bp, Homo sapiens
ccaatactaatgcattgattttcctt

SEQ ID NO: 27547 - DNA, 26 bp, Homo sapiens
caatactaatgcattgattttccttt

SEQ ID NO: 27548 - DNA, 26 bp, Homo sapiens
aatactaatgcattgattttccttta

SEQ ID NO: 27549 - DNA, 26 bp, Homo sapiens
atactaatgcattgattttcctttaa

SEQ ID NO: 27550 - DNA, 26 bp, Homo sapiens
tactaatgcattgattttcctttaat

SEQ ID NO: 27551 - DNA, 26 bp, Homo sapiens
actaatgcattgattttcctttaata

SEQ ID NO: 27552 - DNA, 26 bp, Homo sapiens
ctaatgcattgattttcctttaatag

SEQ ID NO: 27553 - DNA, 26 bp, Homo sapiens
taatgcattgattttcctttaataga

SEQ ID NO: 27554 - DNA, 26 bp, Homo sapiens
aatgcattgattttcctttaatagaa

SEQ ID NO: 27555 - DNA, 26 bp, Homo sapiens
atgcattgattttcctttaatagaat

SEQ ID NO: 27556 - DNA, 26 bp, Homo sapiens
tgcattgattttcctttaatagaatt

SEQ ID NO: 27557 - DNA, 26 bp, Homo sapiens
gcattgattttcctttaatagaattt

SEQ ID NO: 27558 - DNA, 26 bp, Homo sapiens
cattgattttcctttaatagaatttc

SEQ ID NO: 27559 - DNA, 26 bp, Homo sapiens
attgattttcctttaatagaatttcc

SEQ ID NO: 27560 - DNA, 26 bp, Homo sapiens
ttgattttcctttaatagaatttcct

SEQ ID NO: 27561 - DNA, 26 bp, Homo sapiens
tgattttcctttaatagaatttcctt

SEQ ID NO: 27562 - DNA, 26 bp, Homo sapiens
gattttcctttaatagaatttccttg

SEQ ID NO: 27563 - DNA, 26 bp, Homo sapiens
attttcctttaatagaatttccttgt

SEQ ID NO: 27564 - DNA, 26 bp, Homo sapiens
ttttcctttaatagaatttccttgtt

SEQ ID NO: 27565 - DNA, 26 bp, Homo sapiens
tttcctttaatagaatttccttgttg

SEQ ID NO: 27566 - DNA, 26 bp, Homo sapiens
ttcctttaatagaatttccttgttga

SEQ ID NO: 27567 - DNA, 26 bp, Homo sapiens
tcctttaatagaatttccttgttgaa

SEQ ID NO: 27568 - DNA, 26 bp, Homo sapiens
cctttaatagaatttccttgttgaag

SEQ ID NO: 27569 - DNA, 26 bp, Homo sapiens
ctttaatagaatttccttgttgaagg

SEQ ID NO: 27570 - DNA, 26 bp, Homo sapiens
tttaatagaatttccttgttgaagga

SEQ ID NO: 27571 - DNA, 26 bp, Homo sapiens
ttaatagaatttccttgttgaaggac

SEQ ID NO: 27572 - DNA, 26 bp, Homo sapiens
taatagaatttccttgttgaaggacg

SEQ ID NO: 27573 - DNA, 26 bp, Homo sapiens
aatagaatttccttgttgaaggacgg

SEQ ID NO: 27574 - DNA, 26 bp, Homo sapiens
atagaatttccttgttgaaggacggt

SEQ ID NO: 27575 - DNA, 26 bp, Homo sapiens
tagaatttccttgttgaaggacggtg

SEQ ID NO: 27576 - DNA, 26 bp, Homo sapiens
agaatttccttgttgaaggacggtgc

SEQ ID NO: 27577 - DNA, 26 bp, Homo sapiens
gaatttccttgttgaaggacggtgct

SEQ ID NO: 27578 - DNA, 26 bp, Homo sapiens
aatttccttgttgaaggacggtgctc

SEQ ID NO: 27579 - DNA, 26 bp, Homo sapiens
atttccttgttgaaggacggtgctca

SEQ ID NO: 27580 - DNA, 26 bp, Homo sapiens
tttccttgttgaaggacggtgctcag

SEQ ID NO: 27581 - DNA, 26 bp, Homo sapiens
ttccttgttgaaggacggtgctcagt

SEQ ID NO: 27582 - DNA, 26 bp, Homo sapiens
tccttgttgaaggacggtgctcagta

SEQ ID NO: 27583 - DNA, 26 bp, Homo sapiens
ccttgttgaaggacggtgctcagtag

SEQ ID NO: 27584 - DNA, 26 bp, Homo sapiens
cttgttgaaggacggtgctcagtaga

SEQ ID NO: 27585 - DNA, 26 bp, Homo sapiens
ttgttgaaggacggtgctcagtagag

SEQ ID NO: 27586 - DNA, 26 bp, Homo sapiens
tgttgaaggacggtgctcagtagagt

SEQ ID NO: 27587 - DNA, 26 bp, Homo sapiens
gttgaaggacggtgctcagtagagtc

SEQ ID NO: 27588 - DNA, 26 bp, Homo sapiens
ttgaaggacggtgctcagtagagtcc

SEQ ID NO: 27589 - DNA, 26 bp, Homo sapiens
tgaaggacggtgctcagtagagtcca

SEQ ID NO: 27590 - DNA, 26 bp, Homo sapiens
gaaggacggtgctcagtagagtccag

SEQ ID NO: 27591 - DNA, 26 bp, Homo sapiens
aaggacggtgctcagtagagtccagt

SEQ ID NO: 27592 - DNA, 26 bp, Homo sapiens
aggacggtgctcagtagagtccagtc

SEQ ID NO: 27593 - DNA, 26 bp, Homo sapiens
ggacggtgctcagtagagtccagtcc

SEQ ID NO: 27594 - DNA, 26 bp, Homo sapiens
gacggtgctcagtagagtccagtcca

SEQ ID NO: 27595 - DNA, 26 bp, Homo sapiens
acggtgctcagtagagtccagtccac

SEQ ID NO: 27596 - DNA, 26 bp, Homo sapiens
cggtgctcagtagagtccagtccacc

SEQ ID NO: 27597 - DNA, 26 bp, Homo sapiens
ggtgctcagtagagtccagtccaccc

SEQ ID NO: 27598 - DNA, 26 bp, Homo sapiens
gtgctcagtagagtccagtccaccct

SEQ ID NO: 27599 - DNA, 26 bp, Homo sapiens
tgctcagtagagtccagtccaccctt

SEQ ID NO: 27600 - DNA, 26 bp, Homo sapiens
gctcagtagagtccagtccacccttc

SEQ ID NO: 27601 - DNA, 26 bp, Homo sapiens
ctcagtagagtccagtccacccttca

SEQ ID NO: 27602 - DNA, 26 bp, Homo sapiens
tcagtagagtccagtccacccttcaa

SEQ ID NO: 27603 - DNA, 26 bp, Homo sapiens
cagtagagtccagtccacccttcaat

SEQ ID NO: 27604 - DNA, 26 bp, Homo sapiens
agtagagtccagtccacccttcaatc

SEQ ID NO: 27605 - DNA, 26 bp, Homo sapiens
gtagagtccagtccacccttcaatct

SEQ ID NO: 27606 - DNA, 26 bp, Homo sapiens
tagagtccagtccacccttcaatctt

SEQ ID NO: 27607 - DNA, 26 bp, Homo sapiens
agagtccagtccacccttcaatctta

SEQ ID NO: 27608 - DNA, 26 bp, Homo sapiens
gagtccagtccacccttcaatcttaa

SEQ ID NO: 27609 - DNA, 26 bp, Homo sapiens
agtccagtccacccttcaatcttaac

SEQ ID NO: 27610 - DNA, 26 bp, Homo sapiens
gtccagtccacccttcaatcttaacc

SEQ ID NO: 27611 - DNA, 26 bp, Homo sapiens
tccagtccacccttcaatcttaaccc

SEQ ID NO: 27612 - DNA, 26 bp, Homo sapiens
ccagtccacccttcaatcttaaccca

SEQ ID NO: 27613 - DNA, 26 bp, Homo sapiens
cagtccacccttcaatcttaacccat

SEQ ID NO: 27614 - DNA, 26 bp, Homo sapiens
agtccacccttcaatcttaacccatc

SEQ ID NO: 27615 - DNA, 26 bp, Homo sapiens
gtccacccttcaatcttaacccatct

SEQ ID NO: 27616 - DNA, 26 bp, Homo sapiens
tccacccttcaatcttaacccatctg

SEQ ID NO: 27617 - DNA, 26 bp, Homo sapiens
ccacccttcaatcttaacccatctga

SEQ ID NO: 27618 - DNA, 26 bp, Homo sapiens
cacccttcaatcttaacccatctgaa

SEQ ID NO: 27619 - DNA, 26 bp, Homo sapiens
acccttcaatcttaacccatctgaag

SEQ ID NO: 27620 - DNA, 26 bp, Homo sapiens
cccttcaatcttaacccatctgaaga

SEQ ID NO: 27621 - DNA, 26 bp, Homo sapiens
ccttcaatcttaacccatctgaagac

SEQ ID NO: 27622 - DNA, 26 bp, Homo sapiens
cttcaatcttaacccatctgaagact

SEQ ID NO: 27623 - DNA, 26 bp, Homo sapiens
ttcaatcttaacccatctgaagactg

SEQ ID NO: 27624 - DNA, 26 bp, Homo sapiens
tcaatcttaacccatctgaagactgt

SEQ ID NO: 27625 - DNA, 26 bp, Homo sapiens
caatcttaacccatctgaagactgtt

SEQ ID NO: 27626 - DNA, 26 bp, Homo sapiens
aatcttaacccatctgaagactgttc

SEQ ID NO: 27627 - DNA, 26 bp, Homo sapiens
atcttaacccatctgaagactgttcc

SEQ ID NO: 27628 - DNA, 26 bp, Homo sapiens
tcttaacccatctgaagactgttcct

SEQ ID NO: 27629 - DNA, 26 bp, Homo sapiens
cttaacccatctgaagactgttcctt

SEQ ID NO: 27630 - DNA, 26 bp, Homo sapiens
ttaacccatctgaagactgttccttt

SEQ ID NO: 27631 - DNA, 26 bp, Homo sapiens
taacccatctgaagactgttcctttc

SEQ ID NO: 27632 - DNA, 26 bp, Homo sapiens
aacccatctgaagactgttcctttcc

SEQ ID NO: 27633 - DNA, 26 bp, Homo sapiens
acccatctgaagactgttcctttcca

SEQ ID NO: 27634 - DNA, 26 bp, Homo sapiens
cccatctgaagactgttcctttccag

SEQ ID NO: 27635 - DNA, 26 bp, Homo sapiens
ccatctgaagactgttcctttccagt

SEQ ID NO: 27636 - DNA, 26 bp, Homo sapiens
catctgaagactgttcctttccagtc

SEQ ID NO: 27637 - DNA, 26 bp, Homo sapiens
atctgaagactgttcctttccagtcg

SEQ ID NO: 27638 - DNA, 26 bp, Homo sapiens
tctgaagactgttcctttccagtcga

SEQ ID NO: 27639 - DNA, 26 bp, Homo sapiens
ctgaagactgttcctttccagtcgag

SEQ ID NO: 27640 - DNA, 26 bp, Homo sapiens
tgaagactgttcctttccagtcgagc

SEQ ID NO: 27641 - DNA, 26 bp, Homo sapiens
gaagactgttcctttccagtcgagct

SEQ ID NO: 27642 - DNA, 26 bp, Homo sapiens
aagactgttcctttccagtcgagctc

SEQ ID NO: 27643 - DNA, 26 bp, Homo sapiens
agactgttcctttccagtcgagctcc

SEQ ID NO: 27644 - DNA, 26 bp, Homo sapiens
gactgttcctttccagtcgagctcca

SEQ ID NO: 27645 - DNA, 26 bp, Homo sapiens
actgttcctttccagtcgagctccat

SEQ ID NO: 27646 - DNA, 26 bp, Homo sapiens
ctgttcctttccagtcgagctccatt

SEQ ID NO: 27647 - DNA, 26 bp, Homo sapiens
tgttcctttccagtcgagctccattc

SEQ ID NO: 27648 - DNA, 26 bp, Homo sapiens
gttcctttccagtcgagctccattca

SEQ ID NO: 27649 - DNA, 26 bp, Homo sapiens
ttcctttccagtcgagctccattcat

SEQ ID NO: 27650 - DNA, 26 bp, Homo sapiens
tcctttccagtcgagctccattcatt

SEQ ID NO: 27651 - DNA, 26 bp, Homo sapiens
cctttccagtcgagctccattcattt

SEQ ID NO: 27652 - DNA, 26 bp, Homo sapiens
ctttccagtcgagctccattcatttc

SEQ ID NO: 27653 - DNA, 26 bp, Homo sapiens
tttccagtcgagctccattcatttct

SEQ ID NO: 27654 - DNA, 26 bp, Homo sapiens
ttccagtcgagctccattcatttctg

SEQ ID NO: 27655 - DNA, 26 bp, Homo sapiens
tccagtcgagctccattcatttctgg

SEQ ID NO: 27656 - DNA, 26 bp, Homo sapiens
ccagtcgagctccattcatttctggt

SEQ ID NO: 27657 - DNA, 26 bp, Homo sapiens
cagtcgagctccattcatttctggtt

SEQ ID NO: 27658 - DNA, 26 bp, Homo sapiens
agtcgagctccattcatttctggttg

SEQ ID NO: 27659 - DNA, 26 bp, Homo sapiens
gtcgagctccattcatttctggttga

SEQ ID NO: 27660 - DNA, 26 bp, Homo sapiens
tcgagctccattcatttctggttgaa

SEQ ID NO: 27661 - DNA, 26 bp, Homo sapiens
cgagctccattcatttctggttgaat

SEQ ID NO: 27662 - DNA, 26 bp, Homo sapiens
gagctccattcatttctggttgaata

SEQ ID NO: 27663 - DNA, 26 bp, Homo sapiens
agctccattcatttctggttgaatag

SEQ ID NO: 27664 - DNA, 26 bp, Homo sapiens
gctccattcatttctggttgaatagg

SEQ ID NO: 27665 - DNA, 26 bp, Homo sapiens
ctccattcatttctggttgaataggt

SEQ ID NO: 27666 - DNA, 26 bp, Homo sapiens
tccattcatttctggttgaataggtt

SEQ ID NO: 27667 - DNA, 26 bp, Homo sapiens
ccattcatttctggttgaataggtta

SEQ ID NO: 27668 - DNA, 26 bp, Homo sapiens
cattcatttctggttgaataggttaa

SEQ ID NO: 27669 - DNA, 26 bp, Homo sapiens
attcatttctggttgaataggttaag

SEQ ID NO: 27670 - DNA, 26 bp, Homo sapiens
ttcatttctggttgaataggttaagc

SEQ ID NO: 27671 - DNA, 26 bp, Homo sapiens
tcatttctggttgaataggttaagca

SEQ ID NO: 27672 - DNA, 26 bp, Homo sapiens
catttctggttgaataggttaagcaa

SEQ ID NO: 27673 - DNA, 26 bp, Homo sapiens
atttctggttgaataggttaagcaaa

SEQ ID NO: 27674 - DNA, 26 bp, Homo sapiens
tttctggttgaataggttaagcaaag

SEQ ID NO: 27675 - DNA, 26 bp, Homo sapiens
ttctggttgaataggttaagcaaaga

SEQ ID NO: 27676 - DNA, 26 bp, Homo sapiens
tctggttgaataggttaagcaaagac

SEQ ID NO: 27677 - DNA, 26 bp, Homo sapiens
ctggttgaataggttaagcaaagaca

SEQ ID NO: 27678 - DNA, 26 bp, Homo sapiens
tggttgaataggttaagcaaagacag

SEQ ID NO: 27679 - DNA, 26 bp, Homo sapiens
ggttgaataggttaagcaaagacaga

SEQ ID NO: 27680 - DNA, 26 bp, Homo sapiens
gttgaataggttaagcaaagacagac

SEQ ID NO: 27681 - DNA, 26 bp, Homo sapiens
ttgaataggttaagcaaagacagacc

SEQ ID NO: 27682 - DNA, 26 bp, Homo sapiens
tgaataggttaagcaaagacagacct

SEQ ID NO: 27683 - DNA, 26 bp, Homo sapiens
gaataggttaagcaaagacagacctc

SEQ ID NO: 27684 - DNA, 26 bp, Homo sapiens
aataggttaagcaaagacagacctca

SEQ ID NO: 27685 - DNA, 26 bp, Homo sapiens
ataggttaagcaaagacagacctcac

SEQ ID NO: 27686 - DNA, 26 bp, Homo sapiens
taggttaagcaaagacagacctcact

SEQ ID NO: 27687 - DNA, 26 bp, Homo sapiens
aggttaagcaaagacagacctcactg

SEQ ID NO: 27688 - DNA, 26 bp, Homo sapiens
ggttaagcaaagacagacctcactgt

SEQ ID NO: 27689 - DNA, 26 bp, Homo sapiens
gttaagcaaagacagacctcactgtt

SEQ ID NO: 27690 - DNA, 26 bp, Homo sapiens
ttaagcaaagacagacctcactgttc

SEQ ID NO: 27691 - DNA, 26 bp, Homo sapiens
taagcaaagacagacctcactgttct

SEQ ID NO: 27692 - DNA, 26 bp, Homo sapiens
aagcaaagacagacctcactgttctc

SEQ ID NO: 27693 - DNA, 26 bp, Homo sapiens
agcaaagacagacctcactgttctca

SEQ ID NO: 27694 - DNA, 26 bp, Homo sapiens
gcaaagacagacctcactgttctcaa

SEQ ID NO: 27695 - DNA, 26 bp, Homo sapiens
caaagacagacctcactgttctcaat

SEQ ID NO: 27696 - DNA, 26 bp, Homo sapiens
aaagacagacctcactgttctcaatt

SEQ ID NO: 27697 - DNA, 26 bp, Homo sapiens
aagacagacctcactgttctcaattc

SEQ ID NO: 27698 - DNA, 26 bp, Homo sapiens
agacagacctcactgttctcaattca

SEQ ID NO: 27699 - DNA, 26 bp, Homo sapiens
gacagacctcactgttctcaattcac

SEQ ID NO: 27700 - DNA, 26 bp, Homo sapiens
acagacctcactgttctcaattcact

SEQ ID NO: 27701 - DNA, 26 bp, Homo sapiens
cagacctcactgttctcaattcactt

SEQ ID NO: 27702 - DNA, 26 bp, Homo sapiens
agacctcactgttctcaattcacttt

SEQ ID NO: 27703 - DNA, 26 bp, Homo sapiens
gacctcactgttctcaattcacttta

SEQ ID NO: 27704 - DNA, 26 bp, Homo sapiens
acctcactgttctcaattcactttat

SEQ ID NO: 27705 - DNA, 26 bp, Homo sapiens
cctcactgttctcaattcactttatg

SEQ ID NO: 27706 - DNA, 26 bp, Homo sapiens
ctcactgttctcaattcactttatga

SEQ ID NO: 27707 - DNA, 26 bp, Homo sapiens
tcactgttctcaattcactttatgat

SEQ ID NO: 27708 - DNA, 26 bp, Homo sapiens
cactgttctcaattcactttatgatc

SEQ ID NO: 27709 - DNA, 26 bp, Homo sapiens
actgttctcaattcactttatgatcc

SEQ ID NO: 27710 - DNA, 26 bp, Homo sapiens
ctgttctcaattcactttatgatcct

SEQ ID NO: 27711 - DNA, 26 bp, Homo sapiens
tgttctcaattcactttatgatcctc

SEQ ID NO: 27712 - DNA, 26 bp, Homo sapiens
gttctcaattcactttatgatcctcc

SEQ ID NO: 27713 - DNA, 26 bp, Homo sapiens
ttctcaattcactttatgatcctccc

SEQ ID NO: 27714 - DNA, 26 bp, Homo sapiens
tctcaattcactttatgatcctccca

SEQ ID NO: 27715 - DNA, 26 bp, Homo sapiens
ctcaattcactttatgatcctcccat

SEQ ID NO: 27716 - DNA, 26 bp, Homo sapiens
tcaattcactttatgatcctcccatc

SEQ ID NO: 27717 - DNA, 26 bp, Homo sapiens
caattcactttatgatcctcccatca

SEQ ID NO: 27718 - DNA, 26 bp, Homo sapiens
aattcactttatgatcctcccatcat

SEQ ID NO: 27719 - DNA, 26 bp, Homo sapiens
attcactttatgatcctcccatcata

SEQ ID NO: 27720 - DNA, 26 bp, Homo sapiens
ttcactttatgatcctcccatcataa

SEQ ID NO: 27721 - DNA, 26 bp, Homo sapiens
tcactttatgatcctcccatcataaa

SEQ ID NO: 27722 - DNA, 26 bp, Homo sapiens
cactttatgatcctcccatcataaaa

SEQ ID NO: 27723 - DNA, 26 bp, Homo sapiens
actttatgatcctcccatcataaaaa

SEQ ID NO: 27724 - DNA, 26 bp, Homo sapiens
ctttatgatcctcccatcataaaaaa

SEQ ID NO: 27725 - DNA, 26 bp, Homo sapiens
tttatgatcctcccatcataaaaaat

SEQ ID NO: 27726 - DNA, 26 bp, Homo sapiens
ttatgatcctcccatcataaaaaata

SEQ ID NO: 27727 - DNA, 26 bp, Homo sapiens
tatgatcctcccatcataaaaaataa

SEQ ID NO: 27728 - DNA, 26 bp, Homo sapiens
atgatcctcccatcataaaaaataat

SEQ ID NO: 27729 - DNA, 26 bp, Homo sapiens
tgatcctcccatcataaaaaataata

SEQ ID NO: 27730 - DNA, 26 bp, Homo sapiens
gatcctcccatcataaaaaataatat

SEQ ID NO: 27731 - DNA, 26 bp, Homo sapiens
atcctcccatcataaaaaataatatc

SEQ ID NO: 27732 - DNA, 26 bp, Homo sapiens
tcctcccatcataaaaaataatatca

SEQ ID NO: 27733 - DNA, 26 bp, Homo sapiens
cctcccatcataaaaaataatatcag

SEQ ID NO: 27734 - DNA, 26 bp, Homo sapiens
ctcccatcataaaaaataatatcagc

SEQ ID NO: 27735 - DNA, 26 bp, Homo sapiens
tcccatcataaaaaataatatcagca

SEQ ID NO: 27736 - DNA, 26 bp, Homo sapiens
cccatcataaaaaataatatcagcac

SEQ ID NO: 27737 - DNA, 26 bp, Homo sapiens
ccatcataaaaaataatatcagcacc

SEQ ID NO: 27738 - DNA, 26 bp, Homo sapiens
catcataaaaaataatatcagcacct

SEQ ID NO: 27739 - DNA, 26 bp, Homo sapiens
atcataaaaaataatatcagcacctt

SEQ ID NO: 27740 - DNA, 26 bp, Homo sapiens
tcataaaaaataatatcagcaccttg

SEQ ID NO: 27741 - DNA, 26 bp, Homo sapiens
cataaaaaataatatcagcaccttgc

SEQ ID NO: 27742 - DNA, 26 bp, Homo sapiens
ataaaaaataatatcagcaccttgct

SEQ ID NO: 27743 - DNA, 26 bp, Homo sapiens
taaaaaataatatcagcaccttgctt

SEQ ID NO: 27744 - DNA, 26 bp, Homo sapiens
aaaaaataatatcagcaccttgcttt

SEQ ID NO: 27745 - DNA, 26 bp, Homo sapiens
aaaaataatatcagcaccttgctttt

SEQ ID NO: 27746 - DNA, 26 bp, Homo sapiens
aaaataatatcagcaccttgcttttc

SEQ ID NO: 27747 - DNA, 26 bp, Homo sapiens
aaataatatcagcaccttgcttttca

SEQ ID NO: 27748 - DNA, 26 bp, Homo sapiens
aataatatcagcaccttgcttttcat

SEQ ID NO: 27749 - DNA, 26 bp, Homo sapiens
ataatatcagcaccttgcttttcatg

SEQ ID NO: 27750 - DNA, 26 bp, Homo sapiens
taatatcagcaccttgcttttcatgt

SEQ ID NO: 27751 - DNA, 26 bp, Homo sapiens
aatatcagcaccttgcttttcatgtc

SEQ ID NO: 27752 - DNA, 26 bp, Homo sapiens
atatcagcaccttgcttttcatgtca

SEQ ID NO: 27753 - DNA, 26 bp, Homo sapiens
tatcagcaccttgcttttcatgtcag

SEQ ID NO: 27754 - DNA, 26 bp, Homo sapiens
atcagcaccttgcttttcatgtcaga

SEQ ID NO: 27755 - DNA, 26 bp, Homo sapiens
tcagcaccttgcttttcatgtcagaa

SEQ ID NO: 27756 - DNA, 26 bp, Homo sapiens
cagcaccttgcttttcatgtcagaac

SEQ ID NO: 27757 - DNA, 26 bp, Homo sapiens
agcaccttgcttttcatgtcagaact

SEQ ID NO: 27758 - DNA, 26 bp, Homo sapiens
gcaccttgcttttcatgtcagaacta

SEQ ID NO: 27759 - DNA, 26 bp, Homo sapiens
caccttgcttttcatgtcagaactac

SEQ ID NO: 27760 - DNA, 26 bp, Homo sapiens
accttgcttttcatgtcagaactaca

SEQ ID NO: 27761 - DNA, 26 bp, Homo sapiens
ccttgcttttcatgtcagaactacat

SEQ ID NO: 27762 - DNA, 26 bp, Homo sapiens
cttgcttttcatgtcagaactacatt

SEQ ID NO: 27763 - DNA, 26 bp, Homo sapiens
ttgcttttcatgtcagaactacattt

SEQ ID NO: 27764 - DNA, 26 bp, Homo sapiens
tgcttttcatgtcagaactacatttg

SEQ ID NO: 27765 - DNA, 26 bp, Homo sapiens
gcttttcatgtcagaactacatttga

SEQ ID NO: 27766 - DNA, 26 bp, Homo sapiens
cttttcatgtcagaactacatttgag

SEQ ID NO: 27767 - DNA, 26 bp, Homo sapiens
ttttcatgtcagaactacatttgagc

SEQ ID NO: 27768 - DNA, 26 bp, Homo sapiens
tttcatgtcagaactacatttgagcc

SEQ ID NO: 27769 - DNA, 26 bp, Homo sapiens
ttcatgtcagaactacatttgagccg

SEQ ID NO: 27770 - DNA, 26 bp, Homo sapiens
tcatgtcagaactacatttgagccgc

SEQ ID NO: 27771 - DNA, 26 bp, Homo sapiens
catgtcagaactacatttgagccgct

SEQ ID NO: 27772 - DNA, 26 bp, Homo sapiens
atgtcagaactacatttgagccgcta

SEQ ID NO: 27773 - DNA, 26 bp, Homo sapiens
tgtcagaactacatttgagccgctat

SEQ ID NO: 27774 - DNA, 26 bp, Homo sapiens
gtcagaactacatttgagccgctatt

SEQ ID NO: 27775 - DNA, 26 bp, Homo sapiens
tcagaactacatttgagccgctattc

SEQ ID NO: 27776 - DNA, 26 bp, Homo sapiens
cagaactacatttgagccgctattcc

SEQ ID NO: 27777 - DNA, 26 bp, Homo sapiens
agaactacatttgagccgctattccc

SEQ ID NO: 27778 - DNA, 26 bp, Homo sapiens
gaactacatttgagccgctattccct

SEQ ID NO: 27779 - DNA, 26 bp, Homo sapiens
aactacatttgagccgctattcccta

SEQ ID NO: 27780 - DNA, 26 bp, Homo sapiens
actacatttgagccgctattccctat

SEQ ID NO: 27781 - DNA, 26 bp, Homo sapiens
ctacatttgagccgctattccctatg

SEQ ID NO: 27782 - DNA, 26 bp, Homo sapiens
tacatttgagccgctattccctatgc

SEQ ID NO: 27783 - DNA, 26 bp, Homo sapiens
acatttgagccgctattccctatgcc

SEQ ID NO: 27784 - DNA, 26 bp, Homo sapiens
catttgagccgctattccctatgccc

SEQ ID NO: 27785 - DNA, 26 bp, Homo sapiens
atttgagccgctattccctatgccca

SEQ ID NO: 27786 - DNA, 26 bp, Homo sapiens
tttgagccgctattccctatgcccat

SEQ ID NO: 27787 - DNA, 26 bp, Homo sapiens
ttgagccgctattccctatgcccatg

SEQ ID NO: 27788 - DNA, 26 bp, Homo sapiens
tgagccgctattccctatgcccatga

SEQ ID NO: 27789 - DNA, 26 bp, Homo sapiens
gagccgctattccctatgcccatgag

SEQ ID NO: 27790 - DNA, 26 bp, Homo sapiens
agccgctattccctatgcccatgagt

SEQ ID NO: 27791 - DNA, 26 bp, Homo sapiens
gccgctattccctatgcccatgagta

SEQ ID NO: 27792 - DNA, 26 bp, Homo sapiens
ccgctattccctatgcccatgagtaa

SEQ ID NO: 27793 - DNA, 26 bp, Homo sapiens
cgctattccctatgcccatgagtaaa

SEQ ID NO: 27794 - DNA, 26 bp, Homo sapiens
gctattccctatgcccatgagtaaat

SEQ ID NO: 27795 - DNA, 26 bp, Homo sapiens
ctattccctatgcccatgagtaaatc

SEQ ID NO: 27796 - DNA, 26 bp, Homo sapiens
tattccctatgcccatgagtaaatcc

SEQ ID NO: 27797 - DNA, 26 bp, Homo sapiens
attccctatgcccatgagtaaatccc

SEQ ID NO: 27798 - DNA, 26 bp, Homo sapiens
ttccctatgcccatgagtaaatccca

SEQ ID NO: 27799 - DNA, 26 bp, Homo sapiens
tccctatgcccatgagtaaatcccat

SEQ ID NO: 27800 - DNA, 26 bp, Homo sapiens
ccctatgcccatgagtaaatcccata

SEQ ID NO: 27801 - DNA, 26 bp, Homo sapiens
cctatgcccatgagtaaatcccataa

SEQ ID NO: 27802 - DNA, 26 bp, Homo sapiens
ctatgcccatgagtaaatcccataaa

SEQ ID NO: 27803 - DNA, 26 bp, Homo sapiens
tatgcccatgagtaaatcccataaaa

SEQ ID NO: 27804 - DNA, 26 bp, Homo sapiens
atgcccatgagtaaatcccataaaag

SEQ ID NO: 27805 - DNA, 26 bp, Homo sapiens
tgcccatgagtaaatcccataaaagc

SEQ ID NO: 27806 - DNA, 26 bp, Homo sapiens
gcccatgagtaaatcccataaaagcc

SEQ ID NO: 27807 - DNA, 26 bp, Homo sapiens
cccatgagtaaatcccataaaagcca

SEQ ID NO: 27808 - DNA, 26 bp, Homo sapiens
ccatgagtaaatcccataaaagccac

SEQ ID NO: 27809 - DNA, 26 bp, Homo sapiens
catgagtaaatcccataaaagccacc

SEQ ID NO: 27810 - DNA, 26 bp, Homo sapiens
atgagtaaatcccataaaagccaccc

SEQ ID NO: 27811 - DNA, 26 bp, Homo sapiens
tgagtaaatcccataaaagccacccc

SEQ ID NO: 27812 - DNA, 26 bp, Homo sapiens
gagtaaatcccataaaagccaccccg

SEQ ID NO: 27813 - DNA, 26 bp, Homo sapiens
agtaaatcccataaaagccaccccgt

SEQ ID NO: 27814 - DNA, 26 bp, Homo sapiens
gtaaatcccataaaagccaccccgtt

SEQ ID NO: 27815 - DNA, 26 bp, Homo sapiens
taaatcccataaaagccaccccgttg

SEQ ID NO: 27816 - DNA, 26 bp, Homo sapiens
aaatcccataaaagccaccccgttgt

SEQ ID NO: 27817 - DNA, 26 bp, Homo sapiens
aatcccataaaagccaccccgttgta

SEQ ID NO: 27818 - DNA, 26 bp, Homo sapiens
atcccataaaagccaccccgttgtac

SEQ ID NO: 27819 - DNA, 26 bp, Homo sapiens
tcccataaaagccaccccgttgtact

SEQ ID NO: 27820 - DNA, 26 bp, Homo sapiens
cccataaaagccaccccgttgtactg

SEQ ID NO: 27821 - DNA, 26 bp, Homo sapiens
ccataaaagccaccccgttgtactgt

SEQ ID NO: 27822 - DNA, 26 bp, Homo sapiens
cataaaagccaccccgttgtactgtt

SEQ ID NO: 27823 - DNA, 26 bp, Homo sapiens
ataaaagccaccccgttgtactgttg

SEQ ID NO: 27824 - DNA, 26 bp, Homo sapiens
taaaagccaccccgttgtactgttgc

SEQ ID NO: 27825 - DNA, 26 bp, Homo sapiens
aaaagccaccccgttgtactgttgct

SEQ ID NO: 27826 - DNA, 26 bp, Homo sapiens
aaagccaccccgttgtactgttgcta

SEQ ID NO: 27827 - DNA, 26 bp, Homo sapiens
aagccaccccgttgtactgttgctat

SEQ ID NO: 27828 - DNA, 26 bp, Homo sapiens
agccaccccgttgtactgttgctatt

SEQ ID NO: 27829 - DNA, 26 bp, Homo sapiens
gccaccccgttgtactgttgctattt

SEQ ID NO: 27830 - DNA, 26 bp, Homo sapiens
ccaccccgttgtactgttgctatttt

SEQ ID NO: 27831 - DNA, 26 bp, Homo sapiens
caccccgttgtactgttgctattttt

SEQ ID NO: 27832 - DNA, 26 bp, Homo sapiens
accccgttgtactgttgctatttttc

SEQ ID NO: 27833 - DNA, 26 bp, Homo sapiens
ccccgttgtactgttgctatttttcc

SEQ ID NO: 27834 - DNA, 26 bp, Homo sapiens
cccgttgtactgttgctatttttcct

SEQ ID NO: 27835 - DNA, 26 bp, Homo sapiens
ccgttgtactgttgctatttttcctt

SEQ ID NO: 27836 - DNA, 26 bp, Homo sapiens
cgttgtactgttgctatttttccttg

SEQ ID NO: 27837 - DNA, 26 bp, Homo sapiens
gttgtactgttgctatttttccttgt

SEQ ID NO: 27838 - DNA, 26 bp, Homo sapiens
ttgtactgttgctatttttccttgtg

SEQ ID NO: 27839 - DNA, 26 bp, Homo sapiens
tgtactgttgctatttttccttgtgg

SEQ ID NO: 27840 - DNA, 26 bp, Homo sapiens
gtactgttgctatttttccttgtggg

SEQ ID NO: 27841 - DNA, 26 bp, Homo sapiens
tactgttgctatttttccttgtgggt

SEQ ID NO: 27842 - DNA, 26 bp, Homo sapiens
actgttgctatttttccttgtgggtg

SEQ ID NO: 27843 - DNA, 26 bp, Homo sapiens
ctgttgctatttttccttgtgggtga

SEQ ID NO: 27844 - DNA, 26 bp, Homo sapiens
tgttgctatttttccttgtgggtgat

SEQ ID NO: 27845 - DNA, 26 bp, Homo sapiens
gttgctatttttccttgtgggtgatt

SEQ ID NO: 27846 - DNA, 26 bp, Homo sapiens
ttgctatttttccttgtgggtgattg

SEQ ID NO: 27847 - DNA, 26 bp, Homo sapiens
tgctatttttccttgtgggtgattga

SEQ ID NO: 27848 - DNA, 26 bp, Homo sapiens
gctatttttccttgtgggtgattgat

SEQ ID NO: 27849 - DNA, 26 bp, Homo sapiens
ctatttttccttgtgggtgattgatt

SEQ ID NO: 27850 - DNA, 26 bp, Homo sapiens
tatttttccttgtgggtgattgattg

SEQ ID NO: 27851 - DNA, 26 bp, Homo sapiens
atttttccttgtgggtgattgattga

SEQ ID NO: 27852 - DNA, 26 bp, Homo sapiens
tttttccttgtgggtgattgattgat

SEQ ID NO: 27853 - DNA, 26 bp, Homo sapiens
ttttccttgtgggtgattgattgatg

SEQ ID NO: 27854 - DNA, 26 bp, Homo sapiens
tttccttgtgggtgattgattgatgg

SEQ ID NO: 27855 - DNA, 26 bp, Homo sapiens
ttccttgtgggtgattgattgatgga

SEQ ID NO: 27856 - DNA, 26 bp, Homo sapiens
tccttgtgggtgattgattgatggat

SEQ ID NO: 27857 - DNA, 26 bp, Homo sapiens
ccttgtgggtgattgattgatggatg

SEQ ID NO: 27858 - DNA, 26 bp, Homo sapiens
cttgtgggtgattgattgatggatga

SEQ ID NO: 27859 - DNA, 26 bp, Homo sapiens
ttgtgggtgattgattgatggatgag

SEQ ID NO: 27860 - DNA, 26 bp, Homo sapiens
tgtgggtgattgattgatggatgagt

SEQ ID NO: 27861 - DNA, 26 bp, Homo sapiens
gtgggtgattgattgatggatgagtg

SEQ ID NO: 27862 - DNA, 26 bp, Homo sapiens
tgggtgattgattgatggatgagtgc

SEQ ID NO: 27863 - DNA, 26 bp, Homo sapiens
gggtgattgattgatggatgagtgct

SEQ ID NO: 27864 - DNA, 26 bp, Homo sapiens
ggtgattgattgatggatgagtgctg

SEQ ID NO: 27865 - DNA, 26 bp, Homo sapiens
gtgattgattgatggatgagtgctga

SEQ ID NO: 27866 - DNA, 26 bp, Homo sapiens
tgattgattgatggatgagtgctgac

SEQ ID NO: 27867 - DNA, 26 bp, Homo sapiens
gattgattgatggatgagtgctgaca

SEQ ID NO: 27868 - DNA, 26 bp, Homo sapiens
attgattgatggatgagtgctgacac

SEQ ID NO: 27869 - DNA, 26 bp, Homo sapiens
ttgattgatggatgagtgctgacact

SEQ ID NO: 27870 - DNA, 26 bp, Homo sapiens
tgattgatggatgagtgctgacactt

SEQ ID NO: 27871 - DNA, 26 bp, Homo sapiens
gattgatggatgagtgctgacacttc

SEQ ID NO: 27872 - DNA, 26 bp, Homo sapiens
attgatggatgagtgctgacacttca

SEQ ID NO: 27873 - DNA, 26 bp, Homo sapiens
ttgatggatgagtgctgacacttcaa

SEQ ID NO: 27874 - DNA, 26 bp, Homo sapiens
tgatggatgagtgctgacacttcaat

SEQ ID NO: 27875 - DNA, 26 bp, Homo sapiens
gatggatgagtgctgacacttcaatg

SEQ ID NO: 27876 - DNA, 26 bp, Homo sapiens
atggatgagtgctgacacttcaatga

SEQ ID NO: 27877 - DNA, 26 bp, Homo sapiens
tggatgagtgctgacacttcaatgaa

SEQ ID NO: 27878 - DNA, 26 bp, Homo sapiens
ggatgagtgctgacacttcaatgaag

SEQ ID NO: 27879 - DNA, 26 bp, Homo sapiens
gatgagtgctgacacttcaatgaagc

SEQ ID NO: 27880 - DNA, 26 bp, Homo sapiens
atgagtgctgacacttcaatgaagct

SEQ ID NO: 27881 - DNA, 26 bp, Homo sapiens
tgagtgctgacacttcaatgaagcta

SEQ ID NO: 27882 - DNA, 26 bp, Homo sapiens
gagtgctgacacttcaatgaagctat

SEQ ID NO: 27883 - DNA, 26 bp, Homo sapiens
agtgctgacacttcaatgaagctatt

SEQ ID NO: 27884 - DNA, 26 bp, Homo sapiens
gtgctgacacttcaatgaagctattt

SEQ ID NO: 27885 - DNA, 26 bp, Homo sapiens
tgctgacacttcaatgaagctatttc

SEQ ID NO: 27886 - DNA, 26 bp, Homo sapiens
gctgacacttcaatgaagctatttcg

SEQ ID NO: 27887 - DNA, 26 bp, Homo sapiens
ctgacacttcaatgaagctatttcga

SEQ ID NO: 27888 - DNA, 26 bp, Homo sapiens
tgacacttcaatgaagctatttcgac

SEQ ID NO: 27889 - DNA, 26 bp, Homo sapiens
gacacttcaatgaagctatttcgact

SEQ ID NO: 27890 - DNA, 26 bp, Homo sapiens
acacttcaatgaagctatttcgactg

SEQ ID NO: 27891 - DNA, 26 bp, Homo sapiens
cacttcaatgaagctatttcgactgc

SEQ ID NO: 27892 - DNA, 26 bp, Homo sapiens
acttcaatgaagctatttcgactgcc

SEQ ID NO: 27893 - DNA, 26 bp, Homo sapiens
cttcaatgaagctatttcgactgcca

SEQ ID NO: 27894 - DNA, 26 bp, Homo sapiens
ttcaatgaagctatttcgactgccat

SEQ ID NO: 27895 - DNA, 26 bp, Homo sapiens
tcaatgaagctatttcgactgccatc

SEQ ID NO: 27896 - DNA, 26 bp, Homo sapiens
caatgaagctatttcgactgccatct

SEQ ID NO: 27897 - DNA, 26 bp, Homo sapiens
aatgaagctatttcgactgccatctc

SEQ ID NO: 27898 - DNA, 26 bp, Homo sapiens
atgaagctatttcgactgccatctca

SEQ ID NO: 27899 - DNA, 26 bp, Homo sapiens
tgaagctatttcgactgccatctcaa

SEQ ID NO: 27900 - DNA, 26 bp, Homo sapiens
gaagctatttcgactgccatctcaat

SEQ ID NO: 27901 - DNA, 26 bp, Homo sapiens
aagctatttcgactgccatctcaatc

SEQ ID NO: 27902 - DNA, 26 bp, Homo sapiens
agctatttcgactgccatctcaatcc

SEQ ID NO: 27903 - DNA, 26 bp, Homo sapiens
gctatttcgactgccatctcaatccg

SEQ ID NO: 27904 - DNA, 26 bp, Homo sapiens
ctatttcgactgccatctcaatccga

SEQ ID NO: 27905 - DNA, 26 bp, Homo sapiens
tatttcgactgccatctcaatccgat

SEQ ID NO: 27906 - DNA, 26 bp, Homo sapiens
atttcgactgccatctcaatccgatg

SEQ ID NO: 27907 - DNA, 26 bp, Homo sapiens
tttcgactgccatctcaatccgatga

SEQ ID NO: 27908 - DNA, 26 bp, Homo sapiens
ttcgactgccatctcaatccgatgat

SEQ ID NO: 27909 - DNA, 26 bp, Homo sapiens
tcgactgccatctcaatccgatgatg

SEQ ID NO: 27910 - DNA, 26 bp, Homo sapiens
cgactgccatctcaatccgatgatgt

SEQ ID NO: 27911 - DNA, 26 bp, Homo sapiens
gactgccatctcaatccgatgatgtg

SEQ ID NO: 27912 - DNA, 26 bp, Homo sapiens
actgccatctcaatccgatgatgtga

SEQ ID NO: 27913 - DNA, 26 bp, Homo sapiens
ctgccatctcaatccgatgatgtgag

SEQ ID NO: 27914 - DNA, 26 bp, Homo sapiens
tgccatctcaatccgatgatgtgagg

SEQ ID NO: 27915 - DNA, 26 bp, Homo sapiens
gccatctcaatccgatgatgtgaggg

SEQ ID NO: 27916 - DNA, 26 bp, Homo sapiens
ccatctcaatccgatgatgtgagggg

SEQ ID NO: 27917 - DNA, 26 bp, Homo sapiens
catctcaatccgatgatgtgaggggt

SEQ ID NO: 27918 - DNA, 26 bp, Homo sapiens
atctcaatccgatgatgtgaggggta

SEQ ID NO: 27919 - DNA, 26 bp, Homo sapiens
tctcaatccgatgatgtgaggggtat

SEQ ID NO: 27920 - DNA, 26 bp, Homo sapiens
ctcaatccgatgatgtgaggggtata

SEQ ID NO: 27921 - DNA, 26 bp, Homo sapiens
tcaatccgatgatgtgaggggtatat

SEQ ID NO: 27922 - DNA, 26 bp, Homo sapiens
caatccgatgatgtgaggggtatatt

SEQ ID NO: 27923 - DNA, 26 bp, Homo sapiens
aatccgatgatgtgaggggtatattt

SEQ ID NO: 27924 - DNA, 26 bp, Homo sapiens
atccgatgatgtgaggggtatatttt

SEQ ID NO: 27925 - DNA, 26 bp, Homo sapiens
tccgatgatgtgaggggtatattttc

SEQ ID NO: 27926 - DNA, 26 bp, Homo sapiens
ccgatgatgtgaggggtatattttct

SEQ ID NO: 27927 - DNA, 26 bp, Homo sapiens
cgatgatgtgaggggtatattttctg

SEQ ID NO: 27928 - DNA, 26 bp, Homo sapiens
gatgatgtgaggggtatattttctgt

SEQ ID NO: 27929 - DNA, 26 bp, Homo sapiens
atgatgtgaggggtatattttctgtc

SEQ ID NO: 27930 - DNA, 26 bp, Homo sapiens
tgatgtgaggggtatattttctgtcc

SEQ ID NO: 27931 - DNA, 26 bp, Homo sapiens
gatgtgaggggtatattttctgtcca

SEQ ID NO: 27932 - DNA, 26 bp, Homo sapiens
atgtgaggggtatattttctgtccat

SEQ ID NO: 27933 - DNA, 26 bp, Homo sapiens
tgtgaggggtatattttctgtccatg

SEQ ID NO: 27934 - DNA, 26 bp, Homo sapiens
gtgaggggtatattttctgtccatgc

SEQ ID NO: 27935 - DNA, 26 bp, Homo sapiens
tgaggggtatattttctgtccatgcc

SEQ ID NO: 27936 - DNA, 26 bp, Homo sapiens
gaggggtatattttctgtccatgcct

SEQ ID NO: 27937 - DNA, 26 bp, Homo sapiens
aggggtatattttctgtccatgcctc

SEQ ID NO: 27938 - DNA, 26 bp, Homo sapiens
ggggtatattttctgtccatgcctca

SEQ ID NO: 27939 - DNA, 26 bp, Homo sapiens
gggtatattttctgtccatgcctcat

SEQ ID NO: 27940 - DNA, 26 bp, Homo sapiens
ggtatattttctgtccatgcctcatt

SEQ ID NO: 27941 - DNA, 26 bp, Homo sapiens
gtatattttctgtccatgcctcatta

SEQ ID NO: 27942 - DNA, 26 bp, Homo sapiens
tatattttctgtccatgcctcattac

SEQ ID NO: 27943 - DNA, 26 bp, Homo sapiens
atattttctgtccatgcctcattact

SEQ ID NO: 27944 - DNA, 26 bp, Homo sapiens
tattttctgtccatgcctcattactt

SEQ ID NO: 27945 - DNA, 26 bp, Homo sapiens
attttctgtccatgcctcattacttc

SEQ ID NO: 27946 - DNA, 26 bp, Homo sapiens
ttttctgtccatgcctcattacttca

SEQ ID NO: 27947 - DNA, 26 bp, Homo sapiens
tttctgtccatgcctcattacttcag

SEQ ID NO: 27948 - DNA, 26 bp, Homo sapiens
ttctgtccatgcctcattacttcaga

SEQ ID NO: 27949 - DNA, 26 bp, Homo sapiens
tctgtccatgcctcattacttcagaa

SEQ ID NO: 27950 - DNA, 26 bp, Homo sapiens
ctgtccatgcctcattacttcagaat

SEQ ID NO: 27951 - DNA, 26 bp, Homo sapiens
tgtccatgcctcattacttcagaatg

SEQ ID NO: 27952 - DNA, 26 bp, Homo sapiens
gtccatgcctcattacttcagaatga

SEQ ID NO: 27953 - DNA, 26 bp, Homo sapiens
tccatgcctcattacttcagaatgac

SEQ ID NO: 27954 - DNA, 26 bp, Homo sapiens
ccatgcctcattacttcagaatgaca

SEQ ID NO: 27955 - DNA, 26 bp, Homo sapiens
catgcctcattacttcagaatgacat

SEQ ID NO: 27956 - DNA, 26 bp, Homo sapiens
atgcctcattacttcagaatgacatt

SEQ ID NO: 27957 - DNA, 26 bp, Homo sapiens
tgcctcattacttcagaatgacattc

SEQ ID NO: 27958 - DNA, 26 bp, Homo sapiens
gcctcattacttcagaatgacattcc

SEQ ID NO: 27959 - DNA, 26 bp, Homo sapiens
cctcattacttcagaatgacattcct

SEQ ID NO: 27960 - DNA, 26 bp, Homo sapiens
ctcattacttcagaatgacattcctg

SEQ ID NO: 27961 - DNA, 26 bp, Homo sapiens
tcattacttcagaatgacattcctgg

SEQ ID NO: 27962 - DNA, 26 bp, Homo sapiens
cattacttcagaatgacattcctgga

SEQ ID NO: 27963 - DNA, 26 bp, Homo sapiens
attacttcagaatgacattcctggaa

SEQ ID NO: 27964 - DNA, 26 bp, Homo sapiens
ttacttcagaatgacattcctggaac

SEQ ID NO: 27965 - DNA, 26 bp, Homo sapiens
tacttcagaatgacattcctggaact

SEQ ID NO: 27966 - DNA, 26 bp, Homo sapiens
acttcagaatgacattcctggaactt

SEQ ID NO: 27967 - DNA, 26 bp, Homo sapiens
cttcagaatgacattcctggaacttc

SEQ ID NO: 27968 - DNA, 26 bp, Homo sapiens
ttcagaatgacattcctggaacttca

SEQ ID NO: 27969 - DNA, 26 bp, Homo sapiens
tcagaatgacattcctggaacttcat

SEQ ID NO: 27970 - DNA, 26 bp, Homo sapiens
cagaatgacattcctggaacttcatt

SEQ ID NO: 27971 - DNA, 26 bp, Homo sapiens
agaatgacattcctggaacttcattt

SEQ ID NO: 27972 - DNA, 26 bp, Homo sapiens
gaatgacattcctggaacttcattta

SEQ ID NO: 27973 - DNA, 26 bp, Homo sapiens
aatgacattcctggaacttcatttac

SEQ ID NO: 27974 - DNA, 26 bp, Homo sapiens
atgacattcctggaacttcatttact

SEQ ID NO: 27975 - DNA, 26 bp, Homo sapiens
tgacattcctggaacttcatttactt

SEQ ID NO: 27976 - DNA, 26 bp, Homo sapiens
gacattcctggaacttcatttacttt

SEQ ID NO: 27977 - DNA, 26 bp, Homo sapiens
acattcctggaacttcatttactttt

SEQ ID NO: 27978 - DNA, 26 bp, Homo sapiens
cattcctggaacttcatttacttttt

SEQ ID NO: 27979 - DNA, 26 bp, Homo sapiens
attcctggaacttcatttactttttc

SEQ ID NO: 27980 - DNA, 26 bp, Homo sapiens
ttcctggaacttcatttactttttcc

SEQ ID NO: 27981 - DNA, 26 bp, Homo sapiens
tcctggaacttcatttactttttccc

SEQ ID NO: 27982 - DNA, 26 bp, Homo sapiens
cctggaacttcatttactttttccct

SEQ ID NO: 27983 - DNA, 26 bp, Homo sapiens
ctggaacttcatttactttttccctc

SEQ ID NO: 27984 - DNA, 26 bp, Homo sapiens
tggaacttcatttactttttccctcc

SEQ ID NO: 27985 - DNA, 26 bp, Homo sapiens
ggaacttcatttactttttccctcct

SEQ ID NO: 27986 - DNA, 26 bp, Homo sapiens
gaacttcatttactttttccctcctt

SEQ ID NO: 27987 - DNA, 26 bp, Homo sapiens
aacttcatttactttttccctccttc

SEQ ID NO: 27988 - DNA, 26 bp, Homo sapiens
acttcatttactttttccctccttcc

SEQ ID NO: 27989 - DNA, 26 bp, Homo sapiens
cttcatttactttttccctccttccc

SEQ ID NO: 27990 - DNA, 26 bp, Homo sapiens
ttcatttactttttccctccttcccc

SEQ ID NO: 27991 - DNA, 26 bp, Homo sapiens
tcatttactttttccctccttccccg

SEQ ID NO: 27992 - DNA, 26 bp, Homo sapiens
catttactttttccctccttccccga

SEQ ID NO: 27993 - DNA, 26 bp, Homo sapiens
atttactttttccctccttccccgaa

SEQ ID NO: 27994 - DNA, 26 bp, Homo sapiens
tttactttttccctccttccccgaag

SEQ ID NO: 27995 - DNA, 26 bp, Homo sapiens
ttactttttccctccttccccgaagc

SEQ ID NO: 27996 - DNA, 26 bp, Homo sapiens
tactttttccctccttccccgaagcg

SEQ ID NO: 27997 - DNA, 26 bp, Homo sapiens
actttttccctccttccccgaagcgc

SEQ ID NO: 27998 - DNA, 26 bp, Homo sapiens
ctttttccctccttccccgaagcgcc

SEQ ID NO: 27999 - DNA, 26 bp, Homo sapiens
tttttccctccttccccgaagcgcca

SEQ ID NO: 28000 - DNA, 26 bp, Homo sapiens
ttttccctccttccccgaagcgccat

SEQ ID NO: 28001 - DNA, 26 bp, Homo sapiens
tttccctccttccccgaagcgccata

SEQ ID NO: 28002 - DNA, 26 bp, Homo sapiens
ttccctccttccccgaagcgccatat

SEQ ID NO: 28003 - DNA, 26 bp, Homo sapiens
tccctccttccccgaagcgccatatt

SEQ ID NO: 28004 - DNA, 26 bp, Homo sapiens
ccctccttccccgaagcgccatattt

SEQ ID NO: 28005 - DNA, 26 bp, Homo sapiens
cctccttccccgaagcgccatatttt

SEQ ID NO: 28006 - DNA, 26 bp, Homo sapiens
ctccttccccgaagcgccatattttt

SEQ ID NO: 28007 - DNA, 26 bp, Homo sapiens
tccttccccgaagcgccatatttttt

SEQ ID NO: 28008 - DNA, 26 bp, Homo sapiens
ccttccccgaagcgccatattttttc

SEQ ID NO: 28009 - DNA, 26 bp, Homo sapiens
cttccccgaagcgccatattttttcc

SEQ ID NO: 28010 - DNA, 26 bp, Homo sapiens
ttccccgaagcgccatattttttccc

SEQ ID NO: 28011 - DNA, 26 bp, Homo sapiens
tccccgaagcgccatattttttccca

SEQ ID NO: 28012 - DNA, 26 bp, Homo sapiens
ccccgaagcgccatattttttcccat

SEQ ID NO: 28013 - DNA, 26 bp, Homo sapiens
cccgaagcgccatattttttcccatc

SEQ ID NO: 28014 - DNA, 26 bp, Homo sapiens
ccgaagcgccatattttttcccatct

SEQ ID NO: 28015 - DNA, 26 bp, Homo sapiens
cgaagcgccatattttttcccatcta

SEQ ID NO: 28016 - DNA, 26 bp, Homo sapiens
gaagcgccatattttttcccatctag

SEQ ID NO: 28017 - DNA, 26 bp, Homo sapiens
aagcgccatattttttcccatctagg

SEQ ID NO: 28018 - DNA, 26 bp, Homo sapiens
agcgccatattttttcccatctaggt

SEQ ID NO: 28019 - DNA, 26 bp, Homo sapiens
gcgccatattttttcccatctaggtt

SEQ ID NO: 28020 - DNA, 26 bp, Homo sapiens
cgccatattttttcccatctaggtta

SEQ ID NO: 28021 - DNA, 26 bp, Homo sapiens
gccatattttttcccatctaggttat

SEQ ID NO: 28022 - DNA, 26 bp, Homo sapiens
ccatattttttcccatctaggttatg

SEQ ID NO: 28023 - DNA, 26 bp, Homo sapiens
catattttttcccatctaggttatgc

SEQ ID NO: 28024 - DNA, 26 bp, Homo sapiens
atattttttcccatctaggttatgca

SEQ ID NO: 28025 - DNA, 26 bp, Homo sapiens
tattttttcccatctaggttatgcat

SEQ ID NO: 28026 - DNA, 26 bp, Homo sapiens
attttttcccatctaggttatgcatg

SEQ ID NO: 28027 - DNA, 26 bp, Homo sapiens
ttttttcccatctaggttatgcatgc

SEQ ID NO: 28028 - DNA, 26 bp, Homo sapiens
tttttcccatctaggttatgcatgcc

SEQ ID NO: 28029 - DNA, 26 bp, Homo sapiens
ttttcccatctaggttatgcatgcca

SEQ ID NO: 28030 - DNA, 26 bp, Homo sapiens
tttcccatctaggttatgcatgccat

SEQ ID NO: 28031 - DNA, 26 bp, Homo sapiens
ttcccatctaggttatgcatgccata

SEQ ID NO: 28032 - DNA, 26 bp, Homo sapiens
tcccatctaggttatgcatgccataa

SEQ ID NO: 28033 - DNA, 26 bp, Homo sapiens
cccatctaggttatgcatgccataaa

SEQ ID NO: 28034 - DNA, 26 bp, Homo sapiens
ccatctaggttatgcatgccataaaa

SEQ ID NO: 28035 - DNA, 26 bp, Homo sapiens
catctaggttatgcatgccataaaaa

SEQ ID NO: 28036 - DNA, 26 bp, Homo sapiens
atctaggttatgcatgccataaaaaa

SEQ ID NO: 28037 - DNA, 26 bp, Homo sapiens
tctaggttatgcatgccataaaaaaa

SEQ ID NO: 28038 - DNA, 26 bp, Homo sapiens
ctaggttatgcatgccataaaaaaag

SEQ ID NO: 28039 - DNA, 26 bp, Homo sapiens
taggttatgcatgccataaaaaaagc

SEQ ID NO: 28040 - DNA, 26 bp, Homo sapiens
aggttatgcatgccataaaaaaagca

SEQ ID NO: 28041 - DNA, 26 bp, Homo sapiens
ggttatgcatgccataaaaaaagcaa

SEQ ID NO: 28042 - DNA, 26 bp, Homo sapiens
gttatgcatgccataaaaaaagcaat

SEQ ID NO: 28043 - DNA, 26 bp, Homo sapiens
ttatgcatgccataaaaaaagcaatt

SEQ ID NO: 28044 - DNA, 26 bp, Homo sapiens
tatgcatgccataaaaaaagcaattt

SEQ ID NO: 28045 - DNA, 26 bp, Homo sapiens
atgcatgccataaaaaaagcaatttg

SEQ ID NO: 28046 - DNA, 26 bp, Homo sapiens
tgcatgccataaaaaaagcaatttgc

SEQ ID NO: 28047 - DNA, 26 bp, Homo sapiens
gcatgccataaaaaaagcaatttgct

SEQ ID NO: 28048 - DNA, 26 bp, Homo sapiens
catgccataaaaaaagcaatttgcta

SEQ ID NO: 28049 - DNA, 26 bp, Homo sapiens
atgccataaaaaaagcaatttgctat

SEQ ID NO: 28050 - DNA, 26 bp, Homo sapiens
tgccataaaaaaagcaatttgctatt

SEQ ID NO: 28051 - DNA, 26 bp, Homo sapiens
gccataaaaaaagcaatttgctatta

SEQ ID NO: 28052 - DNA, 26 bp, Homo sapiens
ccataaaaaaagcaatttgctattat

SEQ ID NO: 28053 - DNA, 26 bp, Homo sapiens
cataaaaaaagcaatttgctattata

SEQ ID NO: 28054 - DNA, 26 bp, Homo sapiens
ataaaaaaagcaatttgctattatat

SEQ ID NO: 28055 - DNA, 26 bp, Homo sapiens
taaaaaaagcaatttgctattatatg

SEQ ID NO: 28056 - DNA, 26 bp, Homo sapiens
aaaaaaagcaatttgctattatatgt

SEQ ID NO: 28057 - DNA, 26 bp, Homo sapiens
aaaaaagcaatttgctattatatgtg

SEQ ID NO: 28058 - DNA, 26 bp, Homo sapiens
aaaaagcaatttgctattatatgtgg

SEQ ID NO: 28059 - DNA, 26 bp, Homo sapiens
aaaagcaatttgctattatatgtggc

SEQ ID NO: 28060 - DNA, 26 bp, Homo sapiens
aaagcaatttgctattatatgtggca

SEQ ID NO: 28061 - DNA, 26 bp, Homo sapiens
aagcaatttgctattatatgtggcat

SEQ ID NO: 28062 - DNA, 26 bp, Homo sapiens
agcaatttgctattatatgtggcata

SEQ ID NO: 28063 - DNA, 26 bp, Homo sapiens
gcaatttgctattatatgtggcataa

SEQ ID NO: 28064 - DNA, 26 bp, Homo sapiens
caatttgctattatatgtggcataag

SEQ ID NO: 28065 - DNA, 26 bp, Homo sapiens
aatttgctattatatgtggcataagg

SEQ ID NO: 28066 - DNA, 26 bp, Homo sapiens
atttgctattatatgtggcataaggg

SEQ ID NO: 28067 - DNA, 26 bp, Homo sapiens
tttgctattatatgtggcataagggc

SEQ ID NO: 28068 - DNA, 26 bp, Homo sapiens
ttgctattatatgtggcataagggca

SEQ ID NO: 28069 - DNA, 26 bp, Homo sapiens
tgctattatatgtggcataagggcaa

SEQ ID NO: 28070 - DNA, 26 bp, Homo sapiens
gctattatatgtggcataagggcaac

SEQ ID NO: 28071 - DNA, 26 bp, Homo sapiens
ctattatatgtggcataagggcaaca

SEQ ID NO: 28072 - DNA, 26 bp, Homo sapiens
tattatatgtggcataagggcaacac

SEQ ID NO: 28073 - DNA, 26 bp, Homo sapiens
attatatgtggcataagggcaacact

SEQ ID NO: 28074 - DNA, 26 bp, Homo sapiens
ttatatgtggcataagggcaacactt

SEQ ID NO: 28075 - DNA, 26 bp, Homo sapiens
tatatgtggcataagggcaacacttt

SEQ ID NO: 28076 - DNA, 26 bp, Homo sapiens
atatgtggcataagggcaacactttc

SEQ ID NO: 28077 - DNA, 26 bp, Homo sapiens
tatgtggcataagggcaacactttcc

SEQ ID NO: 28078 - DNA, 26 bp, Homo sapiens
atgtggcataagggcaacactttccc

SEQ ID NO: 28079 - DNA, 26 bp, Homo sapiens
tgtggcataagggcaacactttccct

SEQ ID NO: 28080 - DNA, 26 bp, Homo sapiens
gtggcataagggcaacactttcccta

SEQ ID NO: 28081 - DNA, 26 bp, Homo sapiens
tggcataagggcaacactttccctag

SEQ ID NO: 28082 - DNA, 26 bp, Homo sapiens
ggcataagggcaacactttccctagg

SEQ ID NO: 28083 - DNA, 26 bp, Homo sapiens
gcataagggcaacactttccctagga

SEQ ID NO: 28084 - DNA, 26 bp, Homo sapiens
cataagggcaacactttccctaggag

SEQ ID NO: 28085 - DNA, 26 bp, Homo sapiens
ataagggcaacactttccctaggagg

SEQ ID NO: 28086 - DNA, 26 bp, Homo sapiens
taagggcaacactttccctaggaggt

SEQ ID NO: 28087 - DNA, 26 bp, Homo sapiens
aagggcaacactttccctaggaggta

SEQ ID NO: 28088 - DNA, 26 bp, Homo sapiens
agggcaacactttccctaggaggtaa

SEQ ID NO: 28089 - DNA, 26 bp, Homo sapiens
gggcaacactttccctaggaggtaaa

SEQ ID NO: 28090 - DNA, 26 bp, Homo sapiens
ggcaacactttccctaggaggtaaat

SEQ ID NO: 28091 - DNA, 26 bp, Homo sapiens
gcaacactttccctaggaggtaaata

SEQ ID NO: 28092 - DNA, 26 bp, Homo sapiens
caacactttccctaggaggtaaataa

SEQ ID NO: 28093 - DNA, 26 bp, Homo sapiens
aacactttccctaggaggtaaataag

SEQ ID NO: 28094 - DNA, 26 bp, Homo sapiens
acactttccctaggaggtaaataaga

SEQ ID NO: 28095 - DNA, 26 bp, Homo sapiens
cactttccctaggaggtaaataagaa

SEQ ID NO: 28096 - DNA, 26 bp, Homo sapiens
actttccctaggaggtaaataagaag

SEQ ID NO: 28097 - DNA, 26 bp, Homo sapiens
ctttccctaggaggtaaataagaagt

SEQ ID NO: 28098 - DNA, 26 bp, Homo sapiens
tttccctaggaggtaaataagaagtt

SEQ ID NO: 28099 - DNA, 26 bp, Homo sapiens
ttccctaggaggtaaataagaagttt

SEQ ID NO: 28100 - DNA, 26 bp, Homo sapiens
tccctaggaggtaaataagaagtttt

SEQ ID NO: 28101 - DNA, 26 bp, Homo sapiens
ccctaggaggtaaataagaagttttt

SEQ ID NO: 28102 - DNA, 26 bp, Homo sapiens
cctaggaggtaaataagaagtttttt

SEQ ID NO: 28103 - DNA, 26 bp, Homo sapiens
ctaggaggtaaataagaagttttttt

SEQ ID NO: 28104 - DNA, 26 bp, Homo sapiens
taggaggtaaataagaagtttttttt

SEQ ID NO: 28105 - DNA, 26 bp, Homo sapiens
aggaggtaaataagaagttttttttt

SEQ ID NO: 28106 - DNA, 26 bp, Homo sapiens
ggaggtaaataagaagtttttttttt

SEQ ID NO: 28107 - DNA, 26 bp, Homo sapiens
gaggtaaataagaagttttttttttt

SEQ ID NO: 28108 - DNA, 26 bp, Homo sapiens
aggtaaataagaagtttttttttttt

SEQ ID NO: 28109 - DNA, 26 bp, Homo sapiens
ggtaaataagaagttttttttttttt

SEQ ID NO: 28110 - DNA, 26 bp, Homo sapiens
gtaaataagaagtttttttttttttt

SEQ ID NO: 28111 - DNA, 26 bp, Homo sapiens
taaataagaagttttttttttttttt

SEQ ID NO: 28112 - DNA, 26 bp, Homo sapiens
aaataagaagttttttttttttttta

SEQ ID NO: 28113 - DNA, 26 bp, Homo sapiens
aataagaagtttttttttttttttaa

SEQ ID NO: 28114 - DNA, 26 bp, Homo sapiens
ataagaagtttttttttttttttaat

SEQ ID NO: 28115 - DNA, 26 bp, Homo sapiens
taagaagtttttttttttttttaatc

SEQ ID NO: 28116 - DNA, 26 bp, Homo sapiens
aagaagtttttttttttttttaatcc

SEQ ID NO: 28117 - DNA, 26 bp, Homo sapiens
agaagtttttttttttttttaatccc

SEQ ID NO: 28118 - DNA, 26 bp, Homo sapiens
gaagtttttttttttttttaatccca

SEQ ID NO: 28119 - DNA, 26 bp, Homo sapiens
aagtttttttttttttttaatcccaa

SEQ ID NO: 28120 - DNA, 26 bp, Homo sapiens
agtttttttttttttttaatcccaat

SEQ ID NO: 28121 - DNA, 26 bp, Homo sapiens
gtttttttttttttttaatcccaatg

SEQ ID NO: 28122 - DNA, 26 bp, Homo sapiens
tttttttttttttttaatcccaatgt

SEQ ID NO: 28123 - DNA, 26 bp, Homo sapiens
ttttttttttttttaatcccaatgtt

SEQ ID NO: 28124 - DNA, 26 bp, Homo sapiens
tttttttttttttaatcccaatgttg

SEQ ID NO: 28125 - DNA, 26 bp, Homo sapiens
ttttttttttttaatcccaatgttga

SEQ ID NO: 28126 - DNA, 26 bp, Homo sapiens
tttttttttttaatcccaatgttgaa

SEQ ID NO: 28127 - DNA, 26 bp, Homo sapiens
ttttttttttaatcccaatgttgaat

SEQ ID NO: 28128 - DNA, 26 bp, Homo sapiens
tttttttttaatcccaatgttgaatt

SEQ ID NO: 28129 - DNA, 26 bp, Homo sapiens
ttttttttaatcccaatgttgaattt

SEQ ID NO: 28130 - DNA, 26 bp, Homo sapiens
tttttttaatcccaatgttgaattta

SEQ ID NO: 28131 - DNA, 26 bp, Homo sapiens
ttttttaatcccaatgttgaatttag

SEQ ID NO: 28132 - DNA, 26 bp, Homo sapiens
tttttaatcccaatgttgaatttagg

SEQ ID NO: 28133 - DNA, 26 bp, Homo sapiens
ttttaatcccaatgttgaatttaggg

SEQ ID NO: 28134 - DNA, 26 bp, Homo sapiens
tttaatcccaatgttgaatttaggga

SEQ ID NO: 28135 - DNA, 26 bp, Homo sapiens
ttaatcccaatgttgaatttagggat

SEQ ID NO: 28136 - DNA, 26 bp, Homo sapiens
taatcccaatgttgaatttagggatc

SEQ ID NO: 28137 - DNA, 26 bp, Homo sapiens
aatcccaatgttgaatttagggatca

SEQ ID NO: 28138 - DNA, 26 bp, Homo sapiens
atcccaatgttgaatttagggatcat

SEQ ID NO: 28139 - DNA, 26 bp, Homo sapiens
tcccaatgttgaatttagggatcatg

SEQ ID NO: 28140 - DNA, 26 bp, Homo sapiens
cccaatgttgaatttagggatcatgt

SEQ ID NO: 28141 - DNA, 26 bp, Homo sapiens
ccaatgttgaatttagggatcatgtc

SEQ ID NO: 28142 - DNA, 26 bp, Homo sapiens
caatgttgaatttagggatcatgtca

SEQ ID NO: 28143 - DNA, 26 bp, Homo sapiens
aatgttgaatttagggatcatgtcaa

SEQ ID NO: 28144 - DNA, 26 bp, Homo sapiens
atgttgaatttagggatcatgtcaaa

SEQ ID NO: 28145 - DNA, 26 bp, Homo sapiens
tgttgaatttagggatcatgtcaaaa

SEQ ID NO: 28146 - DNA, 26 bp, Homo sapiens
gttgaatttagggatcatgtcaaaat

SEQ ID NO: 28147 - DNA, 26 bp, Homo sapiens
ttgaatttagggatcatgtcaaaatt

SEQ ID NO: 28148 - DNA, 26 bp, Homo sapiens
tgaatttagggatcatgtcaaaattt

SEQ ID NO: 28149 - DNA, 26 bp, Homo sapiens
gaatttagggatcatgtcaaaatttc

SEQ ID NO: 28150 - DNA, 26 bp, Homo sapiens
aatttagggatcatgtcaaaatttcc

SEQ ID NO: 28151 - DNA, 26 bp, Homo sapiens
atttagggatcatgtcaaaatttcca

SEQ ID NO: 28152 - DNA, 26 bp, Homo sapiens
tttagggatcatgtcaaaatttccaa

SEQ ID NO: 28153 - DNA, 26 bp, Homo sapiens
ttagggatcatgtcaaaatttccaaa

SEQ ID NO: 28154 - DNA, 26 bp, Homo sapiens
tagggatcatgtcaaaatttccaaaa

SEQ ID NO: 28155 - DNA, 26 bp, Homo sapiens
agggatcatgtcaaaatttccaaaac

SEQ ID NO: 28156 - DNA, 26 bp, Homo sapiens
gggatcatgtcaaaatttccaaaaca

SEQ ID NO: 28157 - DNA, 26 bp, Homo sapiens
ggatcatgtcaaaatttccaaaacaa

SEQ ID NO: 28158 - DNA, 26 bp, Homo sapiens
gatcatgtcaaaatttccaaaacaat

SEQ ID NO: 28159 - DNA, 26 bp, Homo sapiens
atcatgtcaaaatttccaaaacaatt

SEQ ID NO: 28160 - DNA, 26 bp, Homo sapiens
tcatgtcaaaatttccaaaacaattc

SEQ ID NO: 28161 - DNA, 26 bp, Homo sapiens
catgtcaaaatttccaaaacaattcc

SEQ ID NO: 28162 - DNA, 26 bp, Homo sapiens
atgtcaaaatttccaaaacaattcca

SEQ ID NO: 28163 - DNA, 26 bp, Homo sapiens
tgtcaaaatttccaaaacaattccaa

SEQ ID NO: 28164 - DNA, 26 bp, Homo sapiens
gtcaaaatttccaaaacaattccaac

SEQ ID NO: 28165 - DNA, 26 bp, Homo sapiens
tcaaaatttccaaaacaattccaaca

SEQ ID NO: 28166 - DNA, 26 bp, Homo sapiens
caaaatttccaaaacaattccaacag

SEQ ID NO: 28167 - DNA, 26 bp, Homo sapiens
aaaatttccaaaacaattccaacagg

SEQ ID NO: 28168 - DNA, 26 bp, Homo sapiens
aaatttccaaaacaattccaacaggc

SEQ ID NO: 28169 - DNA, 26 bp, Homo sapiens
aatttccaaaacaattccaacaggca

SEQ ID NO: 28170 - DNA, 26 bp, Homo sapiens
atttccaaaacaattccaacaggcag

SEQ ID NO: 28171 - DNA, 26 bp, Homo sapiens
tttccaaaacaattccaacaggcagc

SEQ ID NO: 28172 - DNA, 26 bp, Homo sapiens
ttccaaaacaattccaacaggcagcc

SEQ ID NO: 28173 - DNA, 26 bp, Homo sapiens
tccaaaacaattccaacaggcagcct

SEQ ID NO: 28174 - DNA, 26 bp, Homo sapiens
ccaaaacaattccaacaggcagcctc

SEQ ID NO: 28175 - DNA, 26 bp, Homo sapiens
caaaacaattccaacaggcagcctcc

SEQ ID NO: 28176 - DNA, 26 bp, Homo sapiens
aaaacaattccaacaggcagcctcct

SEQ ID NO: 28177 - DNA, 26 bp, Homo sapiens
aaacaattccaacaggcagcctcctt

SEQ ID NO: 28178 - DNA, 26 bp, Homo sapiens
aacaattccaacaggcagcctccttg

SEQ ID NO: 28179 - DNA, 26 bp, Homo sapiens
acaattccaacaggcagcctccttga

SEQ ID NO: 28180 - DNA, 26 bp, Homo sapiens
caattccaacaggcagcctccttgag

SEQ ID NO: 28181 - DNA, 26 bp, Homo sapiens
aattccaacaggcagcctccttgaga

SEQ ID NO: 28182 - DNA, 26 bp, Homo sapiens
attccaacaggcagcctccttgagaa

SEQ ID NO: 28183 - DNA, 26 bp, Homo sapiens
ttccaacaggcagcctccttgagaaa

SEQ ID NO: 28184 - DNA, 26 bp, Homo sapiens
tccaacaggcagcctccttgagaaat

SEQ ID NO: 28185 - DNA, 26 bp, Homo sapiens
ccaacaggcagcctccttgagaaatg

SEQ ID NO: 28186 - DNA, 26 bp, Homo sapiens
caacaggcagcctccttgagaaatgg

SEQ ID NO: 28187 - DNA, 26 bp, Homo sapiens
aacaggcagcctccttgagaaatggt

SEQ ID NO: 28188 - DNA, 26 bp, Homo sapiens
acaggcagcctccttgagaaatggtg

SEQ ID NO: 28189 - DNA, 26 bp, Homo sapiens
caggcagcctccttgagaaatggtga

SEQ ID NO: 28190 - DNA, 26 bp, Homo sapiens
aggcagcctccttgagaaatggtgag

SEQ ID NO: 28191 - DNA, 26 bp, Homo sapiens
ggcagcctccttgagaaatggtgagg

SEQ ID NO: 28192 - DNA, 26 bp, Homo sapiens
gcagcctccttgagaaatggtgagga

SEQ ID NO: 28193 - DNA, 26 bp, Homo sapiens
cagcctccttgagaaatggtgaggaa

SEQ ID NO: 28194 - DNA, 26 bp, Homo sapiens
agcctccttgagaaatggtgaggaag

SEQ ID NO: 28195 - DNA, 26 bp, Homo sapiens
gcctccttgagaaatggtgaggaaga

SEQ ID NO: 28196 - DNA, 26 bp, Homo sapiens
cctccttgagaaatggtgaggaagag

SEQ ID NO: 28197 - DNA, 26 bp, Homo sapiens
ctccttgagaaatggtgaggaagaga

SEQ ID NO: 28198 - DNA, 26 bp, Homo sapiens
tccttgagaaatggtgaggaagagat

SEQ ID NO: 28199 - DNA, 26 bp, Homo sapiens
ccttgagaaatggtgaggaagagata

SEQ ID NO: 28200 - DNA, 26 bp, Homo sapiens
cttgagaaatggtgaggaagagatat

SEQ ID NO: 28201 - DNA, 26 bp, Homo sapiens
ttgagaaatggtgaggaagagatatt

SEQ ID NO: 28202 - DNA, 26 bp, Homo sapiens
tgagaaatggtgaggaagagatattt

SEQ ID NO: 28203 - DNA, 26 bp, Homo sapiens
gagaaatggtgaggaagagatatttg

SEQ ID NO: 28204 - DNA, 26 bp, Homo sapiens
agaaatggtgaggaagagatatttgg

SEQ ID NO: 28205 - DNA, 26 bp, Homo sapiens
gaaatggtgaggaagagatatttggt

SEQ ID NO: 28206 - DNA, 26 bp, Homo sapiens
aaatggtgaggaagagatatttggtt

SEQ ID NO: 28207 - DNA, 26 bp, Homo sapiens
aatggtgaggaagagatatttggttt

SEQ ID NO: 28208 - DNA, 26 bp, Homo sapiens
atggtgaggaagagatatttggtttc

SEQ ID NO: 28209 - DNA, 26 bp, Homo sapiens
tggtgaggaagagatatttggtttca

SEQ ID NO: 28210 - DNA, 26 bp, Homo sapiens
ggtgaggaagagatatttggtttcat

SEQ ID NO: 28211 - DNA, 26 bp, Homo sapiens
gtgaggaagagatatttggtttcatt

SEQ ID NO: 28212 - DNA, 26 bp, Homo sapiens
tgaggaagagatatttggtttcattt

SEQ ID NO: 28213 - DNA, 26 bp, Homo sapiens
gaggaagagatatttggtttcatttt

SEQ ID NO: 28214 - DNA, 26 bp, Homo sapiens
aggaagagatatttggtttcattttg

SEQ ID NO: 28215 - DNA, 26 bp, Homo sapiens
ggaagagatatttggtttcattttgt

SEQ ID NO: 28216 - DNA, 26 bp, Homo sapiens
gaagagatatttggtttcattttgtc

SEQ ID NO: 28217 - DNA, 26 bp, Homo sapiens
aagagatatttggtttcattttgtca

SEQ ID NO: 28218 - DNA, 26 bp, Homo sapiens
agagatatttggtttcattttgtcag

SEQ ID NO: 28219 - DNA, 26 bp, Homo sapiens
gagatatttggtttcattttgtcagt

SEQ ID NO: 28220 - DNA, 26 bp, Homo sapiens
agatatttggtttcattttgtcagtg

SEQ ID NO: 28221 - DNA, 26 bp, Homo sapiens
gatatttggtttcattttgtcagtgt

SEQ ID NO: 28222 - DNA, 26 bp, Homo sapiens
atatttggtttcattttgtcagtgtt

SEQ ID NO: 28223 - DNA, 26 bp, Homo sapiens
tatttggtttcattttgtcagtgttg

SEQ ID NO: 28224 - DNA, 26 bp, Homo sapiens
atttggtttcattttgtcagtgttga

SEQ ID NO: 28225 - DNA, 26 bp, Homo sapiens
tttggtttcattttgtcagtgttgag

SEQ ID NO: 28226 - DNA, 26 bp, Homo sapiens
ttggtttcattttgtcagtgttgaga

SEQ ID NO: 28227 - DNA, 26 bp, Homo sapiens
tggtttcattttgtcagtgttgagat

SEQ ID NO: 28228 - DNA, 26 bp, Homo sapiens
ggtttcattttgtcagtgttgagatt

SEQ ID NO: 28229 - DNA, 26 bp, Homo sapiens
gtttcattttgtcagtgttgagatta

SEQ ID NO: 28230 - DNA, 26 bp, Homo sapiens
tttcattttgtcagtgttgagattaa

SEQ ID NO: 28231 - DNA, 26 bp, Homo sapiens
ttcattttgtcagtgttgagattaaa

SEQ ID NO: 28232 - DNA, 26 bp, Homo sapiens
tcattttgtcagtgttgagattaaaa

SEQ ID NO: 28233 - DNA, 26 bp, Homo sapiens
cattttgtcagtgttgagattaaaaa

SEQ ID NO: 28234 - DNA, 26 bp, Homo sapiens
attttgtcagtgttgagattaaaaaa

SEQ ID NO: 28235 - DNA, 26 bp, Homo sapiens
ttttgtcagtgttgagattaaaaaaa

SEQ ID NO: 28236 - DNA, 26 bp, Homo sapiens
tttgtcagtgttgagattaaaaaaaa

SEQ ID NO: 28237 - DNA, 26 bp, Homo sapiens
ttgtcagtgttgagattaaaaaaaaa

SEQ ID NO: 28238 - DNA, 26 bp, Homo sapiens
tgtcagtgttgagattaaaaaaaaat

SEQ ID NO: 28239 - DNA, 26 bp, Homo sapiens
gtcagtgttgagattaaaaaaaaata

SEQ ID NO: 28240 - DNA, 26 bp, Homo sapiens
tcagtgttgagattaaaaaaaaataa

SEQ ID NO: 28241 - DNA, 26 bp, Homo sapiens
cagtgttgagattaaaaaaaaataac

SEQ ID NO: 28242 - DNA, 26 bp, Homo sapiens
agtgttgagattaaaaaaaaataacc

SEQ ID NO: 28243 - DNA, 26 bp, Homo sapiens
gtgttgagattaaaaaaaaataacct

SEQ ID NO: 28244 - DNA, 26 bp, Homo sapiens
tgttgagattaaaaaaaaataacctt

SEQ ID NO: 28245 - DNA, 26 bp, Homo sapiens
gttgagattaaaaaaaaataaccttg

SEQ ID NO: 28246 - DNA, 26 bp, Homo sapiens
ttgagattaaaaaaaaataaccttgg

SEQ ID NO: 28247 - DNA, 26 bp, Homo sapiens
tgagattaaaaaaaaataaccttggt

SEQ ID NO: 28248 - DNA, 26 bp, Homo sapiens
gagattaaaaaaaaataaccttggta

SEQ ID NO: 28249 - DNA, 26 bp, Homo sapiens
agattaaaaaaaaataaccttggtaa

SEQ ID NO: 28250 - DNA, 26 bp, Homo sapiens
gattaaaaaaaaataaccttggtaat

SEQ ID NO: 28251 - DNA, 26 bp, Homo sapiens
attaaaaaaaaataaccttggtaatt

SEQ ID NO: 28252 - DNA, 26 bp, Homo sapiens
ttaaaaaaaaataaccttggtaatta

SEQ ID NO: 28253 - DNA, 26 bp, Homo sapiens
taaaaaaaaataaccttggtaattaa

SEQ ID NO: 28254 - DNA, 26 bp, Homo sapiens
aaaaaaaaataaccttggtaattaaa

SEQ ID NO: 28255 - DNA, 26 bp, Homo sapiens
aaaaaaaataaccttggtaattaaag

SEQ ID NO: 28256 - DNA, 26 bp, Homo sapiens
aaaaaaataaccttggtaattaaagc

SEQ ID NO: 28257 - DNA, 26 bp, Homo sapiens
aaaaaataaccttggtaattaaagca

SEQ ID NO: 28258 - DNA, 26 bp, Homo sapiens
aaaaataaccttggtaattaaagcaa

SEQ ID NO: 28259 - DNA, 26 bp, Homo sapiens
aaaataaccttggtaattaaagcaac

SEQ ID NO: 28260 - DNA, 26 bp, Homo sapiens
aaataaccttggtaattaaagcaaca

SEQ ID NO: 28261 - DNA, 26 bp, Homo sapiens
aataaccttggtaattaaagcaacaa

SEQ ID NO: 28262 - DNA, 26 bp, Homo sapiens
ataaccttggtaattaaagcaacaac

SEQ ID NO: 28263 - DNA, 26 bp, Homo sapiens
taaccttggtaattaaagcaacaaca

SEQ ID NO: 28264 - DNA, 26 bp, Homo sapiens
aaccttggtaattaaagcaacaacag

SEQ ID NO: 28265 - DNA, 26 bp, Homo sapiens
accttggtaattaaagcaacaacaga

SEQ ID NO: 28266 - DNA, 26 bp, Homo sapiens
ccttggtaattaaagcaacaacagaa

SEQ ID NO: 28267 - DNA, 26 bp, Homo sapiens
cttggtaattaaagcaacaacagaaa

SEQ ID NO: 28268 - DNA, 26 bp, Homo sapiens
ttggtaattaaagcaacaacagaaaa

SEQ ID NO: 28269 - DNA, 26 bp, Homo sapiens
tggtaattaaagcaacaacagaaaat

SEQ ID NO: 28270 - DNA, 26 bp, Homo sapiens
ggtaattaaagcaacaacagaaaata

SEQ ID NO: 28271 - DNA, 26 bp, Homo sapiens
gtaattaaagcaacaacagaaaatat

SEQ ID NO: 28272 - DNA, 26 bp, Homo sapiens
taattaaagcaacaacagaaaatatt

SEQ ID NO: 28273 - DNA, 26 bp, Homo sapiens
aattaaagcaacaacagaaaatattc

SEQ ID NO: 28274 - DNA, 26 bp, Homo sapiens
attaaagcaacaacagaaaatattcc

SEQ ID NO: 28275 - DNA, 26 bp, Homo sapiens
ttaaagcaacaacagaaaatattcct

SEQ ID NO: 28276 - DNA, 26 bp, Homo sapiens
taaagcaacaacagaaaatattcctt

SEQ ID NO: 28277 - DNA, 26 bp, Homo sapiens
aaagcaacaacagaaaatattccttt

SEQ ID NO: 28278 - DNA, 26 bp, Homo sapiens
aagcaacaacagaaaatattcctttt

SEQ ID NO: 28279 - DNA, 26 bp, Homo sapiens
agcaacaacagaaaatattccttttg

SEQ ID NO: 28280 - DNA, 26 bp, Homo sapiens
gcaacaacagaaaatattccttttgt

SEQ ID NO: 28281 - DNA, 26 bp, Homo sapiens
caacaacagaaaatattccttttgtt

SEQ ID NO: 28282 - DNA, 26 bp, Homo sapiens
aacaacagaaaatattccttttgttt

SEQ ID NO: 28283 - DNA, 26 bp, Homo sapiens
acaacagaaaatattccttttgtttc

SEQ ID NO: 28284 - DNA, 26 bp, Homo sapiens
caacagaaaatattccttttgtttca

SEQ ID NO: 28285 - DNA, 26 bp, Homo sapiens
aacagaaaatattccttttgtttcag

SEQ ID NO: 28286 - DNA, 26 bp, Homo sapiens
acagaaaatattccttttgtttcaga

SEQ ID NO: 28287 - DNA, 26 bp, Homo sapiens
cagaaaatattccttttgtttcagaa

SEQ ID NO: 28288 - DNA, 26 bp, Homo sapiens
agaaaatattccttttgtttcagaat

SEQ ID NO: 28289 - DNA, 26 bp, Homo sapiens
gaaaatattccttttgtttcagaatc

SEQ ID NO: 28290 - DNA, 26 bp, Homo sapiens
aaaatattccttttgtttcagaatca

SEQ ID NO: 28291 - DNA, 26 bp, Homo sapiens
aaatattccttttgtttcagaatcac

SEQ ID NO: 28292 - DNA, 26 bp, Homo sapiens
aatattccttttgtttcagaatcacc

SEQ ID NO: 28293 - DNA, 26 bp, Homo sapiens
atattccttttgtttcagaatcacct

SEQ ID NO: 28294 - DNA, 26 bp, Homo sapiens
tattccttttgtttcagaatcaccta

SEQ ID NO: 28295 - DNA, 26 bp, Homo sapiens
attccttttgtttcagaatcacctag

SEQ ID NO: 28296 - DNA, 26 bp, Homo sapiens
ttccttttgtttcagaatcacctagt

SEQ ID NO: 28297 - DNA, 26 bp, Homo sapiens
tccttttgtttcagaatcacctagtt

SEQ ID NO: 28298 - DNA, 26 bp, Homo sapiens
ccttttgtttcagaatcacctagttc

SEQ ID NO: 28299 - DNA, 26 bp, Homo sapiens
cttttgtttcagaatcacctagttcc

SEQ ID NO: 28300 - DNA, 26 bp, Homo sapiens
ttttgtttcagaatcacctagttcct

SEQ ID NO: 28301 - DNA, 26 bp, Homo sapiens
tttgtttcagaatcacctagttccta

SEQ ID NO: 28302 - DNA, 26 bp, Homo sapiens
ttgtttcagaatcacctagttcctag

SEQ ID NO: 28303 - DNA, 26 bp, Homo sapiens
tgtttcagaatcacctagttcctagt

SEQ ID NO: 28304 - DNA, 26 bp, Homo sapiens
gtttcagaatcacctagttcctagtg

SEQ ID NO: 28305 - DNA, 26 bp, Homo sapiens
tttcagaatcacctagttcctagtgt

SEQ ID NO: 28306 - DNA, 26 bp, Homo sapiens
ttcagaatcacctagttcctagtgtt

SEQ ID NO: 28307 - DNA, 26 bp, Homo sapiens
tcagaatcacctagttcctagtgttg

SEQ ID NO: 28308 - DNA, 26 bp, Homo sapiens
cagaatcacctagttcctagtgttgt

SEQ ID NO: 28309 - DNA, 26 bp, Homo sapiens
agaatcacctagttcctagtgttgtg

SEQ ID NO: 28310 - DNA, 26 bp, Homo sapiens
gaatcacctagttcctagtgttgtgc

SEQ ID NO: 28311 - DNA, 26 bp, Homo sapiens
aatcacctagttcctagtgttgtgcc

SEQ ID NO: 28312 - DNA, 26 bp, Homo sapiens
atcacctagttcctagtgttgtgcct

SEQ ID NO: 28313 - DNA, 26 bp, Homo sapiens
tcacctagttcctagtgttgtgccta

SEQ ID NO: 28314 - DNA, 26 bp, Homo sapiens
cacctagttcctagtgttgtgcctag

SEQ ID NO: 28315 - DNA, 26 bp, Homo sapiens
acctagttcctagtgttgtgcctaga

SEQ ID NO: 28316 - DNA, 26 bp, Homo sapiens
cctagttcctagtgttgtgcctagaa

SEQ ID NO: 28317 - DNA, 26 bp, Homo sapiens
ctagttcctagtgttgtgcctagaat

SEQ ID NO: 28318 - DNA, 26 bp, Homo sapiens
tagttcctagtgttgtgcctagaata

SEQ ID NO: 28319 - DNA, 26 bp, Homo sapiens
agttcctagtgttgtgcctagaatag

SEQ ID NO: 28320 - DNA, 26 bp, Homo sapiens
gttcctagtgttgtgcctagaatagt

SEQ ID NO: 28321 - DNA, 26 bp, Homo sapiens
ttcctagtgttgtgcctagaatagta

SEQ ID NO: 28322 - DNA, 26 bp, Homo sapiens
tcctagtgttgtgcctagaatagtat

SEQ ID NO: 28323 - DNA, 26 bp, Homo sapiens
cctagtgttgtgcctagaatagtata

SEQ ID NO: 28324 - DNA, 26 bp, Homo sapiens
ctagtgttgtgcctagaatagtataa

SEQ ID NO: 28325 - DNA, 26 bp, Homo sapiens
tagtgttgtgcctagaatagtataaa

SEQ ID NO: 28326 - DNA, 26 bp, Homo sapiens
agtgttgtgcctagaatagtataaat

SEQ ID NO: 28327 - DNA, 26 bp, Homo sapiens
gtgttgtgcctagaatagtataaata

SEQ ID NO: 28328 - DNA, 26 bp, Homo sapiens
tgttgtgcctagaatagtataaatat

SEQ ID NO: 28329 - DNA, 26 bp, Homo sapiens
gttgtgcctagaatagtataaatatt

SEQ ID NO: 28330 - DNA, 26 bp, Homo sapiens
ttgtgcctagaatagtataaatattt

SEQ ID NO: 28331 - DNA, 26 bp, Homo sapiens
tgtgcctagaatagtataaatatttc

SEQ ID NO: 28332 - DNA, 26 bp, Homo sapiens
gtgcctagaatagtataaatatttca

SEQ ID NO: 28333 - DNA, 26 bp, Homo sapiens
tgcctagaatagtataaatatttcac

SEQ ID NO: 28334 - DNA, 26 bp, Homo sapiens
gcctagaatagtataaatatttcacc

SEQ ID NO: 28335 - DNA, 26 bp, Homo sapiens
cctagaatagtataaatatttcacca

SEQ ID NO: 28336 - DNA, 26 bp, Homo sapiens
ctagaatagtataaatatttcaccat

SEQ ID NO: 28337 - DNA, 26 bp, Homo sapiens
tagaatagtataaatatttcaccata

SEQ ID NO: 28338 - DNA, 26 bp, Homo sapiens
agaatagtataaatatttcaccatag

SEQ ID NO: 28339 - DNA, 26 bp, Homo sapiens
gaatagtataaatatttcaccatagc

SEQ ID NO: 28340 - DNA, 26 bp, Homo sapiens
aatagtataaatatttcaccatagct

SEQ ID NO: 28341 - DNA, 26 bp, Homo sapiens
atagtataaatatttcaccatagctg

SEQ ID NO: 28342 - DNA, 26 bp, Homo sapiens
tagtataaatatttcaccatagctga

SEQ ID NO: 28343 - DNA, 26 bp, Homo sapiens
agtataaatatttcaccatagctgag

SEQ ID NO: 28344 - DNA, 26 bp, Homo sapiens
gtataaatatttcaccatagctgagt

SEQ ID NO: 28345 - DNA, 26 bp, Homo sapiens
tataaatatttcaccatagctgagta

SEQ ID NO: 28346 - DNA, 26 bp, Homo sapiens
ataaatatttcaccatagctgagtag

SEQ ID NO: 28347 - DNA, 26 bp, Homo sapiens
taaatatttcaccatagctgagtagc

SEQ ID NO: 28348 - DNA, 26 bp, Homo sapiens
aaatatttcaccatagctgagtagca

SEQ ID NO: 28349 - DNA, 26 bp, Homo sapiens
aatatttcaccatagctgagtagcaa

SEQ ID NO: 28350 - DNA, 26 bp, Homo sapiens
atatttcaccatagctgagtagcaat

SEQ ID NO: 28351 - DNA, 26 bp, Homo sapiens
tatttcaccatagctgagtagcaatt

SEQ ID NO: 28352 - DNA, 26 bp, Homo sapiens
atttcaccatagctgagtagcaattt

SEQ ID NO: 28353 - DNA, 26 bp, Homo sapiens
tttcaccatagctgagtagcaattta

SEQ ID NO: 28354 - DNA, 26 bp, Homo sapiens
ttcaccatagctgagtagcaatttac

SEQ ID NO: 28355 - DNA, 26 bp, Homo sapiens
tcaccatagctgagtagcaatttacc

SEQ ID NO: 28356 - DNA, 26 bp, Homo sapiens
caccatagctgagtagcaatttacca

SEQ ID NO: 28357 - DNA, 26 bp, Homo sapiens
accatagctgagtagcaatttaccac

SEQ ID NO: 28358 - DNA, 26 bp, Homo sapiens
ccatagctgagtagcaatttaccaca

SEQ ID NO: 28359 - DNA, 26 bp, Homo sapiens
catagctgagtagcaatttaccacat

SEQ ID NO: 28360 - DNA, 26 bp, Homo sapiens
atagctgagtagcaatttaccacata

SEQ ID NO: 28361 - DNA, 26 bp, Homo sapiens
tagctgagtagcaatttaccacataa

SEQ ID NO: 28362 - DNA, 26 bp, Homo sapiens
agctgagtagcaatttaccacataat

SEQ ID NO: 28363 - DNA, 26 bp, Homo sapiens
gctgagtagcaatttaccacataatc

SEQ ID NO: 28364 - DNA, 26 bp, Homo sapiens
ctgagtagcaatttaccacataatcc

SEQ ID NO: 28365 - DNA, 26 bp, Homo sapiens
tgagtagcaatttaccacataatcca

SEQ ID NO: 28366 - DNA, 26 bp, Homo sapiens
gagtagcaatttaccacataatccag

SEQ ID NO: 28367 - DNA, 26 bp, Homo sapiens
agtagcaatttaccacataatccaga

SEQ ID NO: 28368 - DNA, 26 bp, Homo sapiens
gtagcaatttaccacataatccagac

SEQ ID NO: 28369 - DNA, 26 bp, Homo sapiens
tagcaatttaccacataatccagacg

SEQ ID NO: 28370 - DNA, 26 bp, Homo sapiens
agcaatttaccacataatccagacgt

SEQ ID NO: 28371 - DNA, 26 bp, Homo sapiens
gcaatttaccacataatccagacgta

SEQ ID NO: 28372 - DNA, 26 bp, Homo sapiens
caatttaccacataatccagacgtat

SEQ ID NO: 28373 - DNA, 26 bp, Homo sapiens
aatttaccacataatccagacgtatt

SEQ ID NO: 28374 - DNA, 26 bp, Homo sapiens
atttaccacataatccagacgtattt

SEQ ID NO: 28375 - DNA, 26 bp, Homo sapiens
tttaccacataatccagacgtatttg

SEQ ID NO: 28376 - DNA, 26 bp, Homo sapiens
ttaccacataatccagacgtatttgt

SEQ ID NO: 28377 - DNA, 26 bp, Homo sapiens
taccacataatccagacgtatttgtc

SEQ ID NO: 28378 - DNA, 26 bp, Homo sapiens
accacataatccagacgtatttgtcc

SEQ ID NO: 28379 - DNA, 26 bp, Homo sapiens
ccacataatccagacgtatttgtcct

SEQ ID NO: 28380 - DNA, 26 bp, Homo sapiens
cacataatccagacgtatttgtcctt

SEQ ID NO: 28381 - DNA, 26 bp, Homo sapiens
acataatccagacgtatttgtccttt

SEQ ID NO: 28382 - DNA, 26 bp, Homo sapiens
cataatccagacgtatttgtcctttg

SEQ ID NO: 28383 - DNA, 26 bp, Homo sapiens
ataatccagacgtatttgtcctttga

SEQ ID NO: 28384 - DNA, 26 bp, Homo sapiens
taatccagacgtatttgtcctttgag

SEQ ID NO: 28385 - DNA, 26 bp, Homo sapiens
aatccagacgtatttgtcctttgaga

SEQ ID NO: 28386 - DNA, 26 bp, Homo sapiens
atccagacgtatttgtcctttgagaa

SEQ ID NO: 28387 - DNA, 26 bp, Homo sapiens
tccagacgtatttgtcctttgagaat

SEQ ID NO: 28388 - DNA, 26 bp, Homo sapiens
ccagacgtatttgtcctttgagaata

SEQ ID NO: 28389 - DNA, 26 bp, Homo sapiens
cagacgtatttgtcctttgagaataa

SEQ ID NO: 28390 - DNA, 26 bp, Homo sapiens
agacgtatttgtcctttgagaataag

SEQ ID NO: 28391 - DNA, 26 bp, Homo sapiens
gacgtatttgtcctttgagaataagg

SEQ ID NO: 28392 - DNA, 26 bp, Homo sapiens
acgtatttgtcctttgagaataagga

SEQ ID NO: 28393 - DNA, 26 bp, Homo sapiens
cgtatttgtcctttgagaataaggaa

SEQ ID NO: 28394 - DNA, 26 bp, Homo sapiens
gtatttgtcctttgagaataaggaaa

SEQ ID NO: 28395 - DNA, 26 bp, Homo sapiens
tatttgtcctttgagaataaggaaat

SEQ ID NO: 28396 - DNA, 26 bp, Homo sapiens
atttgtcctttgagaataaggaaatt

SEQ ID NO: 28397 - DNA, 26 bp, Homo sapiens
tttgtcctttgagaataaggaaattc

SEQ ID NO: 28398 - DNA, 26 bp, Homo sapiens
ttgtcctttgagaataaggaaattca

SEQ ID NO: 28399 - DNA, 26 bp, Homo sapiens
tgtcctttgagaataaggaaattcat

SEQ ID NO: 28400 - DNA, 26 bp, Homo sapiens
gtcctttgagaataaggaaattcatt

SEQ ID NO: 28401 - DNA, 26 bp, Homo sapiens
tcctttgagaataaggaaattcattg

SEQ ID NO: 28402 - DNA, 26 bp, Homo sapiens
cctttgagaataaggaaattcattgt

SEQ ID NO: 28403 - DNA, 26 bp, Homo sapiens
ctttgagaataaggaaattcattgtt

SEQ ID NO: 28404 - DNA, 26 bp, Homo sapiens
tttgagaataaggaaattcattgttt

SEQ ID NO: 28405 - DNA, 26 bp, Homo sapiens
ttgagaataaggaaattcattgttta

SEQ ID NO: 28406 - DNA, 26 bp, Homo sapiens
tgagaataaggaaattcattgtttaa

SEQ ID NO: 28407 - DNA, 26 bp, Homo sapiens
gagaataaggaaattcattgtttaaa

SEQ ID NO: 28408 - DNA, 26 bp, Homo sapiens
agaataaggaaattcattgtttaaat

SEQ ID NO: 28409 - DNA, 26 bp, Homo sapiens
gaataaggaaattcattgtttaaatg

SEQ ID NO: 28410 - DNA, 26 bp, Homo sapiens
aataaggaaattcattgtttaaatgc

SEQ ID NO: 28411 - DNA, 26 bp, Homo sapiens
ataaggaaattcattgtttaaatgca

SEQ ID NO: 28412 - DNA, 26 bp, Homo sapiens
taaggaaattcattgtttaaatgcaa

SEQ ID NO: 28413 - DNA, 26 bp, Homo sapiens
aaggaaattcattgtttaaatgcaat

SEQ ID NO: 28414 - DNA, 26 bp, Homo sapiens
aggaaattcattgtttaaatgcaatg

SEQ ID NO: 28415 - DNA, 26 bp, Homo sapiens
ggaaattcattgtttaaatgcaatga

SEQ ID NO: 28416 - DNA, 26 bp, Homo sapiens
gaaattcattgtttaaatgcaatgat

SEQ ID NO: 28417 - DNA, 26 bp, Homo sapiens
aaattcattgtttaaatgcaatgatg

SEQ ID NO: 28418 - DNA, 26 bp, Homo sapiens
aattcattgtttaaatgcaatgatgg

SEQ ID NO: 28419 - DNA, 26 bp, Homo sapiens
attcattgtttaaatgcaatgatgga

SEQ ID NO: 28420 - DNA, 26 bp, Homo sapiens
ttcattgtttaaatgcaatgatggat

SEQ ID NO: 28421 - DNA, 26 bp, Homo sapiens
tcattgtttaaatgcaatgatggatt

SEQ ID NO: 28422 - DNA, 26 bp, Homo sapiens
cattgtttaaatgcaatgatggattt

SEQ ID NO: 28423 - DNA, 26 bp, Homo sapiens
attgtttaaatgcaatgatggattta

SEQ ID NO: 28424 - DNA, 26 bp, Homo sapiens
ttgtttaaatgcaatgatggatttat

SEQ ID NO: 28425 - DNA, 26 bp, Homo sapiens
tgtttaaatgcaatgatggatttatc

SEQ ID NO: 28426 - DNA, 26 bp, Homo sapiens
gtttaaatgcaatgatggatttatct

SEQ ID NO: 28427 - DNA, 26 bp, Homo sapiens
tttaaatgcaatgatggatttatcta

SEQ ID NO: 28428 - DNA, 26 bp, Homo sapiens
ttaaatgcaatgatggatttatctat

SEQ ID NO: 28429 - DNA, 26 bp, Homo sapiens
taaatgcaatgatggatttatctatt

SEQ ID NO: 28430 - DNA, 26 bp, Homo sapiens
aaatgcaatgatggatttatctatta

SEQ ID NO: 28431 - DNA, 26 bp, Homo sapiens
aatgcaatgatggatttatctattat

SEQ ID NO: 28432 - DNA, 26 bp, Homo sapiens
atgcaatgatggatttatctattata

SEQ ID NO: 28433 - DNA, 26 bp, Homo sapiens
tgcaatgatggatttatctattatag

SEQ ID NO: 28434 - DNA, 26 bp, Homo sapiens
gcaatgatggatttatctattatagg

SEQ ID NO: 28435 - DNA, 26 bp, Homo sapiens
caatgatggatttatctattataggt

SEQ ID NO: 28436 - DNA, 26 bp, Homo sapiens
aatgatggatttatctattataggtt

SEQ ID NO: 28437 - DNA, 26 bp, Homo sapiens
atgatggatttatctattataggttg

SEQ ID NO: 28438 - DNA, 26 bp, Homo sapiens
tgatggatttatctattataggttgc

SEQ ID NO: 28439 - DNA, 26 bp, Homo sapiens
gatggatttatctattataggttgct

SEQ ID NO: 28440 - DNA, 26 bp, Homo sapiens
atggatttatctattataggttgctt

SEQ ID NO: 28441 - DNA, 26 bp, Homo sapiens
tggatttatctattataggttgcttt

SEQ ID NO: 28442 - DNA, 26 bp, Homo sapiens
ggatttatctattataggttgctttc

SEQ ID NO: 28443 - DNA, 26 bp, Homo sapiens
gatttatctattataggttgctttca

SEQ ID NO: 28444 - DNA, 26 bp, Homo sapiens
atttatctattataggttgctttcaa

SEQ ID NO: 28445 - DNA, 26 bp, Homo sapiens
tttatctattataggttgctttcaat

SEQ ID NO: 28446 - DNA, 26 bp, Homo sapiens
ttatctattataggttgctttcaatt

SEQ ID NO: 28447 - DNA, 26 bp, Homo sapiens
tatctattataggttgctttcaattg

SEQ ID NO: 28448 - DNA, 26 bp, Homo sapiens
atctattataggttgctttcaattgt

SEQ ID NO: 28449 - DNA, 26 bp, Homo sapiens
tctattataggttgctttcaattgta

SEQ ID NO: 28450 - DNA, 26 bp, Homo sapiens
ctattataggttgctttcaattgtat

SEQ ID NO: 28451 - DNA, 26 bp, Homo sapiens
tattataggttgctttcaattgtata

SEQ ID NO: 28452 - DNA, 26 bp, Homo sapiens
attataggttgctttcaattgtatag

SEQ ID NO: 28453 - DNA, 26 bp, Homo sapiens
ttataggttgctttcaattgtataga

SEQ ID NO: 28454 - DNA, 26 bp, Homo sapiens
tataggttgctttcaattgtatagaa

SEQ ID NO: 28455 - DNA, 26 bp, Homo sapiens
ataggttgctttcaattgtatagaaa

SEQ ID NO: 28456 - DNA, 26 bp, Homo sapiens
taggttgctttcaattgtatagaaaa

SEQ ID NO: 28457 - DNA, 26 bp, Homo sapiens
aggttgctttcaattgtatagaaaat

SEQ ID NO: 28458 - DNA, 26 bp, Homo sapiens
ggttgctttcaattgtatagaaaatg

SEQ ID NO: 28459 - DNA, 26 bp, Homo sapiens
gttgctttcaattgtatagaaaatgt

SEQ ID NO: 28460 - DNA, 26 bp, Homo sapiens
ttgctttcaattgtatagaaaatgtt

SEQ ID NO: 28461 - DNA, 26 bp, Homo sapiens
tgctttcaattgtatagaaaatgttc

SEQ ID NO: 28462 - DNA, 26 bp, Homo sapiens
gctttcaattgtatagaaaatgttca

SEQ ID NO: 28463 - DNA, 26 bp, Homo sapiens
ctttcaattgtatagaaaatgttcaa

SEQ ID NO: 28464 - DNA, 26 bp, Homo sapiens
tttcaattgtatagaaaatgttcaac

SEQ ID NO: 28465 - DNA, 26 bp, Homo sapiens
ttcaattgtatagaaaatgttcaact

SEQ ID NO: 28466 - DNA, 26 bp, Homo sapiens
tcaattgtatagaaaatgttcaacta

SEQ ID NO: 28467 - DNA, 26 bp, Homo sapiens
caattgtatagaaaatgttcaactag

SEQ ID NO: 28468 - DNA, 26 bp, Homo sapiens
aattgtatagaaaatgttcaactaga

SEQ ID NO: 28469 - DNA, 26 bp, Homo sapiens
attgtatagaaaatgttcaactagag

SEQ ID NO: 28470 - DNA, 26 bp, Homo sapiens
ttgtatagaaaatgttcaactagagt

SEQ ID NO: 28471 - DNA, 26 bp, Homo sapiens
tgtatagaaaatgttcaactagagta

SEQ ID NO: 28472 - DNA, 26 bp, Homo sapiens
gtatagaaaatgttcaactagagtaa

SEQ ID NO: 28473 - DNA, 26 bp, Homo sapiens
tatagaaaatgttcaactagagtaaa

SEQ ID NO: 28474 - DNA, 26 bp, Homo sapiens
atagaaaatgttcaactagagtaaac

SEQ ID NO: 28475 - DNA, 26 bp, Homo sapiens
tagaaaatgttcaactagagtaaaca

SEQ ID NO: 28476 - DNA, 26 bp, Homo sapiens
agaaaatgttcaactagagtaaacag

SEQ ID NO: 28477 - DNA, 26 bp, Homo sapiens
gaaaatgttcaactagagtaaacaga

SEQ ID NO: 28478 - DNA, 26 bp, Homo sapiens
aaaatgttcaactagagtaaacagat

SEQ ID NO: 28479 - DNA, 26 bp, Homo sapiens
aaatgttcaactagagtaaacagatc

SEQ ID NO: 28480 - DNA, 26 bp, Homo sapiens
aatgttcaactagagtaaacagatct

SEQ ID NO: 28481 - DNA, 26 bp, Homo sapiens
atgttcaactagagtaaacagatcta

SEQ ID NO: 28482 - DNA, 26 bp, Homo sapiens
tgttcaactagagtaaacagatctat

SEQ ID NO: 28483 - DNA, 26 bp, Homo sapiens
gttcaactagagtaaacagatctatc

SEQ ID NO: 28484 - DNA, 26 bp, Homo sapiens
ttcaactagagtaaacagatctatcc

SEQ ID NO: 28485 - DNA, 26 bp, Homo sapiens
tcaactagagtaaacagatctatcct

SEQ ID NO: 28486 - DNA, 26 bp, Homo sapiens
caactagagtaaacagatctatcctt

SEQ ID NO: 28487 - DNA, 26 bp, Homo sapiens
aactagagtaaacagatctatccttg

SEQ ID NO: 28488 - DNA, 26 bp, Homo sapiens
actagagtaaacagatctatccttgc

SEQ ID NO: 28489 - DNA, 26 bp, Homo sapiens
ctagagtaaacagatctatccttgcg

SEQ ID NO: 28490 - DNA, 26 bp, Homo sapiens
tagagtaaacagatctatccttgcgt

SEQ ID NO: 28491 - DNA, 26 bp, Homo sapiens
agagtaaacagatctatccttgcgtc

SEQ ID NO: 28492 - DNA, 26 bp, Homo sapiens
gagtaaacagatctatccttgcgtct

SEQ ID NO: 28493 - DNA, 26 bp, Homo sapiens
agtaaacagatctatccttgcgtctc

SEQ ID NO: 28494 - DNA, 26 bp, Homo sapiens
gtaaacagatctatccttgcgtctcc

SEQ ID NO: 28495 - DNA, 26 bp, Homo sapiens
taaacagatctatccttgcgtctcca

SEQ ID NO: 28496 - DNA, 26 bp, Homo sapiens
aaacagatctatccttgcgtctccaa

SEQ ID NO: 28497 - DNA, 26 bp, Homo sapiens
aacagatctatccttgcgtctccaaa

SEQ ID NO: 28498 - DNA, 26 bp, Homo sapiens
acagatctatccttgcgtctccaaac

SEQ ID NO: 28499 - DNA, 26 bp, Homo sapiens
cagatctatccttgcgtctccaaact

SEQ ID NO: 28500 - DNA, 26 bp, Homo sapiens
agatctatccttgcgtctccaaactg

SEQ ID NO: 28501 - DNA, 26 bp, Homo sapiens
gatctatccttgcgtctccaaactgt

SEQ ID NO: 28502 - DNA, 26 bp, Homo sapiens
atctatccttgcgtctccaaactgtg

SEQ ID NO: 28503 - DNA, 26 bp, Homo sapiens
tctatccttgcgtctccaaactgtgc

SEQ ID NO: 28504 - DNA, 26 bp, Homo sapiens
ctatccttgcgtctccaaactgtgca

SEQ ID NO: 28505 - DNA, 26 bp, Homo sapiens
tatccttgcgtctccaaactgtgcac

SEQ ID NO: 28506 - DNA, 26 bp, Homo sapiens
atccttgcgtctccaaactgtgcact

SEQ ID NO: 28507 - DNA, 26 bp, Homo sapiens
tccttgcgtctccaaactgtgcacta

SEQ ID NO: 28508 - DNA, 26 bp, Homo sapiens
ccttgcgtctccaaactgtgcactag

SEQ ID NO: 28509 - DNA, 26 bp, Homo sapiens
cttgcgtctccaaactgtgcactagg

SEQ ID NO: 28510 - DNA, 26 bp, Homo sapiens
ttgcgtctccaaactgtgcactaggt

SEQ ID NO: 28511 - DNA, 26 bp, Homo sapiens
tgcgtctccaaactgtgcactaggta

SEQ ID NO: 28512 - DNA, 26 bp, Homo sapiens
gcgtctccaaactgtgcactaggtat

SEQ ID NO: 28513 - DNA, 26 bp, Homo sapiens
cgtctccaaactgtgcactaggtatg

SEQ ID NO: 28514 - DNA, 26 bp, Homo sapiens
gtctccaaactgtgcactaggtatgc

SEQ ID NO: 28515 - DNA, 26 bp, Homo sapiens
tctccaaactgtgcactaggtatgca

SEQ ID NO: 28516 - DNA, 26 bp, Homo sapiens
ctccaaactgtgcactaggtatgcaa

SEQ ID NO: 28517 - DNA, 26 bp, Homo sapiens
tccaaactgtgcactaggtatgcaag

SEQ ID NO: 28518 - DNA, 26 bp, Homo sapiens
ccaaactgtgcactaggtatgcaaga

SEQ ID NO: 28519 - DNA, 26 bp, Homo sapiens
caaactgtgcactaggtatgcaagac

SEQ ID NO: 28520 - DNA, 26 bp, Homo sapiens
aaactgtgcactaggtatgcaagact

SEQ ID NO: 28521 - DNA, 26 bp, Homo sapiens
aactgtgcactaggtatgcaagactt

SEQ ID NO: 28522 - DNA, 26 bp, Homo sapiens
actgtgcactaggtatgcaagacttt

SEQ ID NO: 28523 - DNA, 26 bp, Homo sapiens
ctgtgcactaggtatgcaagactttt

SEQ ID NO: 28524 - DNA, 26 bp, Homo sapiens
tgtgcactaggtatgcaagactttta

SEQ ID NO: 28525 - DNA, 26 bp, Homo sapiens
gtgcactaggtatgcaagacttttaa

SEQ ID NO: 28526 - DNA, 26 bp, Homo sapiens
tgcactaggtatgcaagacttttaat

SEQ ID NO: 28527 - DNA, 26 bp, Homo sapiens
gcactaggtatgcaagacttttaata

SEQ ID NO: 28528 - DNA, 26 bp, Homo sapiens
cactaggtatgcaagacttttaatat

SEQ ID NO: 28529 - DNA, 26 bp, Homo sapiens
actaggtatgcaagacttttaatatt

SEQ ID NO: 28530 - DNA, 26 bp, Homo sapiens
ctaggtatgcaagacttttaatatta

SEQ ID NO: 28531 - DNA, 26 bp, Homo sapiens
taggtatgcaagacttttaatattaa

SEQ ID NO: 28532 - DNA, 26 bp, Homo sapiens
aggtatgcaagacttttaatattaaa

SEQ ID NO: 28533 - DNA, 26 bp, Homo sapiens
ggtatgcaagacttttaatattaaaa

SEQ ID NO: 28534 - DNA, 26 bp, Homo sapiens
gtatgcaagacttttaatattaaaac

SEQ ID NO: 28535 - DNA, 26 bp, Homo sapiens
tatgcaagacttttaatattaaaaca

SEQ ID NO: 28536 - DNA, 26 bp, Homo sapiens
atgcaagacttttaatattaaaacat

SEQ ID NO: 28537 - DNA, 26 bp, Homo sapiens
tgcaagacttttaatattaaaacatg

SEQ ID NO: 28538 - DNA, 26 bp, Homo sapiens
gcaagacttttaatattaaaacatgc

SEQ ID NO: 28539 - DNA, 26 bp, Homo sapiens
caagacttttaatattaaaacatgct

SEQ ID NO: 28540 - DNA, 26 bp, Homo sapiens
aagacttttaatattaaaacatgctc

SEQ ID NO: 28541 - DNA, 26 bp, Homo sapiens
agacttttaatattaaaacatgctct

SEQ ID NO: 28542 - DNA, 26 bp, Homo sapiens
gacttttaatattaaaacatgctctt

SEQ ID NO: 28543 - DNA, 26 bp, Homo sapiens
acttttaatattaaaacatgctctta

SEQ ID NO: 28544 - DNA, 26 bp, Homo sapiens
cttttaatattaaaacatgctcttag

SEQ ID NO: 28545 - DNA, 26 bp, Homo sapiens
ttttaatattaaaacatgctcttagc

SEQ ID NO: 28546 - DNA, 26 bp, Homo sapiens
tttaatattaaaacatgctcttagct

SEQ ID NO: 28547 - DNA, 26 bp, Homo sapiens
ttaatattaaaacatgctcttagctc

SEQ ID NO: 28548 - DNA, 26 bp, Homo sapiens
taatattaaaacatgctcttagctct

SEQ ID NO: 28549 - DNA, 26 bp, Homo sapiens
aatattaaaacatgctcttagctctt

SEQ ID NO: 28550 - DNA, 26 bp, Homo sapiens
atattaaaacatgctcttagctcttc

SEQ ID NO: 28551 - DNA, 26 bp, Homo sapiens
tattaaaacatgctcttagctcttcc

SEQ ID NO: 28552 - DNA, 26 bp, Homo sapiens
attaaaacatgctcttagctcttcca

SEQ ID NO: 28553 - DNA, 26 bp, Homo sapiens
ttaaaacatgctcttagctcttccaa

SEQ ID NO: 28554 - DNA, 26 bp, Homo sapiens
taaaacatgctcttagctcttccaag

SEQ ID NO: 28555 - DNA, 26 bp, Homo sapiens
aaaacatgctcttagctcttccaagt

SEQ ID NO: 28556 - DNA, 26 bp, Homo sapiens
aaacatgctcttagctcttccaagtt

SEQ ID NO: 28557 - DNA, 26 bp, Homo sapiens
aacatgctcttagctcttccaagttg

SEQ ID NO: 28558 - DNA, 26 bp, Homo sapiens
acatgctcttagctcttccaagttga

SEQ ID NO: 28559 - DNA, 26 bp, Homo sapiens
catgctcttagctcttccaagttgac

SEQ ID NO: 28560 - DNA, 26 bp, Homo sapiens
atgctcttagctcttccaagttgact

SEQ ID NO: 28561 - DNA, 26 bp, Homo sapiens
tgctcttagctcttccaagttgactt

SEQ ID NO: 28562 - DNA, 26 bp, Homo sapiens
gctcttagctcttccaagttgactta

SEQ ID NO: 28563 - DNA, 26 bp, Homo sapiens
ctcttagctcttccaagttgacttag

SEQ ID NO: 28564 - DNA, 26 bp, Homo sapiens
tcttagctcttccaagttgacttagg

SEQ ID NO: 28565 - DNA, 26 bp, Homo sapiens
cttagctcttccaagttgacttagga

SEQ ID NO: 28566 - DNA, 26 bp, Homo sapiens
ttagctcttccaagttgacttaggac

SEQ ID NO: 28567 - DNA, 26 bp, Homo sapiens
tagctcttccaagttgacttaggacc

SEQ ID NO: 28568 - DNA, 26 bp, Homo sapiens
agctcttccaagttgacttaggacct

SEQ ID NO: 28569 - DNA, 26 bp, Homo sapiens
gctcttccaagttgacttaggacctg

SEQ ID NO: 28570 - DNA, 26 bp, Homo sapiens
ctcttccaagttgacttaggacctga

SEQ ID NO: 28571 - DNA, 26 bp, Homo sapiens
tcttccaagttgacttaggacctgat

SEQ ID NO: 28572 - DNA, 26 bp, Homo sapiens
cttccaagttgacttaggacctgatt

SEQ ID NO: 28573 - DNA, 26 bp, Homo sapiens
ttccaagttgacttaggacctgattt

SEQ ID NO: 28574 - DNA, 26 bp, Homo sapiens
tccaagttgacttaggacctgatttt

SEQ ID NO: 28575 - DNA, 26 bp, Homo sapiens
ccaagttgacttaggacctgatttta

SEQ ID NO: 28576 - DNA, 26 bp, Homo sapiens
caagttgacttaggacctgattttaa

SEQ ID NO: 28577 - DNA, 26 bp, Homo sapiens
aagttgacttaggacctgattttaat

SEQ ID NO: 28578 - DNA, 26 bp, Homo sapiens
agttgacttaggacctgattttaatc

SEQ ID NO: 28579 - DNA, 26 bp, Homo sapiens
gttgacttaggacctgattttaatct

SEQ ID NO: 28580 - DNA, 26 bp, Homo sapiens
ttgacttaggacctgattttaatctg

SEQ ID NO: 28581 - DNA, 26 bp, Homo sapiens
tgacttaggacctgattttaatctgt

SEQ ID NO: 28582 - DNA, 26 bp, Homo sapiens
gacttaggacctgattttaatctgtg

SEQ ID NO: 28583 - DNA, 26 bp, Homo sapiens
acttaggacctgattttaatctgtgt

SEQ ID NO: 28584 - DNA, 26 bp, Homo sapiens
cttaggacctgattttaatctgtgta

SEQ ID NO: 28585 - DNA, 26 bp, Homo sapiens
ttaggacctgattttaatctgtgtaa

SEQ ID NO: 28586 - DNA, 26 bp, Homo sapiens
taggacctgattttaatctgtgtaat

SEQ ID NO: 28587 - DNA, 26 bp, Homo sapiens
aggacctgattttaatctgtgtaata

SEQ ID NO: 28588 - DNA, 26 bp, Homo sapiens
ggacctgattttaatctgtgtaatac

SEQ ID NO: 28589 - DNA, 26 bp, Homo sapiens
gacctgattttaatctgtgtaataca

SEQ ID NO: 28590 - DNA, 26 bp, Homo sapiens
acctgattttaatctgtgtaatacag

SEQ ID NO: 28591 - DNA, 26 bp, Homo sapiens
cctgattttaatctgtgtaatacagt

SEQ ID NO: 28592 - DNA, 26 bp, Homo sapiens
ctgattttaatctgtgtaatacagta

SEQ ID NO: 28593 - DNA, 26 bp, Homo sapiens
tgattttaatctgtgtaatacagtat

SEQ ID NO: 28594 - DNA, 26 bp, Homo sapiens
gattttaatctgtgtaatacagtatt

SEQ ID NO: 28595 - DNA, 26 bp, Homo sapiens
attttaatctgtgtaatacagtattc

SEQ ID NO: 28596 - DNA, 26 bp, Homo sapiens
ttttaatctgtgtaatacagtattcc

SEQ ID NO: 28597 - DNA, 26 bp, Homo sapiens
tttaatctgtgtaatacagtattccc

SEQ ID NO: 28598 - DNA, 26 bp, Homo sapiens
ttaatctgtgtaatacagtattcccg

SEQ ID NO: 28599 - DNA, 26 bp, Homo sapiens
taatctgtgtaatacagtattcccgt

SEQ ID NO: 28600 - DNA, 26 bp, Homo sapiens
aatctgtgtaatacagtattcccgtt

SEQ ID NO: 28601 - DNA, 26 bp, Homo sapiens
atctgtgtaatacagtattcccgtta

SEQ ID NO: 28602 - DNA, 26 bp, Homo sapiens
tctgtgtaatacagtattcccgttaa

SEQ ID NO: 28603 - DNA, 26 bp, Homo sapiens
ctgtgtaatacagtattcccgttaat

SEQ ID NO: 28604 - DNA, 26 bp, Homo sapiens
tgtgtaatacagtattcccgttaata

SEQ ID NO: 28605 - DNA, 26 bp, Homo sapiens
gtgtaatacagtattcccgttaataa

SEQ ID NO: 28606 - DNA, 26 bp, Homo sapiens
tgtaatacagtattcccgttaataat

SEQ ID NO: 28607 - DNA, 26 bp, Homo sapiens
gtaatacagtattcccgttaataata

SEQ ID NO: 28608 - DNA, 26 bp, Homo sapiens
taatacagtattcccgttaataataa

SEQ ID NO: 28609 - DNA, 26 bp, Homo sapiens
aatacagtattcccgttaataataac

SEQ ID NO: 28610 - DNA, 26 bp, Homo sapiens
atacagtattcccgttaataataacg

SEQ ID NO: 28611 - DNA, 26 bp, Homo sapiens
tacagtattcccgttaataataacgt

SEQ ID NO: 28612 - DNA, 26 bp, Homo sapiens
acagtattcccgttaataataacgta

SEQ ID NO: 28613 - DNA, 26 bp, Homo sapiens
cagtattcccgttaataataacgtat

SEQ ID NO: 28614 - DNA, 26 bp, Homo sapiens
agtattcccgttaataataacgtata

SEQ ID NO: 28615 - DNA, 26 bp, Homo sapiens
gtattcccgttaataataacgtataa

SEQ ID NO: 28616 - DNA, 26 bp, Homo sapiens
tattcccgttaataataacgtataat

SEQ ID NO: 28617 - DNA, 26 bp, Homo sapiens
attcccgttaataataacgtataatt

SEQ ID NO: 28618 - DNA, 26 bp, Homo sapiens
ttcccgttaataataacgtataatta

SEQ ID NO: 28619 - DNA, 26 bp, Homo sapiens
tcccgttaataataacgtataattaa

SEQ ID NO: 28620 - DNA, 26 bp, Homo sapiens
cccgttaataataacgtataattaag

SEQ ID NO: 28621 - DNA, 26 bp, Homo sapiens
ccgttaataataacgtataattaaga

SEQ ID NO: 28622 - DNA, 26 bp, Homo sapiens
cgttaataataacgtataattaagac

SEQ ID NO: 28623 - DNA, 26 bp, Homo sapiens
gttaataataacgtataattaagaca

SEQ ID NO: 28624 - DNA, 26 bp, Homo sapiens
ttaataataacgtataattaagacat

SEQ ID NO: 28625 - DNA, 26 bp, Homo sapiens
taataataacgtataattaagacatc

SEQ ID NO: 28626 - DNA, 26 bp, Homo sapiens
aataataacgtataattaagacatcc

SEQ ID NO: 28627 - DNA, 26 bp, Homo sapiens
ataataacgtataattaagacatccg

SEQ ID NO: 28628 - DNA, 26 bp, Homo sapiens
taataacgtataattaagacatccgt

SEQ ID NO: 28629 - DNA, 26 bp, Homo sapiens
aataacgtataattaagacatccgtt

SEQ ID NO: 28630 - DNA, 26 bp, Homo sapiens
ataacgtataattaagacatccgtta

SEQ ID NO: 28631 - DNA, 26 bp, Homo sapiens
taacgtataattaagacatccgttaa

SEQ ID NO: 28632 - DNA, 26 bp, Homo sapiens
aacgtataattaagacatccgttaaa

SEQ ID NO: 28633 - DNA, 26 bp, Homo sapiens
acgtataattaagacatccgttaaaa

SEQ ID NO: 28634 - DNA, 26 bp, Homo sapiens
cgtataattaagacatccgttaaaaa

SEQ ID NO: 28635 - DNA, 26 bp, Homo sapiens
gtataattaagacatccgttaaaaat

SEQ ID NO: 28636 - DNA, 26 bp, Homo sapiens
tataattaagacatccgttaaaaatc

SEQ ID NO: 28637 - DNA, 26 bp, Homo sapiens
ataattaagacatccgttaaaaatcc

SEQ ID NO: 28638 - DNA, 26 bp, Homo sapiens
taattaagacatccgttaaaaatcca

SEQ ID NO: 28639 - DNA, 26 bp, Homo sapiens
aattaagacatccgttaaaaatccat

SEQ ID NO: 28640 - DNA, 26 bp, Homo sapiens
attaagacatccgttaaaaatccata

SEQ ID NO: 28641 - DNA, 26 bp, Homo sapiens
ttaagacatccgttaaaaatccataa

SEQ ID NO: 28642 - DNA, 26 bp, Homo sapiens
taagacatccgttaaaaatccataac

SEQ ID NO: 28643 - DNA, 26 bp, Homo sapiens
aagacatccgttaaaaatccataacg

SEQ ID NO: 28644 - DNA, 26 bp, Homo sapiens
agacatccgttaaaaatccataacgt

SEQ ID NO: 28645 - DNA, 26 bp, Homo sapiens
gacatccgttaaaaatccataacgtt

SEQ ID NO: 28646 - DNA, 26 bp, Homo sapiens
acatccgttaaaaatccataacgtta

SEQ ID NO: 28647 - DNA, 26 bp, Homo sapiens
catccgttaaaaatccataacgttaa

SEQ ID NO: 28648 - DNA, 26 bp, Homo sapiens
atccgttaaaaatccataacgttaat

SEQ ID NO: 28649 - DNA, 26 bp, Homo sapiens
tccgttaaaaatccataacgttaatt

SEQ ID NO: 28650 - DNA, 26 bp, Homo sapiens
ccgttaaaaatccataacgttaattt

SEQ ID NO: 28651 - DNA, 26 bp, Homo sapiens
cgttaaaaatccataacgttaattta

SEQ ID NO: 28652 - DNA, 26 bp, Homo sapiens
gttaaaaatccataacgttaatttaa

SEQ ID NO: 28653 - DNA, 26 bp, Homo sapiens
ttaaaaatccataacgttaatttaat

SEQ ID NO: 28654 - DNA, 26 bp, Homo sapiens
taaaaatccataacgttaatttaatg

SEQ ID NO: 28655 - DNA, 26 bp, Homo sapiens
aaaaatccataacgttaatttaatgg

SEQ ID NO: 28656 - DNA, 26 bp, Homo sapiens
aaaatccataacgttaatttaatgga

SEQ ID NO: 28657 - DNA, 26 bp, Homo sapiens
aaatccataacgttaatttaatggag

SEQ ID NO: 28658 - DNA, 26 bp, Homo sapiens
aatccataacgttaatttaatggaga

SEQ ID NO: 28659 - DNA, 26 bp, Homo sapiens
atccataacgttaatttaatggagaa

SEQ ID NO: 28660 - DNA, 26 bp, Homo sapiens
tccataacgttaatttaatggagaaa

SEQ ID NO: 28661 - DNA, 26 bp, Homo sapiens
ccataacgttaatttaatggagaaaa

SEQ ID NO: 28662 - DNA, 26 bp, Homo sapiens
cataacgttaatttaatggagaaaat

SEQ ID NO: 28663 - DNA, 26 bp, Homo sapiens
ataacgttaatttaatggagaaaatc

SEQ ID NO: 28664 - DNA, 26 bp, Homo sapiens
taacgttaatttaatggagaaaatct

SEQ ID NO: 28665 - DNA, 26 bp, Homo sapiens
aacgttaatttaatggagaaaatcta

SEQ ID NO: 28666 - DNA, 26 bp, Homo sapiens
acgttaatttaatggagaaaatctaa

SEQ ID NO: 28667 - DNA, 26 bp, Homo sapiens
cgttaatttaatggagaaaatctaat

SEQ ID NO: 28668 - DNA, 26 bp, Homo sapiens
gttaatttaatggagaaaatctaata

SEQ ID NO: 28669 - DNA, 26 bp, Homo sapiens
ttaatttaatggagaaaatctaatac

SEQ ID NO: 28670 - DNA, 26 bp, Homo sapiens
taatttaatggagaaaatctaataca

SEQ ID NO: 28671 - DNA, 26 bp, Homo sapiens
aatttaatggagaaaatctaatacag

SEQ ID NO: 28672 - DNA, 26 bp, Homo sapiens
atttaatggagaaaatctaatacagt

SEQ ID NO: 28673 - DNA, 26 bp, Homo sapiens
tttaatggagaaaatctaatacagtt

SEQ ID NO: 28674 - DNA, 26 bp, Homo sapiens
ttaatggagaaaatctaatacagttc

SEQ ID NO: 28675 - DNA, 26 bp, Homo sapiens
taatggagaaaatctaatacagttct

SEQ ID NO: 28676 - DNA, 26 bp, Homo sapiens
aatggagaaaatctaatacagttcta

SEQ ID NO: 28677 - DNA, 26 bp, Homo sapiens
atggagaaaatctaatacagttctat

SEQ ID NO: 28678 - DNA, 26 bp, Homo sapiens
tggagaaaatctaatacagttctatt

SEQ ID NO: 28679 - DNA, 26 bp, Homo sapiens
ggagaaaatctaatacagttctattg

SEQ ID NO: 28680 - DNA, 26 bp, Homo sapiens
gagaaaatctaatacagttctattgg

SEQ ID NO: 28681 - DNA, 26 bp, Homo sapiens
agaaaatctaatacagttctattgga

SEQ ID NO: 28682 - DNA, 26 bp, Homo sapiens
gaaaatctaatacagttctattggaa

SEQ ID NO: 28683 - DNA, 26 bp, Homo sapiens
aaaatctaatacagttctattggaat

SEQ ID NO: 28684 - DNA, 26 bp, Homo sapiens
aaatctaatacagttctattggaatt

SEQ ID NO: 28685 - DNA, 26 bp, Homo sapiens
aatctaatacagttctattggaattt

SEQ ID NO: 28686 - DNA, 26 bp, Homo sapiens
atctaatacagttctattggaatttt

SEQ ID NO: 28687 - DNA, 26 bp, Homo sapiens
tctaatacagttctattggaattttt

SEQ ID NO: 28688 - DNA, 26 bp, Homo sapiens
ctaatacagttctattggaattttta

SEQ ID NO: 28689 - DNA, 26 bp, Homo sapiens
taatacagttctattggaatttttac

SEQ ID NO: 28690 - DNA, 26 bp, Homo sapiens
aatacagttctattggaatttttacg

SEQ ID NO: 28691 - DNA, 26 bp, Homo sapiens
atacagttctattggaatttttacgt

SEQ ID NO: 28692 - DNA, 26 bp, Homo sapiens
tacagttctattggaatttttacgtt

SEQ ID NO: 28693 - DNA, 26 bp, Homo sapiens
acagttctattggaatttttacgtta

SEQ ID NO: 28694 - DNA, 26 bp, Homo sapiens
cagttctattggaatttttacgttaa

SEQ ID NO: 28695 - DNA, 26 bp, Homo sapiens
agttctattggaatttttacgttaaa

SEQ ID NO: 28696 - DNA, 26 bp, Homo sapiens
gttctattggaatttttacgttaaat

SEQ ID NO: 28697 - DNA, 26 bp, Homo sapiens
ttctattggaatttttacgttaaatt

SEQ ID NO: 28698 - DNA, 26 bp, Homo sapiens
tctattggaatttttacgttaaatta

SEQ ID NO: 28699 - DNA, 26 bp, Homo sapiens
ctattggaatttttacgttaaattaa

SEQ ID NO: 28700 - DNA, 26 bp, Homo sapiens
tattggaatttttacgttaaattaac

SEQ ID NO: 28701 - DNA, 26 bp, Homo sapiens
attggaatttttacgttaaattaact

SEQ ID NO: 28702 - DNA, 26 bp, Homo sapiens
ttggaatttttacgttaaattaactt

SEQ ID NO: 28703 - DNA, 26 bp, Homo sapiens
tggaatttttacgttaaattaacttt

SEQ ID NO: 28704 - DNA, 26 bp, Homo sapiens
ggaatttttacgttaaattaacttta

SEQ ID NO: 28705 - DNA, 26 bp, Homo sapiens
gaatttttacgttaaattaactttaa

SEQ ID NO: 28706 - DNA, 26 bp, Homo sapiens
aatttttacgttaaattaactttaac

SEQ ID NO: 28707 - DNA, 26 bp, Homo sapiens
atttttacgttaaattaactttaacg

SEQ ID NO: 28708 - DNA, 26 bp, Homo sapiens
tttttacgttaaattaactttaacgg

SEQ ID NO: 28709 - DNA, 26 bp, Homo sapiens
ttttacgttaaattaactttaacggg

SEQ ID NO: 28710 - DNA, 26 bp, Homo sapiens
tttacgttaaattaactttaacgggc

SEQ ID NO: 28711 - DNA, 26 bp, Homo sapiens
ttacgttaaattaactttaacgggct

SEQ ID NO: 28712 - DNA, 26 bp, Homo sapiens
tacgttaaattaactttaacgggctt

SEQ ID NO: 28713 - DNA, 26 bp, Homo sapiens
acgttaaattaactttaacgggcttt

SEQ ID NO: 28714 - DNA, 26 bp, Homo sapiens
cgttaaattaactttaacgggctttt

SEQ ID NO: 28715 - DNA, 26 bp, Homo sapiens
gttaaattaactttaacgggctttta

SEQ ID NO: 28716 - DNA, 26 bp, Homo sapiens
ttaaattaactttaacgggcttttaa

SEQ ID NO: 28717 - DNA, 26 bp, Homo sapiens
taaattaactttaacgggcttttaat

SEQ ID NO: 28718 - DNA, 26 bp, Homo sapiens
aaattaactttaacgggcttttaatg

SEQ ID NO: 28719 - DNA, 26 bp, Homo sapiens
aattaactttaacgggcttttaatgg

SEQ ID NO: 28720 - DNA, 26 bp, Homo sapiens
attaactttaacgggcttttaatgga

SEQ ID NO: 28721 - DNA, 26 bp, Homo sapiens
ttaactttaacgggcttttaatggat

SEQ ID NO: 28722 - DNA, 26 bp, Homo sapiens
taactttaacgggcttttaatggatg

SEQ ID NO: 28723 - DNA, 26 bp, Homo sapiens
aactttaacgggcttttaatggatgt

SEQ ID NO: 28724 - DNA, 26 bp, Homo sapiens
actttaacgggcttttaatggatgtc

SEQ ID NO: 28725 - DNA, 26 bp, Homo sapiens
ctttaacgggcttttaatggatgtct

SEQ ID NO: 28726 - DNA, 26 bp, Homo sapiens
tttaacgggcttttaatggatgtctt

SEQ ID NO: 28727 - DNA, 26 bp, Homo sapiens
ttaacgggcttttaatggatgtctta

SEQ ID NO: 28728 - DNA, 26 bp, Homo sapiens
taacgggcttttaatggatgtcttaa

SEQ ID NO: 28729 - DNA, 26 bp, Homo sapiens
aacgggcttttaatggatgtcttaat

SEQ ID NO: 28730 - DNA, 26 bp, Homo sapiens
acgggcttttaatggatgtcttaatt

SEQ ID NO: 28731 - DNA, 26 bp, Homo sapiens
cgggcttttaatggatgtcttaatta

SEQ ID NO: 28732 - DNA, 26 bp, Homo sapiens
gggcttttaatggatgtcttaattag

SEQ ID NO: 28733 - DNA, 26 bp, Homo sapiens
ggcttttaatggatgtcttaattaga

SEQ ID NO: 28734 - DNA, 26 bp, Homo sapiens
gcttttaatggatgtcttaattagat

SEQ ID NO: 28735 - DNA, 26 bp, Homo sapiens
cttttaatggatgtcttaattagatc

SEQ ID NO: 28736 - DNA, 26 bp, Homo sapiens
ttttaatggatgtcttaattagatct

SEQ ID NO: 28737 - DNA, 26 bp, Homo sapiens
tttaatggatgtcttaattagatctc

SEQ ID NO: 28738 - DNA, 26 bp, Homo sapiens
ttaatggatgtcttaattagatctca

SEQ ID NO: 28739 - DNA, 26 bp, Homo sapiens
taatggatgtcttaattagatctcat

SEQ ID NO: 28740 - DNA, 26 bp, Homo sapiens
aatggatgtcttaattagatctcatt

SEQ ID NO: 28741 - DNA, 26 bp, Homo sapiens
atggatgtcttaattagatctcatta

SEQ ID NO: 28742 - DNA, 26 bp, Homo sapiens
tggatgtcttaattagatctcattat

SEQ ID NO: 28743 - DNA, 26 bp, Homo sapiens
ggatgtcttaattagatctcattatt

SEQ ID NO: 28744 - DNA, 26 bp, Homo sapiens
gatgtcttaattagatctcattatta

SEQ ID NO: 28745 - DNA, 26 bp, Homo sapiens
atgtcttaattagatctcattattaa

SEQ ID NO: 28746 - DNA, 26 bp, Homo sapiens
tgtcttaattagatctcattattaac

SEQ ID NO: 28747 - DNA, 26 bp, Homo sapiens
gtcttaattagatctcattattaacg

SEQ ID NO: 28748 - DNA, 26 bp, Homo sapiens
tcttaattagatctcattattaacgg

SEQ ID NO: 28749 - DNA, 26 bp, Homo sapiens
cttaattagatctcattattaacggg

SEQ ID NO: 28750 - DNA, 26 bp, Homo sapiens
ttaattagatctcattattaacggga

SEQ ID NO: 28751 - DNA, 26 bp, Homo sapiens
taattagatctcattattaacgggaa

SEQ ID NO: 28752 - DNA, 26 bp, Homo sapiens
aattagatctcattattaacgggaat

SEQ ID NO: 28753 - DNA, 26 bp, Homo sapiens
attagatctcattattaacgggaata

SEQ ID NO: 28754 - DNA, 26 bp, Homo sapiens
ttagatctcattattaacgggaatat

SEQ ID NO: 28755 - DNA, 26 bp, Homo sapiens
tagatctcattattaacgggaatatt

SEQ ID NO: 28756 - DNA, 26 bp, Homo sapiens
agatctcattattaacgggaatattc

SEQ ID NO: 28757 - DNA, 26 bp, Homo sapiens
gatctcattattaacgggaatattcc

SEQ ID NO: 28758 - DNA, 26 bp, Homo sapiens
atctcattattaacgggaatattcca

SEQ ID NO: 28759 - DNA, 26 bp, Homo sapiens
tctcattattaacgggaatattccac

SEQ ID NO: 28760 - DNA, 26 bp, Homo sapiens
ctcattattaacgggaatattccaca

SEQ ID NO: 28761 - DNA, 26 bp, Homo sapiens
tcattattaacgggaatattccacaa

SEQ ID NO: 28762 - DNA, 26 bp, Homo sapiens
cattattaacgggaatattccacaaa

SEQ ID NO: 28763 - DNA, 26 bp, Homo sapiens
attattaacgggaatattccacaaat

SEQ ID NO: 28764 - DNA, 26 bp, Homo sapiens
ttattaacgggaatattccacaaatt

SEQ ID NO: 28765 - DNA, 26 bp, Homo sapiens
tattaacgggaatattccacaaatta

SEQ ID NO: 28766 - DNA, 26 bp, Homo sapiens
attaacgggaatattccacaaattaa

SEQ ID NO: 28767 - DNA, 26 bp, Homo sapiens
ttaacgggaatattccacaaattaaa

SEQ ID NO: 28768 - DNA, 26 bp, Homo sapiens
taacgggaatattccacaaattaaaa

SEQ ID NO: 28769 - DNA, 26 bp, Homo sapiens
aacgggaatattccacaaattaaaat

SEQ ID NO: 28770 - DNA, 26 bp, Homo sapiens
acgggaatattccacaaattaaaatt

SEQ ID NO: 28771 - DNA, 26 bp, Homo sapiens
cgggaatattccacaaattaaaattg

SEQ ID NO: 28772 - DNA, 26 bp, Homo sapiens
gggaatattccacaaattaaaattgg

SEQ ID NO: 28773 - DNA, 26 bp, Homo sapiens
ggaatattccacaaattaaaattggg

SEQ ID NO: 28774 - DNA, 26 bp, Homo sapiens
gaatattccacaaattaaaattgggc

SEQ ID NO: 28775 - DNA, 26 bp, Homo sapiens
aatattccacaaattaaaattgggcc

SEQ ID NO: 28776 - DNA, 26 bp, Homo sapiens
atattccacaaattaaaattgggccc

SEQ ID NO: 28777 - DNA, 26 bp, Homo sapiens
tattccacaaattaaaattgggccct

SEQ ID NO: 28778 - DNA, 26 bp, Homo sapiens
attccacaaattaaaattgggccctc

SEQ ID NO: 28779 - DNA, 26 bp, Homo sapiens
ttccacaaattaaaattgggccctca

SEQ ID NO: 28780 - DNA, 26 bp, Homo sapiens
tccacaaattaaaattgggccctcaa

SEQ ID NO: 28781 - DNA, 26 bp, Homo sapiens
ccacaaattaaaattgggccctcaaa

SEQ ID NO: 28782 - DNA, 26 bp, Homo sapiens
cacaaattaaaattgggccctcaaag

SEQ ID NO: 28783 - DNA, 26 bp, Homo sapiens
acaaattaaaattgggccctcaaagt

SEQ ID NO: 28784 - DNA, 26 bp, Homo sapiens
caaattaaaattgggccctcaaagtt

SEQ ID NO: 28785 - DNA, 26 bp, Homo sapiens
aaattaaaattgggccctcaaagttt

SEQ ID NO: 28786 - DNA, 26 bp, Homo sapiens
aattaaaattgggccctcaaagtttt

SEQ ID NO: 28787 - DNA, 26 bp, Homo sapiens
attaaaattgggccctcaaagtttta

SEQ ID NO: 28788 - DNA, 26 bp, Homo sapiens
ttaaaattgggccctcaaagttttaa

SEQ ID NO: 28789 - DNA, 26 bp, Homo sapiens
taaaattgggccctcaaagttttaat

SEQ ID NO: 28790 - DNA, 26 bp, Homo sapiens
aaaattgggccctcaaagttttaatg

SEQ ID NO: 28791 - DNA, 26 bp, Homo sapiens
aaattgggccctcaaagttttaatga

SEQ ID NO: 28792 - DNA, 26 bp, Homo sapiens
aattgggccctcaaagttttaatgaa

SEQ ID NO: 28793 - DNA, 26 bp, Homo sapiens
attgggccctcaaagttttaatgaaa

SEQ ID NO: 28794 - DNA, 26 bp, Homo sapiens
ttgggccctcaaagttttaatgaaaa

SEQ ID NO: 28795 - DNA, 26 bp, Homo sapiens
tgggccctcaaagttttaatgaaaaa

SEQ ID NO: 28796 - DNA, 26 bp, Homo sapiens
gggccctcaaagttttaatgaaaaaa

SEQ ID NO: 28797 - DNA, 26 bp, Homo sapiens
ggccctcaaagttttaatgaaaaaag

SEQ ID NO: 28798 - DNA, 26 bp, Homo sapiens
gccctcaaagttttaatgaaaaaagt

SEQ ID NO: 28799 - DNA, 26 bp, Homo sapiens
ccctcaaagttttaatgaaaaaagtt

SEQ ID NO: 28800 - DNA, 26 bp, Homo sapiens
cctcaaagttttaatgaaaaaagttg

SEQ ID NO: 28801 - DNA, 26 bp, Homo sapiens
ctcaaagttttaatgaaaaaagttgc

SEQ ID NO: 28802 - DNA, 26 bp, Homo sapiens
tcaaagttttaatgaaaaaagttgca

SEQ ID NO: 28803 - DNA, 26 bp, Homo sapiens
caaagttttaatgaaaaaagttgcag

SEQ ID NO: 28804 - DNA, 26 bp, Homo sapiens
aaagttttaatgaaaaaagttgcagg

SEQ ID NO: 28805 - DNA, 26 bp, Homo sapiens
aagttttaatgaaaaaagttgcagga

SEQ ID NO: 28806 - DNA, 26 bp, Homo sapiens
agttttaatgaaaaaagttgcaggaa

SEQ ID NO: 28807 - DNA, 26 bp, Homo sapiens
gttttaatgaaaaaagttgcaggaac

SEQ ID NO: 28808 - DNA, 26 bp, Homo sapiens
ttttaatgaaaaaagttgcaggaaca

SEQ ID NO: 28809 - DNA, 26 bp, Homo sapiens
tttaatgaaaaaagttgcaggaacac

SEQ ID NO: 28810 - DNA, 26 bp, Homo sapiens
ttaatgaaaaaagttgcaggaacaca

SEQ ID NO: 28811 - DNA, 26 bp, Homo sapiens
taatgaaaaaagttgcaggaacacat

SEQ ID NO: 28812 - DNA, 26 bp, Homo sapiens
aatgaaaaaagttgcaggaacacatt

SEQ ID NO: 28813 - DNA, 26 bp, Homo sapiens
atgaaaaaagttgcaggaacacattt

SEQ ID NO: 28814 - DNA, 26 bp, Homo sapiens
tgaaaaaagttgcaggaacacattta

SEQ ID NO: 28815 - DNA, 26 bp, Homo sapiens
gaaaaaagttgcaggaacacatttaa

SEQ ID NO: 28816 - DNA, 26 bp, Homo sapiens
aaaaaagttgcaggaacacatttaaa

SEQ ID NO: 28817 - DNA, 26 bp, Homo sapiens
aaaaagttgcaggaacacatttaaaa

SEQ ID NO: 28818 - DNA, 26 bp, Homo sapiens
aaaagttgcaggaacacatttaaaat

SEQ ID NO: 28819 - DNA, 26 bp, Homo sapiens
aaagttgcaggaacacatttaaaatg

SEQ ID NO: 28820 - DNA, 26 bp, Homo sapiens
aagttgcaggaacacatttaaaatgg

SEQ ID NO: 28821 - DNA, 26 bp, Homo sapiens
agttgcaggaacacatttaaaatgga

SEQ ID NO: 28822 - DNA, 26 bp, Homo sapiens
gttgcaggaacacatttaaaatggac

SEQ ID NO: 28823 - DNA, 26 bp, Homo sapiens
ttgcaggaacacatttaaaatggaca

SEQ ID NO: 28824 - DNA, 26 bp, Homo sapiens
tgcaggaacacatttaaaatggacac

SEQ ID NO: 28825 - DNA, 26 bp, Homo sapiens
gcaggaacacatttaaaatggacacc

SEQ ID NO: 28826 - DNA, 26 bp, Homo sapiens
caggaacacatttaaaatggacaccc

SEQ ID NO: 28827 - DNA, 26 bp, Homo sapiens
aggaacacatttaaaatggacaccct

SEQ ID NO: 28828 - DNA, 26 bp, Homo sapiens
ggaacacatttaaaatggacacccta

SEQ ID NO: 28829 - DNA, 26 bp, Homo sapiens
gaacacatttaaaatggacaccctat

SEQ ID NO: 28830 - DNA, 26 bp, Homo sapiens
aacacatttaaaatggacaccctatt

SEQ ID NO: 28831 - DNA, 26 bp, Homo sapiens
acacatttaaaatggacaccctattt

SEQ ID NO: 28832 - DNA, 26 bp, Homo sapiens
cacatttaaaatggacaccctatttc

SEQ ID NO: 28833 - DNA, 26 bp, Homo sapiens
acatttaaaatggacaccctatttca

SEQ ID NO: 28834 - DNA, 26 bp, Homo sapiens
catttaaaatggacaccctatttcat

SEQ ID NO: 28835 - DNA, 26 bp, Homo sapiens
atttaaaatggacaccctatttcatg

SEQ ID NO: 28836 - DNA, 26 bp, Homo sapiens
tttaaaatggacaccctatttcatgc

SEQ ID NO: 28837 - DNA, 26 bp, Homo sapiens
ttaaaatggacaccctatttcatgct

SEQ ID NO: 28838 - DNA, 26 bp, Homo sapiens
taaaatggacaccctatttcatgctt

SEQ ID NO: 28839 - DNA, 26 bp, Homo sapiens
aaaatggacaccctatttcatgcttt

SEQ ID NO: 28840 - DNA, 26 bp, Homo sapiens
aaatggacaccctatttcatgctttc

SEQ ID NO: 28841 - DNA, 26 bp, Homo sapiens
aatggacaccctatttcatgctttct

SEQ ID NO: 28842 - DNA, 26 bp, Homo sapiens
atggacaccctatttcatgctttctg

SEQ ID NO: 28843 - DNA, 26 bp, Homo sapiens
tggacaccctatttcatgctttctgt

SEQ ID NO: 28844 - DNA, 26 bp, Homo sapiens
ggacaccctatttcatgctttctgtt

SEQ ID NO: 28845 - DNA, 26 bp, Homo sapiens
gacaccctatttcatgctttctgttg

SEQ ID NO: 28846 - DNA, 26 bp, Homo sapiens
acaccctatttcatgctttctgttgc

SEQ ID NO: 28847 - DNA, 26 bp, Homo sapiens
caccctatttcatgctttctgttgct

SEQ ID NO: 28848 - DNA, 26 bp, Homo sapiens
accctatttcatgctttctgttgctt

SEQ ID NO: 28849 - DNA, 26 bp, Homo sapiens
ccctatttcatgctttctgttgcttc

SEQ ID NO: 28850 - DNA, 26 bp, Homo sapiens
cctatttcatgctttctgttgcttct

SEQ ID NO: 28851 - DNA, 26 bp, Homo sapiens
ctatttcatgctttctgttgcttcta

SEQ ID NO: 28852 - DNA, 26 bp, Homo sapiens
tatttcatgctttctgttgcttctaa

SEQ ID NO: 28853 - DNA, 26 bp, Homo sapiens
atttcatgctttctgttgcttctaaa

SEQ ID NO: 28854 - DNA, 26 bp, Homo sapiens
tttcatgctttctgttgcttctaaag

SEQ ID NO: 28855 - DNA, 26 bp, Homo sapiens
ttcatgctttctgttgcttctaaagc

SEQ ID NO: 28856 - DNA, 26 bp, Homo sapiens
tcatgctttctgttgcttctaaagct

SEQ ID NO: 28857 - DNA, 26 bp, Homo sapiens
catgctttctgttgcttctaaagcta

SEQ ID NO: 28858 - DNA, 26 bp, Homo sapiens
atgctttctgttgcttctaaagctaa

SEQ ID NO: 28859 - DNA, 26 bp, Homo sapiens
tgctttctgttgcttctaaagctaag

SEQ ID NO: 28860 - DNA, 26 bp, Homo sapiens
gctttctgttgcttctaaagctaagc

SEQ ID NO: 28861 - DNA, 26 bp, Homo sapiens
ctttctgttgcttctaaagctaagct

SEQ ID NO: 28862 - DNA, 26 bp, Homo sapiens
tttctgttgcttctaaagctaagctg

SEQ ID NO: 28863 - DNA, 26 bp, Homo sapiens
ttctgttgcttctaaagctaagctgc

SEQ ID NO: 28864 - DNA, 26 bp, Homo sapiens
tctgttgcttctaaagctaagctgcg

SEQ ID NO: 28865 - DNA, 26 bp, Homo sapiens
ctgttgcttctaaagctaagctgcgt

SEQ ID NO: 28866 - DNA, 26 bp, Homo sapiens
tgttgcttctaaagctaagctgcgtt

SEQ ID NO: 28867 - DNA, 26 bp, Homo sapiens
gttgcttctaaagctaagctgcgttt

SEQ ID NO: 28868 - DNA, 26 bp, Homo sapiens
ttgcttctaaagctaagctgcgtttt

SEQ ID NO: 28869 - DNA, 26 bp, Homo sapiens
tgcttctaaagctaagctgcgtttta

SEQ ID NO: 28870 - DNA, 26 bp, Homo sapiens
gcttctaaagctaagctgcgttttag

SEQ ID NO: 28871 - DNA, 26 bp, Homo sapiens
cttctaaagctaagctgcgttttaga

SEQ ID NO: 28872 - DNA, 26 bp, Homo sapiens
ttctaaagctaagctgcgttttagag

SEQ ID NO: 28873 - DNA, 26 bp, Homo sapiens
tctaaagctaagctgcgttttagagc

SEQ ID NO: 28874 - DNA, 26 bp, Homo sapiens
ctaaagctaagctgcgttttagagcc

SEQ ID NO: 28875 - DNA, 26 bp, Homo sapiens
taaagctaagctgcgttttagagccc

SEQ ID NO: 28876 - DNA, 26 bp, Homo sapiens
aaagctaagctgcgttttagagccca

SEQ ID NO: 28877 - DNA, 26 bp, Homo sapiens
aagctaagctgcgttttagagcccat

SEQ ID NO: 28878 - DNA, 26 bp, Homo sapiens
agctaagctgcgttttagagcccata

SEQ ID NO: 28879 - DNA, 26 bp, Homo sapiens
gctaagctgcgttttagagcccataa

SEQ ID NO: 28880 - DNA, 26 bp, Homo sapiens
ctaagctgcgttttagagcccataaa

SEQ ID NO: 28881 - DNA, 26 bp, Homo sapiens
taagctgcgttttagagcccataaac

SEQ ID NO: 28882 - DNA, 26 bp, Homo sapiens
aagctgcgttttagagcccataaaca

SEQ ID NO: 28883 - DNA, 26 bp, Homo sapiens
agctgcgttttagagcccataaacat

SEQ ID NO: 28884 - DNA, 26 bp, Homo sapiens
gctgcgttttagagcccataaacatc

SEQ ID NO: 28885 - DNA, 26 bp, Homo sapiens
ctgcgttttagagcccataaacatca

SEQ ID NO: 28886 - DNA, 26 bp, Homo sapiens
tgcgttttagagcccataaacatcag

SEQ ID NO: 28887 - DNA, 26 bp, Homo sapiens
gcgttttagagcccataaacatcagg

SEQ ID NO: 28888 - DNA, 26 bp, Homo sapiens
cgttttagagcccataaacatcaggt

SEQ ID NO: 28889 - DNA, 26 bp, Homo sapiens
gttttagagcccataaacatcaggtt

SEQ ID NO: 28890 - DNA, 26 bp, Homo sapiens
ttttagagcccataaacatcaggttc

SEQ ID NO: 28891 - DNA, 26 bp, Homo sapiens
tttagagcccataaacatcaggttct

SEQ ID NO: 28892 - DNA, 26 bp, Homo sapiens
ttagagcccataaacatcaggttctg

SEQ ID NO: 28893 - DNA, 26 bp, Homo sapiens
tagagcccataaacatcaggttctgc

SEQ ID NO: 28894 - DNA, 26 bp, Homo sapiens
agagcccataaacatcaggttctgca

SEQ ID NO: 28895 - DNA, 26 bp, Homo sapiens
gagcccataaacatcaggttctgcag

SEQ ID NO: 28896 - DNA, 26 bp, Homo sapiens
agcccataaacatcaggttctgcaga

SEQ ID NO: 28897 - DNA, 26 bp, Homo sapiens
gcccataaacatcaggttctgcagaa

SEQ ID NO: 28898 - DNA, 26 bp, Homo sapiens
cccataaacatcaggttctgcagaaa

SEQ ID NO: 28899 - DNA, 26 bp, Homo sapiens
ccataaacatcaggttctgcagaaag

SEQ ID NO: 28900 - DNA, 26 bp, Homo sapiens
cataaacatcaggttctgcagaaagg

SEQ ID NO: 28901 - DNA, 26 bp, Homo sapiens
ataaacatcaggttctgcagaaaggg

SEQ ID NO: 28902 - DNA, 26 bp, Homo sapiens
taaacatcaggttctgcagaaaggga

SEQ ID NO: 28903 - DNA, 26 bp, Homo sapiens
aaacatcaggttctgcagaaagggat

SEQ ID NO: 28904 - DNA, 26 bp, Homo sapiens
aacatcaggttctgcagaaagggatt

SEQ ID NO: 28905 - DNA, 26 bp, Homo sapiens
acatcaggttctgcagaaagggatta

SEQ ID NO: 28906 - DNA, 26 bp, Homo sapiens
catcaggttctgcagaaagggattac

SEQ ID NO: 28907 - DNA, 26 bp, Homo sapiens
atcaggttctgcagaaagggattacc

SEQ ID NO: 28908 - DNA, 26 bp, Homo sapiens
tcaggttctgcagaaagggattacca

SEQ ID NO: 28909 - DNA, 26 bp, Homo sapiens
caggttctgcagaaagggattaccag

SEQ ID NO: 28910 - DNA, 26 bp, Homo sapiens
aggttctgcagaaagggattaccaga

SEQ ID NO: 28911 - DNA, 26 bp, Homo sapiens
ggttctgcagaaagggattaccagaa

SEQ ID NO: 28912 - DNA, 26 bp, Homo sapiens
gttctgcagaaagggattaccagaaa

SEQ ID NO: 28913 - DNA, 26 bp, Homo sapiens
ttctgcagaaagggattaccagaaaa

SEQ ID NO: 28914 - DNA, 26 bp, Homo sapiens
tctgcagaaagggattaccagaaaag

SEQ ID NO: 28915 - DNA, 26 bp, Homo sapiens
ctgcagaaagggattaccagaaaagg

SEQ ID NO: 28916 - DNA, 26 bp, Homo sapiens
tgcagaaagggattaccagaaaaggc

SEQ ID NO: 28917 - DNA, 26 bp, Homo sapiens
gcagaaagggattaccagaaaaggct

SEQ ID NO: 28918 - DNA, 26 bp, Homo sapiens
cagaaagggattaccagaaaaggctg

SEQ ID NO: 28919 - DNA, 26 bp, Homo sapiens
agaaagggattaccagaaaaggctgc

SEQ ID NO: 28920 - DNA, 26 bp, Homo sapiens
gaaagggattaccagaaaaggctgct

SEQ ID NO: 28921 - DNA, 26 bp, Homo sapiens
aaagggattaccagaaaaggctgctg

SEQ ID NO: 28922 - DNA, 26 bp, Homo sapiens
aagggattaccagaaaaggctgctgc

SEQ ID NO: 28923 - DNA, 26 bp, Homo sapiens
agggattaccagaaaaggctgctgca

SEQ ID NO: 28924 - DNA, 26 bp, Homo sapiens
gggattaccagaaaaggctgctgcag

SEQ ID NO: 28925 - DNA, 26 bp, Homo sapiens
ggattaccagaaaaggctgctgcaga

SEQ ID NO: 28926 - DNA, 26 bp, Homo sapiens
gattaccagaaaaggctgctgcagaa

SEQ ID NO: 28927 - DNA, 26 bp, Homo sapiens
attaccagaaaaggctgctgcagaac

SEQ ID NO: 28928 - DNA, 26 bp, Homo sapiens
ttaccagaaaaggctgctgcagaact

SEQ ID NO: 28929 - DNA, 26 bp, Homo sapiens
taccagaaaaggctgctgcagaactt

SEQ ID NO: 28930 - DNA, 26 bp, Homo sapiens
accagaaaaggctgctgcagaacttt

SEQ ID NO: 28931 - DNA, 26 bp, Homo sapiens
ccagaaaaggctgctgcagaactttc

SEQ ID NO: 28932 - DNA, 26 bp, Homo sapiens
cagaaaaggctgctgcagaactttcc

SEQ ID NO: 28933 - DNA, 26 bp, Homo sapiens
agaaaaggctgctgcagaactttcca

SEQ ID NO: 28934 - DNA, 26 bp, Homo sapiens
gaaaaggctgctgcagaactttccac

SEQ ID NO: 28935 - DNA, 26 bp, Homo sapiens
aaaaggctgctgcagaactttccacc

SEQ ID NO: 28936 - DNA, 26 bp, Homo sapiens
aaaggctgctgcagaactttccaccc

SEQ ID NO: 28937 - DNA, 26 bp, Homo sapiens
aaggctgctgcagaactttccaccct

SEQ ID NO: 28938 - DNA, 26 bp, Homo sapiens
aggctgctgcagaactttccaccctg

SEQ ID NO: 28939 - DNA, 26 bp, Homo sapiens
ggctgctgcagaactttccaccctgt

SEQ ID NO: 28940 - DNA, 26 bp, Homo sapiens
gctgctgcagaactttccaccctgta

SEQ ID NO: 28941 - DNA, 26 bp, Homo sapiens
ctgctgcagaactttccaccctgtaa

SEQ ID NO: 28942 - DNA, 26 bp, Homo sapiens
tgctgcagaactttccaccctgtaat

SEQ ID NO: 28943 - DNA, 26 bp, Homo sapiens
gctgcagaactttccaccctgtaatg

SEQ ID NO: 28944 - DNA, 26 bp, Homo sapiens
ctgcagaactttccaccctgtaatga

SEQ ID NO: 28945 - DNA, 26 bp, Homo sapiens
tgcagaactttccaccctgtaatgat

SEQ ID NO: 28946 - DNA, 26 bp, Homo sapiens
gcagaactttccaccctgtaatgatc

SEQ ID NO: 28947 - DNA, 26 bp, Homo sapiens
cagaactttccaccctgtaatgatct

SEQ ID NO: 28948 - DNA, 26 bp, Homo sapiens
agaactttccaccctgtaatgatctc

SEQ ID NO: 28949 - DNA, 26 bp, Homo sapiens
gaactttccaccctgtaatgatctca

SEQ ID NO: 28950 - DNA, 26 bp, Homo sapiens
aactttccaccctgtaatgatctcat

SEQ ID NO: 28951 - DNA, 26 bp, Homo sapiens
actttccaccctgtaatgatctcatc

SEQ ID NO: 28952 - DNA, 26 bp, Homo sapiens
ctttccaccctgtaatgatctcatct

SEQ ID NO: 28953 - DNA, 26 bp, Homo sapiens
tttccaccctgtaatgatctcatctt

SEQ ID NO: 28954 - DNA, 26 bp, Homo sapiens
ttccaccctgtaatgatctcatcttc

SEQ ID NO: 28955 - DNA, 26 bp, Homo sapiens
tccaccctgtaatgatctcatcttct

SEQ ID NO: 28956 - DNA, 26 bp, Homo sapiens
ccaccctgtaatgatctcatcttctc

SEQ ID NO: 28957 - DNA, 26 bp, Homo sapiens
caccctgtaatgatctcatcttctcg

SEQ ID NO: 28958 - DNA, 26 bp, Homo sapiens
accctgtaatgatctcatcttctcgc

SEQ ID NO: 28959 - DNA, 26 bp, Homo sapiens
ccctgtaatgatctcatcttctcgcg

SEQ ID NO: 28960 - DNA, 26 bp, Homo sapiens
cctgtaatgatctcatcttctcgcgt

SEQ ID NO: 28961 - DNA, 26 bp, Homo sapiens
ctgtaatgatctcatcttctcgcgtt

SEQ ID NO: 28962 - DNA, 26 bp, Homo sapiens
tgtaatgatctcatcttctcgcgttc

SEQ ID NO: 28963 - DNA, 26 bp, Homo sapiens
gtaatgatctcatcttctcgcgttct

SEQ ID NO: 28964 - DNA, 26 bp, Homo sapiens
taatgatctcatcttctcgcgttctc

SEQ ID NO: 28965 - DNA, 26 bp, Homo sapiens
aatgatctcatcttctcgcgttctct

SEQ ID NO: 28966 - DNA, 26 bp, Homo sapiens
atgatctcatcttctcgcgttctctc

SEQ ID NO: 28967 - DNA, 26 bp, Homo sapiens
tgatctcatcttctcgcgttctctca

SEQ ID NO: 28968 - DNA, 26 bp, Homo sapiens
gatctcatcttctcgcgttctctcag

SEQ ID NO: 28969 - DNA, 26 bp, Homo sapiens
atctcatcttctcgcgttctctcaga

SEQ ID NO: 28970 - DNA, 26 bp, Homo sapiens
tctcatcttctcgcgttctctcagat

SEQ ID NO: 28971 - DNA, 26 bp, Homo sapiens
ctcatcttctcgcgttctctcagatt

SEQ ID NO: 28972 - DNA, 26 bp, Homo sapiens
tcatcttctcgcgttctctcagattc

SEQ ID NO: 28973 - DNA, 26 bp, Homo sapiens
catcttctcgcgttctctcagattct

SEQ ID NO: 28974 - DNA, 26 bp, Homo sapiens
atcttctcgcgttctctcagattctg

SEQ ID NO: 28975 - DNA, 26 bp, Homo sapiens
tcttctcgcgttctctcagattctgc

SEQ ID NO: 28976 - DNA, 26 bp, Homo sapiens
cttctcgcgttctctcagattctgca

SEQ ID NO: 28977 - DNA, 26 bp, Homo sapiens
ttctcgcgttctctcagattctgcat

SEQ ID NO: 28978 - DNA, 26 bp, Homo sapiens
tctcgcgttctctcagattctgcatt

SEQ ID NO: 28979 - DNA, 26 bp, Homo sapiens
ctcgcgttctctcagattctgcattt

SEQ ID NO: 28980 - DNA, 26 bp, Homo sapiens
tcgcgttctctcagattctgcatttc

SEQ ID NO: 28981 - DNA, 26 bp, Homo sapiens
cgcgttctctcagattctgcatttca

SEQ ID NO: 28982 - DNA, 26 bp, Homo sapiens
gcgttctctcagattctgcatttcac

SEQ ID NO: 28983 - DNA, 26 bp, Homo sapiens
cgttctctcagattctgcatttcacc

SEQ ID NO: 28984 - DNA, 26 bp, Homo sapiens
gttctctcagattctgcatttcacct

SEQ ID NO: 28985 - DNA, 26 bp, Homo sapiens
ttctctcagattctgcatttcaccta

SEQ ID NO: 28986 - DNA, 26 bp, Homo sapiens
tctctcagattctgcatttcacctat

SEQ ID NO: 28987 - DNA, 26 bp, Homo sapiens
ctctcagattctgcatttcacctatt

SEQ ID NO: 28988 - DNA, 26 bp, Homo sapiens
tctcagattctgcatttcacctattc

SEQ ID NO: 28989 - DNA, 26 bp, Homo sapiens
ctcagattctgcatttcacctattct

SEQ ID NO: 28990 - DNA, 26 bp, Homo sapiens
tcagattctgcatttcacctattctc

SEQ ID NO: 28991 - DNA, 26 bp, Homo sapiens
cagattctgcatttcacctattctcc

SEQ ID NO: 28992 - DNA, 26 bp, Homo sapiens
agattctgcatttcacctattctccc

SEQ ID NO: 28993 - DNA, 26 bp, Homo sapiens
gattctgcatttcacctattctccca

SEQ ID NO: 28994 - DNA, 26 bp, Homo sapiens
attctgcatttcacctattctcccaa

SEQ ID NO: 28995 - DNA, 26 bp, Homo sapiens
ttctgcatttcacctattctcccaat

SEQ ID NO: 28996 - DNA, 26 bp, Homo sapiens
tctgcatttcacctattctcccaatt

SEQ ID NO: 28997 - DNA, 26 bp, Homo sapiens
ctgcatttcacctattctcccaattt

SEQ ID NO: 28998 - DNA, 26 bp, Homo sapiens
tgcatttcacctattctcccaatttg

SEQ ID NO: 28999 - DNA, 26 bp, Homo sapiens
gcatttcacctattctcccaatttgc

SEQ ID NO: 29000 - DNA, 26 bp, Homo sapiens
catttcacctattctcccaatttgca

SEQ ID NO: 29001 - DNA, 26 bp, Homo sapiens
atttcacctattctcccaatttgcag

SEQ ID NO: 29002 - DNA, 26 bp, Homo sapiens
tttcacctattctcccaatttgcagt

SEQ ID NO: 29003 - DNA, 26 bp, Homo sapiens
ttcacctattctcccaatttgcagtt

SEQ ID NO: 29004 - DNA, 26 bp, Homo sapiens
tcacctattctcccaatttgcagttc

SEQ ID NO: 29005 - DNA, 26 bp, Homo sapiens
cacctattctcccaatttgcagttct

SEQ ID NO: 29006 - DNA, 26 bp, Homo sapiens
acctattctcccaatttgcagttctc

SEQ ID NO: 29007 - DNA, 26 bp, Homo sapiens
cctattctcccaatttgcagttctca

SEQ ID NO: 29008 - DNA, 26 bp, Homo sapiens
ctattctcccaatttgcagttctcat

SEQ ID NO: 29009 - DNA, 26 bp, Homo sapiens
tattctcccaatttgcagttctcata

SEQ ID NO: 29010 - DNA, 26 bp, Homo sapiens
attctcccaatttgcagttctcatag

SEQ ID NO: 29011 - DNA, 26 bp, Homo sapiens
ttctcccaatttgcagttctcataga

SEQ ID NO: 29012 - DNA, 26 bp, Homo sapiens
tctcccaatttgcagttctcatagac

SEQ ID NO: 29013 - DNA, 26 bp, Homo sapiens
ctcccaatttgcagttctcatagaca

SEQ ID NO: 29014 - DNA, 26 bp, Homo sapiens
tcccaatttgcagttctcatagacag

SEQ ID NO: 29015 - DNA, 26 bp, Homo sapiens
cccaatttgcagttctcatagacagt

SEQ ID NO: 29016 - DNA, 26 bp, Homo sapiens
ccaatttgcagttctcatagacagtg

SEQ ID NO: 29017 - DNA, 26 bp, Homo sapiens
caatttgcagttctcatagacagtgg

SEQ ID NO: 29018 - DNA, 26 bp, Homo sapiens
aatttgcagttctcatagacagtggt

SEQ ID NO: 29019 - DNA, 26 bp, Homo sapiens
atttgcagttctcatagacagtggtg

SEQ ID NO: 29020 - DNA, 26 bp, Homo sapiens
tttgcagttctcatagacagtggtgt

SEQ ID NO: 29021 - DNA, 26 bp, Homo sapiens
ttgcagttctcatagacagtggtgtg

SEQ ID NO: 29022 - DNA, 26 bp, Homo sapiens
tgcagttctcatagacagtggtgtgt

SEQ ID NO: 29023 - DNA, 26 bp, Homo sapiens
gcagttctcatagacagtggtgtgtg

SEQ ID NO: 29024 - DNA, 26 bp, Homo sapiens
cagttctcatagacagtggtgtgtgc

SEQ ID NO: 29025 - DNA, 26 bp, Homo sapiens
agttctcatagacagtggtgtgtgct

SEQ ID NO: 29026 - DNA, 26 bp, Homo sapiens
gttctcatagacagtggtgtgtgctt

SEQ ID NO: 29027 - DNA, 26 bp, Homo sapiens
ttctcatagacagtggtgtgtgctta

SEQ ID NO: 29028 - DNA, 26 bp, Homo sapiens
tctcatagacagtggtgtgtgcttaa

SEQ ID NO: 29029 - DNA, 26 bp, Homo sapiens
ctcatagacagtggtgtgtgcttaaa

SEQ ID NO: 29030 - DNA, 26 bp, Homo sapiens
tcatagacagtggtgtgtgcttaaaa

SEQ ID NO: 29031 - DNA, 26 bp, Homo sapiens
catagacagtggtgtgtgcttaaaac

SEQ ID NO: 29032 - DNA, 26 bp, Homo sapiens
atagacagtggtgtgtgcttaaaact

SEQ ID NO: 29033 - DNA, 26 bp, Homo sapiens
tagacagtggtgtgtgcttaaaacta

SEQ ID NO: 29034 - DNA, 26 bp, Homo sapiens
agacagtggtgtgtgcttaaaactat

SEQ ID NO: 29035 - DNA, 26 bp, Homo sapiens
gacagtggtgtgtgcttaaaactatt

SEQ ID NO: 29036 - DNA, 26 bp, Homo sapiens
acagtggtgtgtgcttaaaactattt

SEQ ID NO: 29037 - DNA, 26 bp, Homo sapiens
cagtggtgtgtgcttaaaactatttt

SEQ ID NO: 29038 - DNA, 26 bp, Homo sapiens
agtggtgtgtgcttaaaactattttt

SEQ ID NO: 29039 - DNA, 26 bp, Homo sapiens
gtggtgtgtgcttaaaactatttttt

SEQ ID NO: 29040 - DNA, 26 bp, Homo sapiens
tggtgtgtgcttaaaactattttttt

SEQ ID NO: 29041 - DNA, 26 bp, Homo sapiens
ggtgtgtgcttaaaactatttttttt

SEQ ID NO: 29042 - DNA, 26 bp, Homo sapiens
gtgtgtgcttaaaactattttttttt

SEQ ID NO: 29043 - DNA, 26 bp, Homo sapiens
tgtgtgcttaaaactatttttttttc

SEQ ID NO: 29044 - DNA, 26 bp, Homo sapiens
gtgtgcttaaaactatttttttttca

SEQ ID NO: 29045 - DNA, 26 bp, Homo sapiens
tgtgcttaaaactatttttttttcag

SEQ ID NO: 29046 - DNA, 26 bp, Homo sapiens
gtgcttaaaactatttttttttcagc

SEQ ID NO: 29047 - DNA, 26 bp, Homo sapiens
tgcttaaaactatttttttttcagcc

SEQ ID NO: 29048 - DNA, 26 bp, Homo sapiens
gcttaaaactatttttttttcagcca

SEQ ID NO: 29049 - DNA, 26 bp, Homo sapiens
cttaaaactatttttttttcagccaa

SEQ ID NO: 29050 - DNA, 26 bp, Homo sapiens
ttaaaactatttttttttcagccaat

SEQ ID NO: 29051 - DNA, 26 bp, Homo sapiens
taaaactatttttttttcagccaatc

SEQ ID NO: 29052 - DNA, 26 bp, Homo sapiens
aaaactatttttttttcagccaatca

SEQ ID NO: 29053 - DNA, 26 bp, Homo sapiens
aaactatttttttttcagccaatcaa

SEQ ID NO: 29054 - DNA, 26 bp, Homo sapiens
aactatttttttttcagccaatcaag

SEQ ID NO: 29055 - DNA, 26 bp, Homo sapiens
actatttttttttcagccaatcaaga

SEQ ID NO: 29056 - DNA, 26 bp, Homo sapiens
ctatttttttttcagccaatcaagat

SEQ ID NO: 29057 - DNA, 26 bp, Homo sapiens
tatttttttttcagccaatcaagata

SEQ ID NO: 29058 - DNA, 26 bp, Homo sapiens
atttttttttcagccaatcaagataa

SEQ ID NO: 29059 - DNA, 26 bp, Homo sapiens
tttttttttcagccaatcaagataat

SEQ ID NO: 29060 - DNA, 26 bp, Homo sapiens
ttttttttcagccaatcaagataatg

SEQ ID NO: 29061 - DNA, 26 bp, Homo sapiens
tttttttcagccaatcaagataatga

SEQ ID NO: 29062 - DNA, 26 bp, Homo sapiens
ttttttcagccaatcaagataatgat

SEQ ID NO: 29063 - DNA, 26 bp, Homo sapiens
tttttcagccaatcaagataatgatg

SEQ ID NO: 29064 - DNA, 26 bp, Homo sapiens
ttttcagccaatcaagataatgatga

SEQ ID NO: 29065 - DNA, 26 bp, Homo sapiens
tttcagccaatcaagataatgatgat

SEQ ID NO: 29066 - DNA, 26 bp, Homo sapiens
ttcagccaatcaagataatgatgatg

SEQ ID NO: 29067 - DNA, 26 bp, Homo sapiens
tcagccaatcaagataatgatgatga

SEQ ID NO: 29068 - DNA, 26 bp, Homo sapiens
cagccaatcaagataatgatgatgat

SEQ ID NO: 29069 - DNA, 26 bp, Homo sapiens
agccaatcaagataatgatgatgatc

SEQ ID NO: 29070 - DNA, 26 bp, Homo sapiens
gccaatcaagataatgatgatgatca

SEQ ID NO: 29071 - DNA, 26 bp, Homo sapiens
ccaatcaagataatgatgatgatcaa

SEQ ID NO: 29072 - DNA, 26 bp, Homo sapiens
caatcaagataatgatgatgatcaag

SEQ ID NO: 29073 - DNA, 26 bp, Homo sapiens
aatcaagataatgatgatgatcaagg

SEQ ID NO: 29074 - DNA, 26 bp, Homo sapiens
atcaagataatgatgatgatcaaggt

SEQ ID NO: 29075 - DNA, 26 bp, Homo sapiens
tcaagataatgatgatgatcaaggtg

SEQ ID NO: 29076 - DNA, 26 bp, Homo sapiens
caagataatgatgatgatcaaggtgc

SEQ ID NO: 29077 - DNA, 26 bp, Homo sapiens
aagataatgatgatgatcaaggtgcc

SEQ ID NO: 29078 - DNA, 26 bp, Homo sapiens
agataatgatgatgatcaaggtgccc

SEQ ID NO: 29079 - DNA, 26 bp, Homo sapiens
gataatgatgatgatcaaggtgcccc

SEQ ID NO: 29080 - DNA, 26 bp, Homo sapiens
ataatgatgatgatcaaggtgcccca

SEQ ID NO: 29081 - DNA, 26 bp, Homo sapiens
taatgatgatgatcaaggtgccccac

SEQ ID NO: 29082 - DNA, 26 bp, Homo sapiens
aatgatgatgatcaaggtgccccacc

SEQ ID NO: 29083 - DNA, 26 bp, Homo sapiens
atgatgatgatcaaggtgccccacca

SEQ ID NO: 29084 - DNA, 26 bp, Homo sapiens
tgatgatgatcaaggtgccccaccac

SEQ ID NO: 29085 - DNA, 26 bp, Homo sapiens
gatgatgatcaaggtgccccaccact

SEQ ID NO: 29086 - DNA, 26 bp, Homo sapiens
atgatgatcaaggtgccccaccactg

SEQ ID NO: 29087 - DNA, 26 bp, Homo sapiens
tgatgatcaaggtgccccaccactgc

SEQ ID NO: 29088 - DNA, 26 bp, Homo sapiens
gatgatcaaggtgccccaccactgca

SEQ ID NO: 29089 - DNA, 26 bp, Homo sapiens
atgatcaaggtgccccaccactgcat

SEQ ID NO: 29090 - DNA, 26 bp, Homo sapiens
tgatcaaggtgccccaccactgcata

SEQ ID NO: 29091 - DNA, 26 bp, Homo sapiens
gatcaaggtgccccaccactgcatag

SEQ ID NO: 29092 - DNA, 26 bp, Homo sapiens
atcaaggtgccccaccactgcatagg

SEQ ID NO: 29093 - DNA, 26 bp, Homo sapiens
tcaaggtgccccaccactgcatagga

SEQ ID NO: 29094 - DNA, 26 bp, Homo sapiens
caaggtgccccaccactgcataggaa

SEQ ID NO: 29095 - DNA, 26 bp, Homo sapiens
aaggtgccccaccactgcataggaaa

SEQ ID NO: 29096 - DNA, 26 bp, Homo sapiens
aggtgccccaccactgcataggaaaa

SEQ ID NO: 29097 - DNA, 26 bp, Homo sapiens
ggtgccccaccactgcataggaaaag

SEQ ID NO: 29098 - DNA, 26 bp, Homo sapiens
gtgccccaccactgcataggaaaagt

SEQ ID NO: 29099 - DNA, 26 bp, Homo sapiens
tgccccaccactgcataggaaaagtc

SEQ ID NO: 29100 - DNA, 26 bp, Homo sapiens
gccccaccactgcataggaaaagtct

SEQ ID NO: 29101 - DNA, 26 bp, Homo sapiens
ccccaccactgcataggaaaagtctt

SEQ ID NO: 29102 - DNA, 26 bp, Homo sapiens
cccaccactgcataggaaaagtcttt

SEQ ID NO: 29103 - DNA, 26 bp, Homo sapiens
ccaccactgcataggaaaagtctttg

SEQ ID NO: 29104 - DNA, 26 bp, Homo sapiens
caccactgcataggaaaagtctttgg

SEQ ID NO: 29105 - DNA, 26 bp, Homo sapiens
accactgcataggaaaagtctttggc

SEQ ID NO: 29106 - DNA, 26 bp, Homo sapiens
ccactgcataggaaaagtctttggca

SEQ ID NO: 29107 - DNA, 26 bp, Homo sapiens
cactgcataggaaaagtctttggcag

SEQ ID NO: 29108 - DNA, 26 bp, Homo sapiens
actgcataggaaaagtctttggcagc

SEQ ID NO: 29109 - DNA, 26 bp, Homo sapiens
ctgcataggaaaagtctttggcagca

SEQ ID NO: 29110 - DNA, 26 bp, Homo sapiens
tgcataggaaaagtctttggcagcaa

SEQ ID NO: 29111 - DNA, 26 bp, Homo sapiens
gcataggaaaagtctttggcagcaac

SEQ ID NO: 29112 - DNA, 26 bp, Homo sapiens
cataggaaaagtctttggcagcaaca

SEQ ID NO: 29113 - DNA, 26 bp, Homo sapiens
ataggaaaagtctttggcagcaacat

SEQ ID NO: 29114 - DNA, 26 bp, Homo sapiens
taggaaaagtctttggcagcaacatg

SEQ ID NO: 29115 - DNA, 26 bp, Homo sapiens
aggaaaagtctttggcagcaacatgg

SEQ ID NO: 29116 - DNA, 26 bp, Homo sapiens
ggaaaagtctttggcagcaacatggt

SEQ ID NO: 29117 - DNA, 26 bp, Homo sapiens
gaaaagtctttggcagcaacatggtt

SEQ ID NO: 29118 - DNA, 26 bp, Homo sapiens
aaaagtctttggcagcaacatggtta

SEQ ID NO: 29119 - DNA, 26 bp, Homo sapiens
aaagtctttggcagcaacatggttaa

SEQ ID NO: 29120 - DNA, 26 bp, Homo sapiens
aagtctttggcagcaacatggttaag

SEQ ID NO: 29121 - DNA, 26 bp, Homo sapiens
agtctttggcagcaacatggttaagc

SEQ ID NO: 29122 - DNA, 26 bp, Homo sapiens
gtctttggcagcaacatggttaagct

SEQ ID NO: 29123 - DNA, 26 bp, Homo sapiens
tctttggcagcaacatggttaagctt

SEQ ID NO: 29124 - DNA, 26 bp, Homo sapiens
ctttggcagcaacatggttaagctta

SEQ ID NO: 29125 - DNA, 26 bp, Homo sapiens
tttggcagcaacatggttaagcttaa

SEQ ID NO: 29126 - DNA, 26 bp, Homo sapiens
ttggcagcaacatggttaagcttaac

SEQ ID NO: 29127 - DNA, 26 bp, Homo sapiens
tggcagcaacatggttaagcttaact

SEQ ID NO: 29128 - DNA, 26 bp, Homo sapiens
ggcagcaacatggttaagcttaacta

SEQ ID NO: 29129 - DNA, 26 bp, Homo sapiens
gcagcaacatggttaagcttaactat

SEQ ID NO: 29130 - DNA, 26 bp, Homo sapiens
cagcaacatggttaagcttaactatt

SEQ ID NO: 29131 - DNA, 26 bp, Homo sapiens
agcaacatggttaagcttaactattt

SEQ ID NO: 29132 - DNA, 26 bp, Homo sapiens
gcaacatggttaagcttaactatttg

SEQ ID NO: 29133 - DNA, 26 bp, Homo sapiens
caacatggttaagcttaactatttga

SEQ ID NO: 29134 - DNA, 26 bp, Homo sapiens
aacatggttaagcttaactatttgag

SEQ ID NO: 29135 - DNA, 26 bp, Homo sapiens
acatggttaagcttaactatttgagc

SEQ ID NO: 29136 - DNA, 26 bp, Homo sapiens
catggttaagcttaactatttgagca

SEQ ID NO: 29137 - DNA, 26 bp, Homo sapiens
atggttaagcttaactatttgagcaa

SEQ ID NO: 29138 - DNA, 26 bp, Homo sapiens
tggttaagcttaactatttgagcaag

SEQ ID NO: 29139 - DNA, 26 bp, Homo sapiens
ggttaagcttaactatttgagcaagt

SEQ ID NO: 29140 - DNA, 26 bp, Homo sapiens
gttaagcttaactatttgagcaagtt

SEQ ID NO: 29141 - DNA, 26 bp, Homo sapiens
ttaagcttaactatttgagcaagttt

SEQ ID NO: 29142 - DNA, 26 bp, Homo sapiens
taagcttaactatttgagcaagtttc

SEQ ID NO: 29143 - DNA, 26 bp, Homo sapiens
aagcttaactatttgagcaagtttca

SEQ ID NO: 29144 - DNA, 26 bp, Homo sapiens
agcttaactatttgagcaagtttcac

SEQ ID NO: 29145 - DNA, 26 bp, Homo sapiens
gcttaactatttgagcaagtttcaca

SEQ ID NO: 29146 - DNA, 26 bp, Homo sapiens
cttaactatttgagcaagtttcacag

SEQ ID NO: 29147 - DNA, 26 bp, Homo sapiens
ttaactatttgagcaagtttcacaga

SEQ ID NO: 29148 - DNA, 26 bp, Homo sapiens
taactatttgagcaagtttcacagaa

SEQ ID NO: 29149 - DNA, 26 bp, Homo sapiens
aactatttgagcaagtttcacagaag

SEQ ID NO: 29150 - DNA, 26 bp, Homo sapiens
actatttgagcaagtttcacagaaga

SEQ ID NO: 29151 - DNA, 26 bp, Homo sapiens
ctatttgagcaagtttcacagaagat

SEQ ID NO: 29152 - DNA, 26 bp, Homo sapiens
tatttgagcaagtttcacagaagatg

SEQ ID NO: 29153 - DNA, 26 bp, Homo sapiens
atttgagcaagtttcacagaagatga

SEQ ID NO: 29154 - DNA, 26 bp, Homo sapiens
tttgagcaagtttcacagaagatgaa

SEQ ID NO: 29155 - DNA, 26 bp, Homo sapiens
ttgagcaagtttcacagaagatgaac

SEQ ID NO: 29156 - DNA, 26 bp, Homo sapiens
tgagcaagtttcacagaagatgaaca

SEQ ID NO: 29157 - DNA, 26 bp, Homo sapiens
gagcaagtttcacagaagatgaacat

SEQ ID NO: 29158 - DNA, 26 bp, Homo sapiens
agcaagtttcacagaagatgaacatt

SEQ ID NO: 29159 - DNA, 26 bp, Homo sapiens
gcaagtttcacagaagatgaacattg

SEQ ID NO: 29160 - DNA, 26 bp, Homo sapiens
caagtttcacagaagatgaacattgt

SEQ ID NO: 29161 - DNA, 26 bp, Homo sapiens
aagtttcacagaagatgaacattgtt

SEQ ID NO: 29162 - DNA, 26 bp, Homo sapiens
agtttcacagaagatgaacattgttc

SEQ ID NO: 29163 - DNA, 26 bp, Homo sapiens
gtttcacagaagatgaacattgttca

SEQ ID NO: 29164 - DNA, 26 bp, Homo sapiens
tttcacagaagatgaacattgttcag

SEQ ID NO: 29165 - DNA, 26 bp, Homo sapiens
ttcacagaagatgaacattgttcagg

SEQ ID NO: 29166 - DNA, 26 bp, Homo sapiens
tcacagaagatgaacattgttcaggg

SEQ ID NO: 29167 - DNA, 26 bp, Homo sapiens
cacagaagatgaacattgttcagggg

SEQ ID NO: 29168 - DNA, 26 bp, Homo sapiens
acagaagatgaacattgttcaggggt

SEQ ID NO: 29169 - DNA, 26 bp, Homo sapiens
cagaagatgaacattgttcaggggtt

SEQ ID NO: 29170 - DNA, 26 bp, Homo sapiens
agaagatgaacattgttcaggggttt

SEQ ID NO: 29171 - DNA, 26 bp, Homo sapiens
gaagatgaacattgttcaggggtttt

SEQ ID NO: 29172 - DNA, 26 bp, Homo sapiens
aagatgaacattgttcaggggttttc

SEQ ID NO: 29173 - DNA, 26 bp, Homo sapiens
agatgaacattgttcaggggttttct

SEQ ID NO: 29174 - DNA, 26 bp, Homo sapiens
gatgaacattgttcaggggttttctt

SEQ ID NO: 29175 - DNA, 26 bp, Homo sapiens
atgaacattgttcaggggttttcttg

SEQ ID NO: 29176 - DNA, 26 bp, Homo sapiens
tgaacattgttcaggggttttcttgg

SEQ ID NO: 29177 - DNA, 26 bp, Homo sapiens
gaacattgttcaggggttttcttggc

SEQ ID NO: 29178 - DNA, 26 bp, Homo sapiens
aacattgttcaggggttttcttggct

SEQ ID NO: 29179 - DNA, 26 bp, Homo sapiens
acattgttcaggggttttcttggctc

SEQ ID NO: 29180 - DNA, 26 bp, Homo sapiens
cattgttcaggggttttcttggctca

SEQ ID NO: 29181 - DNA, 26 bp, Homo sapiens
attgttcaggggttttcttggctcaa

SEQ ID NO: 29182 - DNA, 26 bp, Homo sapiens
ttgttcaggggttttcttggctcaaa

SEQ ID NO: 29183 - DNA, 26 bp, Homo sapiens
tgttcaggggttttcttggctcaaac

SEQ ID NO: 29184 - DNA, 26 bp, Homo sapiens
gttcaggggttttcttggctcaaact

SEQ ID NO: 29185 - DNA, 26 bp, Homo sapiens
ttcaggggttttcttggctcaaactc

SEQ ID NO: 29186 - DNA, 26 bp, Homo sapiens
tcaggggttttcttggctcaaactct

SEQ ID NO: 29187 - DNA, 26 bp, Homo sapiens
caggggttttcttggctcaaactctg

SEQ ID NO: 29188 - DNA, 26 bp, Homo sapiens
aggggttttcttggctcaaactctgg

SEQ ID NO: 29189 - DNA, 26 bp, Homo sapiens
ggggttttcttggctcaaactctggt

SEQ ID NO: 29190 - DNA, 26 bp, Homo sapiens
gggttttcttggctcaaactctggtt

SEQ ID NO: 29191 - DNA, 26 bp, Homo sapiens
ggttttcttggctcaaactctggttt

SEQ ID NO: 29192 - DNA, 26 bp, Homo sapiens
gttttcttggctcaaactctggttta

SEQ ID NO: 29193 - DNA, 26 bp, Homo sapiens
ttttcttggctcaaactctggtttaa

SEQ ID NO: 29194 - DNA, 26 bp, Homo sapiens
tttcttggctcaaactctggtttaac

SEQ ID NO: 29195 - DNA, 26 bp, Homo sapiens
ttcttggctcaaactctggtttaact

SEQ ID NO: 29196 - DNA, 26 bp, Homo sapiens
tcttggctcaaactctggtttaactt

SEQ ID NO: 29197 - DNA, 26 bp, Homo sapiens
cttggctcaaactctggtttaactta

SEQ ID NO: 29198 - DNA, 26 bp, Homo sapiens
ttggctcaaactctggtttaacttaa

SEQ ID NO: 29199 - DNA, 26 bp, Homo sapiens
tggctcaaactctggtttaacttaat

SEQ ID NO: 29200 - DNA, 26 bp, Homo sapiens
ggctcaaactctggtttaacttaata

SEQ ID NO: 29201 - DNA, 26 bp, Homo sapiens
gctcaaactctggtttaacttaataa

SEQ ID NO: 29202 - DNA, 26 bp, Homo sapiens
ctcaaactctggtttaacttaataat

SEQ ID NO: 29203 - DNA, 26 bp, Homo sapiens
tcaaactctggtttaacttaataatt

SEQ ID NO: 29204 - DNA, 26 bp, Homo sapiens
caaactctggtttaacttaataattc

SEQ ID NO: 29205 - DNA, 26 bp, Homo sapiens
aaactctggtttaacttaataattct

SEQ ID NO: 29206 - DNA, 26 bp, Homo sapiens
aactctggtttaacttaataattctt

SEQ ID NO: 29207 - DNA, 26 bp, Homo sapiens
actctggtttaacttaataattcttc

SEQ ID NO: 29208 - DNA, 26 bp, Homo sapiens
ctctggtttaacttaataattcttct

SEQ ID NO: 29209 - DNA, 26 bp, Homo sapiens
tctggtttaacttaataattcttcta

SEQ ID NO: 29210 - DNA, 26 bp, Homo sapiens
ctggtttaacttaataattcttctac

SEQ ID NO: 29211 - DNA, 26 bp, Homo sapiens
tggtttaacttaataattcttctact

SEQ ID NO: 29212 - DNA, 26 bp, Homo sapiens
ggtttaacttaataattcttctactt

SEQ ID NO: 29213 - DNA, 26 bp, Homo sapiens
gtttaacttaataattcttctacttt

SEQ ID NO: 29214 - DNA, 26 bp, Homo sapiens
tttaacttaataattcttctactttg

SEQ ID NO: 29215 - DNA, 26 bp, Homo sapiens
ttaacttaataattcttctactttgc

SEQ ID NO: 29216 - DNA, 26 bp, Homo sapiens
taacttaataattcttctactttgca

SEQ ID NO: 29217 - DNA, 26 bp, Homo sapiens
aacttaataattcttctactttgcag

SEQ ID NO: 29218 - DNA, 26 bp, Homo sapiens
acttaataattcttctactttgcagt

SEQ ID NO: 29219 - DNA, 26 bp, Homo sapiens
cttaataattcttctactttgcagtg

SEQ ID NO: 29220 - DNA, 26 bp, Homo sapiens
ttaataattcttctactttgcagtga

SEQ ID NO: 29221 - DNA, 26 bp, Homo sapiens
taataattcttctactttgcagtgat

SEQ ID NO: 29222 - DNA, 26 bp, Homo sapiens
aataattcttctactttgcagtgatt

SEQ ID NO: 29223 - DNA, 26 bp, Homo sapiens
ataattcttctactttgcagtgatta

SEQ ID NO: 29224 - DNA, 26 bp, Homo sapiens
taattcttctactttgcagtgattaa

SEQ ID NO: 29225 - DNA, 26 bp, Homo sapiens
aattcttctactttgcagtgattaat

SEQ ID NO: 29226 - DNA, 26 bp, Homo sapiens
attcttctactttgcagtgattaatg

SEQ ID NO: 29227 - DNA, 26 bp, Homo sapiens
ttcttctactttgcagtgattaatgg

SEQ ID NO: 29228 - DNA, 26 bp, Homo sapiens
tcttctactttgcagtgattaatggt

SEQ ID NO: 29229 - DNA, 26 bp, Homo sapiens
cttctactttgcagtgattaatggtc

SEQ ID NO: 29230 - DNA, 26 bp, Homo sapiens
ttctactttgcagtgattaatggtcc

SEQ ID NO: 29231 - DNA, 26 bp, Homo sapiens
tctactttgcagtgattaatggtccc

SEQ ID NO: 29232 - DNA, 26 bp, Homo sapiens
ctactttgcagtgattaatggtcccc

SEQ ID NO: 29233 - DNA, 26 bp, Homo sapiens
tactttgcagtgattaatggtcccct

SEQ ID NO: 29234 - DNA, 26 bp, Homo sapiens
actttgcagtgattaatggtccccta

SEQ ID NO: 29235 - DNA, 26 bp, Homo sapiens
ctttgcagtgattaatggtcccctag

SEQ ID NO: 29236 - DNA, 26 bp, Homo sapiens
tttgcagtgattaatggtcccctagt

SEQ ID NO: 29237 - DNA, 26 bp, Homo sapiens
ttgcagtgattaatggtcccctagtg

SEQ ID NO: 29238 - DNA, 26 bp, Homo sapiens
tgcagtgattaatggtcccctagtgc

SEQ ID NO: 29239 - DNA, 26 bp, Homo sapiens
gcagtgattaatggtcccctagtgca

SEQ ID NO: 29240 - DNA, 26 bp, Homo sapiens
cagtgattaatggtcccctagtgcag

SEQ ID NO: 29241 - DNA, 26 bp, Homo sapiens
agtgattaatggtcccctagtgcagg

SEQ ID NO: 29242 - DNA, 26 bp, Homo sapiens
gtgattaatggtcccctagtgcaggg

SEQ ID NO: 29243 - DNA, 26 bp, Homo sapiens
tgattaatggtcccctagtgcagggg

SEQ ID NO: 29244 - DNA, 26 bp, Homo sapiens
gattaatggtcccctagtgcaggggc

SEQ ID NO: 29245 - DNA, 26 bp, Homo sapiens
attaatggtcccctagtgcaggggca

SEQ ID NO: 29246 - DNA, 26 bp, Homo sapiens
ttaatggtcccctagtgcaggggcag

SEQ ID NO: 29247 - DNA, 26 bp, Homo sapiens
taatggtcccctagtgcaggggcagg

SEQ ID NO: 29248 - DNA, 26 bp, Homo sapiens
aatggtcccctagtgcaggggcagga

SEQ ID NO: 29249 - DNA, 26 bp, Homo sapiens
atggtcccctagtgcaggggcaggac

SEQ ID NO: 29250 - DNA, 26 bp, Homo sapiens
tggtcccctagtgcaggggcaggact

SEQ ID NO: 29251 - DNA, 26 bp, Homo sapiens
ggtcccctagtgcaggggcaggactg

SEQ ID NO: 29252 - DNA, 26 bp, Homo sapiens
gtcccctagtgcaggggcaggactgg

SEQ ID NO: 29253 - DNA, 26 bp, Homo sapiens
tcccctagtgcaggggcaggactggg

SEQ ID NO: 29254 - DNA, 26 bp, Homo sapiens
cccctagtgcaggggcaggactgggc

SEQ ID NO: 29255 - DNA, 26 bp, Homo sapiens
ccctagtgcaggggcaggactgggca

SEQ ID NO: 29256 - DNA, 26 bp, Homo sapiens
cctagtgcaggggcaggactgggcaa

SEQ ID NO: 29257 - DNA, 26 bp, Homo sapiens
ctagtgcaggggcaggactgggcaat

SEQ ID NO: 29258 - DNA, 26 bp, Homo sapiens
tagtgcaggggcaggactgggcaatc

SEQ ID NO: 29259 - DNA, 26 bp, Homo sapiens
agtgcaggggcaggactgggcaatcc

SEQ ID NO: 29260 - DNA, 26 bp, Homo sapiens
gtgcaggggcaggactgggcaatcca

SEQ ID NO: 29261 - DNA, 26 bp, Homo sapiens
tgcaggggcaggactgggcaatccag

SEQ ID NO: 29262 - DNA, 26 bp, Homo sapiens
gcaggggcaggactgggcaatccagg

SEQ ID NO: 29263 - DNA, 26 bp, Homo sapiens
caggggcaggactgggcaatccaggt

SEQ ID NO: 29264 - DNA, 26 bp, Homo sapiens
aggggcaggactgggcaatccaggtg

SEQ ID NO: 29265 - DNA, 26 bp, Homo sapiens
ggggcaggactgggcaatccaggtgc

SEQ ID NO: 29266 - DNA, 26 bp, Homo sapiens
gggcaggactgggcaatccaggtgca

SEQ ID NO: 29267 - DNA, 26 bp, Homo sapiens
ggcaggactgggcaatccaggtgcaa

SEQ ID NO: 29268 - DNA, 26 bp, Homo sapiens
gcaggactgggcaatccaggtgcaac

SEQ ID NO: 29269 - DNA, 26 bp, Homo sapiens
caggactgggcaatccaggtgcaact

SEQ ID NO: 29270 - DNA, 26 bp, Homo sapiens
aggactgggcaatccaggtgcaactg

SEQ ID NO: 29271 - DNA, 26 bp, Homo sapiens
ggactgggcaatccaggtgcaactgt

SEQ ID NO: 29272 - DNA, 26 bp, Homo sapiens
gactgggcaatccaggtgcaactgta

SEQ ID NO: 29273 - DNA, 26 bp, Homo sapiens
actgggcaatccaggtgcaactgtaa

SEQ ID NO: 29274 - DNA, 26 bp, Homo sapiens
ctgggcaatccaggtgcaactgtaat

SEQ ID NO: 29275 - DNA, 26 bp, Homo sapiens
tgggcaatccaggtgcaactgtaatt

SEQ ID NO: 29276 - DNA, 26 bp, Homo sapiens
gggcaatccaggtgcaactgtaattg

SEQ ID NO: 29277 - DNA, 26 bp, Homo sapiens
ggcaatccaggtgcaactgtaattgt

SEQ ID NO: 29278 - DNA, 26 bp, Homo sapiens
gcaatccaggtgcaactgtaattgtt

SEQ ID NO: 29279 - DNA, 26 bp, Homo sapiens
caatccaggtgcaactgtaattgtta

SEQ ID NO: 29280 - DNA, 26 bp, Homo sapiens
aatccaggtgcaactgtaattgttac

SEQ ID NO: 29281 - DNA, 26 bp, Homo sapiens
atccaggtgcaactgtaattgttaca

SEQ ID NO: 29282 - DNA, 26 bp, Homo sapiens
tccaggtgcaactgtaattgttacac

SEQ ID NO: 29283 - DNA, 26 bp, Homo sapiens
ccaggtgcaactgtaattgttacact

SEQ ID NO: 29284 - DNA, 26 bp, Homo sapiens
caggtgcaactgtaattgttacactg

SEQ ID NO: 29285 - DNA, 26 bp, Homo sapiens
aggtgcaactgtaattgttacactga

SEQ ID NO: 29286 - DNA, 26 bp, Homo sapiens
ggtgcaactgtaattgttacactgaa

SEQ ID NO: 29287 - DNA, 26 bp, Homo sapiens
gtgcaactgtaattgttacactgaac

SEQ ID NO: 29288 - DNA, 26 bp, Homo sapiens
tgcaactgtaattgttacactgaaca

SEQ ID NO: 29289 - DNA, 26 bp, Homo sapiens
gcaactgtaattgttacactgaacag

SEQ ID NO: 29290 - DNA, 26 bp, Homo sapiens
caactgtaattgttacactgaacaga

SEQ ID NO: 29291 - DNA, 26 bp, Homo sapiens
aactgtaattgttacactgaacagaa

SEQ ID NO: 29292 - DNA, 26 bp, Homo sapiens
actgtaattgttacactgaacagaaa

SEQ ID NO: 29293 - DNA, 26 bp, Homo sapiens
ctgtaattgttacactgaacagaaac

SEQ ID NO: 29294 - DNA, 26 bp, Homo sapiens
tgtaattgttacactgaacagaaaca

SEQ ID NO: 29295 - DNA, 26 bp, Homo sapiens
gtaattgttacactgaacagaaacat

SEQ ID NO: 29296 - DNA, 26 bp, Homo sapiens
taattgttacactgaacagaaacatt

SEQ ID NO: 29297 - DNA, 26 bp, Homo sapiens
aattgttacactgaacagaaacattt

SEQ ID NO: 29298 - DNA, 26 bp, Homo sapiens
attgttacactgaacagaaacatttc

SEQ ID NO: 29299 - DNA, 26 bp, Homo sapiens
ttgttacactgaacagaaacatttcc

SEQ ID NO: 29300 - DNA, 26 bp, Homo sapiens
tgttacactgaacagaaacatttcct

SEQ ID NO: 29301 - DNA, 26 bp, Homo sapiens
gttacactgaacagaaacatttcctt

SEQ ID NO: 29302 - DNA, 26 bp, Homo sapiens
ttacactgaacagaaacatttccttt

SEQ ID NO: 29303 - DNA, 26 bp, Homo sapiens
tacactgaacagaaacatttccttta

SEQ ID NO: 29304 - DNA, 26 bp, Homo sapiens
acactgaacagaaacatttcctttag

SEQ ID NO: 29305 - DNA, 26 bp, Homo sapiens
cactgaacagaaacatttcctttaga

SEQ ID NO: 29306 - DNA, 26 bp, Homo sapiens
actgaacagaaacatttcctttagac

SEQ ID NO: 29307 - DNA, 26 bp, Homo sapiens
ctgaacagaaacatttcctttagaca

SEQ ID NO: 29308 - DNA, 26 bp, Homo sapiens
tgaacagaaacatttcctttagacaa

SEQ ID NO: 29309 - DNA, 26 bp, Homo sapiens
gaacagaaacatttcctttagacaaa

SEQ ID NO: 29310 - DNA, 26 bp, Homo sapiens
aacagaaacatttcctttagacaaac

SEQ ID NO: 29311 - DNA, 26 bp, Homo sapiens
acagaaacatttcctttagacaaacg

SEQ ID NO: 29312 - DNA, 26 bp, Homo sapiens
cagaaacatttcctttagacaaacgt

SEQ ID NO: 29313 - DNA, 26 bp, Homo sapiens
agaaacatttcctttagacaaacgtt

SEQ ID NO: 29314 - DNA, 26 bp, Homo sapiens
gaaacatttcctttagacaaacgttc

SEQ ID NO: 29315 - DNA, 26 bp, Homo sapiens
aaacatttcctttagacaaacgttcc

SEQ ID NO: 29316 - DNA, 26 bp, Homo sapiens
aacatttcctttagacaaacgttccc

SEQ ID NO: 29317 - DNA, 26 bp, Homo sapiens
acatttcctttagacaaacgttccca

SEQ ID NO: 29318 - DNA, 26 bp, Homo sapiens
catttcctttagacaaacgttcccag

SEQ ID NO: 29319 - DNA, 26 bp, Homo sapiens
atttcctttagacaaacgttcccaga

SEQ ID NO: 29320 - DNA, 26 bp, Homo sapiens
tttcctttagacaaacgttcccagag

SEQ ID NO: 29321 - DNA, 26 bp, Homo sapiens
ttcctttagacaaacgttcccagagg

SEQ ID NO: 29322 - DNA, 26 bp, Homo sapiens
tcctttagacaaacgttcccagaggg

SEQ ID NO: 29323 - DNA, 26 bp, Homo sapiens
cctttagacaaacgttcccagagggg

SEQ ID NO: 29324 - DNA, 26 bp, Homo sapiens
ctttagacaaacgttcccagaggggt

SEQ ID NO: 29325 - DNA, 26 bp, Homo sapiens
tttagacaaacgttcccagaggggtt

SEQ ID NO: 29326 - DNA, 26 bp, Homo sapiens
ttagacaaacgttcccagaggggtta

SEQ ID NO: 29327 - DNA, 26 bp, Homo sapiens
tagacaaacgttcccagaggggttat

SEQ ID NO: 29328 - DNA, 26 bp, Homo sapiens
agacaaacgttcccagaggggttata

SEQ ID NO: 29329 - DNA, 26 bp, Homo sapiens
gacaaacgttcccagaggggttataa

SEQ ID NO: 29330 - DNA, 26 bp, Homo sapiens
acaaacgttcccagaggggttataaa

SEQ ID NO: 29331 - DNA, 26 bp, Homo sapiens
caaacgttcccagaggggttataaat

SEQ ID NO: 29332 - DNA, 26 bp, Homo sapiens
aaacgttcccagaggggttataaata

SEQ ID NO: 29333 - DNA, 26 bp, Homo sapiens
aacgttcccagaggggttataaatag

SEQ ID NO: 29334 - DNA, 26 bp, Homo sapiens
acgttcccagaggggttataaatagg

SEQ ID NO: 29335 - DNA, 26 bp, Homo sapiens
cgttcccagaggggttataaatagga

SEQ ID NO: 29336 - DNA, 26 bp, Homo sapiens
gttcccagaggggttataaataggaa

SEQ ID NO: 29337 - DNA, 26 bp, Homo sapiens
ttcccagaggggttataaataggaaa

SEQ ID NO: 29338 - DNA, 26 bp, Homo sapiens
tcccagaggggttataaataggaaat

SEQ ID NO: 29339 - DNA, 26 bp, Homo sapiens
cccagaggggttataaataggaaatg

SEQ ID NO: 29340 - DNA, 26 bp, Homo sapiens
ccagaggggttataaataggaaatgg

SEQ ID NO: 29341 - DNA, 26 bp, Homo sapiens
cagaggggttataaataggaaatgga

SEQ ID NO: 29342 - DNA, 26 bp, Homo sapiens
agaggggttataaataggaaatggac

SEQ ID NO: 29343 - DNA, 26 bp, Homo sapiens
gaggggttataaataggaaatggaca

SEQ ID NO: 29344 - DNA, 26 bp, Homo sapiens
aggggttataaataggaaatggacat

SEQ ID NO: 29345 - DNA, 26 bp, Homo sapiens
ggggttataaataggaaatggacatt

SEQ ID NO: 29346 - DNA, 26 bp, Homo sapiens
gggttataaataggaaatggacatta

SEQ ID NO: 29347 - DNA, 26 bp, Homo sapiens
ggttataaataggaaatggacattac

SEQ ID NO: 29348 - DNA, 26 bp, Homo sapiens
gttataaataggaaatggacattacc

SEQ ID NO: 29349 - DNA, 26 bp, Homo sapiens
ttataaataggaaatggacattacca

SEQ ID NO: 29350 - DNA, 26 bp, Homo sapiens
tataaataggaaatggacattaccat

SEQ ID NO: 29351 - DNA, 26 bp, Homo sapiens
ataaataggaaatggacattaccatg

SEQ ID NO: 29352 - DNA, 26 bp, Homo sapiens
taaataggaaatggacattaccatga

SEQ ID NO: 29353 - DNA, 26 bp, Homo sapiens
aaataggaaatggacattaccatgaa

SEQ ID NO: 29354 - DNA, 26 bp, Homo sapiens
aataggaaatggacattaccatgaaa

SEQ ID NO: 29355 - DNA, 26 bp, Homo sapiens
ataggaaatggacattaccatgaaaa

SEQ ID NO: 29356 - DNA, 26 bp, Homo sapiens
taggaaatggacattaccatgaaaag

SEQ ID NO: 29357 - DNA, 26 bp, Homo sapiens
aggaaatggacattaccatgaaaagt

SEQ ID NO: 29358 - DNA, 26 bp, Homo sapiens
ggaaatggacattaccatgaaaagta

SEQ ID NO: 29359 - DNA, 26 bp, Homo sapiens
gaaatggacattaccatgaaaagtaa

SEQ ID NO: 29360 - DNA, 26 bp, Homo sapiens
aaatggacattaccatgaaaagtaag

SEQ ID NO: 29361 - DNA, 26 bp, Homo sapiens
aatggacattaccatgaaaagtaagc

SEQ ID NO: 29362 - DNA, 26 bp, Homo sapiens
atggacattaccatgaaaagtaagcc

SEQ ID NO: 29363 - DNA, 26 bp, Homo sapiens
tggacattaccatgaaaagtaagcct

SEQ ID NO: 29364 - DNA, 26 bp, Homo sapiens
ggacattaccatgaaaagtaagcctc

SEQ ID NO: 29365 - DNA, 26 bp, Homo sapiens
gacattaccatgaaaagtaagcctcc

SEQ ID NO: 29366 - DNA, 26 bp, Homo sapiens
acattaccatgaaaagtaagcctcca

SEQ ID NO: 29367 - DNA, 26 bp, Homo sapiens
cattaccatgaaaagtaagcctccaa

SEQ ID NO: 29368 - DNA, 26 bp, Homo sapiens
attaccatgaaaagtaagcctccaag

SEQ ID NO: 29369 - DNA, 26 bp, Homo sapiens
ttaccatgaaaagtaagcctccaagt

SEQ ID NO: 29370 - DNA, 26 bp, Homo sapiens
taccatgaaaagtaagcctccaagtg

SEQ ID NO: 29371 - DNA, 26 bp, Homo sapiens
accatgaaaagtaagcctccaagtgt

SEQ ID NO: 29372 - DNA, 26 bp, Homo sapiens
ccatgaaaagtaagcctccaagtgtc

SEQ ID NO: 29373 - DNA, 26 bp, Homo sapiens
catgaaaagtaagcctccaagtgtct

SEQ ID NO: 29374 - DNA, 26 bp, Homo sapiens
atgaaaagtaagcctccaagtgtcta

SEQ ID NO: 29375 - DNA, 26 bp, Homo sapiens
tgaaaagtaagcctccaagtgtctac

SEQ ID NO: 29376 - DNA, 26 bp, Homo sapiens
gaaaagtaagcctccaagtgtctaca

SEQ ID NO: 29377 - DNA, 26 bp, Homo sapiens
aaaagtaagcctccaagtgtctacat

SEQ ID NO: 29378 - DNA, 26 bp, Homo sapiens
aaagtaagcctccaagtgtctacatc

SEQ ID NO: 29379 - DNA, 26 bp, Homo sapiens
aagtaagcctccaagtgtctacatct

SEQ ID NO: 29380 - DNA, 26 bp, Homo sapiens
agtaagcctccaagtgtctacatcta

SEQ ID NO: 29381 - DNA, 26 bp, Homo sapiens
gtaagcctccaagtgtctacatctag

SEQ ID NO: 29382 - DNA, 26 bp, Homo sapiens
taagcctccaagtgtctacatctagt

SEQ ID NO: 29383 - DNA, 26 bp, Homo sapiens
aagcctccaagtgtctacatctagtg

SEQ ID NO: 29384 - DNA, 26 bp, Homo sapiens
agcctccaagtgtctacatctagtgc

SEQ ID NO: 29385 - DNA, 26 bp, Homo sapiens
gcctccaagtgtctacatctagtgca

SEQ ID NO: 29386 - DNA, 26 bp, Homo sapiens
cctccaagtgtctacatctagtgcaa

SEQ ID NO: 29387 - DNA, 26 bp, Homo sapiens
ctccaagtgtctacatctagtgcaac

SEQ ID NO: 29388 - DNA, 26 bp, Homo sapiens
tccaagtgtctacatctagtgcaacc

SEQ ID NO: 29389 - DNA, 26 bp, Homo sapiens
ccaagtgtctacatctagtgcaaccc

SEQ ID NO: 29390 - DNA, 26 bp, Homo sapiens
caagtgtctacatctagtgcaaccca

SEQ ID NO: 29391 - DNA, 26 bp, Homo sapiens
aagtgtctacatctagtgcaacccac

SEQ ID NO: 29392 - DNA, 26 bp, Homo sapiens
agtgtctacatctagtgcaacccact

SEQ ID NO: 29393 - DNA, 26 bp, Homo sapiens
gtgtctacatctagtgcaacccactt

SEQ ID NO: 29394 - DNA, 26 bp, Homo sapiens
tgtctacatctagtgcaacccacttg

SEQ ID NO: 29395 - DNA, 26 bp, Homo sapiens
gtctacatctagtgcaacccacttgg

SEQ ID NO: 29396 - DNA, 26 bp, Homo sapiens
tctacatctagtgcaacccacttgga

SEQ ID NO: 29397 - DNA, 26 bp, Homo sapiens
ctacatctagtgcaacccacttggac

SEQ ID NO: 29398 - DNA, 26 bp, Homo sapiens
tacatctagtgcaacccacttggaca

SEQ ID NO: 29399 - DNA, 26 bp, Homo sapiens
acatctagtgcaacccacttggacat

SEQ ID NO: 29400 - DNA, 26 bp, Homo sapiens
catctagtgcaacccacttggacatt

SEQ ID NO: 29401 - DNA, 26 bp, Homo sapiens
atctagtgcaacccacttggacatta

SEQ ID NO: 29402 - DNA, 26 bp, Homo sapiens
tctagtgcaacccacttggacattag

SEQ ID NO: 29403 - DNA, 26 bp, Homo sapiens
ctagtgcaacccacttggacattaga

SEQ ID NO: 29404 - DNA, 26 bp, Homo sapiens
tagtgcaacccacttggacattagac

SEQ ID NO: 29405 - DNA, 26 bp, Homo sapiens
agtgcaacccacttggacattagact

SEQ ID NO: 29406 - DNA, 26 bp, Homo sapiens
gtgcaacccacttggacattagacta

SEQ ID NO: 29407 - DNA, 26 bp, Homo sapiens
tgcaacccacttggacattagactat

SEQ ID NO: 29408 - DNA, 26 bp, Homo sapiens
gcaacccacttggacattagactatg

SEQ ID NO: 29409 - DNA, 26 bp, Homo sapiens
caacccacttggacattagactatga

SEQ ID NO: 29410 - DNA, 26 bp, Homo sapiens
aacccacttggacattagactatgaa

SEQ ID NO: 29411 - DNA, 26 bp, Homo sapiens
acccacttggacattagactatgaag

SEQ ID NO: 29412 - DNA, 26 bp, Homo sapiens
cccacttggacattagactatgaaga

SEQ ID NO: 29413 - DNA, 26 bp, Homo sapiens
ccacttggacattagactatgaagac

SEQ ID NO: 29414 - DNA, 26 bp, Homo sapiens
cacttggacattagactatgaagact

SEQ ID NO: 29415 - DNA, 26 bp, Homo sapiens
acttggacattagactatgaagactt

SEQ ID NO: 29416 - DNA, 26 bp, Homo sapiens
cttggacattagactatgaagactta

SEQ ID NO: 29417 - DNA, 26 bp, Homo sapiens
ttggacattagactatgaagacttag

SEQ ID NO: 29418 - DNA, 26 bp, Homo sapiens
tggacattagactatgaagacttaga

SEQ ID NO: 29419 - DNA, 26 bp, Homo sapiens
ggacattagactatgaagacttagac

SEQ ID NO: 29420 - DNA, 26 bp, Homo sapiens
gacattagactatgaagacttagact

SEQ ID NO: 29421 - DNA, 26 bp, Homo sapiens
acattagactatgaagacttagactc

SEQ ID NO: 29422 - DNA, 26 bp, Homo sapiens
cattagactatgaagacttagactcc

SEQ ID NO: 29423 - DNA, 26 bp, Homo sapiens
attagactatgaagacttagactccc

SEQ ID NO: 29424 - DNA, 26 bp, Homo sapiens
ttagactatgaagacttagactcccc

SEQ ID NO: 29425 - DNA, 26 bp, Homo sapiens
tagactatgaagacttagactccccc

SEQ ID NO: 29426 - DNA, 26 bp, Homo sapiens
agactatgaagacttagactcccccc

SEQ ID NO: 29427 - DNA, 26 bp, Homo sapiens
gactatgaagacttagactccccccc

SEQ ID NO: 29428 - DNA, 26 bp, Homo sapiens
actatgaagacttagactccccccca

SEQ ID NO: 29429 - DNA, 26 bp, Homo sapiens
ctatgaagacttagactcccccccac

SEQ ID NO: 29430 - DNA, 26 bp, Homo sapiens
tatgaagacttagactcccccccact

SEQ ID NO: 29431 - DNA, 26 bp, Homo sapiens
atgaagacttagactcccccccactt

SEQ ID NO: 29432 - DNA, 26 bp, Homo sapiens
tgaagacttagactcccccccacttt

SEQ ID NO: 29433 - DNA, 26 bp, Homo sapiens
gaagacttagactcccccccactttc

SEQ ID NO: 29434 - DNA, 26 bp, Homo sapiens
aagacttagactcccccccactttcc

SEQ ID NO: 29435 - DNA, 26 bp, Homo sapiens
agacttagactcccccccactttcct

SEQ ID NO: 29436 - DNA, 26 bp, Homo sapiens
gacttagactcccccccactttcctg

SEQ ID NO: 29437 - DNA, 26 bp, Homo sapiens
acttagactcccccccactttcctgt

SEQ ID NO: 29438 - DNA, 26 bp, Homo sapiens
cttagactcccccccactttcctgtt

SEQ ID NO: 29439 - DNA, 26 bp, Homo sapiens
ttagactcccccccactttcctgtta

SEQ ID NO: 29440 - DNA, 26 bp, Homo sapiens
tagactcccccccactttcctgttac

SEQ ID NO: 29441 - DNA, 26 bp, Homo sapiens
agactcccccccactttcctgttaca

SEQ ID NO: 29442 - DNA, 26 bp, Homo sapiens
gactcccccccactttcctgttacaa

SEQ ID NO: 29443 - DNA, 26 bp, Homo sapiens
actcccccccactttcctgttacaaa

SEQ ID NO: 29444 - DNA, 26 bp, Homo sapiens
ctcccccccactttcctgttacaaac

SEQ ID NO: 29445 - DNA, 26 bp, Homo sapiens
tcccccccactttcctgttacaaact

SEQ ID NO: 29446 - DNA, 26 bp, Homo sapiens
cccccccactttcctgttacaaactg

SEQ ID NO: 29447 - DNA, 26 bp, Homo sapiens
ccccccactttcctgttacaaactga

SEQ ID NO: 29448 - DNA, 26 bp, Homo sapiens
cccccactttcctgttacaaactgac

SEQ ID NO: 29449 - DNA, 26 bp, Homo sapiens
ccccactttcctgttacaaactgaca

SEQ ID NO: 29450 - DNA, 26 bp, Homo sapiens
cccactttcctgttacaaactgacaa

SEQ ID NO: 29451 - DNA, 26 bp, Homo sapiens
ccactttcctgttacaaactgacaaa

SEQ ID NO: 29452 - DNA, 26 bp, Homo sapiens
cactttcctgttacaaactgacaaaa

SEQ ID NO: 29453 - DNA, 26 bp, Homo sapiens
actttcctgttacaaactgacaaaat

SEQ ID NO: 29454 - DNA, 26 bp, Homo sapiens
ctttcctgttacaaactgacaaaata

SEQ ID NO: 29455 - DNA, 26 bp, Homo sapiens
tttcctgttacaaactgacaaaataa

SEQ ID NO: 29456 - DNA, 26 bp, Homo sapiens
ttcctgttacaaactgacaaaataag

SEQ ID NO: 29457 - DNA, 26 bp, Homo sapiens
tcctgttacaaactgacaaaataagt

SEQ ID NO: 29458 - DNA, 26 bp, Homo sapiens
cctgttacaaactgacaaaataagta

SEQ ID NO: 29459 - DNA, 26 bp, Homo sapiens
ctgttacaaactgacaaaataagtac

SEQ ID NO: 29460 - DNA, 26 bp, Homo sapiens
tgttacaaactgacaaaataagtaca

SEQ ID NO: 29461 - DNA, 26 bp, Homo sapiens
gttacaaactgacaaaataagtacat

SEQ ID NO: 29462 - DNA, 26 bp, Homo sapiens
ttacaaactgacaaaataagtacatc

SEQ ID NO: 29463 - DNA, 26 bp, Homo sapiens
tacaaactgacaaaataagtacatca

SEQ ID NO: 29464 - DNA, 26 bp, Homo sapiens
acaaactgacaaaataagtacatcaa

SEQ ID NO: 29465 - DNA, 26 bp, Homo sapiens
caaactgacaaaataagtacatcaat

SEQ ID NO: 29466 - DNA, 26 bp, Homo sapiens
aaactgacaaaataagtacatcaatg

SEQ ID NO: 29467 - DNA, 26 bp, Homo sapiens
aactgacaaaataagtacatcaatgc

SEQ ID NO: 29468 - DNA, 26 bp, Homo sapiens
actgacaaaataagtacatcaatgct

SEQ ID NO: 29469 - DNA, 26 bp, Homo sapiens
ctgacaaaataagtacatcaatgctc

SEQ ID NO: 29470 - DNA, 26 bp, Homo sapiens
tgacaaaataagtacatcaatgctct

SEQ ID NO: 29471 - DNA, 26 bp, Homo sapiens
gacaaaataagtacatcaatgctctc

SEQ ID NO: 29472 - DNA, 26 bp, Homo sapiens
acaaaataagtacatcaatgctctca

SEQ ID NO: 29473 - DNA, 26 bp, Homo sapiens
caaaataagtacatcaatgctctcag

SEQ ID NO: 29474 - DNA, 26 bp, Homo sapiens
aaaataagtacatcaatgctctcagt

SEQ ID NO: 29475 - DNA, 26 bp, Homo sapiens
aaataagtacatcaatgctctcagtc

SEQ ID NO: 29476 - DNA, 26 bp, Homo sapiens
aataagtacatcaatgctctcagtca

SEQ ID NO: 29477 - DNA, 26 bp, Homo sapiens
ataagtacatcaatgctctcagtcat

SEQ ID NO: 29478 - DNA, 26 bp, Homo sapiens
taagtacatcaatgctctcagtcatt

SEQ ID NO: 29479 - DNA, 26 bp, Homo sapiens
aagtacatcaatgctctcagtcatta

SEQ ID NO: 29480 - DNA, 26 bp, Homo sapiens
agtacatcaatgctctcagtcattac

SEQ ID NO: 29481 - DNA, 26 bp, Homo sapiens
gtacatcaatgctctcagtcattact

SEQ ID NO: 29482 - DNA, 26 bp, Homo sapiens
tacatcaatgctctcagtcattactt

SEQ ID NO: 29483 - DNA, 26 bp, Homo sapiens
acatcaatgctctcagtcattacttt

SEQ ID NO: 29484 - DNA, 26 bp, Homo sapiens
catcaatgctctcagtcattactttt

SEQ ID NO: 29485 - DNA, 26 bp, Homo sapiens
atcaatgctctcagtcattacttttc

SEQ ID NO: 29486 - DNA, 26 bp, Homo sapiens
tcaatgctctcagtcattacttttct

SEQ ID NO: 29487 - DNA, 26 bp, Homo sapiens
caatgctctcagtcattacttttctt

SEQ ID NO: 29488 - DNA, 26 bp, Homo sapiens
aatgctctcagtcattacttttcttc

SEQ ID NO: 29489 - DNA, 26 bp, Homo sapiens
atgctctcagtcattacttttcttcg

SEQ ID NO: 29490 - DNA, 26 bp, Homo sapiens
tgctctcagtcattacttttcttcgg

SEQ ID NO: 29491 - DNA, 26 bp, Homo sapiens
gctctcagtcattacttttcttcggt

SEQ ID NO: 29492 - DNA, 26 bp, Homo sapiens
ctctcagtcattacttttcttcggtg

SEQ ID NO: 29493 - DNA, 26 bp, Homo sapiens
tctcagtcattacttttcttcggtgg

SEQ ID NO: 29494 - DNA, 26 bp, Homo sapiens
ctcagtcattacttttcttcggtggc

SEQ ID NO: 29495 - DNA, 26 bp, Homo sapiens
tcagtcattacttttcttcggtggca

SEQ ID NO: 29496 - DNA, 26 bp, Homo sapiens
cagtcattacttttcttcggtggcac

SEQ ID NO: 29497 - DNA, 26 bp, Homo sapiens
agtcattacttttcttcggtggcact

SEQ ID NO: 29498 - DNA, 26 bp, Homo sapiens
gtcattacttttcttcggtggcactt

SEQ ID NO: 29499 - DNA, 26 bp, Homo sapiens
tcattacttttcttcggtggcacttt

SEQ ID NO: 29500 - DNA, 26 bp, Homo sapiens
cattacttttcttcggtggcactttg

SEQ ID NO: 29501 - DNA, 26 bp, Homo sapiens
attacttttcttcggtggcactttgt

SEQ ID NO: 29502 - DNA, 26 bp, Homo sapiens
ttacttttcttcggtggcactttgtt

SEQ ID NO: 29503 - DNA, 26 bp, Homo sapiens
tacttttcttcggtggcactttgttt

SEQ ID NO: 29504 - DNA, 26 bp, Homo sapiens
acttttcttcggtggcactttgtttt

SEQ ID NO: 29505 - DNA, 26 bp, Homo sapiens
cttttcttcggtggcactttgttttc

SEQ ID NO: 29506 - DNA, 26 bp, Homo sapiens
ttttcttcggtggcactttgttttct

SEQ ID NO: 29507 - DNA, 26 bp, Homo sapiens
tttcttcggtggcactttgttttctt

SEQ ID NO: 29508 - DNA, 26 bp, Homo sapiens
ttcttcggtggcactttgttttcttg

SEQ ID NO: 29509 - DNA, 26 bp, Homo sapiens
tcttcggtggcactttgttttcttgt

SEQ ID NO: 29510 - DNA, 26 bp, Homo sapiens
cttcggtggcactttgttttcttgtg

SEQ ID NO: 29511 - DNA, 26 bp, Homo sapiens
ttcggtggcactttgttttcttgtga

SEQ ID NO: 29512 - DNA, 26 bp, Homo sapiens
tcggtggcactttgttttcttgtgac

SEQ ID NO: 29513 - DNA, 26 bp, Homo sapiens
cggtggcactttgttttcttgtgaca

SEQ ID NO: 29514 - DNA, 26 bp, Homo sapiens
ggtggcactttgttttcttgtgacag

SEQ ID NO: 29515 - DNA, 26 bp, Homo sapiens
gtggcactttgttttcttgtgacagt

SEQ ID NO: 29516 - DNA, 26 bp, Homo sapiens
tggcactttgttttcttgtgacagtg

SEQ ID NO: 29517 - DNA, 26 bp, Homo sapiens
ggcactttgttttcttgtgacagtga

SEQ ID NO: 29518 - DNA, 26 bp, Homo sapiens
gcactttgttttcttgtgacagtgaa

SEQ ID NO: 29519 - DNA, 26 bp, Homo sapiens
cactttgttttcttgtgacagtgaaa

SEQ ID NO: 29520 - DNA, 26 bp, Homo sapiens
actttgttttcttgtgacagtgaaaa

SEQ ID NO: 29521 - DNA, 26 bp, Homo sapiens
ctttgttttcttgtgacagtgaaaag

SEQ ID NO: 29522 - DNA, 26 bp, Homo sapiens
tttgttttcttgtgacagtgaaaagg

SEQ ID NO: 29523 - DNA, 26 bp, Homo sapiens
ttgttttcttgtgacagtgaaaaggg

SEQ ID NO: 29524 - DNA, 26 bp, Homo sapiens
tgttttcttgtgacagtgaaaagggt

SEQ ID NO: 29525 - DNA, 26 bp, Homo sapiens
gttttcttgtgacagtgaaaagggta

SEQ ID NO: 29526 - DNA, 26 bp, Homo sapiens
ttttcttgtgacagtgaaaagggtac

SEQ ID NO: 29527 - DNA, 26 bp, Homo sapiens
tttcttgtgacagtgaaaagggtact

SEQ ID NO: 29528 - DNA, 26 bp, Homo sapiens
ttcttgtgacagtgaaaagggtactg

SEQ ID NO: 29529 - DNA, 26 bp, Homo sapiens
tcttgtgacagtgaaaagggtactgt

SEQ ID NO: 29530 - DNA, 26 bp, Homo sapiens
cttgtgacagtgaaaagggtactgtg

SEQ ID NO: 29531 - DNA, 26 bp, Homo sapiens
ttgtgacagtgaaaagggtactgtgg

SEQ ID NO: 29532 - DNA, 26 bp, Homo sapiens
tgtgacagtgaaaagggtactgtgga

SEQ ID NO: 29533 - DNA, 26 bp, Homo sapiens
gtgacagtgaaaagggtactgtggag

SEQ ID NO: 29534 - DNA, 26 bp, Homo sapiens
tgacagtgaaaagggtactgtggaga

SEQ ID NO: 29535 - DNA, 26 bp, Homo sapiens
gacagtgaaaagggtactgtggagac

SEQ ID NO: 29536 - DNA, 26 bp, Homo sapiens
acagtgaaaagggtactgtggagacg

SEQ ID NO: 29537 - DNA, 26 bp, Homo sapiens
cagtgaaaagggtactgtggagacga

SEQ ID NO: 29538 - DNA, 26 bp, Homo sapiens
agtgaaaagggtactgtggagacgag

SEQ ID NO: 29539 - DNA, 26 bp, Homo sapiens
gtgaaaagggtactgtggagacgaga

SEQ ID NO: 29540 - DNA, 26 bp, Homo sapiens
tgaaaagggtactgtggagacgagac

SEQ ID NO: 29541 - DNA, 26 bp, Homo sapiens
gaaaagggtactgtggagacgagaca

SEQ ID NO: 29542 - DNA, 26 bp, Homo sapiens
aaaagggtactgtggagacgagacag

SEQ ID NO: 29543 - DNA, 26 bp, Homo sapiens
aaagggtactgtggagacgagacagc

SEQ ID NO: 29544 - DNA, 26 bp, Homo sapiens
aagggtactgtggagacgagacagcc

SEQ ID NO: 29545 - DNA, 26 bp, Homo sapiens
agggtactgtggagacgagacagccc

SEQ ID NO: 29546 - DNA, 26 bp, Homo sapiens
gggtactgtggagacgagacagcccc

SEQ ID NO: 29547 - DNA, 26 bp, Homo sapiens
ggtactgtggagacgagacagcccca

SEQ ID NO: 29548 - DNA, 26 bp, Homo sapiens
gtactgtggagacgagacagccccat

SEQ ID NO: 29549 - DNA, 26 bp, Homo sapiens
tactgtggagacgagacagccccatt

SEQ ID NO: 29550 - DNA, 26 bp, Homo sapiens
actgtggagacgagacagccccattg

SEQ ID NO: 29551 - DNA, 26 bp, Homo sapiens
ctgtggagacgagacagccccattgc

SEQ ID NO: 29552 - DNA, 26 bp, Homo sapiens
tgtggagacgagacagccccattgca

SEQ ID NO: 29553 - DNA, 26 bp, Homo sapiens
gtggagacgagacagccccattgcaa

SEQ ID NO: 29554 - DNA, 26 bp, Homo sapiens
tggagacgagacagccccattgcaat

SEQ ID NO: 29555 - DNA, 26 bp, Homo sapiens
ggagacgagacagccccattgcaatt

SEQ ID NO: 29556 - DNA, 26 bp, Homo sapiens
gagacgagacagccccattgcaattt

SEQ ID NO: 29557 - DNA, 26 bp, Homo sapiens
agacgagacagccccattgcaattta

SEQ ID NO: 29558 - DNA, 26 bp, Homo sapiens
gacgagacagccccattgcaatttat

SEQ ID NO: 29559 - DNA, 26 bp, Homo sapiens
acgagacagccccattgcaatttatc

SEQ ID NO: 29560 - DNA, 26 bp, Homo sapiens
cgagacagccccattgcaatttatca

SEQ ID NO: 29561 - DNA, 26 bp, Homo sapiens
gagacagccccattgcaatttatcaa

SEQ ID NO: 29562 - DNA, 26 bp, Homo sapiens
agacagccccattgcaatttatcaat

SEQ ID NO: 29563 - DNA, 26 bp, Homo sapiens
gacagccccattgcaatttatcaatg

SEQ ID NO: 29564 - DNA, 26 bp, Homo sapiens
acagccccattgcaatttatcaatga

SEQ ID NO: 29565 - DNA, 26 bp, Homo sapiens
cagccccattgcaatttatcaatgaa

SEQ ID NO: 29566 - DNA, 26 bp, Homo sapiens
agccccattgcaatttatcaatgaaa

SEQ ID NO: 29567 - DNA, 26 bp, Homo sapiens
gccccattgcaatttatcaatgaaaa

SEQ ID NO: 29568 - DNA, 26 bp, Homo sapiens
ccccattgcaatttatcaatgaaaat

SEQ ID NO: 29569 - DNA, 26 bp, Homo sapiens
cccattgcaatttatcaatgaaaatc

SEQ ID NO: 29570 - DNA, 26 bp, Homo sapiens
ccattgcaatttatcaatgaaaatct

SEQ ID NO: 29571 - DNA, 26 bp, Homo sapiens
cattgcaatttatcaatgaaaatcta

SEQ ID NO: 29572 - DNA, 26 bp, Homo sapiens
attgcaatttatcaatgaaaatctaa

SEQ ID NO: 29573 - DNA, 26 bp, Homo sapiens
ttgcaatttatcaatgaaaatctaat

SEQ ID NO: 29574 - DNA, 26 bp, Homo sapiens
tgcaatttatcaatgaaaatctaata

SEQ ID NO: 29575 - DNA, 26 bp, Homo sapiens
gcaatttatcaatgaaaatctaatac

SEQ ID NO: 29576 - DNA, 26 bp, Homo sapiens
caatttatcaatgaaaatctaatacc

SEQ ID NO: 29577 - DNA, 26 bp, Homo sapiens
aatttatcaatgaaaatctaataccg

SEQ ID NO: 29578 - DNA, 26 bp, Homo sapiens
atttatcaatgaaaatctaataccgc

SEQ ID NO: 29579 - DNA, 26 bp, Homo sapiens
tttatcaatgaaaatctaataccgcc

SEQ ID NO: 29580 - DNA, 26 bp, Homo sapiens
ttatcaatgaaaatctaataccgccc

SEQ ID NO: 29581 - DNA, 26 bp, Homo sapiens
tatcaatgaaaatctaataccgccca

SEQ ID NO: 29582 - DNA, 26 bp, Homo sapiens
atcaatgaaaatctaataccgcccat

SEQ ID NO: 29583 - DNA, 26 bp, Homo sapiens
tcaatgaaaatctaataccgcccata

SEQ ID NO: 29584 - DNA, 26 bp, Homo sapiens
caatgaaaatctaataccgcccataa

SEQ ID NO: 29585 - DNA, 26 bp, Homo sapiens
aatgaaaatctaataccgcccataag

SEQ ID NO: 29586 - DNA, 26 bp, Homo sapiens
atgaaaatctaataccgcccataagc

SEQ ID NO: 29587 - DNA, 26 bp, Homo sapiens
tgaaaatctaataccgcccataagca

SEQ ID NO: 29588 - DNA, 26 bp, Homo sapiens
gaaaatctaataccgcccataagcag

SEQ ID NO: 29589 - DNA, 26 bp, Homo sapiens
aaaatctaataccgcccataagcaga

SEQ ID NO: 29590 - DNA, 26 bp, Homo sapiens
aaatctaataccgcccataagcagag

SEQ ID NO: 29591 - DNA, 26 bp, Homo sapiens
aatctaataccgcccataagcagaga

SEQ ID NO: 29592 - DNA, 26 bp, Homo sapiens
atctaataccgcccataagcagagaa

SEQ ID NO: 29593 - DNA, 26 bp, Homo sapiens
tctaataccgcccataagcagagaag

SEQ ID NO: 29594 - DNA, 26 bp, Homo sapiens
ctaataccgcccataagcagagaagt

SEQ ID NO: 29595 - DNA, 26 bp, Homo sapiens
taataccgcccataagcagagaagtg

SEQ ID NO: 29596 - DNA, 26 bp, Homo sapiens
aataccgcccataagcagagaagtgg

SEQ ID NO: 29597 - DNA, 26 bp, Homo sapiens
ataccgcccataagcagagaagtgga

SEQ ID NO: 29598 - DNA, 26 bp, Homo sapiens
taccgcccataagcagagaagtggaa

SEQ ID NO: 29599 - DNA, 26 bp, Homo sapiens
accgcccataagcagagaagtggaaa

SEQ ID NO: 29600 - DNA, 26 bp, Homo sapiens
ccgcccataagcagagaagtggaaat

SEQ ID NO: 29601 - DNA, 26 bp, Homo sapiens
cgcccataagcagagaagtggaaatc

SEQ ID NO: 29602 - DNA, 26 bp, Homo sapiens
gcccataagcagagaagtggaaatca

SEQ ID NO: 29603 - DNA, 26 bp, Homo sapiens
cccataagcagagaagtggaaatcaa

SEQ ID NO: 29604 - DNA, 26 bp, Homo sapiens
ccataagcagagaagtggaaatcaat

SEQ ID NO: 29605 - DNA, 26 bp, Homo sapiens
cataagcagagaagtggaaatcaata

SEQ ID NO: 29606 - DNA, 26 bp, Homo sapiens
ataagcagagaagtggaaatcaatac

SEQ ID NO: 29607 - DNA, 26 bp, Homo sapiens
taagcagagaagtggaaatcaatact

SEQ ID NO: 29608 - DNA, 26 bp, Homo sapiens
aagcagagaagtggaaatcaatactt

SEQ ID NO: 29609 - DNA, 26 bp, Homo sapiens
agcagagaagtggaaatcaatacttc

SEQ ID NO: 29610 - DNA, 26 bp, Homo sapiens
gcagagaagtggaaatcaatacttca

SEQ ID NO: 29611 - DNA, 26 bp, Homo sapiens
cagagaagtggaaatcaatacttcat

SEQ ID NO: 29612 - DNA, 26 bp, Homo sapiens
agagaagtggaaatcaatacttcatt

SEQ ID NO: 29613 - DNA, 26 bp, Homo sapiens
gagaagtggaaatcaatacttcatta

SEQ ID NO: 29614 - DNA, 26 bp, Homo sapiens
agaagtggaaatcaatacttcattac

SEQ ID NO: 29615 - DNA, 26 bp, Homo sapiens
gaagtggaaatcaatacttcattacc

SEQ ID NO: 29616 - DNA, 26 bp, Homo sapiens
aagtggaaatcaatacttcattacca

SEQ ID NO: 29617 - DNA, 26 bp, Homo sapiens
agtggaaatcaatacttcattaccaa

SEQ ID NO: 29618 - DNA, 26 bp, Homo sapiens
gtggaaatcaatacttcattaccaaa

SEQ ID NO: 29619 - DNA, 26 bp, Homo sapiens
tggaaatcaatacttcattaccaaat

SEQ ID NO: 29620 - DNA, 26 bp, Homo sapiens
ggaaatcaatacttcattaccaaatt

SEQ ID NO: 29621 - DNA, 26 bp, Homo sapiens
gaaatcaatacttcattaccaaattg

SEQ ID NO: 29622 - DNA, 26 bp, Homo sapiens
aaatcaatacttcattaccaaattgt

SEQ ID NO: 29623 - DNA, 26 bp, Homo sapiens
aatcaatacttcattaccaaattgtt

SEQ ID NO: 29624 - DNA, 26 bp, Homo sapiens
atcaatacttcattaccaaattgtta

SEQ ID NO: 29625 - DNA, 26 bp, Homo sapiens
tcaatacttcattaccaaattgttag

SEQ ID NO: 29626 - DNA, 26 bp, Homo sapiens
caatacttcattaccaaattgttagt

SEQ ID NO: 29627 - DNA, 26 bp, Homo sapiens
aatacttcattaccaaattgttagtg

SEQ ID NO: 29628 - DNA, 26 bp, Homo sapiens
atacttcattaccaaattgttagtga

SEQ ID NO: 29629 - DNA, 26 bp, Homo sapiens
tacttcattaccaaattgttagtgag

SEQ ID NO: 29630 - DNA, 26 bp, Homo sapiens
acttcattaccaaattgttagtgagg

SEQ ID NO: 29631 - DNA, 26 bp, Homo sapiens
cttcattaccaaattgttagtgagga

SEQ ID NO: 29632 - DNA, 26 bp, Homo sapiens
ttcattaccaaattgttagtgaggat

SEQ ID NO: 29633 - DNA, 26 bp, Homo sapiens
tcattaccaaattgttagtgaggatg

SEQ ID NO: 29634 - DNA, 26 bp, Homo sapiens
cattaccaaattgttagtgaggatga

SEQ ID NO: 29635 - DNA, 26 bp, Homo sapiens
attaccaaattgttagtgaggatgaa

SEQ ID NO: 29636 - DNA, 26 bp, Homo sapiens
ttaccaaattgttagtgaggatgaag

SEQ ID NO: 29637 - DNA, 26 bp, Homo sapiens
taccaaattgttagtgaggatgaaga

SEQ ID NO: 29638 - DNA, 26 bp, Homo sapiens
accaaattgttagtgaggatgaagag

SEQ ID NO: 29639 - DNA, 26 bp, Homo sapiens
ccaaattgttagtgaggatgaagaga

SEQ ID NO: 29640 - DNA, 26 bp, Homo sapiens
caaattgttagtgaggatgaagagaa

SEQ ID NO: 29641 - DNA, 26 bp, Homo sapiens
aaattgttagtgaggatgaagagaaa

SEQ ID NO: 29642 - DNA, 26 bp, Homo sapiens
aattgttagtgaggatgaagagaaat

SEQ ID NO: 29643 - DNA, 26 bp, Homo sapiens
attgttagtgaggatgaagagaaatg

SEQ ID NO: 29644 - DNA, 26 bp, Homo sapiens
ttgttagtgaggatgaagagaaatgg

SEQ ID NO: 29645 - DNA, 26 bp, Homo sapiens
tgttagtgaggatgaagagaaatggc

SEQ ID NO: 29646 - DNA, 26 bp, Homo sapiens
gttagtgaggatgaagagaaatggct

SEQ ID NO: 29647 - DNA, 26 bp, Homo sapiens
ttagtgaggatgaagagaaatggctg

SEQ ID NO: 29648 - DNA, 26 bp, Homo sapiens
tagtgaggatgaagagaaatggctgg

SEQ ID NO: 29649 - DNA, 26 bp, Homo sapiens
agtgaggatgaagagaaatggctggg

SEQ ID NO: 29650 - DNA, 26 bp, Homo sapiens
gtgaggatgaagagaaatggctgggg

SEQ ID NO: 29651 - DNA, 26 bp, Homo sapiens
tgaggatgaagagaaatggctggggt

SEQ ID NO: 29652 - DNA, 26 bp, Homo sapiens
gaggatgaagagaaatggctggggtg

SEQ ID NO: 29653 - DNA, 26 bp, Homo sapiens
aggatgaagagaaatggctggggtga

SEQ ID NO: 29654 - DNA, 26 bp, Homo sapiens
ggatgaagagaaatggctggggtgat

SEQ ID NO: 29655 - DNA, 26 bp, Homo sapiens
gatgaagagaaatggctggggtgatt

SEQ ID NO: 29656 - DNA, 26 bp, Homo sapiens
atgaagagaaatggctggggtgattt

SEQ ID NO: 29657 - DNA, 26 bp, Homo sapiens
tgaagagaaatggctggggtgatttt

SEQ ID NO: 29658 - DNA, 26 bp, Homo sapiens
gaagagaaatggctggggtgattttt

SEQ ID NO: 29659 - DNA, 26 bp, Homo sapiens
aagagaaatggctggggtgatttttt

SEQ ID NO: 29660 - DNA, 26 bp, Homo sapiens
agagaaatggctggggtgattttttt

SEQ ID NO: 29661 - DNA, 26 bp, Homo sapiens
gagaaatggctggggtgatttttttt

SEQ ID NO: 29662 - DNA, 26 bp, Homo sapiens
agaaatggctggggtgattttttttt

SEQ ID NO: 29663 - DNA, 26 bp, Homo sapiens
gaaatggctggggtgatttttttttt

SEQ ID NO: 29664 - DNA, 26 bp, Homo sapiens
aaatggctggggtgattttttttttt

SEQ ID NO: 29665 - DNA, 26 bp, Homo sapiens
aatggctggggtgatttttttttttt

SEQ ID NO: 29666 - DNA, 26 bp, Homo sapiens
atggctggggtgattttttttttttt

SEQ ID NO: 29667 - DNA, 26 bp, Homo sapiens
tggctggggtgatttttttttttttt

SEQ ID NO: 29668 - DNA, 26 bp, Homo sapiens
ggctggggtgattttttttttttttt

SEQ ID NO: 29669 - DNA, 26 bp, Homo sapiens
gctggggtgatttttttttttttttt

SEQ ID NO: 29670 - DNA, 26 bp, Homo sapiens
ctggggtgattttttttttttttttt

SEQ ID NO: 29671 - DNA, 26 bp, Homo sapiens
tggggtgatttttttttttttttttt

SEQ ID NO: 29672 - DNA, 26 bp, Homo sapiens
ggggtgattttttttttttttttttt

SEQ ID NO: 29673 - DNA, 26 bp, Homo sapiens
gggtgatttttttttttttttttttt

SEQ ID NO: 29674 - DNA, 26 bp, Homo sapiens
ggtgattttttttttttttttttttt

SEQ ID NO: 29675 - DNA, 26 bp, Homo sapiens
gtgatttttttttttttttttttttg

SEQ ID NO: 29676 - DNA, 26 bp, Homo sapiens
tgatttttttttttttttttttttgg

SEQ ID NO: 29677 - DNA, 26 bp, Homo sapiens
gatttttttttttttttttttttggc

SEQ ID NO: 29678 - DNA, 26 bp, Homo sapiens
atttttttttttttttttttttggca

SEQ ID NO: 29679 - DNA, 26 bp, Homo sapiens
tttttttttttttttttttttggcag

SEQ ID NO: 29680 - DNA, 26 bp, Homo sapiens
ttttttttttttttttttttggcagt

SEQ ID NO: 29681 - DNA, 26 bp, Homo sapiens
tttttttttttttttttttggcagtc

SEQ ID NO: 29682 - DNA, 26 bp, Homo sapiens
ttttttttttttttttttggcagtct

SEQ ID NO: 29683 - DNA, 26 bp, Homo sapiens
tttttttttttttttttggcagtctt

SEQ ID NO: 29684 - DNA, 26 bp, Homo sapiens
ttttttttttttttttggcagtcttc

SEQ ID NO: 29685 - DNA, 26 bp, Homo sapiens
tttttttttttttttggcagtcttct

SEQ ID NO: 29686 - DNA, 26 bp, Homo sapiens
ttttttttttttttggcagtcttctc

SEQ ID NO: 29687 - DNA, 26 bp, Homo sapiens
tttttttttttttggcagtcttctca

SEQ ID NO: 29688 - DNA, 26 bp, Homo sapiens
ttttttttttttggcagtcttctcag

SEQ ID NO: 29689 - DNA, 26 bp, Homo sapiens
tttttttttttggcagtcttctcaga

SEQ ID NO: 29690 - DNA, 26 bp, Homo sapiens
ttttttttttggcagtcttctcagag

SEQ ID NO: 29691 - DNA, 26 bp, Homo sapiens
tttttttttggcagtcttctcagagc

SEQ ID NO: 29692 - DNA, 26 bp, Homo sapiens
ttttttttggcagtcttctcagagcc

SEQ ID NO: 29693 - DNA, 26 bp, Homo sapiens
tttttttggcagtcttctcagagcca

SEQ ID NO: 29694 - DNA, 26 bp, Homo sapiens
ttttttggcagtcttctcagagccag

SEQ ID NO: 29695 - DNA, 26 bp, Homo sapiens
tttttggcagtcttctcagagccagg

SEQ ID NO: 29696 - DNA, 26 bp, Homo sapiens
ttttggcagtcttctcagagccaggg

SEQ ID NO: 29697 - DNA, 26 bp, Homo sapiens
tttggcagtcttctcagagccagggt

SEQ ID NO: 29698 - DNA, 26 bp, Homo sapiens
ttggcagtcttctcagagccagggtg

SEQ ID NO: 29699 - DNA, 26 bp, Homo sapiens
tggcagtcttctcagagccagggtgt

SEQ ID NO: 29700 - DNA, 26 bp, Homo sapiens
ggcagtcttctcagagccagggtgtc

SEQ ID NO: 29701 - DNA, 26 bp, Homo sapiens
gcagtcttctcagagccagggtgtca

SEQ ID NO: 29702 - DNA, 26 bp, Homo sapiens
cagtcttctcagagccagggtgtcag

SEQ ID NO: 29703 - DNA, 26 bp, Homo sapiens
agtcttctcagagccagggtgtcagg

SEQ ID NO: 29704 - DNA, 26 bp, Homo sapiens
gtcttctcagagccagggtgtcagga

SEQ ID NO: 29705 - DNA, 26 bp, Homo sapiens
tcttctcagagccagggtgtcaggag

SEQ ID NO: 29706 - DNA, 26 bp, Homo sapiens
cttctcagagccagggtgtcaggagg

SEQ ID NO: 29707 - DNA, 26 bp, Homo sapiens
ttctcagagccagggtgtcaggagga

SEQ ID NO: 29708 - DNA, 26 bp, Homo sapiens
tctcagagccagggtgtcaggaggag

SEQ ID NO: 29709 - DNA, 26 bp, Homo sapiens
ctcagagccagggtgtcaggaggagt

SEQ ID NO: 29710 - DNA, 26 bp, Homo sapiens
tcagagccagggtgtcaggaggagtt

SEQ ID NO: 29711 - DNA, 26 bp, Homo sapiens
cagagccagggtgtcaggaggagttc

SEQ ID NO: 29712 - DNA, 26 bp, Homo sapiens
agagccagggtgtcaggaggagttca

SEQ ID NO: 29713 - DNA, 26 bp, Homo sapiens
gagccagggtgtcaggaggagttcaa

SEQ ID NO: 29714 - DNA, 26 bp, Homo sapiens
agccagggtgtcaggaggagttcaat

SEQ ID NO: 29715 - DNA, 26 bp, Homo sapiens
gccagggtgtcaggaggagttcaatg

SEQ ID NO: 29716 - DNA, 26 bp, Homo sapiens
ccagggtgtcaggaggagttcaatga

SEQ ID NO: 29717 - DNA, 26 bp, Homo sapiens
cagggtgtcaggaggagttcaatgag

SEQ ID NO: 29718 - DNA, 26 bp, Homo sapiens
agggtgtcaggaggagttcaatgagt

SEQ ID NO: 29719 - DNA, 26 bp, Homo sapiens
gggtgtcaggaggagttcaatgagtt

SEQ ID NO: 29720 - DNA, 26 bp, Homo sapiens
ggtgtcaggaggagttcaatgagttc

SEQ ID NO: 29721 - DNA, 26 bp, Homo sapiens
gtgtcaggaggagttcaatgagttca

SEQ ID NO: 29722 - DNA, 26 bp, Homo sapiens
tgtcaggaggagttcaatgagttcaa

SEQ ID NO: 29723 - DNA, 26 bp, Homo sapiens
gtcaggaggagttcaatgagttcaat

SEQ ID NO: 29724 - DNA, 26 bp, Homo sapiens
tcaggaggagttcaatgagttcaatg

SEQ ID NO: 29725 - DNA, 26 bp, Homo sapiens
caggaggagttcaatgagttcaatgt

SEQ ID NO: 29726 - DNA, 26 bp, Homo sapiens
aggaggagttcaatgagttcaatgtc

SEQ ID NO: 29727 - DNA, 26 bp, Homo sapiens
ggaggagttcaatgagttcaatgtca

SEQ ID NO: 29728 - DNA, 26 bp, Homo sapiens
gaggagttcaatgagttcaatgtcag

SEQ ID NO: 29729 - DNA, 26 bp, Homo sapiens
aggagttcaatgagttcaatgtcaga

SEQ ID NO: 29730 - DNA, 26 bp, Homo sapiens
ggagttcaatgagttcaatgtcagaa

SEQ ID NO: 29731 - DNA, 26 bp, Homo sapiens
gagttcaatgagttcaatgtcagaag

SEQ ID NO: 29732 - DNA, 26 bp, Homo sapiens
agttcaatgagttcaatgtcagaagc

SEQ ID NO: 29733 - DNA, 26 bp, Homo sapiens
gttcaatgagttcaatgtcagaagca

SEQ ID NO: 29734 - DNA, 26 bp, Homo sapiens
ttcaatgagttcaatgtcagaagcag

SEQ ID NO: 29735 - DNA, 26 bp, Homo sapiens
tcaatgagttcaatgtcagaagcagg

SEQ ID NO: 29736 - DNA, 26 bp, Homo sapiens
caatgagttcaatgtcagaagcagga

SEQ ID NO: 29737 - DNA, 26 bp, Homo sapiens
aatgagttcaatgtcagaagcaggat

SEQ ID NO: 29738 - DNA, 26 bp, Homo sapiens
atgagttcaatgtcagaagcaggatg

SEQ ID NO: 29739 - DNA, 26 bp, Homo sapiens
tgagttcaatgtcagaagcaggatgg

SEQ ID NO: 29740 - DNA, 26 bp, Homo sapiens
gagttcaatgtcagaagcaggatggt

SEQ ID NO: 29741 - DNA, 26 bp, Homo sapiens
agttcaatgtcagaagcaggatggtg

SEQ ID NO: 29742 - DNA, 26 bp, Homo sapiens
gttcaatgtcagaagcaggatggtgc

SEQ ID NO: 29743 - DNA, 26 bp, Homo sapiens
ttcaatgtcagaagcaggatggtgca

SEQ ID NO: 29744 - DNA, 26 bp, Homo sapiens
tcaatgtcagaagcaggatggtgcaa

SEQ ID NO: 29745 - DNA, 26 bp, Homo sapiens
caatgtcagaagcaggatggtgcaac

SEQ ID NO: 29746 - DNA, 26 bp, Homo sapiens
aatgtcagaagcaggatggtgcaacg

SEQ ID NO: 29747 - DNA, 26 bp, Homo sapiens
atgtcagaagcaggatggtgcaacga

SEQ ID NO: 29748 - DNA, 26 bp, Homo sapiens
tgtcagaagcaggatggtgcaacgaa

SEQ ID NO: 29749 - DNA, 26 bp, Homo sapiens
gtcagaagcaggatggtgcaacgaag

SEQ ID NO: 29750 - DNA, 26 bp, Homo sapiens
tcagaagcaggatggtgcaacgaaga

SEQ ID NO: 29751 - DNA, 26 bp, Homo sapiens
cagaagcaggatggtgcaacgaagaa

SEQ ID NO: 29752 - DNA, 26 bp, Homo sapiens
agaagcaggatggtgcaacgaagaag

SEQ ID NO: 29753 - DNA, 26 bp, Homo sapiens
gaagcaggatggtgcaacgaagaagg

SEQ ID NO: 29754 - DNA, 26 bp, Homo sapiens
aagcaggatggtgcaacgaagaaggg

SEQ ID NO: 29755 - DNA, 26 bp, Homo sapiens
agcaggatggtgcaacgaagaagggt

SEQ ID NO: 29756 - DNA, 26 bp, Homo sapiens
gcaggatggtgcaacgaagaagggtt

SEQ ID NO: 29757 - DNA, 26 bp, Homo sapiens
caggatggtgcaacgaagaagggttc

SEQ ID NO: 29758 - DNA, 26 bp, Homo sapiens
aggatggtgcaacgaagaagggttca

SEQ ID NO: 29759 - DNA, 26 bp, Homo sapiens
ggatggtgcaacgaagaagggttcag

SEQ ID NO: 29760 - DNA, 26 bp, Homo sapiens
gatggtgcaacgaagaagggttcagt

SEQ ID NO: 29761 - DNA, 26 bp, Homo sapiens
atggtgcaacgaagaagggttcagtg

SEQ ID NO: 29762 - DNA, 26 bp, Homo sapiens
tggtgcaacgaagaagggttcagtgt

SEQ ID NO: 29763 - DNA, 26 bp, Homo sapiens
ggtgcaacgaagaagggttcagtgtg

SEQ ID NO: 29764 - DNA, 26 bp, Homo sapiens
gtgcaacgaagaagggttcagtgtga

SEQ ID NO: 29765 - DNA, 26 bp, Homo sapiens
tgcaacgaagaagggttcagtgtgag

SEQ ID NO: 29766 - DNA, 26 bp, Homo sapiens
gcaacgaagaagggttcagtgtgagg

SEQ ID NO: 29767 - DNA, 26 bp, Homo sapiens
caacgaagaagggttcagtgtgaggg

SEQ ID NO: 29768 - DNA, 26 bp, Homo sapiens
aacgaagaagggttcagtgtgagggg

SEQ ID NO: 29769 - DNA, 26 bp, Homo sapiens
acgaagaagggttcagtgtgagggga

SEQ ID NO: 29770 - DNA, 26 bp, Homo sapiens
cgaagaagggttcagtgtgaggggat

SEQ ID NO: 29771 - DNA, 26 bp, Homo sapiens
gaagaagggttcagtgtgaggggatc

SEQ ID NO: 29772 - DNA, 26 bp, Homo sapiens
aagaagggttcagtgtgaggggatcc

SEQ ID NO: 29773 - DNA, 26 bp, Homo sapiens
agaagggttcagtgtgaggggatcca

SEQ ID NO: 29774 - DNA, 26 bp, Homo sapiens
gaagggttcagtgtgaggggatccag

SEQ ID NO: 29775 - DNA, 26 bp, Homo sapiens
aagggttcagtgtgaggggatccagg

SEQ ID NO: 29776 - DNA, 26 bp, Homo sapiens
agggttcagtgtgaggggatccaggc

SEQ ID NO: 29777 - DNA, 26 bp, Homo sapiens
gggttcagtgtgaggggatccaggct

SEQ ID NO: 29778 - DNA, 26 bp, Homo sapiens
ggttcagtgtgaggggatccaggctg

SEQ ID NO: 29779 - DNA, 26 bp, Homo sapiens
gttcagtgtgaggggatccaggctgg

SEQ ID NO: 29780 - DNA, 26 bp, Homo sapiens
ttcagtgtgaggggatccaggctgga

SEQ ID NO: 29781 - DNA, 26 bp, Homo sapiens
tcagtgtgaggggatccaggctggaa

SEQ ID NO: 29782 - DNA, 26 bp, Homo sapiens
cagtgtgaggggatccaggctggaaa

SEQ ID NO: 29783 - DNA, 26 bp, Homo sapiens
agtgtgaggggatccaggctggaaag

SEQ ID NO: 29784 - DNA, 26 bp, Homo sapiens
gtgtgaggggatccaggctggaaagt

SEQ ID NO: 29785 - DNA, 26 bp, Homo sapiens
tgtgaggggatccaggctggaaagtg

SEQ ID NO: 29786 - DNA, 26 bp, Homo sapiens
gtgaggggatccaggctggaaagtgg

SEQ ID NO: 29787 - DNA, 26 bp, Homo sapiens
tgaggggatccaggctggaaagtgga

SEQ ID NO: 29788 - DNA, 26 bp, Homo sapiens
gaggggatccaggctggaaagtggaa

SEQ ID NO: 29789 - DNA, 26 bp, Homo sapiens
aggggatccaggctggaaagtggaaa

SEQ ID NO: 29790 - DNA, 26 bp, Homo sapiens
ggggatccaggctggaaagtggaaac

SEQ ID NO: 29791 - DNA, 26 bp, Homo sapiens
gggatccaggctggaaagtggaaact

SEQ ID NO: 29792 - DNA, 26 bp, Homo sapiens
ggatccaggctggaaagtggaaacta

SEQ ID NO: 29793 - DNA, 26 bp, Homo sapiens
gatccaggctggaaagtggaaactaa

SEQ ID NO: 29794 - DNA, 26 bp, Homo sapiens
atccaggctggaaagtggaaactaag

SEQ ID NO: 29795 - DNA, 26 bp, Homo sapiens
tccaggctggaaagtggaaactaagg

SEQ ID NO: 29796 - DNA, 26 bp, Homo sapiens
ccaggctggaaagtggaaactaaggc

SEQ ID NO: 29797 - DNA, 26 bp, Homo sapiens
caggctggaaagtggaaactaaggca

SEQ ID NO: 29798 - DNA, 26 bp, Homo sapiens
aggctggaaagtggaaactaaggcat

SEQ ID NO: 29799 - DNA, 26 bp, Homo sapiens
ggctggaaagtggaaactaaggcatt

SEQ ID NO: 29800 - DNA, 26 bp, Homo sapiens
gctggaaagtggaaactaaggcattc

SEQ ID NO: 29801 - DNA, 26 bp, Homo sapiens
ctggaaagtggaaactaaggcattcg

SEQ ID NO: 29802 - DNA, 26 bp, Homo sapiens
tggaaagtggaaactaaggcattcgt

SEQ ID NO: 29803 - DNA, 26 bp, Homo sapiens
ggaaagtggaaactaaggcattcgtc

SEQ ID NO: 29804 - DNA, 26 bp, Homo sapiens
gaaagtggaaactaaggcattcgtcc

SEQ ID NO: 29805 - DNA, 26 bp, Homo sapiens
aaagtggaaactaaggcattcgtcct

SEQ ID NO: 29806 - DNA, 26 bp, Homo sapiens
aagtggaaactaaggcattcgtcctg

SEQ ID NO: 29807 - DNA, 26 bp, Homo sapiens
agtggaaactaaggcattcgtcctgc

SEQ ID NO: 29808 - DNA, 26 bp, Homo sapiens
gtggaaactaaggcattcgtcctgca

SEQ ID NO: 29809 - DNA, 26 bp, Homo sapiens
tggaaactaaggcattcgtcctgcag

SEQ ID NO: 29810 - DNA, 26 bp, Homo sapiens
ggaaactaaggcattcgtcctgcaga

SEQ ID NO: 29811 - DNA, 26 bp, Homo sapiens
gaaactaaggcattcgtcctgcagag

SEQ ID NO: 29812 - DNA, 26 bp, Homo sapiens
aaactaaggcattcgtcctgcagagc

SEQ ID NO: 29813 - DNA, 26 bp, Homo sapiens
aactaaggcattcgtcctgcagagct

SEQ ID NO: 29814 - DNA, 26 bp, Homo sapiens
actaaggcattcgtcctgcagagcta

SEQ ID NO: 29815 - DNA, 26 bp, Homo sapiens
ctaaggcattcgtcctgcagagctat

SEQ ID NO: 29816 - DNA, 26 bp, Homo sapiens
taaggcattcgtcctgcagagctatt

SEQ ID NO: 29817 - DNA, 26 bp, Homo sapiens
aaggcattcgtcctgcagagctattc

SEQ ID NO: 29818 - DNA, 26 bp, Homo sapiens
aggcattcgtcctgcagagctattct

SEQ ID NO: 29819 - DNA, 26 bp, Homo sapiens
ggcattcgtcctgcagagctattctt

SEQ ID NO: 29820 - DNA, 26 bp, Homo sapiens
gcattcgtcctgcagagctattcttc

SEQ ID NO: 29821 - DNA, 26 bp, Homo sapiens
cattcgtcctgcagagctattcttca

SEQ ID NO: 29822 - DNA, 26 bp, Homo sapiens
attcgtcctgcagagctattcttcat

SEQ ID NO: 29823 - DNA, 26 bp, Homo sapiens
ttcgtcctgcagagctattcttcatc

SEQ ID NO: 29824 - DNA, 26 bp, Homo sapiens
tcgtcctgcagagctattcttcatcc

SEQ ID NO: 29825 - DNA, 26 bp, Homo sapiens
cgtcctgcagagctattcttcatcca

SEQ ID NO: 29826 - DNA, 26 bp, Homo sapiens
gtcctgcagagctattcttcatccac

SEQ ID NO: 29827 - DNA, 26 bp, Homo sapiens
tcctgcagagctattcttcatccacg

SEQ ID NO: 29828 - DNA, 26 bp, Homo sapiens
cctgcagagctattcttcatccacgt

SEQ ID NO: 29829 - DNA, 26 bp, Homo sapiens
ctgcagagctattcttcatccacgtc

SEQ ID NO: 29830 - DNA, 26 bp, Homo sapiens
tgcagagctattcttcatccacgtct

SEQ ID NO: 29831 - DNA, 26 bp, Homo sapiens
gcagagctattcttcatccacgtctg

SEQ ID NO: 29832 - DNA, 26 bp, Homo sapiens
cagagctattcttcatccacgtctgt

SEQ ID NO: 29833 - DNA, 26 bp, Homo sapiens
agagctattcttcatccacgtctgtt

SEQ ID NO: 29834 - DNA, 26 bp, Homo sapiens
gagctattcttcatccacgtctgtta

SEQ ID NO: 29835 - DNA, 26 bp, Homo sapiens
agctattcttcatccacgtctgttac

SEQ ID NO: 29836 - DNA, 26 bp, Homo sapiens
gctattcttcatccacgtctgttaca

SEQ ID NO: 29837 - DNA, 26 bp, Homo sapiens
ctattcttcatccacgtctgttacaa

SEQ ID NO: 29838 - DNA, 26 bp, Homo sapiens
tattcttcatccacgtctgttacaaa

SEQ ID NO: 29839 - DNA, 26 bp, Homo sapiens
attcttcatccacgtctgttacaaac

SEQ ID NO: 29840 - DNA, 26 bp, Homo sapiens
ttcttcatccacgtctgttacaaact

SEQ ID NO: 29841 - DNA, 26 bp, Homo sapiens
tcttcatccacgtctgttacaaactg

SEQ ID NO: 29842 - DNA, 26 bp, Homo sapiens
cttcatccacgtctgttacaaactgt

SEQ ID NO: 29843 - DNA, 26 bp, Homo sapiens
ttcatccacgtctgttacaaactgtg

SEQ ID NO: 29844 - DNA, 26 bp, Homo sapiens
tcatccacgtctgttacaaactgtga

SEQ ID NO: 29845 - DNA, 26 bp, Homo sapiens
catccacgtctgttacaaactgtgaa

SEQ ID NO: 29846 - DNA, 26 bp, Homo sapiens
atccacgtctgttacaaactgtgaat

SEQ ID NO: 29847 - DNA, 26 bp, Homo sapiens
tccacgtctgttacaaactgtgaatg

SEQ ID NO: 29848 - DNA, 26 bp, Homo sapiens
ccacgtctgttacaaactgtgaatgg

SEQ ID NO: 29849 - DNA, 26 bp, Homo sapiens
cacgtctgttacaaactgtgaatggt

SEQ ID NO: 29850 - DNA, 26 bp, Homo sapiens
acgtctgttacaaactgtgaatggtg

SEQ ID NO: 29851 - DNA, 26 bp, Homo sapiens
cgtctgttacaaactgtgaatggtgt

SEQ ID NO: 29852 - DNA, 26 bp, Homo sapiens
gtctgttacaaactgtgaatggtgtt

SEQ ID NO: 29853 - DNA, 26 bp, Homo sapiens
tctgttacaaactgtgaatggtgttc

SEQ ID NO: 29854 - DNA, 26 bp, Homo sapiens
ctgttacaaactgtgaatggtgttcg

SEQ ID NO: 29855 - DNA, 26 bp, Homo sapiens
tgttacaaactgtgaatggtgttcgg

SEQ ID NO: 29856 - DNA, 26 bp, Homo sapiens
gttacaaactgtgaatggtgttcggg

SEQ ID NO: 29857 - DNA, 26 bp, Homo sapiens
ttacaaactgtgaatggtgttcgggt

SEQ ID NO: 29858 - DNA, 26 bp, Homo sapiens
tacaaactgtgaatggtgttcgggtg

SEQ ID NO: 29859 - DNA, 26 bp, Homo sapiens
acaaactgtgaatggtgttcgggtga

SEQ ID NO: 29860 - DNA, 26 bp, Homo sapiens
caaactgtgaatggtgttcgggtgac

SEQ ID NO: 29861 - DNA, 26 bp, Homo sapiens
aaactgtgaatggtgttcgggtgact

SEQ ID NO: 29862 - DNA, 26 bp, Homo sapiens
aactgtgaatggtgttcgggtgactt

SEQ ID NO: 29863 - DNA, 26 bp, Homo sapiens
actgtgaatggtgttcgggtgacttg

SEQ ID NO: 29864 - DNA, 26 bp, Homo sapiens
ctgtgaatggtgttcgggtgacttgc

SEQ ID NO: 29865 - DNA, 26 bp, Homo sapiens
tgtgaatggtgttcgggtgacttgct

SEQ ID NO: 29866 - DNA, 26 bp, Homo sapiens
gtgaatggtgttcgggtgacttgctg

SEQ ID NO: 29867 - DNA, 26 bp, Homo sapiens
tgaatggtgttcgggtgacttgctgt

SEQ ID NO: 29868 - DNA, 26 bp, Homo sapiens
gaatggtgttcgggtgacttgctgtg

SEQ ID NO: 29869 - DNA, 26 bp, Homo sapiens
aatggtgttcgggtgacttgctgtgc

SEQ ID NO: 29870 - DNA, 26 bp, Homo sapiens
atggtgttcgggtgacttgctgtgcg

SEQ ID NO: 29871 - DNA, 26 bp, Homo sapiens
tggtgttcgggtgacttgctgtgcgt

SEQ ID NO: 29872 - DNA, 26 bp, Homo sapiens
ggtgttcgggtgacttgctgtgcgtt

SEQ ID NO: 29873 - DNA, 26 bp, Homo sapiens
gtgttcgggtgacttgctgtgcgttt

SEQ ID NO: 29874 - DNA, 26 bp, Homo sapiens
tgttcgggtgacttgctgtgcgtttt

SEQ ID NO: 29875 - DNA, 26 bp, Homo sapiens
gttcgggtgacttgctgtgcgttttg

SEQ ID NO: 29876 - DNA, 26 bp, Homo sapiens
ttcgggtgacttgctgtgcgttttgc

SEQ ID NO: 29877 - DNA, 26 bp, Homo sapiens
tcgggtgacttgctgtgcgttttgct

SEQ ID NO: 29878 - DNA, 26 bp, Homo sapiens
cgggtgacttgctgtgcgttttgctt

SEQ ID NO: 29879 - DNA, 26 bp, Homo sapiens
gggtgacttgctgtgcgttttgctta

SEQ ID NO: 29880 - DNA, 26 bp, Homo sapiens
ggtgacttgctgtgcgttttgcttag

SEQ ID NO: 29881 - DNA, 26 bp, Homo sapiens
gtgacttgctgtgcgttttgcttagg

SEQ ID NO: 29882 - DNA, 26 bp, Homo sapiens
tgacttgctgtgcgttttgcttaggt

SEQ ID NO: 29883 - DNA, 26 bp, Homo sapiens
gacttgctgtgcgttttgcttaggtg

SEQ ID NO: 29884 - DNA, 26 bp, Homo sapiens
acttgctgtgcgttttgcttaggtgg

SEQ ID NO: 29885 - DNA, 26 bp, Homo sapiens
cttgctgtgcgttttgcttaggtgga

SEQ ID NO: 29886 - DNA, 26 bp, Homo sapiens
ttgctgtgcgttttgcttaggtggag

SEQ ID NO: 29887 - DNA, 26 bp, Homo sapiens
tgctgtgcgttttgcttaggtggagt

SEQ ID NO: 29888 - DNA, 26 bp, Homo sapiens
gctgtgcgttttgcttaggtggagtt

SEQ ID NO: 29889 - DNA, 26 bp, Homo sapiens
ctgtgcgttttgcttaggtggagttt

SEQ ID NO: 29890 - DNA, 26 bp, Homo sapiens
tgtgcgttttgcttaggtggagtttt

SEQ ID NO: 29891 - DNA, 26 bp, Homo sapiens
gtgcgttttgcttaggtggagtttta

SEQ ID NO: 29892 - DNA, 26 bp, Homo sapiens
tgcgttttgcttaggtggagttttac

SEQ ID NO: 29893 - DNA, 26 bp, Homo sapiens
gcgttttgcttaggtggagttttacc

SEQ ID NO: 29894 - DNA, 26 bp, Homo sapiens
cgttttgcttaggtggagttttaccg

SEQ ID NO: 29895 - DNA, 26 bp, Homo sapiens
gttttgcttaggtggagttttaccgc

SEQ ID NO: 29896 - DNA, 26 bp, Homo sapiens
ttttgcttaggtggagttttaccgca

SEQ ID NO: 29897 - DNA, 26 bp, Homo sapiens
tttgcttaggtggagttttaccgcat

SEQ ID NO: 29898 - DNA, 26 bp, Homo sapiens
ttgcttaggtggagttttaccgcatg

SEQ ID NO: 29899 - DNA, 26 bp, Homo sapiens
tgcttaggtggagttttaccgcatgt

SEQ ID NO: 29900 - DNA, 26 bp, Homo sapiens
gcttaggtggagttttaccgcatgtt

SEQ ID NO: 29901 - DNA, 26 bp, Homo sapiens
cttaggtggagttttaccgcatgttt

SEQ ID NO: 29902 - DNA, 26 bp, Homo sapiens
ttaggtggagttttaccgcatgtttg

SEQ ID NO: 29903 - DNA, 26 bp, Homo sapiens
taggtggagttttaccgcatgtttgc

SEQ ID NO: 29904 - DNA, 26 bp, Homo sapiens
aggtggagttttaccgcatgtttgct

SEQ ID NO: 29905 - DNA, 26 bp, Homo sapiens
ggtggagttttaccgcatgtttgctc

SEQ ID NO: 29906 - DNA, 26 bp, Homo sapiens
gtggagttttaccgcatgtttgctca

SEQ ID NO: 29907 - DNA, 26 bp, Homo sapiens
tggagttttaccgcatgtttgctcac

SEQ ID NO: 29908 - DNA, 26 bp, Homo sapiens
ggagttttaccgcatgtttgctcaca

SEQ ID NO: 29909 - DNA, 26 bp, Homo sapiens
gagttttaccgcatgtttgctcacaa

SEQ ID NO: 29910 - DNA, 26 bp, Homo sapiens
agttttaccgcatgtttgctcacaaa

SEQ ID NO: 29911 - DNA, 26 bp, Homo sapiens
gttttaccgcatgtttgctcacaaat

SEQ ID NO: 29912 - DNA, 26 bp, Homo sapiens
ttttaccgcatgtttgctcacaaatg

SEQ ID NO: 29913 - DNA, 26 bp, Homo sapiens
tttaccgcatgtttgctcacaaatgt

SEQ ID NO: 29914 - DNA, 26 bp, Homo sapiens
ttaccgcatgtttgctcacaaatgtc

SEQ ID NO: 29915 - DNA, 26 bp, Homo sapiens
taccgcatgtttgctcacaaatgtcc

SEQ ID NO: 29916 - DNA, 26 bp, Homo sapiens
accgcatgtttgctcacaaatgtccg

SEQ ID NO: 29917 - DNA, 26 bp, Homo sapiens
ccgcatgtttgctcacaaatgtccga

SEQ ID NO: 29918 - DNA, 26 bp, Homo sapiens
cgcatgtttgctcacaaatgtccgac

SEQ ID NO: 29919 - DNA, 26 bp, Homo sapiens
gcatgtttgctcacaaatgtccgaca

SEQ ID NO: 29920 - DNA, 26 bp, Homo sapiens
catgtttgctcacaaatgtccgacag

SEQ ID NO: 29921 - DNA, 26 bp, Homo sapiens
atgtttgctcacaaatgtccgacagc

SEQ ID NO: 29922 - DNA, 26 bp, Homo sapiens
tgtttgctcacaaatgtccgacagca

SEQ ID NO: 29923 - DNA, 26 bp, Homo sapiens
gtttgctcacaaatgtccgacagcac

SEQ ID NO: 29924 - DNA, 26 bp, Homo sapiens
tttgctcacaaatgtccgacagcaca

SEQ ID NO: 29925 - DNA, 26 bp, Homo sapiens
ttgctcacaaatgtccgacagcacaa

SEQ ID NO: 29926 - DNA, 26 bp, Homo sapiens
tgctcacaaatgtccgacagcacaac

SEQ ID NO: 29927 - DNA, 26 bp, Homo sapiens
gctcacaaatgtccgacagcacaact

SEQ ID NO: 29928 - DNA, 26 bp, Homo sapiens
ctcacaaatgtccgacagcacaactt

SEQ ID NO: 29929 - DNA, 26 bp, Homo sapiens
tcacaaatgtccgacagcacaactta

SEQ ID NO: 29930 - DNA, 26 bp, Homo sapiens
cacaaatgtccgacagcacaacttac

SEQ ID NO: 29931 - DNA, 26 bp, Homo sapiens
acaaatgtccgacagcacaacttaca

SEQ ID NO: 29932 - DNA, 26 bp, Homo sapiens
caaatgtccgacagcacaacttacac

SEQ ID NO: 29933 - DNA, 26 bp, Homo sapiens
aaatgtccgacagcacaacttacact

SEQ ID NO: 29934 - DNA, 26 bp, Homo sapiens
aatgtccgacagcacaacttacactt

SEQ ID NO: 29935 - DNA, 26 bp, Homo sapiens
atgtccgacagcacaacttacacttg

SEQ ID NO: 29936 - DNA, 26 bp, Homo sapiens
tgtccgacagcacaacttacacttga

SEQ ID NO: 29937 - DNA, 26 bp, Homo sapiens
gtccgacagcacaacttacacttgaa

SEQ ID NO: 29938 - DNA, 26 bp, Homo sapiens
tccgacagcacaacttacacttgaat

SEQ ID NO: 29939 - DNA, 26 bp, Homo sapiens
ccgacagcacaacttacacttgaatt

SEQ ID NO: 29940 - DNA, 26 bp, Homo sapiens
cgacagcacaacttacacttgaattt

SEQ ID NO: 29941 - DNA, 26 bp, Homo sapiens
gacagcacaacttacacttgaattta

SEQ ID NO: 29942 - DNA, 26 bp, Homo sapiens
acagcacaacttacacttgaatttag

SEQ ID NO: 29943 - DNA, 26 bp, Homo sapiens
cagcacaacttacacttgaatttaga

SEQ ID NO: 29944 - DNA, 26 bp, Homo sapiens
agcacaacttacacttgaatttagag

SEQ ID NO: 29945 - DNA, 26 bp, Homo sapiens
gcacaacttacacttgaatttagagt

SEQ ID NO: 29946 - DNA, 26 bp, Homo sapiens
cacaacttacacttgaatttagagtc

SEQ ID NO: 29947 - DNA, 26 bp, Homo sapiens
acaacttacacttgaatttagagtct

SEQ ID NO: 29948 - DNA, 26 bp, Homo sapiens
caacttacacttgaatttagagtctg

SEQ ID NO: 29949 - DNA, 26 bp, Homo sapiens
aacttacacttgaatttagagtctgt

SEQ ID NO: 29950 - DNA, 26 bp, Homo sapiens
acttacacttgaatttagagtctgtg

SEQ ID NO: 29951 - DNA, 26 bp, Homo sapiens
cttacacttgaatttagagtctgtgt

SEQ ID NO: 29952 - DNA, 26 bp, Homo sapiens
ttacacttgaatttagagtctgtgtc

SEQ ID NO: 29953 - DNA, 26 bp, Homo sapiens
tacacttgaatttagagtctgtgtcc

SEQ ID NO: 29954 - DNA, 26 bp, Homo sapiens
acacttgaatttagagtctgtgtcct

SEQ ID NO: 29955 - DNA, 26 bp, Homo sapiens
cacttgaatttagagtctgtgtcctc

SEQ ID NO: 29956 - DNA, 26 bp, Homo sapiens
acttgaatttagagtctgtgtcctct

SEQ ID NO: 29957 - DNA, 26 bp, Homo sapiens
cttgaatttagagtctgtgtcctctt

SEQ ID NO: 29958 - DNA, 26 bp, Homo sapiens
ttgaatttagagtctgtgtcctcttc

SEQ ID NO: 29959 - DNA, 26 bp, Homo sapiens
tgaatttagagtctgtgtcctcttcg

SEQ ID NO: 29960 - DNA, 26 bp, Homo sapiens
gaatttagagtctgtgtcctcttcgg

SEQ ID NO: 29961 - DNA, 26 bp, Homo sapiens
aatttagagtctgtgtcctcttcggc

SEQ ID NO: 29962 - DNA, 26 bp, Homo sapiens
atttagagtctgtgtcctcttcggca

SEQ ID NO: 29963 - DNA, 26 bp, Homo sapiens
tttagagtctgtgtcctcttcggcag

SEQ ID NO: 29964 - DNA, 26 bp, Homo sapiens
ttagagtctgtgtcctcttcggcagc

SEQ ID NO: 29965 - DNA, 26 bp, Homo sapiens
tagagtctgtgtcctcttcggcagct

SEQ ID NO: 29966 - DNA, 26 bp, Homo sapiens
agagtctgtgtcctcttcggcagcta

SEQ ID NO: 29967 - DNA, 26 bp, Homo sapiens
gagtctgtgtcctcttcggcagctat

SEQ ID NO: 29968 - DNA, 26 bp, Homo sapiens
agtctgtgtcctcttcggcagctatt

SEQ ID NO: 29969 - DNA, 26 bp, Homo sapiens
gtctgtgtcctcttcggcagctattg

SEQ ID NO: 29970 - DNA, 26 bp, Homo sapiens
tctgtgtcctcttcggcagctattgt

SEQ ID NO: 29971 - DNA, 26 bp, Homo sapiens
ctgtgtcctcttcggcagctattgtt

SEQ ID NO: 29972 - DNA, 26 bp, Homo sapiens
tgtgtcctcttcggcagctattgttt

SEQ ID NO: 29973 - DNA, 26 bp, Homo sapiens
gtgtcctcttcggcagctattgtttc

SEQ ID NO: 29974 - DNA, 26 bp, Homo sapiens
tgtcctcttcggcagctattgtttct

SEQ ID NO: 29975 - DNA, 26 bp, Homo sapiens
gtcctcttcggcagctattgtttctg

SEQ ID NO: 29976 - DNA, 26 bp, Homo sapiens
tcctcttcggcagctattgtttctgg

SEQ ID NO: 29977 - DNA, 26 bp, Homo sapiens
cctcttcggcagctattgtttctgga

SEQ ID NO: 29978 - DNA, 26 bp, Homo sapiens
ctcttcggcagctattgtttctggag

SEQ ID NO: 29979 - DNA, 26 bp, Homo sapiens
tcttcggcagctattgtttctggaga

SEQ ID NO: 29980 - DNA, 26 bp, Homo sapiens
cttcggcagctattgtttctggagac

SEQ ID NO: 29981 - DNA, 26 bp, Homo sapiens
ttcggcagctattgtttctggagacc

SEQ ID NO: 29982 - DNA, 26 bp, Homo sapiens
tcggcagctattgtttctggagacct

SEQ ID NO: 29983 - DNA, 26 bp, Homo sapiens
cggcagctattgtttctggagacctc

SEQ ID NO: 29984 - DNA, 26 bp, Homo sapiens
ggcagctattgtttctggagacctct

SEQ ID NO: 29985 - DNA, 26 bp, Homo sapiens
gcagctattgtttctggagacctctg

SEQ ID NO: 29986 - DNA, 26 bp, Homo sapiens
cagctattgtttctggagacctctga

SEQ ID NO: 29987 - DNA, 26 bp, Homo sapiens
agctattgtttctggagacctctgag

SEQ ID NO: 29988 - DNA, 26 bp, Homo sapiens
gctattgtttctggagacctctgagc

SEQ ID NO: 29989 - DNA, 26 bp, Homo sapiens
ctattgtttctggagacctctgagcc

SEQ ID NO: 29990 - DNA, 26 bp, Homo sapiens
tattgtttctggagacctctgagccg

SEQ ID NO: 29991 - DNA, 26 bp, Homo sapiens
attgtttctggagacctctgagccga

SEQ ID NO: 29992 - DNA, 26 bp, Homo sapiens
ttgtttctggagacctctgagccgac

SEQ ID NO: 29993 - DNA, 26 bp, Homo sapiens
tgtttctggagacctctgagccgacg

SEQ ID NO: 29994 - DNA, 26 bp, Homo sapiens
gtttctggagacctctgagccgacga

SEQ ID NO: 29995 - DNA, 26 bp, Homo sapiens
tttctggagacctctgagccgacgat

SEQ ID NO: 29996 - DNA, 26 bp, Homo sapiens
ttctggagacctctgagccgacgata

SEQ ID NO: 29997 - DNA, 26 bp, Homo sapiens
tctggagacctctgagccgacgatac

SEQ ID NO: 29998 - DNA, 26 bp, Homo sapiens
ctggagacctctgagccgacgatacc

SEQ ID NO: 29999 - DNA, 26 bp, Homo sapiens
tggagacctctgagccgacgataccc

SEQ ID NO: 30000 - DNA, 26 bp, Homo sapiens
ggagacctctgagccgacgatacccg

SEQ ID NO: 30001 - DNA, 26 bp, Homo sapiens
gagacctctgagccgacgatacccgg

SEQ ID NO: 30002 - DNA, 26 bp, Homo sapiens
agacctctgagccgacgatacccggg

SEQ ID NO: 30003 - DNA, 26 bp, Homo sapiens
gacctctgagccgacgatacccggga

SEQ ID NO: 30004 - DNA, 26 bp, Homo sapiens
acctctgagccgacgatacccgggag

SEQ ID NO: 30005 - DNA, 26 bp, Homo sapiens
cctctgagccgacgatacccgggaga

SEQ ID NO: 30006 - DNA, 26 bp, Homo sapiens
ctctgagccgacgatacccgggagat

SEQ ID NO: 30007 - DNA, 26 bp, Homo sapiens
tctgagccgacgatacccgggagatc

SEQ ID NO: 30008 - DNA, 26 bp, Homo sapiens
ctgagccgacgatacccgggagatct

SEQ ID NO: 30009 - DNA, 26 bp, Homo sapiens
tgagccgacgatacccgggagatctc

SEQ ID NO: 30010 - DNA, 26 bp, Homo sapiens
gagccgacgatacccgggagatctct

SEQ ID NO: 30011 - DNA, 26 bp, Homo sapiens
agccgacgatacccgggagatctctt

SEQ ID NO: 30012 - DNA, 26 bp, Homo sapiens
gccgacgatacccgggagatctcttg

SEQ ID NO: 30013 - DNA, 26 bp, Homo sapiens
ccgacgatacccgggagatctcttgc

SEQ ID NO: 30014 - DNA, 26 bp, Homo sapiens
cgacgatacccgggagatctcttgct

SEQ ID NO: 30015 - DNA, 26 bp, Homo sapiens
gacgatacccgggagatctcttgctc

SEQ ID NO: 30016 - DNA, 26 bp, Homo sapiens
acgatacccgggagatctcttgctcc

SEQ ID NO: 30017 - DNA, 26 bp, Homo sapiens
cgatacccgggagatctcttgctcca

SEQ ID NO: 30018 - DNA, 26 bp, Homo sapiens
gatacccgggagatctcttgctccac

SEQ ID NO: 30019 - DNA, 26 bp, Homo sapiens
atacccgggagatctcttgctccacc

SEQ ID NO: 30020 - DNA, 26 bp, Homo sapiens
tacccgggagatctcttgctccacct

SEQ ID NO: 30021 - DNA, 26 bp, Homo sapiens
acccgggagatctcttgctccacctt

SEQ ID NO: 30022 - DNA, 26 bp, Homo sapiens
cccgggagatctcttgctccaccttg

SEQ ID NO: 30023 - DNA, 26 bp, Homo sapiens
ccgggagatctcttgctccaccttgc

SEQ ID NO: 30024 - DNA, 26 bp, Homo sapiens
cgggagatctcttgctccaccttgct

SEQ ID NO: 30025 - DNA, 26 bp, Homo sapiens
gggagatctcttgctccaccttgctt

SEQ ID NO: 30026 - DNA, 26 bp, Homo sapiens
ggagatctcttgctccaccttgcttt

SEQ ID NO: 30027 - DNA, 26 bp, Homo sapiens
gagatctcttgctccaccttgctttg

SEQ ID NO: 30028 - DNA, 26 bp, Homo sapiens
agatctcttgctccaccttgctttgc

SEQ ID NO: 30029 - DNA, 26 bp, Homo sapiens
gatctcttgctccaccttgctttgct

SEQ ID NO: 30030 - DNA, 26 bp, Homo sapiens
atctcttgctccaccttgctttgctg

SEQ ID NO: 30031 - DNA, 26 bp, Homo sapiens
tctcttgctccaccttgctttgctgg

SEQ ID NO: 30032 - DNA, 26 bp, Homo sapiens
ctcttgctccaccttgctttgctggt

SEQ ID NO: 30033 - DNA, 26 bp, Homo sapiens
tcttgctccaccttgctttgctggtc

SEQ ID NO: 30034 - DNA, 26 bp, Homo sapiens
cttgctccaccttgctttgctggtcc

SEQ ID NO: 30035 - DNA, 26 bp, Homo sapiens
ttgctccaccttgctttgctggtcca

SEQ ID NO: 30036 - DNA, 26 bp, Homo sapiens
tgctccaccttgctttgctggtccac

SEQ ID NO: 30037 - DNA, 26 bp, Homo sapiens
gctccaccttgctttgctggtccact

SEQ ID NO: 30038 - DNA, 26 bp, Homo sapiens
ctccaccttgctttgctggtccactg

SEQ ID NO: 30039 - DNA, 26 bp, Homo sapiens
tccaccttgctttgctggtccactga

SEQ ID NO: 30040 - DNA, 26 bp, Homo sapiens
ccaccttgctttgctggtccactgac

SEQ ID NO: 30041 - DNA, 26 bp, Homo sapiens
caccttgctttgctggtccactgaca

SEQ ID NO: 30042 - DNA, 26 bp, Homo sapiens
accttgctttgctggtccactgacaa

SEQ ID NO: 30043 - DNA, 26 bp, Homo sapiens
ccttgctttgctggtccactgacaag

SEQ ID NO: 30044 - DNA, 26 bp, Homo sapiens
cttgctttgctggtccactgacaagc

SEQ ID NO: 30045 - DNA, 26 bp, Homo sapiens
ttgctttgctggtccactgacaagcg

SEQ ID NO: 30046 - DNA, 26 bp, Homo sapiens
tgctttgctggtccactgacaagcgg

SEQ ID NO: 30047 - DNA, 26 bp, Homo sapiens
gctttgctggtccactgacaagcggg

SEQ ID NO: 30048 - DNA, 26 bp, Homo sapiens
ctttgctggtccactgacaagcgggt

SEQ ID NO: 30049 - DNA, 26 bp, Homo sapiens
tttgctggtccactgacaagcgggtc

SEQ ID NO: 30050 - DNA, 26 bp, Homo sapiens
ttgctggtccactgacaagcgggtca

SEQ ID NO: 30051 - DNA, 26 bp, Homo sapiens
tgctggtccactgacaagcgggtcat

SEQ ID NO: 30052 - DNA, 26 bp, Homo sapiens
gctggtccactgacaagcgggtcatg

SEQ ID NO: 30053 - DNA, 26 bp, Homo sapiens
ctggtccactgacaagcgggtcatgt

SEQ ID NO: 30054 - DNA, 26 bp, Homo sapiens
tggtccactgacaagcgggtcatgtc

SEQ ID NO: 30055 - DNA, 26 bp, Homo sapiens
ggtccactgacaagcgggtcatgtcc

SEQ ID NO: 30056 - DNA, 26 bp, Homo sapiens
gtccactgacaagcgggtcatgtcct

SEQ ID NO: 30057 - DNA, 26 bp, Homo sapiens
tccactgacaagcgggtcatgtcctt

SEQ ID NO: 30058 - DNA, 26 bp, Homo sapiens
ccactgacaagcgggtcatgtccttc

SEQ ID NO: 30059 - DNA, 26 bp, Homo sapiens
cactgacaagcgggtcatgtccttca

SEQ ID NO: 30060 - DNA, 26 bp, Homo sapiens
actgacaagcgggtcatgtccttcat

SEQ ID NO: 30061 - DNA, 26 bp, Homo sapiens
ctgacaagcgggtcatgtccttcatt

SEQ ID NO: 30062 - DNA, 26 bp, Homo sapiens
tgacaagcgggtcatgtccttcattt

SEQ ID NO: 30063 - DNA, 26 bp, Homo sapiens
gacaagcgggtcatgtccttcatttg

SEQ ID NO: 30064 - DNA, 26 bp, Homo sapiens
acaagcgggtcatgtccttcatttgg

SEQ ID NO: 30065 - DNA, 26 bp, Homo sapiens
caagcgggtcatgtccttcatttgga

SEQ ID NO: 30066 - DNA, 26 bp, Homo sapiens
aagcgggtcatgtccttcatttggaa

SEQ ID NO: 30067 - DNA, 26 bp, Homo sapiens
agcgggtcatgtccttcatttggaaa

SEQ ID NO: 30068 - DNA, 26 bp, Homo sapiens
gcgggtcatgtccttcatttggaaac

SEQ ID NO: 30069 - DNA, 26 bp, Homo sapiens
cgggtcatgtccttcatttggaaacc

SEQ ID NO: 30070 - DNA, 26 bp, Homo sapiens
gggtcatgtccttcatttggaaaccc

SEQ ID NO: 30071 - DNA, 26 bp, Homo sapiens
ggtcatgtccttcatttggaaaccca

SEQ ID NO: 30072 - DNA, 26 bp, Homo sapiens
gtcatgtccttcatttggaaacccag

SEQ ID NO: 30073 - DNA, 26 bp, Homo sapiens
tcatgtccttcatttggaaacccagg

SEQ ID NO: 30074 - DNA, 26 bp, Homo sapiens
catgtccttcatttggaaacccaggt

SEQ ID NO: 30075 - DNA, 26 bp, Homo sapiens
atgtccttcatttggaaacccaggtg

SEQ ID NO: 30076 - DNA, 26 bp, Homo sapiens
tgtccttcatttggaaacccaggtga

SEQ ID NO: 30077 - DNA, 26 bp, Homo sapiens
gtccttcatttggaaacccaggtgag

SEQ ID NO: 30078 - DNA, 26 bp, Homo sapiens
tccttcatttggaaacccaggtgaga

SEQ ID NO: 30079 - DNA, 26 bp, Homo sapiens
ccttcatttggaaacccaggtgagat

SEQ ID NO: 30080 - DNA, 26 bp, Homo sapiens
cttcatttggaaacccaggtgagatt

SEQ ID NO: 30081 - DNA, 26 bp, Homo sapiens
ttcatttggaaacccaggtgagattc

SEQ ID NO: 30082 - DNA, 26 bp, Homo sapiens
tcatttggaaacccaggtgagattct

SEQ ID NO: 30083 - DNA, 26 bp, Homo sapiens
catttggaaacccaggtgagattcta

SEQ ID NO: 30084 - DNA, 26 bp, Homo sapiens
atttggaaacccaggtgagattctaa

SEQ ID NO: 30085 - DNA, 26 bp, Homo sapiens
tttggaaacccaggtgagattctaag

SEQ ID NO: 30086 - DNA, 26 bp, Homo sapiens
ttggaaacccaggtgagattctaagt

SEQ ID NO: 30087 - DNA, 26 bp, Homo sapiens
tggaaacccaggtgagattctaagtg

SEQ ID NO: 30088 - DNA, 26 bp, Homo sapiens
ggaaacccaggtgagattctaagtga

SEQ ID NO: 30089 - DNA, 26 bp, Homo sapiens
gaaacccaggtgagattctaagtgac

SEQ ID NO: 30090 - DNA, 26 bp, Homo sapiens
aaacccaggtgagattctaagtgact

SEQ ID NO: 30091 - DNA, 26 bp, Homo sapiens
aacccaggtgagattctaagtgactg

SEQ ID NO: 30092 - DNA, 26 bp, Homo sapiens
acccaggtgagattctaagtgactga

SEQ ID NO: 30093 - DNA, 26 bp, Homo sapiens
cccaggtgagattctaagtgactgat

SEQ ID NO: 30094 - DNA, 26 bp, Homo sapiens
ccaggtgagattctaagtgactgatg

SEQ ID NO: 30095 - DNA, 26 bp, Homo sapiens
caggtgagattctaagtgactgatgt

SEQ ID NO: 30096 - DNA, 26 bp, Homo sapiens
aggtgagattctaagtgactgatgta

SEQ ID NO: 30097 - DNA, 26 bp, Homo sapiens
ggtgagattctaagtgactgatgtag

SEQ ID NO: 30098 - DNA, 26 bp, Homo sapiens
gtgagattctaagtgactgatgtagg

SEQ ID NO: 30099 - DNA, 26 bp, Homo sapiens
tgagattctaagtgactgatgtaggt

SEQ ID NO: 30100 - DNA, 26 bp, Homo sapiens
gagattctaagtgactgatgtaggta

SEQ ID NO: 30101 - DNA, 26 bp, Homo sapiens
agattctaagtgactgatgtaggtag

SEQ ID NO: 30102 - DNA, 26 bp, Homo sapiens
gattctaagtgactgatgtaggtaga

SEQ ID NO: 30103 - DNA, 26 bp, Homo sapiens
attctaagtgactgatgtaggtagaa

SEQ ID NO: 30104 - DNA, 26 bp, Homo sapiens
ttctaagtgactgatgtaggtagaag

SEQ ID NO: 30105 - DNA, 26 bp, Homo sapiens
tctaagtgactgatgtaggtagaagg

SEQ ID NO: 30106 - DNA, 26 bp, Homo sapiens
ctaagtgactgatgtaggtagaaggg

SEQ ID NO: 30107 - DNA, 26 bp, Homo sapiens
taagtgactgatgtaggtagaagggg

SEQ ID NO: 30108 - DNA, 26 bp, Homo sapiens
aagtgactgatgtaggtagaaggggt

SEQ ID NO: 30109 - DNA, 26 bp, Homo sapiens
agtgactgatgtaggtagaaggggtt

SEQ ID NO: 30110 - DNA, 26 bp, Homo sapiens
gtgactgatgtaggtagaaggggttc

SEQ ID NO: 30111 - DNA, 26 bp, Homo sapiens
tgactgatgtaggtagaaggggttct

SEQ ID NO: 30112 - DNA, 26 bp, Homo sapiens
gactgatgtaggtagaaggggttctg

SEQ ID NO: 30113 - DNA, 26 bp, Homo sapiens
actgatgtaggtagaaggggttctga

SEQ ID NO: 30114 - DNA, 26 bp, Homo sapiens
ctgatgtaggtagaaggggttctgaa

SEQ ID NO: 30115 - DNA, 26 bp, Homo sapiens
tgatgtaggtagaaggggttctgaac

SEQ ID NO: 30116 - DNA, 26 bp, Homo sapiens
gatgtaggtagaaggggttctgaact

SEQ ID NO: 30117 - DNA, 26 bp, Homo sapiens
atgtaggtagaaggggttctgaactg

SEQ ID NO: 30118 - DNA, 26 bp, Homo sapiens
tgtaggtagaaggggttctgaactgg

SEQ ID NO: 30119 - DNA, 26 bp, Homo sapiens
gtaggtagaaggggttctgaactggg

SEQ ID NO: 30120 - DNA, 26 bp, Homo sapiens
taggtagaaggggttctgaactggga

SEQ ID NO: 30121 - DNA, 26 bp, Homo sapiens
aggtagaaggggttctgaactgggag

SEQ ID NO: 30122 - DNA, 26 bp, Homo sapiens
ggtagaaggggttctgaactgggagg

SEQ ID NO: 30123 - DNA, 26 bp, Homo sapiens
gtagaaggggttctgaactgggaggc

SEQ ID NO: 30124 - DNA, 26 bp, Homo sapiens
tagaaggggttctgaactgggaggca

SEQ ID NO: 30125 - DNA, 26 bp, Homo sapiens
agaaggggttctgaactgggaggcac

SEQ ID NO: 30126 - DNA, 26 bp, Homo sapiens
gaaggggttctgaactgggaggcaca

SEQ ID NO: 30127 - DNA, 26 bp, Homo sapiens
aaggggttctgaactgggaggcacag

SEQ ID NO: 30128 - DNA, 26 bp, Homo sapiens
aggggttctgaactgggaggcacagt

SEQ ID NO: 30129 - DNA, 26 bp, Homo sapiens
ggggttctgaactgggaggcacagtc

SEQ ID NO: 30130 - DNA, 26 bp, Homo sapiens
gggttctgaactgggaggcacagtca

SEQ ID NO: 30131 - DNA, 26 bp, Homo sapiens
ggttctgaactgggaggcacagtcac

SEQ ID NO: 30132 - DNA, 26 bp, Homo sapiens
gttctgaactgggaggcacagtcact

SEQ ID NO: 30133 - DNA, 26 bp, Homo sapiens
ttctgaactgggaggcacagtcactg

SEQ ID NO: 30134 - DNA, 26 bp, Homo sapiens
tctgaactgggaggcacagtcactgc

SEQ ID NO: 30135 - DNA, 26 bp, Homo sapiens
ctgaactgggaggcacagtcactgca

SEQ ID NO: 30136 - DNA, 26 bp, Homo sapiens
tgaactgggaggcacagtcactgcaa

SEQ ID NO: 30137 - DNA, 26 bp, Homo sapiens
gaactgggaggcacagtcactgcaat

SEQ ID NO: 30138 - DNA, 26 bp, Homo sapiens
aactgggaggcacagtcactgcaata

SEQ ID NO: 30139 - DNA, 26 bp, Homo sapiens
actgggaggcacagtcactgcaataa

SEQ ID NO: 30140 - DNA, 26 bp, Homo sapiens
ctgggaggcacagtcactgcaataaa

SEQ ID NO: 30141 - DNA, 26 bp, Homo sapiens
tgggaggcacagtcactgcaataaaa

SEQ ID NO: 30142 - DNA, 26 bp, Homo sapiens
gggaggcacagtcactgcaataaaag

SEQ ID NO: 30143 - DNA, 26 bp, Homo sapiens
ggaggcacagtcactgcaataaaaga

SEQ ID NO: 30144 - DNA, 26 bp, Homo sapiens
gaggcacagtcactgcaataaaagat

SEQ ID NO: 30145 - DNA, 26 bp, Homo sapiens
aggcacagtcactgcaataaaagatg

SEQ ID NO: 30146 - DNA, 26 bp, Homo sapiens
ggcacagtcactgcaataaaagatgg

SEQ ID NO: 30147 - DNA, 26 bp, Homo sapiens
gcacagtcactgcaataaaagatggg

SEQ ID NO: 30148 - DNA, 26 bp, Homo sapiens
cacagtcactgcaataaaagatgggg

SEQ ID NO: 30149 - DNA, 26 bp, Homo sapiens
acagtcactgcaataaaagatggggt

SEQ ID NO: 30150 - DNA, 26 bp, Homo sapiens
cagtcactgcaataaaagatggggtg

SEQ ID NO: 30151 - DNA, 26 bp, Homo sapiens
agtcactgcaataaaagatggggtgg

SEQ ID NO: 30152 - DNA, 26 bp, Homo sapiens
gtcactgcaataaaagatggggtggc

SEQ ID NO: 30153 - DNA, 26 bp, Homo sapiens
tcactgcaataaaagatggggtggcc

SEQ ID NO: 30154 - DNA, 26 bp, Homo sapiens
cactgcaataaaagatggggtggcct

SEQ ID NO: 30155 - DNA, 26 bp, Homo sapiens
actgcaataaaagatggggtggcctt

SEQ ID NO: 30156 - DNA, 26 bp, Homo sapiens
ctgcaataaaagatggggtggccttt

SEQ ID NO: 30157 - DNA, 26 bp, Homo sapiens
tgcaataaaagatggggtggcctttg

SEQ ID NO: 30158 - DNA, 26 bp, Homo sapiens
gcaataaaagatggggtggcctttgt

SEQ ID NO: 30159 - DNA, 26 bp, Homo sapiens
caataaaagatggggtggcctttgtc

SEQ ID NO: 30160 - DNA, 26 bp, Homo sapiens
aataaaagatggggtggcctttgtcc

SEQ ID NO: 30161 - DNA, 26 bp, Homo sapiens
ataaaagatggggtggcctttgtcca

SEQ ID NO: 30162 - DNA, 26 bp, Homo sapiens
taaaagatggggtggcctttgtccat

SEQ ID NO: 30163 - DNA, 26 bp, Homo sapiens
aaaagatggggtggcctttgtccatg

SEQ ID NO: 30164 - DNA, 26 bp, Homo sapiens
aaagatggggtggcctttgtccatgt

SEQ ID NO: 30165 - DNA, 26 bp, Homo sapiens
aagatggggtggcctttgtccatgtt

SEQ ID NO: 30166 - DNA, 26 bp, Homo sapiens
agatggggtggcctttgtccatgttt

SEQ ID NO: 30167 - DNA, 26 bp, Homo sapiens
gatggggtggcctttgtccatgtttt

SEQ ID NO: 30168 - DNA, 26 bp, Homo sapiens
atggggtggcctttgtccatgttttt

SEQ ID NO: 30169 - DNA, 26 bp, Homo sapiens
tggggtggcctttgtccatgtttttc

SEQ ID NO: 30170 - DNA, 26 bp, Homo sapiens
ggggtggcctttgtccatgtttttca

SEQ ID NO: 30171 - DNA, 26 bp, Homo sapiens
gggtggcctttgtccatgtttttcag

SEQ ID NO: 30172 - DNA, 26 bp, Homo sapiens
ggtggcctttgtccatgtttttcaga

SEQ ID NO: 30173 - DNA, 26 bp, Homo sapiens
gtggcctttgtccatgtttttcagaa

SEQ ID NO: 30174 - DNA, 26 bp, Homo sapiens
tggcctttgtccatgtttttcagaaa

SEQ ID NO: 30175 - DNA, 26 bp, Homo sapiens
ggcctttgtccatgtttttcagaaat

SEQ ID NO: 30176 - DNA, 26 bp, Homo sapiens
gcctttgtccatgtttttcagaaatt

SEQ ID NO: 30177 - DNA, 26 bp, Homo sapiens
cctttgtccatgtttttcagaaattt

SEQ ID NO: 30178 - DNA, 26 bp, Homo sapiens
ctttgtccatgtttttcagaaatttt

SEQ ID NO: 30179 - DNA, 26 bp, Homo sapiens
tttgtccatgtttttcagaaattttg

SEQ ID NO: 30180 - DNA, 26 bp, Homo sapiens
ttgtccatgtttttcagaaattttgt

SEQ ID NO: 30181 - DNA, 26 bp, Homo sapiens
tgtccatgtttttcagaaattttgtc

SEQ ID NO: 30182 - DNA, 26 bp, Homo sapiens
gtccatgtttttcagaaattttgtcc

SEQ ID NO: 30183 - DNA, 26 bp, Homo sapiens
tccatgtttttcagaaattttgtccc

SEQ ID NO: 30184 - DNA, 26 bp, Homo sapiens
ccatgtttttcagaaattttgtcccg

SEQ ID NO: 30185 - DNA, 26 bp, Homo sapiens
catgtttttcagaaattttgtcccgc

SEQ ID NO: 30186 - DNA, 26 bp, Homo sapiens
atgtttttcagaaattttgtcccgcc

SEQ ID NO: 30187 - DNA, 26 bp, Homo sapiens
tgtttttcagaaattttgtcccgccc

SEQ ID NO: 30188 - DNA, 26 bp, Homo sapiens
gtttttcagaaattttgtcccgcccg

SEQ ID NO: 30189 - DNA, 26 bp, Homo sapiens
tttttcagaaattttgtcccgcccgt

SEQ ID NO: 30190 - DNA, 26 bp, Homo sapiens
ttttcagaaattttgtcccgcccgtt

SEQ ID NO: 30191 - DNA, 26 bp, Homo sapiens
tttcagaaattttgtcccgcccgttt

SEQ ID NO: 30192 - DNA, 26 bp, Homo sapiens
ttcagaaattttgtcccgcccgtttt

SEQ ID NO: 30193 - DNA, 26 bp, Homo sapiens
tcagaaattttgtcccgcccgttttc

SEQ ID NO: 30194 - DNA, 26 bp, Homo sapiens
cagaaattttgtcccgcccgttttcc

SEQ ID NO: 30195 - DNA, 26 bp, Homo sapiens
agaaattttgtcccgcccgttttcct

SEQ ID NO: 30196 - DNA, 26 bp, Homo sapiens
gaaattttgtcccgcccgttttccta

SEQ ID NO: 30197 - DNA, 26 bp, Homo sapiens
aaattttgtcccgcccgttttcctaa

SEQ ID NO: 30198 - DNA, 26 bp, Homo sapiens
aattttgtcccgcccgttttcctaag

SEQ ID NO: 30199 - DNA, 26 bp, Homo sapiens
attttgtcccgcccgttttcctaagc

SEQ ID NO: 30200 - DNA, 26 bp, Homo sapiens
ttttgtcccgcccgttttcctaagct

SEQ ID NO: 30201 - DNA, 26 bp, Homo sapiens
tttgtcccgcccgttttcctaagctg

SEQ ID NO: 30202 - DNA, 26 bp, Homo sapiens
ttgtcccgcccgttttcctaagctgg

SEQ ID NO: 30203 - DNA, 26 bp, Homo sapiens
tgtcccgcccgttttcctaagctggt

SEQ ID NO: 30204 - DNA, 26 bp, Homo sapiens
gtcccgcccgttttcctaagctggta

SEQ ID NO: 30205 - DNA, 26 bp, Homo sapiens
tcccgcccgttttcctaagctggtac

SEQ ID NO: 30206 - DNA, 26 bp, Homo sapiens
cccgcccgttttcctaagctggtact

SEQ ID NO: 30207 - DNA, 26 bp, Homo sapiens
ccgcccgttttcctaagctggtactt

SEQ ID NO: 30208 - DNA, 26 bp, Homo sapiens
cgcccgttttcctaagctggtacttg

SEQ ID NO: 30209 - DNA, 26 bp, Homo sapiens
gcccgttttcctaagctggtacttga

SEQ ID NO: 30210 - DNA, 26 bp, Homo sapiens
cccgttttcctaagctggtacttgac

SEQ ID NO: 30211 - DNA, 26 bp, Homo sapiens
ccgttttcctaagctggtacttgacg

SEQ ID NO: 30212 - DNA, 26 bp, Homo sapiens
cgttttcctaagctggtacttgacgt

SEQ ID NO: 30213 - DNA, 26 bp, Homo sapiens
gttttcctaagctggtacttgacgtt

SEQ ID NO: 30214 - DNA, 26 bp, Homo sapiens
ttttcctaagctggtacttgacgttg

SEQ ID NO: 30215 - DNA, 26 bp, Homo sapiens
tttcctaagctggtacttgacgttgg

SEQ ID NO: 30216 - DNA, 26 bp, Homo sapiens
ttcctaagctggtacttgacgttggc

SEQ ID NO: 30217 - DNA, 26 bp, Homo sapiens
tcctaagctggtacttgacgttggcc

SEQ ID NO: 30218 - DNA, 26 bp, Homo sapiens
cctaagctggtacttgacgttggcca

SEQ ID NO: 30219 - DNA, 26 bp, Homo sapiens
ctaagctggtacttgacgttggccag

SEQ ID NO: 30220 - DNA, 26 bp, Homo sapiens
taagctggtacttgacgttggccagc

SEQ ID NO: 30221 - DNA, 26 bp, Homo sapiens
aagctggtacttgacgttggccagcc

SEQ ID NO: 30222 - DNA, 26 bp, Homo sapiens
agctggtacttgacgttggccagcca

SEQ ID NO: 30223 - DNA, 26 bp, Homo sapiens
gctggtacttgacgttggccagccag

SEQ ID NO: 30224 - DNA, 26 bp, Homo sapiens
ctggtacttgacgttggccagccagt

SEQ ID NO: 30225 - DNA, 26 bp, Homo sapiens
tggtacttgacgttggccagccagtg

SEQ ID NO: 30226 - DNA, 26 bp, Homo sapiens
ggtacttgacgttggccagccagtga

SEQ ID NO: 30227 - DNA, 26 bp, Homo sapiens
gtacttgacgttggccagccagtgac

SEQ ID NO: 30228 - DNA, 26 bp, Homo sapiens
tacttgacgttggccagccagtgact

SEQ ID NO: 30229 - DNA, 26 bp, Homo sapiens
acttgacgttggccagccagtgactg

SEQ ID NO: 30230 - DNA, 26 bp, Homo sapiens
cttgacgttggccagccagtgactga

SEQ ID NO: 30231 - DNA, 26 bp, Homo sapiens
ttgacgttggccagccagtgactgat

SEQ ID NO: 30232 - DNA, 26 bp, Homo sapiens
tgacgttggccagccagtgactgata

SEQ ID NO: 30233 - DNA, 26 bp, Homo sapiens
gacgttggccagccagtgactgatag

SEQ ID NO: 30234 - DNA, 26 bp, Homo sapiens
acgttggccagccagtgactgatagt

SEQ ID NO: 30235 - DNA, 26 bp, Homo sapiens
cgttggccagccagtgactgatagtg

SEQ ID NO: 30236 - DNA, 26 bp, Homo sapiens
gttggccagccagtgactgatagtgg

SEQ ID NO: 30237 - DNA, 26 bp, Homo sapiens
ttggccagccagtgactgatagtggt

SEQ ID NO: 30238 - DNA, 26 bp, Homo sapiens
tggccagccagtgactgatagtggtc

SEQ ID NO: 30239 - DNA, 26 bp, Homo sapiens
ggccagccagtgactgatagtggtca

SEQ ID NO: 30240 - DNA, 26 bp, Homo sapiens
gccagccagtgactgatagtggtcat

SEQ ID NO: 30241 - DNA, 26 bp, Homo sapiens
ccagccagtgactgatagtggtcatt

SEQ ID NO: 30242 - DNA, 26 bp, Homo sapiens
cagccagtgactgatagtggtcattg

SEQ ID NO: 30243 - DNA, 26 bp, Homo sapiens
agccagtgactgatagtggtcattga

SEQ ID NO: 30244 - DNA, 26 bp, Homo sapiens
gccagtgactgatagtggtcattgag

SEQ ID NO: 30245 - DNA, 26 bp, Homo sapiens
ccagtgactgatagtggtcattgaga

SEQ ID NO: 30246 - DNA, 26 bp, Homo sapiens
cagtgactgatagtggtcattgagag

SEQ ID NO: 30247 - DNA, 26 bp, Homo sapiens
agtgactgatagtggtcattgagagt

SEQ ID NO: 30248 - DNA, 26 bp, Homo sapiens
gtgactgatagtggtcattgagagtc

SEQ ID NO: 30249 - DNA, 26 bp, Homo sapiens
tgactgatagtggtcattgagagtcc

SEQ ID NO: 30250 - DNA, 26 bp, Homo sapiens
gactgatagtggtcattgagagtccc

SEQ ID NO: 30251 - DNA, 26 bp, Homo sapiens
actgatagtggtcattgagagtcccg

SEQ ID NO: 30252 - DNA, 26 bp, Homo sapiens
ctgatagtggtcattgagagtcccgt

SEQ ID NO: 30253 - DNA, 26 bp, Homo sapiens
tgatagtggtcattgagagtcccgta

SEQ ID NO: 30254 - DNA, 26 bp, Homo sapiens
gatagtggtcattgagagtcccgtaa

SEQ ID NO: 30255 - DNA, 26 bp, Homo sapiens
atagtggtcattgagagtcccgtaaa

SEQ ID NO: 30256 - DNA, 26 bp, Homo sapiens
tagtggtcattgagagtcccgtaaac

SEQ ID NO: 30257 - DNA, 26 bp, Homo sapiens
agtggtcattgagagtcccgtaaact

SEQ ID NO: 30258 - DNA, 26 bp, Homo sapiens
gtggtcattgagagtcccgtaaactt

SEQ ID NO: 30259 - DNA, 26 bp, Homo sapiens
tggtcattgagagtcccgtaaactta

SEQ ID NO: 30260 - DNA, 26 bp, Homo sapiens
ggtcattgagagtcccgtaaacttag

SEQ ID NO: 30261 - DNA, 26 bp, Homo sapiens
gtcattgagagtcccgtaaacttaga

SEQ ID NO: 30262 - DNA, 26 bp, Homo sapiens
tcattgagagtcccgtaaacttagag

SEQ ID NO: 30263 - DNA, 26 bp, Homo sapiens
cattgagagtcccgtaaacttagaga

SEQ ID NO: 30264 - DNA, 26 bp, Homo sapiens
attgagagtcccgtaaacttagagat

SEQ ID NO: 30265 - DNA, 26 bp, Homo sapiens
ttgagagtcccgtaaacttagagatt

SEQ ID NO: 30266 - DNA, 26 bp, Homo sapiens
tgagagtcccgtaaacttagagattt

SEQ ID NO: 30267 - DNA, 26 bp, Homo sapiens
gagagtcccgtaaacttagagatttg

SEQ ID NO: 30268 - DNA, 26 bp, Homo sapiens
agagtcccgtaaacttagagatttgc

SEQ ID NO: 30269 - DNA, 26 bp, Homo sapiens
gagtcccgtaaacttagagatttgca

SEQ ID NO: 30270 - DNA, 26 bp, Homo sapiens
agtcccgtaaacttagagatttgcat

SEQ ID NO: 30271 - DNA, 26 bp, Homo sapiens
gtcccgtaaacttagagatttgcata

SEQ ID NO: 30272 - DNA, 26 bp, Homo sapiens
tcccgtaaacttagagatttgcatac

SEQ ID NO: 30273 - DNA, 26 bp, Homo sapiens
cccgtaaacttagagatttgcatacg

SEQ ID NO: 30274 - DNA, 26 bp, Homo sapiens
ccgtaaacttagagatttgcatacgc

SEQ ID NO: 30275 - DNA, 26 bp, Homo sapiens
cgtaaacttagagatttgcatacgct

SEQ ID NO: 30276 - DNA, 26 bp, Homo sapiens
gtaaacttagagatttgcatacgctc

SEQ ID NO: 30277 - DNA, 26 bp, Homo sapiens
taaacttagagatttgcatacgctct

SEQ ID NO: 30278 - DNA, 26 bp, Homo sapiens
aaacttagagatttgcatacgctctt

SEQ ID NO: 30279 - DNA, 26 bp, Homo sapiens
aacttagagatttgcatacgctcttg

SEQ ID NO: 30280 - DNA, 26 bp, Homo sapiens
acttagagatttgcatacgctcttgt

SEQ ID NO: 30281 - DNA, 26 bp, Homo sapiens
cttagagatttgcatacgctcttgtg

SEQ ID NO: 30282 - DNA, 26 bp, Homo sapiens
ttagagatttgcatacgctcttgtgg

SEQ ID NO: 30283 - DNA, 26 bp, Homo sapiens
tagagatttgcatacgctcttgtggg

SEQ ID NO: 30284 - DNA, 26 bp, Homo sapiens
agagatttgcatacgctcttgtgggc

SEQ ID NO: 30285 - DNA, 26 bp, Homo sapiens
gagatttgcatacgctcttgtgggcc

SEQ ID NO: 30286 - DNA, 26 bp, Homo sapiens
agatttgcatacgctcttgtgggccc

SEQ ID NO: 30287 - DNA, 26 bp, Homo sapiens
gatttgcatacgctcttgtgggccca

SEQ ID NO: 30288 - DNA, 26 bp, Homo sapiens
atttgcatacgctcttgtgggcccag

SEQ ID NO: 30289 - DNA, 26 bp, Homo sapiens
tttgcatacgctcttgtgggcccaga

SEQ ID NO: 30290 - DNA, 26 bp, Homo sapiens
ttgcatacgctcttgtgggcccagat

SEQ ID NO: 30291 - DNA, 26 bp, Homo sapiens
tgcatacgctcttgtgggcccagatc

SEQ ID NO: 30292 - DNA, 26 bp, Homo sapiens
gcatacgctcttgtgggcccagatca

SEQ ID NO: 30293 - DNA, 26 bp, Homo sapiens
catacgctcttgtgggcccagatcag

SEQ ID NO: 30294 - DNA, 26 bp, Homo sapiens
atacgctcttgtgggcccagatcaga

SEQ ID NO: 30295 - DNA, 26 bp, Homo sapiens
tacgctcttgtgggcccagatcagac

SEQ ID NO: 30296 - DNA, 26 bp, Homo sapiens
acgctcttgtgggcccagatcagaca

SEQ ID NO: 30297 - DNA, 26 bp, Homo sapiens
cgctcttgtgggcccagatcagacag

SEQ ID NO: 30298 - DNA, 26 bp, Homo sapiens
gctcttgtgggcccagatcagacagc

SEQ ID NO: 30299 - DNA, 26 bp, Homo sapiens
ctcttgtgggcccagatcagacagca

SEQ ID NO: 30300 - DNA, 26 bp, Homo sapiens
tcttgtgggcccagatcagacagcag

SEQ ID NO: 30301 - DNA, 26 bp, Homo sapiens
cttgtgggcccagatcagacagcagg

SEQ ID NO: 30302 - DNA, 26 bp, Homo sapiens
ttgtgggcccagatcagacagcaggt

SEQ ID NO: 30303 - DNA, 26 bp, Homo sapiens
tgtgggcccagatcagacagcaggta

SEQ ID NO: 30304 - DNA, 26 bp, Homo sapiens
gtgggcccagatcagacagcaggtat

SEQ ID NO: 30305 - DNA, 26 bp, Homo sapiens
tgggcccagatcagacagcaggtatt

SEQ ID NO: 30306 - DNA, 26 bp, Homo sapiens
gggcccagatcagacagcaggtattt

SEQ ID NO: 30307 - DNA, 26 bp, Homo sapiens
ggcccagatcagacagcaggtatttg

SEQ ID NO: 30308 - DNA, 26 bp, Homo sapiens
gcccagatcagacagcaggtatttgc

SEQ ID NO: 30309 - DNA, 26 bp, Homo sapiens
cccagatcagacagcaggtatttgcc

SEQ ID NO: 30310 - DNA, 26 bp, Homo sapiens
ccagatcagacagcaggtatttgccc

SEQ ID NO: 30311 - DNA, 26 bp, Homo sapiens
cagatcagacagcaggtatttgccct

SEQ ID NO: 30312 - DNA, 26 bp, Homo sapiens
agatcagacagcaggtatttgccctc

SEQ ID NO: 30313 - DNA, 26 bp, Homo sapiens
gatcagacagcaggtatttgccctct

SEQ ID NO: 30314 - DNA, 26 bp, Homo sapiens
atcagacagcaggtatttgccctctg

SEQ ID NO: 30315 - DNA, 26 bp, Homo sapiens
tcagacagcaggtatttgccctctga

SEQ ID NO: 30316 - DNA, 26 bp, Homo sapiens
cagacagcaggtatttgccctctgat

SEQ ID NO: 30317 - DNA, 26 bp, Homo sapiens
agacagcaggtatttgccctctgatg

SEQ ID NO: 30318 - DNA, 26 bp, Homo sapiens
gacagcaggtatttgccctctgatgt

SEQ ID NO: 30319 - DNA, 26 bp, Homo sapiens
acagcaggtatttgccctctgatgtc

SEQ ID NO: 30320 - DNA, 26 bp, Homo sapiens
cagcaggtatttgccctctgatgtct

SEQ ID NO: 30321 - DNA, 26 bp, Homo sapiens
agcaggtatttgccctctgatgtctg

SEQ ID NO: 30322 - DNA, 26 bp, Homo sapiens
gcaggtatttgccctctgatgtctgg

SEQ ID NO: 30323 - DNA, 26 bp, Homo sapiens
caggtatttgccctctgatgtctgga

SEQ ID NO: 30324 - DNA, 26 bp, Homo sapiens
aggtatttgccctctgatgtctggaa

SEQ ID NO: 30325 - DNA, 26 bp, Homo sapiens
ggtatttgccctctgatgtctggaag

SEQ ID NO: 30326 - DNA, 26 bp, Homo sapiens
gtatttgccctctgatgtctggaaga

SEQ ID NO: 30327 - DNA, 26 bp, Homo sapiens
tatttgccctctgatgtctggaagag

SEQ ID NO: 30328 - DNA, 26 bp, Homo sapiens
atttgccctctgatgtctggaagagg

SEQ ID NO: 30329 - DNA, 26 bp, Homo sapiens
tttgccctctgatgtctggaagaggc

SEQ ID NO: 30330 - DNA, 26 bp, Homo sapiens
ttgccctctgatgtctggaagaggct

SEQ ID NO: 30331 - DNA, 26 bp, Homo sapiens
tgccctctgatgtctggaagaggctc

SEQ ID NO: 30332 - DNA, 26 bp, Homo sapiens
gccctctgatgtctggaagaggctcg

SEQ ID NO: 30333 - DNA, 26 bp, Homo sapiens
ccctctgatgtctggaagaggctcga

SEQ ID NO: 30334 - DNA, 26 bp, Homo sapiens
cctctgatgtctggaagaggctcgag

SEQ ID NO: 30335 - DNA, 26 bp, Homo sapiens
ctctgatgtctggaagaggctcgagg

SEQ ID NO: 30336 - DNA, 26 bp, Homo sapiens
tctgatgtctggaagaggctcgaggc

SEQ ID NO: 30337 - DNA, 26 bp, Homo sapiens
ctgatgtctggaagaggctcgaggca

SEQ ID NO: 30338 - DNA, 26 bp, Homo sapiens
tgatgtctggaagaggctcgaggcaa

SEQ ID NO: 30339 - DNA, 26 bp, Homo sapiens
gatgtctggaagaggctcgaggcaaa

SEQ ID NO: 30340 - DNA, 26 bp, Homo sapiens
atgtctggaagaggctcgaggcaaac

SEQ ID NO: 30341 - DNA, 26 bp, Homo sapiens
tgtctggaagaggctcgaggcaaact

SEQ ID NO: 30342 - DNA, 26 bp, Homo sapiens
gtctggaagaggctcgaggcaaactg

SEQ ID NO: 30343 - DNA, 26 bp, Homo sapiens
tctggaagaggctcgaggcaaactgg

SEQ ID NO: 30344 - DNA, 26 bp, Homo sapiens
ctggaagaggctcgaggcaaactggg

SEQ ID NO: 30345 - DNA, 26 bp, Homo sapiens
tggaagaggctcgaggcaaactgggc

SEQ ID NO: 30346 - DNA, 26 bp, Homo sapiens
ggaagaggctcgaggcaaactgggct

SEQ ID NO: 30347 - DNA, 26 bp, Homo sapiens
gaagaggctcgaggcaaactgggctt

SEQ ID NO: 30348 - DNA, 26 bp, Homo sapiens
aagaggctcgaggcaaactgggcttg

SEQ ID NO: 30349 - DNA, 26 bp, Homo sapiens
agaggctcgaggcaaactgggcttgt

SEQ ID NO: 30350 - DNA, 26 bp, Homo sapiens
gaggctcgaggcaaactgggcttgta

SEQ ID NO: 30351 - DNA, 26 bp, Homo sapiens
aggctcgaggcaaactgggcttgtag

SEQ ID NO: 30352 - DNA, 26 bp, Homo sapiens
ggctcgaggcaaactgggcttgtaga

SEQ ID NO: 30353 - DNA, 26 bp, Homo sapiens
gctcgaggcaaactgggcttgtagaa

SEQ ID NO: 30354 - DNA, 26 bp, Homo sapiens
ctcgaggcaaactgggcttgtagaat

SEQ ID NO: 30355 - DNA, 26 bp, Homo sapiens
tcgaggcaaactgggcttgtagaatc

SEQ ID NO: 30356 - DNA, 26 bp, Homo sapiens
cgaggcaaactgggcttgtagaatca

SEQ ID NO: 30357 - DNA, 26 bp, Homo sapiens
gaggcaaactgggcttgtagaatcag

SEQ ID NO: 30358 - DNA, 26 bp, Homo sapiens
aggcaaactgggcttgtagaatcaga

SEQ ID NO: 30359 - DNA, 26 bp, Homo sapiens
ggcaaactgggcttgtagaatcagaa

SEQ ID NO: 30360 - DNA, 26 bp, Homo sapiens
gcaaactgggcttgtagaatcagaag

SEQ ID NO: 30361 - DNA, 26 bp, Homo sapiens
caaactgggcttgtagaatcagaaga

SEQ ID NO: 30362 - DNA, 26 bp, Homo sapiens
aaactgggcttgtagaatcagaagat

SEQ ID NO: 30363 - DNA, 26 bp, Homo sapiens
aactgggcttgtagaatcagaagatg

SEQ ID NO: 30364 - DNA, 26 bp, Homo sapiens
actgggcttgtagaatcagaagatgc

SEQ ID NO: 30365 - DNA, 26 bp, Homo sapiens
ctgggcttgtagaatcagaagatgct

SEQ ID NO: 30366 - DNA, 26 bp, Homo sapiens
tgggcttgtagaatcagaagatgctg

SEQ ID NO: 30367 - DNA, 26 bp, Homo sapiens
gggcttgtagaatcagaagatgctga

SEQ ID NO: 30368 - DNA, 26 bp, Homo sapiens
ggcttgtagaatcagaagatgctgag

SEQ ID NO: 30369 - DNA, 26 bp, Homo sapiens
gcttgtagaatcagaagatgctgagg

SEQ ID NO: 30370 - DNA, 26 bp, Homo sapiens
cttgtagaatcagaagatgctgagga

SEQ ID NO: 30371 - DNA, 26 bp, Homo sapiens
ttgtagaatcagaagatgctgaggat

SEQ ID NO: 30372 - DNA, 26 bp, Homo sapiens
tgtagaatcagaagatgctgaggatt

SEQ ID NO: 30373 - DNA, 26 bp, Homo sapiens
gtagaatcagaagatgctgaggattc

SEQ ID NO: 30374 - DNA, 26 bp, Homo sapiens
tagaatcagaagatgctgaggattcc

SEQ ID NO: 30375 - DNA, 26 bp, Homo sapiens
agaatcagaagatgctgaggattcca

SEQ ID NO: 30376 - DNA, 26 bp, Homo sapiens
gaatcagaagatgctgaggattccag

SEQ ID NO: 30377 - DNA, 26 bp, Homo sapiens
aatcagaagatgctgaggattccagt

SEQ ID NO: 30378 - DNA, 26 bp, Homo sapiens
atcagaagatgctgaggattccagtt

SEQ ID NO: 30379 - DNA, 26 bp, Homo sapiens
tcagaagatgctgaggattccagttg

SEQ ID NO: 30380 - DNA, 26 bp, Homo sapiens
cagaagatgctgaggattccagttgg

SEQ ID NO: 30381 - DNA, 26 bp, Homo sapiens
agaagatgctgaggattccagttgga

SEQ ID NO: 30382 - DNA, 26 bp, Homo sapiens
gaagatgctgaggattccagttggac

SEQ ID NO: 30383 - DNA, 26 bp, Homo sapiens
aagatgctgaggattccagttggact

SEQ ID NO: 30384 - DNA, 26 bp, Homo sapiens
agatgctgaggattccagttggactg

SEQ ID NO: 30385 - DNA, 26 bp, Homo sapiens
gatgctgaggattccagttggactgc

SEQ ID NO: 30386 - DNA, 26 bp, Homo sapiens
atgctgaggattccagttggactgcc

SEQ ID NO: 30387 - DNA, 26 bp, Homo sapiens
tgctgaggattccagttggactgccg

SEQ ID NO: 30388 - DNA, 26 bp, Homo sapiens
gctgaggattccagttggactgccgg

SEQ ID NO: 30389 - DNA, 26 bp, Homo sapiens
ctgaggattccagttggactgccggc

SEQ ID NO: 30390 - DNA, 26 bp, Homo sapiens
tgaggattccagttggactgccggcc

SEQ ID NO: 30391 - DNA, 26 bp, Homo sapiens
gaggattccagttggactgccggcct

SEQ ID NO: 30392 - DNA, 26 bp, Homo sapiens
aggattccagttggactgccggcctt

SEQ ID NO: 30393 - DNA, 26 bp, Homo sapiens
ggattccagttggactgccggccttt

SEQ ID NO: 30394 - DNA, 26 bp, Homo sapiens
gattccagttggactgccggcctttt

SEQ ID NO: 30395 - DNA, 26 bp, Homo sapiens
attccagttggactgccggccttttc

SEQ ID NO: 30396 - DNA, 26 bp, Homo sapiens
ttccagttggactgccggccttttct

SEQ ID NO: 30397 - DNA, 26 bp, Homo sapiens
tccagttggactgccggccttttctt

SEQ ID NO: 30398 - DNA, 26 bp, Homo sapiens
ccagttggactgccggccttttcttt

SEQ ID NO: 30399 - DNA, 26 bp, Homo sapiens
cagttggactgccggccttttctttt

SEQ ID NO: 30400 - DNA, 26 bp, Homo sapiens
agttggactgccggccttttctttta

SEQ ID NO: 30401 - DNA, 26 bp, Homo sapiens
gttggactgccggccttttcttttat

SEQ ID NO: 30402 - DNA, 26 bp, Homo sapiens
ttggactgccggccttttcttttatg

SEQ ID NO: 30403 - DNA, 26 bp, Homo sapiens
tggactgccggccttttcttttatgc

SEQ ID NO: 30404 - DNA, 26 bp, Homo sapiens
ggactgccggccttttcttttatgca

SEQ ID NO: 30405 - DNA, 26 bp, Homo sapiens
gactgccggccttttcttttatgcaa

SEQ ID NO: 30406 - DNA, 26 bp, Homo sapiens
actgccggccttttcttttatgcaaa

SEQ ID NO: 30407 - DNA, 26 bp, Homo sapiens
ctgccggccttttcttttatgcaaag

SEQ ID NO: 30408 - DNA, 26 bp, Homo sapiens
tgccggccttttcttttatgcaaagt

SEQ ID NO: 30409 - DNA, 26 bp, Homo sapiens
gccggccttttcttttatgcaaagtt

SEQ ID NO: 30410 - DNA, 26 bp, Homo sapiens
ccggccttttcttttatgcaaagttg

SEQ ID NO: 30411 - DNA, 26 bp, Homo sapiens
cggccttttcttttatgcaaagttga

SEQ ID NO: 30412 - DNA, 26 bp, Homo sapiens
ggccttttcttttatgcaaagttgag

SEQ ID NO: 30413 - DNA, 26 bp, Homo sapiens
gccttttcttttatgcaaagttgaga

SEQ ID NO: 30414 - DNA, 26 bp, Homo sapiens
ccttttcttttatgcaaagttgagac

SEQ ID NO: 30415 - DNA, 26 bp, Homo sapiens
cttttcttttatgcaaagttgagact

SEQ ID NO: 30416 - DNA, 26 bp, Homo sapiens
ttttcttttatgcaaagttgagactt

SEQ ID NO: 30417 - DNA, 26 bp, Homo sapiens
tttcttttatgcaaagttgagacttc

SEQ ID NO: 30418 - DNA, 26 bp, Homo sapiens
ttcttttatgcaaagttgagacttca

SEQ ID NO: 30419 - DNA, 26 bp, Homo sapiens
tcttttatgcaaagttgagacttcac

SEQ ID NO: 30420 - DNA, 26 bp, Homo sapiens
cttttatgcaaagttgagacttcact

SEQ ID NO: 30421 - DNA, 26 bp, Homo sapiens
ttttatgcaaagttgagacttcactg

SEQ ID NO: 30422 - DNA, 26 bp, Homo sapiens
tttatgcaaagttgagacttcactgg

SEQ ID NO: 30423 - DNA, 26 bp, Homo sapiens
ttatgcaaagttgagacttcactgga

SEQ ID NO: 30424 - DNA, 26 bp, Homo sapiens
tatgcaaagttgagacttcactggag

SEQ ID NO: 30425 - DNA, 26 bp, Homo sapiens
atgcaaagttgagacttcactggaga

SEQ ID NO: 30426 - DNA, 26 bp, Homo sapiens
tgcaaagttgagacttcactggagac

SEQ ID NO: 30427 - DNA, 26 bp, Homo sapiens
gcaaagttgagacttcactggagaca

SEQ ID NO: 30428 - DNA, 26 bp, Homo sapiens
caaagttgagacttcactggagacat

SEQ ID NO: 30429 - DNA, 26 bp, Homo sapiens
aaagttgagacttcactggagacatc

SEQ ID NO: 30430 - DNA, 26 bp, Homo sapiens
aagttgagacttcactggagacatcc

SEQ ID NO: 30431 - DNA, 26 bp, Homo sapiens
agttgagacttcactggagacatcct

SEQ ID NO: 30432 - DNA, 26 bp, Homo sapiens
gttgagacttcactggagacatcctc

SEQ ID NO: 30433 - DNA, 26 bp, Homo sapiens
ttgagacttcactggagacatcctca

SEQ ID NO: 30434 - DNA, 26 bp, Homo sapiens
tgagacttcactggagacatcctcaa

SEQ ID NO: 30435 - DNA, 26 bp, Homo sapiens
gagacttcactggagacatcctcaaa

SEQ ID NO: 30436 - DNA, 26 bp, Homo sapiens
agacttcactggagacatcctcaaag

SEQ ID NO: 30437 - DNA, 26 bp, Homo sapiens
gacttcactggagacatcctcaaagc

SEQ ID NO: 30438 - DNA, 26 bp, Homo sapiens
acttcactggagacatcctcaaagcg

SEQ ID NO: 30439 - DNA, 26 bp, Homo sapiens
cttcactggagacatcctcaaagcgc

SEQ ID NO: 30440 - DNA, 26 bp, Homo sapiens
ttcactggagacatcctcaaagcgcc

SEQ ID NO: 30441 - DNA, 26 bp, Homo sapiens
tcactggagacatcctcaaagcgcct

SEQ ID NO: 30442 - DNA, 26 bp, Homo sapiens
cactggagacatcctcaaagcgcctg

SEQ ID NO: 30443 - DNA, 26 bp, Homo sapiens
actggagacatcctcaaagcgcctga

SEQ ID NO: 30444 - DNA, 26 bp, Homo sapiens
ctggagacatcctcaaagcgcctgac

SEQ ID NO: 30445 - DNA, 26 bp, Homo sapiens
tggagacatcctcaaagcgcctgaca

SEQ ID NO: 30446 - DNA, 26 bp, Homo sapiens
ggagacatcctcaaagcgcctgacat

SEQ ID NO: 30447 - DNA, 26 bp, Homo sapiens
gagacatcctcaaagcgcctgacatc

SEQ ID NO: 30448 - DNA, 26 bp, Homo sapiens
agacatcctcaaagcgcctgacatcc

SEQ ID NO: 30449 - DNA, 26 bp, Homo sapiens
gacatcctcaaagcgcctgacatcca

SEQ ID NO: 30450 - DNA, 26 bp, Homo sapiens
acatcctcaaagcgcctgacatccat

SEQ ID NO: 30451 - DNA, 26 bp, Homo sapiens
catcctcaaagcgcctgacatccatt

SEQ ID NO: 30452 - DNA, 26 bp, Homo sapiens
atcctcaaagcgcctgacatccattt

SEQ ID NO: 30453 - DNA, 26 bp, Homo sapiens
tcctcaaagcgcctgacatccatttc

SEQ ID NO: 30454 - DNA, 26 bp, Homo sapiens
cctcaaagcgcctgacatccatttcc

SEQ ID NO: 30455 - DNA, 26 bp, Homo sapiens
ctcaaagcgcctgacatccatttcca

SEQ ID NO: 30456 - DNA, 26 bp, Homo sapiens
tcaaagcgcctgacatccatttccag

SEQ ID NO: 30457 - DNA, 26 bp, Homo sapiens
caaagcgcctgacatccatttccagc

SEQ ID NO: 30458 - DNA, 26 bp, Homo sapiens
aaagcgcctgacatccatttccagct

SEQ ID NO: 30459 - DNA, 26 bp, Homo sapiens
aagcgcctgacatccatttccagctt

SEQ ID NO: 30460 - DNA, 26 bp, Homo sapiens
agcgcctgacatccatttccagcttc

SEQ ID NO: 30461 - DNA, 26 bp, Homo sapiens
gcgcctgacatccatttccagcttca

SEQ ID NO: 30462 - DNA, 26 bp, Homo sapiens
cgcctgacatccatttccagcttcat

SEQ ID NO: 30463 - DNA, 26 bp, Homo sapiens
gcctgacatccatttccagcttcatg

SEQ ID NO: 30464 - DNA, 26 bp, Homo sapiens
cctgacatccatttccagcttcatgg

SEQ ID NO: 30465 - DNA, 26 bp, Homo sapiens
ctgacatccatttccagcttcatggg

SEQ ID NO: 30466 - DNA, 26 bp, Homo sapiens
tgacatccatttccagcttcatgggg

SEQ ID NO: 30467 - DNA, 26 bp, Homo sapiens
gacatccatttccagcttcatggggg

SEQ ID NO: 30468 - DNA, 26 bp, Homo sapiens
acatccatttccagcttcatgggggg

SEQ ID NO: 30469 - DNA, 26 bp, Homo sapiens
catccatttccagcttcatggggggg

SEQ ID NO: 30470 - DNA, 26 bp, Homo sapiens
atccatttccagcttcatggggggga

SEQ ID NO: 30471 - DNA, 26 bp, Homo sapiens
tccatttccagcttcatgggggggac

SEQ ID NO: 30472 - DNA, 26 bp, Homo sapiens
ccatttccagcttcatgggggggacc

SEQ ID NO: 30473 - DNA, 26 bp, Homo sapiens
catttccagcttcatgggggggaccc

SEQ ID NO: 30474 - DNA, 26 bp, Homo sapiens
atttccagcttcatgggggggaccct

SEQ ID NO: 30475 - DNA, 26 bp, Homo sapiens
tttccagcttcatgggggggaccctg

SEQ ID NO: 30476 - DNA, 26 bp, Homo sapiens
ttccagcttcatgggggggaccctgg

SEQ ID NO: 30477 - DNA, 26 bp, Homo sapiens
tccagcttcatgggggggaccctgga

SEQ ID NO: 30478 - DNA, 26 bp, Homo sapiens
ccagcttcatgggggggaccctggag

SEQ ID NO: 30479 - DNA, 26 bp, Homo sapiens
cagcttcatgggggggaccctggagg

SEQ ID NO: 30480 - DNA, 26 bp, Homo sapiens
agcttcatgggggggaccctggagga

SEQ ID NO: 30481 - DNA, 26 bp, Homo sapiens
gcttcatgggggggaccctggaggag

SEQ ID NO: 30482 - DNA, 26 bp, Homo sapiens
cttcatgggggggaccctggaggagg

SEQ ID NO: 30483 - DNA, 26 bp, Homo sapiens
ttcatgggggggaccctggaggagga

SEQ ID NO: 30484 - DNA, 26 bp, Homo sapiens
tcatgggggggaccctggaggaggag

SEQ ID NO: 30485 - DNA, 26 bp, Homo sapiens
catgggggggaccctggaggaggagg

SEQ ID NO: 30486 - DNA, 26 bp, Homo sapiens
atgggggggaccctggaggaggaggc

SEQ ID NO: 30487 - DNA, 26 bp, Homo sapiens
tgggggggaccctggaggaggaggct

SEQ ID NO: 30488 - DNA, 26 bp, Homo sapiens
gggggggaccctggaggaggaggctg

SEQ ID NO: 30489 - DNA, 26 bp, Homo sapiens
ggggggaccctggaggaggaggctgg

SEQ ID NO: 30490 - DNA, 26 bp, Homo sapiens
gggggaccctggaggaggaggctggc

SEQ ID NO: 30491 - DNA, 26 bp, Homo sapiens
ggggaccctggaggaggaggctggct

SEQ ID NO: 30492 - DNA, 26 bp, Homo sapiens
gggaccctggaggaggaggctggctt

SEQ ID NO: 30493 - DNA, 26 bp, Homo sapiens
ggaccctggaggaggaggctggcttt

SEQ ID NO: 30494 - DNA, 26 bp, Homo sapiens
gaccctggaggaggaggctggctttg

SEQ ID NO: 30495 - DNA, 26 bp, Homo sapiens
accctggaggaggaggctggctttgg

SEQ ID NO: 30496 - DNA, 26 bp, Homo sapiens
ccctggaggaggaggctggctttggg

SEQ ID NO: 30497 - DNA, 26 bp, Homo sapiens
cctggaggaggaggctggctttgggg

SEQ ID NO: 30498 - DNA, 26 bp, Homo sapiens
ctggaggaggaggctggctttggggt

SEQ ID NO: 30499 - DNA, 26 bp, Homo sapiens
tggaggaggaggctggctttggggtg

SEQ ID NO: 30500 - DNA, 26 bp, Homo sapiens
ggaggaggaggctggctttggggtgg

SEQ ID NO: 30501 - DNA, 26 bp, Homo sapiens
gaggaggaggctggctttggggtggt

SEQ ID NO: 30502 - DNA, 26 bp, Homo sapiens
aggaggaggctggctttggggtggtg

SEQ ID NO: 30503 - DNA, 26 bp, Homo sapiens
ggaggaggctggctttggggtggtgg

SEQ ID NO: 30504 - DNA, 26 bp, Homo sapiens
gaggaggctggctttggggtggtggc

SEQ ID NO: 30505 - DNA, 26 bp, Homo sapiens
aggaggctggctttggggtggtggct

SEQ ID NO: 30506 - DNA, 26 bp, Homo sapiens
ggaggctggctttggggtggtggctt

SEQ ID NO: 30507 - DNA, 26 bp, Homo sapiens
gaggctggctttggggtggtggcttt

SEQ ID NO: 30508 - DNA, 26 bp, Homo sapiens
aggctggctttggggtggtggctttg

SEQ ID NO: 30509 - DNA, 26 bp, Homo sapiens
ggctggctttggggtggtggctttgg

SEQ ID NO: 30510 - DNA, 26 bp, Homo sapiens
gctggctttggggtggtggctttggg

SEQ ID NO: 30511 - DNA, 26 bp, Homo sapiens
ctggctttggggtggtggctttgggg

SEQ ID NO: 30512 - DNA, 26 bp, Homo sapiens
tggctttggggtggtggctttgggga

SEQ ID NO: 30513 - DNA, 26 bp, Homo sapiens
ggctttggggtggtggctttggggag

SEQ ID NO: 30514 - DNA, 26 bp, Homo sapiens
gctttggggtggtggctttggggagg

SEQ ID NO: 30515 - DNA, 26 bp, Homo sapiens
ctttggggtggtggctttggggagga

SEQ ID NO: 30516 - DNA, 26 bp, Homo sapiens
tttggggtggtggctttggggaggac

SEQ ID NO: 30517 - DNA, 26 bp, Homo sapiens
ttggggtggtggctttggggaggact

SEQ ID NO: 30518 - DNA, 26 bp, Homo sapiens
tggggtggtggctttggggaggactt

SEQ ID NO: 30519 - DNA, 26 bp, Homo sapiens
ggggtggtggctttggggaggacttt

SEQ ID NO: 30520 - DNA, 26 bp, Homo sapiens
gggtggtggctttggggaggactttg

SEQ ID NO: 30521 - DNA, 26 bp, Homo sapiens
ggtggtggctttggggaggactttga

SEQ ID NO: 30522 - DNA, 26 bp, Homo sapiens
gtggtggctttggggaggactttgac

SEQ ID NO: 30523 - DNA, 26 bp, Homo sapiens
tggtggctttggggaggactttgacc

SEQ ID NO: 30524 - DNA, 26 bp, Homo sapiens
ggtggctttggggaggactttgacca

SEQ ID NO: 30525 - DNA, 26 bp, Homo sapiens
gtggctttggggaggactttgaccat

SEQ ID NO: 30526 - DNA, 26 bp, Homo sapiens
tggctttggggaggactttgaccatg

SEQ ID NO: 30527 - DNA, 26 bp, Homo sapiens
ggctttggggaggactttgaccatgt

SEQ ID NO: 30528 - DNA, 26 bp, Homo sapiens
gctttggggaggactttgaccatgtc

SEQ ID NO: 30529 - DNA, 26 bp, Homo sapiens
ctttggggaggactttgaccatgtcg

SEQ ID NO: 30530 - DNA, 26 bp, Homo sapiens
tttggggaggactttgaccatgtcgg

SEQ ID NO: 30531 - DNA, 26 bp, Homo sapiens
ttggggaggactttgaccatgtcggc

SEQ ID NO: 30532 - DNA, 26 bp, Homo sapiens
tggggaggactttgaccatgtcggcg

SEQ ID NO: 30533 - DNA, 26 bp, Homo sapiens
ggggaggactttgaccatgtcggcga

SEQ ID NO: 30534 - DNA, 26 bp, Homo sapiens
gggaggactttgaccatgtcggcgat

SEQ ID NO: 30535 - DNA, 26 bp, Homo sapiens
ggaggactttgaccatgtcggcgatg

SEQ ID NO: 30536 - DNA, 26 bp, Homo sapiens
gaggactttgaccatgtcggcgatgt

SEQ ID NO: 30537 - DNA, 26 bp, Homo sapiens
aggactttgaccatgtcggcgatgtc

SEQ ID NO: 30538 - DNA, 26 bp, Homo sapiens
ggactttgaccatgtcggcgatgtca

SEQ ID NO: 30539 - DNA, 26 bp, Homo sapiens
gactttgaccatgtcggcgatgtcag

SEQ ID NO: 30540 - DNA, 26 bp, Homo sapiens
actttgaccatgtcggcgatgtcaga

SEQ ID NO: 30541 - DNA, 26 bp, Homo sapiens
ctttgaccatgtcggcgatgtcagac

SEQ ID NO: 30542 - DNA, 26 bp, Homo sapiens
tttgaccatgtcggcgatgtcagaca

SEQ ID NO: 30543 - DNA, 26 bp, Homo sapiens
ttgaccatgtcggcgatgtcagacag

SEQ ID NO: 30544 - DNA, 26 bp, Homo sapiens
tgaccatgtcggcgatgtcagacaga

SEQ ID NO: 30545 - DNA, 26 bp, Homo sapiens
gaccatgtcggcgatgtcagacagag

SEQ ID NO: 30546 - DNA, 26 bp, Homo sapiens
accatgtcggcgatgtcagacagagc

SEQ ID NO: 30547 - DNA, 26 bp, Homo sapiens
ccatgtcggcgatgtcagacagagcg

SEQ ID NO: 30548 - DNA, 26 bp, Homo sapiens
catgtcggcgatgtcagacagagcgt

SEQ ID NO: 30549 - DNA, 26 bp, Homo sapiens
atgtcggcgatgtcagacagagcgtg

SEQ ID NO: 30550 - DNA, 26 bp, Homo sapiens
tgtcggcgatgtcagacagagcgtgc

SEQ ID NO: 30551 - DNA, 26 bp, Homo sapiens
gtcggcgatgtcagacagagcgtgct

SEQ ID NO: 30552 - DNA, 26 bp, Homo sapiens
tcggcgatgtcagacagagcgtgctt

SEQ ID NO: 30553 - DNA, 26 bp, Homo sapiens
cggcgatgtcagacagagcgtgcttc

SEQ ID NO: 30554 - DNA, 26 bp, Homo sapiens
ggcgatgtcagacagagcgtgcttct

SEQ ID NO: 30555 - DNA, 26 bp, Homo sapiens
gcgatgtcagacagagcgtgcttctg

SEQ ID NO: 30556 - DNA, 26 bp, Homo sapiens
cgatgtcagacagagcgtgcttctga

SEQ ID NO: 30557 - DNA, 26 bp, Homo sapiens
gatgtcagacagagcgtgcttctgag

SEQ ID NO: 30558 - DNA, 26 bp, Homo sapiens
atgtcagacagagcgtgcttctgagg

SEQ ID NO: 30559 - DNA, 26 bp, Homo sapiens
tgtcagacagagcgtgcttctgaggt

SEQ ID NO: 30560 - DNA, 26 bp, Homo sapiens
gtcagacagagcgtgcttctgaggtg

SEQ ID NO: 30561 - DNA, 26 bp, Homo sapiens
tcagacagagcgtgcttctgaggtgg

SEQ ID NO: 30562 - DNA, 26 bp, Homo sapiens
cagacagagcgtgcttctgaggtggg

SEQ ID NO: 30563 - DNA, 26 bp, Homo sapiens
agacagagcgtgcttctgaggtgggg

SEQ ID NO: 30564 - DNA, 26 bp, Homo sapiens
gacagagcgtgcttctgaggtgggga

SEQ ID NO: 30565 - DNA, 26 bp, Homo sapiens
acagagcgtgcttctgaggtggggac

SEQ ID NO: 30566 - DNA, 26 bp, Homo sapiens
cagagcgtgcttctgaggtggggaca

SEQ ID NO: 30567 - DNA, 26 bp, Homo sapiens
agagcgtgcttctgaggtggggacat

SEQ ID NO: 30568 - DNA, 26 bp, Homo sapiens
gagcgtgcttctgaggtggggacata

SEQ ID NO: 30569 - DNA, 26 bp, Homo sapiens
agcgtgcttctgaggtggggacatac

SEQ ID NO: 30570 - DNA, 26 bp, Homo sapiens
gcgtgcttctgaggtggggacataca

SEQ ID NO: 30571 - DNA, 26 bp, Homo sapiens
cgtgcttctgaggtggggacatacaa

SEQ ID NO: 30572 - DNA, 26 bp, Homo sapiens
gtgcttctgaggtggggacatacaag

SEQ ID NO: 30573 - DNA, 26 bp, Homo sapiens
tgcttctgaggtggggacatacaaga

SEQ ID NO: 30574 - DNA, 26 bp, Homo sapiens
gcttctgaggtggggacatacaagat

SEQ ID NO: 30575 - DNA, 26 bp, Homo sapiens
cttctgaggtggggacatacaagatt

SEQ ID NO: 30576 - DNA, 26 bp, Homo sapiens
ttctgaggtggggacatacaagattg

SEQ ID NO: 30577 - DNA, 26 bp, Homo sapiens
tctgaggtggggacatacaagattgt

SEQ ID NO: 30578 - DNA, 26 bp, Homo sapiens
ctgaggtggggacatacaagattgtg

SEQ ID NO: 30579 - DNA, 26 bp, Homo sapiens
tgaggtggggacatacaagattgtgc

SEQ ID NO: 30580 - DNA, 26 bp, Homo sapiens
gaggtggggacatacaagattgtgct

SEQ ID NO: 30581 - DNA, 26 bp, Homo sapiens
aggtggggacatacaagattgtgctt

SEQ ID NO: 30582 - DNA, 26 bp, Homo sapiens
ggtggggacatacaagattgtgcttg

SEQ ID NO: 30583 - DNA, 26 bp, Homo sapiens
gtggggacatacaagattgtgcttgc

SEQ ID NO: 30584 - DNA, 26 bp, Homo sapiens
tggggacatacaagattgtgcttgcg

SEQ ID NO: 30585 - DNA, 26 bp, Homo sapiens
ggggacatacaagattgtgcttgcga

SEQ ID NO: 30586 - DNA, 26 bp, Homo sapiens
gggacatacaagattgtgcttgcgag

SEQ ID NO: 30587 - DNA, 26 bp, Homo sapiens
ggacatacaagattgtgcttgcgagg

SEQ ID NO: 30588 - DNA, 26 bp, Homo sapiens
gacatacaagattgtgcttgcgagga

SEQ ID NO: 30589 - DNA, 26 bp, Homo sapiens
acatacaagattgtgcttgcgaggac

SEQ ID NO: 30590 - DNA, 26 bp, Homo sapiens
catacaagattgtgcttgcgaggact

SEQ ID NO: 30591 - DNA, 26 bp, Homo sapiens
atacaagattgtgcttgcgaggactc

SEQ ID NO: 30592 - DNA, 26 bp, Homo sapiens
tacaagattgtgcttgcgaggactcg

SEQ ID NO: 30593 - DNA, 26 bp, Homo sapiens
acaagattgtgcttgcgaggactcgg

SEQ ID NO: 30594 - DNA, 26 bp, Homo sapiens
caagattgtgcttgcgaggactcggc

SEQ ID NO: 30595 - DNA, 26 bp, Homo sapiens
aagattgtgcttgcgaggactcggct

SEQ ID NO: 30596 - DNA, 26 bp, Homo sapiens
agattgtgcttgcgaggactcggctt

SEQ ID NO: 30597 - DNA, 26 bp, Homo sapiens
gattgtgcttgcgaggactcggcttt

SEQ ID NO: 30598 - DNA, 26 bp, Homo sapiens
attgtgcttgcgaggactcggctttc

SEQ ID NO: 30599 - DNA, 26 bp, Homo sapiens
ttgtgcttgcgaggactcggctttct

SEQ ID NO: 30600 - DNA, 26 bp, Homo sapiens
tgtgcttgcgaggactcggctttctt

SEQ ID NO: 30601 - DNA, 26 bp, Homo sapiens
gtgcttgcgaggactcggctttcttg

SEQ ID NO: 30602 - DNA, 26 bp, Homo sapiens
tgcttgcgaggactcggctttcttgc

SEQ ID NO: 30603 - DNA, 26 bp, Homo sapiens
gcttgcgaggactcggctttcttgct

SEQ ID NO: 30604 - DNA, 26 bp, Homo sapiens
cttgcgaggactcggctttcttgctt

SEQ ID NO: 30605 - DNA, 26 bp, Homo sapiens
ttgcgaggactcggctttcttgcttt

SEQ ID NO: 30606 - DNA, 26 bp, Homo sapiens
tgcgaggactcggctttcttgctttt

SEQ ID NO: 30607 - DNA, 26 bp, Homo sapiens
gcgaggactcggctttcttgcttttg

SEQ ID NO: 30608 - DNA, 26 bp, Homo sapiens
cgaggactcggctttcttgcttttgg

SEQ ID NO: 30609 - DNA, 26 bp, Homo sapiens
gaggactcggctttcttgcttttgga

SEQ ID NO: 30610 - DNA, 26 bp, Homo sapiens
aggactcggctttcttgcttttggac

SEQ ID NO: 30611 - DNA, 26 bp, Homo sapiens
ggactcggctttcttgcttttggact

SEQ ID NO: 30612 - DNA, 26 bp, Homo sapiens
gactcggctttcttgcttttggactt

SEQ ID NO: 30613 - DNA, 26 bp, Homo sapiens
actcggctttcttgcttttggacttg

SEQ ID NO: 30614 - DNA, 26 bp, Homo sapiens
ctcggctttcttgcttttggacttgg

SEQ ID NO: 30615 - DNA, 26 bp, Homo sapiens
tcggctttcttgcttttggacttggt

SEQ ID NO: 30616 - DNA, 26 bp, Homo sapiens
cggctttcttgcttttggacttggtc

SEQ ID NO: 30617 - DNA, 26 bp, Homo sapiens
ggctttcttgcttttggacttggtca

SEQ ID NO: 30618 - DNA, 26 bp, Homo sapiens
gctttcttgcttttggacttggtcag

SEQ ID NO: 30619 - DNA, 26 bp, Homo sapiens
ctttcttgcttttggacttggtcagg

SEQ ID NO: 30620 - DNA, 26 bp, Homo sapiens
tttcttgcttttggacttggtcaggt

SEQ ID NO: 30621 - DNA, 26 bp, Homo sapiens
ttcttgcttttggacttggtcaggtc

SEQ ID NO: 30622 - DNA, 26 bp, Homo sapiens
tcttgcttttggacttggtcaggtca

SEQ ID NO: 30623 - DNA, 26 bp, Homo sapiens
cttgcttttggacttggtcaggtcaa

SEQ ID NO: 30624 - DNA, 26 bp, Homo sapiens
ttgcttttggacttggtcaggtcaat

SEQ ID NO: 30625 - DNA, 26 bp, Homo sapiens
tgcttttggacttggtcaggtcaatg

SEQ ID NO: 30626 - DNA, 26 bp, Homo sapiens
gcttttggacttggtcaggtcaatgg

SEQ ID NO: 30627 - DNA, 26 bp, Homo sapiens
cttttggacttggtcaggtcaatggg

SEQ ID NO: 30628 - DNA, 26 bp, Homo sapiens
ttttggacttggtcaggtcaatgggc

SEQ ID NO: 30629 - DNA, 26 bp, Homo sapiens
tttggacttggtcaggtcaatgggct

SEQ ID NO: 30630 - DNA, 26 bp, Homo sapiens
ttggacttggtcaggtcaatgggctg

SEQ ID NO: 30631 - DNA, 26 bp, Homo sapiens
tggacttggtcaggtcaatgggctga

SEQ ID NO: 30632 - DNA, 26 bp, Homo sapiens
ggacttggtcaggtcaatgggctgat

SEQ ID NO: 30633 - DNA, 26 bp, Homo sapiens
gacttggtcaggtcaatgggctgatc

SEQ ID NO: 30634 - DNA, 26 bp, Homo sapiens
acttggtcaggtcaatgggctgatcg

SEQ ID NO: 30635 - DNA, 26 bp, Homo sapiens
cttggtcaggtcaatgggctgatcgc

SEQ ID NO: 30636 - DNA, 26 bp, Homo sapiens
ttggtcaggtcaatgggctgatcgct

SEQ ID NO: 30637 - DNA, 26 bp, Homo sapiens
tggtcaggtcaatgggctgatcgctg

SEQ ID NO: 30638 - DNA, 26 bp, Homo sapiens
ggtcaggtcaatgggctgatcgctgt

SEQ ID NO: 30639 - DNA, 26 bp, Homo sapiens
gtcaggtcaatgggctgatcgctgtt

SEQ ID NO: 30640 - DNA, 26 bp, Homo sapiens
tcaggtcaatgggctgatcgctgttc

SEQ ID NO: 30641 - DNA, 26 bp, Homo sapiens
caggtcaatgggctgatcgctgttct

SEQ ID NO: 30642 - DNA, 26 bp, Homo sapiens
aggtcaatgggctgatcgctgttctc

SEQ ID NO: 30643 - DNA, 26 bp, Homo sapiens
ggtcaatgggctgatcgctgttctca

SEQ ID NO: 30644 - DNA, 26 bp, Homo sapiens
gtcaatgggctgatcgctgttctcaa

SEQ ID NO: 30645 - DNA, 26 bp, Homo sapiens
tcaatgggctgatcgctgttctcaaa

SEQ ID NO: 30646 - DNA, 26 bp, Homo sapiens
caatgggctgatcgctgttctcaaac

SEQ ID NO: 30647 - DNA, 26 bp, Homo sapiens
aatgggctgatcgctgttctcaaaca

SEQ ID NO: 30648 - DNA, 26 bp, Homo sapiens
atgggctgatcgctgttctcaaacag

SEQ ID NO: 30649 - DNA, 26 bp, Homo sapiens
tgggctgatcgctgttctcaaacagg

SEQ ID NO: 30650 - DNA, 26 bp, Homo sapiens
gggctgatcgctgttctcaaacaggt

SEQ ID NO: 30651 - DNA, 26 bp, Homo sapiens
ggctgatcgctgttctcaaacaggta

SEQ ID NO: 30652 - DNA, 26 bp, Homo sapiens
gctgatcgctgttctcaaacaggtag

SEQ ID NO: 30653 - DNA, 26 bp, Homo sapiens
ctgatcgctgttctcaaacaggtagc

SEQ ID NO: 30654 - DNA, 26 bp, Homo sapiens
tgatcgctgttctcaaacaggtagcg

SEQ ID NO: 30655 - DNA, 26 bp, Homo sapiens
gatcgctgttctcaaacaggtagcgc

SEQ ID NO: 30656 - DNA, 26 bp, Homo sapiens
atcgctgttctcaaacaggtagcgcc

SEQ ID NO: 30657 - DNA, 26 bp, Homo sapiens
tcgctgttctcaaacaggtagcgcct

SEQ ID NO: 30658 - DNA, 26 bp, Homo sapiens
cgctgttctcaaacaggtagcgcctg

SEQ ID NO: 30659 - DNA, 26 bp, Homo sapiens
gctgttctcaaacaggtagcgcctgg

SEQ ID NO: 30660 - DNA, 26 bp, Homo sapiens
ctgttctcaaacaggtagcgcctgga

SEQ ID NO: 30661 - DNA, 26 bp, Homo sapiens
tgttctcaaacaggtagcgcctggac

SEQ ID NO: 30662 - DNA, 26 bp, Homo sapiens
gttctcaaacaggtagcgcctggaca

SEQ ID NO: 30663 - DNA, 26 bp, Homo sapiens
ttctcaaacaggtagcgcctggacac

SEQ ID NO: 30664 - DNA, 26 bp, Homo sapiens
tctcaaacaggtagcgcctggacacg

SEQ ID NO: 30665 - DNA, 26 bp, Homo sapiens
ctcaaacaggtagcgcctggacacgc

SEQ ID NO: 30666 - DNA, 26 bp, Homo sapiens
tcaaacaggtagcgcctggacacgct

SEQ ID NO: 30667 - DNA, 26 bp, Homo sapiens
caaacaggtagcgcctggacacgctg

SEQ ID NO: 30668 - DNA, 26 bp, Homo sapiens
aaacaggtagcgcctggacacgctgg

SEQ ID NO: 30669 - DNA, 26 bp, Homo sapiens
aacaggtagcgcctggacacgctggc

SEQ ID NO: 30670 - DNA, 26 bp, Homo sapiens
acaggtagcgcctggacacgctggct

SEQ ID NO: 30671 - DNA, 26 bp, Homo sapiens
caggtagcgcctggacacgctggctg

SEQ ID NO: 30672 - DNA, 26 bp, Homo sapiens
aggtagcgcctggacacgctggctga

SEQ ID NO: 30673 - DNA, 26 bp, Homo sapiens
ggtagcgcctggacacgctggctgac

SEQ ID NO: 30674 - DNA, 26 bp, Homo sapiens
gtagcgcctggacacgctggctgacc

SEQ ID NO: 30675 - DNA, 26 bp, Homo sapiens
tagcgcctggacacgctggctgacct

SEQ ID NO: 30676 - DNA, 26 bp, Homo sapiens
agcgcctggacacgctggctgacctt

SEQ ID NO: 30677 - DNA, 26 bp, Homo sapiens
gcgcctggacacgctggctgaccttg

SEQ ID NO: 30678 - DNA, 26 bp, Homo sapiens
cgcctggacacgctggctgaccttgt

SEQ ID NO: 30679 - DNA, 26 bp, Homo sapiens
gcctggacacgctggctgaccttgtg

SEQ ID NO: 30680 - DNA, 26 bp, Homo sapiens
cctggacacgctggctgaccttgtgg

SEQ ID NO: 30681 - DNA, 26 bp, Homo sapiens
ctggacacgctggctgaccttgtgga

SEQ ID NO: 30682 - DNA, 26 bp, Homo sapiens
tggacacgctggctgaccttgtggag

SEQ ID NO: 30683 - DNA, 26 bp, Homo sapiens
ggacacgctggctgaccttgtggagg

SEQ ID NO: 30684 - DNA, 26 bp, Homo sapiens
gacacgctggctgaccttgtggaggc

SEQ ID NO: 30685 - DNA, 26 bp, Homo sapiens
acacgctggctgaccttgtggaggca

SEQ ID NO: 30686 - DNA, 26 bp, Homo sapiens
cacgctggctgaccttgtggaggcag

SEQ ID NO: 30687 - DNA, 26 bp, Homo sapiens
acgctggctgaccttgtggaggcagg

SEQ ID NO: 30688 - DNA, 26 bp, Homo sapiens
cgctggctgaccttgtggaggcagga

SEQ ID NO: 30689 - DNA, 26 bp, Homo sapiens
gctggctgaccttgtggaggcaggac

SEQ ID NO: 30690 - DNA, 26 bp, Homo sapiens
ctggctgaccttgtggaggcaggact

SEQ ID NO: 30691 - DNA, 26 bp, Homo sapiens
tggctgaccttgtggaggcaggactc

SEQ ID NO: 30692 - DNA, 26 bp, Homo sapiens
ggctgaccttgtggaggcaggactca

SEQ ID NO: 30693 - DNA, 26 bp, Homo sapiens
gctgaccttgtggaggcaggactcaa

SEQ ID NO: 30694 - DNA, 26 bp, Homo sapiens
ctgaccttgtggaggcaggactcaag

SEQ ID NO: 30695 - DNA, 26 bp, Homo sapiens
tgaccttgtggaggcaggactcaaga

SEQ ID NO: 30696 - DNA, 26 bp, Homo sapiens
gaccttgtggaggcaggactcaagac

SEQ ID NO: 30697 - DNA, 26 bp, Homo sapiens
accttgtggaggcaggactcaagacc

SEQ ID NO: 30698 - DNA, 26 bp, Homo sapiens
ccttgtggaggcaggactcaagaccg

SEQ ID NO: 30699 - DNA, 26 bp, Homo sapiens
cttgtggaggcaggactcaagaccgg

SEQ ID NO: 30700 - DNA, 26 bp, Homo sapiens
ttgtggaggcaggactcaagaccggc

SEQ ID NO: 30701 - DNA, 26 bp, Homo sapiens
tgtggaggcaggactcaagaccggct

SEQ ID NO: 30702 - DNA, 26 bp, Homo sapiens
gtggaggcaggactcaagaccggctt

SEQ ID NO: 30703 - DNA, 26 bp, Homo sapiens
tggaggcaggactcaagaccggcttg

SEQ ID NO: 30704 - DNA, 26 bp, Homo sapiens
ggaggcaggactcaagaccggcttgt

SEQ ID NO: 30705 - DNA, 26 bp, Homo sapiens
gaggcaggactcaagaccggcttgtc

SEQ ID NO: 30706 - DNA, 26 bp, Homo sapiens
aggcaggactcaagaccggcttgtcc

SEQ ID NO: 30707 - DNA, 26 bp, Homo sapiens
ggcaggactcaagaccggcttgtcca

SEQ ID NO: 30708 - DNA, 26 bp, Homo sapiens
gcaggactcaagaccggcttgtccat

SEQ ID NO: 30709 - DNA, 26 bp, Homo sapiens
caggactcaagaccggcttgtccatg

SEQ ID NO: 30710 - DNA, 26 bp, Homo sapiens
aggactcaagaccggcttgtccatga

SEQ ID NO: 30711 - DNA, 26 bp, Homo sapiens
ggactcaagaccggcttgtccatgac

SEQ ID NO: 30712 - DNA, 26 bp, Homo sapiens
gactcaagaccggcttgtccatgaca

SEQ ID NO: 30713 - DNA, 26 bp, Homo sapiens
actcaagaccggcttgtccatgacat

SEQ ID NO: 30714 - DNA, 26 bp, Homo sapiens
ctcaagaccggcttgtccatgacatt

SEQ ID NO: 30715 - DNA, 26 bp, Homo sapiens
tcaagaccggcttgtccatgacattg

SEQ ID NO: 30716 - DNA, 26 bp, Homo sapiens
caagaccggcttgtccatgacattga

SEQ ID NO: 30717 - DNA, 26 bp, Homo sapiens
aagaccggcttgtccatgacattgag

SEQ ID NO: 30718 - DNA, 26 bp, Homo sapiens
agaccggcttgtccatgacattgaga

SEQ ID NO: 30719 - DNA, 26 bp, Homo sapiens
gaccggcttgtccatgacattgagat

SEQ ID NO: 30720 - DNA, 26 bp, Homo sapiens
accggcttgtccatgacattgagatt

SEQ ID NO: 30721 - DNA, 26 bp, Homo sapiens
ccggcttgtccatgacattgagattc

SEQ ID NO: 30722 - DNA, 26 bp, Homo sapiens
cggcttgtccatgacattgagattcg

SEQ ID NO: 30723 - DNA, 26 bp, Homo sapiens
ggcttgtccatgacattgagattcga

SEQ ID NO: 30724 - DNA, 26 bp, Homo sapiens
gcttgtccatgacattgagattcgac

SEQ ID NO: 30725 - DNA, 26 bp, Homo sapiens
cttgtccatgacattgagattcgact

SEQ ID NO: 30726 - DNA, 26 bp, Homo sapiens
ttgtccatgacattgagattcgactt

SEQ ID NO: 30727 - DNA, 26 bp, Homo sapiens
tgtccatgacattgagattcgacttg

SEQ ID NO: 30728 - DNA, 26 bp, Homo sapiens
gtccatgacattgagattcgacttgt

SEQ ID NO: 30729 - DNA, 26 bp, Homo sapiens
tccatgacattgagattcgacttgtg

SEQ ID NO: 30730 - DNA, 26 bp, Homo sapiens
ccatgacattgagattcgacttgtgg

SEQ ID NO: 30731 - DNA, 26 bp, Homo sapiens
catgacattgagattcgacttgtgga

SEQ ID NO: 30732 - DNA, 26 bp, Homo sapiens
atgacattgagattcgacttgtggaa

SEQ ID NO: 30733 - DNA, 26 bp, Homo sapiens
tgacattgagattcgacttgtggaac

SEQ ID NO: 30734 - DNA, 26 bp, Homo sapiens
gacattgagattcgacttgtggaaca

SEQ ID NO: 30735 - DNA, 26 bp, Homo sapiens
acattgagattcgacttgtggaacat

SEQ ID NO: 30736 - DNA, 26 bp, Homo sapiens
cattgagattcgacttgtggaacatg

SEQ ID NO: 30737 - DNA, 26 bp, Homo sapiens
attgagattcgacttgtggaacatgg

SEQ ID NO: 30738 - DNA, 26 bp, Homo sapiens
ttgagattcgacttgtggaacatgga

SEQ ID NO: 30739 - DNA, 26 bp, Homo sapiens
tgagattcgacttgtggaacatggaa

SEQ ID NO: 30740 - DNA, 26 bp, Homo sapiens
gagattcgacttgtggaacatggaaa

SEQ ID NO: 30741 - DNA, 26 bp, Homo sapiens
agattcgacttgtggaacatggaaat

SEQ ID NO: 30742 - DNA, 26 bp, Homo sapiens
gattcgacttgtggaacatggaaatt

SEQ ID NO: 30743 - DNA, 26 bp, Homo sapiens
attcgacttgtggaacatggaaattg

SEQ ID NO: 30744 - DNA, 26 bp, Homo sapiens
ttcgacttgtggaacatggaaattgt

SEQ ID NO: 30745 - DNA, 26 bp, Homo sapiens
tcgacttgtggaacatggaaattgtg

SEQ ID NO: 30746 - DNA, 26 bp, Homo sapiens
cgacttgtggaacatggaaattgtgc

SEQ ID NO: 30747 - DNA, 26 bp, Homo sapiens
gacttgtggaacatggaaattgtgct

SEQ ID NO: 30748 - DNA, 26 bp, Homo sapiens
acttgtggaacatggaaattgtgctt

SEQ ID NO: 30749 - DNA, 26 bp, Homo sapiens
cttgtggaacatggaaattgtgcttg

SEQ ID NO: 30750 - DNA, 26 bp, Homo sapiens
ttgtggaacatggaaattgtgcttga

SEQ ID NO: 30751 - DNA, 26 bp, Homo sapiens
tgtggaacatggaaattgtgcttgaa

SEQ ID NO: 30752 - DNA, 26 bp, Homo sapiens
gtggaacatggaaattgtgcttgaac

SEQ ID NO: 30753 - DNA, 26 bp, Homo sapiens
tggaacatggaaattgtgcttgaact

SEQ ID NO: 30754 - DNA, 26 bp, Homo sapiens
ggaacatggaaattgtgcttgaactt

SEQ ID NO: 30755 - DNA, 26 bp, Homo sapiens
gaacatggaaattgtgcttgaacttg

SEQ ID NO: 30756 - DNA, 26 bp, Homo sapiens
aacatggaaattgtgcttgaacttgg

SEQ ID NO: 30757 - DNA, 26 bp, Homo sapiens
acatggaaattgtgcttgaacttggg

SEQ ID NO: 30758 - DNA, 26 bp, Homo sapiens
catggaaattgtgcttgaacttgggc

SEQ ID NO: 30759 - DNA, 26 bp, Homo sapiens
atggaaattgtgcttgaacttgggct

SEQ ID NO: 30760 - DNA, 26 bp, Homo sapiens
tggaaattgtgcttgaacttgggctg

SEQ ID NO: 30761 - DNA, 26 bp, Homo sapiens
ggaaattgtgcttgaacttgggctgg

SEQ ID NO: 30762 - DNA, 26 bp, Homo sapiens
gaaattgtgcttgaacttgggctgga

SEQ ID NO: 30763 - DNA, 26 bp, Homo sapiens
aaattgtgcttgaacttgggctggag

SEQ ID NO: 30764 - DNA, 26 bp, Homo sapiens
aattgtgcttgaacttgggctggagc

SEQ ID NO: 30765 - DNA, 26 bp, Homo sapiens
attgtgcttgaacttgggctggagca

SEQ ID NO: 30766 - DNA, 26 bp, Homo sapiens
ttgtgcttgaacttgggctggagcag

SEQ ID NO: 30767 - DNA, 26 bp, Homo sapiens
tgtgcttgaacttgggctggagcagg

SEQ ID NO: 30768 - DNA, 26 bp, Homo sapiens
gtgcttgaacttgggctggagcagga

SEQ ID NO: 30769 - DNA, 26 bp, Homo sapiens
tgcttgaacttgggctggagcaggaa

SEQ ID NO: 30770 - DNA, 26 bp, Homo sapiens
gcttgaacttgggctggagcaggaag

SEQ ID NO: 30771 - DNA, 26 bp, Homo sapiens
cttgaacttgggctggagcaggaagg

SEQ ID NO: 30772 - DNA, 26 bp, Homo sapiens
ttgaacttgggctggagcaggaaggt

SEQ ID NO: 30773 - DNA, 26 bp, Homo sapiens
tgaacttgggctggagcaggaaggtg

SEQ ID NO: 30774 - DNA, 26 bp, Homo sapiens
gaacttgggctggagcaggaaggtga

SEQ ID NO: 30775 - DNA, 26 bp, Homo sapiens
aacttgggctggagcaggaaggtgag

SEQ ID NO: 30776 - DNA, 26 bp, Homo sapiens
acttgggctggagcaggaaggtgagc

SEQ ID NO: 30777 - DNA, 26 bp, Homo sapiens
cttgggctggagcaggaaggtgagcg

SEQ ID NO: 30778 - DNA, 26 bp, Homo sapiens
ttgggctggagcaggaaggtgagcgc

SEQ ID NO: 30779 - DNA, 26 bp, Homo sapiens
tgggctggagcaggaaggtgagcgca

SEQ ID NO: 30780 - DNA, 26 bp, Homo sapiens
gggctggagcaggaaggtgagcgcaa

SEQ ID NO: 30781 - DNA, 26 bp, Homo sapiens
ggctggagcaggaaggtgagcgcaag

SEQ ID NO: 30782 - DNA, 26 bp, Homo sapiens
gctggagcaggaaggtgagcgcaagg

SEQ ID NO: 30783 - DNA, 26 bp, Homo sapiens
ctggagcaggaaggtgagcgcaaggg

SEQ ID NO: 30784 - DNA, 26 bp, Homo sapiens
tggagcaggaaggtgagcgcaagggc

SEQ ID NO: 30785 - DNA, 26 bp, Homo sapiens
ggagcaggaaggtgagcgcaagggct

SEQ ID NO: 30786 - DNA, 26 bp, Homo sapiens
gagcaggaaggtgagcgcaagggctc

SEQ ID NO: 30787 - DNA, 26 bp, Homo sapiens
agcaggaaggtgagcgcaagggctcc

SEQ ID NO: 30788 - DNA, 26 bp, Homo sapiens
gcaggaaggtgagcgcaagggctccg

SEQ ID NO: 30789 - DNA, 26 bp, Homo sapiens
caggaaggtgagcgcaagggctccgt

SEQ ID NO: 30790 - DNA, 26 bp, Homo sapiens
aggaaggtgagcgcaagggctccgtg

SEQ ID NO: 30791 - DNA, 26 bp, Homo sapiens
ggaaggtgagcgcaagggctccgtgg

SEQ ID NO: 30792 - DNA, 26 bp, Homo sapiens
gaaggtgagcgcaagggctccgtggc

SEQ ID NO: 30793 - DNA, 26 bp, Homo sapiens
aaggtgagcgcaagggctccgtggct

SEQ ID NO: 30794 - DNA, 26 bp, Homo sapiens
aggtgagcgcaagggctccgtggctt

SEQ ID NO: 30795 - DNA, 26 bp, Homo sapiens
ggtgagcgcaagggctccgtggcttt

SEQ ID NO: 30796 - DNA, 26 bp, Homo sapiens
gtgagcgcaagggctccgtggctttg

SEQ ID NO: 30797 - DNA, 26 bp, Homo sapiens
tgagcgcaagggctccgtggctttgc

SEQ ID NO: 30798 - DNA, 26 bp, Homo sapiens
gagcgcaagggctccgtggctttgcc

SEQ ID NO: 30799 - DNA, 26 bp, Homo sapiens
agcgcaagggctccgtggctttgccc

SEQ ID NO: 30800 - DNA, 26 bp, Homo sapiens
gcgcaagggctccgtggctttgccca

SEQ ID NO: 30801 - DNA, 26 bp, Homo sapiens
cgcaagggctccgtggctttgcccaa

SEQ ID NO: 30802 - DNA, 26 bp, Homo sapiens
gcaagggctccgtggctttgcccaag

SEQ ID NO: 30803 - DNA, 26 bp, Homo sapiens
caagggctccgtggctttgcccaagt

SEQ ID NO: 30804 - DNA, 26 bp, Homo sapiens
aagggctccgtggctttgcccaagtg

SEQ ID NO: 30805 - DNA, 26 bp, Homo sapiens
agggctccgtggctttgcccaagtga

SEQ ID NO: 30806 - DNA, 26 bp, Homo sapiens
gggctccgtggctttgcccaagtgat

SEQ ID NO: 30807 - DNA, 26 bp, Homo sapiens
ggctccgtggctttgcccaagtgatt

SEQ ID NO: 30808 - DNA, 26 bp, Homo sapiens
gctccgtggctttgcccaagtgattg

SEQ ID NO: 30809 - DNA, 26 bp, Homo sapiens
ctccgtggctttgcccaagtgattgt

SEQ ID NO: 30810 - DNA, 26 bp, Homo sapiens
tccgtggctttgcccaagtgattgtt

SEQ ID NO: 30811 - DNA, 26 bp, Homo sapiens
ccgtggctttgcccaagtgattgttc

SEQ ID NO: 30812 - DNA, 26 bp, Homo sapiens
cgtggctttgcccaagtgattgttca

SEQ ID NO: 30813 - DNA, 26 bp, Homo sapiens
gtggctttgcccaagtgattgttcag

SEQ ID NO: 30814 - DNA, 26 bp, Homo sapiens
tggctttgcccaagtgattgttcagg

SEQ ID NO: 30815 - DNA, 26 bp, Homo sapiens
ggctttgcccaagtgattgttcagga

SEQ ID NO: 30816 - DNA, 26 bp, Homo sapiens
gctttgcccaagtgattgttcaggac

SEQ ID NO: 30817 - DNA, 26 bp, Homo sapiens
ctttgcccaagtgattgttcaggacg

SEQ ID NO: 30818 - DNA, 26 bp, Homo sapiens
tttgcccaagtgattgttcaggacgg

SEQ ID NO: 30819 - DNA, 26 bp, Homo sapiens
ttgcccaagtgattgttcaggacgga

SEQ ID NO: 30820 - DNA, 26 bp, Homo sapiens
tgcccaagtgattgttcaggacggac

SEQ ID NO: 30821 - DNA, 26 bp, Homo sapiens
gcccaagtgattgttcaggacggact

SEQ ID NO: 30822 - DNA, 26 bp, Homo sapiens
cccaagtgattgttcaggacggactg

SEQ ID NO: 30823 - DNA, 26 bp, Homo sapiens
ccaagtgattgttcaggacggactgc

SEQ ID NO: 30824 - DNA, 26 bp, Homo sapiens
caagtgattgttcaggacggactgca

SEQ ID NO: 30825 - DNA, 26 bp, Homo sapiens
aagtgattgttcaggacggactgcag

SEQ ID NO: 30826 - DNA, 26 bp, Homo sapiens
agtgattgttcaggacggactgcagg

SEQ ID NO: 30827 - DNA, 26 bp, Homo sapiens
gtgattgttcaggacggactgcaggg

SEQ ID NO: 30828 - DNA, 26 bp, Homo sapiens
tgattgttcaggacggactgcagggc

SEQ ID NO: 30829 - DNA, 26 bp, Homo sapiens
gattgttcaggacggactgcagggcg

SEQ ID NO: 30830 - DNA, 26 bp, Homo sapiens
attgttcaggacggactgcagggcgc

SEQ ID NO: 30831 - DNA, 26 bp, Homo sapiens
ttgttcaggacggactgcagggcgct

SEQ ID NO: 30832 - DNA, 26 bp, Homo sapiens
tgttcaggacggactgcagggcgctg

SEQ ID NO: 30833 - DNA, 26 bp, Homo sapiens
gttcaggacggactgcagggcgctga

SEQ ID NO: 30834 - DNA, 26 bp, Homo sapiens
ttcaggacggactgcagggcgctgag

SEQ ID NO: 30835 - DNA, 26 bp, Homo sapiens
tcaggacggactgcagggcgctgagt

SEQ ID NO: 30836 - DNA, 26 bp, Homo sapiens
caggacggactgcagggcgctgagtg

SEQ ID NO: 30837 - DNA, 26 bp, Homo sapiens
aggacggactgcagggcgctgagtgg

SEQ ID NO: 30838 - DNA, 26 bp, Homo sapiens
ggacggactgcagggcgctgagtggg

SEQ ID NO: 30839 - DNA, 26 bp, Homo sapiens
gacggactgcagggcgctgagtgggt

SEQ ID NO: 30840 - DNA, 26 bp, Homo sapiens
acggactgcagggcgctgagtgggtt

SEQ ID NO: 30841 - DNA, 26 bp, Homo sapiens
cggactgcagggcgctgagtgggttg

SEQ ID NO: 30842 - DNA, 26 bp, Homo sapiens
ggactgcagggcgctgagtgggttga

SEQ ID NO: 30843 - DNA, 26 bp, Homo sapiens
gactgcagggcgctgagtgggttgat

SEQ ID NO: 30844 - DNA, 26 bp, Homo sapiens
actgcagggcgctgagtgggttgatg

SEQ ID NO: 30845 - DNA, 26 bp, Homo sapiens
ctgcagggcgctgagtgggttgatgc

SEQ ID NO: 30846 - DNA, 26 bp, Homo sapiens
tgcagggcgctgagtgggttgatgca

SEQ ID NO: 30847 - DNA, 26 bp, Homo sapiens
gcagggcgctgagtgggttgatgcat

SEQ ID NO: 30848 - DNA, 26 bp, Homo sapiens
cagggcgctgagtgggttgatgcatg

SEQ ID NO: 30849 - DNA, 26 bp, Homo sapiens
agggcgctgagtgggttgatgcatgg

SEQ ID NO: 30850 - DNA, 26 bp, Homo sapiens
gggcgctgagtgggttgatgcatggc

SEQ ID NO: 30851 - DNA, 26 bp, Homo sapiens
ggcgctgagtgggttgatgcatggca

SEQ ID NO: 30852 - DNA, 26 bp, Homo sapiens
gcgctgagtgggttgatgcatggcag

SEQ ID NO: 30853 - DNA, 26 bp, Homo sapiens
cgctgagtgggttgatgcatggcagg

SEQ ID NO: 30854 - DNA, 26 bp, Homo sapiens
gctgagtgggttgatgcatggcaggg

SEQ ID NO: 30855 - DNA, 26 bp, Homo sapiens
ctgagtgggttgatgcatggcagggc

SEQ ID NO: 30856 - DNA, 26 bp, Homo sapiens
tgagtgggttgatgcatggcagggcc

SEQ ID NO: 30857 - DNA, 26 bp, Homo sapiens
gagtgggttgatgcatggcagggccg

SEQ ID NO: 30858 - DNA, 26 bp, Homo sapiens
agtgggttgatgcatggcagggccgg

SEQ ID NO: 30859 - DNA, 26 bp, Homo sapiens
gtgggttgatgcatggcagggccggg

SEQ ID NO: 30860 - DNA, 26 bp, Homo sapiens
tgggttgatgcatggcagggccgggg

SEQ ID NO: 30861 - DNA, 26 bp, Homo sapiens
gggttgatgcatggcagggccggggc

SEQ ID NO: 30862 - DNA, 26 bp, Homo sapiens
ggttgatgcatggcagggccggggcg

SEQ ID NO: 30863 - DNA, 26 bp, Homo sapiens
gttgatgcatggcagggccggggcgt

SEQ ID NO: 30864 - DNA, 26 bp, Homo sapiens
ttgatgcatggcagggccggggcgtg

SEQ ID NO: 30865 - DNA, 26 bp, Homo sapiens
tgatgcatggcagggccggggcgtgg

SEQ ID NO: 30866 - DNA, 26 bp, Homo sapiens
gatgcatggcagggccggggcgtggt

SEQ ID NO: 30867 - DNA, 26 bp, Homo sapiens
atgcatggcagggccggggcgtggtt

SEQ ID NO: 30868 - DNA, 26 bp, Homo sapiens
tgcatggcagggccggggcgtggttg

SEQ ID NO: 30869 - DNA, 26 bp, Homo sapiens
gcatggcagggccggggcgtggttgg

SEQ ID NO: 30870 - DNA, 26 bp, Homo sapiens
catggcagggccggggcgtggttggc

SEQ ID NO: 30871 - DNA, 26 bp, Homo sapiens
atggcagggccggggcgtggttggcg

SEQ ID NO: 30872 - DNA, 26 bp, Homo sapiens
tggcagggccggggcgtggttggcga

SEQ ID NO: 30873 - DNA, 26 bp, Homo sapiens
ggcagggccggggcgtggttggcgag

SEQ ID NO: 30874 - DNA, 26 bp, Homo sapiens
gcagggccggggcgtggttggcgagg

SEQ ID NO: 30875 - DNA, 26 bp, Homo sapiens
cagggccggggcgtggttggcgaggg

SEQ ID NO: 30876 - DNA, 26 bp, Homo sapiens
agggccggggcgtggttggcgagggc

SEQ ID NO: 30877 - DNA, 26 bp, Homo sapiens
gggccggggcgtggttggcgagggcg

SEQ ID NO: 30878 - DNA, 26 bp, Homo sapiens
ggccggggcgtggttggcgagggcgc

SEQ ID NO: 30879 - DNA, 26 bp, Homo sapiens
gccggggcgtggttggcgagggcgca

SEQ ID NO: 30880 - DNA, 26 bp, Homo sapiens
ccggggcgtggttggcgagggcgcac

SEQ ID NO: 30881 - DNA, 26 bp, Homo sapiens
cggggcgtggttggcgagggcgcacc

SEQ ID NO: 30882 - DNA, 26 bp, Homo sapiens
ggggcgtggttggcgagggcgcaccc

SEQ ID NO: 30883 - DNA, 26 bp, Homo sapiens
gggcgtggttggcgagggcgcaccca

SEQ ID NO: 30884 - DNA, 26 bp, Homo sapiens
ggcgtggttggcgagggcgcacccat

SEQ ID NO: 30885 - DNA, 26 bp, Homo sapiens
gcgtggttggcgagggcgcacccatt

SEQ ID NO: 30886 - DNA, 26 bp, Homo sapiens
cgtggttggcgagggcgcacccattg

SEQ ID NO: 30887 - DNA, 26 bp, Homo sapiens
gtggttggcgagggcgcacccattgc

SEQ ID NO: 30888 - DNA, 26 bp, Homo sapiens
tggttggcgagggcgcacccattgct

SEQ ID NO: 30889 - DNA, 26 bp, Homo sapiens
ggttggcgagggcgcacccattgctc

SEQ ID NO: 30890 - DNA, 26 bp, Homo sapiens
gttggcgagggcgcacccattgctca

SEQ ID NO: 30891 - DNA, 26 bp, Homo sapiens
ttggcgagggcgcacccattgctcag

SEQ ID NO: 30892 - DNA, 26 bp, Homo sapiens
tggcgagggcgcacccattgctcaga

SEQ ID NO: 30893 - DNA, 26 bp, Homo sapiens
ggcgagggcgcacccattgctcagag

SEQ ID NO: 30894 - DNA, 26 bp, Homo sapiens
gcgagggcgcacccattgctcagagc

SEQ ID NO: 30895 - DNA, 26 bp, Homo sapiens
cgagggcgcacccattgctcagagca

SEQ ID NO: 30896 - DNA, 26 bp, Homo sapiens
gagggcgcacccattgctcagagcag

SEQ ID NO: 30897 - DNA, 26 bp, Homo sapiens
agggcgcacccattgctcagagcaga

SEQ ID NO: 30898 - DNA, 26 bp, Homo sapiens
gggcgcacccattgctcagagcagat

SEQ ID NO: 30899 - DNA, 26 bp, Homo sapiens
ggcgcacccattgctcagagcagatg

SEQ ID NO: 30900 - DNA, 26 bp, Homo sapiens
gcgcacccattgctcagagcagatgt

SEQ ID NO: 30901 - DNA, 26 bp, Homo sapiens
cgcacccattgctcagagcagatgtg

SEQ ID NO: 30902 - DNA, 26 bp, Homo sapiens
gcacccattgctcagagcagatgtgg

SEQ ID NO: 30903 - DNA, 26 bp, Homo sapiens
cacccattgctcagagcagatgtggg

SEQ ID NO: 30904 - DNA, 26 bp, Homo sapiens
acccattgctcagagcagatgtgggc

SEQ ID NO: 30905 - DNA, 26 bp, Homo sapiens
cccattgctcagagcagatgtgggct

SEQ ID NO: 30906 - DNA, 26 bp, Homo sapiens
ccattgctcagagcagatgtgggctc

SEQ ID NO: 30907 - DNA, 26 bp, Homo sapiens
cattgctcagagcagatgtgggctcc

SEQ ID NO: 30908 - DNA, 26 bp, Homo sapiens
attgctcagagcagatgtgggctcca

SEQ ID NO: 30909 - DNA, 26 bp, Homo sapiens
ttgctcagagcagatgtgggctccag

SEQ ID NO: 30910 - DNA, 26 bp, Homo sapiens
tgctcagagcagatgtgggctccagg

SEQ ID NO: 30911 - DNA, 26 bp, Homo sapiens
gctcagagcagatgtgggctccaggg

SEQ ID NO: 30912 - DNA, 26 bp, Homo sapiens
ctcagagcagatgtgggctccagggg

SEQ ID NO: 30913 - DNA, 26 bp, Homo sapiens
tcagagcagatgtgggctccaggggc

SEQ ID NO: 30914 - DNA, 26 bp, Homo sapiens
cagagcagatgtgggctccaggggct

SEQ ID NO: 30915 - DNA, 26 bp, Homo sapiens
agagcagatgtgggctccaggggctg

SEQ ID NO: 30916 - DNA, 26 bp, Homo sapiens
gagcagatgtgggctccaggggctgg

SEQ ID NO: 30917 - DNA, 26 bp, Homo sapiens
agcagatgtgggctccaggggctggg

SEQ ID NO: 30918 - DNA, 26 bp, Homo sapiens
gcagatgtgggctccaggggctgggg

SEQ ID NO: 30919 - DNA, 26 bp, Homo sapiens
cagatgtgggctccaggggctggggt

SEQ ID NO: 30920 - DNA, 26 bp, Homo sapiens
agatgtgggctccaggggctggggtt

SEQ ID NO: 30921 - DNA, 26 bp, Homo sapiens
gatgtgggctccaggggctggggttt

SEQ ID NO: 30922 - DNA, 26 bp, Homo sapiens
atgtgggctccaggggctggggtttc

SEQ ID NO: 30923 - DNA, 26 bp, Homo sapiens
tgtgggctccaggggctggggtttct

SEQ ID NO: 30924 - DNA, 26 bp, Homo sapiens
gtgggctccaggggctggggtttctc

SEQ ID NO: 30925 - DNA, 26 bp, Homo sapiens
tgggctccaggggctggggtttctcc

SEQ ID NO: 30926 - DNA, 26 bp, Homo sapiens
gggctccaggggctggggtttctcct

SEQ ID NO: 30927 - DNA, 26 bp, Homo sapiens
ggctccaggggctggggtttctcctt

SEQ ID NO: 30928 - DNA, 26 bp, Homo sapiens
gctccaggggctggggtttctccttc

SEQ ID NO: 30929 - DNA, 26 bp, Homo sapiens
ctccaggggctggggtttctccttct

SEQ ID NO: 30930 - DNA, 26 bp, Homo sapiens
tccaggggctggggtttctccttctc

SEQ ID NO: 30931 - DNA, 26 bp, Homo sapiens
ccaggggctggggtttctccttctcg

SEQ ID NO: 30932 - DNA, 26 bp, Homo sapiens
caggggctggggtttctccttctcgc

SEQ ID NO: 30933 - DNA, 26 bp, Homo sapiens
aggggctggggtttctccttctcgct

SEQ ID NO: 30934 - DNA, 26 bp, Homo sapiens
ggggctggggtttctccttctcgctg

SEQ ID NO: 30935 - DNA, 26 bp, Homo sapiens
gggctggggtttctccttctcgctgc

SEQ ID NO: 30936 - DNA, 26 bp, Homo sapiens
ggctggggtttctccttctcgctgcc

SEQ ID NO: 30937 - DNA, 26 bp, Homo sapiens
gctggggtttctccttctcgctgccc

SEQ ID NO: 30938 - DNA, 26 bp, Homo sapiens
ctggggtttctccttctcgctgccct

SEQ ID NO: 30939 - DNA, 26 bp, Homo sapiens
tggggtttctccttctcgctgccctc

SEQ ID NO: 30940 - DNA, 26 bp, Homo sapiens
ggggtttctccttctcgctgccctct

SEQ ID NO: 30941 - DNA, 26 bp, Homo sapiens
gggtttctccttctcgctgccctctt

SEQ ID NO: 30942 - DNA, 26 bp, Homo sapiens
ggtttctccttctcgctgccctcttt

SEQ ID NO: 30943 - DNA, 26 bp, Homo sapiens
gtttctccttctcgctgccctctttc

SEQ ID NO: 30944 - DNA, 26 bp, Homo sapiens
tttctccttctcgctgccctctttca

SEQ ID NO: 30945 - DNA, 26 bp, Homo sapiens
ttctccttctcgctgccctctttcat

SEQ ID NO: 30946 - DNA, 26 bp, Homo sapiens
tctccttctcgctgccctctttcatc

SEQ ID NO: 30947 - DNA, 26 bp, Homo sapiens
ctccttctcgctgccctctttcatca

SEQ ID NO: 30948 - DNA, 26 bp, Homo sapiens
tccttctcgctgccctctttcatcag

SEQ ID NO: 30949 - DNA, 26 bp, Homo sapiens
ccttctcgctgccctctttcatcagc

SEQ ID NO: 30950 - DNA, 26 bp, Homo sapiens
cttctcgctgccctctttcatcagct

SEQ ID NO: 30951 - DNA, 26 bp, Homo sapiens
ttctcgctgccctctttcatcagctt

SEQ ID NO: 30952 - DNA, 26 bp, Homo sapiens
tctcgctgccctctttcatcagcttc

SEQ ID NO: 30953 - DNA, 26 bp, Homo sapiens
ctcgctgccctctttcatcagcttct

SEQ ID NO: 30954 - DNA, 26 bp, Homo sapiens
tcgctgccctctttcatcagcttctc

SEQ ID NO: 30955 - DNA, 26 bp, Homo sapiens
cgctgccctctttcatcagcttctcc

SEQ ID NO: 30956 - DNA, 26 bp, Homo sapiens
gctgccctctttcatcagcttctcct

SEQ ID NO: 30957 - DNA, 26 bp, Homo sapiens
ctgccctctttcatcagcttctcctc

SEQ ID NO: 30958 - DNA, 26 bp, Homo sapiens
tgccctctttcatcagcttctcctcc

SEQ ID NO: 30959 - DNA, 26 bp, Homo sapiens
gccctctttcatcagcttctcctcct

SEQ ID NO: 30960 - DNA, 26 bp, Homo sapiens
ccctctttcatcagcttctcctcctc

SEQ ID NO: 30961 - DNA, 26 bp, Homo sapiens
cctctttcatcagcttctcctcctcc

SEQ ID NO: 30962 - DNA, 26 bp, Homo sapiens
ctctttcatcagcttctcctcctcct

SEQ ID NO: 30963 - DNA, 26 bp, Homo sapiens
tctttcatcagcttctcctcctcctt

SEQ ID NO: 30964 - DNA, 26 bp, Homo sapiens
ctttcatcagcttctcctcctccttc

SEQ ID NO: 30965 - DNA, 26 bp, Homo sapiens
tttcatcagcttctcctcctccttca

SEQ ID NO: 30966 - DNA, 26 bp, Homo sapiens
ttcatcagcttctcctcctccttcag

SEQ ID NO: 30967 - DNA, 26 bp, Homo sapiens
tcatcagcttctcctcctccttcagg

SEQ ID NO: 30968 - DNA, 26 bp, Homo sapiens
catcagcttctcctcctccttcaggg

SEQ ID NO: 30969 - DNA, 26 bp, Homo sapiens
atcagcttctcctcctccttcagggg

SEQ ID NO: 30970 - DNA, 26 bp, Homo sapiens
tcagcttctcctcctccttcagggga

SEQ ID NO: 30971 - DNA, 26 bp, Homo sapiens
cagcttctcctcctccttcaggggac

SEQ ID NO: 30972 - DNA, 26 bp, Homo sapiens
agcttctcctcctccttcaggggacc

SEQ ID NO: 30973 - DNA, 26 bp, Homo sapiens
gcttctcctcctccttcaggggaccc

SEQ ID NO: 30974 - DNA, 26 bp, Homo sapiens
cttctcctcctccttcaggggaccca

SEQ ID NO: 30975 - DNA, 26 bp, Homo sapiens
ttctcctcctccttcaggggacccag

SEQ ID NO: 30976 - DNA, 26 bp, Homo sapiens
tctcctcctccttcaggggacccagc

SEQ ID NO: 30977 - DNA, 26 bp, Homo sapiens
ctcctcctccttcaggggacccagct

SEQ ID NO: 30978 - DNA, 26 bp, Homo sapiens
tcctcctccttcaggggacccagctc

SEQ ID NO: 30979 - DNA, 26 bp, Homo sapiens
cctcctccttcaggggacccagctcg

SEQ ID NO: 30980 - DNA, 26 bp, Homo sapiens
ctcctccttcaggggacccagctcgg

SEQ ID NO: 30981 - DNA, 26 bp, Homo sapiens
tcctccttcaggggacccagctcggt

SEQ ID NO: 30982 - DNA, 26 bp, Homo sapiens
cctccttcaggggacccagctcggtc

SEQ ID NO: 30983 - DNA, 26 bp, Homo sapiens
ctccttcaggggacccagctcggtct

SEQ ID NO: 30984 - DNA, 26 bp, Homo sapiens
tccttcaggggacccagctcggtctt

SEQ ID NO: 30985 - DNA, 26 bp, Homo sapiens
ccttcaggggacccagctcggtcttt

SEQ ID NO: 30986 - DNA, 26 bp, Homo sapiens
cttcaggggacccagctcggtctttt

SEQ ID NO: 30987 - DNA, 26 bp, Homo sapiens
ttcaggggacccagctcggtcttttt

SEQ ID NO: 30988 - DNA, 26 bp, Homo sapiens
tcaggggacccagctcggtctttttg

SEQ ID NO: 30989 - DNA, 26 bp, Homo sapiens
caggggacccagctcggtctttttgg

SEQ ID NO: 30990 - DNA, 26 bp, Homo sapiens
aggggacccagctcggtctttttggc

SEQ ID NO: 30991 - DNA, 26 bp, Homo sapiens
ggggacccagctcggtctttttggct

SEQ ID NO: 30992 - DNA, 26 bp, Homo sapiens
gggacccagctcggtctttttggctt

SEQ ID NO: 30993 - DNA, 26 bp, Homo sapiens
ggacccagctcggtctttttggcttc

SEQ ID NO: 30994 - DNA, 26 bp, Homo sapiens
gacccagctcggtctttttggcttct

SEQ ID NO: 30995 - DNA, 26 bp, Homo sapiens
acccagctcggtctttttggcttctg

SEQ ID NO: 30996 - DNA, 26 bp, Homo sapiens
cccagctcggtctttttggcttctgg

SEQ ID NO: 30997 - DNA, 26 bp, Homo sapiens
ccagctcggtctttttggcttctgga

SEQ ID NO: 30998 - DNA, 26 bp, Homo sapiens
cagctcggtctttttggcttctggag

SEQ ID NO: 30999 - DNA, 26 bp, Homo sapiens
agctcggtctttttggcttctggagg

SEQ ID NO: 31000 - DNA, 26 bp, Homo sapiens
gctcggtctttttggcttctggaggt

SEQ ID NO: 31001 - DNA, 26 bp, Homo sapiens
ctcggtctttttggcttctggaggtg

SEQ ID NO: 31002 - DNA, 26 bp, Homo sapiens
tcggtctttttggcttctggaggtgt

SEQ ID NO: 31003 - DNA, 26 bp, Homo sapiens
cggtctttttggcttctggaggtgtt

SEQ ID NO: 31004 - DNA, 26 bp, Homo sapiens
ggtctttttggcttctggaggtgttt

SEQ ID NO: 31005 - DNA, 26 bp, Homo sapiens
gtctttttggcttctggaggtgtttc

SEQ ID NO: 31006 - DNA, 26 bp, Homo sapiens
tctttttggcttctggaggtgtttca

SEQ ID NO: 31007 - DNA, 26 bp, Homo sapiens
ctttttggcttctggaggtgtttcac

SEQ ID NO: 31008 - DNA, 26 bp, Homo sapiens
tttttggcttctggaggtgtttcact

SEQ ID NO: 31009 - DNA, 26 bp, Homo sapiens
ttttggcttctggaggtgtttcactt

SEQ ID NO: 31010 - DNA, 26 bp, Homo sapiens
tttggcttctggaggtgtttcacttt

SEQ ID NO: 31011 - DNA, 26 bp, Homo sapiens
ttggcttctggaggtgtttcactttt

SEQ ID NO: 31012 - DNA, 26 bp, Homo sapiens
tggcttctggaggtgtttcacttttg

SEQ ID NO: 31013 - DNA, 26 bp, Homo sapiens
ggcttctggaggtgtttcacttttgc

SEQ ID NO: 31014 - DNA, 26 bp, Homo sapiens
gcttctggaggtgtttcacttttgcg

SEQ ID NO: 31015 - DNA, 26 bp, Homo sapiens
cttctggaggtgtttcacttttgcgg

SEQ ID NO: 31016 - DNA, 26 bp, Homo sapiens
ttctggaggtgtttcacttttgcgga

SEQ ID NO: 31017 - DNA, 26 bp, Homo sapiens
tctggaggtgtttcacttttgcggaa

SEQ ID NO: 31018 - DNA, 26 bp, Homo sapiens
ctggaggtgtttcacttttgcggaaa

SEQ ID NO: 31019 - DNA, 26 bp, Homo sapiens
tggaggtgtttcacttttgcggaaag

SEQ ID NO: 31020 - DNA, 26 bp, Homo sapiens
ggaggtgtttcacttttgcggaaaga

SEQ ID NO: 31021 - DNA, 26 bp, Homo sapiens
gaggtgtttcacttttgcggaaagaa

SEQ ID NO: 31022 - DNA, 26 bp, Homo sapiens
aggtgtttcacttttgcggaaagaat

SEQ ID NO: 31023 - DNA, 26 bp, Homo sapiens
ggtgtttcacttttgcggaaagaatc

SEQ ID NO: 31024 - DNA, 26 bp, Homo sapiens
gtgtttcacttttgcggaaagaatcg

SEQ ID NO: 31025 - DNA, 26 bp, Homo sapiens
tgtttcacttttgcggaaagaatcgc

SEQ ID NO: 31026 - DNA, 26 bp, Homo sapiens
gtttcacttttgcggaaagaatcgcc

SEQ ID NO: 31027 - DNA, 26 bp, Homo sapiens
tttcacttttgcggaaagaatcgccc

SEQ ID NO: 31028 - DNA, 26 bp, Homo sapiens
ttcacttttgcggaaagaatcgccct

SEQ ID NO: 31029 - DNA, 26 bp, Homo sapiens
tcacttttgcggaaagaatcgccctc

SEQ ID NO: 31030 - DNA, 26 bp, Homo sapiens
cacttttgcggaaagaatcgccctca

SEQ ID NO: 31031 - DNA, 26 bp, Homo sapiens
acttttgcggaaagaatcgccctcac

SEQ ID NO: 31032 - DNA, 26 bp, Homo sapiens
cttttgcggaaagaatcgccctcact

SEQ ID NO: 31033 - DNA, 26 bp, Homo sapiens
ttttgcggaaagaatcgccctcactg

SEQ ID NO: 31034 - DNA, 26 bp, Homo sapiens
tttgcggaaagaatcgccctcactgt

SEQ ID NO: 31035 - DNA, 26 bp, Homo sapiens
ttgcggaaagaatcgccctcactgtg

SEQ ID NO: 31036 - DNA, 26 bp, Homo sapiens
tgcggaaagaatcgccctcactgtgg

SEQ ID NO: 31037 - DNA, 26 bp, Homo sapiens
gcggaaagaatcgccctcactgtggc

SEQ ID NO: 31038 - DNA, 26 bp, Homo sapiens
cggaaagaatcgccctcactgtggct

SEQ ID NO: 31039 - DNA, 26 bp, Homo sapiens
ggaaagaatcgccctcactgtggctg

SEQ ID NO: 31040 - DNA, 26 bp, Homo sapiens
gaaagaatcgccctcactgtggctga

SEQ ID NO: 31041 - DNA, 26 bp, Homo sapiens
aaagaatcgccctcactgtggctgaa

SEQ ID NO: 31042 - DNA, 26 bp, Homo sapiens
aagaatcgccctcactgtggctgaaa

SEQ ID NO: 31043 - DNA, 26 bp, Homo sapiens
agaatcgccctcactgtggctgaaag

SEQ ID NO: 31044 - DNA, 26 bp, Homo sapiens
gaatcgccctcactgtggctgaaaga

SEQ ID NO: 31045 - DNA, 26 bp, Homo sapiens
aatcgccctcactgtggctgaaagat

SEQ ID NO: 31046 - DNA, 26 bp, Homo sapiens
atcgccctcactgtggctgaaagatg

SEQ ID NO: 31047 - DNA, 26 bp, Homo sapiens
tcgccctcactgtggctgaaagatga

SEQ ID NO: 31048 - DNA, 26 bp, Homo sapiens
cgccctcactgtggctgaaagatgag

SEQ ID NO: 31049 - DNA, 26 bp, Homo sapiens
gccctcactgtggctgaaagatgagg

SEQ ID NO: 31050 - DNA, 26 bp, Homo sapiens
ccctcactgtggctgaaagatgaggc

SEQ ID NO: 31051 - DNA, 26 bp, Homo sapiens
cctcactgtggctgaaagatgaggcc

SEQ ID NO: 31052 - DNA, 26 bp, Homo sapiens
ctcactgtggctgaaagatgaggcct

SEQ ID NO: 31053 - DNA, 26 bp, Homo sapiens
tcactgtggctgaaagatgaggcctc

SEQ ID NO: 31054 - DNA, 26 bp, Homo sapiens
cactgtggctgaaagatgaggcctct

SEQ ID NO: 31055 - DNA, 26 bp, Homo sapiens
actgtggctgaaagatgaggcctctt

SEQ ID NO: 31056 - DNA, 26 bp, Homo sapiens
ctgtggctgaaagatgaggcctcttc

SEQ ID NO: 31057 - DNA, 26 bp, Homo sapiens
tgtggctgaaagatgaggcctcttcg

SEQ ID NO: 31058 - DNA, 26 bp, Homo sapiens
gtggctgaaagatgaggcctcttcgt

SEQ ID NO: 31059 - DNA, 26 bp, Homo sapiens
tggctgaaagatgaggcctcttcgtg

SEQ ID NO: 31060 - DNA, 26 bp, Homo sapiens
ggctgaaagatgaggcctcttcgtgg

SEQ ID NO: 31061 - DNA, 26 bp, Homo sapiens
gctgaaagatgaggcctcttcgtggg

SEQ ID NO: 31062 - DNA, 26 bp, Homo sapiens
ctgaaagatgaggcctcttcgtgggg

SEQ ID NO: 31063 - DNA, 26 bp, Homo sapiens
tgaaagatgaggcctcttcgtgggga

SEQ ID NO: 31064 - DNA, 26 bp, Homo sapiens
gaaagatgaggcctcttcgtggggac

SEQ ID NO: 31065 - DNA, 26 bp, Homo sapiens
aaagatgaggcctcttcgtggggact

SEQ ID NO: 31066 - DNA, 26 bp, Homo sapiens
aagatgaggcctcttcgtggggactt

SEQ ID NO: 31067 - DNA, 26 bp, Homo sapiens
agatgaggcctcttcgtggggacttt

SEQ ID NO: 31068 - DNA, 26 bp, Homo sapiens
gatgaggcctcttcgtggggactttc

SEQ ID NO: 31069 - DNA, 26 bp, Homo sapiens
atgaggcctcttcgtggggactttct

SEQ ID NO: 31070 - DNA, 26 bp, Homo sapiens
tgaggcctcttcgtggggactttctt

SEQ ID NO: 31071 - DNA, 26 bp, Homo sapiens
gaggcctcttcgtggggactttcttt

SEQ ID NO: 31072 - DNA, 26 bp, Homo sapiens
aggcctcttcgtggggactttctttc

SEQ ID NO: 31073 - DNA, 26 bp, Homo sapiens
ggcctcttcgtggggactttctttcc

SEQ ID NO: 31074 - DNA, 26 bp, Homo sapiens
gcctcttcgtggggactttctttccc

SEQ ID NO: 31075 - DNA, 26 bp, Homo sapiens
cctcttcgtggggactttctttccca

SEQ ID NO: 31076 - DNA, 26 bp, Homo sapiens
ctcttcgtggggactttctttcccac

SEQ ID NO: 31077 - DNA, 26 bp, Homo sapiens
tcttcgtggggactttctttcccaca

SEQ ID NO: 31078 - DNA, 26 bp, Homo sapiens
cttcgtggggactttctttcccacac

SEQ ID NO: 31079 - DNA, 26 bp, Homo sapiens
ttcgtggggactttctttcccacact

SEQ ID NO: 31080 - DNA, 26 bp, Homo sapiens
tcgtggggactttctttcccacactc

SEQ ID NO: 31081 - DNA, 26 bp, Homo sapiens
cgtggggactttctttcccacactcc

SEQ ID NO: 31082 - DNA, 26 bp, Homo sapiens
gtggggactttctttcccacactcct

SEQ ID NO: 31083 - DNA, 26 bp, Homo sapiens
tggggactttctttcccacactcctt

SEQ ID NO: 31084 - DNA, 26 bp, Homo sapiens
ggggactttctttcccacactccttc

SEQ ID NO: 31085 - DNA, 26 bp, Homo sapiens
gggactttctttcccacactccttca

SEQ ID NO: 31086 - DNA, 26 bp, Homo sapiens
ggactttctttcccacactccttcac

SEQ ID NO: 31087 - DNA, 26 bp, Homo sapiens
gactttctttcccacactccttcacc

SEQ ID NO: 31088 - DNA, 26 bp, Homo sapiens
actttctttcccacactccttcaccg

SEQ ID NO: 31089 - DNA, 26 bp, Homo sapiens
ctttctttcccacactccttcaccgc

SEQ ID NO: 31090 - DNA, 26 bp, Homo sapiens
tttctttcccacactccttcaccgct

SEQ ID NO: 31091 - DNA, 26 bp, Homo sapiens
ttctttcccacactccttcaccgctt

SEQ ID NO: 31092 - DNA, 26 bp, Homo sapiens
tctttcccacactccttcaccgcttc

SEQ ID NO: 31093 - DNA, 26 bp, Homo sapiens
ctttcccacactccttcaccgcttca

SEQ ID NO: 31094 - DNA, 26 bp, Homo sapiens
tttcccacactccttcaccgcttcat

SEQ ID NO: 31095 - DNA, 26 bp, Homo sapiens
ttcccacactccttcaccgcttcatc

SEQ ID NO: 31096 - DNA, 26 bp, Homo sapiens
tcccacactccttcaccgcttcatct

SEQ ID NO: 31097 - DNA, 26 bp, Homo sapiens
cccacactccttcaccgcttcatctt

SEQ ID NO: 31098 - DNA, 26 bp, Homo sapiens
ccacactccttcaccgcttcatcttt

SEQ ID NO: 31099 - DNA, 26 bp, Homo sapiens
cacactccttcaccgcttcatctttg

SEQ ID NO: 31100 - DNA, 26 bp, Homo sapiens
acactccttcaccgcttcatctttgt

SEQ ID NO: 31101 - DNA, 26 bp, Homo sapiens
cactccttcaccgcttcatctttgtc

SEQ ID NO: 31102 - DNA, 26 bp, Homo sapiens
actccttcaccgcttcatctttgtct

SEQ ID NO: 31103 - DNA, 26 bp, Homo sapiens
ctccttcaccgcttcatctttgtctt

SEQ ID NO: 31104 - DNA, 26 bp, Homo sapiens
tccttcaccgcttcatctttgtcttc

SEQ ID NO: 31105 - DNA, 26 bp, Homo sapiens
ccttcaccgcttcatctttgtcttct

SEQ ID NO: 31106 - DNA, 26 bp, Homo sapiens
cttcaccgcttcatctttgtcttctg

SEQ ID NO: 31107 - DNA, 26 bp, Homo sapiens
ttcaccgcttcatctttgtcttctga

SEQ ID NO: 31108 - DNA, 26 bp, Homo sapiens
tcaccgcttcatctttgtcttctgac

SEQ ID NO: 31109 - DNA, 26 bp, Homo sapiens
caccgcttcatctttgtcttctgact

SEQ ID NO: 31110 - DNA, 26 bp, Homo sapiens
accgcttcatctttgtcttctgactc

SEQ ID NO: 31111 - DNA, 26 bp, Homo sapiens
ccgcttcatctttgtcttctgactct

SEQ ID NO: 31112 - DNA, 26 bp, Homo sapiens
cgcttcatctttgtcttctgactctt

SEQ ID NO: 31113 - DNA, 26 bp, Homo sapiens
gcttcatctttgtcttctgactcttt

SEQ ID NO: 31114 - DNA, 26 bp, Homo sapiens
cttcatctttgtcttctgactctttc

SEQ ID NO: 31115 - DNA, 26 bp, Homo sapiens
ttcatctttgtcttctgactctttct

SEQ ID NO: 31116 - DNA, 26 bp, Homo sapiens
tcatctttgtcttctgactctttctt

SEQ ID NO: 31117 - DNA, 26 bp, Homo sapiens
catctttgtcttctgactctttcttg

SEQ ID NO: 31118 - DNA, 26 bp, Homo sapiens
atctttgtcttctgactctttcttga

SEQ ID NO: 31119 - DNA, 26 bp, Homo sapiens
tctttgtcttctgactctttcttgac

SEQ ID NO: 31120 - DNA, 26 bp, Homo sapiens
ctttgtcttctgactctttcttgact

SEQ ID NO: 31121 - DNA, 26 bp, Homo sapiens
tttgtcttctgactctttcttgactt

SEQ ID NO: 31122 - DNA, 26 bp, Homo sapiens
ttgtcttctgactctttcttgacttg

SEQ ID NO: 31123 - DNA, 26 bp, Homo sapiens
tgtcttctgactctttcttgacttga

SEQ ID NO: 31124 - DNA, 26 bp, Homo sapiens
gtcttctgactctttcttgacttgag

SEQ ID NO: 31125 - DNA, 26 bp, Homo sapiens
tcttctgactctttcttgacttgagt

SEQ ID NO: 31126 - DNA, 26 bp, Homo sapiens
cttctgactctttcttgacttgagtg

SEQ ID NO: 31127 - DNA, 26 bp, Homo sapiens
ttctgactctttcttgacttgagtgt

SEQ ID NO: 31128 - DNA, 26 bp, Homo sapiens
tctgactctttcttgacttgagtgta

SEQ ID NO: 31129 - DNA, 26 bp, Homo sapiens
ctgactctttcttgacttgagtgtaa

SEQ ID NO: 31130 - DNA, 26 bp, Homo sapiens
tgactctttcttgacttgagtgtaag

SEQ ID NO: 31131 - DNA, 26 bp, Homo sapiens
gactctttcttgacttgagtgtaagg

SEQ ID NO: 31132 - DNA, 26 bp, Homo sapiens
actctttcttgacttgagtgtaaggg

SEQ ID NO: 31133 - DNA, 26 bp, Homo sapiens
ctctttcttgacttgagtgtaagggg

SEQ ID NO: 31134 - DNA, 26 bp, Homo sapiens
tctttcttgacttgagtgtaaggggc

SEQ ID NO: 31135 - DNA, 26 bp, Homo sapiens
ctttcttgacttgagtgtaaggggcc

SEQ ID NO: 31136 - DNA, 26 bp, Homo sapiens
tttcttgacttgagtgtaaggggcca

SEQ ID NO: 31137 - DNA, 26 bp, Homo sapiens
ttcttgacttgagtgtaaggggccag

SEQ ID NO: 31138 - DNA, 26 bp, Homo sapiens
tcttgacttgagtgtaaggggccagg

SEQ ID NO: 31139 - DNA, 26 bp, Homo sapiens
cttgacttgagtgtaaggggccaggt

SEQ ID NO: 31140 - DNA, 26 bp, Homo sapiens
ttgacttgagtgtaaggggccaggtg

SEQ ID NO: 31141 - DNA, 26 bp, Homo sapiens
tgacttgagtgtaaggggccaggtgt

SEQ ID NO: 31142 - DNA, 26 bp, Homo sapiens
gacttgagtgtaaggggccaggtgtg

SEQ ID NO: 31143 - DNA, 26 bp, Homo sapiens
acttgagtgtaaggggccaggtgtgt

SEQ ID NO: 31144 - DNA, 26 bp, Homo sapiens
cttgagtgtaaggggccaggtgtgtg

SEQ ID NO: 31145 - DNA, 26 bp, Homo sapiens
ttgagtgtaaggggccaggtgtgtgg

SEQ ID NO: 31146 - DNA, 26 bp, Homo sapiens
tgagtgtaaggggccaggtgtgtggg

SEQ ID NO: 31147 - DNA, 26 bp, Homo sapiens
gagtgtaaggggccaggtgtgtgggc

SEQ ID NO: 31148 - DNA, 26 bp, Homo sapiens
agtgtaaggggccaggtgtgtgggca

SEQ ID NO: 31149 - DNA, 26 bp, Homo sapiens
gtgtaaggggccaggtgtgtgggcat

SEQ ID NO: 31150 - DNA, 26 bp, Homo sapiens
tgtaaggggccaggtgtgtgggcata

SEQ ID NO: 31151 - DNA, 26 bp, Homo sapiens
gtaaggggccaggtgtgtgggcatag

SEQ ID NO: 31152 - DNA, 26 bp, Homo sapiens
taaggggccaggtgtgtgggcataga

SEQ ID NO: 31153 - DNA, 26 bp, Homo sapiens
aaggggccaggtgtgtgggcatagaa

SEQ ID NO: 31154 - DNA, 26 bp, Homo sapiens
aggggccaggtgtgtgggcatagaaa

SEQ ID NO: 31155 - DNA, 26 bp, Homo sapiens
ggggccaggtgtgtgggcatagaaac

SEQ ID NO: 31156 - DNA, 26 bp, Homo sapiens
gggccaggtgtgtgggcatagaaacc

SEQ ID NO: 31157 - DNA, 26 bp, Homo sapiens
ggccaggtgtgtgggcatagaaacca

SEQ ID NO: 31158 - DNA, 26 bp, Homo sapiens
gccaggtgtgtgggcatagaaaccag

SEQ ID NO: 31159 - DNA, 26 bp, Homo sapiens
ccaggtgtgtgggcatagaaaccagt

SEQ ID NO: 31160 - DNA, 26 bp, Homo sapiens
caggtgtgtgggcatagaaaccagtg

SEQ ID NO: 31161 - DNA, 26 bp, Homo sapiens
aggtgtgtgggcatagaaaccagtgg

SEQ ID NO: 31162 - DNA, 26 bp, Homo sapiens
ggtgtgtgggcatagaaaccagtggc

SEQ ID NO: 31163 - DNA, 26 bp, Homo sapiens
gtgtgtgggcatagaaaccagtggca

SEQ ID NO: 31164 - DNA, 26 bp, Homo sapiens
tgtgtgggcatagaaaccagtggcat

SEQ ID NO: 31165 - DNA, 26 bp, Homo sapiens
gtgtgggcatagaaaccagtggcatc

SEQ ID NO: 31166 - DNA, 26 bp, Homo sapiens
tgtgggcatagaaaccagtggcatca

SEQ ID NO: 31167 - DNA, 26 bp, Homo sapiens
gtgggcatagaaaccagtggcatcac

SEQ ID NO: 31168 - DNA, 26 bp, Homo sapiens
tgggcatagaaaccagtggcatcact

SEQ ID NO: 31169 - DNA, 26 bp, Homo sapiens
gggcatagaaaccagtggcatcactt

SEQ ID NO: 31170 - DNA, 26 bp, Homo sapiens
ggcatagaaaccagtggcatcacttt

SEQ ID NO: 31171 - DNA, 26 bp, Homo sapiens
gcatagaaaccagtggcatcactttc

SEQ ID NO: 31172 - DNA, 26 bp, Homo sapiens
catagaaaccagtggcatcactttcc

SEQ ID NO: 31173 - DNA, 26 bp, Homo sapiens
atagaaaccagtggcatcactttcca

SEQ ID NO: 31174 - DNA, 26 bp, Homo sapiens
tagaaaccagtggcatcactttccac

SEQ ID NO: 31175 - DNA, 26 bp, Homo sapiens
agaaaccagtggcatcactttccact

SEQ ID NO: 31176 - DNA, 26 bp, Homo sapiens
gaaaccagtggcatcactttccactt

SEQ ID NO: 31177 - DNA, 26 bp, Homo sapiens
aaaccagtggcatcactttccacttt

SEQ ID NO: 31178 - DNA, 26 bp, Homo sapiens
aaccagtggcatcactttccactttg

SEQ ID NO: 31179 - DNA, 26 bp, Homo sapiens
accagtggcatcactttccactttgg

SEQ ID NO: 31180 - DNA, 26 bp, Homo sapiens
ccagtggcatcactttccactttggt

SEQ ID NO: 31181 - DNA, 26 bp, Homo sapiens
cagtggcatcactttccactttggtg

SEQ ID NO: 31182 - DNA, 26 bp, Homo sapiens
agtggcatcactttccactttggtgc

SEQ ID NO: 31183 - DNA, 26 bp, Homo sapiens
gtggcatcactttccactttggtgca

SEQ ID NO: 31184 - DNA, 26 bp, Homo sapiens
tggcatcactttccactttggtgcaa

SEQ ID NO: 31185 - DNA, 26 bp, Homo sapiens
ggcatcactttccactttggtgcaat

SEQ ID NO: 31186 - DNA, 26 bp, Homo sapiens
gcatcactttccactttggtgcaatg

SEQ ID NO: 31187 - DNA, 26 bp, Homo sapiens
catcactttccactttggtgcaatgg

SEQ ID NO: 31188 - DNA, 26 bp, Homo sapiens
atcactttccactttggtgcaatggg

SEQ ID NO: 31189 - DNA, 26 bp, Homo sapiens
tcactttccactttggtgcaatgggc

SEQ ID NO: 31190 - DNA, 26 bp, Homo sapiens
cactttccactttggtgcaatgggcc

SEQ ID NO: 31191 - DNA, 26 bp, Homo sapiens
actttccactttggtgcaatgggcct

SEQ ID NO: 31192 - DNA, 26 bp, Homo sapiens
ctttccactttggtgcaatgggcctc

SEQ ID NO: 31193 - DNA, 26 bp, Homo sapiens
tttccactttggtgcaatgggcctca

SEQ ID NO: 31194 - DNA, 26 bp, Homo sapiens
ttccactttggtgcaatgggcctcag

SEQ ID NO: 31195 - DNA, 26 bp, Homo sapiens
tccactttggtgcaatgggcctcagc

SEQ ID NO: 31196 - DNA, 26 bp, Homo sapiens
ccactttggtgcaatgggcctcagct

SEQ ID NO: 31197 - DNA, 26 bp, Homo sapiens
cactttggtgcaatgggcctcagctt

SEQ ID NO: 31198 - DNA, 26 bp, Homo sapiens
actttggtgcaatgggcctcagcttg

SEQ ID NO: 31199 - DNA, 26 bp, Homo sapiens
ctttggtgcaatgggcctcagcttgt

SEQ ID NO: 31200 - DNA, 26 bp, Homo sapiens
tttggtgcaatgggcctcagcttgtt

SEQ ID NO: 31201 - DNA, 26 bp, Homo sapiens
ttggtgcaatgggcctcagcttgttg

SEQ ID NO: 31202 - DNA, 26 bp, Homo sapiens
tggtgcaatgggcctcagcttgttgg

SEQ ID NO: 31203 - DNA, 26 bp, Homo sapiens
ggtgcaatgggcctcagcttgttggt

SEQ ID NO: 31204 - DNA, 26 bp, Homo sapiens
gtgcaatgggcctcagcttgttggtg

SEQ ID NO: 31205 - DNA, 26 bp, Homo sapiens
tgcaatgggcctcagcttgttggtga

SEQ ID NO: 31206 - DNA, 26 bp, Homo sapiens
gcaatgggcctcagcttgttggtgag

SEQ ID NO: 31207 - DNA, 26 bp, Homo sapiens
caatgggcctcagcttgttggtgaga

SEQ ID NO: 31208 - DNA, 26 bp, Homo sapiens
aatgggcctcagcttgttggtgagat

SEQ ID NO: 31209 - DNA, 26 bp, Homo sapiens
atgggcctcagcttgttggtgagatt

SEQ ID NO: 31210 - DNA, 26 bp, Homo sapiens
tgggcctcagcttgttggtgagatta

SEQ ID NO: 31211 - DNA, 26 bp, Homo sapiens
gggcctcagcttgttggtgagattag

SEQ ID NO: 31212 - DNA, 26 bp, Homo sapiens
ggcctcagcttgttggtgagattagg

SEQ ID NO: 31213 - DNA, 26 bp, Homo sapiens
gcctcagcttgttggtgagattaggc

SEQ ID NO: 31214 - DNA, 26 bp, Homo sapiens
cctcagcttgttggtgagattaggcc

SEQ ID NO: 31215 - DNA, 26 bp, Homo sapiens
ctcagcttgttggtgagattaggccg

SEQ ID NO: 31216 - DNA, 26 bp, Homo sapiens
tcagcttgttggtgagattaggccgg

SEQ ID NO: 31217 - DNA, 26 bp, Homo sapiens
cagcttgttggtgagattaggccgga

SEQ ID NO: 31218 - DNA, 26 bp, Homo sapiens
agcttgttggtgagattaggccggat

SEQ ID NO: 31219 - DNA, 26 bp, Homo sapiens
gcttgttggtgagattaggccggatc

SEQ ID NO: 31220 - DNA, 26 bp, Homo sapiens
cttgttggtgagattaggccggatct

SEQ ID NO: 31221 - DNA, 26 bp, Homo sapiens
ttgttggtgagattaggccggatctg

SEQ ID NO: 31222 - DNA, 26 bp, Homo sapiens
tgttggtgagattaggccggatctgc

SEQ ID NO: 31223 - DNA, 26 bp, Homo sapiens
gttggtgagattaggccggatctgca

SEQ ID NO: 31224 - DNA, 26 bp, Homo sapiens
ttggtgagattaggccggatctgcag

SEQ ID NO: 31225 - DNA, 26 bp, Homo sapiens
tggtgagattaggccggatctgcagt

SEQ ID NO: 31226 - DNA, 26 bp, Homo sapiens
ggtgagattaggccggatctgcagta

SEQ ID NO: 31227 - DNA, 26 bp, Homo sapiens
gtgagattaggccggatctgcagtac

SEQ ID NO: 31228 - DNA, 26 bp, Homo sapiens
tgagattaggccggatctgcagtacc

SEQ ID NO: 31229 - DNA, 26 bp, Homo sapiens
gagattaggccggatctgcagtacct

SEQ ID NO: 31230 - DNA, 26 bp, Homo sapiens
agattaggccggatctgcagtacctg

SEQ ID NO: 31231 - DNA, 26 bp, Homo sapiens
gattaggccggatctgcagtacctgg

SEQ ID NO: 31232 - DNA, 26 bp, Homo sapiens
attaggccggatctgcagtacctggg

SEQ ID NO: 31233 - DNA, 26 bp, Homo sapiens
ttaggccggatctgcagtacctggga

SEQ ID NO: 31234 - DNA, 26 bp, Homo sapiens
taggccggatctgcagtacctgggat

SEQ ID NO: 31235 - DNA, 26 bp, Homo sapiens
aggccggatctgcagtacctgggatc

SEQ ID NO: 31236 - DNA, 26 bp, Homo sapiens
ggccggatctgcagtacctgggatcc

SEQ ID NO: 31237 - DNA, 26 bp, Homo sapiens
gccggatctgcagtacctgggatccc

SEQ ID NO: 31238 - DNA, 26 bp, Homo sapiens
ccggatctgcagtacctgggatccca

SEQ ID NO: 31239 - DNA, 26 bp, Homo sapiens
cggatctgcagtacctgggatcccat

SEQ ID NO: 31240 - DNA, 26 bp, Homo sapiens
ggatctgcagtacctgggatcccata

SEQ ID NO: 31241 - DNA, 26 bp, Homo sapiens
gatctgcagtacctgggatcccatag

SEQ ID NO: 31242 - DNA, 26 bp, Homo sapiens
atctgcagtacctgggatcccatagg

SEQ ID NO: 31243 - DNA, 26 bp, Homo sapiens
tctgcagtacctgggatcccataggc

SEQ ID NO: 31244 - DNA, 26 bp, Homo sapiens
ctgcagtacctgggatcccataggca

SEQ ID NO: 31245 - DNA, 26 bp, Homo sapiens
tgcagtacctgggatcccataggcaa

SEQ ID NO: 31246 - DNA, 26 bp, Homo sapiens
gcagtacctgggatcccataggcaaa

SEQ ID NO: 31247 - DNA, 26 bp, Homo sapiens
cagtacctgggatcccataggcaaag

SEQ ID NO: 31248 - DNA, 26 bp, Homo sapiens
agtacctgggatcccataggcaaagg

SEQ ID NO: 31249 - DNA, 26 bp, Homo sapiens
gtacctgggatcccataggcaaaggc

SEQ ID NO: 31250 - DNA, 26 bp, Homo sapiens
tacctgggatcccataggcaaaggcg

SEQ ID NO: 31251 - DNA, 26 bp, Homo sapiens
acctgggatcccataggcaaaggcgg

SEQ ID NO: 31252 - DNA, 26 bp, Homo sapiens
cctgggatcccataggcaaaggcggc

SEQ ID NO: 31253 - DNA, 26 bp, Homo sapiens
ctgggatcccataggcaaaggcggct

SEQ ID NO: 31254 - DNA, 26 bp, Homo sapiens
tgggatcccataggcaaaggcggctt

SEQ ID NO: 31255 - DNA, 26 bp, Homo sapiens
gggatcccataggcaaaggcggcttg

SEQ ID NO: 31256 - DNA, 26 bp, Homo sapiens
ggatcccataggcaaaggcggcttgg

SEQ ID NO: 31257 - DNA, 26 bp, Homo sapiens
gatcccataggcaaaggcggcttggt

SEQ ID NO: 31258 - DNA, 26 bp, Homo sapiens
atcccataggcaaaggcggcttggtg

SEQ ID NO: 31259 - DNA, 26 bp, Homo sapiens
tcccataggcaaaggcggcttggtgc

SEQ ID NO: 31260 - DNA, 26 bp, Homo sapiens
cccataggcaaaggcggcttggtgcc

SEQ ID NO: 31261 - DNA, 26 bp, Homo sapiens
ccataggcaaaggcggcttggtgccc

SEQ ID NO: 31262 - DNA, 26 bp, Homo sapiens
cataggcaaaggcggcttggtgccct

SEQ ID NO: 31263 - DNA, 26 bp, Homo sapiens
ataggcaaaggcggcttggtgccctc

SEQ ID NO: 31264 - DNA, 26 bp, Homo sapiens
taggcaaaggcggcttggtgccctca

SEQ ID NO: 31265 - DNA, 26 bp, Homo sapiens
aggcaaaggcggcttggtgccctcag

SEQ ID NO: 31266 - DNA, 26 bp, Homo sapiens
ggcaaaggcggcttggtgccctcaga

SEQ ID NO: 31267 - DNA, 26 bp, Homo sapiens
gcaaaggcggcttggtgccctcagac

SEQ ID NO: 31268 - DNA, 26 bp, Homo sapiens
caaaggcggcttggtgccctcagaca

SEQ ID NO: 31269 - DNA, 26 bp, Homo sapiens
aaaggcggcttggtgccctcagacag

SEQ ID NO: 31270 - DNA, 26 bp, Homo sapiens
aaggcggcttggtgccctcagacagc

SEQ ID NO: 31271 - DNA, 26 bp, Homo sapiens
aggcggcttggtgccctcagacagct

SEQ ID NO: 31272 - DNA, 26 bp, Homo sapiens
ggcggcttggtgccctcagacagctg

SEQ ID NO: 31273 - DNA, 26 bp, Homo sapiens
gcggcttggtgccctcagacagctgg

SEQ ID NO: 31274 - DNA, 26 bp, Homo sapiens
cggcttggtgccctcagacagctggt

SEQ ID NO: 31275 - DNA, 26 bp, Homo sapiens
ggcttggtgccctcagacagctggta

SEQ ID NO: 31276 - DNA, 26 bp, Homo sapiens
gcttggtgccctcagacagctggtag

SEQ ID NO: 31277 - DNA, 26 bp, Homo sapiens
cttggtgccctcagacagctggtagg

SEQ ID NO: 31278 - DNA, 26 bp, Homo sapiens
ttggtgccctcagacagctggtaggc

SEQ ID NO: 31279 - DNA, 26 bp, Homo sapiens
tggtgccctcagacagctggtaggct

SEQ ID NO: 31280 - DNA, 26 bp, Homo sapiens
ggtgccctcagacagctggtaggctg

SEQ ID NO: 31281 - DNA, 26 bp, Homo sapiens
gtgccctcagacagctggtaggctgc

SEQ ID NO: 31282 - DNA, 26 bp, Homo sapiens
tgccctcagacagctggtaggctgcg

SEQ ID NO: 31283 - DNA, 26 bp, Homo sapiens
gccctcagacagctggtaggctgcgt

SEQ ID NO: 31284 - DNA, 26 bp, Homo sapiens
ccctcagacagctggtaggctgcgtg

SEQ ID NO: 31285 - DNA, 26 bp, Homo sapiens
cctcagacagctggtaggctgcgtgg

SEQ ID NO: 31286 - DNA, 26 bp, Homo sapiens
ctcagacagctggtaggctgcgtgga

SEQ ID NO: 31287 - DNA, 26 bp, Homo sapiens
tcagacagctggtaggctgcgtggat

SEQ ID NO: 31288 - DNA, 26 bp, Homo sapiens
cagacagctggtaggctgcgtggatg

SEQ ID NO: 31289 - DNA, 26 bp, Homo sapiens
agacagctggtaggctgcgtggatgc

SEQ ID NO: 31290 - DNA, 26 bp, Homo sapiens
gacagctggtaggctgcgtggatgct

SEQ ID NO: 31291 - DNA, 26 bp, Homo sapiens
acagctggtaggctgcgtggatgctg

SEQ ID NO: 31292 - DNA, 26 bp, Homo sapiens
cagctggtaggctgcgtggatgctgg

SEQ ID NO: 31293 - DNA, 26 bp, Homo sapiens
agctggtaggctgcgtggatgctggg

SEQ ID NO: 31294 - DNA, 26 bp, Homo sapiens
gctggtaggctgcgtggatgctgggg

SEQ ID NO: 31295 - DNA, 26 bp, Homo sapiens
ctggtaggctgcgtggatgctggggt

SEQ ID NO: 31296 - DNA, 26 bp, Homo sapiens
tggtaggctgcgtggatgctggggta

SEQ ID NO: 31297 - DNA, 26 bp, Homo sapiens
ggtaggctgcgtggatgctggggtag

SEQ ID NO: 31298 - DNA, 26 bp, Homo sapiens
gtaggctgcgtggatgctggggtagg

SEQ ID NO: 31299 - DNA, 26 bp, Homo sapiens
taggctgcgtggatgctggggtaggc

SEQ ID NO: 31300 - DNA, 26 bp, Homo sapiens
aggctgcgtggatgctggggtaggca

SEQ ID NO: 31301 - DNA, 26 bp, Homo sapiens
ggctgcgtggatgctggggtaggcac

SEQ ID NO: 31302 - DNA, 26 bp, Homo sapiens
gctgcgtggatgctggggtaggcact

SEQ ID NO: 31303 - DNA, 26 bp, Homo sapiens
ctgcgtggatgctggggtaggcactc

SEQ ID NO: 31304 - DNA, 26 bp, Homo sapiens
tgcgtggatgctggggtaggcactcc

SEQ ID NO: 31305 - DNA, 26 bp, Homo sapiens
gcgtggatgctggggtaggcactcca

SEQ ID NO: 31306 - DNA, 26 bp, Homo sapiens
cgtggatgctggggtaggcactccag

SEQ ID NO: 31307 - DNA, 26 bp, Homo sapiens
gtggatgctggggtaggcactccagc

SEQ ID NO: 31308 - DNA, 26 bp, Homo sapiens
tggatgctggggtaggcactccagct

SEQ ID NO: 31309 - DNA, 26 bp, Homo sapiens
ggatgctggggtaggcactccagctg

SEQ ID NO: 31310 - DNA, 26 bp, Homo sapiens
gatgctggggtaggcactccagctgg

SEQ ID NO: 31311 - DNA, 26 bp, Homo sapiens
atgctggggtaggcactccagctggg

SEQ ID NO: 31312 - DNA, 26 bp, Homo sapiens
tgctggggtaggcactccagctgggg

SEQ ID NO: 31313 - DNA, 26 bp, Homo sapiens
gctggggtaggcactccagctggggg

SEQ ID NO: 31314 - DNA, 26 bp, Homo sapiens
ctggggtaggcactccagctgggggc

SEQ ID NO: 31315 - DNA, 26 bp, Homo sapiens
tggggtaggcactccagctgggggcc

SEQ ID NO: 31316 - DNA, 26 bp, Homo sapiens
ggggtaggcactccagctgggggccc

SEQ ID NO: 31317 - DNA, 26 bp, Homo sapiens
gggtaggcactccagctgggggcccc

SEQ ID NO: 31318 - DNA, 26 bp, Homo sapiens
ggtaggcactccagctgggggccccg

SEQ ID NO: 31319 - DNA, 26 bp, Homo sapiens
gtaggcactccagctgggggccccgt

SEQ ID NO: 31320 - DNA, 26 bp, Homo sapiens
taggcactccagctgggggccccgtt

SEQ ID NO: 31321 - DNA, 26 bp, Homo sapiens
aggcactccagctgggggccccgttt

SEQ ID NO: 31322 - DNA, 26 bp, Homo sapiens
ggcactccagctgggggccccgtttt

SEQ ID NO: 31323 - DNA, 26 bp, Homo sapiens
gcactccagctgggggccccgttttg

SEQ ID NO: 31324 - DNA, 26 bp, Homo sapiens
cactccagctgggggccccgttttgg

SEQ ID NO: 31325 - DNA, 26 bp, Homo sapiens
actccagctgggggccccgttttggg

SEQ ID NO: 31326 - DNA, 26 bp, Homo sapiens
ctccagctgggggccccgttttgggc

SEQ ID NO: 31327 - DNA, 26 bp, Homo sapiens
tccagctgggggccccgttttgggct

SEQ ID NO: 31328 - DNA, 26 bp, Homo sapiens
ccagctgggggccccgttttgggctt

SEQ ID NO: 31329 - DNA, 26 bp, Homo sapiens
cagctgggggccccgttttgggcttt

SEQ ID NO: 31330 - DNA, 26 bp, Homo sapiens
agctgggggccccgttttgggctttg

SEQ ID NO: 31331 - DNA, 26 bp, Homo sapiens
gctgggggccccgttttgggctttgt

SEQ ID NO: 31332 - DNA, 26 bp, Homo sapiens
ctgggggccccgttttgggctttgtt

SEQ ID NO: 31333 - DNA, 26 bp, Homo sapiens
tgggggccccgttttgggctttgttg

SEQ ID NO: 31334 - DNA, 26 bp, Homo sapiens
gggggccccgttttgggctttgttga

SEQ ID NO: 31335 - DNA, 26 bp, Homo sapiens
ggggccccgttttgggctttgttgat

SEQ ID NO: 31336 - DNA, 26 bp, Homo sapiens
gggccccgttttgggctttgttgatg

SEQ ID NO: 31337 - DNA, 26 bp, Homo sapiens
ggccccgttttgggctttgttgatgg

SEQ ID NO: 31338 - DNA, 26 bp, Homo sapiens
gccccgttttgggctttgttgatggc

SEQ ID NO: 31339 - DNA, 26 bp, Homo sapiens
ccccgttttgggctttgttgatggct

SEQ ID NO: 31340 - DNA, 26 bp, Homo sapiens
cccgttttgggctttgttgatggctg

SEQ ID NO: 31341 - DNA, 26 bp, Homo sapiens
ccgttttgggctttgttgatggctgt

SEQ ID NO: 31342 - DNA, 26 bp, Homo sapiens
cgttttgggctttgttgatggctgtg

SEQ ID NO: 31343 - DNA, 26 bp, Homo sapiens
gttttgggctttgttgatggctgtgg

SEQ ID NO: 31344 - DNA, 26 bp, Homo sapiens
ttttgggctttgttgatggctgtggt

SEQ ID NO: 31345 - DNA, 26 bp, Homo sapiens
tttgggctttgttgatggctgtggtg

SEQ ID NO: 31346 - DNA, 26 bp, Homo sapiens
ttgggctttgttgatggctgtggtga

SEQ ID NO: 31347 - DNA, 26 bp, Homo sapiens
tgggctttgttgatggctgtggtgac

SEQ ID NO: 31348 - DNA, 26 bp, Homo sapiens
gggctttgttgatggctgtggtgaca

SEQ ID NO: 31349 - DNA, 26 bp, Homo sapiens
ggctttgttgatggctgtggtgacag

SEQ ID NO: 31350 - DNA, 26 bp, Homo sapiens
gctttgttgatggctgtggtgacagt

SEQ ID NO: 31351 - DNA, 26 bp, Homo sapiens
ctttgttgatggctgtggtgacagta

SEQ ID NO: 31352 - DNA, 26 bp, Homo sapiens
tttgttgatggctgtggtgacagtat

SEQ ID NO: 31353 - DNA, 26 bp, Homo sapiens
ttgttgatggctgtggtgacagtatt

SEQ ID NO: 31354 - DNA, 26 bp, Homo sapiens
tgttgatggctgtggtgacagtattt

SEQ ID NO: 31355 - DNA, 26 bp, Homo sapiens
gttgatggctgtggtgacagtatttt

SEQ ID NO: 31356 - DNA, 26 bp, Homo sapiens
ttgatggctgtggtgacagtattttc

SEQ ID NO: 31357 - DNA, 26 bp, Homo sapiens
tgatggctgtggtgacagtattttcc

SEQ ID NO: 31358 - DNA, 26 bp, Homo sapiens
gatggctgtggtgacagtattttcca

SEQ ID NO: 31359 - DNA, 26 bp, Homo sapiens
atggctgtggtgacagtattttccaa

SEQ ID NO: 31360 - DNA, 26 bp, Homo sapiens
tggctgtggtgacagtattttccaaa

SEQ ID NO: 31361 - DNA, 26 bp, Homo sapiens
ggctgtggtgacagtattttccaaag

SEQ ID NO: 31362 - DNA, 26 bp, Homo sapiens
gctgtggtgacagtattttccaaaga

SEQ ID NO: 31363 - DNA, 26 bp, Homo sapiens
ctgtggtgacagtattttccaaagat

SEQ ID NO: 31364 - DNA, 26 bp, Homo sapiens
tgtggtgacagtattttccaaagatt

SEQ ID NO: 31365 - DNA, 26 bp, Homo sapiens
gtggtgacagtattttccaaagattt

SEQ ID NO: 31366 - DNA, 26 bp, Homo sapiens
tggtgacagtattttccaaagatttc

SEQ ID NO: 31367 - DNA, 26 bp, Homo sapiens
ggtgacagtattttccaaagatttca

SEQ ID NO: 31368 - DNA, 26 bp, Homo sapiens
gtgacagtattttccaaagatttcaa

SEQ ID NO: 31369 - DNA, 26 bp, Homo sapiens
tgacagtattttccaaagatttcaaa

SEQ ID NO: 31370 - DNA, 26 bp, Homo sapiens
gacagtattttccaaagatttcaaaa

SEQ ID NO: 31371 - DNA, 26 bp, Homo sapiens
acagtattttccaaagatttcaaaat

SEQ ID NO: 31372 - DNA, 26 bp, Homo sapiens
cagtattttccaaagatttcaaaatg

SEQ ID NO: 31373 - DNA, 26 bp, Homo sapiens
agtattttccaaagatttcaaaatgt

SEQ ID NO: 31374 - DNA, 26 bp, Homo sapiens
gtattttccaaagatttcaaaatgtc

SEQ ID NO: 31375 - DNA, 26 bp, Homo sapiens
tattttccaaagatttcaaaatgtcc

SEQ ID NO: 31376 - DNA, 26 bp, Homo sapiens
attttccaaagatttcaaaatgtccc

SEQ ID NO: 31377 - DNA, 26 bp, Homo sapiens
ttttccaaagatttcaaaatgtcccc

SEQ ID NO: 31378 - DNA, 26 bp, Homo sapiens
tttccaaagatttcaaaatgtcccct

SEQ ID NO: 31379 - DNA, 26 bp, Homo sapiens
ttccaaagatttcaaaatgtcccctc

SEQ ID NO: 31380 - DNA, 26 bp, Homo sapiens
tccaaagatttcaaaatgtcccctcc

SEQ ID NO: 31381 - DNA, 26 bp, Homo sapiens
ccaaagatttcaaaatgtcccctcca

SEQ ID NO: 31382 - DNA, 26 bp, Homo sapiens
caaagatttcaaaatgtcccctccac

SEQ ID NO: 31383 - DNA, 26 bp, Homo sapiens
aaagatttcaaaatgtcccctccacc

SEQ ID NO: 31384 - DNA, 26 bp, Homo sapiens
aagatttcaaaatgtcccctccaccc

SEQ ID NO: 31385 - DNA, 26 bp, Homo sapiens
agatttcaaaatgtcccctccaccct

SEQ ID NO: 31386 - DNA, 26 bp, Homo sapiens
gatttcaaaatgtcccctccaccctt

SEQ ID NO: 31387 - DNA, 26 bp, Homo sapiens
atttcaaaatgtcccctccacccttt

SEQ ID NO: 31388 - DNA, 26 bp, Homo sapiens
tttcaaaatgtcccctccaccctttg

SEQ ID NO: 31389 - DNA, 26 bp, Homo sapiens
ttcaaaatgtcccctccaccctttga

SEQ ID NO: 31390 - DNA, 26 bp, Homo sapiens
tcaaaatgtcccctccaccctttgag

SEQ ID NO: 31391 - DNA, 26 bp, Homo sapiens
caaaatgtcccctccaccctttgagc

SEQ ID NO: 31392 - DNA, 26 bp, Homo sapiens
aaaatgtcccctccaccctttgagcc

SEQ ID NO: 31393 - DNA, 26 bp, Homo sapiens
aaatgtcccctccaccctttgagcca

SEQ ID NO: 31394 - DNA, 26 bp, Homo sapiens
aatgtcccctccaccctttgagccat

SEQ ID NO: 31395 - DNA, 26 bp, Homo sapiens
atgtcccctccaccctttgagccatc

SEQ ID NO: 31396 - DNA, 26 bp, Homo sapiens
tgtcccctccaccctttgagccatct

SEQ ID NO: 31397 - DNA, 26 bp, Homo sapiens
gtcccctccaccctttgagccatctt

SEQ ID NO: 31398 - DNA, 26 bp, Homo sapiens
tcccctccaccctttgagccatcttc

SEQ ID NO: 31399 - DNA, 26 bp, Homo sapiens
cccctccaccctttgagccatcttcc

SEQ ID NO: 31400 - DNA, 26 bp, Homo sapiens
ccctccaccctttgagccatcttcca

SEQ ID NO: 31401 - DNA, 26 bp, Homo sapiens
cctccaccctttgagccatcttccaa

SEQ ID NO: 31402 - DNA, 26 bp, Homo sapiens
ctccaccctttgagccatcttccaag

SEQ ID NO: 31403 - DNA, 26 bp, Homo sapiens
tccaccctttgagccatcttccaagt

SEQ ID NO: 31404 - DNA, 26 bp, Homo sapiens
ccaccctttgagccatcttccaagtc

SEQ ID NO: 31405 - DNA, 26 bp, Homo sapiens
caccctttgagccatcttccaagtct

SEQ ID NO: 31406 - DNA, 26 bp, Homo sapiens
accctttgagccatcttccaagtctt

SEQ ID NO: 31407 - DNA, 26 bp, Homo sapiens
ccctttgagccatcttccaagtcttc

SEQ ID NO: 31408 - DNA, 26 bp, Homo sapiens
cctttgagccatcttccaagtcttcc

SEQ ID NO: 31409 - DNA, 26 bp, Homo sapiens
ctttgagccatcttccaagtcttcct

SEQ ID NO: 31410 - DNA, 26 bp, Homo sapiens
tttgagccatcttccaagtcttcctc

SEQ ID NO: 31411 - DNA, 26 bp, Homo sapiens
ttgagccatcttccaagtcttcctcc

SEQ ID NO: 31412 - DNA, 26 bp, Homo sapiens
tgagccatcttccaagtcttcctccc

SEQ ID NO: 31413 - DNA, 26 bp, Homo sapiens
gagccatcttccaagtcttcctccct

SEQ ID NO: 31414 - DNA, 26 bp, Homo sapiens
agccatcttccaagtcttcctccctt

SEQ ID NO: 31415 - DNA, 26 bp, Homo sapiens
gccatcttccaagtcttcctccctta

SEQ ID NO: 31416 - DNA, 26 bp, Homo sapiens
ccatcttccaagtcttcctcccttag

SEQ ID NO: 31417 - DNA, 26 bp, Homo sapiens
catcttccaagtcttcctcccttagg

SEQ ID NO: 31418 - DNA, 26 bp, Homo sapiens
atcttccaagtcttcctcccttaggt

SEQ ID NO: 31419 - DNA, 26 bp, Homo sapiens
tcttccaagtcttcctcccttaggta

SEQ ID NO: 31420 - DNA, 26 bp, Homo sapiens
cttccaagtcttcctcccttaggtat

SEQ ID NO: 31421 - DNA, 26 bp, Homo sapiens
ttccaagtcttcctcccttaggtatt

SEQ ID NO: 31422 - DNA, 26 bp, Homo sapiens
tccaagtcttcctcccttaggtattg

SEQ ID NO: 31423 - DNA, 26 bp, Homo sapiens
ccaagtcttcctcccttaggtattga

SEQ ID NO: 31424 - DNA, 26 bp, Homo sapiens
caagtcttcctcccttaggtattgat

SEQ ID NO: 31425 - DNA, 26 bp, Homo sapiens
aagtcttcctcccttaggtattgata

SEQ ID NO: 31426 - DNA, 26 bp, Homo sapiens
agtcttcctcccttaggtattgatat

SEQ ID NO: 31427 - DNA, 26 bp, Homo sapiens
gtcttcctcccttaggtattgatatt

SEQ ID NO: 31428 - DNA, 26 bp, Homo sapiens
tcttcctcccttaggtattgatattt

SEQ ID NO: 31429 - DNA, 26 bp, Homo sapiens
cttcctcccttaggtattgatatttg

SEQ ID NO: 31430 - DNA, 26 bp, Homo sapiens
ttcctcccttaggtattgatatttga

SEQ ID NO: 31431 - DNA, 26 bp, Homo sapiens
tcctcccttaggtattgatatttgat

SEQ ID NO: 31432 - DNA, 26 bp, Homo sapiens
cctcccttaggtattgatatttgatt

SEQ ID NO: 31433 - DNA, 26 bp, Homo sapiens
ctcccttaggtattgatatttgattg

SEQ ID NO: 31434 - DNA, 26 bp, Homo sapiens
tcccttaggtattgatatttgattgt

SEQ ID NO: 31435 - DNA, 26 bp, Homo sapiens
cccttaggtattgatatttgattgta

SEQ ID NO: 31436 - DNA, 26 bp, Homo sapiens
ccttaggtattgatatttgattgtag

SEQ ID NO: 31437 - DNA, 26 bp, Homo sapiens
cttaggtattgatatttgattgtagg

SEQ ID NO: 31438 - DNA, 26 bp, Homo sapiens
ttaggtattgatatttgattgtaggg

SEQ ID NO: 31439 - DNA, 26 bp, Homo sapiens
taggtattgatatttgattgtagggt

SEQ ID NO: 31440 - DNA, 26 bp, Homo sapiens
aggtattgatatttgattgtagggtc

SEQ ID NO: 31441 - DNA, 26 bp, Homo sapiens
ggtattgatatttgattgtagggtct

SEQ ID NO: 31442 - DNA, 26 bp, Homo sapiens
gtattgatatttgattgtagggtcta

SEQ ID NO: 31443 - DNA, 26 bp, Homo sapiens
tattgatatttgattgtagggtctaa

SEQ ID NO: 31444 - DNA, 26 bp, Homo sapiens
attgatatttgattgtagggtctaaa

SEQ ID NO: 31445 - DNA, 26 bp, Homo sapiens
ttgatatttgattgtagggtctaaag

SEQ ID NO: 31446 - DNA, 26 bp, Homo sapiens
tgatatttgattgtagggtctaaagg

SEQ ID NO: 31447 - DNA, 26 bp, Homo sapiens
gatatttgattgtagggtctaaaggt

SEQ ID NO: 31448 - DNA, 26 bp, Homo sapiens
atatttgattgtagggtctaaaggtt

SEQ ID NO: 31449 - DNA, 26 bp, Homo sapiens
tatttgattgtagggtctaaaggttt

SEQ ID NO: 31450 - DNA, 26 bp, Homo sapiens
atttgattgtagggtctaaaggtttt

SEQ ID NO: 31451 - DNA, 26 bp, Homo sapiens
tttgattgtagggtctaaaggttttt

SEQ ID NO: 31452 - DNA, 26 bp, Homo sapiens
ttgattgtagggtctaaaggtttttg

SEQ ID NO: 31453 - DNA, 26 bp, Homo sapiens
tgattgtagggtctaaaggtttttgt

SEQ ID NO: 31454 - DNA, 26 bp, Homo sapiens
gattgtagggtctaaaggtttttgta

SEQ ID NO: 31455 - DNA, 26 bp, Homo sapiens
attgtagggtctaaaggtttttgtag

SEQ ID NO: 31456 - DNA, 26 bp, Homo sapiens
ttgtagggtctaaaggtttttgtaga

SEQ ID NO: 31457 - DNA, 26 bp, Homo sapiens
tgtagggtctaaaggtttttgtagag

SEQ ID NO: 31458 - DNA, 26 bp, Homo sapiens
gtagggtctaaaggtttttgtagagg

SEQ ID NO: 31459 - DNA, 26 bp, Homo sapiens
tagggtctaaaggtttttgtagagga

SEQ ID NO: 31460 - DNA, 26 bp, Homo sapiens
agggtctaaaggtttttgtagaggat

SEQ ID NO: 31461 - DNA, 26 bp, Homo sapiens
gggtctaaaggtttttgtagaggatc

SEQ ID NO: 31462 - DNA, 26 bp, Homo sapiens
ggtctaaaggtttttgtagaggatct

SEQ ID NO: 31463 - DNA, 26 bp, Homo sapiens
gtctaaaggtttttgtagaggatctt

SEQ ID NO: 31464 - DNA, 26 bp, Homo sapiens
tctaaaggtttttgtagaggatcttc

SEQ ID NO: 31465 - DNA, 26 bp, Homo sapiens
ctaaaggtttttgtagaggatcttca

SEQ ID NO: 31466 - DNA, 26 bp, Homo sapiens
taaaggtttttgtagaggatcttcat

SEQ ID NO: 31467 - DNA, 26 bp, Homo sapiens
aaaggtttttgtagaggatcttcata

SEQ ID NO: 31468 - DNA, 26 bp, Homo sapiens
aaggtttttgtagaggatcttcatag

SEQ ID NO: 31469 - DNA, 26 bp, Homo sapiens
aggtttttgtagaggatcttcatagt

SEQ ID NO: 31470 - DNA, 26 bp, Homo sapiens
ggtttttgtagaggatcttcatagtc

SEQ ID NO: 31471 - DNA, 26 bp, Homo sapiens
gtttttgtagaggatcttcatagtcc

SEQ ID NO: 31472 - DNA, 26 bp, Homo sapiens
tttttgtagaggatcttcatagtcct

SEQ ID NO: 31473 - DNA, 26 bp, Homo sapiens
ttttgtagaggatcttcatagtcctc

SEQ ID NO: 31474 - DNA, 26 bp, Homo sapiens
tttgtagaggatcttcatagtcctcg

SEQ ID NO: 31475 - DNA, 26 bp, Homo sapiens
ttgtagaggatcttcatagtcctcgc

SEQ ID NO: 31476 - DNA, 26 bp, Homo sapiens
tgtagaggatcttcatagtcctcgct

SEQ ID NO: 31477 - DNA, 26 bp, Homo sapiens
gtagaggatcttcatagtcctcgctt

SEQ ID NO: 31478 - DNA, 26 bp, Homo sapiens
tagaggatcttcatagtcctcgcttt

SEQ ID NO: 31479 - DNA, 26 bp, Homo sapiens
agaggatcttcatagtcctcgctttt

SEQ ID NO: 31480 - DNA, 26 bp, Homo sapiens
gaggatcttcatagtcctcgcttttc

SEQ ID NO: 31481 - DNA, 26 bp, Homo sapiens
aggatcttcatagtcctcgcttttca

SEQ ID NO: 31482 - DNA, 26 bp, Homo sapiens
ggatcttcatagtcctcgcttttcac

SEQ ID NO: 31483 - DNA, 26 bp, Homo sapiens
gatcttcatagtcctcgcttttcacg

SEQ ID NO: 31484 - DNA, 26 bp, Homo sapiens
atcttcatagtcctcgcttttcacga

SEQ ID NO: 31485 - DNA, 26 bp, Homo sapiens
tcttcatagtcctcgcttttcacgac

SEQ ID NO: 31486 - DNA, 26 bp, Homo sapiens
cttcatagtcctcgcttttcacgact

SEQ ID NO: 31487 - DNA, 26 bp, Homo sapiens
ttcatagtcctcgcttttcacgactt

SEQ ID NO: 31488 - DNA, 26 bp, Homo sapiens
tcatagtcctcgcttttcacgacttt

SEQ ID NO: 31489 - DNA, 26 bp, Homo sapiens
catagtcctcgcttttcacgactttc

SEQ ID NO: 31490 - DNA, 26 bp, Homo sapiens
atagtcctcgcttttcacgactttct

SEQ ID NO: 31491 - DNA, 26 bp, Homo sapiens
tagtcctcgcttttcacgactttctc

SEQ ID NO: 31492 - DNA, 26 bp, Homo sapiens
agtcctcgcttttcacgactttctca

SEQ ID NO: 31493 - DNA, 26 bp, Homo sapiens
gtcctcgcttttcacgactttctcat

SEQ ID NO: 31494 - DNA, 26 bp, Homo sapiens
tcctcgcttttcacgactttctcatc

SEQ ID NO: 31495 - DNA, 26 bp, Homo sapiens
cctcgcttttcacgactttctcatcc

SEQ ID NO: 31496 - DNA, 26 bp, Homo sapiens
ctcgcttttcacgactttctcatcct

SEQ ID NO: 31497 - DNA, 26 bp, Homo sapiens
tcgcttttcacgactttctcatcctt

SEQ ID NO: 31498 - DNA, 26 bp, Homo sapiens
cgcttttcacgactttctcatccttg

SEQ ID NO: 31499 - DNA, 26 bp, Homo sapiens
gcttttcacgactttctcatccttgc

SEQ ID NO: 31500 - DNA, 26 bp, Homo sapiens
cttttcacgactttctcatccttgct

SEQ ID NO: 31501 - DNA, 26 bp, Homo sapiens
ttttcacgactttctcatccttgctg

SEQ ID NO: 31502 - DNA, 26 bp, Homo sapiens
tttcacgactttctcatccttgctgg

SEQ ID NO: 31503 - DNA, 26 bp, Homo sapiens
ttcacgactttctcatccttgctggt

SEQ ID NO: 31504 - DNA, 26 bp, Homo sapiens
tcacgactttctcatccttgctggtt

SEQ ID NO: 31505 - DNA, 26 bp, Homo sapiens
cacgactttctcatccttgctggttt

SEQ ID NO: 31506 - DNA, 26 bp, Homo sapiens
acgactttctcatccttgctggtttc

SEQ ID NO: 31507 - DNA, 26 bp, Homo sapiens
cgactttctcatccttgctggtttcc

SEQ ID NO: 31508 - DNA, 26 bp, Homo sapiens
gactttctcatccttgctggtttcct

SEQ ID NO: 31509 - DNA, 26 bp, Homo sapiens
actttctcatccttgctggtttcctc

SEQ ID NO: 31510 - DNA, 26 bp, Homo sapiens
ctttctcatccttgctggtttcctct

SEQ ID NO: 31511 - DNA, 26 bp, Homo sapiens
tttctcatccttgctggtttcctctg

SEQ ID NO: 31512 - DNA, 26 bp, Homo sapiens
ttctcatccttgctggtttcctctgg

SEQ ID NO: 31513 - DNA, 26 bp, Homo sapiens
tctcatccttgctggtttcctctggc

SEQ ID NO: 31514 - DNA, 26 bp, Homo sapiens
ctcatccttgctggtttcctctggcc

SEQ ID NO: 31515 - DNA, 26 bp, Homo sapiens
tcatccttgctggtttcctctggcct

SEQ ID NO: 31516 - DNA, 26 bp, Homo sapiens
catccttgctggtttcctctggcctt

SEQ ID NO: 31517 - DNA, 26 bp, Homo sapiens
atccttgctggtttcctctggccttt

SEQ ID NO: 31518 - DNA, 26 bp, Homo sapiens
tccttgctggtttcctctggcctttc

SEQ ID NO: 31519 - DNA, 26 bp, Homo sapiens
ccttgctggtttcctctggcctttct

SEQ ID NO: 31520 - DNA, 26 bp, Homo sapiens
cttgctggtttcctctggcctttctt

SEQ ID NO: 31521 - DNA, 26 bp, Homo sapiens
ttgctggtttcctctggcctttcttt

SEQ ID NO: 31522 - DNA, 26 bp, Homo sapiens
tgctggtttcctctggcctttctttt

SEQ ID NO: 31523 - DNA, 26 bp, Homo sapiens
gctggtttcctctggcctttcttttt

SEQ ID NO: 31524 - DNA, 26 bp, Homo sapiens
ctggtttcctctggcctttctttttt

SEQ ID NO: 31525 - DNA, 26 bp, Homo sapiens
tggtttcctctggcctttctttttta

SEQ ID NO: 31526 - DNA, 26 bp, Homo sapiens
ggtttcctctggcctttcttttttac

SEQ ID NO: 31527 - DNA, 26 bp, Homo sapiens
gtttcctctggcctttcttttttact

SEQ ID NO: 31528 - DNA, 26 bp, Homo sapiens
tttcctctggcctttcttttttactc

SEQ ID NO: 31529 - DNA, 26 bp, Homo sapiens
ttcctctggcctttcttttttactct

SEQ ID NO: 31530 - DNA, 26 bp, Homo sapiens
tcctctggcctttcttttttactctc

SEQ ID NO: 31531 - DNA, 26 bp, Homo sapiens
cctctggcctttcttttttactctct

SEQ ID NO: 31532 - DNA, 26 bp, Homo sapiens
ctctggcctttcttttttactctctt

SEQ ID NO: 31533 - DNA, 26 bp, Homo sapiens
tctggcctttcttttttactctcttt

SEQ ID NO: 31534 - DNA, 26 bp, Homo sapiens
ctggcctttcttttttactctctttc

SEQ ID NO: 31535 - DNA, 26 bp, Homo sapiens
tggcctttcttttttactctctttct

SEQ ID NO: 31536 - DNA, 26 bp, Homo sapiens
ggcctttcttttttactctctttctt

SEQ ID NO: 31537 - DNA, 26 bp, Homo sapiens
gcctttcttttttactctctttcttt

SEQ ID NO: 31538 - DNA, 26 bp, Homo sapiens
cctttcttttttactctctttcttta

SEQ ID NO: 31539 - DNA, 26 bp, Homo sapiens
ctttcttttttactctctttctttaa

SEQ ID NO: 31540 - DNA, 26 bp, Homo sapiens
tttcttttttactctctttctttaac

SEQ ID NO: 31541 - DNA, 26 bp, Homo sapiens
ttcttttttactctctttctttaact

SEQ ID NO: 31542 - DNA, 26 bp, Homo sapiens
tcttttttactctctttctttaactc

SEQ ID NO: 31543 - DNA, 26 bp, Homo sapiens
cttttttactctctttctttaactca

SEQ ID NO: 31544 - DNA, 26 bp, Homo sapiens
ttttttactctctttctttaactcag

SEQ ID NO: 31545 - DNA, 26 bp, Homo sapiens
tttttactctctttctttaactcagt

SEQ ID NO: 31546 - DNA, 26 bp, Homo sapiens
ttttactctctttctttaactcagtt

SEQ ID NO: 31547 - DNA, 26 bp, Homo sapiens
tttactctctttctttaactcagttg

SEQ ID NO: 31548 - DNA, 26 bp, Homo sapiens
ttactctctttctttaactcagttgt

SEQ ID NO: 31549 - DNA, 26 bp, Homo sapiens
tactctctttctttaactcagttgta

SEQ ID NO: 31550 - DNA, 26 bp, Homo sapiens
actctctttctttaactcagttgtag

SEQ ID NO: 31551 - DNA, 26 bp, Homo sapiens
ctctctttctttaactcagttgtaga

SEQ ID NO: 31552 - DNA, 26 bp, Homo sapiens
tctctttctttaactcagttgtagag

SEQ ID NO: 31553 - DNA, 26 bp, Homo sapiens
ctctttctttaactcagttgtagagg

SEQ ID NO: 31554 - DNA, 26 bp, Homo sapiens
tctttctttaactcagttgtagaggc

SEQ ID NO: 31555 - DNA, 26 bp, Homo sapiens
ctttctttaactcagttgtagaggct

SEQ ID NO: 31556 - DNA, 26 bp, Homo sapiens
tttctttaactcagttgtagaggctg

SEQ ID NO: 31557 - DNA, 26 bp, Homo sapiens
ttctttaactcagttgtagaggctgt

SEQ ID NO: 31558 - DNA, 26 bp, Homo sapiens
tctttaactcagttgtagaggctgta

SEQ ID NO: 31559 - DNA, 26 bp, Homo sapiens
ctttaactcagttgtagaggctgtac

SEQ ID NO: 31560 - DNA, 26 bp, Homo sapiens
tttaactcagttgtagaggctgtaca

SEQ ID NO: 31561 - DNA, 26 bp, Homo sapiens
ttaactcagttgtagaggctgtacaa

SEQ ID NO: 31562 - DNA, 26 bp, Homo sapiens
taactcagttgtagaggctgtacaat

SEQ ID NO: 31563 - DNA, 26 bp, Homo sapiens
aactcagttgtagaggctgtacaatc

SEQ ID NO: 31564 - DNA, 26 bp, Homo sapiens
actcagttgtagaggctgtacaatct

SEQ ID NO: 31565 - DNA, 26 bp, Homo sapiens
ctcagttgtagaggctgtacaatctg

SEQ ID NO: 31566 - DNA, 26 bp, Homo sapiens
tcagttgtagaggctgtacaatctga

SEQ ID NO: 31567 - DNA, 26 bp, Homo sapiens
cagttgtagaggctgtacaatctgat

SEQ ID NO: 31568 - DNA, 26 bp, Homo sapiens
agttgtagaggctgtacaatctgatg

SEQ ID NO: 31569 - DNA, 26 bp, Homo sapiens
gttgtagaggctgtacaatctgatgc

SEQ ID NO: 31570 - DNA, 26 bp, Homo sapiens
ttgtagaggctgtacaatctgatgct

SEQ ID NO: 31571 - DNA, 26 bp, Homo sapiens
tgtagaggctgtacaatctgatgctg

SEQ ID NO: 31572 - DNA, 26 bp, Homo sapiens
gtagaggctgtacaatctgatgctga

SEQ ID NO: 31573 - DNA, 26 bp, Homo sapiens
tagaggctgtacaatctgatgctgag

SEQ ID NO: 31574 - DNA, 26 bp, Homo sapiens
agaggctgtacaatctgatgctgagt

SEQ ID NO: 31575 - DNA, 26 bp, Homo sapiens
gaggctgtacaatctgatgctgagtt

SEQ ID NO: 31576 - DNA, 26 bp, Homo sapiens
aggctgtacaatctgatgctgagtta

SEQ ID NO: 31577 - DNA, 26 bp, Homo sapiens
ggctgtacaatctgatgctgagttac

SEQ ID NO: 31578 - DNA, 26 bp, Homo sapiens
gctgtacaatctgatgctgagttact

SEQ ID NO: 31579 - DNA, 26 bp, Homo sapiens
ctgtacaatctgatgctgagttactg

SEQ ID NO: 31580 - DNA, 26 bp, Homo sapiens
tgtacaatctgatgctgagttactgg

SEQ ID NO: 31581 - DNA, 26 bp, Homo sapiens
gtacaatctgatgctgagttactgga

SEQ ID NO: 31582 - DNA, 26 bp, Homo sapiens
tacaatctgatgctgagttactggat

SEQ ID NO: 31583 - DNA, 26 bp, Homo sapiens
acaatctgatgctgagttactggatg

SEQ ID NO: 31584 - DNA, 26 bp, Homo sapiens
caatctgatgctgagttactggatgg

SEQ ID NO: 31585 - DNA, 26 bp, Homo sapiens
aatctgatgctgagttactggatggc

SEQ ID NO: 31586 - DNA, 26 bp, Homo sapiens
atctgatgctgagttactggatggct

SEQ ID NO: 31587 - DNA, 26 bp, Homo sapiens
tctgatgctgagttactggatggctt

SEQ ID NO: 31588 - DNA, 26 bp, Homo sapiens
ctgatgctgagttactggatggcttg

SEQ ID NO: 31589 - DNA, 26 bp, Homo sapiens
tgatgctgagttactggatggcttgg

SEQ ID NO: 31590 - DNA, 26 bp, Homo sapiens
gatgctgagttactggatggcttggg

SEQ ID NO: 31591 - DNA, 26 bp, Homo sapiens
atgctgagttactggatggcttggga

SEQ ID NO: 31592 - DNA, 26 bp, Homo sapiens
tgctgagttactggatggcttgggag

SEQ ID NO: 31593 - DNA, 26 bp, Homo sapiens
gctgagttactggatggcttgggagc

SEQ ID NO: 31594 - DNA, 26 bp, Homo sapiens
ctgagttactggatggcttgggagcc

SEQ ID NO: 31595 - DNA, 26 bp, Homo sapiens
tgagttactggatggcttgggagcca

SEQ ID NO: 31596 - DNA, 26 bp, Homo sapiens
gagttactggatggcttgggagccag

SEQ ID NO: 31597 - DNA, 26 bp, Homo sapiens
agttactggatggcttgggagccaga

SEQ ID NO: 31598 - DNA, 26 bp, Homo sapiens
gttactggatggcttgggagccagag

SEQ ID NO: 31599 - DNA, 26 bp, Homo sapiens
ttactggatggcttgggagccagaga

SEQ ID NO: 31600 - DNA, 26 bp, Homo sapiens
tactggatggcttgggagccagagaa

SEQ ID NO: 31601 - DNA, 26 bp, Homo sapiens
actggatggcttgggagccagagaat

SEQ ID NO: 31602 - DNA, 26 bp, Homo sapiens
ctggatggcttgggagccagagaatc

SEQ ID NO: 31603 - DNA, 26 bp, Homo sapiens
tggatggcttgggagccagagaatca

SEQ ID NO: 31604 - DNA, 26 bp, Homo sapiens
ggatggcttgggagccagagaatcac

SEQ ID NO: 31605 - DNA, 26 bp, Homo sapiens
gatggcttgggagccagagaatcact

SEQ ID NO: 31606 - DNA, 26 bp, Homo sapiens
atggcttgggagccagagaatcactg

SEQ ID NO: 31607 - DNA, 26 bp, Homo sapiens
tggcttgggagccagagaatcactgt

SEQ ID NO: 31608 - DNA, 26 bp, Homo sapiens
ggcttgggagccagagaatcactgtt

SEQ ID NO: 31609 - DNA, 26 bp, Homo sapiens
gcttgggagccagagaatcactgttt

SEQ ID NO: 31610 - DNA, 26 bp, Homo sapiens
cttgggagccagagaatcactgtttg

SEQ ID NO: 31611 - DNA, 26 bp, Homo sapiens
ttgggagccagagaatcactgtttgg

SEQ ID NO: 31612 - DNA, 26 bp, Homo sapiens
tgggagccagagaatcactgtttggg

SEQ ID NO: 31613 - DNA, 26 bp, Homo sapiens
gggagccagagaatcactgtttgggg

SEQ ID NO: 31614 - DNA, 26 bp, Homo sapiens
ggagccagagaatcactgtttggggc

SEQ ID NO: 31615 - DNA, 26 bp, Homo sapiens
gagccagagaatcactgtttggggcc

SEQ ID NO: 31616 - DNA, 26 bp, Homo sapiens
agccagagaatcactgtttggggcct

SEQ ID NO: 31617 - DNA, 26 bp, Homo sapiens
gccagagaatcactgtttggggcctc

SEQ ID NO: 31618 - DNA, 26 bp, Homo sapiens
ccagagaatcactgtttggggcctca

SEQ ID NO: 31619 - DNA, 26 bp, Homo sapiens
cagagaatcactgtttggggcctcag

SEQ ID NO: 31620 - DNA, 26 bp, Homo sapiens
agagaatcactgtttggggcctcaga

SEQ ID NO: 31621 - DNA, 26 bp, Homo sapiens
gagaatcactgtttggggcctcagac

SEQ ID NO: 31622 - DNA, 26 bp, Homo sapiens
agaatcactgtttggggcctcagaca

SEQ ID NO: 31623 - DNA, 26 bp, Homo sapiens
gaatcactgtttggggcctcagacaa

SEQ ID NO: 31624 - DNA, 26 bp, Homo sapiens
aatcactgtttggggcctcagacaac

SEQ ID NO: 31625 - DNA, 26 bp, Homo sapiens
atcactgtttggggcctcagacaacg

SEQ ID NO: 31626 - DNA, 26 bp, Homo sapiens
tcactgtttggggcctcagacaacga

SEQ ID NO: 31627 - DNA, 26 bp, Homo sapiens
cactgtttggggcctcagacaacgac

SEQ ID NO: 31628 - DNA, 26 bp, Homo sapiens
actgtttggggcctcagacaacgact

SEQ ID NO: 31629 - DNA, 26 bp, Homo sapiens
ctgtttggggcctcagacaacgactg

SEQ ID NO: 31630 - DNA, 26 bp, Homo sapiens
tgtttggggcctcagacaacgactgc

SEQ ID NO: 31631 - DNA, 26 bp, Homo sapiens
gtttggggcctcagacaacgactgca

SEQ ID NO: 31632 - DNA, 26 bp, Homo sapiens
tttggggcctcagacaacgactgcat

SEQ ID NO: 31633 - DNA, 26 bp, Homo sapiens
ttggggcctcagacaacgactgcatt

SEQ ID NO: 31634 - DNA, 26 bp, Homo sapiens
tggggcctcagacaacgactgcattt

SEQ ID NO: 31635 - DNA, 26 bp, Homo sapiens
ggggcctcagacaacgactgcatttt

SEQ ID NO: 31636 - DNA, 26 bp, Homo sapiens
gggcctcagacaacgactgcattttc

SEQ ID NO: 31637 - DNA, 26 bp, Homo sapiens
ggcctcagacaacgactgcattttct

SEQ ID NO: 31638 - DNA, 26 bp, Homo sapiens
gcctcagacaacgactgcattttctc

SEQ ID NO: 31639 - DNA, 26 bp, Homo sapiens
cctcagacaacgactgcattttctcc

SEQ ID NO: 31640 - DNA, 26 bp, Homo sapiens
ctcagacaacgactgcattttctcca

SEQ ID NO: 31641 - DNA, 26 bp, Homo sapiens
tcagacaacgactgcattttctccac

SEQ ID NO: 31642 - DNA, 26 bp, Homo sapiens
cagacaacgactgcattttctccact

SEQ ID NO: 31643 - DNA, 26 bp, Homo sapiens
agacaacgactgcattttctccactg

SEQ ID NO: 31644 - DNA, 26 bp, Homo sapiens
gacaacgactgcattttctccactgc

SEQ ID NO: 31645 - DNA, 26 bp, Homo sapiens
acaacgactgcattttctccactgct

SEQ ID NO: 31646 - DNA, 26 bp, Homo sapiens
caacgactgcattttctccactgcta

SEQ ID NO: 31647 - DNA, 26 bp, Homo sapiens
aacgactgcattttctccactgctaa

SEQ ID NO: 31648 - DNA, 26 bp, Homo sapiens
acgactgcattttctccactgctaac

SEQ ID NO: 31649 - DNA, 26 bp, Homo sapiens
cgactgcattttctccactgctaacg

SEQ ID NO: 31650 - DNA, 26 bp, Homo sapiens
gactgcattttctccactgctaacgg

SEQ ID NO: 31651 - DNA, 26 bp, Homo sapiens
actgcattttctccactgctaacggg

SEQ ID NO: 31652 - DNA, 26 bp, Homo sapiens
ctgcattttctccactgctaacgggt

SEQ ID NO: 31653 - DNA, 26 bp, Homo sapiens
tgcattttctccactgctaacgggtc

SEQ ID NO: 31654 - DNA, 26 bp, Homo sapiens
gcattttctccactgctaacgggtct

SEQ ID NO: 31655 - DNA, 26 bp, Homo sapiens
cattttctccactgctaacgggtcta

SEQ ID NO: 31656 - DNA, 26 bp, Homo sapiens
attttctccactgctaacgggtctaa

SEQ ID NO: 31657 - DNA, 26 bp, Homo sapiens
ttttctccactgctaacgggtctaat

SEQ ID NO: 31658 - DNA, 26 bp, Homo sapiens
tttctccactgctaacgggtctaata

SEQ ID NO: 31659 - DNA, 26 bp, Homo sapiens
ttctccactgctaacgggtctaatac

SEQ ID NO: 31660 - DNA, 26 bp, Homo sapiens
tctccactgctaacgggtctaatacc

SEQ ID NO: 31661 - DNA, 26 bp, Homo sapiens
ctccactgctaacgggtctaatacca

SEQ ID NO: 31662 - DNA, 26 bp, Homo sapiens
tccactgctaacgggtctaataccag

SEQ ID NO: 31663 - DNA, 26 bp, Homo sapiens
ccactgctaacgggtctaataccagc

SEQ ID NO: 31664 - DNA, 26 bp, Homo sapiens
cactgctaacgggtctaataccagct

SEQ ID NO: 31665 - DNA, 26 bp, Homo sapiens
actgctaacgggtctaataccagctg

SEQ ID NO: 31666 - DNA, 26 bp, Homo sapiens
ctgctaacgggtctaataccagctgc

SEQ ID NO: 31667 - DNA, 26 bp, Homo sapiens
tgctaacgggtctaataccagctgct

SEQ ID NO: 31668 - DNA, 26 bp, Homo sapiens
gctaacgggtctaataccagctgctt

SEQ ID NO: 31669 - DNA, 26 bp, Homo sapiens
ctaacgggtctaataccagctgcttc

SEQ ID NO: 31670 - DNA, 26 bp, Homo sapiens
taacgggtctaataccagctgcttcc

SEQ ID NO: 31671 - DNA, 26 bp, Homo sapiens
aacgggtctaataccagctgcttccc

SEQ ID NO: 31672 - DNA, 26 bp, Homo sapiens
acgggtctaataccagctgcttccct

SEQ ID NO: 31673 - DNA, 26 bp, Homo sapiens
cgggtctaataccagctgcttccctt

SEQ ID NO: 31674 - DNA, 26 bp, Homo sapiens
gggtctaataccagctgcttcccttt

SEQ ID NO: 31675 - DNA, 26 bp, Homo sapiens
ggtctaataccagctgcttccctttc

SEQ ID NO: 31676 - DNA, 26 bp, Homo sapiens
gtctaataccagctgcttccctttct

SEQ ID NO: 31677 - DNA, 26 bp, Homo sapiens
tctaataccagctgcttccctttctt

SEQ ID NO: 31678 - DNA, 26 bp, Homo sapiens
ctaataccagctgcttccctttcttg

SEQ ID NO: 31679 - DNA, 26 bp, Homo sapiens
taataccagctgcttccctttcttgg

SEQ ID NO: 31680 - DNA, 26 bp, Homo sapiens
aataccagctgcttccctttcttgga

SEQ ID NO: 31681 - DNA, 26 bp, Homo sapiens
ataccagctgcttccctttcttggag

SEQ ID NO: 31682 - DNA, 26 bp, Homo sapiens
taccagctgcttccctttcttggagg

SEQ ID NO: 31683 - DNA, 26 bp, Homo sapiens
accagctgcttccctttcttggaggc

SEQ ID NO: 31684 - DNA, 26 bp, Homo sapiens
ccagctgcttccctttcttggaggca

SEQ ID NO: 31685 - DNA, 26 bp, Homo sapiens
cagctgcttccctttcttggaggcag

SEQ ID NO: 31686 - DNA, 26 bp, Homo sapiens
agctgcttccctttcttggaggcaga

SEQ ID NO: 31687 - DNA, 26 bp, Homo sapiens
gctgcttccctttcttggaggcagag

SEQ ID NO: 31688 - DNA, 26 bp, Homo sapiens
ctgcttccctttcttggaggcagagc

SEQ ID NO: 31689 - DNA, 26 bp, Homo sapiens
tgcttccctttcttggaggcagagct

SEQ ID NO: 31690 - DNA, 26 bp, Homo sapiens
gcttccctttcttggaggcagagctg

SEQ ID NO: 31691 - DNA, 26 bp, Homo sapiens
cttccctttcttggaggcagagctgg

SEQ ID NO: 31692 - DNA, 26 bp, Homo sapiens
ttccctttcttggaggcagagctggt

SEQ ID NO: 31693 - DNA, 26 bp, Homo sapiens
tccctttcttggaggcagagctggtg

SEQ ID NO: 31694 - DNA, 26 bp, Homo sapiens
ccctttcttggaggcagagctggtga

SEQ ID NO: 31695 - DNA, 26 bp, Homo sapiens
cctttcttggaggcagagctggtgac

SEQ ID NO: 31696 - DNA, 26 bp, Homo sapiens
ctttcttggaggcagagctggtgacc

SEQ ID NO: 31697 - DNA, 26 bp, Homo sapiens
tttcttggaggcagagctggtgacct

SEQ ID NO: 31698 - DNA, 26 bp, Homo sapiens
ttcttggaggcagagctggtgacctt

SEQ ID NO: 31699 - DNA, 26 bp, Homo sapiens
tcttggaggcagagctggtgaccttg

SEQ ID NO: 31700 - DNA, 26 bp, Homo sapiens
cttggaggcagagctggtgaccttga

SEQ ID NO: 31701 - DNA, 26 bp, Homo sapiens
ttggaggcagagctggtgaccttgag

SEQ ID NO: 31702 - DNA, 26 bp, Homo sapiens
tggaggcagagctggtgaccttgaga

SEQ ID NO: 31703 - DNA, 26 bp, Homo sapiens
ggaggcagagctggtgaccttgagaa

SEQ ID NO: 31704 - DNA, 26 bp, Homo sapiens
gaggcagagctggtgaccttgagaaa

SEQ ID NO: 31705 - DNA, 26 bp, Homo sapiens
aggcagagctggtgaccttgagaaag

SEQ ID NO: 31706 - DNA, 26 bp, Homo sapiens
ggcagagctggtgaccttgagaaagt

SEQ ID NO: 31707 - DNA, 26 bp, Homo sapiens
gcagagctggtgaccttgagaaagtg

SEQ ID NO: 31708 - DNA, 26 bp, Homo sapiens
cagagctggtgaccttgagaaagtga

SEQ ID NO: 31709 - DNA, 26 bp, Homo sapiens
agagctggtgaccttgagaaagtgac

SEQ ID NO: 31710 - DNA, 26 bp, Homo sapiens
gagctggtgaccttgagaaagtgacc

SEQ ID NO: 31711 - DNA, 26 bp, Homo sapiens
agctggtgaccttgagaaagtgacct

SEQ ID NO: 31712 - DNA, 26 bp, Homo sapiens
gctggtgaccttgagaaagtgacctg

SEQ ID NO: 31713 - DNA, 26 bp, Homo sapiens
ctggtgaccttgagaaagtgacctgt

SEQ ID NO: 31714 - DNA, 26 bp, Homo sapiens
tggtgaccttgagaaagtgacctgtg

SEQ ID NO: 31715 - DNA, 26 bp, Homo sapiens
ggtgaccttgagaaagtgacctgtga

SEQ ID NO: 31716 - DNA, 26 bp, Homo sapiens
gtgaccttgagaaagtgacctgtgac

SEQ ID NO: 31717 - DNA, 26 bp, Homo sapiens
tgaccttgagaaagtgacctgtgacc

SEQ ID NO: 31718 - DNA, 26 bp, Homo sapiens
gaccttgagaaagtgacctgtgacca

SEQ ID NO: 31719 - DNA, 26 bp, Homo sapiens
accttgagaaagtgacctgtgaccat

SEQ ID NO: 31720 - DNA, 26 bp, Homo sapiens
ccttgagaaagtgacctgtgaccatc

SEQ ID NO: 31721 - DNA, 26 bp, Homo sapiens
cttgagaaagtgacctgtgaccatca

SEQ ID NO: 31722 - DNA, 26 bp, Homo sapiens
ttgagaaagtgacctgtgaccatcat

SEQ ID NO: 31723 - DNA, 26 bp, Homo sapiens
tgagaaagtgacctgtgaccatcatg

SEQ ID NO: 31724 - DNA, 26 bp, Homo sapiens
gagaaagtgacctgtgaccatcatgt

SEQ ID NO: 31725 - DNA, 26 bp, Homo sapiens
agaaagtgacctgtgaccatcatgtg

SEQ ID NO: 31726 - DNA, 26 bp, Homo sapiens
gaaagtgacctgtgaccatcatgtgg

SEQ ID NO: 31727 - DNA, 26 bp, Homo sapiens
aaagtgacctgtgaccatcatgtggg

SEQ ID NO: 31728 - DNA, 26 bp, Homo sapiens
aagtgacctgtgaccatcatgtgggt

SEQ ID NO: 31729 - DNA, 26 bp, Homo sapiens
agtgacctgtgaccatcatgtgggtg

SEQ ID NO: 31730 - DNA, 26 bp, Homo sapiens
gtgacctgtgaccatcatgtgggtgg

SEQ ID NO: 31731 - DNA, 26 bp, Homo sapiens
tgacctgtgaccatcatgtgggtggt

SEQ ID NO: 31732 - DNA, 26 bp, Homo sapiens
gacctgtgaccatcatgtgggtggtg

SEQ ID NO: 31733 - DNA, 26 bp, Homo sapiens
acctgtgaccatcatgtgggtggtga

SEQ ID NO: 31734 - DNA, 26 bp, Homo sapiens
cctgtgaccatcatgtgggtggtgag

SEQ ID NO: 31735 - DNA, 26 bp, Homo sapiens
ctgtgaccatcatgtgggtggtgagc

SEQ ID NO: 31736 - DNA, 26 bp, Homo sapiens
tgtgaccatcatgtgggtggtgagct

SEQ ID NO: 31737 - DNA, 26 bp, Homo sapiens
gtgaccatcatgtgggtggtgagctg

SEQ ID NO: 31738 - DNA, 26 bp, Homo sapiens
tgaccatcatgtgggtggtgagctgc

SEQ ID NO: 31739 - DNA, 26 bp, Homo sapiens
gaccatcatgtgggtggtgagctgct

SEQ ID NO: 31740 - DNA, 26 bp, Homo sapiens
accatcatgtgggtggtgagctgctg

SEQ ID NO: 31741 - DNA, 26 bp, Homo sapiens
ccatcatgtgggtggtgagctgctgc

SEQ ID NO: 31742 - DNA, 26 bp, Homo sapiens
catcatgtgggtggtgagctgctgca

SEQ ID NO: 31743 - DNA, 26 bp, Homo sapiens
atcatgtgggtggtgagctgctgcaa

SEQ ID NO: 31744 - DNA, 26 bp, Homo sapiens
tcatgtgggtggtgagctgctgcaag

SEQ ID NO: 31745 - DNA, 26 bp, Homo sapiens
catgtgggtggtgagctgctgcaagg

SEQ ID NO: 31746 - DNA, 26 bp, Homo sapiens
atgtgggtggtgagctgctgcaaggt

SEQ ID NO: 31747 - DNA, 26 bp, Homo sapiens
tgtgggtggtgagctgctgcaaggtg

SEQ ID NO: 31748 - DNA, 26 bp, Homo sapiens
gtgggtggtgagctgctgcaaggtgt

SEQ ID NO: 31749 - DNA, 26 bp, Homo sapiens
tgggtggtgagctgctgcaaggtgtc

SEQ ID NO: 31750 - DNA, 26 bp, Homo sapiens
gggtggtgagctgctgcaaggtgtca

SEQ ID NO: 31751 - DNA, 26 bp, Homo sapiens
ggtggtgagctgctgcaaggtgtcat

SEQ ID NO: 31752 - DNA, 26 bp, Homo sapiens
gtggtgagctgctgcaaggtgtcatg

SEQ ID NO: 31753 - DNA, 26 bp, Homo sapiens
tggtgagctgctgcaaggtgtcatgg

SEQ ID NO: 31754 - DNA, 26 bp, Homo sapiens
ggtgagctgctgcaaggtgtcatggg

SEQ ID NO: 31755 - DNA, 26 bp, Homo sapiens
gtgagctgctgcaaggtgtcatggga

SEQ ID NO: 31756 - DNA, 26 bp, Homo sapiens
tgagctgctgcaaggtgtcatgggag

SEQ ID NO: 31757 - DNA, 26 bp, Homo sapiens
gagctgctgcaaggtgtcatgggagc

SEQ ID NO: 31758 - DNA, 26 bp, Homo sapiens
agctgctgcaaggtgtcatgggagct

SEQ ID NO: 31759 - DNA, 26 bp, Homo sapiens
gctgctgcaaggtgtcatgggagctc

SEQ ID NO: 31760 - DNA, 26 bp, Homo sapiens
ctgctgcaaggtgtcatgggagctcc

SEQ ID NO: 31761 - DNA, 26 bp, Homo sapiens
tgctgcaaggtgtcatgggagctccc

SEQ ID NO: 31762 - DNA, 26 bp, Homo sapiens
gctgcaaggtgtcatgggagctccca

SEQ ID NO: 31763 - DNA, 26 bp, Homo sapiens
ctgcaaggtgtcatgggagctcccac

SEQ ID NO: 31764 - DNA, 26 bp, Homo sapiens
tgcaaggtgtcatgggagctcccaca

SEQ ID NO: 31765 - DNA, 26 bp, Homo sapiens
gcaaggtgtcatgggagctcccacac

SEQ ID NO: 31766 - DNA, 26 bp, Homo sapiens
caaggtgtcatgggagctcccacact

SEQ ID NO: 31767 - DNA, 26 bp, Homo sapiens
aaggtgtcatgggagctcccacactc

SEQ ID NO: 31768 - DNA, 26 bp, Homo sapiens
aggtgtcatgggagctcccacactcc

SEQ ID NO: 31769 - DNA, 26 bp, Homo sapiens
ggtgtcatgggagctcccacactcca

SEQ ID NO: 31770 - DNA, 26 bp, Homo sapiens
gtgtcatgggagctcccacactccat

SEQ ID NO: 31771 - DNA, 26 bp, Homo sapiens
tgtcatgggagctcccacactccatg

SEQ ID NO: 31772 - DNA, 26 bp, Homo sapiens
gtcatgggagctcccacactccatgc

SEQ ID NO: 31773 - DNA, 26 bp, Homo sapiens
tcatgggagctcccacactccatgca

SEQ ID NO: 31774 - DNA, 26 bp, Homo sapiens
catgggagctcccacactccatgcac

SEQ ID NO: 31775 - DNA, 26 bp, Homo sapiens
atgggagctcccacactccatgcact

SEQ ID NO: 31776 - DNA, 26 bp, Homo sapiens
tgggagctcccacactccatgcactt

SEQ ID NO: 31777 - DNA, 26 bp, Homo sapiens
gggagctcccacactccatgcacttt

SEQ ID NO: 31778 - DNA, 26 bp, Homo sapiens
ggagctcccacactccatgcacttta

SEQ ID NO: 31779 - DNA, 26 bp, Homo sapiens
gagctcccacactccatgcactttaa

SEQ ID NO: 31780 - DNA, 26 bp, Homo sapiens
agctcccacactccatgcactttaag

SEQ ID NO: 31781 - DNA, 26 bp, Homo sapiens
gctcccacactccatgcactttaaga

SEQ ID NO: 31782 - DNA, 26 bp, Homo sapiens
ctcccacactccatgcactttaagat

SEQ ID NO: 31783 - DNA, 26 bp, Homo sapiens
tcccacactccatgcactttaagatc

SEQ ID NO: 31784 - DNA, 26 bp, Homo sapiens
cccacactccatgcactttaagatct

SEQ ID NO: 31785 - DNA, 26 bp, Homo sapiens
ccacactccatgcactttaagatctg

SEQ ID NO: 31786 - DNA, 26 bp, Homo sapiens
cacactccatgcactttaagatctgg

SEQ ID NO: 31787 - DNA, 26 bp, Homo sapiens
acactccatgcactttaagatctggg

SEQ ID NO: 31788 - DNA, 26 bp, Homo sapiens
cactccatgcactttaagatctggga

SEQ ID NO: 31789 - DNA, 26 bp, Homo sapiens
actccatgcactttaagatctgggac

SEQ ID NO: 31790 - DNA, 26 bp, Homo sapiens
ctccatgcactttaagatctgggact

SEQ ID NO: 31791 - DNA, 26 bp, Homo sapiens
tccatgcactttaagatctgggactt

SEQ ID NO: 31792 - DNA, 26 bp, Homo sapiens
ccatgcactttaagatctgggacttg

SEQ ID NO: 31793 - DNA, 26 bp, Homo sapiens
catgcactttaagatctgggacttgc

SEQ ID NO: 31794 - DNA, 26 bp, Homo sapiens
atgcactttaagatctgggacttgca

SEQ ID NO: 31795 - DNA, 26 bp, Homo sapiens
tgcactttaagatctgggacttgcag

SEQ ID NO: 31796 - DNA, 26 bp, Homo sapiens
gcactttaagatctgggacttgcagg

SEQ ID NO: 31797 - DNA, 26 bp, Homo sapiens
cactttaagatctgggacttgcaggc

SEQ ID NO: 31798 - DNA, 26 bp, Homo sapiens
actttaagatctgggacttgcaggcc

SEQ ID NO: 31799 - DNA, 26 bp, Homo sapiens
ctttaagatctgggacttgcaggcct

SEQ ID NO: 31800 - DNA, 26 bp, Homo sapiens
tttaagatctgggacttgcaggcctc

SEQ ID NO: 31801 - DNA, 26 bp, Homo sapiens
ttaagatctgggacttgcaggcctca

SEQ ID NO: 31802 - DNA, 26 bp, Homo sapiens
taagatctgggacttgcaggcctcaa

SEQ ID NO: 31803 - DNA, 26 bp, Homo sapiens
aagatctgggacttgcaggcctcaaa

SEQ ID NO: 31804 - DNA, 26 bp, Homo sapiens
agatctgggacttgcaggcctcaaac

SEQ ID NO: 31805 - DNA, 26 bp, Homo sapiens
gatctgggacttgcaggcctcaaact

SEQ ID NO: 31806 - DNA, 26 bp, Homo sapiens
atctgggacttgcaggcctcaaactg

SEQ ID NO: 31807 - DNA, 26 bp, Homo sapiens
tctgggacttgcaggcctcaaactgc

SEQ ID NO: 31808 - DNA, 26 bp, Homo sapiens
ctgggacttgcaggcctcaaactgcc

SEQ ID NO: 31809 - DNA, 26 bp, Homo sapiens
tgggacttgcaggcctcaaactgcca

SEQ ID NO: 31810 - DNA, 26 bp, Homo sapiens
gggacttgcaggcctcaaactgccag

SEQ ID NO: 31811 - DNA, 26 bp, Homo sapiens
ggacttgcaggcctcaaactgccagg

SEQ ID NO: 31812 - DNA, 26 bp, Homo sapiens
gacttgcaggcctcaaactgccaggt

SEQ ID NO: 31813 - DNA, 26 bp, Homo sapiens
acttgcaggcctcaaactgccaggtg

SEQ ID NO: 31814 - DNA, 26 bp, Homo sapiens
cttgcaggcctcaaactgccaggtgt

SEQ ID NO: 31815 - DNA, 26 bp, Homo sapiens
ttgcaggcctcaaactgccaggtgta

SEQ ID NO: 31816 - DNA, 26 bp, Homo sapiens
tgcaggcctcaaactgccaggtgtag

SEQ ID NO: 31817 - DNA, 26 bp, Homo sapiens
gcaggcctcaaactgccaggtgtagc

SEQ ID NO: 31818 - DNA, 26 bp, Homo sapiens
caggcctcaaactgccaggtgtagct

SEQ ID NO: 31819 - DNA, 26 bp, Homo sapiens
aggcctcaaactgccaggtgtagctg

SEQ ID NO: 31820 - DNA, 26 bp, Homo sapiens
ggcctcaaactgccaggtgtagctgg

SEQ ID NO: 31821 - DNA, 26 bp, Homo sapiens
gcctcaaactgccaggtgtagctggc

SEQ ID NO: 31822 - DNA, 26 bp, Homo sapiens
cctcaaactgccaggtgtagctggct

SEQ ID NO: 31823 - DNA, 26 bp, Homo sapiens
ctcaaactgccaggtgtagctggctc

SEQ ID NO: 31824 - DNA, 26 bp, Homo sapiens
tcaaactgccaggtgtagctggctcc

SEQ ID NO: 31825 - DNA, 26 bp, Homo sapiens
caaactgccaggtgtagctggctcca

SEQ ID NO: 31826 - DNA, 26 bp, Homo sapiens
aaactgccaggtgtagctggctccat

SEQ ID NO: 31827 - DNA, 26 bp, Homo sapiens
aactgccaggtgtagctggctccatt

SEQ ID NO: 31828 - DNA, 26 bp, Homo sapiens
actgccaggtgtagctggctccattt

SEQ ID NO: 31829 - DNA, 26 bp, Homo sapiens
ctgccaggtgtagctggctccatttt

SEQ ID NO: 31830 - DNA, 26 bp, Homo sapiens
tgccaggtgtagctggctccattttg

SEQ ID NO: 31831 - DNA, 26 bp, Homo sapiens
gccaggtgtagctggctccattttgg

SEQ ID NO: 31832 - DNA, 26 bp, Homo sapiens
ccaggtgtagctggctccattttggt

SEQ ID NO: 31833 - DNA, 26 bp, Homo sapiens
caggtgtagctggctccattttggta

SEQ ID NO: 31834 - DNA, 26 bp, Homo sapiens
aggtgtagctggctccattttggtag

SEQ ID NO: 31835 - DNA, 26 bp, Homo sapiens
ggtgtagctggctccattttggtagc

SEQ ID NO: 31836 - DNA, 26 bp, Homo sapiens
gtgtagctggctccattttggtagcc

SEQ ID NO: 31837 - DNA, 26 bp, Homo sapiens
tgtagctggctccattttggtagcca

SEQ ID NO: 31838 - DNA, 26 bp, Homo sapiens
gtagctggctccattttggtagccat

SEQ ID NO: 31839 - DNA, 26 bp, Homo sapiens
tagctggctccattttggtagccata

SEQ ID NO: 31840 - DNA, 26 bp, Homo sapiens
agctggctccattttggtagccatag

SEQ ID NO: 31841 - DNA, 26 bp, Homo sapiens
gctggctccattttggtagccatagc

SEQ ID NO: 31842 - DNA, 26 bp, Homo sapiens
ctggctccattttggtagccatagcg

SEQ ID NO: 31843 - DNA, 26 bp, Homo sapiens
tggctccattttggtagccatagcgg

SEQ ID NO: 31844 - DNA, 26 bp, Homo sapiens
ggctccattttggtagccatagcggt

SEQ ID NO: 31845 - DNA, 26 bp, Homo sapiens
gctccattttggtagccatagcggtt

SEQ ID NO: 31846 - DNA, 26 bp, Homo sapiens
ctccattttggtagccatagcggttg

SEQ ID NO: 31847 - DNA, 26 bp, Homo sapiens
tccattttggtagccatagcggttgt

SEQ ID NO: 31848 - DNA, 26 bp, Homo sapiens
ccattttggtagccatagcggttgtt

SEQ ID NO: 31849 - DNA, 26 bp, Homo sapiens
cattttggtagccatagcggttgttg

SEQ ID NO: 31850 - DNA, 26 bp, Homo sapiens
attttggtagccatagcggttgttgg

SEQ ID NO: 31851 - DNA, 26 bp, Homo sapiens
ttttggtagccatagcggttgttgga

SEQ ID NO: 31852 - DNA, 26 bp, Homo sapiens
tttggtagccatagcggttgttggag

SEQ ID NO: 31853 - DNA, 26 bp, Homo sapiens
ttggtagccatagcggttgttggagg

SEQ ID NO: 31854 - DNA, 26 bp, Homo sapiens
tggtagccatagcggttgttggagga

SEQ ID NO: 31855 - DNA, 26 bp, Homo sapiens
ggtagccatagcggttgttggaggac

SEQ ID NO: 31856 - DNA, 26 bp, Homo sapiens
gtagccatagcggttgttggaggaca

SEQ ID NO: 31857 - DNA, 26 bp, Homo sapiens
tagccatagcggttgttggaggacaa

SEQ ID NO: 31858 - DNA, 26 bp, Homo sapiens
agccatagcggttgttggaggacaac

SEQ ID NO: 31859 - DNA, 26 bp, Homo sapiens
gccatagcggttgttggaggacaact

SEQ ID NO: 31860 - DNA, 26 bp, Homo sapiens
ccatagcggttgttggaggacaactg

SEQ ID NO: 31861 - DNA, 26 bp, Homo sapiens
catagcggttgttggaggacaactgc

SEQ ID NO: 31862 - DNA, 26 bp, Homo sapiens
atagcggttgttggaggacaactgca

SEQ ID NO: 31863 - DNA, 26 bp, Homo sapiens
tagcggttgttggaggacaactgcaa

SEQ ID NO: 31864 - DNA, 26 bp, Homo sapiens
agcggttgttggaggacaactgcaag

SEQ ID NO: 31865 - DNA, 26 bp, Homo sapiens
gcggttgttggaggacaactgcaagt

SEQ ID NO: 31866 - DNA, 26 bp, Homo sapiens
cggttgttggaggacaactgcaagtt

SEQ ID NO: 31867 - DNA, 26 bp, Homo sapiens
ggttgttggaggacaactgcaagttg

SEQ ID NO: 31868 - DNA, 26 bp, Homo sapiens
gttgttggaggacaactgcaagttgg

SEQ ID NO: 31869 - DNA, 26 bp, Homo sapiens
ttgttggaggacaactgcaagttggc

SEQ ID NO: 31870 - DNA, 26 bp, Homo sapiens
tgttggaggacaactgcaagttggcg

SEQ ID NO: 31871 - DNA, 26 bp, Homo sapiens
gttggaggacaactgcaagttggcgt

SEQ ID NO: 31872 - DNA, 26 bp, Homo sapiens
ttggaggacaactgcaagttggcgtt

SEQ ID NO: 31873 - DNA, 26 bp, Homo sapiens
tggaggacaactgcaagttggcgttc

SEQ ID NO: 31874 - DNA, 26 bp, Homo sapiens
ggaggacaactgcaagttggcgttct

SEQ ID NO: 31875 - DNA, 26 bp, Homo sapiens
gaggacaactgcaagttggcgttctt

SEQ ID NO: 31876 - DNA, 26 bp, Homo sapiens
aggacaactgcaagttggcgttcttc

SEQ ID NO: 31877 - DNA, 26 bp, Homo sapiens
ggacaactgcaagttggcgttcttct

SEQ ID NO: 31878 - DNA, 26 bp, Homo sapiens
gacaactgcaagttggcgttcttctg

SEQ ID NO: 31879 - DNA, 26 bp, Homo sapiens
acaactgcaagttggcgttcttctga

SEQ ID NO: 31880 - DNA, 26 bp, Homo sapiens
caactgcaagttggcgttcttctgag

SEQ ID NO: 31881 - DNA, 26 bp, Homo sapiens
aactgcaagttggcgttcttctgaga

SEQ ID NO: 31882 - DNA, 26 bp, Homo sapiens
actgcaagttggcgttcttctgagaa

SEQ ID NO: 31883 - DNA, 26 bp, Homo sapiens
ctgcaagttggcgttcttctgagaag

SEQ ID NO: 31884 - DNA, 26 bp, Homo sapiens
tgcaagttggcgttcttctgagaaga

SEQ ID NO: 31885 - DNA, 26 bp, Homo sapiens
gcaagttggcgttcttctgagaagaa

SEQ ID NO: 31886 - DNA, 26 bp, Homo sapiens
caagttggcgttcttctgagaagaaa

SEQ ID NO: 31887 - DNA, 26 bp, Homo sapiens
aagttggcgttcttctgagaagaaaa

SEQ ID NO: 31888 - DNA, 26 bp, Homo sapiens
agttggcgttcttctgagaagaaaaa

SEQ ID NO: 31889 - DNA, 26 bp, Homo sapiens
gttggcgttcttctgagaagaaaaag

SEQ ID NO: 31890 - DNA, 26 bp, Homo sapiens
ttggcgttcttctgagaagaaaaaga

SEQ ID NO: 31891 - DNA, 26 bp, Homo sapiens
tggcgttcttctgagaagaaaaagaa

SEQ ID NO: 31892 - DNA, 26 bp, Homo sapiens
ggcgttcttctgagaagaaaaagaat

SEQ ID NO: 31893 - DNA, 26 bp, Homo sapiens
gcgttcttctgagaagaaaaagaatc

SEQ ID NO: 31894 - DNA, 26 bp, Homo sapiens
cgttcttctgagaagaaaaagaatct

SEQ ID NO: 31895 - DNA, 26 bp, Homo sapiens
gttcttctgagaagaaaaagaatctg

SEQ ID NO: 31896 - DNA, 26 bp, Homo sapiens
ttcttctgagaagaaaaagaatctgc

SEQ ID NO: 31897 - DNA, 26 bp, Homo sapiens
tcttctgagaagaaaaagaatctgca

SEQ ID NO: 31898 - DNA, 26 bp, Homo sapiens
cttctgagaagaaaaagaatctgcaa

SEQ ID NO: 31899 - DNA, 26 bp, Homo sapiens
ttctgagaagaaaaagaatctgcaaa

SEQ ID NO: 31900 - DNA, 26 bp, Homo sapiens
tctgagaagaaaaagaatctgcaaaa

SEQ ID NO: 31901 - DNA, 26 bp, Homo sapiens
ctgagaagaaaaagaatctgcaaaag

SEQ ID NO: 31902 - DNA, 26 bp, Homo sapiens
tgagaagaaaaagaatctgcaaaaga

SEQ ID NO: 31903 - DNA, 26 bp, Homo sapiens
gagaagaaaaagaatctgcaaaagat

SEQ ID NO: 31904 - DNA, 26 bp, Homo sapiens
agaagaaaaagaatctgcaaaagatc

SEQ ID NO: 31905 - DNA, 26 bp, Homo sapiens
gaagaaaaagaatctgcaaaagatcc

SEQ ID NO: 31906 - DNA, 26 bp, Homo sapiens
aagaaaaagaatctgcaaaagatcct

SEQ ID NO: 31907 - DNA, 26 bp, Homo sapiens
agaaaaagaatctgcaaaagatcctg

SEQ ID NO: 31908 - DNA, 26 bp, Homo sapiens
gaaaaagaatctgcaaaagatcctgt

SEQ ID NO: 31909 - DNA, 26 bp, Homo sapiens
aaaaagaatctgcaaaagatcctgtg

SEQ ID NO: 31910 - DNA, 26 bp, Homo sapiens
aaaagaatctgcaaaagatcctgtgg

SEQ ID NO: 31911 - DNA, 26 bp, Homo sapiens
aaagaatctgcaaaagatcctgtggt

SEQ ID NO: 31912 - DNA, 26 bp, Homo sapiens
aagaatctgcaaaagatcctgtggtt

SEQ ID NO: 31913 - DNA, 26 bp, Homo sapiens
agaatctgcaaaagatcctgtggttg

SEQ ID NO: 31914 - DNA, 26 bp, Homo sapiens
gaatctgcaaaagatcctgtggttga

SEQ ID NO: 31915 - DNA, 26 bp, Homo sapiens
aatctgcaaaagatcctgtggttgaa

SEQ ID NO: 31916 - DNA, 26 bp, Homo sapiens
atctgcaaaagatcctgtggttgaat

SEQ ID NO: 31917 - DNA, 26 bp, Homo sapiens
tctgcaaaagatcctgtggttgaatc

SEQ ID NO: 31918 - DNA, 26 bp, Homo sapiens
ctgcaaaagatcctgtggttgaatcg

SEQ ID NO: 31919 - DNA, 26 bp, Homo sapiens
tgcaaaagatcctgtggttgaatcgg

SEQ ID NO: 31920 - DNA, 26 bp, Homo sapiens
gcaaaagatcctgtggttgaatcggg

SEQ ID NO: 31921 - DNA, 26 bp, Homo sapiens
caaaagatcctgtggttgaatcgggg

SEQ ID NO: 31922 - DNA, 26 bp, Homo sapiens
aaaagatcctgtggttgaatcggggg

SEQ ID NO: 31923 - DNA, 26 bp, Homo sapiens
aaagatcctgtggttgaatcggggga

SEQ ID NO: 31924 - DNA, 26 bp, Homo sapiens
aagatcctgtggttgaatcgggggaa

SEQ ID NO: 31925 - DNA, 26 bp, Homo sapiens
agatcctgtggttgaatcgggggaac

SEQ ID NO: 31926 - DNA, 26 bp, Homo sapiens
gatcctgtggttgaatcgggggaaca

SEQ ID NO: 31927 - DNA, 26 bp, Homo sapiens
atcctgtggttgaatcgggggaacac

SEQ ID NO: 31928 - DNA, 26 bp, Homo sapiens
tcctgtggttgaatcgggggaacacg

SEQ ID NO: 31929 - DNA, 26 bp, Homo sapiens
cctgtggttgaatcgggggaacacgg

SEQ ID NO: 31930 - DNA, 26 bp, Homo sapiens
ctgtggttgaatcgggggaacacggc

SEQ ID NO: 31931 - DNA, 26 bp, Homo sapiens
tgtggttgaatcgggggaacacggcc

SEQ ID NO: 31932 - DNA, 26 bp, Homo sapiens
gtggttgaatcgggggaacacggccg

SEQ ID NO: 31933 - DNA, 26 bp, Homo sapiens
tggttgaatcgggggaacacggccga

SEQ ID NO: 31934 - DNA, 26 bp, Homo sapiens
ggttgaatcgggggaacacggccgat

SEQ ID NO: 31935 - DNA, 26 bp, Homo sapiens
gttgaatcgggggaacacggccgatt

SEQ ID NO: 31936 - DNA, 26 bp, Homo sapiens
ttgaatcgggggaacacggccgattg

SEQ ID NO: 31937 - DNA, 26 bp, Homo sapiens
tgaatcgggggaacacggccgattga

SEQ ID NO: 31938 - DNA, 26 bp, Homo sapiens
gaatcgggggaacacggccgattgac

SEQ ID NO: 31939 - DNA, 26 bp, Homo sapiens
aatcgggggaacacggccgattgaca

SEQ ID NO: 31940 - DNA, 26 bp, Homo sapiens
atcgggggaacacggccgattgacat

SEQ ID NO: 31941 - DNA, 26 bp, Homo sapiens
tcgggggaacacggccgattgacatc

SEQ ID NO: 31942 - DNA, 26 bp, Homo sapiens
cgggggaacacggccgattgacatca

SEQ ID NO: 31943 - DNA, 26 bp, Homo sapiens
gggggaacacggccgattgacatcaa

SEQ ID NO: 31944 - DNA, 26 bp, Homo sapiens
ggggaacacggccgattgacatcaaa

SEQ ID NO: 31945 - DNA, 26 bp, Homo sapiens
gggaacacggccgattgacatcaaaa

SEQ ID NO: 31946 - DNA, 26 bp, Homo sapiens
ggaacacggccgattgacatcaaaaa

SEQ ID NO: 31947 - DNA, 26 bp, Homo sapiens
gaacacggccgattgacatcaaaaac

SEQ ID NO: 31948 - DNA, 26 bp, Homo sapiens
aacacggccgattgacatcaaaaacg

SEQ ID NO: 31949 - DNA, 26 bp, Homo sapiens
acacggccgattgacatcaaaaacgc

SEQ ID NO: 31950 - DNA, 26 bp, Homo sapiens
cacggccgattgacatcaaaaacgcg

SEQ ID NO: 31951 - DNA, 26 bp, Homo sapiens
acggccgattgacatcaaaaacgcgt

SEQ ID NO: 31952 - DNA, 26 bp, Homo sapiens
cggccgattgacatcaaaaacgcgtt

SEQ ID NO: 31953 - DNA, 26 bp, Homo sapiens
ggccgattgacatcaaaaacgcgttt

SEQ ID NO: 31954 - DNA, 26 bp, Homo sapiens
gccgattgacatcaaaaacgcgtttc

SEQ ID NO: 31955 - DNA, 26 bp, Homo sapiens
ccgattgacatcaaaaacgcgtttct

SEQ ID NO: 31956 - DNA, 26 bp, Homo sapiens
cgattgacatcaaaaacgcgtttctt

SEQ ID NO: 31957 - DNA, 26 bp, Homo sapiens
gattgacatcaaaaacgcgtttctta

SEQ ID NO: 31958 - DNA, 26 bp, Homo sapiens
attgacatcaaaaacgcgtttcttag

SEQ ID NO: 31959 - DNA, 26 bp, Homo sapiens
ttgacatcaaaaacgcgtttcttagc

SEQ ID NO: 31960 - DNA, 26 bp, Homo sapiens
tgacatcaaaaacgcgtttcttagcc

SEQ ID NO: 31961 - DNA, 26 bp, Homo sapiens
gacatcaaaaacgcgtttcttagccg

SEQ ID NO: 31962 - DNA, 26 bp, Homo sapiens
acatcaaaaacgcgtttcttagccgg

SEQ ID NO: 31963 - DNA, 26 bp, Homo sapiens
catcaaaaacgcgtttcttagccggg

SEQ ID NO: 31964 - DNA, 26 bp, Homo sapiens
atcaaaaacgcgtttcttagccgggg

SEQ ID NO: 31965 - DNA, 26 bp, Homo sapiens
tcaaaaacgcgtttcttagccggggt

SEQ ID NO: 31966 - DNA, 26 bp, Homo sapiens
caaaaacgcgtttcttagccggggtg

SEQ ID NO: 31967 - DNA, 26 bp, Homo sapiens
aaaaacgcgtttcttagccggggtga

SEQ ID NO: 31968 - DNA, 26 bp, Homo sapiens
aaaacgcgtttcttagccggggtgac

SEQ ID NO: 31969 - DNA, 26 bp, Homo sapiens
aaacgcgtttcttagccggggtgacc

SEQ ID NO: 31970 - DNA, 26 bp, Homo sapiens
aacgcgtttcttagccggggtgacca

SEQ ID NO: 31971 - DNA, 26 bp, Homo sapiens
acgcgtttcttagccggggtgaccat

SEQ ID NO: 31972 - DNA, 26 bp, Homo sapiens
cgcgtttcttagccggggtgaccatt

SEQ ID NO: 31973 - DNA, 26 bp, Homo sapiens
gcgtttcttagccggggtgaccattt

SEQ ID NO: 31974 - DNA, 26 bp, Homo sapiens
cgtttcttagccggggtgaccatttt

SEQ ID NO: 31975 - DNA, 26 bp, Homo sapiens
gtttcttagccggggtgaccattttc

SEQ ID NO: 31976 - DNA, 26 bp, Homo sapiens
tttcttagccggggtgaccattttcg

SEQ ID NO: 31977 - DNA, 26 bp, Homo sapiens
ttcttagccggggtgaccattttcga

SEQ ID NO: 31978 - DNA, 26 bp, Homo sapiens
tcttagccggggtgaccattttcgag

SEQ ID NO: 31979 - DNA, 26 bp, Homo sapiens
cttagccggggtgaccattttcgagg

SEQ ID NO: 31980 - DNA, 26 bp, Homo sapiens
ttagccggggtgaccattttcgagga

SEQ ID NO: 31981 - DNA, 26 bp, Homo sapiens
tagccggggtgaccattttcgaggaa

SEQ ID NO: 31982 - DNA, 26 bp, Homo sapiens
agccggggtgaccattttcgaggaaa

SEQ ID NO: 31983 - DNA, 26 bp, Homo sapiens
gccggggtgaccattttcgaggaaat

SEQ ID NO: 31984 - DNA, 26 bp, Homo sapiens
ccggggtgaccattttcgaggaaatg

SEQ ID NO: 31985 - DNA, 26 bp, Homo sapiens
cggggtgaccattttcgaggaaatgg

SEQ ID NO: 31986 - DNA, 26 bp, Homo sapiens
ggggtgaccattttcgaggaaatggt

SEQ ID NO: 31987 - DNA, 26 bp, Homo sapiens
gggtgaccattttcgaggaaatggtt

SEQ ID NO: 31988 - DNA, 26 bp, Homo sapiens
ggtgaccattttcgaggaaatggttg

SEQ ID NO: 31989 - DNA, 26 bp, Homo sapiens
gtgaccattttcgaggaaatggttgg

SEQ ID NO: 31990 - DNA, 26 bp, Homo sapiens
tgaccattttcgaggaaatggttggg

SEQ ID NO: 31991 - DNA, 26 bp, Homo sapiens
gaccattttcgaggaaatggttggga

SEQ ID NO: 31992 - DNA, 26 bp, Homo sapiens
accattttcgaggaaatggttgggac

SEQ ID NO: 31993 - DNA, 26 bp, Homo sapiens
ccattttcgaggaaatggttgggact

SEQ ID NO: 31994 - DNA, 26 bp, Homo sapiens
cattttcgaggaaatggttgggactg

SEQ ID NO: 31995 - DNA, 26 bp, Homo sapiens
attttcgaggaaatggttgggactgg

SEQ ID NO: 31996 - DNA, 26 bp, Homo sapiens
ttttcgaggaaatggttgggactggc

SEQ ID NO: 31997 - DNA, 26 bp, Homo sapiens
tttcgaggaaatggttgggactggct

SEQ ID NO: 31998 - DNA, 26 bp, Homo sapiens
ttcgaggaaatggttgggactggctc

SEQ ID NO: 31999 - DNA, 26 bp, Homo sapiens
tcgaggaaatggttgggactggctcc

SEQ ID NO: 32000 - DNA, 26 bp, Homo sapiens
cgaggaaatggttgggactggctcct

SEQ ID NO: 32001 - DNA, 26 bp, Homo sapiens
gaggaaatggttgggactggctcctt

SEQ ID NO: 32002 - DNA, 26 bp, Homo sapiens
aggaaatggttgggactggctccttc

SEQ ID NO: 32003 - DNA, 26 bp, Homo sapiens
ggaaatggttgggactggctccttca

SEQ ID NO: 32004 - DNA, 26 bp, Homo sapiens
gaaatggttgggactggctccttcaa

SEQ ID NO: 32005 - DNA, 26 bp, Homo sapiens
aaatggttgggactggctccttcaaa

SEQ ID NO: 32006 - DNA, 26 bp, Homo sapiens
aatggttgggactggctccttcaaag

SEQ ID NO: 32007 - DNA, 26 bp, Homo sapiens
atggttgggactggctccttcaaagg

SEQ ID NO: 32008 - DNA, 26 bp, Homo sapiens
tggttgggactggctccttcaaaggc

SEQ ID NO: 32009 - DNA, 26 bp, Homo sapiens
ggttgggactggctccttcaaaggca

SEQ ID NO: 32010 - DNA, 26 bp, Homo sapiens
gttgggactggctccttcaaaggcac

SEQ ID NO: 32011 - DNA, 26 bp, Homo sapiens
ttgggactggctccttcaaaggcact

SEQ ID NO: 32012 - DNA, 26 bp, Homo sapiens
tgggactggctccttcaaaggcactt

SEQ ID NO: 32013 - DNA, 26 bp, Homo sapiens
gggactggctccttcaaaggcacttt

SEQ ID NO: 32014 - DNA, 26 bp, Homo sapiens
ggactggctccttcaaaggcactttt

SEQ ID NO: 32015 - DNA, 26 bp, Homo sapiens
gactggctccttcaaaggcacttttt

SEQ ID NO: 32016 - DNA, 26 bp, Homo sapiens
actggctccttcaaaggcactttttg

SEQ ID NO: 32017 - DNA, 26 bp, Homo sapiens
ctggctccttcaaaggcactttttgg

SEQ ID NO: 32018 - DNA, 26 bp, Homo sapiens
tggctccttcaaaggcactttttggt

SEQ ID NO: 32019 - DNA, 26 bp, Homo sapiens
ggctccttcaaaggcactttttggta

SEQ ID NO: 32020 - DNA, 26 bp, Homo sapiens
gctccttcaaaggcactttttggtaa

SEQ ID NO: 32021 - DNA, 26 bp, Homo sapiens
ctccttcaaaggcactttttggtaat

SEQ ID NO: 32022 - DNA, 26 bp, Homo sapiens
tccttcaaaggcactttttggtaatg

SEQ ID NO: 32023 - DNA, 26 bp, Homo sapiens
ccttcaaaggcactttttggtaatgt

SEQ ID NO: 32024 - DNA, 26 bp, Homo sapiens
cttcaaaggcactttttggtaatgtt

SEQ ID NO: 32025 - DNA, 26 bp, Homo sapiens
ttcaaaggcactttttggtaatgttt

SEQ ID NO: 32026 - DNA, 26 bp, Homo sapiens
tcaaaggcactttttggtaatgtttt

SEQ ID NO: 32027 - DNA, 26 bp, Homo sapiens
caaaggcactttttggtaatgttttg

SEQ ID NO: 32028 - DNA, 26 bp, Homo sapiens
aaaggcactttttggtaatgttttgt

SEQ ID NO: 32029 - DNA, 26 bp, Homo sapiens
aaggcactttttggtaatgttttgtt

SEQ ID NO: 32030 - DNA, 26 bp, Homo sapiens
aggcactttttggtaatgttttgttt

SEQ ID NO: 32031 - DNA, 26 bp, Homo sapiens
ggcactttttggtaatgttttgtttt

SEQ ID NO: 32032 - DNA, 26 bp, Homo sapiens
gcactttttggtaatgttttgtttta

SEQ ID NO: 32033 - DNA, 26 bp, Homo sapiens
cactttttggtaatgttttgttttaa

SEQ ID NO: 32034 - DNA, 26 bp, Homo sapiens
actttttggtaatgttttgttttaat

SEQ ID NO: 32035 - DNA, 26 bp, Homo sapiens
ctttttggtaatgttttgttttaatc

SEQ ID NO: 32036 - DNA, 26 bp, Homo sapiens
tttttggtaatgttttgttttaatca

SEQ ID NO: 32037 - DNA, 26 bp, Homo sapiens
ttttggtaatgttttgttttaatcat

SEQ ID NO: 32038 - DNA, 26 bp, Homo sapiens
tttggtaatgttttgttttaatcatg

SEQ ID NO: 32039 - DNA, 26 bp, Homo sapiens
ttggtaatgttttgttttaatcatgt

SEQ ID NO: 32040 - DNA, 26 bp, Homo sapiens
tggtaatgttttgttttaatcatgtg

SEQ ID NO: 32041 - DNA, 26 bp, Homo sapiens
ggtaatgttttgttttaatcatgtgg

SEQ ID NO: 32042 - DNA, 26 bp, Homo sapiens
gtaatgttttgttttaatcatgtgga

SEQ ID NO: 32043 - DNA, 26 bp, Homo sapiens
taatgttttgttttaatcatgtggac

SEQ ID NO: 32044 - DNA, 26 bp, Homo sapiens
aatgttttgttttaatcatgtggacg

SEQ ID NO: 32045 - DNA, 26 bp, Homo sapiens
atgttttgttttaatcatgtggacgc

SEQ ID NO: 32046 - DNA, 26 bp, Homo sapiens
tgttttgttttaatcatgtggacgct

SEQ ID NO: 32047 - DNA, 26 bp, Homo sapiens
gttttgttttaatcatgtggacgctc

SEQ ID NO: 32048 - DNA, 26 bp, Homo sapiens
ttttgttttaatcatgtggacgctca

SEQ ID NO: 32049 - DNA, 26 bp, Homo sapiens
tttgttttaatcatgtggacgctcaa

SEQ ID NO: 32050 - DNA, 26 bp, Homo sapiens
ttgttttaatcatgtggacgctcaaa

SEQ ID NO: 32051 - DNA, 26 bp, Homo sapiens
tgttttaatcatgtggacgctcaaat

SEQ ID NO: 32052 - DNA, 26 bp, Homo sapiens
gttttaatcatgtggacgctcaaatc

SEQ ID NO: 32053 - DNA, 26 bp, Homo sapiens
ttttaatcatgtggacgctcaaatct

SEQ ID NO: 32054 - DNA, 26 bp, Homo sapiens
tttaatcatgtggacgctcaaatctt

SEQ ID NO: 32055 - DNA, 26 bp, Homo sapiens
ttaatcatgtggacgctcaaatcttg

SEQ ID NO: 32056 - DNA, 26 bp, Homo sapiens
taatcatgtggacgctcaaatcttgg

SEQ ID NO: 32057 - DNA, 26 bp, Homo sapiens
aatcatgtggacgctcaaatcttgga

SEQ ID NO: 32058 - DNA, 26 bp, Homo sapiens
atcatgtggacgctcaaatcttggag

SEQ ID NO: 32059 - DNA, 26 bp, Homo sapiens
tcatgtggacgctcaaatcttggagg

SEQ ID NO: 32060 - DNA, 26 bp, Homo sapiens
catgtggacgctcaaatcttggaggg

SEQ ID NO: 32061 - DNA, 26 bp, Homo sapiens
atgtggacgctcaaatcttggaggga

SEQ ID NO: 32062 - DNA, 26 bp, Homo sapiens
tgtggacgctcaaatcttggagggaa

SEQ ID NO: 32063 - DNA, 26 bp, Homo sapiens
gtggacgctcaaatcttggagggaat

SEQ ID NO: 32064 - DNA, 26 bp, Homo sapiens
tggacgctcaaatcttggagggaatc

SEQ ID NO: 32065 - DNA, 26 bp, Homo sapiens
ggacgctcaaatcttggagggaatca

SEQ ID NO: 32066 - DNA, 26 bp, Homo sapiens
gacgctcaaatcttggagggaatcaa

SEQ ID NO: 32067 - DNA, 26 bp, Homo sapiens
acgctcaaatcttggagggaatcaaa

SEQ ID NO: 32068 - DNA, 26 bp, Homo sapiens
cgctcaaatcttggagggaatcaaag

SEQ ID NO: 32069 - DNA, 26 bp, Homo sapiens
gctcaaatcttggagggaatcaaagg

SEQ ID NO: 32070 - DNA, 26 bp, Homo sapiens
ctcaaatcttggagggaatcaaagga

SEQ ID NO: 32071 - DNA, 26 bp, Homo sapiens
tcaaatcttggagggaatcaaaggag

SEQ ID NO: 32072 - DNA, 26 bp, Homo sapiens
caaatcttggagggaatcaaaggagt

SEQ ID NO: 32073 - DNA, 26 bp, Homo sapiens
aaatcttggagggaatcaaaggagtc

SEQ ID NO: 32074 - DNA, 26 bp, Homo sapiens
aatcttggagggaatcaaaggagtcg

SEQ ID NO: 32075 - DNA, 26 bp, Homo sapiens
atcttggagggaatcaaaggagtcgc

SEQ ID NO: 32076 - DNA, 26 bp, Homo sapiens
tcttggagggaatcaaaggagtcgcc

SEQ ID NO: 32077 - DNA, 26 bp, Homo sapiens
cttggagggaatcaaaggagtcgcca

SEQ ID NO: 32078 - DNA, 26 bp, Homo sapiens
ttggagggaatcaaaggagtcgccac

SEQ ID NO: 32079 - DNA, 26 bp, Homo sapiens
tggagggaatcaaaggagtcgccaca

SEQ ID NO: 32080 - DNA, 26 bp, Homo sapiens
ggagggaatcaaaggagtcgccacaa

SEQ ID NO: 32081 - DNA, 26 bp, Homo sapiens
gagggaatcaaaggagtcgccacaaa

SEQ ID NO: 32082 - DNA, 26 bp, Homo sapiens
agggaatcaaaggagtcgccacaaaa

SEQ ID NO: 32083 - DNA, 26 bp, Homo sapiens
gggaatcaaaggagtcgccacaaaac

SEQ ID NO: 32084 - DNA, 26 bp, Homo sapiens
ggaatcaaaggagtcgccacaaaaca

SEQ ID NO: 32085 - DNA, 26 bp, Homo sapiens
gaatcaaaggagtcgccacaaaacat

SEQ ID NO: 32086 - DNA, 26 bp, Homo sapiens
aatcaaaggagtcgccacaaaacata

SEQ ID NO: 32087 - DNA, 26 bp, Homo sapiens
atcaaaggagtcgccacaaaacatac

SEQ ID NO: 32088 - DNA, 26 bp, Homo sapiens
tcaaaggagtcgccacaaaacataca

SEQ ID NO: 32089 - DNA, 26 bp, Homo sapiens
caaaggagtcgccacaaaacatacat

SEQ ID NO: 32090 - DNA, 26 bp, Homo sapiens
aaaggagtcgccacaaaacatacatt

SEQ ID NO: 32091 - DNA, 26 bp, Homo sapiens
aaggagtcgccacaaaacatacattt

SEQ ID NO: 32092 - DNA, 26 bp, Homo sapiens
aggagtcgccacaaaacatacatttc

SEQ ID NO: 32093 - DNA, 26 bp, Homo sapiens
ggagtcgccacaaaacatacatttca

SEQ ID NO: 32094 - DNA, 26 bp, Homo sapiens
gagtcgccacaaaacatacatttcag

SEQ ID NO: 32095 - DNA, 26 bp, Homo sapiens
agtcgccacaaaacatacatttcaga

SEQ ID NO: 32096 - DNA, 26 bp, Homo sapiens
gtcgccacaaaacatacatttcagaa

SEQ ID NO: 32097 - DNA, 26 bp, Homo sapiens
tcgccacaaaacatacatttcagaac

SEQ ID NO: 32098 - DNA, 26 bp, Homo sapiens
cgccacaaaacatacatttcagaacc

SEQ ID NO: 32099 - DNA, 26 bp, Homo sapiens
gccacaaaacatacatttcagaacct

SEQ ID NO: 32100 - DNA, 26 bp, Homo sapiens
ccacaaaacatacatttcagaacctt

SEQ ID NO: 32101 - DNA, 26 bp, Homo sapiens
cacaaaacatacatttcagaaccttt

SEQ ID NO: 32102 - DNA, 26 bp, Homo sapiens
acaaaacatacatttcagaacctttt

SEQ ID NO: 32103 - DNA, 26 bp, Homo sapiens
caaaacatacatttcagaaccttttg

SEQ ID NO: 32104 - DNA, 26 bp, Homo sapiens
aaaacatacatttcagaaccttttga

SEQ ID NO: 32105 - DNA, 26 bp, Homo sapiens
aaacatacatttcagaaccttttgag

SEQ ID NO: 32106 - DNA, 26 bp, Homo sapiens
aacatacatttcagaaccttttgagc

SEQ ID NO: 32107 - DNA, 26 bp, Homo sapiens
acatacatttcagaaccttttgagca

SEQ ID NO: 32108 - DNA, 26 bp, Homo sapiens
catacatttcagaaccttttgagcat

SEQ ID NO: 32109 - DNA, 26 bp, Homo sapiens
atacatttcagaaccttttgagcatc

SEQ ID NO: 32110 - DNA, 26 bp, Homo sapiens
tacatttcagaaccttttgagcatcc

SEQ ID NO: 32111 - DNA, 26 bp, Homo sapiens
acatttcagaaccttttgagcatcct

SEQ ID NO: 32112 - DNA, 26 bp, Homo sapiens
catttcagaaccttttgagcatcctc

SEQ ID NO: 32113 - DNA, 26 bp, Homo sapiens
atttcagaaccttttgagcatcctct

SEQ ID NO: 32114 - DNA, 26 bp, Homo sapiens
tttcagaaccttttgagcatcctctt

SEQ ID NO: 32115 - DNA, 26 bp, Homo sapiens
ttcagaaccttttgagcatcctcttt

SEQ ID NO: 32116 - DNA, 26 bp, Homo sapiens
tcagaaccttttgagcatcctctttg

SEQ ID NO: 32117 - DNA, 26 bp, Homo sapiens
cagaaccttttgagcatcctctttgt

SEQ ID NO: 32118 - DNA, 26 bp, Homo sapiens
agaaccttttgagcatcctctttgtc

SEQ ID NO: 32119 - DNA, 26 bp, Homo sapiens
gaaccttttgagcatcctctttgtcc

SEQ ID NO: 32120 - DNA, 26 bp, Homo sapiens
aaccttttgagcatcctctttgtcca

SEQ ID NO: 32121 - DNA, 26 bp, Homo sapiens
accttttgagcatcctctttgtccat

SEQ ID NO: 32122 - DNA, 26 bp, Homo sapiens
ccttttgagcatcctctttgtccata

SEQ ID NO: 32123 - DNA, 26 bp, Homo sapiens
cttttgagcatcctctttgtccatat

SEQ ID NO: 32124 - DNA, 26 bp, Homo sapiens
ttttgagcatcctctttgtccatatc

SEQ ID NO: 32125 - DNA, 26 bp, Homo sapiens
tttgagcatcctctttgtccatatcc

SEQ ID NO: 32126 - DNA, 26 bp, Homo sapiens
ttgagcatcctctttgtccatatcct

SEQ ID NO: 32127 - DNA, 26 bp, Homo sapiens
tgagcatcctctttgtccatatcctg

SEQ ID NO: 32128 - DNA, 26 bp, Homo sapiens
gagcatcctctttgtccatatcctgg

SEQ ID NO: 32129 - DNA, 26 bp, Homo sapiens
agcatcctctttgtccatatcctgga

SEQ ID NO: 32130 - DNA, 26 bp, Homo sapiens
gcatcctctttgtccatatcctggaa

SEQ ID NO: 32131 - DNA, 26 bp, Homo sapiens
catcctctttgtccatatcctggaaa

SEQ ID NO: 32132 - DNA, 26 bp, Homo sapiens
atcctctttgtccatatcctggaaag

SEQ ID NO: 32133 - DNA, 26 bp, Homo sapiens
tcctctttgtccatatcctggaaagc

SEQ ID NO: 32134 - DNA, 26 bp, Homo sapiens
cctctttgtccatatcctggaaagcc

SEQ ID NO: 32135 - DNA, 26 bp, Homo sapiens
ctctttgtccatatcctggaaagccc

SEQ ID NO: 32136 - DNA, 26 bp, Homo sapiens
tctttgtccatatcctggaaagccct

SEQ ID NO: 32137 - DNA, 26 bp, Homo sapiens
ctttgtccatatcctggaaagccctt

SEQ ID NO: 32138 - DNA, 26 bp, Homo sapiens
tttgtccatatcctggaaagcccttt

SEQ ID NO: 32139 - DNA, 26 bp, Homo sapiens
ttgtccatatcctggaaagccctttt

SEQ ID NO: 32140 - DNA, 26 bp, Homo sapiens
tgtccatatcctggaaagcccttttc

SEQ ID NO: 32141 - DNA, 26 bp, Homo sapiens
gtccatatcctggaaagcccttttcc

SEQ ID NO: 32142 - DNA, 26 bp, Homo sapiens
tccatatcctggaaagcccttttcct

SEQ ID NO: 32143 - DNA, 26 bp, Homo sapiens
ccatatcctggaaagcccttttcctg

SEQ ID NO: 32144 - DNA, 26 bp, Homo sapiens
catatcctggaaagcccttttcctgg

SEQ ID NO: 32145 - DNA, 26 bp, Homo sapiens
atatcctggaaagcccttttcctggg

SEQ ID NO: 32146 - DNA, 26 bp, Homo sapiens
tatcctggaaagcccttttcctgggc

SEQ ID NO: 32147 - DNA, 26 bp, Homo sapiens
atcctggaaagcccttttcctgggct

SEQ ID NO: 32148 - DNA, 26 bp, Homo sapiens
tcctggaaagcccttttcctgggctt

SEQ ID NO: 32149 - DNA, 26 bp, Homo sapiens
cctggaaagcccttttcctgggcttt

SEQ ID NO: 32150 - DNA, 26 bp, Homo sapiens
ctggaaagcccttttcctgggctttg

SEQ ID NO: 32151 - DNA, 26 bp, Homo sapiens
tggaaagcccttttcctgggctttga

SEQ ID NO: 32152 - DNA, 26 bp, Homo sapiens
ggaaagcccttttcctgggctttgaa

SEQ ID NO: 32153 - DNA, 26 bp, Homo sapiens
gaaagcccttttcctgggctttgaat

SEQ ID NO: 32154 - DNA, 26 bp, Homo sapiens
aaagcccttttcctgggctttgaata

SEQ ID NO: 32155 - DNA, 26 bp, Homo sapiens
aagcccttttcctgggctttgaatag

SEQ ID NO: 32156 - DNA, 26 bp, Homo sapiens
agcccttttcctgggctttgaatagc

SEQ ID NO: 32157 - DNA, 26 bp, Homo sapiens
gcccttttcctgggctttgaatagct

SEQ ID NO: 32158 - DNA, 26 bp, Homo sapiens
cccttttcctgggctttgaatagctc

SEQ ID NO: 32159 - DNA, 26 bp, Homo sapiens
ccttttcctgggctttgaatagctcg

SEQ ID NO: 32160 - DNA, 26 bp, Homo sapiens
cttttcctgggctttgaatagctcgt

SEQ ID NO: 32161 - DNA, 26 bp, Homo sapiens
ttttcctgggctttgaatagctcgtg

SEQ ID NO: 32162 - DNA, 26 bp, Homo sapiens
tttcctgggctttgaatagctcgtgg

SEQ ID NO: 32163 - DNA, 26 bp, Homo sapiens
ttcctgggctttgaatagctcgtggg

SEQ ID NO: 32164 - DNA, 26 bp, Homo sapiens
tcctgggctttgaatagctcgtgggt

SEQ ID NO: 32165 - DNA, 26 bp, Homo sapiens
cctgggctttgaatagctcgtgggtc

SEQ ID NO: 32166 - DNA, 26 bp, Homo sapiens
ctgggctttgaatagctcgtgggtct

SEQ ID NO: 32167 - DNA, 26 bp, Homo sapiens
tgggctttgaatagctcgtgggtctg

SEQ ID NO: 32168 - DNA, 26 bp, Homo sapiens
gggctttgaatagctcgtgggtctga

SEQ ID NO: 32169 - DNA, 26 bp, Homo sapiens
ggctttgaatagctcgtgggtctgag

SEQ ID NO: 32170 - DNA, 26 bp, Homo sapiens
gctttgaatagctcgtgggtctgagc

SEQ ID NO: 32171 - DNA, 26 bp, Homo sapiens
ctttgaatagctcgtgggtctgagct

SEQ ID NO: 32172 - DNA, 26 bp, Homo sapiens
tttgaatagctcgtgggtctgagctt

SEQ ID NO: 32173 - DNA, 26 bp, Homo sapiens
ttgaatagctcgtgggtctgagcttg

SEQ ID NO: 32174 - DNA, 26 bp, Homo sapiens
tgaatagctcgtgggtctgagcttgt

SEQ ID NO: 32175 - DNA, 26 bp, Homo sapiens
gaatagctcgtgggtctgagcttgtc

SEQ ID NO: 32176 - DNA, 26 bp, Homo sapiens
aatagctcgtgggtctgagcttgtcc

SEQ ID NO: 32177 - DNA, 26 bp, Homo sapiens
atagctcgtgggtctgagcttgtcct

SEQ ID NO: 32178 - DNA, 26 bp, Homo sapiens
tagctcgtgggtctgagcttgtcctt

SEQ ID NO: 32179 - DNA, 26 bp, Homo sapiens
agctcgtgggtctgagcttgtccttt

SEQ ID NO: 32180 - DNA, 26 bp, Homo sapiens
gctcgtgggtctgagcttgtcctttt

SEQ ID NO: 32181 - DNA, 26 bp, Homo sapiens
ctcgtgggtctgagcttgtccttttt

SEQ ID NO: 32182 - DNA, 26 bp, Homo sapiens
tcgtgggtctgagcttgtcctttttg

SEQ ID NO: 32183 - DNA, 26 bp, Homo sapiens
cgtgggtctgagcttgtcctttttgc

SEQ ID NO: 32184 - DNA, 26 bp, Homo sapiens
gtgggtctgagcttgtcctttttgcg

SEQ ID NO: 32185 - DNA, 26 bp, Homo sapiens
tgggtctgagcttgtcctttttgcgg

SEQ ID NO: 32186 - DNA, 26 bp, Homo sapiens
gggtctgagcttgtcctttttgcggt

SEQ ID NO: 32187 - DNA, 26 bp, Homo sapiens
ggtctgagcttgtcctttttgcggtt

SEQ ID NO: 32188 - DNA, 26 bp, Homo sapiens
gtctgagcttgtcctttttgcggttg

SEQ ID NO: 32189 - DNA, 26 bp, Homo sapiens
tctgagcttgtcctttttgcggttgt

SEQ ID NO: 32190 - DNA, 26 bp, Homo sapiens
ctgagcttgtcctttttgcggttgtc

SEQ ID NO: 32191 - DNA, 26 bp, Homo sapiens
tgagcttgtcctttttgcggttgtca

SEQ ID NO: 32192 - DNA, 26 bp, Homo sapiens
gagcttgtcctttttgcggttgtcat

SEQ ID NO: 32193 - DNA, 26 bp, Homo sapiens
agcttgtcctttttgcggttgtcatc

SEQ ID NO: 32194 - DNA, 26 bp, Homo sapiens
gcttgtcctttttgcggttgtcatct

SEQ ID NO: 32195 - DNA, 26 bp, Homo sapiens
cttgtcctttttgcggttgtcatctt

SEQ ID NO: 32196 - DNA, 26 bp, Homo sapiens
ttgtcctttttgcggttgtcatcttg

SEQ ID NO: 32197 - DNA, 26 bp, Homo sapiens
tgtcctttttgcggttgtcatcttga

SEQ ID NO: 32198 - DNA, 26 bp, Homo sapiens
gtcctttttgcggttgtcatcttgat

SEQ ID NO: 32199 - DNA, 26 bp, Homo sapiens
tcctttttgcggttgtcatcttgata

SEQ ID NO: 32200 - DNA, 26 bp, Homo sapiens
cctttttgcggttgtcatcttgatag

SEQ ID NO: 32201 - DNA, 26 bp, Homo sapiens
ctttttgcggttgtcatcttgatagt

SEQ ID NO: 32202 - DNA, 26 bp, Homo sapiens
tttttgcggttgtcatcttgatagtg

SEQ ID NO: 32203 - DNA, 26 bp, Homo sapiens
ttttgcggttgtcatcttgatagtgg

SEQ ID NO: 32204 - DNA, 26 bp, Homo sapiens
tttgcggttgtcatcttgatagtggc

SEQ ID NO: 32205 - DNA, 26 bp, Homo sapiens
ttgcggttgtcatcttgatagtggcc

SEQ ID NO: 32206 - DNA, 26 bp, Homo sapiens
tgcggttgtcatcttgatagtggccc

SEQ ID NO: 32207 - DNA, 26 bp, Homo sapiens
gcggttgtcatcttgatagtggcccg

SEQ ID NO: 32208 - DNA, 26 bp, Homo sapiens
cggttgtcatcttgatagtggcccgt

SEQ ID NO: 32209 - DNA, 26 bp, Homo sapiens
ggttgtcatcttgatagtggcccgtt

SEQ ID NO: 32210 - DNA, 26 bp, Homo sapiens
gttgtcatcttgatagtggcccgttt

SEQ ID NO: 32211 - DNA, 26 bp, Homo sapiens
ttgtcatcttgatagtggcccgtttc

SEQ ID NO: 32212 - DNA, 26 bp, Homo sapiens
tgtcatcttgatagtggcccgtttca

SEQ ID NO: 32213 - DNA, 26 bp, Homo sapiens
gtcatcttgatagtggcccgtttcat

SEQ ID NO: 32214 - DNA, 26 bp, Homo sapiens
tcatcttgatagtggcccgtttcatt

SEQ ID NO: 32215 - DNA, 26 bp, Homo sapiens
catcttgatagtggcccgtttcattc

SEQ ID NO: 32216 - DNA, 26 bp, Homo sapiens
atcttgatagtggcccgtttcattca

SEQ ID NO: 32217 - DNA, 26 bp, Homo sapiens
tcttgatagtggcccgtttcattcat

SEQ ID NO: 32218 - DNA, 26 bp, Homo sapiens
cttgatagtggcccgtttcattcatg

SEQ ID NO: 32219 - DNA, 26 bp, Homo sapiens
ttgatagtggcccgtttcattcatgt

SEQ ID NO: 32220 - DNA, 26 bp, Homo sapiens
tgatagtggcccgtttcattcatgtg

SEQ ID NO: 32221 - DNA, 26 bp, Homo sapiens
gatagtggcccgtttcattcatgtgc

SEQ ID NO: 32222 - DNA, 26 bp, Homo sapiens
atagtggcccgtttcattcatgtgca

SEQ ID NO: 32223 - DNA, 26 bp, Homo sapiens
tagtggcccgtttcattcatgtgcac

SEQ ID NO: 32224 - DNA, 26 bp, Homo sapiens
agtggcccgtttcattcatgtgcaca

SEQ ID NO: 32225 - DNA, 26 bp, Homo sapiens
gtggcccgtttcattcatgtgcacag

SEQ ID NO: 32226 - DNA, 26 bp, Homo sapiens
tggcccgtttcattcatgtgcacagt

SEQ ID NO: 32227 - DNA, 26 bp, Homo sapiens
ggcccgtttcattcatgtgcacagtc

SEQ ID NO: 32228 - DNA, 26 bp, Homo sapiens
gcccgtttcattcatgtgcacagtca

SEQ ID NO: 32229 - DNA, 26 bp, Homo sapiens
cccgtttcattcatgtgcacagtcag

SEQ ID NO: 32230 - DNA, 26 bp, Homo sapiens
ccgtttcattcatgtgcacagtcagc

SEQ ID NO: 32231 - DNA, 26 bp, Homo sapiens
cgtttcattcatgtgcacagtcagct

SEQ ID NO: 32232 - DNA, 26 bp, Homo sapiens
gtttcattcatgtgcacagtcagctc

SEQ ID NO: 32233 - DNA, 26 bp, Homo sapiens
tttcattcatgtgcacagtcagctcg

SEQ ID NO: 32234 - DNA, 26 bp, Homo sapiens
ttcattcatgtgcacagtcagctcga

SEQ ID NO: 32235 - DNA, 26 bp, Homo sapiens
tcattcatgtgcacagtcagctcgac

SEQ ID NO: 32236 - DNA, 26 bp, Homo sapiens
cattcatgtgcacagtcagctcgact

SEQ ID NO: 32237 - DNA, 26 bp, Homo sapiens
attcatgtgcacagtcagctcgacta

SEQ ID NO: 32238 - DNA, 26 bp, Homo sapiens
ttcatgtgcacagtcagctcgactag

SEQ ID NO: 32239 - DNA, 26 bp, Homo sapiens
tcatgtgcacagtcagctcgactagg

SEQ ID NO: 32240 - DNA, 26 bp, Homo sapiens
catgtgcacagtcagctcgactaggg

SEQ ID NO: 32241 - DNA, 26 bp, Homo sapiens
atgtgcacagtcagctcgactagggt

SEQ ID NO: 32242 - DNA, 26 bp, Homo sapiens
tgtgcacagtcagctcgactagggtg

SEQ ID NO: 32243 - DNA, 26 bp, Homo sapiens
gtgcacagtcagctcgactagggtgt

SEQ ID NO: 32244 - DNA, 26 bp, Homo sapiens
tgcacagtcagctcgactagggtgtc

SEQ ID NO: 32245 - DNA, 26 bp, Homo sapiens
gcacagtcagctcgactagggtgtca

SEQ ID NO: 32246 - DNA, 26 bp, Homo sapiens
cacagtcagctcgactagggtgtcat

SEQ ID NO: 32247 - DNA, 26 bp, Homo sapiens
acagtcagctcgactagggtgtcata

SEQ ID NO: 32248 - DNA, 26 bp, Homo sapiens
cagtcagctcgactagggtgtcatag

SEQ ID NO: 32249 - DNA, 26 bp, Homo sapiens
agtcagctcgactagggtgtcatagg

SEQ ID NO: 32250 - DNA, 26 bp, Homo sapiens
gtcagctcgactagggtgtcataggc

SEQ ID NO: 32251 - DNA, 26 bp, Homo sapiens
tcagctcgactagggtgtcataggcc

SEQ ID NO: 32252 - DNA, 26 bp, Homo sapiens
cagctcgactagggtgtcataggccg

SEQ ID NO: 32253 - DNA, 26 bp, Homo sapiens
agctcgactagggtgtcataggccgc

SEQ ID NO: 32254 - DNA, 26 bp, Homo sapiens
gctcgactagggtgtcataggccgcg

SEQ ID NO: 32255 - DNA, 26 bp, Homo sapiens
ctcgactagggtgtcataggccgcgc

SEQ ID NO: 32256 - DNA, 26 bp, Homo sapiens
tcgactagggtgtcataggccgcgct

SEQ ID NO: 32257 - DNA, 26 bp, Homo sapiens
cgactagggtgtcataggccgcgctg

SEQ ID NO: 32258 - DNA, 26 bp, Homo sapiens
gactagggtgtcataggccgcgctgc

SEQ ID NO: 32259 - DNA, 26 bp, Homo sapiens
actagggtgtcataggccgcgctgca

SEQ ID NO: 32260 - DNA, 26 bp, Homo sapiens
ctagggtgtcataggccgcgctgcac

SEQ ID NO: 32261 - DNA, 26 bp, Homo sapiens
tagggtgtcataggccgcgctgcact

SEQ ID NO: 32262 - DNA, 26 bp, Homo sapiens
agggtgtcataggccgcgctgcactg

SEQ ID NO: 32263 - DNA, 26 bp, Homo sapiens
gggtgtcataggccgcgctgcactgt

SEQ ID NO: 32264 - DNA, 26 bp, Homo sapiens
ggtgtcataggccgcgctgcactgtc

SEQ ID NO: 32265 - DNA, 26 bp, Homo sapiens
gtgtcataggccgcgctgcactgtcg

SEQ ID NO: 32266 - DNA, 26 bp, Homo sapiens
tgtcataggccgcgctgcactgtcgg

SEQ ID NO: 32267 - DNA, 26 bp, Homo sapiens
gtcataggccgcgctgcactgtcggc

SEQ ID NO: 32268 - DNA, 26 bp, Homo sapiens
tcataggccgcgctgcactgtcggca

SEQ ID NO: 32269 - DNA, 26 bp, Homo sapiens
cataggccgcgctgcactgtcggcat

SEQ ID NO: 32270 - DNA, 26 bp, Homo sapiens
ataggccgcgctgcactgtcggcatc

SEQ ID NO: 32271 - DNA, 26 bp, Homo sapiens
taggccgcgctgcactgtcggcatcg

SEQ ID NO: 32272 - DNA, 26 bp, Homo sapiens
aggccgcgctgcactgtcggcatcgg

SEQ ID NO: 32273 - DNA, 26 bp, Homo sapiens
ggccgcgctgcactgtcggcatcgga

SEQ ID NO: 32274 - DNA, 26 bp, Homo sapiens
gccgcgctgcactgtcggcatcggaa

SEQ ID NO: 32275 - DNA, 26 bp, Homo sapiens
ccgcgctgcactgtcggcatcggaat

SEQ ID NO: 32276 - DNA, 26 bp, Homo sapiens
cgcgctgcactgtcggcatcggaatc

SEQ ID NO: 32277 - DNA, 26 bp, Homo sapiens
gcgctgcactgtcggcatcggaatct

SEQ ID NO: 32278 - DNA, 26 bp, Homo sapiens
cgctgcactgtcggcatcggaatctg

SEQ ID NO: 32279 - DNA, 26 bp, Homo sapiens
gctgcactgtcggcatcggaatctgc

SEQ ID NO: 32280 - DNA, 26 bp, Homo sapiens
ctgcactgtcggcatcggaatctgct

SEQ ID NO: 32281 - DNA, 26 bp, Homo sapiens
tgcactgtcggcatcggaatctgctg

SEQ ID NO: 32282 - DNA, 26 bp, Homo sapiens
gcactgtcggcatcggaatctgctgg

SEQ ID NO: 32283 - DNA, 26 bp, Homo sapiens
cactgtcggcatcggaatctgctggc

SEQ ID NO: 32284 - DNA, 26 bp, Homo sapiens
actgtcggcatcggaatctgctggcc

SEQ ID NO: 32285 - DNA, 26 bp, Homo sapiens
ctgtcggcatcggaatctgctggccc

SEQ ID NO: 32286 - DNA, 26 bp, Homo sapiens
tgtcggcatcggaatctgctggcccc

SEQ ID NO: 32287 - DNA, 26 bp, Homo sapiens
gtcggcatcggaatctgctggcccct

SEQ ID NO: 32288 - DNA, 26 bp, Homo sapiens
tcggcatcggaatctgctggcccctg

SEQ ID NO: 32289 - DNA, 26 bp, Homo sapiens
cggcatcggaatctgctggcccctgt

SEQ ID NO: 32290 - DNA, 26 bp, Homo sapiens
ggcatcggaatctgctggcccctgtg

SEQ ID NO: 32291 - DNA, 26 bp, Homo sapiens
gcatcggaatctgctggcccctgtga

SEQ ID NO: 32292 - DNA, 26 bp, Homo sapiens
catcggaatctgctggcccctgtgaa

SEQ ID NO: 32293 - DNA, 26 bp, Homo sapiens
atcggaatctgctggcccctgtgaac

SEQ ID NO: 32294 - DNA, 26 bp, Homo sapiens
tcggaatctgctggcccctgtgaaca

SEQ ID NO: 32295 - DNA, 26 bp, Homo sapiens
cggaatctgctggcccctgtgaacac

SEQ ID NO: 32296 - DNA, 26 bp, Homo sapiens
ggaatctgctggcccctgtgaacaca

SEQ ID NO: 32297 - DNA, 26 bp, Homo sapiens
gaatctgctggcccctgtgaacacag

SEQ ID NO: 32298 - DNA, 26 bp, Homo sapiens
aatctgctggcccctgtgaacacagt

SEQ ID NO: 32299 - DNA, 26 bp, Homo sapiens
atctgctggcccctgtgaacacagtc

SEQ ID NO: 32300 - DNA, 26 bp, Homo sapiens
tctgctggcccctgtgaacacagtcc

SEQ ID NO: 32301 - DNA, 26 bp, Homo sapiens
ctgctggcccctgtgaacacagtccc

SEQ ID NO: 32302 - DNA, 26 bp, Homo sapiens
tgctggcccctgtgaacacagtcccg

SEQ ID NO: 32303 - DNA, 26 bp, Homo sapiens
gctggcccctgtgaacacagtcccgc

SEQ ID NO: 32304 - DNA, 26 bp, Homo sapiens
ctggcccctgtgaacacagtcccgca

SEQ ID NO: 32305 - DNA, 26 bp, Homo sapiens
tggcccctgtgaacacagtcccgcac

SEQ ID NO: 32306 - DNA, 26 bp, Homo sapiens
ggcccctgtgaacacagtcccgcaca

SEQ ID NO: 32307 - DNA, 26 bp, Homo sapiens
gcccctgtgaacacagtcccgcacat

SEQ ID NO: 32308 - DNA, 26 bp, Homo sapiens
cccctgtgaacacagtcccgcacatc

SEQ ID NO: 32309 - DNA, 26 bp, Homo sapiens
ccctgtgaacacagtcccgcacatct

SEQ ID NO: 32310 - DNA, 26 bp, Homo sapiens
cctgtgaacacagtcccgcacatctt

SEQ ID NO: 32311 - DNA, 26 bp, Homo sapiens
ctgtgaacacagtcccgcacatcttg

SEQ ID NO: 32312 - DNA, 26 bp, Homo sapiens
tgtgaacacagtcccgcacatcttgc

SEQ ID NO: 32313 - DNA, 26 bp, Homo sapiens
gtgaacacagtcccgcacatcttgct

SEQ ID NO: 32314 - DNA, 26 bp, Homo sapiens
tgaacacagtcccgcacatcttgctg

SEQ ID NO: 32315 - DNA, 26 bp, Homo sapiens
gaacacagtcccgcacatcttgctgc

SEQ ID NO: 32316 - DNA, 26 bp, Homo sapiens
aacacagtcccgcacatcttgctgct

SEQ ID NO: 32317 - DNA, 26 bp, Homo sapiens
acacagtcccgcacatcttgctgctc

SEQ ID NO: 32318 - DNA, 26 bp, Homo sapiens
cacagtcccgcacatcttgctgctct

SEQ ID NO: 32319 - DNA, 26 bp, Homo sapiens
acagtcccgcacatcttgctgctctg

SEQ ID NO: 32320 - DNA, 26 bp, Homo sapiens
cagtcccgcacatcttgctgctctgt

SEQ ID NO: 32321 - DNA, 26 bp, Homo sapiens
agtcccgcacatcttgctgctctgtc

SEQ ID NO: 32322 - DNA, 26 bp, Homo sapiens
gtcccgcacatcttgctgctctgtcg

SEQ ID NO: 32323 - DNA, 26 bp, Homo sapiens
tcccgcacatcttgctgctctgtcgg

SEQ ID NO: 32324 - DNA, 26 bp, Homo sapiens
cccgcacatcttgctgctctgtcggt

SEQ ID NO: 32325 - DNA, 26 bp, Homo sapiens
ccgcacatcttgctgctctgtcggta

SEQ ID NO: 32326 - DNA, 26 bp, Homo sapiens
cgcacatcttgctgctctgtcggtac

SEQ ID NO: 32327 - DNA, 26 bp, Homo sapiens
gcacatcttgctgctctgtcggtaca

SEQ ID NO: 32328 - DNA, 26 bp, Homo sapiens
cacatcttgctgctctgtcggtacaa

SEQ ID NO: 32329 - DNA, 26 bp, Homo sapiens
acatcttgctgctctgtcggtacaac

SEQ ID NO: 32330 - DNA, 26 bp, Homo sapiens
catcttgctgctctgtcggtacaact

SEQ ID NO: 32331 - DNA, 26 bp, Homo sapiens
atcttgctgctctgtcggtacaactg

SEQ ID NO: 32332 - DNA, 26 bp, Homo sapiens
tcttgctgctctgtcggtacaactgc

SEQ ID NO: 32333 - DNA, 26 bp, Homo sapiens
cttgctgctctgtcggtacaactgca

SEQ ID NO: 32334 - DNA, 26 bp, Homo sapiens
ttgctgctctgtcggtacaactgcac

SEQ ID NO: 32335 - DNA, 26 bp, Homo sapiens
tgctgctctgtcggtacaactgcacc

SEQ ID NO: 32336 - DNA, 26 bp, Homo sapiens
gctgctctgtcggtacaactgcaccg

SEQ ID NO: 32337 - DNA, 26 bp, Homo sapiens
ctgctctgtcggtacaactgcaccga

SEQ ID NO: 32338 - DNA, 26 bp, Homo sapiens
tgctctgtcggtacaactgcaccgag

SEQ ID NO: 32339 - DNA, 26 bp, Homo sapiens
gctctgtcggtacaactgcaccgagc

SEQ ID NO: 32340 - DNA, 26 bp, Homo sapiens
ctctgtcggtacaactgcaccgagct

SEQ ID NO: 32341 - DNA, 26 bp, Homo sapiens
tctgtcggtacaactgcaccgagctg

SEQ ID NO: 32342 - DNA, 26 bp, Homo sapiens
ctgtcggtacaactgcaccgagctga

SEQ ID NO: 32343 - DNA, 26 bp, Homo sapiens
tgtcggtacaactgcaccgagctgaa

SEQ ID NO: 32344 - DNA, 26 bp, Homo sapiens
gtcggtacaactgcaccgagctgaac

SEQ ID NO: 32345 - DNA, 26 bp, Homo sapiens
tcggtacaactgcaccgagctgaaca

SEQ ID NO: 32346 - DNA, 26 bp, Homo sapiens
cggtacaactgcaccgagctgaacag

SEQ ID NO: 32347 - DNA, 26 bp, Homo sapiens
ggtacaactgcaccgagctgaacagg

SEQ ID NO: 32348 - DNA, 26 bp, Homo sapiens
gtacaactgcaccgagctgaacaggc

SEQ ID NO: 32349 - DNA, 26 bp, Homo sapiens
tacaactgcaccgagctgaacaggct

SEQ ID NO: 32350 - DNA, 26 bp, Homo sapiens
acaactgcaccgagctgaacaggctg

SEQ ID NO: 32351 - DNA, 26 bp, Homo sapiens
caactgcaccgagctgaacaggctgg

SEQ ID NO: 32352 - DNA, 26 bp, Homo sapiens
aactgcaccgagctgaacaggctggg

SEQ ID NO: 32353 - DNA, 26 bp, Homo sapiens
actgcaccgagctgaacaggctgggt

SEQ ID NO: 32354 - DNA, 26 bp, Homo sapiens
ctgcaccgagctgaacaggctgggtt

SEQ ID NO: 32355 - DNA, 26 bp, Homo sapiens
tgcaccgagctgaacaggctgggttt

SEQ ID NO: 32356 - DNA, 26 bp, Homo sapiens
gcaccgagctgaacaggctgggtttc

SEQ ID NO: 32357 - DNA, 26 bp, Homo sapiens
caccgagctgaacaggctgggtttcg

SEQ ID NO: 32358 - DNA, 26 bp, Homo sapiens
accgagctgaacaggctgggtttcga

SEQ ID NO: 32359 - DNA, 26 bp, Homo sapiens
ccgagctgaacaggctgggtttcgag

SEQ ID NO: 32360 - DNA, 26 bp, Homo sapiens
cgagctgaacaggctgggtttcgaga

SEQ ID NO: 32361 - DNA, 26 bp, Homo sapiens
gagctgaacaggctgggtttcgagac

SEQ ID NO: 32362 - DNA, 26 bp, Homo sapiens
agctgaacaggctgggtttcgagacg

SEQ ID NO: 32363 - DNA, 26 bp, Homo sapiens
gctgaacaggctgggtttcgagacgg

SEQ ID NO: 32364 - DNA, 26 bp, Homo sapiens
ctgaacaggctgggtttcgagacgga

SEQ ID NO: 32365 - DNA, 26 bp, Homo sapiens
tgaacaggctgggtttcgagacggac

SEQ ID NO: 32366 - DNA, 26 bp, Homo sapiens
gaacaggctgggtttcgagacggacc

SEQ ID NO: 32367 - DNA, 26 bp, Homo sapiens
aacaggctgggtttcgagacggaccg

SEQ ID NO: 32368 - DNA, 26 bp, Homo sapiens
acaggctgggtttcgagacggaccga

SEQ ID NO: 32369 - DNA, 26 bp, Homo sapiens
caggctgggtttcgagacggaccgag

SEQ ID NO: 32370 - DNA, 26 bp, Homo sapiens
aggctgggtttcgagacggaccgaga

SEQ ID NO: 32371 - DNA, 26 bp, Homo sapiens
ggctgggtttcgagacggaccgagaa

SEQ ID NO: 32372 - DNA, 26 bp, Homo sapiens
gctgggtttcgagacggaccgagaag

SEQ ID NO: 32373 - DNA, 26 bp, Homo sapiens
ctgggtttcgagacggaccgagaagg

SEQ ID NO: 32374 - DNA, 26 bp, Homo sapiens
tgggtttcgagacggaccgagaaggc

SEQ ID NO: 32375 - DNA, 26 bp, Homo sapiens
gggtttcgagacggaccgagaaggca

SEQ ID NO: 32376 - DNA, 26 bp, Homo sapiens
ggtttcgagacggaccgagaaggcaa

SEQ ID NO: 32377 - DNA, 26 bp, Homo sapiens
gtttcgagacggaccgagaaggcaag

SEQ ID NO: 32378 - DNA, 26 bp, Homo sapiens
tttcgagacggaccgagaaggcaagt

SEQ ID NO: 32379 - DNA, 26 bp, Homo sapiens
ttcgagacggaccgagaaggcaagtt

SEQ ID NO: 32380 - DNA, 26 bp, Homo sapiens
tcgagacggaccgagaaggcaagttc

SEQ ID NO: 32381 - DNA, 26 bp, Homo sapiens
cgagacggaccgagaaggcaagttct

SEQ ID NO: 32382 - DNA, 26 bp, Homo sapiens
gagacggaccgagaaggcaagttctg

SEQ ID NO: 32383 - DNA, 26 bp, Homo sapiens
agacggaccgagaaggcaagttctgc

SEQ ID NO: 32384 - DNA, 26 bp, Homo sapiens
gacggaccgagaaggcaagttctgct

SEQ ID NO: 32385 - DNA, 26 bp, Homo sapiens
acggaccgagaaggcaagttctgctg

SEQ ID NO: 32386 - DNA, 26 bp, Homo sapiens
cggaccgagaaggcaagttctgctgc

SEQ ID NO: 32387 - DNA, 26 bp, Homo sapiens
ggaccgagaaggcaagttctgctgca

SEQ ID NO: 32388 - DNA, 26 bp, Homo sapiens
gaccgagaaggcaagttctgctgcag

SEQ ID NO: 32389 - DNA, 26 bp, Homo sapiens
accgagaaggcaagttctgctgcagg

SEQ ID NO: 32390 - DNA, 26 bp, Homo sapiens
ccgagaaggcaagttctgctgcaggc

SEQ ID NO: 32391 - DNA, 26 bp, Homo sapiens
cgagaaggcaagttctgctgcaggct

SEQ ID NO: 32392 - DNA, 26 bp, Homo sapiens
gagaaggcaagttctgctgcaggctt

SEQ ID NO: 32393 - DNA, 26 bp, Homo sapiens
agaaggcaagttctgctgcaggcttt

SEQ ID NO: 32394 - DNA, 26 bp, Homo sapiens
gaaggcaagttctgctgcaggctttt

SEQ ID NO: 32395 - DNA, 26 bp, Homo sapiens
aaggcaagttctgctgcaggcttttg

SEQ ID NO: 32396 - DNA, 26 bp, Homo sapiens
aggcaagttctgctgcaggcttttgg

SEQ ID NO: 32397 - DNA, 26 bp, Homo sapiens
ggcaagttctgctgcaggcttttgga

SEQ ID NO: 32398 - DNA, 26 bp, Homo sapiens
gcaagttctgctgcaggcttttggac

SEQ ID NO: 32399 - DNA, 26 bp, Homo sapiens
caagttctgctgcaggcttttggaca

SEQ ID NO: 32400 - DNA, 26 bp, Homo sapiens
aagttctgctgcaggcttttggacag

SEQ ID NO: 32401 - DNA, 26 bp, Homo sapiens
agttctgctgcaggcttttggacaga

SEQ ID NO: 32402 - DNA, 26 bp, Homo sapiens
gttctgctgcaggcttttggacagag

SEQ ID NO: 32403 - DNA, 26 bp, Homo sapiens
ttctgctgcaggcttttggacagagc

SEQ ID NO: 32404 - DNA, 26 bp, Homo sapiens
tctgctgcaggcttttggacagagcg

SEQ ID NO: 32405 - DNA, 26 bp, Homo sapiens
ctgctgcaggcttttggacagagcgt

SEQ ID NO: 32406 - DNA, 26 bp, Homo sapiens
tgctgcaggcttttggacagagcgtc

SEQ ID NO: 32407 - DNA, 26 bp, Homo sapiens
gctgcaggcttttggacagagcgtct

SEQ ID NO: 32408 - DNA, 26 bp, Homo sapiens
ctgcaggcttttggacagagcgtctt

SEQ ID NO: 32409 - DNA, 26 bp, Homo sapiens
tgcaggcttttggacagagcgtcttg

SEQ ID NO: 32410 - DNA, 26 bp, Homo sapiens
gcaggcttttggacagagcgtcttgg

SEQ ID NO: 32411 - DNA, 26 bp, Homo sapiens
caggcttttggacagagcgtcttggt

SEQ ID NO: 32412 - DNA, 26 bp, Homo sapiens
aggcttttggacagagcgtcttggtg

SEQ ID NO: 32413 - DNA, 26 bp, Homo sapiens
ggcttttggacagagcgtcttggtgc

SEQ ID NO: 32414 - DNA, 26 bp, Homo sapiens
gcttttggacagagcgtcttggtgcc

SEQ ID NO: 32415 - DNA, 26 bp, Homo sapiens
cttttggacagagcgtcttggtgcca

SEQ ID NO: 32416 - DNA, 26 bp, Homo sapiens
ttttggacagagcgtcttggtgccaa

SEQ ID NO: 32417 - DNA, 26 bp, Homo sapiens
tttggacagagcgtcttggtgccaat

SEQ ID NO: 32418 - DNA, 26 bp, Homo sapiens
ttggacagagcgtcttggtgccaatc

SEQ ID NO: 32419 - DNA, 26 bp, Homo sapiens
tggacagagcgtcttggtgccaatca

SEQ ID NO: 32420 - DNA, 26 bp, Homo sapiens
ggacagagcgtcttggtgccaatcaa

SEQ ID NO: 32421 - DNA, 26 bp, Homo sapiens
gacagagcgtcttggtgccaatcaaa

SEQ ID NO: 32422 - DNA, 26 bp, Homo sapiens
acagagcgtcttggtgccaatcaaaa

SEQ ID NO: 32423 - DNA, 26 bp, Homo sapiens
cagagcgtcttggtgccaatcaaaat

SEQ ID NO: 32424 - DNA, 26 bp, Homo sapiens
agagcgtcttggtgccaatcaaaatc

SEQ ID NO: 32425 - DNA, 26 bp, Homo sapiens
gagcgtcttggtgccaatcaaaatca

SEQ ID NO: 32426 - DNA, 26 bp, Homo sapiens
agcgtcttggtgccaatcaaaatcac

SEQ ID NO: 32427 - DNA, 26 bp, Homo sapiens
gcgtcttggtgccaatcaaaatcact

SEQ ID NO: 32428 - DNA, 26 bp, Homo sapiens
cgtcttggtgccaatcaaaatcactc

SEQ ID NO: 32429 - DNA, 26 bp, Homo sapiens
gtcttggtgccaatcaaaatcactct

SEQ ID NO: 32430 - DNA, 26 bp, Homo sapiens
tcttggtgccaatcaaaatcactctt

SEQ ID NO: 32431 - DNA, 26 bp, Homo sapiens
cttggtgccaatcaaaatcactcttg

SEQ ID NO: 32432 - DNA, 26 bp, Homo sapiens
ttggtgccaatcaaaatcactcttgt

SEQ ID NO: 32433 - DNA, 26 bp, Homo sapiens
tggtgccaatcaaaatcactcttgtt

SEQ ID NO: 32434 - DNA, 26 bp, Homo sapiens
ggtgccaatcaaaatcactcttgttg

SEQ ID NO: 32435 - DNA, 26 bp, Homo sapiens
gtgccaatcaaaatcactcttgttgc

SEQ ID NO: 32436 - DNA, 26 bp, Homo sapiens
tgccaatcaaaatcactcttgttgct

SEQ ID NO: 32437 - DNA, 26 bp, Homo sapiens
gccaatcaaaatcactcttgttgctg

SEQ ID NO: 32438 - DNA, 26 bp, Homo sapiens
ccaatcaaaatcactcttgttgctgc

SEQ ID NO: 32439 - DNA, 26 bp, Homo sapiens
caatcaaaatcactcttgttgctgcc

SEQ ID NO: 32440 - DNA, 26 bp, Homo sapiens
aatcaaaatcactcttgttgctgccg

SEQ ID NO: 32441 - DNA, 26 bp, Homo sapiens
atcaaaatcactcttgttgctgccgt

SEQ ID NO: 32442 - DNA, 26 bp, Homo sapiens
tcaaaatcactcttgttgctgccgtt

SEQ ID NO: 32443 - DNA, 26 bp, Homo sapiens
caaaatcactcttgttgctgccgttt

SEQ ID NO: 32444 - DNA, 26 bp, Homo sapiens
aaaatcactcttgttgctgccgtttc

SEQ ID NO: 32445 - DNA, 26 bp, Homo sapiens
aaatcactcttgttgctgccgtttcg

SEQ ID NO: 32446 - DNA, 26 bp, Homo sapiens
aatcactcttgttgctgccgtttcgg

SEQ ID NO: 32447 - DNA, 26 bp, Homo sapiens
atcactcttgttgctgccgtttcggg

SEQ ID NO: 32448 - DNA, 26 bp, Homo sapiens
tcactcttgttgctgccgtttcgggt

SEQ ID NO: 32449 - DNA, 26 bp, Homo sapiens
cactcttgttgctgccgtttcgggtg

SEQ ID NO: 32450 - DNA, 26 bp, Homo sapiens
actcttgttgctgccgtttcgggtgt

SEQ ID NO: 32451 - DNA, 26 bp, Homo sapiens
ctcttgttgctgccgtttcgggtgtc

SEQ ID NO: 32452 - DNA, 26 bp, Homo sapiens
tcttgttgctgccgtttcgggtgtca

SEQ ID NO: 32453 - DNA, 26 bp, Homo sapiens
cttgttgctgccgtttcgggtgtcac

SEQ ID NO: 32454 - DNA, 26 bp, Homo sapiens
ttgttgctgccgtttcgggtgtcaca

SEQ ID NO: 32455 - DNA, 26 bp, Homo sapiens
tgttgctgccgtttcgggtgtcacag

SEQ ID NO: 32456 - DNA, 26 bp, Homo sapiens
gttgctgccgtttcgggtgtcacagt

SEQ ID NO: 32457 - DNA, 26 bp, Homo sapiens
ttgctgccgtttcgggtgtcacagtt

SEQ ID NO: 32458 - DNA, 26 bp, Homo sapiens
tgctgccgtttcgggtgtcacagttc

SEQ ID NO: 32459 - DNA, 26 bp, Homo sapiens
gctgccgtttcgggtgtcacagttcc

SEQ ID NO: 32460 - DNA, 26 bp, Homo sapiens
ctgccgtttcgggtgtcacagttcct

SEQ ID NO: 32461 - DNA, 26 bp, Homo sapiens
tgccgtttcgggtgtcacagttcctc

SEQ ID NO: 32462 - DNA, 26 bp, Homo sapiens
gccgtttcgggtgtcacagttcctcc

SEQ ID NO: 32463 - DNA, 26 bp, Homo sapiens
ccgtttcgggtgtcacagttcctcct

SEQ ID NO: 32464 - DNA, 26 bp, Homo sapiens
cgtttcgggtgtcacagttcctcctc

SEQ ID NO: 32465 - DNA, 26 bp, Homo sapiens
gtttcgggtgtcacagttcctcctct

SEQ ID NO: 32466 - DNA, 26 bp, Homo sapiens
tttcgggtgtcacagttcctcctctc

SEQ ID NO: 32467 - DNA, 26 bp, Homo sapiens
ttcgggtgtcacagttcctcctctca

SEQ ID NO: 32468 - DNA, 26 bp, Homo sapiens
tcgggtgtcacagttcctcctctcac

SEQ ID NO: 32469 - DNA, 26 bp, Homo sapiens
cgggtgtcacagttcctcctctcact

SEQ ID NO: 32470 - DNA, 26 bp, Homo sapiens
gggtgtcacagttcctcctctcacta

SEQ ID NO: 32471 - DNA, 26 bp, Homo sapiens
ggtgtcacagttcctcctctcactat

SEQ ID NO: 32472 - DNA, 26 bp, Homo sapiens
gtgtcacagttcctcctctcactatt

SEQ ID NO: 32473 - DNA, 26 bp, Homo sapiens
tgtcacagttcctcctctcactattg

SEQ ID NO: 32474 - DNA, 26 bp, Homo sapiens
gtcacagttcctcctctcactattgg

SEQ ID NO: 32475 - DNA, 26 bp, Homo sapiens
tcacagttcctcctctcactattgga

SEQ ID NO: 32476 - DNA, 26 bp, Homo sapiens
cacagttcctcctctcactattggac

SEQ ID NO: 32477 - DNA, 26 bp, Homo sapiens
acagttcctcctctcactattggaca

SEQ ID NO: 32478 - DNA, 26 bp, Homo sapiens
cagttcctcctctcactattggacag

SEQ ID NO: 32479 - DNA, 26 bp, Homo sapiens
agttcctcctctcactattggacagc

SEQ ID NO: 32480 - DNA, 26 bp, Homo sapiens
gttcctcctctcactattggacagct

SEQ ID NO: 32481 - DNA, 26 bp, Homo sapiens
ttcctcctctcactattggacagctt

SEQ ID NO: 32482 - DNA, 26 bp, Homo sapiens
tcctcctctcactattggacagcttg

SEQ ID NO: 32483 - DNA, 26 bp, Homo sapiens
cctcctctcactattggacagcttga

SEQ ID NO: 32484 - DNA, 26 bp, Homo sapiens
ctcctctcactattggacagcttgaa

SEQ ID NO: 32485 - DNA, 26 bp, Homo sapiens
tcctctcactattggacagcttgaag

SEQ ID NO: 32486 - DNA, 26 bp, Homo sapiens
cctctcactattggacagcttgaagc

SEQ ID NO: 32487 - DNA, 26 bp, Homo sapiens
ctctcactattggacagcttgaagcc

SEQ ID NO: 32488 - DNA, 26 bp, Homo sapiens
tctcactattggacagcttgaagcca

SEQ ID NO: 32489 - DNA, 26 bp, Homo sapiens
ctcactattggacagcttgaagccaa

SEQ ID NO: 32490 - DNA, 26 bp, Homo sapiens
tcactattggacagcttgaagccaag

SEQ ID NO: 32491 - DNA, 26 bp, Homo sapiens
cactattggacagcttgaagccaagg

SEQ ID NO: 32492 - DNA, 26 bp, Homo sapiens
actattggacagcttgaagccaaggc

SEQ ID NO: 32493 - DNA, 26 bp, Homo sapiens
ctattggacagcttgaagccaaggcc

SEQ ID NO: 32494 - DNA, 26 bp, Homo sapiens
tattggacagcttgaagccaaggccc

SEQ ID NO: 32495 - DNA, 26 bp, Homo sapiens
attggacagcttgaagccaaggccca

SEQ ID NO: 32496 - DNA, 26 bp, Homo sapiens
ttggacagcttgaagccaaggcccag

SEQ ID NO: 32497 - DNA, 26 bp, Homo sapiens
tggacagcttgaagccaaggcccagg

SEQ ID NO: 32498 - DNA, 26 bp, Homo sapiens
ggacagcttgaagccaaggcccaggc

SEQ ID NO: 32499 - DNA, 26 bp, Homo sapiens
gacagcttgaagccaaggcccaggcc

SEQ ID NO: 32500 - DNA, 26 bp, Homo sapiens
acagcttgaagccaaggcccaggcct

SEQ ID NO: 32501 - DNA, 26 bp, Homo sapiens
cagcttgaagccaaggcccaggcctg

SEQ ID NO: 32502 - DNA, 26 bp, Homo sapiens
agcttgaagccaaggcccaggcctga

SEQ ID NO: 32503 - DNA, 26 bp, Homo sapiens
gcttgaagccaaggcccaggcctgac

SEQ ID NO: 32504 - DNA, 26 bp, Homo sapiens
cttgaagccaaggcccaggcctgacc

SEQ ID NO: 32505 - DNA, 26 bp, Homo sapiens
ttgaagccaaggcccaggcctgacca

SEQ ID NO: 32506 - DNA, 26 bp, Homo sapiens
tgaagccaaggcccaggcctgaccag

SEQ ID NO: 32507 - DNA, 26 bp, Homo sapiens
gaagccaaggcccaggcctgaccagt

SEQ ID NO: 32508 - DNA, 26 bp, Homo sapiens
aagccaaggcccaggcctgaccagta

SEQ ID NO: 32509 - DNA, 26 bp, Homo sapiens
agccaaggcccaggcctgaccagtag

SEQ ID NO: 32510 - DNA, 26 bp, Homo sapiens
gccaaggcccaggcctgaccagtagg

SEQ ID NO: 32511 - DNA, 26 bp, Homo sapiens
ccaaggcccaggcctgaccagtagga

SEQ ID NO: 32512 - DNA, 26 bp, Homo sapiens
caaggcccaggcctgaccagtaggaa

SEQ ID NO: 32513 - DNA, 26 bp, Homo sapiens
aaggcccaggcctgaccagtaggaat

SEQ ID NO: 32514 - DNA, 26 bp, Homo sapiens
aggcccaggcctgaccagtaggaatc

SEQ ID NO: 32515 - DNA, 26 bp, Homo sapiens
ggcccaggcctgaccagtaggaatcc

SEQ ID NO: 32516 - DNA, 26 bp, Homo sapiens
gcccaggcctgaccagtaggaatccg

SEQ ID NO: 32517 - DNA, 26 bp, Homo sapiens
cccaggcctgaccagtaggaatccga

SEQ ID NO: 32518 - DNA, 26 bp, Homo sapiens
ccaggcctgaccagtaggaatccgac

SEQ ID NO: 32519 - DNA, 26 bp, Homo sapiens
caggcctgaccagtaggaatccgaca

SEQ ID NO: 32520 - DNA, 26 bp, Homo sapiens
aggcctgaccagtaggaatccgacag

SEQ ID NO: 32521 - DNA, 26 bp, Homo sapiens
ggcctgaccagtaggaatccgacagg

SEQ ID NO: 32522 - DNA, 26 bp, Homo sapiens
gcctgaccagtaggaatccgacagga

SEQ ID NO: 32523 - DNA, 26 bp, Homo sapiens
cctgaccagtaggaatccgacaggat

SEQ ID NO: 32524 - DNA, 26 bp, Homo sapiens
ctgaccagtaggaatccgacaggatg

SEQ ID NO: 32525 - DNA, 26 bp, Homo sapiens
tgaccagtaggaatccgacaggatgt

SEQ ID NO: 32526 - DNA, 26 bp, Homo sapiens
gaccagtaggaatccgacaggatgtt

SEQ ID NO: 32527 - DNA, 26 bp, Homo sapiens
accagtaggaatccgacaggatgttg

SEQ ID NO: 32528 - DNA, 26 bp, Homo sapiens
ccagtaggaatccgacaggatgttgg

SEQ ID NO: 32529 - DNA, 26 bp, Homo sapiens
cagtaggaatccgacaggatgttggc

SEQ ID NO: 32530 - DNA, 26 bp, Homo sapiens
agtaggaatccgacaggatgttggcg

SEQ ID NO: 32531 - DNA, 26 bp, Homo sapiens
gtaggaatccgacaggatgttggcgt

SEQ ID NO: 32532 - DNA, 26 bp, Homo sapiens
taggaatccgacaggatgttggcgta

SEQ ID NO: 32533 - DNA, 26 bp, Homo sapiens
aggaatccgacaggatgttggcgtag

SEQ ID NO: 32534 - DNA, 26 bp, Homo sapiens
ggaatccgacaggatgttggcgtaga

SEQ ID NO: 32535 - DNA, 26 bp, Homo sapiens
gaatccgacaggatgttggcgtagac

SEQ ID NO: 32536 - DNA, 26 bp, Homo sapiens
aatccgacaggatgttggcgtagaca

SEQ ID NO: 32537 - DNA, 26 bp, Homo sapiens
atccgacaggatgttggcgtagacag

SEQ ID NO: 32538 - DNA, 26 bp, Homo sapiens
tccgacaggatgttggcgtagacagc

SEQ ID NO: 32539 - DNA, 26 bp, Homo sapiens
ccgacaggatgttggcgtagacagcg

SEQ ID NO: 32540 - DNA, 26 bp, Homo sapiens
cgacaggatgttggcgtagacagcgg

SEQ ID NO: 32541 - DNA, 26 bp, Homo sapiens
gacaggatgttggcgtagacagcggt

SEQ ID NO: 32542 - DNA, 26 bp, Homo sapiens
acaggatgttggcgtagacagcggtc

SEQ ID NO: 32543 - DNA, 26 bp, Homo sapiens
caggatgttggcgtagacagcggtca

SEQ ID NO: 32544 - DNA, 26 bp, Homo sapiens
aggatgttggcgtagacagcggtcat

SEQ ID NO: 32545 - DNA, 26 bp, Homo sapiens
ggatgttggcgtagacagcggtcatt

SEQ ID NO: 32546 - DNA, 26 bp, Homo sapiens
gatgttggcgtagacagcggtcattt

SEQ ID NO: 32547 - DNA, 26 bp, Homo sapiens
atgttggcgtagacagcggtcatttt

SEQ ID NO: 32548 - DNA, 26 bp, Homo sapiens
tgttggcgtagacagcggtcatttta

SEQ ID NO: 32549 - DNA, 26 bp, Homo sapiens
gttggcgtagacagcggtcattttat

SEQ ID NO: 32550 - DNA, 26 bp, Homo sapiens
ttggcgtagacagcggtcattttatc

SEQ ID NO: 32551 - DNA, 26 bp, Homo sapiens
tggcgtagacagcggtcattttatcc

SEQ ID NO: 32552 - DNA, 26 bp, Homo sapiens
ggcgtagacagcggtcattttatcca

SEQ ID NO: 32553 - DNA, 26 bp, Homo sapiens
gcgtagacagcggtcattttatccat

SEQ ID NO: 32554 - DNA, 26 bp, Homo sapiens
cgtagacagcggtcattttatccatg

SEQ ID NO: 32555 - DNA, 26 bp, Homo sapiens
gtagacagcggtcattttatccatgc

SEQ ID NO: 32556 - DNA, 26 bp, Homo sapiens
tagacagcggtcattttatccatgca

SEQ ID NO: 32557 - DNA, 26 bp, Homo sapiens
agacagcggtcattttatccatgcaa

SEQ ID NO: 32558 - DNA, 26 bp, Homo sapiens
gacagcggtcattttatccatgcaat

SEQ ID NO: 32559 - DNA, 26 bp, Homo sapiens
acagcggtcattttatccatgcaatt

SEQ ID NO: 32560 - DNA, 26 bp, Homo sapiens
cagcggtcattttatccatgcaattg

SEQ ID NO: 32561 - DNA, 26 bp, Homo sapiens
agcggtcattttatccatgcaattgt

SEQ ID NO: 32562 - DNA, 26 bp, Homo sapiens
gcggtcattttatccatgcaattgtg

SEQ ID NO: 32563 - DNA, 26 bp, Homo sapiens
cggtcattttatccatgcaattgtgt

SEQ ID NO: 32564 - DNA, 26 bp, Homo sapiens
ggtcattttatccatgcaattgtgtg

SEQ ID NO: 32565 - DNA, 26 bp, Homo sapiens
gtcattttatccatgcaattgtgtgc

SEQ ID NO: 32566 - DNA, 26 bp, Homo sapiens
tcattttatccatgcaattgtgtgct

SEQ ID NO: 32567 - DNA, 26 bp, Homo sapiens
cattttatccatgcaattgtgtgctt

SEQ ID NO: 32568 - DNA, 26 bp, Homo sapiens
attttatccatgcaattgtgtgcttc

SEQ ID NO: 32569 - DNA, 26 bp, Homo sapiens
ttttatccatgcaattgtgtgcttcg

SEQ ID NO: 32570 - DNA, 26 bp, Homo sapiens
tttatccatgcaattgtgtgcttcgt

SEQ ID NO: 32571 - DNA, 26 bp, Homo sapiens
ttatccatgcaattgtgtgcttcgtt

SEQ ID NO: 32572 - DNA, 26 bp, Homo sapiens
tatccatgcaattgtgtgcttcgttt

SEQ ID NO: 32573 - DNA, 26 bp, Homo sapiens
atccatgcaattgtgtgcttcgtttg

SEQ ID NO: 32574 - DNA, 26 bp, Homo sapiens
tccatgcaattgtgtgcttcgtttgg

SEQ ID NO: 32575 - DNA, 26 bp, Homo sapiens
ccatgcaattgtgtgcttcgtttgga

SEQ ID NO: 32576 - DNA, 26 bp, Homo sapiens
catgcaattgtgtgcttcgtttggaa

SEQ ID NO: 32577 - DNA, 26 bp, Homo sapiens
atgcaattgtgtgcttcgtttggaag

SEQ ID NO: 32578 - DNA, 26 bp, Homo sapiens
tgcaattgtgtgcttcgtttggaagc

SEQ ID NO: 32579 - DNA, 26 bp, Homo sapiens
gcaattgtgtgcttcgtttggaagcc

SEQ ID NO: 32580 - DNA, 26 bp, Homo sapiens
caattgtgtgcttcgtttggaagcct

SEQ ID NO: 32581 - DNA, 26 bp, Homo sapiens
aattgtgtgcttcgtttggaagcctg

SEQ ID NO: 32582 - DNA, 26 bp, Homo sapiens
attgtgtgcttcgtttggaagcctga

SEQ ID NO: 32583 - DNA, 26 bp, Homo sapiens
ttgtgtgcttcgtttggaagcctgac

SEQ ID NO: 32584 - DNA, 26 bp, Homo sapiens
tgtgtgcttcgtttggaagcctgacg

SEQ ID NO: 32585 - DNA, 26 bp, Homo sapiens
gtgtgcttcgtttggaagcctgacgt

SEQ ID NO: 32586 - DNA, 26 bp, Homo sapiens
tgtgcttcgtttggaagcctgacgtg

SEQ ID NO: 32587 - DNA, 26 bp, Homo sapiens
gtgcttcgtttggaagcctgacgtga

SEQ ID NO: 32588 - DNA, 26 bp, Homo sapiens
tgcttcgtttggaagcctgacgtgag

SEQ ID NO: 32589 - DNA, 26 bp, Homo sapiens
gcttcgtttggaagcctgacgtgagt

SEQ ID NO: 32590 - DNA, 26 bp, Homo sapiens
cttcgtttggaagcctgacgtgagtg

SEQ ID NO: 32591 - DNA, 26 bp, Homo sapiens
ttcgtttggaagcctgacgtgagtgt

SEQ ID NO: 32592 - DNA, 26 bp, Homo sapiens
tcgtttggaagcctgacgtgagtgtg

SEQ ID NO: 32593 - DNA, 26 bp, Homo sapiens
cgtttggaagcctgacgtgagtgtgt

SEQ ID NO: 32594 - DNA, 26 bp, Homo sapiens
gtttggaagcctgacgtgagtgtgtg

SEQ ID NO: 32595 - DNA, 26 bp, Homo sapiens
tttggaagcctgacgtgagtgtgtgc

SEQ ID NO: 32596 - DNA, 26 bp, Homo sapiens
ttggaagcctgacgtgagtgtgtgct

SEQ ID NO: 32597 - DNA, 26 bp, Homo sapiens
tggaagcctgacgtgagtgtgtgctt

SEQ ID NO: 32598 - DNA, 26 bp, Homo sapiens
ggaagcctgacgtgagtgtgtgcttt

SEQ ID NO: 32599 - DNA, 26 bp, Homo sapiens
gaagcctgacgtgagtgtgtgctttc

SEQ ID NO: 32600 - DNA, 26 bp, Homo sapiens
aagcctgacgtgagtgtgtgctttct

SEQ ID NO: 32601 - DNA, 26 bp, Homo sapiens
agcctgacgtgagtgtgtgctttctt

SEQ ID NO: 32602 - DNA, 26 bp, Homo sapiens
gcctgacgtgagtgtgtgctttcttg

SEQ ID NO: 32603 - DNA, 26 bp, Homo sapiens
cctgacgtgagtgtgtgctttcttgt

SEQ ID NO: 32604 - DNA, 26 bp, Homo sapiens
ctgacgtgagtgtgtgctttcttgtc

SEQ ID NO: 32605 - DNA, 26 bp, Homo sapiens
tgacgtgagtgtgtgctttcttgtct

SEQ ID NO: 32606 - DNA, 26 bp, Homo sapiens
gacgtgagtgtgtgctttcttgtctg

SEQ ID NO: 32607 - DNA, 26 bp, Homo sapiens
acgtgagtgtgtgctttcttgtctga

SEQ ID NO: 32608 - DNA, 26 bp, Homo sapiens
cgtgagtgtgtgctttcttgtctgag

SEQ ID NO: 32609 - DNA, 26 bp, Homo sapiens
gtgagtgtgtgctttcttgtctgagg

SEQ ID NO: 32610 - DNA, 26 bp, Homo sapiens
tgagtgtgtgctttcttgtctgaggc

SEQ ID NO: 32611 - DNA, 26 bp, Homo sapiens
gagtgtgtgctttcttgtctgaggca

SEQ ID NO: 32612 - DNA, 26 bp, Homo sapiens
agtgtgtgctttcttgtctgaggcat

SEQ ID NO: 32613 - DNA, 26 bp, Homo sapiens
gtgtgtgctttcttgtctgaggcatc

SEQ ID NO: 32614 - DNA, 26 bp, Homo sapiens
tgtgtgctttcttgtctgaggcatct

SEQ ID NO: 32615 - DNA, 26 bp, Homo sapiens
gtgtgctttcttgtctgaggcatctc

SEQ ID NO: 32616 - DNA, 26 bp, Homo sapiens
tgtgctttcttgtctgaggcatctct

SEQ ID NO: 32617 - DNA, 26 bp, Homo sapiens
gtgctttcttgtctgaggcatctctg

SEQ ID NO: 32618 - DNA, 26 bp, Homo sapiens
tgctttcttgtctgaggcatctctgc

SEQ ID NO: 32619 - DNA, 26 bp, Homo sapiens
gctttcttgtctgaggcatctctgcc

SEQ ID NO: 32620 - DNA, 26 bp, Homo sapiens
ctttcttgtctgaggcatctctgccg

SEQ ID NO: 32621 - DNA, 26 bp, Homo sapiens
tttcttgtctgaggcatctctgccgc

SEQ ID NO: 32622 - DNA, 26 bp, Homo sapiens
ttcttgtctgaggcatctctgccgca

SEQ ID NO: 32623 - DNA, 26 bp, Homo sapiens
tcttgtctgaggcatctctgccgcag

SEQ ID NO: 32624 - DNA, 26 bp, Homo sapiens
cttgtctgaggcatctctgccgcaga

SEQ ID NO: 32625 - DNA, 26 bp, Homo sapiens
ttgtctgaggcatctctgccgcagac

SEQ ID NO: 32626 - DNA, 26 bp, Homo sapiens
tgtctgaggcatctctgccgcagaca

SEQ ID NO: 32627 - DNA, 26 bp, Homo sapiens
gtctgaggcatctctgccgcagacac

SEQ ID NO: 32628 - DNA, 26 bp, Homo sapiens
tctgaggcatctctgccgcagacact

SEQ ID NO: 32629 - DNA, 26 bp, Homo sapiens
ctgaggcatctctgccgcagacactc

SEQ ID NO: 32630 - DNA, 26 bp, Homo sapiens
tgaggcatctctgccgcagacactct

SEQ ID NO: 32631 - DNA, 26 bp, Homo sapiens
gaggcatctctgccgcagacactctt

SEQ ID NO: 32632 - DNA, 26 bp, Homo sapiens
aggcatctctgccgcagacactcttg

SEQ ID NO: 32633 - DNA, 26 bp, Homo sapiens
ggcatctctgccgcagacactcttga

SEQ ID NO: 32634 - DNA, 26 bp, Homo sapiens
gcatctctgccgcagacactcttgat

SEQ ID NO: 32635 - DNA, 26 bp, Homo sapiens
catctctgccgcagacactcttgatg

SEQ ID NO: 32636 - DNA, 26 bp, Homo sapiens
atctctgccgcagacactcttgatgt

SEQ ID NO: 32637 - DNA, 26 bp, Homo sapiens
tctctgccgcagacactcttgatgtc

SEQ ID NO: 32638 - DNA, 26 bp, Homo sapiens
ctctgccgcagacactcttgatgtcc

SEQ ID NO: 32639 - DNA, 26 bp, Homo sapiens
tctgccgcagacactcttgatgtccg

SEQ ID NO: 32640 - DNA, 26 bp, Homo sapiens
ctgccgcagacactcttgatgtccga

SEQ ID NO: 32641 - DNA, 26 bp, Homo sapiens
tgccgcagacactcttgatgtccgac

SEQ ID NO: 32642 - DNA, 26 bp, Homo sapiens
gccgcagacactcttgatgtccgaca

SEQ ID NO: 32643 - DNA, 26 bp, Homo sapiens
ccgcagacactcttgatgtccgacac

SEQ ID NO: 32644 - DNA, 26 bp, Homo sapiens
cgcagacactcttgatgtccgacacc

SEQ ID NO: 32645 - DNA, 26 bp, Homo sapiens
gcagacactcttgatgtccgacacct

SEQ ID NO: 32646 - DNA, 26 bp, Homo sapiens
cagacactcttgatgtccgacacctg

SEQ ID NO: 32647 - DNA, 26 bp, Homo sapiens
agacactcttgatgtccgacacctga

SEQ ID NO: 32648 - DNA, 26 bp, Homo sapiens
gacactcttgatgtccgacacctgat

SEQ ID NO: 32649 - DNA, 26 bp, Homo sapiens
acactcttgatgtccgacacctgatc

SEQ ID NO: 32650 - DNA, 26 bp, Homo sapiens
cactcttgatgtccgacacctgatca

SEQ ID NO: 32651 - DNA, 26 bp, Homo sapiens
actcttgatgtccgacacctgatcac

SEQ ID NO: 32652 - DNA, 26 bp, Homo sapiens
ctcttgatgtccgacacctgatcact

SEQ ID NO: 32653 - DNA, 26 bp, Homo sapiens
tcttgatgtccgacacctgatcactg

SEQ ID NO: 32654 - DNA, 26 bp, Homo sapiens
cttgatgtccgacacctgatcactgg

SEQ ID NO: 32655 - DNA, 26 bp, Homo sapiens
ttgatgtccgacacctgatcactggc

SEQ ID NO: 32656 - DNA, 26 bp, Homo sapiens
tgatgtccgacacctgatcactggcg

SEQ ID NO: 32657 - DNA, 26 bp, Homo sapiens
gatgtccgacacctgatcactggcgt

SEQ ID NO: 32658 - DNA, 26 bp, Homo sapiens
atgtccgacacctgatcactggcgtc

SEQ ID NO: 32659 - DNA, 26 bp, Homo sapiens
tgtccgacacctgatcactggcgtca

SEQ ID NO: 32660 - DNA, 26 bp, Homo sapiens
gtccgacacctgatcactggcgtcac

SEQ ID NO: 32661 - DNA, 26 bp, Homo sapiens
tccgacacctgatcactggcgtcact

SEQ ID NO: 32662 - DNA, 26 bp, Homo sapiens
ccgacacctgatcactggcgtcactc

SEQ ID NO: 32663 - DNA, 26 bp, Homo sapiens
cgacacctgatcactggcgtcactca

SEQ ID NO: 32664 - DNA, 26 bp, Homo sapiens
gacacctgatcactggcgtcactcag

SEQ ID NO: 32665 - DNA, 26 bp, Homo sapiens
acacctgatcactggcgtcactcagc

SEQ ID NO: 32666 - DNA, 26 bp, Homo sapiens
cacctgatcactggcgtcactcagca

SEQ ID NO: 32667 - DNA, 26 bp, Homo sapiens
acctgatcactggcgtcactcagcag

SEQ ID NO: 32668 - DNA, 26 bp, Homo sapiens
cctgatcactggcgtcactcagcaga

SEQ ID NO: 32669 - DNA, 26 bp, Homo sapiens
ctgatcactggcgtcactcagcagag

SEQ ID NO: 32670 - DNA, 26 bp, Homo sapiens
tgatcactggcgtcactcagcagaga

SEQ ID NO: 32671 - DNA, 26 bp, Homo sapiens
gatcactggcgtcactcagcagagac

SEQ ID NO: 32672 - DNA, 26 bp, Homo sapiens
atcactggcgtcactcagcagagact

SEQ ID NO: 32673 - DNA, 26 bp, Homo sapiens
tcactggcgtcactcagcagagactc

SEQ ID NO: 32674 - DNA, 26 bp, Homo sapiens
cactggcgtcactcagcagagactcg

SEQ ID NO: 32675 - DNA, 26 bp, Homo sapiens
actggcgtcactcagcagagactcgt

SEQ ID NO: 32676 - DNA, 26 bp, Homo sapiens
ctggcgtcactcagcagagactcgtt

SEQ ID NO: 32677 - DNA, 26 bp, Homo sapiens
tggcgtcactcagcagagactcgttc

SEQ ID NO: 32678 - DNA, 26 bp, Homo sapiens
ggcgtcactcagcagagactcgttct

SEQ ID NO: 32679 - DNA, 26 bp, Homo sapiens
gcgtcactcagcagagactcgttctc

SEQ ID NO: 32680 - DNA, 26 bp, Homo sapiens
cgtcactcagcagagactcgttctcg

SEQ ID NO: 32681 - DNA, 26 bp, Homo sapiens
gtcactcagcagagactcgttctcgg

SEQ ID NO: 32682 - DNA, 26 bp, Homo sapiens
tcactcagcagagactcgttctcggc

SEQ ID NO: 32683 - DNA, 26 bp, Homo sapiens
cactcagcagagactcgttctcggca

SEQ ID NO: 32684 - DNA, 26 bp, Homo sapiens
actcagcagagactcgttctcggcat

SEQ ID NO: 32685 - DNA, 26 bp, Homo sapiens
ctcagcagagactcgttctcggcatc

SEQ ID NO: 32686 - DNA, 26 bp, Homo sapiens
tcagcagagactcgttctcggcatcc

SEQ ID NO: 32687 - DNA, 26 bp, Homo sapiens
cagcagagactcgttctcggcatcct

SEQ ID NO: 32688 - DNA, 26 bp, Homo sapiens
agcagagactcgttctcggcatcctg

SEQ ID NO: 32689 - DNA, 26 bp, Homo sapiens
gcagagactcgttctcggcatcctga

SEQ ID NO: 32690 - DNA, 26 bp, Homo sapiens
cagagactcgttctcggcatcctgat

SEQ ID NO: 32691 - DNA, 26 bp, Homo sapiens
agagactcgttctcggcatcctgatt

SEQ ID NO: 32692 - DNA, 26 bp, Homo sapiens
gagactcgttctcggcatcctgattg

SEQ ID NO: 32693 - DNA, 26 bp, Homo sapiens
agactcgttctcggcatcctgattgg

SEQ ID NO: 32694 - DNA, 26 bp, Homo sapiens
gactcgttctcggcatcctgattgga

SEQ ID NO: 32695 - DNA, 26 bp, Homo sapiens
actcgttctcggcatcctgattggac

SEQ ID NO: 32696 - DNA, 26 bp, Homo sapiens
ctcgttctcggcatcctgattggaca

SEQ ID NO: 32697 - DNA, 26 bp, Homo sapiens
tcgttctcggcatcctgattggacaa

SEQ ID NO: 32698 - DNA, 26 bp, Homo sapiens
cgttctcggcatcctgattggacaaa

SEQ ID NO: 32699 - DNA, 26 bp, Homo sapiens
gttctcggcatcctgattggacaaat

SEQ ID NO: 32700 - DNA, 26 bp, Homo sapiens
ttctcggcatcctgattggacaaatg

SEQ ID NO: 32701 - DNA, 26 bp, Homo sapiens
tctcggcatcctgattggacaaatga

SEQ ID NO: 32702 - DNA, 26 bp, Homo sapiens
ctcggcatcctgattggacaaatgac

SEQ ID NO: 32703 - DNA, 26 bp, Homo sapiens
tcggcatcctgattggacaaatgact

SEQ ID NO: 32704 - DNA, 26 bp, Homo sapiens
cggcatcctgattggacaaatgactt

SEQ ID NO: 32705 - DNA, 26 bp, Homo sapiens
ggcatcctgattggacaaatgacttc

SEQ ID NO: 32706 - DNA, 26 bp, Homo sapiens
gcatcctgattggacaaatgacttcc

SEQ ID NO: 32707 - DNA, 26 bp, Homo sapiens
catcctgattggacaaatgacttcct

SEQ ID NO: 32708 - DNA, 26 bp, Homo sapiens
atcctgattggacaaatgacttcctg

SEQ ID NO: 32709 - DNA, 26 bp, Homo sapiens
tcctgattggacaaatgacttcctgg

SEQ ID NO: 32710 - DNA, 26 bp, Homo sapiens
cctgattggacaaatgacttcctgga

SEQ ID NO: 32711 - DNA, 26 bp, Homo sapiens
ctgattggacaaatgacttcctggag

SEQ ID NO: 32712 - DNA, 26 bp, Homo sapiens
tgattggacaaatgacttcctggaga

SEQ ID NO: 32713 - DNA, 26 bp, Homo sapiens
gattggacaaatgacttcctggagag

SEQ ID NO: 32714 - DNA, 26 bp, Homo sapiens
attggacaaatgacttcctggagagt

SEQ ID NO: 32715 - DNA, 26 bp, Homo sapiens
ttggacaaatgacttcctggagagtt

SEQ ID NO: 32716 - DNA, 26 bp, Homo sapiens
tggacaaatgacttcctggagagttc

SEQ ID NO: 32717 - DNA, 26 bp, Homo sapiens
ggacaaatgacttcctggagagttct

SEQ ID NO: 32718 - DNA, 26 bp, Homo sapiens
gacaaatgacttcctggagagttctg

SEQ ID NO: 32719 - DNA, 26 bp, Homo sapiens
acaaatgacttcctggagagttctgg

SEQ ID NO: 32720 - DNA, 26 bp, Homo sapiens
caaatgacttcctggagagttctggt

SEQ ID NO: 32721 - DNA, 26 bp, Homo sapiens
aaatgacttcctggagagttctggta

SEQ ID NO: 32722 - DNA, 26 bp, Homo sapiens
aatgacttcctggagagttctggtag

SEQ ID NO: 32723 - DNA, 26 bp, Homo sapiens
atgacttcctggagagttctggtagc

SEQ ID NO: 32724 - DNA, 26 bp, Homo sapiens
tgacttcctggagagttctggtagct

SEQ ID NO: 32725 - DNA, 26 bp, Homo sapiens
gacttcctggagagttctggtagctg

SEQ ID NO: 32726 - DNA, 26 bp, Homo sapiens
acttcctggagagttctggtagctga

SEQ ID NO: 32727 - DNA, 26 bp, Homo sapiens
cttcctggagagttctggtagctgaa

SEQ ID NO: 32728 - DNA, 26 bp, Homo sapiens
ttcctggagagttctggtagctgaag

SEQ ID NO: 32729 - DNA, 26 bp, Homo sapiens
tcctggagagttctggtagctgaagc

SEQ ID NO: 32730 - DNA, 26 bp, Homo sapiens
cctggagagttctggtagctgaagca

SEQ ID NO: 32731 - DNA, 26 bp, Homo sapiens
ctggagagttctggtagctgaagcag

SEQ ID NO: 32732 - DNA, 26 bp, Homo sapiens
tggagagttctggtagctgaagcagc

SEQ ID NO: 32733 - DNA, 26 bp, Homo sapiens
ggagagttctggtagctgaagcagcc

SEQ ID NO: 32734 - DNA, 26 bp, Homo sapiens
gagagttctggtagctgaagcagcct

SEQ ID NO: 32735 - DNA, 26 bp, Homo sapiens
agagttctggtagctgaagcagcctt

SEQ ID NO: 32736 - DNA, 26 bp, Homo sapiens
gagttctggtagctgaagcagccttt

SEQ ID NO: 32737 - DNA, 26 bp, Homo sapiens
agttctggtagctgaagcagcctttt

SEQ ID NO: 32738 - DNA, 26 bp, Homo sapiens
gttctggtagctgaagcagccttttt

SEQ ID NO: 32739 - DNA, 26 bp, Homo sapiens
ttctggtagctgaagcagcctttttg

SEQ ID NO: 32740 - DNA, 26 bp, Homo sapiens
tctggtagctgaagcagcctttttgc

SEQ ID NO: 32741 - DNA, 26 bp, Homo sapiens
ctggtagctgaagcagcctttttgct

SEQ ID NO: 32742 - DNA, 26 bp, Homo sapiens
tggtagctgaagcagcctttttgctc

SEQ ID NO: 32743 - DNA, 26 bp, Homo sapiens
ggtagctgaagcagcctttttgctct

SEQ ID NO: 32744 - DNA, 26 bp, Homo sapiens
gtagctgaagcagcctttttgctctg

SEQ ID NO: 32745 - DNA, 26 bp, Homo sapiens
tagctgaagcagcctttttgctctgg

SEQ ID NO: 32746 - DNA, 26 bp, Homo sapiens
agctgaagcagcctttttgctctggg

SEQ ID NO: 32747 - DNA, 26 bp, Homo sapiens
gctgaagcagcctttttgctctgggc

SEQ ID NO: 32748 - DNA, 26 bp, Homo sapiens
ctgaagcagcctttttgctctgggcc

SEQ ID NO: 32749 - DNA, 26 bp, Homo sapiens
tgaagcagcctttttgctctgggccc

SEQ ID NO: 32750 - DNA, 26 bp, Homo sapiens
gaagcagcctttttgctctgggcccg

SEQ ID NO: 32751 - DNA, 26 bp, Homo sapiens
aagcagcctttttgctctgggcccgt

SEQ ID NO: 32752 - DNA, 26 bp, Homo sapiens
agcagcctttttgctctgggcccgtt

SEQ ID NO: 32753 - DNA, 26 bp, Homo sapiens
gcagcctttttgctctgggcccgttt

SEQ ID NO: 32754 - DNA, 26 bp, Homo sapiens
cagcctttttgctctgggcccgtttc

SEQ ID NO: 32755 - DNA, 26 bp, Homo sapiens
agcctttttgctctgggcccgtttct

SEQ ID NO: 32756 - DNA, 26 bp, Homo sapiens
gcctttttgctctgggcccgtttcta

SEQ ID NO: 32757 - DNA, 26 bp, Homo sapiens
cctttttgctctgggcccgtttctag

SEQ ID NO: 32758 - DNA, 26 bp, Homo sapiens
ctttttgctctgggcccgtttctagc

SEQ ID NO: 32759 - DNA, 26 bp, Homo sapiens
tttttgctctgggcccgtttctagct

SEQ ID NO: 32760 - DNA, 26 bp, Homo sapiens
ttttgctctgggcccgtttctagctc

SEQ ID NO: 32761 - DNA, 26 bp, Homo sapiens
tttgctctgggcccgtttctagctcc

SEQ ID NO: 32762 - DNA, 26 bp, Homo sapiens
ttgctctgggcccgtttctagctcct

SEQ ID NO: 32763 - DNA, 26 bp, Homo sapiens
tgctctgggcccgtttctagctcctc

SEQ ID NO: 32764 - DNA, 26 bp, Homo sapiens
gctctgggcccgtttctagctcctcg

SEQ ID NO: 32765 - DNA, 26 bp, Homo sapiens
ctctgggcccgtttctagctcctcgt

SEQ ID NO: 32766 - DNA, 26 bp, Homo sapiens
tctgggcccgtttctagctcctcgtc

SEQ ID NO: 32767 - DNA, 26 bp, Homo sapiens
ctgggcccgtttctagctcctcgtcc

SEQ ID NO: 32768 - DNA, 26 bp, Homo sapiens
tgggcccgtttctagctcctcgtccg

SEQ ID NO: 32769 - DNA, 26 bp, Homo sapiens
gggcccgtttctagctcctcgtccgt

SEQ ID NO: 32770 - DNA, 26 bp, Homo sapiens
ggcccgtttctagctcctcgtccgtc

SEQ ID NO: 32771 - DNA, 26 bp, Homo sapiens
gcccgtttctagctcctcgtccgtcc

SEQ ID NO: 32772 - DNA, 26 bp, Homo sapiens
cccgtttctagctcctcgtccgtccc

SEQ ID NO: 32773 - DNA, 26 bp, Homo sapiens
ccgtttctagctcctcgtccgtccct

SEQ ID NO: 32774 - DNA, 26 bp, Homo sapiens
cgtttctagctcctcgtccgtccctg

SEQ ID NO: 32775 - DNA, 26 bp, Homo sapiens
gtttctagctcctcgtccgtccctgt

SEQ ID NO: 32776 - DNA, 26 bp, Homo sapiens
tttctagctcctcgtccgtccctgtg

SEQ ID NO: 32777 - DNA, 26 bp, Homo sapiens
ttctagctcctcgtccgtccctgtgt

SEQ ID NO: 32778 - DNA, 26 bp, Homo sapiens
tctagctcctcgtccgtccctgtgtc

SEQ ID NO: 32779 - DNA, 26 bp, Homo sapiens
ctagctcctcgtccgtccctgtgtca

SEQ ID NO: 32780 - DNA, 26 bp, Homo sapiens
tagctcctcgtccgtccctgtgtcat

SEQ ID NO: 32781 - DNA, 26 bp, Homo sapiens
agctcctcgtccgtccctgtgtcatt

SEQ ID NO: 32782 - DNA, 26 bp, Homo sapiens
gctcctcgtccgtccctgtgtcattg

SEQ ID NO: 32783 - DNA, 26 bp, Homo sapiens
ctcctcgtccgtccctgtgtcattgc

SEQ ID NO: 32784 - DNA, 26 bp, Homo sapiens
tcctcgtccgtccctgtgtcattgcc

SEQ ID NO: 32785 - DNA, 26 bp, Homo sapiens
cctcgtccgtccctgtgtcattgcca

SEQ ID NO: 32786 - DNA, 26 bp, Homo sapiens
ctcgtccgtccctgtgtcattgccac

SEQ ID NO: 32787 - DNA, 26 bp, Homo sapiens
tcgtccgtccctgtgtcattgccacc

SEQ ID NO: 32788 - DNA, 26 bp, Homo sapiens
cgtccgtccctgtgtcattgccaccc

SEQ ID NO: 32789 - DNA, 26 bp, Homo sapiens
gtccgtccctgtgtcattgccaccct

SEQ ID NO: 32790 - DNA, 26 bp, Homo sapiens
tccgtccctgtgtcattgccaccctg

SEQ ID NO: 32791 - DNA, 26 bp, Homo sapiens
ccgtccctgtgtcattgccaccctgc

SEQ ID NO: 32792 - DNA, 26 bp, Homo sapiens
cgtccctgtgtcattgccaccctgca

SEQ ID NO: 32793 - DNA, 26 bp, Homo sapiens
gtccctgtgtcattgccaccctgcag

SEQ ID NO: 32794 - DNA, 26 bp, Homo sapiens
tccctgtgtcattgccaccctgcagt

SEQ ID NO: 32795 - DNA, 26 bp, Homo sapiens
ccctgtgtcattgccaccctgcagtt

SEQ ID NO: 32796 - DNA, 26 bp, Homo sapiens
cctgtgtcattgccaccctgcagttg

SEQ ID NO: 32797 - DNA, 26 bp, Homo sapiens
ctgtgtcattgccaccctgcagttga

SEQ ID NO: 32798 - DNA, 26 bp, Homo sapiens
tgtgtcattgccaccctgcagttgag

SEQ ID NO: 32799 - DNA, 26 bp, Homo sapiens
gtgtcattgccaccctgcagttgagc

SEQ ID NO: 32800 - DNA, 26 bp, Homo sapiens
tgtcattgccaccctgcagttgagct

SEQ ID NO: 32801 - DNA, 26 bp, Homo sapiens
gtcattgccaccctgcagttgagcta

SEQ ID NO: 32802 - DNA, 26 bp, Homo sapiens
tcattgccaccctgcagttgagctac

SEQ ID NO: 32803 - DNA, 26 bp, Homo sapiens
cattgccaccctgcagttgagctact

SEQ ID NO: 32804 - DNA, 26 bp, Homo sapiens
attgccaccctgcagttgagctactg

SEQ ID NO: 32805 - DNA, 26 bp, Homo sapiens
ttgccaccctgcagttgagctactga

SEQ ID NO: 32806 - DNA, 26 bp, Homo sapiens
tgccaccctgcagttgagctactgaa

SEQ ID NO: 32807 - DNA, 26 bp, Homo sapiens
gccaccctgcagttgagctactgaac

SEQ ID NO: 32808 - DNA, 26 bp, Homo sapiens
ccaccctgcagttgagctactgaacc

SEQ ID NO: 32809 - DNA, 26 bp, Homo sapiens
caccctgcagttgagctactgaaccg

SEQ ID NO: 32810 - DNA, 26 bp, Homo sapiens
accctgcagttgagctactgaaccgc

SEQ ID NO: 32811 - DNA, 26 bp, Homo sapiens
ccctgcagttgagctactgaaccgct

SEQ ID NO: 32812 - DNA, 26 bp, Homo sapiens
cctgcagttgagctactgaaccgctg

SEQ ID NO: 32813 - DNA, 26 bp, Homo sapiens
ctgcagttgagctactgaaccgctgt

SEQ ID NO: 32814 - DNA, 26 bp, Homo sapiens
tgcagttgagctactgaaccgctgtc

SEQ ID NO: 32815 - DNA, 26 bp, Homo sapiens
gcagttgagctactgaaccgctgtcc

SEQ ID NO: 32816 - DNA, 26 bp, Homo sapiens
cagttgagctactgaaccgctgtcct

SEQ ID NO: 32817 - DNA, 26 bp, Homo sapiens
agttgagctactgaaccgctgtcctc

SEQ ID NO: 32818 - DNA, 26 bp, Homo sapiens
gttgagctactgaaccgctgtcctcc

SEQ ID NO: 32819 - DNA, 26 bp, Homo sapiens
ttgagctactgaaccgctgtcctcct

SEQ ID NO: 32820 - DNA, 26 bp, Homo sapiens
tgagctactgaaccgctgtcctcctc

SEQ ID NO: 32821 - DNA, 26 bp, Homo sapiens
gagctactgaaccgctgtcctcctcc

SEQ ID NO: 32822 - DNA, 26 bp, Homo sapiens
agctactgaaccgctgtcctcctcct

SEQ ID NO: 32823 - DNA, 26 bp, Homo sapiens
gctactgaaccgctgtcctcctcctc

SEQ ID NO: 32824 - DNA, 26 bp, Homo sapiens
ctactgaaccgctgtcctcctcctcc

SEQ ID NO: 32825 - DNA, 26 bp, Homo sapiens
tactgaaccgctgtcctcctcctcct

SEQ ID NO: 32826 - DNA, 26 bp, Homo sapiens
actgaaccgctgtcctcctcctcctc

SEQ ID NO: 32827 - DNA, 26 bp, Homo sapiens
ctgaaccgctgtcctcctcctcctcc

SEQ ID NO: 32828 - DNA, 26 bp, Homo sapiens
tgaaccgctgtcctcctcctcctcct

SEQ ID NO: 32829 - DNA, 26 bp, Homo sapiens
gaaccgctgtcctcctcctcctcctc

SEQ ID NO: 32830 - DNA, 26 bp, Homo sapiens
aaccgctgtcctcctcctcctcctct

SEQ ID NO: 32831 - DNA, 26 bp, Homo sapiens
accgctgtcctcctcctcctcctctt

SEQ ID NO: 32832 - DNA, 26 bp, Homo sapiens
ccgctgtcctcctcctcctcctcttc

SEQ ID NO: 32833 - DNA, 26 bp, Homo sapiens
cgctgtcctcctcctcctcctcttct

SEQ ID NO: 32834 - DNA, 26 bp, Homo sapiens
gctgtcctcctcctcctcctcttctt

SEQ ID NO: 32835 - DNA, 26 bp, Homo sapiens
ctgtcctcctcctcctcctcttcttt

SEQ ID NO: 32836 - DNA, 26 bp, Homo sapiens
tgtcctcctcctcctcctcttctttt

SEQ ID NO: 32837 - DNA, 26 bp, Homo sapiens
gtcctcctcctcctcctcttctttta

SEQ ID NO: 32838 - DNA, 26 bp, Homo sapiens
tcctcctcctcctcctcttcttttat

SEQ ID NO: 32839 - DNA, 26 bp, Homo sapiens
cctcctcctcctcctcttcttttatt

SEQ ID NO: 32840 - DNA, 26 bp, Homo sapiens
ctcctcctcctcctcttcttttattt

SEQ ID NO: 32841 - DNA, 26 bp, Homo sapiens
tcctcctcctcctcttcttttatttc

SEQ ID NO: 32842 - DNA, 26 bp, Homo sapiens
cctcctcctcctcttcttttatttcc

SEQ ID NO: 32843 - DNA, 26 bp, Homo sapiens
ctcctcctcctcttcttttatttcct

SEQ ID NO: 32844 - DNA, 26 bp, Homo sapiens
tcctcctcctcttcttttatttcctc

SEQ ID NO: 32845 - DNA, 26 bp, Homo sapiens
cctcctcctcttcttttatttcctcc

SEQ ID NO: 32846 - DNA, 26 bp, Homo sapiens
ctcctcctcttcttttatttcctcct

SEQ ID NO: 32847 - DNA, 26 bp, Homo sapiens
tcctcctcttcttttatttcctcctc

SEQ ID NO: 32848 - DNA, 26 bp, Homo sapiens
cctcctcttcttttatttcctcctct

SEQ ID NO: 32849 - DNA, 26 bp, Homo sapiens
ctcctcttcttttatttcctcctctt

SEQ ID NO: 32850 - DNA, 26 bp, Homo sapiens
tcctcttcttttatttcctcctcttc

SEQ ID NO: 32851 - DNA, 26 bp, Homo sapiens
cctcttcttttatttcctcctcttct

SEQ ID NO: 32852 - DNA, 26 bp, Homo sapiens
ctcttcttttatttcctcctcttctt

SEQ ID NO: 32853 - DNA, 26 bp, Homo sapiens
tcttcttttatttcctcctcttcttt

SEQ ID NO: 32854 - DNA, 26 bp, Homo sapiens
cttcttttatttcctcctcttctttc

SEQ ID NO: 32855 - DNA, 26 bp, Homo sapiens
ttcttttatttcctcctcttctttca

SEQ ID NO: 32856 - DNA, 26 bp, Homo sapiens
tcttttatttcctcctcttctttcag

SEQ ID NO: 32857 - DNA, 26 bp, Homo sapiens
cttttatttcctcctcttctttcagc

SEQ ID NO: 32858 - DNA, 26 bp, Homo sapiens
ttttatttcctcctcttctttcagct

SEQ ID NO: 32859 - DNA, 26 bp, Homo sapiens
tttatttcctcctcttctttcagctg

SEQ ID NO: 32860 - DNA, 26 bp, Homo sapiens
ttatttcctcctcttctttcagctgt

SEQ ID NO: 32861 - DNA, 26 bp, Homo sapiens
tatttcctcctcttctttcagctgtt

SEQ ID NO: 32862 - DNA, 26 bp, Homo sapiens
atttcctcctcttctttcagctgttc

SEQ ID NO: 32863 - DNA, 26 bp, Homo sapiens
tttcctcctcttctttcagctgttcc

SEQ ID NO: 32864 - DNA, 26 bp, Homo sapiens
ttcctcctcttctttcagctgttcct

SEQ ID NO: 32865 - DNA, 26 bp, Homo sapiens
tcctcctcttctttcagctgttcctc

SEQ ID NO: 32866 - DNA, 26 bp, Homo sapiens
cctcctcttctttcagctgttcctcc

SEQ ID NO: 32867 - DNA, 26 bp, Homo sapiens
ctcctcttctttcagctgttcctcct

SEQ ID NO: 32868 - DNA, 26 bp, Homo sapiens
tcctcttctttcagctgttcctcctg

SEQ ID NO: 32869 - DNA, 26 bp, Homo sapiens
cctcttctttcagctgttcctcctgg

SEQ ID NO: 32870 - DNA, 26 bp, Homo sapiens
ctcttctttcagctgttcctcctggg

SEQ ID NO: 32871 - DNA, 26 bp, Homo sapiens
tcttctttcagctgttcctcctgggc

SEQ ID NO: 32872 - DNA, 26 bp, Homo sapiens
cttctttcagctgttcctcctgggcg

SEQ ID NO: 32873 - DNA, 26 bp, Homo sapiens
ttctttcagctgttcctcctgggcgt

SEQ ID NO: 32874 - DNA, 26 bp, Homo sapiens
tctttcagctgttcctcctgggcgta

SEQ ID NO: 32875 - DNA, 26 bp, Homo sapiens
ctttcagctgttcctcctgggcgtag

SEQ ID NO: 32876 - DNA, 26 bp, Homo sapiens
tttcagctgttcctcctgggcgtagc

SEQ ID NO: 32877 - DNA, 26 bp, Homo sapiens
ttcagctgttcctcctgggcgtagcc

SEQ ID NO: 32878 - DNA, 26 bp, Homo sapiens
tcagctgttcctcctgggcgtagcct

SEQ ID NO: 32879 - DNA, 26 bp, Homo sapiens
cagctgttcctcctgggcgtagcctg

SEQ ID NO: 32880 - DNA, 26 bp, Homo sapiens
agctgttcctcctgggcgtagcctgc

SEQ ID NO: 32881 - DNA, 26 bp, Homo sapiens
gctgttcctcctgggcgtagcctgcc

SEQ ID NO: 32882 - DNA, 26 bp, Homo sapiens
ctgttcctcctgggcgtagcctgccg

SEQ ID NO: 32883 - DNA, 26 bp, Homo sapiens
tgttcctcctgggcgtagcctgccgc

SEQ ID NO: 32884 - DNA, 26 bp, Homo sapiens
gttcctcctgggcgtagcctgccgcc

SEQ ID NO: 32885 - DNA, 26 bp, Homo sapiens
ttcctcctgggcgtagcctgccgccc

SEQ ID NO: 32886 - DNA, 26 bp, Homo sapiens
tcctcctgggcgtagcctgccgcccg

SEQ ID NO: 32887 - DNA, 26 bp, Homo sapiens
cctcctgggcgtagcctgccgcccgc

SEQ ID NO: 32888 - DNA, 26 bp, Homo sapiens
ctcctgggcgtagcctgccgcccgct

SEQ ID NO: 32889 - DNA, 26 bp, Homo sapiens
tcctgggcgtagcctgccgcccgctt

SEQ ID NO: 32890 - DNA, 26 bp, Homo sapiens
cctgggcgtagcctgccgcccgcttg

SEQ ID NO: 32891 - DNA, 26 bp, Homo sapiens
ctgggcgtagcctgccgcccgcttgg

SEQ ID NO: 32892 - DNA, 26 bp, Homo sapiens
tgggcgtagcctgccgcccgcttggg

SEQ ID NO: 32893 - DNA, 26 bp, Homo sapiens
gggcgtagcctgccgcccgcttgggt

SEQ ID NO: 32894 - DNA, 26 bp, Homo sapiens
ggcgtagcctgccgcccgcttgggtg

SEQ ID NO: 32895 - DNA, 26 bp, Homo sapiens
gcgtagcctgccgcccgcttgggtgc

SEQ ID NO: 32896 - DNA, 26 bp, Homo sapiens
cgtagcctgccgcccgcttgggtgcc

SEQ ID NO: 32897 - DNA, 26 bp, Homo sapiens
gtagcctgccgcccgcttgggtgcct

SEQ ID NO: 32898 - DNA, 26 bp, Homo sapiens
tagcctgccgcccgcttgggtgcctg

SEQ ID NO: 32899 - DNA, 26 bp, Homo sapiens
agcctgccgcccgcttgggtgcctgc

SEQ ID NO: 32900 - DNA, 26 bp, Homo sapiens
gcctgccgcccgcttgggtgcctgct

SEQ ID NO: 32901 - DNA, 26 bp, Homo sapiens
cctgccgcccgcttgggtgcctgctg

SEQ ID NO: 32902 - DNA, 26 bp, Homo sapiens
ctgccgcccgcttgggtgcctgctgt

SEQ ID NO: 32903 - DNA, 26 bp, Homo sapiens
tgccgcccgcttgggtgcctgctgtt

SEQ ID NO: 32904 - DNA, 26 bp, Homo sapiens
gccgcccgcttgggtgcctgctgttt

SEQ ID NO: 32905 - DNA, 26 bp, Homo sapiens
ccgcccgcttgggtgcctgctgtttt

SEQ ID NO: 32906 - DNA, 26 bp, Homo sapiens
cgcccgcttgggtgcctgctgttttc

SEQ ID NO: 32907 - DNA, 26 bp, Homo sapiens
gcccgcttgggtgcctgctgttttct

SEQ ID NO: 32908 - DNA, 26 bp, Homo sapiens
cccgcttgggtgcctgctgttttctc

SEQ ID NO: 32909 - DNA, 26 bp, Homo sapiens
ccgcttgggtgcctgctgttttctcc

SEQ ID NO: 32910 - DNA, 26 bp, Homo sapiens
cgcttgggtgcctgctgttttctcct

SEQ ID NO: 32911 - DNA, 26 bp, Homo sapiens
gcttgggtgcctgctgttttctcctc

SEQ ID NO: 32912 - DNA, 26 bp, Homo sapiens
cttgggtgcctgctgttttctcctcg

SEQ ID NO: 32913 - DNA, 26 bp, Homo sapiens
ttgggtgcctgctgttttctcctcgg

SEQ ID NO: 32914 - DNA, 26 bp, Homo sapiens
tgggtgcctgctgttttctcctcggc

SEQ ID NO: 32915 - DNA, 26 bp, Homo sapiens
gggtgcctgctgttttctcctcggca

SEQ ID NO: 32916 - DNA, 26 bp, Homo sapiens
ggtgcctgctgttttctcctcggcat

SEQ ID NO: 32917 - DNA, 26 bp, Homo sapiens
gtgcctgctgttttctcctcggcatc

SEQ ID NO: 32918 - DNA, 26 bp, Homo sapiens
tgcctgctgttttctcctcggcatcc

SEQ ID NO: 32919 - DNA, 26 bp, Homo sapiens
gcctgctgttttctcctcggcatcct

SEQ ID NO: 32920 - DNA, 26 bp, Homo sapiens
cctgctgttttctcctcggcatcctc

SEQ ID NO: 32921 - DNA, 26 bp, Homo sapiens
ctgctgttttctcctcggcatcctct

SEQ ID NO: 32922 - DNA, 26 bp, Homo sapiens
tgctgttttctcctcggcatcctcta

SEQ ID NO: 32923 - DNA, 26 bp, Homo sapiens
gctgttttctcctcggcatcctctac

SEQ ID NO: 32924 - DNA, 26 bp, Homo sapiens
ctgttttctcctcggcatcctctact

SEQ ID NO: 32925 - DNA, 26 bp, Homo sapiens
tgttttctcctcggcatcctctactt

SEQ ID NO: 32926 - DNA, 26 bp, Homo sapiens
gttttctcctcggcatcctctacttc

SEQ ID NO: 32927 - DNA, 26 bp, Homo sapiens
ttttctcctcggcatcctctacttcg

SEQ ID NO: 32928 - DNA, 26 bp, Homo sapiens
tttctcctcggcatcctctacttcgc

SEQ ID NO: 32929 - DNA, 26 bp, Homo sapiens
ttctcctcggcatcctctacttcgct

SEQ ID NO: 32930 - DNA, 26 bp, Homo sapiens
tctcctcggcatcctctacttcgctc

SEQ ID NO: 32931 - DNA, 26 bp, Homo sapiens
ctcctcggcatcctctacttcgctcc

SEQ ID NO: 32932 - DNA, 26 bp, Homo sapiens
tcctcggcatcctctacttcgctcca

SEQ ID NO: 32933 - DNA, 26 bp, Homo sapiens
cctcggcatcctctacttcgctccag

SEQ ID NO: 32934 - DNA, 26 bp, Homo sapiens
ctcggcatcctctacttcgctccagt

SEQ ID NO: 32935 - DNA, 26 bp, Homo sapiens
tcggcatcctctacttcgctccagtc

SEQ ID NO: 32936 - DNA, 26 bp, Homo sapiens
cggcatcctctacttcgctccagtcc

SEQ ID NO: 32937 - DNA, 26 bp, Homo sapiens
ggcatcctctacttcgctccagtccc

SEQ ID NO: 32938 - DNA, 26 bp, Homo sapiens
gcatcctctacttcgctccagtccca

SEQ ID NO: 32939 - DNA, 26 bp, Homo sapiens
catcctctacttcgctccagtcccac

SEQ ID NO: 32940 - DNA, 26 bp, Homo sapiens
atcctctacttcgctccagtcccact

SEQ ID NO: 32941 - DNA, 26 bp, Homo sapiens
tcctctacttcgctccagtcccactt

SEQ ID NO: 32942 - DNA, 26 bp, Homo sapiens
cctctacttcgctccagtcccacttc

SEQ ID NO: 32943 - DNA, 26 bp, Homo sapiens
ctctacttcgctccagtcccacttct

SEQ ID NO: 32944 - DNA, 26 bp, Homo sapiens
tctacttcgctccagtcccacttctg

SEQ ID NO: 32945 - DNA, 26 bp, Homo sapiens
ctacttcgctccagtcccacttctgg

SEQ ID NO: 32946 - DNA, 26 bp, Homo sapiens
tacttcgctccagtcccacttctggc

SEQ ID NO: 32947 - DNA, 26 bp, Homo sapiens
acttcgctccagtcccacttctggcg

SEQ ID NO: 32948 - DNA, 26 bp, Homo sapiens
cttcgctccagtcccacttctggcgc

SEQ ID NO: 32949 - DNA, 26 bp, Homo sapiens
ttcgctccagtcccacttctggcgcc

SEQ ID NO: 32950 - DNA, 26 bp, Homo sapiens
tcgctccagtcccacttctggcgccc

SEQ ID NO: 32951 - DNA, 26 bp, Homo sapiens
cgctccagtcccacttctggcgcccc

SEQ ID NO: 32952 - DNA, 26 bp, Homo sapiens
gctccagtcccacttctggcgcccca

SEQ ID NO: 32953 - DNA, 26 bp, Homo sapiens
ctccagtcccacttctggcgccccag

SEQ ID NO: 32954 - DNA, 26 bp, Homo sapiens
tccagtcccacttctggcgccccagc

SEQ ID NO: 32955 - DNA, 26 bp, Homo sapiens
ccagtcccacttctggcgccccagcc

SEQ ID NO: 32956 - DNA, 26 bp, Homo sapiens
cagtcccacttctggcgccccagccc

SEQ ID NO: 32957 - DNA, 26 bp, Homo sapiens
agtcccacttctggcgccccagcccc

SEQ ID NO: 32958 - DNA, 26 bp, Homo sapiens
gtcccacttctggcgccccagccccg

SEQ ID NO: 32959 - DNA, 26 bp, Homo sapiens
tcccacttctggcgccccagccccga

SEQ ID NO: 32960 - DNA, 26 bp, Homo sapiens
cccacttctggcgccccagccccgag

SEQ ID NO: 32961 - DNA, 26 bp, Homo sapiens
ccacttctggcgccccagccccgagc

SEQ ID NO: 32962 - DNA, 26 bp, Homo sapiens
cacttctggcgccccagccccgagcc

SEQ ID NO: 32963 - DNA, 26 bp, Homo sapiens
acttctggcgccccagccccgagccg

SEQ ID NO: 32964 - DNA, 26 bp, Homo sapiens
cttctggcgccccagccccgagccgc

SEQ ID NO: 32965 - DNA, 26 bp, Homo sapiens
ttctggcgccccagccccgagccgcg

SEQ ID NO: 32966 - DNA, 26 bp, Homo sapiens
tctggcgccccagccccgagccgcgc

SEQ ID NO: 32967 - DNA, 26 bp, Homo sapiens
ctggcgccccagccccgagccgcgcg

SEQ ID NO: 32968 - DNA, 26 bp, Homo sapiens
tggcgccccagccccgagccgcgcgc

SEQ ID NO: 32969 - DNA, 26 bp, Homo sapiens
ggcgccccagccccgagccgcgcgct

SEQ ID NO: 32970 - DNA, 26 bp, Homo sapiens
gcgccccagccccgagccgcgcgctg

SEQ ID NO: 32971 - DNA, 26 bp, Homo sapiens
cgccccagccccgagccgcgcgctgg

SEQ ID NO: 32972 - DNA, 26 bp, Homo sapiens
gccccagccccgagccgcgcgctggg

SEQ ID NO: 32973 - DNA, 26 bp, Homo sapiens
ccccagccccgagccgcgcgctgggg

SEQ ID NO: 32974 - DNA, 26 bp, Homo sapiens
cccagccccgagccgcgcgctggggc

SEQ ID NO: 32975 - DNA, 26 bp, Homo sapiens
ccagccccgagccgcgcgctggggcc

SEQ ID NO: 32976 - DNA, 26 bp, Homo sapiens
cagccccgagccgcgcgctggggccc

SEQ ID NO: 32977 - DNA, 26 bp, Homo sapiens
agccccgagccgcgcgctggggcccg

SEQ ID NO: 32978 - DNA, 26 bp, Homo sapiens
gccccgagccgcgcgctggggcccgc

SEQ ID NO: 32979 - DNA, 26 bp, Homo sapiens
ccccgagccgcgcgctggggcccgct

SEQ ID NO: 32980 - DNA, 26 bp, Homo sapiens
cccgagccgcgcgctggggcccgctg

SEQ ID NO: 32981 - DNA, 26 bp, Homo sapiens
ccgagccgcgcgctggggcccgctgt

SEQ ID NO: 32982 - DNA, 26 bp, Homo sapiens
cgagccgcgcgctggggcccgctgtc

SEQ ID NO: 32983 - DNA, 26 bp, Homo sapiens
gagccgcgcgctggggcccgctgtct

SEQ ID NO: 32984 - DNA, 26 bp, Homo sapiens
agccgcgcgctggggcccgctgtctc

SEQ ID NO: 32985 - DNA, 26 bp, Homo sapiens
gccgcgcgctggggcccgctgtctct

SEQ ID NO: 32986 - DNA, 26 bp, Homo sapiens
ccgcgcgctggggcccgctgtctctc

SEQ ID NO: 32987 - DNA, 26 bp, Homo sapiens
cgcgcgctggggcccgctgtctctct

SEQ ID NO: 32988 - DNA, 26 bp, Homo sapiens
gcgcgctggggcccgctgtctctctg

SEQ ID NO: 32989 - DNA, 26 bp, Homo sapiens
cgcgctggggcccgctgtctctctgg

SEQ ID NO: 32990 - DNA, 26 bp, Homo sapiens
gcgctggggcccgctgtctctctggc

SEQ ID NO: 32991 - DNA, 26 bp, Homo sapiens
cgctggggcccgctgtctctctggcc

SEQ ID NO: 32992 - DNA, 26 bp, Homo sapiens
gctggggcccgctgtctctctggcct

SEQ ID NO: 32993 - DNA, 26 bp, Homo sapiens
ctggggcccgctgtctctctggcctc

SEQ ID NO: 32994 - DNA, 26 bp, Homo sapiens
tggggcccgctgtctctctggcctct

SEQ ID NO: 32995 - DNA, 26 bp, Homo sapiens
ggggcccgctgtctctctggcctctc

SEQ ID NO: 32996 - DNA, 26 bp, Homo sapiens
gggcccgctgtctctctggcctctct

SEQ ID NO: 32997 - DNA, 26 bp, Homo sapiens
ggcccgctgtctctctggcctctctg

SEQ ID NO: 32998 - DNA, 26 bp, Homo sapiens
gcccgctgtctctctggcctctctgg

SEQ ID NO: 32999 - DNA, 26 bp, Homo sapiens
cccgctgtctctctggcctctctggg

SEQ ID NO: 33000 - DNA, 26 bp, Homo sapiens
ccgctgtctctctggcctctctgggt

SEQ ID NO: 33001 - DNA, 26 bp, Homo sapiens
cgctgtctctctggcctctctgggtc

SEQ ID NO: 33002 - DNA, 26 bp, Homo sapiens
gctgtctctctggcctctctgggtct

SEQ ID NO: 33003 - DNA, 26 bp, Homo sapiens
ctgtctctctggcctctctgggtctc

SEQ ID NO: 33004 - DNA, 26 bp, Homo sapiens
tgtctctctggcctctctgggtctcc

SEQ ID NO: 33005 - DNA, 26 bp, Homo sapiens
gtctctctggcctctctgggtctcct

SEQ ID NO: 33006 - DNA, 26 bp, Homo sapiens
tctctctggcctctctgggtctcctc

SEQ ID NO: 33007 - DNA, 26 bp, Homo sapiens
ctctctggcctctctgggtctcctcc

SEQ ID NO: 33008 - DNA, 26 bp, Homo sapiens
tctctggcctctctgggtctcctccg

SEQ ID NO: 33009 - DNA, 26 bp, Homo sapiens
ctctggcctctctgggtctcctccgc

SEQ ID NO: 33010 - DNA, 26 bp, Homo sapiens
tctggcctctctgggtctcctccgcc

SEQ ID NO: 33011 - DNA, 26 bp, Homo sapiens
ctggcctctctgggtctcctccgcct

SEQ ID NO: 33012 - DNA, 26 bp, Homo sapiens
tggcctctctgggtctcctccgcctc

SEQ ID NO: 33013 - DNA, 26 bp, Homo sapiens
ggcctctctgggtctcctccgcctct

SEQ ID NO: 33014 - DNA, 26 bp, Homo sapiens
gcctctctgggtctcctccgcctctt

SEQ ID NO: 33015 - DNA, 26 bp, Homo sapiens
cctctctgggtctcctccgcctcttg

SEQ ID NO: 33016 - DNA, 26 bp, Homo sapiens
ctctctgggtctcctccgcctcttgc

SEQ ID NO: 33017 - DNA, 26 bp, Homo sapiens
tctctgggtctcctccgcctcttgcc

SEQ ID NO: 33018 - DNA, 26 bp, Homo sapiens
ctctgggtctcctccgcctcttgccc

SEQ ID NO: 33019 - DNA, 26 bp, Homo sapiens
tctgggtctcctccgcctcttgcccg

SEQ ID NO: 33020 - DNA, 26 bp, Homo sapiens
ctgggtctcctccgcctcttgcccgg

SEQ ID NO: 33021 - DNA, 26 bp, Homo sapiens
tgggtctcctccgcctcttgcccggt

SEQ ID NO: 33022 - DNA, 26 bp, Homo sapiens
gggtctcctccgcctcttgcccggtg

SEQ ID NO: 33023 - DNA, 26 bp, Homo sapiens
ggtctcctccgcctcttgcccggtgg

SEQ ID NO: 33024 - DNA, 26 bp, Homo sapiens
gtctcctccgcctcttgcccggtggc

SEQ ID NO: 33025 - DNA, 26 bp, Homo sapiens
tctcctccgcctcttgcccggtggct

SEQ ID NO: 33026 - DNA, 26 bp, Homo sapiens
ctcctccgcctcttgcccggtggctc

SEQ ID NO: 33027 - DNA, 26 bp, Homo sapiens
tcctccgcctcttgcccggtggctcc

SEQ ID NO: 33028 - DNA, 26 bp, Homo sapiens
cctccgcctcttgcccggtggctcct

SEQ ID NO: 33029 - DNA, 26 bp, Homo sapiens
ctccgcctcttgcccggtggctccta

SEQ ID NO: 33030 - DNA, 26 bp, Homo sapiens
tccgcctcttgcccggtggctcctag

SEQ ID NO: 33031 - DNA, 26 bp, Homo sapiens
ccgcctcttgcccggtggctcctagg

SEQ ID NO: 33032 - DNA, 26 bp, Homo sapiens
cgcctcttgcccggtggctcctagga

SEQ ID NO: 33033 - DNA, 26 bp, Homo sapiens
gcctcttgcccggtggctcctaggac

SEQ ID NO: 33034 - DNA, 26 bp, Homo sapiens
cctcttgcccggtggctcctaggacg

SEQ ID NO: 33035 - DNA, 26 bp, Homo sapiens
ctcttgcccggtggctcctaggacgt

SEQ ID NO: 33036 - DNA, 26 bp, Homo sapiens
tcttgcccggtggctcctaggacgtc

SEQ ID NO: 33037 - DNA, 26 bp, Homo sapiens
cttgcccggtggctcctaggacgtca

SEQ ID NO: 33038 - DNA, 26 bp, Homo sapiens
ttgcccggtggctcctaggacgtcac

SEQ ID NO: 33039 - DNA, 26 bp, Homo sapiens
tgcccggtggctcctaggacgtcact

SEQ ID NO: 33040 - DNA, 26 bp, Homo sapiens
gcccggtggctcctaggacgtcactc

SEQ ID NO: 33041 - DNA, 26 bp, Homo sapiens
cccggtggctcctaggacgtcactcg

SEQ ID NO: 33042 - DNA, 26 bp, Homo sapiens
ccggtggctcctaggacgtcactcgg

SEQ ID NO: 33043 - DNA, 26 bp, Homo sapiens
cggtggctcctaggacgtcactcggc

SEQ ID NO: 33044 - DNA, 26 bp, Homo sapiens
ggtggctcctaggacgtcactcggcc

SEQ ID NO: 33045 - DNA, 26 bp, Homo sapiens
gtggctcctaggacgtcactcggcct

SEQ ID NO: 33046 - DNA, 26 bp, Homo sapiens
tggctcctaggacgtcactcggcctc

SEQ ID NO: 33047 - DNA, 26 bp, Homo sapiens
ggctcctaggacgtcactcggcctct

SEQ ID NO: 33048 - DNA, 26 bp, Homo sapiens
gctcctaggacgtcactcggcctctg

SEQ ID NO: 33049 - DNA, 26 bp, Homo sapiens
ctcctaggacgtcactcggcctctgt

SEQ ID NO: 33050 - DNA, 26 bp, Homo sapiens
tcctaggacgtcactcggcctctgtc

SEQ ID NO: 33051 - DNA, 26 bp, Homo sapiens
cctaggacgtcactcggcctctgtcc

SEQ ID NO: 33052 - DNA, 26 bp, Homo sapiens
ctaggacgtcactcggcctctgtccc

SEQ ID NO: 33053 - DNA, 26 bp, Homo sapiens
taggacgtcactcggcctctgtcccc

SEQ ID NO: 33054 - DNA, 26 bp, Homo sapiens
aggacgtcactcggcctctgtccccc

SEQ ID NO: 33055 - DNA, 26 bp, Homo sapiens
ggacgtcactcggcctctgtccccct

SEQ ID NO: 33056 - DNA, 26 bp, Homo sapiens
gacgtcactcggcctctgtccccctg

SEQ ID NO: 33057 - DNA, 26 bp, Homo sapiens
acgtcactcggcctctgtccccctga

SEQ ID NO: 33058 - DNA, 26 bp, Homo sapiens
cgtcactcggcctctgtccccctgac

SEQ ID NO: 33059 - DNA, 26 bp, Homo sapiens
gtcactcggcctctgtccccctgacg

SEQ ID NO: 33060 - DNA, 26 bp, Homo sapiens
tcactcggcctctgtccccctgacga

SEQ ID NO: 33061 - DNA, 26 bp, Homo sapiens
cactcggcctctgtccccctgacgat

SEQ ID NO: 33062 - DNA, 26 bp, Homo sapiens
actcggcctctgtccccctgacgatc

SEQ ID NO: 33063 - DNA, 26 bp, Homo sapiens
ctcggcctctgtccccctgacgatcc

SEQ ID NO: 33064 - DNA, 26 bp, Homo sapiens
tcggcctctgtccccctgacgatccc

SEQ ID NO: 33065 - DNA, 26 bp, Homo sapiens
cggcctctgtccccctgacgatcccc

SEQ ID NO: 33066 - DNA, 26 bp, Homo sapiens
ggcctctgtccccctgacgatccccc

SEQ ID NO: 33067 - DNA, 26 bp, Homo sapiens
gcctctgtccccctgacgatcccccc

SEQ ID NO: 33068 - DNA, 26 bp, Homo sapiens
cctctgtccccctgacgatcccccct

SEQ ID NO: 33069 - DNA, 26 bp, Homo sapiens
ctctgtccccctgacgatcccccctg

SEQ ID NO: 33070 - DNA, 26 bp, Homo sapiens
tctgtccccctgacgatcccccctgc

SEQ ID NO: 33071 - DNA, 26 bp, Homo sapiens
ctgtccccctgacgatcccccctgca

SEQ ID NO: 33072 - DNA, 26 bp, Homo sapiens
tgtccccctgacgatcccccctgcaa

SEQ ID NO: 33073 - DNA, 26 bp, Homo sapiens
gtccccctgacgatcccccctgcaac

SEQ ID NO: 33074 - DNA, 26 bp, Homo sapiens
tccccctgacgatcccccctgcaact

SEQ ID NO: 33075 - DNA, 26 bp, Homo sapiens
ccccctgacgatcccccctgcaactc

SEQ ID NO: 33076 - DNA, 26 bp, Homo sapiens
cccctgacgatcccccctgcaactcc

SEQ ID NO: 33077 - DNA, 26 bp, Homo sapiens
ccctgacgatcccccctgcaactcct

SEQ ID NO: 33078 - DNA, 26 bp, Homo sapiens
cctgacgatcccccctgcaactcctc

SEQ ID NO: 33079 - DNA, 26 bp, Homo sapiens
ctgacgatcccccctgcaactcctcc

SEQ ID NO: 33080 - DNA, 26 bp, Homo sapiens
tgacgatcccccctgcaactcctcca

SEQ ID NO: 33081 - DNA, 26 bp, Homo sapiens
gacgatcccccctgcaactcctccac

SEQ ID NO: 33082 - DNA, 26 bp, Homo sapiens
acgatcccccctgcaactcctccacc

SEQ ID NO: 33083 - DNA, 26 bp, Homo sapiens
cgatcccccctgcaactcctccacca

SEQ ID NO: 33084 - DNA, 26 bp, Homo sapiens
gatcccccctgcaactcctccaccac

SEQ ID NO: 33085 - DNA, 26 bp, Homo sapiens
atcccccctgcaactcctccaccacg

SEQ ID NO: 33086 - DNA, 26 bp, Homo sapiens
tcccccctgcaactcctccaccacgg

SEQ ID NO: 33087 - DNA, 26 bp, Homo sapiens
cccccctgcaactcctccaccacggg

SEQ ID NO: 33088 - DNA, 26 bp, Homo sapiens
ccccctgcaactcctccaccacgggc

SEQ ID NO: 33089 - DNA, 26 bp, Homo sapiens
cccctgcaactcctccaccacgggcc

SEQ ID NO: 33090 - DNA, 26 bp, Homo sapiens
ccctgcaactcctccaccacgggcca

SEQ ID NO: 33091 - DNA, 26 bp, Homo sapiens
cctgcaactcctccaccacgggccag

SEQ ID NO: 33092 - DNA, 26 bp, Homo sapiens
ctgcaactcctccaccacgggccaga

SEQ ID NO: 33093 - DNA, 26 bp, Homo sapiens
tgcaactcctccaccacgggccagag

SEQ ID NO: 33094 - DNA, 26 bp, Homo sapiens
gcaactcctccaccacgggccagaga

SEQ ID NO: 33095 - DNA, 26 bp, Homo sapiens
caactcctccaccacgggccagagac

SEQ ID NO: 33096 - DNA, 26 bp, Homo sapiens
aactcctccaccacgggccagagacc

SEQ ID NO: 33097 - DNA, 26 bp, Homo sapiens
actcctccaccacgggccagagaccc

SEQ ID NO: 33098 - DNA, 26 bp, Homo sapiens
ctcctccaccacgggccagagacccc

SEQ ID NO: 33099 - DNA, 26 bp, Homo sapiens
tcctccaccacgggccagagaccccc

SEQ ID NO: 33100 - DNA, 26 bp, Homo sapiens
cctccaccacgggccagagacccccc

SEQ ID NO: 33101 - DNA, 26 bp, Homo sapiens
ctccaccacgggccagagacccccct

SEQ ID NO: 33102 - DNA, 26 bp, Homo sapiens
tccaccacgggccagagacccccctc

SEQ ID NO: 33103 - DNA, 26 bp, Homo sapiens
ccaccacgggccagagacccccctct

SEQ ID NO: 33104 - DNA, 26 bp, Homo sapiens
caccacgggccagagacccccctctc

SEQ ID NO: 33105 - DNA, 26 bp, Homo sapiens
accacgggccagagacccccctctct

SEQ ID NO: 33106 - DNA, 26 bp, Homo sapiens
ccacgggccagagacccccctctctg

SEQ ID NO: 33107 - DNA, 26 bp, Homo sapiens
cacgggccagagacccccctctctgg

SEQ ID NO: 33108 - DNA, 26 bp, Homo sapiens
acgggccagagacccccctctctggg

SEQ ID NO: 33109 - DNA, 26 bp, Homo sapiens
cgggccagagacccccctctctgggt

SEQ ID NO: 33110 - DNA, 26 bp, Homo sapiens
gggccagagacccccctctctgggtg

SEQ ID NO: 33111 - DNA, 26 bp, Homo sapiens
ggccagagacccccctctctgggtgg

SEQ ID NO: 33112 - DNA, 26 bp, Homo sapiens
gccagagacccccctctctgggtggc

SEQ ID NO: 33113 - DNA, 26 bp, Homo sapiens
ccagagacccccctctctgggtggca

SEQ ID NO: 33114 - DNA, 26 bp, Homo sapiens
cagagacccccctctctgggtggcag

SEQ ID NO: 33115 - DNA, 26 bp, Homo sapiens
agagacccccctctctgggtggcaga

SEQ ID NO: 33116 - DNA, 26 bp, Homo sapiens
gagacccccctctctgggtggcagac

SEQ ID NO: 33117 - DNA, 26 bp, Homo sapiens
agacccccctctctgggtggcagaca

SEQ ID NO: 33118 - DNA, 26 bp, Homo sapiens
gacccccctctctgggtggcagacac

SEQ ID NO: 33119 - DNA, 26 bp, Homo sapiens
acccccctctctgggtggcagacacg

SEQ ID NO: 33120 - DNA, 26 bp, Homo sapiens
cccccctctctgggtggcagacacgg

SEQ ID NO: 33121 - DNA, 26 bp, Homo sapiens
ccccctctctgggtggcagacacggg

SEQ ID NO: 33122 - DNA, 26 bp, Homo sapiens
cccctctctgggtggcagacacgggt

SEQ ID NO: 33123 - DNA, 26 bp, Homo sapiens
ccctctctgggtggcagacacgggtg

SEQ ID NO: 33124 - DNA, 26 bp, Homo sapiens
cctctctgggtggcagacacgggtgg

SEQ ID NO: 33125 - DNA, 26 bp, Homo sapiens
ctctctgggtggcagacacgggtggc

SEQ ID NO: 33126 - DNA, 26 bp, Homo sapiens
tctctgggtggcagacacgggtggct

SEQ ID NO: 33127 - DNA, 26 bp, Homo sapiens
ctctgggtggcagacacgggtggctt

SEQ ID NO: 33128 - DNA, 26 bp, Homo sapiens
tctgggtggcagacacgggtggcttg

SEQ ID NO: 33129 - DNA, 26 bp, Homo sapiens
ctgggtggcagacacgggtggcttgt

SEQ ID NO: 33130 - DNA, 26 bp, Homo sapiens
tgggtggcagacacgggtggcttgtg

SEQ ID NO: 33131 - DNA, 26 bp, Homo sapiens
gggtggcagacacgggtggcttgtgc

SEQ ID NO: 33132 - DNA, 26 bp, Homo sapiens
ggtggcagacacgggtggcttgtgcc

SEQ ID NO: 33133 - DNA, 26 bp, Homo sapiens
gtggcagacacgggtggcttgtgccg

SEQ ID NO: 33134 - DNA, 26 bp, Homo sapiens
tggcagacacgggtggcttgtgccgg

SEQ ID NO: 33135 - DNA, 26 bp, Homo sapiens
ggcagacacgggtggcttgtgccggc

SEQ ID NO: 33136 - DNA, 26 bp, Homo sapiens
gcagacacgggtggcttgtgccggct

SEQ ID NO: 33137 - DNA, 26 bp, Homo sapiens
cagacacgggtggcttgtgccggctg

SEQ ID NO: 33138 - DNA, 26 bp, Homo sapiens
agacacgggtggcttgtgccggctgc

SEQ ID NO: 33139 - DNA, 26 bp, Homo sapiens
gacacgggtggcttgtgccggctgct

SEQ ID NO: 33140 - DNA, 26 bp, Homo sapiens
acacgggtggcttgtgccggctgctt

SEQ ID NO: 33141 - DNA, 26 bp, Homo sapiens
cacgggtggcttgtgccggctgcttt

SEQ ID NO: 33142 - DNA, 26 bp, Homo sapiens
acgggtggcttgtgccggctgctttg

SEQ ID NO: 33143 - DNA, 26 bp, Homo sapiens
cgggtggcttgtgccggctgctttga

SEQ ID NO: 33144 - DNA, 26 bp, Homo sapiens
gggtggcttgtgccggctgctttgaa

SEQ ID NO: 33145 - DNA, 26 bp, Homo sapiens
ggtggcttgtgccggctgctttgaag

SEQ ID NO: 33146 - DNA, 26 bp, Homo sapiens
gtggcttgtgccggctgctttgaagt

SEQ ID NO: 33147 - DNA, 26 bp, Homo sapiens
tggcttgtgccggctgctttgaagta

SEQ ID NO: 33148 - DNA, 26 bp, Homo sapiens
ggcttgtgccggctgctttgaagtag

SEQ ID NO: 33149 - DNA, 26 bp, Homo sapiens
gcttgtgccggctgctttgaagtaga

SEQ ID NO: 33150 - DNA, 26 bp, Homo sapiens
cttgtgccggctgctttgaagtagag

SEQ ID NO: 33151 - DNA, 26 bp, Homo sapiens
ttgtgccggctgctttgaagtagagg

SEQ ID NO: 33152 - DNA, 26 bp, Homo sapiens
tgtgccggctgctttgaagtagaggt

SEQ ID NO: 33153 - DNA, 26 bp, Homo sapiens
gtgccggctgctttgaagtagaggtt

SEQ ID NO: 33154 - DNA, 26 bp, Homo sapiens
tgccggctgctttgaagtagaggttg

SEQ ID NO: 33155 - DNA, 26 bp, Homo sapiens
gccggctgctttgaagtagaggttgg

SEQ ID NO: 33156 - DNA, 26 bp, Homo sapiens
ccggctgctttgaagtagaggttggt

SEQ ID NO: 33157 - DNA, 26 bp, Homo sapiens
cggctgctttgaagtagaggttggtt

SEQ ID NO: 33158 - DNA, 26 bp, Homo sapiens
ggctgctttgaagtagaggttggttc

SEQ ID NO: 33159 - DNA, 26 bp, Homo sapiens
gctgctttgaagtagaggttggttct

SEQ ID NO: 33160 - DNA, 26 bp, Homo sapiens
ctgctttgaagtagaggttggttctg

SEQ ID NO: 33161 - DNA, 26 bp, Homo sapiens
tgctttgaagtagaggttggttctgc

SEQ ID NO: 33162 - DNA, 26 bp, Homo sapiens
gctttgaagtagaggttggttctgcc

SEQ ID NO: 33163 - DNA, 26 bp, Homo sapiens
ctttgaagtagaggttggttctgcct

SEQ ID NO: 33164 - DNA, 26 bp, Homo sapiens
tttgaagtagaggttggttctgcctt

SEQ ID NO: 33165 - DNA, 26 bp, Homo sapiens
ttgaagtagaggttggttctgccttg

SEQ ID NO: 33166 - DNA, 26 bp, Homo sapiens
tgaagtagaggttggttctgccttgt

SEQ ID NO: 33167 - DNA, 26 bp, Homo sapiens
gaagtagaggttggttctgccttgtt

SEQ ID NO: 33168 - DNA, 26 bp, Homo sapiens
aagtagaggttggttctgccttgttt

SEQ ID NO: 33169 - DNA, 26 bp, Homo sapiens
agtagaggttggttctgccttgtttg

SEQ ID NO: 33170 - DNA, 26 bp, Homo sapiens
gtagaggttggttctgccttgtttgt

SEQ ID NO: 33171 - DNA, 26 bp, Homo sapiens
tagaggttggttctgccttgtttgtt

SEQ ID NO: 33172 - DNA, 26 bp, Homo sapiens
agaggttggttctgccttgtttgttt

SEQ ID NO: 33173 - DNA, 26 bp, Homo sapiens
gaggttggttctgccttgtttgtttg

SEQ ID NO: 33174 - DNA, 26 bp, Homo sapiens
aggttggttctgccttgtttgtttgt

SEQ ID NO: 33175 - DNA, 26 bp, Homo sapiens
ggttggttctgccttgtttgtttgtt

SEQ ID NO: 33176 - DNA, 26 bp, Homo sapiens
gttggttctgccttgtttgtttgttt

SEQ ID NO: 33177 - DNA, 26 bp, Homo sapiens
ttggttctgccttgtttgtttgtttg

SEQ ID NO: 33178 - DNA, 26 bp, Homo sapiens
tggttctgccttgtttgtttgtttgt

SEQ ID NO: 33179 - DNA, 26 bp, Homo sapiens
ggttctgccttgtttgtttgtttgtt

SEQ ID NO: 33180 - DNA, 26 bp, Homo sapiens
gttctgccttgtttgtttgtttgttt

SEQ ID NO: 33181 - DNA, 26 bp, Homo sapiens
ttctgccttgtttgtttgtttgttta

SEQ ID NO: 33182 - DNA, 26 bp, Homo sapiens
tctgccttgtttgtttgtttgtttat

SEQ ID NO: 33183 - DNA, 26 bp, Homo sapiens
ctgccttgtttgtttgtttgtttatt

SEQ ID NO: 33184 - DNA, 26 bp, Homo sapiens
tgccttgtttgtttgtttgtttattt

SEQ ID NO: 33185 - DNA, 26 bp, Homo sapiens
gccttgtttgtttgtttgtttatttt

SEQ ID NO: 33186 - DNA, 26 bp, Homo sapiens
ccttgtttgtttgtttgtttattttg

SEQ ID NO: 33187 - DNA, 26 bp, Homo sapiens
cttgtttgtttgtttgtttattttga

SEQ ID NO: 33188 - DNA, 26 bp, Homo sapiens
ttgtttgtttgtttgtttattttgaa

SEQ ID NO: 33189 - DNA, 26 bp, Homo sapiens
tgtttgtttgtttgtttattttgaat

SEQ ID NO: 33190 - DNA, 26 bp, Homo sapiens
gtttgtttgtttgtttattttgaatt

SEQ ID NO: 33191 - DNA, 26 bp, Homo sapiens
tttgtttgtttgtttattttgaattt

SEQ ID NO: 33192 - DNA, 26 bp, Homo sapiens
ttgtttgtttgtttattttgaatttt

SEQ ID NO: 33193 - DNA, 26 bp, Homo sapiens
tgtttgtttgtttattttgaattttt

SEQ ID NO: 33194 - DNA, 26 bp, Homo sapiens
gtttgtttgtttattttgaatttttt

SEQ ID NO: 33195 - DNA, 26 bp, Homo sapiens
tttgtttgtttattttgaattttttt

SEQ ID NO: 33196 - DNA, 26 bp, Homo sapiens
ttgtttgtttattttgaatttttttt

SEQ ID NO: 33197 - DNA, 26 bp, Homo sapiens
tgtttgtttattttgaattttttttc

SEQ ID NO: 33198 - DNA, 26 bp, Homo sapiens
gtttgtttattttgaattttttttcc

SEQ ID NO: 33199 - DNA, 26 bp, Homo sapiens
tttgtttattttgaattttttttcct

SEQ ID NO: 33200 - DNA, 26 bp, Homo sapiens
ttgtttattttgaattttttttcctc

SEQ ID NO: 33201 - DNA, 26 bp, Homo sapiens
tgtttattttgaattttttttcctct

SEQ ID NO: 33202 - DNA, 26 bp, Homo sapiens
gtttattttgaattttttttcctctc

SEQ ID NO: 33203 - DNA, 26 bp, Homo sapiens
tttattttgaattttttttcctctct

SEQ ID NO: 33204 - DNA, 26 bp, Homo sapiens
ttattttgaattttttttcctctctc

SEQ ID NO: 33205 - DNA, 26 bp, Homo sapiens
tattttgaattttttttcctctctct

SEQ ID NO: 33206 - DNA, 26 bp, Homo sapiens
attttgaattttttttcctctctctt

SEQ ID NO: 33207 - DNA, 26 bp, Homo sapiens
ttttgaattttttttcctctctcttt

SEQ ID NO: 33208 - DNA, 26 bp, Homo sapiens
tttgaattttttttcctctctctttt

SEQ ID NO: 33209 - DNA, 26 bp, Homo sapiens
ttgaattttttttcctctctcttttt

SEQ ID NO: 33210 - DNA, 26 bp, Homo sapiens
tgaattttttttcctctctctttttt

SEQ ID NO: 33211 - DNA, 26 bp, Homo sapiens
gaattttttttcctctctcttttttg

SEQ ID NO: 33212 - DNA, 26 bp, Homo sapiens
aattttttttcctctctcttttttgt

SEQ ID NO: 33213 - DNA, 26 bp, Homo sapiens
attttttttcctctctcttttttgtt

SEQ ID NO: 33214 - DNA, 26 bp, Homo sapiens
ttttttttcctctctcttttttgttt

SEQ ID NO: 33215 - DNA, 26 bp, Homo sapiens
tttttttcctctctcttttttgtttt

SEQ ID NO: 33216 - DNA, 26 bp, Homo sapiens
ttttttcctctctcttttttgttttt

SEQ ID NO: 33217 - DNA, 26 bp, Homo sapiens
tttttcctctctcttttttgtttttg

SEQ ID NO: 33218 - DNA, 26 bp, Homo sapiens
ttttcctctctcttttttgtttttgc

SEQ ID NO: 33219 - DNA, 26 bp, Homo sapiens
tttcctctctcttttttgtttttgct

SEQ ID NO: 33220 - DNA, 26 bp, Homo sapiens
ttcctctctcttttttgtttttgctt

SEQ ID NO: 33221 - DNA, 26 bp, Homo sapiens
tcctctctcttttttgtttttgcttt

SEQ ID NO: 33222 - DNA, 26 bp, Homo sapiens
cctctctcttttttgtttttgctttt

SEQ ID NO: 33223 - DNA, 26 bp, Homo sapiens
ctctctcttttttgtttttgcttttg

SEQ ID NO: 33224 - DNA, 26 bp, Homo sapiens
tctctcttttttgtttttgcttttgg

SEQ ID NO: 33225 - DNA, 26 bp, Homo sapiens
ctctcttttttgtttttgcttttgga

SEQ ID NO: 33226 - DNA, 26 bp, Homo sapiens
tctcttttttgtttttgcttttggaa

SEQ ID NO: 33227 - DNA, 26 bp, Homo sapiens
ctcttttttgtttttgcttttggaat

SEQ ID NO: 33228 - DNA, 26 bp, Homo sapiens
tcttttttgtttttgcttttggaatt

SEQ ID NO: 33229 - DNA, 26 bp, Homo sapiens
cttttttgtttttgcttttggaattt

SEQ ID NO: 33230 - DNA, 26 bp, Homo sapiens
ttttttgtttttgcttttggaatttt

SEQ ID NO: 33231 - DNA, 26 bp, Homo sapiens
tttttgtttttgcttttggaattttt

SEQ ID NO: 33232 - DNA, 26 bp, Homo sapiens
ttttgtttttgcttttggaatttttt

SEQ ID NO: 33233 - DNA, 26 bp, Homo sapiens
tttgtttttgcttttggaattttttt

SEQ ID NO: 33234 - DNA, 26 bp, Homo sapiens
ttgtttttgcttttggaatttttttg

SEQ ID NO: 33235 - DNA, 26 bp, Homo sapiens
tgtttttgcttttggaatttttttgg

SEQ ID NO: 33236 - DNA, 26 bp, Homo sapiens
gtttttgcttttggaatttttttggt

SEQ ID NO: 33237 - DNA, 26 bp, Homo sapiens
tttttgcttttggaatttttttggtt

SEQ ID NO: 33238 - DNA, 26 bp, Homo sapiens
ttttgcttttggaatttttttggttt

SEQ ID NO: 33239 - DNA, 26 bp, Homo sapiens
tttgcttttggaatttttttggtttt

SEQ ID NO: 33240 - DNA, 26 bp, Homo sapiens
ttgcttttggaatttttttggttttg

SEQ ID NO: 33241 - DNA, 26 bp, Homo sapiens
tgcttttggaatttttttggttttgt

SEQ ID NO: 33242 - DNA, 26 bp, Homo sapiens
gcttttggaatttttttggttttgtt

SEQ ID NO: 33243 - DNA, 26 bp, Homo sapiens
cttttggaatttttttggttttgttt

SEQ ID NO: 33244 - DNA, 26 bp, Homo sapiens
ttttggaatttttttggttttgtttt

SEQ ID NO: 33245 - DNA, 26 bp, Homo sapiens
tttggaatttttttggttttgttttt

SEQ ID NO: 33246 - DNA, 26 bp, Homo sapiens
ttggaatttttttggttttgtttttg

SEQ ID NO: 33247 - DNA, 26 bp, Homo sapiens
tggaatttttttggttttgtttttgc

SEQ ID NO: 33248 - DNA, 26 bp, Homo sapiens
ggaatttttttggttttgtttttgcg

SEQ ID NO: 33249 - DNA, 26 bp, Homo sapiens
gaatttttttggttttgtttttgcgg

SEQ ID NO: 33250 - DNA, 26 bp, Homo sapiens
aatttttttggttttgtttttgcggt

SEQ ID NO: 33251 - DNA, 26 bp, Homo sapiens
atttttttggttttgtttttgcggtt

SEQ ID NO: 33252 - DNA, 26 bp, Homo sapiens
tttttttggttttgtttttgcggttt

SEQ ID NO: 33253 - DNA, 26 bp, Homo sapiens
ttttttggttttgtttttgcggtttt

SEQ ID NO: 33254 - DNA, 26 bp, Homo sapiens
tttttggttttgtttttgcggttttt

SEQ ID NO: 33255 - DNA, 26 bp, Homo sapiens
ttttggttttgtttttgcggtttttt

SEQ ID NO: 33256 - DNA, 26 bp, Homo sapiens
tttggttttgtttttgcggttttttt

SEQ ID NO: 33257 - DNA, 26 bp, Homo sapiens
ttggttttgtttttgcggtttttttt

SEQ ID NO: 33258 - DNA, 26 bp, Homo sapiens
tggttttgtttttgcggttttttttt

SEQ ID NO: 33259 - DNA, 26 bp, Homo sapiens
ggttttgtttttgcggtttttttttt

SEQ ID NO: 33260 - DNA, 26 bp, Homo sapiens
gttttgtttttgcggttttttttttt

SEQ ID NO: 33261 - DNA, 26 bp, Homo sapiens
ttttgtttttgcggtttttttttttt

SEQ ID NO: 33262 - DNA, 26 bp, Homo sapiens
tttgtttttgcggttttttttttttt

SEQ ID NO: 33263 - DNA, 26 bp, Homo sapiens
ttgtttttgcggtttttttttttttt

SEQ ID NO: 33264 - DNA, 26 bp, Homo sapiens
tgtttttgcggttttttttttttttg

SEQ ID NO: 33265 - DNA, 26 bp, Homo sapiens
gtttttgcggttttttttttttttgg

SEQ ID NO: 33266 - DNA, 26 bp, Homo sapiens
tttttgcggttttttttttttttggt

SEQ ID NO: 33267 - DNA, 26 bp, Homo sapiens
ttttgcggttttttttttttttggtg

SEQ ID NO: 33268 - DNA, 26 bp, Homo sapiens
tttgcggttttttttttttttggtga

SEQ ID NO: 33269 - DNA, 26 bp, Homo sapiens
ttgcggttttttttttttttggtgac

SEQ ID NO: 33270 - DNA, 26 bp, Homo sapiens
tgcggttttttttttttttggtgact

SEQ ID NO: 33271 - DNA, 26 bp, Homo sapiens
gcggttttttttttttttggtgactg

SEQ ID NO: 33272 - DNA, 26 bp, Homo sapiens
cggttttttttttttttggtgactgt

SEQ ID NO: 33273 - DNA, 26 bp, Homo sapiens
ggttttttttttttttggtgactgtt

SEQ ID NO: 33274 - DNA, 26 bp, Homo sapiens
gttttttttttttttggtgactgttg

SEQ ID NO: 33275 - DNA, 26 bp, Homo sapiens
ttttttttttttttggtgactgttga

SEQ ID NO: 33276 - DNA, 26 bp, Homo sapiens
tttttttttttttggtgactgttgag

SEQ ID NO: 33277 - DNA, 26 bp, Homo sapiens
ttttttttttttggtgactgttgaga

SEQ ID NO: 33278 - DNA, 26 bp, Homo sapiens
tttttttttttggtgactgttgagac

SEQ ID NO: 33279 - DNA, 26 bp, Homo sapiens
ttttttttttggtgactgttgagaca

SEQ ID NO: 33280 - DNA, 26 bp, Homo sapiens
tttttttttggtgactgttgagacac

SEQ ID NO: 33281 - DNA, 26 bp, Homo sapiens
ttttttttggtgactgttgagacact

SEQ ID NO: 33282 - DNA, 26 bp, Homo sapiens
tttttttggtgactgttgagacactt

SEQ ID NO: 33283 - DNA, 26 bp, Homo sapiens
ttttttggtgactgttgagacacttg

SEQ ID NO: 33284 - DNA, 26 bp, Homo sapiens
tttttggtgactgttgagacacttga

SEQ ID NO: 33285 - DNA, 26 bp, Homo sapiens
ttttggtgactgttgagacacttgat

SEQ ID NO: 33286 - DNA, 26 bp, Homo sapiens
tttggtgactgttgagacacttgatt

SEQ ID NO: 33287 - DNA, 26 bp, Homo sapiens
ttggtgactgttgagacacttgattt

SEQ ID NO: 33288 - DNA, 26 bp, Homo sapiens
tggtgactgttgagacacttgatttc

SEQ ID NO: 33289 - DNA, 26 bp, Homo sapiens
ggtgactgttgagacacttgatttct

SEQ ID NO: 33290 - DNA, 26 bp, Homo sapiens
gtgactgttgagacacttgatttctt

SEQ ID NO: 33291 - DNA, 26 bp, Homo sapiens
tgactgttgagacacttgatttcttt

SEQ ID NO: 33292 - DNA, 26 bp, Homo sapiens
gactgttgagacacttgatttcttta

SEQ ID NO: 33293 - DNA, 26 bp, Homo sapiens
actgttgagacacttgatttctttat

SEQ ID NO: 33294 - DNA, 26 bp, Homo sapiens
ctgttgagacacttgatttctttatt

SEQ ID NO: 33295 - DNA, 26 bp, Homo sapiens
tgttgagacacttgatttctttatta

SEQ ID NO: 33296 - DNA, 26 bp, Homo sapiens
gttgagacacttgatttctttattaa

SEQ ID NO: 33297 - DNA, 26 bp, Homo sapiens
ttgagacacttgatttctttattaaa

SEQ ID NO: 33298 - DNA, 26 bp, Homo sapiens
tgagacacttgatttctttattaaac

SEQ ID NO: 33299 - DNA, 26 bp, Homo sapiens
gagacacttgatttctttattaaaca

SEQ ID NO: 33300 - DNA, 26 bp, Homo sapiens
agacacttgatttctttattaaacat

SEQ ID NO: 33301 - DNA, 26 bp, Homo sapiens
gacacttgatttctttattaaacatc

SEQ ID NO: 33302 - DNA, 26 bp, Homo sapiens
acacttgatttctttattaaacatcc

SEQ ID NO: 33303 - DNA, 26 bp, Homo sapiens
cacttgatttctttattaaacatcca

SEQ ID NO: 33304 - DNA, 26 bp, Homo sapiens
acttgatttctttattaaacatccaa

SEQ ID NO: 33305 - DNA, 26 bp, Homo sapiens
cttgatttctttattaaacatccaag

SEQ ID NO: 33306 - DNA, 26 bp, Homo sapiens
ttgatttctttattaaacatccaagc

SEQ ID NO: 33307 - DNA, 26 bp, Homo sapiens
tgatttctttattaaacatccaagcc

SEQ ID NO: 33308 - DNA, 26 bp, Homo sapiens
gatttctttattaaacatccaagccc

SEQ ID NO: 33309 - DNA, 26 bp, Homo sapiens
atttctttattaaacatccaagcccg

SEQ ID NO: 33310 - DNA, 26 bp, Homo sapiens
tttctttattaaacatccaagcccgg

SEQ ID NO: 33311 - DNA, 26 bp, Homo sapiens
ttctttattaaacatccaagcccggg

SEQ ID NO: 33312 - DNA, 26 bp, Homo sapiens
tctttattaaacatccaagcccgggt

SEQ ID NO: 33313 - DNA, 26 bp, Homo sapiens
ctttattaaacatccaagcccgggtt

(The sequence listing continues in the following parts.)

1. A composition comprising:
(a) a sequence encoding a non-self polypeptide of interest (POI), and
(b) a sequence encoding a non-cleavable Fas Ligand (FASL),
wherein expression of the non-cleavable FASL eliminates MHC-mediated immunogenic peptides and helper T cells specific to the expression of the POI.

2. The composition of claim 1, wherein expression of the non-cleavable FASL selectively eliminates a T-cell that recognizes a MHC-peptide complex, wherein the peptide is derived from the non-self polypeptide, and wherein expression of FASL is in the presence of IL-6 or TNF-alpha.

3. The composition of claim 1, wherein the non-self POI is a nucleoprotein complex encoded by (i) a sequence comprising a guide RNA (gRNA) that specifically binds a target sequence within an RNA molecule, and (ii) a sequence encoding an RNA-binding polypeptide.

4. The composition of claim 1, wherein a vector comprises the sequence of (a) and the sequence of (b).

5.-6. (canceled)

7. The composition of claim 1, wherein a promoter drives expression of the sequence of (a).

8. The composition of claim 1, wherein the promoter drives expression of the sequence of (b).

9. The composition of claim 8, wherein the promoter is a promoter regulated by the presence of IL-6 receptor or TNF-alpha receptor.

10. (canceled)

11. The composition of claim 3, wherein a first promoter drives expression of the sequences encoding the nucleoprotein complex and a second promoter drives expression of the sequence of (b).

12. The composition of claim 11, wherein the first promoter comprises a sequence isolated or derived from a U6 promoter or wherein the first promoter comprises a sequence isolated or derived from a promoter capable of driving expression of a transfer RNA (tRNA).

13.-15. (canceled)

16. The composition of claim 1, wherein a delivery vector comprises the composition.

17. The composition of claim 16, wherein the delivery vector is an adeno-associated viral (AAV) vector.

18. (canceled)

19. The composition of any one of claim 1, wherein the sequence of (a) or the sequence of (b) further comprises an Internal Ribosomal Entry Site (IRES) or sequence encoding a self-cleaving peptide.

20. The composition of claim 19, wherein the IRES or the sequence encoding a self-cleaving peptide is positioned between the sequence of (a) and the sequence of (b).

21. The composition of claim 19, wherein the self-cleaving peptide comprises a 2A self-cleaving peptide.

22. The composition of claim 1, wherein the non-cleavable FASL comprises a mutation in a metalloproteinase cleavage site, wherein the mutation comprises one or more of a substitution, an insertion, a deletion, a frameshift, an inversion, or a transposition of the amino acid sequence ELAELR.

23.-24. (canceled)

25. The composition of claim 22, wherein the non-cleavable FASL comprises the amino acid sequence of:
(SEQ ID NO: 210)
MQQPFNYPYPQIYWVDSSASSPWAPPGTVLPCPTSVPRRPGQRRPPPPPP
PPPLPPPPPPPPLPPLPLPPLKKRGNHSTGLCLLVMFFMVLVALVGLGLG
MFQLFHLQKX₁X₂X₃X₄X₅X₆ESTSQMHTASSLEKQIGHPSPPPEKKELR
KVAHLTGKSNSRSMPLEWEDTYGIVLLSGVKYKKGGLVINETGLYFVYSK
VYFRGQSCNNLPLSHKVYMRNSKYPQDLVMMEGKMMSYCTTGQMWARSSY
LGAVFNLTSADHLYVNVSELSLVNFEESQTFFGLYKL,
wherein X₁ is not a glutamic acid (E), X₂ is not an leucine (L), X₃ is not an alanine (A), X₄ is not an glutamic acid (E), X₅ is not an leucine (L) or X₆ is not an arginine (R).

26. (canceled)

27. The composition of claim 1, wherein the non-cleavable FASL comprises an intron, wherein the intron blocks FASL splicing in the absence of IL-6 or TNF-alpha.

28. The composition of claim 27, further comprising synthetic mRNA target sites which are expressed in the presence of IL-6 or TNF-alpha.

29. The composition of claim 1, further comprising 1) a synthetic notch system, 2) microRNA target sites, or a 3) split intein and engineered IL-6 or TNF-alpha receptors for regulating expression of FASL in the presence of IL-6 or TNF-alpha.

30. The composition of claim 3, wherein the RNA-binding polypeptide is a CRISPR/Cas polypeptide selected from the group consisting of Cas9, Cpf1, Cas13a, Cas13b, Cas13c, and Cas13d.
